United States Patent Application Publication US 2010/0291551 A1 - sequence listing, part 3

SEQ ID NO: 3816 - DNA, 801 bp, Homo sapiens
gaaagaacagtcgcagagggaaagcgggaaagagatgggggaaagtgtgtgtgtgtgagtgtgtgcttgtgtgcatgtgtgtgcgtgtgtgtgtcaaggaaaaaagctcgcagtccagcagcccgggcctgggaggcttgtgagccgggcctttcgtaattgtcccctccccgcggccccctcccccaggcctcccccctctcccgccctcccgcccgccctctctccctccctctttccctcacagccgacgaggcaacaattaggctttggggataaaacgaggtgcggagagcgggctggggcatttctccccgagatggcgggtctgacggcggcggccccgcggcccggagtcctcctgctcctgctgtccatcctccacccctctcggcctggaggggtccctggggccattcctggtggagttcctggaggagtcttttatccaggggctggtctcggagcccttggaggaggagcgctggggcctggaggcaaacctcttaagccagttcccggagggcttgcgggtgctggccttggggcagggctcggcgccttccccgcagttacctttccgggggctctggtgcctggtggagtggctgacgctgctgcagcctataaagctgctaaggctggcgctgggcttggtggtgtcccaggagttggtggcttaggagtgtctgcaggtgcggtggttcctcagcctggagccggagtgaagcctgggaaagtgccgggtcagtgcggtctctccaggggttgtgtcaccagaagcagctgctaaggcagctg

SEQ ID NO: 3817 - protein, 157 aa, Homo sapiens
MAGLTAAAPRPGVLLLLLSILHPSRPGGVPGAIPGGVPGGVFYPGAGLGALGGGALGPGGKPLKPVPGGLAGAGLGAGLGAFPAVTFPGALVPGGVADAAAAYKAAKAGAGLGGVPGVGGLGVSAGAVVPQPGAGVKPGKVPGQCGLSRGCVTRSSC

SEQ ID NO: 3818 - DNA, 2782 bp, Homo sapiens
gaaagaacagtcgcagagggaaagcgggaaagagatgggggaaagtgtgtgtgtgtgagtgtgtgcttgtgtgcatgtgtgtgcgtgtgtgtgtcaaggaaaaaagctcgcagtccagcagcccgggcctgggaggcttgtgagccgggcctttcgtaattgtcccctccccgcggccccctcccccaggcctcccccctctcccgccctcccgcccgccctctctccctccctctttccctcacagccgacgaggcaacaattaggctttggggataaaacgaggtgcggagagcgggctggggcatttctccccgagatggcgggtctgacggcggcggccccgcggcccggagtcctcctgctcctgctgtccatcctccacccctctcggcctggaggggtccctggggccattcctggtggagttcctggaggagtcttttatccaggggctggtctcggagcccttggaggaggagcgctggggcctggaggcaaacctcttaagccagttcccggagggcttgcgggtgctggccttggggcagggctcggcgccttccccgcagttacctttccgggggctctggtgcctggtggagtggctgacgctgctgcagcctataaagctgctaaggctggcgctgggcttggtggtgtcccaggagttggtggcttaggagtgtctgcaggtgcggtggttcctcagcctggagccggagtgaagcctgggaaagtgccgggtgtggggctgccaggtgtatacccaggtggcgtgctcccaggagctcggttccccggtgtgggggtgctccctggagttcccactggagcaggagttaagcccaaggctccaggtgtaggtggagcttttgctggaatcccaggagttggaccctttgggggaccgcaacctggagtcccactggggtatcccatcaaggcccccaagctgcctggtggctatggactgccctacaccacagggaaactgccctatggctatgggcccggaggagtggctggtgcagcgggcaaggctggttacccaacagggacaggggttggcccccaggcagcagcagcagcggcagctaaagcagcagcaaagttcggtgctggagcagccggagtcctccctggtgttggaggggctggtgttcctggcgtgcctggggcaattcctggaattggaggcatcgcaggcgttgggactccagctgcagctgcagctgcagcagcagccgctaaggcagccaagtatggagctgctgcaggcttagtgcctggtgggccaggctttggcccgggagtagttggtgtcccaggagctggcgttccaggtgttggtgtcccaggagctgggattccagttgtcccaggtgctgggatcccaggtgctgcggttccaggggttgtgtcaccagaagcagctgctaaggcagctgcaaaggcagccaaatacggggccaggcccggagtcggagttggaggcattcctacttacggggttggagctgggggctttcccggctttggtgtcggagtcggaggtatccctggagtcgcaggtgtccctggtgtcggaggtgttcccggagtcggaggtgtcccgggagttggcatttcccccgaagctcaggcagcagctgccgccaaggctgccaagtacggagtggggaccccagcagctgcagctgctaaagcagccgccaaagccgcccagtttgggttagttcctggtgtcggcgtggctcctggagttggcgtggctcctggtgtcggtgtggctcctggagttggcttggctcctggagttggcgtggctcctggagttggtgtggctcctggcgttggcgtggctcccggcattggccctggtggagttgcagctgcagcaaaatccgctgccaaggtggctgccaaagcccagctccgagctgcagctgggcttggtgctggcatccctggacttggagttggtgtcggcgtccctggacttggagttggtgctggtgttcctggacttggagttggtgctggtgttcctggcttcggggcaggtgcagatgagggagttaggcggagcctgtcccctgagctcagggaaggagatccctcctcctctcagcacctccccagcaccccctcatcacccagggtacctggagccctggctgccgctaaagcagccaaatatggagcagcagtgcctggggtccttggagggctcggggctctcggtggagtaggcatcccaggcggtgtggtgggagccggacccgccgccgccgctgccgcagccaaagctgctgccaaagccgcccagtttggcctagtgggagccgctgggctcggaggactcggagtcggagggcttggagttccaggtgttgggggccttggaggtatacctccagctgcagccgctaaagcagctaaatacggtgctgctggccttggaggtgtcctagggggtgccgggcagttcccacttggaggagtggcagcaagacctggcttcggattgtctcccattttcccaggtggggcctgcctggggaaagcttgtggccggaagagaaaatgagcttcctaggacccctgactcacgacctcatcaacgttggtgctactgcttggtggagaatgtaaacccttttataccccccatccctccctcggtccactgaacttcagagcagttcccattcctgccccgcccatctttttgtgtctcgctgtgatagatcaataaatattttattttttgtcctgg

SEQ ID NO: 3819 - protein, 757 aa, Homo sapiens
MAGLTAAAPRPGVLLLLLSILHPSRPGGVPGAIPGGVPGGVFYPGAGLGALGGGALGPGGKPLKPVPGGLAGAGLGAGLGAFPAVTFPGALVPGGVADAAAAYKAAKAGAGLGGVPGVGGLGVSAGAVVPQPGAGVKPGKVPGVGLPGVYPGGVLPGARFPGVGVLPGVPTGAGVKPKAPGVGGAFAGIPGVGPFGGPQPGVPLGYPIKAPKLPGGYGLPYTTGKLPYGYGPGGVAGAAGKAGYPTGTGVGPQAAAAAAAKAAAKFGAGAAGVLPGVGGAGVPGVPGAIPGIGGIAGVGTPAAAAAAAAAAKAAKYGAAAGLVPGGPGFGPGVVGVPGAGVPGVGVPGAGIPVVPGAGIPGAAVPGVVSPEAAAKAAAKAAKYGARPGVGVGGIPTYGVGAGGFPGFGVGVGGIPGVAGVPGVGGVPGVGGVPGVGISPEAQAAAAAKAAKYGVGTPAAAAAKAAAKAAQFGLVPGVGVAPGVGVAPGVGVAPGVGLAPGVGVAPGVGVAPGVGVAPGIGPGGVAAAAKSAAKVAAKAQLRAAAGLGAGIPGLGVGVGVPGLGVGAGVPGLGVGAGVPGFGAGADEGVRRSLSPELREGDPSSSQHLPSTPSSPRVPGALAAAKAAKYGAAVPGVLGGLGALGGVGIPGGVVGAGPAAAAAAAKAAAKAAQFGLVGAAGLGGLGVGGLGVPGVGGLGGIPPAAAAKAAKYGAAGLGGVLGGAGQFPLGGVAARPGFGLSPIFPGGACLGKACGRKRK

SEQ ID NO: 3820 - DNA, 3228 bp, Homo sapiens
gaaagaacagtcgcagagggaaagcgggaaagagatgggggaaagtgtgtgtgtgtgagtgtgtgcttgtgtgcatgtgtgtgcgtgtgtgtgtcaaggaaaaaagctcgcagtccagcagcccgggcctgggaggcttgtgagccgggcctttcgtaattgtcccctccccgcggccccctcccccaggcctcccccctctcccgccctcccgcccgccctctctccctccctctttccctcacagccgacgaggcaacaattaggctttggggataaaacgaggtgcggagagcgggctggggcatttctccccgagatggcgggtctgacggcggcggccccgcggcccggagtcctcctgctcctgctgtccatcctccacccctctcggcctggaggggtccctggggccattcctggtggagttcctggaggagtcttttatccaggggctggtctcggagcccttggaggaggagcgctggggcctggaggcaaacctcttaagccagggctcggcgccttccccgcagttacctttccgggggctctggtgcctggtggagtggctgacgctgctgcagcctataaagctgctaaggctggcgctgggcttggtggtgtcccaggagttggtggcttaggagtgtctgcaggtgcggtggttcctcagcctggagccggagtgaagcctgggaaagtgccgggtgtggggctgccaggtgtatacccaggtggcgtgctcccaggagctcggttccccggtgtgggggtgctccctggagttcccactggagcaggagttaagcccaaggctccaggagttggaccctttgggggaccgcaacctggagtcccactggggtatcccatcaaggcccccaagctgcctggctatgggcccggaggagtggctggtgcagcgggcaaggctggttacccaacagggacaggggttggcccccaggcagcagcagcagcggcagctaaagcagcagcaaagttcggtgctggagcagccggagtcctccctggtgttggaggggctggtgttcctggcgtgcctggggcaattcctggaattggaggcatcgcaggcgttgggactccagctgcagctgcagctgcagcagcagccgctaaggcagccaagtatggagctgctgcaggcttagtgcctggtgggccaggctttggcccgggagtagttggtgtcccaggagctggcgttccaggtgttggtgtcccaggagctgggattccagttgtcccaggtgctgggatcccaggtgctgcggttccaggggttgtgtcaccagaagcagctgctaaggcagctgcaaaggcagccaaatacggggccaggcccggagtcggagttggaggcattcctacttacggggttggagctgggggctttcccggctttggtgtcggagtcggagccgaagctcaggcagcagctgccgccaaggctgccaagtacgggttagttcctggtgtcggcgtggctcctggagttggcgtggctcctggtgtcggtgtggctcctggagttggcttggctcctggagttggcgtggctcctggagttggtgtggctcctggcgttggcgtggctcccggcattggccctggtggagttgcagctgcagcaaaatccgctgccaaggtggctgccaaagcccagctccgagctgcagctgggcttggtgctggcatccctggacttggagttggtgtcggcgtccctggacttggagttggtgctggtgttcctggacttggagttggtgctggtgttcctggcttcggggcagtacctggagccctggctgccgctaaagcagccaaatatggagcagcagtgcctggggtccttggagggctcggggctctcggtggagtaggcatcccaggcggtgtggtgggagccggacccgccgccgccgctgccgcagccaaagctgctgccaaagccgcccagtttggcctagtgggagccgctgggctcggaggactcggagtcggagggcttggagttccaggtgttgggggccttggaggtatacctccagctgcagccgctaaagcagctaaatacggtgctgctggccttggaggtgtcctagggggtgccgggcagttcccacttggaggagtggcagcaagacctggcttcggattgtctcccattttcccaggtggggcctgcctggggaaagcttgtggccggaagagaaaatgagcttcctaggacccctgactcacgacctcatcaacgttggtgctactgcttggtggagaatgtaaaccctttgtaaccccatcccatgcccctccgactccccaccccaggagggaacgggcaggccgggcggccttgcagatccacagggcaaggaaacaagaggggagcggccaagtgccccgaccaggaggccccctacttcagaggcaagggccatgtggtcctggccccccaccccatcccttcccacctaggagctccccctccacacagcctccatctccaggggaacttggtgctacacgctggtgctcttatcttcctggggggagggaggagggaagggtggcccctcggggaaccccctacctggggctcctctaaagatggtgcagacacttcctgggcagtcccagctccccctgcccaccaggacccaccgttggctgccatccagttggtacccaagcacctgaagcctcaaagctggattcgctctagcatccctcctctcctgggtccacttggccgtctcctccccaccgatcgctgttccccacatctggggcgcttttgggttggaaaaccaccccacactgggaatagccaccttgcccttgtagaatccatccgcccatccgtccattcatccatcggtccgtccatccatgtccccagttgaccgcccggcaccactagctggctgggtgcacccaccatcaacctggttgacctgtcatggccgcctgtgccctgcctccacccccatcctacactcccccagggcgtgcggggctgtgcagactggggtgccaggcatctcctccccacccggggtgtccccacatgcagtactgtataccccccatccctccctcggtccactgaacttcagagcagttcccattcctgccccgcccatctttttgtgtctcgctgtgatagatcaataaatattttattttttgtcctgg

SEQ ID NO: 3821 - protein, 643 aa, Homo sapiens
MAGLTAAAPRPGVLLLLLSILHPSRPGGVPGAIPGGVPGGVFYPGAGLGALGGGALGPGGKPLKPGLGAFPAVTFPGALVPGGVADAAAAYKAAKAGAGLGGVPGVGGLGVSAGAVVPQPGAGVKPGKVPGVGLPGVYPGGVLPGARFPGVGVLPGVPTGAGVKPKAPGVGPFGGPQPGVPLGYPIKAPKLPGYGPGGVAGAAGKAGYPTGTGVGPQAAAAAAAKAAAKFGAGAAGVLPGVGGAGVPGVPGAIPGIGGIAGVGTPAAAAAAAAAAKAAKYGAAAGLVPGGPGFGPGVVGVPGAGVPGVGVPGAGIPVVPGAGIPGAAVPGVVSPEAAAKAAAKAAKYGARPGVGVGGIPTYGVGAGGFPGFGVGVGAEAQAAAAAKAAKYGLVPGVGVAPGVGVAPGVGVAPGVGLAPGVGVAPGVGVAPGVGVAPGIGPGGVAAAAKSAAKVAAKAQLRAAAGLGAGIPGLGVGVGVPGLGVGAGVPGLGVGAGVPGFGAVPGALAAAKAAKYGAAVPGVLGGLGALGGVGIPGGVVGAGPAAAAAAAKAAAKAAQFGLVGAAGLGGLGVGGLGVPGVGGLGGIPPAAAAKAAKYGAAGLGGVLGGAGQFPLGGVAARPGFGLSPIFPGGACLGKACGRKRK

SEQ ID NO: 3822 - DNA, 3471 bp, Homo sapiens
gaaagaacagtcgcagagggaaagcgggaaagagatgggggaaagtgtgtgtgtgtgagtgtgtgcttgtgtgcatgtgtgtgcgtgtgtgtgtcaaggaaaaaagctcgcagtccagcagcccgggcctgggaggcttgtgagccgggcctttcgtaattgtcccctccccgcggccccctcccccaggcctcccccctctcccgccctcccgcccgccctctctccctccctctttccctcacagccgacgaggcaacaattaggctttggggataaaacgaggtgcggagagcgggctggggcatttctccccgagatggcgggtctgacggcggcggccccgcggcccggagtcctcctgctcctgctgtccatcctccacccctctcggcctggaggggtccctggggccattcctggtggagttcctggaggagtcttttatccaggggctggtctcggagcccttggaggaggagcgctggggcctggaggcaaacctcttaagccagttcccggagggcttgcgggtgctggccttggggcagggctcggcgccttccccgcagttacctttccgggggctctggtgcctggtggagtggctgacgctgctgcagcctataaagctgctaaggctggcgctgggcttggtggtgtcccaggagttggtggcttaggagtgtctgcaggtgcggtggttcctcagcctggagccggagtgaagcctgggaaagtgccgggtgtggggctgccaggtgtatacccaggtggcgtgctcccaggagctcggttccccggtgtgggggtgctccctggagttcccactggagcaggagttaagcccaaggctccaggtgtaggtggagcttttgctggaatcccaggagttggaccctttgggggaccgcaacctggagtcccactggggtatcccatcaaggcccccaagctgcctggtggctatggactgccctacaccacagggaaactgccctatggctatgggcccggaggagtggctggtgcagcgggcaaggctggttacccaacagggacaggggttggcccccaggcagcagcagcagcggcagctaaagcagcagcaaagttcggtgctggagcagccggagtcctccctggtgttggaggggctggtgttcctggcgtgcctggggcaattcctggaattggaggcatcgcaggcgttgggactccagctgcagctgcagctgcagcagcagccgctaaggcagccaagtatggagctgctgcaggcttagtgcctggtgggccaggctttggcccgggagtagttggtgtcccaggagctggcgttccaggtgttggtgtcccaggagctgggattccagttgtcccaggtgctgggatcccaggtgctgcggttccaggggttgtgtcaccagaagcagctgctaaggcagctgcaaaggcagccaaatacggggccaggcccggagtcggagttggaggcattcctacttacggggttggagctgggggctttcccggctttggtgtcggagtcggaggtatccctggagtcgcaggtgtccctggtgtcggaggtgttcccggagtcggaggtgtcccgggagttggcatttcccccgaagctcaggcagcagctgccgccaaggctgccaagtacggagtggggaccccagcagctgcagctgctaaagcagccgccaaagccgcccagtttgggttagttcctggtgtcggcgtggctcctggagttggcgtggctcctggtgtcggtgtggctcctggagttggcttggctcctggagttggcgtggctcctggagttggtgtggctcctggcgttggcgtggctcccggcattggccctggtggagttgcagctgcagcaaaatccgctgccaaggtggctgccaaagcccagctccgagctgcagctgggcttggtgctggcatccctggacttggagttggtgtcggcgtccctggacttggagttggtgctggtgttcctggacttggagttggtgctggtgttcctggcttcggggcagtacctggagccctggctgccgctaaagcagccaaatatggagcagcagtgcctggggtccttggagggctcggggctctcggtggagtaggcatcccaggcggtgtggtgggagccggacccgccgccgccgctgccgcagccaaagctgctgccaaagccgcccagtttggcctagtgggagccgctgggctcggaggactcggagtcggagggcttggagttccaggtgttgggggccttggaggtatacctccagctgcagccgctaaagcagctaaatacggtgctgctggccttggaggtgtcctagggggtgccgggcagttcccacttggaggagtggcagcaagacctggcttcggattgtctcccattttcccaggtggggcctgcctggggaaagcttgtggccggaagagaaaatgagcttcctaggacccctgactcacgacctcatcaacgttggtgctactgcttggtggagaatgtaaaccctttgtaaccccatcccatgcccctccgactccccaccccaggagggaacgggcaggccgggcggccttgcagatccacagggcaaggaaacaagaggggagcggccaagtgccccgaccaggaggccccctacttcagaggcaagggccatgtggtcctggccccccaccccatcccttcccacctaggagctccccctccacacagcctccatctccaggggaacttggtgctacacgctggtgctcttatcttcctggggggagggaggagggaagggtggcccctcggggaaccccctacctggggctcctctaaagatggtgcagacacttcctgggcagtcccagctccccctgcccaccaggacccaccgttggctgccatccagttggtacccaagcacctgaagcctcaaagctggattcgctctagcatccctcctctcctgggtccacttggccgtctcctccccaccgatcgctgttccccacatctggggcgcttttgggttggaaaaccaccccacactgggaatagccaccttgcccttgtagaatccatccgcccatccgtccattcatccatcggtccgtccatccatgtccccagttgaccgcccggcaccactagctggctgggtgcacccaccatcaacctggttgacctgtcatggccgcctgtgccctgcctccacccccatcctacactcccccagggcgtgcggggctgtgcagactggggtgccaggcatctcctccccacccggggtgtccccacatgcagtactgtataccccccatccctccctcggtccactgaacttcagagcagttcccattcctgccccgcccatctttttgtgtctcgctgtgatagatcaataaatattttattttttgtcctgg

SEQ ID NO: 3823 - protein, 724 aa, Homo sapiens; identical to SEQ ID NO: 442

SEQ ID NO: 3824 - DNA, 1666 bp, Homo sapiens
gaaagaacagtcgcagagggaaagcgggaaagagatgggggaaagtgtgtgtgtgtgagtgtgtgcttgtgtgcatgtgtgtgcgtgtgtgtgtcaaggaaaaaagctcgcagtccagcagcccgggcctgggaggcttgtgagccgggcctttcgtaattgtcccctccccgcggccccctcccccaggcctcccccctctcccgccctcccgcccgccctctctccctccctctttccctcacagccgacgaggcaacaattaggctttggggataaaacgaggtgcggagagcgggctggggcatttctccccgagatggcgggtctgacggcggcggccccgcggcccggagtcctcctgctcctgctgtccatcctccacccctctcggcctggaggggtccctggggccattcctggtggagttcctggaggagtcttttatccaggggctggtctcggagcccttggaggaggagcgctggggcctggaggcaaacctcttaagccagttcccggagggcttgcgggtgctggccttggggcagggcagccgctaaggcagccaagtatggagctgctgcaggcttagtgcctggtgggccaggctttggcccgggagtagttggtgtcccaggagctggcgttccaggtgttggtgtcccaggagctgggattccagttgtcccaggtgctgggatcccaggtgctgcggttccaggggttgtgtcaccagaagcagctgctaaggcagctgcaaaggcagccaaatacggggccaggcccggagtcggagttggaggcattcctacttacggggttggagctgggggctttcccggctttggtgtcggagtcggaggtatccctggagtcgcaggtgtccctggtgtcggaggtgttcccggagtcggaggtgtcccgggagttggcatttcccccgaagctcaggcagcagctgccgccaaggctgccaagtacgggttagttcctggtgtcggcgtggctcctggagttggcgtggctcctggtgtcggtgtggctcctggagttggcttggctcctggagttggcgtggctcctggagttggtgtggctcctggcgttggcgtggctcccggcattggccctggtggagttgcagctgcagcaaaatccgctgccaaggtggctgccaaagcccagctccgagctgcagctgggcttggtgctggcatccctggacttggagttggtgtcggcgtccctggacttggagttggtgctggtgttcctggacttggagttggtgctggtgttcctggcttcggggcagtacctggagccctggctgccgctaaagcagccaaatatggagcagcagtgcctggggtccttggagggctcggggctctcggtggagtaggcatcaacctggttgacctgtcatggccgcctgtgccctgcctccacccccatcctacactcccccagggcgtgcggggctgtgcagactggggtgccaggcatctcctccccacccggggtgtccccacatgcagtactgtataccccccatccctccctcggtccactgaacttcagagcagttcccattcctgccccgcccatctttttgtgtctcgctgtgatagatcaataaatattttattttttgtcctgg

SEQ ID NO: 3825 - protein, 91 aa, Homo sapiens
MAGLTAAAPRPGVLLLLLSILHPSRPGGVPGAIPGGVPGGVFYPGAGLGALGGGALGPGGKPLKPVPGGLAGAGLGAGQPLRQPSMELLQA

SEQ ID NO: 3826 - DNA, 2859 bp, Homo sapiens
gaaagaacagtcgcagagggaaagcgggaaagagatgggggaaagtgtgtgtgtgtgagtgtgtgcttgtgtgcatgtgtgtgcgtgtgtgtgtcaaggaaaaaagctcgcagtccagcagcccgggcctgggaggcttgtgagccgggcctttcgtaattgtcccctccccgcggccccctcccccaggcctcccccctctcccgccctcccgcccgccctctctccctccctctttccctcacagccgacgaggcaacaattaggctttggggataaaacgaggtgcggagagcgggctggggcatttctccccgagatggcgggtctgacggcggcggccccgcggcccggagtcctcctgctcctgctgtccatcctccacccctctcggcctggaggggtccctggggccattcctggtggagttcctggaggagtcttttatccaggggctggtctcggagcccttggaggaggagcgctggggcctggaggcaaacctcttaagccagttcccggagggcttgcgggtgctggccttggggcagggctcggcgccttccccgcagttacctttccgggggctctggtgcctggtggagtggctgacgctgctgcagcctataaagctgctaaggctggcgctgggcttggtggtgtcccaggagttggtggcttaggagtgtctgcaggtgcggtggttcctcagcctggagccggagtgaagcctgggaaagtgccgggtgtggggctgccaggtgtatacccaggtggcgtgctcccaggagctcggttccccggtgtgggggtgctccctggagttcccactggagcaggagttaagcccaaggctccaggtgtaggtggagcttttgctggaatcccaggagttggaccctttgggggaccgcaacctggagtcccactggggtatcccatcaaggcccccaagctgcctggtggctatggactgccctacaccacagggaaactgccctatggctatgggcccggaggagtggctggtgcagcgggcaaggctggttacccaacagggacaggggttggcccccagggtgctggagcagccggagtcctccctggtgttggaggggctggtgttcctggcgtgcctggggcaattcctggaattggaggcatcgcaggcgttgggactccagctgcagctgcagctgcagcagcagccgctaaggcagccaagtatggagctgctgcaggcttagtgcctggtgggccaggctttggcccgggagtattggtgctggtgttcctggacttggagttggtgctggtgttcctggcttcggggcagtacctggagccctggctgccgctaaagcagccaaatatggagcagcagtgcctggggtccttggagggctcggggctctcggtggagtaggcatcccaggcggtgtggtgggggcctagtgggagccgctgggctcggaggactcggagtcggagggcttggagttccaggtgttgggggccttggaggtatacctccagctgcagccgctaaagcagctaaatacggagtggcagcaagacctggcttcggattgtctcccattttcccaggtggggcctgcctggggaaagcttgtggccggaagagaaaatgagcttcctaggacccctgactcacgacctcatcaacgttggtgctactgcttggtggagaatgtaaaccctttgtaaccccatcccatgcccctccgactccccaccccaggagggaacgggcaggccgggcggccttgcagatccacagggcaaggaaacaagaggggagcggccaagtgccccgaccaggaggccccctacttcagaggcaagggccatgtggtcctggccccccaccccatcccttcccacctaggagctccccctccacacagcctccatctccaggggaacttggtgctacacgctggtgctcttatcttcctggggggagggaggagggaagggtggcccctcggggaaccccctacctggggctcctctaaagatggtgcagacacttcctgggcagtcccagctccccctgcccaccaggacccaccgttggctgccatccagttggtacccaagcacctgaagcctcaaagctggattcgctctagcatccctcctctcctgggtccacttggccgtctcctccccaccgatcgctgttccccacatctggggcgcttttgggttggaaaaccaccccacactgggaatagccaccttgcccttgtagaatccatccgcccatccgtccattcatccatcggtccgtccatccatgtccccagttgaccgcccggcaccactagctggctgggtgcacccaccatcaacctggttgacctgtcatggccgcctgtgccctgcctccacccccatcctacactcccccagggcgtgcggggctgtgcagactggggtgccaggcatctcctccccacccggggtgtccccacatgcagtactgtataccccccatccctccctcggtccactgaacttcagagcagttcccattcctgccccgcccatctttttgtgtctcgctgtgatagatcaataaatattttattttttgtcctggatatttggggattatttttgattgttgatattctcttttggttttattgttgtggttcattgaaaaaaaaagataatttttttttctgatccggggagctgtatccccagtagaaaaaacattttaatcactctaatataactctggatgaaacacacctttttttttaataagaaaagagaattaactgcttcagaaatgactaataaatgaaaaacctttaaaggaaa

SEQ ID NO: 3827 - protein, 368 aa, Homo sapiens
MAGLTAAAPRPGVLLLLLSILHPSRPGGVPGAIPGGVPGGVFYPGAGLGALGGGALGPGGKPLKPVPGGLAGAGLGAGLGAFPAVTFPGALVPGGVADAAAAYKAAKAGAGLGGVPGVGGLGVSAGAVVPQPGAGVKPGKVPGVGLPGVYPGGVLPGARFPGVGVLPGVPTGAGVKPKAPGVGGAFAGIPGVGPFGGPQPGVPLGYPIKAPKLPGGYGLPYTTGKLPYGYGPGGVAGAAGKAGYPTGTGVGPQGAGAAGVLPGVGGAGVPGVPGAIPGIGGIAGVGTPAAAAAAAAAAKAAKYGAAAGLVPGGPGFGPGVLVLVFLDLELVLVFLASGQYLEPWLPLKQPNMEQQCLGSLEGSGLSVE

SEQ ID NO: 3828 - DNA, 3458 bp, Homo sapiens
gaaagaacagtcgcagagggaaagcgggaaagagatgggggaaagtgtgtgtgtgtgagtgtgtgcttgtgtgcatgtgtgtgcgtgtgtgtgtcaaggaaaaaagctcgcagtccagcagcccgggcctgggaggcttgtgagccgggcctttcgtaattgtcccctccccgcggccccctcccccaggcctcccccctctcccgccctcccgcccgccctctctccctccctctttccctcacagccgacgaggcaacaattaggctttggggataaaacgaggtgcggagagcgggctggggcatttctccccgagatggcgggtctgacggcggcggccccgcggcccggagtcctcctgctcctgctgtccatcctccacccctctcggcctggaggggtccctggggccattcctggtggagttcctggaggagtcttttatccaggggctggtctcggagcccttggaggaggagcgctggggcctggaggcaaacctcttaagccagggctcggcgccttccccgcagttacctttccgggggctctggtgcctggtggagtggctgacgctgctgcagcctataaagctgctaaggctggcgctgggcttggtggtgtcccaggagttggtggcttaggagtgtctgcaggtgcggtggttcctcagcctggagccggagtgaagcctgggaaagtgccgggtgtggggctgccaggtgtatacccaggtggcgtgctcccaggagctcggttccccggtgtgggggtgctccctggagttcccactggagcaggagttaagcccaaggctccaggagttggaccctttgggggaccgcaacctggagtcccactggggtatcccatcaaggcccccaagctgcctggctatgggcccggaggagtggctggtgcagcgggcaaggctggttacccaacagggacaggggttggcccccaggcagcagcagcagcggcagctaaagcagcagcaaagttcggtgctggagcagccggagtcctccctggtgttggaggggctggtgttcctggcgtgcctggggcaattcctggaattggaggcatcgcaggcgttgggactccagctgcagctgcagctgcagcagcagccgctaaggcagccaagtatggagctgctgcaggcttagtgcctggtgggccaggctttggcccgggagtagttggtgtcccaggagctggcgttccaggtgttggtgtcccaggagctgggattccagttgtcccaggtgctgggatcccaggtgctgcggttccaggggttgtgtcaccagaagcagctgctaaggcagctgcaaaggcagccaaatacggggccaggcccggagtcggagttggaggcattcctacttacggggttggagctgggggctttcccggctttggtgtcggagtcggagccgaagctcaggcagcagctgccgccaaggctgccaagtacgggttagttcctggtgtcggcgtggctcctggagttggcgtggctcctggtgtcggtgtggctcctggagttggcttggctcctggagttggcgtggctcctggagttggtgtggctcctggcgttggcgtggctcccggcattggccctggtggagttgcagctgcagcaaaatccgctgccaaggtggctgccaaagcccagctccgagctgcagctgggcttggtgctggcatccctggacttggagttggtgtcggcgtccctggacttggagttggtgctggtgttcctggacttggagttggtgctggtgttcctggcttcggggcagtacctggagccctggctgccgctaaagcagccaaatatggagcagcagtgcctggggtccttggagggctcggggctctcggtggagtaggcatcccaggcggtgtggtgggagccggacccgccgccgccgctgccgcagccaaagctgctgccaaagccgcccagtttggcctagtgggagccgctgggctcggaggactcggagtcggagggcttggagttccaggtgttgggggccttggaggtatacctccagctgcagccgctaaagcagctaaatacggtgctgctggccttggaggtgtcctagggggtgccgggcagttcccacttggaggagtggcagcaagacctggcttcggattgtctcccattttcccaggtggggcctgcctggggaaagcttgtggccggaagagaaaatgagcttcctaggacccctgactcacgacctcatcaacgttggtgctactgcttggtggagaatgtaaaccctttgtaaccccatcccatgcccctccgactccccaccccaggagggaacgggcaggccgggcggccttgcagatccacagggcaaggaaacaagaggggagcggccaagtgccccgaccaggaggccccctacttcagaggcaagggccatgtggtcctggccccccaccccatcccttcccacctaggagctccccctccacacagcctccatctccaggggaacttggtgctacacgctggtgctcttatcttcctggggggagggaggagggaagggtggcccctcggggaaccccctacctggggctcctctaaagatggtgcagacacttcctgggcagtcccagctccccctgcccaccaggacccaccgttggctgccatccagttggtacccaagcacctgaagcctcaaagctggattcgctctagcatccctcctctcctgggtccacttggccgtctcctccccaccgatcgctgttccccacatctggggcgcttttgggttggaaaaccaccccacactgggaatagccaccttgcccttgtagaatccatccgcccatccgtccattcatccatcggtccgtccatccatgtccccagttgaccgcccggcaccactagctggctgggtgcacccaccatcaacctggttgacctgtcatggccgcctgtgccctgcctccacccccatcctacactcccccagggcgtgcggggctgtgcagactggggtgccaggcatctcctccccacccggggtgtccccacatgcagtactgtataccccccatccctccctcggtccactgaacttcagagcagttcccattcctgccccgcccatctttttgtgtctcgctgtgatagatcaataaatattttattttttgtcctggatatttggggattatttttgattgttgatattctcttttggttttattgttgtggttcattgaaaaaaaaagataatttttttttctgatccggggagctgtatccccagtagaaaaaacattttaatcactctaatataactctggatgaaacacacctttttttttaataagaaaagagaattaactgcttcagaaatgactaataaatgaaaaacctttaaaggaaa

SEQ ID NO: 3829 - protein, 643 aa, Homo sapiens; identical to SEQ ID NO: 3821

SEQ ID NO: 3830 - DNA, 3503 bp, Homo sapiens
gaaagaacagtcgcagagggaaagcgggaaagagatgggggaaagtgtgtgtgtgtgagtgtgtgcttgtgtgcatgtgtgtgcgtgtgtgtgtcaaggaaaaaagctcgcagtccagcagcccgggcctgggaggcttgtgagccgggcctttcgtaattgtcccctccccgcggccccctcccccaggcctcccccctctcccgccctcccgcccgccctctctccctccctctttccctcacagccgacgaggcaacaattaggctttggggataaaacgaggtgcggagagcgggctggggcatttctccccgagatggcgggtctgacggcggcggccccgcggcccggagtcctcctgctcctgctgtccatcctccacccctctcggcctggaggggtccctggggccattcctggtggagttcctggaggagtcttttatccaggggctggtctcggagcccttggaggaggagcgctggggcctggaggcaaacctcttaagccagttcccggagggcttgcgggtgctggccttggggcagggctcggcgccttccccgcagttacctttccgggggctctggtgcctggtggagtggctgacgctgctgcagcctataaagctgctaaggctggcgctgggcttggtggtgtcccaggagttggtggcttaggagtgtctgcaggtgcggtggttcctcagcctggagccggagtgaagcctgggaaagtgccgggtgtggggctgccaggtgtatacccaggtggcgtgctcccaggagctcggttccccggtgtgggggtgctccctggagttcccactggagcaggagttaagcccaaggctccaggtgtaggtggagcttttgctggaatcccaggagttggaccctttgggggaccgcaacctggagtcccactggggtatcccatcaaggcccccaagctgcctggctatgggcccggaggagtggctggtgcagcgggcaaggctggttacccaacagggacaggggttggcccccaggcagcagcagcagcggcagctaaagcagcagcaaagttcggtgctggagcagccggagtcctccctggtgttggaggggctggtgttcctggcgtgcctggggcaattcctggaattggaggcatcgcaggcgttgggactccagctgcagctgcagctgcagcagcagccgctaaggcagccaagtatggagctgctgcaggcttagtgcctggtgggccaggctttggcccgggagtagttggtgtcccaggagctggcgttccaggtgttggtgtcccaggagctgggattccagttgtcccaggtgctgggatcccaggtgctgcggttccaggggttgtgtcaccagaagcagctgctaaggcagctgcaaaggcagccaaatacggggccaggcccggagtcggagttggaggcattcctacttacggggttggagctgggggctttcccggctttggtgtcggagtcggaggtatccctggagtcgcaggtgtccctggtgtcggaggtgttcccggagtcggaggtgtcccgggagttggcatttcccccgaagctcaggcagcagctgccgccaaggctgccaagtacgggttagttcctggtgtcggcgtggctcctggagttggcgtggctcctggtgtcggtgtggctcctggagttggcttggctcctggagttggcgtggctcctggagttggtgtggctcctggcgttggcgtggctcccggcattggccctggtggagttgcaggagctgcagctgggcttggtgctggcatccctggacttggagttggtgtcggcgtccctggacttggagttggtgctggtgttcctggacttggagttggtgctggtgttcctggcttcggggcagtacctggagccctggctgccgctaaagcagccaaatatggagcagcagtgcctggggtccttggagggctcggggctctcggtggagtaggcatcccaggcggtgtggtgggagccggacccgccgccgccgctgccgcagccaaagctgctgccaaagccgcccagtttggcctagtgggagccgctgggctcggaggactcggagtcggagggcttggagttccaggtgttgggggccttggaggtatacctccagctgcagccgctaaagcagctaaatacggagtggcagcaagacctggcttcggattgtctcccattttcccaggtggggcctgcctggggaaagcttgtggccggaagagaaaatgagcttcctaggacccctgactcacgacctcatcaacgttggtgctactgcttggtggagaatgtaaaccctttgtaaccccatcccatgcccctccgactccccaccccaggagggaacgggcaggccgggcggccttgcagatccacagggcaaggaaacaagaggggagcggccaagtgccccgaccaggaggccccctacttcagaggcaagggccatgtggtcctggccccccaccccatcccttcccacctaggagctccccctccacacagcctccatctccaggggaacttggtgctacacgctggtgctcttatcttcctggggggagggaggagggaagggtggcccctcggggaaccccctacctggggctcctctaaagatggtgcagacacttcctgggcagtcccagctccccctgcccaccaggacccaccgttggctgccatccagttggtacccaagcacctgaagcctcaaagctggattcgctctagcatccctcctctcctgggtccacttggccgtctcctccccaccgatcgctgttccccacatctggggcgcttttgggttggaaaaccaccccacactgggaatagccaccttgcccttgtagaatccatccgcccatccgtccattcatccatcggtccgtccatccatgtccccagttgaccgcccggcaccactagctggctgggtgcacccaccatcaacctggttgacctgtcatggccgcctgtgccctgcctccacccccatcctacactcccccagggcgtgcggggctgtgcagactggggtgccaggcatctcctccccacccggggtgtccccacatgcagtactgtataccccccatccctccctcggtccactgaacttcagagcagttcccattcctgccccgcccatctttttgtgtctcgctgtgatagatcaataaatattttattttttgtcctggatatttggggattatttttgattgttgatattctcttttggttttattgttgtggttcattgaaaaaaaaagataatttttttttctgatccggggagctgtatccccagtagaaaaaacattttaatcactctaatataactctggatgaaacacacctttttttttaataagaaaagagaattaactgcttcagaaatgactaataaatgaaaaacctttaaaggaaa

SEQ ID NO: 3831 - protein, 658 aa, Homo sapiens
MAGLTAAAPRPGVLLLLLSILHPSRPGGVPGAIPGGVPGGVFYPGAGLGALGGGALGPGGKPLKPVPGGLAGAGLGAGLGAFPAVTFPGALVPGGVADAAAAYKAAKAGAGLGGVPGVGGLGVSAGAVVPQPGAGVKPGKVPGVGLPGVYPGGVLPGARFPGVGVLPGVPTGAGVKPKAPGVGGAFAGIPGVGPFGGPQPGVPLGYPIKAPKLPGYGPGGVAGAAGKAGYPTGTGVGPQAAAAAAAKAAAKFGAGAAGVLPGVGGAGVPGVPGAIPGIGGIAGVGTPAAAAAAAAAAKAAKYGAAAGLVPGGPGFGPGVVGVPGAGVPGVGVPGAGIPVVPGAGIPGAAVPGVVSPEAAAKAAAKAAKYGARPGVGVGGIPTYGVGAGGFPGFGVGVGGIPGVAGVPGVGGVPGVGGVPGVGISPEAQAAAAAKAAKYGLVPGVGVAPGVGVAPGVGVAPGVGLAPGVGVAPGVGVAPGVGVAPGIGPGGVAGAAAGLGAGIPGLGVGVGVPGLGVGAGVPGLGVGAGVPGFGAVPGALAAAKAAKYGAAVPGVLGGLGALGGVGIPGGVVGAGPAAAAAAAKAAAKAAQFGLVGAAGLGGLGVGGLGVPGVGGLGGIPPAAAAKAAKYGVAARPGFGLSPIFPGGACLGKACGRKRK

SEQ ID NO: 3832 - DNA, 1896 bp, Homo sapiens
gaaagaacagtcgcagagggaaagcgggaaagagatgggggaaagtgtgtgtgtgtgagtgtgtgcttgtgtgcatgtgtgtgcgtgtgtgtgtcaaggaaaaaagctcgcagtccagcagcccgggcctgggaggcttgtgagccgggcctttcgtaattgtcccctccccgcggccccctcccccaggcctcccccctctcccgccctcccgcccgccctctctccctccctctttccctcacagccgacgaggcaacaattaggctttggggataaaacgaggtgcggagagcgggctggggcatttctccccgagatggcgggtctgacggcggcggccccgcggcccggagtcctcctgctcctgctgtccatcctccacccctctcggcctggaggggtccctggggccattcctggtggagttcctggaggagtcttttatccaggggctggtctcggagcccttggaggaggagcgctggggcctggaggcaaacctcttaagccagttcccggagggcttgcgggtgctggccttggggcagggcagccgctaaggcagccaagtatggagctgctgcaggcttagtgcctggtgggccaggctttggcccgggagtagttggtgtcccaggagctggcgttccaggtgttggtgtcccaggagctgggattccagttgtcccaggtgctgggatcccaggtgctgcggttccaggggttgtgtcaccagaagcagctgctaaggcagctgcaaaggcagccaaatacggggccaggcccggagtcggagttggaggcattcctacttacggggttggagctgggggctttcccggctttggtgtcggagtcggaggtatccctggagtcgcaggtgtccctggtgtcggaggtgttcccggagtcggaggtgtcccgggagttggcatttcccccgaagctcaggcagcagctgccgccaaggctgccaagtacgggttagttcctggtgtcggcgtggctcctggagttggcgtggctcctggtgtcggtgtggctcctggagttggcttggctcctggagttggcgtggctcctggagttggtgtggctcctggcgttggcgtggctcccggcattggccctggtggagttgcagctgcagcaaaatccgctgccaaggtggctgccaaagcccagctccgagctgcagctgggcttggtgctggcatccctggacttggagttggtgtcggcgtccctggacttggagttggtgctggtgttcctggacttggagttggtgctggtgttcctggcttcggggcagtacctggagccctggctgccgctaaagcagccaaatatggagcagcagtgcctggggtccttggagggctcggggctctcggtggagtaggcatcaacctggttgacctgtcatggccgcctgtgccctgcctccacccccatcctacactcccccagggcgtgcggggctgtgcagactggggtgccaggcatctcctccccacccggggtgtccccacatgcagtactgtataccccccatccctccctcggtccactgaacttcagagcagttcccattcctgccccgcccatctttttgtgtctcgctgtgatagatcaataaatattttattttttgtcctggatatttggggattatttttgattgttgatattctcttttggttttattgttgtggttcattgaaaaaaaaagataatttttttttctgatccggggagctgtatccccagtagaaaaaacattttaatcactctaatataactctggatgaaacacacctttttttttaataagaaaagagaattaactgcttcagaaatgactaataaatgaaaaacctttaaaggaaa

SEQ ID NO: 3833 - protein, 91 aa, Homo sapiens; identical to SEQ ID NO: 3825

SEQ ID NO: 3834 - DNA, 3550 bp, Homo sapiens
gaaagaacagtcgcagagggaaagcgggaaagagatgggggaaagtgtgtgtgtgtgagtgtgtgcttgtgtgcatgtgtgtgcgtgtgtgtgtcaaggaaaaaagctcgcagtccagcagcccgggcctgggaggcttgtgagccgggcctttcgtaattgtcccctccccgcggccccctcccccaggcctcccccctctcccgccctcccgcccgccctctctccctccctctttccctcacagccgacgaggcaacaattaggctttggggataaaacgaggtgcggagagcgggctggggcatttctccccgagatggcgggtctgacggcggcggccccgcggcccggagtcctcctgctcctgctgtccatcctccacccctctcggcctggaggggtccctggggccattcctggtggagttcctggaggagtcttttatccaggggctggtctcggagcccttggaggaggagcgctggggcctggaggcaaacctcttaagccagttcccggagggcttgcgggtgctggccttggggcagggctcggcgccttccccgcagttacctttccgggggctctggtgcctggtggagtggctgacgctgctgcagcctataaagctgctaaggctggcgctgggcttggtggtgtcccaggagttggtggcttaggagtgtctgcaggtgcggtggttcctcagcctggagccggagtgaagcctgggaaagtgccgggtgtggggctgccaggtgtatacccaggtggcgtgctcccaggagctcggttccccggtgtgggggtgctccctggagttcccactggagcaggagttaagcccaaggctccaggtgtaggtggagcttttgctggaatcccaggagttggaccctttgggggaccgcaacctggagtcccactggggtatcccatcaaggcccccaagctgcctggtggctatggactgccctacaccacagggaaactgccctatggctatgggcccggaggagtggctggtgcagcgggcaaggctggttacccaacagggacaggggttggcccccagggtgctggagcagccggagtcctccctggtgttggaggggctggtgttcctggcgtgcctggggcaattcctggaattggaggcatcgcaggcgttgggactccagctgcagctgcagctgcagcagcagccgctaaggcagccaagtatggagctgctgcaggcttagtgcctggtgggccaggctttggcccgggagtagttggtgtcccaggagctggcgttccaggtgttggtgtcccaggagctgggattccagttgtcccaggtgctgggatcccaggtgctgcggttccaggggttgtgtcaccagaagcagctgctaaggcagctgcaaaggcagccaaatacggggccaggcccggagtcggagttggaggcattcctacttacggggttggagctgggggctttcccggctttggtgtcggagtcggaggtatccctggagtcgcaggtgtccctggtgtcggaggtgttcccggagtcggaggtgtcccgggagttggcatttcccccgaagctcaggcagcagctgccgccaaggctgccaagtacggagtggggaccccagcagctgcagctgctaaagcagccgccaaagccgcccagtttgggttagttcctggtgtcggcgtggctcctggagttggcgtggctcctggtgtcggtgtggctcctggagttggcttggctcctggagttggcgtggctcctggagttggtgtggctcctggcgttggcgtggctcccggcattggccctggtggagttgcagctgcagcaaaatccgctgccaaggtggctgccaaagcccagctccgagctgcagctgggcttggtgctggcatccctggacttggagttggtgtcggcgtccctggacttggagttggtgctggtgttcctggacttggagttggtgctggtgttcctggcttcggggcagtacctggagccctggctgccgctaaagcagccaaatatggagcagcagtgcctggggtccttggagggctcggggctctcggtggagtaggcatcccaggcggtgtggtgggggcctagtgggagccgctgggctcggaggactcggagtcggagggcttggagttccaggtgttgggggccttggaggtatacctccagctgcagccgctaaagcagctaaatacggagtggcagcaagacctggcttcggattgtctcccattttcccaggtggggcctgcctggggaaagcttgtggccggaagagaaaatgagcttcctaggacccctgactcacgacctcatcaacgttggtgctactgcttggtggagaatgtaaaccctttgtaaccccatcccatgcccctccgactccccaccccaggagggaacgggcaggccgggcggccttgcagatccacagggcaaggaaacaagaggggagcggccaagtgccccgaccaggaggccccctacttcagaggcaagggccatgtggtcctggccccccaccccatcccttcccacctaggagctccccctccacacagcctccatctccaggggaacttggtgctacacgctggtgctcttatcttcctggggggagggaggagggaagggtggcccctcggggaaccccctacctggggctcctctaaagatggtgcagacacttcctgggcagtcccagctccccctgcccaccaggacccaccgttggctgccatccagttggtacccaagcacctgaagcctcaaagctggattcgctctagcatccctcctctcctgggtccacttggccgtctcctccccaccgatcgctgttccccacatctggggcgcttttgggttggaaaaccaccccacactgggaatagccaccttgcccttgtagaatccatccgcccatccgtccattcatccatcggtccgtccatccatgtccccagttgaccgcccggcaccactagctggctgggtgcacccaccatcaacctggttgacctgtcatggccgcctgtgccctgcctccacccccatcctacactcccccagggcgtgcggggctgtgcagactggggtgccaggcatctcctccccacccggggtgtccccacatgcagtactgtataccccccatccctccctcggtccactgaacttcagagcagttcccattcctgccccgcccatctttttgtgtctcgctgtgatagatcaataaatattttattttttgtcctggatatttggggattatttttgattgttgatattctcttttggttttattgttgtggttcattgaaaaaaaaagataatttttttttctgatccggggagctgtatccccagtagaaaaaacattttaatcactctaatataactctggatgaaacacacctttttttttaataagaaaagagaattaactgcttcagaaatgactaataaatgaaaaacctttaaaggaaa

SEQ ID NO: 3835 - protein, 608 aa, Homo sapiens
MAGLTAAAPRPGVLLLLLSILHPSRPGGVPGAIPGGVPGGVFYPGAGLGALGGGALGPGGKPLKPVPGGLAGAGLGAGLGAFPAVTFPGALVPGGVADAAAAYKAAKAGAGLGGVPGVGGLGVSAGAVVPQPGAGVKPGKVPGVGLPGVYPGGVLPGARFPGVGVLPGVPTGAGVKPKAPGVGGAFAGIPGVGPFGGPQPGVPLGYPIKAPKLPGGYGLPYTTGKLPYGYGPGGVAGAAGKAGYPTGTGVGPQGAGAAGVLPGVGGAGVPGVPGAIPGIGGIAGVGTPAAAAAAAAAAKAAKYGAAAGLVPGGPGFGPGVVGVPGAGVPGVGVPGAGIPVVPGAGIPGAAVPGVVSPEAAAKAAAKAAKYGARPGVGVGGIPTYGVGAGGFPGFGVGVGGIPGVAGVPGVGGVPGVGGVPGVGISPEAQAAAAAKAAKYGVGTPAAAAAKAAAKAAQFGLVPGVGVAPGVGVAPGVGVAPGVGLAPGVGVAPGVGVAPGVGVAPGIGPGGVAAAAKSAAKVAAKAQLRAAAGLGAGIPGLGVGVGVPGLGVGAGVPGLGVGAGVPGFGAVPGALAAAKAAKYGAAVPGVLGGLGALGGVGIPGGVVGA

SEQ ID NO: 3836 - DNA, 3590 bp, Homo sapiens
gaaagaacagtcgcagagggaaagcgggaaagagatgggggaaagtgtgtgtgtgtgagtgtgtgcttgtgtgcatgtgtgtgcgtgtgtgtgtcaaggaaaaaagctcgcagtccagcagcccgggcctgggaggcttgtgagccgggcctttcgtaattgtcccctccccgcggccccctcccccaggcctcccccctctcccgccctcccgcccgccctctctccctccctctttccctcacagccgacgaggcaacaattaggctttggggataaaacgaggtgcggagagcgggctggggcatttctccccgagatggcgggtctgacggcggcggccccgcggcccggagtcctcctgctcctgctgtccatcctccacccctctcggcctggaggggtccctggggccattcctggtggagttcctggaggagtcttttatccaggggctggtctcggagcccttggaggaggagcgctggggcctggaggcaaacctcttaagccagttcccggagggcttgcgggtgctggccttggggcagggctcggcgccttccccgcagttacctttccgggggctctggtgcctggtggagtggctgacgctgctgcagcctataaagctgctaaggctggcgctgggcttggtggtgtcccaggagttggtggcttaggagtgtctgcaggtgcggtggttcctcagcctggagccggagtgaagcctgggaaagtgccgggtgtggggctgccaggtgtatacccaggtggcgtgctcccaggagctcggttccccggtgtgggggtgctccctggagttcccactggagcaggagttaagcccaaggctccaggtgtaggtggagcttttgctggaatcccaggagttggaccctttgggggaccgcaacctggagtcccactggggtatcccatcaaggcccccaagctgcctggtggctatggactgccctacaccacagggaaactgccctatggctatgggcccggaggagtggctggtgcagcgggcaaggctggttacccaacagggacaggggttggcccccaggcagcagcagcagcggcagctaaagcagcagcaaagttcggtgctggagcagccggagtcctccctggtgttggaggggctggtgttcctggcgtgcctggggcaattcctggaattggaggcatcgcaggcgttgggactccagctgcagctgcagctgcagcagcagccgctaaggcagccaagtatggagctgctgcaggcttagtgcctggtgggccaggctttggcccgggagtagttggtgtcccaggagctggcgttccaggtgttggtgtcccaggagctgggattccagttgtcccaggtgctgggatcccaggtgctgcggttccaggggttgtgtcaccagaagcagctgctaaggcagctgcaaaggcagccaaatacggggccaggcccggagtcggagttggaggcattcctacttacggggttggagctgggggctttcccggctttggtgtcggagtcggaggtatccctggagtcgcaggtgtccctggtgtcggaggtgttcccggagtcggaggtgtcccgggagttggcatttcccccgaagctcaggcagcagctgccgccaaggctgccaagtacgggttagttcctggtgtcggcgtggctcctggagttggcgtggctcctggtgtcggtgtggctcctggagttggcttggctcctggagttggcgtggctcctggagttggtgtggctcctggcgttggcgtggctcccggcattggccctggtggagttgcagctgcagcaaaatccgctgccaaggtggctgccaaagcccagctccgagctgcagctgggcttggtgctggcatccctggacttggagttggtgtcggcgtccctggacttggagttggtgctggtgttcctggacttggagttggtgctggtgttcctggcttcggggcagtacctggagccctggctgccgctaaagcagccaaatatggagcagcagtgcctggggtccttggagggctcggggctctcggtggagtaggcatcccaggcggtgtggtgggagccggacccgccgccgccgctgccgcagccaaagctgctgccaaagccgcccagtttggcctagtgggagccgctgggctcggaggactcggagtcggagggcttggagttccaggtgttgggggccttggaggtatacctccagctgcagccgctaaagcagctaaatacggagtggcagcaagacctggcttcggattgtctcccattttcccaggtggggcctgcctggggaaagcttgtggccggaagagaaaatgagcttcctaggacccctgactcacgacctcatcaacgttggtgctactgcttggtggagaatgtaaaccctttgtaaccccatcccatgcccctccgactccccaccccaggagggaacgggcaggccgggcggccttgcagatccacagggcaaggaaacaagaggggagcggccaagtgccccgaccaggaggccccctacttcagaggcaagggccatgtggtcctggccccccaccccatcccttcccacctaggagctccccctccacacagcctccatctccaggggaacttggtgctacacgctggtgctcttatcttcctggggggagggaggagggaagggtggcccctcggggaaccccctacctggggctcctctaaagatggtgcagacacttcctgggcagtcccagctccccctgcccaccaggacccaccgttggctgccatccagttggtacccaagcacctgaagcctcaaagctggattcgctctagcatccctcctctcctgggtccacttggccgtctcctccccaccgatcgctgttccccacatctggggcgcttttgggttggaaaaccaccccacactgggaatagccaccttgcccttgtagaatccatccgcccatccgtccattcatccatcggtccgtccatccatgtccccagttgaccgcccggcaccactagctggctgggtgcacccaccatcaacctggttgacctgtcatggccgcctgtgccctgcctccacccccatcctacactcccccagggcgtgcggggctgtgcagactggggtgccaggcatctcctccccacccggggtgtccccacatgcagtactgtataccccccatccctccctcggtccactgaacttcagagcagttcccattcctgccccgcccatctttttgtgtctcgctgtgatagatcaataaatattttattttttgtcctggatatttggggattatttttgattgttgatattctcttttggttttattgttgtggttcattgaaaaaaaaagataatttttttttctgatccggggagctgtatccccagtagaaaaaacattttaatcactctaatataactctggatgaaacacacctttttttttaataagaaaagagaattaactgcttcagaaatgactaataaatgaaaaacctttaaaggaaa

SEQ ID NO: 3837 - protein, 687 aa, Homo sapiens
MAGLTAAAPRPGVLLLLLSILHPSRPGGVPGAIPGGVPGGVFYPGAGLGALGGGALGPGGKPLKPVPGGLAGAGLGAGLGAFPAVTFPGALVPGGVADAAAAYKAAKAGAGLGGVPGVGGLGVSAGAVVPQPGAGVKPGKVPGVGLPGVYPGGVLPGARFPGVGVLPGVPTGAGVKPKAPGVGGAFAGIPGVGPFGGPQPGVPLGYPIKAPKLPGGYGLPYTTGKLPYGYGPGGVAGAAGKAGYPTGTGVGPQAAAAAAAKAAAKFGAGAAGVLPGVGGAGVPGVPGAIPGIGGIAGVGTPAAAAAAAAAAKAAKYGAAAGLVPGGPGFGPGVVGVPGAGVPGVGVPGAGIPVVPGAGIPGAAVPGVVSPEAAAKAAAKAAKYGARPGVGVGGIPTYGVGAGGFPGFGVGVGGIPGVAGVPGVGGVPGVGGVPGVGISPEAQAAAAAKAAKYGLVPGVGVAPGVGVAPGVGVAPGVGLAPGVGVAPGVGVAPGVGVAPGIGPGGVAAAAKSAAKVAAKAQLRAAAGLGAGIPGLGVGVGVPGLGVGAGVPGLGVGAGVPGFGAVPGALAAAKAAKYGAAVPGVLGGLGALGGVGIPGGVVGAGPAAAAAAAKAAAKAAQFGLVGAAGLGGLGVGGLGVPGVGGLGGIPPAAAAKAAKYGVAARPGFGLSPIFPGGACLGKACGRKRK

SEQ ID NO: 3838 - DNA, 3012 bp, Homo sapiens
gaaagaacagtcgcagagggaaagcgggaaagagatgggggaaagtgtgtgtgtgtgagtgtgtgcttgtgtgcatgtgtgtgcgtgtgtgtgtcaaggaaaaaagctcgcagtccagcagcccgggcctgggaggcttgtgagccgggcctttcgtaattgtcccctccccgcggccccctcccccaggcctcccccctctcccgccctcccgcccgccctctctccctccctctttccctcacagccgacgaggcaacaattaggctttggggataaaacgaggtgcggagagcgggctggggcatttctccccgagatggcgggtctgacggcggcggccccgcggcccggagtcctcctgctcctgctgtccatcctccacccctctcggcctggaggggtccctggggccattcctggtggagttcctggaggagtcttttatccaggggctggtctcggagcccttggaggaggagcgctggggcctggaggcaaacctcttaagccagttcccggagggcttgcgggtgctggccttggggcagggctcggcgccttccccgcagttacctttccgggggctctggtgcctggtggagtggctgacgctgctgcagcctataaagctgctaaggctggcgctgggcttggtggtgtcccaggagttggtggcttaggagtgtctgcaggtgcggtggttcctcagcctggagccggagtgaagcctgggaaagtgccgggtgtggggctgccaggtgtatacccaggtggcgtgctcccaggagctcggttccccggtgtgggggtgctccctggagttcccactggagcaggagttaagcccaaggctccaggtgtaggtggagcttttgctggaatcccaggagttggaccctttgggggaccgcaacctggagtcccactggggtatcccatcaaggcccccaagctgcctggtggctatggactgccctacaccacagggaaactgccctatggctatgggcccggaggagtggctggtgcagcgggcaaggctggttacccaacagggacaggggttggcccccaggcagcagcagcagcggcagctaaagcagcagcaaagttcggtgctggagcagccggagtcctccctggtgttggaggggctggtgttcctggcgtgcctggggcaattcctggaattggaggcatcgcaggcgttgggactccagctgcagctgcagctgcagcagcagccgctaaggcagccaagtatggagctgctgcaggcttagtgcctggtgggccaggctttggcccgggagtagttggtgtcccaggagctggcgttccaggtgttggtgtcccaggagctgggattccagttgtcccaggtgctgggatcccaggtgctgcggttccaggggttgtgtcaccagaagcagctgctaaggcagctgcaaaggcagccaaatacggggccaggcccggagtcggagttggaggcattcctacttacggggttggagctgggggctttcccggctttggtgtcggagtcggaggtatccctggagtcgcaggtgtccctggtgtcggaggtgttcccggagtcggaggtgtcccgggagttggcatttcccccgaagctcaggcagcagctgccgccaaggctgccaagtacggagtggggaccccagcagctgcagctgctaaagcagccgccaaagccgcccagtttgggttagttcctggtgtcggcgtggctcctggagttggcgtggctcctggtgtcggtgtggctcctggagttggcttggctcctggagttggcgtggctcctggagttggtgtggctcctggcgttggcgtggctcccggcattggccctggtggagttgcagctgcagcaaaatccgctgccaaggtggctgccaaagcccagctccgagctgcagctgggcttggtgctggcatccctggacttggagttggtgtcggcgtccctggacttggagttggtgctggtgttcctggacttggagttggtgctggtgttcctggcttcggggcaggtgcagatgagggagttaggcggagcctgtcccctgagctcagggaaggagatccctcctcctctcagcacctccccagcaccccctcatcacccagggtacctggagccctggctgccgctaaagcagccaaatatggagcagcagtgcctggggtccttggagggctcggggctctcggtggagtaggcatcccaggcggtgtggtgggagccggacccgccgccgccgctgccgcagccaaagctgctgccaaagccgcccagtttggcctagtgggagccgctgggctcggaggactcggagtcggagggcttggagttccaggtgttgggggccttggaggtatacctccagctgcagccgctaaagcagctaaatacggtgctgctggccttggaggtgtcctagggggtgccgggcagttcccacttggaggagtggcagcaagacctggcttcggattgtctcccattttcccaggtggggcctgcctggggaaagcttgtggccggaagagaaaatgagcttcctaggacccctgactcacgacctcatcaacgttggtgctactgcttggtggagaatgtaaacccttttataccccccatccctccctcggtccactgaacttcagagcagttcccattcctgccccgcccatctttttgtgtctcgctgtgatagatcaataaatattttattttttgtcctggatatttggggattatttttgattgttgatattctcttttggttttattgttgtggttcattgaaaaaaaaagataatttttttttctgatccggggagctgtatccccagtagaaaaaacattttaatcactctaatataactctggatgaaacacacctttttttttaataagaaaagagaattaactgcttcagaaatgactaataaatgaaaaacctttaaaggaaa

SEQ ID NO: 3839 - protein, 757 aa, Homo sapiens; identical to SEQ ID NO: 3819

SEQ ID NO: 3840 - DNA, 3076 bp, Homo sapiens
ggcaacaattaggctttggggataaaacgaggtgcggagagcgggctggggcatttctccccgagatggcgggtctgacggcggcggccccgcggcccggagtcctcctgctcctgctgtccatcctccacccctctcggcctggaggggtccctggggccattcctggtggagttcctggaggagtcttttatccagcgctggggcctggaggcaaacctcttaagccagttcccggagggcttgcgggtgctggccttggggcagggctcggcgccttccccgcagttacctttccgggggctctggtgcctggtggagtggctgacgctgctgcagcctataaagctgctaaggctggcgctgggcttggtggtgtcccaggagttggtggcttaggagtgtctgcaggtgcggtggttcctcagcctggagccggagtgaagcctgggaaagtgccgggtgtggggctgccaggtgtatacccaggtggcgtgctcccaggagctcggttccccggtgtgggggtgctccctggagttcccactggagcaggagttaagcccaaggctccaggtgtaggtggagcttttgctggaatcccaggagttggaccctttgggggaccgcaacctggagtcccactggggtatcccatcaaggcccccaagctgcctggtggctatggactgccctacaccacagggaaactgccctatggctatgggcccggaggagtggctggtgcagcgggcaaggctggttacccaacagggacaggggttggcccccaggcagcagcagcagcggcagctaaagcagcagcaaagttcggtgctggagcagccggagtcctccctggtgttggaggggctggtgttcctggcgtgcctggggcaattcctggaattggaggcatcgcaggcgttgggactccagctgcagctgcagctgcagcagcagccgctaaggcagccaagtatggagctgctgcaggcttagtgcctggtgggccaggctttggcccgggagtagttggtgtcccaggagctggcgttccaggtgttggtgtcccaggagctgggattccagttgtcccaggtgctgggatcccaggtgctgcggttccaggggttgtgtcaccagaagcagctgctaaggcagctgcaaaggcagccaaatacggggccaggcccggagtcggagttggaggcattcctacttacggggttggagctgggggctttcccggctttggtgtcggagtcggaggtatccctggagtcgcaggtgtccctggtgtcggaggtgttcccggagtcggaggtgtcccgggagttggcatttcccccgaagctcaggcagcagctgccgccaaggctgccaagtacgggttagttcctggtgtcggcgtggctcctggagttggcgtggctcctggtgtcggtgtggctcctggagttggcttggctcctggagttggcgtggctcctggagttggtgtggctcctggcgttggcgtggctcccggcattggccctggtggagttgcagctgcagcaaaatccgctgccaaggtggctgccaaagcccagctccgagctgcagctgggcttggtgctggcatccctggacttggagttggtgtcggcgtccctggacttggagttggtgctggtgttcctggacttggagttggtgctggtgttcctggcttcggggcagtacctggagccctggctgccgctaaagcagccaaatatggagcagcagtgcctggggtccttggagggctcggggctctcggtggagtaggcatcccaggcggtgtggtgggagccggacccgccgccgccgctgccgcagccaaagctgctgccaaagccgcccagtttggcctagtgggagccgctgggctcggaggactcggagtcggagggcttggagttccaggtgttgggggccttggaggtatacctccagctgcagccgctaaagcagctaaatacggagtggcagcaagacctggcttcggattgtctcccattttcccaggtggggcctgcctggggaaagcttgtggccggaagagaaaatgagcttcctaggacccctgactcacgacctcatcaacgttggtgctactgcttggtggagaatgtaaaccctttgtaaccccatcccatgcccctccgactccccaccccaggagggaacgggcaggccgggcggccttgcagatccacagggcaaggaaacaagaggggagcggccaagtgccccgaccaggaggccccctacttcagaggcaagggccatgtggtcctggccccccaccccatcccttcccacctaggagctccccctccacacagcctccatctccaggggaacttggtgctacacgctggtgctcttatcttcctggggggagggaggagggaagggtggcccctcggggaaccccctacctggggctcctctaaagatggtgcagacacttcctgggcagtcccagctccccctgcccaccaggacccaccgttggctgccatccagttggtacccaagcacctgaagcctcaaagctggattcgctctagcatccctcctctcctgggtccacttggccgtctcctccccaccgatcgctgttccccacatctggggcgcttttgggttggaaaaccaccccacactgggaatagccaccttgcccttgtagaatccatccgcccatccgtccattcatccatcggtccgtccatccatgtccccagttgaccgcccggcaccactagctggctgggtgcacccaccatcaacctggttgacctgtcatggccgcctgtgccctgcctccacccccatcctacactcccccagggcgtgcggggctgtgcagactggggtgccaggcatctcctccccacccggggtgtccccacatgcagtactgtataccccccatccctccctcggtccactgaacttcagagcagttcccattcctgccccgcccatctttttgtgtctcgctgtgatagatcaataaatattttattttttgtcctgg

SEQ ID NO: 3841 - protein, 677 aa, Homo sapiens
MAGLTAAAPRPGVLLLLLSILHPSRPGGVPGAIPGGVPGGVFYPALGPGGKPLKPVPGGLAGAGLGAGLGAFPAVTFPGALVPGGVADAAAAYKAAKAGAGLGGVPGVGGLGVSAGAVVPQPGAGVKPGKVPGVGLPGVYPGGVLPGARFPGVGVLPGVPTGAGVKPKAPGVGGAFAGIPGVGPFGGPQPGVPLGYPIKAPKLPGGYGLPYTTGKLPYGYGPGGVAGAAGKAGYPTGTGVGPQAAAAAAAKAAAKFGAGAAGVLPGVGGAGVPGVPGAIPGIGGIAGVGTPAAAAAAAAAAKAAKYGAAAGLVPGGPGFGPGVVGVPGAGVPGVGVPGAGIPVVPGAGIPGAAVPGVVSPEAAAKAAAKAAKYGARPGVGVGGIPTYGVGAGGFPGFGVGVGGIPGVAGVPGVGGVPGVGGVPGVGISPEAQAAAAAKAAKYGLVPGVGVAPGVGVAPGVGVAPGVGLAPGVGVAPGVGVAPGVGVAPGIGPGGVAAAAKSAAKVAAKAQLRAAAGLGAGIPGLGVGVGVPGLGVGAGVPGLGVGAGVPGFGAVPGALAAAKAAKYGAAVPGVLGGLGALGGVGIPGGVVGAGPAAAAAAAKAAAKAAQFGLVGAAGLGGLGVGGLGVPGVGGLGGIPPAAAAKAAKYGVAARPGFGLSPIFPGGACLGKACGRKRK

SEQ ID NO: 3842 - DNA, 3130 bp, Homo sapiens
ggcaacaattaggctttggggataaaacgaggtgcggagagcgggctggggcatttctccccgagatggcgggtctgacggcggcggccccgcggcccggagtcctcctgctcctgctgtccatcctccacccctctcggcctggaggggtccctggggccattcctggtggagttcctggaggagtcttttatccagcgctggggcctggaggcaaacctcttaagccagttcccggagggcttgcgggtgctggccttggggcagggctcggcgccttccccgcagttacctttccgggggctctggtgcctggtggagtggctgacgctgctgcagcctataaagctgctaaggctggcgctgggcttggtggtgtcccaggagttggtggcttaggagtgtctgcaggtgcggtggttcctcagcctggagccggagtgaagcctgggaaagtgccgggtgtggggctgccaggtgtatacccaggtggcgtgctcccaggagctcggttccccggtgtgggggtgctccctggagttcccactggagcaggagttaagcccaaggctccaggtgtaggtggagcttttgctggaatcccaggagttggaccctttgggggaccgcaacctggagtcccactggggtatcccatcaaggcccccaagctgcctggtggctatggactgccctacaccacagggaaactgccctatggctatgggcccggaggagtggctggtgcagcgggcaaggctggttacccaacagggacaggggttggcccccaggcagcagcagcagcggcagctaaagcagcagcaaagttcggtgctggagcagccggagtcctccctggtgttggaggggctggtgttcctggcgtgcctggggcaattcctggaattggaggcatcgcaggcgttgggactccagctgcagctgcagctgcagcagcagccgctaaggcagccaagtatggagctgctgcaggcttagtgcctggtgggccaggctttggcccgggagtagttggtgtcccaggagctggcgttccaggtgttggtgtcccaggagctgggattccagttgtcccaggtgctgggatcccaggtgctgcggttccaggggttgtgtcaccagaagcagctgctaaggcagctgcaaaggcagccaaatacggggccaggcccggagtcggagttggaggcattcctacttacggggttggagctgggggctttcccggctttggtgtcggagtcggaggtatccctggagtcgcaggtgtccctggtgtcggaggtgttcccggagtcggaggtgtcccgggagttggcatttcccccgaagctcaggcagcagctgccgccaaggctgccaagtacgggttagttcctggtgtcggcgtggctcctggagttggcgtggctcctggtgtcggtgtggctcctggagttggcttggctcctggagttggcgtggctcctggagttggtgtggctcctggcgttggcgtggctcccggcattggccctggtggagttgcagctgcagcaaaatccgctgccaaggtggctgccaaagcccagctccgagctgcagctgggcttggtgctggcatccctggacttggagttggtgtcggcgtccctggacttggagttggtgctggtgttcctggacttggagttggtgctggtgttcctggcttcggggcagtacctggagccctggctgccgctaaagcagccaaatatggagcagcagtgcctggggtccttggagggctcggggctctcggtggagtaggcatcccaggcggtgtggtgggagccggacccgccgccgccgctgccgcagccaaagctgctgccaaagccgcccagtttggcctagtgggagccgctgggctcggaggactcggagtcggagggcttggagttccaggtgttgggggccttggaggtatacctccagctgcagccgctaaagcagctaaatacggtgctgctggccttggaggtgtcctagggggtgccgggcagttcccacttggaggagtggcagcaagacctggcttcggattgtctcccattttcccaggtggggcctgcctggggaaagcttgtggccggaagagaaaatgagcttcctaggacccctgactcacgacctcatcaacgttggtgctactgcttggtggagaatgtaaaccctttgtaaccccatcccatgcccctccgactccccaccccaggagggaacgggcaggccgggcggccttgcagatccacagggcaaggaaacaagaggggagcggccaagtgccccgaccaggaggccccctacttcagaggcaagggccatgtggtcctggccccccaccccatcccttcccacctaggagctccccctccacacagcctccatctccaggggaacttggtgctacacgctggtgctcttatcttcctggggggagggaggagggaagggtggcccctcggggaaccccctacctggggctcctctaaagatggtgcagacacttcctgggcagtcccagctccccctgcccaccaggacccaccgttggctgccatccagttggtacccaagcacctgaagcctcaaagctggattcgctctagcatccctcctctcctgggtccacttggccgtctcctccccaccgatcgctgttccccacatctggggcgcttttgggttggaaaaccaccccacactgggaatagccaccttgcccttgtagaatccatccgcccatccgtccattcatccatcggtccgtccatccatgtccccagttgaccgcccggcaccactagctggctgggtgcacccaccatcaacctggttgacctgtcatggccgcctgtgccctgcctccacccccatcctacactcccccagggcgtgcggggctgtgcagactggggtgccaggcatctcctccccacccggggtgtccccacatgcagtactgtataccccccatccctccctcggtccactgaacttcagagcagttcccattcctgccccgcccatctttttgtgtctcgctgtgatagatcaataaatattttattttttgtcctgg

SEQ ID NO: 3843 - protein, 695 aa, Homo sapiens
MAGLTAAAPRPGVLLLLLSILHPSRPGGVPGAIPGGVPGGVFYPALGPGGKPLKPVPGGLAGAGLGAGLGAFPAVTFPGALVPGGVADAAAAYKAAKAGAGLGGVPGVGGLGVSAGAVVPQPGAGVKPGKVPGVGLPGVYPGGVLPGARFPGVGVLPGVPTGAGVKPKAPGVGGAFAGIPGVGPFGGPQPGVPLGYPIKAPKLPGGYGLPYTTGKLPYGYGPGGVAGAAGKAGYPTGTGVGPQAAAAAAAKAAAKFGAGAAGVLPGVGGAGVPGVPGAIPGIGGIAGVGTPAAAAAAAAAAKAAKYGAAAGLVPGGPGFGPGVVGVPGAGVPGVGVPGAGIPVVPGAGIPGAAVPGVVSPEAAAKAAAKAAKYGARPGVGVGGIPTYGVGAGGFPGFGVGVGGIPGVAGVPGVGGVPGVGGVPGVGISPEAQAAAAAKAAKYGLVPGVGVAPGVGVAPGVGVAPGVGLAPGVGVAPGVGVAPGVGVAPGIGPGGVAAAAKSAAKVAAKAQLRAAAGLGAGIPGLGVGVGVPGLGVGAGVPGLGVGAGVPGFGAVPGALAAAKAAKYGAAVPGVLGGLGALGGVGIPGGVVGAGPAAAAAAAKAAAKAAQFGLVGAAGLGGLGVGGLGVPGVGGLGGIPPAAAAKAAKYGAAGLGGVLGGAGQFPLGGVAARPGFGLSPIFPGGACLGKACGRKRK

SEQ ID NO: 3844 - DNA, 3187 bp, Homo sapiens
ggcaacaattaggctttggggataaaacgaggtgcggagagcgggctggggcatttctccccgagatggcgggtctgacggcggcggccccgcggcccggagtcctcctgctcctgctgtccatcctccacccctctcggcctggaggggtccctggggccattcctggtggagttcctggaggagtcttttatccagcgctggggcctggaggcaaacctcttaagccagttcccggagggcttgcgggtgctggccttggggcagggctcggcgccttccccgcagttacctttccgggggctctggtgcctggtggagtggctgacgctgctgcagcctataaagctgctaaggctggcgctgggcttggtggtgtcccaggagttggtggcttaggagtgtctgcaggtgcggtggttcctcagcctggagccggagtgaagcctgggaaagtgccgggtgtggggctgccaggtgtatacccaggtggcgtgctcccaggagctcggttccccggtgtgggggtgctccctggagttcccactggagcaggagttaagcccaaggctccaggtgtaggtggagcttttgctggaatcccaggagttggaccctttgggggaccgcaacctggagtcccactggggtatcccatcaaggcccccaagctgcctggtggctatggactgccctacaccacagggaaactgccctatggctatgggcccggaggagtggctggtgcagcgggcaaggctggttacccaacagggacaggggttggcccccaggcagcagcagcagcggcagctaaagcagcagcaaagttcggtgctggagcagccggagtcctccctggtgttggaggggctggtgttcctggcgtgcctggggcaattcctggaattggaggcatcgcaggcgttgggactccagctgcagctgcagctgcagcagcagccgctaaggcagccaagtatggagctgctgcaggcttagtgcctggtgggccaggctttggcccgggagtagttggtgtcccaggagctggcgttccaggtgttggtgtcccaggagctgggattccagttgtcccaggtgctgggatcccaggtgctgcggttccaggggttgtgtcaccagaagcagctgctaaggcagctgcaaaggcagccaaatacggggccaggcccggagtcggagttggaggcattcctacttacggggttggagctgggggctttcccggctttggtgtcggagtcggaggtatccctggagtcgcaggtgtccctggtgtcggaggtgttcccggagtcggaggtgtcccgggagttggcatttcccccgaagctcaggcagcagctgccgccaaggctgccaagtacggagtggggaccccagcagctgcagctgctaaagcagccgccaaagccgcccagtttgggttagttcctggtgtcggcgtggctcctggagttggcgtggctcctggtgtcggtgtggctcctggagttggcttggctcctggagttggcgtggctcctggagttggtgtggctcctggcgttggcgtggctcccggcattggccctggtggagttgcagctgcagcaaaatccgctgccaaggtggctgccaaagcccagctccgagctgcagctgggcttggtgctggcatccctggacttggagttggtgtcggcgtccctggacttggagttggtgctggtgttcctggacttggagttggtgctggtgttcctggcttcggggcagtacctggagccctggctgccgctaaagcagccaaatatggagcagcagtgcctggggtccttggagggctcggggctctcggtggagtaggcatcccaggcggtgtggtgggagccggacccgccgccgccgctgccgcagccaaagctgctgccaaagccgcccagtttggcctagtgggagccgctgggctcggaggactcggagtcggagggcttggagttccaggtgttgggggccttggaggtatacctccagctgcagccgctaaagcagctaaatacggtgctgctggccttggaggtgtcctagggggtgccgggcagttcccacttggaggagtggcagcaagacctggcttcggattgtctcccattttcccaggtggggcctgcctggggaaagcttgtggccggaagagaaaatgagcttcctaggacccctgactcacgacctcatcaacgttggtgctactgcttggtggagaatgtaaaccctttgtaaccccatcccatgcccctccgactccccaccccaggagggaacgggcaggccgggcggccttgcagatccacagggcaaggaaacaagaggggagcggccaagtgccccgaccaggaggccccctacttcagaggcaagggccatgtggtcctggccccccaccccatcccttcccacctaggagctccccctccacacagcctccatctccaggggaacttggtgctacacgctggtgctcttatcttcctggggggagggaggagggaagggtggcccctcggggaaccccctacctggggctcctctaaagatggtgcagacacttcctgggcagtcccagctccccctgcccaccaggacccaccgttggctgccatccagttggtacccaagcacctgaagcctcaaagctggattcgctctagcatccctcctctcctgggtccacttggccgtctcctccccaccgatcgctgttccccacatctggggcgcttttgggttggaaaaccaccccacactgggaatagccaccttgcccttgtagaatccatccgcccatccgtccattcatccatcggtccgtccatccatgtccccagttgaccgcccggcaccactagctggctgggtgcacccaccatcaacctggttgacctgtcatggccgcctgtgccctgcctccacccccatcctacactcccccagggcgtgcggggctgtgcagactggggtgccaggcatctcctccccacccggggtgtccccacatgcagtactgtataccccccatccctccctcggtccactgaacttcagagcagttcccattcctgccccgcccatctttttgtgtctcgctgtgatagatcaataaatattttattttttgtcctgg

SEQ ID NO: 3845 - protein, 714 aa, Homo sapiens
MAGLTAAAPRPGVLLLLLSILHPSRPGGVPGAIPGGVPGGVFYPALGPGGKPLKPVPGGLAGAGLGAGLGAFPAVTFPGALVPGGVADAAAAYKAAKAGAGLGGVPGVGGLGVSAGAVVPQPGAGVKPGKVPGVGLPGVYPGGVLPGARFPGVGVLPGVPTGAGVKPKAPGVGGAFAGIPGVGPFGGPQPGVPLGYPIKAPKLPGGYGLPYTTGKLPYGYGPGGVAGAAGKAGYPTGTGVGPQAAAAAAAKAAAKFGAGAAGVLPGVGGAGVPGVPGAIPGIGGIAGVGTPAAAAAAAAAAKAAKYGAAAGLVPGGPGFGPGVVGVPGAGVPGVGVPGAGIPVVPGAGIPGAAVPGVVSPEAAAKAAAKAAKYGARPGVGVGGIPTYGVGAGGFPGFGVGVGGIPGVAGVPGVGGVPGVGGVPGVGISPEAQAAAAAKAAKYGVGTPAAAAAKAAAKAAQFGLVPGVGVAPGVGVAPGVGVAPGVGLAPGVGVAPGVGVAPGVGVAPGIGPGGVAAAAKSAAKVAAKAQLRAAAGLGAGIPGLGVGVGVPGLGVGAGVPGLGVGAGVPGFGAVPGALAAAKAAKYGAAVPGVLGGLGALGGVGIPGGVVGAGPAAAAAAAKAAAKAAQFGLVGAAGLGGLGVGGLGVPGVGGLGGIPPAAAAKAAKYGAAGLGGVLGGAGQFPLGGVAARPGFGLSPIFPGGACLGKACGRKRK

SEQ ID NO: 3846 - DNA, 3360 bp, Homo sapiens
ggcaacaattaggctttggggataaaacgaggtgcggagagcgggctggggcatttctccccgagatggcgggtctgacggcggcggccccgcggcccggagtcctcctgctcctgctgtccatcctccacccctctcggcctggaggggtccctggggccattcctggtggagttcctggaggagtcttttatccagcgctggggcctggaggcaaacctcttaagccagttcccggagggcttgcgggtgctggccttggggcagggctcggcgccttccccgcagttacctttccgggggctctggtgcctggtggagtggctgacgctgctgcagcctataaagctgctaaggctggcgctgggcttggtggtgtcccaggagttggtggcttaggagtgtctgcaggtgcggtggttcctcagcctggagccggagtgaagcctgggaaagtgccgggtgtggggctgccaggtgtatacccaggtggcgtgctcccaggagctcggttccccggtgtgggggtgctccctggagttcccactggagcaggagttaagcccaaggctccaggtgtaggtggagcttttgctggaatcccaggagttggaccctttgggggaccgcaacctggagtcccactggggtatcccatcaaggcccccaagctgcctggtggctatggactgccctacaccacagggaaactgccctatggctatgggcccggaggagtggctggtgcagcgggcaaggctggttacccaacagggacaggggttggcccccaggcagcagcagcagcggcagctaaagcagcagcaaagttcggtgctggagcagccggagtcctccctggtgttggaggggctggtgttcctggcgtgcctggggcaattcctggaattggaggcatcgcaggcgttgggactccagctgcagctgcagctgcagcagcagccgctaaggcagccaagtatggagctgctgcaggcttagtgcctggtgggccaggctttggcccgggagtagttggtgtcccaggagctggcgttccaggtgttggtgtcccaggagctgggattccagttgtcccaggtgctgggatcccaggtgctgcggttccaggggttgtgtcaccagaagcagctgctaaggcagctgcaaaggcagccaaatacggggccaggcccggagtcggagttggaggcattcctacttacggggttggagctgggggctttcccggctttggtgtcggagtcggaggtatccctggagtcgcaggtgtccctggtgtcggaggtgttcccggagtcggaggtgtcccgggagttggcatttcccccgaagctcaggcagcagctgccgccaaggctgccaagtacgggttagttcctggtgtcggcgtggctcctggagttggcgtggctcctggtgtcggtgtggctcctggagttggcttggctcctggagttggcgtggctcctggagttggtgtggctcctggcgttggcgtggctcccggcattggccctggtggagttgcagctgcagcaaaatccgctgccaaggtggctgccaaagcccagctccgagctgcagctgggcttggtgctggcatccctggacttggagttggtgtcggcgtccctggacttggagttggtgctggtgttcctggacttggagttggtgctggtgttcctggcttcggggcagtacctggagccctggctgccgctaaagcagccaaatatggagcagcagtgcctggggtccttggagggctcggggctctcggtggagtaggcatcccaggcggtgtggtgggagccggacccgccgccgccgctgccgcagccaaagctgctgccaaagccgcccagtttggcctagtgggagccgctgggctcggaggactcggagtcggagggcttggagttccaggtgttgggggccttggaggtatacctccagctgcagccgctaaagcagctaaatacggtgctgctggccttggaggtgtcctagggggtgccgggcagttcccacttggaggagtggcagcaagacctggcttcggattgtctcccattttcccaggtggggcctgcctggggaaagcttgtggccggaagagaaaatgagcttcctaggacccctgactcacgacctcatcaacgttggtgctactgcttggtggagaatgtaaaccctttgtaaccccatcccatgcccctccgactccccaccccaggagggaacgggcaggccgggcggccttgcagatccacagggcaaggaaacaagaggggagcggccaagtgccccgaccaggaggccccctacttcagaggcaagggccatgtggtcctggccccccaccccatcccttcccacctaggagctccccctccacacagcctccatctccaggggaacttggtgctacacgctggtgctcttatcttcctggggggagggaggagggaagggtggcccctcggggaaccccctacctggggctcctctaaagatggtgcagacacttcctgggcagtcccagctccccctgcccaccaggacccaccgttggctgccatccagttggtacccaagcacctgaagcctcaaagctggattcgctctagcatccctcctctcctgggtccacttggccgtctcctccccaccgatcgctgttccccacatctggggcgcttttgggttggaaaaccaccccacactgggaatagccaccttgcccttgtagaatccatccgcccatccgtccattcatccatcggtccgtccatccatgtccccagttgaccgcccggcaccactagctggctgggtgcacccaccatcaacctggttgacctgtcatggccgcctgtgccctgcctccacccccatcctacactcccccagggcgtgcggggctgtgcagactggggtgccaggcatctcctccccacccggggtgtccccacatgcagtactgtataccccccatccctccctcggtccactgaacttcagagcagttcccattcctgccccgcccatctttttgtgtctcgctgtgatagatcaataaatattttattttttgtcctggatatttggggattatttttgattgttgatattctcttttggttttattgttgtggttcattgaaaaaaaaagataatttttttttctgatccggggagctgtatccccagtagaaaaaacattttaatcactctaatataactctggatgaaacacacctttttttttaataagaaaagagaattaactgcttcagaaatgactaataaatgaaaaacctttaaaggaaa

SEQ ID NO: 3847 - protein, 695 aa, Homo sapiens; identical to SEQ ID NO: 3843

SEQ ID NO: 3848 - DNA, 3417 bp, Homo sapiens
ggcaacaattaggctttggggataaaacgaggtgcggagagcgggctggggcatttctccccgagatggcgggtctgacggcggcggccccgcggcccggagtcctcctgctcctgctgtccatcctccacccctctcggcctggaggggtccctggggccattcctggtggagttcctggaggagtcttttatccagcgctggggcctggaggcaaacctcttaagccagttcccggagggcttgcgggtgctggccttggggcagggctcggcgccttccccgcagttacctttccgggggctctggtgcctggtggagtggctgacgctgctgcagcctataaagctgctaaggctggcgctgggcttggtggtgtcccaggagttggtggcttaggagtgtctgcaggtgcggtggttcctcagcctggagccggagtgaagcctgggaaagtgccgggtgtggggctgccaggtgtatacccaggtggcgtgctcccaggagctcggttccccggtgtgggggtgctccctggagttcccactggagcaggagttaagcccaaggctccaggtgtaggtggagcttttgctggaatcccaggagttggaccctttgggggaccgcaacctggagtcccactggggtatcccatcaaggcccccaagctgcctggtggctatggactgccctacaccacagggaaactgccctatggctatgggcccggaggagtggctggtgcagcgggcaaggctggttacccaacagggacaggggttggcccccaggcagcagcagcagcggcagctaaagcagcagcaaagttcggtgctggagcagccggagtcctccctggtgttggaggggctggtgttcctggcgtgcctggggcaattcctggaattggaggcatcgcaggcgttgggactccagctgcagctgcagctgcagcagcagccgctaaggcagccaagtatggagctgctgcaggcttagtgcctggtgggccaggctttggcccgggagtagttggtgtcccaggagctggcgttccaggtgttggtgtcccaggagctgggattccagttgtcccaggtgctgggatcccaggtgctgcggttccaggggttgtgtcaccagaagcagctgctaaggcagctgcaaaggcagccaaatacggggccaggcccggagtcggagttggaggcattcctacttacggggttggagctgggggctttcccggctttggtgtcggagtcggaggtatccctggagtcgcaggtgtccctggtgtcggaggtgttcccggagtcggaggtgtcccgggagttggcatttcccccgaagctcaggcagcagctgccgccaaggctgccaagtacggagtggggaccccagcagctgcagctgctaaagcagccgccaaagccgcccagtttgggttagttcctggtgtcggcgtggctcctggagttggcgtggctcctggtgtcggtgtggctcctggagttggcttggctcctggagttggcgtggctcctggagttggtgtggctcctggcgttggcgtggctcccggcattggccctggtggagttgcagctgcagcaaaatccgctgccaaggtggctgccaaagcccagctccgagctgcagctgggcttggtgctggcatccctggacttggagttggtgtcggcgtccctggacttggagttggtgctggtgttcctggacttggagttggtgctggtgttcctggcttcggggcagtacctggagccctggctgccgctaaagcagccaaatatggagcagcagtgcctggggtccttggagggctcggggctctcggtggagtaggcatcccaggcggtgtggtgggagccggacccgccgccgccgctgccgcagccaaagctgctgccaaagccgcccagtttggcctagtgggagccgctgggctcggaggactcggagtcggagggcttggagttccaggtgttgggggccttggaggtatacctccagctgcagccgctaaagcagctaaatacggtgctgctggccttggaggtgtcctagggggtgccgggcagttcccacttggaggagtggcagcaagacctggcttcggattgtctcccattttcccaggtggggcctgcctggggaaagcttgtggccggaagagaaaatgagcttcctaggacccctgactcacgacctcatcaacgttggtgctactgcttggtggagaatgtaaaccctttgtaaccccatcccatgcccctccgactccccaccccaggagggaacgggcaggccgggcggccttgcagatccacagggcaaggaaacaagaggggagcggccaagtgccccgaccaggaggccccctacttcagaggcaagggccatgtggtcctggccccccaccccatcccttcccacctaggagctccccctccacacagcctccatctccaggggaacttggtgctacacgctggtgctcttatcttcctggggggagggaggagggaagggtggcccctcggggaaccccctacctggggctcctctaaagatggtgcagacacttcctgggcagtcccagctccccctgcccaccaggacccaccgttggctgccatccagttggtacccaagcacctgaagcctcaaagctggattcgctctagcatccctcctctcctgggtccacttggccgtctcctccccaccgatcgctgttccccacatctggggcgcttttgggttggaaaaccaccccacactgggaatagccaccttgcccttgtagaatccatccgcccatccgtccattcatccatcggtccgtccatccatgtccccagttgaccgcccggcaccactagctggctgggtgcacccaccatcaacctggttgacctgtcatggccgcctgtgccctgcctccacccccatcctacactcccccagggcgtgcggggctgtgcagactggggtgccaggcatctcctccccacccggggtgtccccacatgcagtactgtataccccccatccctccctcggtccactgaacttcagagcagttcccattcctgccccgcccatctttttgtgtctcgctgtgatagatcaataaatattttattttttgtcctggatatttggggattatttttgattgttgatattctcttttggttttattgttgtggttcattgaaaaaaaaagataatttttttttctgatccggggagctgtatccccagtagaaaaaacattttaatcactctaatataactctggatgaaacacacctttttttttaataagaaaagagaattaactgcttcagaaatgactaataaatgaaaaacctttaaaggaaa

SEQ ID NO: 3849 - protein, 714 aa, Homo sapiens; identical to SEQ ID NO: 3845

SEQ ID NO: 3850 - DNA, 524 bp, Homo sapiens
gcaacaattaggctttggggataaaacgaggtgcggagagcgggctggggcatttctccccgagatggcgggtctgacggcggcggccccgcggcccggagtcctcctgctcctgctgtccatcctccacccctctcggcctggaggggtccctggggccattcctggtggagttcctggaggagtcttttatccaggggctggtctcggagcccttggaggaggagcgctggggcctggaggcaaacctcttaagccagttcccggagggcttgcgggtgctggccttggggcagggctcggcgccttccccgcagttacctttccgggggctctggtgcctggtggagtggctgacgctgctgcagcctataaagctgctaaggctggtgagtggtgctctttgggacatgccacaagccctctggcttccgtggggccctccgctttgcaaagaaccttccctcaactcaggcttgggagccgggtgggtgggattgtcagttgcaatctactggggctca

SEQ ID NO: 3851 - protein, 152 aa, Homo sapiens
MAGLTAAAPRPGVLLLLLSILHPSRPGGVPGAIPGGVPGGVFYPGAGLGALGGGALGPGGKPLKPVPGGLAGAGLGAGLGAFPAVTFPGALVPGGVADAAAAYKAAKAGEWCSLGHATSPLASVGPSALQRTFPQLRLGSRVGGIVSCNLLG

SEQ ID NO: 3852 - DNA, 1956 bp, Homo sapiens
aggctttggggataaaacgaggtgcggagagcgggctggggcatttctccccgagatggcgggtctgacggcggcggccccgcggcccggagtcctcctgctcctgctgtccatcctccacccctctcggcctggaggggtccctggggccattcctggtggagttcctggaggagtcttttatccaggggctggtctcggagcccttggaggaggagcgctggggcctggaggcaaacctcttaagccagttcccggagggcttgcgggtgctggccttggggcagggctcggcgccttccccgcagttacctttccgggggctctggtgcctggtggagggtgctggagcagccggagtcctccctggtgttggaggggctggtgttcctggcgtgcctggggcaattcctggaattggaggcatcgcaggcgttgggactccagctgcagctgcagctgcagcagcagccgctaaggcagccaagtatggagctgctgcaggcttagtgcctggtgggccaggctttggcccgggagtagttggtgtcccaggagctggcgttccaggtgttggtgtcccaggagctgggattccagttgtcccaggtgctgggatcccaggtgctgcggttccaggggttgtgtcaccagaagcagctgctaaggcagctgcaaaggcagccaaatacggggccaggcccggagtcggagttggaggcattcctacttacggggctctcggtggagtaggcatcccaggcggtgtggtgggggcctagtgggagccgctgggctcggaggactcggagtcggagggcttggagttccaggtgttgggggccttggaggtatacctccagctgcagccgctaaagcagctaaatacggagtggcagcaagacctggcttcggattgtctcccattttcccaggtggggcctgcctggggaaagcttgtggccggaagagaaaatgagcttcctaggacccctgactcacgacctcatcaacgttggtgctactgcttggtggagaatgtaaaccctttgtaaccccatcccatgcccctccgactccccaccccaggagggaacgggcaggccgggcggccttgcagatccacagggcaaggaaacaagaggggagcggccaagtgccccgaccaggaggccccctacttcagaggcaagggccatgtggtcctggccccccaccccatcccttcccacctaggagctccccctccacacagcctccatctccaggggaacttggtgctacacgctggtgctcttatcttcctggggggagggaggagggaagggtggcccctcggggaaccccctacctggggctcctctaaagatggtgcagacacttcctgggcagtcccagctccccctgcccaccaggacccaccgttggctgccatccagttggtacccaagcacctgaagcctcaaagctggattcgctctagcatccctcctctcctgggtccacttggccgtctcctccccaccgatcgctgttccccacatctggggcgcttttgggttggaaaaccaccccacactgggaatagccaccttgcccttgtagaatccatccgcccatccgtccattcatccatcggtccgtccatccatgtccccagttgaccgcccggcaccactagctggctgggtgcacccaccatcaacctggttgacctgtcatggccgcctgtgccctgcctccacccccatcctacactcccccagggcgtgcggggctgtgcagactggggtgccaggcatctcctccccacccggggtgtccccacatgcagtactgtataccccccatccctccctcggtccactgaacttcagagcagttcccattcctgccccgcccatctttttgtgtctcgctgtgatagatcaataaatattttattttttgtcctgg

SEQ ID NO: 3853 - protein, 140 aa, Homo sapiens
MAGLTAAAPRPGVLLLLLSILHPSRPGGVPGAIPGGVPGGVFYPGAGLGALGGGALGPGGKPLKPVPGGLAGAGLGAGLGAFPAVTFPGALVPGGGCWSSRSPPWCWRGWCSWRAWGNSWNWRHRRRWDSSCSCSCSSSR

SEQ ID NO: 3854 - DNA, 2186 bp, Homo sapiens
aggctttggggataaaacgaggtgcggagagcgggctggggcatttctccccgagatggcgggtctgacggcggcggccccgcggcccggagtcctcctgctcctgctgtccatcctccacccctctcggcctggaggggtccctggggccattcctggtggagttcctggaggagtcttttatccaggggctggtctcggagcccttggaggaggagcgctggggcctggaggcaaacctcttaagccagttcccggagggcttgcgggtgctggccttggggcagggctcggcgccttccccgcagttacctttccgggggctctggtgcctggtggagggtgctggagcagccggagtcctccctggtgttggaggggctggtgttcctggcgtgcctggggcaattcctggaattggaggcatcgcaggcgttgggactccagctgcagctgcagctgcagcagcagccgctaaggcagccaagtatggagctgctgcaggcttagtgcctggtgggccaggctttggcccgggagtagttggtgtcccaggagctggcgttccaggtgttggtgtcccaggagctgggattccagttgtcccaggtgctgggatcccaggtgctgcggttccaggggttgtgtcaccagaagcagctgctaaggcagctgcaaaggcagccaaatacggggccaggcccggagtcggagttggaggcattcctacttacggggctctcggtggagtaggcatcccaggcggtgtggtgggggcctagtgggagccgctgggctcggaggactcggagtcggagggcttggagttccaggtgttgggggccttggaggtatacctccagctgcagccgctaaagcagctaaatacggagtggcagcaagacctggcttcggattgtctcccattttcccaggtggggcctgcctggggaaagcttgtggccggaagagaaaatgagcttcctaggacccctgactcacgacctcatcaacgttggtgctactgcttggtggagaatgtaaaccctttgtaaccccatcccatgcccctccgactccccaccccaggagggaacgggcaggccgggcggccttgcagatccacagggcaaggaaacaagaggggagcggccaagtgccccgaccaggaggccccctacttcagaggcaagggccatgtggtcctggccccccaccccatcccttcccacctaggagctccccctccacacagcctccatctccaggggaacttggtgctacacgctggtgctcttatcttcctggggggagggaggagggaagggtggcccctcggggaaccccctacctggggctcctctaaagatggtgcagacacttcctgggcagtcccagctccccctgcccaccaggacccaccgttggctgccatccagttggtacccaagcacctgaagcctcaaagctggattcgctctagcatccctcctctcctgggtccacttggccgtctcctccccaccgatcgctgttccccacatctggggcgcttttgggttggaaaaccaccccacactgggaatagccaccttgcccttgtagaatccatccgcccatccgtccattcatccatcggtccgtccatccatgtccccagttgaccgcccggcaccactagctggctgggtgcacccaccatcaacctggttgacctgtcatggccgcctgtgccctgcctccacccccatcctacactcccccagggcgtgcggggctgtgcagactggggtgccaggcatctcctccccacccggggtgtccccacatgcagtactgtataccccccatccctccctcggtccactgaacttcagagcagttcccattcctgccccgcccatctttttgtgtctcgctgtgatagatcaataaatattttattttttgtcctggatatttggggattatttttgattgttgatattctcttttggttttattgttgtggttcattgaaaaaaaaagataatttttttttctgatccggggagctgtatccccagtagaaaaaacattttaatcactctaatataactctggatgaaacacacctttttttttaataagaaaagagaattaactgcttcagaaatgactaataaatgaaaaacctttaaaggaaa

SEQ ID NO: 3855 - protein, 140 aa, Homo sapiens; identical to SEQ ID NO: 3853

SEQ ID NO: 3856 - DNA, 545 bp, Homo sapiens
ataaaacgaggtgcggagagcgggctggggcatttctccccgagatggcgggtctgacggcggcggccccgcggcccggagtcctcctgctcctgctgtccatcctccacccctctcggcctggaggggtccctggggccattcctggtggagttcctggaggagtcttttatccagcgctggggcctggaggcaaacctcttaagccagttcccggagggcttgcgggtgctggccttggggcagggctcggcgccttccccgcagttacctttccgggggctctggtgcctggtggagtggctgacgctgctgcagcctataaagctgctaaggctggcgctgggcttggtggtgtcccaggagttggtggcttaggagtgtctgcaggtacgatggctatccccgaactccctgggtcaaagttgcaggcctgggtggagccaactctgatgcagccccttctgtgccaggtgcggtggttcctcagcctggagccggagtgaagcctgggaaagtgccgggtcagtgcggaatccctgggg

SEQ ID NO: 3857 - protein, 153 aa, Homo sapiens
MAGLTAAAPRPGVLLLLLSILHPSRPGGVPGAIPGGVPGGVFYPALGPGGKPLKPVPGGLAGAGLGAGLGAFPAVTFPGALVPGGVADAAAAYKAAKAGAGLGGVPGVGGLGVSAGTMAIPELPGSKLQAWVEPTLMQPLLCQVRWFLSLEPE

SEQ ID NO: 3858 - DNA, 2864 bp, Homo sapiens
tgcggagagcgggctggggcatttctccccgagatggcgggtctgacggcggcggccccgcggcccggagtcctcctgctcctgctgtccatcctccacccctctcggcctggaggggtccctggggccattcctggtggagttcctggaggagtcttttatccagcgctggggcctggaggcaaacctcttaagccagttcccggagggcttgcgggtgctggccttggggcagggctcggcgccttccccgcagttacctttccgggggctctggtgcctggtggagtggctgacgctgctgcagcctataaagctgctaaggctggcgctgggcttggtggtgtcccaggagttggtggcttaggagtgtctgcaggtgcggtggttcctcagcctggagccggagtgaagcctgggaaagtgccgggtgtggggctgccaggtgtatacccaggtggcgtgctcccaggagttggaccctttgggggaccgcaacctggagtcccactggggtatcccatcaaggcccccaagctgcctggtggctatggactgccctacaccacagggaaactgccctatggctatgggcccggaggagtggctggtgcagcgggcaaggctggttacccaacagggacaggggttggcccccaggcagcagcagcagcggcagctaaagcagcagcaaagttcggtgctggagcagccggagtcctccctggtgttggaggggctggtgttcctggcgtgcctggggcaattcctggaattggaggcatcgcaggcgttgggactccagctgcagctgcagctgcagcagcagccgctaaggcagccaagtatggagctgctgcaggcttagtgcctggtgggccaggctttggcccgggagtagttggtgtcccaggagctggcgttccaggtgttggtgtcccaggagctgggattccagttgtcccaggtgctgggatcccaggtgctgcggttccaggggttgtgtcaccagaagcagctgctaaggcagctgcaaaggcagccaaatacggggccaggcccggagtcggagttggaggcattcctacttacggggttggagctgggggctttcccggctttggtgtcggagtcggagccgaagctcaggcagcagctgccgccaaggctgccaagtacgggttagttcctggtgtcggcgtggctcctggagttggcgtggctcctggtgtcggtgtggctcctggagttggcttggctcctggagttggcgtggctcctggagttggtgtggctcctggcgttggcgtggctcccggcattggccctggtggagttgcagctgcagcaaaatccgctgccaaggtggctgccaaagcccagctccgagctgcagctgggcttggtgctggcatccctggacttggagttggtgtcggcgtccctggacttggagttggtgctggtgttcctggacttggagttggtgctggtgttcctggcttcggggcagtacctggagccctggctgccgctaaagcagccaaatatggagcagcagtgcctggggtccttggagggctcggggctctcggtggagtaggcatcccaggcggtgtggtgggagccggacccgccgccgccgctgccgcagccaaagctgctgccaaagccgcccagtttggcctagtgggagccgctgggctcggaggactcggagtcggagggcttggagttccaggtgttgggggccttggaggtatacctccagctgcagccgctaaagcagctaaatacggagtggcagcaagacctggcttcggattgtctcccattttcccaggtggggcctgcctggggaaagcttgtggccggaagagaaaatgagcttcctaggacccctgactcacgacctcatcaacgttggtgctactgcttggtggagaatgtaaaccctttgtaaccccatcccatgcccctccgactccccaccccaggagggaacgggcaggccgggcggccttgcagatccacagggcaaggaaacaagaggggagcggccaagtgccccgaccaggaggccccctacttcagaggcaagggccatgtggtcctggccccccaccccatcccttcccacctaggagctccccctccacacagcctccatctccaggggaacttggtgctacacgctggtgctcttatcttcctggggggagggaggagggaagggtggcccctcggggaaccccctacctggggctcctctaaagatggtgcagacacttcctgggcagtcccagctccccctgcccaccaggacccaccgttggctgccatccagttggtacccaagcacctgaagcctcaaagctggattcgctctagcatccctcctctcctgggtccacttggccgtctcctccccaccgatcgctgttccccacatctggggcgcttttgggttggaaaaccaccccacactgggaatagccaccttgcccttgtagaatccatccgcccatccgtccattcatccatcggtccgtccatccatgtccccagttgaccgcccggcaccactagctggctgggtgcacccaccatcaacctggttgacctgtcatggccgcctgtgccctgcctccacccccatcctacactcccccagggcgtgcggggctgtgcagactggggtgccaggcatctcctccccacccggggtgtccccacatgcagtactgtataccccccatccctccctcggtccactgaacttcagagcagttcccattcctgccccgcccatctttttgtgtctcgctgtgatagatcaataaatattttattttttgtcctgg

SEQ ID NO: 3859 - protein, 617 aa, Homo sapiens
MAGLTAAAPRPGVLLLLLSILHPSRPGGVPGAIPGGVPGGVFYPALGPGGKPLKPVPGGLAGAGLGAGLGAFPAVTFPGALVPGGVADAAAAYKAAKAGAGLGGVPGVGGLGVSAGAVVPQPGAGVKPGKVPGVGLPGVYPGGVLPGVGPFGGPQPGVPLGYPIKAPKLPGGYGLPYTTGKLPYGYGPGGVAGAAGKAGYPTGTGVGPQAAAAAAAKAAAKFGAGAAGVLPGVGGAGVPGVPGAIPGIGGIAGVGTPAAAAAAAAAAKAAKYGAAAGLVPGGPGFGPGVVGVPGAGVPGVGVPGAGIPVVPGAGIPGAAVPGVVSPEAAAKAAAKAAKYGARPGVGVGGIPTYGVGAGGFPGFGVGVGAEAQAAAAAKAAKYGLVPGVGVAPGVGVAPGVGVAPGVGLAPGVGVAPGVGVAPGVGVAPGIGPGGVAAAAKSAAKVAAKAQLRAAAGLGAGIPGLGVGVGVPGLGVGAGVPGLGVGAGVPGFGAVPGALAAAKAAKYGAAVPGVLGGLGALGGVGIPGGVVGAGPAAAAAAAKAAAKAAQFGLVGAAGLGGLGVGGLGVPGVGGLGGIPPAAAAKAAKYGVAARPGFGLSPIFPGGACLGKACGRKRK

SEQ ID NO: 3860 - DNA, 3094 bp, Homo sapiens
tgcggagagcgggctggggcatttctccccgagatggcgggtctgacggcggcggccccgcggcccggagtcctcctgctcctgctgtccatcctccacccctctcggcctggaggggtccctggggccattcctggtggagttcctggaggagtcttttatccagcgctggggcctggaggcaaacctcttaagccagttcccggagggcttgcgggtgctggccttggggcagggctcggcgccttccccgcagttacctttccgggggctctggtgcctggtggagtggctgacgctgctgcagcctataaagctgctaaggctggcgctgggcttggtggtgtcccaggagttggtggcttaggagtgtctgcaggtgcggtggttcctcagcctggagccggagtgaagcctgggaaagtgccgggtgtggggctgccaggtgtatacccaggtggcgtgctcccaggagttggaccctttgggggaccgcaacctggagtcccactggggtatcccatcaaggcccccaagctgcctggtggctatggactgccctacaccacagggaaactgccctatggctatgggcccggaggagtggctggtgcagcgggcaaggctggttacccaacagggacaggggttggcccccaggcagcagcagcagcggcagctaaagcagcagcaaagttcggtgctggagcagccggagtcctccctggtgttggaggggctggtgttcctggcgtgcctggggcaattcctggaattggaggcatcgcaggcgttgggactccagctgcagctgcagctgcagcagcagccgctaaggcagccaagtatggagctgctgcaggcttagtgcctggtgggccaggctttggcccgggagtagttggtgtcccaggagctggcgttccaggtgttggtgtcccaggagctgggattccagttgtcccaggtgctgggatcccaggtgctgcggttccaggggttgtgtcaccagaagcagctgctaaggcagctgcaaaggcagccaaatacggggccaggcccggagtcggagttggaggcattcctacttacggggttggagctgggggctttcccggctttggtgtcggagtcggagccgaagctcaggcagcagctgccgccaaggctgccaagtacgggttagttcctggtgtcggcgtggctcctggagttggcgtggctcctggtgtcggtgtggctcctggagttggcttggctcctggagttggcgtggctcctggagttggtgtggctcctggcgttggcgtggctcccggcattggccctggtggagttgcagctgcagcaaaatccgctgccaaggtggctgccaaagcccagctccgagctgcagctgggcttggtgctggcatccctggacttggagttggtgtcggcgtccctggacttggagttggtgctggtgttcctggacttggagttggtgctggtgttcctggcttcggggcagtacctggagccctggctgccgctaaagcagccaaatatggagcagcagtgcctggggtccttggagggctcggggctctcggtggagtaggcatcccaggcggtgtggtgggagccggacccgccgccgccgctgccgcagccaaagctgctgccaaagccgcccagtttggcctagtgggagccgctgggctcggaggactcggagtcggagggcttggagttccaggtgttgggggccttggaggtatacctccagctgcagccgctaaagcagctaaatacggagtggcagcaagacctggcttcggattgtctcccattttcccaggtggggcctgcctggggaaagcttgtggccggaagagaaaatgagcttcctaggacccctgactcacgacctcatcaacgttggtgctactgcttggtggagaatgtaaaccctttgtaaccccatcccatgcccctccgactccccaccccaggagggaacgggcaggccgggcggccttgcagatccacagggcaaggaaacaagaggggagcggccaagtgccccgaccaggaggccccctacttcagaggcaagggccatgtggtcctggccccccaccccatcccttcccacctaggagctccccctccacacagcctccatctccaggggaacttggtgctacacgctggtgctcttatcttcctggggggagggaggagggaagggtggcccctcggggaaccccctacctggggctcctctaaagatggtgcagacacttcctgggcagtcccagctccccctgcccaccaggacccaccgttggctgccatccagttggtacccaagcacctgaagcctcaaagctggattcgctctagcatccctcctctcctgggtccacttggccgtctcctccccaccgatcgctgttccccacatctggggcgcttttgggttggaaaaccaccccacactgggaatagccaccttgcccttgtagaatccatccgcccatccgtccattcatccatcggtccgtccatccatgtccccagttgaccgcccggcaccactagctggctgggtgcacccaccatcaacctggttgacctgtcatggccgcctgtgccctgcctccacccccatcctacactcccccagggcgtgcggggctgtgcagactggggtgccaggcatctcctccccacccggggtgtccccacatgcagtactgtataccccccatccctccctcggtccactgaacttcagagcagttcccattcctgccccgcccatctttttgtgtctcgctgtgatagatcaataaatattttattttttgtcctggatatttggggattatttttgattgttgatattctcttttggttttattgttgtggttcattgaaaaaaaaagataatttttttttctgatccggggagctgtatccccagtagaaaaaacattttaatcactctaatataactctggatgaaacacacctttttttttaataagaaaagagaattaactgcttcagaaatgactaataaatgaaaaacctttaaaggaaa

SEQ ID NO: 3861 - protein, 617 aa, Homo sapiens; identical to SEQ ID NO: 3859

SEQ ID NO: 3862 - DNA, 2886 bp, Homo sapiens
gcatttctccccgagatggcgggtctgacggcggcggccccgcggcccggagtcctcctgctcctgctgtccatcctccacccctctcggcctggaggggtccctggggccattcctggtggagttcctggaggagtcttttatccaggggctggtctcggagcccttggaggaggagcgctggggcctggaggcaaacctcttaagccagttcccggagggcttgcgggtgctggccttggggcaggcgctgggcttggtggtgtcccaggagttggtggcttaggagtgtctgcaggtgcggtggttcctcagcctggagccggagtgaagcctgggaaagtgccgggtgtggggctgccaggtgtatacccaggtggcgtgctcccaggagctcggttccccggtgtgggggtgctccctggagttcccactggagcaggagttaagcccaaggctccaggtgtaggtggagcttttgctggaatcccaggagttggaccctttgggggaccgcaacctggagtcccactggggtatcccatcaaggcccccaagctgcctggtggctatggactgccctacaccacagggaaactgccctatggctatgggcccggaggagtggctggtgcagcgggcaaggctggttacccaacagggacaggggttggcccccagggtgctggagcagccggagtcctccctggtgttggaggggctggtgttcctggcgtgcctggggcaattcctggaattggaggcatcgcaggcgttgggactccagctgcagctgcagctgcagcagcagccgctaaggcagccaagtatggagctgctgcaggcttagtgcctggtgggccaggctttggcccgggagtagttggtgtcccaggagctggcgttccaggtgttggtgtcccaggagctgggattccagttgtcccaggtgctgggatcccaggtgctgcggttccaggggttgtgtcaccagaagcagctgctaaggcagctgcaaaggcagccaaatacggggccaggcccggagtcggagttggaggcattcctacttacggggttggagctgggggctttcccggctttggtgtcggagtcggaggtatccctggagtcgcaggtgtccctggtgtcggaggtgttcccggagtcggaggtgtcccgggagttggcatttcccccgaagctcaggcagcagctgccgccaaggctgccaagtacggagtggggaccccagcagctgcagctgctaaagcagccgccaaagccgcccagtttggtaagctcctggagttggtgtggctcctggcgttggcgtggctcccggcattggccctggtggagttgcagctgcagcaaaatccgctgccaaggtggctgccaaagcccagctccgagctgcagctgggcttggtgctggcatccctggacttggagttggtgtcggcgtccctggacttggagttggtgctggtgttcctggacttggagttggtgctggtgttcctggcttcggggcagtacctggagccctggctgccgctaaagcagccaaatatggagcagcagtgcctggggtccttggagggctcggggctctcggtggagtaggcatcccaggcggtgtggtgggggcctagtgggagccgctgggctcggaggactcggagtcggagggcttggagttccaggtgttgggggccttggaggtatacctccagctgcagccgctaaagcagctaaatacggtgctgctggccttggaggtgtcctagggggtgccgggcagttcccacttggaggagtggcagcaagacctggcttcggattgtctcccattttcccaggtggggcctgcctggggaaagcttgtggccggaagagaaaatgagcttcctaggacccctgactcacgacctcatcaacgttggtgctactgcttggtggagaatgtaaaccctttgtaaccccatcccatgcccctccgactccccaccccaggagggaacgggcaggccgggcggccttgcagatccacagggcaaggaaacaagaggggagcggccaagtgccccgaccaggaggccccctacttcagaggcaagggccatgtggtcctggccccccaccccatcccttcccacctaggagctccccctccacacagcctccatctccaggggaacttggtgctacacgctggtgctcttatcttcctggggggagggaggagggaagggtggcccctcggggaaccccctacctggggctcctctaaagatggtgcagacacttcctgggcagtcccagctccccctgcccaccaggacccaccgttggctgccatccagttggtacccaagcacctgaagcctcaaagctggattcgctctagcatccctcctctcctgggtccacttggccgtctcctccccaccgatcgctgttccccacatctggggcgcttttgggttggaaaaccaccccacactgggaatagccaccttgcccttgtagaatccatccgcccatccgtccattcatccatcggtccgtccatccatgtccccagttgaccgcccggcaccactagctggctgggtgcacccaccatcaacctggttgacctgtcatggccgcctgtgccctgcctccacccccatcctacactcccccagggcgtgcggggctgtgcagactggggtgccaggcatctcctccccacccggggtgtccccacatgcagtactgtataccccccatccctccctcggtccactgaacttcagagcagttcccattcctgccccgcccatctttttgtgtctcgctgtgatagatcaataaatattttattttttgtcctgg

SEQ ID NO: 3863 - protein, 537 aa, Homo sapiens
MAGLTAAAPRPGVLLLLLSILHPSRPGGVPGAIPGGVPGGVFYPGAGLGALGGGALGPGGKPLKPVPGGLAGAGLGAGAGLGGVPGVGGLGVSAGAVVPQPGAGVKPGKVPGVGLPGVYPGGVLPGARFPGVGVLPGVPTGAGVKPKAPGVGGAFAGIPGVGPFGGPQPGVPLGYPIKAPKLPGGYGLPYTTGKLPYGYGPGGVAGAAGKAGYPTGTGVGPQGAGAAGVLPGVGGAGVPGVPGAIPGIGGIAGVGTPAAAAAAAAAAKAAKYGAAAGLVPGGPGFGPGVVGVPGAGVPGVGVPGAGIPVVPGAGIPGAAVPGVVSPEAAAKAAAKAAKYGARPGVGVGGIPTYGVGAGGFPGFGVGVGGIPGVAGVPGVGGVPGVGGVPGVGISPEAQAAAAAKAAKYGVGTPAAAAAKAAAKAAQFGKLLELVWLLALAWLPALALVELQLQQNPLPRWLPKPSSELQLGLVLASLDLELVSASLDLELVLVFLDLELVLVFLASGQYLEPWLPLKQPNMEQQCLGSLEGSGLSVE

SEQ ID NO: 3864 - DNA, 3116 bp, Homo sapiens
gcatttctccccgagatggcgggtctgacggcggcggccccgcggcccggagtcctcctgctcctgctgtccatcctccacccctctcggcctggaggggtccctggggccattcctggtggagttcctggaggagtcttttatccaggggctggtctcggagcccttggaggaggagcgctggggcctggaggcaaacctcttaagccagttcccggagggcttgcgggtgctggccttggggcaggcgctgggcttggtggtgtcccaggagttggtggcttaggagtgtctgcaggtgcggtggttcctcagcctggagccggagtgaagcctgggaaagtgccgggtgtggggctgccaggtgtatacccaggtggcgtgctcccaggagctcggttccccggtgtgggggtgctccctggagttcccactggagcaggagttaagcccaaggctccaggtgtaggtggagcttttgctggaatcccaggagttggaccctttgggggaccgcaacctggagtcccactggggtatcccatcaaggcccccaagctgcctggtggctatggactgccctacaccacagggaaactgccctatggctatgggcccggaggagtggctggtgcagcgggcaaggctggttacccaacagggacaggggttggcccccagggtgctggagcagccggagtcctccctggtgttggaggggctggtgttcctggcgtgcctggggcaattcctggaattggaggcatcgcaggcgttgggactccagctgcagctgcagctgcagcagcagccgctaaggcagccaagtatggagctgctgcaggcttagtgcctggtgggccaggctttggcccgggagtagttggtgtcccaggagctggcgttccaggtgttggtgtcccaggagctgggattccagttgtcccaggtgctgggatcccaggtgctgcggttccaggggttgtgtcaccagaagcagctgctaaggcagctgcaaaggcagccaaatacggggccaggcccggagtcggagttggaggcattcctacttacggggttggagctgggggctttcccggctttggtgtcggagtcggaggtatccctggagtcgcaggtgtccctggtgtcggaggtgttcccggagtcggaggtgtcccgggagttggcatttcccccgaagctcaggcagcagctgccgccaaggctgccaagtacggagtggggaccccagcagctgcagctgctaaagcagccgccaaagccgcccagtttggtaagctcctggagttggtgtggctcctggcgttggcgtggctcccggcattggccctggtggagttgcagctgcagcaaaatccgctgccaaggtggctgccaaagcccagctccgagctgcagctgggcttggtgctggcatccctggacttggagttggtgtcggcgtccctggacttggagttggtgctggtgttcctggacttggagttggtgctggtgttcctggcttcggggcagtacctggagccctggctgccgctaaagcagccaaatatggagcagcagtgcctggggtccttggagggctcggggctctcggtggagtaggcatcccaggcggtgtggtgggggcctagtgggagccgctgggctcggaggactcggagtcggagggcttggagttccaggtgttgggggccttggaggtatacctccagctgcagccgctaaagcagctaaatacggtgctgctggccttggaggtgtcctagggggtgccgggcagttcccacttggaggagtggcagcaagacctggcttcggattgtctcccattttcccaggtggggcctgcctggggaaagcttgtggccggaagagaaaatgagcttcctaggacccctgactcacgacctcatcaacgttggtgctactgcttggtggagaatgtaaaccctttgtaaccccatcccatgcccctccgactccccaccccaggagggaacgggcaggccgggcggccttgcagatccacagggcaaggaaacaagaggggagcggccaagtgccccgaccaggaggccccctacttcagaggcaagggccatgtggtcctggccccccaccccatcccttcccacctaggagctccccctccacacagcctccatctccaggggaacttggtgctacacgctggtgctcttatcttcctggggggagggaggagggaagggtggcccctcggggaaccccctacctggggctcctctaaagatggtgcagacacttcctgggcagtcccagctccccctgcccaccaggacccaccgttggctgccatccagttggtacccaagcacctgaagcctcaaagctggattcgctctagcatccctcctctcctgggtccacttggccgtctcctccccaccgatcgctgttccccacatctggggcgcttttgggttggaaaaccaccccacactgggaatagccaccttgcccttgtagaatccatccgcccatccgtccattcatccatcggtccgtccatccatgtccccagttgaccgcccggcaccactagctggctgggtgcacccaccatcaacctggttgacctgtcatggccgcctgtgccctgcctccacccccatcctacactcccccagggcgtgcggggctgtgcagactggggtgccaggcatctcctccccacccggggtgtccccacatgcagtactgtataccccccatccctccctcggtccactgaacttcagagcagttcccattcctgccccgcccatctttttgtgtctcgctgtgatagatcaataaatattttattttttgtcctggatatttggggattatttttgattgttgatattctcttttggttttattgttgtggttcattgaaaaaaaaagataatttttttttctgatccggggagctgtatccccagtagaaaaaacattttaatcactctaatataactctggatgaaacacacctttttttttaataagaaaagagaattaactgcttcagaaatgactaataaatgaaaaacctttaaaggaaa

SEQ ID NO: 3865 - protein, 537 aa, Homo sapiens; identical to SEQ ID NO: 3863

SEQ ID NO: 3866 - DNA, 2703 bp, Homo sapiens
atttctccccgagatggcgggtctgacggcggcggccccgcggcccggagtcctcctgctcctgctgtccatcctccacccctctcggcctggaggggtccctggggccattcctggtggagttcctggaggagtcttttatccaggggctggtctcggagcccttggaggaggagcgctggggcctggaggcaaacctcttaagccagttcccggagggcttgcgggtgctggccttggggcaggtgtaggtggagcttttgctggaatcccaggagttggaccctttgggggaccgcaacctggagtcccactggggtatcccatcaaggcccccaagctgcctggctatgggcccggaggagtggctggtgcagcgggcaaggctggttacccaacagggacaggggttggcccccaggcagcagcagcagcggcagctaaagcagcagcaaagttcggtgctggagcagccggagtcctccctggtgttggaggggctggtgttcctggcgtgcctggggcaattcctggaattggaggcatcgcaggcgttgggactccagctgcagctgcagctgcagcagcagccgctaaggcagccaagtatggagctgctgcaggcttagtgcctggtgggccaggctttggcccgggagtagttggtgtcccaggagctggcgttccaggtgttggtgtcccaggagctgggattccagttgtcccaggtgctgggatcccaggtgctgcggttccaggggttgtgtcaccagaagcagctgctaaggcagctgcaaaggcagccaaatacggggccaggcccggagtcggagttggaggcattcctacttacggggttggagctgggggctttcccggctttggtgtcggagtcggaggtatccctggagtcgcaggtgtccctggtgtcggaggtgttcccggagtcggaggtgtcccgggagttggcatttcccccgaagctcaggcagcagctgccgccaaggctgccaagtacgggttagttcctggtgtcggcgtggctcctggagttggcgtggctcctggtgtcggtgtggctcctggagttggcttggctcctggagttggcgtggctcctggagttggtgtggctcctggcgttggcgtggctcccggcattggccctggtggagttgcagctgcagcaaaatccgctgccaaggtggctgccaaagcccagctccgagctgcagctgggcttggtgctggcatccctggacttggagttggtgtcggcgtccctggacttggagttggtgctggtgttcctggacttggagttggtgctggtgttcctggcttcggggcagtacctggagccctggctgccgctaaagcagccaaatatggagcagcagtgcctggggtccttggagggctcggggctctcggtggagtaggcatcccaggcggtgtggtgggagccggacccgccgccgccgctgccgcagccaaagctgctgccaaagccgcccagtttggcctagtgggagccgctgggctcggaggactcggagtcggagggcttggagttccaggtgttgggggccttggaggtatacctccagctgcagccgctaaagcagctaaatacggagtggcagcaagacctggcttcggattgtctcccattttcccaggtggggcctgcctggggaaagcttgtggccggaagagaaaatgagcttcctaggacccctgactcacgacctcatcaacgttggtgctactgcttggtggagaatgtaaaccctttgtaaccccatcccatgcccctccgactccccaccccaggagggaacgggcaggccgggcggccttgcagatccacagggcaaggaaacaagaggggagcggccaagtgccccgaccaggaggccccctacttcagaggcaagggccatgtggtcctggccccccaccccatcccttcccacctaggagctccccctccacacagcctccatctccaggggaacttggtgctacacgctggtgctcttatcttcctggggggagggaggagggaagggtggcccctcggggaaccccctacctggggctcctctaaagatggtgcagacacttcctgggcagtcccagctccccctgcccaccaggacccaccgttggctgccatccagttggtacccaagcacctgaagcctcaaagctggattcgctctagcatccctcctctcctgggtccacttggccgtctcctccccaccgatcgctgttccccacatctggggcgcttttgggttggaaaaccaccccacactgggaatagccaccttgcccttgtagaatccatccgcccatccgtccattcatccatcggtccgtccatccatgtccccagttgaccgcccggcaccactagctggctgggtgcacccaccatcaacctggttgacctgtcatggccgcctgtgccctgcctccacccccatcctacactcccccagggcgtgcggggctgtgcagactggggtgccaggcatctcctccccacccggggtgtccccacatgcagtactgtataccccccatccctccctcggtccactgaacttcagagcagttcccattcctgccccgcccatctttttgtgtctcgctgtgatagatcaataaatattttattttttgtcctgg

SEQ ID NO: 3867 - protein, 570 aa, Homo sapiens
MAGLTAAAPRPGVLLLLLSILHPSRPGGVPGAIPGGVPGGVFYPGAGLGALGGGALGPGGKPLKPVPGGLAGAGLGAGVGGAFAGIPGVGPFGGPQPGVPLGYPIKAPKLPGYGPGGVAGAAGKAGYPTGTGVGPQAAAAAAAKAAAKFGAGAAGVLPGVGGAGVPGVPGAIPGIGGIAGVGTPAAAAAAAAAAKAAKYGAAAGLVPGGPGFGPGVVGVPGAGVPGVGVPGAGIPVVPGAGIPGAAVPGVVSPEAAAKAAAKAAKYGARPGVGVGGIPTYGVGAGGFPGFGVGVGGIPGVAGVPGVGGVPGVGGVPGVGISPEAQAAAAAKAAKYGLVPGVGVAPGVGVAPGVGVAPGVGLAPGVGVAPGVGVAPGVGVAPGIGPGGVAAAAKSAAKVAAKAQLRAAAGLGAGIPGLGVGVGVPGLGVGAGVPGLGVGAGVPGFGAVPGALAAAKAAKYGAAVPGVLGGLGALGGVGIPGGVVGAGPAAAAAAAKAAAKAAQFGLVGAAGLGGLGVGGLGVPGVGGLGGIPPAAAAKAAKYGVAARPGFGLSPIFPGGACLGKACGRKRK

SEQ ID NO: 3868 - DNA, 2933 bp, Homo sapiens
atttctccccgagatggcgggtctgacggcggcggccccgcggcccggagtcctcctgctcctgctgtccatcctccacccctctcggcctggaggggtccctggggccattcctggtggagttcctggaggagtcttttatccaggggctggtctcggagcccttggaggaggagcgctggggcctggaggcaaacctcttaagccagttcccggagggcttgcgggtgctggccttggggcaggtgtaggtggagcttttgctggaatcccaggagttggaccctttgggggaccgcaacctggagtcccactggggtatcccatcaaggcccccaagctgcctggctatgggcccggaggagtggctggtgcagcgggcaaggctggttacccaacagggacaggggttggcccccaggcagcagcagcagcggcagctaaagcagcagcaaagttcggtgctggagcagccggagtcctccctggtgttggaggggctggtgttcctggcgtgcctggggcaattcctggaattggaggcatcgcaggcgttgggactccagctgcagctgcagctgcagcagcagccgctaaggcagccaagtatggagctgctgcaggcttagtgcctggtgggccaggctttggcccgggagtagttggtgtcccaggagctggcgttccaggtgttggtgtcccaggagctgggattccagttgtcccaggtgctgggatcccaggtgctgcggttccaggggttgtgtcaccagaagcagctgctaaggcagctgcaaaggcagccaaatacggggccaggcccggagtcggagttggaggcattcctacttacggggttggagctgggggctttcccggctttggtgtcggagtcggaggtatccctggagtcgcaggtgtccctggtgtcggaggtgttcccggagtcggaggtgtcccgggagttggcatttcccccgaagctcaggcagcagctgccgccaaggctgccaagtacgggttagttcctggtgtcggcgtggctcctggagttggcgtggctcctggtgtcggtgtggctcctggagttggcttggctcctggagttggcgtggctcctggagttggtgtggctcctggcgttggcgtggctcccggcattggccctggtggagttgcagctgcagcaaaatccgctgccaaggtggctgccaaagcccagctccgagctgcagctgggcttggtgctggcatccctggacttggagttggtgtcggcgtccctggacttggagttggtgctggtgttcctggacttggagttggtgctggtgttcctggcttcggggcagtacctggagccctggctgccgctaaagcagccaaatatggagcagcagtgcctggggtccttggagggctcggggctctcggtggagtaggcatcccaggcggtgtggtgggagccggacccgccgccgccgctgccgcagccaaagctgctgccaaagccgcccagtttggcctagtgggagccgctgggctcggaggactcggagtcggagggcttggagttccaggtgttgggggccttggaggtatacctccagctgcagccgctaaagcagctaaatacggagtggcagcaagacctggcttcggattgtctcccattttcccaggtggggcctgcctggggaaagcttgtggccggaagagaaaatgagcttcctaggacccctgactcacgacctcatcaacgttggtgctactgcttggtggagaatgtaaaccctttgtaaccccatcccatgcccctccgactccccaccccaggagggaacgggcaggccgggcggccttgcagatccacagggcaaggaaacaagaggggagcggccaagtgccccgaccaggaggccccctacttcagaggcaagggccatgtggtcctggccccccaccccatcccttcccacctaggagctccccctccacacagcctccatctccaggggaacttggtgctacacgctggtgctcttatcttcctggggggagggaggagggaagggtggcccctcggggaaccccctacctggggctcctctaaagatggtgcagacacttcctgggcagtcccagctccccctgcccaccaggacccaccgttggctgccatccagttggtacccaagcacctgaagcctcaaagctggattcgctctagcatccctcctctcctgggtccacttggccgtctcctccccaccgatcgctgttccccacatctggggcgcttttgggttggaaaaccaccccacactgggaatagccaccttgcccttgtagaatccatccgcccatccgtccattcatccatcggtccgtccatccatgtccccagttgaccgcccggcaccactagctggctgggtgcacccaccatcaacctggttgacctgtcatggccgcctgtgccctgcctccacccccatcctacactcccccagggcgtgcggggctgtgcagactggggtgccaggcatctcctccccacccggggtgtccccacatgcagtactgtataccccccatccctccctcggtccactgaacttcagagcagttcccattcctgccccgcccatctttttgtgtctcgctgtgatagatcaataaatattttattttttgtcctggatatttggggattatttttgattgttgatattctcttttggttttattgttgtggttcattgaaaaaaaaagataatttttttttctgatccggggagctgtatccccagtagaaaaaacattttaatcactctaatataactctggatgaaacacacctttttttttaataagaaaagagaattaactgcttcagaaatgactaataaatgaaaaacctttaaaggaaa

SEQ ID NO: 3869 - protein, 570 aa, Homo sapiens; identical to SEQ ID NO: 3867

SEQ ID NO: 3870 - DNA, 467 bp, Homo sapiens
ctccccgagatggcgggtctgacggcggcggccccgcggcccggagtcctcctgctcctgctgtccatcctccacccctctcggcctggaggggtccctggggccattcctggtggagttcctggaggagtcttttatccaggggctggtctcggagcccttggaggaggagcgctggggcctggaggcaaacctcttaagccagggctcggcgccttccccgcagttacctttccgggggctctggtgcctggtggagtggctgacgctgctgcagcctataaagctgctaaggctggcgctgggcttggtggtgtcccaggagttggtggcttaggagtgtctgcaggtgcggtggttcctcagcctggagccggagtgaagcctgggaaagtgccgggtcagtgcggaatccctggggctggaggacagagggcagggaggggcagagggcagggaggaacaga

SEQ ID NO: 3871 - protein, 151 aa, Homo sapiens
MAGLTAAAPRPGVLLLLLSILHPSRPGGVPGAIPGGVPGGVFYPGAGLGALGGGALGPGGKPLKPGLGAFPAVTFPGALVPGGVADAAAAYKAAKAGAGLGGVPGVGGLGVSAGAVVPQPGAGVKPGKVPGQCGIPGAGGQRAGRGRGQGG

SEQ ID NO: 3872 - DNA, 520 bp, Homo sapiens
gacactacagaaggtaggaacattgacacgcctaccagaagtcacacccacttaaaaatgcaattaacaagacattgatttacagctattaagagcatacaggctggacatggtggcttatgcctgtaatctcaacactctgggaggcagagaaacaaggattgcttgaggccaggagtttcagaccagcctggacaacatagggctggtctcggagcccttggaggaggagcgctggggcctggaggcaaacctcttaagccagttcccggagggcttgcgggtgctggccttggggcagggctcggcgccttccccgcagttacctttccgggggctctggtgcctggtggagtggctgacgctgctgcagcctataaagctgctaaggctggcgctgggcttggtggtgtcccaggagttggtggcttaggagtgtctgcaggtgcggtggttcctcagcctggagccggagtgaagcctgggaaagtgccgggtcagtgcggaatccctggggctg

SEQ ID NO: 3873 - protein, 129 aa, Homo sapiens
SQHSGRQRNKDCLRPGVSDQPGQHRAGLGALGGGALGPGGKPLKPVPGGLAGAGLGAGLGAFPAVTFPGALVPGGVADAAAAYKAAKAGAGLGGVPGVGGLGVSAGAVVPQPGAGVKPGKVPGQCGIPG

SEQ ID NO: 3874 - DNA, 894 bp, Homo sapiens
aagaaagaaagaaaagagggccagatgcagtggctcatgcctgtaatcccagcactttgggaggccgaggtgggcggatcacctgaggtcagcctgaccaacacggtgaagccctgtctctactaataatacaaaaattagctgggcgtggtggcctgcacctgtaatcccagctacttgggaggctgaggcgggagaatcgccagaacctgggaggcagaggttgcggtgagttgagatcaccccattccaccccagcctgggcgacaagagcgaaactccatctccgaaaaaagaaaccccagagttcatgtgagcgcagcatgcgatgactggtctgggaagaactggccattccttgggcctcctggccccttggtgctgtctggcccagtgtccacagttccagggctgtagtgacagctttttatcattacaggtgtaggtggagcttttgctggaatcccaggagttggaccctttgggggaccgcaacctggagtcccactggggtatcccatcaaggcccccaagctgcctggtggctatggactgccctacaccacagggaaactgccctatggctatgggcccggaggagtggctggtgcagcgggcaaggctggttacccaacagggacaggggttggcccccaggcagcagcagcagcggcagctaaagcagcagcaaagttcggtgctggagcagccggagtcctccctggtgttggaggggctggtgttcctggcgtgcctggggcaattcctggaattggaggcatcgcaggcgttgggactccagctgcagctgcagctgcagcagcagccgctaaggcagccaagtatggagctgctgcaggcttagtgcctggtgggccaggctttggcccggga

SEQ ID NO: 3875 - protein, 105 aa, Homo sapiens
MDCPTPQGNCPMAMGPEEWLVQRARLVTQQGQGLAPRQQQQRQLKQQQSSVLEQPESSLVLEGLVFLACLGQFLELEASQALGLQLQLQLQQQPLRQPSMELLQA

SEQ ID NO: 3876 - DNA, 748 bp, Homo sapiens
gtgctgggacctgaacttgctctctttattcccacaggagttggaccctttgggggaccgcaacctggagtcccactggggtatcccatcaaggcccccaagctgcctggtggctatggactgccctacaccacagggaaactgccctatggctatgggcccggaggagtggctggtgcagcgggcaaggctggttacccaacagggacaggggttggcccccaggcagcagcagcagcggcagctaaagcagcagcaaagttcggtgctggagcagccggagtcctccctggtgttggaggggctggtgttcctggcgtgcctggggcaattcctggaattggaggcatcgcaggtaacatctgtcccagcagggggcgggtgtgtccttgagatggccacagggcaaggacctcaccctctgtggctgtgttttcaggcgttgggactccagctgcagctgcagctgcagcagcagccgctaaggcagccaagtatggtgagtgcctcccggggtggcaagtccacggctcgggcccctgcatagacctcggagaccctagccgcaaagccagatggacttggcctttgttccttcccaaatatgcattgttcatgcctccttacctttgccccttctgatcactctacctgagatgccatctctattgttttgccctgattaactcagcagagggaggggaccctgcagaggggacatggctcctcccactccatcccctccagg

SEQ ID NO: 3877 - protein, 143 aa, Homo sapiens
MDCPTPQGNCPMAMGPEEWLVQRARLVTQQGQGLAPRQQQQRQLKQQQSSVLEQPESSLVLEGLVFLACLGQFLELEASQVTSVPAGGGCVLEMATGQGPHPLWLCFQALGLQLQLQLQQQPLRQPSMVSASRGGKSTARAPA

SEQ ID NO: 3878 - DNA, 590 bp, Homo sapiens
gagggagagagaaagaaagaaagagagagagagagagagaaagaaagaaagaaagagaaaggaaggaaagaaaagaaaagaaaaagaaagagatcacattcctccagctcactgattcaaatcctagagctctttagggaccctcttagtctctccacatctctctgatgagtaggatccatgcagaggaaatgtcaacccacctgcaatcctgcattcaggaccaactgtcacttccatactctactaaccacccttctagcccctctgaggttcccataggttaggggaacaatgctttttcttccacaggagctgctgcaggcttagtgcctggtgggccaggctttggcccgggagtagttggtgtcccaggagctggcgttccaggtgttggtgtcccaggagctgggattccagttgtcccaggtgctgggatcccaggtgctgcggttccaggggttgtgtcaccagaagcagctgctaaggcagctgcaaaggcagccaaatacggggccaggcccggagtcggagttggaggcattcctacttacggggttggagctgggggctttcccggctttggtgtc

SEQ ID NO: 3879 - protein, 39 aa, Homo sapiens
MSRIHAEEMSTHLQSCIQDQLSLPYSTNHPSSPSEVPIG

SEQ ID NO: 3880 - DNA, 501 bp, Homo sapiens
tttaaacacggctcggaggagacccaggcacggcttctgagggtctctttctttctcgtttccttgtagccgaagctcaggcagcagctgccgccaaggctgccaagtacggagtggggaccccagcagctgcagctgctaaagcagccgccaaagccgcccagtttgggttagttcctggtgtcggcgtggctcctggagttggcgtggctcctggtgtcggtgtggctcctggagttggcttggctcctggagttggcgtggctcctggagttggtgtggctcctggcgttggcgtggctcccggcattggccctggtggagttgcagctgcagcaaaatccgctgccaaggtggctgccaaagcccagctccgagctgcagctgggcttggtgctggcatccctggacttggagttggtgtcggcgtccctggacttggagttggtgctggtgttcctggacttggagttggtgctggtgttcctggcttcggggcag

SEQ ID NO: 3881 - protein, 164 aa, Homo sapiens
TRLGGDPGTASEGLFLSRFLVAEAQAAAAAKAAKYGVGTPAAAAAKAAAKAAQFGLVPGVGVAPGVGVAPGVGVAPGVGLAPGVGVAPGVGVAPGVGVAPGIGPGGVAAAAKSAAKVAAKAQLRAAAGLGAGIPGLGVGVGVPGLGVGAGVPGLGVGAGVPGFG

SEQ ID NO: 3882 - DNA, 532 bp, Homo sapiens
aagcagtcagcagtgagcaggggaggaggccagggctgctgggggtcggcgctgaggaagccaggattttccgagggccaatgccgggagccacgccaacgccaggagccacaccaactccaggagccacgccaactccaggagccaagccaactccaggagccacaccgacaccaggagccacgccaactccaggagccacgccgacaccaggaactaaccctgcaagattgagaagagctgatcattaaccaagacctgatcaaagaggacagaagcttatggaaagagggctggagcctcggccctggcatagatttgctgtgtgaccctggatcagttactttcccttgctgggcctcagcttcctcctccctaatatgaagtgtgtgcaggctcaggagttcataactttgtttttttggagacagagtctcactctatcgcccaggctggagtgcaatggcgtgatctcgactcactgcaaccaccacctcccgagttcaagtgagtctcctgcctcagcctcctg

SEQ ID NO: 3883 - protein, 56 aa, Homo sapiens
MPGATPTPGATPTPGATPTPGAKPTPGATPTPGATPTPGATPTPGTNPARLRRADH

SEQ ID NO: 3884 - DNA, 438 bp, Homo sapiens
ggaggccagggctgctgggggtcggcgctgaggaagccaggattttccgagccaagccaactccaggagccacaccgacaccaggagccacgccaactccaggagccacgccgacaccaggaactaaccctgcaagattgagaagagctgatcattaaccaagacctgatcaaagaggacagaagcttatggaaagagggctggagcctcggccctggcatagatttgctgtgtgaccctggatcagttactttcccttgctgggcctcagcttcctcctccctaatatgaagtgtgtgcaggctcaggagttcataactttgtttttttggagacagagtctcactctatcgcccaggctggagtgcaatggcgtgatctcgactcactgcaaccaccacctcccgagttcaagtgagtctcctgcctcagcctcct

SEQ ID NO: 3885 - protein, 49 aa, Homo sapiens
MKCVQAQEFITLFFWRQSLTLSPRLECNGVISTHCNHHLPSSSESPASA

SEQ ID NO: 3886 - DNA, 1379 bp, Homo sapiens
ggtgctggtgttcctggcttcggggcagtacctggagccctggctgccgctaaagcagccaaatatggagcagcagtgcctggggtccttggagggctcggggctctcggtggagtaggcatcccaggcggtgtggtgggagccggacccgccgccgccgctgccgcagccaaagctgctgccaaagccgcccagtttggcctagtgggagccgctgggctcggaggactcggagtcggagggcttggagttccaggtgttgggggccttggaggtatacctccagctgcagccgctaaagcagctaaatacggagtggcagcaagacctggcttcggattgtctcccattttcccaggtggggcctgcctggggaaagcttgtggccggaagagaaaatgagcttcctaggacccctgactcacgacctcatcaacgttggtgctactgcttggtggagaatgtaaaccctttgtaaccccatcccatgcccctccgactccccaccccaggagggaacgggcaggccgggcggccttgcagatccacagggcaaggaaacaagaggggagcggccaagtgccccgaccaggaggccccctacttcagaggcaagggccatgtggtcctggccccccaccccatcccttcccacctaggagctccccctccacacagcctccatctccaggggaacttggtgctacacgctggtgctcttatcttcctggggggagggaggagggaagggtggcccctcggggaaccccctacctggggctcctctaaagatggtgcagacacttcctgggcagtcccagctccccctgcccaccaggacccaccgttggctgccatccagttggtacccaagcacctgaagcctcaaagctggattcgctctagcatccctcctctcctgggtccacttggccgtctcctccccaccgatcgctgttccccacatctggggcgcttttgggttggaaaaccaccccacactgggaatagccaccttgcccttgtagaatccatccgcccatccgtccattcatccatcggtccgtccatccatgtccccagttgaccgcccggcaccactagctggctgggtgcacccaccatcaacctggttgacctgtcatggccgcctgtgccctgcctccacccccatcctacactcccccagggcgtgcggggctgtgcagactggggtgccaggcatctcctccccacccggggtgtccccacatgcagtactgtataccccccatccctccctcggtccactgaacttcagagcagttcccattcctgccccgcccatctttttgtgtctcgctgtgatagatcaataaatattttattttttgtcctgg

SEQ ID NO: 3887 - protein, 199 aa, Homo sapiens [sequence omitted]

SEQ ID NO: 3888 - DNA, 1609 bp, Homo sapiens
ggtgctggtgttcctggcttcggggcagtacctggagccctggctgccgctaaagcagccaaatatggagcagcagtgcctggggtccttggagggctcggggctctcggtggagtaggcatcccaggcggtgtggtgggagccggacccgccgccgccgctgccgcagccaaagctgctgccaaagccgcccagtttggcctagtgggagccgctgggctcggaggactcggagtcggagggcttggagttccaggtgttgggggccttggaggtatacctccagctgcagccgctaaagcagctaaatacggagtggcagcaagacctggcttcggattgtctcccattttcccaggtggggcctgcctggggaaagcttgtggccggaagagaaaatgagcttcctaggacccctgactcacgacctcatcaacgttggtgctactgcttggtggagaatgtaaaccctttgtaaccccatcccatgcccctccgactccccaccccaggagggaacgggcaggccgggcggccttgcagatccacagggcaaggaaacaagaggggagcggccaagtgccccgaccaggaggccccctacttcagaggcaagggccatgtggtcctggccccccaccccatcccttcccacctaggagctccccctccacacagcctccatctccaggggaacttggtgctacacgctggtgctcttatcttcctggggggagggaggagggaagggtggcccctcggggaaccccctacctggggctcctctaaagatggtgcagacacttcctgggcagtcccagctccccctgcccaccaggacccaccgttggctgccatccagttggtacccaagcacctgaagcctcaaagctggattcgctctagcatccctcctctcctgggtccacttggccgtctcctccccaccgatcgctgttccccacatctggggcgcttttgggttggaaaaccaccccacactgggaatagccaccttgcccttgtagaatccatccgcccatccgtccattcatccatcggtccgtccatccatgtccccagttgaccgcccggcaccactagctggctgggtgcacccaccatcaacctggttgacctgtcatggccgcctgtgccctgcctccacccccatcctacactcccccagggcgtgcggggctgtgcagactggggtgccaggcatctcctccccacccggggtgtccccacatgcagtactgtataccccccatccctccctcggtccactgaacttcagagcagttcccattcctgccccgcccatctttttgtgtctcgctgtgatagatcaataaatattttattttttgtcctggatatttggggattatttttgattgttgatattctcttttggttttattgttgtggttcattgaaaaaaaaagataatttttttttctgatccggggagctgtatccccagtagaaaaaacattttaatcactctaatataactctggatgaaacacacctttttttttaataagaaaagagaattaactgcttcagaaatgactaataaatgaaaaacctttaaaggaaa

SEQ ID NO: 3889 - protein, 199 aa, Homo sapiens [sequence omitted]

SEQ ID NO: 3890 - DNA, 604 bp, Homo sapiens
ggagtggcagcaagacctggcttcggattgtctcccattttcccagctccccctgcccaccaggacccaccgttggctgccatccagttggtacccaagcacctgaagcctcaaagctggattcgctctagcatccctcctctcctgggtccacttggccgtctcctccccaccgatcgctgttccccacatctggggcgcttttgggttggaaaaccaccccacactgggaatagccaccttgcccttgtagaatccatccgcccatccgtccattcatccatcggtccgtccatccatgtccccagttgaccgcccggcaccactagctggctgggtgcacccaccatcaacctggttgacctgtcatggccgcctgtgccctgcctccacccccatcctacactcccccagggcgtgcggggctgtgcagactggggtgccaggcatctcctccccacccggggtgtccccacatgcagtactgtataccccccatccctccctcggtccactgaacttcagagcagttcccattcctgccccgcccatctttttgtgtctcgctgtgatagatcaataaatattttattttttgtcctgg

SEQ ID NO: 3891 - protein, 94 aa, Homo sapiens
MSPVDRPAPLAGWVHPPSTWLTCHGRLCPASTPILHSPRACGAVQTGVPGISSPPGVSPHAVLYTPHPSLGPLNFRAVPIPAPPIFLCLAVIDQ

SEQ ID NO: 3892 - DNA, 834 bp, Homo sapiens
ggagtggcagcaagacctggcttcggattgtctcccattttcccagctccccctgcccaccaggacccaccgttggctgccatccagttggtacccaagcacctgaagcctcaaagctggattcgctctagcatccctcctctcctgggtccacttggccgtctcctccccaccgatcgctgttccccacatctggggcgcttttgggttggaaaaccaccccacactgggaatagccaccttgcccttgtagaatccatccgcccatccgtccattcatccatcggtccgtccatccatgtccccagttgaccgcccggcaccactagctggctgggtgcacccaccatcaacctggttgacctgtcatggccgcctgtgccctgcctccacccccatcctacactcccccagggcgtgcggggctgtgcagactggggtgccaggcatctcctccccacccggggtgtccccacatgcagtactgtataccccccatccctccctcggtccactgaacttcagagcagttcccattcctgccccgcccatctttttgtgtctcgctgtgatagatcaataaatattttattttttgtcctggatatttggggattatttttgattgttgatattctcttttggttttattgttgtggttcattgaaaaaaaaagataatttttttttctgatccggggagctgtatccccagtagaaaaaacattttaatcactctaatataactctggatgaaacacacctttttttttaataagaaaagagaattaactgcttcagaaatgactaataaatgaaaaacctttaaaggaaa

SEQ ID NO: 3893 - protein, 94 aa, Homo sapiens; identical to SEQ ID NO: 3891

SEQ ID NO: 3894 - DNA, 831 bp, Homo sapiens
tccaggtggggcctgcctggggaaagcttgtggccggaagagaaaatgagcttcctaggacccctgactcacgacctcatcaacgttggtgctactgcttggtggagaatgtaaaccctttgtaaccccatcccatgcccctccgactccccaccccaggagggaacgggcaggccgggcggccttgcagatccacagggcaaggaaacaagaggggagcggactgggaatagccaccttgcccttgtagaatccatccgcccatccgtccattcatccatcggtccgtccatccatgtccccagttgaccgcccggcaccactagctggctgggtgcacccaccatcaacctggttgacctgtcatggccgcctgtgccctgcctccacccccatcctacactcccccagggcgtgcggggctgtgcagactggggtgccaggcatctcctccccacccggggtgtccccacatgcagtactgtataccccccatccctccctcggtccactgaacttcagagcagttcccattcctgccccgcccatctttttgtgtctcgctgtgatagatcaataaatattttattttttgtcctggatatttggggattatttttgattgttgatattctcttttggttttattgttgtggttcattgaaaaaaaaagataatttttttttctgatccggggagctgtatccccagtagaaaaaacattttaatcactctaatataactctggatgaaacacacctttttttttaataagaaaagagaattaactgcttcagaaatgactaataaatgaaaaacctttaaaggaaa

SEQ ID NO: 3895 - protein, 32 aa, Homo sapiens
MPLRLPTPGGNGQAGRPCRSTGQGNKRGADWE

SEQ ID NO: 3896 - DNA, 3311 bp, Homo sapiens
acaggccccgcctcggtccgcccctccgctcgctccccaagccgccgcggcgccgagccggtttccccgccggtgtccgagaggcgcccccggcccggccgcccccagccccagccccgccgggccccgccccccgtcgagtgcatgaggttgacgctactttgttgcacctggagggaagaacgtatgggagaggaaggaagcgagttgcccgtgtgtgcaagctgcggccagaggatctatgatggccagtacctccaggccctgaacgcggactggcacgcagactgcttcaggtgttgtgactgcagtgcctccctgtcgcaccagtactatgagaaggatgggcagctcttctgcaagaaggactactgggcccgctatggcgagtcctgccatgggtgctctgagcaaatcaccaagggactggttatggtggctggggagctgaagtaccaccccgagtgtttcatctgcctcacgtgtgggacctttatcggtgacggggacacctacacgctggtggagcactccaagctgtactgcgggcactgctactaccagactgtggtgacccccgtcatcgagcagatcctgcctgactcccctggctcccacctgccccacaccgtcaccctggtgtccatcccagcctcatctcatggcaagcgtggactttcagtctccattgaccccccgcacggcccaccgggctgtggcaccgagcactcacacaccgtccgcgtccagggagtggatccgggctgcatgagcccagatgtgaagaattccatccacgtcggagaccggatcttggaaatcaatggcacgcccatccgaaatgtgcccctggacgagattgacctgctgattcaggaaaccagccgcctgctccagctgaccctcgagcatgaccctcacgatacactgggccacgggctggggcctgagaccagccccctgagctctccggcttatactcccagcggggaggcgggcagctctgcccggcagaaacctgtcttgaggagctgcagcatcgacaggtctccgggcgctggctcactgggctccccggcctcccagcgcaaggacctgggtcgctctgagtccctccgcgtagtctgccggccacaccgcatcttccggccgtcggacctcatccacggggaggtgctgggcaagggctgcttcggccaggctatcaaggtgacacaccgtgagacaggtgaggtgatggtgatgaaggagctgatccggttcgacgaggagacccagaggacgttcctcaaggaggtgaaggtcatgcgatgcctggaacaccccaacgtgctcaagttcatcggggtgctctacaaggacaagaggctcaacttcatcactgagtacatcaagggcggcacgctccggggcatcatcaagagcatggacagccagtacccatggagccagagagtgagctttgccaaggacatcgcatcagggatggcctacctccactccatgaacatcatccaccgagacctcaactcccacaactgcctggtccgcgagaacaagaatgtggtggtggctgacttcgggctggcgcgtctcatggtggacgagaagactcagcctgagggcctgcggagcctcaagaagccagaccgcaagaagcgctacaccgtggtgggcaacccctactggatggcacctgagatgatcaacggccgcagctatgatgagaaggtggatgtgttctcctttgggatcgtcctgtgcgagatcatcgggcgggtgaacgcagaccctgactacctgccccgcaccatggactttggcctcaacgtgcgaggattcctggaccgctactgccccccaaactgccccccgagcttcttccccatcaccgtgcgctgttgcgatctggaccccgagaagaggccatcctttgtgaagctggaacactggctggagaccctccgcatgcacctggccggccacctgccactgggcccacagctggagcagctggacagaggtttctgggagacctaccggcgcggcgagagcggactgcctgcccaccctgaggtccccgactgagccagggccactcagctgcccctgtccccacctctggagaatccacccccaccagattcctccgcgggaggtggccctcagctgggacagtggggacccaggcttctcctcagagccaggccctgacttgccttctcccaccccgtggaccgcttcccctgccttctctctgccgtggcccagagccggcccagctgcacacacacaccatgctctcgccctgctgtaacctctgtcttggcagggctgtcccctcttgcttctccttgcatgagctggagggcctgtgtgagttacgcccctttccacacgccgctgccccagcaaccctgttcacgctccacctgtctggtccatagctccctggaggctgggccaggaggcagcctccgaaccatgccccatataacgcttgggtgcgtgggagggcgcacatcagggcagaggccaagttccaggtgtctgtgttcccaggaaccaaatggggagtctggggcccgttttccccccagggggtgtctaggtagcaacaggtatcgaggactctccaaacccccaaagcagagagagggctgatcccatggggcggaggtccccagtggctgagcaaacagccccttctctcgctttgggtcttttttttgtttctttcttaaagccactttagtgagaagcaggtaccaagcctcagggtgaagggggtcccttgagggagcgtggagctgcggtgccctggccggcgatggggaggagccggctccggcagtgagaggataggcacagtggaccgggcaggtgtccaccagcagctcagcccctgcagtcatctcagagccccttcccgggcctctcccccaaggctccctgcccctcctcatgcccctctgtcctctgcgttttttctgtgtaatctattttttaagaagagtttgtattattttttcatacggctgcagcagcagctgccaggggcttgggattttatttttgtggcgggcgggggtgggagggccattttgtcactttgcctcagttgagcatctaggaagtattaaaactgtgaagctttctcagtgcactttgaacctggaaaacaatcccaacaggcccgtgggaccatgacttagggaggtgggacccacccacccccatccaggaaccgtgacgtccaaggaaccaaacccagacgcagaacaataaaataaattccgtactccccaccc

SEQ ID NO: 3897 - protein, 647 aa, Homo sapiens; identical to SEQ ID NO: 444

SEQ ID NO: 3898 - DNA, 3350 bp, Homo sapiens
acaggccccgcctcggtccgcccctccgctcgctccccaagccgccgcggcgccgagccggtttccccgccggtgtccgagaggcgcccccggcccggccgcccccagccccagccccgccgggccccgccccccgtcgagtgcatgaggttgacgctactttgttgcacctggagggaagaacgtatgggagaggaaggaagcgagttgcccgtgtgtgcaagctgcggccagaggatctatgatggccagtacctccaggccctgaacgcggactggcacgcagactgcttcaggtgttgtgactgcagtgcctccctgtcgcaccagtactatgagaaggatgggcagctcttctgcaagaaggactactgggcccgctatggcgagtcctgccatgggtgctctgagcaaatcaccaagggactggttatggtggctggggagctgaagtaccaccccgagtgtttcatctgcctcacgtgtgggacctttatcggtgacggggacacctacacgctggtggagcactccaagctgtactgcgggcactgctactaccagactgtggtgacccccgtcatcgagcagatcctgcctgactcccctggctcccacctgccccacaccgtcaccctggtgtccatcccagcctcatctcatggcaagcgtggactttcagtctccattgaccccccgcacggcccaccgggctgtggcaccgagcactcacacaccgtccgcgtccagggagtggatccgggctgcatgagcccagatgtgaagaattccatccacgtcggagaccggatcttggaaatcaatggcacgcccatccgaaatgtgcccctggacgagattgacctgctgattcaggaaaccagccgcctgctccagctgaccctcgagcatgaccctcacgatacactgggccacgggctggggcctgagaccagccccctgagctctccggcttatactcccagcggggaggcgggcagctctgcccggcagaaacctgtcttgaggagctgcagcatcgacaggtctccgggcgctggctcactgggctccccggcctcccagcgcaaggacctgggtcgctctgagtccctccgcgtagtctgccggccacaccgcatcttccggccgtcggacctcatccacggggaggtgctgggcaagggctgcttcggccaggctatcaaggtgacacaccgtgagacaggtgaggtgatggtgatgaaggagctgatccggttcgacgaggagacccagaggacgttcctcaaggaggtgaaggtcatgcgatgcctggaacaccccaacgtgctcaagttcatcggggtgctctacaaggacaagaggctcaacttcatcactgagtacatcaagggcggcacgctccggggcatcatcaagagcatggacagccagtacccatggagccagagagtgagctttgccaaggacatcgcatcagggatggcctacctccactccatgaacatcatccaccgagacctcaactcccacaactgcctggtccgcgagaacaagaatgtggtggtggctgacttcgggctggcgcgtctcatggtggacgagaagactcagcctgagggcctgcggagcctcaagaagccagaccgcaagaagcgctacaccgtggtgggcaacccctactggatggcacctgagatgatcaacggccgcagctatgatgagaaggtggatgtgttctcctttgggatcgtcctgtgcgagatcatcgggcgggtgaacgcagaccctgactacctgccccgcaccatggactttggcctcaacgtgcgaggattcctggaccgctactgccccccaaactgccccccgagcttcttccccatcaccgtgcgctgttgcgatctggaccccgagaagaggccatcctttgtgaagctggaacactggctggagaccctccgcatgcacctggccggccacctgccactgggcccacagctggagcagctggacagaggtttctgggagacctaccggcgcggcgagagcggactgcctgcccaccctgaggtccccgactgagccagggccactcagctgcccctgtccccacctctggagaatccacccccaccagattcctccgcgggaggtggccctcagctgggacagtggggacccaggcttctcctcagagccaggccctgacttgccttctcccaccccgtggaccgcttcccctgccttctctctgccgtggcccagagccggcccagctgcacacacacaccatgctctcgccctgctgtaacctctgtcttggcagggctgtcccctcttgcttctccttgcatgagctggagggcctgtgtgagttacgcccctttccacacgccgctgccccagcaaccctgttcacgctccacctgtctggtccatagctccctggaggctgggccaggaggcagcctccgaaccatgccccatataacgcttgggtgcgtgggagggcgcacatcagggcagaggccaagttccaggtgtctgtgttcccaggaaccaaatggggagtctggggcccgttttccccccagggggtgtctaggtagcaacaggtatcgaggactctccaaacccccaaagcagagagagggctgatcccatggggcggaggtccccagtggctgagcaaacagccccttctctcgctttgggtcttttttttgtttctttcttaaagccactttagtgagaagcaggtaccaagcctcagggtgaagggggtcccttgagggagcgtggagctgcggtgccctggccggcgatggggaggagccggctccggcagtgagaggataggcacagtggaccgggcaggtgtccaccagcagctcagcccctgcagtcatctcagagccccttcccgggcctctcccccaaggctccctgcccctcctcatgcccctctgtcctctgcgttttttctgtgtaatctattttttaagaagagtttgtattattttttcatacggctgcagcagcagctgccaggggcttgggattttatttttgtggcgggcgggggtgggagggccattttgtcactttgcctcagttgagcatctaggaagtattaaaactgtgaagctttctcagtgcactttgaacctggaaaacaatcccaacaggcccgtgggaccatgacttagggaggtgggacccacccacccccatccaggaaccgtgacgtccaaggaaccaaacccagacgcagaacaataaaataaattccgtactccccacccaggtcctgcgtggcgatgtgtgtctggggccctggggaa

SEQ ID NO: 3899 - protein, 647 aa, Homo sapiens; identical to SEQ ID NO: 444

SEQ ID NO: 3900 - DNA, 3367 bp, Homo sapiens
ggtccgcccctccgctcgctccccaagccgccgcggcgccgagccggtttccccgccggtgtccgagaggcgcccccggcccggcccggcccggcccgcgccctccgcccccgcctccccgggccggcggcggtgggcgagctcgcgggcccggccgcccccagccccagccccgccgggccccgccccccgtcgagtgcatgaggttgacgctactttgttgcacctggagggaagaacgtatgggagaggaaggaagcgagttgcccgtgtgtgcaagctgcggccagaggatctatgatggccagtacctccaggccctgaacgcggactggcacgcagactgcttcaggtgttgtgactgcagtgcctccctgtcgcaccagtactatgagaaggatgggcagctcttctgcaagaaggactactgggcccgctatggcgagtcctgccatgggtgctctgagcaaatcaccaagggactggttatggtggctggggagctgaagtaccaccccgagtgtttcatctgcctcacgtgtgggacctttatcggtgacggggacacctacacgctggtggagcactccaagctgtactgcgggcactgctactaccagactgtggtgacccccgtcatcgagcagatcctgcctgactcccctggctcccacctgccccacaccgtcaccctggtgtccatcccagcctcatctcatggcaagcgtggactttcagtctccattgaccccccgcacggcccaccgggctgtggcaccgagcactcacacaccgtccgcgtccagggagtggatccgggctgcatgagcccagatgtgaagaattccatccacgtcggagaccggatcttggaaatcaatggcacgcccatccgaaatgtgcccctggacgagattgacctgctgattcaggaaaccagccgcctgctccagctgaccctcgagcatgaccctcacgatacactgggccacgggctggggcctgagaccagccccctgagctctccggcttatactcccagcggggaggcgggcagctctgcccggcagaaacctgtcttgaggagctgcagcatcgacaggtctccgggcgctggctcactgggctccccggcctcccagcgcaaggacctgggtcgctctgagtccctccgcgtagtctgccggccacaccgcatcttccggccgtcggacctcatccacggggaggtgctgggcaagggctgcttcggccaggctatcaaggtgacacaccgtgagacaggtgaggtgatggtgatgaaggagctgatccggttcgacgaggagacccagaggacgttcctcaaggaggtgaaggtcatgcgatgcctggaacaccccaacgtgctcaagttcatcggggtgctctacaaggacaagaggctcaacttcatcactgagtacatcaagggcggcacgctccggggcatcatcaagagcatggacagccagtacccatggagccagagagtgagctttgccaaggacatcgcatcagggatggcctacctccactccatgaacatcatccaccgagacctcaactcccacaactgcctggtccgcgagaacaagaatgtggtggtggctgacttcgggctggcgcgtctcatggtggacgagaagactcagcctgagggcctgcggagcctcaagaagccagaccgcaagaagcgctacaccgtggtgggcaacccctactggatggcacctgagatgatcaacggccgcagctatgatgagaaggtggatgtgttctcctttgggatcgtcctgtgcgagatcatcgggcgggtgaacgcagaccctgactacctgccccgcaccatggactttggcctcaacgtgcgaggattcctggaccgctactgccccccaaactgccccccgagcttcttccccatcaccgtgcgctgttgcgatctggaccccgagaagaggccatcctttgtgaagctggaacactggctggagaccctccgcatgcacctggccggccacctgccactgggcccacagctggagcagctggacagaggtttctgggagacctaccggcgcggcgagagcggactgcctgcccaccctgaggtccccgactgagccagggccactcagctgcccctgtccccacctctggagaatccacccccaccagattcctccgcgggaggtggccctcagctgggacagtggggacccaggcttctcctcagagccaggccctgacttgccttctcccaccccgtggaccgcttcccctgccttctctctgccgtggcccagagccggcccagctgcacacacacaccatgctctcgccctgctgtaacctctgtcttggcagggctgtcccctcttgcttctccttgcatgagctggagggcctgtgtgagttacgcccctttccacacgccgctgccccagcaaccctgttcacgctccacctgtctggtccatagctccctggaggctgggccaggaggcagcctccgaaccatgccccatataacgcttgggtgcgtgggagggcgcacatcagggcagaggccaagttccaggtgtctgtgttcccaggaaccaaatggggagtctggggcccgttttccccccagggggtgtctaggtagcaacaggtatcgaggactctccaaacccccaaagcagagagagggctgatcccatggggcggaggtccccagtggctgagcaaacagccccttctctcgctttgggtcttttttttgtttctttcttaaagccactttagtgagaagcaggtaccaagcctcagggtgaagggggtcccttgagggagcgtggagctgcggtgccctggccggcgatggggaggagccggctccggcagtgagaggataggcacagtggaccgggcaggtgtccaccagcagctcagcccctgcagtcatctcagagccccttcccgggcctctcccccaaggctccctgcccctcctcatgcccctctgtcctctgcgttttttctgtgtaatctattttttaagaagagtttgtattattttttcatacggctgcagcagcagctgccaggggcttgggattttatttttgtggcgggcgggggtgggagggccattttgtcactttgcctcagttgagcatctaggaagtattaaaactgtgaagctttctcagtgcactttgaacctggaaaacaatcccaacaggcccgtgggaccatgacttagggaggtgggacccacccacccccatccaggaaccgtgacgtccaaggaaccaaacccagacgcagaacaataaaataaattccgtactccccaccc

SEQ ID NO: 3901 - protein, 647 aa, Homo sapiens; identical to SEQ ID NO: 444

SEQ ID NO: 3902 - DNA, 3306 bp, Homo sapiens
ggtccgcccctccgctcgctccccaagccgccgcggcgccgagccggtttccccgccggtgtccgagaggcgcccccggcccggcccggcccggcccgcgccctccgcccccgcctccccgggccggcggcggtgggcgagctcgcgggcccggccgcccccagccccagccccgccgggccccgccccccgtcgagtgcatgaggttgacgctactttgttgcacctggagggaagaacgtatgggagaggaaggaagcgagttgcccgtgtgtgcaagctgcggccagaggatctatgatggccagtacctccaggccctgaacgcggactggcacgcagactgcttcaggtgttgtgactgcagtgcctccctgtcgcaccagtactatgagaaggatgggcagctcttctgcaagaaggactactgggcccgctatggcgagtcctgccatgggtgctctgagcaaatcaccaagggactggttatggtggctggggagctgaagtaccaccccgagtgtttcatctgcctcacgtgtgggacctttatcggtgacggggacacctacacgctggtggagcactccaagctgtactgcgggcactgctactaccagactgtggtgacccccgtcatcgagcagatcctgcctgactcccctggctcccacctgccccacaccgtcaccctggtgtccatcccagcctcatctcatggcaagcgtggactttcagtctccattgaccccccgcacggcccaccgggctgtggcaccgagcactcacacaccgtccgcgtccagggagtggatccgggctgcatgagcccagatgtgaagaattccatccacgtcggagaccggatcttggaaatcaatggcacgcccatccgaaatgtgcccctggacgagattgacctgctgattcaggaaaccagccgcctgctccagctgaccctcgagcatgaccctcacgatacactgggccacgggctggggcctgagaccagccccctgagctctccggcttatactcccagcggggaggcgggcagctctgcccggcagaaacctgtcttcgcaaggacctgggtcgctctgagtccctccgcgtagtctgccggccacaccgcatcttccggccgtcggacctcatccacggggaggtgctgggcaagggctgcttcggccaggctatcaaggtgacacaccgtgagacaggtgaggtgatggtgatgaaggagctgatccggttcgacgaggagacccagaggacgttcctcaaggaggtgaaggtcatgcgatgcctggaacaccccaacgtgctcaagttcatcggggtgctctacaaggacaagaggctcaacttcatcactgagtacatcaagggcggcacgctccggggcatcatcaagagcatggacagccagtacccatggagccagagagtgagctttgccaaggacatcgcatcagggatggcctacctccactccatgaacatcatccaccgagacctcaactcccacaactgcctggtccgcgagaacaagaatgtggtggtggctgacttcgggctggcgcgtctcatggtggacgagaagactcagcctgagggcctgcggagcctcaagaagccagaccgcaagaagcgctacaccgtggtgggcaacccctactggatggcacctgagatgatcaacggccgcagctatgatgagaaggtggatgtgttctcctttgggatcgtcctgtgcgagatcatcgggcgggtgaacgcagaccctgactacctgccccgcaccatggactttggcctcaacgtgcgaggattcctggaccgctactgccccccaaactgccccccgagcttcttccccatcaccgtgcgctgttgcgatctggaccccgagaagaggccatcctttgtgaagctggaacactggctggagaccctccgcatgcacctggccggccacctgccactgggcccacagctggagcagctggacagaggtttctgggagacctaccggcgcggcgagagcggactgcctgcccaccctgaggtccccgactgagccagggccactcagctgcccctgtccccacctctggagaatccacccccaccagattcctccgcgggaggtggccctcagctgggacagtggggacccaggcttctcctcagagccaggccctgacttgccttctcccaccccgtggaccgcttcccctgccttctctctgccgtggcccagagccggcccagctgcacacacacaccatgctctcgccctgctgtaacctctgtcttggcagggctgtcccctcttgcttctccttgcatgagctggagggcctgtgtgagttacgcccctttccacacgccgctgccccagcaaccctgttcacgctccacctgtctggtccatagctccctggaggctgggccaggaggcagcctccgaaccatgccccatataacgcttgggtgcgtgggagggcgcacatcagggcagaggccaagttccaggtgtctgtgttcccaggaaccaaatggggagtctggggcccgttttccccccagggggtgtctaggtagcaacaggtatcgaggactctccaaacccccaaagcagagagagggctgatcccatggggcggaggtccccagtggctgagcaaacagccccttctctcgctttgggtcttttttttgtttctttcttaaagccactttagtgagaagcaggtaccaagcctcagggtgaagggggtcccttgagggagcgtggagctgcggtgccctggccggcgatggggaggagccggctccggcagtgagaggataggcacagtggaccgggcaggtgtccaccagcagctcagcccctgcagtcatctcagagccccttcccgggcctctcccccaaggctccctgcccctcctcatgcccctctgtcctctgcgttttttctgtgtaatctattttttaagaagagtttgtattattttttcatacggctgcagcagcagctgccaggggcttgggattttatttttgtggcgggcgggggtgggagggccattttgtcactttgcctcagttgagcatctaggaagtattaaaactgtgaagctttctcagtgcactttgaacctggaaaacaatcccaacaggcccgtgggaccatgacttagggaggtgggacccacccacccccatccaggaaccgtgacgtccaaggaaccaaacccagacgcagaacaataaaataaattccgtactccccaccc

SEQ ID NO: 3903 - protein, 305 aa, Homo sapiens
MRLTLLCCTWREERMGEEGSELPVCASCGQRIYDGQYLQALNADWHADCFRCCDCSASLSHQYYEKDGQLFCKKDYWARYGESCHGCSEQITKGLVMVAGELKYHPECFICLTCGTFIGDGDTYTLVEHSKLYCGHCYYQTVVTPVIEQILPDSPGSHLPHTVTLVSIPASSHGKRGLSVSIDPPHGPPGCGTEHSHTVRVQGVDPGCMSPDVKNSIHVGDRILEINGTPIRNVPLDEIDLLIQETSRLLQLTLEHDPHDTLGHGLGPETSPLSSPAYTPSGEAGSSARQKPVFARTWVALSPSA

SEQ ID NO: 3904 - DNA, 3345 bp, Homo sapiens
ggtccgcccctccgctcgctccccaagccgccgcggcgccgagccggtttccccgccggtgtccgagaggcgcccccggcccggcccggcccggcccgcgccctccgcccccgcctccccgggccggcggcggtgggcgagctcgcgggcccggccgcccccagccccagccccgccgggccccgccccccgtcgagtgcatgaggttgacgctactttgttgcacctggagggaagaacgtatgggagaggaaggaagcgagttgcccgtgtgtgcaagctgcggccagaggatctatgatggccagtacctccaggccctgaacgcggactggcacgcagactgcttcaggtgttgtgactgcagtgcctccctgtcgcaccagtactatgagaaggatgggcagctcttctgcaagaaggactactgggcccgctatggcgagtcctgccatgggtgctctgagcaaatcaccaagggactggttatggtggctggggagctgaagtaccaccccgagtgtttcatctgcctcacgtgtgggacctttatcggtgacggggacacctacacgctggtggagcactccaagctgtactgcgggcactgctactaccagactgtggtgacccccgtcatcgagcagatcctgcctgactcccctggctcccacctgccccacaccgtcaccctggtgtccatcccagcctcatctcatggcaagcgtggactttcagtctccattgaccccccgcacggcccaccgggctgtggcaccgagcactcacacaccgtccgcgtccagggagtggatccgggctgcatgagcccagatgtgaagaattccatccacgtcggagaccggatcttggaaatcaatggcacgcccatccgaaatgtgcccctggacgagattgacctgctgattcaggaaaccagccgcctgctccagctgaccctcgagcatgaccctcacgatacactgggccacgggctggggcctgagaccagccccctgagctctccggcttatactcccagcggggaggcgggcagctctgcccggcagaaacctgtcttcgcaaggacctgggtcgctctgagtccctccgcgtagtctgccggccacaccgcatcttccggccgtcggacctcatccacggggaggtgctgggcaagggctgcttcggccaggctatcaaggtgacacaccgtgagacaggtgaggtgatggtgatgaaggagctgatccggttcgacgaggagacccagaggacgttcctcaaggaggtgaaggtcatgcgatgcctggaacaccccaacgtgctcaagttcatcggggtgctctacaaggacaagaggctcaacttcatcactgagtacatcaagggcggcacgctccggggcatcatcaagagcatggacagccagtacccatggagccagagagtgagctttgccaaggacatcgcatcagggatggcctacctccactccatgaacatcatccaccgagacctcaactcccacaactgcctggtccgcgagaacaagaatgtggtggtggctgacttcgggctggcgcgtctcatggtggacgagaagactcagcctgagggcctgcggagcctcaagaagccagaccgcaagaagcgctacaccgtggtgggcaacccctactggatggcacctgagatgatcaacggccgcagctatgatgagaaggtggatgtgttctcctttgggatcgtcctgtgcgagatcatcgggcgggtgaacgcagaccctgactacctgccccgcaccatggactttggcctcaacgtgcgaggattcctggaccgctactgccccccaaactgccccccgagcttcttccccatcaccgtgcgctgttgcgatctggaccccgagaagaggccatcctttgtgaagctggaacactggctggagaccctccgcatgcacctggccggccacctgccactgggcccacagctggagcagctggacagaggtttctgggagacctaccggcgcggcgagagcggactgcctgcccaccctgaggtccccgactgagccagggccactcagctgcccctgtccccacctctggagaatccacccccaccagattcctccgcgggaggtggccctcagctgggacagtggggacccaggcttctcctcagagccaggccctgacttgccttctcccaccccgtggaccgcttcccctgccttctctctgccgtggcccagagccggcccagctgcacacacacaccatgctctcgccctgctgtaacctctgtcttggcagggctgtcccctcttgcttctccttgcatgagctggagggcctgtgtgagttacgcccctttccacacgccgctgccccagcaaccctgttcacgctccacctgtctggtccatagctccctggaggctgggccaggaggcagcctccgaaccatgccccatataacgcttgggtgcgtgggagggcgcacatcagggcagaggccaagttccaggtgtctgtgttcccaggaaccaaatggggagtctggggcccgttttccccccagggggtgtctaggtagcaacaggtatcgaggactctccaaacccccaaagcagagagagggctgatcccatggggcggaggtccccagtggctgagcaaacagccccttctctcgctttgggtcttttttttgtttctttcttaaagccactttagtgagaagcaggtaccaagcctcagggtgaagggggtcccttgagggagcgtggagctgcggtgccctggccggcgatggggaggagccggctccggcagtgagaggataggcacagtggaccgggcaggtgtccaccagcagctcagcccctgcagtcatctcagagccccttcccgggcctctcccccaaggctccctgcccctcctcatgcccctctgtcctctgcgttttttctgtgtaatctattttttaagaagagtttgtattattttttcatacggctgcagcagcagctgccaggggcttgggattttatttttgtggcgggcgggggtgggagggccattttgtcactttgcctcagttgagcatctaggaagtattaaaactgtgaagctttctcagtgcactttgaacctggaaaacaatcccaacaggcccgtgggaccatgacttagggaggtgggacccacccacccccatccaggaaccgtgacgtccaaggaaccaaacccagacgcagaacaataaaataaattccgtactccccacccaggtcctgcgtggcgatgtgtgtctggggccctggggaa

SEQ ID NO: 3905 - protein, 305 aa, Homo sapiens; identical to SEQ ID NO: 3903

SEQ ID NO: 3906 - DNA, 3406 bp, Homo sapiens
ggtccgcccctccgctcgctccccaagccgccgcggcgccgagccggtttccccgccggtgtccgagaggcgcccccggcccggcccggcccggcccgcgccctccgcccccgcctccccgggccggcggcggtgggcgagctcgcgggcccggccgcccccagccccagccccgccgggccccgccccccgtcgagtgcatgaggttgacgctactttgttgcacctggagggaagaacgtatgggagaggaaggaagcgagttgcccgtgtgtgcaagctgcggccagaggatctatgatggccagtacctccaggccctgaacgcggactggcacgcagactgcttcaggtgttgtgactgcagtgcctccctgtcgcaccagtactatgagaaggatgggcagctcttctgcaagaaggactactgggcccgctatggcgagtcctgccatgggtgctctgagcaaatcaccaagggactggttatggtggctggggagctgaagtaccaccccgagtgtttcatctgcctcacgtgtgggacctttatcggtgacggggacacctacacgctggtggagcactccaagctgtactgcgggcactgctactaccagactgtggtgacccccgtcatcgagcagatcctgcctgactcccctggctcccacctgccccacaccgtcaccctggtgtccatcccagcctcatctcatggcaagcgtggactttcagtctccattgaccccccgcacggcccaccgggctgtggcaccgagcactcacacaccgtccgcgtccagggagtggatccgggctgcatgagcccagatgtgaagaattccatccacgtcggagaccggatcttggaaatcaatggcacgcccatccgaaatgtgcccctggacgagattgacctgctgattcaggaaaccagccgcctgctccagctgaccctcgagcatgaccctcacgatacactgggccacgggctggggcctgagaccagccccctgagctctccggcttatactcccagcggggaggcgggcagctctgcccggcagaaacctgtcttgaggagctgcagcatcgacaggtctccgggcgctggctcactgggctccccggcctcccagcgcaaggacctgggtcgctctgagtccctccgcgtagtctgccggccacaccgcatcttccggccgtcggacctcatccacggggaggtgctgggcaagggctgcttcggccaggctatcaaggtgacacaccgtgagacaggtgaggtgatggtgatgaaggagctgatccggttcgacgaggagacccagaggacgttcctcaaggaggtgaaggtcatgcgatgcctggaacaccccaacgtgctcaagttcatcggggtgctctacaaggacaagaggctcaacttcatcactgagtacatcaagggcggcacgctccggggcatcatcaagagcatggacagccagtacccatggagccagagagtgagctttgccaaggacatcgcatcagggatggcctacctccactccatgaacatcatccaccgagacctcaactcccacaactgcctggtccgcgagaacaagaatgtggtggtggctgacttcgggctggcgcgtctcatggtggacgagaagactcagcctgagggcctgcggagcctcaagaagccagaccgcaagaagcgctacaccgtggtgggcaacccctactggatggcacctgagatgatcaacggccgcagctatgatgagaaggtggatgtgttctcctttgggatcgtcctgtgcgagatcatcgggcgggtgaacgcagaccctgactacctgccccgcaccatggactttggcctcaacgtgcgaggattcctggaccgctactgccccccaaactgccccccgagcttcttccccatcaccgtgcgctgttgcgatctggaccccgagaagaggccatcctttgtgaagctggaacactggctggagaccctccgcatgcacctggccggccacctgccactgggcccacagctggagcagctggacagaggtttctgggagacctaccggcgcggcgagagcggactgcctgcccaccctgaggtccccgactgagccagggccactcagctgcccctgtccccacctctggagaatccacccccaccagattcctccgcgggaggtggccctcagctgggacagtggggacccaggcttctcctcagagccaggccctgacttgccttctcccaccccgtggaccgcttcccctgccttctctctgccgtggcccagagccggcccagctgcacacacacaccatgctctcgccctgctgtaacctctgtcttggcagggctgtcccctcttgcttctccttgcatgagctggagggcctgtgtgagttacgcccctttccacacgccgctgccccagcaaccctgttcacgctccacctgtctggtccatagctccctggaggctgggccaggaggcagcctccgaaccatgccccatataacgcttgggtgcgtgggagggcgcacatcagggcagaggccaagttccaggtgtctgtgttcccaggaaccaaatggggagtctggggcccgttttccccccagggggtgtctaggtagcaacaggtatcgaggactctccaaacccccaaagcagagagagggctgatcccatggggcggaggtccccagtggctgagcaaacagccccttctctcgctttgggtcttttttttgtttctttcttaaagccactttagtgagaagcaggtaccaagcctcagggtgaagggggtcccttgagggagcgtggagctgcggtgccctggccggcgatggggaggagccggctccggcagtgagaggataggcacagtggaccgggcaggtgtccaccagcagctcagcccctgcagtcatctcagagccccttcccgggcctctcccccaaggctccctgcccctcctcatgcccctctgtcctctgcgttttttctgtgtaatctattttttaagaagagtttgtattattttttcatacggctgcagcagcagctgccaggggcttgggattttatttttgtggcgggcgggggtgggagggccattttgtcactttgcctcagttgagcatctaggaagtattaaaactgtgaagctttctcagtgcactttgaacctggaaaacaatcccaacaggcccgtgggaccatgacttagggaggtgggacccacccacccccatccaggaaccgtgacgtccaaggaaccaaacccagacgcagaacaataaaataaattccgtactccccacccaggtcctgcgtggcgatgtgtgtctggggccctggggaa

SEQ ID NO: 3907 - protein, 647 aa, Homo sapiens; identical to SEQ ID NO: 444

SEQ ID NO: 3908 - DNA, 391 bp, Homo sapiens
ggcacgcccatccgaaatgtgcccctggacgagattgacctgctgattcaggaaaccagccgcctgctccagctgaccctcgagcatgaccctcacgatacactgggccacgggctggggcctgagaccagccccctgagctctccggcttatactcccagcggggaggcgggcagctctgcccggcagaaacctgtcttgtaagtcagcctgctcctcggttcagctgggtgctttcactcctgctggggctcaggggctgtgggacctaggtcggggagccagccctgcacaaatgcagcccaggcttgagccagggaggtggaggctgcagtaagctgtcatcacaccactgctctccagcttgggtgacaaaacaagacccactctc

SEQ ID NO: 3909 - protein, 67 aa, Homo sapiens
GTPIRNVPLDEIDLLIQETSRLLQLTLEHDPHDTLGHGLGPETSPLSSPAYTPSGEAGSSARQKPVL

SEQ ID NO: 3910 - DNA, 1353 bp, Homo sapiens
gggtcgctctgagtccctccgcgtagtctgccggccacaccgcatcttccggccgtcggacctcatccacggggaggtgctgggcaagggctgcttcggccaggctatcaaggtgacacaccgtgagacaggtgaggtgatggtgatgaaggagctgatccggttcgacgaggagacccagaggacgttcctcaaggaggtgaaggtcatgcgatgcctggaacaccccaacgtgctcaagttcatcggggtgctctacaaggacaagaggctcaacttcatcactgagtacatcaagggcggcacgctccggggcatcatcaagagcatggtgagtcctgggcagagccagccacccccgctgtgcggccccgggcaaagcagctccctctgtgagcctcagtctcatctcttcaatggggggaagccacaggggtctcaaaggccctctgaaccctgattcctaatcaaaaaggggagcgactgactccatctaaagctaggaaaggccaggtacaatggtgcacacctgttattctggcactttgggagcccaaggcaagaggatcactcgaggccaggaattcaaggctgcagtgagctgtgatctcaccactgcactccagcctggaccacacagcaagaccctgtctcaaaaactaaaataaaattcagagctttccttaaggatttgaataaaattacaaatccatctttagaaataaagtgctcaggccaggtgcagtggctcatgcctataatctcagcactttcagaggctgaggccagcagatcacctgaggtcaggagtccaagaccagcctggccaacatggtgaaaccccgtctctactaaaaatacaaaaattagctgggcctggtggcaggcacctgtaatcccagcactttgggagactgaggttggcagatcacctgaggtcaggagttcgagaccatcctggtaacccgtctctactaaaaatacaaaaaattagccgggcaaggtggcaggtgcctgtagtcccagctactcgggagactgaagcaggagaatggcgttgaacccagggggcagagcctgcagtgagccaagatcgcaccactgcactctagcctgggtgacagcgagattccttctcaaaaaaaaagcacttggaggaagcctcacagagccctgtgctggaccacaccctggggatccagtcctggcctccagccccatttctgtaccaccctgagaccatgggatcttcctcaggttggattaccttgtatccaaggtgtggaccctatgggctcctgctaggtgtaacttgacacaacgggttccgttgtcaggtgcaatttagaaact

SEQ ID NO: 3911 - protein, 106 aa, Homo sapiens
MVMKELIRFDEETQRTFLKEVKVMRCLEHPNVLKFIGVLYKDKRLNFITEYIKGGTLRGIIKSMVSPGQSQPPPLCGPGQSSSLCEPQSHLFNGGKPQGSQRPSEP

SEQ ID NO: 3912 - DNA, 455 bp, Homo sapiens
caaaaaccaacacgttgtcgttggcgggaggcagtggaagggatccgccccgcaagcaagaccccgggagcccagccgccgccgccccgtctccgagcgcgccatttccaggccccggccctccaggcgccgctcctaggcctccgcgggcccccgcctcccgccgccccggctgagcgcaggacggccgccaccctgacggccccgactccgccggtcccgcagcccccgacggggcccgcgcacgcccgcctcaccctctgccgccgccgaagctgctgtaggcccgatcgtcgtaggtgtcgaagtccgccatttgccgtctccgctccgagaggaaccagggatgaagttgaagttactttctctgcctaagatccagacatcccccctcaacaaggaaaacaattgtttttttttcttctcctttctataaaatcaagaatggaaccaca

SEQ ID NO: 3913 - protein, 124 aa, Homo sapiens [sequence omitted]

SEQ ID NO: 3914 - DNA, 2499 bp, Homo sapiens
cggcgcggcggacagccccggcggcggggcggggggagttatattgcggggtccttcctcgctcaccctggttcctctcggagcggagacggcaaatggcggacttcgacacctacgacgatcgggcctacagcagcttcggcggcggcagagggtcccgcggcagtgctggtggccatggttcccgtagccagaaggagttgcccacagagcccccctacacagcatacgtaggaaatctacctttcaatacggttcagggcgacatagatgctatctttaaggatctcagcataaggagtgtacggctagtcagagacaaagacacagataaatttaaaggattctgctatgtagaattcgatgaagtggattcccttaaggaagccttgacatacgatggtgcactgttgggcgatcggtcacttcgtgtggacattgcagaaggcagaaaacaagataaaggtggctttggattcagaaaaggtggaccagatgacagagccgcttcagagatggccctcccctccgtggatccaacatggatttcagagaacccacagaagaggaaagagcacagagaccacgactccagcttaaacctcgaacagtcgcgacgcccctcaatcaagtagccaatcccaactctgctatcttcgggggtgccaggcctagagaggaagtcgttcaaaaggagcaagaatgagcctgcggttgggagggaatggggcgtggggggttagagcaggaccacagcctggtgagtccccgggcagccgtcctgcagccgccactcctgcgcctgccattggcctcctcacagcggaaacacagcttgtgagtgcatgtcagctgttaacaagtggtttttagtacattctgggctttgctgtatctatctagtgcctgtttgtgcgtttttttctttcttccgctgcttccccattttccttctgtcctttttctcctgctccttgttttcccagcagcacatggggttcctcggaggagcagaggtggccgccgtgggggggcgtttgggctgcggtgctgcgtcatttttcctttgctttctctttactttagacactggcccaactccaggcgtttcctttcattccctcagtgcttctcttctgacctgcatgttgagttctgtattgctggggcttccaacaaaaaccagagtcactgacagagggaacagcagagaccttgttggtattcagctgtgatggatatagagaatcagaggcaccttgttttcacaactaggataaaaatatctgcagggtcctttccattcctatttagagggagtcctggctccatgaccccctcccgagtggactgtccaagcagataggctcacacgagaaacagtgaggctgaaagggggggctatggaagagcggtagggagtccacggagaagatgcagtgaatgcttgcatgcattcacacgtgtgtgtgtcccagctagttcactcctttcgccgtgcgtggtggaggctggcctctctggctgggtgcagtgaatggccagcgggtttcttttctgctgggccaaggcgctttgggggtggagggggtggtgctggtgctgcactgggctgactgcggcgctgacgcagcgtttccccccatccctgttgcctgtgtgttgtgtggatctgttcctagtataggcaacataatgagatactgtgcttcccacctccccttcagttcagagccaaaatgggtctagaatctggcactttactcatttcctttgataaattgtactatgcagagctgtcaggaaccttcagatagcagtagaggactgcagctgtctaggtctgcggccacatcttggggacacactggactgttcccatgtgcagggttcagcagttatgtgggagtgctaggggttaggcttttgagcttgaacgcctgcgtgtgaacagatgaaaaatccttcagtacccaagtcccagtctgtcctatggggagcagtttgggggcggccggcagcaggagcctgggaaagaggccctcgccaggtgatggcagggccagggtggcctggggcacccagcggaatgtgcttagtatttggtcaccagccgtcatcctgggcttttcctactgtgtcttgttacaaggcctcagcaatccacagaactctctctccttccttccacctgtcagcttctctgcttctgagataagaaccatttgtgtaacaccaacacttaacttcagaaagacatgcattatgtggtgtaatcaaacccgatgctttcagatgacctacttacatcttcaatgtggataagataaagaacaaaacacatgcatctaaactgctgggcaatccagttgacttttaaatgtaagaatggaattccaaacacttaacacattcagctatatgacagaaagtaaatctatggatatggtattttgtgaatgatcttttaaataaaagaaaaccttacgtaatatttaa

SEQ ID NO: 3915 - protein, 179 aa, Homo sapiens
MADFDTYDDRAYSSFGGGRGSRGSAGGHGSRSQKELPTEPPYTAYVGNLPFNTVQGDIDAIFKDLSIRSVRLVRDKDTDKFKGFCYVEFDEVDSLKEALTYDGALLGDRSLRVDIAEGRKQDKGGFGFRKGGPDDRAASEMALPSVDPTWISENPQKRKEHRDHDSSLNLEQSRRPSIK

SEQ ID NO: 3916 - DNA, 2508 bp, Homo sapiens
ctggttcctctcggagcggagacggcaaatggcggacttcgacacctacgacgatcgggcctacagcagcttcggcggcggcagagggtcccgcggcagtgctggtggccatggttcccgtagccagaaggagttgcccacagagcccccctacacagcatacgtaggaaatctacctttcaatacggttcagggcgacatagatgctatctttaaggatctcagcataaggagtgtacggctagtcagagacaaagacacagataaatttaaaggattctgctatgtagaattcgatgaagtggattcccttaaggaagccttgacatacgatggtgcactgttgggcgatcggtcacttcgtgtggacattgcagaaggcagaaaacaagataaaggtggctttggattcagaaaaggtggaccagatgacagaggcttcagggatgacttcttagggggcaggggaggtagtcgcccaggcgaccggcgaacaggcccccccatgggcagccgcttcagagatggccctcccctccgtggatccaacatggatttcagagaacccacagaagaggaaagagcacagagaccacgactccagcttaaacctcgaacagtcgcgacgcccctcaatcaagtagccaatcccaactctgctatcttcgggggtgccaggcctagagaggaagtcgttcaaaaggagcaagaatgagcctgcggttgggagggaatggggcgtggggggttagagcaggaccacagcctggtgagtccccgggcagccgtcctgcagccgccactcctgcgcctgccattggcctcctcacagcggaaacacagcttgtgagtgcatgtcagctgttaacaagtggtttttagtacattctgggctttgctgtatctatctagtgcctgtttgtgcgtttttttctttcttccgctgcttccccattttccttctgtcctttttctcctgctccttgttttcccagcagcacatggggttcctcggaggagcagaggtggccgccgtgggggggcgtttgggctgcggtgctgcgtcatttttcctttgctttctctttactttagacactggcccaactccaggcgtttcctttcattccctcagtgcttctcttctgacctgcatgttgagttctgtattgctggggcttccaacaaaaaccagagtcactgacagagggaacagcagagaccttgttggtattcagctgtgatggatatagagaatcagaggcaccttgttttcacaactaggataaaaatatctgcagggtcctttccattcctatttagagggagtcctggctccatgaccccctcccgagtggactgtccaagcagataggctcacacgagaaacagtgaggctgaaagggggggctatggaagagcggtagggagtccacggagaagatgcagtgaatgcttgcatgcattcacacgtgtgtgtgtcccagctagttcactcctttcgccgtgcgtggtggaggctggcctctctggctgggtgcagtgaatggccagcgggtttcttttctgctgggccaaggcgctttgggggtggagggggtggtgctggtgctgcactgggctgactgcggcgctgacgcagcgtttccccccatccctgttgcctgtgtgttgtgtggatctgttcctagtataggcaacataatgagatactgtgcttcccacctccccttcagttcagagccaaaatgggtctagaatctggcactttactcatttcctttgataaattgtactatgcagagctgtcaggaaccttcagatagcagtagaggactgcagctgtctaggtctgcggccacatcttggggacacactggactgttcccatgtgcagggttcagcagttatgtgggagtgctaggggttaggcttttgagcttgaacgcctgcgtgtgaacagatgaaaaatccttcagtacccaagtcccagtctgtcctatggggagcagtttgggggcggccggcagcaggagcctgggaaagaggccctcgccaggtgatggcagggccagggtggcctggggcacccagcggaatgtgcttagtatttggtcaccagccgtcatcctgggcttttcctactgtgtcttgttacaaggcctcagcaatccacagaactctctctccttccttccacctgtcagcttctctgcttctgagataagaaccatttgtgtaacaccaacacttaacttcagaaagacatgcattatgtggtgtaatcaaacccgatgctttcagatgacctacttacatcttcaatgtggataagataaagaacaaaacacatgcatctaaactgctgggcaatccagttgacttttaaatgtaagaatggaattccaaacacttaacacattcagctatatgacagaaagtaaatctatggatatggtattttgtgaatgatcttttaaataaaagaaaaccttacgtaatatttaa

SEQ ID NO: 3917 - protein, 228 aa, Homo sapiens; identical to SEQ ID NO: 448

SEQ ID NO: 3918 - DNA, 559 bp, Homo sapiens
tcctctcggagcggagacggcaaatggcggacttcgacacctacgacgatcgggcctacagcagcttcggcggcggcagagggtcccgcggcagtgctggtggccatggttcccgtagccagaaggagttgcccacagagcccccctacacagcatacgtaggaaatctacctttcaatacggttcagggcgacatagatgctatctttaaggatctcacaatccacagaactctctctccttccttccacctgtcagcttctctgcttctgagataagaaccatttgtgtaacaccaacacttaacttcagaaagacatgcattatgtggtgtaatcaaacccgatgctttcagatgacctacttacatcttcaatgtggataagataaagaacaaaacacatgcatctaaactgctgggcaatccagttgacttttaaatgtaagaatggaattccaaacacttaacacattcagctatatgacagaaagtaaatctatggatatggtattttgtgaatgatcttttaaataaaagaaaaccttacgtaatatttaa

SEQ ID NO: 3919 - protein, 84 aa, Homo sapiens
MADFDTYDDRAYSSFGGGRGSRGSAGGHGSRSQKELPTEPPYTAYVGNLPFNTVQGDIDAIFKDLTIHRTLSPSFHLSASLLLR

SEQ ID NO: 3920 - DNA, 519 bp, Homo sapiens
cctctcggagcggagacggcaaatggcggacttcgacacctacgacgatcgggcctacagcagcttcggcggcggcagagggtcccgcggcagtgctggtggccatggttcccgtagccagaaggagttgcccacagagcccccctacacagcatacgtaggaaatctacctttcaatacggttcagggcgacatagatgctatctttaaggatctcacttctctgcttctgagataagaaccatttgtgtaacaccaacacttaacttcagaaagacatgcattatgtggtgtaatcaaacccgatgctttcagatgacctacttacatcttcaatgtggataagataaagaacaaaacacatgcatctaaactgctgggcaatccagttgacttttaaatgtaagaatggaattccaaacacttaacacattcagctatatgacagaaagtaaatctatggatatggtattttgtgaatgatcttttaaataaaagaaaaccttacgtaatatttaa

SEQ ID NO: 3921 - protein, 71 aa, Homo sapiens
MADFDTYDDRAYSSFGGGRGSRGSAGGHGSRSQKELPTEPPYTAYVGNLPFNTVQGDIDAIFKDLTSLLLR

SEQ ID NO: 3922 - DNA, 2560 bp, Homo sapiens
tctcggagcggagacggcaaatggcggacttcgacacctacgacgatcgggcctacagcagcttcggcggcggcagagggtcccgcggcagtgctggtggccatggttcccgtagccagaaggagttgcccacagagcccccctacacagcatacgtaggaaatctacctttcaatacggttcagggcgacatagatgctatctttaaggatctcagcataaggagtgtacggctagtcagagacaaagacacagataaatttaaaggattctgctatgtagaattcgatgaagtggattcccttaaggaagccttgacatacgatggtgcactgttgggcgatcggtcacttcgtgtggacattgcagaaggcagaaaacaagataaaggtggctttggattcagaaaaggtggaccagatgacagaggaatgggtagctctcgagaatctagaggtggatgggattcccgggatgacttcaattctggcttcagggatgacttcttagggggcaggggaggtagtcgcccaggcgaccggcgaacaggcccccccatgggcagccgcttcagagatggccctcccctccgtggatccaacatggatttcagagaacccacagaagaggaaagagcacagagaccacgactccagcttaaacctcgaacagtcgcgacgcccctcaatcaagtagccaatcccaactctgctatcttcgggggtgccaggcctagagaggaagtcgttcaaaaggagcaagaatgagcctgcggttgggagggaatggggcgtggggggttagagcaggaccacagcctggtgagtccccgggcagccgtcctgcagccgccactcctgcgcctgccattggcctcctcacagcggaaacacagcttgtgagtgcatgtcagctgttaacaagtggtttttagtacattctgggctttgctgtatctatctagtgcctgtttgtgcgtttttttctttcttccgctgcttccccattttccttctgtcctttttctcctgctccttgttttcccagcagcacatggggttcctcggaggagcagaggtggccgccgtgggggggcgtttgggctgcggtgctgcgtcatttttcctttgctttctctttactttagacactggcccaactccaggcgtttcctttcattccctcagtgcttctcttctgacctgcatgttgagttctgtattgctggggcttccaacaaaaaccagagtcactgacagagggaacagcagagaccttgttggtattcagctgtgatggatatagagaatcagaggcaccttgttttcacaactaggataaaaatatctgcagggtcctttccattcctatttagagggagtcctggctccatgaccccctcccgagtggactgtccaagcagataggctcacacgagaaacagtgaggctgaaagggggggctatggaagagcggtagggagtccacggagaagatgcagtgaatgcttgcatgcattcacacgtgtgtgtgtcccagctagttcactcctttcgccgtgcgtggtggaggctggcctctctggctgggtgcagtgaatggccagcgggtttcttttctgctgggccaaggcgctttgggggtggagggggtggtgctggtgctgcactgggctgactgcggcgctgacgcagcgtttccccccatccctgttgcctgtgtgttgtgtggatctgttcctagtataggcaacataatgagatactgtgcttcccacctccccttcagttcagagccaaaatgggtctagaatctggcactttactcatttcctttgataaattgtactatgcagagctgtcaggaaccttcagatagcagtagaggactgcagctgtctaggtctgcggccacatcttggggacacactggactgttcccatgtgcagggttcagcagttatgtgggagtgctaggggttaggcttttgagcttgaacgcctgcgtgtgaacagatgaaaaatccttcagtacccaagtcccagtctgtcctatggggagcagtttgggggcggccggcagcaggagcctgggaaagaggccctcgccaggtgatggcagggccagggtggcctggggcacccagcggaatgtgcttagtatttggtcaccagccgtcatcctgggcttttcctactgtgtcttgttacaaggcctcagcaatccacagaactctctctccttccttccacctgtcagcttctctgcttctgagataagaaccatttgtgtaacaccaacacttaacttcagaaagacatgcattatgtggtgtaatcaaacccgatgctttcagatgacctacttacatcttcaatgtggataagataaagaacaaaacacatgcatctaaactgctgggcaatccagttgacttttaaatgtaagaatggaattccaaacacttaacacattcagctatatgacagaaagtaaatctatggatatggtattttgtgaatgatcttttaaataaaagaaaaccttacgtaatatttaa

SEQ ID NO: 3923 - protein, 248 aa, Homo sapiens; identical to SEQ ID NO: 446

SEQ ID NO: 3924 - DNA, 1920 bp, Homo sapiens
tctcggagcggagacggcaaatggcggacttcgacacctacgacgatcgggcctacagcagcttcggcggcggcagagggtcccgcggcagtgctggtggccatggttcccgtagccagaaggagttgcccacagagcccccctacacagcatacgtaggaaatctacctttcaatacggttcagggcgacatagatgctatctttaaggatctcagcataaggagtgtacggctagtcagagacaaagacacagataaatttaaaggattctgctatgtagaattcgatgaagtggattcccttaaggaagccttgacatacgatggtgcactgttgggcgatcggtcacttcgtgtggacattgcagaaggcagaaaacaagataaaggtggctttggattcagaaaaggtggaccagatgacagaggagcagaggtggccgccgtgggggggcgtttgggctgcggtgctgcgtcatttttcctttgctttctctttactttagacactggcccaactccaggcgtttcctttcattccctcagtgcttctcttctgacctgcatgttgagttctgtattgctggggcttccaacaaaaaccagagtcactgacagagggaacagcagagaccttgttggtattcagctgtgatggatatagagaatcagaggcaccttgttttcacaactaggataaaaatatctgcagggtcctttccattcctatttagagggagtcctggctccatgaccccctcccgagtggactgtccaagcagataggctcacacgagaaacagtgaggctgaaagggggggctatggaagagcggtagggagtccacggagaagatgcagtgaatgcttgcatgcattcacacgtgtgtgtgtcccagctagttcactcctttcgccgtgcgtggtggaggctggcctctctggctgggtgcagtgaatggccagcgggtttcttttctgctgggccaaggcgctttgggggtggagggggtggtgctggtgctgcactgggctgactgcggcgctgacgcagcgtttccccccatccctgttgcctgtgtgttgtgtggatctgttcctagtataggcaacataatgagatactgtgcttcccacctccccttcagttcagagccaaaatgggtctagaatctggcactttactcatttcctttgataaattgtactatgcagagctgtcaggaaccttcagatagcagtagaggactgcagctgtctaggtctgcggccacatcttggggacacactggactgttcccatgtgcagggttcagcagttatgtgggagtgctaggggttaggcttttgagcttgaacgcctgcgtgtgaacagatgaaaaatccttcagtacccaagtcccagtctgtcctatggggagcagtttgggggcggccggcagcaggagcctgggaaagaggccctcgccaggtgatggcagggccagggtggcctggggcacccagcggaatgtgcttagtatttggtcaccagccgtcatcctgggcttttcctactgtgtcttgttacaaggcctcagcaatccacagaactctctctccttccttccacctgtcagcttctctgcttctgagataagaaccatttgtgtaacaccaacacttaacttcagaaagacatgcattatgtggtgtaatcaaacccgatgctttcagatgacctacttacatcttcaatgtggataagataaagaacaaaacacatgcatctaaactgctgggcaatccagttgacttttaaatgtaagaatggaattccaaacacttaacacattcagctatatgacagaaagtaaatctatggatatggtattttgtgaatgatcttttaaataaaagaaaaccttacgtaatatttaa

SEQ ID NO: 3925 - protein, 211 aa, Homo sapiens
MADFDTYDDRAYSSFGGGRGSRGSAGGHGSRSQKELPTEPPYTAYVGNLPFNTVQGDIDAIFKDLSIRSVRLVRDKDTDKFKGFCYVEFDEVDSLKEALTYDGALLGDRSLRVDIAEGRKQDKGGFGFRKGGPDDRGAEVAAVGGRLGCGAASFFLCFLFTLDTGPTPGVSFHSLSASLLTCMLSSVLLGLPTKTRVTDRGNSRDLVGIQL

SEQ ID NO: 3926 - DNA, 1919 bp, Homo sapiens
tctcggagcggagacggcaaatggcggacttcgacacctacgacgatcgggcctacagcagcttcggcggcggcagagggtcccgcggcagtgctggtggccatggttcccgtagccagaaggagttgcccacagagcccccctacacagcatacgtaggaaatctacctttcaatacggttcagggcgacatagatgctatctttaaggatctcagcataaggagtgtacggctagtcagagacaaagacacagataaatttaaaggattctgctatgtagaattcgatgaagtggattcccttaaggaagccttgacatacgatggtgcactgttgggcgatcggtcacttcgtgtggacattgcagaaggcagaaaacaagataaaggtggctttggattcagaaaaggtggaccagatgacagaggcttcagggatgacttcttagggggcgtttgggctgcggtgctgcgtcatttttcctttgctttctctttactttagacactggcccaactccaggcgtttcctttcattccctcagtgcttctcttctgacctgcatgttgagttctgtattgctggggcttccaacaaaaaccagagtcactgacagagggaacagcagagaccttgttggtattcagctgtgatggatatagagaatcagaggcaccttgttttcacaactaggataaaaatatctgcagggtcctttccattcctatttagagggagtcctggctccatgaccccctcccgagtggactgtccaagcagataggctcacacgagaaacagtgaggctgaaagggggggctatggaagagcggtagggagtccacggagaagatgcagtgaatgcttgcatgcattcacacgtgtgtgtgtcccagctagttcactcctttcgccgtgcgtggtggaggctggcctctctggctgggtgcagtgaatggccagcgggtttcttttctgctgggccaaggcgctttgggggtggagggggtggtgctggtgctgcactgggctgactgcggcgctgacgcagcgtttccccccatccctgttgcctgtgtgttgtgtggatctgttcctagtataggcaacataatgagatactgtgcttcccacctccccttcagttcagagccaaaatgggtctagaatctggcactttactcatttcctttgataaattgtactatgcagagctgtcaggaaccttcagatagcagtagaggactgcagctgtctaggtctgcggccacatcttggggacacactggactgttcccatgtgcagggttcagcagttatgtgggagtgctaggggttaggcttttgagcttgaacgcctgcgtgtgaacagatgaaaaatccttcagtacccaagtcccagtctgtcctatggggagcagtttgggggcggccggcagcaggagcctgggaaagaggccctcgccaggtgatggcagggccagggtggcctggggcacccagcggaatgtgcttagtatttggtcaccagccgtcatcctgggcttttcctactgtgtcttgttacaaggcctcagcaatccacagaactctctctccttccttccacctgtcagcttctctgcttctgagataagaaccatttgtgtaacaccaacacttaacttcagaaagacatgcattatgtggtgtaatcaaacccgatgctttcagatgacctacttacatcttcaatgtggataagataaagaacaaaacacatgcatctaaactgctgggcaatccagttgacttttaaatgtaagaatggaattccaaacacttaacacattcagctatatgacagaaagtaaatctatggatatggtattttgtgaatgatcttttaaataaaagaaaaccttacgtaatatttaa

SEQ ID NO: 3927 - protein, 161 aa, Homo sapiens
MADFDTYDDRAYSSFGGGRGSRGSAGGHGSRSQKELPTEPPYTAYVGNLPFNTVQGDIDAIFKDLSIRSVRLVRDKDTDKFKGFCYVEFDEVDSLKEALTYDGALLGDRSLRVDIAEGRKQDKGGFGFRKGGPDDRGFRDDFLGGVWAAVLRHFSFAFSLL

SEQ ID NO: 3928 - DNA, 2288 bp, Homo sapiens
cggacttcgacacctacgacgatcgggcctacagcagcttcggcggcggcagagggattctgctatgtagaattcgatgaagtggattcccttaaggaagccttgacatacgatggtgcactgttgggcgatcggtcacttcgtgtggacattgcagaaggcagaaaacaagataaaggtggctttggattcagaaaaggtggaccagatgacagaggcttcagggatgacttcttagggggcaggggaggtagtcgcccaggcgaccggcgaacaggcccccccatgggcagccgcttcagagatggccctcccctccgtggatccaacatggatttcagagaacccacagaagaggaaagagcacagagaccacgactccagcttaaacctcgaacagtcgcgacgcccctcaatcaagtagccaatcccaactctgctatcttcgggggtgccaggcctagagaggaagtcgttcaaaaggagcaagaatgagcctgcggttgggagggaatggggcgtggggggttagagcaggaccacagcctggtgagtccccgggcagccgtcctgcagccgccactcctgcgcctgccattggcctcctcacagcggaaacacagcttgtgagtgcatgtcagctgttaacaagtggtttttagtacattctgggctttgctgtatctatctagtgcctgtttgtgcgtttttttctttcttccgctgcttccccattttccttctgtcctttttctcctgctccttgttttcccagcagcacatggggttcctcggaggagcagaggtggccgccgtgggggggcgtttgggctgcggtgctgcgtcatttttcctttgctttctctttactttagacactggcccaactccaggcgtttcctttcattccctcagtgcttctcttctgacctgcatgttgagttctgtattgctggggcttccaacaaaaaccagagtcactgacagagggaacagcagagaccttgttggtattcagctgtgatggatatagagaatcagaggcaccttgttttcacaactaggataaaaatatctgcagggtcctttccattcctatttagagggagtcctggctccatgaccccctcccgagtggactgtccaagcagataggctcacacgagaaacagtgaggctgaaagggggggctatggaagagcggtagggagtccacggagaagatgcagtgaatgcttgcatgcattcacacgtgtgtgtgtcccagctagttcactcctttcgccgtgcgtggtggaggctggcctctctggctgggtgcagtgaatggccagcgggtttcttttctgctgggccaaggcgctttgggggtggagggggtggtgctggtgctgcactgggctgactgcggcgctgacgcagcgtttccccccatccctgttgcctgtgtgttgtgtggatctgttcctagtataggcaacataatgagatactgtgcttcccacctccccttcagttcagagccaaaatgggtctagaatctggcactttactcatttcctttgataaattgtactatgcagagctgtcaggaaccttcagatagcagtagaggactgcagctgtctaggtctgcggccacatcttggggacacactggactgttcccatgtgcagggttcagcagttatgtgggagtgctaggggttaggcttttgagcttgaacgcctgcgtgtgaacagatgaaaaatccttcagtacccaagtcccagtctgtcctatggggagcagtttgggggcggccggcagcaggagcctgggaaagaggccctcgccaggtgatggcagggccagggtggcctggggcacccagcggaatgtgcttagtatttggtcaccagccgtcatcctgggcttttcctactgtgtcttgttacaaggcctcagcaatccacagaactctctctccttccttccacctgtcagcttctctgcttctgagataagaaccatttgtgtaacaccaacacttaacttcagaaagacatgcattatgtggtgtaatcaaacccgatgctttcagatgacctacttacatcttcaatgtggataagataaagaacaaaacacatgcatctaaactgctgggcaatccagttgacttttaaatgtaagaatggaattccaaacacttaacacattcagctatatgacagaaagtaaatctatggatatggtattttgtgaatgatcttttaaataaaagaaaaccttacgtaatatttaa

SEQ ID NO: 3929 - protein, 69 aa, Homo sapiens
MGSRFRDGPPLRGSNMDFREPTEEERAQRPRLQLKPRTVATPLNQVANPNSAIFGGARPREEVVQKEQE

SEQ ID NO: 3930 - DNA, 1236 bp, Homo sapiens
cctacgacgatcgggcctacagcagcttcggcggcggcagagggtcccgcggcagtgctggtggccatggttcccgtagccagaaggagttgcccacagagcccccctacacagcatacgtaggaaatctacctttcaatacggttcagggcgacatagatgctatctttaaggatctcagcataaggagtgtacggctagtcagagacaaagacacagataaatttaaaggattctgctatgtagaattcgatgaagtggattcccttaaggaagccttgacatacgatggtgcagtaaggccaaggcgctttgggggtggagggggtggtgctggtgctgcactgggctgactgcggcgctgacgcagcgtttccccccatccctgttgcctgtgtgttgtgtggatctgttcctagtataggcaacataatgagatactgtgcttcccacctccccttcagttcagagccaaaatgggtctagaatctggcactttactcatttcctttgataaattgtactatgcagagctgtcaggaaccttcagatagcagtagaggactgcagctgtctaggtctgcggccacatcttggggacacactggactgttcccatgtgcagggttcagcagttatgtgggagtgctaggggttaggcttttgagcttgaacgcctgcgtgtgaacagatgaaaaatccttcagtacccaagtcccagtctgtcctatggggagcagtttgggggcggccggcagcaggagcctgggaaagaggccctcgccaggtgatggcagggccagggtggcctggggcacccagcggaatgtgcttagtatttggtcaccagccgtcatcctgggcttttcctactgtgtcttgttacaaggcctcagcaatccacagaactctctctccttccttccacctgtcagcttctctgcttctgagataagaaccatttgtgtaacaccaacacttaacttcagaaagacatgcattatgtggtgtaatcaaacccgatgctttcagatgacctacttacatcttcaatgtggataagataaagaacaaaacacatgcatctaaactgctgggcaatccagttgacttttaaatgtaagaatggaattccaaacacttaacacattcagctatatgacagaaagtaaatctatggatatggtattttgtgaatgatcttttaaataaaagaaaaccttacgtaatatttaa

SEQ ID NO: 3931 - protein, 110 aa, Homo sapiens
MGSSLGAAGSRSLGKRPSPGDGRARVAWGTQRNVLSIWSPAVILGFSYCVLLQGLSNPQNSLSFLPPVSFSASEIRTICVTPTLNFRKTCIMWCNQTRCFQMTYLHLQCG

SEQ ID NO: 3932 - DNA, 359 bp, Homo sapiens
tcaaatgtcaagtcgtttaggtttgttatccttcttcactccaagtgttccattgcttagttccaaaccattatcctctatgaaaagtgttaccagaaatatttggatttgctaagaggtctctgcatgacggttcatgtaaaagccctggctttggaataaggcagaccagagtttcatcagttcagccatgtgttagttgtgtgatctgaagtaagtttcttcacctctctgagcctcgttttccccacatatgagttagaaacatgtatttatttatgaaataggctctccttctgtcacccaggctgaagccatagaatcacttgaacctgggaggtggagtttgcagtgagccc

SEQ ID NO: 3933 - protein, 36 aa, Homo sapiens
MSSRLGLLSFFTPSVPLLSSKPLSSMKSVTRNIWIC

SEQ ID NO: 3934 - DNA, 611 bp, Homo sapiens
atcccagcactttggaaggccgaagcaggcggatcacttgtggccagaagtttgagaccaccctgaccaacgtggcaaaaccccatgtctactaaaaatacaaaacgggtgtggcggcacatacctgtaatcctagctacttgggaggctgaggcaggagaattgcttgaaccagggaggcggaggttgcattgagctgagatcatgccactgcactcctccagcctgggcgacagagagagacttctccctggaagcttagaacgtacaaagcagactctgaatgtctttccaggatcacactctggcttccagcttcccctggaaggttcaggagagtatttgtcgcctggttgcttttacatcatgctgattagacctgcacacccgggcatgaaatgagtgtgattgcatcattttcatagaacctaatggcagctgtatgtacgtctaagacttcttttgtgtaagtcgaatgttcttcgaagtttccccacgtcatgatttatgtgattttccgtcttgatcaggaccttctgaaggagctcaagtatgtggctgctccacggttgatgagtctctggttaagcatggccttccagttcagggct

SEQ ID NO: 3935 - protein, 65 aa, Homo sapiens
MPLHSSSLGDRERLLPGSLERTKQTLNVFPGSHSGFQLPLEGSGEYLSPGCFYIMLIRPAHPGMK

SEQ ID NO: 3936 - DNA, 2849 bp, Homo sapiens
ctgaaggccccttaagaccattgagaaaatactctttcctcctacacaccagtgggaattcagcatttctaaatgagatgcagtttacttctgccaagagcccacttagcaggcacacaaatgaatggggaaagaacgctttgcccccacaggaggcgccggtgggggtgaggcgctgtgctctctgctcatgcccctctgtgtagggcatggccaatttcggataactgctttgtttaccacacaggtgctttgcttgtagaatggcccacacctaaaacgcagccaaaacaggaaaattgggactttgtgtttttattttgtcttcatatagcgttttcttgtgatttttgtgttctgagttgtaaatacttctaaatttcaggtttatcttttaaaatagctgtatagatttctattagaaaatagagttcaacctgctttgaggctttcttgttttgcttaagccgtattaaaatacagtttcgtggtattaatatttttctacttttcatgcaagctgagcatgtaaacagctcgtttgtttgctctcctaagatcttgattcctttttctttgggaagtctgttagcgctgtcattactccacacattggcatttggacccacttttaacacactttattttggagagacttcagatagtggacaaactaaagaatttaaaatgaaactcaaacaattcccagaacattattctataagcagcttggagacgatagtttgaaaagtaattcagtgtcctgtttcttcctcaggcttcagggatgacttcttagggggcaggggaggtagtcgcccaggcgaccggcgaacaggcccccccatgggcagccgcttcagagatggccctcccctccgtggatccaacatggatttcagagaacccacagaagaggaaagagcacagagaccacgactccagcttaaacctcgaacagtcgcgacgcccctcaatcaagtagccaatcccaactctgctatcttcgggggtgccaggcctagagaggaagtcgttcaaaaggagcaagaatgagcctgcggttgggagggaatggggcgtggggggttagagcaggaccacagcctggtgagtccccgggcagccgtcctgcagccgccactcctgcgcctgccattggcctcctcacagcggaaacacagcttgtgagtgcatgtcagctgttaacaagtggtttttagtacattctgggctttgctgtatctatctagtgcctgtttgtgcgtttttttctttcttccgctgcttccccattttccttctgtcctttttctcctgctccttgttttcccagcagcacatggggttcctcggaggagcagaggtggccgccgtgggggggcgtttgggctgcggtgctgcgtcatttttcctttgctttctctttactttagacactggcccaactccaggcgtttcctttcattccctcagtgcttctcttctgacctgcatgttgagttctgtattgctggggcttccaacaaaaaccagagtcactgacagagggaacagcagagaccttgttggtattcagctgtgatggatatagagaatcagaggcaccttgttttcacaactaggataaaaatatctgcagggtcctttccattcctatttagagggagtcctggctccatgaccccctcccgagtggactgtccaagcagataggctcacacgagaaacagtgaggctgaaagggggggctatggaagagcggtagggagtccacggagaagatgcagtgaatgcttgcatgcattcacacgtgtgtgtgtcccagctagttcactcctttcgccgtgcgtggtggaggctggcctctctggctgggtgcagtgaatggccagcgggtttcttttctgctgggccaaggcgctttgggggtggagggggtggtgctggtgctgcactgggctgactgcggcgctgacgcagcgtttccccccatccctgttgcctgtgtgttgtgtggatctgttcctagtataggcaacataatgagatactgtgcttcccacctccccttcagttcagagccaaaatgggtctagaatctggcactttactcatttcctttgataaattgtactatgcagagctgtcaggaaccttcagatagcagtagaggactgcagctgtctaggtctgcggccacatcttggggacacactggactgttcccatgtgcagggttcagcagttatgtgggagtgctaggggttaggcttttgagcttgaacgcctgcgtgtgaacagatgaaaaatccttcagtacccaagtcccagtctgtcctatggggagcagtttgggggcggccggcagcaggagcctgggaaagaggccctcgccaggtgatggcagggccagggtggcctggggcacccagcggaatgtgcttagtatttggtcaccagccgtcatcctgggcttttcctactgtgtcttgttacaaggcctcagcaatccacagaactctctctccttccttccacctgtcagcttctctgcttctgagataagaaccatttgtgtaacaccaacacttaacttcagaaagacatgcattatgtggtgtaatcaaacccgatgctttcagatgacctacttacatcttcaatgtggataagataaagaacaaaacacatgcatctaaactgctgggcaatccagttgacttttaaatgtaagaatggaattccaaacacttaacacattcagctatatgacagaaagtaaatctatggatatggtattttgtgaatgatcttttaaataaaagaaaaccttacgtaatatttaa

SEQ ID NO: 3937 - protein, 69 aa, Homo sapiens; identical to SEQ ID NO: 3929

SEQ ID NO: 3938 - DNA, 1436 bp, Homo sapiens
cccagaggaaagagcacagagaccacgactccagcttaaacctcgaacagtcgcgacgcccctcaatcaagtagccaatcccaactctgctatcttcgggggtgccaggcctagagaggaagtcgttcaaaaggagcaagaatgagcctgcggttgggagggaatggggcgtggggggttagagcaggaccacagcctggtgagtccccgggcagccgtcctgcagccgccactcctgcgcctgccattggcctcctcacagcggaaacacagcttgtgagtgcatgtcagctgttaacaagtggtttttagtacattctgggctttgctgtatctatctagtgcctgtttgtgcgtttttttctttcttccgctgcttccccattttccttctgtcctttttctcctgctccttgttttcccagcagcacatggggttcctcggaggagcagaggtggccgccgtgggggggcgtttgggctgcggtgctgcgtcatttttcctttgctttctctttactttagacactggcccaactccaggcgtttcctttcattccctcagtgcttctcttctgacctgcatgttgacctgtgtgttgtgtggatctgttcctagtataggcaacataatgagatactgtgcttcccacctccccttcagttcagagccaaaatgggtctagaatctggcactttactcatttcctttgataaattgtactatgcagagctgtcaggaaccttcagatagcagtagaggactgcagctgtctaggtctgcggccacatcttggggacacactggactgttcccatgtgcagggttcagcagttatgtgggagtgctaggggttaggcttttgagcttgaacgcctgcgtgtgaacagatgaaaaatccttcagtacccaagtcccagtctgtcctatggggagcagtttgggggcggccggcagcaggagcctgggaaagaggccctcgccaggtgatggcagggccagggtggcctggggcacccagcggaatgtgcttagtatttggtcaccagccgtcatcctgggcttttcctactgtgtcttgttacaaggcctcagcaatccacagaactctctctccttccttccacctgtcagcttctctgcttctgagataagaaccatttgtgtaacaccaacacttaacttcagaaagacatgcattatgtggtgtaatcaaacccgatgctttcagatgacctacttacatcttcaatgtggataagataaagaacaaaacacatgcatctaaactgctgggcaatccagttgacttttaaatgtaagaatggaattccaaacacttaacacattcagctatatgacagaaagtaaatctatggatatggtattttgtgaatgatcttttaaataaaagaaaaccttacgtaatatttaa

SEQ ID NO: 3939 - protein, 133 aa, Homo sapiens
MSAVNKWFLVHSGLCCIYLVPVCAFFSFFRCFPIFLLSFFSCSLFSQQHMGFLGGAEVAAVGGRLGCGAASFFLCFLFTLDTGPTPGVSFHSLSASLLTCMLTCVLCGSVPSIGNIMRYCASHLPFSSEPKWV

SEQ ID NO: 3940 - DNA, 974 bp, Homo sapiens
ggaaagagcacagagaccacgactccagcttaaacctcgaacagtcgcgacgcccctcaatcaagtagccaatcccaactctgctatcttcgggggtgccaggcctagagaggaagtcgttcaaaaggagcaagaatgagcctgcggttgggagggaatggggcgtggggggttagagcaggaccacagcctggtgagtccccgggcagccgtcctgcagccgccactcctgcgcctgccattggcctcctcacagcggaaacacagcttgtgagtgcatgtcagctgttaacaagtggtttttagtacattctgggctttgctgtatctatctagtgcctgtttgtgcgtttttttctttcttccgctgcttccccattttccttctgtcctttttctcctgctccttgttttcccagcagcacatggggttcctcggaggagcagaggtggccgccgtgggggggcgtttgggctgcggtgctgcgtcatttttcctttgctttctctttactttagacactggcccaactccaggcgtttcctttcattccctcagtgcttctcttctgacctgcatgttgagttctgtattgctggggttttcctactgtgtcttgttacaaggcctcagcaatccacagaactctctctccttccttccacctgtcagcttctctgcttctgagataagaaccatttgtgtaacaccaacacttaacttcagaaagacatgcattatgtggtgtaatcaaacccgatgctttcagatgacctacttacatcttcaatgtggataagataaagaacaaaacacatgcatctaaactgctgggcaatccagttgacttttaaatgtaagaatggaattccaaacacttaacacattcagctatatgacagaaagtaaatctatggatatggtattttgtgaatgatcttttaaataaaagaaaaccttacgtaatatttaa

SEQ ID NO: 3941 - protein, 173 aa, Homo sapiens
MSAVNKWFLVHSGLCCIYLVPVCAFFSFFRCFPIFLLSFFSCSLFSQQHMGFLGGAEVAAVGGRLGCGAASFFLCFLFTLDTGPTPGVSFHSLSASLLTCMLSSVLLGFSYCVLLQGLSNPQNSLSFLPPVSFSASEIRTICVTPTLNFRKTCIMWCNQTRCFQMTYLHLQCG

SEQ ID NO: 3942 - DNA, 827 bp, Homo sapiens
tctgttgatggacacttagatttcttccaaatcttggctgttgtgaacagtggcgcaataaatatggcagtgcaggtatctcttcgaggtacaaaattcctttctttggggtatatacccggcagtgggattgctggatcatatggtagctcaatttttagttttgtgaggaacctccaaaccattttccatagtgggtgtagtaatttatgttcccaccagtagggtacaagggttcccttttcttcacatccttgccagcatttgttatttatatcacagttcaaaaaaataatgtaatataccaaaaacgattgagttgtggggaaaaaaaaatataagtgcactagaatttatgcaactgaacaggaactgtctagtttgttgtcttttttttttttttttttgagacagggtgtcattctgtcacccaggctgcagttcagtggcgtgatctcggctcactgcaacctccacctcccgggttcaagcgtcagcctcccgagtatctgggatttacaggcgcagccgtgcattgaaagtaatggtaaaaaccacaattacttttgtgccaacctaataccatcccacaccagtgtcccacagtcacacccccccttgtggttaaactttctctcagcagctgttgaaaagtttttcctctctccgataattctgctgatggcctctgcagagctgattaaacagtgttgtgactgtctcatgggaagagctggggcccagagggaccttgagtcagaaatgttgccagaaaaagtatctcctccaaccaaaacatctcaataaaaccattttagttgaaaagc

SEQ ID NO: 3943 - protein, 41 aa, Homo sapiens
MASAELIKQCCDCLMGRAGAQRDLESEMLPEKVSPPTKTSQ

SEQ ID NO: 3944 - DNA, 1856 bp, Homo sapiens
cattatcttgctccctgtctattggagtgtatctctcttcctctctgtgtgactttttgtgtttatgtgtgtgtttagtgtgtgtccatattttcctgttctcttgtgtctctctgctgtgtctctctctttttctttctgttttttgagacggagtctccctctgtcacccaggctggagtgcagtggtgcgatctcggctcactgcaacctctgcttctgaggttcaaacgattctcctgcctcagcctcccgagtagctggaattacagacacatgccaccatgcccagctaattttgtatttttaatagagacggggtttcaccatgttggccaggctggtcttaaactcttgaccttacgtgatccacccgcctcggcctcccaaagtttttggattacaggtgtgagccacctcgcccggtcctatctctctttcttctctttctccctctcactttgtttctcttctctctctctctcccgcctccttcccccgtctcccctcccttccccccaccgccctcttcatagctgagcctgtccggcagtgcggcggatgtacggatgattcagtggctggcaggaagcccgccctgcccgcccgccagtgtcagtggtgttggcatcagcttgggcaggtgtgcgggctcaggatggggcggccgtggtgaggaaccctggactctcagagatggaatttcaccgtgttgcctaggctggtctggagctcttgatctcaagcgatcctccctgcctcggcctcccaacgtgctgggattataggcgtgagccaccgctcctggccagggtctgttcctagttgcaacagttcttggaaacccactcgagagggccacgcctccattcaccaggccacggtgggtggtgtgcgtatgttttgctgaggcctggtcatcacgctgtggctccaaggctgggaccagccacagaccgagaagccggtcaggtgccagccagagattcagggctccctccctctgaacatcctgtctttagcccatccttggcatcccagctcatgtcatcccagccacctgcagcagtgccctagggccccatccctctgcggatcatgctcttgggccacctcctccaagaagccttccctgacctccctcctcccagctcccaccacaggcagaatctgggcttgcagttgtttcaggaatggaagccccattcccaggtcctggggggaccccaaggcaggaggtgggcagagaggggtcctgcgaagcatagaggagccctgagttgctctggggtgggcgagggcttccgggtgcgtctgcgtgagtggtggccacagactgtcacctccaggagccagggtgggtttactggaggcaacccactgtgggttgatgggcagagccagggttaggggcaggacactggggcctgaatcccatctttccacttagcagacgtgagctctctggcctcagtttctcgatttgtgaaatgcagtgaacctcgtcctcaaagggcagttgtctagattaagcgaggctgtgtgtagggctgtgtgcgtgcacatggggctgtcttgtgggcccccagaaccttccagcacttatcaagggtgaagatggcccacagggcagaggtgttggtttggggtcacatggggtgaacaggactggttctgtccttgcccagtgcaggagcggggaggggaggtggtgtttccgcagcctaggctcaggtatggggctgtccgagcacagtgggggtgtggggtaggattcctgaaaaaggggccccttgctcacgggcacctcccatttcagcatcacaagaggcaacaccaggagccaacatgagctc

SEQ ID NO: 3945 - protein, 72 aa, Homo sapiens
MIQWLAGSPPCPPASVSGVGISLGRCAGSGWGGRGEEPWTLRDGISPCCLGWSGALDLKRSSLPRPPNVLGL

SEQ ID NO: 3946 - DNA, 1320 bp, Homo sapiens
cattatcttgctccctgtctattggagtgtatctctcttcctctctgtgtgactttttgtgtttatgtgtgtgtttagtgtgtgtccatattttcctgttctcttgtgtctctctgctgtgtctctctctttttctttctgttttttgagacggagtctccctctgtcacccaggctggagtgcagtggtgcgatctcggctcactgcaacctctgcttctgaggttcaaacgattctcctgcctcagcctcccgagtagctggaattacagacacatgccaccatgcccagctaattttgtatttttaatagagacggggtttcaccatgttggccaggctggtcttaaactcttgaccttacgtgatccacccgcctcggcctcccaaagtttttggattacaggtgtgagccacctcgcccggtcctatctctctttcttctctttctccctctcactttgtttctcttctctctctctctcccgcctccttcccccgtctcccctcccttccccccaccgccctcttcatagctgagcctgtccggcagtgcggcggatgtacggatgattcagtggctggcaggaagcccgccctgcccgcccgccagtgtcagtggtgttggcatcagcttgggcaggtgtgcgggctcaggatggggcggccgtggtgaggaaccctggactctcagagatggaatttcaccgtgttgcctaggctggtctggagctcttgatctcaagcgatcctccctgcctcggcctcccaacgtgctgggattataggcgtgagccaccgctcctggccaggcatcacaagaggcaacaccaggagccaacatgagctcggggactgaactgctgtggcccggagcagcgctgctggtgctgttgggggtggcagccagtctgtgtgtgcgctgctcacgcccaggtgcaaagaggtcagagaaaatctaccagcagagaagtctgcgtgaggaccaacagagctttacggggtcccggacctactccttggtcgggcaggcatggccaggacccctggcggacatggcacccacaaggaaggacaagctgttgcaattctaccccagcctggaggatccagcatcttccaggtaccagaacttcagcaaaggaagcagacacgggtcggaggaagcctacatagaccccattgccatggagtattacaactgggggcggttctcgaagcccccagaaggtgaggcgaaggacaaagccggaggtggaggaagtggtgtgggagctcagggcagaagccatacctccaggcaggagaggaggctgggcc

SEQ ID NO: 3947 - protein, 158 aa, Homo sapiens
MSSGTELLWPGAALLVLLGVAASLCVRCSRPGAKRSEKIYQQRSLREDQQSFTGSRTYSLVGQAWPGPLADMAPTRKDKLLQFYPSLEDPASSRYQNFSKGSRHGSEEAYIDPIAMEYYNWGRFSKPPEGEAKDKAGGGGSGVGAQGRSHTSRQERRL

SEQ ID NO: 3948 - DNA, 3021 bp, Homo sapiens
cattatcttgctccctgtctattggagtgtatctctcttcctctctgtgtgactttttgtgtttatgtgtgtgtttagtgtgtgtccatattttcctgttctcttgtgtctctctgctgtgtctctctctttttctttctgttttttgagacggagtctccctctgtcacccaggctggagtgcagtggtgcgatctcggctcactgcaacctctgcttctgaggttcaaacgattctcctgcctcagcctcccgagtagctggaattacagacacatgccaccatgcccagctaattttgtatttttaatagagacggggtttcaccatgttggccaggctggtcttaaactcttgaccttacgtgatccacccgcctcggcctcccaaagtttttggattacaggtgtgagccacctcgcccggtcctatctctctttcttctctttctccctctcactttgtttctcttctctctctctctcccgcctccttcccccgtctcccctcccttccccccaccgccctcttcatagctgagcctgtccggcagtgcggcggatgtacggatgattcagtggctggcaggaagcccgccctgcccgcccgccagtgtcagtggtgttggcatcagcttgggcaggtgtgcgggctcaggatggggcggccgtggtgaggaaccctggactctcagcatcacaagaggcaacaccaggagccaacatgagctcggggactgaactgctgtggcccggagcagcgctgctggtgctgttgggggtggcagccagtctgtgtgtgcgctgctcacgcccaggtgcaaagaggtcagagaaaatctaccagcagagaagtctgcgtgaggaccaacagagctttacggggtcccggacctactccttggtcgggcaggcatggccaggacccctggcggacatggcacccacaaggaaggacaagctgttgcaattctaccccagcctggaggatccagcatcttccaggtaccagaacttcagcaaaggaagcagacacgggtcggaggaagcctacatagaccccattgccatggagtattacaactgggggcggttctcgaagcccccagaagatgatgatgccaattcctacgagaatgtgctcatttgcaagcagaaaaccacagagacaggtgcccagcaggagggcataggtggcctctgcagaggggacctcagcctgtcactggccctgaagactggccccacttctggtctctgtccctctgcctccccggaagaagatgaggaatctgaggattatcagaactcagcatccatccatcagtggcgcgagtccaggaaggtcatggggcaactccagagagaagcatcccctggcccggtgggaagcccagacgaggaggacggggaaccggattacgtgaatggggaggtggcagccacagaagcctagggcagaccaagaagaaaggggcgtcaggcagggaattctggtgacttcaggggcaaagaagtgggcaccgggtgggtctcccaactccactgcatcctcctggctgcgaccttggaccaagtgacaacctcccagaacttagttcctcacttggtgcccacctctcagagaagacatcgcacacacggccgggcacggtggctcacgcctgtaatcccggcactttgggaggccgaggcaggcagatcacctgaggtcacgagttcgagaccagcctggccaacatggtgaaacttcatctctactaaaaacacaaaaaattagccaggcatggtggtgggtgcctgtagtcccagttagttgggaggctgaggcaggagaatcatttgaaccctgaaggcggaggttgcggtgagttaagatcacatgcactcaaccctgggtgacagagcgagactccgtctcaataaataaataaaaaaacagacattgcacacaaagcctcagcccagcaggcactcggtcaatgctggaaacagacaggaggcagggacgttgggaaatgtaacagtggctgagacgcgctgaggagccaccgcaggccagtgagatggtgcggcgctaagcgctcacacgtgcaccatctcttagcacccaaagccacagagcagttaagccacctgcccaaggccacatcttgaagtaaggggaggaggagatggaatccccagtggtcagacatcagacatcaaagcctaggctgggtctactgcttgggaagcacgatggacccccagagggccttgaaggctgcccaaagtccccatctgggagacccaggccgtcatctcagcgagcaggctggagggtggaaaccacagtgaacctgggtggtcaagagtcagccccagaggcaggtgcaggagtttgagccaaatgtgcagagccccacgtcattcattcaaccagtatccactgggcccctgctacgggcaagtcctgctctaggtgctgggaacaccaacataaagaacagcaaacccctgaccccttagaacttgcattctggtaggagagagaaaacagatagggctggacacagcggtcatgcctataaatcccagcacttcgggaggctgaggcgggaggatcctttgagcctctgagtttgaggccagcctgggcaacatagcaagacctctctctctacaaaaactttttttttttttttttgagacagagtatcactgtcactcaggctggagtgcagtggcgccatctcggctcactgcaacctccacctcctgggttcaagcgattctcgtgcctcagccttccaagtagctgggattacaggcacacgccaccatgtccagcctctataaaaacatttaaaattagccaggcatggtggtggatgccctagagtcccactgacttgggaggctgaggtgggaagatcacttgagcctgggaggtcaaggttgcaatgagccatggttgctgcagtgagctgtggtcgtgccactgcactcaagcctgggcaacagagcaagaccccatctc

SEQ ID NO: 3949 - protein, 243 aa, Homo sapiens; identical to SEQ ID NO: 450

SEQ ID NO: 3950 - DNA, 2553 bp, Homo sapiens
cattatcttgctccctgtctattggagtgtatctctcttcctctctgtgtgactttttgtgtttatgtgtgtgtttagtgtgtgtccatattttcctgttctcttgtgtctctctgctgtgtctctctctttttctttctgttttttgagacggagtctccctctgtcacccaggctggagtgcagtggtgcgatctcggctcactgcaacctctgcttctgaggttcaaacgattctcctgcctcagcctcccgagtagctggaattacagacacatgccaccatgcccagctaattttgtatttttaatagagacggggtttcaccatgttggccaggctggtcttaaactcttgaccttacgtgatccacccgcctcggcctcccaaagtttttggattacaggtgtgagccacctcgcccggtcctatctctctttcttctctttctccctctcactttgtttctcttctctctctctctcccgcctccttcccccgtctcccctcccttccccccaccgccctcttcatagctgagcctgtccggcagtgcggcggatgtacggatgattcagtggctggcaggaagcccgccctgcccgcccgccagtgtcagtggtgttggcatcagcttgggcaggtgtgcgggctcaggatggggcggccgtggtgaggaaccctggactctcagagatggaatttcaccgtgttgcctaggctggtctggagctcttgatctcaagcgatcctccctgcctcggcctcccaacgtgctgggattataggcgtgagccaccgctcctggccagggtctgttcctagttgcaacagttcttggaaacccactcgagagggccacgcctccattcaccaggccacgcatcacaagaggcaacaccaggagccaacatgagctcggggactgaactgctgtggcccggagcagcgctgctggtgctgttgggggtggcagccagtctgtgtgtgcgctgctcacgcccaggtgcaaagaggtcagagaaaatctaccagcagagaagtctgcgtgaggaccaacagagctttacggggtcccggacctactccttggtcgggcaggcatggccaggacccctggcggacatggcacccacaaggaaggacaagctgttgcaattctaccccagcctggaggatccagcatcttccaggtaccagaacttcagcaaaggaagcagacacgggtcggaggaagcctacatagaccccattgccatggagtattacaactgggggcggttctcgaagcccccagaagatgatgatgccaattcctacgagaatgtgctcatttgcaagcagaaaaccacagagacaggtgcccagcaggagggcataggtggcctctgcagaggggacctcagcctgtcactggccctgaagactggccccacttctggtctctgtccctctgcctccccggaagaagatgaggaatctgaggattatcagaactcagcatccatccatcagtggcgcgagtccaggaaggtcatggggcaactccagagagaagcatcccctggcccggtgggaagcccagacgaggaggacggggaaccggattacgtgaatggggaggtggcagccacagaagcctagggcagaccaagaagaaaggagccaaggcaaagagggaccactgtgctcatggacccatcgctgccttccaaggaccatttcccagagctactcaacttttaagcccctgccatggttgctcctggaaggagaaccagccaccctgaggaccacctggccatgcgtgcacagcctgggaaaagacagttactcacgggagctgcaggcccgtcaccaagccctctcccgacccaggctttgtggggcaggcacctggtaccaagggtaacccggctcctggtatggacggatgcgcaggatttaggataagctgtcacccagtccccataacaaaaccactgtccaacactggtatctgtgttcttttgtgctatgaatttggattcctaattgctattgttggttgctggggttttaaatgattgataagcttgtacagttaacttatagagggggagccatatttaacattctggatttcagagtagagatttctgtgttgtctcctagaaagcattacatgtagtttatttcagcatccttgttgggtggggccctggctctcttcccctttggtgggacctcccctttctttgggcttcagttcactcaggaagaaatgaggctgtcgccatctttatgtgcttccagtggaaatgtcacttgctacagacaatagtgcatgagagtctagagaagtagtgaccagaacagggcagagtaggtcccctccatggccctgaatcctcctctgctccagggctggcctctgcagagctgattaaacagtgttgtgactgtctcatgggaagagctggggcccagagggaccttgagtcagaaatgttgccagaaaaagtatctcctccaaccaaaacatctcaataaaaccattttagttgaaaagca

SEQ ID NO: 3951 - protein, 243 aa, Homo sapiens; identical to SEQ ID NO: 450

SEQ ID NO: 3952 - DNA, 2364 bp, Homo sapiens
cattatcttgctccctgtctattggagtgtatctctcttcctctctgtgtgactttttgtgtttatgtgtgtgtttagtgtgtgtccatattttcctgttctcttgtgtctctctgctgtgtctctctctttttctttctgttttttgagacggagtctccctctgtcacccaggctggagtgcagtggtgcgatctcggctcactgcaacctctgcttctgaggttcaaacgattctcctgcctcagcctcccgagtagctggaattacagacacatgccaccatgcccagctaattttgtatttttaatagagacggggtttcaccatgttggccaggctggtcttaaactcttgaccttacgtgatccacccgcctcggcctcccaaagtttttggattacaggtgtgagccacctcgcccggtcctatctctctttcttctctttctccctctcactttgtttctcttctctctctctctcccgcctccttcccccgtctcccctcccttccccccaccgccctcttcatagctgagcctgtccggcagtgcggcggatgtacggatgattcagtggctggcaggaagcccgccctgcccgcccgccagtgtcagtggtgttggcatcagcttgggcaggtgtgcgggctcaggatggggcggccgtggtgaggaaccctggactctcagcatcacaagaggcaacaccaggagccaacatgagctcggggactgaactgctgtggcccggagcagcgctgctggtgctgttgggggtggcagccagtctgtgtgtgcgctgctcacgcccaggtgcaaagaggtcagagaaaatctaccagcagagaagtctgcgtgaggaccaacagagctttacggggtcccggacctactccttggtcgggcaggcatggccaggacccctggcggacatggcacccacaaggaaggacaagctgttgcaattctaccccagcctggaggatccagcatcttccaggtaccagaacttcagcaaaggaagcagacacgggtcggaggaagcctacatagaccccattgccatggagtattacaactgggggcggttctcgaagcccccagaagatgatgatgccaattcctacgagaatgtgctcatttgcaagcagaaaaccacagagacaggtgcccagcaggagggcataggtggcctctgcagaggggacctcagcctgtcactggccctgaagactggccccacttctggtctctgtccctctgcctccccggaagaagatgaggaatctgaggattatcagaactcagcatccatccatcagtggcgcgagtccaggaaggtcatggggcaactccagagagaagcatcccctggcccggtgggaagcccagacgaggaggacggggaaccggattacgtgaatggggaggtggcagccacagaagcctagggcagaccaagaagaaaggagccaaggcaaagagggaccactgtgctcatggacccatcgctgccttccaaggaccatttcccagagctactcaacttttaagcccctgccatggttgctcctggaaggagaaccagccaccctgaggaccacctggccatgcgtgcacagcctgggaaaagacagttactcacgggagctgcaggcccgtcaccaagccctctcccgacccaggctttgtggggcaggcacctggtaccaagggtaacccggctcctggtatggacggatgcgcaggatttaggataagctgtcacccagtccccataacaaaaccactgtccaacactggtatctgtgttcttttgtgctatgaatttggattcctaattgctattgttggttgctggggttttaaatgattgataagcttgtacagttaacttatagagggggagccatatttaacattctggatttcagagtagagatttctgtgttgtctcctagaaagcattacatgtagtttatttcagcatccttgttgggtggggccctggctctcttcccctttggtgggacctcccctttctttgggcttcagttcactcaggaagaaatgaggctgtcgccatctttatgtgcttccagtggaaatgtcacttgctacagacaatagtgcatgagagtctagagaagtagtgaccagaacagggcagagtaggtcccctccatggccctgaatcctcctctgctccagggctggcctctgcagagctgattaaacagtgttgtgactgtctcatgggaagagctggggcccagagggaccttgagtcagaaatgttgccagaaaaagtatctcctccaaccaaaacatctcaataaaaccattttagttgaaaagca

SEQ ID NO: 3953 - protein, 243 aa, Homo sapiens; identical to SEQ ID NO: 450

SEQ ID NO: 3954 - DNA, 2483 bp, Homo sapiens
cattatcttgctccctgtctattggagtgtatctctcttcctctctgtgtgactttttgtgtttatgtgtgtgtttagtgtgtgtccatattttcctgttctcttgtgtctctctgctgtgtctctctctttttctttctgttttttgagacggagtctccctctgtcacccaggctggagtgcagtggtgcgatctcggctcactgcaacctctgcttctgaggttcaaacgattctcctgcctcagcctcccgagtagctggaattacagacacatgccaccatgcccagctaattttgtatttttaatagagacggggtttcaccatgttggccaggctggtcttaaactcttgaccttacgtgatccacccgcctcggcctcccaaagtttttggattacaggtgtgagccacctcgcccggtcctatctctctttcttctctttctccctctcactttgtttctcttctctctctctctcccgcctccttcccccgtctcccctcccttccccccaccgccctcttcatagctgagcctgtccggcagtgcggcggatgtacggatgattcagtggctggcaggaagcccgccctgcccgcccgccagtgtcagtggtgttggcatcagcttgggcaggtgtgcgggctcaggatggggcggccgtggtgaggaaccctggactctcagagatggaatttcaccgtgttgcctaggctggtctggagctcttgatctcaagcgatcctccctgcctcggcctcccaacgtgctgggattataggcgtgagccaccgctcctggccaggcatcacaagaggcaacaccaggagccaacatgagctcggggactgaactgctgtggcccggagcagcgctgctggtgctgttgggggtggcagccagtctgtgtgtgcgctgctcacgcccaggtgcaaagaggtcagagaaaatctaccagcagagaagtctgcgtgaggaccaacagagctttacggggtcccggacctactccttggtcgggcaggcatggccaggacccctggcggacatggcacccacaaggaaggacaagctgttgcaattctaccccagcctggaggatccagcatcttccaggtaccagaacttcagcaaaggaagcagacacgggtcggaggaagcctacatagaccccattgccatggagtattacaactgggggcggttctcgaagcccccagaagatgatgatgccaattcctacgagaatgtgctcatttgcaagcagaaaaccacagagacaggtgcccagcaggagggcataggtggcctctgcagaggggacctcagcctgtcactggccctgaagactggccccacttctggtctctgtccctctgcctccccggaagaagatgaggaatctgaggattatcagaactcagcatccatccatcagtggcgcgagtccaggaaggtcatggggcaactccagagagaagcatcccctggcccggtgggaagcccagacgaggaggacggggaaccggattacgtgaatggggaggtggcagccacagaagcctagggcagaccaagaagaaaggagccaaggcaaagagggaccactgtgctcatggacccatcgctgccttccaaggaccatttcccagagctactcaacttttaagcccctgccatggttgctcctggaaggagaaccagccaccctgaggaccacctggccatgcgtgcacagcctgggaaaagacagttactcacgggagctgcaggcccgtcaccaagccctctcccgacccaggctttgtggggcaggcacctggtaccaagggtaacccggctcctggtatggacggatgcgcaggatttaggataagctgtcacccagtccccataacaaaaccactgtccaacactggtatctgtgttcttttgtgctatgaatttggattcctaattgctattgttggttgctggggttttaaatgattgataagcttgtacagttaacttatagagggggagccatatttaacattctggatttcagagtagagatttctgtgttgtctcctagaaagcattacatgtagtttatttcagcatccttgttgggtggggccctggctctcttcccctttggtgggacctcccctttctttgggcttcagttcactcaggaagaaatgaggctgtcgccatctttatgtgcttccagtggaaatgtcacttgctacagacaatagtgcatgagagtctagagaagtagtgaccagaacagggcagagtaggtcccctccatggccctgaatcctcctctgctccagggctggcctctgcagagctgattaaacagtgttgtgactgtctcatgggaagagctggggcccagagggaccttgagtcagaaatgttgccagaaaaagtatctcctccaaccaaaacatctcaataaaaccattttagttgaaaagca

SEQ ID NO: 3955 - protein, 243 aa, Homo sapiens; identical to SEQ ID NO: 450

SEQ ID NO: 3956 - DNA, 2307 bp, Homo sapiens
attatcttgctccctgtctattggagtgtatctctcttcctctctgtgtgactttttgtgtttatgtgtgtgtttagtgtgtgtccatattttcctgttctcttgtgtctctctgctgtgtctctctctttttctttctgttttttgagacggagtctccctctgtcacccaggctggagtgcagtggtgcgatctcggctcactgcaacctctgcttctgaggttcaaacgattctcctgcctcagcctcccgagtagctggaattacagacacatgccaccatgcccagctaattttgtatttttaatagagacggggtttcaccatgttggccaggctggtcttaaactcttgaccttacgtgatccacccgcctcggcctcccaaagtttttggattacaggtgtgagccacctcgcccggtcctatctctctttcttctctttctccctctcactttgtttctcttctctctctctctcccgcctccttcccccgtctcccctcccttccccccaccgccctcttcatagctgagcctgtccggcagtgcggcggatgtacggatgattcagtggctggcaggaagcccgccctgcccgcccgccagtgtcagtggtgttggcatcagcttgggcaggtgtgcgggctcaggatggggcggccgtggtgaggaaccctggactctcagcatcacaagaggcaacaccaggagccaacatgagctcggggactgaactgctgtggcccggagcagcgctgctggtgctgttgggggtggcagccagtctgtgtgtgcgctgctcacgcccaggtgcaaagaggtcagagaaaatctaccagcagagaagtctgcgtgaggaccaacagagctttacggggtcccggacctactccttggtcgggcaggcatggccaggacccctggcggacatggcacccacaaggaaggacaagctgttgcaattctaccccagcctggaggatccagcatcttccaggtaccagaacttcagcaaaggaagcagacacgggtcggaggaagcctacatatgatgatgccaattcctacgagaatgtgctcatttgcaagcagaaaaccacagagacaggtgcccagcaggagggcataggtggcctctgcagaggggacctcagcctgtcactggccctgaagactggccccacttctggtctctgtccctctgcctccccggaagaagatgaggaatctgaggattatcagaactcagcatccatccatcagtggcgcgagtccaggaaggtcatggggcaactccagagagaagcatcccctggcccggtgggaagcccagacgaggaggacggggaaccggattacgtgaatggggaggtggcagccacagaagcctagggcagaccaagaagaaaggagccaaggcaaagagggaccactgtgctcatggacccatcgctgccttccaaggaccatttcccagagctactcaacttttaagcccctgccatggttgctcctggaaggagaaccagccaccctgaggaccacctggccatgcgtgcacagcctgggaaaagacagttactcacgggagctgcaggcccgtcaccaagccctctcccgacccaggctttgtggggcaggcacctggtaccaagggtaacccggctcctggtatggacggatgcgcaggatttaggataagctgtcacccagtccccataacaaaaccactgtccaacactggtatctgtgttcttttgtgctatgaatttggattcctaattgctattgttggttgctggggttttaaatgattgataagcttgtacagttaacttatagagggggagccatatttaacattctggatttcagagtagagatttctgtgttgtctcctagaaagcattacatgtagtttatttcagcatccttgttgggtggggccctggctctcttcccctttggtgggacctcccctttctttgggcttcagttcactcaggaagaaatgaggctgtcgccatctttatgtgcttccagtggaaatgtcacttgctacagacaatagtgcatgagagtctagagaagtagtgaccagaacagggcagagtaggtcccctccatggccctgaatcctcctctgctccagggctggcctctgcagagctgattaaacagtgttgtgactgtctcatgggaagagctggggcccagagggaccttgagtcagaaatgttgccagaaaaagtatctcctccaaccaaaacatctcaataaaaccattttagttgaaaagca

SEQ ID NO: 3957 - protein, 111 aa, Homo sapiens
MSSGTELLWPGAALLVLLGVAASLCVRCSRPGAKRSEKIYQQRSLREDQQSFTGSRTYSLVGQAWPGPLADMAPTRKDKLLQFYPSLEDPASSRYQNFSKGSRHGSEEAYI

SEQ ID NO: 3958 - DNA, 1502 bp, Homo sapiens
ggggacagggagcactgcaaaggctcagacacgggaaatagctggccctgccttgggctgcagcacccgagctgggtgcaaagcaggggccaggggagaaagcaattagctgggtctttcttccagatccagcatcttccaggtaccagaacttcagcaaaggaagcagacacgggtcggaggaagcctacatagaccccattgccatggagtattacaactgggggcggttctcgaagcccccagaagatgatgatgccaattcctacgagaatgtgctcatttgcaagcagaaaaccacagagacaggtgcccagcaggagggcataggtggcctctgcagaggggacctcagcctgtcactggccctgaagactggccccacttctggtctctgtccctctgcctccccggaagaagatgaggaatctgaggattatcagaactcagcatccatccatcagtggcgcgagtccaggaaggtcatggggcaactccagagagaagcatcccctggcccggtgggaagcccagacgaggaggacggggaaccggattacgtgaatggggaggtggcagccacagaagcctagggcagaccaagaagaaaggagccaaggcaaagagggaccactgtgctcatggacccatcgctgccttccaaggaccatttcccagagctactcaacttttaagcccctgccatggttgctcctggaaggagaaccagccaccctgaggaccacctggccatgcgtgcacagcctgggaaaagacagttactcacgggagctgcaggcccgtcaccaagccctctcccgacccaggctttgtggggcaggcacctggtaccaagggtaacccggctcctggtatggacggatgcgcaggatttaggataagctgtcacccagtccccataacaaaaccactgtccaacactggtatctgtgttcttttgtgctatgaatttggattcctaattgctattgttggttgctggggttttaaatgattgataagcttgtacagttaacttatagagggggagccatatttaacattctggatttcagagtagagatttctgtgttgtctcctagaaagcattacatgtagtttatttcagcatccttgttgggtggggccctggctctcttcccctttggtgggacctcccctttctttgggcttcagttcactcaggaagaaatgaggctgtcgccatctttatgtgcttccagtggaaatgtcacttgctacagacaatagtgcatgagagtctagagaagtagtgaccagaacagggcagagtaggtcccctccatggccctgaatcctcctctgctccagggctggcctctgcagagctgattaaacagtgttgtgactgtctcatgggaagagctggggcccagagggaccttgagtcagaaatgttgccagaaaaagtatctcctccaaccaaaacatctcaataaaaccattttagttgaaaagca

SEQ ID NO: 3959 - protein, 128 aa, Homo sapiens [sequence omitted]

SEQ ID NO: 3960 - DNA, 738 bp, Homo sapiens
aaagagggaccactgtgctcatggacccatcgctgccttccaaggaccatttcccagagctactcaacttttaagcccctgccatggttgctcctggaaggagaaccagccaccctgaggaccacctggccatgcgtgcacagcctgggaaaagacagttactcacgggagctgcaggcccgtcaccaagccctctcccgacccaggctttgtggggcaggcacctggtaccaagggtaacccggctcctggtatggacggatgcgcaggatttaggataagctgtcacccagtccccataacaaaaccactgtccaacactggtatctgtgttcttttgtgctatgaatttggattcctaattgctattgttggttgctggggttttaaatgattgataagcttgtacagttaacttatagagggggagccatatttaacattctggatttcagagtagagatttctgtgttgtctcctagaaagcattacatgtagtttatttcagcatccttgttgggtggggccctggctctcttcccctttggtgggacgtcccctccatggccctgaatcctcctctgctccagggctggcctctgcagagctgattaaacagtgttgtgactgtctcatgggaagagctggggcccagagggaccttgagtcagaaatgttgccagaaaaagtatctcctccaaccaaaacatctcaataaaaccattttagttgaaaagc

SEQ ID NO: 3961 - protein, 65 aa, Homo sapiens
MVAPGRRTSHPEDHLAMRAQPGKRQLLTGAAGPSPSPLPTQALWGRHLVPRVTRLLVWTDAQDLG

SEQ ID NO: 3962 - DNA, 162 bp, Homo sapiens
gtagtgaccagaacagggcagagtaggtcccctccatggccctgaatcctcctctgctccagggctggcctctgcagagctgattaaacagtgttgtgactaaatgttgccagaaaaagtatctcctccaaccaaaacatctcaataaaaccattttagttg

SEQ ID NO: 3963 - protein, 31 aa, Homo sapiens
PEQGRVGPLHGPESSSAPGLASAELIKQCCD

SEQ ID NO: 3964 - DNA, 914 bp, Homo sapiens
tggtaaaggagatgatccagcactgtgtgaatgccaacattgacgaagcctacaaggttggcctccttccccccgtcctggcagaggaaccgctcacttcttgggcagaggaaaaaaaaaaaatatcattggcaacatctttcgagtgtgtaaaactttccaaatggcagaatacctgaaactggagtttatcaaggaaattggatacactcacatgaaaatagcggaaggagtgaactctcttttgcagatggcaggcctcctggcaaggctgtgtcagaagacaatggccccggtggccagttagagcagagacttcactgactgacttacaggtgccctattctgaggtacaggagccgcggctttctgatgggggaaaatgccgccttaggctggagccaacatgactgtcctttaaactccagtggctggccaggcacggtagctcacgcctgtaatcccaacactttgggaggccgaggcaggtggatcacctgaggtcagaagttcaagaccagcctggccaacatggggaaaccctgtctttactaaaaatataaaaattagctgggtgtggtggcgggcacctgtaatcccagctactcgggaggctgtggcaggagaatcgcttgaacccaggaggtggaggttgcagtgagccaagatcacaccattgcactccagcctgggcgacagagtctccatctggggaaaaaaattaaataaataaactcccgtgacttgcatgtttgcttctgggacgtctgtgccccgcaagtgtttgagtttggcctccaccccattgatgcggtgacggggcggaaaggcgcagagaagctgagggcggtctctgatctgtgtgtgggttgacattttagctaataaagccttgcagtgtttgttggcaataa

SEQ ID NO: 3965 - protein, 55 aa, Homo sapiens
MIQHCVNANIDEAYKVGLLPPVLAEEPLTSWAEEKKKISLATSFECVKLSKWQNT

SEQ ID NO: 3966 - DNA, 1602 bp, Homo sapiens
cgagaatggaggtggaggccgtctgtggtggcgcgggcgaggtggaggcccaggactctgaccctgcccctgccttcagcaaggcccccggcagcgccggccactacgaactgccgtggtctttgcaagggaaggaaatgtgcccaacatcatcattgcgggccctccaggaaccggcaagaccacaagcattctgtgcttggcccgggccctgctgggcccagcactcaaagatgccatgttggaactcaatgcttcaaatgacaggggcattgacgttgtgaggaataaaattaaaatgtttgctcaacaaaaagtcactcttcccaaaggccgacataagatcatcattctggatgaagcagacagcatgaccgacggagcccagcaagccttgaggagaaccatggaaatctactctaaaaccactcgcttcgcccttgcttgtaatgcttcggataagatcatcgagcccattcagtcccgctgtgcagtcctccggtacacaaagctgaccgacgcccagatcctcaccaggctgatgaatgttatcgagaaggagagggtaccctacactgatgacggcctagaagccatcatcttcacggcccagggagacatgaggcaggcgctgaacaacctgcagtccaccttctcaggatttggcttcattaacagtgagaacgtgttcaaggtctgtgacgagccccacccactgctggtaaaggagatgatccagcactgtgtgaatgccaacattgacgaagcctacaagattcttgctcacttgtggcatctgggctactcaccagaagatatcattggcaacatctttcgagtgtgtaaaactttccaaatggcagaatacctgaaactggagtttatcaaggaaattggatacactcacatgaaaatagcggaaggagtgaactctcttttgcagatggcaggcctcctggcaaggctgtgtcagaagacaatggccccggtggccagttagagcagagacttcactgactgacttacaggtgccctattctgaggtacaggagccgcggctttctgatgggggaaaatgccgccttaggctggagccaacatgactgtcctttaaactccagtggctggccaggcacggtagctcacgcctgtaatcccaacactttgggaggccgaggcaggtggatcacctgaggtcagaagttcaagaccagcctggccaacatggggaaaccctgtctttactaaaaatataaaaattagctgggtgtggtggcgggcacctgtaatcccagctactcgggaggctgtggcaggagaatcgcttgaacccaggaggtggaggttgcagtgagccaagatcacaccattgcactccagcctgggcgacagagtctccatctggggaaaaaaattaaataaataaactcccgtgacttgcatgtttgcttctgggacgtctgtgccccgcaagtgtttgagtttggcctccaccccattgatgcggtgacggggcggaaaggcgcagagaagctgagggcggtctctgatctgtgtgtgggttgacattttagctaataaagccttgcagtgtttgttggc

SEQ ID NO: 3967 - protein, 253 aa, Homo sapiens
MLELNASNDRGIDVVRNKIKMFAQQKVTLPKGRHKIIILDEADSMTDGAQQALRRTMEIYSKTTRFALACNASDKIIEPIQSRCAVLRYTKLTDAQILTRLMNVIEKERVPYTDDGLEAIIFTAQGDMRQALNNLQSTFSGFGFINSENVFKVCDEPHPLLVKEMIQHCVNANIDEAYKILAHLWHLGYSPEDIIGNIFRVCKTFQMAEYLKLEFIKEIGYTHMKIAEGVNSLLQMAGLLARLCQKTMAPVAS

SEQ ID NO: 3968 - DNA, 1694 bp, Homo sapiens
gcgagaatggaggtggaggccgtctgtggtggcgcgggcgaggtggaggcccaggactctgaccctgcccctgccttcagcaaggcccccggcagcgccggccactacgaactgccgtgatggagtcacactttgtcacacaggctggagtgcagtggtgtgatttctgctcactacaacctgcatctccctggttcaatcaattctgcctcagccttcctagtagctgggattacaggcatggttgaaaaatataggccagtaaagctgaatgaaattgtcgggaatgaagacaccgtgagcaggctagaggtctttgcaagggaaggaaatgtgcccaacatcatcattgcgggccctccaggaaccggcaagaccacaagcattctgtgcttggcccgggccctgctgggcccagcactcaaagatgccatgttggaactcaatgcttcaaatgacagcatgaccgacggagcccagcaagccttgaggagaaccatggaaatctactctaaaaccactcgcttcgcccttgcttgtaatgcttcggataagatcatcgagcccattcagtcccgctgtgcagtcctccggtacacaaagctgaccgacgcccagatcctcaccaggctgatgaatgttatcgagaaggagagggtaccctacactgatgacggcctagaagccatcatcttcacggcccagggagacatgaggcaggcgctgaacaacctgcagtccaccttctcaggatttggcttcattaacagtgagaacgtgttcaaggtctgtgacgagccccacccactgctggtaaaggagatgatccagcactgtgtgaatgccaacattgacgaagcctacaagattcttgctcacttgtggcatctgggctactcaccagaagatatcattggcaacatctttcgagtgtgtaaaactttccaaatggcagaatacctgaaactggagtttatcaaggaaattggatacactcacatgaaaatagcggaaggagtgaactctcttttgcagatggcaggcctcctggcaaggctgtgtcagaagacaatggccccggtggccagttagagcagagacttcactgactgacttacaggtgccctattctgaggtacaggagccgcggctttctgatgggggaaaatgccgccttaggctggagccaacatgactgtcctttaaactccagtggctggccaggcacggtagctcacgcctgtaatcccaacactttgggaggccgaggcaggtggatcacctgaggtcagaagttcaagaccagcctggccaacatggggaaaccctgtctttactaaaaatataaaaattagctgggtgtggtggcgggcacctgtaatcccagctactcgggaggctgtggcaggagaatcgcttgaacccaggaggtggaggttgcagtgagccaagatcacaccattgcactccagcctgggcgacagagtctccatctggggaaaaaaattaaataaataaactcccgtgacttgcatgtttgcttctgggacgtctgtgccccgcaagtgtttgagtttggcctccaccccattgatgcggtgacggggcggaaaggcgcagagaagctgagggcggtctctgatctgtgtgtgggttgacattttagctaataaagccttgcagtgtttgttggc

SEQ ID NO: 3969 - protein, 283 aa, Homo sapiens
MVEKYRPVKLNEIVGNEDTVSRLEVFAREGNVPNIIIAGPPGTGKTTSILCLARALLGPALKDAMLELNASNDSMTDGAQQALRRTMEIYSKTTRFALACNASDKIIEPIQSRCAVLRYTKLTDAQILTRLMNVIEKERVPYTDDGLEAIIFTAQGDMRQALNNLQSTFSGFGFINSENVFKVCDEPHPLLVKEMIQHCVNANIDEAYKILAHLWHLGYSPEDIIGNIFRVCKTFQMAEYLKLEFIKEIGYTHMKIAEGVNSLLQMAGLLARLCQKTMAPVAS

SEQ ID NO: 3970 - DNA, 1606 bp, Homo sapiens
aaggggcggtgcctcgggtggcgggaagaggaggcgcgagaatggaggtggaggccgtctgtggtggcgcgggcgaggtggaggcccaggactctgaccctgcccctgccttcagcaaggcccccggcagcgccggccactacgaactgccgtgggttgaaaaatataggccagtaaagctgaatgaaattgtcgggaatgaagacaccgtgagcaggctagaggtctttgcaagggaaggaaatgtgcccaacatcatcattgcgggccctccaggaaccggcaagaccacaagcattctgtgcttggcccgggccctgctgggcccagcactcaaagatgccatgttggaactcaatgcttcaaatgacagcatgaccgacggagcccagcaagccttgaggagaaccatggaaatctactctaaaaccactcgcttcgcccttgcttgtaatgcttcggataagatcatcgagcccattcagtcccgctgtgcagtcctccggtacacaaagctgaccgacgcccagatcctcaccaggctgatgaatgttatcgagaaggagagggtaccctacactgatgacggcctagaagccatcatcttcacggcccagggagacatgaggcaggcgctgaacaacctgcagtccaccttctcaggatttggcttcattaacagtgagaacgtgttcaaggtctgtgacgagccccacccactgctggtaaaggagatgatccagcactgtgtgaatgccaacattgacgaagcctacaagattcttgctcacttgtggcatctgggctactcaccagaagatatcattggcaacatctttcgagtgtgtaaaactttccaaatggcagaatacctgaaactggagtttatcaaggaaattggatacactcacatgaaaatagcggaaggagtgaactctcttttgcagatggcaggcctcctggcaaggctgtgtcagaagacaatggccccggtggccagttagagcagagacttcactgactgacttacaggtgccctattctgaggtacaggagccgcggctttctgatgggggaaaatgccgccttaggctggagccaacatgactgtcctttaaactccagtggctggccaggcacggtagctcacgcctgtaatcccaacactttgggaggccgaggcaggtggatcacctgaggtcagaagttcaagaccagcctggccaacatggggaaaccctgtctttactaaaaatataaaaattagctgggtgtggtggcgggcacctgtaatcccagctactcgggaggctgtggcaggagaatcgcttgaacccaggaggtggaggttgcagtgagccaagatcacaccattgcactccagcctgggcgacagagtctccatctggggaaaaaaattaaataaataaactcccgtgacttgcatgtttgcttctgggacgtctgtgccccgcaagtgtttgagtttggcctccaccccattgatgcggtgacggggcggaaaggcgcagagaagctgagggcggtctctgatctgtgtgtgggttgacattttagctaataaagccttgcagtgtttgttggc

SEQ ID NO: 3971 - protein, 320 aa, Homo sapiens; identical to SEQ ID NO: 454

SEQ ID NO: 3972 - DNA, 1714 bp, Homo sapiens
ggcgtcaaggggcggtgcctcgggtggcgggaagaggaggcgcgagaatggaggtggaggccgtctgtggtggcgcgggcgaggtggaggcccaggactctgaccctgcccctgccttcagcaaggcccccggcagcgccggccactacgaactgccgtgggttgaaaaatataggccagtaaagctgaatgaaattgtcgggaatgaagacaccgtgagcaggctagaggtctttgcaagggaaggaaatgtgcccaacatcatcattgcgggccctccaggaaccggcaagaccacaagcattctgtgcttggcccgggccctgctgggcccagcactcaaagatgccatgttggaactcaatgcttcaaatgacaggggcattgacgttgtgaggaataaaattaaaatgtttgctcaacaaaaagtcactcttcccaaaggccgacataagatcatcattctggatgaagcagacagcatgaccgacggagcccagcaagccttgaggagaaccatggaaatctactctaaaaccactcgcttcgcccttgcttgtaatgcttcggataagatcatcgagcccattcagtcccgctgtgcagtcctccggtacacaaagctgaccgacgcccagatcctcaccaggctgatgaatgttatcgagaaggagagggtaccctacactgatgacggcctagaagccatcatcttcacggcccagggagacatgaggcaggcgctgaacaacctgcagtccaccttctcaggatttggcttcattaacagtgagaacgtgttcaaggtctgtgacgagccccacccactgctggtaaaggagatgatccagcactgtgtgaatgccaacattgacgaagcctacaagattcttgctcacttgtggcatctgggctactcaccagaagatatcattggcaacatctttcgagtgtgtaaaactttccaaatggcagaatacctgaaactggagtttatcaaggaaattggatacactcacatgaaaatagcggaaggagtgaactctcttttgcagatggcaggcctcctggcaaggctgtgtcagaagacaatggccccggtggccagttagagcagagacttcactgactgacttacaggtgccctattctgaggtacaggagccgcggctttctgatgggggaaaatgccgccttaggctggagccaacatgactgtcctttaaactccagtggctggccaggcacggtagctcacgcctgtaatcccaacactttgggaggccgaggcaggtggatcacctgaggtcagaagttcaagaccagcctggccaacatggggaaaccctgtctttactaaaaatataaaaattagctgggtgtggtggcgggcacctgtaatcccagctactcgggaggctgtggcaggagaatcgcttgaacccaggaggtggaggttgcagtgagccaagatcacaccattgcactccagcctgggcgacagagtctccatctggggaaaaaaattaaataaataaactcccgtgacttgcatgtttgcttctgggacgtctgtgccccgcaagtgtttgagtttggcctccaccccattgatgcggtgacggggcggaaaggcgcagagaagctgagggcggtctctgatctgtgtgtgggttgacattttagctaataaagccttgcagtgtttgttggc

SEQ ID NO: 3973 - protein, 354 aa, Homo sapiens; identical to SEQ ID NO: 456

SEQ ID NO: 3974 - DNA, 748 bp, Homo sapiens
tggtaaaggagatgatccagcactgtgtgaatgccaacattgacgaagcctacaaggttggcctccttccccccgtcctggcagaggaaccgctcacttcttgggcagaggaaaaaaaaaaaatatcattggcaacatctttcgagtgtgtaaaactttccaaatggcagaatacctgaaactggagtttatcaaggaaattggatacactcacatgaaaatagcggaaggagtgaactctcttttgcagatggcaggcctcctggcaaggctgtgtcagaagacaatggccccggtggccagttagagcagagacttcactgactgacttacaggtgccctattctgaggtacaggagccgcggctttctgatgggggaaaatgccgccttaggctggagccaacatgactgtcctttaaactccagtggctggccaggcacggtagctcacgcctgtaatcccaacactttgggaggccgaggcaggtggatcacctgaggtcagaagttcaagaccagcctggccaacatggggaaaccctgtctttactaaaaatataaaaattagctgggtgtggtggcgggcacctgtaatcccagctactcgggaggctgtggcaggagaatcgcttgaacccaggaggtggaggttgcagtgagccaagatcacaccattgcactccagcctgggcgacagagtctccatctggggaaaaaaattaaataaataaactcccgtgacttgc

SEQ ID NO: 3975 - protein, 55 aa, Homo sapiens; identical to SEQ ID NO: 3965

SEQ ID NO: 3976 - DNA, 1533 bp, Homo sapiens
gcgagaatggaggtggaggccgtctgtggtggcgcgggcgaggtggaggcccaggactctgaccctgcccctgccttcagcaaggcccccggcagcgccggccactacgaactgccgtgatggagtcacactttgtcacacaggctggagtgcagtggtgtgatttctgctcactacaacctgcatctccctggttcaatcaattctgcctcagccttcctagtagctgggattacaggcatggttgaaaaatataggccagtaaagctgaatgaaattgtcgggaatgaagacaccgtgagcaggctagaggtctttgcaagggaaggaaatgtgcccaacatcatcattgcgggccctccaggaaccggcaagaccacaagcattctgtgcttggcccgggccctgctgggcccagcactcaaagatgccatgttggaactcaatgcttcaaatgacagcatgaccgacggagcccagcaagccttgaggagaaccatggaaatctactctaaaaccactcgcttcgcccttgcttgtaatgcttcggataagatcatcgagcccattcagtcccgctgtgcagtcctccggtacacaaagctgaccgacgcccagatcctcaccaggctgatgaatgttatcgagaaggagagggtaccctacactgatgacggcctagaagccatcatcttcacggcccagggagacatgaggcaggcgctgaacaacctgcagtccaccttctcaggatttggcttcattaacagtgagaacgtgttcaaggtctgtgacgagccccacccactgctggtaaaggagatgatccagcactgtgtgaatgccaacattgacgaagcctacaagattcttgctcacttgtggcatctgggctactcaccagaagatatcattggcaacatctttcgagtgtgtaaaactttccaaatggcagaatacctgaaactggagtttatcaaggaaattggatacactcacatgaaaatagcggaaggagtgaactctcttttgcagatggcaggcctcctggcaaggctgtgtcagaagacaatggccccggtggccagttagagcagagacttcactgactgacttacaggtgccctattctgaggtacaggagccgcggctttctgatgggggaaaatgccgccttaggctggagccaacatgactgtcctttaaactccagtggctggccaggcacggtagctcacgcctgtaatcccaacactttgggaggccgaggcaggtggatcacctgaggtcagaagttcaagaccagcctggccaacatggggaaaccctgtctttactaaaaatataaaaattagctgggtgtggtggcgggcacctgtaatcccagctactcgggaggctgtggcaggagaatcgcttgaacccaggaggtggaggttgcagtgagccaagatcacaccattgcactccagcctgggcgacagagtctccatctggggaaaaaaattaaataaataaactcccgtgacttgc

SEQ ID NO: 3977 - protein, 283 aa, Homo sapiens; identical to SEQ ID NO: 3969

SEQ ID NO: 3978 - DNA, 1445 bp, Homo sapiens
aaggggcggtgcctcgggtggcgggaagaggaggcgcgagaatggaggtggaggccgtctgtggtggcgcgggcgaggtggaggcccaggactctgaccctgcccctgccttcagcaaggcccccggcagcgccggccactacgaactgccgtgggttgaaaaatataggccagtaaagctgaatgaaattgtcgggaatgaagacaccgtgagcaggctagaggtctttgcaagggaaggaaatgtgcccaacatcatcattgcgggccctccaggaaccggcaagaccacaagcattctgtgcttggcccgggccctgctgggcccagcactcaaagatgccatgttggaactcaatgcttcaaatgacagcatgaccgacggagcccagcaagccttgaggagaaccatggaaatctactctaaaaccactcgcttcgcccttgcttgtaatgcttcggataagatcatcgagcccattcagtcccgctgtgcagtcctccggtacacaaagctgaccgacgcccagatcctcaccaggctgatgaatgttatcgagaaggagagggtaccctacactgatgacggcctagaagccatcatcttcacggcccagggagacatgaggcaggcgctgaacaacctgcagtccaccttctcaggatttggcttcattaacagtgagaacgtgttcaaggtctgtgacgagccccacccactgctggtaaaggagatgatccagcactgtgtgaatgccaacattgacgaagcctacaagattcttgctcacttgtggcatctgggctactcaccagaagatatcattggcaacatctttcgagtgtgtaaaactttccaaatggcagaatacctgaaactggagtttatcaaggaaattggatacactcacatgaaaatagcggaaggagtgaactctcttttgcagatggcaggcctcctggcaaggctgtgtcagaagacaatggccccggtggccagttagagcagagacttcactgactgacttacaggtgccctattctgaggtacaggagccgcggctttctgatgggggaaaatgccgccttaggctggagccaacatgactgtcctttaaactccagtggctggccaggcacggtagctcacgcctgtaatcccaacactttgggaggccgaggcaggtggatcacctgaggtcagaagttcaagaccagcctggccaacatggggaaaccctgtctttactaaaaatataaaaattagctgggtgtggtggcgggcacctgtaatcccagctactcgggaggctgtggcaggagaatcgcttgaacccaggaggtggaggttgcagtgagccaagatcacaccattgcactccagcctgggcgacagagtctccatctggggaaaaaaattaaataaataaactcccgtgacttgc

SEQ ID NO: 3979 - protein, 320 aa, Homo sapiens; identical to SEQ ID NO: 454

SEQ ID NO: 3980 - DNA, 1553 bp, Homo sapiens
ggcgtcaaggggcggtgcctcgggtggcgggaagaggaggcgcgagaatggaggtggaggccgtctgtggtggcgcgggcgaggtggaggcccaggactctgaccctgcccctgccttcagcaaggcccccggcagcgccggccactacgaactgccgtgggttgaaaaatataggccagtaaagctgaatgaaattgtcgggaatgaagacaccgtgagcaggctagaggtctttgcaagggaaggaaatgtgcccaacatcatcattgcgggccctccaggaaccggcaagaccacaagcattctgtgcttggcccgggccctgctgggcccagcactcaaagatgccatgttggaactcaatgcttcaaatgacaggggcattgacgttgtgaggaataaaattaaaatgtttgctcaacaaaaagtcactcttcccaaaggccgacataagatcatcattctggatgaagcagacagcatgaccgacggagcccagcaagccttgaggagaaccatggaaatctactctaaaaccactcgcttcgcccttgcttgtaatgcttcggataagatcatcgagcccattcagtcccgctgtgcagtcctccggtacacaaagctgaccgacgcccagatcctcaccaggctgatgaatgttatcgagaaggagagggtaccctacactgatgacggcctagaagccatcatcttcacggcccagggagacatgaggcaggcgctgaacaacctgcagtccaccttctcaggatttggcttcattaacagtgagaacgtgttcaaggtctgtgacgagccccacccactgctggtaaaggagatgatccagcactgtgtgaatgccaacattgacgaagcctacaagattcttgctcacttgtggcatctgggctactcaccagaagatatcattggcaacatctttcgagtgtgtaaaactttccaaatggcagaatacctgaaactggagtttatcaaggaaattggatacactcacatgaaaatagcggaaggagtgaactctcttttgcagatggcaggcctcctggcaaggctgtgtcagaagacaatggccccggtggccagttagagcagagacttcactgactgacttacaggtgccctattctgaggtacaggagccgcggctttctgatgggggaaaatgccgccttaggctggagccaacatgactgtcctttaaactccagtggctggccaggcacggtagctcacgcctgtaatcccaacactttgggaggccgaggcaggtggatcacctgaggtcagaagttcaagaccagcctggccaacatggggaaaccctgtctttactaaaaatataaaaattagctgggtgtggtggcgggcacctgtaatcccagctactcgggaggctgtggcaggagaatcgcttgaacccaggaggtggaggttgcagtgagccaagatcacaccattgcactccagcctgggcgacagagtctccatctggggaaaaaaattaaataaataaactcccgtgacttgc

SEQ ID NO: 3981 - protein, 354 aa, Homo sapiens; identical to SEQ ID NO: 456

SEQ ID NO: 3982 - DNA, 1406 bp, Homo sapiens
caggaaaccatggcttccaccgggaaaaggcaagggcaggtgtgggtgacctctggagccatcaggaggctttcattgggaagatgtaggggtcgacattgtaccagaggcagagcctcatgccactgcggagaatgctgcagggaggacggagtccccagcaccatgcacctgcctgctggagtagcctgaccccttgtttagggtgtcaggctgaggctgggggaccttttgtagggaaggccagttcctactccggggtggaggtgggaattggcccaaaagacctcccagttctaaagtgaattccaagtggttctgggcaactgaccccccaagtgatctaagacagatgacttgtgactttaaagctgtccccaagtgagcatccttcacaggcccttggttgctctcttgttcatctgtcttatgtttgggaaatttatcttcctggtgccggaagcacttctctttgatggtgagaggagcattccccaaactcatcctggttgctggagaatttgatgaaaacaacaggttgagaagttttacccatagattgcctggaagtcggtctgttggggcctccccgctcacattgtcccttctagcccctgaccgcctttcctttccctttggccaggtctgtgacgagccccacccactgctggtaaaggagatgatccagcactgtgtgaatgccaacattgacgaagcctacaagattcttgctcacttgtggcatctgggctactcaccagaagatatcattggcaacatctttcgagtgtgtaaaactttccaaatggcagaatacctgaaactggagtttatcaaggtcggtgagaatgtagaaatgcctctgtcctcaagaatgtggcccatagtggccgggtgctgtgggccacacctgtaatcccagcactttgggaggccgaggtgggcagatcacctgaggtcaggagttcgagaccagcctggccaacgtagtgaaagcctctgtctactaaaaatacaaaaattagctgggcatggctgggcgtggtggctcatgcctgtaatcccagcactttgggaggccgaggtgggcggatcacctgaggtcaggagtttgagaccagcctggccaacatggcaaagccccatctctactaaaaatacaaaacttagctgggtgtggtggcaagcgcctataatcccagctacttgggaggctgagggaggaggatcgcttgaacctgggaggtggaggttgcagtgagccaagatcgcaccactgcactccagcctgggcagcagagcgagactgtctcaaaacaaaaaaaaaagactgtgggccctggcttcgctttctctgctcacaggcctggcatctagaaggtgctcagtgtttcccaactgcagtg

SEQ ID NO: 3983 - protein, 146 aa, Homo sapiens
MVRGAFPKLILVAGEFDENNRLRSFTHRLPGSRSVGASPLTLSLLAPDRLSFPFGQVCDEPHPLLVKEMIQHCVNANIDEAYKILAHLWHLGYSPEDIIGNIFRVCKTFQMAEYLKLEFIKVGENVEMPLSSRMWPIVAGCCGPHL

SEQ ID NO: 3984 - DNA, 424 bp, Homo sapiens
attcttatgggctgtttttctacccaatctttcctcccatagcccaaattgtcataatattcaataatgatgatcccagaactttgggaggctaaggtgggaggatccctcaaactcctgacttcaagtgatccgcttgcctcagcctcccaaagtgctgggattacaggtgtgagccaccgcgtctggccaagcagttggttttaacgatagtattaacgtatacagattcacaacttaacacagtgtttttctttccatgtaatttggaaaaaatgtttgaattggccatctctcccctattccccctttaaactgatggagcggtcttgtctgttttttcaatcattattcacaggtcttttatttttccggaggagaaaatacacactcctcttgaaatatacacttttcttgaaatgtc

SEQ ID NO: 3985 - protein, 46 aa, Homo sapiens
MMIPELWEAKVGGSLKLLTSSDPLASASQSAGITGVSHRVWPSSWF

SEQ ID NO: 3986 - DNA, 5499 bp, Homo sapiens
gctggctccgctggctccgctggctccgcgggcgctcagctcggctcggccgcggggcgcgcaggcggctgctgggcggcctcggtgcgcgcctcccgccttcccagagacgtggcgcgaggcccgggccctgagcacctatcgcggggatccccggcgccaggagggggtgcagccggtgggcagcgccgcgcagggaggggccgcagcatcctcgccccccagcgcgcccgggcccgagaggaggaggccggggctctccgggcctcccgccgcttagcctgatgctggaaggacgaaggtgagtgaagatggcagagaggacgtgaccagcactcacccttgtccacctgcccagtggcaccgccatgcagaagcccagcggcctgaagccccccggccgtggggggaagcactccagccccatgggccggacatctactgggtcagcttcatcctcggcggcggtggccgctagctccaaggaaggctccccactgcacaaacagtcatctggaccctcctcctccccggccgcagctgctgcccccgagaagccgggccccaaggcggcggaagtgggggatgacttcctgggggactttgtggtgggcgagcgggtgtgggtgaacggcgtgaagccaggcgtggtgcagtatctgggagagacgcagttcgcaccgggccagtgggctggcgtggtgctggacgacccggtgggcaagaatgatggcgcggtgggcggcgtgcgctacttcgagtgcccggccctccagggtatcttcacgcggccctccaagctgacccggcagcccacggccgagggctcggggagtgatgcccactccgtggagtcgctgactgcccagaacctgtcattgcattcgggcacggccacgcccccgctgaccagccgcgtcatccccctgcgggagagcgtcctcaacagctccgtgaagactggcaacgagtcgggatccaacctctcagacagcggctctgtgaagcggggcgaaaaggacctgcgcctgggggaccgcgtgctggttggcgggacgaagactggcgtggtgcggtacgtgggggagacagactttgccaagggcgagtggtgtggcgtggagctggacgagccccttgggaagaatgatggggcggtggcgggcaccaggtacttccagtgcccacccaagtttggtctcttcgcgcccatccacaaagtgatccgtatcggcttcccatctaccagcccagccaaggccaagaagaccaagcgtatggccatgggtgtgtcagcactgacccacagtcccagcagttcctccatcagctccgtcagctctgtggcctcctccgtggggggtcggcccagccgcagtggcctgctcacggagacctcttcacgctacgcccgcaagatctcgggcaccacggccttgcaggaggcactgaaggagaagcagcagcacattgagcagctgctggctgaacgagacctggaacgggctgaggtggccaaggccacaagccacatctgcgaggtggagaaggagattgccctgctcaaggcacagcatgagcagtatgttgcagaagccgaggagaagctgcagcgagcccggctgctcgtggagagcgtgcggaaagagaaggtggacctgtccaaccagctggaggaggagaggaggaaggtggaggatctgcagttccgcgtggaggaggagtccatcaccaagggagacctggagctgaccacagtggccgagaagtcgcgcgtgctgcagctggaggaggagctcaccctgcgccgaggtgaaatcgaggagctccagcagtgcctgttgcactcgggtcccccacctccggaccacccagacgccgccgagatcctgcggctacgggagcggctgctctcggccagcaaggaacaccagagggagagtggggtgctgcgggataaatacgagaaggccctgaaggcctaccaggcggaggtggacaagctccgcgcggccaacgagaagtacgcacaggaggtggcgggcctgaaggacaaggttcagcaggccaccagcgagaacatggggctaatggacaactggaaatccaagctggactcgctggcctcggaccaccagaagtccctggaggacctcaaagccaccctgaactcgggcccaggcgcccagcagaaggagatcggcgagctgaaggcagtgatggagggcatcaagatggagcaccagctggagctgggtaacttgcaggccaagcatgacctggagaccgccatgcacgtgaaggagaaggaggccctgcgagagaagctgcaggaggcccaggaggagctggctgggctgcagcggcactggcgggcccagctggaggtgcaagccagccagcaccggctggagctgcaggaggcccaggaccagcgccgggatgccgagctgcgtgtgcacgagctggaaaaactggacgtggagtaccggggccaggcgcaggctatcgagttcctcaaggagcagatctcgctggccgagaagaagatgttggactacgagcggctgcagcgggcagaagcccagggcaaacaggaggtcgagagtttgcgggagaagctcctggtggctgagaacagactccaggcggtcgaggccctgtgctcctcccagcacacccacatgattgagtcgaatgacatttcagaggagacgatcaggacgaaggaaactgtggagggcctgcaggacaagctgaacaagagggacaaagaggtgacagccttgacctcccagaccgagatgctcagggcccaagtaagtgcgctggagagcaagtgtaagtcaggcgagaagaaggtggacgccctcctgaaggagaagcggcgcctggaggcagagctggagaccgtgtcccggaagacccatgacgcctcgggccagctagtcctcatcagccaggagctgctgcggaaggagcggagcctgaacgaactgcgggtgttgctgctggaggccaatcgtcactccccagggccggagagggacctgagccgtgaggtacacaaggctgagtggcggatcaaggagcagaaactcaaggatgacatccggggcctgcgtgaaaagctgaccgggctggacaaagagaaatccctgtcggatcagaggcgctactccctcatcgaccggtcctcggcgcccgagcttctgcggctgcagcaccagctgatgagcacggaggacgccctgcgggatgcgctggaccaggctcagcaggtggagaagctgatggaggccatgaggagctgccctgacaaggcccagaccatcggcaattccggttctgcaaacggcatccaccagcaggacaaagctcagaaacaagaggacaagcactgatcctgaggggatactgtggagcagcccagtccacaccagagccccacgcggctgcccggcagtacctcctccaggcaggagccgggactgtcactttggagacaaaacagtgtttgtaacaataacgtactcaccgccgcggacaatcccccaccccgatccctcgccagaccaggacgcttcctcaagcccagccttctacagagagtgtgaacggtacagccccggcctgacccggggaccttcagcctggacacccggcagcttctggagtttgtcagtggaggcagaggggatccggccaggcccctctgtccagaaggagctgccctgaggaccatcttagcggccctgtcctctttttccgcccattctccctcgggtctccccagaggggccggcgggggctggggagggggtaagtttatccatgcagacaccaagggggagcatccagtctttaagagccaagtgggggccccttttccgaagccacttccaggccaaggcagtcgccagggcttcttgtccccaccttctgaaccttcttcaaacagtagtacaagctcccctcagccagcctgcctgcccagcgaggcccccaggttcaaggtgttggcgggggcggagggcaggggaacgggatccttctcccgctgcccaccaacaccaacacacacacacctctaagctgctggccgaagatgtcaccaaggccaaagacacagtattatgaaggtttggaaacccctctcctcacctcccaccgtgaccttgggcaaaccctggctcggagcccagggcagaggcagctcagagtggaggctctaggcaggtttgacaaaggtcagtaatacggtttcccctggggttgaccagatgttccaaaatatctgcatccacctggagatgcagctaagtgggtccttatgtacacaccacgttcacacacacacagagggaccacgtgtgcacgcatgaccgtgtgggtggcggcgtttgctgtgaaccacgctcaggccacacagagacacatacttggtttctgggactgagacccaggcctggcaggaccgtgcctacagatactgcaaacgttcctacagcctagaggtgcgtatacacacccaagtacacgcagccaggcattcaggggtgtgtttgccacatggagcatcccttcctggtcttgccaggcacctgcacagagcgtctccagccccatctcctaacgggggctgggggtaagagaaatctaactgcgctcccccaacccctcgccctgccatcttcccctcaagcctgctaagttatcccaggcctgtgcgtggtggaaaaagccagccttggccctgcagcctccacctcgccgctgggggaccaacaggttgcttacagctttgcaccccggcatcagcacaggggtccctgccccaccctccggcagctcagggagtgttttcctgtgaggcctcccccatcagtggaccagagggagaagcccgatgccccatcccggctttcccgtaacgcacaggacacgtgtgcaattcataggaacggcccagatcgccctcatgagtgccacctggtacaggtaggtggcgctcacgttcctgcccaaatgcagcccatcggggagtcacagtcagtccccccggcccccctcccagtccctgttggctttcggtagctctcgcatgcagttctattaacagccgtctagaagcgatgctttagtggcctaacccagggtcaaatacagctctttctagcaaaatcaggcagctctgccccatcggtaggggcaccgattagtctactaacagccagaggtccatctagcagggtgccgggaggagctgagcccccggaggtgggctcctggtgacgggtgtccaagaagcggtttccttgggagcttctgcctccgtgggcctctcagcccgccccgtgtggccgcccgggtgtggctcagccatgtcccctccccaggtccttcattcacccctcccctccccacagtggaattgttgaagtgtggcgagtctgtgctcgggacaataaagcttgtgacaggtccaggaccccggca

SEQ ID NO: 3987 - protein, 1011 aa, Homo sapiens
MQKPSGLKPPGRGGKHSSPMGRTSTGSASSSAAVAASSKEGSPLHKQSSGPSSSPAAAAAPEKPGPKAAEVGDDFLGDFVVGERVWVNGVKPGVVQYLGETQFAPGQWAGVVLDDPVGKNDGAVGGVRYFECPALQGIFTRPSKLTRQPTAEGSGSDAHSVESLTAQNLSLHSGTATPPLTSRVIPLRESVLNSSVKTGNESGSNLSDSGSVKRGEKDLRLGDRVLVGGTKTGVVRYVGETDFAKGEWCGVELDEPLGKNDGAVAGTRYFQCPPKFGLFAPIHKVIRIGFPSTSPAKAKKTKRMAMGVSALTHSPSSSSISSVSSVASSVGGRPSRSGLLTETSSRYARKISGTTALQEALKEKQQHIEQLLAERDLERAEVAKATSHICEVEKEIALLKAQHEQYVAEAEEKLQRARLLVESVRKEKVDLSNQLEEERRKVEDLQFRVEEESITKGDLELTTVAEKSRVLQLEEELTLRRGEIEELQQCLLHSGPPPPDHPDAAEILRLRERLLSASKEHQRESGVLRDKYEKALKAYQAEVDKLRAANEKYAQEVAGLKDKVQQATSENMGLMDNWKSKLDSLASDHQKSLEDLKATLNSGPGAQQKEIGELKAVMEGIKMEHQLELGNLQAKHDLETAMHVKEKEALREKLQEAQEELAGLQRHWRAQLEVQASQHRLELQEAQDQRRDAELRVHELEKLDVEYRGQAQAIEFLKEQISLAEKKMLDYERLQRAEAQGKQEVESLREKLLVAENRLQAVEALCSSQHTHMIESNDISEETIRTKETVEGLQDKLNKRDKEVTALTSQTEMLRAQVSALESKCKSGEKKVDALLKEKRRLEAELETVSRKTHDASGQLVLISQELLRKERSLNELRVLLLEANRHSPGPERDLSREVHKAEWRIKEQKLKDDIRGLREKLTGLDKEKSLSDQRRYSLIDRSSAPELLRLQHQLMSTEDALRDALDQAQQVEKLMEAMRSCPDKAQTIGNSGSANGIHQQDKAQKQEDKH

SEQ ID NO: 3988 - DNA, 5604 bp, Homo sapiens
gctggctccgctggctccgctggctccgcgggcgctcagctcggctcggccgcggggcgcgcaggcggctgctgggcggcctcggtgcgcgcctcccgccttcccagagacgtggcgcgaggcccgggccctgagcacctatcgcggggatccccggcgccaggagggggtgcagccggtgggcagcgccgcgcagggaggggccgcagcatcctcgccccccagcgcgcccgggcccgagaggaggaggccggggctctccgggcctcccgccgcttagcctgatgctggaaggacgaaggtgagtgaagatggcagagaggacgtgaccagcactcacccttgtccacctgcccagtggcaccgccatgcagaagcccagcggcctgaagccccccggccgtggggggaagcactccagccccatgggccggacatctactgggtcagcttcatcctcggcggcggtggccgctagctccaaggaaggctccccactgcacaaacagtcatctggaccctcctcctccccggccgcagctgctgcccccgagaagccgggccccaaggcggcggaagtgggggatgacttcctgggggactttgtggtgggcgagcgggtgtgggtgaacggcgtgaagccaggcgtggtgcagtatctgggagagacgcagttcgcaccgggccagtgggctggcgtggtgctggacgacccggtgggcaagaatgatggcgcggtgggcggcgtgcgctacttcgagtgcccggccctccagggtatcttcacgcggccctccaagctgacccggcagcccacggccgagggctcggggagtgatgcccactccgtggagtcgctgactgcccagaacctgtcattgcattcgggcacggccacgcccccgctgaccagccgcgtcatccccctgcgggagagcgtcctcaacagctccgtgaagactggcaacgagtcgggatccaacctctcagacagcggctctgtgaagcggggcgaaaaggacctgcgcctgggggaccgcgtgctggttggcgggacgaagactggcgtggtgcggtacgtgggggagacagactttgccaagggcgagtggtgtggcgtggagctggacgagccccttgggaagaatgatggggcggtggcgggcaccaggtacttccagtgcccacccaagtttggtctcttcgcgcccatccacaaagtgatccgtatcggcttcccatctaccagcccagccaaggccaagaagaccaagcgtatggccatgggtgtgtcagcactgacccacagtcccagcagttcctccatcagctccgtcagctctgtggcctcctccgtggggggtcggcccagccgcagtggcctgctcacggagacctcttcacgctacgcccgcaagatctcgggcaccacggccttgcaggaggcactgaaggagaagcagcagcacattgagcagctgctggctgaacgagacctggaacgggctgaggtggccaaggccacaagccacatctgcgaggtggagaaggagattgccctgctcaaggcacagcatgagcagtatgttgcagaagccgaggagaagctgcagcgagcccggctgctcgtggagagcgtgcggaaagagaaggtggacctgtccaaccagctggaggaggagaggaggaaggtggaggatctgcagttccgcgtggaggaggagtccatcaccaagggagacctggagacccagacgcagctggagcacgcgcgcattggggagctggaacagagcctgctactggagaaggcgcaggccgagcggctgctccgagaattagcggacaacaggctgaccacagtggccgagaagtcgcgcgtgctgcagctggaggaggagctcaccctgcgccgaggtgaaatcgaggagctccagcagtgcctgttgcactcgggtcccccacctccggaccacccagacgccgccgagatcctgcggctacgggagcggctgctctcggccagcaaggaacaccagagggagagtggggtgctgcgggataaatacgagaaggccctgaaggcctaccaggcggaggtggacaagctccgcgcggccaacgagaagtacgcacaggaggtggcgggcctgaaggacaaggttcagcaggccaccagcgagaacatggggctaatggacaactggaaatccaagctggactcgctggcctcggaccaccagaagtccctggaggacctcaaagccaccctgaactcgggcccaggcgcccagcagaaggagatcggcgagctgaaggcagtgatggagggcatcaagatggagcaccagctggagctgggtaacttgcaggccaagcatgacctggagaccgccatgcacgtgaaggagaaggaggccctgcgagagaagctgcaggaggcccaggaggagctggctgggctgcagcggcactggcgggcccagctggaggtgcaagccagccagcaccggctggagctgcaggaggcccaggaccagcgccgggatgccgagctgcgtgtgcacgagctggaaaaactggacgtggagtaccggggccaggcgcaggctatcgagttcctcaaggagcagatctcgctggccgagaagaagatgttggactacgagcggctgcagcgggcagaagcccagggcaaacaggaggtcgagagtttgcgggagaagctcctggtggctgagaacagactccaggcggtcgaggccctgtgctcctcccagcacacccacatgattgagtcgaatgacatttcagaggagacgatcaggacgaaggaaactgtggagggcctgcaggacaagctgaacaagagggacaaagaggtgacagccttgacctcccagaccgagatgctcagggcccaagtaagtgcgctggagagcaagtgtaagtcaggcgagaagaaggtggacgccctcctgaaggagaagcggcgcctggaggcagagctggagaccgtgtcccggaagacccatgacgcctcgggccagctagtcctcatcagccaggagctgctgcggaaggagcggagcctgaacgaactgcgggtgttgctgctggaggccaatcgtcactccccagggccggagagggacctgagccgtgaggtacacaaggctgagtggcggatcaaggagcagaaactcaaggatgacatccggggcctgcgtgaaaagctgaccgggctggacaaagagaaatccctgtcggatcagaggcgctactccctcatcgaccggtcctcggcgcccgagcttctgcggctgcagcaccagctgatgagcacggaggacgccctgcgggatgcgctggaccaggctcagcaggtggagaagctgatggaggccatgaggagctgccctgacaaggcccagaccatcggcaattccggttctgcaaacggcatccaccagcaggacaaagctcagaaacaagaggacaagcactgatcctgaggggatactgtggagcagcccagtccacaccagagccccacgcggctgcccggcagtacctcctccaggcaggagccgggactgtcactttggagacaaaacagtgtttgtaacaataacgtactcaccgccgcggacaatcccccaccccgatccctcgccagaccaggacgcttcctcaagcccagccttctacagagagtgtgaacggtacagccccggcctgacccggggaccttcagcctggacacccggcagcttctggagtttgtcagtggaggcagaggggatccggccaggcccctctgtccagaaggagctgccctgaggaccatcttagcggccctgtcctctttttccgcccattctccctcgggtctccccagaggggccggcgggggctggggagggggtaagtttatccatgcagacaccaagggggagcatccagtctttaagagccaagtgggggccccttttccgaagccacttccaggccaaggcagtcgccagggcttcttgtccccaccttctgaaccttcttcaaacagtagtacaagctcccctcagccagcctgcctgcccagcgaggcccccaggttcaaggtgttggcgggggcggagggcaggggaacgggatccttctcccgctgcccaccaacaccaacacacacacacctctaagctgctggccgaagatgtcaccaaggccaaagacacagtattatgaaggtttggaaacccctctcctcacctcccaccgtgaccttgggcaaaccctggctcggagcccagggcagaggcagctcagagtggaggctctaggcaggtttgacaaaggtcagtaatacggtttcccctggggttgaccagatgttccaaaatatctgcatccacctggagatgcagctaagtgggtccttatgtacacaccacgttcacacacacacagagggaccacgtgtgcacgcatgaccgtgtgggtggcggcgtttgctgtgaaccacgctcaggccacacagagacacatacttggtttctgggactgagacccaggcctggcaggaccgtgcctacagatactgcaaacgttcctacagcctagaggtgcgtatacacacccaagtacacgcagccaggcattcaggggtgtgtttgccacatggagcatcccttcctggtcttgccaggcacctgcacagagcgtctccagccccatctcctaacgggggctgggggtaagagaaatctaactgcgctcccccaacccctcgccctgccatcttcccctcaagcctgctaagttatcccaggcctgtgcgtggtggaaaaagccagccttggccctgcagcctccacctcgccgctgggggaccaacaggttgcttacagctttgcaccccggcatcagcacaggggtccctgccccaccctccggcagctcagggagtgttttcctgtgaggcctcccccatcagtggaccagagggagaagcccgatgccccatcccggctttcccgtaacgcacaggacacgtgtgcaattcataggaacggcccagatcgccctcatgagtgccacctggtacaggtaggtggcgctcacgttcctgcccaaatgcagcccatcggggagtcacagtcagtccccccggcccccctcccagtccctgttggctttcggtagctctcgcatgcagttctattaacagccgtctagaagcgatgctttagtggcctaacccagggtcaaatacagctctttctagcaaaatcaggcagctctgccccatcggtaggggcaccgattagtctactaacagccagaggtccatctagcagggtgccgggaggagctgagcccccggaggtgggctcctggtgacgggtgtccaagaagcggtttccttgggagcttctgcctccgtgggcctctcagcccgccccgtgtggccgcccgggtgtggctcagccatgtcccctccccaggtccttcattcacccctcccctccccacagtggaattgttgaagtgtggcgagtctgtgctcgggacaataaagcttgtgacaggtccaggaccccggca

SEQ ID NO: 3989 - protein, 1046 aa, Homo sapiens
MQKPSGLKPPGRGGKHSSPMGRTSTGSASSSAAVAASSKEGSPLHKQSSGPSSSPAAAAAPEKPGPKAAEVGDDFLGDFVVGERVWVNGVKPGVVQYLGETQFAPGQWAGVVLDDPVGKNDGAVGGVRYFECPALQGIFTRPSKLTRQPTAEGSGSDAHSVESLTAQNLSLHSGTATPPLTSRVIPLRESVLNSSVKTGNESGSNLSDSGSVKRGEKDLRLGDRVLVGGTKTGVVRYVGETDFAKGEWCGVELDEPLGKNDGAVAGTRYFQCPPKFGLFAPIHKVIRIGFPSTSPAKAKKTKRMAMGVSALTHSPSSSSISSVSSVASSVGGRPSRSGLLTETSSRYARKISGTTALQEALKEKQQHIEQLLAERDLERAEVAKATSHICEVEKEIALLKAQHEQYVAEAEEKLQRARLLVESVRKEKVDLSNQLEEERRKVEDLQFRVEEESITKGDLETQTQLEHARIGELEQSLLLEKAQAERLLRELADNRLTTVAEKSRVLQLEEELTLRRGEIEELQQCLLHSGPPPPDHPDAAEILRLRERLLSASKEHQRESGVLRDKYEKALKAYQAEVDKLRAANEKYAQEVAGLKDKVQQATSENMGLMDNWKSKLDSLASDHQKSLEDLKATLNSGPGAQQKEIGELKAVMEGIKMEHQLELGNLQAKHDLETAMHVKEKEALREKLQEAQEELAGLQRHWRAQLEVQASQHRLELQEAQDQRRDAELRVHELEKLDVEYRGQAQAIEFLKEQISLAEKKMLDYERLQRAEAQGKQEVESLREKLLVAENRLQAVEALCSSQHTHMIESNDISEETIRTKETVEGLQDKLNKRDKEVTALTSQTEMLRAQVSALESKCKSGEKKVDALLKEKRRLEAELETVSRKTHDASGQLVLISQELLRKERSLNELRVLLLEANRHSPGPERDLSREVHKAEWRIKEQKLKDDIRGLREKLTGLDKEKSLSDQRRYSLIDRSSAPELLRLQHQLMSTEDALRDALDQAQQVEKLMEAMRSCPDKAQTIGNSGSANGIHQQDKAQKQEDKH

SEQ ID NO: 3990 - DNA, 245 bp, Homo sapiens
gctcacggagacctcttcacgctacgcccgcaagatctcgggcaccacggccttgcaggaggcactgaaggagaagcagcagcacattgagcagctgctggctgaacgagacctggaacgggctgaggtggccaaggccacaagccacatctgcgaggtggagaaggagattgccctgctcaagtggaattgttgaagtgtggcgagtctgtgctcgggacaataaagcttgtgacaggtccagg

SEQ ID NO: 3991 - protein, 64 aa, Homo sapiens
LTETSSRYARKISGTTALQEALKEKQQHIEQLLAERDLERAEVAKATSHICEVEKEIALLKWNC

SEQ ID NO: 3992 - DNA, 551 bp, Homo sapiens
ctggagtgaggaagaacttggaccctggaggccaagtgtgaccccgtcacagagctcctgtgggagggccatggccctacccactgctgctttggtccaggagcattgatgcttctcgtctctcctctctcccctaggcctgcaggacaagctgaacaagagggacaaagaggtgacagccttgacctcccagaccgagatgctcagggcccaagtaagtgcgctggagagcaagtgtaagtcaggcgagaagaaggtggacgccctcctgaaggagaagcggcgcctggaggcagagctggagaccgtgtcccggaagacccatgacgcctcgggccagctagtcctcatcagccaggagctgctgcggaaggagcggtgaggcggccgtggggccggctgggtcctccctgtggccctggcccttgctcctcttcttgacattagctcatgttatcttggggcagagagggggatagagctggtgggccaggtggccgatctcgagcgatcaccctgctctcctctaagctccgataaagtctccaaag

SEQ ID NO: 3993 - protein, 60 aa, Homo sapiens
MLRAQVSALESKCKSGEKKVDALLKEKRRLEAELETVSRKTHDASGQLVLISQELLRKER

SEQ ID NO: 3994 - DNA, 588 bp, Homo sapiens
cggggaccttcagcctggacacccggcagcttctggagtttgtcagtggaggcagaggggatccggccaggcccctctgtccagaaggagctgccctgaggaccatcttagcggccctgtcctctttttccgcccattctccctcgggtctccccagaggggccggcgggggctggggagggggtaagtttatccatgcattctattaacagccgtctagaagcgatgctttagtggcctaacccagggtcaaatacagctctttctagcaaaatcaggcagctctgccccatcggtaggggcaccgattagtctactaacagccagaggtccatctagcagggtgccgggaggagctgagcccccggaggtgggctcctggtgacgggtgtccaagaagcggtttccttgggagcttctgcctccgtgggcctctcagcccgccccgtgtggccgcccgggtgtggctcagccatgtcccctccccaggtccttcattcacccctcccctccccacagtggaattgttgaagtgtggcgagtctgtgctcgggacaataaagcttgtgacaggtccaggaccccggc

SEQ ID NO: 3995 - protein, 68 aa, Homo sapiens [sequence omitted]

SEQ ID NO: 3996 - DNA, 3445 bp, Homo sapiens
taaatggcagccaatggagggtggtgttgcgcggggctgggattagggccggggcgaatggctggcaatcttactgggattacagaacaaagagcctccccgcgctcccgctctccgctcctctccccgcgccgccccgccctccgccgcagcccgcgccgggggtgggggccgccgagcgccagccccccggccggccgattccccccccgcgccccctccccgcgcctccctccccgccctcgccgcgccgccgtcctcgcctccctctgcctctccttcccccattctcccggattaattaaggaggcagcggcaggaggctgagtcctggccgcgggccggggccggggcgccgctggcaggagcgcttggggatcctccaaggcgaccatggccttgctgggtaagcgctgtgacgtccccaccaacggctgcggacccgaccgctggaactccgcgttcacccgcaaagacgagatcatcaccagcctcgtgtctgccttagactccatgtgctcagcgctgtccaaactgaacgccgaggtggcctgtgtcgccgtgcacgatgagagcgcctttgtggtgggcacagagaaggggagaatgttcctgaatgcccggaaggagctacagtcagacttcctcaggttctgccgagggcccccgtggaaggatccggaggcagagcaccccaagaaggtgcagcggggcgagggtggaggccgtagcctccctcggtcctccctggaacatggctcagatgtgtaccttctgcggaagatggtagaggaggtgtttgatgttctttatagcgaggccctgggaagggccagtgtggtgccactgccctatgagaggctgctcagggagccagggctgctggccgtgcaggggctgcccgaaggcctggccttccgaaggccagccgagtatgaccccaaggccctcatggccatcctggaacacagccaccgcatccgcttcaagctcaagaggccacttgaggatggcgggcgggactcgaaggccctggtggagctgaacggtgtctccctgattcccaaggggtcacgggactgtggcctgcatggccaggcccccaaggtgccaccccaggacctgcccccaaccgccacctcctcctccatggccagcttcctgtacagcacggcgctccccaaccacgccatccgagagctcaagcaggaagcaccttcctgcccccttgcccccagcgacctgggcctgagtcggcccatgccagagcccaaggccaccggtgcccaagacttctccgactgttgtggacagaagcccactgggcctggtgggcctctcatccagaacgtccatgcctccaagcgcattctcttctccatcgtccatgacaagtcagagaagtgggacgccttcataaaggaaaccgaggacatcaacacgctccgggagtgtgtgcagatcctgtttaacagcagatatgcggaagccctgggcctggaccacatggtccccgtgccctaccggaagattgcctgtgacccggaggctgtggagatcgtgggcatcccggacaagatccccttcaagcgcccctgcacttatggagtccccaagctgaagcggatcctggaggagcgccatagtatccacttcatcattaagaggatgtttgatgagcgaattttcacagggaacaagtttaccaaagacaccacgaagctggagccagccagcccgccagaggacacctctgcagaggtctctagggccaccgtccttgaccttgctgggaatgctcggtcagacaagggcagcatgtctgaagactgtgggccaggaacctccggggagctgggcgggctgaggccgatcaaaattgagccagaggatctggacatcattcaggtcaccgtcccagacccctcgccaacctctgaggaaatgacagactcgatgcctgggcacctgccatcggaggattctggttatgggatggagatgctgacagacaaaggtctgagtgaggacgcgcggcccgaggagaggcccgtggaggacagccacggtgacgtgatccggcccctgcggaagcaggtggagctgctcttcaacacacgatacgccaaggccattggcatctcggagcccgtcaaggtgccgtactccaagtttctgatgcacccggaggagctgtttgtggtgggactgcctgaaggcatctccctccgcaggcccaactgcttcgggatcgccaagctccggaagattctggaggccagcaacagcatccagtttgtcatcaagaggcccgagctgctcactgagggagtcaaagagcccatcatggatagtcaaggaactgcctcctcacttggcttctctccccctgccctgcccccagagagggattccggggaccctctggtggacgagagcctgaagagacagggctttcaagaaaattatgacgcgaggctctcacggatcgacatcgccaacacactaagggagcaggtccaggaccttttcaataagaaatacggggaagccttgggcatcaagtacccggtccaggtcccctacaagcggatcaagagtaaccccggctccgtgatcatcgaggggctgcccccaggaatcccgttccgaaagccctgtaccttcggctcccagaacctggagaggattcttgctgtggctgacaagatcaagttcacagtcaccaggcctttccaaggactcatcccaaagcctgatgaagatgacgccaacagactcggggagaaggtgatcctgcgggagcaggtgaaggaactcttcaacgagaaatacggtgaggccctgggcctgaaccggccggtgctggtcccttataaactaatccgggacagcccagacgccgtggaggtcacgggtctgcctgatgacatccccttccggaaccccaacacgtacgacatccaccggctggagaagatcctgaaggcccgagagcatgtccgcatggtcatcattaaccagctccaaccctttgcagaaatctgcaatgatgccaaggtgccagccaaagacagcagcattcccaagcgcaagagaaagcgggtctcggaaggaaattccgtctcctcttcctcctcgtcttcctcttcctcgtcctctaacccggattcagtggcatcggccaaccagatctcactcgtgcaatggccaatgtacatggtggactatgccggcctgaacgtgcagctcccgggacctcttaattactagacctcagtactgaatcaggacctcactcagaaagactaaaggaaatgtaatttatgtacaaaatgtatattcggatatgtatcgatgccttttagtttttccaatgatttttacactatattcctgccaccaaggcctttttaaataagtaaaaaaagaaaaaaaaaaaaag

SEQ ID NO: 3997 - protein, 959 aa, Homo sapiens; identical to SEQ ID NO: 464

SEQ ID NO: 3998 - DNA, 3304 bp, Homo sapiens
gccgccgagcgccagccccccggccggccgattccccccccgcgccccctccccgcgcctccctccccgccctcgccgcgccgccgtcctcgcctccctctgcctctccttcccccattctcccggattaattaaggaggcagcggcaggaggctgagtcctggccgcgggccggggccggggcgccgctggcaggagcgcttggggatcctccaaggcgaccatggccttgctgggtaagcgctgtgacgtccccaccaacggctgcggacccgaccgctggaactccgcgttcacccgcaaagacgagatcatcaccagcctcgtgtctgccttagactccatgtgctcagcgctgtccaaactgaacgccgaggtggcctgtgtcgccgtgcacgatgagagcgcctttgtggtgggcacagagaaggggagaatgttcctgaatgcccggaaggagctacagtcagacttcctcaggttctgcctctccgcagctcagcacagggcagcgacatcccagctcgaaggccgggtggtgagacgggtgctcactgtggcctcgcgtgctctgtgtcccacaggagggcccccgtggaaggatccggaggcagagcaccccaagaaggtgcagcggggcgagggtggaggccgtagcctccctcggtcctccctggaacatggctcagatgtgtaccttctgcggaagatggtagaggaggtgtttgatgttctttatagcgaggccctgggaagggccagtgtggtgccactgccctatgagaggctgctcagggagccagggctgctggccgtgcaggggctgcccgaaggcctggccttccgaaggccagccgagtatgaccccaaggccctcatggccatcctggaacacagccaccgcatccgcttcaagctcaagaggccacttgaggatggcgggcgggactcgaaggccctggtggagctgaacggtgtctccctgattcccaaggggtcacgggactgtggcctgcatggccaggcccccaaggtgccaccccaggacctgcccccaaccgccacctcctcctccatggccagcttcctgtacagcacggcgctccccaaccacgccatccgagagctcaagcaggaagcaccttcctgcccccttgcccccagcgacctgggcctgagtcggcccatgccagagcccaaggccaccggtgcccaagacttctccgactgttgtggacagaagcccactgggcctggtgggcctctcatccagaacgtccatgcctccaagcgcattctcttctccatcgtccatgacaagtcagagaagtgggacgccttcataaaggaaaccgaggacatcaacacgctccgggagtgtgtgcagatcctgtttaacagcagatatgcggaagccctgggcctggaccacatggtccccgtgccctaccggaagattgcctgtgacccggaggctgtggagatcgtgggcatcccggacaagatccccttcaagcgcccctgcacttatggagtccccaagctgaagcggatcctggaggagcgccatagtatccacttcatcattaagaggatgtttgatgagcgaattttcacagggaacaagtttaccaaagacaccacgaagctggagccagccagcccgccagaggacacctctgcagaggtctctagggccaccgtccttgaccttgctgggaatgctcggtcagacaagggcagcatgtctgaagactgtgggccaggaacctccggggagctgggcgggctgaggccgatcaaaattgagccagaggatctggacatcattcaggtcaccgtcccagacccctcgccaacctctgaggaaatgacagactcgatgcctgggcacctgccatcggaggattctggttatgggatggagatgctgacagacaaaggtctgagtgaggacgcgcggcccgaggagaggcccgtggaggacagccacggtgacgtgatccggcccctgcggaagcaggtggagctgctcttcaacacacgatacgccaaggccattggcatctcggagcccgtcaaggtgccgtactccaagtttctgatgcacccggaggagctgtttgtggtgggactgcctgaaggcatctccctccgcaggcccaactgcttcgggatcgccaagctccggaagattctggaggccagcaacagcatccagtttgtcatcaagaggcccgagctgctcactgagggagtcaaagagcccatcatggatagtcaagagagggattccggggaccctctggtggacgagagcctgaagagacagggctttcaagaaaattatgacgcgaggctctcacggatcgacatcgccaacacactaagggagcaggtccaggaccttttcaataagaaatacggggaagccttgggcatcaagtacccggtccaggtcccctacaagcggatcaagagtaaccccggctccgtgatcatcgaggggctgcccccaggaatcccgttccgaaagccctgtaccttcggctcccagaacctggagaggattcttgctgtggctgacaagatcaagttcacagtcaccaggcctttccaaggactcatcccaaagcctgatgaagatgacgccaacagactcggggagaaggtgatcctgcgggagcaggtgaaggaactcttcaacgagaaatacggtgaggccctgggcctgaaccggccggtgctggtcccttataaactaatccgggacagcccagacgccgtggaggtcacgggtctgcctgatgacatccccttccggaaccccaacacgtacgacatccaccggctggagaagatcctgaaggcccgagagcatgtccgcatggtcatcattaaccagctccaaccctttgcagaaatctgcaatgatgccaaggtgccagccaaagacagcagcattcccaagcgcaagagaaagcgggtctcggaaggaaattccgtctcctcttcctcctcgtcttcctcttcctcgtcctctaacccggattcagtggcatcggccaaccagatctcactcgtgcaatggccaatgtacatggtggactatgccggcctgaacgtgcagctcccgggacctcttaattactagacctcagtactgaatcaggacctcactcagaaagactaaaggaaatgtaatttatgtacaaaatgtatattcggatatgtatcgatgccttttagtttttccaatgatttttacactatattcctgccaccaaggcctttttaaataagt

SEQ ID NO: 3999 - protein, 976 aa, Homo sapiens
MALLGKRCDVPTNGCGPDRWNSAFTRKDEIITSLVSALDSMCSALSKLNAEVACVAVHDESAFVVGTEKGRMFLNARKELQSDFLRFCLSAAQHRAATSQLEGRVVRRVLTVASRALCPTGGPPWKDPEAEHPKKVQRGEGGGRSLPRSSLEHGSDVYLLRKMVEEVFDVLYSEALGRASVVPLPYERLLREPGLLAVQGLPEGLAFRRPAEYDPKALMAILEHSHRIRFKLKRPLEDGGRDSKALVELNGVSLIPKGSRDCGLHGQAPKVPPQDLPPTATSSSMASFLYSTALPNHAIRELKQEAPSCPLAPSDLGLSRPMPEPKATGAQDFSDCCGQKPTGPGGPLIQNVHASKRILFSIVHDKSEKWDAFIKETEDINTLRECVQILFNSRYAEALGLDHMVPVPYRKIACDPEAVEIVGIPDKIPFKRPCTYGVPKLKRILEERHSIHFIIKRMFDERIFTGNKFTKDTTKLEPASPPEDTSAEVSRATVLDLAGNARSDKGSMSEDCGPGTSGELGGLRPIKIEPEDLDIIQVTVPDPSPTSEEMTDSMPGHLPSEDSGYGMEMLTDKGLSEDARPEERPVEDSHGDVIRPLRKQVELLFNTRYAKAIGISEPVKVPYSKFLMHPEELFVVGLPEGISLRRPNCFGIAKLRKILEASNSIQFVIKRPELLTEGVKEPIMDSQERDSGDPLVDESLKRQGFQENYDARLSRIDIANTLREQVQDLFNKKYGEALGIKYPVQVPYKRIKSNPGSVIIEGLPPGIPFRKPCTFGSQNLERILAVADKIKFTVTRPFQGLIPKPDEDDANRLGEKVILREQVKELFNEKYGEALGLNRPVLVPYKLIRDSPDAVEVTGLPDDIPFRNPNTYDIHRLEKILKAREHVRMVIINQLQPFAEICNDAKVPAKDSSIPKRKRKRVSEGNSVSSSSSSSSSSSSNPDSVASANQISLVQWPMYMVDYAGLNVQLPGPLNY

SEQ ID NO: 4000 - DNA, 3196 bp, Homo sapiens
cccccccgcgccccctccccgcgcctccctccccgccctcgccgcgccgccgtcctcgcctccctctgcctctccttcccccattctcccggattaattaaggaggcagcggcaggaggctgagtcctggccgcgggccggggccggggcgccgctggcaggagcgcttggggatcctccaaggcgaccatggccttgctgggtaagcgctgtgacgtccccaccaacggctgcggacccgaccgctggaactccgcgttcacccgcaaagacgagatcatcaccagcctcgtgtctgccttagactccatgtgctcagcgctgtccaaactgaacgccgaggtggcctgtgtcgccgtgcacgatgagagcgcctttgtggtgggcacagagaaggggagaatgttcctgaatgcccggaaggagctacagtcagacttcctcaggttctgccgagggcccccgtggaaggatccggaggcagagcaccccaagaaggtgcagcggggcgagggtggaggccgtagcctccctcggtcctccctggaacatggctcagatgtgtaccttctgcggaagatggtagaggaggtgtttgatgttctttatagcgaggccctgggaagggccagtgtggtgccactgccctatgagaggctgctcagggagccagggctgctggccgtgcaggggctgcccgaaggcctggccttccgaaggccagccgagtatgaccccaaggccctcatggccatcctggaacacagccaccgcatccgcttcaagctcaagaggccacttgaggatggcgggcgggactcgaaggccctggtggagctgaacggtgtctccctgattcccaaggggtcacgggactgtggcctgcatggccaggcccccaaggtgccaccccaggacctgcccccaaccgccacctcctcctccatggccagcttcctgtacagcacggcgctccccaaccacgccatccgagagctcaagcaggaagcaccttcctgcccccttgcccccagcgacctgggcctgagtcggcccatgccagagcccaaggccaccggtgcccaagacttctccgactgttgtggacagaagcccactgggcctggtgggcctctcatccagaacgtccatgcctccaagcgcattctcttctccatcgtccatgacaagtcagagaagtgggacgccttcataaaggaaaccgaggacatcaacacgctccgggagtgtgtgcagatcctgtttaacagcagatatgcggaagccctgggcctggaccacatggtccccgtgccctaccggaagattgcctgtgacccggaggctgtggagatcgtgggcatcccggacaagatccccttcaagcgcccctgcacttatggagtccccaagctgaagcggatcctggaggagcgccatagtatccacttcatcattaagaggatgtttgatgagcgaattttcacagggaacaagtttaccaaagacaccacgaagctggagccagccagcccgccagaggacacctctgcagaggtctctagggccaccgtccttgaccttgctgggaatgctcggtcagacaagggcagcatgtctgaagactgtgggccaggaacctccggggagctgggcgggctgaggccgatcaaaattgagccagaggatctggacatcattcaggtcaccgtcccagacccctcgccaacctctgaggaaatgacagactcgatgcctgggcacctgccatcggaggattctggttatgggatggagatgctgacagacaaaggtctgagtgaggacgcgcggcccgaggagaggcccgtggaggacagccacggtgacgtgatccggcccctgcggaagcaggtggagctgctcttcaacacacgatacgccaaggccattggcatctcggagcccgtcaaggtgccgtactccaagtttctgatgcacccggaggagctgtttgtggtgggactgcctgaaggcatctccctccgcaggcccaactgcttcgggatcgccaagctccggaagattctggaggccagcaacagcatccagtttgtcatcaagaggcccgagctgctcactgagggagtcaaagagcccatcatggatagtcaagagagggattccggggaccctctggtggacgagagcctgaagagacagggctttcaagaaaattatgacgcgaggctctcacggatcgacatcgccaacacactaagggagcaggtccaggaccttttcaataagaaatacggggaagccttgggcatcaagtacccggtccaggtcccctacaagcggatcaagagtaaccccggctccgtgatcatcgaggggctgcccccaggaatcccgttccgaaagccctgtaccttcggctcccagaacctggagaggattcttgctgtggctgacaagatcaagttcacagtcaccaggcctttccaaggactcatcccaaagcctgatgaagatgacgccaacagactcggggagaaggtgatcctgcgggagcaggtgaaggaactcttcaacgagaaatacggtgaggccctgggcctgaaccggccggtgctggtcccttataaactaatccgggacagcccagacgccgtggaggtcacgggtctgcctgatgacatccccttccggaaccccaacacgtacgacatccaccggctggagaagatcctgaaggcccgagagcatgtccgcatggtcatcattaaccagctccaaccctttgcagaaatctgcaatgatgccaaggtgccagccaaagacagcagcattcccaagcgcaagagaaagcgggtctcggaaggaaattccgtctcctcttcctcctcgtcttcctcttcctcgtcctctaacccggattcagtggcatcggccaaccagatctcactcgtgcaatggccaatgtacatggtggactatgccggcctgaacgtgcagctcccgggacctcttaattactagacctcagtactgaatcaggacctcactcagaaagactaaaggaaatgtaatttatgtacaaaatgtatattcggatatgtatcgatgccttttagtttttccaatgatttttacactatattcctgccaccaaggcctttttaaataagtaaaaaaagaaaaaaaaaaaaag

SEQ ID NO: 4001 - protein, 944 aa, Homo sapiens
MALLGKRCDVPTNGCGPDRWNSAFTRKDEIITSLVSALDSMCSALSKLNAEVACVAVHDESAFVVGTEKGRMFLNARKELQSDFLRFCRGPPWKDPEAEHPKKVQRGEGGGRSLPRSSLEHGSDVYLLRKMVEEVFDVLYSEALGRASVVPLPYERLLREPGLLAVQGLPEGLAFRRPAEYDPKALMAILEHSHRIRFKLKRPLEDGGRDSKALVELNGVSLIPKGSRDCGLHGQAPKVPPQDLPPTATSSSMASFLYSTALPNHAIRELKQEAPSCPLAPSDLGLSRPMPEPKATGAQDFSDCCGQKPTGPGGPLIQNVHASKRILFSIVHDKSEKWDAFIKETEDINTLRECVQILFNSRYAEALGLDHMVPVPYRKIACDPEAVEIVGIPDKIPFKRPCTYGVPKLKRILEERHSIHFIIKRMFDERIFTGNKFTKDTTKLEPASPPEDTSAEVSRATVLDLAGNARSDKGSMSEDCGPGTSGELGGLRPIKIEPEDLDIIQVTVPDPSPTSEEMTDSMPGHLPSEDSGYGMEMLTDKGLSEDARPEERPVEDSHGDVIRPLRKQVELLFNTRYAKAIGISEPVKVPYSKFLMHPEELFVVGLPEGISLRRPNCFGIAKLRKILEASNSIQFVIKRPELLTEGVKEPIMDSQERDSGDPLVDESLKRQGFQENYDARLSRIDIANTLREQVQDLFNKKYGEALGIKYPVQVPYKRIKSNPGSVIIEGLPPGIPFRKPCTFGSQNLERILAVADKIKFTVTRPFQGLIPKPDEDDANRLGEKVILREQVKELFNEKYGEALGLNRPVLVPYKLIRDSPDAVEVTGLPDDIPFRNPNTYDIHRLEKILKAREHVRMVIINQLQPFAEICNDAKVPAKDSSIPKRKRKRVSEGNSVSSSSSSSSSSSSNPDSVASANQISLVQWPMYMVDYAGLNVQLPGPLNY

SEQ ID NO: 4002 - DNA, 681 bp, Homo sapiens
gaggggctgggctgtgggccatccccagctccttgtctcggtcatccgggcttgtaggaccccctgtcccgagccacagcccaggtgggtgcacttggggagcatggagagagacagccactccctgcaaagggcctcagatggagggagaggcaggttccacgtgcctggagcaagaatgcagcaggagaagcgggggaagatgagacccaggcccacgtctgctaggagcacctcggaggaggaattcccacctgaagaccccaccacaaggatgtcgcaaagctgaaacctgagctcgggtcataccaactaaatccgggttcccatcaccccacaacgcagccttcaagccccttcccccgtggaatgatgacacagcggtgggctcggctctgcactgcccaaccctgcccggcagtgaacaggcgagaccacccagctgggacccagggaagaggcaaagaggagacccctcagcagggtccgtttctcctgcctgggcttgtcctgcacccaggaccaatgtggccctacaggacagctagaaccctcccctcctcttctccccaagtgtccccagagcttcagaaaagtgtgtgcttaaaggacgattcaatgaaataattttctaaaaagagaataaatacatacatacataaagaagcaggagtgtaccag

SEQ ID NO: 4003 - protein, 61 aa, Homo sapiens
MERDSHSLQRASDGGRGRFHVPGARMQQEKRGKMRPRPTSARSTSEEEFPPEDPTTRMSQS

SEQ ID NO: 4004 - DNA, 5868 bp, Homo sapiens
aacatttagcagcaaactcaacatacattttggccaaacgcccaccggccagttgtttaaatcaatatttatccacagccaaaaagcagaggagagccagaactgaggccagagccgagctctgatgcatctctcatttctcgggatgtttctgtccctgtggttggacacctctggccttgtgaagtgtgatgcactgtcacatctcctgttctgtgtcattggccaatgatcatatatcatgacctgctggaaggcctgtctgtggctgggaccacacgccttgggccttatgcacactgggcactggtcgggatcctggggtgcaacagtggcaggcagacctggtttctgccctcaaagagcttacagatggcaggggcacccatggcggcagaagacaccccaggcctggtgccctttgtggtgccagccccatggtcctcctgcctgggccttccctaccccattgggtgcagaaactccctgtctgcaggtaggagacagagggtaggttttcaggctcccttgggaactgcagccctgctctctgccatcaacacccagcaggggccacacagagagcaccgggactgagcccatagaggggaaccgagaggcccctgcctctagtctctgccttctttgcttggattggtgcagggacagctgccttgagggcaggccctggcactggggcagcctgtgggtgccccctgggtcaagaaggagaggggcagggtagaaccaggagccaaaggaggctgatctttgcatctcatgggtgcccagctggacactgtcatacccaggaagcctgtgccatgccatggggacccacaactgggggccctggacttgagggggaggatgcagctctgtcccccaggaaccccattgcaacaggacacagtcctgccctggggagcccctgacctgagacaaagcagcctcggccctgctgtatctttccatacccctgatgccaagtctcctggctaggagggaaactgaggctggaaggcctcggcgggggtggcattggcctcgggagcatgtggcttgatgcagaaatgtgacggcagagctcagaggcatgcggaagggaggggaggacatcaccggctcctgacccagctgggcttcaggttgggggtacaggaggtgggcaagcaggttggacaattaaaagcttcgatgaggctgggtgagtggcttatgcctgtatttccaacactttgggaggctgaggtgggcagatcacctgaggccaggagttcaagaccagcctggccaacatggtgaaaccccatctctactaaaaatacaaaaattagccagacgtgtggtggcacctgtaatcccagctacccgggaggctgaggcaggagaatcactcgaacccaggaaggggaggttgcagtgagccaagattgcaccactgcactatagcctgggcaacagagtgagactctgtctcgaaataaaattaaatttaaaatttaaaaaagcttcaaggacaaccagcagatgatggcaggaccaggaagggtgcttcaggcagcgggaactgaacctgcacagactagggaagcatgaacatcggtacatctgggagtggcacagcttagagggcctggagcatggagtgtgagggggaactggagtgagggacaggagaccaggcgaccatggccttgctgggtaagcgctgtgacgtccccaccaacggctgcggacccgaccgctggaactccgcgttcacccgcaaagacgagatcatcaccagcctcgtgtctgccttagactccatgtgctcagcgctgtccaaactgaacgccgaggtggcctgtgtcgccgtgcacgatgagagcgcctttgtggtgggcacagagaaggggagaatgttcctgaatgcccggaaggagctacagtcagacttcctcaggttctgccgagggcccccgtggaaggatccggaggcagagcaccccaagaaggtgcagcggggcgagggtggaggccgtagcctccctcggtcctccctggaacatggctcagatgtgtaccttctgcggaagatggtagaggaggtgtttgatgttctttatagcgaggccctgggaagggccagtgtggtgccactgccctatgagaggctgctcagggagccagggctgctggccgtgcaggggctgcccgaaggcctggccttccgaaggccagccgagtatgaccccaaggccctcatggccatcctggaacacagccaccgcatccgcttcaagctcaagaggccacttgaggatggcgggcgggactcgaaggccctggtggagctgaacggtgtctccctgattcccaaggggtcacgggactgtggcctgcatggccaggcccccaaggtgccaccccaggacctgcccccaaccgccacctcctcctccatggccagcttcctgtacagcacggcgctccccaaccacgccatccgagagctcaagcaggaagcaccttcctgcccccttgcccccagcgacctgggcctgagtcggcccatgccagagcccaaggccaccggtgcccaagacttctccgactgttgtggacagaagcccactgggcctggtgggcctctcatccagaacgtccatgcctccaagcgcattctcttctccatcgtccatgacaagtcagagaagtgggacgccttcataaaggaaaccgaggacatcaacacgctccgggagtgtgtgcagatcctgtttaacagcagatatgcggaagccctgggcctggaccacatggtccccgtgccctaccggaagattgcctgtgacccggaggctgtggagatcgtgggcatcccggacaagatccccttcaagcgcccctgcacttatggagtccccaagctgaagcggatcctggaggagcgccatagtatccacttcatcattaagaggatgtttgatgagcgaattttcacagggaacaagtttaccaaagacaccacgaagctggagccagccagcccgccagaggacacctctgcagaggtctctagggccaccgtccttgaccttgctgggaatgctcggtcagacaagggcagcatgtctgaagactgtgggccaggaacctccggggagctgggcgggctgaggccgatcaaaattgagccagaggatctggacatcattcaggtcaccgtcccagacccctcgccaacctctgaggaaatgacagactcgatgcctgggcacctgccatcggaggattctggttatgggatggagatgctgacagacaaaggtctgagtgaggacgcgcggcccgaggagaggcccgtggaggacagccacggtgacgtgatccggcccctgcggaagcaggtggagctgctcttcaacacacgatacgccaaggccattggcatctcggagcccgtcaaggtgccgtactccaagtttctgatgcacccggaggagctgtttgtggtgggactgcctgaaggcatctccctccgcaggcccaactgcttcgggatcgccaagctccggaagattctggaggccagcaacagcatccagtttgtcatcaagaggcccgagctgctcactgagggagtcaaagagcccatcatggatagtcaagagagggattccggggaccctctggtggacgagagcctgaagagacagggctttcaagaaaattatgacgcgaggctctcacggatcgacatcgccaacacactaagggagcaggtccaggaccttttcaataagaaatacggggaagccttgggcatcaagtacccggtccaggtcccctacaagcggatcaagagtaaccccggctccgtgatcatcgaggggctgcccccaggaatcccgttccgaaagccctgtaccttcggctcccagaacctggagaggattcttgctgtggctgacaagatcaagttcacagtcaccaggcctttccaaggactcatcccaaagcctgatgaagatgacgccaacagactcggggagaaggtgatcctgcgggagcaggtgaaggaactcttcaacgagaaatacggtgaggccctgggcctgaaccggccggtgctggtcccttataaactaatccgggacagcccagacgccgtggaggtcacgggtctgcctgatgacatccccttccggaaccccaacacgtacgacatccaccggctggagaagatcctgaaggcccgagagcatgtccgcatggtcatcattaaccagctccaaccctttgcagaaatctgcaatgatgccaaggtgccagccaaagacagcagcattcccaagcgcaagagaaagcgggtctcggaaggaaattccgtctcctcttcctcctcgtcttcctcttcctcgtcctctaacccggattcagtggcatcggccaaccagatctcactcgtggtaaagttgcaccgatttggactccggcactcatctctgtggccctcacccctctgtctggcagggccgtctactctgggatgtgggcccaggggacggggaggcactgggctttgagtggggaccttccggcctcgggggttatagatgcatccacctgtctcacccaagaggtagcccatccttctcgtggggtactcacaggcactcaggcaggaattcacatcctcgctgggcagatgggccggctgaggtccacctgcccacacccttcagccgcaccagagctggagacatgaaaagacatggctggcgggtgcagtggctcacgcctgtaatcccagcactttggcaggtcaagtcgggtggatcacctgaggtcaggagtttgagaccaggctgaccaacacggggaaaccccatctctactaaaaatacaaaattagccgggcaaagtggggcatagtggctcatgcctgtaatcccagctacttggaaggctgagataggagaatcgcttgaacctgggaggcagaggttgcaatgagccgaggtcgcgccattgcactgcagcctgggcaacaagagtgaaacactgtctcagaaaaaaaaattagccaggcatggtggcacgtgcctgtggtcgcagctacttgggaggctggggcaggaggatcatttgagcccaaggggattgaggctgcagtgagccaagatcgtcccattgcactccagcctgggcaagagaacgagactccatctcaaaaataaataaataggctgggtgtggtggctcacgcctgtaatcctagcactttgggaggccgaggcaggcggatcacttgaggctcaggagttcaagaccagcctggccaacatggcaaaaccccgtctctactaaaaatagaaaaattagccgggcatggtggcgggcgcctataatcccagctactcgggaggctgaggcaggagactcgcttgaacccgcggggccaaggttgcagtgagccgagattgcatcactgcactccagcctgggcagaagagtgaaactccatctcaaaaaaataaaaaatataaataaatagcctctgagaaagctcttccaaaagcagaactaagcattttgggtttgttccgcatcacctggagtcctaatccagtccctttgtccctctctctagcaatggccaatgtacatggtggactatgccggcctgaacgtgcagctcccgggacctcttaattactagacctcagtactgaatcaggacctcactcagaaagactaaaggaaatgtaatttatgtacaaaatgtatattcggatatgtatcgatgccttttagtttttccaatgatttttacactatattcctgccaccaaggcctttttaaataagtaaaaaaag

SEQ ID NO: 4005 - protein, 960 aa, Homo sapiens
MALLGKRCDVPTNGCGPDRWNSAFTRKDEIITSLVSALDSMCSALSKLNAEVACVAVHDESAFVVGTEKGRMFLNARKELQSDFLRFCRGPPWKDPEAEHPKKVQRGEGGGRSLPRSSLEHGSDVYLLRKMVEEVFDVLYSEALGRASVVPLPYERLLREPGLLAVQGLPEGLAFRRPAEYDPKALMAILEHSHRIRFKLKRPLEDGGRDSKALVELNGVSLIPKGSRDCGLHGQAPKVPPQDLPPTATSSSMASFLYSTALPNHAIRELKQEAPSCPLAPSDLGLSRPMPEPKATGAQDFSDCCGQKPTGPGGPLIQNVHASKRILFSIVHDKSEKWDAFIKETEDINTLRECVQILFNSRYAEALGLDHMVPVPYRKIACDPEAVEIVGIPDKIPFKRPCTYGVPKLKRILEERHSIHFIIKRMFDERIFTGNKFTKDTTKLEPASPPEDTSAEVSRATVLDLAGNARSDKGSMSEDCGPGTSGELGGLRPIKIEPEDLDIIQVTVPDPSPTSEEMTDSMPGHLPSEDSGYGMEMLTDKGLSEDARPEERPVEDSHGDVIRPLRKQVELLFNTRYAKAIGISEPVKVPYSKFLMHPEELFVVGLPEGISLRRPNCFGIAKLRKILEASNSIQFVIKRPELLTEGVKEPIMDSQERDSGDPLVDESLKRQGFQENYDARLSRIDIANTLREQVQDLFNKKYGEALGIKYPVQVPYKRIKSNPGSVIIEGLPPGIPFRKPCTFGSQNLERILAVADKIKFTVTRPFQGLIPKPDEDDANRLGEKVILREQVKELFNEKYGEALGLNRPVLVPYKLIRDSPDAVEVTGLPDDIPFRNPNTYDIHRLEKILKAREHVRMVIINQLQPFAEICNDAKVPAKDSSIPKRKRKRVSEGNSVSSSSSSSSSSSSNPDSVASANQISLVVKLHRFGLRHSSLWPSPLCLAGPSTLGCGPRGRGGTGL

SEQ ID NO: 4006 - DNA, 2613 bp, Homo sapiens
cacttgtaatcctagcacttggaaaggctgagacaggaggatcacttgaggccaggagtttgagaccaacctgggcaatatagtgagaccctatttctacaaaaaataaaataaatagccaggcctggtggtatgcacctgtagtcctagctactgaggaggctgacggaggaggatcacttgagcccaggaattggaggctgcagtgagctatgatcacgccactgcactccagcctgggcgacagagccagaccctatctctgaaaacaataataaaacgacaaccaatgctgactgtgtctccatcactgggtggggctgaggaagcaggcctcagaaaggaagccagttttcccccaaaattattccctgaggctgcctctgggcctgtggatccagatgtgtgggggccttcaggagtggcaggggagtggggcctccagcgtgaaaacagaagtcaccgtcagccttgcacccccggctctgcctcccaggactggtgtttttgcctctgttttaatttcctgctgggtcctcccttggacattgtcaggtatgcaggctgggacatcccttctttcctcctacattccccctagagcccaaggctctgtccgtggtccagccactccatggcagggaagctgtacctccataatcagctgcctgagggcccctgacccaccaccaggcaccaccctggtggggctgaggttagaagggaaagaatgccagaactccagtcctggaggcaggagagtgtgtgagcccagccccgccctctcagactctcagacctttatttcatcctcattttcctggctagaggttccatgcatcatttttttttttttttttttcagatggagtctcactctattgcccaggctggagtgcagtggtgctatgtcggctcactgaaacctccgcctctcaggttcaagcaattctcctgcctccgcctcccaagtagctgggattacaggcatgcaccaccacacctggctagtttttgtatttttagtagagacggggtttcaccatgttggccaggctggtctcaaactcctgacctcaggtgatccacctgcctgggcttcccaaagtactgggattataggcttgagccaccacgcccggctggttccatgcatcttacctggatgacttgggtccctaaatgggcccctgggtgcccagcctcccctcctccaatacattctctgataatctgaccttgtcatgaccattggggcacctgttgcccacagggtagaggccaggtgcctgaggacagcactgaaggccgtgcacctccacctccagcctccagtcacctcacctagctcactgctctctctcctgcaaagtctctcctgcttccctccctaagggaagggctggccgctcactgcttgggcccccttgatttctaagacacctgtgaagggtcccacaaggccaggcacagtggctcttgtctgtaatcccagcgctctgggaggctgaggcaggaggatcacttgaggtcaggagttcaatgtggacaacacagtaagaccctgtctctacaaaaaaatttaaaacttagctggcattggtggcgcatgcctatagtcccagctacttgggaggttgaggtaggaggatcgcttgaacccaggagttcaagtctgcagtgagctatgattgcaccactgcactccagcctgggtgatagagcaagaccccaactcaaaaaaaaaaaaaaggatcccacggttcaccttgtgctgccacgatcggttggcagctctgctctgtgccgtcctgtgcctgtcactgagtaagatgcaggagaagttgggcaaaagccctcaggataaacgaataagtcattcagagtaggtgctggtgggaaatgggcttgagtcactcacctggggccagaagaggcccccagggagttgtgagcagattagaccctccaagaccgccccaggggttggcccatgctttccctaactgtgcaaaaatggtttgggataggctgggtgccgtgggtcacgcctgtaatcccagcactttgggaggctgaggcaggtggatcacctcaagtcaggagttcgagaccagcctggccaacatggtgaaaccccatctctactaaaaatacagaaattagctgggtgtggttgcacacgcctgtaatcccagctactcaggaggctgagggaggagaatcccttgaacccgggaggcggaggttcatggggaacccagcaggaaattagaatagaaccaaaaacgccagtcatgggaggcagagctgggggagcgaggctgacaatgactcctgttttcacgctgagagaccccactcccctgctgagatcgcgccactgcactccagcctgggcgacagagcaagactccatctcaaaaaaaaagttaattaattaattagattaaagtacaacaattagcagggcatggtggtgcacgtctgtagtcccagctactcaggaggctgaggcagaagaatcgcttgaaccctggaggcggaggttgccgtgagccaagatcgcaccactgcactccagcctgggcgacaaagtgagactctgtctcc

SEQ ID NO: 4007 - protein, 173 aa, Homo sapiens
MCGGLQEWQGSGASSVKTEVTVSLAPPALPPRTGVFASVLISCWVLPWTLSGMQAGTSLLSSYIPPRAQGSVRGPATPWQGSCTSIISCLRAPDPPPGTTLVGLRLEGKECQNSSPGGRRVCEPSPALSDSQTFISSSFSWLEVPCIIFFFFFFRWSLTLLPRLECSGAMSAH

SEQ ID NO: 4008 - DNA, 496 bp, Homo sapiens
gtgtcattcggagttttgtcttcagacccctcgccaacctctgaggaaatgacagactcgatgcctgggcacctgccatcggaggattctggttatgggatggagatgctgacaggtaagaaatggacctgggctggtggtgcttgggactcagctctccagggagcaaagggaaaggggtgggccaggccgtccccaggtgtttcttggtgtcagccgtctgtagtagaggaaacccaatatatgcctgaccctaatccaaggctgggttccttttggaaacctcaagtaggctctatttatttatttagagacggagtttcactcttgttgcccaggctggagttgcagtgagccaagattttgccattgcactccagcctggacaacagagcgaagctctgcctcaaaataactaaatagatagatagatagatagatagatagataaaaattagacaggaacggtaggacctatgtgtagtcccatctactc

SEQ ID NO: 4009 - protein, 101 aa, Homo sapiens [sequence omitted]

SEQ ID NO: 4010 - DNA, 448 bp, Homo sapiens
cagagcacttttccagggagctcaggaggctgagacagaaaagcctcagcttccagtgtcaacagccttttcccctccttccagccaaagacagcagcattcccaagcgcaagagaaagcgggtctcggaaggaaattccgtctcctcttcctcctcgtcttcctcttcctcgtcctctaacccggattcagtggcatcggccaaccagatctcactcgtgcaatggccaatgtacatggtggactatgccggcctgaacgtgcagctcccgggacctcttaattactagacctcagtactgaatcaggacctcactcagaaagactaaaggaaatgtaatttatgtacaaaatgtatattcggatatgtatcgatgccttttagtttttccaatgatttttacactatattcctgccaccaaggcctttttaaataagtaaaaaaag

SEQ ID NO: 4011 - protein, 59 aa, Homo sapiens
RALFQGAQEAETEKPQLPVSTAFSPPSSQRQQHSQAQEKAGLGRKFRLLFLLVFLFLVL

SEQ ID NO: 4012 - DNA, 272 bp, Homo sapiens
cagccacgccttccagcccagagcaaagttttcagaagataagaactctgtggttttcagcaaggagacaataagaagttgttcctaattggcttcctgtcgcagtcctcagggcacctgctggttccagcctggatccagcctaccttgacctttgccagttggcaccgatgtgcagataaccagtgaagcccaggagcaaatcctcaaatccagacctgtttcagctccatgctgtgccgtgagaaacctctctgcaggtccctacttga

SEQ ID NO: 4013 - protein, 39 aa, Homo sapiens
PLPVGTDVQITSEAQEQILKSRPVSAPCCAVRNLSAGPY

SEQ ID NO: 4014 - DNA, 1356 bp, Homo sapiens
aaaaaaaaaaaaaaaaaaaaaaaaaaaagaaaaaagaaaaaaaaaaggaggaggaggaggagggtgagagagaagctgggagagcagagaaaaggggccaccggtcgcccccccgcttccccgcacgcgctctccagccgcggccgcccgcctgccgcggtcaccccggcctctgcctctgtcccccagtgatcggatcaaggcgctgagcgaggccctgcctgcggggcggccatgcggcggtgacaggagcgcgaccgacacgcacgggcccctcgccccctctcgcctcccgtccgctcgccagctcccctcagccgaggctgctccgcggcggccgcagcccgcgcgcggcccacactcgcctcccctcggcacccccggccccggagctgcctggaggcggccgcactcggggatcatggcccaagttgcaatgtccaccctccccgttgaagatgaggagtcctcggagagcaggatggtggtgacattcctcatgtcagctctcgagtccatgtgtaaagaactggccaagtccaaagccgaagtggcctgcattgcagtgtatgaaacagacgtgtttgtcgtcggaactgaaagaggacgtgcttttgtcaataccagaaaggattttcaaaaagattttgtaaaatattgtgttgaagaagaagaaaaagctgcagagatgcataaaatgaaatctacaacccaggcaaatcggatgagtgtagatgctgtagaaattgaaacactcagaaaaacagttgaggactatttctgcttttgctatgggaaagctttaggcaaatccacagtggtacctgtaccatatgagaagatgctgcgagaccagtcggctgtggtagtgcaggggcttccggaaggtgttgcctttaaacaccccgagaactatgatcttgcaaccctgaaatggattttggagaacaaagcagggatttcattcatcattaagagaccttttttagagccaaagaagcatgtaggtggtcgtgtgatggtaacagatgctgacaggtcaatactatctccaggtggaagttgtggccccatcaaagtgaaaactgaacccacagaagattctggcatttccctggaaatggcagctgtgacagtaaaggaagaatcagaagatcctgattattatcaatataacattcaaggaagccaccattcttcagagggcaatgaaggcacagaaatggaagtaccagcagaaggttaggagaaaaagagattgcatattttccactatttgttgtatgtttattctattttatagattctattatccttaaaacaccttatttggaaataaaaggtgattcccttggt

SEQ ID NO: 4015 - protein, 274 aa, Homo sapiens
MAQVAMSTLPVEDEESSESRMVVTFLMSALESMCKELAKSKAEVACIAVYETDVFVVGTERGRAFVNTRKDFQKDFVKYCVEEEEKAAEMHKMKSTTQANRMSVDAVEIETLRKTVEDYFCFCYGKALGKSTVVPVPYEKMLRDQSAVVVQGLPEGVAFKHPENYDLATLKWILENKAGISFIIKRPFLEPKKHVGGRVMVTDADRSILSPGGSCGPIKVKTEPTEDSGISLEMAAVTVKEESEDPDYYQYNIQGSHHSSEGNEGTEMEVPAEG

SEQ ID NO: 4016 - DNA, 4207 bp, Homo sapiens
aaaaaaaaaaaaaaaaaaaaaaaaaaaagaaaaaagaaaaaaaaaaggaggaggaggaggagggtgagagagaagctgggagagcagagaaaaggggccaccggtcgcccccccgcttccccgcacgcgctctccagccgcggccgcccgcctgccgcggtcaccccggcctctgcctctgtcccccagtgatcggatcaaggcgctgagcgaggccctgcctgcggggcggccatgcggcggtgacaggagcgcgaccgacacgcacgggcccctcgccccctctcgcctcccgtccgctcgccagctcccctcagccgaggctgctccgcggcggccgcagcccgcgcgcggcccacactcgcctccccgttgaagatgaggagtcctcggagagcaggatggtggtgacattcctcatgtcagctctcgagtccatgtgtaaagaactggccaagtccaaagccgaagtggcctgcattgcagtgtatgaaacagacgtgtttgtcgtcggaactgaaagaggacgtgcttttgtcaataccagaaaggattttcaaaaagattttgtaaaatattgtgttgaagaagaagaaaaagctgcagagatgcataaaatgaaatctacaacccaggcaaatcggatgagtgtagatgctgtagaaattgaaacactcagaaaaacagttgaggactatttctgcttttgctatgggaaagctttaggcaaatccacagtggtacctgtaccatatgagaagatgctgcgagaccagtcggctgtggtagtgcaggggcttccggaaggtgttgcctttaaacaccccgagaactatgatcttgcaaccctgaaatggattttggagaacaaagcagggatttcattcatcattaagagaccttttttagagccaaagaagcatgtaggtggtcgtgtgatggtaacagatgctgacaggtcaatactatctccaggtggaagttgtggccccatcaaagtgaaaactgaacccacagaagattctggcatttccctggaaatggcagctgtgacagtaaaggaagaatcagaagatcctgattattatcaatataacattcaagcaggcccttctgaaactgatgatgttgatgaaaaacagcccctatcgaagcctttgcaaggaagccaccattcttcagagggcaatgaaggcacagaaatggaagtaccagcagaagattctactcaacatgtcccttcagaaacaagtgaggaccctgaagttgaggtgactattgaagatgatgattattctccaccgtctaagagaccaaaggccaatgagctaccgcagccaccagtcccggaacccgccaatgctgggaagcggaaagtgagggagttcaacttcgagaaatggaatgctcgcatcactgatctacgtaaacaagttgaagaattgtttgaaaggaaatatgctcaagccataaaagccaaaggtccggtgacgatcccgtaccctcttttccagtctcatgttgaagatctttatgtagaaggacttcctgaaggaattccttttagaaggccatctacttacggaattcctcgcctggagaggatattacttgcaaaggaaaggattcgttttgtgattaagaaacatgagcttctgaattcaacacgtgaagatttacagcttgataagccagcttcaggagtaaaggaagaatggtatgccagaatcactaaattaagaaagatggtggatcagcttttctgcaaaaaatttgcggaagccttggggagcactgaagccaaggctgtaccgtaccaaaaatttgaggcacacccgaatgatctgtacgtggaaggactgccagaaaacattcctttccgaagtccctcatggtatggaatcccaaggctggaaaaaatcattcaagtgggcaatcgaattaaatttgttattaaaagaccagaacttctgactcacagtaccactgaagttactcagccaagaacgaatacaccagtcaaagaagattggaatgtcagaattaccaagctacggaagcaagtggaagagatttttaatttgaaatttgctcaagctcttggactcaccgaggcagtaaaagtaccatatcctgtgtttgaatcaaacccggagttcttgaaaggatcgtccgcgggagtaataaaatcaagttcgttgttaaaaaacctgaactagttatttcctacttgcctcctgggatggctagtaaaataaacactaaagctttgcagtcccccaaaagaccacgaagtcctgggagtaattcaaaggttcctgaaattgaggtcaccgtggaaggccctaataacaacaatcctcaaacctcagctgttcgaaccccgacccagactaacggttctaacgttcccttcaagccacgagggagagagttttcctttgaggcctggaatgccaaaatcacggacctaaaacagaaagttgaaaatctcttcaatgagaaatgtggggaagctcttggccttaaacaagctgtgaaggtgccgttcgcgttatttgagtctttcccggaagacttttatgtggaaggcttacctgagggtgtgccattccgaagaccatcgacttttggcattccgaggctggagaagatactcagaaacaaagccaaaattaagttcatcattaaaaagcccgaaatgtttgagacggcgattaaggagagcacctcctctaagagccctcccagaaaaataaattcatcacccaatgttaatactactgcatcaggtgttgaagaccttaacatcattcaggtgacaattccagatgatgataatgaaagactctcgaaagttgaaaaagctagacagctaagagaacaagtgaatgacctctttagtcggaaatttggtgaagctattggtatgggttttcctgtgaaagttccctacaggaaaatcacaattaaccctggctgtgtggtggttgatggcatgcccccgggggtgtccttcaaagcccccagctacctggaaatcagctccatgagaaggatcttagactctgccgagtttatcaaattcacggtcattagaccatttccaggacttgtgattaataaccagctggttgatcagagtgagtcagaaggccccgtgatacaagaatcagctgaaccaagccagttggaagttccagccacagaagaaataaaagagactgatggaagctctcagatcaagcaagaaccagaccccacgtggtagacctcttccctcctaggcttaaagtatcagtggttgagaagagcttttcggacctgttactaccccaagctgtagccttgagttacggtgtttattttccaatcaagtgaagatatctcctacttctcctactggaacatctcagcttctgcagtgaagaaaaattcctgtgatagttcagttctttagtttttctatttgaaaaaaaaaaatcatttaaatgatcctttgttcacggctctccttaatgactgagtgaacagttcctatctgtatatttgactaaaccttttcctaagctatctctcatggttcctatgtttttttatcataattaaaagcaaaaccatctggatcacctaacagtcagaggtcagtatctcagcgtgtgaattatagaggaaatacagagagaacctcttccacttttacttttcgtccaaataaaatgcatggtgtaccagaagttgaagatcgggttgaggattggggctagctcgatgacactaaggccccaacatcgcgggacctgctgtggcgcggattcttaggaacgctgttctagccggccccctctccaggggtcgccgtggccggcattatttcctagttcttcttgtaaccctgaggtgccagcgcggggagtgaggaggggtcagggggctaaggatgcaacctctgacgttctgcgccttcctaggagagtcttacatgtgttgagatttcacaagcaatgcgagttgtaaaataccagctctacaagaagctaggctctgtgacggcatagttttcagtagctttatcacaatattcacaatggagaattatatgacatggtagcagaaataggcccttttatgtgttgcttctattttacctcaaattgtagatatagggtaatcaataaaatccatccatgcctttcacacactaagt

SEQ ID NO: 4017 - protein, 605 aa, Homo sapiens
MVVTFLMSALESMCKELAKSKAEVACIAVYETDVFVVGTERGRAFVNTRKDFQKDFVKYCVEEEEKAAEMHKMKSTTQANRMSVDAVEIETLRKTVEDYFCFCYGKALGKSTVVPVPYEKMLRDQSAVVVQGLPEGVAFKHPENYDLATLKWILENKAGISFIIKRPFLEPKKHVGGRVMVTDADRSILSPGGSCGPIKVKTEPTEDSGISLEMAAVTVKEESEDPDYYQYNIQAGPSETDDVDEKQPLSKPLQGSHHSSEGNEGTEMEVPAEDSTQHVPSETSEDPEVEVTIEDDDYSPPSKRPKANELPQPPVPEPANAGKRKVREFNFEKWNARITDLRKQVEELFERKYAQAIKAKGPVTIPYPLFQSHVEDLYVEGLPEGIPFRRPSTYGIPRLERILLAKERIRFVIKKHELLNSTREDLQLDKPASGVKEEWYARITKLRKMVDQLFCKKFAEALGSTEAKAVPYQKFEAHPNDLYVEGLPENIPFRSPSWYGIPRLEKIIQVGNRIKFVIKRPELLTHSTTEVTQPRTNTPVKEDWNVRITKLRKQVEEIFNLKFAQALGLTEAVKVPYPVFESNPEFLKGSSAGVIKSSSLLKNLN

SEQ ID NO: 4018 - DNA, 3791 bp, Homo sapiens
aaaaaaaaaaaaaaaaaaaaaaaaaaaagaaaaaagaaaaaaaaaaggaggaggaggaggagggtgagagagaagctgggagagcagagaaaaggggccaccggtcgcccccccgcttccccgcacgcgctctccagccgcggccgcccgcctgccgcggtcaccccggcctctgcctctgtcccccagtgatcggatcaaggcgctgagcgaggccctgcctgcggggcggccatgcggcggtgacaggagcgcgaccgacacgcacgggcccctcgccccctctcgcctcccgtccgctcgccagctcccctcagccgaggctgctccgcggcggccgcagcccgcgcgcggcccacactcgcctcccctcggcacccccggccccggagctgcctggaggcggccgcactcggtgtaaagaactggccaagtccaaagccgaagtggcctgcattgcagtgtatgaaacagacgtgtttgtcgtcggaactgaaagaggacgtgcttttgtcaataccagaaaggattttcaaaaagattttgtaaaatattgtgttgaagaagaagaaaaagctgcagagatgcataaaatgaaatctacaacccaggcaaatcggatgagtgtagatgctgtagaaattgaaacactcagaaaaacagttgaggactatttctgcttttgctatgggaaagctttaggcaaatccacagtggtacctgtaccatatgagaagatgctgcgagaccagtcggctgtggtagtgcaggggcttccggaaggtgttgcctttaaacaccccgagaactatgatcttgcaaccctgaaatggattttggagaacaaagcagggatttcattcatcattaagagaccttttttagagccaaagaagcatgtaggtggtcgtgtgatggtaacagatgctgacaggtcaatactatctccaggtggaagttgtggccccatcaaagtgaaaactgaacccacagaagattctggcatttccctggaaatggcagctgtgacagtaaaggaagaatcagaagatcctgattattatcaatataacattcaagcaggcccttctgaaactgatgatgttgatgaaaaacagcccctatcgaagcctttgcaaggaagccaccattcttcagagggcaatgaaggcacagaaatggaagtaccagcagaagatgatgattattctccaccgtctaagagaccaaaggccaatgagctaccgcagccaccagtcccggaacccgccaatgctgggaagcggaaagtgagggagttcaacttcgagaaatggaatgctcgcatcactgatctacgtaaacaagttgaagaattgtttgaaaggaaatatgctcaagccataaaagccaaaggtccggtgacgatcccgtaccctcttttccagtctcatgttgaagatctttatgtagaaggacttcctgaaggaattccttttagaaggccatctacttacggaattcctcgcctggagaggatattacttgcaaaggaaaggattcgttttgtgattaagaaacatgagcttctgaattcaacacgtgaagatttacagcttgataagccagcttcaggagtaaaggaagaatggtatgccagaatcactaaattaagaaagatggtggatcagcttttctgcaaaaaatttgcggaagccttggggagcactgaagccaaggctgtaccgtaccaaaaatttgaggcacacccgaatgatctgtacgtggaaggactgccagaaaacattcctttccgaagtccctcatggtatggaatcccaaggctggaaaaaatcattcaagtgggcaatcgaattaaatttgttattaaaagaccagaacttctgactcacagtaccactgaagttactcagccaagaacgaatacaccagctcaagctcttggactcaccgaggcagtaaaagtaccatatcctgtgtttgaatcaaacccggagttcttgtatgtggaaggcttgccagaggggattcccttccgaagccctacctggtttggaattccacgacttgaaaggatcgtccgcgggagtaataaaatcaagttcgttgttaaaaaacctgaactagttatttcctacttgcctcctgggatggctagtaaaataaacactaaagctttgcagtcccccaaaagaccacgaagtcctgggagtaattcaaaggttcctgaaattgaggtcaccgtggaaggccctaataacaacaatcctcaaacctcagctgttcgaaccccgacccagactaacggttctaacgttcccttcaagccacgagggagagagttttcctttgaggcctggaatgccaaaatcacggacctaaaacagaaagttgaaaatctcttcaatgagaaatgtggggaagctcttggccttaaacaagctgtgaaggtgccgttcgcgttatttgagtctttcccggaagacttttatgtggaaggcttacctgagggtgtgccattccgaagaccatcgacttttggcattccgaggctggagaagatactcagaaacaaagccaaaattaagttcatcattaaaaagcccgaaatgtttgagacggcgattaaggagagcacctcctctaagagccctcccagaaaaataaattcatcacccaatgttaatactactgcatcaggtgttgaagaccttaacatcattcaggtgacaattccagatgatgataatgaaagactctcgaaagttgaaaaagctagacagctaagagaacaagtgaatgacctctttagtcggaaatttggtgaagctattggtatgggttttcctgtgaaagttccctacaggaaaatcacaattaaccctggctgtgtggtggttgatggcatgcccccgggggtgtccttcaaagcccccagctacctggaaatcagctccatgagaaggatcttagactctgccgagtttatcaaattcacggtcattagaccatttccaggacttgtgattaataaccagctggttgatcagagtgagtcagaaggccccgtgatacaagaatcagctgaaccaagccagttggaagttccagccacagaagaaataaaagagactgatggaagctctcagatcaagcaagaaccagaccccacgtggtagacctcttccctcctaggcaaaaccatctggatcacctaacagtcagaggtcagtatctcagcgtgtgaattatagaggaaatacagagagaacctcttccacttttacttttcgtccaaataaaatgcatggtgtaccagaagttgaagatcgggttgaggattggggctagctcgatgacactaaggccccaacatcgcgggacctgctgtggcgcggattcttaggaacgctgttctagccggccccctctccaggggtcgccgtggccggcattatttcctagttcttcttgtaaccctgaggtgccagcgcggggagtgaggaggggtcagggggctaaggatgcaacctctgacgttctgcgccttcctaggagagtcttacatgtgttgagatttcacaagcaatgcgagttgtaaaataccagctctacaagaagctaggctctgtgacggcatagttttcagtagctttatcacaatattcacaatggagaattatatgacatggtagcagaaataggcccttttatgtgttgcttctattttacctcaaattgtagatatagggtaatcaataaaatccatccatgcctttcacacactaagt

SEQ ID NO: 4019 - protein, 864 aa, Homo sapiens
MHKMKSTTQANRMSVDAVEIETLRKTVEDYFCFCYGKALGKSTVVPVPYEKMLRDQSAVVVQGLPEGVAFKHPENYDLATLKWILENKAGISFIIKRPFLEPKKHVGGRVMVTDADRSILSPGGSCGPIKVKTEPTEDSGISLEMAAVTVKEESEDPDYYQYNIQAGPSETDDVDEKQPLSKPLQGSHHSSEGNEGTEMEVPAEDDDYSPPSKRPKANELPQPPVPEPANAGKRKVREFNFEKWNARITDLRKQVEELFERKYAQAIKAKGPVTIPYPLFQSHVEDLYVEGLPEGIPFRRPSTYGIPRLERILLAKERIRFVIKKHELLNSTREDLQLDKPASGVKEEWYARITKLRKMVDQLFCKKFAEALGSTEAKAVPYQKFEAHPNDLYVEGLPENIPFRSPSWYGIPRLEKIIQVGNRIKFVIKRPELLTHSTTEVTQPRTNTPAQALGLTEAVKVPYPVFESNPEFLYVEGLPEGIPFRSPTWFGIPRLERIVRGSNKIKFVVKKPELVISYLPPGMASKINTKALQSPKRPRSPGSNSKVPEIEVTVEGPNNNNPQTSAVRTPTQTNGSNVPFKPRGREFSFEAWNAKITDLKQKVENLFNEKCGEALGLKQAVKVPFALFESFPEDFYVEGLPEGVPFRRPSTFGIPRLEKILRNKAKIKFIIKKPEMFETAIKESTSSKSPPRKINSSPNVNTTASGVEDLNIIQVTIPDDDNERLSKVEKARQLREQVNDLFSRKFGEAIGMGFPVKVPYRKITINPGCVVVDGMPPGVSFKAPSYLEISSMRRILDSAEFIKFTVIRPFPGLVINNQLVDQSESEGPVIQESAEPSQLEVPATEEIKETDGSSQIKQEPDPTW

SEQ ID NO: 4020 - DNA, 5052 bp, Homo sapiens
aaaaaaaaaaaaaaaaaaaaaaaaaaaagaaaaaagaaaaaaaaaaggaggaggaggaggagggtgagagagaagctgggagagcagagaaaaggggccaccggtcgcccccccgcttccccgcacgcgctctccagccgcggccgcccgcctgccgcggtcaccccggcctctgcctctgtcccccagtgatcggatcaaggcgctgagcgaggccctgcctgcggggcggccatgcggcggtgacaggagcgcgaccgacacgcacgggcccctcgccccctctcgcctcccgtccgctcgccagctcccctcagccgaggctgctccgcggcggccgcagcccgcgcgcggcccacactcgcctcccctcggcacccccggccccggagctgcctggaggcggccgcactcggtgtaaagaactggccaagtccaaagccgaagtggcctgcattgcagtgtatgaaacagacgtgtttgtcgtcggaactgaaagaggacgtgcttttgtcaataccagaaaggattttcaaaaagattttgtaaaatattgtgttgaagaagaagaaaaagctgcagagatgcataaaatgaaatctacaacccaggcaaatcggatgagtgtagatgctgtagaaattgaaacactcagaaaaacagttgaggactatttctgcttttgctatgggaaagctttaggcaaatccacagtggtacctgtaccatatgagaagatgctgcgagaccagtcggctgtggtagtgcaggggcttccggaaggtgttgcctttaaacaccccgagaactatgatcttgcaaccctgaaatggattttggagaacaaagcagggatttcattcatcattaagagaccttttttagagccaaagaagcatgtaggtggtcgtgtgatggtaacagatgctgacaggtcaatactatctccaggtggaagttgtggccccatcaaagtgaaaactgaacccacagaagattctggcatttccctggaaatggcagctgtgacagtaaaggaagaatcagaagatcctgattattatcaatataacattcaagcaggcccttctgaaactgatgatgttgatgaaaaacagcccctatcgaagcctttgcaaggaagccaccattcttcagagggcaatgaaggcacagaaatggaagtaccagcagaagattctactcaacatgtcccttcagaaacaagtgaggaccctgaagttgaggtgactattgaagatgatgattattctccaccgtctaagagaccaaaggccaatgagctaccgcagccaccagtcccggaacccgccaatgctgggaagcggaaagtgagggagttcaacttcgagaaatggaatgctcgcatcactgatctacgtaaacaagttgaagaattgtttgaaaggaaatatgctcaagccataaaagccaaaggtccggtgacgatcccgtaccctcttttccagtctcatgttgaagatctttatgtagaaggacttcctgaaggaattccttttagaaggccatctacttacggaattcctcgcctggagaggatattacttgcaaaggaaaggattcgttttgtgattaagaaacatgagcttctgaattcaacacgtgaagatttacagcttgataagccagcttcaggagtaaaggaagaatggtatgccagaatcactaaattaagaaagatggtggatcagcttttctgcaaaaaatttgcggaagccttggggagcactgaagccaaggctgtaccgtaccaaaaatttgaggcacacccgaatgatctgtacgtggaaggactgccagaaaacattcctttccgaagtccctcatggtatggaatcccaaggctggaaaaaatcattcaagtgggcaatcgaattaaatttgttattaaaagaccagaacttctgactcacagtaccactgaagttactcagccaagaacgaatacaccagtcaaagaagattggaatgtcagaattaccaagctacggaagcaagtggaagagatttttaatttgaaatttgctcaagctcttggactcaccgaggcagtaaaagtaccatatcctgtgtttgaatcaaacccggagttcttgaaaggatcgtccgcgggagtaataaaatcaagttcgttgttaaaaaacctgaactagttatttcctacttgcctcctgggatggctagtaaaataaacactaaagctttgcagtcccccaaaagaccacgaagtcctgggagtaattcaaaggttcctgaaattgaggtcaccgtggaaggccctaataacaacaatcctcaaacctcagctgttcgaaccccgacccagactaacggttctaacgttcccttcaagccacgagggagagagttttcctttgaggcctggaatgccaaaatcacggacctaaaacagaaagttgaaaatctcttcaatgagaaatgtggggaagctcttggccttaaacaagctgtgaaggtgccgttcgcgttatttgagtctttcccggaagacttttatgtggaaggcttacctgagggtgtgccattccgaagaccatcgacttttggcattccgaggctggagaagatactcagaaacaaagccaaaattaagttcatcattaaaaagcccgaaatgtttgagacggcgattaaggagagcacctcctctaagagccctcccagaaaaataaattcatcacccaatgttaatactactgcatcaggtgttgaagaccttaacatcattcaggtgacaattccagatgatgataatgaaagactctcgaaagttgaaaaagctagacagctaagagaacaagtgaatgacctctttagtcggaaatttggtgaagctattggtatgggttttcctgtgaaagttccctacaggaaaatcacaattaaccctggctgtgtggtggttgatggcatgcccccgggggtgtccttcaaagcccccagctacctggaaatcagctccatgagaaggatcttagactctgccgagtttatcaaattcacggtcattagaccatttccaggacttgtgattaataaccagctggttgatcagagtgagtcagaaggccccgtgatacaagaatcagctgaaccaagccagttggaagttccagccacagaaggtaaaaggacctcttccctcctagggtaaatcagcttctgtgtcagggatgctgtgtggtgtccatctgaaccccctgcatacgcgtagctaatgtgatctccccactttcacataagatggtggccctgccttcagggaatgtgggagccaggtgggagccttcccggatatttaagctagaagattctacagggagattctccttggatcaatatatgtctctcagtcaaagatgtaaaagcacttttgccttaaaaagaatgttctgtttctaaatagagtcaacgttgtcctcctcattggaattcactatgagtcagaatcattagactgacttttttttttccatagtaatagtattttgcagagtctcacagagctgcagatcttttgttcatcttgcagagttaacaagtctgatcctgttagtccagatttcttaaatttggccaagttataataggagcagtagcttgagacccgaagtcaggaaactttgacaatggatttttttttttaatccagagacttgtactggaatttgccttaccctgtcagctcatggacttaaggtttcatcccgctttatgagtgcttctgaatccaagtcattgttacctgaatttgcaaattaagttgtgatattcgtgactgttaaattcctgtaattagattaacctctttgcttgcttgtttgttttctctcctattttagcttaaagtatcagtggttgagaagagcttttcggacctgttactaccccaagctgtgtaatatacttgtataacagaaataccttctatacaaacctttttttctacttttagatagaaatgtctactttttcagcagttctgtgaattaaagagcagagtgactgtgggtctggaatggctggtgtacttgggaatgtactatcaggattttacagcaatgctgggaaatgacagggaaaatgacaggaatgaatctcaccagattttttatgtactcagcagagccttgagttacggtgtttattttccaatcaagtgaagatatctcctacttctcctactggaacatctcagcttctgcagtgaagaaaaattcctgtgatagttcagttctttagtttttctatttgaaaaaaaaaaatcatttaaatgatcctttgttcacggctctccttaatgactgagtgaacagttcctatctgtatatttgactaaaccttttcctaagctatctctcatggttcctatgtttttttatcataattaaaagcaaaaccatctggatcacctaacagtcagaggtcagtatctcagcgtgtgaattatagaggaaatacagagagaacctcttccacttttacttttcgtccaaataaaatgcatggtgtaccagaagttgaagatcgggttgaggattggggctagctcgatgacactaaggccccaacatcgcgggacctgctgtggcgcggattcttaggaacgctgttctagccggccccctctccaggggtcgccgtggccggcattatttcctagttcttcttgtaaccctgaggtgccagcgcggggagtgaggaggggtcagggggctaaggatgcaacctctgacgttctgcgccttcctaggagagtcttacatgtgttgagatttcacaagcaatgcgagttgtaaaataccagctctacaagaagctaggctctgtgacggcatagttttcagtagctttatcacaatattcacaatggagaattatatgacatggtagcagaaataggcccttttatgtgttgcttctattttacctcaaattgtagatatagggtaatcaataaaatccatccatgcctttcacacactaagt

SEQ ID NO: 4021 - protein, 536 aa, Homo sapiens
MHKMKSTTQANRMSVDAVEIETLRKTVEDYFCFCYGKALGKSTVVPVPYEKMLRDQSAVVVQGLPEGVAFKHPENYDLATLKWILENKAGISFIIKRPFLEPKKHVGGRVMVTDADRSILSPGGSCGPIKVKTEPTEDSGISLEMAAVTVKEESEDPDYYQYNIQAGPSETDDVDEKQPLSKPLQGSHHSSEGNEGTEMEVPAEDSTQHVPSETSEDPEVEVTIEDDDYSPPSKRPKANELPQPPVPEPANAGKRKVREFNFEKWNARITDLRKQVEELFERKYAQAIKAKGPVTIPYPLFQSHVEDLYVEGLPEGIPFRRPSTYGIPRLERILLAKERIRFVIKKHELLNSTREDLQLDKPASGVKEEWYARITKLRKMVDQLFCKKFAEALGSTEAKAVPYQKFEAHPNDLYVEGLPENIPFRSPSWYGIPRLEKIIQVGNRIKFVIKRPELLTHSTTEVTQPRTNTPVKEDWNVRITKLRKQVEEIFNLKFAQALGLTEAVKVPYPVFESNPEFLKGSSAGVIKSSSLLKNLN

SEQ ID NO: 4022 - DNA, 4084 bp, Homo sapiens
aaaaaaaaaaaaaaaaaaaaaaaaaaaagaaaaaagaaaaaaaaaaggaggaggaggaggagggtgagagagaagctgggagagcagagaaaaggggccaccggtcgcccccccgcttccccgcacgcgctctccagccgcggccgcccgcctgccgcggtcaccccggcctctgcctctgtcccccagtgatcggatcaaggcgctgagcgaggccctgcctgcggggcggccatgcggcggtgacaggagcgcgaccgacacgcacgggcccctcgccccctctcgcctcccgtccgctcgccagctcccctcagccgaggctgctccgcggcggccgcagcccgcgcgcggcccacactcgcctccccgttgaagatgaggagtcctcggagagcaggatggtggtgacattcctcatgtcagctctcgagtccatgtgtaaagaactggccaagtccaaagccgaagtggcctgcattgcagtgtatgaaacagacgtgtttgtcgtcggaactgaaagaggacgtgcttttgtcaataccagaaaggattttcaaaaagattttgtaaaatattgtgttgaagaagaagaaaaagctgcagagatgcataaaatgaaatctacaacccaggcaaatcggatgagtgtagatgctgtagaaattgaaacactcagaaaaacagttgaggactatttctgcttttgctatgggaaagctttaggcaaatccacagtggtacctgtaccatatgagaagatgctgcgagaccagtcggctgtggtagtgcaggggcttccggaaggtgttgcctttaaacaccccgagaactatgatcttgcaaccctgaaatggattttggagaacaaagcagggatttcattcatcattaagagaccttttttagagccaaagaagcatgtaggtggtcgtgtgatggtaacagatgctgacaggtcaatactatctccaggtggaagttgtggccccatcaaagtgaaaactgaacccacagaagattctggcatttccctggaaatggcagctgtgacagtaaaggaagaatcagaagatcctgattattatcaatataacattcaaggaagccaccattcttcagagggcaatgaaggcacagaaatggaagtaccagcagaagatgatgattattctccaccgtctaagagaccaaaggccaatgagctaccgcagccaccagtcccggaacccgccaatgctgggaagcggaaagtgagggagttcaacttcgagaaatggaatgctcgcatcactgatctacgtaaacaagttgaagaattgtttgaaaggaaatatgctcaagccataaaagccaaaggtccggtgacgatcccgtaccctcttttccagtctcatgttgaagatctttatgtagaaggacttcctgaaggaattccttttagaaggccatctacttacggaattcctcgcctggagaggatattacttgcaaaggaaaggattcgttttgtgattaagaaacatgagcttctgaattcaacacgtgaagatttacagcttgataagccagcttcaggagtaaaggaagaatggtatgccagaatcactaaattaagaaagatggtggatcagcttttctgcaaaaaatttgcggaagccttggggagcactgaagccaaggctgtaccgtaccaaaaatttgaggcacacccgaatgatctgtacgtggaaggactgccagaaaacattcctttccgaagtccctcatggtatggaatcccaaggctggaaaaaatcattcaagtgggcaatcgaattaaatttgttattaaaagaccagaacttctgactcacagtaccactgaagttactcagccaagaacgaatacaccagtcaaagaagattggaatgtcagaattaccaagctacggaagcaagtggaagagatttttaatttgaaatttgctcaagctcttggactcaccgaggcagtaaaagtaccatatcctgtgtttgaatcaaacccggagttcttgaaaggatcgtccgcgggagtaataaaatcaagttcgttgttaaaaaacctgaactagttatttcctacttgcctcctgggatggctagtaaaataaacactaaagctttgcagtcccccaaaagaccacgaagtcctgggagtaattcaaaggttcctgaaattgaggtcaccgtggaaggccctaataacaacaatcctcaaacctcagctgttcgaaccccgacccagactaacggttctaacgttcccttcaagccacgagggagagagttttcctttgaggcctggaatgccaaaatcacggacctaaaacagaaagttgaaaatctcttcaatgagaaatgtggggaagctcttggccttaaacaagctgtgaaggtgccgttcgcgttatttgagtctttcccggaagacttttatgtggaaggcttacctgagggtgtgccattccgaagaccatcgacttttggcattccgaggctggagaagatactcagaaacaaagccaaaattaagttcatcattaaaaagcccgaaatgtttgagacggcgattaaggagagcacctcctctaagagccctcccagaaaaataaattcatcacccaatgttaatactactgcatcaggtgttgaagaccttaacatcattcaggtgacaattccagatgatgataatgaaagactctcgaaagttgaaaaagctagacagctaagagaacaagtgaatgacctctttagtcggaaatttggtgaagctattggtatgggttttcctgtgaaagttccctacaggaaaatcacaattaaccctggctgtgtggtggttgatggcatgcccccgggggtgtccttcaaagcccccagctacctggaaatcagctccatgagaaggatcttagactctgccgagtttatcaaattcacggtcattagaccatttccaggacttgtgattaataaccagctggttgatcagagtgagtcagaaggccccgtgatacaagaatcagctgaaccaagccagttggaagttccagccacagaagaaataaaagagactgatggaagctctcagatcaagcaagaaccagaccccacgtggtagacctcttccctcctaggcttaaagtatcagtggttgagaagagcttttcggacctgttactaccccaagctgtagccttgagttacggtgtttattttccaatcaagtgaagatatctcctacttctcctactggaacatctcagcttctgcagtgaagaaaaattcctgtgatagttcagttctttagtttttctatttgaaaaaaaaaaatcatttaaatgatcctttgttcacggctctccttaatgactgagtgaacagttcctatctgtatatttgactaaaccttttcctaagctatctctcatggttcctatgtttttttatcataattaaaagcaaaaccatctggatcacctaacagtcagaggtcagtatctcagcgtgtgaattatagaggaaatacagagagaacctcttccacttttacttttcgtccaaataaaatgcatggtgtaccagaagttgaagatcgggttgaggattggggctagctcgatgacactaaggccccaacatcgcgggacctgctgtggcgcggattcttaggaacgctgttctagccggccccctctccaggggtcgccgtggccggcattatttcctagttcttcttgtaaccctgaggtgccagcgcggggagtgaggaggggtcagggggctaaggatgcaacctctgacgttctgcgccttcctaggagagtcttacatgtgttgagatttcacaagcaatgcgagttgtaaaataccagctctacaagaagctaggctctgtgacggcatagttttcagtagctttatcacaatattcacaatggagaattatatgacatggtagcagaaataggcccttttatgtgttgcttctattttacctcaaattgtagatatagggtaatcaataaaatccatccatgcctttcacacactaagt

SEQ ID NO: 4023 - protein, 564 aa, Homo sapiens
MVVTFLMSALESMCKELAKSKAEVACIAVYETDVFVVGTERGRAFVNTRKDFQKDFVKYCVEEEEKAAEMHKMKSTTQANRMSVDAVEIETLRKTVEDYFCFCYGKALGKSTVVPVPYEKMLRDQSAVVVQGLPEGVAFKHPENYDLATLKWILENKAGISFIIKRPFLEPKKHVGGRVMVTDADRSILSPGGSCGPIKVKTEPTEDSGISLEMAAVTVKEESEDPDYYQYNIQGSHHSSEGNEGTEMEVPAEDDDYSPPSKRPKANELPQPPVPEPANAGKRKVREFNFEKWNARITDLRKQVEELFERKYAQAIKAKGPVTIPYPLFQSHVEDLYVEGLPEGIPFRRPSTYGIPRLERILLAKERIRFVIKKHELLNSTREDLQLDKPASGVKEEWYARITKLRKMVDQLFCKKFAEALGSTEAKAVPYQKFEAHPNDLYVEGLPENIPFRSPSWYGIPRLEKIIQVGNRIKFVIKRPELLTHSTTEVTQPRTNTPVKEDWNVRITKLRKQVEEIFNLKFAQALGLTEAVKVPYPVFESNPEFLKGSSAGVIKSSSLLKNLN

SEQ ID NO: 4024 - DNA, 7980 bp, Homo sapiens
aaaaaaaaaaaaaaaaaaaaaaaaaaaagaaaaaagaaaaaaaaaaggaggaggaggaggagggtgagagagaagctgggagagcagagaaaaggggccaccggtcgcccccccgcttccccgcacgcgctctccagccgcggccgcccgcctgccgcggtcaccccggcctctgcctctgtcccccagtgatcggatcaaggcgctgagcgaggccctgcctgcggggcggccatgcggcggtgacaggagcgcgaccgacacgcacgggcccctcgccccctctcgcctcccgtccgctcgccagctcccctcagccgaggctgctccgcggcggccgcagcccgcgcgcggcccacactcgcctcccctcggcacccccggccccggagctgcctggaggcggccgcactcggtgtaaagaactggccaagtccaaagccgaagtggcctgcattgcagtgtatgaaacagacgtgtttgtcgtcggaactgaaagaggacgtgcttttgtcaataccagaaaggattttcaaaaagattttgtaaaatattgtgttgaagaagaagaaaaagctgcagagatgcataaaatgaaatctacaacccaggcaaatcggatgagtgtagatgctgtagaaattgaaacactcagaaaaacagttgaggactatttctgcttttgctatgggaaagctttaggcaaatccacagtggtacctgtaccatatgagaagatgctgcgagaccagtcggctgtggtagtgcaggggcttccggaaggtgttgcctttaaacaccccgagaactatgatcttgcaaccctgaaatggattttggagaacaaagcagggatttcattcatcattaagagaccttttttagagccaaagaagcatgtaggtggtcgtgtgatggtaacagatgctgacaggtcaatactatctccaggtggaagttgtggccccatcaaagtgaaaactgaacccacagaagattctggcatttccctggaaatggcagctgtgacagtaaaggaagaatcagaagatcctgattattatcaatataacattcaagcaggcccttctgaaactgatgatgttgatgaaaaacagcccctatcgaagcctttgcaaggaagccaccattcttcagagggcaatgaaggcacagaaatggaagtaccagcagaagatgatgattattctccaccgtctaagagaccaaaggccaatgagctaccgcagccaccagtcccggaacccgccaatgctgggaagcggaaagtgagggagttcaacttcgagaaatggaatgctcgcatcactgatctacgtaaacaagttgaagaattgtttgaaaggaaatatgctcaagccataaaagccaaaggtccggtgacgatcccgtaccctcttttccagtctcatgttgaagatctttatgtagaaggacttcctgaaggaattccttttagaaggccatctacttacggaattcctcgcctggagaggatattacttgcaaaggaaaggattcgttttgtgattaagaaacatgagcttctgaattcaacacgtgaagatttacagcttgataagccagcttcaggagtaaaggaagaatggtatgccagaatcactaaattaagaaagatggtggatcagcttttctgcaaaaaatttgcggaagccttggggagcactgaagccaaggctgtaccgtaccaaaaatttgaggcacacccgaatgatctgtacgtggaaggactgccagaaaacattcctttccgaagtccctcatggtatggaatcccaaggctggaaaaaatcattcaagtgggcaatcgaattaaatttgttattaaaagaccagaacttctgactcacagtaccactgaagttactcagccaagaacgaatacaccagtcaaagaagattggaatgtcagaattaccaagctacggaagcaagtggaagagatttttaatttgaaatttgcttagatttgttgacagcggtttcctggagtgctgtcttgagaacgattctgaggaggctcagcaagaaagagtgtttcagttgattgggtgtgtctgtcatggagaaggaactcaagctcttggactcaccgaggcagtaaaagtaccatatcctgtgtttgaatcaaacccggagttcttgtatgtggaaggcttgccagaggggattcccttccgaagccctacctggtttggaattccacgacttgaaaggatcgtccgcgggagtaataaaatcaagttcgttgttaaaaaacctgaactagttatttcctacttgcctcctgggatggctagtaaaataaacactaaagctttgcagtcccccaaaagaccacgaagtcctgggagtaattcaaaggttcctgaaattgaggtcaccgtggaaggccctaataacaacaatcctcaaacctcagctgttcgaaccccgacccagactaacggttctaacgttcccttcaagccacgagggagagagttttcctttgaggcctggaatgccaaaatcacggacctaaaacagaaagttgaaaatctcttcaatgagaaatgtggggaagctcttggccttaaacaagctgtgaaggtgccgttcgcgttatttgagtctttcccggaagacttttatgtggaaggcttacctgagggtgtgccattccgaagaccatcgacttttggcattccgaggctggagaagatactcagaaacaaagccaaaattaagttcatcattaaaaagcccgaaatgtttgagacggcgattaaggagagcacctcctctaagagccctcccagaaaaataaattcatcacccaatgttaatactactgcatcaggtgttgaagaccttaacatcattcaggtgacaattccagatgatgataatgaaagactctcgaaagttgaaaaagctagacagctaagagaacaagtgaatgacctctttagtcggaaatttggtgaagctattggtatgggttttcctgtgaaagttccctacaggaaaatcacaattaaccctggctgtgtggtggttgatggcatgcccccgggggtgtccttcaaagcccccagctacctggaaatcagctccatgagaaggatcttagactctgccgagtttatcaaattcacggtcattaggtaagtgagagtttcctgcttagtcacaggagcgaatctggagctcatgaggctgactcttctaaaatgcagccacaggtagtcatcgaatccggcttcctatgctgtgcaatcaacaaatcaaaataacttgtgtcatcattagaatgtcagatgtgcttctacgaactaagctgactcttttaattctttggcaaagggttggcaaactaggactgtttgccaaattcaggctgcctcctatttttagagtcttcctgaaacacagctacacccgtattatccatggctgctttcctgtcacagtgagtaagtagctgggactgagaaggcatggcctccaaagtctaaaatatttactctctagcactttgtagaaaaaccttagctaggcacagtggctaacgcctgtaatcccagcattttgggaggccaaggcaggcagatcacctgaggtcaggagttccagaccagcctggccaacatggtgaaatcccatctctacaaaaataaaacagttagctgggcatgatggcgggtgcctgtaatcccagctactcgggaggctgaggcaggatagtcgcttgaacccaggaggtggaggttgcaatgagccaagatcatgccactgcactccagcctggacgacagagtgagactccatcacaagaaaaaaagaactttgtcaacctctgtcttagggcgccttgtcacaggcttcgggtcagacggattcaaccttgcatcagccatttgttagccaggtcactctgttctttgtctgtaaatgagattgatcgttgttcccactgagagtgtcagctccttcccgtagagcaggcatgatgattgtactcacctctgacaccattgtgagtgccacattccttcccacgtccttgtcactgtaagagatgcccacctgagcaccaaccccaggttatcttcccctttgtcttccagccccccagaaacagctacgactcaacctacccaatcatttcatcatcagattgccactgtctctagttcaggtctcttgggactggcactcagaaatctcataataaatcctcttgaggcttctcatacactcgtcttcttccaatcttctttccctcaaaatctcatattttggttccacttcacccaccgtcattctccatatcactcccaggagttaggcaaaaagccccttccgttcttccgtatgttaaacttagaatcactctgttccctgctctgcgtttctattttttgtttttcctccatttactagtagcttaacactttctaacagtgttcttattattgatacgtatctatctcttccataagcttataaggtcacggataatacttctcattgtagtacgtaaatgacgtgggctagatatgagttgaataaacagttatacctgtaaattcttacagagtgaaaataaattgttatactttacaatttgtttctctctttagaccatttccaggacttgtgattaataaccgtgagtattttgtgaagtgttttgtttttgttttttcctggggtctgacgtgtgtgcgtgtgagtgtgtatacatgcttaacgtatatcacgttacttcacctatgtcagtaaccaggccaaatacttgttttagccctcagtaaaaacaccaggcacttcctagttgtaaaattattcaagcttcttaacttcctatcctcgatgcacttaatcataaaatggtaataatagcaccgattttgggggagtcgttccagtagatggaaagcatctggaacaggtgtcagcaagctcctgccgacgtgtatgcataaagttttattgaaaccaccatcgtgtccatttgtttatggcagaactgagagatggcagcagcaagtgtgtgcctgcaaaacctaaaatatttactaattggctctgcaagaaaagagtttgcatccccctaacctagaacagtgtctagcctctagtatgtgtttagcctacagtatgtgctcagcgaatacaatctatatttattactgcttttatgactgttataattactgtgcttggatttcgttacaaagtaagtcacaatgtgcctgcttctgttagtatttcagcacagtgcctggcacacatggggctctcaaatattgctgagcgagtgaacaaatgtcctttcaattccttaacgttgatgtcattttcaatagtattttgagccaaacttaattttgcgagtgtgttttgttttcttaactttattattaaaaatgtataaaagtgaggccaggcgtggtggctcacgcctgtaatcccagcagtttgggaggctgaggcaggcggatcagttgaggttgggagttggagaccagcccgtccaacatggtgaaagcctgtctctactaaaaatacaaaaatcagctgggtgtggtggcgcgtgcctgtaatcccagctactcaggaggctgaggcaggagagttgcttgaatcctagaggtggaggttgcagtgagctgagatcgtgccattgcactccagcctgggcaacaagagcaaaactctgtcccaataaataaataaataaaatgttctcttttgttcctgttcttgtgcggtagtgtggtatagagttttatggtaattactgtgaattagtgattctgagggacatatcagaactctgaggtttgtttccttctcatcttgagggaaacagcaaatgtatgttaaaatgcttttccaagggaacaacacatccttacattatttaaaccaatctgcttcattttcagagctggttgatcagagtgagtcagaaggccccgtgatacaagaatcagctgaaccaagccagttggaagttccagccacagaagaaataaaagagactgatggaagctctcagatcaagcaagaaccagaccccacgtggtagacctcttccctcctagggtaaatcagcttctgtgtcagggatgctgtgtggtgtccatctgaaccccctgcatacgcgtagctaatgtgatctccccactttcacataagatggtggccctgccttcagggaatgtgggagccaggtgggagccttcccggatatttaagctagaagattctacagggagattctccttggatcaatatatgtctctcagtcaaagatgtaaaagcacttttgccttaaaaagaatgttctgtttctaaatagagtcaacgttgtcctcctcattggaattcactatgagtcagaatcattagactgacttttttttttccatagtaatagtattttgcagagtctcacagagctgcagatcttttgttcatcttgcagagttaacaagtctgatcctgttagtccagatttcttaaatttggccaagttataataggagcagtagcttgagacccgaagtcaggaaactttgacaatggatttttttttttaatccagagacttgtactggaatttgccttaccctgtcagctcatggacttaaggtttcatcccgctttatgagtgcttctgaatccaagtcattgttacctgaatttgcaaattaagttgtgatattcgtgactgttaaattcctgtaattagattaacctctttgcttgcttgtttgttttctctcctattttagcttaaagtatcagtggttgagaagagcttttcggacctgttactaccccaagctgtgtaatatacttgtataacagaaataccttctatacaaacctttttttctacttttagatagaaatgtctactttttcagcagttctgtgaattaaagagcagagtgactgtgggtctggaatggctggtgtacttgggaatgtactatcaggattttacagcaatgctgggaaatgacagggaaaatgacaggaatgaatctcaccagattttttatgtactcagcagagccttgagttacggtgtttattttccaatcaagtgaagatatctcctacttctcctactggaacatctcagcttctgcagtgaagaaaaattcctgtgatagttcagttctttagtttttctatttgaaaaaaaaaaatcatttaaatgatcctttgttcacggctctccttaatgactgagtgaacagttcctatctgtatatttgactaaaccttttcctaagctatctctcatggttcctatgtttttttatcataattaaaagcaaaaccatctggatcacctaacagtcagaggtcagtatctcagcgtgtgaattatagaggaaatacagagagaacctcttccacttttacttttcgtccaaataaaatgcatggtgtaccagaagttgaagatcgggttgaggattggggctagctcgatgacactaaggccccaacatcgcgggacctgctgtggcgcggattcttaggaacgctgttctagccggccccctctccaggggtcgccgtggccggcattatttcctagttcttcttgtaaccctgaggtgccagcgcggggagtgaggaggggtcagggggctaaggatgcaacctctgacgttctgcgccttcctaggagagtcttacatgtgttgagatttcacaagcaatgcgagttgtaaaataccagctctacaagaagctaggctctgtgacggcatagttttcagtagctttatcacaatattcacaatggagaattatatgacatggtagcagaaataggcccttttatgtgttgcttctattttacctcaaattgtagatatagggtaatcaataaaatccatccatgcctttcacacactaagt

SEQ ID NO: 4025 - protein, 474 aa, Homo sapiens
MHKMKSTTQANRMSVDAVEIETLRKTVEDYFCFCYGKALGKSTVVPVPYEKMLRDQSAVVVQGLPEGVAFKHPENYDLATLKWILENKAGISFIIKRPFLEPKKHVGGRVMVTDADRSILSPGGSCGPIKVKTEPTEDSGISLEMAAVTVKEESEDPDYYQYNIQAGPSETDDVDEKQPLSKPLQGSHHSSEGNEGTEMEVPAEDDDYSPPSKRPKANELPQPPVPEPANAGKRKVREFNFEKWNARITDLRKQVEELFERKYAQAIKAKGPVTIPYPLFQSHVEDLYVEGLPEGIPFRRPSTYGIPRLERILLAKERIRFVIKKHELLNSTREDLQLDKPASGVKEEWYARITKLRKMVDQLFCKKFAEALGSTEAKAVPYQKFEAHPNDLYVEGLPENIPFRSPSWYGIPRLEKIIQVGNRIKFVIKRPELLTHSTTEVTQPRTNTPVKEDWNVRITKLRKQVEEIFNLKFA

SEQ ID NO: 4026 - DNA, 4187 bp, Homo sapiens
aaaaaaaaaaaaaaaaaaaaaaaaaaaagaaaaaagaaaaaaaaaaggaggaggaggaggagggtgagagagaagctgggagagcagagaaaaggggccaccggtcgcccccccgcttccccgcacgcgctctccagccgcggccgcccgcctgccgcggtcaccccggcctctgcctctgtcccccagtgatcggatcaaggcgctgagcgaggccctgcctgcggggcggccatgcggcggtgacaggagcgcgaccgacacgcacgggcccctcgccccctctcgcctcccgtccgctcgccagctcccctcagccgaggctgctccgcggcggccgcagcccgcgcgcggcccacactcgcctcccctcggcacccccggccccggagctgcctggaggcggccgcactcggtgtaaagaactggccaagtccaaagccgaagtggcctgcattgcagtgtatgaaacagacgtgtttgtcgtcggaactgaaagaggacgtgcttttgtcaataccagaaaggattttcaaaaagattttgtaaaatattgtgttgaagaagaagaaaaagctgcagagatgcataaaatgaaatctacaacccaggcaaatcggatgagtgtagatgctgtagaaattgaaacactcagaaaaacagttgaggactatttctgcttttgctatgggaaagctttaggcaaatccacagtggtacctgtaccatatgagaagatgctgcgagaccagtcggctgtggtagtgcaggggcttccggaaggtgttgcctttaaacaccccgagaactatgatcttgcaaccctgaaatggattttggagaacaaagcagggatttcattcatcattaagagaccttttttagagccaaagaagcatgtaggtggtcgtgtgatggtaacagatgctgacaggtcaatactatctccaggtggaagttgtggccccatcaaagtgaaaactgaacccacagaagattctggcatttccctggaaatggcagctgtgacagtaaaggaagaatcagaagatcctgattattatcaatataacattcaagcaggcccttctgaaactgatgatgttgatgaaaaacagcccctatcgaagcctttgcaaggaagccaccattcttcagagggcaatgaaggcacagaaatggaagtaccagcagaagatgatgattattctccaccgtctaagagaccaaaggccaatgagctaccgcagccaccagtcccggaacccgccaatgctgggaagcggaaagtgagggagttcaacttcgagaaatggaatgctcgcatcactgatctacgtaaacaagttgaagaattgtttgaaaggaaatatgctcaagccataaaagccaaaggtccggtgacgatcccgtaccctcttttccagtctcatgttgaagatctttatgtagaaggacttcctgaaggaattccttttagaaggccatctacttacggaattcctcgcctggagaggatattacttgcaaaggaaaggattcgttttgtgattaagaaacatgagcttctgaattcaacacgtgaagatttacagcttgataagccagcttcaggagtaaaggaagaatggtatgccagaatcactaaattaagaaagatggtggatcagcttttctgcaaaaaatttgcggaagccttggggagcactgaagccaaggctgtaccgtaccaaaaatttgaggcacacccgaatgatctgtacgtggaaggactgccagaaaacattcctttccgaagtccctcatggtatggaatcccaaggctggaaaaaatcattcaagtgggcaatcgaattaaatttgttattaaaagaccagaacttctgactcacagtaccactgaagttactcagccaagaacgaatacaccagtcaaagaagattggaatgtcagaattaccaagctacggaagcaagtggaagagatttttaatttgaaatttgctcaagctcttggactcaccgaggcagtaaaagtaccatatcctgtgtttgaatcaaacccggagttcttgtatgtggaaggcttgccagaggggattcccttccgaagccctacctggtttggaattccacgacttgaaaggatcgtccgcgggagtaataaaatcaagttcgttgttaaaaaacctgaactagttatttcctacttgcctcctgggatggctagtaaaataaacactaaagctttgcagtcccccaaaagaccacgaagtcctgggagtaattcaaaggttcctgaaattgaggtcaccgtggaaggccctaataacaacaatcctcaaacctcagctgttcgaaccccgacccagactaacggttctaacgttcccttcaagccacgagggagagagttttcctttgaggcctggaatgccaaaatcacggacctaaaacagaaagttgaaaatctcttcaatgagaaatgtggggaagctcttggccttaaacaagctgtgaaggtgccgttcgcgttatttgagtctttcccggaagacttttatgtggaaggcttacctgagggtgtgccattccgaagaccatcgacttttggcattccgaggctggagaagatactcagaaacaaagccaaaattaagttcatcattaaaaagcccgaaatgtttgagacggcgattaaggagagcacctcctctaagagccctcccagaaaaataaattcatcacccaatgttaatactactgcatcaggtgttgaagaccttaacatcattcaggtgacaattccagatgatgataatgaaagactctcgaaagttgaaaaagctagacagctaagagaacaagtgaatgacctctttagtcggaaatttggtgaagctattggtatgggttttcctgtgaaagttccctacaggaaaatcacaattaaccctggctgtgtggtggttgatggcatgcccccgggggtgtccttcaaagcccccagctacctggaaatcagctccatgagaaggatcttagactctgccgagtttatcaaattcacggtcattagaccatttccaggacttgtgattaataaccagctggttgatcagagtgagtcagaaggccccgtgatacaagaatcagctgaaccaagccagttggaagttccagccacagaagaaataaaagagactgatggaagctctcagatcaagcaagaaccagaccccacgtggtagacctcttccctcctaggcttaaagtatcagtggttgagaagagcttttcggacctgttactaccccaagctgtagccttgagttacggtgtttattttccaatcaagtgaagatatctcctacttctcctactggaacatctcagcttctgcagtgaagaaaaattcctgtgatagttcagttctttagtttttctatttgaaaaaaaaaaatcatttaaatgatcctttgttcacggctctccttaatgactgagtgaacagttcctatctgtatatttgactaaaccttttcctaagctatctctcatggttcctatgtttttttatcataattaaaagcaaaaccatctggatcacctaacagtcagaggtcagtatctcagcgtgtgaattatagaggaaatacagagagaacctcttccacttttacttttcgtccaaataaaatgcatggtgtaccagaagttgaagatcgggttgaggattggggctagctcgatgacactaaggccccaacatcgcgggacctgctgtggcgcggattcttaggaacgctgttctagccggccccctctccaggggtcgccgtggccggcattatttcctagttcttcttgtaaccctgaggtgccagcgcggggagtgaggaggggtcagggggctaaggatgcaacctctgacgttctgcgccttcctaggagagtcttacatgtgttgagatttcacaagcaatgcgagttgtaaaataccagctctacaagaagctaggctctgtgacggcatagttttcagtagctttatcacaatattcacaatggagaattatatgacatggtagcagaaataggcccttttatgtgttgcttctattttacctcaaattgtagatatagggtaatcaataaaatccatccatgcctttcacacactaagt

SEQ ID NO: 4027 - protein, 888 aa, Homo sapiens
MHKMKSTTQANRMSVDAVEIETLRKTVEDYFCFCYGKALGKSTVVPVPYEKMLRDQSAVVVQGLPEGVAFKHPENYDLATLKWILENKAGISFIIKRPFLEPKKHVGGRVMVTDADRSILSPGGSCGPIKVKTEPTEDSGISLEMAAVTVKEESEDPDYYQYNIQAGPSETDDVDEKQPLSKPLQGSHHSSEGNEGTEMEVPAEDDDYSPPSKRPKANELPQPPVPEPANAGKRKVREFNFEKWNARITDLRKQVEELFERKYAQAIKAKGPVTIPYPLFQSHVEDLYVEGLPEGIPFRRPSTYGIPRLERILLAKERIRFVIKKHELLNSTREDLQLDKPASGVKEEWYARITKLRKMVDQLFCKKFAEALGSTEAKAVPYQKFEAHPNDLYVEGLPENIPFRSPSWYGIPRLEKIIQVGNRIKFVIKRPELLTHSTTEVTQPRTNTPVKEDWNVRITKLRKQVEEIFNLKFAQALGLTEAVKVPYPVFESNPEFLYVEGLPEGIPFRSPTWFGIPRLERIVRGSNKIKFVVKKPELVISYLPPGMASKINTKALQSPKRPRSPGSNSKVPEIEVTVEGPNNNNPQTSAVRTPTQTNGSNVPFKPRGREFSFEAWNAKITDLKQKVENLFNEKCGEALGLKQAVKVPFALFESFPEDFYVEGLPEGVPFRRPSTFGIPRLEKILRNKAKIKFIIKKPEMFETAIKESTSSKSPPRKINSSPNVNTTASGVEDLNIIQVTIPDDDNERLSKVEKARQLREQVNDLFSRKFGEAIGMGFPVKVPYRKITINPGCVVVDGMPPGVSFKAPSYLEISSMRRILDSAEFIKFTVIRPFPGLVINNQLVDQSESEGPVIQESAEPSQLEVPATEEIKETDGSSQIKQEPDPTW

SEQ ID NO: 4028 - DNA, 4411 bp, Homo sapiens
aaaaaaaaaaaaaaaaaaaaaaaaaaaagaaaaaagaaaaaaaaaaggaggaggaggaggagggtgagagagaagctgggagagcagagaaaaggggccaccggtcgcccccccgcttccccgcacgcgctctccagccgcggccgcccgcctgccgcggtcaccccggcctctgcctctgtcccccagtgatcggatcaaggcgctgagcgaggccctgcctgcggggcggccatgcggcggtgacaggagcgcgaccgacacgcacgggcccctcgccccctctcgcctcccgtccgctcgccagctcccctcagccgaggctgctccgcggcggccgcagcccgcgcgcggcccacactcgcctcccctcggcacccccggccccggagctgcctggaggcggccgcactcggtgtaaagaactggccaagtccaaagccgaagtggcctgcattgcagtgtatgaaacagacgtgtttgtcgtcggaactgaaagaggacgtgcttttgtcaataccagaaaggattttcaaaaagattttgtaaaatattgtgttgaagaagaagaaaaagctgcagagatgcataaaatgaaatctacaacccaggcaaatcggatgagtgtagatgctgtagaaattgaaacactcagaaaaacagttgaggactatttctgcttttgctatgggaaagctttaggcaaatccacagtggtacctgtaccatatgagaagatgctgcgagaccagtcggctgtggtagtgcaggggcttccggaaggtgttgcctttaaacaccccgagaactatgatcttgcaaccctgaaatggattttggagaacaaagcagggatttcattcatcattaagagaccttttttagagccaaagaagcatgtaggtggtcgtgtgatggtaacagatgctgacaggtcaatactatctccaggtggaagttgtggccccatcaaagtgaaaactgaacccacagaagattctggcatttccctggaaatggcagctgtgacagtaaaggaagaatcagaagatcctgattattatcaatataacattcaagcaggcccttctgaaactgatgatgttgatgaaaaacagcccctatcgaagcctttgcaaggaagccaccattcttcagagggcaatgaaggcacagaaatggaagtaccagcagaagattctactcaacatgtcccttcagaaacaagtgaggaccctgaagttgaggtgactattgaagatgatgattattctccaccgtctaagagaccaaaggccaatgagctaccgcagccaccagtcccggaacccgccaatgctgggaagcggaaagtgagggagttcaacttcgagaaatggaatgctcgcatcactgatctacgtaaacaagttgaagaattgtttgaaaggaaatatgctcaagccataaaagccaaaggtccggtgacgatcccgtaccctcttttccagtctcatgttgaagatctttatgtagaaggacttcctgaaggaattccttttagaaggccatctacttacggaattcctcgcctggagaggatattacttgcaaaggaaaggattcgttttgtgattaagaaacatgagcttctgaattcaacacgtgaagatttacagcttgataagccagcttcaggagtaaaggaagaatggtatgccagaatcactaaattaagaaagatggtggatcagcttttctgcaaaaaatttgcggaagccttggggagcactgaagccaaggctgtaccgtaccaaaaatttgaggcacacccgaatgatctgtacgtggaaggactgccagaaaacattcctttccgaagtccctcatggtatggaatcccaaggctggaaaaaatcattcaagtgggcaatcgaattaaatttgttattaaaagaccagaacttctgactcacagtaccactgaagttactcagccaagaacgaatacaccagtcaaagaagattggaatgtcagaattaccaagctacggaagcaagtggaagagatttttaatttgaaatttgctcaagctcttggactcaccgaggcagtaaaagtaccatatcctgtgtttgaatcaaacccggagttcttgaaaggatcgtccgcgggagtaataaaatcaagttcgttgttaaaaaacctgaactagttatttcctacttgcctcctgggatggctagtaaaataaacactaaagctttgcagtcccccaaaagaccacgaagtcctgggagtaattcaaaggttcctgaaattgaggtcaccgtggaaggccctaataacaacaatcctcaaacctcagctgttcgaaccccgacccagactaacggttctaacgttcccttcaagccacgagggagagagttttcctttgaggcctggaatgccaaaatcacggacctaaaacagaaagttgaaaatctcttcaatgagaaatgtggggaagctcttggccttaaacaagctgtgaaggtgccgttcgcgttatttgagtctttcccggaagacttttatgtggaaggcttacctgagggtgtgccattccgaagaccatcgacttttggcattccgaggctggagaagatactcagaaacaaagccaaaattaagttcatcattaaaaagcccgaaatgtttgagacggcgattaaggagagcacctcctctaagagccctcccagaaaaataaattcatcacccaatgttaatactactgcatcaggtgttgaagaccttaacatcattcaggtgacaattccagatgatgataatgaaagactctcgaaagttgaaaaagctagacagctaagagaacaagtgaatgacctctttagtcggaaatttggtgaagctattggtatgggttttcctgtgaaagttccctacaggaaaatcacaattaaccctggctgtgtggtggttgatggcatgcccccgggggtgtccttcaaagcccccagctacctggaaatcagctccatgagaaggatcttagactctgccgagtttatcaaattcacggtcattagaccatttccaggacttgtgattaataaccagctggttgatcagagtgagtcagaaggccccgtgatacaagaatcagctgaaccaagccagttggaagttccagccacagaagaaataaaagagactgatggaagctctcagatcaagcaagaaccagaccccacgtggtagacctcttccctcctaggcttaaagtatcagtggttgagaagagcttttcggacctgttactaccccaagctgtgtaatatacttgtataacagaaataccttctatacaaacctttttttctacttttagatagaaatgtctactttttcagcagttctgtgaattaaagagcagagtgactgtgggtctggaatggctggtgtacttgggaatgtactatcaggattttacagcaatgctgggaaatgacagggaaaatgacaggaatgaatctcaccagattttttatgtactcagcagagccttgagttacggtgtttattttccaatcaagtgaagatatctcctacttctcctactggaacatctcagcttctgcagtgaagaaaaattcctgtgatagttcagttctttagtttttctatttgaaaaaaaaaaatcatttaaatgatcctttgttcacggctctccttaatgactgagtgaacagttcctatctgtatatttgactaaaccttttcctaagctatctctcatggttcctatgtttttttatcataattaaaagcaaaaccatctggatcacctaacagtcagaggtcagtatctcagcgtgtgaattatagaggaaatacagagagaacctcttccacttttacttttcgtccaaataaaatgcatggtgtaccagaagttgaagatcgggttgaggattggggctagctcgatgacactaaggccccaacatcgcgggacctgctgtggcgcggattcttaggaacgctgttctagccggccccctctccaggggtcgccgtggccggcattatttcctagttcttcttgtaaccctgaggtgccagcgcggggagtgaggaggggtcagggggctaaggatgcaacctctgacgttctgcgccttcctaggagagtcttacatgtgttgagatttcacaagcaatgcgagttgtaaaataccagctctacaagaagctaggctctgtgacggcatagttttcagtagctttatcacaatattcacaatggagaattatatgacatggtagcagaaataggcccttttatgtgttgcttctattttacctcaaattgtagatatagggtaatcaataaaatccatccatgcctttcacacactaagt

SEQ ID NO: 4029 - protein, 536 aa, Homo sapiens; identical to SEQ ID NO: 4021

SEQ ID NO: 4030 - DNA, 4330 bp, Homo sapiens
aaaaaaaaaaaaaaaaaaaaaaaaaaaagaaaaaagaaaaaaaaaaggaggaggaggaggagggtgagagagaagctgggagagcagagaaaaggggccaccggtcgcccccccgcttccccgcacgcgctctccagccgcggccgcccgcctgccgcggtcaccccggcctctgcctctgtcccccagtgatcggatcaaggcgctgagcgaggccctgcctgcggggcggccatgcggcggtgacaggagcgcgaccgacacgcacgggcccctcgccccctctcgcctcccgtccgctcgccagctcccctcagccgaggctgctccgcggcggccgcagcccgcgcgcggcccacactcgcctccccgttgaagatgaggagtcctcggagagcaggatggtggtgacattcctcatgtcagctctcgagtccatgtgtaaagaactggccaagtccaaagccgaagtggcctgcattgcagtgtatgaaacagacgtgtttgtcgtcggaactgaaagaggacgtgcttttgtcaataccagaaaggattttcaaaaagattttgtaaaatattgtgttgaagaagaagaaaaagctgcagagatgcataaaatgaaatctacaacccaggcaaatcggatgagtgtagatgctgtagaaattgaaacactcagaaaaacagttgaggactatttctgcttttgctatgggaaagctttaggcaaatccacagtggtacctgtaccatatgagaagatgctgcgagaccagtcggctgtggtagtgcaggggcttccggaaggtgttgcctttaaacaccccgagaactatgatcttgcaaccctgaaatggattttggagaacaaagcagggatttcattcatcattaagagaccttttttagagccaaagaagcatgtaggtggtcgtgtgatggtaacagatgctgacaggtcaatactatctccaggtggaagttgtggccccatcaaagtgaaaactgaacccacagaagattctggcatttccctggaaatggcagctgtgacagtaaaggaagaatcagaagatcctgattattatcaatataacattcaagcaggcccttctgaaactgatgatgttgatgaaaaacagcccctatcgaagcctttgcaaggaagccaccattcttcagagggcaatgaaggcacagaaatggaagtaccagcagaagattctactcaacatgtcccttcagaaacaagtgaggaccctgaagttgaggtgactattgaagatgatgattattctccaccgtctaagagaccaaaggccaatgagctaccgcagccaccagtcccggaacccgccaatgctgggaagcggaaagtgagggagttcaacttcgagaaatggaatgctcgcatcactgatctacgtaaacaagttgaagaattgtttgaaaggaaatatgctcaagccataaaagccaaaggtccggtgacgatcccgtaccctcttttccagtctcatgttgaagatctttatgtagaaggacttcctgaaggaattccttttagaaggccatctacttacggaattcctcgcctggagaggatattacttgcaaaggaaaggattcgttttgtgattaagaaacatgagcttctgaattcaacacgtgaagatttacagcttgataagccagcttcaggagtaaaggaagaatggtatgccagaatcactaaattaagaaagatggtggatcagcttttctgcaaaaaatttgcggaagccttggggagcactgaagccaaggctgtaccgtaccaaaaatttgaggcacacccgaatgatctgtacgtggaaggactgccagaaaacattcctttccgaagtccctcatggtatggaatcccaaggctggaaaaaatcattcaagtgggcaatcgaattaaatttgttattaaaagaccagaacttctgactcacagtaccactgaagttactcagccaagaacgaatacaccagtcaaagaagattggaatgtcagaattaccaagctacggaagcaagtggaagagatttttaatttgaaatttgcttagatttgttgacagcggtttcctggagtgctgtcttgagaacgattctgaggaggctcagcaagaaagagtgtttcagttgattgggtgtgtctgtcatggagaaggaactcaagctcttggactcaccgaggcagtaaaagtaccatatcctgtgtttgaatcaaacccggagttcttgtatgtggaaggcttgccagaggggattcccttccgaagccctacctggtttggaattccacgacttgaaaggatcgtccgcgggagtaataaaatcaagttcgttgttaaaaaacctgaactagttatttcctacttgcctcctgggatggctagtaaaataaacactaaagctttgcagtcccccaaaagaccacgaagtcctgggagtaattcaaaggttcctgaaattgaggtcaccgtggaaggccctaataacaacaatcctcaaacctcagctgttcgaaccccgacccagactaacggttctaacgttcccttcaagccacgagggagagagttttcctttgaggcctggaatgccaaaatcacggacctaaaacagaaagttgaaaatctcttcaatgagaaatgtggggaagctcttggccttaaacaagctgtgaaggtgccgttcgcgttatttgagtctttcccggaagacttttatgtggaaggcttacctgagggtgtgccattccgaagaccatcgacttttggcattccgaggctggagaagatactcagaaacaaagccaaaattaagttcatcattaaaaagcccgaaatgtttgagacggcgattaaggagagcacctcctctaagagccctcccagaaaaataaattcatcacccaatgttaatactactgcatcaggtgttgaagaccttaacatcattcaggtgacaattccagatgatgataatgaaagactctcgaaagttgaaaaagctagacagctaagagaacaagtgaatgacctctttagtcggaaatttggtgaagctattggtatgggttttcctgtgaaagttccctacaggaaaatcacaattaaccctggctgtgtggtggttgatggcatgcccccgggggtgtccttcaaagcccccagctacctggaaatcagctccatgagaaggatcttagactctgccgagtttatcaaattcacggtcattagaccatttccaggacttgtgattaataaccagctggttgatcagagtgagtcagaaggccccgtgatacaagaatcagctgaaccaagccagttggaagttccagccacagaagaaataaaagagactgatggaagctctcagatcaagcaagaaccagaccccacgtggtagacctcttccctcctaggagccttgagttacggtgtttattttccaatcaagtgaagatatctcctacttctcctactggaacatctcagcttctgcagtgaagaaaaattcctgtgatagttcagttctttagtttttctatttgaaaaaaaaaaatcatttaaatgatcctttgttcacggctctccttaatgactgagtgaacagttcctatctgtatatttgactaaaccttttcctaagctatctctcatggttcctatgtttttttatcataattaaaagcaaaaccatctggatcacctaacagtcagaggtcagtatctcagcgtgtgaattatagaggaaatacagagagaacctcttccacttttacttttcgtccaaataaaatgcatggtgtaccagaagttgaagatcgggttgaggattggggctagctcgatgacactaaggccccaacatcgcgggacctgctgtggcgcggattcttaggaacgctgttctagccggccccctctccaggggtcgccgtggccggcattatttcctagttcttcttgtaaccctgaggtgccagcgcggggagtgaggaggggtcagggggctaaggatgcaacctctgacgttctgcgccttcctaggagagtcttacatgtgttgagatttcacaagcaatgcgagttgtaaaataccagctctacaagaagctaggctctgtgacggcatagttttcagtagctttatcacaatattcacaatggagaattatatgacatggtagcagaaataggcccttttatgtgttgcttctattttacctcaaattgtagatatagggtaatcaataaaatccatccatgcctttcacacactaagt

SEQ ID NO: 4031 - protein, 564 aa, Homo sapiens
MVVTFLMSALESMCKELAKSKAEVACIAVYETDVFVVGTERGRAFVNTRKDFQKDFVKYCVEEEEKAAEMHKMKSTTQANRMSVDAVEIETLRKTVEDYFCFCYGKALGKSTVVPVPYEKMLRDQSAVVVQGLPEGVAFKHPENYDLATLKWILENKAGISFIIKRPFLEPKKHVGGRVMVTDADRSILSPGGSCGPIKVKTEPTEDSGISLEMAAVTVKEESEDPDYYQYNIQAGPSETDDVDEKQPLSKPLQGSHHSSEGNEGTEMEVPAEDSTQHVPSETSEDPEVEVTIEDDDYSPPSKRPKANELPQPPVPEPANAGKRKVREFNFEKWNARITDLRKQVEELFERKYAQAIKAKGPVTIPYPLFQSHVEDLYVEGLPEGIPFRRPSTYGIPRLERILLAKERIRFVIKKHELLNSTREDLQLDKPASGVKEEWYARITKLRKMVDQLFCKKFAEALGSTEAKAVPYQKFEAHPNDLYVEGLPENIPFRSPSWYGIPRLEKIIQVGNRIKFVIKRPELLTHSTTEVTQPRTNTPVKEDWNVRITKLRKQVEEIFNLKFA

SEQ ID NO: 4032 - DNA, 7968 bp, Homo sapiens
aaaaaaaaaaaaaaaaaaaaaaaaaaaagaaaaaagaaaaaaaaaaggaggaggaggaggagggtgagagagaagctgggagagcagagaaaaggggccaccggtcgcccccccgcttccccgcacgcgctctccagccgcggccgcccgcctgccgcggtcaccccggcctctgcctctgtcccccagtgatcggatcaaggcgctgagcgaggccctgcctgcggggcggccatgcggcggtgacaggagcgcgaccgacacgcacgggcccctcgccccctctcgcctcccgtccgctcgccagctcccctcagccgaggctgctccgcggcggccgcagcccgcgcgcggcccacactcgcctcccctcggcacccccggccccggagctgcctggaggcggccgcactcggggatcatggcccaagttgcaatgtccaccctccccgttgaagatgaggagtcctcggagagcaggatggtggtgacattcctcatgtcagctctcgagtccatgtgtaaagaactggccaagtccaaagccgaagtggcctgcattgcagtgtatgaaacagacgtgtttgtcgtcggaactgaaagaggacgtgcttttgtcaataccagaaaggattttcaaaaagattttgtaaaatattgtgttgaagaagaagaaaaagctgcagagatgcataaaatgaaatctacaacccaggcaaatcggatgagtgtagatgctgtagaaattgaaacactcagaaaaacagttgaggactatttctgcttttgctatgggaaagctttaggcaaatccacagtggtacctgtaccatatgagaagatgctgcgagaccagtcggctgtggtagtgcaggggcttccggaaggtgttgcctttaaacaccccgagaactatgatcttgcaaccctgaaatggattttggagaacaaagcagggatttcattcatcattaagagaccttttttagagccaaagaagcatgtaggtggtcgtgtgatggtaacagatgctgacaggtcaatactatctccaggtggaagttgtggccccatcaaagtgaaaactgaacccacagaagattctggcatttccctggaaatggcagctgtgacagtaaaggaagaatcagaagatcctgattattatcaatataacattcaagcaggcccttctgaaactgatgatgttgatgaaaaacagcccctatcgaagcctttgcaaggaagccaccattcttcagagggcaatgaaggcacagaaatggaagtaccagcagaagattctactcaacatgtcccttcagaaacaagtgaggaccctgaagttgaggtgactattgaagatgatgattattctccaccgtctaagagaccaaaggccaatgagctaccgcagccaccagtcccggaacccgccaatgctgggaagcggaaagtgagggagttcaacttcgagaaatggaatgctcgcatcactgatctacgtaaacaagttgaagaattgtttgaaaggaaatatgctcaagccataaaagccaaaggtccggtgacgatcccgtaccctcttttccagtctcatgttgaagatctttatgtagaaggacttcctgaaggaattccttttagaaggccatctacttacggaattcctcgcctggagaggatattacttgcaaaggaaaggattcgttttgtgattaagaaacatgagcttctgaattcaacacgtgaagatttacagcttgataagccagcttcaggagtaaaggaagaatggtatgccagaatcactaaattaagaaagatggtggatcagcttttctgcaaaaaatttgcggaagccttggggagcactgaagccaaggctgtaccgtaccaaaaatttgaggcacacccgaatgatctgtacgtggaaggactgccagaaaacattcctttccgaagtccctcatggtatggaatcccaaggctggaaaaaatcattcaagtgggcaatcgaattaaatttgttattaaaagaccagaacttctgactcacagtaccactgaagttactcagccaagaacgaatacaccagtcaaagaagattggaatgtcagaattaccaagctacggaagcaagtggaagagatttttaatttgaaatttgctcaagctcttggactcaccgaggcagtaaaagtaccatatcctgtgtttgaatcaaacccggagttcttgaaaggatcgtccgcgggagtaataaaatcaagttcgttgttaaaaaacctgaactagttatttcctacttgcctcctgggatggctagtaaaataaacactaaagctttgcagtcccccaaaagaccacgaagtcctgggagtaattcaaaggttcctgaaattgaggtcaccgtggaaggccctaataacaacaatcctcaaacctcagctgttcgaaccccgacccagactaacggttctaacgttcccttcaagccacgagggagagagttttcctttgaggcctggaatgccaaaatcacggacctaaaacagaaagttgaaaatctcttcaatgagaaatgtggggaagctcttggccttaaacaagctgtgaaggtgccgttcgcgttatttgagtctttcccggaagacttttatgtggaaggcttacctgagggtgtgccattccgaagaccatcgacttttggcattccgaggctggagaagatactcagaaacaaagccaaaattaagttcatcattaaaaagcccgaaatgtttgagacggcgattaaggagagcacctcctctaagagccctcccagaaaaataaattcatcacccaatgttaatactactgcatcaggtgttgaagaccttaacatcattcaggtgacaattccagatgatgataatgaaagactctcgaaagttgaaaaagctagacagctaagagaacaagtgaatgacctctttagtcggaaatttggtgaagctattggtatgggttttcctgtgaaagttccctacaggaaaatcacaattaaccctggctgtgtggtggttgatggcatgcccccgggggtgtccttcaaagcccccagctacctggaaatcagctccatgagaaggatcttagactctgccgagtttatcaaattcacggtcattaggtaagtgagagtttcctgcttagtcacaggagcgaatctggagctcatgaggctgactcttctaaaatgcagccacaggtagtcatcgaatccggcttcctatgctgtgcaatcaacaaatcaaaataacttgtgtcatcattagaatgtcagatgtgcttctacgaactaagctgactcttttaattctttggcaaagggttggcaaactaggactgtttgccaaattcaggctgcctcctatttttagagtcttcctgaaacacagctacacccgtattatccatggctgctttcctgtcacagtgagtaagtagctgggactgagaaggcatggcctccaaagtctaaaatatttactctctagcactttgtagaaaaaccttagctaggcacagtggctaacgcctgtaatcccagcattttgggaggccaaggcaggcagatcacctgaggtcaggagttccagaccagcctggccaacatggtgaaatcccatctctacaaaaataaaacagttagctgggcatgatggcgggtgcctgtaatcccagctactcgggaggctgaggcaggatagtcgcttgaacccaggaggtggaggttgcaatgagccaagatcatgccactgcactccagcctggacgacagagtgagactccatcacaagaaaaaaagaactttgtcaacctctgtcttagggcgccttgtcacaggcttcgggtcagacggattcaaccttgcatcagccatttgttagccaggtcactctgttctttgtctgtaaatgagattgatcgttgttcccactgagagtgtcagctccttcccgtagagcaggcatgatgattgtactcacctctgacaccattgtgagtgccacattccttcccacgtccttgtcactgtaagagatgcccacctgagcaccaaccccaggttatcttcccctttgtcttccagccccccagaaacagctacgactcaacctacccaatcatttcatcatcagattgccactgtctctagttcaggtctcttgggactggcactcagaaatctcataataaatcctcttgaggcttctcatacactcgtcttcttccaatcttctttccctcaaaatctcatattttggttccacttcacccaccgtcattctccatatcactcccaggagttaggcaaaaagccccttccgttcttccgtatgttaaacttagaatcactctgttccctgctctgcgtttctattttttgtttttcctccatttactagtagcttaacactttctaacagtgttcttattattgatacgtatctatctcttccataagcttataaggtcacggataatacttctcattgtagtacgtaaatgacgtgggctagatatgagttgaataaacagttatacctgtaaattcttacagagtgaaaataaattgttatactttacaatttgtttctctctttagaccatttccaggacttgtgattaataaccgtgagtattttgtgaagtgttttgtttttgttttttcctggggtctgacgtgtgtgcgtgtgagtgtgtatacatgcttaacgtatatcacgttacttcacctatgtcagtaaccaggccaaatacttgttttagccctcagtaaaaacaccaggcacttcctagttgtaaaattattcaagcttcttaacttcctatcctcgatgcacttaatcataaaatggtaataatagcaccgattttgggggagtcgttccagtagatggaaagcatctggaacaggtgtcagcaagctcctgccgacgtgtatgcataaagttttattgaaaccaccatcgtgtccatttgtttatggcagaactgagagatggcagcagcaagtgtgtgcctgcaaaacctaaaatatttactaattggctctgcaagaaaagagtttgcatccccctaacctagaacagtgtctagcctctagtatgtgtttagcctacagtatgtgctcagcgaatacaatctatatttattactgcttttatgactgttataattactgtgcttggatttcgttacaaagtaagtcacaatgtgcctgcttctgttagtatttcagcacagtgcctggcacacatggggctctcaaatattgctgagcgagtgaacaaatgtcctttcaattccttaacgttgatgtcattttcaatagtattttgagccaaacttaattttgcgagtgtgttttgttttcttaactttattattaaaaatgtataaaagtgaggccaggcgtggtggctcacgcctgtaatcccagcagtttgggaggctgaggcaggcggatcagttgaggttgggagttggagaccagcccgtccaacatggtgaaagcctgtctctactaaaaatacaaaaatcagctgggtgtggtggcgcgtgcctgtaatcccagctactcaggaggctgaggcaggagagttgcttgaatcctagaggtggaggttgcagtgagctgagatcgtgccattgcactccagcctgggcaacaagagcaaaactctgtcccaataaataaataaataaaatgttctcttttgttcctgttcttgtgcggtagtgtggtatagagttttatggtaattactgtgaattagtgattctgagggacatatcagaactctgaggtttgtttccttctcatcttgagggaaacagcaaatgtatgttaaaatgcttttccaagggaacaacacatccttacattatttaaaccaatctgcttcattttcagagctggttgatcagagtgagtcagaaggccccgtgatacaagaatcagctgaaccaagccagttggaagttccagccacagaagaaataaaagagactgatggaagctctcagatcaagcaagaaccagaccccacgtggtagacctcttccctcctagggtaaatcagcttctgtgtcagggatgctgtgtggtgtccatctgaaccccctgcatacgcgtagctaatgtgatctccccactttcacataagatggtggccctgccttcagggaatgtgggagccaggtgggagccttcccggatatttaagctagaagattctacagggagattctccttggatcaatatatgtctctcagtcaaagatgtaaaagcacttttgccttaaaaagaatgttctgtttctaaatagagtcaacgttgtcctcctcattggaattcactatgagtcagaatcattagactgacttttttttttccatagtaatagtattttgcagagtctcacagagctgcagatcttttgttcatcttgcagagttaacaagtctgatcctgttagtccagatttcttaaatttggccaagttataataggagcagtagcttgagacccgaagtcaggaaactttgacaatggatttttttttttaatccagagacttgtactggaatttgccttaccctgtcagctcatggacttaaggtttcatcccgctttatgagtgcttctgaatccaagtcattgttacctgaatttgcaaattaagttgtgatattcgtgactgttaaattcctgtaattagattaacctctttgcttgcttgtttgttttctctcctattttagcttaaagtatcagtggttgagaagagcttttcggacctgttactaccccaagctgtgtaatatacttgtataacagaaataccttctatacaaacctttttttctacttttagatagaaatgtctactttttcagcagttctgtgaattaaagagcagagtgactgtgggtctggaatggctggtgtacttgggaatgtactatcaggattttacagcaatgctgggaaatgacagggaaaatgacaggaatgaatctcaccagattttttatgtactcagcagagccttgagttacggtgtttattttccaatcaagtgaagatatctcctacttctcctactggaacatctcagcttctgcagtgaagaaaaattcctgtgatagttcagttctttagtttttctatttgaaaaaaaaaaatcatttaaatgatcctttgttcacggctctccttaatgactgagtgaacagttcctatctgtatatttgactaaaccttttcctaagctatctctcatggttcctatgtttttttatcataattaaaagcaaaaccatctggatcacctaacagtcagaggtcagtatctcagcgtgtgaattatagaggaaatacagagagaacctcttccacttttacttttcgtccaaataaaatgcatggtgtaccagaagttgaagatcgggttgaggattggggctagctcgatgacactaaggccccaacatcgcgggacctgctgtggcgcggattcttaggaacgctgttctagccggccccctctccaggggtcgccgtggccggcattatttcctagttcttcttgtaaccctgaggtgccagcgcggggagtgaggaggggtcagggggctaaggatgcaacctctgacgttctgcgccttcctaggagagtcttacatgtgttgagatttcacaagcaatgcgagttgtaaaataccagctctacaagaagctaggctctgtgacggcatagttttcagtagctttatcacaatattcacaatggagaattatatgacatggtagcagaaataggcccttttatgtgttgcttctattttacctcaaattgtagatatagggtaatcaataaaatccatccatgcctttcacacactaagt

SEQ ID NO: 4033 - protein, 625 aa, Homo sapiens
MAQVAMSTLPVEDEESSESRMVVTFLMSALESMCKELAKSKAEVACIAVYETDVFVVGTERGRAFVNTRKDFQKDFVKYCVEEEEKAAEMHKMKSTTQANRMSVDAVEIETLRKTVEDYFCFCYGKALGKSTVVPVPYEKMLRDQSAVVVQGLPEGVAFKHPENYDLATLKWILENKAGISFIIKRPFLEPKKHVGGRVMVTDADRSILSPGGSCGPIKVKTEPTEDSGISLEMAAVTVKEESEDPDYYQYNIQAGPSETDDVDEKQPLSKPLQGSHHSSEGNEGTEMEVPAEDSTQHVPSETSEDPEVEVTIEDDDYSPPSKRPKANELPQPPVPEPANAGKRKVREFNFEKWNARITDLRKQVEELFERKYAQAIKAKGPVTIPYPLFQSHVEDLYVEGLPEGIPFRRPSTYGIPRLERILLAKERIRFVIKKHELLNSTREDLQLDKPASGVKEEWYARITKLRKMVDQLFCKKFAEALGSTEAKAVPYQKFEAHPNDLYVEGLPENIPFRSPSWYGIPRLEKIIQVGNRIKFVIKRPELLTHSTTEVTQPRTNTPVKEDWNVRITKLRKQVEEIFNLKFAQALGLTEAVKVPYPVFESNPEFLKGSSAGVIKSSSLLKNLN

SEQ ID NO: 4034 - DNA, 5028 bp, Homo sapiens
aaaaaaaaaaaaaaaaaaaaaaaaaaaagaaaaaagaaaaaaaaaaggaggaggaggaggagggtgagagagaagctgggagagcagagaaaaggggccaccggtcgcccccccgcttccccgcacgcgctctccagccgcggccgcccgcctgccgcggtcaccccggcctctgcctctgtcccccagtgatcggatcaaggcgctgagcgaggccctgcctgcggggcggccatgcggcggtgacaggagcgcgaccgacacgcacgggcccctcgccccctctcgcctcccgtccgctcgccagctcccctcagccgaggctgctccgcggcggccgcagcccgcgcgcggcccacactcgcctcccctcggcacccccggccccggagctgcctggaggcggccgcactcggggatcatggcccaagttgcaatgtccaccctccccgttgaagatgaggagtcctcggagagcaggatggtggtgacattcctcatgtcagctctcgagtccatgtgtaaagaactggccaagtccaaagccgaagtggcctgcattgcagtgtatgaaacagacgtgtttgtcgtcggaactgaaagaggacgtgcttttgtcaataccagaaaggattttcaaaaagattttgtaaaatattgtgttgaagaagaagaaaaagctgcagagatgcataaaatgaaatctacaacccaggcaaatcggatgagtgtagatgctgtagaaattgaaacactcagaaaaacagttgaggactatttctgcttttgctatgggaaagctttaggcaaatccacagtggtacctgtaccatatgagaagatgctgcgagaccagtcggctgtggtagtgcaggggcttccggaaggtgttgcctttaaacaccccgagaactatgatcttgcaaccctgaaatggattttggagaacaaagcagggatttcattcatcattaagagaccttttttagagccaaagaagcatgtaggtggtcgtgtgatggtaacagatgctgacaggtcaatactatctccaggtggaagttgtggccccatcaaagtgaaaactgaacccacagaagattctggcatttccctggaaatggcagctgtgacagtaaaggaagaatcagaagatcctgattattatcaatataacattcaaggaagccaccattcttcagagggcaatgaaggcacagaaatggaagtaccagcagaagatgatgattattctccaccgtctaagagaccaaaggccaatgagctaccgcagccaccagtcccggaacccgccaatgctgggaagcggaaagtgagggagttcaacttcgagaaatggaatgctcgcatcactgatctacgtaaacaagttgaagaattgtttgaaaggaaatatgctcaagccataaaagccaaaggtccggtgacgatcccgtaccctcttttccagtctcatgttgaagatctttatgtagaaggacttcctgaaggaattccttttagaaggccatctacttacggaattcctcgcctggagaggatattacttgcaaaggaaaggattcgttttgtgattaagaaacatgagcttctgaattcaacacgtgaagatttacagcttgataagccagcttcaggagtaaaggaagaatggtatgccagaatcactaaattaagaaagatggtggatcagcttttctgcaaaaaatttgcggaagccttggggagcactgaagccaaggctgtaccgtaccaaaaatttgaggcacacccgaatgatctgtacgtggaaggactgccagaaaacattcctttccgaagtccctcatggtatggaatcccaaggctggaaaaaatcattcaagtgggcaatcgaattaaatttgttattaaaagaccagaacttctgactcacagtaccactgaagttactcagccaagaacgaatacaccagctcaagctcttggactcaccgaggcagtaaaagtaccatatcctgtgtttgaatcaaacccggagttcttgtatgtggaaggcttgccagaggggattcccttccgaagccctacctggtttggaattccacgacttgaaaggatcgtccgcgggagtaataaaatcaagttcgttgttaaaaaacctgaactagttatttcctacttgcctcctgggatggctagtaaaataaacactaaagctttgcagtcccccaaaagaccacgaagtcctgggagtaattcaaaggttcctgaaattgaggtcaccgtggaaggccctaataacaacaatcctcaaacctcagctgttcgaaccccgacccagactaacggttctaacgttcccttcaagccacgagggagagagttttcctttgaggcctggaatgccaaaatcacggacctaaaacagaaagttgaaaatctcttcaatgagaaatgtggggaagctcttggccttaaacaagctgtgaaggtgccgttcgcgttatttgagtctttcccggaagacttttatgtggaaggcttacctgagggtgtgccattccgaagaccatcgacttttggcattccgaggctggagaagatactcagaaacaaagccaaaattaagttcatcattaaaaagcccgaaatgtttgagacggcgattaaggagagcacctcctctaagagccctcccagaaaaataaattcatcacccaatgttaatactactgcatcaggtgttgaagaccttaacatcattcaggtgacaattccagatgatgataatgaaagactctcgaaagttgaaaaagctagacagctaagagaacaagtgaatgacctctttagtcggaaatttggtgaagctattggtatgggttttcctgtgaaagttccctacaggaaaatcacaattaaccctggctgtgtggtggttgatggcatgcccccgggggtgtccttcaaagcccccagctacctggaaatcagctccatgagaaggatcttagactctgccgagtttatcaaattcacggtcattagaccatttccaggacttgtgattaataaccagctggttgatcagagtgagtcagaaggccccgtgatacaagaatcagctgaaccaagccagttggaagttccagccacagaaggtaaaaggacctcttccctcctagggtaaatcagcttctgtgtcagggatgctgtgtggtgtccatctgaaccccctgcatacgcgtagctaatgtgatctccccactttcacataagatggtggccctgccttcagggaatgtgggagccaggtgggagccttcccggatatttaagctagaagattctacagggagattctccttggatcaatatatgtctctcagtcaaagatgtaaaagcacttttgccttaaaaagaatgttctgtttctaaatagagtcaacgttgtcctcctcattggaattcactatgagtcagaatcattagactgacttttttttttccatagtaatagtattttgcagagtctcacagagctgcagatcttttgttcatcttgcagagttaacaagtctgatcctgttagtccagatttcttaaatttggccaagttataataggagcagtagcttgagacccgaagtcaggaaactttgacaatggatttttttttttaatccagagacttgtactggaatttgccttaccctgtcagctcatggacttaaggtttcatcccgctttatgagtgcttctgaatccaagtcattgttacctgaatttgcaaattaagttgtgatattcgtgactgttaaattcctgtaattagattaacctctttgcttgcttgtttgttttctctcctattttagcttaaagtatcagtggttgagaagagcttttcggacctgttactaccccaagctgtgtaatatacttgtataacagaaataccttctatacaaacctttttttctacttttagatagaaatgtctactttttcagcagttctgtgaattaaagagcagagtgactgtgggtctggaatggctggtgtacttgggaatgtactatcaggattttacagcaatgctgggaaatgacagggaaaatgacaggaatgaatctcaccagattttttatgtactcagcagagccttgagttacggtgtttattttccaatcaagtgaagatatctcctacttctcctactggaacatctcagcttctgcagtgaagaaaaattcctgtgatagttcagttctttagtttttctatttgaaaaaaaaaaatcatttaaatgatcctttgttcacggctctccttaatgactgagtgaacagttcctatctgtatatttgactaaaccttttcctaagctatctctcatggttcctatgtttttttatcataattaaaagcaaaaccatctggatcacctaacagtcagaggtcagtatctcagcgtgtgaattatagaggaaatacagagagaacctcttccacttttacttttcgtccaaataaaatgcatggtgtaccagaagttgaagatcgggttgaggattggggctagctcgatgacactaaggccccaacatcgcgggacctgctgtggcgcggattcttaggaacgctgttctagccggccccctctccaggggtcgccgtggccggcattatttcctagttcttcttgtaaccctgaggtgccagcgcggggagtgaggaggggtcagggggctaaggatgcaacctctgacgttctgcgccttcctaggagagtcttacatgtgttgagatttcacaagcaatgcgagttgtaaaataccagctctacaagaagctaggctctgtgacggcatagttttcagtagctttatcacaatattcacaatggagaattatatgacatggtagcagaaataggcccttttatgtgttgcttctattttacctcaaattgtagatatagggtaatcaataaaatccatccatgcctttcacacactaagt

SEQ ID NO: 4035 - protein, 923 aa, Homo sapiens
MAQVAMSTLPVEDEESSESRMVVTFLMSALESMCKELAKSKAEVACIAVYETDVFVVGTERGRAFVNTRKDFQKDFVKYCVEEEEKAAEMHKMKSTTQANRMSVDAVEIETLRKTVEDYFCFCYGKALGKSTVVPVPYEKMLRDQSAVVVQGLPEGVAFKHPENYDLATLKWILENKAGISFIIKRPFLEPKKHVGGRVMVTDADRSILSPGGSCGPIKVKTEPTEDSGISLEMAAVTVKEESEDPDYYQYNIQGSHHSSEGNEGTEMEVPAEDDDYSPPSKRPKANELPQPPVPEPANAGKRKVREFNFEKWNARITDLRKQVEELFERKYAQAIKAKGPVTIPYPLFQSHVEDLYVEGLPEGIPFRRPSTYGIPRLERILLAKERIRFVIKKHELLNSTREDLQLDKPASGVKEEWYARITKLRKMVDQLFCKKFAEALGSTEAKAVPYQKFEAHPNDLYVEGLPENIPFRSPSWYGIPRLEKIIQVGNRIKFVIKRPELLTHSTTEVTQPRTNTPAQALGLTEAVKVPYPVFESNPEFLYVEGLPEGIPFRSPTWFGIPRLERIVRGSNKIKFVVKKPELVISYLPPGMASKINTKALQSPKRPRSPGSNSKVPEIEVTVEGPNNNNPQTSAVRTPTQTNGSNVPFKPRGREFSFEAWNAKITDLKQKVENLFNEKCGEALGLKQAVKVPFALFESFPEDFYVEGLPEGVPFRRPSTFGIPRLEKILRNKAKIKFIIKKPEMFETAIKESTSSKSPPRKINSSPNVNTTASGVEDLNIIQVTIPDDDNERLSKVEKARQLREQVNDLFSRKFGEAIGMGFPVKVPYRKITINPGCVVVDGMPPGVSFKAPSYLEISSMRRILDSAEFIKFTVIRPFPGLVINNQLVDQSESEGPVIQESAEPSQLEVPATEGKRTSSLLG

SEQ ID NO: 4036 - DNA, 5100 bp, Homo sapiens
aaaaaaaaaaaaaaaaaaaaaaaaaaaagaaaaaagaaaaaaaaaaggaggaggaggaggagggtgagagagaagctgggagagcagagaaaaggggccaccggtcgcccccccgcttccccgcacgcgctctccagccgcggccgcccgcctgccgcggtcaccccggcctctgcctctgtcccccagtgatcggatcaaggcgctgagcgaggccctgcctgcggggcggccatgcggcggtgacaggagcgcgaccgacacgcacgggcccctcgccccctctcgcctcccgtccgctcgccagctcccctcagccgaggctgctccgcggcggccgcagcccgcgcgcggcccacactcgcctcccctcggcacccccggccccggagctgcctggaggcggccgcactcggggatcatggcccaagttgcaatgtccaccctccccgttgaagatgaggagtcctcggagagcaggatggtggtgacattcctcatgtcagctctcgagtccatgtgtaaagaactggccaagtccaaagccgaagtggcctgcattgcagtgtatgaaacagacgtgtttgtcgtcggaactgaaagaggacgtgcttttgtcaataccagaaaggattttcaaaaagattttgtaaaatattgtgttgaagaagaagaaaaagctgcagagatgcataaaatgaaatctacaacccaggcaaatcggatgagtgtagatgctgtagaaattgaaacactcagaaaaacagttgaggactatttctgcttttgctatgggaaagctttaggcaaatccacagtggtacctgtaccatatgagaagatgctgcgagaccagtcggctgtggtagtgcaggggcttccggaaggtgttgcctttaaacaccccgagaactatgatcttgcaaccctgaaatggattttggagaacaaagcagggatttcattcatcattaagagaccttttttagagccaaagaagcatgtaggtggtcgtgtgatggtaacagatgctgacaggtcaatactatctccaggtggaagttgtggccccatcaaagtgaaaactgaacccacagaagattctggcatttccctggaaatggcagctgtgacagtaaaggaagaatcagaagatcctgattattatcaatataacattcaaggaagccaccattcttcagagggcaatgaaggcacagaaatggaagtaccagcagaagatgatgattattctccaccgtctaagagaccaaaggccaatgagctaccgcagccaccagtcccggaacccgccaatgctgggaagcggaaagtgagggagttcaacttcgagaaatggaatgctcgcatcactgatctacgtaaacaagttgaagaattgtttgaaaggaaatatgctcaagccataaaagccaaaggtccggtgacgatcccgtaccctcttttccagtctcatgttgaagatctttatgtagaaggacttcctgaaggaattccttttagaaggccatctacttacggaattcctcgcctggagaggatattacttgcaaaggaaaggattcgttttgtgattaagaaacatgagcttctgaattcaacacgtgaagatttacagcttgataagccagcttcaggagtaaaggaagaatggtatgccagaatcactaaattaagaaagatggtggatcagcttttctgcaaaaaatttgcggaagccttggggagcactgaagccaaggctgtaccgtaccaaaaatttgaggcacacccgaatgatctgtacgtggaaggactgccagaaaacattcctttccgaagtccctcatggtatggaatcccaaggctggaaaaaatcattcaagtgggcaatcgaattaaatttgttattaaaagaccagaacttctgactcacagtaccactgaagttactcagccaagaacgaatacaccagtcaaagaagattggaatgtcagaattaccaagctacggaagcaagtggaagagatttttaatttgaaatttgctcaagctcttggactcaccgaggcagtaaaagtaccatatcctgtgtttgaatcaaacccggagttcttgtatgtggaaggcttgccagaggggattcccttccgaagccctacctggtttggaattccacgacttgaaaggatcgtccgcgggagtaataaaatcaagttcgttgttaaaaaacctgaactagttatttcctacttgcctcctgggatggctagtaaaataaacactaaagctttgcagtcccccaaaagaccacgaagtcctgggagtaattcaaaggttcctgaaattgaggtcaccgtggaaggccctaataacaacaatcctcaaacctcagctgttcgaaccccgacccagactaacggttctaacgttcccttcaagccacgagggagagagttttcctttgaggcctggaatgccaaaatcacggacctaaaacagaaagttgaaaatctcttcaatgagaaatgtggggaagctcttggccttaaacaagctgtgaaggtgccgttcgcgttatttgagtctttcccggaagacttttatgtggaaggcttacctgagggtgtgccattccgaagaccatcgacttttggcattccgaggctggagaagatactcagaaacaaagccaaaattaagttcatcattaaaaagcccgaaatgtttgagacggcgattaaggagagcacctcctctaagagccctcccagaaaaataaattcatcacccaatgttaatactactgcatcaggtgttgaagaccttaacatcattcaggtgacaattccagatgatgataatgaaagactctcgaaagttgaaaaagctagacagctaagagaacaagtgaatgacctctttagtcggaaatttggtgaagctattggtatgggttttcctgtgaaagttccctacaggaaaatcacaattaaccctggctgtgtggtggttgatggcatgcccccgggggtgtccttcaaagcccccagctacctggaaatcagctccatgagaaggatcttagactctgccgagtttatcaaattcacggtcattagaccatttccaggacttgtgattaataaccagctggttgatcagagtgagtcagaaggccccgtgatacaagaatcagctgaaccaagccagttggaagttccagccacagaaggtaaaaggacctcttccctcctagggtaaatcagcttctgtgtcagggatgctgtgtggtgtccatctgaaccccctgcatacgcgtagctaatgtgatctccccactttcacataagatggtggccctgccttcagggaatgtgggagccaggtgggagccttcccggatatttaagctagaagattctacagggagattctccttggatcaatatatgtctctcagtcaaagatgtaaaagcacttttgccttaaaaagaatgttctgtttctaaatagagtcaacgttgtcctcctcattggaattcactatgagtcagaatcattagactgacttttttttttccatagtaatagtattttgcagagtctcacagagctgcagatcttttgttcatcttgcagagttaacaagtctgatcctgttagtccagatttcttaaatttggccaagttataataggagcagtagcttgagacccgaagtcaggaaactttgacaatggatttttttttttaatccagagacttgtactggaatttgccttaccctgtcagctcatggacttaaggtttcatcccgctttatgagtgcttctgaatccaagtcattgttacctgaatttgcaaattaagttgtgatattcgtgactgttaaattcctgtaattagattaacctctttgcttgcttgtttgttttctctcctattttagcttaaagtatcagtggttgagaagagcttttcggacctgttactaccccaagctgtgtaatatacttgtataacagaaataccttctatacaaacctttttttctacttttagatagaaatgtctactttttcagcagttctgtgaattaaagagcagagtgactgtgggtctggaatggctggtgtacttgggaatgtactatcaggattttacagcaatgctgggaaatgacagggaaaatgacaggaatgaatctcaccagattttttatgtactcagcagagccttgagttacggtgtttattttccaatcaagtgaagatatctcctacttctcctactggaacatctcagcttctgcagtgaagaaaaattcctgtgatagttcagttctttagtttttctatttgaaaaaaaaaaatcatttaaatgatcctttgttcacggctctccttaatgactgagtgaacagttcctatctgtatatttgactaaaccttttcctaagctatctctcatggttcctatgtttttttatcataattaaaagcaaaaccatctggatcacctaacagtcagaggtcagtatctcagcgtgtgaattatagaggaaatacagagagaacctcttccacttttacttttcgtccaaataaaatgcatggtgtaccagaagttgaagatcgggttgaggattggggctagctcgatgacactaaggccccaacatcgcgggacctgctgtggcgcggattcttaggaacgctgttctagccggccccctctccaggggtcgccgtggccggcattatttcctagttcttcttgtaaccctgaggtgccagcgcggggagtgaggaggggtcagggggctaaggatgcaacctctgacgttctgcgccttcctaggagagtcttacatgtgttgagatttcacaagcaatgcgagttgtaaaataccagctctacaagaagctaggctctgtgacggcatagttttcagtagctttatcacaatattcacaatggagaattatatgacatggtagcagaaataggcccttttatgtgttgcttctattttacctcaaattgtagatatagggtaatcaataaaatccatccatgcctttcacacactaagt

SEQ ID NO: 4037 - protein, 947 aa, Homo sapiens
MAQVAMSTLPVEDEESSESRMVVTFLMSALESMCKELAKSKAEVACIAVYETDVFVVGTERGRAFVNTRKDFQKDFVKYCVEEEEKAAEMHKMKSTTQANRMSVDAVEIETLRKTVEDYFCFCYGKALGKSTVVPVPYEKMLRDQSAVVVQGLPEGVAFKHPENYDLATLKWILENKAGISFIIKRPFLEPKKHVGGRVMVTDADRSILSPGGSCGPIKVKTEPTEDSGISLEMAAVTVKEESEDPDYYQYNIQGSHHSSEGNEGTEMEVPAEDDDYSPPSKRPKANELPQPPVPEPANAGKRKVREFNFEKWNARITDLRKQVEELFERKYAQAIKAKGPVTIPYPLFQSHVEDLYVEGLPEGIPFRRPSTYGIPRLERILLAKERIRFVIKKHELLNSTREDLQLDKPASGVKEEWYARITKLRKMVDQLFCKKFAEALGSTEAKAVPYQKFEAHPNDLYVEGLPENIPFRSPSWYGIPRLEKIIQVGNRIKFVIKRPELLTHSTTEVTQPRTNTPVKEDWNVRITKLRKQVEEIFNLKFAQALGLTEAVKVPYPVFESNPEFLYVEGLPEGIPFRSPTWFGIPRLERIVRGSNKIKFVVKKPELVISYLPPGMASKINTKALQSPKRPRSPGSNSKVPEIEVTVEGPNNNNPQTSAVRTPTQTNGSNVPFKPRGREFSFEAWNAKITDLKQKVENLFNEKCGEALGLKQAVKVPFALFESFPEDFYVEGLPEGVPFRRPSTFGIPRLEKILRNKAKIKFIIKKPEMFETAIKESTSSKSPPRKINSSPNVNTTASGVEDLNIIQVTIPDDDNERLSKVEKARQLREQVNDLFSRKFGEAIGMGFPVKVPYRKITINPGCVVVDGMPPGVSFKAPSYLEISSMRRILDSAEFIKFTVIRPFPGLVINNQLVDQSESEGPVIQESAEPSQLEVPATEGKRTSSLLG

SEQ ID NO: 4038 - DNA, 3788 bp, Homo sapiens
aaaaaaaaaaaaaaaaaaaaaaaaaaaagaaaaaagaaaaaaaaaaggaggaggaggaggagggtgagagagaagctgggagagcagagaaaaggggccaccggtcgcccccccgcttccccgcacgcgctctccagccgcggccgcccgcctgccgcggtcaccccggcctctgcctctgtcccccagtgatcggatcaaggcgctgagcgaggccctgcctgcggggcggccatgcggcggtgacaggagcgcgaccgacacgcacgggcccctcgccccctctcgcctcccgtccgctcgccagctcccctcagccgaggctgctccgcggcggccgcagcccgcgcgcggcccacactcgcctcccctcggcacccccggccccggagctgcctggaggcggccgcactcggtgtaaagaactggccaagtccaaagccgaagtggcctgcattgcagtgtatgaaacagacgtgtttgtcgtcggaactgaaagaggacgtgcttttgtcaataccagaaaggattttcaaaaagattttgtaaaatattgtgttgaagaagaagaaaaagctgcagagatgcataaaatgaaatctacaacccaggcaaatcggatgagtgtagatgctgtagaaattgaaacactcagaaaaacagttgaggactatttctgcttttgctatgggaaagctttaggcaaatccacagtggtacctgtaccatatgagaagatgctgcgagaccagtcggctgtggtagtgcaggggcttccggaaggtgttgcctttaaacaccccgagaactatgatcttgcaaccctgaaatggattttggagaacaaagcagggatttcattcatcattaagagaccttttttagagccaaagaagcatgtaggtggtcgtgtgatggtaacagatgctgacaggtcaatactatctccaggtggaagttgtggccccatcaaagtgaaaactgaacccacagaagattctggaagccaccattcttcagagggcaatgaaggcacagaaatggaagtaccagcagaagattctactcaacatgtcccttcagaaacaagtgaggaccctgaagttgaggtgactattgaagatgatgattattctccaccgtctaagagaccaaaggccaatgagctaccgcagccaccagtcccggaacccgccaatgctgggaagcggaaagtgagggagttcaacttcgagaaatggaatgctcgcatcactgatctacgtaaacaagttgaagaattgtttgaaaggaaatatgctcaagccataaaagccaaaggtccggtgacgatcccgtaccctcttttccagtctcatgttgaagatctttatgtagaaggacttcctgaaggaattccttttagaaggccatctacttacggaattcctcgcctggagaggatattacttgcaaaggaaaggattcgttttgtgattaagaaacatgagcttctgaattcaacacgtgaagatttacagcttgataagccagcttcaggagtaaaggaagaatggtatgccagaatcactaaattaagaaagatggtggatcagcttttctgcaaaaaatttgcggaagccttggggagcactgaagccaaggctgtaccgtaccaaaaatttgaggcacacccgaatgatctgtacgtggaaggactgccagaaaacattcctttccgaagtccctcatggtatggaatcccaaggctggaaaaaatcattcaagtgggcaatcgaattaaatttgttattaaaagaccagaacttctgactcacagtaccactgaagttactcagccaagaacgaatacaccagtcaaagaagattggaatgtcagaattaccaagctacggaagcaagtggaagagatttttaatttgaaatttgctcaagctcttggactcaccgaggcagtaaaagtaccatatcctgtgtttgaatcaaacccggagttcttgtatgtggaaggcttgccagaggggattcccttccgaagccctacctggtttggaattccacgacttgaaaggatcgtccgcgggagtaataaaatcaagttcgttgttaaaaaacctgaactagttatttcctacttgcctcctgggatggctagtaaaataaacactaaagctttgcagtcccccaaaagaccacgaagtcctgggagtaattcaaaggttcctgaaattgaggtcaccgtggaaggccctaataacaacaatcctcaaacctcagctgttcgaaccccgacccagactaacggttctaacgttcccttcaagccacgagggagagagttttcctttgaggcctggaatgccaaaatcacggacctaaaacagaaagttgaaaatctcttcaatgagaaatgtggggaagctcttggccttaaacaagctgtgaaggtgccgttcgcgttatttgagtctttcccggaagacttttatgtggaaggcttacctgagggtgtgccattccgaagaccatcgacttttggcattccgaggctggagaagatactcagaaacaaagccaaaattaagttcatcattaaaaagcccgaaatgtttgagacggcgattaaggagagcacctcctctaagagccctcccagaaaaataaattcatcacccaatgttaatactactgcatcaggtgttgaagaccttaacatcattcaggtgacaattccagatgatgataatgaaagactctcgaaagttgaaaaagctagacagctaagagaacaagtgaatgacctctttagtcggaaatttggtgaagctattggtatgggttttcctgtgaaagttccctacaggaaaatcacaattaaccctggctgtgtggtggttgatggcatgcccccgggggtgtccttcaaagcccccagctacctggaaatcagctccatgagaaggatcttagactctgccgagtttatcaaattcacggtcattagaccatttccaggacttgtgattaataaccagctggttgatcagagtgagtcagaaggccccgtgatacaagaatcagctgaaccaagccagttggaagttccagccacagaagaaataaaagagactgatggaagctctcagatcaagcaagaaccagaccccacgtggtagacctcttccctcctaggcaaaaccatctggatcacctaacagtcagaggtcagtatctcagcgtgtgaattatagaggaaatacagagagaacctcttccacttttacttttcgtccaaataaaatgcatggtgtaccagaagttgaagatcgggttgaggattggggctagctcgatgacactaaggccccaacatcgcgggacctgctgtggcgcggattcttaggaacgctgttctagccggccccctctccaggggtcgccgtggccggcattatttcctagttcttcttgtaaccctgaggtgccagcgcggggagtgaggaggggtcagggggctaaggatgcaacctctgacgttctgcgccttcctaggagagtcttacatgtgttgagatttcacaagcaatgcgagttgtaaaataccagctctacaagaagctaggctctgtgacggcatagttttcagtagctttatcacaatattcacaatggagaattatatgacatggtagcagaaataggcccttttatgtgttgcttctattttacctcaaattgtagatatagggtaatcaataaaatccatccatgcctttcacacactaagt

SEQ ID NO: 4039 - protein, 863 aa, Homo sapiens
MHKMKSTTQANRMSVDAVEIETLRKTVEDYFCFCYGKALGKSTVVPVPYEKMLRDQSAVVVQGLPEGVAFKHPENYDLATLKWILENKAGISFIIKRPFLEPKKHVGGRVMVTDADRSILSPGGSCGPIKVKTEPTEDSGSHHSSEGNEGTEMEVPAEDSTQHVPSETSEDPEVEVTIEDDDYSPPSKRPKANELPQPPVPEPANAGKRKVREFNFEKWNARITDLRKQVEELFERKYAQAIKAKGPVTIPYPLFQSHVEDLYVEGLPEGIPFRRPSTYGIPRLERILLAKERIRFVIKKHELLNSTREDLQLDKPASGVKEEWYARITKLRKMVDQLFCKKFAEALGSTEAKAVPYQKFEAHPNDLYVEGLPENIPFRSPSWYGIPRLEKIIQVGNRIKFVIKRPELLTHSTTEVTQPRTNTPVKEDWNVRITKLRKQVEEIFNLKFAQALGLTEAVKVPYPVFESNPEFLYVEGLPEGIPFRSPTWFGIPRLERIVRGSNKIKFVVKKPELVISYLPPGMASKINTKALQSPKRPRSPGSNSKVPEIEVTVEGPNNNNPQTSAVRTPTQTNGSNVPFKPRGREFSFEAWNAKITDLKQKVENLFNEKCGEALGLKQAVKVPFALFESFPEDFYVEGLPEGVPFRRPSTFGIPRLEKILRNKAKIKFIIKKPEMFETAIKESTSSKSPPRKINSSPNVNTTASGVEDLNIIQVTIPDDDNERLSKVEKARQLREQVNDLFSRKFGEAIGMGFPVKVPYRKITINPGCVVVDGMPPGVSFKAPSYLEISSMRRILDSAEFIKFTVIRPFPGLVINNQLVDQSESEGPVIQESAEPSQLEVPATEEIKETDGSSQIKQEPDPTW

SEQ ID NO: 4040 - DNA, 5131 bp, Homo sapiens
aaaaaaaaaaaaaaaaaaaaaaaaaaaagaaaaaagaaaaaaaaaaggaggaggaggaggagggtgagagagaagctgggagagcagagaaaaggggccaccggtcgcccccccgcttccccgcacgcgctctccagccgcggccgcccgcctgccgcggtcaccccggcctctgcctctgtcccccagtgatcggatcaaggcgctgagcgaggccctgcctgcggggcggccatgcggcggtgacaggagcgcgaccgacacgcacgggcccctcgccccctctcgcctcccgtccgctcgccagctcccctcagccgaggctgctccgcggcggccgcagcccgcgcgcggcccacactcgcctccccgttgaagatgaggagtcctcggagagcaggatggtggtgacattcctcatgtcagctctcgagtccatgtgtaaagaactggccaagtccaaagccgaagtggcctgcattgcagtgtatgaaacagacgtgtttgtcgtcggaactgaaagaggacgtgcttttgtcaataccagaaaggattttcaaaaagattttgtaaaatattgtgttgaagaagaagaaaaagctgcagagatgcataaaatgaaatctacaacccaggcaaatcggatgagtgtagatgctgtagaaattgaaacactcagaaaaacagttgaggactatttctgcttttgctatgggaaagctttaggcaaatccacagtggtacctgtaccatatgagaagatgctgcgagaccagtcggctgtggtagtgcaggggcttccggaaggtgttgcctttaaacaccccgagaactatgatcttgcaaccctgaaatggattttggagaacaaagcagggatttcattcatcattaagagaccttttttagagccaaagaagcatgtaggtggtcgtgtgatggtaacagatgctgacaggtcaatactatctccaggtggaagttgtggccccatcaaagtgaaaactgaacccacagaagattctggcatttccctggaaatggcagctgtgacagtaaaggaagaatcagaagatcctgattattatcaatataacattcaagcaggcccttctgaaactgatgatgttgatgaaaaacagcccctatcgaagcctttgcaaggaagccaccattcttcagagggcaatgaaggcacagaaatggaagtaccagcagaagatgatgattattctccaccgtctaagagaccaaaggccaatgagctaccgcagccaccagtcccggaacccgccaatgctgggaagcggaaagtgagggagttcaacttcgagaaatggaatgctcgcatcactgatctacgtaaacaagttgaagaattgtttgaaaggaaatatgctcaagccataaaagccaaaggtccggtgacgatcccgtaccctcttttccagtctcatgttgaagatctttatgtagaaggacttcctgaaggaattccttttagaaggccatctacttacggaattcctcgcctggagaggatattacttgcaaaggaaaggattcgttttgtgattaagaaacatgagcttctgaattcaacacgtgaagatttacagcttgataagccagcttcaggagtaaaggaagaatggtatgccagaatcactaaattaagaaagatggtggatcagcttttctgcaaaaaatttgcggaagccttggggagcactgaagccaaggctgtaccgtaccaaaaatttgaggcacacccgaatgatctgtacgtggaaggactgccagaaaacattcctttccgaagtccctcatggtatggaatcccaaggctggaaaaaatcattcaagtgggcaatcgaattaaatttgttattaaaagaccagaacttctgactcacagtaccactgaagttactcagccaagaacgaatacaccagtcaaagaagattggaatgtcagaattaccaagctacggaagcaagtggaagagatttttaatttgaaatttgctcaagctcttggactcaccgaggcagtaaaagtaccatatcctgtgtttgaatcaaacccggagttcttgtatgtggaaggcttgccagaggggattcccttccgaagccctacctggtttggaattccacgacttgaaaggatcgtccgcgggagtaataaaatcaagttcgttgttaaaaaacctgaactagttatttcctacttgcctcctgggatggctagtaaaataaacactaaagctttgcagtcccccaaaagaccacgaagtcctgggagtaattcaaaggttcctgaaattgaggtcaccgtggaaggccctaataacaacaatcctcaaacctcagctgttcgaaccccgacccagactaacggttctaacgttcccttcaagccacgagggagagagttttcctttgaggcctggaatgccaaaatcacggacctaaaacagaaagttgaaaatctcttcaatgagaaatgtggggaagctcttggccttaaacaagctgtgaaggtgccgttcgcgttatttgagtctttcccggaagacttttatgtggaaggcttacctgagggtgtgccattccgaagaccatcgacttttggcattccgaggctggagaagatactcagaaacaaagccaaaattaagttcatcattaaaaagcccgaaatgtttgagacggcgattaaggagagcacctcctctaagagccctcccagaaaaataaattcatcacccaatgttaatactactgcatcaggtgttgaagaccttaacatcattcaggtgacaattccagatgatgataatgaaagactctcgaaagttgaaaaagctagacagctaagagaacaagtgaatgacctctttagtcggaaatttggtgaagctattggtatgggttttcctgtgaaagttccctacaggaaaatcacaattaaccctggctgtgtggtggttgatggcatgcccccgggggtgtccttcaaagcccccagctacctggaaatcagctccatgagaaggatcttagactctgccgagtttatcaaattcacggtcattagaccatttccaggacttgtgattaataaccagctggttgatcagagtgagtcagaaggccccgtgatacaagaatcagctgaaccaagccagttggaagttccagccacagaagaaataaaagagactgatggaagctctcagatcaagcaagaaccagaccccacgtggtagacctcttccctcctagggtaaatcagcttctgtgtcagggatgctgtgtggtgtccatctgaaccccctgcatacgcgtagctaatgtgatctccccactttcacataagatggtggccctgccttcagggaatgtgggagccaggtgggagccttcccggatatttaagctagaagattctacagggagattctccttggatcaatatatgtctctcagtcaaagatgtaaaagcacttttgccttaaaaagaatgttctgtttctaaatagagtcaacgttgtcctcctcattggaattcactatgagtcagaatcattagactgacttttttttttccatagtaatagtattttgcagagtctcacagagctgcagatcttttgttcatcttgcagagttaacaagtctgatcctgttagtccagatttcttaaatttggccaagttataataggagcagtagcttgagacccgaagtcaggaaactttgacaatggatttttttttttaatccagagacttgtactggaatttgccttaccctgtcagctcatggacttaaggtttcatcccgctttatgagtgcttctgaatccaagtcattgttacctgaatttgcaaattaagttgtgatattcgtgactgttaaattcctgtaattagattaacctctttgcttgcttgtttgttttctctcctattttagcttaaagtatcagtggttgagaagagcttttcggacctgttactaccccaagctgtgtaatatacttgtataacagaaataccttctatacaaacctttttttctacttttagatagaaatgtctactttttcagcagttctgtgaattaaagagcagagtgactgtgggtctggaatggctggtgtacttgggaatgtactatcaggattttacagcaatgctgggaaatgacagggaaaatgacaggaatgaatctcaccagattttttatgtactcagcagagccttgagttacggtgtttattttccaatcaagtgaagatatctcctacttctcctactggaacatctcagcttctgcagtgaagaaaaattcctgtgatagttcagttctttagtttttctatttgaaaaaaaaaaatcatttaaatgatcctttgttcacggctctccttaatgactgagtgaacagttcctatctgtatatttgactaaaccttttcctaagctatctctcatggttcctatgtttttttatcataattaaaagcaaaaccatctggatcacctaacagtcagaggtcagtatctcagcgtgtgaattatagaggaaatacagagagaacctcttccacttttacttttcgtccaaataaaatgcatggtgtaccagaagttgaagatcgggttgaggattggggctagctcgatgacactaaggccccaacatcgcgggacctgctgtggcgcggattcttaggaacgctgttctagccggccccctctccaggggtcgccgtggccggcattatttcctagttcttcttgtaaccctgaggtgccagcgcggggagtgaggaggggtcagggggctaaggatgcaacctctgacgttctgcgccttcctaggagagtcttacatgtgttgagatttcacaagcaatgcgagttgtaaaataccagctctacaagaagctaggctctgtgacggcatagttttcagtagctttatcacaatattcacaatggagaattatatgacatggtagcagaaataggcccttttatgtgttgcttctattttacctcaaattgtagatatagggtaatcaataaaatccatccatgcctttcacacactaagt

SEQ ID NO: 4041 - protein, 957 aa, Homo sapiens
MVVTFLMSALESMCKELAKSKAEVACIAVYETDVFVVGTERGRAFVNTRKDFQKDFVKYCVEEEEKAAEMHKMKSTTQANRMSVDAVEIETLRKTVEDYFCFCYGKALGKSTVVPVPYEKMLRDQSAVVVQGLPEGVAFKHPENYDLATLKWILENKAGISFIIKRPFLEPKKHVGGRVMVTDADRSILSPGGSCGPIKVKTEPTEDSGISLEMAAVTVKEESEDPDYYQYNIQAGPSETDDVDEKQPLSKPLQGSHHSSEGNEGTEMEVPAEDDDYSPPSKRPKANELPQPPVPEPANAGKRKVREFNFEKWNARITDLRKQVEELFERKYAQAIKAKGPVTIPYPLFQSHVEDLYVEGLPEGIPFRRPSTYGIPRLERILLAKERIRFVIKKHELLNSTREDLQLDKPASGVKEEWYARITKLRKMVDQLFCKKFAEALGSTEAKAVPYQKFEAHPNDLYVEGLPENIPFRSPSWYGIPRLEKIIQVGNRIKFVIKRPELLTHSTTEVTQPRTNTPVKEDWNVRITKLRKQVEEIFNLKFAQALGLTEAVKVPYPVFESNPEFLYVEGLPEGIPFRSPTWFGIPRLERIVRGSNKIKFVVKKPELVISYLPPGMASKINTKALQSPKRPRSPGSNSKVPEIEVTVEGPNNNNPQTSAVRTPTQTNGSNVPFKPRGREFSFEAWNAKITDLKQKVENLFNEKCGEALGLKQAVKVPFALFESFPEDFYVEGLPEGVPFRRPSTFGIPRLEKILRNKAKIKFIIKKPEMFETAIKESTSSKSPPRKINSSPNVNTTASGVEDLNIIQVTIPDDDNERLSKVEKARQLREQVNDLFSRKFGEAIGMGFPVKVPYRKITINPGCVVVDGMPPGVSFKAPSYLEISSMRRILDSAEFIKFTVIRPFPGLVINNQLVDQSESEGPVIQESAEPSQLEVPATEEIKETDGSSQIKQEPDPTW

SEQ ID NO: 4042 - DNA, 3794 bp, Homo sapiens
aaaaaaaaaaaaaaaaaaaaaaaaaaaagaaaaaagaaaaaaaaaaggaggaggaggaggagggtgagagagaagctgggagagcagagaaaaggggccaccggtcgcccccccgcttccccgcacgcgctctccagccgcggccgcccgcctgccgcggtcaccccggcctctgcctctgtcccccagtgatcggatcaaggcgctgagcgaggccctgcctgcggggcggccatgcggcggtgacaggagcgcgaccgacacgcacgggcccctcgccccctctcgcctcccgtccgctcgccagctcccctcagccgaggctgctccgcggcggccgcagcccgcgcgcggcccacactcgcctcccctcggcacccccggccccggagctgcctggaggcggccgcactcggtgtaaagaactggccaagtccaaagccgaagtggcctgcattgcagtgtatgaaacagacgtgtttgtcgtcggaactgaaagaggacgtgcttttgtcaataccagaaaggattttcaaaaagattttgtaaaatattgtgttgaagaagaagaaaaagctgcagagatgcataaaatgaaatctacaacccaggcaaatcggatgagtgtagatgctgtagaaattgaaacactcagaaaaacagttgaggactatttctgcttttgctatgggaaagctttaggcaaatccacagtggtacctgtaccatatgagaagatgctgcgagaccagtcggctgtggtagtgcaggggcttccggaaggtgttgcctttaaacaccccgagaactatgatcttgcaaccctgaaatggattttggagaacaaagcagggatttcattcatcattaagagaccttttttagagccaaagaagcatgtaggtggtcgtgtgatggtaacagatgctgacaggtcaatactatctccaggtggaagttgtggccccatcaaagtgaaaactgaacccacagaagattctggcatttccctggaaatggcagctgtgacagtaaaggaagaatcagaagatcctgattattatcaatataacattcaaggaagccaccattcttcagagggcaatgaaggcacagaaatggaagtaccagcagaagattctactcaacatgtcccttcagaaacaagtgaggaccctgaagttgaggtgactattgaagatgatgattattctccaccgtctaagagaccaaaggccaatgagctaccgcagccaccagtcccggaacccgccaatgctgggaagcggaaagtgagggagttcaacttcgagaaatggaatgctcgcatcactgatctacgtaaacaagttgaagaattgtttgaaaggaaatatgctcaagccataaaagccaaaggtccggtgacgatcccgtaccctcttttccagtctcatgttgaagatctttatgtagaaggacttcctgaaggaattccttttagaaggccatctacttacggaattcctcgcctggagaggatattacttgcaaaggaaaggattcgttttgtgattaagaaacatgagcttctgaattcaacacgtgaagatttacagcttgataagccagcttcaggagtaaaggaagaatggtatgccagaatcactaaattaagaaagatggtggatcagcttttctgcaaaaaatttgcggaagccttggggagcactgaagccaaggctgtaccgtaccaaaaatttgaggcacacccgaatgatctgtacgtggaaggactgccagaaaacattcctttccgaagtccctcatggtatggaatcccaaggctggaaaaaatcattcaagtgggcaatcgaattaaatttgttattaaaagaccagaacttctgactcacagtaccactgaagttactcagccaagaacgaatacaccagctcaagctcttggactcaccgaggcagtaaaagtaccatatcctgtgtttgaatcaaacccggagttcttgtatgtggaaggcttgccagaggggattcccttccgaagccctacctggtttggaattccacgacttgaaaggatcgtccgcgggagtaataaaatcaagttcgttgttaaaaaacctgaactagttatttcctacttgcctcctgggatggctagtaaaataaacactaaagctttgcagtcccccaaaagaccacgaagtcctgggagtaattcaaaggttcctgaaattgaggtcaccgtggaaggccctaataacaacaatcctcaaacctcagctgttcgaaccccgacccagactaacggttctaacgttcccttcaagccacgagggagagagttttcctttgaggcctggaatgccaaaatcacggacctaaaacagaaagttgaaaatctcttcaatgagaaatgtggggaagctcttggccttaaacaagctgtgaaggtgccgttcgcgttatttgagtctttcccggaagacttttatgtggaaggcttacctgagggtgtgccattccgaagaccatcgacttttggcattccgaggctggagaagatactcagaaacaaagccaaaattaagttcatcattaaaaagcccgaaatgtttgagacggcgattaaggagagcacctcctctaagagccctcccagaaaaataaattcatcacccaatgttaatactactgcatcaggtgttgaagaccttaacatcattcaggtgacaattccagatgatgataatgaaagactctcgaaagttgaaaaagctagacagctaagagaacaagtgaatgacctctttagtcggaaatttggtgaagctattggtatgggttttcctgtgaaagttccctacaggaaaatcacaattaaccctggctgtgtggtggttgatggcatgcccccgggggtgtccttcaaagcccccagctacctggaaatcagctccatgagaaggatcttagactctgccgagtttatcaaattcacggtcattagaccatttccaggacttgtgattaataaccagctggttgatcagagtgagtcagaaggccccgtgatacaagaatcagctgaaccaagccagttggaagttccagccacagaagaaataaaagagactgatggaagctctcagatcaagcaagaaccagaccccacgtggtagacctcttccctcctaggcaaaaccatctggatcacctaacagtcagaggtcagtatctcagcgtgtgaattatagaggaaatacagagagaacctcttccacttttacttttcgtccaaataaaatgcatggtgtaccagaagttgaagatcgggttgaggattggggctagctcgatgacactaaggccccaacatcgcgggacctgctgtggcgcggattcttaggaacgctgttctagccggccccctctccaggggtcgccgtggccggcattatttcctagttcttcttgtaaccctgaggtgccagcgcggggagtgaggaggggtcagggggctaaggatgcaacctctgacgttctgcgccttcctaggagagtcttacatgtgttgagatttcacaagcaatgcgagttgtaaaataccagctctacaagaagctaggctctgtgacggcatagttttcagtagctttatcacaatattcacaatggagaattatatgacatggtagcagaaataggcccttttatgtgttgcttctattttacctcaaattgtagatatagggtaatcaataaaatccatccatgcctttcacacactaagt

SEQ ID NO: 4043 - protein, 865 aa, Homo sapiens
MHKMKSTTQANRMSVDAVEIETLRKTVEDYFCFCYGKALGKSTVVPVPYEKMLRDQSAVVVQGLPEGVAFKHPENYDLATLKWILENKAGISFIIKRPFLEPKKHVGGRVMVTDADRSILSPGGSCGPIKVKTEPTEDSGISLEMAAVTVKEESEDPDYYQYNIQGSHHSSEGNEGTEMEVPAEDSTQHVPSETSEDPEVEVTIEDDDYSPPSKRPKANELPQPPVPEPANAGKRKVREFNFEKWNARITDLRKQVEELFERKYAQAIKAKGPVTIPYPLFQSHVEDLYVEGLPEGIPFRRPSTYGIPRLERILLAKERIRFVIKKHELLNSTREDLQLDKPASGVKEEWYARITKLRKMVDQLFCKKFAEALGSTEAKAVPYQKFEAHPNDLYVEGLPENIPFRSPSWYGIPRLEKIIQVGNRIKFVIKRPELLTHSTTEVTQPRTNTPAQALGLTEAVKVPYPVFESNPEFLYVEGLPEGIPFRSPTWFGIPRLERIVRGSNKIKFVVKKPELVISYLPPGMASKINTKALQSPKRPRSPGSNSKVPEIEVTVEGPNNNNPQTSAVRTPTQTNGSNVPFKPRGREFSFEAWNAKITDLKQKVENLFNEKCGEALGLKQAVKVPFALFESFPEDFYVEGLPEGVPFRRPSTFGIPRLEKILRNKAKIKFIIKKPEMFETAIKESTSSKSPPRKINSSPNVNTTASGVEDLNIIQVTIPDDDNERLSKVEKARQLREQVNDLFSRKFGEAIGMGFPVKVPYRKITINPGCVVVDGMPPGVSFKAPSYLEISSMRRILDSAEFIKFTVIRPFPGLVINNQLVDQSESEGPVIQESAEPSQLEVPATEEIKETDGSSQIKQEPDPTW

SEQ ID NO: 4044 - DNA, 7315 bp, Homo sapiens
aaaaaaaaaaaaaaaaaaaaaaaaaaaagaaaaaagaaaaaaaaaaggaggaggaggaggagggtgagagagaagctgggagagcagagaaaaggggccaccggtcgcccccccgcttccccgcacgcgctctccagccgcggccgcccgcctgccgcggtcaccccggcctctgcctctgtcccccagtgatcggatcaaggcgctgagcgaggccctgcctgcggggcggccatgcggcggtgacaggagcgcgaccgacacgcacgggcccctcgccccctctcgcctcccgtccgctcgccagctcccctcagccgaggctgctccgcggcggccgcagcccgcgcgcggcccacactcgcctccccgttgaagatgaggagtcctcggagagcaggatggtggtgacattcctcatgtcagctctcgagtccatgtgtaaagaactggccaagtccaaagccgaagtggcctgcattgcagtgtatgaaacagacgtgtttgtcgtcggaactgaaagaggacgtgcttttgtcaataccagaaaggattttcaaaaagattttgtaaaatattgtgttgaagaagaagaaaaagctgcagagatgcataaaatgaaatctacaacccaggcaaatcggatgagtgtagatgctgtagaaattgaaacactcagaaaaacagttgaggactatttctgcttttgctatgggaaagctttaggcaaatccacagtggtacctgtaccatatgagaagatgctgcgagaccagtcggctgtggtagtgcaggggcttccggaaggtgttgcctttaaacaccccgagaactatgatcttgcaaccctgaaatggattttggagaacaaagcagggatttcattcatcattaagagaccttttttagagccaaagaagcatgtaggtggtcgtgtgatggtaacagatgctgacaggtcaatactatctccaggtggaagttgtggccccatcaaagtgaaaactgaacccacagaagattctggcatttccctggaaatggcagctgtgacagtaaaggaagaatcagaagatcctgattattatcaatataacattcaaggaagccaccattcttcagagggcaatgaaggcacagaaatggaagtaccagcagaagattctactcaacatgtcccttcagaaacaagtgaggaccctgaagttgaggtgactattgaagatgatgattattctccaccgtctaagagaccaaaggccaatgagctaccgcagccaccagtcccggaacccgccaatgctgggaagcggaaagtgagggagttcaacttcgagaaatggaatgctcgcatcactgatctacgtaaacaagttgaagaattgtttgaaaggaaatatgctcaagccataaaagccaaaggtccggtgacgatcccgtaccctcttttccagtctcatgttgaagatctttatgtagaaggacttcctgaaggaattccttttagaaggccatctacttacggaattcctcgcctggagaggatattacttgcaaaggaaaggattcgttttgtgattaagaaacatgagcttctgaattcaacacgtgaagatttacagcttgataagccagcttcaggagtaaaggaagaatggtatgccagaatcactaaattaagaaagatggtggatcagcttttctgcaaaaaatttgcggaagccttggggagcactgaagccaaggctgtaccgtaccaaaaatttgaggcacacccgaatgatctgtacgtggaaggactgccagaaaacattcctttccgaagtccctcatggtatggaatcccaaggctggaaaaaatcattcaagtgggcaatcgaattaaatttgttattaaaagaccagaacttctgactcacagtaccactgaagttactcagccaagaacgaatacaccagtcaaagaagattggaatgtcagaattaccaagctacggaagcaagtggaagagatttttaatttgaaatttgcttagatttgttgacagcggtttcctggagtgctgtcttgagaacgattctgaggaggctcagcaagaaagagtgtttcagttgattgggtgtgtctgtcatggagaaggaactcaagctcttggactcaccgaggcagtaaaagtaccatatcctgtgtttgaatcaaacccggagttcttgtatgtggaaggcttgccagaggggattcccttccgaagccctacctggtttggaattccacgacttgaaaggatcgtccgcgggagtaataaaatcaagttcgttgttaaaaaacctgaactagttatttcctacttgcctcctgggatggctagtaaaataaacactaaagctttgcagtcccccaaaagaccacgaagtcctgggagtaattcaaaggttcctgaaattgaggtcaccgtggaaggccctaataacaacaatcctcaaacctcagctgttcgaaccccgacccagactaacggttctaacgttcccttcaagccacgagggagagagttttcctttgaggcctggaatgccaaaatcacggacctaaaacagaaagttgaaaatctcttcaatgagaaatgtggggaagctcttggccttaaacaagctgtgaaggtgccgttcgcgttatttgagtctttcccggaagacttttatgtggaaggcttacctgagggtgtgccattccgaagaccatcgacttttggcattccgaggctggagaagatactcagaaacaaagccaaaattaagttcatcattaaaaagcccgaaatgtttgagacggcgattaaggagagcacctcctctaagagccctcccagaaaaataaattcatcacccaatgttaatactactgcatcaggtgttgaagaccttaacatcattcaggtgacaattccagatgatgataatgaaagactctcgaaagttgaaaaagctagacagctaagagaacaagtgaatgacctctttagtcggaaatttggtgaagctattggtatgggttttcctgtgaaagttccctacaggaaaatcacaattaaccctggctgtgtggtggttgatggcatgcccccgggggtgtccttcaaagcccccagctacctggaaatcagctccatgagaaggatcttagactctgccgagtttatcaaattcacggtcattaggtaagtgagagtttcctgcttagtcacaggagcgaatctggagctcatgaggctgactcttctaaaatgcagccacaggtagtcatcgaatccggcttcctatgctgtgcaatcaacaaatcaaaataacttgtgtcatcattagaatgtcagatgtgcttctacgaactaagctgactcttttaattctttggcaaagggttggcaaactaggactgtttgccaaattcaggctgcctcctatttttagagtcttcctgaaacacagctacacccgtattatccatggctgctttcctgtcacagtgagtaagtagctgggactgagaaggcatggcctccaaagtctaaaatatttactctctagcactttgtagaaaaaccttagctaggcacagtggctaacgcctgtaatcccagcattttgggaggccaaggcaggcagatcacctgaggtcaggagttccagaccagcctggccaacatggtgaaatcccatctctacaaaaataaaacagttagctgggcatgatggcgggtgcctgtaatcccagctactcgggaggctgaggcaggatagtcgcttgaacccaggaggtggaggttgcaatgagccaagatcatgccactgcactccagcctggacgacagagtgagactccatcacaagaaaaaaagaactttgtcaacctctgtcttagggcgccttgtcacaggcttcgggtcagacggattcaaccttgcatcagccatttgttagccaggtcactctgttctttgtctgtaaatgagattgatcgttgttcccactgagagtgtcagctccttcccgtagagcaggcatgatgattgtactcacctctgacaccattgtgagtgccacattccttcccacgtccttgtcactgtaagagatgcccacctgagcaccaaccccaggttatcttcccctttgtcttccagccccccagaaacagctacgactcaacctacccaatcatttcatcatcagattgccactgtctctagttcaggtctcttgggactggcactcagaaatctcataataaatcctcttgaggcttctcatacactcgtcttcttccaatcttctttccctcaaaatctcatattttggttccacttcacccaccgtcattctccatatcactcccaggagttaggcaaaaagccccttccgttcttccgtatgttaaacttagaatcactctgttccctgctctgcgtttctattttttgtttttcctccatttactagtagcttaacactttctaacagtgttcttattattgatacgtatctatctcttccataagcttataaggtcacggataatacttctcattgtagtacgtaaatgacgtgggctagatatgagttgaataaacagttatacctgtaaattcttacagagtgaaaataaattgttatactttacaatttgtttctctctttagaccatttccaggacttgtgattaataaccgtgagtattttgtgaagtgttttgtttttgttttttcctggggtctgacgtgtgtgcgtgtgagtgtgtatacatgcttaacgtatatcacgttacttcacctatgtcagtaaccaggccaaatacttgttttagccctcagtaaaaacaccaggcacttcctagttgtaaaattattcaagcttcttaacttcctatcctcgatgcacttaatcataaaatggtaataatagcaccgattttgggggagtcgttccagtagatggaaagcatctggaacaggtgtcagcaagctcctgccgacgtgtatgcataaagttttattgaaaccaccatcgtgtccatttgtttatggcagaactgagagatggcagcagcaagtgtgtgcctgcaaaacctaaaatatttactaattggctctgcaagaaaagagtttgcatccccctaacctagaacagtgtctagcctctagtatgtgtttagcctacagtatgtgctcagcgaatacaatctatatttattactgcttttatgactgttataattactgtgcttggatttcgttacaaagtaagtcacaatgtgcctgcttctgttagtatttcagcacagtgcctggcacacatggggctctcaaatattgctgagcgagtgaacaaatgtcctttcaattccttaacgttgatgtcattttcaatagtattttgagccaaacttaattttgcgagtgtgttttgttttcttaactttattattaaaaatgtataaaagtgaggccaggcgtggtggctcacgcctgtaatcccagcagtttgggaggctgaggcaggcggatcagttgaggttgggagttggagaccagcccgtccaacatggtgaaagcctgtctctactaaaaatacaaaaatcagctgggtgtggtggcgcgtgcctgtaatcccagctactcaggaggctgaggcaggagagttgcttgaatcctagaggtggaggttgcagtgagctgagatcgtgccattgcactccagcctgggcaacaagagcaaaactctgtcccaataaataaataaataaaatgttctcttttgttcctgttcttgtgcggtagtgtggtatagagttttatggtaattactgtgaattagtgattctgagggacatatcagaactctgaggtttgtttccttctcatcttgagggaaacagcaaatgtatgttaaaatgcttttccaagggaacaacacatccttacattatttaaaccaatctgcttcattttcagagctggttgatcagagtgagtcagaaggccccgtgatacaagaatcagctgaaccaagccagttggaagttccagccacagaagaaataaaagagactgatggaagctctcagatcaagcaagaaccagaccccacgtggtagacctcttccctcctaggcttaaagtatcagtggttgagaagagcttttcggacctgttactaccccaagctgtgtaatatacttgtataacagaaataccttctatacaaacctttttttctacttttagatagaaatgtctactttttcagcagttctgtgaattaaagagcagagtgactgtgggtctggaatggctggtgtacttgggaatgtactatcaggattttacagcaatgctgggaaatgacagggaaaatgacaggaatgaatctcaccagattttttatgtactcagcagagccttgagttacggtgtttattttccaatcaagtgaagatatctcctacttctcctactggaacatctcagcttctgcagtgaagaaaaattcctgtgatagttcagttctttagtttttctatttgaaaaaaaaaaatcatttaaatgatcctttgttcacggctctccttaatgactgagtgaacagttcctatctgtatatttgactaaaccttttcctaagctatctctcatggttcctatgtttttttatcataattaaaagcaaaaccatctggatcacctaacagtcagaggtcagtatctcagcgtgtgaattatagaggaaatacagagagaacctcttccacttttacttttcgtccaaataaaatgcatggtgtaccagaagttgaagatcgggttgaggattggggctagctcgatgacactaaggccccaacatcgcgggacctgctgtggcgcggattcttaggaacgctgttctagccggccccctctccaggggtcgccgtggccggcattatttcctagttcttcttgtaaccctgaggtgccagcgcggggagtgaggaggggtcagggggctaaggatgcaacctctgacgttctgcgccttcctaggagagtcttacatgtgttgagatttcacaagcaatgcgagttgtaaaataccagctctacaagaagctaggctctgtgacggcatagttttcagtagctttatcacaatattcacaatggagaattatatgacatggtagcagaaataggcccttttatgtgttgcttctattttacctcaaattgtagatatagggtaatcaataaaatccatccatgcctttcacacactaagt

SEQ ID NO: 4045 - protein, 544 aa, Homo sapiens
MVVTFLMSALESMCKELAKSKAEVACIAVYETDVFVVGTERGRAFVNTRKDFQKDFVKYCVEEEEKAAEMHKMKSTTQANRMSVDAVEIETLRKTVEDYFCFCYGKALGKSTVVPVPYEKMLRDQSAVVVQGLPEGVAFKHPENYDLATLKWILENKAGISFIIKRPFLEPKKHVGGRVMVTDADRSILSPGGSCGPIKVKTEPTEDSGISLEMAAVTVKEESEDPDYYQYNIQGSHHSSEGNEGTEMEVPAEDSTQHVPSETSEDPEVEVTIEDDDYSPPSKRPKANELPQPPVPEPANAGKRKVREFNFEKWNARITDLRKQVEELFERKYAQAIKAKGPVTIPYPLFQSHVEDLYVEGLPEGIPFRRPSTYGIPRLERILLAKERIRFVIKKHELLNSTREDLQLDKPASGVKEEWYARITKLRKMVDQLFCKKFAEALGSTEAKAVPYQKFEAHPNDLYVEGLPENIPFRSPSWYGIPRLEKIIQVGNRIKFVIKRPELLTHSTTEVTQPRTNTPVKEDWNVRITKLRKQVEEIFNLKFA

SEQ ID NO: 4046 - DNA, 4478 bp, Homo sapiens
aaaaaaaaaaaaaaaaaaaaaaaaaaaagaaaaaagaaaaaaaaaaggaggaggaggaggagggtgagagagaagctgggagagcagagaaaaggggccaccggtcgcccccccgcttccccgcacgcgctctccagccgcggccgcccgcctgccgcggtcaccccggcctctgcctctgtcccccagtgatcggatcaaggcgctgagcgaggccctgcctgcggggcggccatgcggcggtgacaggagcgcgaccgacacgcacgggcccctcgccccctctcgcctcccgtccgctcgccagctcccctcagccgaggctgctccgcggcggccgcagcccgcgcgcggcccacactcgcctcccctcggcacccccggccccggagctgcctggaggcggccgcactcggtgtaaagaactggccaagtccaaagccgaagtggcctgcattgcagtgtatgaaacagacgtgtttgtcgtcggaactgaaagaggacgtgcttttgtcaataccagaaaggattttcaaaaagattttgtaaaatattgtgttgaagaagaagaaaaagctgcagagatgcataaaatgaaatctacaacccaggcaaatcggatgagtgtagatgctgtagaaattgaaacactcagaaaaacagttgaggactatttctgcttttgctatgggaaagctttaggcaaatccacagtggtacctgtaccatatgagaagatgctgcgagaccagtcggctgtggtagtgcaggggcttccggaaggtgttgcctttaaacaccccgagaactatgatcttgcaaccctgaaatggattttggagaacaaagcagggatttcattcatcattaagagaccttttttagagccaaagaagcatgtaggtggtcgtgtgatggtaacagatgctgacaggtcaatactatctccaggtggaagttgtggccccatcaaagtgaaaactgaacccacagaagattctggcatttccctggaaatggcagctgtgacagtaaaggaagaatcagaagatcctgattattatcaatataacattcaagcaggcccttctgaaactgatgatgttgatgaaaaacagcccctatcgaagcctttgcaaggaagccaccattcttcagagggcaatgaaggcacagaaatggaagtaccagcagaagattctactcaacatgtcccttcagaaacaagtgaggaccctgaagttgaggtgactattgaagatgatgattattctccaccgtctaagagaccaaaggccaatgagctaccgcagccaccagtcccggaacccgccaatgctgggaagcggaaagtgagggagttcaacttcgagaaatggaatgctcgcatcactgatctacgtaaacaagttgaagaattgtttgaaaggaaatatgctcaagccataaaagccaaaggtccggtgacgatcccgtaccctcttttccagtctcatgttgaagatctttatgtagaaggacttcctgaaggaattccttttagaaggccatctacttacggaattcctcgcctggagaggatattacttgcaaaggaaaggattcgttttgtgattaagaaacatgagcttctgaattcaacacgtgaagatttacagcttgataagccagcttcaggagtaaaggaagaatggtatgccagaatcactaaattaagaaagatggtggatcagcttttctgcaaaaaatttgcggaagccttggggagcactgaagccaaggctgtaccgtaccaaaaatttgaggcacacccgaatgatctgtacgtggaaggactgccagaaaacattcctttccgaagtccctcatggtatggaatcccaaggctggaaaaaatcattcaagtgggcaatcgaattaaatttgttattaaaagaccagaacttctgactcacagtaccactgaagttactcagccaagaacgaatacaccagtcaaagaagattggaatgtcagaattaccaagctacggaagcaagtggaagagatttttaatttgaaatttgctcaagctcttggactcaccgaggcagtaaaagtaccatatcctgtgtttgaatcaaacccggagttcttgtatgtggaaggcttgccagaggggattcccttccgaagccctacctggtttggaattccacgacttgaaaggatcgtccgcgggagtaataaaatcaagttcgttgttaaaaaacctgaactagttatttcctacttgcctcctgggatggctagtaaaataaacactaaagctttgcagtcccccaaaagaccacgaagtcctgggagtaattcaaaggttcctgaaattgaggtcaccgtggaaggccctaataacaacaatcctcaaacctcagctgttcgaaccccgacccagactaacggttctaacgttcccttcaagccacgagggagagagttttcctttgaggcctggaatgccaaaatcacggacctaaaacagaaagttgaaaatctcttcaatgagaaatgtggggaagctcttggccttaaacaagctgtgaaggtgccgttcgcgttatttgagtctttcccggaagacttttatgtggaaggcttacctgagggtgtgccattccgaagaccatcgacttttggcattccgaggctggagaagatactcagaaacaaagccaaaattaagttcatcattaaaaagcccgaaatgtttgagacggcgattaaggagagcacctcctctaagagccctcccagaaaaataaattcatcacccaatgttaatactactgcatcaggtgttgaagaccttaacatcattcaggtgacaattccagatgatgataatgaaagactctcgaaagttgaaaaagctagacagctaagagaacaagtgaatgacctctttagtcggaaatttggtgaagctattggtatgggttttcctgtgaaagttccctacaggaaaatcacaattaaccctggctgtgtggtggttgatggcatgcccccgggggtgtccttcaaagcccccagctacctggaaatcagctccatgagaaggatcttagactctgccgagtttatcaaattcacggtcattagaccatttccaggacttgtgattaataaccagctggttgatcagagtgagtcagaaggccccgtgatacaagaatcagctgaaccaagccagttggaagttccagccacagaagaaataaaagagactgatggaagctctcagatcaagcaagaaccagaccccacgtggtagacctcttccctcctaggcttaaagtatcagtggttgagaagagcttttcggacctgttactaccccaagctgtgtaatatacttgtataacagaaataccttctatacaaacctttttttctacttttagatagaaatgtctactttttcagcagttctgtgaattaaagagcagagtgactgtgggtctggaatggctggtgtacttgggaatgtactatcaggattttacagcaatgctgggaaatgacagggaaaatgacaggaatgaatctcaccagattttttatgtactcagcagagccttgagttacggtgtttattttccaatcaagtgaagatatctcctacttctcctactggaacatctcagcttctgcagtgaagaaaaattcctgtgatagttcagttctttagtttttctatttgaaaaaaaaaaatcatttaaatgatcctttgttcacggctctccttaatgactgagtgaacagttcctatctgtatatttgactaaaccttttcctaagctatctctcatggttcctatgtttttttatcataattaaaagcaaaaccatctggatcacctaacagtcagaggtcagtatctcagcgtgtgaattatagaggaaatacagagagaacctcttccacttttacttttcgtccaaataaaatgcatggtgtaccagaagttgaagatcgggttgaggattggggctagctcgatgacactaaggccccaacatcgcgggacctgctgtggcgcggattcttaggaacgctgttctagccggccccctctccaggggtcgccgtggccggcattatttcctagttcttcttgtaaccctgaggtgccagcgcggggagtgaggaggggtcagggggctaaggatgcaacctctgacgttctgcgccttcctaggagagtcttacatgtgttgagatttcacaagcaatgcgagttgtaaaataccagctctacaagaagctaggctctgtgacggcatagttttcagtagctttatcacaatattcacaatggagaattatatgacatggtagcagaaataggcccttttatgtgttgcttctattttacctcaaattgtagatatagggtaatcaataaaatccatccatgcctttcacacactaagt

SEQ ID NO: 4047 - protein, 909 aa, Homo sapiens
MHKMKSTTQANRMSVDAVEIETLRKTVEDYFCFCYGKALGKSTVVPVPYEKMLRDQSAVVVQGLPEGVAFKHPENYDLATLKWILENKAGISFIIKRPFLEPKKHVGGRVMVTDADRSILSPGGSCGPIKVKTEPTEDSGISLEMAAVTVKEESEDPDYYQYNIQAGPSETDDVDEKQPLSKPLQGSHHSSEGNEGTEMEVPAEDSTQHVPSETSEDPEVEVTIEDDDYSPPSKRPKANELPQPPVPEPANAGKRKVREFNFEKWNARITDLRKQVEELFERKYAQAIKAKGPVTIPYPLFQSHVEDLYVEGLPEGIPFRRPSTYGIPRLERILLAKERIRFVIKKHELLNSTREDLQLDKPASGVKEEWYARITKLRKMVDQLFCKKFAEALGSTEAKAVPYQKFEAHPNDLYVEGLPENIPFRSPSWYGIPRLEKIIQVGNRIKFVIKRPELLTHSTTEVTQPRTNTPVKEDWNVRITKLRKQVEEIFNLKFAQALGLTEAVKVPYPVFESNPEFLYVEGLPEGIPFRSPTWFGIPRLERIVRGSNKIKFVVKKPELVISYLPPGMASKINTKALQSPKRPRSPGSNSKVPEIEVTVEGPNNNNPQTSAVRTPTQTNGSNVPFKPRGREFSFEAWNAKITDLKQKVENLFNEKCGEALGLKQAVKVPFALFESFPEDFYVEGLPEGVPFRRPSTFGIPRLEKILRNKAKIKFIIKKPEMFETAIKESTSSKSPPRKINSSPNVNTTASGVEDLNIIQVTIPDDDNERLSKVEKARQLREQVNDLFSRKFGEAIGMGFPVKVPYRKITINPGCVVVDGMPPGVSFKAPSYLEISSMRRILDSAEFIKFTVIRPFPGLVINNQLVDQSESEGPVIQESAEPSQLEVPATEEIKETDGSSQIKQEPDPTW

SEQ ID NO: 4048 - DNA, 7068 bp, Homo sapiens
aaaaaaaaaaaaaaaaaaaaaaaaaaaagaaaaaagaaaaaaaaaaggaggaggaggaggagggtgagagagaagctgggagagcagagaaaaggggccaccggtcgcccccccgcttccccgcacgcgctctccagccgcggccgcccgcctgccgcggtcaccccggcctctgcctctgtcccccagtgatcggatcaaggcgctgagcgaggccctgcctgcggggcggccatgcggcggtgacaggagcgcgaccgacacgcacgggcccctcgccccctctcgcctcccgtccgctcgccagctcccctcagccgaggctgctccgcggcggccgcagcccgcgcgcggcccacactcgcctccccgttgaagatgaggagtcctcggagagcaggatggtggtgacattcctcatgtcagctctcgagtccatgtgtaaagaactggccaagtccaaagccgaagtggcctgcattgcagtgtatgaaacagacgtgtttgtcgtcggaactgaaagaggacgtgcttttgtcaataccagaaaggattttcaaaaagattttgtaaaatattgtgttgaagaagaagaaaaagctgcagagatgcataaaatgaaatctacaacccaggcaaatcggatgagtgtagatgctgtagaaattgaaacactcagaaaaacagttgaggactatttctgcttttgctatgggaaagctttaggcaaatccacagtggtacctgtaccatatgagaagatgctgcgagaccagtcggctgtggtagtgcaggggcttccggaaggtgttgcctttaaacaccccgagaactatgatcttgcaaccctgaaatggattttggagaacaaagcagggatttcattcatcattaagagaccttttttagagccaaagaagcatgtaggtggtcgtgtgatggtaacagatgctgacaggtcaatactatctccaggtggaagttgtggccccatcaaagtgaaaactgaacccacagaagattctggcatttccctggaaatggcagctgtgacagtaaaggaagaatcagaagatcctgattattatcaatataacattcaaggaagccaccattcttcagagggcaatgaaggcacagaaatggaagtaccagcagaagatgatgattattctccaccgtctaagagaccaaaggccaatgagctaccgcagccaccagtcccggaacccgccaatgctgggaagcggaaagtgagggagttcaacttcgagaaatggaatgctcgcatcactgatctacgtaaacaagttgaagaattgtttgaaaggaaatatgctcaagccataaaagccaaaggtccggtgacgatcccgtaccctcttttccagtctcatgttgaagatctttatgtagaaggacttcctgaaggaattccttttagaaggccatctacttacggaattcctcgcctggagaggatattacttgcaaaggaaaggattcgttttgtgattaagaaacatgagcttctgaattcaacacgtgaagatttacagcttgataagccagcttcaggagtaaaggaagaatggtatgccagaatcactaaattaagaaagatggtggatcagcttttctgcaaaaaatttgcggaagccttggggagcactgaagccaaggctgtaccgtaccaaaaatttgaggcacacccgaatgatctgtacgtggaaggactgccagaaaacattcctttccgaagtccctcatggtatggaatcccaaggctggaaaaaatcattcaagtgggcaatcgaattaaatttgttattaaaagaccagaacttctgactcacagtaccactgaagttactcagccaagaacgaatacaccagctcaagctcttggactcaccgaggcagtaaaagtaccatatcctgtgtttgaatcaaacccggagttcttgtatgtggaaggcttgccagaggggattcccttccgaagccctacctggtttggaattccacgacttgaaaggatcgtccgcgggagtaataaaatcaagttcgttgttaaaaaacctgaactagttatttcctacttgcctcctgggatggctagtaaaataaacactaaagctttgcagtcccccaaaagaccacgaagtcctgggagtaattcaaaggttcctgaaattgaggtcaccgtggaaggccctaataacaacaatcctcaaacctcagctgttcgaaccccgacccagactaacggttctaacgttcccttcaagccacgagggagagagttttcctttgaggcctggaatgccaaaatcacggacctaaaacagaaagttgaaaatctcttcaatgagaaatgtggggaagctcttggccttaaacaagctgtgaaggtgccgttcgcgttatttgagtctttcccggaagacttttatgtggaaggcttacctgagggtgtgccattccgaagaccatcgacttttggcattccgaggctggagaagatactcagaaacaaagccaaaattaagttcatcattaaaaagcccgaaatgtttgagacggcgattaaggagagcacctcctctaagagccctcccagaaaaataaattcatcacccaatgttaatactactgcatcaggtgttgaagaccttaacatcattcaggtgacaattccagatgatgataatgaaagactctcgaaagttgaaaaagctagacagctaagagaacaagtgaatgacctctttagtcggaaatttggtgaagctattggtatgggttttcctgtgaaagttccctacaggaaaatcacaattaaccctggctgtgtggtggttgatggcatgcccccgggggtgtccttcaaagcccccagctacctggaaatcagctccatgagaaggatcttagactctgccgagtttatcaaattcacggtcattaggtaagtgagagtttcctgcttagtcacaggagcgaatctggagctcatgaggctgactcttctaaaatgcagccacaggtagtcatcgaatccggcttcctatgctgtgcaatcaacaaatcaaaataacttgtgtcatcattagaatgtcagatgtgcttctacgaactaagctgactcttttaattctttggcaaagggttggcaaactaggactgtttgccaaattcaggctgcctcctatttttagagtcttcctgaaacacagctacacccgtattatccatggctgctttcctgtcacagtgagtaagtagctgggactgagaaggcatggcctccaaagtctaaaatatttactctctagcactttgtagaaaaaccttagctaggcacagtggctaacgcctgtaatcccagcattttgggaggccaaggcaggcagatcacctgaggtcaggagttccagaccagcctggccaacatggtgaaatcccatctctacaaaaataaaacagttagctgggcatgatggcgggtgcctgtaatcccagctactcgggaggctgaggcaggatagtcgcttgaacccaggaggtggaggttgcaatgagccaagatcatgccactgcactccagcctggacgacagagtgagactccatcacaagaaaaaaagaactttgtcaacctctgtcttagggcgccttgtcacaggcttcgggtcagacggattcaaccttgcatcagccatttgttagccaggtcactctgttctttgtctgtaaatgagattgatcgttgttcccactgagagtgtcagctccttcccgtagagcaggcatgatgattgtactcacctctgacaccattgtgagtgccacattccttcccacgtccttgtcactgtaagagatgcccacctgagcaccaaccccaggttatcttcccctttgtcttccagccccccagaaacagctacgactcaacctacccaatcatttcatcatcagattgccactgtctctagttcaggtctcttgggactggcactcagaaatctcataataaatcctcttgaggcttctcatacactcgtcttcttccaatcttctttccctcaaaatctcatattttggttccacttcacccaccgtcattctccatatcactcccaggagttaggcaaaaagccccttccgttcttccgtatgttaaacttagaatcactctgttccctgctctgcgtttctattttttgtttttcctccatttactagtagcttaacactttctaacagtgttcttattattgatacgtatctatctcttccataagcttataaggtcacggataatacttctcattgtagtacgtaaatgacgtgggctagatatgagttgaataaacagttatacctgtaaattcttacagagtgaaaataaattgttatactttacaatttgtttctctctttagaccatttccaggacttgtgattaataaccgtgagtattttgtgaagtgttttgtttttgttttttcctggggtctgacgtgtgtgcgtgtgagtgtgtatacatgcttaacgtatatcacgttacttcacctatgtcagtaaccaggccaaatacttgttttagccctcagtaaaaacaccaggcacttcctagttgtaaaattattcaagcttcttaacttcctatcctcgatgcacttaatcataaaatggtaataatagcaccgattttgggggagtcgttccagtagatggaaagcatctggaacaggtgtcagcaagctcctgccgacgtgtatgcataaagttttattgaaaccaccatcgtgtccatttgtttatggcagaactgagagatggcagcagcaagtgtgtgcctgcaaaacctaaaatatttactaattggctctgcaagaaaagagtttgcatccccctaacctagaacagtgtctagcctctagtatgtgtttagcctacagtatgtgctcagcgaatacaatctatatttattactgcttttatgactgttataattactgtgcttggatttcgttacaaagtaagtcacaatgtgcctgcttctgttagtatttcagcacagtgcctggcacacatggggctctcaaatattgctgagcgagtgaacaaatgtcctttcaattccttaacgttgatgtcattttcaatagtattttgagccaaacttaattttgcgagtgtgttttgttttcttaactttattattaaaaatgtataaaagtgaggccaggcgtggtggctcacgcctgtaatcccagcagtttgggaggctgaggcaggcggatcagttgaggttgggagttggagaccagcccgtccaacatggtgaaagcctgtctctactaaaaatacaaaaatcagctgggtgtggtggcgcgtgcctgtaatcccagctactcaggaggctgaggcaggagagttgcttgaatcctagaggtggaggttgcagtgagctgagatcgtgccattgcactccagcctgggcaacaagagcaaaactctgtcccaataaataaataaataaaatgttctcttttgttcctgttcttgtgcggtagtgtggtatagagttttatggtaattactgtgaattagtgattctgagggacatatcagaactctgaggtttgtttccttctcatcttgagggaaacagcaaatgtatgttaaaatgcttttccaagggaacaacacatccttacattatttaaaccaatctgcttcattttcagagctggttgatcagagtgagtcagaaggccccgtgatacaagaatcagctgaaccaagccagttggaagttccagccacagaagaaataaaagagactgatggaagctctcagatcaagcaagaaccagaccccacgtggtagacctcttccctcctaggcttaaagtatcagtggttgagaagagcttttcggacctgttactaccccaagctgtgtaatatacttgtataacagaaataccttctatacaaacctttttttctacttttagatagaaatgtctactttttcagcagttctgtgaattaaagagcagagtgactgtgggtctggaatggctggtgtacttgggaatgtactatcaggattttacagcaatgctgggaaatgacagggaaaatgacaggaatgaatctcaccagattttttatgtactcagcagagccttgagttacggtgtttattttccaatcaagtgaagatatctcctacttctcctactggaacatctcagcttctgcagtgaagaaaaattcctgtgatagttcagttctttagtttttctatttgaaaaaaaaaaatcatttaaatgatcctttgttcacggctctccttaatgactgagtgaacagttcctatctgtatatttgactaaaccttttcctaagctatctctcatggttcctatgtttttttatcataattaaaagcaaaaccatctggatcacctaacagtcagaggtcagtatctcagcgtgtgaattatagaggaaatacagagagaacctcttccacttttacttttcgtccaaataaaatgcatggtgtaccagaagttgaagatcgggttgaggattggggctagctcgatgacactaaggccccaacatcgcgggacctgctgtggcgcggattcttaggaacgctgttctagccggccccctctccaggggtcgccgtggccggcattatttcctagttcttcttgtaaccctgaggtgccagcgcggggagtgaggaggggtcagggggctaaggatgcaacctctgacgttctgcgccttcctaggagagtcttacatgtgttgagatttcacaagcaatgcgagttgtaaaataccagctctacaagaagctaggctctgtgacggcatagttttcagtagctttatcacaatattcacaatggagaattatatgacatggtagcagaaataggcccttttatgtgttgcttctattttacctcaaattgtagatatagggtaatcaataaaatccatccatgcctttcacacactaagt

SEQ ID NO: 4049 - protein, 857 aa, Homo sapiens
MVVTFLMSALESMCKELAKSKAEVACIAVYETDVFVVGTERGRAFVNTRKDFQKDFVKYCVEEEEKAAEMHKMKSTTQANRMSVDAVEIETLRKTVEDYFCFCYGKALGKSTVVPVPYEKMLRDQSAVVVQGLPEGVAFKHPENYDLATLKWILENKAGISFIIKRPFLEPKKHVGGRVMVTDADRSILSPGGSCGPIKVKTEPTEDSGISLEMAAVTVKEESEDPDYYQYNIQGSHHSSEGNEGTEMEVPAEDDDYSPPSKRPKANELPQPPVPEPANAGKRKVREFNFEKWNARITDLRKQVEELFERKYAQAIKAKGPVTIPYPLFQSHVEDLYVEGLPEGIPFRRPSTYGIPRLERILLAKERIRFVIKKHELLNSTREDLQLDKPASGVKEEWYARITKLRKMVDQLFCKKFAEALGSTEAKAVPYQKFEAHPNDLYVEGLPENIPFRSPSWYGIPRLEKIIQVGNRIKFVIKRPELLTHSTTEVTQPRTNTPAQALGLTEAVKVPYPVFESNPEFLYVEGLPEGIPFRSPTWFGIPRLERIVRGSNKIKFVVKKPELVISYLPPGMASKINTKALQSPKRPRSPGSNSKVPEIEVTVEGPNNNNPQTSAVRTPTQTNGSNVPFKPRGREFSFEAWNAKITDLKQKVENLFNEKCGEALGLKQAVKVPFALFESFPEDFYVEGLPEGVPFRRPSTFGIPRLEKILRNKAKIKFIIKKPEMFETAIKESTSSKSPPRKINSSPNVNTTASGVEDLNIIQVTIPDDDNERLSKVEKARQLREQVNDLFSRKFGEAIGMGFPVKVPYRKITINPGCVVVDGMPPGVSFKAPSYLEISSMRRILDSAEFIKFTVIR

SEQ ID NO: 4050 - DNA, 4192 bp, Homo sapiens
aaaaaaaaaaaaaaaaaaaaaaaaaaaagaaaaaagaaaaaaaaaaggaggaggaggaggagggtgagagagaagctgggagagcagagaaaaggggccaccggtcgcccccccgcttccccgcacgcgctctccagccgcggccgcccgcctgccgcggtcaccccggcctctgcctctgtcccccagtgatcggatcaaggcgctgagcgaggccctgcctgcggggcggccatgcggcggtgacaggagcgcgaccgacacgcacgggcccctcgccccctctcgcctcccgtccgctcgccagctcccctcagccgaggctgctccgcggcggccgcagcccgcgcgcggcccacactcgcctccccgttgaagatgaggagtcctcggagagcaggatggtggtgacattcctcatgtcagctctcgagtccatgtgtaaagaactggccaagtccaaagccgaagtggcctgcattgcagtgtatgaaacagacgtgtttgtcgtcggaactgaaagaggacgtgcttttgtcaataccagaaaggattttcaaaaagattttgtaaaatattgtgttgaagaagaagaaaaagctgcagagatgcataaaatgaaatctacaacccaggcaaatcggatgagtgtagatgctgtagaaattgaaacactcagaaaaacagttgaggactatttctgcttttgctatgggaaagctttaggcaaatccacagtggtacctgtaccatatgagaagatgctgcgagaccagtcggctgtggtagtgcaggggcttccggaaggtgttgcctttaaacaccccgagaactatgatcttgcaaccctgaaatggattttggagaacaaagcagggatttcattcatcattaagagaccttttttagagccaaagaagcatgtaggtggtcgtgtgatggtaacagatgctgacaggtcaatactatctccaggtggaagttgtggccccatcaaagtgaaaactgaacccacagaagattctggaagccaccattcttcagagggcaatgaaggcacagaaatggaagtaccagcagaagattctactcaacatgtcccttcagaaacaagtgaggaccctgaagttgaggtgactattgaagatgatgattattctccaccgtctaagagaccaaaggccaatgagctaccgcagccaccagtcccggaacccgccaatgctgggaagcggaaagtgagggagttcaacttcgagaaatggaatgctcgcatcactgatctacgtaaacaagttgaagaattgtttgaaaggaaatatgctcaagccataaaagccaaaggtccggtgacgatcccgtaccctcttttccagtctcatgttgaagatctttatgtagaaggacttcctgaaggaattccttttagaaggccatctacttacggaattcctcgcctggagaggatattacttgcaaaggaaaggattcgttttgtgattaagaaacatgagcttctgaattcaacacgtgaagatttacagcttgataagccagcttcaggagtaaaggaagaatggtatgccagaatcactaaattaagaaagatggtggatcagcttttctgcaaaaaatttgcggaagccttggggagcactgaagccaaggctgtaccgtaccaaaaatttgaggcacacccgaatgatctgtacgtggaaggactgccagaaaacattcctttccgaagtccctcatggtatggaatcccaaggctggaaaaaatcattcaagtgggcaatcgaattaaatttgttattaaaagaccagaacttctgactcacagtaccactgaagttactcagccaagaacgaatacaccagtcaaagaagattggaatgtcagaattaccaagctacggaagcaagtggaagagatttttaatttgaaatttgcttagatttgttgacagcggtttcctggagtgctgtcttgagaacgattctgaggaggctcagcaagaaagagtgtttcagttgattgggtgtgtctgtcatggagaaggaactcaagctcttggactcaccgaggcagtaaaagtaccatatcctgtgtttgaatcaaacccggagttcttgtatgtggaaggcttgccagaggggattcccttccgaagccctacctggtttggaattccacgacttgaaaggatcgtccgcgggagtaataaaatcaagttcgttgttaaaaaacctgaactagttatttcctacttgcctcctgggatggctagtaaaataaacactaaagctttgcagtcccccaaaagaccacgaagtcctgggagtaattcaaaggttcctgaaattgaggtcaccgtggaaggccctaataacaacaatcctcaaacctcagctgttcgaaccccgacccagactaacggttctaacgttcccttcaagccacgagggagagagttttcctttgaggcctggaatgccaaaatcacggacctaaaacagaaagttgaaaatctcttcaatgagaaatgtggggaagctcttggccttaaacaagctgtgaaggtgccgttcgcgttatttgagtctttcccggaagacttttatgtggaaggcttacctgagggtgtgccattccgaagaccatcgacttttggcattccgaggctggagaagatactcagaaacaaagccaaaattaagttcatcattaaaaagcccgaaatgtttgagacggcgattaaggagagcacctcctctaagagccctcccagaaaaataaattcatcacccaatgttaatactactgcatcaggtgttgaagaccttaacatcattcaggtgacaattccagatgatgataatgaaagactctcgaaagttgaaaaagctagacagctaagagaacaagtgaatgacctctttagtcggaaatttggtgaagctattggtatgggttttcctgtgaaagttccctacaggaaaatcacaattaaccctggctgtgtggtggttgatggcatgcccccgggggtgtccttcaaagcccccagctacctggaaatcagctccatgagaaggatcttagactctgccgagtttatcaaattcacggtcattagaccatttccaggacttgtgattaataaccagctggttgatcagagtgagtcagaaggccccgtgatacaagaatcagctgaaccaagccagttggaagttccagccacagaagaaataaaagagactgatggaagctctcagatcaagcaagaaccagaccccacgtggtagacctcttccctcctaggagccttgagttacggtgtttattttccaatcaagtgaagatatctcctacttctcctactggaacatctcagcttctgcagtgaagaaaaattcctgtgatagttcagttctttagtttttctatttgaaaaaaaaaaatcatttaaatgatcctttgttcacggctctccttaatgactgagtgaacagttcctatctgtatatttgactaaaccttttcctaagctatctctcatggttcctatgtttttttatcataattaaaagcaaaaccatctggatcacctaacagtcagaggtcagtatctcagcgtgtgaattatagaggaaatacagagagaacctcttccacttttacttttcgtccaaataaaatgcatggtgtaccagaagttgaagatcgggttgaggattggggctagctcgatgacactaaggccccaacatcgcgggacctgctgtggcgcggattcttaggaacgctgttctagccggccccctctccaggggtcgccgtggccggcattatttcctagttcttcttgtaaccctgaggtgccagcgcggggagtgaggaggggtcagggggctaaggatgcaacctctgacgttctgcgccttcctaggagagtcttacatgtgttgagatttcacaagcaatgcgagttgtaaaataccagctctacaagaagctaggctctgtgacggcatagttttcagtagctttatcacaatattcacaatggagaattatatgacatggtagcagaaataggcccttttatgtgttgcttctattttacctcaaattgtagatatagggtaatcaataaaatccatccatgcctttcacacactaagt

SEQ ID NO: 4051 - protein, 518 aa, Homo sapiens
MVVTFLMSALESMCKELAKSKAEVACIAVYETDVFVVGTERGRAFVNTRKDFQKDFVKYCVEEEEKAAEMHKMKSTTQANRMSVDAVEIETLRKTVEDYFCFCYGKALGKSTVVPVPYEKMLRDQSAVVVQGLPEGVAFKHPENYDLATLKWILENKAGISFIIKRPFLEPKKHVGGRVMVTDADRSILSPGGSCGPIKVKTEPTEDSGSHHSSEGNEGTEMEVPAEDSTQHVPSETSEDPEVEVTIEDDDYSPPSKRPKANELPQPPVPEPANAGKRKVREFNFEKWNARITDLRKQVEELFERKYAQAIKAKGPVTIPYPLFQSHVEDLYVEGLPEGIPFRRPSTYGIPRLERILLAKERIRFVIKKHELLNSTREDLQLDKPASGVKEEWYARITKLRKMVDQLFCKKFAEALGSTEAKAVPYQKFEAHPNDLYVEGLPENIPFRSPSWYGIPRLEKIIQVGNRIKFVIKRPELLTHSTTEVTQPRTNTPVKEDWNVRITKLRKQVEEIFNLKFA

SEQ ID NO: 4052 - DNA, 5386 bp, Homo sapiens
aaaaaaaaaaaaaaaaaaaaaaaaaaaagaaaaaagaaaaaaaaaaggaggaggaggaggagggtgagagagaagctgggagagcagagaaaaggggccaccggtcgcccccccgcttccccgcacgcgctctccagccgcggccgcccgcctgccgcggtcaccccggcctctgcctctgtcccccagtgatcggatcaaggcgctgagcgaggccctgcctgcggggcggccatgcggcggtgacaggagcgcgaccgacacgcacgggcccctcgccccctctcgcctcccgtccgctcgccagctcccctcagccgaggctgctccgcggcggccgcagcccgcgcgcggcccacactcgcctcccctcggcacccccggccccggagctgcctggaggcggccgcactcggggatcatggcccaagttgcaatgtccaccctccccgttgaagatgaggagtcctcggagagcaggatggtggtgacattcctcatgtcagctctcgagtccatgtgtaaagaactggccaagtccaaagccgaagtggcctgcattgcagtgtatgaaacagacgtgtttgtcgtcggaactgaaagaggacgtgcttttgtcaataccagaaaggattttcaaaaagattttgtaaaatattgtgttgaagaagaagaaaaagctgcagagatgcataaaatgaaatctacaacccaggcaaatcggatgagtgtagatgctgtagaaattgaaacactcagaaaaacagttgaggactatttctgcttttgctatgggaaagctttaggcaaatccacagtggtacctgtaccatatgagaagatgctgcgagaccagtcggctgtggtagtgcaggggcttccggaaggtgttgcctttaaacaccccgagaactatgatcttgcaaccctgaaatggattttggagaacaaagcagggatttcattcatcattaagagaccttttttagagccaaagaagcatgtaggtggtcgtgtgatggtaacagatgctgacaggtcaatactatctccaggtggaagttgtggccccatcaaagtgaaaactgaacccacagaagattctggcatttccctggaaatggcagctgtgacagtaaaggaagaatcagaagatcctgattattatcaatataacattcaagcaggcccttctgaaactgatgatgttgatgaaaaacagcccctatcgaagcctttgcaaggaagccaccattcttcagagggcaatgaaggcacagaaatggaagtaccagcagaagattctactcaacatgtcccttcagaaacaagtgaggaccctgaagttgaggtgactattgaagatgatgattattctccaccgtctaagagaccaaaggccaatgagctaccgcagccaccagtcccggaacccgccaatgctgggaagcggaaagtgagggagttcaacttcgagaaatggaatgctcgcatcactgatctacgtaaacaagttgaagaattgtttgaaaggaaatatgctcaagccataaaagccaaaggtccggtgacgatcccgtaccctcttttccagtctcatgttgaagatctttatgtagaaggacttcctgaaggaattccttttagaaggccatctacttacggaattcctcgcctggagaggatattacttgcaaaggaaaggattcgttttgtgattaagaaacatgagcttctgaattcaacacgtgaagatttacagcttgataagccagcttcaggagtaaaggaagaatggtatgccagaatcactaaattaagaaagatggtggatcagcttttctgcaaaaaatttgcggaagccttggggagcactgaagccaaggctgtaccgtaccaaaaatttgaggcacacccgaatgatctgtacgtggaaggactgccagaaaacattcctttccgaagtccctcatggtatggaatcccaaggctggaaaaaatcattcaagtgggcaatcgaattaaatttgttattaaaagaccagaacttctgactcacagtaccactgaagttactcagccaagaacgaatacaccagtcaaagaagattggaatgtcagaattaccaagctacggaagcaagtggaagagatttttaatttgaaatttgcttagatttgttgacagcggtttcctggagtgctgtcttgagaacgattctgaggaggctcagcaagaaagagtgtttcagttgattgggtgtgtctgtcatggagaaggaactcaagctcttggactcaccgaggcagtaaaagtaccatatcctgtgtttgaatcaaacccggagttcttgtatgtggaaggcttgccagaggggattcccttccgaagccctacctggtttggaattccacgacttgaaaggatcgtccgcgggagtaataaaatcaagttcgttgttaaaaaacctgaactagttatttcctacttgcctcctgggatggctagtaaaataaacactaaagctttgcagtcccccaaaagaccacgaagtcctgggagtaattcaaaggttcctgaaattgaggtcaccgtggaaggccctaataacaacaatcctcaaacctcagctgttcgaaccccgacccagactaacggttctaacgttcccttcaagccacgagggagagagttttcctttgaggcctggaatgccaaaatcacggacctaaaacagaaagttgaaaatctcttcaatgagaaatgtggggaagctcttggccttaaacaagctgtgaaggtgccgttcgcgttatttgagtctttcccggaagacttttatgtggaaggcttacctgagggtgtgccattccgaagaccatcgacttttggcattccgaggctggagaagatactcagaaacaaagccaaaattaagttcatcattaaaaagcccgaaatgtttgagacggcgattaaggagagcacctcctctaagagccctcccagaaaaataaattcatcacccaatgttaatactactgcatcaggtgttgaagaccttaacatcattcaggtgacaattccagatgatgataatgaaagactctcgaaagttgaaaaagctagacagctaagagaacaagtgaatgacctctttagtcggaaatttggtgaagctattggtatgggttttcctgtgaaagttccctacaggaaaatcacaattaaccctggctgtgtggtggttgatggcatgcccccgggggtgtccttcaaagcccccagctacctggaaatcagctccatgagaaggatcttagactctgccgagtttatcaaattcacggtcattagaccatttccaggacttgtgattaataaccagctggttgatcagagtgagtcagaaggccccgtgatacaagaatcagctgaaccaagccagttggaagttccagccacagaagaaataaaagagactgatggaagctctcagatcaagcaagaaccagaccccacgtggtagacctcttccctcctagggtaaatcagcttctgtgtcagggatgctgtgtggtgtccatctgaaccccctgcatacgcgtagctaatgtgatctccccactttcacataagatggtggccctgccttcagggaatgtgggagccaggtgggagccttcccggatatttaagctagaagattctacagggagattctccttggatcaatatatgtctctcagtcaaagatgtaaaagcacttttgccttaaaaagaatgttctgtttctaaatagagtcaacgttgtcctcctcattggaattcactatgagtcagaatcattagactgacttttttttttccatagtaatagtattttgcagagtctcacagagctgcagatcttttgttcatcttgcagagttaacaagtctgatcctgttagtccagatttcttaaatttggccaagttataataggagcagtagcttgagacccgaagtcaggaaactttgacaatggatttttttttttaatccagagacttgtactggaatttgccttaccctgtcagctcatggacttaaggtttcatcccgctttatgagtgcttctgaatccaagtcattgttacctgaatttgcaaattaagttgtgatattcgtgactgttaaattcctgtaattagattaacctctttgcttgcttgtttgttttctctcctattttagcttaaagtatcagtggttgagaagagcttttcggacctgttactaccccaagctgtgtaatatacttgtataacagaaataccttctatacaaacctttttttctacttttagatagaaatgtctactttttcagcagttctgtgaattaaagagcagagtgactgtgggtctggaatggctggtgtacttgggaatgtactatcaggattttacagcaatgctgggaaatgacagggaaaatgacaggaatgaatctcaccagattttttatgtactcagcagagccttgagttacggtgtttattttccaatcaagtgaagatatctcctacttctcctactggaacatctcagcttctgcagtgaagaaaaattcctgtgatagttcagttctttagtttttctatttgaaaaaaaaaaatcatttaaatgatcctttgttcacggctctccttaatgactgagtgaacagttcctatctgtatatttgactaaaccttttcctaagctatctctcatggttcctatgtttttttatcataattaaaagcaaaaccatctggatcacctaacagtcagaggtcagtatctcagcgtgtgaattatagaggaaatacagagagaacctcttccacttttacttttcgtccaaataaaatgcatggtgtaccagaagttgaagatcgggttgaggattggggctagctcgatgacactaaggccccaacatcgcgggacctgctgtggcgcggattcttaggaacgctgttctagccggccccctctccaggggtcgccgtggccggcattatttcctagttcttcttgtaaccctgaggtgccagcgcggggagtgaggaggggtcagggggctaaggatgcaacctctgacgttctgcgccttcctaggagagtcttacatgtgttgagatttcacaagcaatgcgagttgtaaaataccagctctacaagaagctaggctctgtgacggcatagttttcagtagctttatcacaatattcacaatggagaattatatgacatggtagcagaaataggcccttttatgtgttgcttctattttacctcaaattgtagatatagggtaatcaataaaatccatccatgcctttcacacactaagt

SEQ ID NO: 4053 - protein, 584 aa, Homo sapiens
MAQVAMSTLPVEDEESSESRMVVTFLMSALESMCKELAKSKAEVACIAVYETDVFVVGTERGRAFVNTRKDFQKDFVKYCVEEEEKAAEMHKMKSTTQANRMSVDAVEIETLRKTVEDYFCFCYGKALGKSTVVPVPYEKMLRDQSAVVVQGLPEGVAFKHPENYDLATLKWILENKAGISFIIKRPFLEPKKHVGGRVMVTDADRSILSPGGSCGPIKVKTEPTEDSGISLEMAAVTVKEESEDPDYYQYNIQAGPSETDDVDEKQPLSKPLQGSHHSSEGNEGTEMEVPAEDSTQHVPSETSEDPEVEVTIEDDDYSPPSKRPKANELPQPPVPEPANAGKRKVREFNFEKWNARITDLRKQVEELFERKYAQAIKAKGPVTIPYPLFQSHVEDLYVEGLPEGIPFRRPSTYGIPRLERILLAKERIRFVIKKHELLNSTREDLQLDKPASGVKEEWYARITKLRKMVDQLFCKKFAEALGSTEAKAVPYQKFEAHPNDLYVEGLPENIPFRSPSWYGIPRLEKIIQVGNRIKFVIKRPELLTHSTTEVTQPRTNTPVKEDWNVRITKLRKQVEEIFNLKFA

SEQ ID NO: 4054 - DNA, 7237 bp, Homo sapiens
aaaaaaaaaaaaaaaaaaaaaaaaaaaagaaaaaagaaaaaaaaaaggaggaggaggaggagggtgagagagaagctgggagagcagagaaaaggggccaccggtcgcccccccgcttccccgcacgcgctctccagccgcggccgcccgcctgccgcggtcaccccggcctctgcctctgtcccccagtgatcggatcaaggcgctgagcgaggccctgcctgcggggcggccatgcggcggtgacaggagcgcgaccgacacgcacgggcccctcgccccctctcgcctcccgtccgctcgccagctcccctcagccgaggctgctccgcggcggccgcagcccgcgcgcggcccacactcgcctccccgttgaagatgaggagtcctcggagagcaggatggtggtgacattcctcatgtcagctctcgagtccatgtgtaaagaactggccaagtccaaagccgaagtggcctgcattgcagtgtatgaaacagacgtgtttgtcgtcggaactgaaagaggacgtgcttttgtcaataccagaaaggattttcaaaaagattttgtaaaatattgtgttgaagaagaagaaaaagctgcagagatgcataaaatgaaatctacaacccaggcaaatcggatgagtgtagatgctgtagaaattgaaacactcagaaaaacagttgaggactatttctgcttttgctatgggaaagctttaggcaaatccacagtggtacctgtaccatatgagaagatgctgcgagaccagtcggctgtggtagtgcaggggcttccggaaggtgttgcctttaaacaccccgagaactatgatcttgcaaccctgaaatggattttggagaacaaagcagggatttcattcatcattaagagaccttttttagagccaaagaagcatgtaggtggtcgtgtgatggtaacagatgctgacaggtcaatactatctccaggtggaagttgtggccccatcaaagtgaaaactgaacccacagaagattctggaagccaccattcttcagagggcaatgaaggcacagaaatggaagtaccagcagaagattctactcaacatgtcccttcagaaacaagtgaggaccctgaagttgaggtgactattgaagatgatgattattctccaccgtctaagagaccaaaggccaatgagctaccgcagccaccagtcccggaacccgccaatgctgggaagcggaaagtgagggagttcaacttcgagaaatggaatgctcgcatcactgatctacgtaaacaagttgaagaattgtttgaaaggaaatatgctcaagccataaaagccaaaggtccggtgacgatcccgtaccctcttttccagtctcatgttgaagatctttatgtagaaggacttcctgaaggaattccttttagaaggccatctacttacggaattcctcgcctggagaggatattacttgcaaaggaaaggattcgttttgtgattaagaaacatgagcttctgaattcaacacgtgaagatttacagcttgataagccagcttcaggagtaaaggaagaatggtatgccagaatcactaaattaagaaagatggtggatcagcttttctgcaaaaaatttgcggaagccttggggagcactgaagccaaggctgtaccgtaccaaaaatttgaggcacacccgaatgatctgtacgtggaaggactgccagaaaacattcctttccgaagtccctcatggtatggaatcccaaggctggaaaaaatcattcaagtgggcaatcgaattaaatttgttattaaaagaccagaacttctgactcacagtaccactgaagttactcagccaagaacgaatacaccagtcaaagaagattggaatgtcagaattaccaagctacggaagcaagtggaagagatttttaatttgaaatttgcttagatttgttgacagcggtttcctggagtgctgtcttgagaacgattctgaggaggctcagcaagaaagagtgtttcagttgattgggtgtgtctgtcatggagaaggaactcaagctcttggactcaccgaggcagtaaaagtaccatatcctgtgtttgaatcaaacccggagttcttgtatgtggaaggcttgccagaggggattcccttccgaagccctacctggtttggaattccacgacttgaaaggatcgtccgcgggagtaataaaatcaagttcgttgttaaaaaacctgaactagttatttcctacttgcctcctgggatggctagtaaaataaacactaaagctttgcagtcccccaaaagaccacgaagtcctgggagtaattcaaaggttcctgaaattgaggtcaccgtggaaggccctaataacaacaatcctcaaacctcagctgttcgaaccccgacccagactaacggttctaacgttcccttcaagccacgagggagagagttttcctttgaggcctggaatgccaaaatcacggacctaaaacagaaagttgaaaatctcttcaatgagaaatgtggggaagctcttggccttaaacaagctgtgaaggtgccgttcgcgttatttgagtctttcccggaagacttttatgtggaaggcttacctgagggtgtgccattccgaagaccatcgacttttggcattccgaggctggagaagatactcagaaacaaagccaaaattaagttcatcattaaaaagcccgaaatgtttgagacggcgattaaggagagcacctcctctaagagccctcccagaaaaataaattcatcacccaatgttaatactactgcatcaggtgttgaagaccttaacatcattcaggtgacaattccagatgatgataatgaaagactctcgaaagttgaaaaagctagacagctaagagaacaagtgaatgacctctttagtcggaaatttggtgaagctattggtatgggttttcctgtgaaagttccctacaggaaaatcacaattaaccctggctgtgtggtggttgatggcatgcccccgggggtgtccttcaaagcccccagctacctggaaatcagctccatgagaaggatcttagactctgccgagtttatcaaattcacggtcattaggtaagtgagagtttcctgcttagtcacaggagcgaatctggagctcatgaggctgactcttctaaaatgcagccacaggtagtcatcgaatccggcttcctatgctgtgcaatcaacaaatcaaaataacttgtgtcatcattagaatgtcagatgtgcttctacgaactaagctgactcttttaattctttggcaaagggttggcaaactaggactgtttgccaaattcaggctgcctcctatttttagagtcttcctgaaacacagctacacccgtattatccatggctgctttcctgtcacagtgagtaagtagctgggactgagaaggcatggcctccaaagtctaaaatatttactctctagcactttgtagaaaaaccttagctaggcacagtggctaacgcctgtaatcccagcattttgggaggccaaggcaggcagatcacctgaggtcaggagttccagaccagcctggccaacatggtgaaatcccatctctacaaaaataaaacagttagctgggcatgatggcgggtgcctgtaatcccagctactcgggaggctgaggcaggatagtcgcttgaacccaggaggtggaggttgcaatgagccaagatcatgccactgcactccagcctggacgacagagtgagactccatcacaagaaaaaaagaactttgtcaacctctgtcttagggcgccttgtcacaggcttcgggtcagacggattcaaccttgcatcagccatttgttagccaggtcactctgttctttgtctgtaaatgagattgatcgttgttcccactgagagtgtcagctccttcccgtagagcaggcatgatgattgtactcacctctgacaccattgtgagtgccacattccttcccacgtccttgtcactgtaagagatgcccacctgagcaccaaccccaggttatcttcccctttgtcttccagccccccagaaacagctacgactcaacctacccaatcatttcatcatcagattgccactgtctctagttcaggtctcttgggactggcactcagaaatctcataataaatcctcttgaggcttctcatacactcgtcttcttccaatcttctttccctcaaaatctcatattttggttccacttcacccaccgtcattctccatatcactcccaggagttaggcaaaaagccccttccgttcttccgtatgttaaacttagaatcactctgttccctgctctgcgtttctattttttgtttttcctccatttactagtagcttaacactttctaacagtgttcttattattgatacgtatctatctcttccataagcttataaggtcacggataatacttctcattgtagtacgtaaatgacgtgggctagatatgagttgaataaacagttatacctgtaaattcttacagagtgaaaataaattgttatactttacaatttgtttctctctttagaccatttccaggacttgtgattaataaccgtgagtattttgtgaagtgttttgtttttgttttttcctggggtctgacgtgtgtgcgtgtgagtgtgtatacatgcttaacgtatatcacgttacttcacctatgtcagtaaccaggccaaatacttgttttagccctcagtaaaaacaccaggcacttcctagttgtaaaattattcaagcttcttaacttcctatcctcgatgcacttaatcataaaatggtaataatagcaccgattttgggggagtcgttccagtagatggaaagcatctggaacaggtgtcagcaagctcctgccgacgtgtatgcataaagttttattgaaaccaccatcgtgtccatttgtttatggcagaactgagagatggcagcagcaagtgtgtgcctgcaaaacctaaaatatttactaattggctctgcaagaaaagagtttgcatccccctaacctagaacagtgtctagcctctagtatgtgtttagcctacagtatgtgctcagcgaatacaatctatatttattactgcttttatgactgttataattactgtgcttggatttcgttacaaagtaagtcacaatgtgcctgcttctgttagtatttcagcacagtgcctggcacacatggggctctcaaatattgctgagcgagtgaacaaatgtcctttcaattccttaacgttgatgtcattttcaatagtattttgagccaaacttaattttgcgagtgtgttttgttttcttaactttattattaaaaatgtataaaagtgaggccaggcgtggtggctcacgcctgtaatcccagcagtttgggaggctgaggcaggcggatcagttgaggttgggagttggagaccagcccgtccaacatggtgaaagcctgtctctactaaaaatacaaaaatcagctgggtgtggtggcgcgtgcctgtaatcccagctactcaggaggctgaggcaggagagttgcttgaatcctagaggtggaggttgcagtgagctgagatcgtgccattgcactccagcctgggcaacaagagcaaaactctgtcccaataaataaataaataaaatgttctcttttgttcctgttcttgtgcggtagtgtggtatagagttttatggtaattactgtgaattagtgattctgagggacatatcagaactctgaggtttgtttccttctcatcttgagggaaacagcaaatgtatgttaaaatgcttttccaagggaacaacacatccttacattatttaaaccaatctgcttcattttcagagctggttgatcagagtgagtcagaaggccccgtgatacaagaatcagctgaaccaagccagttggaagttccagccacagaagaaataaaagagactgatggaagctctcagatcaagcaagaaccagaccccacgtggtagacctcttccctcctaggcttaaagtatcagtggttgagaagagcttttcggacctgttactaccccaagctgtgtaatatacttgtataacagaaataccttctatacaaacctttttttctacttttagatagaaatgtctactttttcagcagttctgtgaattaaagagcagagtgactgtgggtctggaatggctggtgtacttgggaatgtactatcaggattttacagcaatgctgggaaatgacagggaaaatgacaggaatgaatctcaccagattttttatgtactcagcagagccttgagttacggtgtttattttccaatcaagtgaagatatctcctacttctcctactggaacatctcagcttctgcagtgaagaaaaattcctgtgatagttcagttctttagtttttctatttgaaaaaaaaaaatcatttaaatgatcctttgttcacggctctccttaatgactgagtgaacagttcctatctgtatatttgactaaaccttttcctaagctatctctcatggttcctatgtttttttatcataattaaaagcaaaaccatctggatcacctaacagtcagaggtcagtatctcagcgtgtgaattatagaggaaatacagagagaacctcttccacttttacttttcgtccaaataaaatgcatggtgtaccagaagttgaagatcgggttgaggattggggctagctcgatgacactaaggccccaacatcgcgggacctgctgtggcgcggattcttaggaacgctgttctagccggccccctctccaggggtcgccgtggccggcattatttcctagttcttcttgtaaccctgaggtgccagcgcggggagtgaggaggggtcagggggctaaggatgcaacctctgacgttctgcgccttcctaggagagtcttacatgtgttgagatttcacaagcaatgcgagttgtaaaataccagctctacaagaagctaggctctgtgacggcatagttttcagtagctttatcacaatattcacaatggagaattatatgacatggtagcagaaataggcccttttatgtgttgcttctattttacctcaaattgtagatatagggtaatcaataaaatccatccatgcctttcacacactaagt

SEQ ID NO: 4055 - protein, 518 aa, Homo sapiens; identical to SEQ ID NO: 4051

SEQ ID NO: 4056 - DNA, 4590 bp, Homo sapiens
aaaaaaaaaaaaaaaaaaaaaaaaaaaagaaaaaagaaaaaaaaaaggaggaggaggaggagggtgagagagaagctgggagagcagagaaaaggggccaccggtcgcccccccgcttccccgcacgcgctctccagccgcggccgcccgcctgccgcggtcaccccggcctctgcctctgtcccccagtgatcggatcaaggcgctgagcgaggccctgcctgcggggcggccatgcggcggtgacaggagcgcgaccgacacgcacgggcccctcgccccctctcgcctcccgtccgctcgccagctcccctcagccgaggctgctccgcggcggccgcagcccgcgcgcggcccacactcgcctcccctcggcacccccggccccggagctgcctggaggcggccgcactcggtgtaaagaactggccaagtccaaagccgaagtggcctgcattgcagtgtatgaaacagacgtgtttgtcgtcggaactgaaagaggacgtgcttttgtcaataccagaaaggattttcaaaaagattttgtaaaatattgtgttgaagaagaagaaaaagctgcagagatgcataaaatgaaatctacaacccaggcaaatcggatgagtgtagatgctgtagaaattgaaacactcagaaaaacagttgaggactatttctgcttttgctatgggaaagctttaggcaaatccacagtggtacctgtaccatatgagaagatgctgcgagaccagtcggctgtggtagtgcaggggcttccggaaggtgttgcctttaaacaccccgagaactatgatcttgcaaccctgaaatggattttggagaacaaagcagggatttcattcatcattaagagaccttttttagagccaaagaagcatgtaggtggtcgtgtgatggtaacagatgctgacaggtcaatactatctccaggtggaagttgtggccccatcaaagtgaaaactgaacccacagaagattctggcatttccctggaaatggcagctgtgacagtaaaggaagaatcagaagatcctgattattatcaatataacattcaagcaggcccttctgaaactgatgatgttgatgaaaaacagcccctatcgaagcctttgcaaggaagccaccattcttcagagggcaatgaaggcacagaaatggaagtaccagcagaagattctactcaacatgtcccttcagaaacaagtgaggaccctgaagttgaggtgactattgaagatgatgattattctccaccgtctaagagaccaaaggccaatgagctaccgcagccaccagtcccggaacccgccaatgctgggaagcggaaagtgagggagttcaacttcgagaaatggaatgctcgcatcactgatctacgtaaacaagttgaagaattgtttgaaaggaaatatgctcaagccataaaagccaaaggtccggtgacgatcccgtaccctcttttccagtctcatgttgaagatctttatgtagaaggacttcctgaaggaattccttttagaaggccatctacttacggaattcctcgcctggagaggatattacttgcaaaggaaaggattcgttttgtgattaagaaacatgagcttctgaattcaacacgtgaagatttacagcttgataagccagcttcaggagtaaaggaagaatggtatgccagaatcactaaattaagaaagatggtggatcagcttttctgcaaaaaatttgcggaagccttggggagcactgaagccaaggctgtaccgtaccaaaaatttgaggcacacccgaatgatctgtacgtggaaggactgccagaaaacattcctttccgaagtccctcatggtatggaatcccaaggctggaaaaaatcattcaagtgggcaatcgaattaaatttgttattaaaagaccagaacttctgactcacagtaccactgaagttactcagccaagaacgaatacaccagtcaaagaagattggaatgtcagaattaccaagctacggaagcaagtggaagagatttttaatttgaaatttgcttagatttgttgacagcggtttcctggagtgctgtcttgagaacgattctgaggaggctcagcaagaaagagtgtttcagttgattgggtgtgtctgtcatggagaaggaactcaagctcttggactcaccgaggcagtaaaagtaccatatcctgtgtttgaatcaaacccggagttcttgtatgtggaaggcttgccagaggggattcccttccgaagccctacctggtttggaattccacgacttgaaaggatcgtccgcgggagtaataaaatcaagttcgttgttaaaaaacctgaactagttatttcctacttgcctcctgggatggctagtaaaataaacactaaagctttgcagtcccccaaaagaccacgaagtcctgggagtaattcaaaggttcctgaaattgaggtcaccgtggaaggccctaataacaacaatcctcaaacctcagctgttcgaaccccgacccagactaacggttctaacgttcccttcaagccacgagggagagagttttcctttgaggcctggaatgccaaaatcacggacctaaaacagaaagttgaaaatctcttcaatgagaaatgtggggaagctcttggccttaaacaagctgtgaaggtgccgttcgcgttatttgagtctttcccggaagacttttatgtggaaggcttacctgagggtgtgccattccgaagaccatcgacttttggcattccgaggctggagaagatactcagaaacaaagccaaaattaagttcatcattaaaaagcccgaaatgtttgagacggcgattaaggagagcacctcctctaagagccctcccagaaaaataaattcatcacccaatgttaatactactgcatcaggtgttgaagaccttaacatcattcaggtgacaattccagatgatgataatgaaagactctcgaaagttgaaaaagctagacagctaagagaacaagtgaatgacctctttagtcggaaatttggtgaagctattggtatgggttttcctgtgaaagttccctacaggaaaatcacaattaaccctggctgtgtggtggttgatggcatgcccccgggggtgtccttcaaagcccccagctacctggaaatcagctccatgagaaggatcttagactctgccgagtttatcaaattcacggtcattagaccatttccaggacttgtgattaataaccagctggttgatcagagtgagtcagaaggccccgtgatacaagaatcagctgaaccaagccagttggaagttccagccacagaagaaataaaagagactgatggaagctctcagatcaagcaagaaccagaccccacgtggtagacctcttccctcctaggcttaaagtatcagtggttgagaagagcttttcggacctgttactaccccaagctgtgtaatatacttgtataacagaaataccttctatacaaacctttttttctacttttagatagaaatgtctactttttcagcagttctgtgaattaaagagcagagtgactgtgggtctggaatggctggtgtacttgggaatgtactatcaggattttacagcaatgctgggaaatgacagggaaaatgacaggaatgaatctcaccagattttttatgtactcagcagagccttgagttacggtgtttattttccaatcaagtgaagatatctcctacttctcctactggaacatctcagcttctgcagtgaagaaaaattcctgtgatagttcagttctttagtttttctatttgaaaaaaaaaaatcatttaaatgatcctttgttcacggctctccttaatgactgagtgaacagttcctatctgtatatttgactaaaccttttcctaagctatctctcatggttcctatgtttttttatcataattaaaagcaaaaccatctggatcacctaacagtcagaggtcagtatctcagcgtgtgaattatagaggaaatacagagagaacctcttccacttttacttttcgtccaaataaaatgcatggtgtaccagaagttgaagatcgggttgaggattggggctagctcgatgacactaaggccccaacatcgcgggacctgctgtggcgcggattcttaggaacgctgttctagccggccccctctccaggggtcgccgtggccggcattatttcctagttcttcttgtaaccctgaggtgccagcgcggggagtgaggaggggtcagggggctaaggatgcaacctctgacgttctgcgccttcctaggagagtcttacatgtgttgagatttcacaagcaatgcgagttgtaaaataccagctctacaagaagctaggctctgtgacggcatagttttcagtagctttatcacaatattcacaatggagaattatatgacatggtagcagaaataggcccttttatgtgttgcttctattttacctcaaattgtagatatagggtaatcaataaaatccatccatgcctttcacacactaagt

SEQ ID NO: 4057 - protein, 495 aa, Homo sapiens
MHKMKSTTQANRMSVDAVEIETLRKTVEDYFCFCYGKALGKSTVVPVPYEKMLRDQSAVVVQGLPEGVAFKHPENYDLATLKWILENKAGISFIIKRPFLEPKKHVGGRVMVTDADRSILSPGGSCGPIKVKTEPTEDSGISLEMAAVTVKEESEDPDYYQYNIQAGPSETDDVDEKQPLSKPLQGSHHSSEGNEGTEMEVPAEDSTQHVPSETSEDPEVEVTIEDDDYSPPSKRPKANELPQPPVPEPANAGKRKVREFNFEKWNARITDLRKQVEELFERKYAQAIKAKGPVTIPYPLFQSHVEDLYVEGLPEGIPFRRPSTYGIPRLERILLAKERIRFVIKKHELLNSTREDLQLDKPASGVKEEWYARITKLRKMVDQLFCKKFAEALGSTEAKAVPYQKFEAHPNDLYVEGLPENIPFRSPSWYGIPRLEKIIQVGNRIKFVIKRPELLTHSTTEVTQPRTNTPVKEDWNVRITKLRKQVEEIFNLKFA

SEQ ID NO: 4058 - DNA, 7975 bp, Homo sapiens
aaaaaaaaaaaaaaaaaaaaaaaaaaaagaaaaaagaaaaaaaaaaggaggaggaggaggagggtgagagagaagctgggagagcagagaaaaggggccaccggtcgcccccccgcttccccgcacgcgctctccagccgcggccgcccgcctgccgcggtcaccccggcctctgcctctgtcccccagtgatcggatcaaggcgctgagcgaggccctgcctgcggggcggccatgcggcggtgacaggagcgcgaccgacacgcacgggcccctcgccccctctcgcctcccgtccgctcgccagctcccctcagccgaggctgctccgcggcggccgcagcccgcgcgcggcccacactcgcctcccctcggcacccccggccccggagctgcctggaggcggccgcactcggggatcatggcccaagttgcaatgtccaccctccccgttgaagatgaggagtcctcggagagcaggatggtggtgacattcctcatgtcagctctcgagtccatgtgtaaagaactggccaagtccaaagccgaagtggcctgcattgcagtgtatgaaacagacgtgtttgtcgtcggaactgaaagaggacgtgcttttgtcaataccagaaaggattttcaaaaagattttgtaaaatattgtgttgaagaagaagaaaaagctgcagagatgcataaaatgaaatctacaacccaggcaaatcggatgagtgtagatgctgtagaaattgaaacactcagaaaaacagttgaggactatttctgcttttgctatgggaaagctttaggcaaatccacagtggtacctgtaccatatgagaagatgctgcgagaccagtcggctgtggtagtgcaggggcttccggaaggtgttgcctttaaacaccccgagaactatgatcttgcaaccctgaaatggattttggagaacaaagcagggatttcattcatcattaagagaccttttttagagccaaagaagcatgtaggtggtcgtgtgatggtaacagatgctgacaggtcaatactatctccaggtggaagttgtggccccatcaaagtgaaaactgaacccacagaagattctggcatttccctggaaatggcagctgtgacagtaaaggaagaatcagaagatcctgattattatcaatataacattcaaggaagccaccattcttcagagggcaatgaaggcacagaaatggaagtaccagcagaagattctactcaacatgtcccttcagaaacaagtgaggaccctgaagttgaggtgactattgaagatgatgattattctccaccgtctaagagaccaaaggccaatgagctaccgcagccaccagtcccggaacccgccaatgctgggaagcggaaagtgagggagttcaacttcgagaaatggaatgctcgcatcactgatctacgtaaacaagttgaagaattgtttgaaaggaaatatgctcaagccataaaagccaaaggtccggtgacgatcccgtaccctcttttccagtctcatgttgaagatctttatgtagaaggacttcctgaaggaattccttttagaaggccatctacttacggaattcctcgcctggagaggatattacttgcaaaggaaaggattcgttttgtgattaagaaacatgagcttctgaattcaacacgtgaagatttacagcttgataagccagcttcaggagtaaaggaagaatggtatgccagaatcactaaattaagaaagatggtggatcagcttttctgcaaaaaatttgcggaagccttggggagcactgaagccaaggctgtaccgtaccaaaaatttgaggcacacccgaatgatctgtacgtggaaggactgccagaaaacattcctttccgaagtccctcatggtatggaatcccaaggctggaaaaaatcattcaagtgggcaatcgaattaaatttgttattaaaagaccagaacttctgactcacagtaccactgaagttactcagccaagaacgaatacaccagtcaaagaagattggaatgtcagaattaccaagctacggaagcaagtggaagagatttttaatttgaaatttgctcaagctcttggactcaccgaggcagtaaaagtaccatatcctgtgtttgaatcaaacccggagttcttgtatgtggaaggcttgccagaggggattcccttccgaagccctacctggtttggaattccacgacttgaaaggatcgtccgcgggagtaataaaatcaagttcgttgttaaaaaacctgaactagttatttcctacttgcctcctgggatggctagtaaaataaacactaaagctttgcagtcccccaaaagaccacgaagtcctgggagtaattcaaaggttcctgaaattgaggtcaccgtggaaggccctaataacaacaatcctcaaacctcagctgttcgaaccccgacccagactaacggttctaacgttcccttcaagccacgagggagagagttttcctttgaggcctggaatgccaaaatcacggacctaaaacagaaagttgaaaatctcttcaatgagaaatgtggggaagctcttggccttaaacaagctgtgaaggtgccgttcgcgttatttgagtctttcccggaagacttttatgtggaaggcttacctgagggtgtgccattccgaagaccatcgacttttggcattccgaggctggagaagatactcagaaacaaagccaaaattaagttcatcattaaaaagcccgaaatgtttgagacggcgattaaggagagcacctcctctaagagccctcccagaaaaataaattcatcacccaatgttaatactactgcatcaggtgttgaagaccttaacatcattcaggtgacaattccagatgatgataatgaaagactctcgaaagttgaaaaagctagacagctaagagaacaagtgaatgacctctttagtcggaaatttggtgaagctattggtatgggttttcctgtgaaagttccctacaggaaaatcacaattaaccctggctgtgtggtggttgatggcatgcccccgggggtgtccttcaaagcccccagctacctggaaatcagctccatgagaaggatcttagactctgccgagtttatcaaattcacggtcattaggtaagtgagagtttcctgcttagtcacaggagcgaatctggagctcatgaggctgactcttctaaaatgcagccacaggtagtcatcgaatccggcttcctatgctgtgcaatcaacaaatcaaaataacttgtgtcatcattagaatgtcagatgtgcttctacgaactaagctgactcttttaattctttggcaaagggttggcaaactaggactgtttgccaaattcaggctgcctcctatttttagagtcttcctgaaacacagctacacccgtattatccatggctgctttcctgtcacagtgagtaagtagctgggactgagaaggcatggcctccaaagtctaaaatatttactctctagcactttgtagaaaaaccttagctaggcacagtggctaacgcctgtaatcccagcattttgggaggccaaggcaggcagatcacctgaggtcaggagttccagaccagcctggccaacatggtgaaatcccatctctacaaaaataaaacagttagctgggcatgatggcgggtgcctgtaatcccagctactcgggaggctgaggcaggatagtcgcttgaacccaggaggtggaggttgcaatgagccaagatcatgccactgcactccagcctggacgacagagtgagactccatcacaagaaaaaaagaactttgtcaacctctgtcttagggcgccttgtcacaggcttcgggtcagacggattcaaccttgcatcagccatttgttagccaggtcactctgttctttgtctgtaaatgagattgatcgttgttcccactgagagtgtcagctccttcccgtagagcaggcatgatgattgtactcacctctgacaccattgtgagtgccacattccttcccacgtccttgtcactgtaagagatgcccacctgagcaccaaccccaggttatcttcccctttgtcttccagccccccagaaacagctacgactcaacctacccaatcatttcatcatcagattgccactgtctctagttcaggtctcttgggactggcactcagaaatctcataataaatcctcttgaggcttctcatacactcgtcttcttccaatcttctttccctcaaaatctcatattttggttccacttcacccaccgtcattctccatatcactcccaggagttaggcaaaaagccccttccgttcttccgtatgttaaacttagaatcactctgttccctgctctgcgtttctattttttgtttttcctccatttactagtagcttaacactttctaacagtgttcttattattgatacgtatctatctcttccataagcttataaggtcacggataatacttctcattgtagtacgtaaatgacgtgggctagatatgagttgaataaacagttatacctgtaaattcttacagagtgaaaataaattgttatactttacaatttgtttctctctttagaccatttccaggacttgtgattaataaccgtgagtattttgtgaagtgttttgtttttgttttttcctggggtctgacgtgtgtgcgtgtgagtgtgtatacatgcttaacgtatatcacgttacttcacctatgtcagtaaccaggccaaatacttgttttagccctcagtaaaaacaccaggcacttcctagttgtaaaattattcaagcttcttaacttcctatcctcgatgcacttaatcataaaatggtaataatagcaccgattttgggggagtcgttccagtagatggaaagcatctggaacaggtgtcagcaagctcctgccgacgtgtatgcataaagttttattgaaaccaccatcgtgtccatttgtttatggcagaactgagagatggcagcagcaagtgtgtgcctgcaaaacctaaaatatttactaattggctctgcaagaaaagagtttgcatccccctaacctagaacagtgtctagcctctagtatgtgtttagcctacagtatgtgctcagcgaatacaatctatatttattactgcttttatgactgttataattactgtgcttggatttcgttacaaagtaagtcacaatgtgcctgcttctgttagtatttcagcacagtgcctggcacacatggggctctcaaatattgctgagcgagtgaacaaatgtcctttcaattccttaacgttgatgtcattttcaatagtattttgagccaaacttaattttgcgagtgtgttttgttttcttaactttattattaaaaatgtataaaagtgaggccaggcgtggtggctcacgcctgtaatcccagcagtttgggaggctgaggcaggcggatcagttgaggttgggagttggagaccagcccgtccaacatggtgaaagcctgtctctactaaaaatacaaaaatcagctgggtgtggtggcgcgtgcctgtaatcccagctactcaggaggctgaggcaggagagttgcttgaatcctagaggtggaggttgcagtgagctgagatcgtgccattgcactccagcctgggcaacaagagcaaaactctgtcccaataaataaataaataaaatgttctcttttgttcctgttcttgtgcggtagtgtggtatagagttttatggtaattactgtgaattagtgattctgagggacatatcagaactctgaggtttgtttccttctcatcttgagggaaacagcaaatgtatgttaaaatgcttttccaagggaacaacacatccttacattatttaaaccaatctgcttcattttcagagctggttgatcagagtgagtcagaaggccccgtgatacaagaatcagctgaaccaagccagttggaagttccagccacagaagaaataaaagagactgatggaagctctcagatcaagcaagaaccagaccccacgtggtagacctcttccctcctagggtaaatcagcttctgtgtcagggatgctgtgtggtgtccatctgaaccccctgcatacgcgtagctaatgtgatctccccactttcacataagatggtggccctgccttcagggaatgtgggagccaggtgggagccttcccggatatttaagctagaagattctacagggagattctccttggatcaatatatgtctctcagtcaaagatgtaaaagcacttttgccttaaaaagaatgttctgtttctaaatagagtcaacgttgtcctcctcattggaattcactatgagtcagaatcattagactgacttttttttttccatagtaatagtattttgcagagtctcacagagctgcagatcttttgttcatcttgcagagttaacaagtctgatcctgttagtccagatttcttaaatttggccaagttataataggagcagtagcttgagacccgaagtcaggaaactttgacaatggatttttttttttaatccagagacttgtactggaatttgccttaccctgtcagctcatggacttaaggtttcatcccgctttatgagtgcttctgaatccaagtcattgttacctgaatttgcaaattaagttgtgatattcgtgactgttaaattcctgtaattagattaacctctttgcttgcttgtttgttttctctcctattttagcttaaagtatcagtggttgagaagagcttttcggacctgttactaccccaagctgtgtaatatacttgtataacagaaataccttctatacaaacctttttttctacttttagatagaaatgtctactttttcagcagttctgtgaattaaagagcagagtgactgtgggtctggaatggctggtgtacttgggaatgtactatcaggattttacagcaatgctgggaaatgacagggaaaatgacaggaatgaatctcaccagattttttatgtactcagcagagccttgagttacggtgtttattttccaatcaagtgaagatatctcctacttctcctactggaacatctcagcttctgcagtgaagaaaaattcctgtgatagttcagttctttagtttttctatttgaaaaaaaaaaatcatttaaatgatcctttgttcacggctctccttaatgactgagtgaacagttcctatctgtatatttgactaaaccttttcctaagctatctctcatggttcctatgtttttttatcataattaaaagcaaaaccatctggatcacctaacagtcagaggtcagtatctcagcgtgtgaattatagaggaaatacagagagaacctcttccacttttacttttcgtccaaataaaatgcatggtgtaccagaagttgaagatcgggttgaggattggggctagctcgatgacactaaggccccaacatcgcgggacctgctgtggcgcggattcttaggaacgctgttctagccggccccctctccaggggtcgccgtggccggcattatttcctagttcttcttgtaaccctgaggtgccagcgcggggagtgaggaggggtcagggggctaaggatgcaacctctgacgttctgcgccttcctaggagagtcttacatgtgttgagatttcacaagcaatgcgagttgtaaaataccagctctacaagaagctaggctctgtgacggcatagttttcagtagctttatcacaatattcacaatggagaattatatgacatggtagcagaaataggcccttttatgtgttgcttctattttacctcaaattgtagatatagggtaatcaataaaatccatccatgcctttcacacactaagt

SEQ ID NO: 4059 - protein, 922 aa, Homo sapiens
MAQVAMSTLPVEDEESSESRMVVTFLMSALESMCKELAKSKAEVACIAVYETDVFVVGTERGRAFVNTRKDFQKDFVKYCVEEEEKAAEMHKMKSTTQANRMSVDAVEIETLRKTVEDYFCFCYGKALGKSTVVPVPYEKMLRDQSAVVVQGLPEGVAFKHPENYDLATLKWILENKAGISFIIKRPFLEPKKHVGGRVMVTDADRSILSPGGSCGPIKVKTEPTEDSGISLEMAAVTVKEESEDPDYYQYNIQGSHHSSEGNEGTEMEVPAEDSTQHVPSETSEDPEVEVTIEDDDYSPPSKRPKANELPQPPVPEPANAGKRKVREFNFEKWNARITDLRKQVEELFERKYAQAIKAKGPVTIPYPLFQSHVEDLYVEGLPEGIPFRRPSTYGIPRLERILLAKERIRFVIKKHELLNSTREDLQLDKPASGVKEEWYARITKLRKMVDQLFCKKFAEALGSTEAKAVPYQKFEAHPNDLYVEGLPENIPFRSPSWYGIPRLEKIIQVGNRIKFVIKRPELLTHSTTEVTQPRTNTPVKEDWNVRITKLRKQVEEIFNLKFAQALGLTEAVKVPYPVFESNPEFLYVEGLPEGIPFRSPTWFGIPRLERIVRGSNKIKFVVKKPELVISYLPPGMASKINTKALQSPKRPRSPGSNSKVPEIEVTVEGPNNNNPQTSAVRTPTQTNGSNVPFKPRGREFSFEAWNAKITDLKQKVENLFNEKCGEALGLKQAVKVPFALFESFPEDFYVEGLPEGVPFRRPSTFGIPRLEKILRNKAKIKFIIKKPEMFETAIKESTSSKSPPRKINSSPNVNTTASGVEDLNIIQVTIPDDDNERLSKVEKARQLREQVNDLFSRKFGEAIGMGFPVKVPYRKITINPGCVVVDGMPPGVSFKAPSYLEISSMRRILDSAEFIKFTVIR

SEQ ID NO: 4060 - DNA, 5275 bp, Homo sapiens
aaaaaaaaaaaaaaaaaaaaaaaaaaaagaaaaaagaaaaaaaaaaggaggaggaggaggagggtgagagagaagctgggagagcagagaaaaggggccaccggtcgcccccccgcttccccgcacgcgctctccagccgcggccgcccgcctgccgcggtcaccccggcctctgcctctgtcccccagtgatcggatcaaggcgctgagcgaggccctgcctgcggggcggccatgcggcggtgacaggagcgcgaccgacacgcacgggcccctcgccccctctcgcctcccgtccgctcgccagctcccctcagccgaggctgctccgcggcggccgcagcccgcgcgcggcccacactcgcctcccctcggcacccccggccccggagctgcctggaggcggccgcactcggggatcatggcccaagttgcaatgtccaccctccccgttgaagatgaggagtcctcggagagcaggatggtggtgacattcctcatgtcagctctcgagtccatgtgtaaagaactggccaagtccaaagccgaagtggcctgcattgcagtgtatgaaacagacgtgtttgtcgtcggaactgaaagaggacgtgcttttgtcaataccagaaaggattttcaaaaagattttgtaaaatattgtgttgaagaagaagaaaaagctgcagagatgcataaaatgaaatctacaacccaggcaaatcggatgagtgtagatgctgtagaaattgaaacactcagaaaaacagttgaggactatttctgcttttgctatgggaaagctttaggcaaatccacagtggtacctgtaccatatgagaagatgctgcgagaccagtcggctgtggtagtgcaggggcttccggaaggtgttgcctttaaacaccccgagaactatgatcttgcaaccctgaaatggattttggagaacaaagcagggatttcattcatcattaagagaccttttttagagccaaagaagcatgtaggtggtcgtgtgatggtaacagatgctgacaggtcaatactatctccaggtggaagttgtggccccatcaaagtgaaaactgaacccacagaagattctggcatttccctggaaatggcagctgtgacagtaaaggaagaatcagaagatcctgattattatcaatataacattcaaggaagccaccattcttcagagggcaatgaaggcacagaaatggaagtaccagcagaagattctactcaacatgtcccttcagaaacaagtgaggaccctgaagttgaggtgactattgaagatgatgattattctccaccgtctaagagaccaaaggccaatgagctaccgcagccaccagtcccggaacccgccaatgctgggaagcggaaagtgagggagttcaacttcgagaaatggaatgctcgcatcactgatctacgtaaacaagttgaagaattgtttgaaaggaaatatgctcaagccataaaagccaaaggtccggtgacgatcccgtaccctcttttccagtctcatgttgaagatctttatgtagaaggacttcctgaaggaattccttttagaaggccatctacttacggaattcctcgcctggagaggatattacttgcaaaggaaaggattcgttttgtgattaagaaacatgagcttctgaattcaacacgtgaagatttacagcttgataagccagcttcaggagtaaaggaagaatggtatgccagaatcactaaattaagaaagatggtggatcagcttttctgcaaaaaatttgcggaagccttggggagcactgaagccaaggctgtaccgtaccaaaaatttgaggcacacccgaatgatctgtacgtggaaggactgccagaaaacattcctttccgaagtccctcatggtatggaatcccaaggctggaaaaaatcattcaagtgggcaatcgaattaaatttgttattaaaagaccagaacttctgactcacagtaccactgaagttactcagccaagaacgaatacaccagtcaaagaagattggaatgtcagaattaccaagctacggaagcaagtggaagagatttttaatttgaaatttgcttagatttgttgacagcggtttcctggagtgctgtcttgagaacgattctgaggaggctcagcaagaaagagtgtttcagttgattgggtgtgtctgtcatggagaaggaactcaagctcttggactcaccgaggcagtaaaagtaccatatcctgtgtttgaatcaaacccggagttcttgtatgtggaaggcttgccagaggggattcccttccgaagccctacctggtttggaattccacgacttgaaaggatcgtccgcgggagtaataaaatcaagttcgttgttaaaaaacctgaactagttatttcctacttgcctcctgggatggctagtaaaataaacactaaagctttgcagtcccccaaaagaccacgaagtcctgggagtaattcaaaggttcctgaaattgaggtcaccgtggaaggccctaataacaacaatcctcaaacctcagctgttcgaaccccgacccagactaacggttctaacgttcccttcaagccacgagggagagagttttcctttgaggcctggaatgccaaaatcacggacctaaaacagaaagttgaaaatctcttcaatgagaaatgtggggaagctcttggccttaaacaagctgtgaaggtgccgttcgcgttatttgagtctttcccggaagacttttatgtggaaggcttacctgagggtgtgccattccgaagaccatcgacttttggcattccgaggctggagaagatactcagaaacaaagccaaaattaagttcatcattaaaaagcccgaaatgtttgagacggcgattaaggagagcacctcctctaagagccctcccagaaaaataaattcatcacccaatgttaatactactgcatcaggtgttgaagaccttaacatcattcaggtgacaattccagatgatgataatgaaagactctcgaaagttgaaaaagctagacagctaagagaacaagtgaatgacctctttagtcggaaatttggtgaagctattggtatgggttttcctgtgaaagttccctacaggaaaatcacaattaaccctggctgtgtggtggttgatggcatgcccccgggggtgtccttcaaagcccccagctacctggaaatcagctccatgagaaggatcttagactctgccgagtttatcaaattcacggtcattagaccatttccaggacttgtgattaataaccagctggttgatcagagtgagtcagaaggccccgtgatacaagaatcagctgaaccaagccagttggaagttccagccacagaaggtaaaaggacctcttccctcctagggtaaatcagcttctgtgtcagggatgctgtgtggtgtccatctgaaccccctgcatacgcgtagctaatgtgatctccccactttcacataagatggtggccctgccttcagggaatgtgggagccaggtgggagccttcccggatatttaagctagaagattctacagggagattctccttggatcaatatatgtctctcagtcaaagatgtaaaagcacttttgccttaaaaagaatgttctgtttctaaatagagtcaacgttgtcctcctcattggaattcactatgagtcagaatcattagactgacttttttttttccatagtaatagtattttgcagagtctcacagagctgcagatcttttgttcatcttgcagagttaacaagtctgatcctgttagtccagatttcttaaatttggccaagttataataggagcagtagcttgagacccgaagtcaggaaactttgacaatggatttttttttttaatccagagacttgtactggaatttgccttaccctgtcagctcatggacttaaggtttcatcccgctttatgagtgcttctgaatccaagtcattgttacctgaatttgcaaattaagttgtgatattcgtgactgttaaattcctgtaattagattaacctctttgcttgcttgtttgttttctctcctattttagcttaaagtatcagtggttgagaagagcttttcggacctgttactaccccaagctgtgtaatatacttgtataacagaaataccttctatacaaacctttttttctacttttagatagaaatgtctactttttcagcagttctgtgaattaaagagcagagtgactgtgggtctggaatggctggtgtacttgggaatgtactatcaggattttacagcaatgctgggaaatgacagggaaaatgacaggaatgaatctcaccagattttttatgtactcagcagagccttgagttacggtgtttattttccaatcaagtgaagatatctcctacttctcctactggaacatctcagcttctgcagtgaagaaaaattcctgtgatagttcagttctttagtttttctatttgaaaaaaaaaaatcatttaaatgatcctttgttcacggctctccttaatgactgagtgaacagttcctatctgtatatttgactaaaccttttcctaagctatctctcatggttcctatgtttttttatcataattaaaagcaaaaccatctggatcacctaacagtcagaggtcagtatctcagcgtgtgaattatagaggaaatacagagagaacctcttccacttttacttttcgtccaaataaaatgcatggtgtaccagaagttgaagatcgggttgaggattggggctagctcgatgacactaaggccccaacatcgcgggacctgctgtggcgcggattcttaggaacgctgttctagccggccccctctccaggggtcgccgtggccggcattatttcctagttcttcttgtaaccctgaggtgccagcgcggggagtgaggaggggtcagggggctaaggatgcaacctctgacgttctgcgccttcctaggagagtcttacatgtgttgagatttcacaagcaatgcgagttgtaaaataccagctctacaagaagctaggctctgtgacggcatagttttcagtagctttatcacaatattcacaatggagaattatatgacatggtagcagaaataggcccttttatgtgttgcttctattttacctcaaattgtagatatagggtaatcaataaaatccatccatgcctttcacacactaagt

SEQ ID NO: 4061 - protein, 564 aa, Homo sapiens
MAQVAMSTLPVEDEESSESRMVVTFLMSALESMCKELAKSKAEVACIAVYETDVFVVGTERGRAFVNTRKDFQKDFVKYCVEEEEKAAEMHKMKSTTQANRMSVDAVEIETLRKTVEDYFCFCYGKALGKSTVVPVPYEKMLRDQSAVVVQGLPEGVAFKHPENYDLATLKWILENKAGISFIIKRPFLEPKKHVGGRVMVTDADRSILSPGGSCGPIKVKTEPTEDSGISLEMAAVTVKEESEDPDYYQYNIQGSHHSSEGNEGTEMEVPAEDSTQHVPSETSEDPEVEVTIEDDDYSPPSKRPKANELPQPPVPEPANAGKRKVREFNFEKWNARITDLRKQVEELFERKYAQAIKAKGPVTIPYPLFQSHVEDLYVEGLPEGIPFRRPSTYGIPRLERILLAKERIRFVIKKHELLNSTREDLQLDKPASGVKEEWYARITKLRKMVDQLFCKKFAEALGSTEAKAVPYQKFEAHPNDLYVEGLPENIPFRSPSWYGIPRLEKIIQVGNRIKFVIKRPELLTHSTTEVTQPRTNTPVKEDWNVRITKLRKQVEEIFNLKFA

SEQ ID NO: 4062 - DNA, 4038 bp, Homo sapiens
aaaaaaaaaaaaaaaaaaaaaaaaaaaagaaaaaagaaaaaaaaaaggaggaggaggaggagggtgagagagaagctgggagagcagagaaaaggggccaccggtcgcccccccgcttccccgcacgcgctctccagccgcggccgcccgcctgccgcggtcaccccggcctctgcctctgtcccccagtgatcggatcaaggcgctgagcgaggccctgcctgcggggcggccatgcggcggtgacaggagcgcgaccgacacgcacgggcccctcgccccctctcgcctcccgtccgctcgccagctcccctcagccgaggctgctccgcggcggccgcagcccgcgcgcggcccacactcgcctcccctcggcacccccggccccggagctgcctggaggcggccgcactcggtgtaaagaactggccaagtccaaagccgaagtggcctgcattgcagtgtatgaaacagacgtgtttgtcgtcggaactgaaagaggacgtgcttttgtcaataccagaaaggattttcaaaaagattttgtaaaatattgtgttgaagaagaagaaaaagctgcagagatgcataaaatgaaatctacaacccaggcaaatcggatgagtgtagatgctgtagaaattgaaacactcagaaaaacagttgaggactatttctgcttttgctatgggaaagctttaggcaaatccacagtggtacctgtaccatatgagaagatgctgcgagaccagtcggctgtggtagtgcaggggcttccggaaggtgttgcctttaaacaccccgagaactatgatcttgcaaccctgaaatggattttggagaacaaagcagggatttcattcatcattaagagaccttttttagagccaaagaagcatgtaggtggtcgtgtgatggtaacagatgctgacaggtcaatactatctccaggtggaagttgtggccccatcaaagtgaaaactgaacccacagaagattctggcatttccctggaaatggcagctgtgacagtaaaggaagaatcagaagatcctgattattatcaatataacattcaagcaggcccttctgaaactgatgatgttgatgaaaaacagcccctatcgaagcctttgcaaggaagccaccattcttcagagggcaatgaaggcacagaaatggaagtaccagcagaagattctactcaacatgtcccttcagaaacaagtgaggaccctgaagttgaggtgactattgaagatgatgattattctccaccgtctaagagaccaaaggccaatgagctaccgcagccaccagtcccggaacccgccaatgctgggaagcggaaagtgagggagttcaacttcgagaaatggaatgctcgcatcactgatctacgtaaacaagttgaagaattgtttgaaaggaaatatgctcaagccataaaagccaaaggtccggtgacgatcccgtaccctcttttccagtctcatgttgaagatctttatgtagaaggacttcctgaaggaattccttttagaaggccatctacttacggaattcctcgcctggagaggatattacttgcaaaggaaaggattcgttttgtgattaagaaacatgagcttctgaattcaacacgtgaagatttacagcttgataagccagcttcaggagtaaaggaagaatggtatgccagaatcactaaattaagaaagatggtggatcagcttttctgcaaaaaatttgcggaagccttggggagcactgaagccaaggctgtaccgtaccaaaaatttgaggcacacccgaatgatctgtacgtggaaggactgccagaaaacattcctttccgaagtccctcatggtatggaatcccaaggctggaaaaaatcattcaagtgggcaatcgaattaaatttgttattaaaagaccagaacttctgactcacagtaccactgaagttactcagccaagaacgaatacaccagtcaaagaagattggaatgtcagaattaccaagctacggaagcaagtggaagagatttttaatttgaaatttgcttagatttgttgacagcggtttcctggagtgctgtcttgagaacgattctgaggaggctcagcaagaaagagtgtttcagttgattgggtgtgtctgtcatggagaaggaactcaagctcttggactcaccgaggcagtaaaagtaccatatcctgtgtttgaatcaaacccggagttcttgtatgtggaaggcttgccagaggggattcccttccgaagccctacctggtttggaattccacgacttgaaaggatcgtccgcgggagtaataaaatcaagttcgttgttaaaaaacctgaactagttatttcctacttgcctcctgggatggctagtaaaataaacactaaagctttgcagtcccccaaaagaccacgaagtcctgggagtaattcaaaggttcctgaaattgaggtcaccgtggaaggccctaataacaacaatcctcaaacctcagctgttcgaaccccgacccagactaacggttctaacgttcccttcaagccacgagggagagagttttcctttgaggcctggaatgccaaaatcacggacctaaaacagaaagttgaaaatctcttcaatgagaaatgtggggaagctcttggccttaaacaagctgtgaaggtgccgttcgcgttatttgagtctttcccggaagacttttatgtggaaggcttacctgagggtgtgccattccgaagaccatcgacttttggcattccgaggctggagaagatactcagaaacaaagccaaaattaagttcatcattaaaaagcccgaaatgtttgagacggcgattaaggagagcacctcctctaagagccctcccagaaaaataaattcatcacccaatgttaatactactgcatcaggtgttgaagaccttaacatcattcaggtgacaattccagatgatgataatgaaagactctcgaaagttgaaaaagctagacagctaagagaacaagtgaatgacctctttagtcggaaatttggtgaagctattggtatgggttttcctgtgaaagttccctacaggaaaatcacaattaaccctggctgtgtggtggttgatggcatgcccccgggggtgtccttcaaagcccccagctacctggaaatcagctccatgagaaggatcttagactctgccgagtttatcaaattcacggtcattagaccatttccaggacttgtgattaataaccagctggttgatcagagtgagtcagaaggccccgtgatacaagaatcagctgaaccaagccagttggaagttccagccacagaagaaataaaagagactgatggaagctctcagatcaagcaagaaccagaccccacgtggtagacctcttccctcctaggcaaaaccatctggatcacctaacagtcagaggtcagtatctcagcgtgtgaattatagaggaaatacagagagaacctcttccacttttacttttcgtccaaataaaatgcatggtgtaccagaagttgaagatcgggttgaggattggggctagctcgatgacactaaggccccaacatcgcgggacctgctgtggcgcggattcttaggaacgctgttctagccggccccctctccaggggtcgccgtggccggcattatttcctagttcttcttgtaaccctgaggtgccagcgcggggagtgaggaggggtcagggggctaaggatgcaacctctgacgttctgcgccttcctaggagagtcttacatgtgttgagatttcacaagcaatgcgagttgtaaaataccagctctacaagaagctaggctctgtgacggcatagttttcagtagctttatcacaatattcacaatggagaattatatgacatggtagcagaaataggcccttttatgtgttgcttctattttacctcaaattgtagatatagggtaatcaataaaatccatccatgcctttcacacactaagt

SEQ ID NO: 4063 - protein, 495 aa, Homo sapiens; identical to SEQ ID NO: 4057

SEQ ID NO: 4064 - DNA, 5056 bp, Homo sapiens
aaaaaaaaaaaaaaaaaaaaaaaaaaaagaaaaaagaaaaaaaaaaggaggaggaggaggagggtgagagagaagctgggagagcagagaaaaggggccaccggtcgcccccccgcttccccgcacgcgctctccagccgcggccgcccgcctgccgcggtcaccccggcctctgcctctgtcccccagtgatcggatcaaggcgctgagcgaggccctgcctgcggggcggccatgcggcggtgacaggagcgcgaccgacacgcacgggcccctcgccccctctcgcctcccgtccgctcgccagctcccctcagccgaggctgctccgcggcggccgcagcccgcgcgcggcccacactcgcctccccgttgaagatgaggagtcctcggagagcaggatggtggtgacattcctcatgtcagctctcgagtccatgtgtaaagaactggccaagtccaaagccgaagtggcctgcattgcagtgtatgaaacagacgtgtttgtcgtcggaactgaaagaggacgtgcttttgtcaataccagaaaggattttcaaaaagattttgtaaaatattgtgttgaagaagaagaaaaagctgcagagatgcataaaatgaaatctacaacccaggcaaatcggatgagtgtagatgctgtagaaattgaaacactcagaaaaacagttgaggactatttctgcttttgctatgggaaagctttaggcaaatccacagtggtacctgtaccatatgagaagatgctgcgagaccagtcggctgtggtagtgcaggggcttccggaaggtgttgcctttaaacaccccgagaactatgatcttgcaaccctgaaatggattttggagaacaaagcagggatttcattcatcattaagagaccttttttagagccaaagaagcatgtaggtggtcgtgtgatggtaacagatgctgacaggtcaatactatctccaggtggaagttgtggccccatcaaagtgaaaactgaacccacagaagattctggaagccaccattcttcagagggcaatgaaggcacagaaatggaagtaccagcagaagattctactcaacatgtcccttcagaaacaagtgaggaccctgaagttgaggtgactattgaagatgatgattattctccaccgtctaagagaccaaaggccaatgagctaccgcagccaccagtcccggaacccgccaatgctgggaagcggaaagtgagggagttcaacttcgagaaatggaatgctcgcatcactgatctacgtaaacaagttgaagaattgtttgaaaggaaatatgctcaagccataaaagccaaaggtccggtgacgatcccgtaccctcttttccagtctcatgttgaagatctttatgtagaaggacttcctgaaggaattccttttagaaggccatctacttacggaattcctcgcctggagaggatattacttgcaaaggaaaggattcgttttgtgattaagaaacatgagcttctgaattcaacacgtgaagatttacagcttgataagccagcttcaggagtaaaggaagaatggtatgccagaatcactaaattaagaaagatggtggatcagcttttctgcaaaaaatttgcggaagccttggggagcactgaagccaaggctgtaccgtaccaaaaatttgaggcacacccgaatgatctgtacgtggaaggactgccagaaaacattcctttccgaagtccctcatggtatggaatcccaaggctggaaaaaatcattcaagtgggcaatcgaattaaatttgttattaaaagaccagaacttctgactcacagtaccactgaagttactcagccaagaacgaatacaccagtcaaagaagattggaatgtcagaattaccaagctacggaagcaagtggaagagatttttaatttgaaatttgctcaagctcttggactcaccgaggcagtaaaagtaccatatcctgtgtttgaatcaaacccggagttcttgtatgtggaaggcttgccagaggggattcccttccgaagccctacctggtttggaattccacgacttgaaaggatcgtccgcgggagtaataaaatcaagttcgttgttaaaaaacctgaactagttatttcctacttgcctcctgggatggctagtaaaataaacactaaagctttgcagtcccccaaaagaccacgaagtcctgggagtaattcaaaggttcctgaaattgaggtcaccgtggaaggccctaataacaacaatcctcaaacctcagctgttcgaaccccgacccagactaacggttctaacgttcccttcaagccacgagggagagagttttcctttgaggcctggaatgccaaaatcacggacctaaaacagaaagttgaaaatctcttcaatgagaaatgtggggaagctcttggccttaaacaagctgtgaaggtgccgttcgcgttatttgagtctttcccggaagacttttatgtggaaggcttacctgagggtgtgccattccgaagaccatcgacttttggcattccgaggctggagaagatactcagaaacaaagccaaaattaagttcatcattaaaaagcccgaaatgtttgagacggcgattaaggagagcacctcctctaagagccctcccagaaaaataaattcatcacccaatgttaatactactgcatcaggtgttgaagaccttaacatcattcaggtgacaattccagatgatgataatgaaagactctcgaaagttgaaaaagctagacagctaagagaacaagtgaatgacctctttagtcggaaatttggtgaagctattggtatgggttttcctgtgaaagttccctacaggaaaatcacaattaaccctggctgtgtggtggttgatggcatgcccccgggggtgtccttcaaagcccccagctacctggaaatcagctccatgagaaggatcttagactctgccgagtttatcaaattcacggtcattagaccatttccaggacttgtgattaataaccagctggttgatcagagtgagtcagaaggccccgtgatacaagaatcagctgaaccaagccagttggaagttccagccacagaagaaataaaagagactgatggaagctctcagatcaagcaagaaccagaccccacgtggtagacctcttccctcctagggtaaatcagcttctgtgtcagggatgctgtgtggtgtccatctgaaccccctgcatacgcgtagctaatgtgatctccccactttcacataagatggtggccctgccttcagggaatgtgggagccaggtgggagccttcccggatatttaagctagaagattctacagggagattctccttggatcaatatatgtctctcagtcaaagatgtaaaagcacttttgccttaaaaagaatgttctgtttctaaatagagtcaacgttgtcctcctcattggaattcactatgagtcagaatcattagactgacttttttttttccatagtaatagtattttgcagagtctcacagagctgcagatcttttgttcatcttgcagagttaacaagtctgatcctgttagtccagatttcttaaatttggccaagttataataggagcagtagcttgagacccgaagtcaggaaactttgacaatggatttttttttttaatccagagacttgtactggaatttgccttaccctgtcagctcatggacttaaggtttcatcccgctttatgagtgcttctgaatccaagtcattgttacctgaatttgcaaattaagttgtgatattcgtgactgttaaattcctgtaattagattaacctctttgcttgcttgtttgttttctctcctattttagcttaaagtatcagtggttgagaagagcttttcggacctgttactaccccaagctgtgtaatatacttgtataacagaaataccttctatacaaacctttttttctacttttagatagaaatgtctactttttcagcagttctgtgaattaaagagcagagtgactgtgggtctggaatggctggtgtacttgggaatgtactatcaggattttacagcaatgctgggaaatgacagggaaaatgacaggaatgaatctcaccagattttttatgtactcagcagagccttgagttacggtgtttattttccaatcaagtgaagatatctcctacttctcctactggaacatctcagcttctgcagtgaagaaaaattcctgtgatagttcagttctttagtttttctatttgaaaaaaaaaaatcatttaaatgatcctttgttcacggctctccttaatgactgagtgaacagttcctatctgtatatttgactaaaccttttcctaagctatctctcatggttcctatgtttttttatcataattaaaagcaaaaccatctggatcacctaacagtcagaggtcagtatctcagcgtgtgaattatagaggaaatacagagagaacctcttccacttttacttttcgtccaaataaaatgcatggtgtaccagaagttgaagatcgggttgaggattggggctagctcgatgacactaaggccccaacatcgcgggacctgctgtggcgcggattcttaggaacgctgttctagccggccccctctccaggggtcgccgtggccggcattatttcctagttcttcttgtaaccctgaggtgccagcgcggggagtgaggaggggtcagggggctaaggatgcaacctctgacgttctgcgccttcctaggagagtcttacatgtgttgagatttcacaagcaatgcgagttgtaaaataccagctctacaagaagctaggctctgtgacggcatagttttcagtagctttatcacaatattcacaatggagaattatatgacatggtagcagaaataggcccttttatgtgttgcttctattttacctcaaattgtagatatagggtaatcaataaaatccatccatgcctttcacacactaagt

SEQ ID NO: 4065 - protein, 932 aa, Homo sapiens
MVVTFLMSALESMCKELAKSKAEVACIAVYETDVFVVGTERGRAFVNTRKDFQKDFVKYCVEEEEKAAEMHKMKSTTQANRMSVDAVEIETLRKTVEDYFCFCYGKALGKSTVVPVPYEKMLRDQSAVVVQGLPEGVAFKHPENYDLATLKWILENKAGISFIIKRPFLEPKKHVGGRVMVTDADRSILSPGGSCGPIKVKTEPTEDSGSHHSSEGNEGTEMEVPAEDSTQHVPSETSEDPEVEVTIEDDDYSPPSKRPKANELPQPPVPEPANAGKRKVREFNFEKWNARITDLRKQVEELFERKYAQAIKAKGPVTIPYPLFQSHVEDLYVEGLPEGIPFRRPSTYGIPRLERILLAKERIRFVIKKHELLNSTREDLQLDKPASGVKEEWYARITKLRKMVDQLFCKKFAEALGSTEAKAVPYQKFEAHPNDLYVEGLPENIPFRSPSWYGIPRLEKIIQVGNRIKFVIKRPELLTHSTTEVTQPRTNTPVKEDWNVRITKLRKQVEEIFNLKFAQALGLTEAVKVPYPVFESNPEFLYVEGLPEGIPFRSPTWFGIPRLERIVRGSNKIKFVVKKPELVISYLPPGMASKINTKALQSPKRPRSPGSNSKVPEIEVTVEGPNNNNPQTSAVRTPTQTNGSNVPFKPRGREFSFEAWNAKITDLKQKVENLFNEKCGEALGLKQAVKVPFALFESFPEDFYVEGLPEGVPFRRPSTFGIPRLEKILRNKAKIKFIIKKPEMFETAIKESTSSKSPPRKINSSPNVNTTASGVEDLNIIQVTIPDDDNERLSKVEKARQLREQVNDLFSRKFGEAIGMGFPVKVPYRKITINPGCVVVDGMPPGVSFKAPSYLEISSMRRILDSAEFIKFTVIRPFPGLVINNQLVDQSESEGPVIQESAEPSQLEVPATEEIKETDGSSQIKQEPDPTW

SEQ ID NO: 4066 - DNA, 4159 bp, Homo sapiens
aaaaaaaaaaaaaaaaaaaaaaaaaaaagaaaaaagaaaaaaaaaaggaggaggaggaggagggtgagagagaagctgggagagcagagaaaaggggccaccggtcgcccccccgcttccccgcacgcgctctccagccgcggccgcccgcctgccgcggtcaccccggcctctgcctctgtcccccagtgatcggatcaaggcgctgagcgaggccctgcctgcggggcggccatgcggcggtgacaggagcgcgaccgacacgcacgggcccctcgccccctctcgcctcccgtccgctcgccagctcccctcagccgaggctgctccgcggcggccgcagcccgcgcgcggcccacactcgcctcccctcggcacccccggccccggagctgcctggaggcggccgcactcggggatcatggcccaagttgcaatgtccaccctccccgttgaagatgaggagtcctcggagagcaggatggtggtgacattcctcatgtcagctctcgagtccatgtgtaaagaactggccaagtccaaagccgaagtggcctgcattgcagtgtatgaaacagacgtgtttgtcgtcggaactgaaagaggacgtgcttttgtcaataccagaaaggattttcaaaaagattttgtaaaatattgtgttgaagaagaagaaaaagctgcagagatgcataaaatgaaatctacaacccaggcaaatcggatgagtgtagatgctgtagaaattgaaacactcagaaaaacagttgaggactatttctgcttttgctatgggaaagctttaggcaaatccacagtggtacctgtaccatatgagaagatgctgcgagaccagtcggctgtggtagtgcaggggcttccggaaggtgttgcctttaaacaccccgagaactatgatcttgcaaccctgaaatggattttggagaacaaagcagggatttcattcatcattaagagaccttttttagagccaaagaagcatgtaggtggtcgtgtgatggtaacagatgctgacaggtcaatactatctccaggtggaagttgtggccccatcaaagtgaaaactgaacccacagaagattctggcatttccctggaaatggcagctgtgacagtaaaggaagaatcagaagatcctgattattatcaatataacattcaaggaagccaccattcttcagagggcaatgaaggcacagaaatggaagtaccagcagaagatgatgattattctccaccgtctaagagaccaaaggccaatgagctaccgcagccaccagtcccggaacccgccaatgctgggaagcggaaagtgagggagttcaacttcgagaaatggaatgctcgcatcactgatctacgtaaacaagttgaagaattgtttgaaaggaaatatgctcaagccataaaagccaaaggtccggtgacgatcccgtaccctcttttccagtctcatgttgaagatctttatgtagaaggacttcctgaaggaattccttttagaaggccatctacttacggaattcctcgcctggagaggatattacttgcaaaggaaaggattcgttttgtgattaagaaacatgagcttctgaattcaacacgtgaagatttacagcttgataagccagcttcaggagtaaaggaagaatggtatgccagaatcactaaattaagaaagatggtggatcagcttttctgcaaaaaatttgcggaagccttggggagcactgaagccaaggctgtaccgtaccaaaaatttgaggcacacccgaatgatctgtacgtggaaggactgccagaaaacattcctttccgaagtccctcatggtatggaatcccaaggctggaaaaaatcattcaagtgggcaatcgaattaaatttgttattaaaagaccagaacttctgactcacagtaccactgaagttactcagccaagaacgaatacaccagctcaagctcttggactcaccgaggcagtaaaagtaccatatcctgtgtttgaatcaaacccggagttcttgtatgtggaaggcttgccagaggggattcccttccgaagccctacctggtttggaattccacgacttgaaaggatcgtccgcgggagtaataaaatcaagttcgttgttaaaaaacctgaactagttatttcctacttgcctcctgggatggctagtaaaataaacactaaagctttgcagtcccccaaaagaccacgaagtcctgggagtaattcaaaggttcctgaaattgaggtcaccgtggaaggccctaataacaacaatcctcaaacctcagctgttcgaaccccgacccagactaacggttctaacgttcccttcaagccacgagggagagagttttcctttgaggcctggaatgccaaaatcacggacctaaaacagaaagttgaaaatctcttcaatgagaaatgtggggaagctcttggccttaaacaagctgtgaaggtgccgttcgcgttatttgagtctttcccggaagacttttatgtggaaggcttacctgagggtgtgccattccgaagaccatcgacttttggcattccgaggctggagaagatactcagaaacaaagccaaaattaagttcatcattaaaaagcccgaaatgtttgagacggcgattaaggagagcacctcctctaagagccctcccagaaaaataaattcatcacccaatgttaatactactgcatcaggtgttgaagaccttaacatcattcaggtgacaattccagatgatgataatgaaagactctcgaaagttgaaaaagctagacagctaagagaacaagtgaatgacctctttagtcggaaatttggtgaagctattggtatgggttttcctgtgaaagttccctacaggaaaatcacaattaaccctggctgtgtggtggttgatggcatgcccccgggggtgtccttcaaagcccccagctacctggaaatcagctccatgagaaggatcttagactctgccgagtttatcaaattcacggtcattagaccatttccaggacttgtgattaataaccagctggttgatcagagtgagtcagaaggccccgtgatacaagaatcagctgaaccaagccagttggaagttccagccacagaagaaataaaagagactgatggaagctctcagatcaagcaagaaccagaccccacgtggtagacctcttccctcctaggcttaaagtatcagtggttgagaagagcttttcggacctgttactaccccaagctgtagccttgagttacggtgtttattttccaatcaagtgaagatatctcctacttctcctactggaacatctcagcttctgcagtgaagaaaaattcctgtgatagttcagttctttagtttttctatttgaaaaaaaaaaatcatttaaatgatcctttgttcacggctctccttaatgactgagtgaacagttcctatctgtatatttgactaaaccttttcctaagctatctctcatggttcctatgtttttttatcataattaaaagcaaaaccatctggatcacctaacagtcagaggtcagtatctcagcgtgtgaattatagaggaaatacagagagaacctcttccacttttacttttcgtccaaataaaatgcatggtgtaccagaagttgaagatcgggttgaggattggggctagctcgatgacactaaggccccaacatcgcgggacctgctgtggcgcggattcttaggaacgctgttctagccggccccctctccaggggtcgccgtggccggcattatttcctagttcttcttgtaaccctgaggtgccagcgcggggagtgaggaggggtcagggggctaaggatgcaacctctgacgttctgcgccttcctaggagagtcttacatgtgttgagatttcacaagcaatgcgagttgtaaaataccagctctacaagaagctaggctctgtgacggcatagttttcagtagctttatcacaatattcacaatggagaattatatgacatggtagcagaaataggcccttttatgtgttgcttctattttacctcaaattgtagatatagggtaatcaataaaatccatccatgcctttcacacactaagt

SEQ ID NO: 4067 - protein, 933 aa, Homo sapiens
MAQVAMSTLPVEDEESSESRMVVTFLMSALESMCKELAKSKAEVACIAVYETDVFVVGTERGRAFVNTRKDFQKDFVKYCVEEEEKAAEMHKMKSTTQANRMSVDAVEIETLRKTVEDYFCFCYGKALGKSTVVPVPYEKMLRDQSAVVVQGLPEGVAFKHPENYDLATLKWILENKAGISFIIKRPFLEPKKHVGGRVMVTDADRSILSPGGSCGPIKVKTEPTEDSGISLEMAAVTVKEESEDPDYYQYNIQGSHHSSEGNEGTEMEVPAEDDDYSPPSKRPKANELPQPPVPEPANAGKRKVREFNFEKWNARITDLRKQVEELFERKYAQAIKAKGPVTIPYPLFQSHVEDLYVEGLPEGIPFRRPSTYGIPRLERILLAKERIRFVIKKHELLNSTREDLQLDKPASGVKEEWYARITKLRKMVDQLFCKKFAEALGSTEAKAVPYQKFEAHPNDLYVEGLPENIPFRSPSWYGIPRLEKIIQVGNRIKFVIKRPELLTHSTTEVTQPRTNTPAQALGLTEAVKVPYPVFESNPEFLYVEGLPEGIPFRSPTWFGIPRLERIVRGSNKIKFVVKKPELVISYLPPGMASKINTKALQSPKRPRSPGSNSKVPEIEVTVEGPNNNNPQTSAVRTPTQTNGSNVPFKPRGREFSFEAWNAKITDLKQKVENLFNEKCGEALGLKQAVKVPFALFESFPEDFYVEGLPEGVPFRRPSTFGIPRLEKILRNKAKIKFIIKKPEMFETAIKESTSSKSPPRKINSSPNVNTTASGVEDLNIIQVTIPDDDNERLSKVEKARQLREQVNDLFSRKFGEAIGMGFPVKVPYRKITINPGCVVVDGMPPGVSFKAPSYLEISSMRRILDSAEFIKFTVIRPFPGLVINNQLVDQSESEGPVIQESAEPSQLEVPATEEIKETDGSSQIKQEPDPTW

SEQ ID NO: 4068 - DNA, 4216 bp, Homo sapiens
aaaaaaaaaaaaaaaaaaaaaaaaaaaagaaaaaagaaaaaaaaaaggaggaggaggaggagggtgagagagaagctgggagagcagagaaaaggggccaccggtcgcccccccgcttccccgcacgcgctctccagccgcggccgcccgcctgccgcggtcaccccggcctctgcctctgtcccccagtgatcggatcaaggcgctgagcgaggccctgcctgcggggcggccatgcggcggtgacaggagcgcgaccgacacgcacgggcccctcgccccctctcgcctcccgtccgctcgccagctcccctcagccgaggctgctccgcggcggccgcagcccgcgcgcggcccacactcgcctcccctcggcacccccggccccggagctgcctggaggcggccgcactcggggatcatggcccaagttgcaatgtccaccctccccgttgaagatgaggagtcctcggagagcaggatggtggtgacattcctcatgtcagctctcgagtccatgtgtaaagaactggccaagtccaaagccgaagtggcctgcattgcagtgtatgaaacagacgtgtttgtcgtcggaactgaaagaggacgtgcttttgtcaataccagaaaggattttcaaaaagattttgtaaaatattgtgttgaagaagaagaaaaagctgcagagatgcataaaatgaaatctacaacccaggcaaatcggatgagtgtagatgctgtagaaattgaaacactcagaaaaacagttgaggactatttctgcttttgctatgggaaagctttaggcaaatccacagtggtacctgtaccatatgagaagatgctgcgagaccagtcggctgtggtagtgcaggggcttccggaaggtgttgcctttaaacaccccgagaactatgatcttgcaaccctgaaatggattttggagaacaaagcagggatttcattcatcattaagagaccttttttagagccaaagaagcatgtaggtggtcgtgtgatggtaacagatgctgacaggtcaatactatctccaggtggaagttgtggccccatcaaagtgaaaactgaacccacagaagattctggaagccaccattcttcagagggcaatgaaggcacagaaatggaagtaccagcagaagattctactcaacatgtcccttcagaaacaagtgaggaccctgaagttgaggtgactattgaagatgatgattattctccaccgtctaagagaccaaaggccaatgagctaccgcagccaccagtcccggaacccgccaatgctgggaagcggaaagtgagggagttcaacttcgagaaatggaatgctcgcatcactgatctacgtaaacaagttgaagaattgtttgaaaggaaatatgctcaagccataaaagccaaaggtccggtgacgatcccgtaccctcttttccagtctcatgttgaagatctttatgtagaaggacttcctgaaggaattccttttagaaggccatctacttacggaattcctcgcctggagaggatattacttgcaaaggaaaggattcgttttgtgattaagaaacatgagcttctgaattcaacacgtgaagatttacagcttgataagccagcttcaggagtaaaggaagaatggtatgccagaatcactaaattaagaaagatggtggatcagcttttctgcaaaaaatttgcggaagccttggggagcactgaagccaaggctgtaccgtaccaaaaatttgaggcacacccgaatgatctgtacgtggaaggactgccagaaaacattcctttccgaagtccctcatggtatggaatcccaaggctggaaaaaatcattcaagtgggcaatcgaattaaatttgttattaaaagaccagaacttctgactcacagtaccactgaagttactcagccaagaacgaatacaccagtcaaagaagattggaatgtcagaattaccaagctacggaagcaagtggaagagatttttaatttgaaatttgctcaagctcttggactcaccgaggcagtaaaagtaccatatcctgtgtttgaatcaaacccggagttcttgtatgtggaaggcttgccagaggggattcccttccgaagccctacctggtttggaattccacgacttgaaaggatcgtccgcgggagtaataaaatcaagttcgttgttaaaaaacctgaactagttatttcctacttgcctcctgggatggctagtaaaataaacactaaagctttgcagtcccccaaaagaccacgaagtcctgggagtaattcaaaggttcctgaaattgaggtcaccgtggaaggccctaataacaacaatcctcaaacctcagctgttcgaaccccgacccagactaacggttctaacgttcccttcaagccacgagggagagagttttcctttgaggcctggaatgccaaaatcacggacctaaaacagaaagttgaaaatctcttcaatgagaaatgtggggaagctcttggccttaaacaagctgtgaaggtgccgttcgcgttatttgagtctttcccggaagacttttatgtggaaggcttacctgagggtgtgccattccgaagaccatcgacttttggcattccgaggctggagaagatactcagaaacaaagccaaaattaagttcatcattaaaaagcccgaaatgtttgagacggcgattaaggagagcacctcctctaagagccctcccagaaaaataaattcatcacccaatgttaatactactgcatcaggtgttgaagaccttaacatcattcaggtgacaattccagatgatgataatgaaagactctcgaaagttgaaaaagctagacagctaagagaacaagtgaatgacctctttagtcggaaatttggtgaagctattggtatgggttttcctgtgaaagttccctacaggaaaatcacaattaaccctggctgtgtggtggttgatggcatgcccccgggggtgtccttcaaagcccccagctacctggaaatcagctccatgagaaggatcttagactctgccgagtttatcaaattcacggtcattagaccatttccaggacttgtgattaataaccagctggttgatcagagtgagtcagaaggccccgtgatacaagaatcagctgaaccaagccagttggaagttccagccacagaagaaataaaagagactgatggaagctctcagatcaagcaagaaccagaccccacgtggtagacctcttccctcctaggcttaaagtatcagtggttgagaagagcttttcggacctgttactaccccaagctgtagccttgagttacggtgtttattttccaatcaagtgaagatatctcctacttctcctactggaacatctcagcttctgcagtgaagaaaaattcctgtgatagttcagttctttagtttttctatttgaaaaaaaaaaatcatttaaatgatcctttgttcacggctctccttaatgactgagtgaacagttcctatctgtatatttgactaaaccttttcctaagctatctctcatggttcctatgtttttttatcataattaaaagcaaaaccatctggatcacctaacagtcagaggtcagtatctcagcgtgtgaattatagaggaaatacagagagaacctcttccacttttacttttcgtccaaataaaatgcatggtgtaccagaagttgaagatcgggttgaggattggggctagctcgatgacactaaggccccaacatcgcgggacctgctgtggcgcggattcttaggaacgctgttctagccggccccctctccaggggtcgccgtggccggcattatttcctagttcttcttgtaaccctgaggtgccagcgcggggagtgaggaggggtcagggggctaaggatgcaacctctgacgttctgcgccttcctaggagagtcttacatgtgttgagatttcacaagcaatgcgagttgtaaaataccagctctacaagaagctaggctctgtgacggcatagttttcagtagctttatcacaatattcacaatggagaattatatgacatggtagcagaaataggcccttttatgtgttgcttctattttacctcaaattgtagatatagggtaatcaataaaatccatccatgcctttcacacactaagt

SEQ ID NO: 4069 - protein, 952 aa, Homo sapiens
MAQVAMSTLPVEDEESSESRMVVTFLMSALESMCKELAKSKAEVACIAVYETDVFVVGTERGRAFVNTRKDFQKDFVKYCVEEEEKAAEMHKMKSTTQANRMSVDAVEIETLRKTVEDYFCFCYGKALGKSTVVPVPYEKMLRDQSAVVVQGLPEGVAFKHPENYDLATLKWILENKAGISFIIKRPFLEPKKHVGGRVMVTDADRSILSPGGSCGPIKVKTEPTEDSGSHHSSEGNEGTEMEVPAEDSTQHVPSETSEDPEVEVTIEDDDYSPPSKRPKANELPQPPVPEPANAGKRKVREFNFEKWNARITDLRKQVEELFERKYAQAIKAKGPVTIPYPLFQSHVEDLYVEGLPEGIPFRRPSTYGIPRLERILLAKERIRFVIKKHELLNSTREDLQLDKPASGVKEEWYARITKLRKMVDQLFCKKFAEALGSTEAKAVPYQKFEAHPNDLYVEGLPENIPFRSPSWYGIPRLEKIIQVGNRIKFVIKRPELLTHSTTEVTQPRTNTPVKEDWNVRITKLRKQVEEIFNLKFAQALGLTEAVKVPYPVFESNPEFLYVEGLPEGIPFRSPTWFGIPRLERIVRGSNKIKFVVKKPELVISYLPPGMASKINTKALQSPKRPRSPGSNSKVPEIEVTVEGPNNNNPQTSAVRTPTQTNGSNVPFKPRGREFSFEAWNAKITDLKQKVENLFNEKCGEALGLKQAVKVPFALFESFPEDFYVEGLPEGVPFRRPSTFGIPRLEKILRNKAKIKFIIKKPEMFETAIKESTSSKSPPRKINSSPNVNTTASGVEDLNIIQVTIPDDDNERLSKVEKARQLREQVNDLFSRKFGEAIGMGFPVKVPYRKITINPGCVVVDGMPPGVSFKAPSYLEISSMRRILDSAEFIKFTVIRPFPGLVINNQLVDQSESEGPVIQESAEPSQLEVPATEEIKETDGSSQIKQEPDPTW

SEQ ID NO: 4070 - DNA, 5219 bp, Homo sapiens
aaaaaaaaaaaaaaaaaaaaaaaaaaaagaaaaaagaaaaaaaaaaggaggaggaggaggagggtgagagagaagctgggagagcagagaaaaggggccaccggtcgcccccccgcttccccgcacgcgctctccagccgcggccgcccgcctgccgcggtcaccccggcctctgcctctgtcccccagtgatcggatcaaggcgctgagcgaggccctgcctgcggggcggccatgcggcggtgacaggagcgcgaccgacacgcacgggcccctcgccccctctcgcctcccgtccgctcgccagctcccctcagccgaggctgctccgcggcggccgcagcccgcgcgcggcccacactcgcctcccctcggcacccccggccccggagctgcctggaggcggccgcactcggtgtaaagaactggccaagtccaaagccgaagtggcctgcattgcagtgtatgaaacagacgtgtttgtcgtcggaactgaaagaggacgtgcttttgtcaataccagaaaggattttcaaaaagattttgtaaaatattgtgttgaagaagaagaaaaagctgcagagatgcataaaatgaaatctacaacccaggcaaatcggatgagtgtagatgctgtagaaattgaaacactcagaaaaacagttgaggactatttctgcttttgctatgggaaagctttaggcaaatccacagtggtacctgtaccatatgagaagatgctgcgagaccagtcggctgtggtagtgcaggggcttccggaaggtgttgcctttaaacaccccgagaactatgatcttgcaaccctgaaatggattttggagaacaaagcagggatttcattcatcattaagagaccttttttagagccaaagaagcatgtaggtggtcgtgtgatggtaacagatgctgacaggtcaatactatctccaggtggaagttgtggccccatcaaagtgaaaactgaacccacagaagattctggcatttccctggaaatggcagctgtgacagtaaaggaagaatcagaagatcctgattattatcaatataacattcaagcaggcccttctgaaactgatgatgttgatgaaaaacagcccctatcgaagcctttgcaaggaagccaccattcttcagagggcaatgaaggcacagaaatggaagtaccagcagaagatgatgattattctccaccgtctaagagaccaaaggccaatgagctaccgcagccaccagtcccggaacccgccaatgctgggaagcggaaagtgagggagttcaacttcgagaaatggaatgctcgcatcactgatctacgtaaacaagttgaagaattgtttgaaaggaaatatgctcaagccataaaagccaaaggtccggtgacgatcccgtaccctcttttccagtctcatgttgaagatctttatgtagaaggacttcctgaaggaattccttttagaaggccatctacttacggaattcctcgcctggagaggatattacttgcaaaggaaaggattcgttttgtgattaagaaacatgagcttctgaattcaacacgtgaagatttacagcttgataagccagcttcaggagtaaaggaagaatggtatgccagaatcactaaattaagaaagatggtggatcagcttttctgcaaaaaatttgcggaagccttggggagcactgaagccaaggctgtaccgtaccaaaaatttgaggcacacccgaatgatctgtacgtggaaggactgccagaaaacattcctttccgaagtccctcatggtatggaatcccaaggctggaaaaaatcattcaagtgggcaatcgaattaaatttgttattaaaagaccagaacttctgactcacagtaccactgaagttactcagccaagaacgaatacaccagtcaaagaagattggaatgtcagaattaccaagctacggaagcaagtggaagagatttttaatttgaaatttgcttagatttgttgacagcggtttcctggagtgctgtcttgagaacgattctgaggaggctcagcaagaaagagtgtttcagttgattgggtgtgtctgtcatggagaaggaactcaagctcttggactcaccgaggcagtaaaagtaccatatcctgtgtttgaatcaaacccggagttcttgtatgtggaaggcttgccagaggggattcccttccgaagccctacctggtttggaattccacgacttgaaaggatcgtccgcgggagtaataaaatcaagttcgttgttaaaaaacctgaactagttatttcctacttgcctcctgggatggctagtaaaataaacactaaagctttgcagtcccccaaaagaccacgaagtcctgggagtaattcaaaggttcctgaaattgaggtcaccgtggaaggccctaataacaacaatcctcaaacctcagctgttcgaaccccgacccagactaacggttctaacgttcccttcaagccacgagggagagagttttcctttgaggcctggaatgccaaaatcacggacctaaaacagaaagttgaaaatctcttcaatgagaaatgtggggaagctcttggccttaaacaagctgtgaaggtgccgttcgcgttatttgagtctttcccggaagacttttatgtggaaggcttacctgagggtgtgccattccgaagaccatcgacttttggcattccgaggctggagaagatactcagaaacaaagccaaaattaagttcatcattaaaaagcccgaaatgtttgagacggcgattaaggagagcacctcctctaagagccctcccagaaaaataaattcatcacccaatgttaatactactgcatcaggtgttgaagaccttaacatcattcaggtgacaattccagatgatgataatgaaagactctcgaaagttgaaaaagctagacagctaagagaacaagtgaatgacctctttagtcggaaatttggtgaagctattggtatgggttttcctgtgaaagttccctacaggaaaatcacaattaaccctggctgtgtggtggttgatggcatgcccccgggggtgtccttcaaagcccccagctacctggaaatcagctccatgagaaggatcttagactctgccgagtttatcaaattcacggtcattagaccatttccaggacttgtgattaataaccagctggttgatcagagtgagtcagaaggccccgtgatacaagaatcagctgaaccaagccagttggaagttccagccacagaagaaataaaagagactgatggaagctctcagatcaagcaagaaccagaccccacgtggtagacctcttccctcctagggtaaatcagcttctgtgtcagggatgctgtgtggtgtccatctgaaccccctgcatacgcgtagctaatgtgatctccccactttcacataagatggtggccctgccttcagggaatgtgggagccaggtgggagccttcccggatatttaagctagaagattctacagggagattctccttggatcaatatatgtctctcagtcaaagatgtaaaagcacttttgccttaaaaagaatgttctgtttctaaatagagtcaacgttgtcctcctcattggaattcactatgagtcagaatcattagactgacttttttttttccatagtaatagtattttgcagagtctcacagagctgcagatcttttgttcatcttgcagagttaacaagtctgatcctgttagtccagatttcttaaatttggccaagttataataggagcagtagcttgagacccgaagtcaggaaactttgacaatggatttttttttttaatccagagacttgtactggaatttgccttaccctgtcagctcatggacttaaggtttcatcccgctttatgagtgcttctgaatccaagtcattgttacctgaatttgcaaattaagttgtgatattcgtgactgttaaattcctgtaattagattaacctctttgcttgcttgtttgttttctctcctattttagcttaaagtatcagtggttgagaagagcttttcggacctgttactaccccaagctgtgtaatatacttgtataacagaaataccttctatacaaacctttttttctacttttagatagaaatgtctactttttcagcagttctgtgaattaaagagcagagtgactgtgggtctggaatggctggtgtacttgggaatgtactatcaggattttacagcaatgctgggaaatgacagggaaaatgacaggaatgaatctcaccagattttttatgtactcagcagagccttgagttacggtgtttattttccaatcaagtgaagatatctcctacttctcctactggaacatctcagcttctgcagtgaagaaaaattcctgtgatagttcagttctttagtttttctatttgaaaaaaaaaaatcatttaaatgatcctttgttcacggctctccttaatgactgagtgaacagttcctatctgtatatttgactaaaccttttcctaagctatctctcatggttcctatgtttttttatcataattaaaagcaaaaccatctggatcacctaacagtcagaggtcagtatctcagcgtgtgaattatagaggaaatacagagagaacctcttccacttttacttttcgtccaaataaaatgcatggtgtaccagaagttgaagatcgggttgaggattggggctagctcgatgacactaaggccccaacatcgcgggacctgctgtggcgcggattcttaggaacgctgttctagccggccccctctccaggggtcgccgtggccggcattatttcctagttcttcttgtaaccctgaggtgccagcgcggggagtgaggaggggtcagggggctaaggatgcaacctctgacgttctgcgccttcctaggagagtcttacatgtgttgagatttcacaagcaatgcgagttgtaaaataccagctctacaagaagctaggctctgtgacggcatagttttcagtagctttatcacaatattcacaatggagaattatatgacatggtagcagaaataggcccttttatgtgttgcttctattttacctcaaattgtagatatagggtaatcaataaaatccatccatgcctttcacacactaagt

SEQ ID NO: 4071 - protein, 474 aa, Homo sapiens; identical to SEQ ID NO: 4025

SEQ ID NO: 4072 - DNA, 4134 bp, Homo sapiens
aaaaaaaaaaaaaaaaaaaaaaaaaaaagaaaaaagaaaaaaaaaaggaggaggaggaggagggtgagagagaagctgggagagcagagaaaaggggccaccggtcgcccccccgcttccccgcacgcgctctccagccgcggccgcccgcctgccgcggtcaccccggcctctgcctctgtcccccagtgatcggatcaaggcgctgagcgaggccctgcctgcggggcggccatgcggcggtgacaggagcgcgaccgacacgcacgggcccctcgccccctctcgcctcccgtccgctcgccagctcccctcagccgaggctgctccgcggcggccgcagcccgcgcgcggcccacactcgcctcccctcggcacccccggccccggagctgcctggaggcggccgcactcggtgtaaagaactggccaagtccaaagccgaagtggcctgcattgcagtgtatgaaacagacgtgtttgtcgtcggaactgaaagaggacgtgcttttgtcaataccagaaaggattttcaaaaagattttgtaaaatattgtgttgaagaagaagaaaaagctgcagagatgcataaaatgaaatctacaacccaggcaaatcggatgagtgtagatgctgtagaaattgaaacactcagaaaaacagttgaggactatttctgcttttgctatgggaaagctttaggcaaatccacagtggtacctgtaccatatgagaagatgctgcgagaccagtcggctgtggtagtgcaggggcttccggaaggtgttgcctttaaacaccccgagaactatgatcttgcaaccctgaaatggattttggagaacaaagcagggatttcattcatcattaagagaccttttttagagccaaagaagcatgtaggtggtcgtgtgatggtaacagatgctgacaggtcaatactatctccaggtggaagttgtggccccatcaaagtgaaaactgaacccacagaagattctggcatttccctggaaatggcagctgtgacagtaaaggaagaatcagaagatcctgattattatcaatataacattcaaggaagccaccattcttcagagggcaatgaaggcacagaaatggaagtaccagcagaagattctactcaacatgtcccttcagaaacaagtgaggaccctgaagttgaggtgactattgaagatgatgattattctccaccgtctaagagaccaaaggccaatgagctaccgcagccaccagtcccggaacccgccaatgctgggaagcggaaagtgagggagttcaacttcgagaaatggaatgctcgcatcactgatctacgtaaacaagttgaagaattgtttgaaaggaaatatgctcaagccataaaagccaaaggtccggtgacgatcccgtaccctcttttccagtctcatgttgaagatctttatgtagaaggacttcctgaaggaattccttttagaaggccatctacttacggaattcctcgcctggagaggatattacttgcaaaggaaaggattcgttttgtgattaagaaacatgagcttctgaattcaacacgtgaagatttacagcttgataagccagcttcaggagtaaaggaagaatggtatgccagaatcactaaattaagaaagatggtggatcagcttttctgcaaaaaatttgcggaagccttggggagcactgaagccaaggctgtaccgtaccaaaaatttgaggcacacccgaatgatctgtacgtggaaggactgccagaaaacattcctttccgaagtccctcatggtatggaatcccaaggctggaaaaaatcattcaagtgggcaatcgaattaaatttgttattaaaagaccagaacttctgactcacagtaccactgaagttactcagccaagaacgaatacaccagtcaaagaagattggaatgtcagaattaccaagctacggaagcaagtggaagagatttttaatttgaaatttgctcaagctcttggactcaccgaggcagtaaaagtaccatatcctgtgtttgaatcaaacccggagttcttgtatgtggaaggcttgccagaggggattcccttccgaagccctacctggtttggaattccacgacttgaaaggatcgtccgcgggagtaataaaatcaagttcgttgttaaaaaacctgaactagttatttcctacttgcctcctgggatggctagtaaaataaacactaaagctttgcagtcccccaaaagaccacgaagtcctgggagtaattcaaaggttcctgaaattgaggtcaccgtggaaggccctaataacaacaatcctcaaacctcagctgttcgaaccccgacccagactaacggttctaacgttcccttcaagccacgagggagagagttttcctttgaggcctggaatgccaaaatcacggacctaaaacagaaagttgaaaatctcttcaatgagaaatgtggggaagctcttggccttaaacaagctgtgaaggtgccgttcgcgttatttgagtctttcccggaagacttttatgtggaaggcttacctgagggtgtgccattccgaagaccatcgacttttggcattccgaggctggagaagatactcagaaacaaagccaaaattaagttcatcattaaaaagcccgaaatgtttgagacggcgattaaggagagcacctcctctaagagccctcccagaaaaataaattcatcacccaatgttaatactactgcatcaggtgttgaagaccttaacatcattcaggtgacaattccagatgatgataatgaaagactctcgaaagttgaaaaagctagacagctaagagaacaagtgaatgacctctttagtcggaaatttggtgaagctattggtatgggttttcctgtgaaagttccctacaggaaaatcacaattaaccctggctgtgtggtggttgatggcatgcccccgggggtgtccttcaaagcccccagctacctggaaatcagctccatgagaaggatcttagactctgccgagtttatcaaattcacggtcattagaccatttccaggacttgtgattaataaccagctggttgatcagagtgagtcagaaggccccgtgatacaagaatcagctgaaccaagccagttggaagttccagccacagaagaaataaaagagactgatggaagctctcagatcaagcaagaaccagaccccacgtggtagacctcttccctcctaggagccttgagttacggtgtttattttccaatcaagtgaagatatctcctacttctcctactggaacatctcagcttctgcagtgaagaaaaattcctgtgatagttcagttctttagtttttctatttgaaaaaaaaaaatcatttaaatgatcctttgttcacggctctccttaatgactgagtgaacagttcctatctgtatatttgactaaaccttttcctaagctatctctcatggttcctatgtttttttatcataattaaaagcaaaaccatctggatcacctaacagtcagaggtcagtatctcagcgtgtgaattatagaggaaatacagagagaacctcttccacttttacttttcgtccaaataaaatgcatggtgtaccagaagttgaagatcgggttgaggattggggctagctcgatgacactaaggccccaacatcgcgggacctgctgtggcgcggattcttaggaacgctgttctagccggccccctctccaggggtcgccgtggccggcattatttcctagttcttcttgtaaccctgaggtgccagcgcggggagtgaggaggggtcagggggctaaggatgcaacctctgacgttctgcgccttcctaggagagtcttacatgtgttgagatttcacaagcaatgcgagttgtaaaataccagctctacaagaagctaggctctgtgacggcatagttttcagtagctttatcacaatattcacaatggagaattatatgacatggtagcagaaataggcccttttatgtgttgcttctattttacctcaaattgtagatatagggtaatcaataaaatccatccatgcctttcacacactaagt

SEQ ID NO: 4073 - protein, 889 aa, Homo sapiens
MHKMKSTTQANRMSVDAVEIETLRKTVEDYFCFCYGKALGKSTVVPVPYEKMLRDQSAVVVQGLPEGVAFKHPENYDLATLKWILENKAGISFIIKRPFLEPKKHVGGRVMVTDADRSILSPGGSCGPIKVKTEPTEDSGISLEMAAVTVKEESEDPDYYQYNIQGSHHSSEGNEGTEMEVPAEDSTQHVPSETSEDPEVEVTIEDDDYSPPSKRPKANELPQPPVPEPANAGKRKVREFNFEKWNARITDLRKQVEELFERKYAQAIKAKGPVTIPYPLFQSHVEDLYVEGLPEGIPFRRPSTYGIPRLERILLAKERIRFVIKKHELLNSTREDLQLDKPASGVKEEWYARITKLRKMVDQLFCKKFAEALGSTEAKAVPYQKFEAHPNDLYVEGLPENIPFRSPSWYGIPRLEKIIQVGNRIKFVIKRPELLTHSTTEVTQPRTNTPVKEDWNVRITKLRKQVEEIFNLKFAQALGLTEAVKVPYPVFESNPEFLYVEGLPEGIPFRSPTWFGIPRLERIVRGSNKIKFVVKKPELVISYLPPGMASKINTKALQSPKRPRSPGSNSKVPEIEVTVEGPNNNNPQTSAVRTPTQTNGSNVPFKPRGREFSFEAWNAKITDLKQKVENLFNEKCGEALGLKQAVKVPFALFESFPEDFYVEGLPEGVPFRRPSTFGIPRLEKILRNKAKIKFIIKKPEMFETAIKESTSSKSPPRKINSSPNVNTTASGVEDLNIIQVTIPDDDNERLSKVEKARQLREQVNDLFSRKFGEAIGMGFPVKVPYRKITINPGCVVVDGMPPGVSFKAPSYLEISSMRRILDSAEFIKFTVIRPFPGLVINNQLVDQSESEGPVIQESAEPSQLEVPATEEIKETDGSSQIKQEPDPTW

SEQ ID NO: 4074 - DNA, 4379 bp, Homo sapiens
aaaaaaaaaaaaaaaaaaaaaaaaaaaagaaaaaagaaaaaaaaaaggaggaggaggaggagggtgagagagaagctgggagagcagagaaaaggggccaccggtcgcccccccgcttccccgcacgcgctctccagccgcggccgcccgcctgccgcggtcaccccggcctctgcctctgtcccccagtgatcggatcaaggcgctgagcgaggccctgcctgcggggcggccatgcggcggtgacaggagcgcgaccgacacgcacgggcccctcgccccctctcgcctcccgtccgctcgccagctcccctcagccgaggctgctccgcggcggccgcagcccgcgcgcggcccacactcgcctccccgttgaagatgaggagtcctcggagagcaggatggtggtgacattcctcatgtcagctctcgagtccatgtgtaaagaactggccaagtccaaagccgaagtggcctgcattgcagtgtatgaaacagacgtgtttgtcgtcggaactgaaagaggacgtgcttttgtcaataccagaaaggattttcaaaaagattttgtaaaatattgtgttgaagaagaagaaaaagctgcagagatgcataaaatgaaatctacaacccaggcaaatcggatgagtgtagatgctgtagaaattgaaacactcagaaaaacagttgaggactatttctgcttttgctatgggaaagctttaggcaaatccacagtggtacctgtaccatatgagaagatgctgcgagaccagtcggctgtggtagtgcaggggcttccggaaggtgttgcctttaaacaccccgagaactatgatcttgcaaccctgaaatggattttggagaacaaagcagggatttcattcatcattaagagaccttttttagagccaaagaagcatgtaggtggtcgtgtgatggtaacagatgctgacaggtcaatactatctccaggtggaagttgtggccccatcaaagtgaaaactgaacccacagaagattctggcatttccctggaaatggcagctgtgacagtaaaggaagaatcagaagatcctgattattatcaatataacattcaaggaagccaccattcttcagagggcaatgaaggcacagaaatggaagtaccagcagaagatgatgattattctccaccgtctaagagaccaaaggccaatgagctaccgcagccaccagtcccggaacccgccaatgctgggaagcggaaagtgagggagttcaacttcgagaaatggaatgctcgcatcactgatctacgtaaacaagttgaagaattgtttgaaaggaaatatgctcaagccataaaagccaaaggtccggtgacgatcccgtaccctcttttccagtctcatgttgaagatctttatgtagaaggacttcctgaaggaattccttttagaaggccatctacttacggaattcctcgcctggagaggatattacttgcaaaggaaaggattcgttttgtgattaagaaacatgagcttctgaattcaacacgtgaagatttacagcttgataagccagcttcaggagtaaaggaagaatggtatgccagaatcactaaattaagaaagatggtggatcagcttttctgcaaaaaatttgcggaagccttggggagcactgaagccaaggctgtaccgtaccaaaaatttgaggcacacccgaatgatctgtacgtggaaggactgccagaaaacattcctttccgaagtccctcatggtatggaatcccaaggctggaaaaaatcattcaagtgggcaatcgaattaaatttgttattaaaagaccagaacttctgactcacagtaccactgaagttactcagccaagaacgaatacaccagtcaaagaagattggaatgtcagaattaccaagctacggaagcaagtggaagagatttttaatttgaaatttgctcaagctcttggactcaccgaggcagtaaaagtaccatatcctgtgtttgaatcaaacccggagttcttgtatgtggaaggcttgccagaggggattcccttccgaagccctacctggtttggaattccacgacttgaaaggatcgtccgcgggagtaataaaatcaagttcgttgttaaaaaacctgaactagttatttcctacttgcctcctgggatggctagtaaaataaacactaaagctttgcagtcccccaaaagaccacgaagtcctgggagtaattcaaaggttcctgaaattgaggtcaccgtggaaggccctaataacaacaatcctcaaacctcagctgttcgaaccccgacccagactaacggttctaacgttcccttcaagccacgagggagagagttttcctttgaggcctggaatgccaaaatcacggacctaaaacagaaagttgaaaatctcttcaatgagaaatgtggggaagctcttggccttaaacaagctgtgaaggtgccgttcgcgttatttgagtctttcccggaagacttttatgtggaaggcttacctgagggtgtgccattccgaagaccatcgacttttggcattccgaggctggagaagatactcagaaacaaagccaaaattaagttcatcattaaaaagcccgaaatgtttgagacggcgattaaggagagcacctcctctaagagccctcccagaaaaataaattcatcacccaatgttaatactactgcatcaggtgttgaagaccttaacatcattcaggtgacaattccagatgatgataatgaaagactctcgaaagttgaaaaagctagacagctaagagaacaagtgaatgacctctttagtcggaaatttggtgaagctattggtatgggttttcctgtgaaagttccctacaggaaaatcacaattaaccctggctgtgtggtggttgatggcatgcccccgggggtgtccttcaaagcccccagctacctggaaatcagctccatgagaaggatcttagactctgccgagtttatcaaattcacggtcattagaccatttccaggacttgtgattaataaccagctggttgatcagagtgagtcagaaggccccgtgatacaagaatcagctgaaccaagccagttggaagttccagccacagaagaaataaaagagactgatggaagctctcagatcaagcaagaaccagaccccacgtggtagacctcttccctcctaggcttaaagtatcagtggttgagaagagcttttcggacctgttactaccccaagctgtgtaatatacttgtataacagaaataccttctatacaaacctttttttctacttttagatagaaatgtctactttttcagcagttctgtgaattaaagagcagagtgactgtgggtctggaatggctggtgtacttgggaatgtactatcaggattttacagcaatgctgggaaatgacagggaaaatgacaggaatgaatctcaccagattttttatgtactcagcagagccttgagttacggtgtttattttccaatcaagtgaagatatctcctacttctcctactggaacatctcagcttctgcagtgaagaaaaattcctgtgatagttcagttctttagtttttctatttgaaaaaaaaaaatcatttaaatgatcctttgttcacggctctccttaatgactgagtgaacagttcctatctgtatatttgactaaaccttttcctaagctatctctcatggttcctatgtttttttatcataattaaaagcaaaaccatctggatcacctaacagtcagaggtcagtatctcagcgtgtgaattatagaggaaatacagagagaacctcttccacttttacttttcgtccaaataaaatgcatggtgtaccagaagttgaagatcgggttgaggattggggctagctcgatgacactaaggccccaacatcgcgggacctgctgtggcgcggattcttaggaacgctgttctagccggccccctctccaggggtcgccgtggccggcattatttcctagttcttcttgtaaccctgaggtgccagcgcggggagtgaggaggggtcagggggctaaggatgcaacctctgacgttctgcgccttcctaggagagtcttacatgtgttgagatttcacaagcaatgcgagttgtaaaataccagctctacaagaagctaggctctgtgacggcatagttttcagtagctttatcacaatattcacaatggagaattatatgacatggtagcagaaataggcccttttatgtgttgcttctattttacctcaaattgtagatatagggtaatcaataaaatccatccatgcctttcacacactaagt

SEQ ID NO: 4075 - protein, 937 aa, Homo sapiens [sequence omitted]

SEQ ID NO: 4076 - DNA, 5064 bp, Homo sapiens
aaaaaaaaaaaaaaaaaaaaaaaaaaaagaaaaaagaaaaaaaaaaggaggaggaggaggagggtgagagagaagctgggagagcagagaaaaggggccaccggtcgcccccccgcttccccgcacgcgctctccagccgcggccgcccgcctgccgcggtcaccccggcctctgcctctgtcccccagtgatcggatcaaggcgctgagcgaggccctgcctgcggggcggccatgcggcggtgacaggagcgcgaccgacacgcacgggcccctcgccccctctcgcctcccgtccgctcgccagctcccctcagccgaggctgctccgcggcggccgcagcccgcgcgcggcccacactcgcctccccgttgaagatgaggagtcctcggagagcaggatggtggtgacattcctcatgtcagctctcgagtccatgtgtaaagaactggccaagtccaaagccgaagtggcctgcattgcagtgtatgaaacagacgtgtttgtcgtcggaactgaaagaggacgtgcttttgtcaataccagaaaggattttcaaaaagattttgtaaaatattgtgttgaagaagaagaaaaagctgcagagatgcataaaatgaaatctacaacccaggcaaatcggatgagtgtagatgctgtagaaattgaaacactcagaaaaacagttgaggactatttctgcttttgctatgggaaagctttaggcaaatccacagtggtacctgtaccatatgagaagatgctgcgagaccagtcggctgtggtagtgcaggggcttccggaaggtgttgcctttaaacaccccgagaactatgatcttgcaaccctgaaatggattttggagaacaaagcagggatttcattcatcattaagagaccttttttagagccaaagaagcatgtaggtggtcgtgtgatggtaacagatgctgacaggtcaatactatctccaggtggaagttgtggccccatcaaagtgaaaactgaacccacagaagattctggcatttccctggaaatggcagctgtgacagtaaaggaagaatcagaagatcctgattattatcaatataacattcaagcaggcccttctgaaactgatgatgttgatgaaaaacagcccctatcgaagcctttgcaaggaagccaccattcttcagagggcaatgaaggcacagaaatggaagtaccagcagaagatgatgattattctccaccgtctaagagaccaaaggccaatgagctaccgcagccaccagtcccggaacccgccaatgctgggaagcggaaagtgagggagttcaacttcgagaaatggaatgctcgcatcactgatctacgtaaacaagttgaagaattgtttgaaaggaaatatgctcaagccataaaagccaaaggtccggtgacgatcccgtaccctcttttccagtctcatgttgaagatctttatgtagaaggacttcctgaaggaattccttttagaaggccatctacttacggaattcctcgcctggagaggatattacttgcaaaggaaaggattcgttttgtgattaagaaacatgagcttctgaattcaacacgtgaagatttacagcttgataagccagcttcaggagtaaaggaagaatggtatgccagaatcactaaattaagaaagatggtggatcagcttttctgcaaaaaatttgcggaagccttggggagcactgaagccaaggctgtaccgtaccaaaaatttgaggcacacccgaatgatctgtacgtggaaggactgccagaaaacattcctttccgaagtccctcatggtatggaatcccaaggctggaaaaaatcattcaagtgggcaatcgaattaaatttgttattaaaagaccagaacttctgactcacagtaccactgaagttactcagccaagaacgaatacaccagtcaaagaagattggaatgtcagaattaccaagctacggaagcaagtggaagagatttttaatttgaaatttgctcaagctcttggactcaccgaggcagtaaaagtaccatatcctgtgtttgaatcaaacccggagttcttgaaaggatcgtccgcgggagtaataaaatcaagttcgttgttaaaaaacctgaactagttatttcctacttgcctcctgggatggctagtaaaataaacactaaagctttgcagtcccccaaaagaccacgaagtcctgggagtaattcaaaggttcctgaaattgaggtcaccgtggaaggccctaataacaacaatcctcaaacctcagctgttcgaaccccgacccagactaacggttctaacgttcccttcaagccacgagggagagagttttcctttgaggcctggaatgccaaaatcacggacctaaaacagaaagttgaaaatctcttcaatgagaaatgtggggaagctcttggccttaaacaagctgtgaaggtgccgttcgcgttatttgagtctttcccggaagacttttatgtggaaggcttacctgagggtgtgccattccgaagaccatcgacttttggcattccgaggctggagaagatactcagaaacaaagccaaaattaagttcatcattaaaaagcccgaaatgtttgagacggcgattaaggagagcacctcctctaagagccctcccagaaaaataaattcatcacccaatgttaatactactgcatcaggtgttgaagaccttaacatcattcaggtgacaattccagatgatgataatgaaagactctcgaaagttgaaaaagctagacagctaagagaacaagtgaatgacctctttagtcggaaatttggtgaagctattggtatgggttttcctgtgaaagttccctacaggaaaatcacaattaaccctggctgtgtggtggttgatggcatgcccccgggggtgtccttcaaagcccccagctacctggaaatcagctccatgagaaggatcttagactctgccgagtttatcaaattcacggtcattagaccatttccaggacttgtgattaataaccagctggttgatcagagtgagtcagaaggccccgtgatacaagaatcagctgaaccaagccagttggaagttccagccacagaagaaataaaagagactgatggaagctctcagatcaagcaagaaccagaccccacgtggtagacctcttccctcctagggtaaatcagcttctgtgtcagggatgctgtgtggtgtccatctgaaccccctgcatacgcgtagctaatgtgatctccccactttcacataagatggtggccctgccttcagggaatgtgggagccaggtgggagccttcccggatatttaagctagaagattctacagggagattctccttggatcaatatatgtctctcagtcaaagatgtaaaagcacttttgccttaaaaagaatgttctgtttctaaatagagtcaacgttgtcctcctcattggaattcactatgagtcagaatcattagactgacttttttttttccatagtaatagtattttgcagagtctcacagagctgcagatcttttgttcatcttgcagagttaacaagtctgatcctgttagtccagatttcttaaatttggccaagttataataggagcagtagcttgagacccgaagtcaggaaactttgacaatggatttttttttttaatccagagacttgtactggaatttgccttaccctgtcagctcatggacttaaggtttcatcccgctttatgagtgcttctgaatccaagtcattgttacctgaatttgcaaattaagttgtgatattcgtgactgttaaattcctgtaattagattaacctctttgcttgcttgtttgttttctctcctattttagcttaaagtatcagtggttgagaagagcttttcggacctgttactaccccaagctgtgtaatatacttgtataacagaaataccttctatacaaacctttttttctacttttagatagaaatgtctactttttcagcagttctgtgaattaaagagcagagtgactgtgggtctggaatggctggtgtacttgggaatgtactatcaggattttacagcaatgctgggaaatgacagggaaaatgacaggaatgaatctcaccagattttttatgtactcagcagagccttgagttacggtgtttattttccaatcaagtgaagatatctcctacttctcctactggaacatctcagcttctgcagtgaagaaaaattcctgtgatagttcagttctttagtttttctatttgaaaaaaaaaaatcatttaaatgatcctttgttcacggctctccttaatgactgagtgaacagttcctatctgtatatttgactaaaccttttcctaagctatctctcatggttcctatgtttttttatcataattaaaagcaaaaccatctggatcacctaacagtcagaggtcagtatctcagcgtgtgaattatagaggaaatacagagagaacctcttccacttttacttttcgtccaaataaaatgcatggtgtaccagaagttgaagatcgggttgaggattggggctagctcgatgacactaaggccccaacatcgcgggacctgctgtggcgcggattcttaggaacgctgttctagccggccccctctccaggggtcgccgtggccggcattatttcctagttcttcttgtaaccctgaggtgccagcgcggggagtgaggaggggtcagggggctaaggatgcaacctctgacgttctgcgccttcctaggagagtcttacatgtgttgagatttcacaagcaatgcgagttgtaaaataccagctctacaagaagctaggctctgtgacggcatagttttcagtagctttatcacaatattcacaatggagaattatatgacatggtagcagaaataggcccttttatgtgttgcttctattttacctcaaattgtagatatagggtaatcaataaaatccatccatgcctttcacacactaagt

SEQ ID NO: 4077 - protein, 584 aa, Homo sapiens
MVVTFLMSALESMCKELAKSKAEVACIAVYETDVFVVGTERGRAFVNTRKDFQKDFVKYCVEEEEKAAEMHKMKSTTQANRMSVDAVEIETLRKTVEDYFCFCYGKALGKSTVVPVPYEKMLRDQSAVVVQGLPEGVAFKHPENYDLATLKWILENKAGISFIIKRPFLEPKKHVGGRVMVTDADRSILSPGGSCGPIKVKTEPTEDSGISLEMAAVTVKEESEDPDYYQYNIQAGPSETDDVDEKQPLSKPLQGSHHSSEGNEGTEMEVPAEDDDYSPPSKRPKANELPQPPVPEPANAGKRKVREFNFEKWNARITDLRKQVEELFERKYAQAIKAKGPVTIPYPLFQSHVEDLYVEGLPEGIPFRRPSTYGIPRLERILLAKERIRFVIKKHELLNSTREDLQLDKPASGVKEEWYARITKLRKMVDQLFCKKFAEALGSTEAKAVPYQKFEAHPNDLYVEGLPENIPFRSPSWYGIPRLEKIIQVGNRIKFVIKRPELLTHSTTEVTQPRTNTPVKEDWNVRITKLRKQVEEIFNLKFAQALGLTEAVKVPYPVFESNPEFLKGSSAGVIKSSSLLKNLN

SEQ ID NO: 4078 - DNA, 7288 bp, Homo sapiens
aaaaaaaaaaaaaaaaaaaaaaaaaaaagaaaaaagaaaaaaaaaaggaggaggaggaggagggtgagagagaagctgggagagcagagaaaaggggccaccggtcgcccccccgcttccccgcacgcgctctccagccgcggccgcccgcctgccgcggtcaccccggcctctgcctctgtcccccagtgatcggatcaaggcgctgagcgaggccctgcctgcggggcggccatgcggcggtgacaggagcgcgaccgacacgcacgggcccctcgccccctctcgcctcccgtccgctcgccagctcccctcagccgaggctgctccgcggcggccgcagcccgcgcgcggcccacactcgcctcccctcggcacccccggccccggagctgcctggaggcggccgcactcggtgtaaagaactggccaagtccaaagccgaagtggcctgcattgcagtgtatgaaacagacgtgtttgtcgtcggaactgaaagaggacgtgcttttgtcaataccagaaaggattttcaaaaagattttgtaaaatattgtgttgaagaagaagaaaaagctgcagagatgcataaaatgaaatctacaacccaggcaaatcggatgagtgtagatgctgtagaaattgaaacactcagaaaaacagttgaggactatttctgcttttgctatgggaaagctttaggcaaatccacagtggtacctgtaccatatgagaagatgctgcgagaccagtcggctgtggtagtgcaggggcttccggaaggtgttgcctttaaacaccccgagaactatgatcttgcaaccctgaaatggattttggagaacaaagcagggatttcattcatcattaagagaccttttttagagccaaagaagcatgtaggtggtcgtgtgatggtaacagatgctgacaggtcaatactatctccaggtggaagttgtggccccatcaaagtgaaaactgaacccacagaagattctggcatttccctggaaatggcagctgtgacagtaaaggaagaatcagaagatcctgattattatcaatataacattcaagcaggcccttctgaaactgatgatgttgatgaaaaacagcccctatcgaagcctttgcaaggaagccaccattcttcagagggcaatgaaggcacagaaatggaagtaccagcagaagatgatgattattctccaccgtctaagagaccaaaggccaatgagctaccgcagccaccagtcccggaacccgccaatgctgggaagcggaaagtgagggagttcaacttcgagaaatggaatgctcgcatcactgatctacgtaaacaagttgaagaattgtttgaaaggaaatatgctcaagccataaaagccaaaggtccggtgacgatcccgtaccctcttttccagtctcatgttgaagatctttatgtagaaggacttcctgaaggaattccttttagaaggccatctacttacggaattcctcgcctggagaggatattacttgcaaaggaaaggattcgttttgtgattaagaaacatgagcttctgaattcaacacgtgaagatttacagcttgataagccagcttcaggagtaaaggaagaatggtatgccagaatcactaaattaagaaagatggtggatcagcttttctgcaaaaaatttgcggaagccttggggagcactgaagccaaggctgtaccgtaccaaaaatttgaggcacacccgaatgatctgtacgtggaaggactgccagaaaacattcctttccgaagtccctcatggtatggaatcccaaggctggaaaaaatcattcaagtgggcaatcgaattaaatttgttattaaaagaccagaacttctgactcacagtaccactgaagttactcagccaagaacgaatacaccagtcaaagaagattggaatgtcagaattaccaagctacggaagcaagtggaagagatttttaatttgaaatttgcttagatttgttgacagcggtttcctggagtgctgtcttgagaacgattctgaggaggctcagcaagaaagagtgtttcagttgattgggtgtgtctgtcatggagaaggaactcaagctcttggactcaccgaggcagtaaaagtaccatatcctgtgtttgaatcaaacccggagttcttgtatgtggaaggcttgccagaggggattcccttccgaagccctacctggtttggaattccacgacttgaaaggatcgtccgcgggagtaataaaatcaagttcgttgttaaaaaacctgaactagttatttcctacttgcctcctgggatggctagtaaaataaacactaaagctttgcagtcccccaaaagaccacgaagtcctgggagtaattcaaaggttcctgaaattgaggtcaccgtggaaggccctaataacaacaatcctcaaacctcagctgttcgaaccccgacccagactaacggttctaacgttcccttcaagccacgagggagagagttttcctttgaggcctggaatgccaaaatcacggacctaaaacagaaagttgaaaatctcttcaatgagaaatgtggggaagctcttggccttaaacaagctgtgaaggtgccgttcgcgttatttgagtctttcccggaagacttttatgtggaaggcttacctgagggtgtgccattccgaagaccatcgacttttggcattccgaggctggagaagatactcagaaacaaagccaaaattaagttcatcattaaaaagcccgaaatgtttgagacggcgattaaggagagcacctcctctaagagccctcccagaaaaataaattcatcacccaatgttaatactactgcatcaggtgttgaagaccttaacatcattcaggtgacaattccagatgatgataatgaaagactctcgaaagttgaaaaagctagacagctaagagaacaagtgaatgacctctttagtcggaaatttggtgaagctattggtatgggttttcctgtgaaagttccctacaggaaaatcacaattaaccctggctgtgtggtggttgatggcatgcccccgggggtgtccttcaaagcccccagctacctggaaatcagctccatgagaaggatcttagactctgccgagtttatcaaattcacggtcattaggtaagtgagagtttcctgcttagtcacaggagcgaatctggagctcatgaggctgactcttctaaaatgcagccacaggtagtcatcgaatccggcttcctatgctgtgcaatcaacaaatcaaaataacttgtgtcatcattagaatgtcagatgtgcttctacgaactaagctgactcttttaattctttggcaaagggttggcaaactaggactgtttgccaaattcaggctgcctcctatttttagagtcttcctgaaacacagctacacccgtattatccatggctgctttcctgtcacagtgagtaagtagctgggactgagaaggcatggcctccaaagtctaaaatatttactctctagcactttgtagaaaaaccttagctaggcacagtggctaacgcctgtaatcccagcattttgggaggccaaggcaggcagatcacctgaggtcaggagttccagaccagcctggccaacatggtgaaatcccatctctacaaaaataaaacagttagctgggcatgatggcgggtgcctgtaatcccagctactcgggaggctgaggcaggatagtcgcttgaacccaggaggtggaggttgcaatgagccaagatcatgccactgcactccagcctggacgacagagtgagactccatcacaagaaaaaaagaactttgtcaacctctgtcttagggcgccttgtcacaggcttcgggtcagacggattcaaccttgcatcagccatttgttagccaggtcactctgttctttgtctgtaaatgagattgatcgttgttcccactgagagtgtcagctccttcccgtagagcaggcatgatgattgtactcacctctgacaccattgtgagtgccacattccttcccacgtccttgtcactgtaagagatgcccacctgagcaccaaccccaggttatcttcccctttgtcttccagccccccagaaacagctacgactcaacctacccaatcatttcatcatcagattgccactgtctctagttcaggtctcttgggactggcactcagaaatctcataataaatcctcttgaggcttctcatacactcgtcttcttccaatcttctttccctcaaaatctcatattttggttccacttcacccaccgtcattctccatatcactcccaggagttaggcaaaaagccccttccgttcttccgtatgttaaacttagaatcactctgttccctgctctgcgtttctattttttgtttttcctccatttactagtagcttaacactttctaacagtgttcttattattgatacgtatctatctcttccataagcttataaggtcacggataatacttctcattgtagtacgtaaatgacgtgggctagatatgagttgaataaacagttatacctgtaaattcttacagagtgaaaataaattgttatactttacaatttgtttctctctttagaccatttccaggacttgtgattaataaccgtgagtattttgtgaagtgttttgtttttgttttttcctggggtctgacgtgtgtgcgtgtgagtgtgtatacatgcttaacgtatatcacgttacttcacctatgtcagtaaccaggccaaatacttgttttagccctcagtaaaaacaccaggcacttcctagttgtaaaattattcaagcttcttaacttcctatcctcgatgcacttaatcataaaatggtaataatagcaccgattttgggggagtcgttccagtagatggaaagcatctggaacaggtgtcagcaagctcctgccgacgtgtatgcataaagttttattgaaaccaccatcgtgtccatttgtttatggcagaactgagagatggcagcagcaagtgtgtgcctgcaaaacctaaaatatttactaattggctctgcaagaaaagagtttgcatccccctaacctagaacagtgtctagcctctagtatgtgtttagcctacagtatgtgctcagcgaatacaatctatatttattactgcttttatgactgttataattactgtgcttggatttcgttacaaagtaagtcacaatgtgcctgcttctgttagtatttcagcacagtgcctggcacacatggggctctcaaatattgctgagcgagtgaacaaatgtcctttcaattccttaacgttgatgtcattttcaatagtattttgagccaaacttaattttgcgagtgtgttttgttttcttaactttattattaaaaatgtataaaagtgaggccaggcgtggtggctcacgcctgtaatcccagcagtttgggaggctgaggcaggcggatcagttgaggttgggagttggagaccagcccgtccaacatggtgaaagcctgtctctactaaaaatacaaaaatcagctgggtgtggtggcgcgtgcctgtaatcccagctactcaggaggctgaggcaggagagttgcttgaatcctagaggtggaggttgcagtgagctgagatcgtgccattgcactccagcctgggcaacaagagcaaaactctgtcccaataaataaataaataaaatgttctcttttgttcctgttcttgtgcggtagtgtggtatagagttttatggtaattactgtgaattagtgattctgagggacatatcagaactctgaggtttgtttccttctcatcttgagggaaacagcaaatgtatgttaaaatgcttttccaagggaacaacacatccttacattatttaaaccaatctgcttcattttcagagctggttgatcagagtgagtcagaaggccccgtgatacaagaatcagctgaaccaagccagttggaagttccagccacagaagaaataaaagagactgatggaagctctcagatcaagcaagaaccagaccccacgtggtagacctcttccctcctaggcttaaagtatcagtggttgagaagagcttttcggacctgttactaccccaagctgtgtaatatacttgtataacagaaataccttctatacaaacctttttttctacttttagatagaaatgtctactttttcagcagttctgtgaattaaagagcagagtgactgtgggtctggaatggctggtgtacttgggaatgtactatcaggattttacagcaatgctgggaaatgacagggaaaatgacaggaatgaatctcaccagattttttatgtactcagcagagccttgagttacggtgtttattttccaatcaagtgaagatatctcctacttctcctactggaacatctcagcttctgcagtgaagaaaaattcctgtgatagttcagttctttagtttttctatttgaaaaaaaaaaatcatttaaatgatcctttgttcacggctctccttaatgactgagtgaacagttcctatctgtatatttgactaaaccttttcctaagctatctctcatggttcctatgtttttttatcataattaaaagcaaaaccatctggatcacctaacagtcagaggtcagtatctcagcgtgtgaattatagaggaaatacagagagaacctcttccacttttacttttcgtccaaataaaatgcatggtgtaccagaagttgaagatcgggttgaggattggggctagctcgatgacactaaggccccaacatcgcgggacctgctgtggcgcggattcttaggaacgctgttctagccggccccctctccaggggtcgccgtggccggcattatttcctagttcttcttgtaaccctgaggtgccagcgcggggagtgaggaggggtcagggggctaaggatgcaacctctgacgttctgcgccttcctaggagagtcttacatgtgttgagatttcacaagcaatgcgagttgtaaaataccagctctacaagaagctaggctctgtgacggcatagttttcagtagctttatcacaatattcacaatggagaattatatgacatggtagcagaaataggcccttttatgtgttgcttctattttacctcaaattgtagatatagggtaatcaataaaatccatccatgcctttcacacactaagt

SEQ ID NO: 4079 - protein, 474 aa, Homo sapiens; identical to SEQ ID NO: 4025

SEQ ID NO: 4080 - DNA, 4248 bp, Homo sapiens
aaaaaaaaaaaaaaaaaaaaaaaaaaaagaaaaaagaaaaaaaaaaggaggaggaggaggagggtgagagagaagctgggagagcagagaaaaggggccaccggtcgcccccccgcttccccgcacgcgctctccagccgcggccgcccgcctgccgcggtcaccccggcctctgcctctgtcccccagtgatcggatcaaggcgctgagcgaggccctgcctgcggggcggccatgcggcggtgacaggagcgcgaccgacacgcacgggcccctcgccccctctcgcctcccgtccgctcgccagctcccctcagccgaggctgctccgcggcggccgcagcccgcgcgcggcccacactcgcctccccgttgaagatgaggagtcctcggagagcaggatggtggtgacattcctcatgtcagctctcgagtccatgtgtaaagaactggccaagtccaaagccgaagtggcctgcattgcagtgtatgaaacagacgtgtttgtcgtcggaactgaaagaggacgtgcttttgtcaataccagaaaggattttcaaaaagattttgtaaaatattgtgttgaagaagaagaaaaagctgcagagatgcataaaatgaaatctacaacccaggcaaatcggatgagtgtagatgctgtagaaattgaaacactcagaaaaacagttgaggactatttctgcttttgctatgggaaagctttaggcaaatccacagtggtacctgtaccatatgagaagatgctgcgagaccagtcggctgtggtagtgcaggggcttccggaaggtgttgcctttaaacaccccgagaactatgatcttgcaaccctgaaatggattttggagaacaaagcagggatttcattcatcattaagagaccttttttagagccaaagaagcatgtaggtggtcgtgtgatggtaacagatgctgacaggtcaatactatctccaggtggaagttgtggccccatcaaagtgaaaactgaacccacagaagattctggaagccaccattcttcagagggcaatgaaggcacagaaatggaagtaccagcagaagattctactcaacatgtcccttcagaaacaagtgaggaccctgaagttgaggtgactattgaagatgatgattattctccaccgtctaagagaccaaaggccaatgagctaccgcagccaccagtcccggaacccgccaatgctgggaagcggaaagtgagggagttcaacttcgagaaatggaatgctcgcatcactgatctacgtaaacaagttgaagaattgtttgaaaggaaatatgctcaagccataaaagccaaaggtccggtgacgatcccgtaccctcttttccagtctcatgttgaagatctttatgtagaaggacttcctgaaggaattccttttagaaggccatctacttacggaattcctcgcctggagaggatattacttgcaaaggaaaggattcgttttgtgattaagaaacatgagcttctgaattcaacacgtgaagatttacagcttgataagccagcttcaggagtaaaggaagaatggtatgccagaatcactaaattaagaaagatggtggatcagcttttctgcaaaaaatttgcggaagccttggggagcactgaagccaaggctgtaccgtaccaaaaatttgaggcacacccgaatgatctgtacgtggaaggactgccagaaaacattcctttccgaagtccctcatggtatggaatcccaaggctggaaaaaatcattcaagtgggcaatcgaattaaatttgttattaaaagaccagaacttctgactcacagtaccactgaagttactcagccaagaacgaatacaccagtcaaagaagattggaatgtcagaattaccaagctacggaagcaagtggaagagatttttaatttgaaatttgcttagatttgttgacagcggtttcctggagtgctgtcttgagaacgattctgaggaggctcagcaagaaagagtgtttcagttgattgggtgtgtctgtcatggagaaggaactcaagctcttggactcaccgaggcagtaaaagtaccatatcctgtgtttgaatcaaacccggagttcttgtatgtggaaggcttgccagaggggattcccttccgaagccctacctggtttggaattccacgacttgaaaggatcgtccgcgggagtaataaaatcaagttcgttgttaaaaaacctgaactagttatttcctacttgcctcctgggatggctagtaaaataaacactaaagctttgcagtcccccaaaagaccacgaagtcctgggagtaattcaaaggttcctgaaattgaggtcaccgtggaaggccctaataacaacaatcctcaaacctcagctgttcgaaccccgacccagactaacggttctaacgttcccttcaagccacgagggagagagttttcctttgaggcctggaatgccaaaatcacggacctaaaacagaaagttgaaaatctcttcaatgagaaatgtggggaagctcttggccttaaacaagctgtgaaggtgccgttcgcgttatttgagtctttcccggaagacttttatgtggaaggcttacctgagggtgtgccattccgaagaccatcgacttttggcattccgaggctggagaagatactcagaaacaaagccaaaattaagttcatcattaaaaagcccgaaatgtttgagacggcgattaaggagagcacctcctctaagagccctcccagaaaaataaattcatcacccaatgttaatactactgcatcaggtgttgaagaccttaacatcattcaggtgacaattccagatgatgataatgaaagactctcgaaagttgaaaaagctagacagctaagagaacaagtgaatgacctctttagtcggaaatttggtgaagctattggtatgggttttcctgtgaaagttccctacaggaaaatcacaattaaccctggctgtgtggtggttgatggcatgcccccgggggtgtccttcaaagcccccagctacctggaaatcagctccatgagaaggatcttagactctgccgagtttatcaaattcacggtcattagaccatttccaggacttgtgattaataaccagctggttgatcagagtgagtcagaaggccccgtgatacaagaatcagctgaaccaagccagttggaagttccagccacagaagaaataaaagagactgatggaagctctcagatcaagcaagaaccagaccccacgtggtagacctcttccctcctaggcttaaagtatcagtggttgagaagagcttttcggacctgttactaccccaagctgtagccttgagttacggtgtttattttccaatcaagtgaagatatctcctacttctcctactggaacatctcagcttctgcagtgaagaaaaattcctgtgatagttcagttctttagtttttctatttgaaaaaaaaaaatcatttaaatgatcctttgttcacggctctccttaatgactgagtgaacagttcctatctgtatatttgactaaaccttttcctaagctatctctcatggttcctatgtttttttatcataattaaaagcaaaaccatctggatcacctaacagtcagaggtcagtatctcagcgtgtgaattatagaggaaatacagagagaacctcttccacttttacttttcgtccaaataaaatgcatggtgtaccagaagttgaagatcgggttgaggattggggctagctcgatgacactaaggccccaacatcgcgggacctgctgtggcgcggattcttaggaacgctgttctagccggccccctctccaggggtcgccgtggccggcattatttcctagttcttcttgtaaccctgaggtgccagcgcggggagtgaggaggggtcagggggctaaggatgcaacctctgacgttctgcgccttcctaggagagtcttacatgtgttgagatttcacaagcaatgcgagttgtaaaataccagctctacaagaagctaggctctgtgacggcatagttttcagtagctttatcacaatattcacaatggagaattatatgacatggtagcagaaataggcccttttatgtgttgcttctattttacctcaaattgtagatatagggtaatcaataaaatccatccatgcctttcacacactaagt

SEQ ID NO: 4081 - protein, 518 aa, Homo sapiens; identical to SEQ ID NO: 4051

SEQ ID NO: 4082 - DNA, 5059 bp, Homo sapiens
aaaaaaaaaaaaaaaaaaaaaaaaaaaagaaaaaagaaaaaaaaaaggaggaggaggaggagggtgagagagaagctgggagagcagagaaaaggggccaccggtcgcccccccgcttccccgcacgcgctctccagccgcggccgcccgcctgccgcggtcaccccggcctctgcctctgtcccccagtgatcggatcaaggcgctgagcgaggccctgcctgcggggcggccatgcggcggtgacaggagcgcgaccgacacgcacgggcccctcgccccctctcgcctcccgtccgctcgccagctcccctcagccgaggctgctccgcggcggccgcagcccgcgcgcggcccacactcgcctccccgttgaagatgaggagtcctcggagagcaggatggtggtgacattcctcatgtcagctctcgagtccatgtgtaaagaactggccaagtccaaagccgaagtggcctgcattgcagtgtatgaaacagacgtgtttgtcgtcggaactgaaagaggacgtgcttttgtcaataccagaaaggattttcaaaaagattttgtaaaatattgtgttgaagaagaagaaaaagctgcagagatgcataaaatgaaatctacaacccaggcaaatcggatgagtgtagatgctgtagaaattgaaacactcagaaaaacagttgaggactatttctgcttttgctatgggaaagctttaggcaaatccacagtggtacctgtaccatatgagaagatgctgcgagaccagtcggctgtggtagtgcaggggcttccggaaggtgttgcctttaaacaccccgagaactatgatcttgcaaccctgaaatggattttggagaacaaagcagggatttcattcatcattaagagaccttttttagagccaaagaagcatgtaggtggtcgtgtgatggtaacagatgctgacaggtcaatactatctccaggtggaagttgtggccccatcaaagtgaaaactgaacccacagaagattctggcatttccctggaaatggcagctgtgacagtaaaggaagaatcagaagatcctgattattatcaatataacattcaagcaggcccttctgaaactgatgatgttgatgaaaaacagcccctatcgaagcctttgcaaggaagccaccattcttcagagggcaatgaaggcacagaaatggaagtaccagcagaagatgatgattattctccaccgtctaagagaccaaaggccaatgagctaccgcagccaccagtcccggaacccgccaatgctgggaagcggaaagtgagggagttcaacttcgagaaatggaatgctcgcatcactgatctacgtaaacaagttgaagaattgtttgaaaggaaatatgctcaagccataaaagccaaaggtccggtgacgatcccgtaccctcttttccagtctcatgttgaagatctttatgtagaaggacttcctgaaggaattccttttagaaggccatctacttacggaattcctcgcctggagaggatattacttgcaaaggaaaggattcgttttgtgattaagaaacatgagcttctgaattcaacacgtgaagatttacagcttgataagccagcttcaggagtaaaggaagaatggtatgccagaatcactaaattaagaaagatggtggatcagcttttctgcaaaaaatttgcggaagccttggggagcactgaagccaaggctgtaccgtaccaaaaatttgaggcacacccgaatgatctgtacgtggaaggactgccagaaaacattcctttccgaagtccctcatggtatggaatcccaaggctggaaaaaatcattcaagtgggcaatcgaattaaatttgttattaaaagaccagaacttctgactcacagtaccactgaagttactcagccaagaacgaatacaccagctcaagctcttggactcaccgaggcagtaaaagtaccatatcctgtgtttgaatcaaacccggagttcttgtatgtggaaggcttgccagaggggattcccttccgaagccctacctggtttggaattccacgacttgaaaggatcgtccgcgggagtaataaaatcaagttcgttgttaaaaaacctgaactagttatttcctacttgcctcctgggatggctagtaaaataaacactaaagctttgcagtcccccaaaagaccacgaagtcctgggagtaattcaaaggttcctgaaattgaggtcaccgtggaaggccctaataacaacaatcctcaaacctcagctgttcgaaccccgacccagactaacggttctaacgttcccttcaagccacgagggagagagttttcctttgaggcctggaatgccaaaatcacggacctaaaacagaaagttgaaaatctcttcaatgagaaatgtggggaagctcttggccttaaacaagctgtgaaggtgccgttcgcgttatttgagtctttcccggaagacttttatgtggaaggcttacctgagggtgtgccattccgaagaccatcgacttttggcattccgaggctggagaagatactcagaaacaaagccaaaattaagttcatcattaaaaagcccgaaatgtttgagacggcgattaaggagagcacctcctctaagagccctcccagaaaaataaattcatcacccaatgttaatactactgcatcaggtgttgaagaccttaacatcattcaggtgacaattccagatgatgataatgaaagactctcgaaagttgaaaaagctagacagctaagagaacaagtgaatgacctctttagtcggaaatttggtgaagctattggtatgggttttcctgtgaaagttccctacaggaaaatcacaattaaccctggctgtgtggtggttgatggcatgcccccgggggtgtccttcaaagcccccagctacctggaaatcagctccatgagaaggatcttagactctgccgagtttatcaaattcacggtcattagaccatttccaggacttgtgattaataaccagctggttgatcagagtgagtcagaaggccccgtgatacaagaatcagctgaaccaagccagttggaagttccagccacagaagaaataaaagagactgatggaagctctcagatcaagcaagaaccagaccccacgtggtagacctcttccctcctagggtaaatcagcttctgtgtcagggatgctgtgtggtgtccatctgaaccccctgcatacgcgtagctaatgtgatctccccactttcacataagatggtggccctgccttcagggaatgtgggagccaggtgggagccttcccggatatttaagctagaagattctacagggagattctccttggatcaatatatgtctctcagtcaaagatgtaaaagcacttttgccttaaaaagaatgttctgtttctaaatagagtcaacgttgtcctcctcattggaattcactatgagtcagaatcattagactgacttttttttttccatagtaatagtattttgcagagtctcacagagctgcagatcttttgttcatcttgcagagttaacaagtctgatcctgttagtccagatttcttaaatttggccaagttataataggagcagtagcttgagacccgaagtcaggaaactttgacaatggatttttttttttaatccagagacttgtactggaatttgccttaccctgtcagctcatggacttaaggtttcatcccgctttatgagtgcttctgaatccaagtcattgttacctgaatttgcaaattaagttgtgatattcgtgactgttaaattcctgtaattagattaacctctttgcttgcttgtttgttttctctcctattttagcttaaagtatcagtggttgagaagagcttttcggacctgttactaccccaagctgtgtaatatacttgtataacagaaataccttctatacaaacctttttttctacttttagatagaaatgtctactttttcagcagttctgtgaattaaagagcagagtgactgtgggtctggaatggctggtgtacttgggaatgtactatcaggattttacagcaatgctgggaaatgacagggaaaatgacaggaatgaatctcaccagattttttatgtactcagcagagccttgagttacggtgtttattttccaatcaagtgaagatatctcctacttctcctactggaacatctcagcttctgcagtgaagaaaaattcctgtgatagttcagttctttagtttttctatttgaaaaaaaaaaatcatttaaatgatcctttgttcacggctctccttaatgactgagtgaacagttcctatctgtatatttgactaaaccttttcctaagctatctctcatggttcctatgtttttttatcataattaaaagcaaaaccatctggatcacctaacagtcagaggtcagtatctcagcgtgtgaattatagaggaaatacagagagaacctcttccacttttacttttcgtccaaataaaatgcatggtgtaccagaagttgaagatcgggttgaggattggggctagctcgatgacactaaggccccaacatcgcgggacctgctgtggcgcggattcttaggaacgctgttctagccggccccctctccaggggtcgccgtggccggcattatttcctagttcttcttgtaaccctgaggtgccagcgcggggagtgaggaggggtcagggggctaaggatgcaacctctgacgttctgcgccttcctaggagagtcttacatgtgttgagatttcacaagcaatgcgagttgtaaaataccagctctacaagaagctaggctctgtgacggcatagttttcagtagctttatcacaatattcacaatggagaattatatgacatggtagcagaaataggcccttttatgtgttgcttctattttacctcaaattgtagatatagggtaatcaataaaatccatccatgcctttcacacactaagt

SEQ ID NO: 4083 - protein, 933 aa, Homo sapiens
MVVTFLMSALESMCKELAKSKAEVACIAVYETDVFVVGTERGRAFVNTRKDFQKDFVKYCVEEEEKAAEMHKMKSTTQANRMSVDAVEIETLRKTVEDYFCFCYGKALGKSTVVPVPYEKMLRDQSAVVVQGLPEGVAFKHPENYDLATLKWILENKAGISFIIKRPFLEPKKHVGGRVMVTDADRSILSPGGSCGPIKVKTEPTEDSGISLEMAAVTVKEESEDPDYYQYNIQAGPSETDDVDEKQPLSKPLQGSHHSSEGNEGTEMEVPAEDDDYSPPSKRPKANELPQPPVPEPANAGKRKVREFNFEKWNARITDLRKQVEELFERKYAQAIKAKGPVTIPYPLFQSHVEDLYVEGLPEGIPFRRPSTYGIPRLERILLAKERIRFVIKKHELLNSTREDLQLDKPASGVKEEWYARITKLRKMVDQLFCKKFAEALGSTEAKAVPYQKFEAHPNDLYVEGLPENIPFRSPSWYGIPRLEKIIQVGNRIKFVIKRPELLTHSTTEVTQPRTNTPAQALGLTEAVKVPYPVFESNPEFLYVEGLPEGIPFRSPTWFGIPRLERIVRGSNKIKFVVKKPELVISYLPPGMASKINTKALQSPKRPRSPGSNSKVPEIEVTVEGPNNNNPQTSAVRTPTQTNGSNVPFKPRGREFSFEAWNAKITDLKQKVENLFNEKCGEALGLKQAVKVPFALFESFPEDFYVEGLPEGVPFRRPSTFGIPRLEKILRNKAKIKFIIKKPEMFETAIKESTSSKSPPRKINSSPNVNTTASGVEDLNIIQVTIPDDDNERLSKVEKARQLREQVNDLFSRKFGEAIGMGFPVKVPYRKITINPGCVVVDGMPPGVSFKAPSYLEISSMRRILDSAEFIKFTVIRPFPGLVINNQLVDQSESEGPVIQESAEPSQLEVPATEEIKETDGSSQIKQEPDPTW

SEQ ID NO: 4084 - DNA, 3818 bp, Homo sapiens
aaaaaaaaaaaaaaaaaaaaaaaaaaaagaaaaaagaaaaaaaaaaggaggaggaggaggagggtgagagagaagctgggagagcagagaaaaggggccaccggtcgcccccccgcttccccgcacgcgctctccagccgcggccgcccgcctgccgcggtcaccccggcctctgcctctgtcccccagtgatcggatcaaggcgctgagcgaggccctgcctgcggggcggccatgcggcggtgacaggagcgcgaccgacacgcacgggcccctcgccccctctcgcctcccgtccgctcgccagctcccctcagccgaggctgctccgcggcggccgcagcccgcgcgcggcccacactcgcctccccgttgaagatgaggagtcctcggagagcaggatggtggtgacattcctcatgtcagctctcgagtccatgtgtaaagaactggccaagtccaaagccgaagtggcctgcattgcagtgtatgaaacagacgtgtttgtcgtcggaactgaaagaggacgtgcttttgtcaataccagaaaggattttcaaaaagattttgtaaaatattgtgttgaagaagaagaaaaagctgcagagatgcataaaatgaaatctacaacccaggcaaatcggatgagtgtagatgctgtagaaattgaaacactcagaaaaacagttgaggactatttctgcttttgctatgggaaagctttaggcaaatccacagtggtacctgtaccatatgagaagatgctgcgagaccagtcggctgtggtagtgcaggggcttccggaaggtgttgcctttaaacaccccgagaactatgatcttgcaaccctgaaatggattttggagaacaaagcagggatttcattcatcattaagagaccttttttagagccaaagaagcatgtaggtggtcgtgtgatggtaacagatgctgacaggtcaatactatctccaggtggaagttgtggccccatcaaagtgaaaactgaacccacagaagattctggcatttccctggaaatggcagctgtgacagtaaaggaagaatcagaagatcctgattattatcaatataacattcaaggaagccaccattcttcagagggcaatgaaggcacagaaatggaagtaccagcagaagattctactcaacatgtcccttcagaaacaagtgaggaccctgaagttgaggtgactattgaagatgatgattattctccaccgtctaagagaccaaaggccaatgagctaccgcagccaccagtcccggaacccgccaatgctgggaagcggaaagtgagggagttcaacttcgagaaatggaatgctcgcatcactgatctacgtaaacaagttgaagaattgtttgaaaggaaatatgctcaagccataaaagccaaaggtccggtgacgatcccgtaccctcttttccagtctcatgttgaagatctttatgtagaaggacttcctgaaggaattccttttagaaggccatctacttacggaattcctcgcctggagaggatattacttgcaaaggaaaggattcgttttgtgattaagaaacatgagcttctgaattcaacacgtgaagatttacagcttgataagccagcttcaggagtaaaggaagaatggtatgccagaatcactaaattaagaaagatggtggatcagcttttctgcaaaaaatttgcggaagccttggggagcactgaagccaaggctgtaccgtaccaaaaatttgaggcacacccgaatgatctgtacgtggaaggactgccagaaaacattcctttccgaagtccctcatggtatggaatcccaaggctggaaaaaatcattcaagtgggcaatcgaattaaatttgttattaaaagaccagaacttctgactcacagtaccactgaagttactcagccaagaacgaatacaccagctcaagctcttggactcaccgaggcagtaaaagtaccatatcctgtgtttgaatcaaacccggagttcttgtatgtggaaggcttgccagaggggattcccttccgaagccctacctggtttggaattccacgacttgaaaggatcgtccgcgggagtaataaaatcaagttcgttgttaaaaaacctgaactagttatttcctacttgcctcctgggatggctagtaaaataaacactaaagctttgcagtcccccaaaagaccacgaagtcctgggagtaattcaaaggttcctgaaattgaggtcaccgtggaaggccctaataacaacaatcctcaaacctcagctgttcgaaccccgacccagactaacggttctaacgttcccttcaagccacgagggagagagttttcctttgaggcctggaatgccaaaatcacggacctaaaacagaaagttgaaaatctcttcaatgagaaatgtggggaagctcttggccttaaacaagctgtgaaggtgccgttcgcgttatttgagtctttcccggaagacttttatgtggaaggcttacctgagggtgtgccattccgaagaccatcgacttttggcattccgaggctggagaagatactcagaaacaaagccaaaattaagttcatcattaaaaagcccgaaatgtttgagacggcgattaaggagagcacctcctctaagagccctcccagaaaaataaattcatcacccaatgttaatactactgcatcaggtgttgaagaccttaacatcattcaggtgacaattccagatgatgataatgaaagactctcgaaagttgaaaaagctagacagctaagagaacaagtgaatgacctctttagtcggaaatttggtgaagctattggtatgggttttcctgtgaaagttccctacaggaaaatcacaattaaccctggctgtgtggtggttgatggcatgcccccgggggtgtccttcaaagcccccagctacctggaaatcagctccatgagaaggatcttagactctgccgagtttatcaaattcacggtcattagaccatttccaggacttgtgattaataaccagctggttgatcagagtgagtcagaaggccccgtgatacaagaatcagctgaaccaagccagttggaagttccagccacagaagaaataaaagagactgatggaagctctcagatcaagcaagaaccagaccccacgtggtagacctcttccctcctaggcaaaaccatctggatcacctaacagtcagaggtcagtatctcagcgtgtgaattatagaggaaatacagagagaacctcttccacttttacttttcgtccaaataaaatgcatggtgtaccagaagttgaagatcgggttgaggattggggctagctcgatgacactaaggccccaacatcgcgggacctgctgtggcgcggattcttaggaacgctgttctagccggccccctctccaggggtcgccgtggccggcattatttcctagttcttcttgtaaccctgaggtgccagcgcggggagtgaggaggggtcagggggctaaggatgcaacctctgacgttctgcgccttcctaggagagtcttacatgtgttgagatttcacaagcaatgcgagttgtaaaataccagctctacaagaagctaggctctgtgacggcatagttttcagtagctttatcacaatattcacaatggagaattatatgacatggtagcagaaataggcccttttatgtgttgcttctattttacctcaaattgtagatatagggtaatcaataaaatccatccatgcctttcacacactaagt

SEQ ID NO: 4085 - protein, 934 aa, Homo sapiens
MVVTFLMSALESMCKELAKSKAEVACIAVYETDVFVVGTERGRAFVNTRKDFQKDFVKYCVEEEEKAAEMHKMKSTTQANRMSVDAVEIETLRKTVEDYFCFCYGKALGKSTVVPVPYEKMLRDQSAVVVQGLPEGVAFKHPENYDLATLKWILENKAGISFIIKRPFLEPKKHVGGRVMVTDADRSILSPGGSCGPIKVKTEPTEDSGISLEMAAVTVKEESEDPDYYQYNIQGSHHSSEGNEGTEMEVPAEDSTQHVPSETSEDPEVEVTIEDDDYSPPSKRPKANELPQPPVPEPANAGKRKVREFNFEKWNARITDLRKQVEELFERKYAQAIKAKGPVTIPYPLFQSHVEDLYVEGLPEGIPFRRPSTYGIPRLERILLAKERIRFVIKKHELLNSTREDLQLDKPASGVKEEWYARITKLRKMVDQLFCKKFAEALGSTEAKAVPYQKFEAHPNDLYVEGLPENIPFRSPSWYGIPRLEKIIQVGNRIKFVIKRPELLTHSTTEVTQPRTNTPAQALGLTEAVKVPYPVFESNPEFLYVEGLPEGIPFRSPTWFGIPRLERIVRGSNKIKFVVKKPELVISYLPPGMASKINTKALQSPKRPRSPGSNSKVPEIEVTVEGPNNNNPQTSAVRTPTQTNGSNVPFKPRGREFSFEAWNAKITDLKQKVENLFNEKCGEALGLKQAVKVPFALFESFPEDFYVEGLPEGVPFRRPSTFGIPRLEKILRNKAKIKFIIKKPEMFETAIKESTSSKSPPRKINSSPNVNTTASGVEDLNIIQVTIPDDDNERLSKVEKARQLREQVNDLFSRKFGEAIGMGFPVKVPYRKITINPGCVVVDGMPPGVSFKAPSYLEISSMRRILDSAEFIKFTVIRPFPGLVINNQLVDQSESEGPVIQESAEPSQLEVPATEEIKETDGSSQIKQEPDPTW

SEQ ID NO: 4086 - DNA, 7900 bp, Homo sapiens
aaaaaaaaaaaaaaaaaaaaaaaaaaaagaaaaaagaaaaaaaaaaggaggaggaggaggagggtgagagagaagctgggagagcagagaaaaggggccaccggtcgcccccccgcttccccgcacgcgctctccagccgcggccgcccgcctgccgcggtcaccccggcctctgcctctgtcccccagtgatcggatcaaggcgctgagcgaggccctgcctgcggggcggccatgcggcggtgacaggagcgcgaccgacacgcacgggcccctcgccccctctcgcctcccgtccgctcgccagctcccctcagccgaggctgctccgcggcggccgcagcccgcgcgcggcccacactcgcctcccctcggcacccccggccccggagctgcctggaggcggccgcactcggggatcatggcccaagttgcaatgtccaccctccccgttgaagatgaggagtcctcggagagcaggatggtggtgacattcctcatgtcagctctcgagtccatgtgtaaagaactggccaagtccaaagccgaagtggcctgcattgcagtgtatgaaacagacgtgtttgtcgtcggaactgaaagaggacgtgcttttgtcaataccagaaaggattttcaaaaagattttgtaaaatattgtgttgaagaagaagaaaaagctgcagagatgcataaaatgaaatctacaacccaggcaaatcggatgagtgtagatgctgtagaaattgaaacactcagaaaaacagttgaggactatttctgcttttgctatgggaaagctttaggcaaatccacagtggtacctgtaccatatgagaagatgctgcgagaccagtcggctgtggtagtgcaggggcttccggaaggtgttgcctttaaacaccccgagaactatgatcttgcaaccctgaaatggattttggagaacaaagcagggatttcattcatcattaagagaccttttttagagccaaagaagcatgtaggtggtcgtgtgatggtaacagatgctgacaggtcaatactatctccaggtggaagttgtggccccatcaaagtgaaaactgaacccacagaagattctggcatttccctggaaatggcagctgtgacagtaaaggaagaatcagaagatcctgattattatcaatataacattcaagcaggcccttctgaaactgatgatgttgatgaaaaacagcccctatcgaagcctttgcaaggaagccaccattcttcagagggcaatgaaggcacagaaatggaagtaccagcagaagatgatgattattctccaccgtctaagagaccaaaggccaatgagctaccgcagccaccagtcccggaacccgccaatgctgggaagcggaaagtgagggagttcaacttcgagaaatggaatgctcgcatcactgatctacgtaaacaagttgaagaattgtttgaaaggaaatatgctcaagccataaaagccaaaggtccggtgacgatcccgtaccctcttttccagtctcatgttgaagatctttatgtagaaggacttcctgaaggaattccttttagaaggccatctacttacggaattcctcgcctggagaggatattacttgcaaaggaaaggattcgttttgtgattaagaaacatgagcttctgaattcaacacgtgaagatttacagcttgataagccagcttcaggagtaaaggaagaatggtatgccagaatcactaaattaagaaagatggtggatcagcttttctgcaaaaaatttgcggaagccttggggagcactgaagccaaggctgtaccgtaccaaaaatttgaggcacacccgaatgatctgtacgtggaaggactgccagaaaacattcctttccgaagtccctcatggtatggaatcccaaggctggaaaaaatcattcaagtgggcaatcgaattaaatttgttattaaaagaccagaacttctgactcacagtaccactgaagttactcagccaagaacgaatacaccagctcaagctcttggactcaccgaggcagtaaaagtaccatatcctgtgtttgaatcaaacccggagttcttgtatgtggaaggcttgccagaggggattcccttccgaagccctacctggtttggaattccacgacttgaaaggatcgtccgcgggagtaataaaatcaagttcgttgttaaaaaacctgaactagttatttcctacttgcctcctgggatggctagtaaaataaacactaaagctttgcagtcccccaaaagaccacgaagtcctgggagtaattcaaaggttcctgaaattgaggtcaccgtggaaggccctaataacaacaatcctcaaacctcagctgttcgaaccccgacccagactaacggttctaacgttcccttcaagccacgagggagagagttttcctttgaggcctggaatgccaaaatcacggacctaaaacagaaagttgaaaatctcttcaatgagaaatgtggggaagctcttggccttaaacaagctgtgaaggtgccgttcgcgttatttgagtctttcccggaagacttttatgtggaaggcttacctgagggtgtgccattccgaagaccatcgacttttggcattccgaggctggagaagatactcagaaacaaagccaaaattaagttcatcattaaaaagcccgaaatgtttgagacggcgattaaggagagcacctcctctaagagccctcccagaaaaataaattcatcacccaatgttaatactactgcatcaggtgttgaagaccttaacatcattcaggtgacaattccagatgatgataatgaaagactctcgaaagttgaaaaagctagacagctaagagaacaagtgaatgacctctttagtcggaaatttggtgaagctattggtatgggttttcctgtgaaagttccctacaggaaaatcacaattaaccctggctgtgtggtggttgatggcatgcccccgggggtgtccttcaaagcccccagctacctggaaatcagctccatgagaaggatcttagactctgccgagtttatcaaattcacggtcattaggtaagtgagagtttcctgcttagtcacaggagcgaatctggagctcatgaggctgactcttctaaaatgcagccacaggtagtcatcgaatccggcttcctatgctgtgcaatcaacaaatcaaaataacttgtgtcatcattagaatgtcagatgtgcttctacgaactaagctgactcttttaattctttggcaaagggttggcaaactaggactgtttgccaaattcaggctgcctcctatttttagagtcttcctgaaacacagctacacccgtattatccatggctgctttcctgtcacagtgagtaagtagctgggactgagaaggcatggcctccaaagtctaaaatatttactctctagcactttgtagaaaaaccttagctaggcacagtggctaacgcctgtaatcccagcattttgggaggccaaggcaggcagatcacctgaggtcaggagttccagaccagcctggccaacatggtgaaatcccatctctacaaaaataaaacagttagctgggcatgatggcgggtgcctgtaatcccagctactcgggaggctgaggcaggatagtcgcttgaacccaggaggtggaggttgcaatgagccaagatcatgccactgcactccagcctggacgacagagtgagactccatcacaagaaaaaaagaactttgtcaacctctgtcttagggcgccttgtcacaggcttcgggtcagacggattcaaccttgcatcagccatttgttagccaggtcactctgttctttgtctgtaaatgagattgatcgttgttcccactgagagtgtcagctccttcccgtagagcaggcatgatgattgtactcacctctgacaccattgtgagtgccacattccttcccacgtccttgtcactgtaagagatgcccacctgagcaccaaccccaggttatcttcccctttgtcttccagccccccagaaacagctacgactcaacctacccaatcatttcatcatcagattgccactgtctctagttcaggtctcttgggactggcactcagaaatctcataataaatcctcttgaggcttctcatacactcgtcttcttccaatcttctttccctcaaaatctcatattttggttccacttcacccaccgtcattctccatatcactcccaggagttaggcaaaaagccccttccgttcttccgtatgttaaacttagaatcactctgttccctgctctgcgtttctattttttgtttttcctccatttactagtagcttaacactttctaacagtgttcttattattgatacgtatctatctcttccataagcttataaggtcacggataatacttctcattgtagtacgtaaatgacgtgggctagatatgagttgaataaacagttatacctgtaaattcttacagagtgaaaataaattgttatactttacaatttgtttctctctttagaccatttccaggacttgtgattaataaccgtgagtattttgtgaagtgttttgtttttgttttttcctggggtctgacgtgtgtgcgtgtgagtgtgtatacatgcttaacgtatatcacgttacttcacctatgtcagtaaccaggccaaatacttgttttagccctcagtaaaaacaccaggcacttcctagttgtaaaattattcaagcttcttaacttcctatcctcgatgcacttaatcataaaatggtaataatagcaccgattttgggggagtcgttccagtagatggaaagcatctggaacaggtgtcagcaagctcctgccgacgtgtatgcataaagttttattgaaaccaccatcgtgtccatttgtttatggcagaactgagagatggcagcagcaagtgtgtgcctgcaaaacctaaaatatttactaattggctctgcaagaaaagagtttgcatccccctaacctagaacagtgtctagcctctagtatgtgtttagcctacagtatgtgctcagcgaatacaatctatatttattactgcttttatgactgttataattactgtgcttggatttcgttacaaagtaagtcacaatgtgcctgcttctgttagtatttcagcacagtgcctggcacacatggggctctcaaatattgctgagcgagtgaacaaatgtcctttcaattccttaacgttgatgtcattttcaatagtattttgagccaaacttaattttgcgagtgtgttttgttttcttaactttattattaaaaatgtataaaagtgaggccaggcgtggtggctcacgcctgtaatcccagcagtttgggaggctgaggcaggcggatcagttgaggttgggagttggagaccagcccgtccaacatggtgaaagcctgtctctactaaaaatacaaaaatcagctgggtgtggtggcgcgtgcctgtaatcccagctactcaggaggctgaggcaggagagttgcttgaatcctagaggtggaggttgcagtgagctgagatcgtgccattgcactccagcctgggcaacaagagcaaaactctgtcccaataaataaataaataaaatgttctcttttgttcctgttcttgtgcggtagtgtggtatagagttttatggtaattactgtgaattagtgattctgagggacatatcagaactctgaggtttgtttccttctcatcttgagggaaacagcaaatgtatgttaaaatgcttttccaagggaacaacacatccttacattatttaaaccaatctgcttcattttcagagctggttgatcagagtgagtcagaaggccccgtgatacaagaatcagctgaaccaagccagttggaagttccagccacagaagaaataaaagagactgatggaagctctcagatcaagcaagaaccagaccccacgtggtagacctcttccctcctagggtaaatcagcttctgtgtcagggatgctgtgtggtgtccatctgaaccccctgcatacgcgtagctaatgtgatctccccactttcacataagatggtggccctgccttcagggaatgtgggagccaggtgggagccttcccggatatttaagctagaagattctacagggagattctccttggatcaatatatgtctctcagtcaaagatgtaaaagcacttttgccttaaaaagaatgttctgtttctaaatagagtcaacgttgtcctcctcattggaattcactatgagtcagaatcattagactgacttttttttttccatagtaatagtattttgcagagtctcacagagctgcagatcttttgttcatcttgcagagttaacaagtctgatcctgttagtccagatttcttaaatttggccaagttataataggagcagtagcttgagacccgaagtcaggaaactttgacaatggatttttttttttaatccagagacttgtactggaatttgccttaccctgtcagctcatggacttaaggtttcatcccgctttatgagtgcttctgaatccaagtcattgttacctgaatttgcaaattaagttgtgatattcgtgactgttaaattcctgtaattagattaacctctttgcttgcttgtttgttttctctcctattttagcttaaagtatcagtggttgagaagagcttttcggacctgttactaccccaagctgtgtaatatacttgtataacagaaataccttctatacaaacctttttttctacttttagatagaaatgtctactttttcagcagttctgtgaattaaagagcagagtgactgtgggtctggaatggctggtgtacttgggaatgtactatcaggattttacagcaatgctgggaaatgacagggaaaatgacaggaatgaatctcaccagattttttatgtactcagcagagccttgagttacggtgtttattttccaatcaagtgaagatatctcctacttctcctactggaacatctcagcttctgcagtgaagaaaaattcctgtgatagttcagttctttagtttttctatttgaaaaaaaaaaatcatttaaatgatcctttgttcacggctctccttaatgactgagtgaacagttcctatctgtatatttgactaaaccttttcctaagctatctctcatggttcctatgtttttttatcataattaaaagcaaaaccatctggatcacctaacagtcagaggtcagtatctcagcgtgtgaattatagaggaaatacagagagaacctcttccacttttacttttcgtccaaataaaatgcatggtgtaccagaagttgaagatcgggttgaggattggggctagctcgatgacactaaggccccaacatcgcgggacctgctgtggcgcggattcttaggaacgctgttctagccggccccctctccaggggtcgccgtggccggcattatttcctagttcttcttgtaaccctgaggtgccagcgcggggagtgaggaggggtcagggggctaaggatgcaacctctgacgttctgcgccttcctaggagagtcttacatgtgttgagatttcacaagcaatgcgagttgtaaaataccagctctacaagaagctaggctctgtgacggcatagttttcagtagctttatcacaatattcacaatggagaattatatgacatggtagcagaaataggcccttttatgtgttgcttctattttacctcaaattgtagatatagggtaatcaataaaatccatccatgcctttcacacactaagt

SEQ ID NO: 4087 - protein, 897 aa, Homo sapiens
MAQVAMSTLPVEDEESSESRMVVTFLMSALESMCKELAKSKAEVACIAVYETDVFVVGTERGRAFVNTRKDFQKDFVKYCVEEEEKAAEMHKMKSTTQANRMSVDAVEIETLRKTVEDYFCFCYGKALGKSTVVPVPYEKMLRDQSAVVVQGLPEGVAFKHPENYDLATLKWILENKAGISFIIKRPFLEPKKHVGGRVMVTDADRSILSPGGSCGPIKVKTEPTEDSGISLEMAAVTVKEESEDPDYYQYNIQAGPSETDDVDEKQPLSKPLQGSHHSSEGNEGTEMEVPAEDDDYSPPSKRPKANELPQPPVPEPANAGKRKVREFNFEKWNARITDLRKQVEELFERKYAQAIKAKGPVTIPYPLFQSHVEDLYVEGLPEGIPFRRPSTYGIPRLERILLAKERIRFVIKKHELLNSTREDLQLDKPASGVKEEWYARITKLRKMVDQLFCKKFAEALGSTEAKAVPYQKFEAHPNDLYVEGLPENIPFRSPSWYGIPRLEKIIQVGNRIKFVIKRPELLTHSTTEVTQPRTNTPAQALGLTEAVKVPYPVFESNPEFLYVEGLPEGIPFRSPTWFGIPRLERIVRGSNKIKFVVKKPELVISYLPPGMASKINTKALQSPKRPRSPGSNSKVPEIEVTVEGPNNNNPQTSAVRTPTQTNGSNVPFKPRGREFSFEAWNAKITDLKQKVENLFNEKCGEALGLKQAVKVPFALFESFPEDFYVEGLPEGVPFRRPSTFGIPRLEKILRNKAKIKFIIKKPEMFETAIKESTSSKSPPRKINSSPNVNTTASGVEDLNIIQVTIPDDDNERLSKVEKARQLREQVNDLFSRKFGEAIGMGFPVKVPYRKITINPGCVVVDGMPPGVSFKAPSYLEISSMRRILDSAEFIKFTVIR

SEQ ID NO: 4088 - DNA, 4999 bp, Homo sapiens
aaaaaaaaaaaaaaaaaaaaaaaaaaaagaaaaaagaaaaaaaaaaggaggaggaggaggagggtgagagagaagctgggagagcagagaaaaggggccaccggtcgcccccccgcttccccgcacgcgctctccagccgcggccgcccgcctgccgcggtcaccccggcctctgcctctgtcccccagtgatcggatcaaggcgctgagcgaggccctgcctgcggggcggccatgcggcggtgacaggagcgcgaccgacacgcacgggcccctcgccccctctcgcctcccgtccgctcgccagctcccctcagccgaggctgctccgcggcggccgcagcccgcgcgcggcccacactcgcctccccgttgaagatgaggagtcctcggagagcaggatggtggtgacattcctcatgtcagctctcgagtccatgtgtaaagaactggccaagtccaaagccgaagtggcctgcattgcagtgtatgaaacagacgtgtttgtcgtcggaactgaaagaggacgtgcttttgtcaataccagaaaggattttcaaaaagattttgtaaaatattgtgttgaagaagaagaaaaagctgcagagatgcataaaatgaaatctacaacccaggcaaatcggatgagtgtagatgctgtagaaattgaaacactcagaaaaacagttgaggactatttctgcttttgctatgggaaagctttaggcaaatccacagtggtacctgtaccatatgagaagatgctgcgagaccagtcggctgtggtagtgcaggggcttccggaaggtgttgcctttaaacaccccgagaactatgatcttgcaaccctgaaatggattttggagaacaaagcagggatttcattcatcattaagagaccttttttagagccaaagaagcatgtaggtggtcgtgtgatggtaacagatgctgacaggtcaatactatctccaggtggaagttgtggccccatcaaagtgaaaactgaacccacagaagattctggcatttccctggaaatggcagctgtgacagtaaaggaagaatcagaagatcctgattattatcaatataacattcaaggaagccaccattcttcagagggcaatgaaggcacagaaatggaagtaccagcagaagatgatgattattctccaccgtctaagagaccaaaggccaatgagctaccgcagccaccagtcccggaacccgccaatgctgggaagcggaaagtgagggagttcaacttcgagaaatggaatgctcgcatcactgatctacgtaaacaagttgaagaattgtttgaaaggaaatatgctcaagccataaaagccaaaggtccggtgacgatcccgtaccctcttttccagtctcatgttgaagatctttatgtagaaggacttcctgaaggaattccttttagaaggccatctacttacggaattcctcgcctggagaggatattacttgcaaaggaaaggattcgttttgtgattaagaaacatgagcttctgaattcaacacgtgaagatttacagcttgataagccagcttcaggagtaaaggaagaatggtatgccagaatcactaaattaagaaagatggtggatcagcttttctgcaaaaaatttgcggaagccttggggagcactgaagccaaggctgtaccgtaccaaaaatttgaggcacacccgaatgatctgtacgtggaaggactgccagaaaacattcctttccgaagtccctcatggtatggaatcccaaggctggaaaaaatcattcaagtgggcaatcgaattaaatttgttattaaaagaccagaacttctgactcacagtaccactgaagttactcagccaagaacgaatacaccagctcaagctcttggactcaccgaggcagtaaaagtaccatatcctgtgtttgaatcaaacccggagttcttgtatgtggaaggcttgccagaggggattcccttccgaagccctacctggtttggaattccacgacttgaaaggatcgtccgcgggagtaataaaatcaagttcgttgttaaaaaacctgaactagttatttcctacttgcctcctgggatggctagtaaaataaacactaaagctttgcagtcccccaaaagaccacgaagtcctgggagtaattcaaaggttcctgaaattgaggtcaccgtggaaggccctaataacaacaatcctcaaacctcagctgttcgaaccccgacccagactaacggttctaacgttcccttcaagccacgagggagagagttttcctttgaggcctggaatgccaaaatcacggacctaaaacagaaagttgaaaatctcttcaatgagaaatgtggggaagctcttggccttaaacaagctgtgaaggtgccgttcgcgttatttgagtctttcccggaagacttttatgtggaaggcttacctgagggtgtgccattccgaagaccatcgacttttggcattccgaggctggagaagatactcagaaacaaagccaaaattaagttcatcattaaaaagcccgaaatgtttgagacggcgattaaggagagcacctcctctaagagccctcccagaaaaataaattcatcacccaatgttaatactactgcatcaggtgttgaagaccttaacatcattcaggtgacaattccagatgatgataatgaaagactctcgaaagttgaaaaagctagacagctaagagaacaagtgaatgacctctttagtcggaaatttggtgaagctattggtatgggttttcctgtgaaagttccctacaggaaaatcacaattaaccctggctgtgtggtggttgatggcatgcccccgggggtgtccttcaaagcccccagctacctggaaatcagctccatgagaaggatcttagactctgccgagtttatcaaattcacggtcattagaccatttccaggacttgtgattaataaccagctggttgatcagagtgagtcagaaggccccgtgatacaagaatcagctgaaccaagccagttggaagttccagccacagaagaaataaaagagactgatggaagctctcagatcaagcaagaaccagaccccacgtggtagacctcttccctcctagggtaaatcagcttctgtgtcagggatgctgtgtggtgtccatctgaaccccctgcatacgcgtagctaatgtgatctccccactttcacataagatggtggccctgccttcagggaatgtgggagccaggtgggagccttcccggatatttaagctagaagattctacagggagattctccttggatcaatatatgtctctcagtcaaagatgtaaaagcacttttgccttaaaaagaatgttctgtttctaaatagagtcaacgttgtcctcctcattggaattcactatgagtcagaatcattagactgacttttttttttccatagtaatagtattttgcagagtctcacagagctgcagatcttttgttcatcttgcagagttaacaagtctgatcctgttagtccagatttcttaaatttggccaagttataataggagcagtagcttgagacccgaagtcaggaaactttgacaatggatttttttttttaatccagagacttgtactggaatttgccttaccctgtcagctcatggacttaaggtttcatcccgctttatgagtgcttctgaatccaagtcattgttacctgaatttgcaaattaagttgtgatattcgtgactgttaaattcctgtaattagattaacctctttgcttgcttgtttgttttctctcctattttagcttaaagtatcagtggttgagaagagcttttcggacctgttactaccccaagctgtgtaatatacttgtataacagaaataccttctatacaaacctttttttctacttttagatagaaatgtctactttttcagcagttctgtgaattaaagagcagagtgactgtgggtctggaatggctggtgtacttgggaatgtactatcaggattttacagcaatgctgggaaatgacagggaaaatgacaggaatgaatctcaccagattttttatgtactcagcagagccttgagttacggtgtttattttccaatcaagtgaagatatctcctacttctcctactggaacatctcagcttctgcagtgaagaaaaattcctgtgatagttcagttctttagtttttctatttgaaaaaaaaaaatcatttaaatgatcctttgttcacggctctccttaatgactgagtgaacagttcctatctgtatatttgactaaaccttttcctaagctatctctcatggttcctatgtttttttatcataattaaaagcaaaaccatctggatcacctaacagtcagaggtcagtatctcagcgtgtgaattatagaggaaatacagagagaacctcttccacttttacttttcgtccaaataaaatgcatggtgtaccagaagttgaagatcgggttgaggattggggctagctcgatgacactaaggccccaacatcgcgggacctgctgtggcgcggattcttaggaacgctgttctagccggccccctctccaggggtcgccgtggccggcattatttcctagttcttcttgtaaccctgaggtgccagcgcggggagtgaggaggggtcagggggctaaggatgcaacctctgacgttctgcgccttcctaggagagtcttacatgtgttgagatttcacaagcaatgcgagttgtaaaataccagctctacaagaagctaggctctgtgacggcatagttttcagtagctttatcacaatattcacaatggagaattatatgacatggtagcagaaataggcccttttatgtgttgcttctattttacctcaaattgtagatatagggtaatcaataaaatccatccatgcctttcacacactaagt

SEQ ID NO: 4089 - protein, 913 aa, Homo sapiens
MVVTFLMSALESMCKELAKSKAEVACIAVYETDVFVVGTERGRAFVNTRKDFQKDFVKYCVEEEEKAAEMHKMKSTTQANRMSVDAVEIETLRKTVEDYFCFCYGKALGKSTVVPVPYEKMLRDQSAVVVQGLPEGVAFKHPENYDLATLKWILENKAGISFIIKRPFLEPKKHVGGRVMVTDADRSILSPGGSCGPIKVKTEPTEDSGISLEMAAVTVKEESEDPDYYQYNIQGSHHSSEGNEGTEMEVPAEDDDYSPPSKRPKANELPQPPVPEPANAGKRKVREFNFEKWNARITDLRKQVEELFERKYAQAIKAKGPVTIPYPLFQSHVEDLYVEGLPEGIPFRRPSTYGIPRLERILLAKERIRFVIKKHELLNSTREDLQLDKPASGVKEEWYARITKLRKMVDQLFCKKFAEALGSTEAKAVPYQKFEAHPNDLYVEGLPENIPFRSPSWYGIPRLEKIIQVGNRIKFVIKRPELLTHSTTEVTQPRTNTPAQALGLTEAVKVPYPVFESNPEFLYVEGLPEGIPFRSPTWFGIPRLERIVRGSNKIKFVVKKPELVISYLPPGMASKINTKALQSPKRPRSPGSNSKVPEIEVTVEGPNNNNPQTSAVRTPTQTNGSNVPFKPRGREFSFEAWNAKITDLKQKVENLFNEKCGEALGLKQAVKVPFALFESFPEDFYVEGLPEGVPFRRPSTFGIPRLEKILRNKAKIKFIIKKPEMFETAIKESTSSKSPPRKINSSPNVNTTASGVEDLNIIQVTIPDDDNERLSKVEKARQLREQVNDLFSRKFGEAIGMGFPVKVPYRKITINPGCVVVDGMPPGVSFKAPSYLEISSMRRILDSAEFIKFTVIRPFPGLVINNQLVDQSESEGPVIQESAEPSQLEVPATEEIKETDGSSQIKQEPDPTW

SEQ ID NO: 4090 - DNA, 4350 bp, Homo sapiens
aaaaaaaaaaaaaaaaaaaaaaaaaaaagaaaaaagaaaaaaaaaaggaggaggaggaggagggtgagagagaagctgggagagcagagaaaaggggccaccggtcgcccccccgcttccccgcacgcgctctccagccgcggccgcccgcctgccgcggtcaccccggcctctgcctctgtcccccagtgatcggatcaaggcgctgagcgaggccctgcctgcggggcggccatgcggcggtgacaggagcgcgaccgacacgcacgggcccctcgccccctctcgcctcccgtccgctcgccagctcccctcagccgaggctgctccgcggcggccgcagcccgcgcgcggcccacactcgcctcccctcggcacccccggccccggagctgcctggaggcggccgcactcggggatcatggcccaagttgcaatgtccaccctccccgttgaagatgaggagtcctcggagagcaggatggtggtgacattcctcatgtcagctctcgagtccatgtgtaaagaactggccaagtccaaagccgaagtggcctgcattgcagtgtatgaaacagacgtgtttgtcgtcggaactgaaagaggacgtgcttttgtcaataccagaaaggattttcaaaaagattttgtaaaatattgtgttgaagaagaagaaaaagctgcagagatgcataaaatgaaatctacaacccaggcaaatcggatgagtgtagatgctgtagaaattgaaacactcagaaaaacagttgaggactatttctgcttttgctatgggaaagctttaggcaaatccacagtggtacctgtaccatatgagaagatgctgcgagaccagtcggctgtggtagtgcaggggcttccggaaggtgttgcctttaaacaccccgagaactatgatcttgcaaccctgaaatggattttggagaacaaagcagggatttcattcatcattaagagaccttttttagagccaaagaagcatgtaggtggtcgtgtgatggtaacagatgctgacaggtcaatactatctccaggtggaagttgtggccccatcaaagtgaaaactgaacccacagaagattctggcatttccctggaaatggcagctgtgacagtaaaggaagaatcagaagatcctgattattatcaatataacattcaaggaagccaccattcttcagagggcaatgaaggcacagaaatggaagtaccagcagaagattctactcaacatgtcccttcagaaacaagtgaggaccctgaagttgaggtgactattgaagatgatgattattctccaccgtctaagagaccaaaggccaatgagctaccgcagccaccagtcccggaacccgccaatgctgggaagcggaaagtgagggagttcaacttcgagaaatggaatgctcgcatcactgatctacgtaaacaagttgaagaattgtttgaaaggaaatatgctcaagccataaaagccaaaggtccggtgacgatcccgtaccctcttttccagtctcatgttgaagatctttatgtagaaggacttcctgaaggaattccttttagaaggccatctacttacggaattcctcgcctggagaggatattacttgcaaaggaaaggattcgttttgtgattaagaaacatgagcttctgaattcaacacgtgaagatttacagcttgataagccagcttcaggagtaaaggaagaatggtatgccagaatcactaaattaagaaagatggtggatcagcttttctgcaaaaaatttgcggaagccttggggagcactgaagccaaggctgtaccgtaccaaaaatttgaggcacacccgaatgatctgtacgtggaaggactgccagaaaacattcctttccgaagtccctcatggtatggaatcccaaggctggaaaaaatcattcaagtgggcaatcgaattaaatttgttattaaaagaccagaacttctgactcacagtaccactgaagttactcagccaagaacgaatacaccagtcaaagaagattggaatgtcagaattaccaagctacggaagcaagtggaagagatttttaatttgaaatttgcttagatttgttgacagcggtttcctggagtgctgtcttgagaacgattctgaggaggctcagcaagaaagagtgtttcagttgattgggtgtgtctgtcatggagaaggaactcaagctcttggactcaccgaggcagtaaaagtaccatatcctgtgtttgaatcaaacccggagttcttgtatgtggaaggcttgccagaggggattcccttccgaagccctacctggtttggaattccacgacttgaaaggatcgtccgcgggagtaataaaatcaagttcgttgttaaaaaacctgaactagttatttcctacttgcctcctgggatggctagtaaaataaacactaaagctttgcagtcccccaaaagaccacgaagtcctgggagtaattcaaaggttcctgaaattgaggtcaccgtggaaggccctaataacaacaatcctcaaacctcagctgttcgaaccccgacccagactaacggttctaacgttcccttcaagccacgagggagagagttttcctttgaggcctggaatgccaaaatcacggacctaaaacagaaagttgaaaatctcttcaatgagaaatgtggggaagctcttggccttaaacaagctgtgaaggtgccgttcgcgttatttgagtctttcccggaagacttttatgtggaaggcttacctgagggtgtgccattccgaagaccatcgacttttggcattccgaggctggagaagatactcagaaacaaagccaaaattaagttcatcattaaaaagcccgaaatgtttgagacggcgattaaggagagcacctcctctaagagccctcccagaaaaataaattcatcacccaatgttaatactactgcatcaggtgttgaagaccttaacatcattcaggtgacaattccagatgatgataatgaaagactctcgaaagttgaaaaagctagacagctaagagaacaagtgaatgacctctttagtcggaaatttggtgaagctattggtatgggttttcctgtgaaagttccctacaggaaaatcacaattaaccctggctgtgtggtggttgatggcatgcccccgggggtgtccttcaaagcccccagctacctggaaatcagctccatgagaaggatcttagactctgccgagtttatcaaattcacggtcattagaccatttccaggacttgtgattaataaccagctggttgatcagagtgagtcagaaggccccgtgatacaagaatcagctgaaccaagccagttggaagttccagccacagaagaaataaaagagactgatggaagctctcagatcaagcaagaaccagaccccacgtggtagacctcttccctcctaggagccttgagttacggtgtttattttccaatcaagtgaagatatctcctacttctcctactggaacatctcagcttctgcagtgaagaaaaattcctgtgatagttcagttctttagtttttctatttgaaaaaaaaaaatcatttaaatgatcctttgttcacggctctccttaatgactgagtgaacagttcctatctgtatatttgactaaaccttttcctaagctatctctcatggttcctatgtttttttatcataattaaaagcaaaaccatctggatcacctaacagtcagaggtcagtatctcagcgtgtgaattatagaggaaatacagagagaacctcttccacttttacttttcgtccaaataaaatgcatggtgtaccagaagttgaagatcgggttgaggattggggctagctcgatgacactaaggccccaacatcgcgggacctgctgtggcgcggattcttaggaacgctgttctagccggccccctctccaggggtcgccgtggccggcattatttcctagttcttcttgtaaccctgaggtgccagcgcggggagtgaggaggggtcagggggctaaggatgcaacctctgacgttctgcgccttcctaggagagtcttacatgtgttgagatttcacaagcaatgcgagttgtaaaataccagctctacaagaagctaggctctgtgacggcatagttttcagtagctttatcacaatattcacaatggagaattatatgacatggtagcagaaataggcccttttatgtgttgcttctattttacctcaaattgtagatatagggtaatcaataaaatccatccatgcctttcacacactaagt

SEQ ID NO: 4091 - protein, 564 aa, Homo sapiens; identical to SEQ ID NO: 4061

SEQ ID NO: 4092 - DNA, 4231 bp, Homo sapiens
aaaaaaaaaaaaaaaaaaaaaaaaaaaagaaaaaagaaaaaaaaaaggaggaggaggaggagggtgagagagaagctgggagagcagagaaaaggggccaccggtcgcccccccgcttccccgcacgcgctctccagccgcggccgcccgcctgccgcggtcaccccggcctctgcctctgtcccccagtgatcggatcaaggcgctgagcgaggccctgcctgcggggcggccatgcggcggtgacaggagcgcgaccgacacgcacgggcccctcgccccctctcgcctcccgtccgctcgccagctcccctcagccgaggctgctccgcggcggccgcagcccgcgcgcggcccacactcgcctcccctcggcacccccggccccggagctgcctggaggcggccgcactcggggatcatggcccaagttgcaatgtccaccctccccgttgaagatgaggagtcctcggagagcaggatggtggtgacattcctcatgtcagctctcgagtccatgtgtaaagaactggccaagtccaaagccgaagtggcctgcattgcagtgtatgaaacagacgtgtttgtcgtcggaactgaaagaggacgtgcttttgtcaataccagaaaggattttcaaaaagattttgtaaaatattgtgttgaagaagaagaaaaagctgcagagatgcataaaatgaaatctacaacccaggcaaatcggatgagtgtagatgctgtagaaattgaaacactcagaaaaacagttgaggactatttctgcttttgctatgggaaagctttaggcaaatccacagtggtacctgtaccatatgagaagatgctgcgagaccagtcggctgtggtagtgcaggggcttccggaaggtgttgcctttaaacaccccgagaactatgatcttgcaaccctgaaatggattttggagaacaaagcagggatttcattcatcattaagagaccttttttagagccaaagaagcatgtaggtggtcgtgtgatggtaacagatgctgacaggtcaatactatctccaggtggaagttgtggccccatcaaagtgaaaactgaacccacagaagattctggcatttccctggaaatggcagctgtgacagtaaaggaagaatcagaagatcctgattattatcaatataacattcaagcaggcccttctgaaactgatgatgttgatgaaaaacagcccctatcgaagcctttgcaaggaagccaccattcttcagagggcaatgaaggcacagaaatggaagtaccagcagaagattctactcaacatgtcccttcagaaacaagtgaggaccctgaagttgaggtgactattgaagatgatgattattctccaccgtctaagagaccaaaggccaatgagctaccgcagccaccagtcccggaacccgccaatgctgggaagcggaaagtgagggagttcaacttcgagaaatggaatgctcgcatcactgatctacgtaaacaagttgaagaattgtttgaaaggaaatatgctcaagccataaaagccaaaggtccggtgacgatcccgtaccctcttttccagtctcatgttgaagatctttatgtagaaggacttcctgaaggaattccttttagaaggccatctacttacggaattcctcgcctggagaggatattacttgcaaaggaaaggattcgttttgtgattaagaaacatgagcttctgaattcaacacgtgaagatttacagcttgataagccagcttcaggagtaaaggaagaatggtatgccagaatcactaaattaagaaagatggtggatcagcttttctgcaaaaaatttgcggaagccttggggagcactgaagccaaggctgtaccgtaccaaaaatttgaggcacacccgaatgatctgtacgtggaaggactgccagaaaacattcctttccgaagtccctcatggtatggaatcccaaggctggaaaaaatcattcaagtgggcaatcgaattaaatttgttattaaaagaccagaacttctgactcacagtaccactgaagttactcagccaagaacgaatacaccagtcaaagaagattggaatgtcagaattaccaagctacggaagcaagtggaagagatttttaatttgaaatttgctcaagctcttggactcaccgaggcagtaaaagtaccatatcctgtgtttgaatcaaacccggagttcttgaaaggatcgtccgcgggagtaataaaatcaagttcgttgttaaaaaacctgaactagttatttcctacttgcctcctgggatggctagtaaaataaacactaaagctttgcagtcccccaaaagaccacgaagtcctgggagtaattcaaaggttcctgaaattgaggtcaccgtggaaggccctaataacaacaatcctcaaacctcagctgttcgaaccccgacccagactaacggttctaacgttcccttcaagccacgagggagagagttttcctttgaggcctggaatgccaaaatcacggacctaaaacagaaagttgaaaatctcttcaatgagaaatgtggggaagctcttggccttaaacaagctgtgaaggtgccgttcgcgttatttgagtctttcccggaagacttttatgtggaaggcttacctgagggtgtgccattccgaagaccatcgacttttggcattccgaggctggagaagatactcagaaacaaagccaaaattaagttcatcattaaaaagcccgaaatgtttgagacggcgattaaggagagcacctcctctaagagccctcccagaaaaataaattcatcacccaatgttaatactactgcatcaggtgttgaagaccttaacatcattcaggtgacaattccagatgatgataatgaaagactctcgaaagttgaaaaagctagacagctaagagaacaagtgaatgacctctttagtcggaaatttggtgaagctattggtatgggttttcctgtgaaagttccctacaggaaaatcacaattaaccctggctgtgtggtggttgatggcatgcccccgggggtgtccttcaaagcccccagctacctggaaatcagctccatgagaaggatcttagactctgccgagtttatcaaattcacggtcattagaccatttccaggacttgtgattaataaccagctggttgatcagagtgagtcagaaggccccgtgatacaagaatcagctgaaccaagccagttggaagttccagccacagaagaaataaaagagactgatggaagctctcagatcaagcaagaaccagaccccacgtggtagacctcttccctcctaggagccttgagttacggtgtttattttccaatcaagtgaagatatctcctacttctcctactggaacatctcagcttctgcagtgaagaaaaattcctgtgatagttcagttctttagtttttctatttgaaaaaaaaaaatcatttaaatgatcctttgttcacggctctccttaatgactgagtgaacagttcctatctgtatatttgactaaaccttttcctaagctatctctcatggttcctatgtttttttatcataattaaaagcaaaaccatctggatcacctaacagtcagaggtcagtatctcagcgtgtgaattatagaggaaatacagagagaacctcttccacttttacttttcgtccaaataaaatgcatggtgtaccagaagttgaagatcgggttgaggattggggctagctcgatgacactaaggccccaacatcgcgggacctgctgtggcgcggattcttaggaacgctgttctagccggccccctctccaggggtcgccgtggccggcattatttcctagttcttcttgtaaccctgaggtgccagcgcggggagtgaggaggggtcagggggctaaggatgcaacctctgacgttctgcgccttcctaggagagtcttacatgtgttgagatttcacaagcaatgcgagttgtaaaataccagctctacaagaagctaggctctgtgacggcatagttttcagtagctttatcacaatattcacaatggagaattatatgacatggtagcagaaataggcccttttatgtgttgcttctattttacctcaaattgtagatatagggtaatcaataaaatccatccatgcctttcacacactaagt

SEQ ID NO: 4093 - protein, 625 aa, Homo sapiens; identical to SEQ ID NO: 4033

SEQ ID NO: 4094 - DNA, 7793 bp, Homo sapiens
aaaaaaaaaaaaaaaaaaaaaaaaaaaagaaaaaagaaaaaaaaaaggaggaggaggaggagggtgagagagaagctgggagagcagagaaaaggggccaccggtcgcccccccgcttccccgcacgcgctctccagccgcggccgcccgcctgccgcggtcaccccggcctctgcctctgtcccccagtgatcggatcaaggcgctgagcgaggccctgcctgcggggcggccatgcggcggtgacaggagcgcgaccgacacgcacgggcccctcgccccctctcgcctcccgtccgctcgccagctcccctcagccgaggctgctccgcggcggccgcagcccgcgcgcggcccacactcgcctcccctcggcacccccggccccggagctgcctggaggcggccgcactcggtgtaaagaactggccaagtccaaagccgaagtggcctgcattgcagtgtatgaaacagacgtgtttgtcgtcggaactgaaagaggacgtgcttttgtcaataccagaaaggattttcaaaaagattttgtaaaatattgtgttgaagaagaagaaaaagctgcagagatgcataaaatgaaatctacaacccaggcaaatcggatgagtgtagatgctgtagaaattgaaacactcagaaaaacagttgaggactatttctgcttttgctatgggaaagctttaggcaaatccacagtggtacctgtaccatatgagaagatgctgcgagaccagtcggctgtggtagtgcaggggcttccggaaggtgttgcctttaaacaccccgagaactatgatcttgcaaccctgaaatggattttggagaacaaagcagggatttcattcatcattaagagaccttttttagagccaaagaagcatgtaggtggtcgtgtgatggtaacagatgctgacaggtcaatactatctccaggtggaagttgtggccccatcaaagtgaaaactgaacccacagaagattctggaagccaccattcttcagagggcaatgaaggcacagaaatggaagtaccagcagaagattctactcaacatgtcccttcagaaacaagtgaggaccctgaagttgaggtgactattgaagatgatgattattctccaccgtctaagagaccaaaggccaatgagctaccgcagccaccagtcccggaacccgccaatgctgggaagcggaaagtgagggagttcaacttcgagaaatggaatgctcgcatcactgatctacgtaaacaagttgaagaattgtttgaaaggaaatatgctcaagccataaaagccaaaggtccggtgacgatcccgtaccctcttttccagtctcatgttgaagatctttatgtagaaggacttcctgaaggaattccttttagaaggccatctacttacggaattcctcgcctggagaggatattacttgcaaaggaaaggattcgttttgtgattaagaaacatgagcttctgaattcaacacgtgaagatttacagcttgataagccagcttcaggagtaaaggaagaatggtatgccagaatcactaaattaagaaagatggtggatcagcttttctgcaaaaaatttgcggaagccttggggagcactgaagccaaggctgtaccgtaccaaaaatttgaggcacacccgaatgatctgtacgtggaaggactgccagaaaacattcctttccgaagtccctcatggtatggaatcccaaggctggaaaaaatcattcaagtgggcaatcgaattaaatttgttattaaaagaccagaacttctgactcacagtaccactgaagttactcagccaagaacgaatacaccagtcaaagaagattggaatgtcagaattaccaagctacggaagcaagtggaagagatttttaatttgaaatttgctcaagctcttggactcaccgaggcagtaaaagtaccatatcctgtgtttgaatcaaacccggagttcttgtatgtggaaggcttgccagaggggattcccttccgaagccctacctggtttggaattccacgacttgaaaggatcgtccgcgggagtaataaaatcaagttcgttgttaaaaaacctgaactagttatttcctacttgcctcctgggatggctagtaaaataaacactaaagctttgcagtcccccaaaagaccacgaagtcctgggagtaattcaaaggttcctgaaattgaggtcaccgtggaaggccctaataacaacaatcctcaaacctcagctgttcgaaccccgacccagactaacggttctaacgttcccttcaagccacgagggagagagttttcctttgaggcctggaatgccaaaatcacggacctaaaacagaaagttgaaaatctcttcaatgagaaatgtggggaagctcttggccttaaacaagctgtgaaggtgccgttcgcgttatttgagtctttcccggaagacttttatgtggaaggcttacctgagggtgtgccattccgaagaccatcgacttttggcattccgaggctggagaagatactcagaaacaaagccaaaattaagttcatcattaaaaagcccgaaatgtttgagacggcgattaaggagagcacctcctctaagagccctcccagaaaaataaattcatcacccaatgttaatactactgcatcaggtgttgaagaccttaacatcattcaggtgacaattccagatgatgataatgaaagactctcgaaagttgaaaaagctagacagctaagagaacaagtgaatgacctctttagtcggaaatttggtgaagctattggtatgggttttcctgtgaaagttccctacaggaaaatcacaattaaccctggctgtgtggtggttgatggcatgcccccgggggtgtccttcaaagcccccagctacctggaaatcagctccatgagaaggatcttagactctgccgagtttatcaaattcacggtcattaggtaagtgagagtttcctgcttagtcacaggagcgaatctggagctcatgaggctgactcttctaaaatgcagccacaggtagtcatcgaatccggcttcctatgctgtgcaatcaacaaatcaaaataacttgtgtcatcattagaatgtcagatgtgcttctacgaactaagctgactcttttaattctttggcaaagggttggcaaactaggactgtttgccaaattcaggctgcctcctatttttagagtcttcctgaaacacagctacacccgtattatccatggctgctttcctgtcacagtgagtaagtagctgggactgagaaggcatggcctccaaagtctaaaatatttactctctagcactttgtagaaaaaccttagctaggcacagtggctaacgcctgtaatcccagcattttgggaggccaaggcaggcagatcacctgaggtcaggagttccagaccagcctggccaacatggtgaaatcccatctctacaaaaataaaacagttagctgggcatgatggcgggtgcctgtaatcccagctactcgggaggctgaggcaggatagtcgcttgaacccaggaggtggaggttgcaatgagccaagatcatgccactgcactccagcctggacgacagagtgagactccatcacaagaaaaaaagaactttgtcaacctctgtcttagggcgccttgtcacaggcttcgggtcagacggattcaaccttgcatcagccatttgttagccaggtcactctgttctttgtctgtaaatgagattgatcgttgttcccactgagagtgtcagctccttcccgtagagcaggcatgatgattgtactcacctctgacaccattgtgagtgccacattccttcccacgtccttgtcactgtaagagatgcccacctgagcaccaaccccaggttatcttcccctttgtcttccagccccccagaaacagctacgactcaacctacccaatcatttcatcatcagattgccactgtctctagttcaggtctcttgggactggcactcagaaatctcataataaatcctcttgaggcttctcatacactcgtcttcttccaatcttctttccctcaaaatctcatattttggttccacttcacccaccgtcattctccatatcactcccaggagttaggcaaaaagccccttccgttcttccgtatgttaaacttagaatcactctgttccctgctctgcgtttctattttttgtttttcctccatttactagtagcttaacactttctaacagtgttcttattattgatacgtatctatctcttccataagcttataaggtcacggataatacttctcattgtagtacgtaaatgacgtgggctagatatgagttgaataaacagttatacctgtaaattcttacagagtgaaaataaattgttatactttacaatttgtttctctctttagaccatttccaggacttgtgattaataaccgtgagtattttgtgaagtgttttgtttttgttttttcctggggtctgacgtgtgtgcgtgtgagtgtgtatacatgcttaacgtatatcacgttacttcacctatgtcagtaaccaggccaaatacttgttttagccctcagtaaaaacaccaggcacttcctagttgtaaaattattcaagcttcttaacttcctatcctcgatgcacttaatcataaaatggtaataatagcaccgattttgggggagtcgttccagtagatggaaagcatctggaacaggtgtcagcaagctcctgccgacgtgtatgcataaagttttattgaaaccaccatcgtgtccatttgtttatggcagaactgagagatggcagcagcaagtgtgtgcctgcaaaacctaaaatatttactaattggctctgcaagaaaagagtttgcatccccctaacctagaacagtgtctagcctctagtatgtgtttagcctacagtatgtgctcagcgaatacaatctatatttattactgcttttatgactgttataattactgtgcttggatttcgttacaaagtaagtcacaatgtgcctgcttctgttagtatttcagcacagtgcctggcacacatggggctctcaaatattgctgagcgagtgaacaaatgtcctttcaattccttaacgttgatgtcattttcaatagtattttgagccaaacttaattttgcgagtgtgttttgttttcttaactttattattaaaaatgtataaaagtgaggccaggcgtggtggctcacgcctgtaatcccagcagtttgggaggctgaggcaggcggatcagttgaggttgggagttggagaccagcccgtccaacatggtgaaagcctgtctctactaaaaatacaaaaatcagctgggtgtggtggcgcgtgcctgtaatcccagctactcaggaggctgaggcaggagagttgcttgaatcctagaggtggaggttgcagtgagctgagatcgtgccattgcactccagcctgggcaacaagagcaaaactctgtcccaataaataaataaataaaatgttctcttttgttcctgttcttgtgcggtagtgtggtatagagttttatggtaattactgtgaattagtgattctgagggacatatcagaactctgaggtttgtttccttctcatcttgagggaaacagcaaatgtatgttaaaatgcttttccaagggaacaacacatccttacattatttaaaccaatctgcttcattttcagagctggttgatcagagtgagtcagaaggccccgtgatacaagaatcagctgaaccaagccagttggaagttccagccacagaagaaataaaagagactgatggaagctctcagatcaagcaagaaccagaccccacgtggtagacctcttccctcctagggtaaatcagcttctgtgtcagggatgctgtgtggtgtccatctgaaccccctgcatacgcgtagctaatgtgatctccccactttcacataagatggtggccctgccttcagggaatgtgggagccaggtgggagccttcccggatatttaagctagaagattctacagggagattctccttggatcaatatatgtctctcagtcaaagatgtaaaagcacttttgccttaaaaagaatgttctgtttctaaatagagtcaacgttgtcctcctcattggaattcactatgagtcagaatcattagactgacttttttttttccatagtaatagtattttgcagagtctcacagagctgcagatcttttgttcatcttgcagagttaacaagtctgatcctgttagtccagatttcttaaatttggccaagttataataggagcagtagcttgagacccgaagtcaggaaactttgacaatggatttttttttttaatccagagacttgtactggaatttgccttaccctgtcagctcatggacttaaggtttcatcccgctttatgagtgcttctgaatccaagtcattgttacctgaatttgcaaattaagttgtgatattcgtgactgttaaattcctgtaattagattaacctctttgcttgcttgtttgttttctctcctattttagcttaaagtatcagtggttgagaagagcttttcggacctgttactaccccaagctgtgtaatatacttgtataacagaaataccttctatacaaacctttttttctacttttagatagaaatgtctactttttcagcagttctgtgaattaaagagcagagtgactgtgggtctggaatggctggtgtacttgggaatgtactatcaggattttacagcaatgctgggaaatgacagggaaaatgacaggaatgaatctcaccagattttttatgtactcagcagagccttgagttacggtgtttattttccaatcaagtgaagatatctcctacttctcctactggaacatctcagcttctgcagtgaagaaaaattcctgtgatagttcagttctttagtttttctatttgaaaaaaaaaaatcatttaaatgatcctttgttcacggctctccttaatgactgagtgaacagttcctatctgtatatttgactaaaccttttcctaagctatctctcatggttcctatgtttttttatcataattaaaagcaaaaccatctggatcacctaacagtcagaggtcagtatctcagcgtgtgaattatagaggaaatacagagagaacctcttccacttttacttttcgtccaaataaaatgcatggtgtaccagaagttgaagatcgggttgaggattggggctagctcgatgacactaaggccccaacatcgcgggacctgctgtggcgcggattcttaggaacgctgttctagccggccccctctccaggggtcgccgtggccggcattatttcctagttcttcttgtaaccctgaggtgccagcgcggggagtgaggaggggtcagggggctaaggatgcaacctctgacgttctgcgccttcctaggagagtcttacatgtgttgagatttcacaagcaatgcgagttgtaaaataccagctctacaagaagctaggctctgtgacggcatagttttcagtagctttatcacaatattcacaatggagaattatatgacatggtagcagaaataggcccttttatgtgttgcttctattttacctcaaattgtagatatagggtaatcaataaaatccatccatgcctttcacacactaagt

SEQ ID NO: 4095 - protein, 807 aa, Homo sapiens
MHKMKSTTQANRMSVDAVEIETLRKTVEDYFCFCYGKALGKSTVVPVPYEKMLRDQSAVVVQGLPEGVAFKHPENYDLATLKWILENKAGISFIIKRPFLEPKKHVGGRVMVTDADRSILSPGGSCGPIKVKTEPTEDSGSHHSSEGNEGTEMEVPAEDSTQHVPSETSEDPEVEVTIEDDDYSPPSKRPKANELPQPPVPEPANAGKRKVREFNFEKWNARITDLRKQVEELFERKYAQAIKAKGPVTIPYPLFQSHVEDLYVEGLPEGIPFRRPSTYGIPRLERILLAKERIRFVIKKHELLNSTREDLQLDKPASGVKEEWYARITKLRKMVDQLFCKKFAEALGSTEAKAVPYQKFEAHPNDLYVEGLPENIPFRSPSWYGIPRLEKIIQVGNRIKFVIKRPELLTHSTTEVTQPRTNTPVKEDWNVRITKLRKQVEEIFNLKFAQALGLTEAVKVPYPVFESNPEFLYVEGLPEGIPFRSPTWFGIPRLERIVRGSNKIKFVVKKPELVISYLPPGMASKINTKALQSPKRPRSPGSNSKVPEIEVTVEGPNNNNPQTSAVRTPTQTNGSNVPFKPRGREFSFEAWNAKITDLKQKVENLFNEKCGEALGLKQAVKVPFALFESFPEDFYVEGLPEGVPFRRPSTFGIPRLEKILRNKAKIKFIIKKPEMFETAIKESTSSKSPPRKINSSPNVNTTASGVEDLNIIQVTIPDDDNERLSKVEKARQLREQVNDLFSRKFGEAIGMGFPVKVPYRKITINPGCVVVDGMPPGVSFKAPSYLEISSMRRILDSAEFIKFTVIR

SEQ ID NO: 4096 - DNA, 7392 bp, Homo sapiens
aaaaaaaaaaaaaaaaaaaaaaaaaaaagaaaaaagaaaaaaaaaaggaggaggaggaggagggtgagagagaagctgggagagcagagaaaaggggccaccggtcgcccccccgcttccccgcacgcgctctccagccgcggccgcccgcctgccgcggtcaccccggcctctgcctctgtcccccagtgatcggatcaaggcgctgagcgaggccctgcctgcggggcggccatgcggcggtgacaggagcgcgaccgacacgcacgggcccctcgccccctctcgcctcccgtccgctcgccagctcccctcagccgaggctgctccgcggcggccgcagcccgcgcgcggcccacactcgcctcccctcggcacccccggccccggagctgcctggaggcggccgcactcggggatcatggcccaagttgcaatgtccaccctccccgttgaagatgaggagtcctcggagagcaggatggtggtgacattcctcatgtcagctctcgagtccatgtgtaaagaactggccaagtccaaagccgaagtggcctgcattgcagtgtatgaaacagacgtgtttgtcgtcggaactgaaagaggacgtgcttttgtcaataccagaaaggattttcaaaaagattttgtaaaatattgtgttgaagaagaagaaaaagctgcagagatgcataaaatgaaatctacaacccaggcaaatcggatgagtgtagatgctgtagaaattgaaacactcagaaaaacagttgaggactatttctgcttttgctatgggaaagctttaggcaaatccacagtggtacctgtaccatatgagaagatgctgcgagaccagtcggctgtggtagtgcaggggcttccggaaggtgttgcctttaaacaccccgagaactatgatcttgcaaccctgaaatggattttggagaacaaagcagggatttcattcatcattaagagaccttttttagagccaaagaagcatgtaggtggtcgtgtgatggtaacagatgctgacaggtcaatactatctccaggtggaagttgtggccccatcaaagtgaaaactgaacccacagaagattctggcatttccctggaaatggcagctgtgacagtaaaggaagaatcagaagatcctgattattatcaatataacattcaagcaggcccttctgaaactgatgatgttgatgaaaaacagcccctatcgaagcctttgcaaggaagccaccattcttcagagggcaatgaaggcacagaaatggaagtaccagcagaagatgatgattattctccaccgtctaagagaccaaaggccaatgagctaccgcagccaccagtcccggaacccgccaatgctgggaagcggaaagtgagggagttcaacttcgagaaatggaatgctcgcatcactgatctacgtaaacaagttgaagaattgtttgaaaggaaatatgctcaagccataaaagccaaaggtccggtgacgatcccgtaccctcttttccagtctcatgttgaagatctttatgtagaaggacttcctgaaggaattccttttagaaggccatctacttacggaattcctcgcctggagaggatattacttgcaaaggaaaggattcgttttgtgattaagaaacatgagcttctgaattcaacacgtgaagatttacagcttgataagccagcttcaggagtaaaggaagaatggtatgccagaatcactaaattaagaaagatggtggatcagcttttctgcaaaaaatttgcggaagccttggggagcactgaagccaaggctgtaccgtaccaaaaatttgaggcacacccgaatgatctgtacgtggaaggactgccagaaaacattcctttccgaagtccctcatggtatggaatcccaaggctggaaaaaatcattcaagtgggcaatcgaattaaatttgttattaaaagaccagaacttctgactcacagtaccactgaagttactcagccaagaacgaatacaccagtcaaagaagattggaatgtcagaattaccaagctacggaagcaagtggaagagatttttaatttgaaatttgcttagatttgttgacagcggtttcctggagtgctgtcttgagaacgattctgaggaggctcagcaagaaagagtgtttcagttgattgggtgtgtctgtcatggagaaggaactcaagctcttggactcaccgaggcagtaaaagtaccatatcctgtgtttgaatcaaacccggagttcttgtatgtggaaggcttgccagaggggattcccttccgaagccctacctggtttggaattccacgacttgaaaggatcgtccgcgggagtaataaaatcaagttcgttgttaaaaaacctgaactagttatttcctacttgcctcctgggatggctagtaaaataaacactaaagctttgcagtcccccaaaagaccacgaagtcctgggagtaattcaaaggttcctgaaattgaggtcaccgtggaaggccctaataacaacaatcctcaaacctcagctgttcgaaccccgacccagactaacggttctaacgttcccttcaagccacgagggagagagttttcctttgaggcctggaatgccaaaatcacggacctaaaacagaaagttgaaaatctcttcaatgagaaatgtggggaagctcttggccttaaacaagctgtgaaggtgccgttcgcgttatttgagtctttcccggaagacttttatgtggaaggcttacctgagggtgtgccattccgaagaccatcgacttttggcattccgaggctggagaagatactcagaaacaaagccaaaattaagttcatcattaaaaagcccgaaatgtttgagacggcgattaaggagagcacctcctctaagagccctcccagaaaaataaattcatcacccaatgttaatactactgcatcaggtgttgaagaccttaacatcattcaggtgacaattccagatgatgataatgaaagactctcgaaagttgaaaaagctagacagctaagagaacaagtgaatgacctctttagtcggaaatttggtgaagctattggtatgggttttcctgtgaaagttccctacaggaaaatcacaattaaccctggctgtgtggtggttgatggcatgcccccgggggtgtccttcaaagcccccagctacctggaaatcagctccatgagaaggatcttagactctgccgagtttatcaaattcacggtcattaggtaagtgagagtttcctgcttagtcacaggagcgaatctggagctcatgaggctgactcttctaaaatgcagccacaggtagtcatcgaatccggcttcctatgctgtgcaatcaacaaatcaaaataacttgtgtcatcattagaatgtcagatgtgcttctacgaactaagctgactcttttaattctttggcaaagggttggcaaactaggactgtttgccaaattcaggctgcctcctatttttagagtcttcctgaaacacagctacacccgtattatccatggctgctttcctgtcacagtgagtaagtagctgggactgagaaggcatggcctccaaagtctaaaatatttactctctagcactttgtagaaaaaccttagctaggcacagtggctaacgcctgtaatcccagcattttgggaggccaaggcaggcagatcacctgaggtcaggagttccagaccagcctggccaacatggtgaaatcccatctctacaaaaataaaacagttagctgggcatgatggcgggtgcctgtaatcccagctactcgggaggctgaggcaggatagtcgcttgaacccaggaggtggaggttgcaatgagccaagatcatgccactgcactccagcctggacgacagagtgagactccatcacaagaaaaaaagaactttgtcaacctctgtcttagggcgccttgtcacaggcttcgggtcagacggattcaaccttgcatcagccatttgttagccaggtcactctgttctttgtctgtaaatgagattgatcgttgttcccactgagagtgtcagctccttcccgtagagcaggcatgatgattgtactcacctctgacaccattgtgagtgccacattccttcccacgtccttgtcactgtaagagatgcccacctgagcaccaaccccaggttatcttcccctttgtcttccagccccccagaaacagctacgactcaacctacccaatcatttcatcatcagattgccactgtctctagttcaggtctcttgggactggcactcagaaatctcataataaatcctcttgaggcttctcatacactcgtcttcttccaatcttctttccctcaaaatctcatattttggttccacttcacccaccgtcattctccatatcactcccaggagttaggcaaaaagccccttccgttcttccgtatgttaaacttagaatcactctgttccctgctctgcgtttctattttttgtttttcctccatttactagtagcttaacactttctaacagtgttcttattattgatacgtatctatctcttccataagcttataaggtcacggataatacttctcattgtagtacgtaaatgacgtgggctagatatgagttgaataaacagttatacctgtaaattcttacagagtgaaaataaattgttatactttacaatttgtttctctctttagaccatttccaggacttgtgattaataaccgtgagtattttgtgaagtgttttgtttttgttttttcctggggtctgacgtgtgtgcgtgtgagtgtgtatacatgcttaacgtatatcacgttacttcacctatgtcagtaaccaggccaaatacttgttttagccctcagtaaaaacaccaggcacttcctagttgtaaaattattcaagcttcttaacttcctatcctcgatgcacttaatcataaaatggtaataatagcaccgattttgggggagtcgttccagtagatggaaagcatctggaacaggtgtcagcaagctcctgccgacgtgtatgcataaagttttattgaaaccaccatcgtgtccatttgtttatggcagaactgagagatggcagcagcaagtgtgtgcctgcaaaacctaaaatatttactaattggctctgcaagaaaagagtttgcatccccctaacctagaacagtgtctagcctctagtatgtgtttagcctacagtatgtgctcagcgaatacaatctatatttattactgcttttatgactgttataattactgtgcttggatttcgttacaaagtaagtcacaatgtgcctgcttctgttagtatttcagcacagtgcctggcacacatggggctctcaaatattgctgagcgagtgaacaaatgtcctttcaattccttaacgttgatgtcattttcaatagtattttgagccaaacttaattttgcgagtgtgttttgttttcttaactttattattaaaaatgtataaaagtgaggccaggcgtggtggctcacgcctgtaatcccagcagtttgggaggctgaggcaggcggatcagttgaggttgggagttggagaccagcccgtccaacatggtgaaagcctgtctctactaaaaatacaaaaatcagctgggtgtggtggcgcgtgcctgtaatcccagctactcaggaggctgaggcaggagagttgcttgaatcctagaggtggaggttgcagtgagctgagatcgtgccattgcactccagcctgggcaacaagagcaaaactctgtcccaataaataaataaataaaatgttctcttttgttcctgttcttgtgcggtagtgtggtatagagttttatggtaattactgtgaattagtgattctgagggacatatcagaactctgaggtttgtttccttctcatcttgagggaaacagcaaatgtatgttaaaatgcttttccaagggaacaacacatccttacattatttaaaccaatctgcttcattttcagagctggttgatcagagtgagtcagaaggccccgtgatacaagaatcagctgaaccaagccagttggaagttccagccacagaagaaataaaagagactgatggaagctctcagatcaagcaagaaccagaccccacgtggtagacctcttccctcctaggcttaaagtatcagtggttgagaagagcttttcggacctgttactaccccaagctgtgtaatatacttgtataacagaaataccttctatacaaacctttttttctacttttagatagaaatgtctactttttcagcagttctgtgaattaaagagcagagtgactgtgggtctggaatggctggtgtacttgggaatgtactatcaggattttacagcaatgctgggaaatgacagggaaaatgacaggaatgaatctcaccagattttttatgtactcagcagagccttgagttacggtgtttattttccaatcaagtgaagatatctcctacttctcctactggaacatctcagcttctgcagtgaagaaaaattcctgtgatagttcagttctttagtttttctatttgaaaaaaaaaaatcatttaaatgatcctttgttcacggctctccttaatgactgagtgaacagttcctatctgtatatttgactaaaccttttcctaagctatctctcatggttcctatgtttttttatcataattaaaagcaaaaccatctggatcacctaacagtcagaggtcagtatctcagcgtgtgaattatagaggaaatacagagagaacctcttccacttttacttttcgtccaaataaaatgcatggtgtaccagaagttgaagatcgggttgaggattggggctagctcgatgacactaaggccccaacatcgcgggacctgctgtggcgcggattcttaggaacgctgttctagccggccccctctccaggggtcgccgtggccggcattatttcctagttcttcttgtaaccctgaggtgccagcgcggggagtgaggaggggtcagggggctaaggatgcaacctctgacgttctgcgccttcctaggagagtcttacatgtgttgagatttcacaagcaatgcgagttgtaaaataccagctctacaagaagctaggctctgtgacggcatagttttcagtagctttatcacaatattcacaatggagaattatatgacatggtagcagaaataggcccttttatgtgttgcttctattttacctcaaattgtagatatagggtaatcaataaaatccatccatgcctttcacacactaagt

SEQ ID NO: 4097 - protein, 563 aa, Homo sapiens
MAQVAMSTLPVEDEESSESRMVVTFLMSALESMCKELAKSKAEVACIAVYETDVFVVGTERGRAFVNTRKDFQKDFVKYCVEEEEKAAEMHKMKSTTQANRMSVDAVEIETLRKTVEDYFCFCYGKALGKSTVVPVPYEKMLRDQSAVVVQGLPEGVAFKHPENYDLATLKWILENKAGISFIIKRPFLEPKKHVGGRVMVTDADRSILSPGGSCGPIKVKTEPTEDSGISLEMAAVTVKEESEDPDYYQYNIQAGPSETDDVDEKQPLSKPLQGSHHSSEGNEGTEMEVPAEDDDYSPPSKRPKANELPQPPVPEPANAGKRKVREFNFEKWNARITDLRKQVEELFERKYAQAIKAKGPVTIPYPLFQSHVEDLYVEGLPEGIPFRRPSTYGIPRLERILLAKERIRFVIKKHELLNSTREDLQLDKPASGVKEEWYARITKLRKMVDQLFCKKFAEALGSTEAKAVPYQKFEAHPNDLYVEGLPENIPFRSPSWYGIPRLEKIIQVGNRIKFVIKRPELLTHSTTEVTQPRTNTPVKEDWNVRITKLRKQVEEIFNLKFA

SEQ ID NO: 4098 - DNA, 5011 bp, Homo sapiens
aaaaaaaaaaaaaaaaaaaaaaaaaaaagaaaaaagaaaaaaaaaaggaggaggaggaggagggtgagagagaagctgggagagcagagaaaaggggccaccggtcgcccccccgcttccccgcacgcgctctccagccgcggccgcccgcctgccgcggtcaccccggcctctgcctctgtcccccagtgatcggatcaaggcgctgagcgaggccctgcctgcggggcggccatgcggcggtgacaggagcgcgaccgacacgcacgggcccctcgccccctctcgcctcccgtccgctcgccagctcccctcagccgaggctgctccgcggcggccgcagcccgcgcgcggcccacactcgcctccccgttgaagatgaggagtcctcggagagcaggatggtggtgacattcctcatgtcagctctcgagtccatgtgtaaagaactggccaagtccaaagccgaagtggcctgcattgcagtgtatgaaacagacgtgtttgtcgtcggaactgaaagaggacgtgcttttgtcaataccagaaaggattttcaaaaagattttgtaaaatattgtgttgaagaagaagaaaaagctgcagagatgcataaaatgaaatctacaacccaggcaaatcggatgagtgtagatgctgtagaaattgaaacactcagaaaaacagttgaggactatttctgcttttgctatgggaaagctttaggcaaatccacagtggtacctgtaccatatgagaagatgctgcgagaccagtcggctgtggtagtgcaggggcttccggaaggtgttgcctttaaacaccccgagaactatgatcttgcaaccctgaaatggattttggagaacaaagcagggatttcattcatcattaagagaccttttttagagccaaagaagcatgtaggtggtcgtgtgatggtaacagatgctgacaggtcaatactatctccaggtggaagttgtggccccatcaaagtgaaaactgaacccacagaagattctggcatttccctggaaatggcagctgtgacagtaaaggaagaatcagaagatcctgattattatcaatataacattcaaggaagccaccattcttcagagggcaatgaaggcacagaaatggaagtaccagcagaagattctactcaacatgtcccttcagaaacaagtgaggaccctgaagttgaggtgactattgaagatgatgattattctccaccgtctaagagaccaaaggccaatgagctaccgcagccaccagtcccggaacccgccaatgctgggaagcggaaagtgagggagttcaacttcgagaaatggaatgctcgcatcactgatctacgtaaacaagttgaagaattgtttgaaaggaaatatgctcaagccataaaagccaaaggtccggtgacgatcccgtaccctcttttccagtctcatgttgaagatctttatgtagaaggacttcctgaaggaattccttttagaaggccatctacttacggaattcctcgcctggagaggatattacttgcaaaggaaaggattcgttttgtgattaagaaacatgagcttctgaattcaacacgtgaagatttacagcttgataagccagcttcaggagtaaaggaagaatggtatgccagaatcactaaattaagaaagatggtggatcagcttttctgcaaaaaatttgcggaagccttggggagcactgaagccaaggctgtaccgtaccaaaaatttgaggcacacccgaatgatctgtacgtggaaggactgccagaaaacattcctttccgaagtccctcatggtatggaatcccaaggctggaaaaaatcattcaagtgggcaatcgaattaaatttgttattaaaagaccagaacttctgactcacagtaccactgaagttactcagccaagaacgaatacaccagctcaagctcttggactcaccgaggcagtaaaagtaccatatcctgtgtttgaatcaaacccggagttcttgtatgtggaaggcttgccagaggggattcccttccgaagccctacctggtttggaattccacgacttgaaaggatcgtccgcgggagtaataaaatcaagttcgttgttaaaaaacctgaactagttatttcctacttgcctcctgggatggctagtaaaataaacactaaagctttgcagtcccccaaaagaccacgaagtcctgggagtaattcaaaggttcctgaaattgaggtcaccgtggaaggccctaataacaacaatcctcaaacctcagctgttcgaaccccgacccagactaacggttctaacgttcccttcaagccacgagggagagagttttcctttgaggcctggaatgccaaaatcacggacctaaaacagaaagttgaaaatctcttcaatgagaaatgtggggaagctcttggccttaaacaagctgtgaaggtgccgttcgcgttatttgagtctttcccggaagacttttatgtggaaggcttacctgagggtgtgccattccgaagaccatcgacttttggcattccgaggctggagaagatactcagaaacaaagccaaaattaagttcatcattaaaaagcccgaaatgtttgagacggcgattaaggagagcacctcctctaagagccctcccagaaaaataaattcatcacccaatgttaatactactgcatcaggtgttgaagaccttaacatcattcaggtgacaattccagatgatgataatgaaagactctcgaaagttgaaaaagctagacagctaagagaacaagtgaatgacctctttagtcggaaatttggtgaagctattggtatgggttttcctgtgaaagttccctacaggaaaatcacaattaaccctggctgtgtggtggttgatggcatgcccccgggggtgtccttcaaagcccccagctacctggaaatcagctccatgagaaggatcttagactctgccgagtttatcaaattcacggtcattagaccatttccaggacttgtgattaataaccagctggttgatcagagtgagtcagaaggccccgtgatacaagaatcagctgaaccaagccagttggaagttccagccacagaaggtaaaaggacctcttccctcctagggtaaatcagcttctgtgtcagggatgctgtgtggtgtccatctgaaccccctgcatacgcgtagctaatgtgatctccccactttcacataagatggtggccctgccttcagggaatgtgggagccaggtgggagccttcccggatatttaagctagaagattctacagggagattctccttggatcaatatatgtctctcagtcaaagatgtaaaagcacttttgccttaaaaagaatgttctgtttctaaatagagtcaacgttgtcctcctcattggaattcactatgagtcagaatcattagactgacttttttttttccatagtaatagtattttgcagagtctcacagagctgcagatcttttgttcatcttgcagagttaacaagtctgatcctgttagtccagatttcttaaatttggccaagttataataggagcagtagcttgagacccgaagtcaggaaactttgacaatggatttttttttttaatccagagacttgtactggaatttgccttaccctgtcagctcatggacttaaggtttcatcccgctttatgagtgcttctgaatccaagtcattgttacctgaatttgcaaattaagttgtgatattcgtgactgttaaattcctgtaattagattaacctctttgcttgcttgtttgttttctctcctattttagcttaaagtatcagtggttgagaagagcttttcggacctgttactaccccaagctgtgtaatatacttgtataacagaaataccttctatacaaacctttttttctacttttagatagaaatgtctactttttcagcagttctgtgaattaaagagcagagtgactgtgggtctggaatggctggtgtacttgggaatgtactatcaggattttacagcaatgctgggaaatgacagggaaaatgacaggaatgaatctcaccagattttttatgtactcagcagagccttgagttacggtgtttattttccaatcaagtgaagatatctcctacttctcctactggaacatctcagcttctgcagtgaagaaaaattcctgtgatagttcagttctttagtttttctatttgaaaaaaaaaaatcatttaaatgatcctttgttcacggctctccttaatgactgagtgaacagttcctatctgtatatttgactaaaccttttcctaagctatctctcatggttcctatgtttttttatcataattaaaagcaaaaccatctggatcacctaacagtcagaggtcagtatctcagcgtgtgaattatagaggaaatacagagagaacctcttccacttttacttttcgtccaaataaaatgcatggtgtaccagaagttgaagatcgggttgaggattggggctagctcgatgacactaaggccccaacatcgcgggacctgctgtggcgcggattcttaggaacgctgttctagccggccccctctccaggggtcgccgtggccggcattatttcctagttcttcttgtaaccctgaggtgccagcgcggggagtgaggaggggtcagggggctaaggatgcaacctctgacgttctgcgccttcctaggagagtcttacatgtgttgagatttcacaagcaatgcgagttgtaaaataccagctctacaagaagctaggctctgtgacggcatagttttcagtagctttatcacaatattcacaatggagaattatatgacatggtagcagaaataggcccttttatgtgttgcttctattttacctcaaattgtagatatagggtaatcaataaaatccatccatgcctttcacacactaagt

SEQ ID NO: 4099 - protein, 924 aa, Homo sapiens
MVVTFLMSALESMCKELAKSKAEVACIAVYETDVFVVGTERGRAFVNTRKDFQKDFVKYCVEEEEKAAEMHKMKSTTQANRMSVDAVEIETLRKTVEDYFCFCYGKALGKSTVVPVPYEKMLRDQSAVVVQGLPEGVAFKHPENYDLATLKWILENKAGISFIIKRPFLEPKKHVGGRVMVTDADRSILSPGGSCGPIKVKTEPTEDSGISLEMAAVTVKEESEDPDYYQYNIQGSHHSSEGNEGTEMEVPAEDSTQHVPSETSEDPEVEVTIEDDDYSPPSKRPKANELPQPPVPEPANAGKRKVREFNFEKWNARITDLRKQVEELFERKYAQAIKAKGPVTIPYPLFQSHVEDLYVEGLPEGIPFRRPSTYGIPRLERILLAKERIRFVIKKHELLNSTREDLQLDKPASGVKEEWYARITKLRKMVDQLFCKKFAEALGSTEAKAVPYQKFEAHPNDLYVEGLPENIPFRSPSWYGIPRLEKIIQVGNRIKFVIKRPELLTHSTTEVTQPRTNTPAQALGLTEAVKVPYPVFESNPEFLYVEGLPEGIPFRSPTWFGIPRLERIVRGSNKIKFVVKKPELVISYLPPGMASKINTKALQSPKRPRSPGSNSKVPEIEVTVEGPNNNNPQTSAVRTPTQTNGSNVPFKPRGREFSFEAWNAKITDLKQKVENLFNEKCGEALGLKQAVKVPFALFESFPEDFYVEGLPEGVPFRRPSTFGIPRLEKILRNKAKIKFIIKKPEMFETAIKESTSSKSPPRKINSSPNVNTTASGVEDLNIIQVTIPDDDNERLSKVEKARQLREQVNDLFSRKFGEAIGMGFPVKVPYRKITINPGCVVVDGMPPGVSFKAPSYLEISSMRRILDSAEFIKFTVIRPFPGLVINNQLVDQSESEGPVIQESAEPSQLEVPATEGKRTSSLLG

SEQ ID NO: 4100 - DNA, 4510 bp, Homo sapiens
aaaaaaaaaaaaaaaaaaaaaaaaaaaagaaaaaagaaaaaaaaaaggaggaggaggaggagggtgagagagaagctgggagagcagagaaaaggggccaccggtcgcccccccgcttccccgcacgcgctctccagccgcggccgcccgcctgccgcggtcaccccggcctctgcctctgtcccccagtgatcggatcaaggcgctgagcgaggccctgcctgcggggcggccatgcggcggtgacaggagcgcgaccgacacgcacgggcccctcgccccctctcgcctcccgtccgctcgccagctcccctcagccgaggctgctccgcggcggccgcagcccgcgcgcggcccacactcgcctcccctcggcacccccggccccggagctgcctggaggcggccgcactcggggatcatggcccaagttgcaatgtccaccctccccgttgaagatgaggagtcctcggagagcaggatggtggtgacattcctcatgtcagctctcgagtccatgtgtaaagaactggccaagtccaaagccgaagtggcctgcattgcagtgtatgaaacagacgtgtttgtcgtcggaactgaaagaggacgtgcttttgtcaataccagaaaggattttcaaaaagattttgtaaaatattgtgttgaagaagaagaaaaagctgcagagatgcataaaatgaaatctacaacccaggcaaatcggatgagtgtagatgctgtagaaattgaaacactcagaaaaacagttgaggactatttctgcttttgctatgggaaagctttaggcaaatccacagtggtacctgtaccatatgagaagatgctgcgagaccagtcggctgtggtagtgcaggggcttccggaaggtgttgcctttaaacaccccgagaactatgatcttgcaaccctgaaatggattttggagaacaaagcagggatttcattcatcattaagagaccttttttagagccaaagaagcatgtaggtggtcgtgtgatggtaacagatgctgacaggtcaatactatctccaggtggaagttgtggccccatcaaagtgaaaactgaacccacagaagattctggcatttccctggaaatggcagctgtgacagtaaaggaagaatcagaagatcctgattattatcaatataacattcaagcaggcccttctgaaactgatgatgttgatgaaaaacagcccctatcgaagcctttgcaaggaagccaccattcttcagagggcaatgaaggcacagaaatggaagtaccagcagaagattctactcaacatgtcccttcagaaacaagtgaggaccctgaagttgaggtgactattgaagatgatgattattctccaccgtctaagagaccaaaggccaatgagctaccgcagccaccagtcccggaacccgccaatgctgggaagcggaaagtgagggagttcaacttcgagaaatggaatgctcgcatcactgatctacgtaaacaagttgaagaattgtttgaaaggaaatatgctcaagccataaaagccaaaggtccggtgacgatcccgtaccctcttttccagtctcatgttgaagatctttatgtagaaggacttcctgaaggaattccttttagaaggccatctacttacggaattcctcgcctggagaggatattacttgcaaaggaaaggattcgttttgtgattaagaaacatgagcttctgaattcaacacgtgaagatttacagcttgataagccagcttcaggagtaaaggaagaatggtatgccagaatcactaaattaagaaagatggtggatcagcttttctgcaaaaaatttgcggaagccttggggagcactgaagccaaggctgtaccgtaccaaaaatttgaggcacacccgaatgatctgtacgtggaaggactgccagaaaacattcctttccgaagtccctcatggtatggaatcccaaggctggaaaaaatcattcaagtgggcaatcgaattaaatttgttattaaaagaccagaacttctgactcacagtaccactgaagttactcagccaagaacgaatacaccagctcaagctcttggactcaccgaggcagtaaaagtaccatatcctgtgtttgaatcaaacccggagttcttgtatgtggaaggcttgccagaggggattcccttccgaagccctacctggtttggaattccacgacttgaaaggatcgtccgcgggagtaataaaatcaagttcgttgttaaaaaacctgaactagttatttcctacttgcctcctgggatggctagtaaaataaacactaaagctttgcagtcccccaaaagaccacgaagtcctgggagtaattcaaaggttcctgaaattgaggtcaccgtggaaggccctaataacaacaatcctcaaacctcagctgttcgaaccccgacccagactaacggttctaacgttcccttcaagccacgagggagagagttttcctttgaggcctggaatgccaaaatcacggacctaaaacagaaagttgaaaatctcttcaatgagaaatgtggggaagctcttggccttaaacaagctgtgaaggtgccgttcgcgttatttgagtctttcccggaagacttttatgtggaaggcttacctgagggtgtgccattccgaagaccatcgacttttggcattccgaggctggagaagatactcagaaacaaagccaaaattaagttcatcattaaaaagcccgaaatgtttgagacggcgattaaggagagcacctcctctaagagccctcccagaaaaataaattcatcacccaatgttaatactactgcatcaggtgttgaagaccttaacatcattcaggtgacaattccagatgatgataatgaaagactctcgaaagttgaaaaagctagacagctaagagaacaagtgaatgacctctttagtcggaaatttggtgaagctattggtatgggttttcctgtgaaagttccctacaggaaaatcacaattaaccctggctgtgtggtggttgatggcatgcccccgggggtgtccttcaaagcccccagctacctggaaatcagctccatgagaaggatcttagactctgccgagtttatcaaattcacggtcattagaccatttccaggacttgtgattaataaccagctggttgatcagagtgagtcagaaggccccgtgatacaagaatcagctgaaccaagccagttggaagttccagccacagaagaaataaaagagactgatggaagctctcagatcaagcaagaaccagaccccacgtggtagacctcttccctcctaggcttaaagtatcagtggttgagaagagcttttcggacctgttactaccccaagctgtgtaatatacttgtataacagaaataccttctatacaaacctttttttctacttttagatagaaatgtctactttttcagcagttctgtgaattaaagagcagagtgactgtgggtctggaatggctggtgtacttgggaatgtactatcaggattttacagcaatgctgggaaatgacagggaaaatgacaggaatgaatctcaccagattttttatgtactcagcagagccttgagttacggtgtttattttccaatcaagtgaagatatctcctacttctcctactggaacatctcagcttctgcagtgaagaaaaattcctgtgatagttcagttctttagtttttctatttgaaaaaaaaaaatcatttaaatgatcctttgttcacggctctccttaatgactgagtgaacagttcctatctgtatatttgactaaaccttttcctaagctatctctcatggttcctatgtttttttatcataattaaaagcaaaaccatctggatcacctaacagtcagaggtcagtatctcagcgtgtgaattatagaggaaatacagagagaacctcttccacttttacttttcgtccaaataaaatgcatggtgtaccagaagttgaagatcgggttgaggattggggctagctcgatgacactaaggccccaacatcgcgggacctgctgtggcgcggattcttaggaacgctgttctagccggccccctctccaggggtcgccgtggccggcattatttcctagttcttcttgtaaccctgaggtgccagcgcggggagtgaggaggggtcagggggctaaggatgcaacctctgacgttctgcgccttcctaggagagtcttacatgtgttgagatttcacaagcaatgcgagttgtaaaataccagctctacaagaagctaggctctgtgacggcatagttttcagtagctttatcacaatattcacaatggagaattatatgacatggtagcagaaataggcccttttatgtgttgcttctattttacctcaaattgtagatatagggtaatcaataaaatccatccatgcctttcacacactaagt

SEQ ID NO: 4101 - protein, 974 aa, Homo sapiens
MAQVAMSTLPVEDEESSESRMVVTFLMSALESMCKELAKSKAEVACIAVYETDVFVVGTERGRAFVNTRKDFQKDFVKYCVEEEEKAAEMHKMKSTTQANRMSVDAVEIETLRKTVEDYFCFCYGKALGKSTVVPVPYEKMLRDQSAVVVQGLPEGVAFKHPENYDLATLKWILENKAGISFIIKRPFLEPKKHVGGRVMVTDADRSILSPGGSCGPIKVKTEPTEDSGISLEMAAVTVKEESEDPDYYQYNIQAGPSETDDVDEKQPLSKPLQGSHHSSEGNEGTEMEVPAEDSTQHVPSETSEDPEVEVTIEDDDYSPPSKRPKANELPQPPVPEPANAGKRKVREFNFEKWNARITDLRKQVEELFERKYAQAIKAKGPVTIPYPLFQSHVEDLYVEGLPEGIPFRRPSTYGIPRLERILLAKERIRFVIKKHELLNSTREDLQLDKPASGVKEEWYARITKLRKMVDQLFCKKFAEALGSTEAKAVPYQKFEAHPNDLYVEGLPENIPFRSPSWYGIPRLEKIIQVGNRIKFVIKRPELLTHSTTEVTQPRTNTPAQALGLTEAVKVPYPVFESNPEFLYVEGLPEGIPFRSPTWFGIPRLERIVRGSNKIKFVVKKPELVISYLPPGMASKINTKALQSPKRPRSPGSNSKVPEIEVTVEGPNNNNPQTSAVRTPTQTNGSNVPFKPRGREFSFEAWNAKITDLKQKVENLFNEKCGEALGLKQAVKVPFALFESFPEDFYVEGLPEGVPFRRPSTFGIPRLEKILRNKAKIKFIIKKPEMFETAIKESTSSKSPPRKINSSPNVNTTASGVEDLNIIQVTIPDDDNERLSKVEKARQLREQVNDLFSRKFGEAIGMGFPVKVPYRKITINPGCVVVDGMPPGVSFKAPSYLEISSMRRILDSAEFIKFTVIRPFPGLVINNQLVDQSESEGPVIQESAEPSQLEVPATEEIKETDGSSQIKQEPDPTW

SEQ ID NO: 4102 - DNA, 5088 bp, Homo sapiens
aaaaaaaaaaaaaaaaaaaaaaaaaaaagaaaaaagaaaaaaaaaaggaggaggaggaggagggtgagagagaagctgggagagcagagaaaaggggccaccggtcgcccccccgcttccccgcacgcgctctccagccgcggccgcccgcctgccgcggtcaccccggcctctgcctctgtcccccagtgatcggatcaaggcgctgagcgaggccctgcctgcggggcggccatgcggcggtgacaggagcgcgaccgacacgcacgggcccctcgccccctctcgcctcccgtccgctcgccagctcccctcagccgaggctgctccgcggcggccgcagcccgcgcgcggcccacactcgcctcccctcggcacccccggccccggagctgcctggaggcggccgcactcggggatcatggcccaagttgcaatgtccaccctccccgttgaagatgaggagtcctcggagagcaggatggtggtgacattcctcatgtcagctctcgagtccatgtgtaaagaactggccaagtccaaagccgaagtggcctgcattgcagtgtatgaaacagacgtgtttgtcgtcggaactgaaagaggacgtgcttttgtcaataccagaaaggattttcaaaaagattttgtaaaatattgtgttgaagaagaagaaaaagctgcagagatgcataaaatgaaatctacaacccaggcaaatcggatgagtgtagatgctgtagaaattgaaacactcagaaaaacagttgaggactatttctgcttttgctatgggaaagctttaggcaaatccacagtggtacctgtaccatatgagaagatgctgcgagaccagtcggctgtggtagtgcaggggcttccggaaggtgttgcctttaaacaccccgagaactatgatcttgcaaccctgaaatggattttggagaacaaagcagggatttcattcatcattaagagaccttttttagagccaaagaagcatgtaggtggtcgtgtgatggtaacagatgctgacaggtcaatactatctccaggtggaagttgtggccccatcaaagtgaaaactgaacccacagaagattctggcatttccctggaaatggcagctgtgacagtaaaggaagaatcagaagatcctgattattatcaatataacattcaagcaggcccttctgaaactgatgatgttgatgaaaaacagcccctatcgaagcctttgcaaggaagccaccattcttcagagggcaatgaaggcacagaaatggaagtaccagcagaagatgatgattattctccaccgtctaagagaccaaaggccaatgagctaccgcagccaccagtcccggaacccgccaatgctgggaagcggaaagtgagggagttcaacttcgagaaatggaatgctcgcatcactgatctacgtaaacaagttgaagaattgtttgaaaggaaatatgctcaagccataaaagccaaaggtccggtgacgatcccgtaccctcttttccagtctcatgttgaagatctttatgtagaaggacttcctgaaggaattccttttagaaggccatctacttacggaattcctcgcctggagaggatattacttgcaaaggaaaggattcgttttgtgattaagaaacatgagcttctgaattcaacacgtgaagatttacagcttgataagccagcttcaggagtaaaggaagaatggtatgccagaatcactaaattaagaaagatggtggatcagcttttctgcaaaaaatttgcggaagccttggggagcactgaagccaaggctgtaccgtaccaaaaatttgaggcacacccgaatgatctgtacgtggaaggactgccagaaaacattcctttccgaagtccctcatggtatggaatcccaaggctggaaaaaatcattcaagtgggcaatcgaattaaatttgttattaaaagaccagaacttctgactcacagtaccactgaagttactcagccaagaacgaatacaccagctcaagctcttggactcaccgaggcagtaaaagtaccatatcctgtgtttgaatcaaacccggagttcttgtatgtggaaggcttgccagaggggattcccttccgaagccctacctggtttggaattccacgacttgaaaggatcgtccgcgggagtaataaaatcaagttcgttgttaaaaaacctgaactagttatttcctacttgcctcctgggatggctagtaaaataaacactaaagctttgcagtcccccaaaagaccacgaagtcctgggagtaattcaaaggttcctgaaattgaggtcaccgtggaaggccctaataacaacaatcctcaaacctcagctgttcgaaccccgacccagactaacggttctaacgttcccttcaagccacgagggagagagttttcctttgaggcctggaatgccaaaatcacggacctaaaacagaaagttgaaaatctcttcaatgagaaatgtggggaagctcttggccttaaacaagctgtgaaggtgccgttcgcgttatttgagtctttcccggaagacttttatgtggaaggcttacctgagggtgtgccattccgaagaccatcgacttttggcattccgaggctggagaagatactcagaaacaaagccaaaattaagttcatcattaaaaagcccgaaatgtttgagacggcgattaaggagagcacctcctctaagagccctcccagaaaaataaattcatcacccaatgttaatactactgcatcaggtgttgaagaccttaacatcattcaggtgacaattccagatgatgataatgaaagactctcgaaagttgaaaaagctagacagctaagagaacaagtgaatgacctctttagtcggaaatttggtgaagctattggtatgggttttcctgtgaaagttccctacaggaaaatcacaattaaccctggctgtgtggtggttgatggcatgcccccgggggtgtccttcaaagcccccagctacctggaaatcagctccatgagaaggatcttagactctgccgagtttatcaaattcacggtcattagaccatttccaggacttgtgattaataaccagctggttgatcagagtgagtcagaaggccccgtgatacaagaatcagctgaaccaagccagttggaagttccagccacagaaggtaaaaggacctcttccctcctagggtaaatcagcttctgtgtcagggatgctgtgtggtgtccatctgaaccccctgcatacgcgtagctaatgtgatctccccactttcacataagatggtggccctgccttcagggaatgtgggagccaggtgggagccttcccggatatttaagctagaagattctacagggagattctccttggatcaatatatgtctctcagtcaaagatgtaaaagcacttttgccttaaaaagaatgttctgtttctaaatagagtcaacgttgtcctcctcattggaattcactatgagtcagaatcattagactgacttttttttttccatagtaatagtattttgcagagtctcacagagctgcagatcttttgttcatcttgcagagttaacaagtctgatcctgttagtccagatttcttaaatttggccaagttataataggagcagtagcttgagacccgaagtcaggaaactttgacaatggatttttttttttaatccagagacttgtactggaatttgccttaccctgtcagctcatggacttaaggtttcatcccgctttatgagtgcttctgaatccaagtcattgttacctgaatttgcaaattaagttgtgatattcgtgactgttaaattcctgtaattagattaacctctttgcttgcttgtttgttttctctcctattttagcttaaagtatcagtggttgagaagagcttttcggacctgttactaccccaagctgtgtaatatacttgtataacagaaataccttctatacaaacctttttttctacttttagatagaaatgtctactttttcagcagttctgtgaattaaagagcagagtgactgtgggtctggaatggctggtgtacttgggaatgtactatcaggattttacagcaatgctgggaaatgacagggaaaatgacaggaatgaatctcaccagattttttatgtactcagcagagccttgagttacggtgtttattttccaatcaagtgaagatatctcctacttctcctactggaacatctcagcttctgcagtgaagaaaaattcctgtgatagttcagttctttagtttttctatttgaaaaaaaaaaatcatttaaatgatcctttgttcacggctctccttaatgactgagtgaacagttcctatctgtatatttgactaaaccttttcctaagctatctctcatggttcctatgtttttttatcataattaaaagcaaaaccatctggatcacctaacagtcagaggtcagtatctcagcgtgtgaattatagaggaaatacagagagaacctcttccacttttacttttcgtccaaataaaatgcatggtgtaccagaagttgaagatcgggttgaggattggggctagctcgatgacactaaggccccaacatcgcgggacctgctgtggcgcggattcttaggaacgctgttctagccggccccctctccaggggtcgccgtggccggcattatttcctagttcttcttgtaaccctgaggtgccagcgcggggagtgaggaggggtcagggggctaaggatgcaacctctgacgttctgcgccttcctaggagagtcttacatgtgttgagatttcacaagcaatgcgagttgtaaaataccagctctacaagaagctaggctctgtgacggcatagttttcagtagctttatcacaatattcacaatggagaattatatgacatggtagcagaaataggcccttttatgtgttgcttctattttacctcaaattgtagatatagggtaatcaataaaatccatccatgcctttcacacactaagt

SEQ ID NO: 4103 - protein, 943 aa, Homo sapiens
MAQVAMSTLPVEDEESSESRMVVTFLMSALESMCKELAKSKAEVACIAVYETDVFVVGTERGRAFVNTRKDFQKDFVKYCVEEEEKAAEMHKMKSTTQANRMSVDAVEIETLRKTVEDYFCFCYGKALGKSTVVPVPYEKMLRDQSAVVVQGLPEGVAFKHPENYDLATLKWILENKAGISFIIKRPFLEPKKHVGGRVMVTDADRSILSPGGSCGPIKVKTEPTEDSGISLEMAAVTVKEESEDPDYYQYNIQAGPSETDDVDEKQPLSKPLQGSHHSSEGNEGTEMEVPAEDDDYSPPSKRPKANELPQPPVPEPANAGKRKVREFNFEKWNARITDLRKQVEELFERKYAQAIKAKGPVTIPYPLFQSHVEDLYVEGLPEGIPFRRPSTYGIPRLERILLAKERIRFVIKKHELLNSTREDLQLDKPASGVKEEWYARITKLRKMVDQLFCKKFAEALGSTEAKAVPYQKFEAHPNDLYVEGLPENIPFRSPSWYGIPRLEKIIQVGNRIKFVIKRPELLTHSTTEVTQPRTNTPAQALGLTEAVKVPYPVFESNPEFLYVEGLPEGIPFRSPTWFGIPRLERIVRGSNKIKFVVKKPELVISYLPPGMASKINTKALQSPKRPRSPGSNSKVPEIEVTVEGPNNNNPQTSAVRTPTQTNGSNVPFKPRGREFSFEAWNAKITDLKQKVENLFNEKCGEALGLKQAVKVPFALFESFPEDFYVEGLPEGVPFRRPSTFGIPRLEKILRNKAKIKFIIKKPEMFETAIKESTSSKSPPRKINSSPNVNTTASGVEDLNIIQVTIPDDDNERLSKVEKARQLREQVNDLFSRKFGEAIGMGFPVKVPYRKITINPGCVVVDGMPPGVSFKAPSYLEISSMRRILDSAEFIKFTVIRPFPGLVINNQLVDQSESEGPVIQESAEPSQLEVPATEGKRTSSLLG

SEQ ID NO: 4104 - DNA, 7726 bp, Homo sapiens
aaaaaaaaaaaaaaaaaaaaaaaaaaaagaaaaaagaaaaaaaaaaggaggaggaggaggagggtgagagagaagctgggagagcagagaaaaggggccaccggtcgcccccccgcttccccgcacgcgctctccagccgcggccgcccgcctgccgcggtcaccccggcctctgcctctgtcccccagtgatcggatcaaggcgctgagcgaggccctgcctgcggggcggccatgcggcggtgacaggagcgcgaccgacacgcacgggcccctcgccccctctcgcctcccgtccgctcgccagctcccctcagccgaggctgctccgcggcggccgcagcccgcgcgcggcccacactcgcctcccctcggcacccccggccccggagctgcctggaggcggccgcactcggtgtaaagaactggccaagtccaaagccgaagtggcctgcattgcagtgtatgaaacagacgtgtttgtcgtcggaactgaaagaggacgtgcttttgtcaataccagaaaggattttcaaaaagattttgtaaaatattgtgttgaagaagaagaaaaagctgcagagatgcataaaatgaaatctacaacccaggcaaatcggatgagtgtagatgctgtagaaattgaaacactcagaaaaacagttgaggactatttctgcttttgctatgggaaagctttaggcaaatccacagtggtacctgtaccatatgagaagatgctgcgagaccagtcggctgtggtagtgcaggggcttccggaaggtgttgcctttaaacaccccgagaactatgatcttgcaaccctgaaatggattttggagaacaaagcagggatttcattcatcattaagagaccttttttagagccaaagaagcatgtaggtggtcgtgtgatggtaacagatgctgacaggtcaatactatctccaggtggaagttgtggccccatcaaagtgaaaactgaacccacagaagattctggaagccaccattcttcagagggcaatgaaggcacagaaatggaagtaccagcagaagattctactcaacatgtcccttcagaaacaagtgaggaccctgaagttgaggtgactattgaagatgatgattattctccaccgtctaagagaccaaaggccaatgagctaccgcagccaccagtcccggaacccgccaatgctgggaagcggaaagtgagggagttcaacttcgagaaatggaatgctcgcatcactgatctacgtaaacaagttgaagaattgtttgaaaggaaatatgctcaagccataaaagccaaaggtccggtgacgatcccgtaccctcttttccagtctcatgttgaagatctttatgtagaaggacttcctgaaggaattccttttagaaggccatctacttacggaattcctcgcctggagaggatattacttgcaaaggaaaggattcgttttgtgattaagaaacatgagcttctgaattcaacacgtgaagatttacagcttgataagccagcttcaggagtaaaggaagaatggtatgccagaatcactaaattaagaaagatggtggatcagcttttctgcaaaaaatttgcggaagccttggggagcactgaagccaaggctgtaccgtaccaaaaatttgaggcacacccgaatgatctgtacgtggaaggactgccagaaaacattcctttccgaagtccctcatggtatggaatcccaaggctggaaaaaatcattcaagtgggcaatcgaattaaatttgttattaaaagaccagaacttctgactcacagtaccactgaagttactcagccaagaacgaatacaccagtcaaagaagattggaatgtcagaattaccaagctacggaagcaagtggaagagatttttaatttgaaatttgctcaagctcttggactcaccgaggcagtaaaagtaccatatcctgtgtttgaatcaaacccggagttcttgaaaggatcgtccgcgggagtaataaaatcaagttcgttgttaaaaaacctgaactagttatttcctacttgcctcctgggatggctagtaaaataaacactaaagctttgcagtcccccaaaagaccacgaagtcctgggagtaattcaaaggttcctgaaattgaggtcaccgtggaaggccctaataacaacaatcctcaaacctcagctgttcgaaccccgacccagactaacggttctaacgttcccttcaagccacgagggagagagttttcctttgaggcctggaatgccaaaatcacggacctaaaacagaaagttgaaaatctcttcaatgagaaatgtggggaagctcttggccttaaacaagctgtgaaggtgccgttcgcgttatttgagtctttcccggaagacttttatgtggaaggcttacctgagggtgtgccattccgaagaccatcgacttttggcattccgaggctggagaagatactcagaaacaaagccaaaattaagttcatcattaaaaagcccgaaatgtttgagacggcgattaaggagagcacctcctctaagagccctcccagaaaaataaattcatcacccaatgttaatactactgcatcaggtgttgaagaccttaacatcattcaggtgacaattccagatgatgataatgaaagactctcgaaagttgaaaaagctagacagctaagagaacaagtgaatgacctctttagtcggaaatttggtgaagctattggtatgggttttcctgtgaaagttccctacaggaaaatcacaattaaccctggctgtgtggtggttgatggcatgcccccgggggtgtccttcaaagcccccagctacctggaaatcagctccatgagaaggatcttagactctgccgagtttatcaaattcacggtcattaggtaagtgagagtttcctgcttagtcacaggagcgaatctggagctcatgaggctgactcttctaaaatgcagccacaggtagtcatcgaatccggcttcctatgctgtgcaatcaacaaatcaaaataacttgtgtcatcattagaatgtcagatgtgcttctacgaactaagctgactcttttaattctttggcaaagggttggcaaactaggactgtttgccaaattcaggctgcctcctatttttagagtcttcctgaaacacagctacacccgtattatccatggctgctttcctgtcacagtgagtaagtagctgggactgagaaggcatggcctccaaagtctaaaatatttactctctagcactttgtagaaaaaccttagctaggcacagtggctaacgcctgtaatcccagcattttgggaggccaaggcaggcagatcacctgaggtcaggagttccagaccagcctggccaacatggtgaaatcccatctctacaaaaataaaacagttagctgggcatgatggcgggtgcctgtaatcccagctactcgggaggctgaggcaggatagtcgcttgaacccaggaggtggaggttgcaatgagccaagatcatgccactgcactccagcctggacgacagagtgagactccatcacaagaaaaaaagaactttgtcaacctctgtcttagggcgccttgtcacaggcttcgggtcagacggattcaaccttgcatcagccatttgttagccaggtcactctgttctttgtctgtaaatgagattgatcgttgttcccactgagagtgtcagctccttcccgtagagcaggcatgatgattgtactcacctctgacaccattgtgagtgccacattccttcccacgtccttgtcactgtaagagatgcccacctgagcaccaaccccaggttatcttcccctttgtcttccagccccccagaaacagctacgactcaacctacccaatcatttcatcatcagattgccactgtctctagttcaggtctcttgggactggcactcagaaatctcataataaatcctcttgaggcttctcatacactcgtcttcttccaatcttctttccctcaaaatctcatattttggttccacttcacccaccgtcattctccatatcactcccaggagttaggcaaaaagccccttccgttcttccgtatgttaaacttagaatcactctgttccctgctctgcgtttctattttttgtttttcctccatttactagtagcttaacactttctaacagtgttcttattattgatacgtatctatctcttccataagcttataaggtcacggataatacttctcattgtagtacgtaaatgacgtgggctagatatgagttgaataaacagttatacctgtaaattcttacagagtgaaaataaattgttatactttacaatttgtttctctctttagaccatttccaggacttgtgattaataaccgtgagtattttgtgaagtgttttgtttttgttttttcctggggtctgacgtgtgtgcgtgtgagtgtgtatacatgcttaacgtatatcacgttacttcacctatgtcagtaaccaggccaaatacttgttttagccctcagtaaaaacaccaggcacttcctagttgtaaaattattcaagcttcttaacttcctatcctcgatgcacttaatcataaaatggtaataatagcaccgattttgggggagtcgttccagtagatggaaagcatctggaacaggtgtcagcaagctcctgccgacgtgtatgcataaagttttattgaaaccaccatcgtgtccatttgtttatggcagaactgagagatggcagcagcaagtgtgtgcctgcaaaacctaaaatatttactaattggctctgcaagaaaagagtttgcatccccctaacctagaacagtgtctagcctctagtatgtgtttagcctacagtatgtgctcagcgaatacaatctatatttattactgcttttatgactgttataattactgtgcttggatttcgttacaaagtaagtcacaatgtgcctgcttctgttagtatttcagcacagtgcctggcacacatggggctctcaaatattgctgagcgagtgaacaaatgtcctttcaattccttaacgttgatgtcattttcaatagtattttgagccaaacttaattttgcgagtgtgttttgttttcttaactttattattaaaaatgtataaaagtgaggccaggcgtggtggctcacgcctgtaatcccagcagtttgggaggctgaggcaggcggatcagttgaggttgggagttggagaccagcccgtccaacatggtgaaagcctgtctctactaaaaatacaaaaatcagctgggtgtggtggcgcgtgcctgtaatcccagctactcaggaggctgaggcaggagagttgcttgaatcctagaggtggaggttgcagtgagctgagatcgtgccattgcactccagcctgggcaacaagagcaaaactctgtcccaataaataaataaataaaatgttctcttttgttcctgttcttgtgcggtagtgtggtatagagttttatggtaattactgtgaattagtgattctgagggacatatcagaactctgaggtttgtttccttctcatcttgagggaaacagcaaatgtatgttaaaatgcttttccaagggaacaacacatccttacattatttaaaccaatctgcttcattttcagagctggttgatcagagtgagtcagaaggccccgtgatacaagaatcagctgaaccaagccagttggaagttccagccacagaagaaataaaagagactgatggaagctctcagatcaagcaagaaccagaccccacgtggtagacctcttccctcctagggtaaatcagcttctgtgtcagggatgctgtgtggtgtccatctgaaccccctgcatacgcgtagctaatgtgatctccccactttcacataagatggtggccctgccttcagggaatgtgggagccaggtgggagccttcccggatatttaagctagaagattctacagggagattctccttggatcaatatatgtctctcagtcaaagatgtaaaagcacttttgccttaaaaagaatgttctgtttctaaatagagtcaacgttgtcctcctcattggaattcactatgagtcagaatcattagactgacttttttttttccatagtaatagtattttgcagagtctcacagagctgcagatcttttgttcatcttgcagagttaacaagtctgatcctgttagtccagatttcttaaatttggccaagttataataggagcagtagcttgagacccgaagtcaggaaactttgacaatggatttttttttttaatccagagacttgtactggaatttgccttaccctgtcagctcatggacttaaggtttcatcccgctttatgagtgcttctgaatccaagtcattgttacctgaatttgcaaattaagttgtgatattcgtgactgttaaattcctgtaattagattaacctctttgcttgcttgtttgttttctctcctattttagcttaaagtatcagtggttgagaagagcttttcggacctgttactaccccaagctgtgtaatatacttgtataacagaaataccttctatacaaacctttttttctacttttagatagaaatgtctactttttcagcagttctgtgaattaaagagcagagtgactgtgggtctggaatggctggtgtacttgggaatgtactatcaggattttacagcaatgctgggaaatgacagggaaaatgacaggaatgaatctcaccagattttttatgtactcagcagagccttgagttacggtgtttattttccaatcaagtgaagatatctcctacttctcctactggaacatctcagcttctgcagtgaagaaaaattcctgtgatagttcagttctttagtttttctatttgaaaaaaaaaaatcatttaaatgatcctttgttcacggctctccttaatgactgagtgaacagttcctatctgtatatttgactaaaccttttcctaagctatctctcatggttcctatgtttttttatcataattaaaagcaaaaccatctggatcacctaacagtcagaggtcagtatctcagcgtgtgaattatagaggaaatacagagagaacctcttccacttttacttttcgtccaaataaaatgcatggtgtaccagaagttgaagatcgggttgaggattggggctagctcgatgacactaaggccccaacatcgcgggacctgctgtggcgcggattcttaggaacgctgttctagccggccccctctccaggggtcgccgtggccggcattatttcctagttcttcttgtaaccctgaggtgccagcgcggggagtgaggaggggtcagggggctaaggatgcaacctctgacgttctgcgccttcctaggagagtcttacatgtgttgagatttcacaagcaatgcgagttgtaaaataccagctctacaagaagctaggctctgtgacggcatagttttcagtagctttatcacaatattcacaatggagaattatatgacatggtagcagaaataggcccttttatgtgttgcttctattttacctcaaattgtagatatagggtaatcaataaaatccatccatgcctttcacacactaagt

SEQ ID NO: 4105 - protein, 490 aa, Homo sapiens
MHKMKSTTQANRMSVDAVEIETLRKTVEDYFCFCYGKALGKSTVVPVPYEKMLRDQSAVVVQGLPEGVAFKHPENYDLATLKWILENKAGISFIIKRPFLEPKKHVGGRVMVTDADRSILSPGGSCGPIKVKTEPTEDSGSHHSSEGNEGTEMEVPAEDSTQHVPSETSEDPEVEVTIEDDDYSPPSKRPKANELPQPPVPEPANAGKRKVREFNFEKWNARITDLRKQVEELFERKYAQAIKAKGPVTIPYPLFQSHVEDLYVEGLPEGIPFRRPSTYGIPRLERILLAKERIRFVIKKHELLNSTREDLQLDKPASGVKEEWYARITKLRKMVDQLFCKKFAEALGSTEAKAVPYQKFEAHPNDLYVEGLPENIPFRSPSWYGIPRLEKIIQVGNRIKFVIKRPELLTHSTTEVTQPRTNTPVKEDWNVRITKLRKQVEEIFNLKFAQALGLTEAVKVPYPVFESNPEFLKGSSAGVIKSSSLLKNLN

SEQ ID NO: 4106 - DNA, 4243 bp, Homo sapiens
aaaaaaaaaaaaaaaaaaaaaaaaaaaagaaaaaagaaaaaaaaaaggaggaggaggaggagggtgagagagaagctgggagagcagagaaaaggggccaccggtcgcccccccgcttccccgcacgcgctctccagccgcggccgcccgcctgccgcggtcaccccggcctctgcctctgtcccccagtgatcggatcaaggcgctgagcgaggccctgcctgcggggcggccatgcggcggtgacaggagcgcgaccgacacgcacgggcccctcgccccctctcgcctcccgtccgctcgccagctcccctcagccgaggctgctccgcggcggccgcagcccgcgcgcggcccacactcgcctcccctcggcacccccggccccggagctgcctggaggcggccgcactcggtgtaaagaactggccaagtccaaagccgaagtggcctgcattgcagtgtatgaaacagacgtgtttgtcgtcggaactgaaagaggacgtgcttttgtcaataccagaaaggattttcaaaaagattttgtaaaatattgtgttgaagaagaagaaaaagctgcagagatgcataaaatgaaatctacaacccaggcaaatcggatgagtgtagatgctgtagaaattgaaacactcagaaaaacagttgaggactatttctgcttttgctatgggaaagctttaggcaaatccacagtggtacctgtaccatatgagaagatgctgcgagaccagtcggctgtggtagtgcaggggcttccggaaggtgttgcctttaaacaccccgagaactatgatcttgcaaccctgaaatggattttggagaacaaagcagggatttcattcatcattaagagaccttttttagagccaaagaagcatgtaggtggtcgtgtgatggtaacagatgctgacaggtcaatactatctccaggtggaagttgtggccccatcaaagtgaaaactgaacccacagaagattctggcatttccctggaaatggcagctgtgacagtaaaggaagaatcagaagatcctgattattatcaatataacattcaagcaggcccttctgaaactgatgatgttgatgaaaaacagcccctatcgaagcctttgcaaggaagccaccattcttcagagggcaatgaaggcacagaaatggaagtaccagcagaagatgatgattattctccaccgtctaagagaccaaaggccaatgagctaccgcagccaccagtcccggaacccgccaatgctgggaagcggaaagtgagggagttcaacttcgagaaatggaatgctcgcatcactgatctacgtaaacaagttgaagaattgtttgaaaggaaatatgctcaagccataaaagccaaaggtccggtgacgatcccgtaccctcttttccagtctcatgttgaagatctttatgtagaaggacttcctgaaggaattccttttagaaggccatctacttacggaattcctcgcctggagaggatattacttgcaaaggaaaggattcgttttgtgattaagaaacatgagcttctgaattcaacacgtgaagatttacagcttgataagccagcttcaggagtaaaggaagaatggtatgccagaatcactaaattaagaaagatggtggatcagcttttctgcaaaaaatttgcggaagccttggggagcactgaagccaaggctgtaccgtaccaaaaatttgaggcacacccgaatgatctgtacgtggaaggactgccagaaaacattcctttccgaagtccctcatggtatggaatcccaaggctggaaaaaatcattcaagtgggcaatcgaattaaatttgttattaaaagaccagaacttctgactcacagtaccactgaagttactcagccaagaacgaatacaccagtcaaagaagattggaatgtcagaattaccaagctacggaagcaagtggaagagatttttaatttgaaatttgcttagatttgttgacagcggtttcctggagtgctgtcttgagaacgattctgaggaggctcagcaagaaagagtgtttcagttgattgggtgtgtctgtcatggagaaggaactcaagctcttggactcaccgaggcagtaaaagtaccatatcctgtgtttgaatcaaacccggagttcttgtatgtggaaggcttgccagaggggattcccttccgaagccctacctggtttggaattccacgacttgaaaggatcgtccgcgggagtaataaaatcaagttcgttgttaaaaaacctgaactagttatttcctacttgcctcctgggatggctagtaaaataaacactaaagctttgcagtcccccaaaagaccacgaagtcctgggagtaattcaaaggttcctgaaattgaggtcaccgtggaaggccctaataacaacaatcctcaaacctcagctgttcgaaccccgacccagactaacggttctaacgttcccttcaagccacgagggagagagttttcctttgaggcctggaatgccaaaatcacggacctaaaacagaaagttgaaaatctcttcaatgagaaatgtggggaagctcttggccttaaacaagctgtgaaggtgccgttcgcgttatttgagtctttcccggaagacttttatgtggaaggcttacctgagggtgtgccattccgaagaccatcgacttttggcattccgaggctggagaagatactcagaaacaaagccaaaattaagttcatcattaaaaagcccgaaatgtttgagacggcgattaaggagagcacctcctctaagagccctcccagaaaaataaattcatcacccaatgttaatactactgcatcaggtgttgaagaccttaacatcattcaggtgacaattccagatgatgataatgaaagactctcgaaagttgaaaaagctagacagctaagagaacaagtgaatgacctctttagtcggaaatttggtgaagctattggtatgggttttcctgtgaaagttccctacaggaaaatcacaattaaccctggctgtgtggtggttgatggcatgcccccgggggtgtccttcaaagcccccagctacctggaaatcagctccatgagaaggatcttagactctgccgagtttatcaaattcacggtcattagaccatttccaggacttgtgattaataaccagctggttgatcagagtgagtcagaaggccccgtgatacaagaatcagctgaaccaagccagttggaagttccagccacagaagaaataaaagagactgatggaagctctcagatcaagcaagaaccagaccccacgtggtagacctcttccctcctaggagccttgagttacggtgtttattttccaatcaagtgaagatatctcctacttctcctactggaacatctcagcttctgcagtgaagaaaaattcctgtgatagttcagttctttagtttttctatttgaaaaaaaaaaatcatttaaatgatcctttgttcacggctctccttaatgactgagtgaacagttcctatctgtatatttgactaaaccttttcctaagctatctctcatggttcctatgtttttttatcataattaaaagcaaaaccatctggatcacctaacagtcagaggtcagtatctcagcgtgtgaattatagaggaaatacagagagaacctcttccacttttacttttcgtccaaataaaatgcatggtgtaccagaagttgaagatcgggttgaggattggggctagctcgatgacactaaggccccaacatcgcgggacctgctgtggcgcggattcttaggaacgctgttctagccggccccctctccaggggtcgccgtggccggcattatttcctagttcttcttgtaaccctgaggtgccagcgcggggagtgaggaggggtcagggggctaaggatgcaacctctgacgttctgcgccttcctaggagagtcttacatgtgttgagatttcacaagcaatgcgagttgtaaaataccagctctacaagaagctaggctctgtgacggcatagttttcagtagctttatcacaatattcacaatggagaattatatgacatggtagcagaaataggcccttttatgtgttgcttctattttacctcaaattgtagatatagggtaatcaataaaatccatccatgcctttcacacactaagt

SEQ ID NO: 4107 - protein, 474 aa, Homo sapiens; identical to SEQ ID NO: 4025

SEQ ID NO: 4108 - DNA, 4122 bp, Homo sapiens
aaaaaaaaaaaaaaaaaaaaaaaaaaaagaaaaaagaaaaaaaaaaggaggaggaggaggagggtgagagagaagctgggagagcagagaaaaggggccaccggtcgcccccccgcttccccgcacgcgctctccagccgcggccgcccgcctgccgcggtcaccccggcctctgcctctgtcccccagtgatcggatcaaggcgctgagcgaggccctgcctgcggggcggccatgcggcggtgacaggagcgcgaccgacacgcacgggcccctcgccccctctcgcctcccgtccgctcgccagctcccctcagccgaggctgctccgcggcggccgcagcccgcgcgcggcccacactcgcctcccctcggcacccccggccccggagctgcctggaggcggccgcactcggtgtaaagaactggccaagtccaaagccgaagtggcctgcattgcagtgtatgaaacagacgtgtttgtcgtcggaactgaaagaggacgtgcttttgtcaataccagaaaggattttcaaaaagattttgtaaaatattgtgttgaagaagaagaaaaagctgcagagatgcataaaatgaaatctacaacccaggcaaatcggatgagtgtagatgctgtagaaattgaaacactcagaaaaacagttgaggactatttctgcttttgctatgggaaagctttaggcaaatccacagtggtacctgtaccatatgagaagatgctgcgagaccagtcggctgtggtagtgcaggggcttccggaaggtgttgcctttaaacaccccgagaactatgatcttgcaaccctgaaatggattttggagaacaaagcagggatttcattcatcattaagagaccttttttagagccaaagaagcatgtaggtggtcgtgtgatggtaacagatgctgacaggtcaatactatctccaggtggaagttgtggccccatcaaagtgaaaactgaacccacagaagattctggcatttccctggaaatggcagctgtgacagtaaaggaagaatcagaagatcctgattattatcaatataacattcaagcaggcccttctgaaactgatgatgttgatgaaaaacagcccctatcgaagcctttgcaaggaagccaccattcttcagagggcaatgaaggcacagaaatggaagtaccagcagaagattctactcaacatgtcccttcagaaacaagtgaggaccctgaagttgaggtgactattgaagatgatgattattctccaccgtctaagagaccaaaggccaatgagctaccgcagccaccagtcccggaacccgccaatgctgggaagcggaaagtgagggagttcaacttcgagaaatggaatgctcgcatcactgatctacgtaaacaagttgaagaattgtttgaaaggaaatatgctcaagccataaaagccaaaggtccggtgacgatcccgtaccctcttttccagtctcatgttgaagatctttatgtagaaggacttcctgaaggaattccttttagaaggccatctacttacggaattcctcgcctggagaggatattacttgcaaaggaaaggattcgttttgtgattaagaaacatgagcttctgaattcaacacgtgaagatttacagcttgataagccagcttcaggagtaaaggaagaatggtatgccagaatcactaaattaagaaagatggtggatcagcttttctgcaaaaaatttgcggaagccttggggagcactgaagccaaggctgtaccgtaccaaaaatttgaggcacacccgaatgatctgtacgtggaaggactgccagaaaacattcctttccgaagtccctcatggtatggaatcccaaggctggaaaaaatcattcaagtgggcaatcgaattaaatttgttattaaaagaccagaacttctgactcacagtaccactgaagttactcagccaagaacgaatacaccagctcaagctcttggactcaccgaggcagtaaaagtaccatatcctgtgtttgaatcaaacccggagttcttgtatgtggaaggcttgccagaggggattcccttccgaagccctacctggtttggaattccacgacttgaaaggatcgtccgcgggagtaataaaatcaagttcgttgttaaaaaacctgaactagttatttcctacttgcctcctgggatggctagtaaaataaacactaaagctttgcagtcccccaaaagaccacgaagtcctgggagtaattcaaaggttcctgaaattgaggtcaccgtggaaggccctaataacaacaatcctcaaacctcagctgttcgaaccccgacccagactaacggttctaacgttcccttcaagccacgagggagagagttttcctttgaggcctggaatgccaaaatcacggacctaaaacagaaagttgaaaatctcttcaatgagaaatgtggggaagctcttggccttaaacaagctgtgaaggtgccgttcgcgttatttgagtctttcccggaagacttttatgtggaaggcttacctgagggtgtgccattccgaagaccatcgacttttggcattccgaggctggagaagatactcagaaacaaagccaaaattaagttcatcattaaaaagcccgaaatgtttgagacggcgattaaggagagcacctcctctaagagccctcccagaaaaataaattcatcacccaatgttaatactactgcatcaggtgttgaagaccttaacatcattcaggtgacaattccagatgatgataatgaaagactctcgaaagttgaaaaagctagacagctaagagaacaagtgaatgacctctttagtcggaaatttggtgaagctattggtatgggttttcctgtgaaagttccctacaggaaaatcacaattaaccctggctgtgtggtggttgatggcatgcccccgggggtgtccttcaaagcccccagctacctggaaatcagctccatgagaaggatcttagactctgccgagtttatcaaattcacggtcattagaccatttccaggacttgtgattaataaccagctggttgatcagagtgagtcagaaggccccgtgatacaagaatcagctgaaccaagccagttggaagttccagccacagaagaaataaaagagactgatggaagctctcagatcaagcaagaaccagaccccacgtggtagacctcttccctcctaggagccttgagttacggtgtttattttccaatcaagtgaagatatctcctacttctcctactggaacatctcagcttctgcagtgaagaaaaattcctgtgatagttcagttctttagtttttctatttgaaaaaaaaaaatcatttaaatgatcctttgttcacggctctccttaatgactgagtgaacagttcctatctgtatatttgactaaaccttttcctaagctatctctcatggttcctatgtttttttatcataattaaaagcaaaaccatctggatcacctaacagtcagaggtcagtatctcagcgtgtgaattatagaggaaatacagagagaacctcttccacttttacttttcgtccaaataaaatgcatggtgtaccagaagttgaagatcgggttgaggattggggctagctcgatgacactaaggccccaacatcgcgggacctgctgtggcgcggattcttaggaacgctgttctagccggccccctctccaggggtcgccgtggccggcattatttcctagttcttcttgtaaccctgaggtgccagcgcggggagtgaggaggggtcagggggctaaggatgcaacctctgacgttctgcgccttcctaggagagtcttacatgtgttgagatttcacaagcaatgcgagttgtaaaataccagctctacaagaagctaggctctgtgacggcatagttttcagtagctttatcacaatattcacaatggagaattatatgacatggtagcagaaataggcccttttatgtgttgcttctattttacctcaaattgtagatatagggtaatcaataaaatccatccatgcctttcacacactaagt

SEQ ID NO: 4109 - protein, 885 aa, Homo sapiens
MHKMKSTTQANRMSVDAVEIETLRKTVEDYFCFCYGKALGKSTVVPVPYEKMLRDQSAVVVQGLPEGVAFKHPENYDLATLKWILENKAGISFIIKRPFLEPKKHVGGRVMVTDADRSILSPGGSCGPIKVKTEPTEDSGISLEMAAVTVKEESEDPDYYQYNIQAGPSETDDVDEKQPLSKPLQGSHHSSEGNEGTEMEVPAEDSTQHVPSETSEDPEVEVTIEDDDYSPPSKRPKANELPQPPVPEPANAGKRKVREFNFEKWNARITDLRKQVEELFERKYAQAIKAKGPVTIPYPLFQSHVEDLYVEGLPEGIPFRRPSTYGIPRLERILLAKERIRFVIKKHELLNSTREDLQLDKPASGVKEEWYARITKLRKMVDQLFCKKFAEALGSTEAKAVPYQKFEAHPNDLYVEGLPENIPFRSPSWYGIPRLEKIIQVGNRIKFVIKRPELLTHSTTEVTQPRTNTPAQALGLTEAVKVPYPVFESNPEFLYVEGLPEGIPFRSPTWFGIPRLERIVRGSNKIKFVVKKPELVISYLPPGMASKINTKALQSPKRPRSPGSNSKVPEIEVTVEGPNNNNPQTSAVRTPTQTNGSNVPFKPRGREFSFEAWNAKITDLKQKVENLFNEKCGEALGLKQAVKVPFALFESFPEDFYVEGLPEGVPFRRPSTFGIPRLEKILRNKAKIKFIIKKPEMFETAIKESTSSKSPPRKINSSPNVNTTASGVEDLNIIQVTIPDDDNERLSKVEKARQLREQVNDLFSRKFGEAIGMGFPVKVPYRKITINPGCVVVDGMPPGVSFKAPSYLEISSMRRILDSAEFIKFTVIRPFPGLVINNQLVDQSESEGPVIQESAEPSQLEVPATEEIKETDGSSQIKQEPDPTW

SEQ ID NO: 4110 - DNA, 7138 bp, Homo sapiens
aaaaaaaaaaaaaaaaaaaaaaaaaaaagaaaaaagaaaaaaaaaaggaggaggaggaggagggtgagagagaagctgggagagcagagaaaaggggccaccggtcgcccccccgcttccccgcacgcgctctccagccgcggccgcccgcctgccgcggtcaccccggcctctgcctctgtcccccagtgatcggatcaaggcgctgagcgaggccctgcctgcggggcggccatgcggcggtgacaggagcgcgaccgacacgcacgggcccctcgccccctctcgcctcccgtccgctcgccagctcccctcagccgaggctgctccgcggcggccgcagcccgcgcgcggcccacactcgcctcccctcggcacccccggccccggagctgcctggaggcggccgcactcggggatcatggcccaagttgcaatgtccaccctccccgttgaagatgaggagtcctcggagagcaggatggtggtgacattcctcatgtcagctctcgagtccatgtgtaaagaactggccaagtccaaagccgaagtggcctgcattgcagtgtatgaaacagacgtgtttgtcgtcggaactgaaagaggacgtgcttttgtcaataccagaaaggattttcaaaaagattttgtaaaatattgtgttgaagaagaagaaaaagctgcagagatgcataaaatgaaatctacaacccaggcaaatcggatgagtgtagatgctgtagaaattgaaacactcagaaaaacagttgaggactatttctgcttttgctatgggaaagctttaggcaaatccacagtggtacctgtaccatatgagaagatgctgcgagaccagtcggctgtggtagtgcaggggcttccggaaggtgttgcctttaaacaccccgagaactatgatcttgcaaccctgaaatggattttggagaacaaagcagggatttcattcatcattaagagaccttttttagagccaaagaagcatgtaggtggtcgtgtgatggtaacagatgctgacaggtcaatactatctccaggtggaagttgtggccccatcaaagtgaaaactgaacccacagaagattctggaagccaccattcttcagagggcaatgaaggcacagaaatggaagtaccagcagaagattctactcaacatgtcccttcagaaacaagtgaggaccctgaagttgaggtgactattgaagatgatgattattctccaccgtctaagagaccaaaggccaatgagctaccgcagccaccagtcccggaacccgccaatgctgggaagcggaaagtgagggagttcaacttcgagaaatggaatgctcgcatcactgatctacgtaaacaagttgaagaattgtttgaaaggaaatatgctcaagccataaaagccaaaggtccggtgacgatcccgtaccctcttttccagtctcatgttgaagatctttatgtagaaggacttcctgaaggaattccttttagaaggccatctacttacggaattcctcgcctggagaggatattacttgcaaaggaaaggattcgttttgtgattaagaaacatgagcttctgaattcaacacgtgaagatttacagcttgataagccagcttcaggagtaaaggaagaatggtatgccagaatcactaaattaagaaagatggtggatcagcttttctgcaaaaaatttgcggaagccttggggagcactgaagccaaggctgtaccgtaccaaaaatttgaggcacacccgaatgatctgtacgtggaaggactgccagaaaacattcctttccgaagtccctcatggtatggaatcccaaggctggaaaaaatcattcaagtgggcaatcgaattaaatttgttattaaaagaccagaacttctgactcacagtaccactgaagttactcagccaagaacgaatacaccagtcaaagaagattggaatgtcagaattaccaagctacggaagcaagtggaagagatttttaatttgaaatttgctcaagctcttggactcaccgaggcagtaaaagtaccatatcctgtgtttgaatcaaacccggagttcttgaaaggatcgtccgcgggagtaataaaatcaagttcgttgttaaaaaacctgaactagttatttcctacttgcctcctgggatggctagtaaaataaacactaaagctttgcagtcccccaaaagaccacgaagtcctgggagtaattcaaaggttcctgaaattgaggtcaccgtggaaggccctaataacaacaatcctcaaacctcagctgttcgaaccccgacccagactaacggttctaacgttcccttcaagccacgagggagagagttttcctttgaggcctggaatgccaaaatcacggacctaaaacagaaagttgaaaatctcttcaatgagaaatgtggggaagctcttggccttaaacaagctgtgaaggtgccgttcgcgttatttgagtctttcccggaagacttttatgtggaaggcttacctgagggtgtgccattccgaagaccatcgacttttggcattccgaggctggagaagatactcagaaacaaagccaaaattaagttcatcattaaaaagcccgaaatgtttgagacggcgattaaggagagcacctcctctaagagccctcccagaaaaataaattcatcacccaatgttaatactactgcatcaggtgttgaagaccttaacatcattcaggtgacaattccagatgatgataatgaaagactctcgaaagttgaaaaagctagacagctaagagaacaagtgaatgacctctttagtcggaaatttggtgaagctattggtatgggttttcctgtgaaagttccctacaggaaaatcacaattaaccctggctgtgtggtggttgatggcatgcccccgggggtgtccttcaaagcccccagctacctggaaatcagctccatgagaaggatcttagactctgccgagtttatcaaattcacggtcattaggtaagtgagagtttcctgcttagtcacaggagcgaatctggagctcatgaggctgactcttctaaaatgcagccacaggtagtcatcgaatccggcttcctatgctgtgcaatcaacaaatcaaaataacttgtgtcatcattagaatgtcagatgtgcttctacgaactaagctgactcttttaattctttggcaaagggttggcaaactaggactgtttgccaaattcaggctgcctcctatttttagagtcttcctgaaacacagctacacccgtattatccatggctgctttcctgtcacagtgagtaagtagctgggactgagaaggcatggcctccaaagtctaaaatatttactctctagcactttgtagaaaaaccttagctaggcacagtggctaacgcctgtaatcccagcattttgggaggccaaggcaggcagatcacctgaggtcaggagttccagaccagcctggccaacatggtgaaatcccatctctacaaaaataaaacagttagctgggcatgatggcgggtgcctgtaatcccagctactcgggaggctgaggcaggatagtcgcttgaacccaggaggtggaggttgcaatgagccaagatcatgccactgcactccagcctggacgacagagtgagactccatcacaagaaaaaaagaactttgtcaacctctgtcttagggcgccttgtcacaggcttcgggtcagacggattcaaccttgcatcagccatttgttagccaggtcactctgttctttgtctgtaaatgagattgatcgttgttcccactgagagtgtcagctccttcccgtagagcaggcatgatgattgtactcacctctgacaccattgtgagtgccacattccttcccacgtccttgtcactgtaagagatgcccacctgagcaccaaccccaggttatcttcccctttgtcttccagccccccagaaacagctacgactcaacctacccaatcatttcatcatcagattgccactgtctctagttcaggtctcttgggactggcactcagaaatctcataataaatcctcttgaggcttctcatacactcgtcttcttccaatcttctttccctcaaaatctcatattttggttccacttcacccaccgtcattctccatatcactcccaggagttaggcaaaaagccccttccgttcttccgtatgttaaacttagaatcactctgttccctgctctgcgtttctattttttgtttttcctccatttactagtagcttaacactttctaacagtgttcttattattgatacgtatctatctcttccataagcttataaggtcacggataatacttctcattgtagtacgtaaatgacgtgggctagatatgagttgaataaacagttatacctgtaaattcttacagagtgaaaataaattgttatactttacaatttgtttctctctttagaccatttccaggacttgtgattaataaccgtgagtattttgtgaagtgttttgtttttgttttttcctggggtctgacgtgtgtgcgtgtgagtgtgtatacatgcttaacgtatatcacgttacttcacctatgtcagtaaccaggccaaatacttgttttagccctcagtaaaaacaccaggcacttcctagttgtaaaattattcaagcttcttaacttcctatcctcgatgcacttaatcataaaatggtaataatagcaccgattttgggggagtcgttccagtagatggaaagcatctggaacaggtgtcagcaagctcctgccgacgtgtatgcataaagttttattgaaaccaccatcgtgtccatttgtttatggcagaactgagagatggcagcagcaagtgtgtgcctgcaaaacctaaaatatttactaattggctctgcaagaaaagagtttgcatccccctaacctagaacagtgtctagcctctagtatgtgtttagcctacagtatgtgctcagcgaatacaatctatatttattactgcttttatgactgttataattactgtgcttggatttcgttacaaagtaagtcacaatgtgcctgcttctgttagtatttcagcacagtgcctggcacacatggggctctcaaatattgctgagcgagtgaacaaatgtcctttcaattccttaacgttgatgtcattttcaatagtattttgagccaaacttaattttgcgagtgtgttttgttttcttaactttattattaaaaatgtataaaagtgaggccaggcgtggtggctcacgcctgtaatcccagcagtttgggaggctgaggcaggcggatcagttgaggttgggagttggagaccagcccgtccaacatggtgaaagcctgtctctactaaaaatacaaaaatcagctgggtgtggtggcgcgtgcctgtaatcccagctactcaggaggctgaggcaggagagttgcttgaatcctagaggtggaggttgcagtgagctgagatcgtgccattgcactccagcctgggcaacaagagcaaaactctgtcccaataaataaataaataaaatgttctcttttgttcctgttcttgtgcggtagtgtggtatagagttttatggtaattactgtgaattagtgattctgagggacatatcagaactctgaggtttgtttccttctcatcttgagggaaacagcaaatgtatgttaaaatgcttttccaagggaacaacacatccttacattatttaaaccaatctgcttcattttcagagctggttgatcagagtgagtcagaaggccccgtgatacaagaatcagctgaaccaagccagttggaagttccagccacagaagaaataaaagagactgatggaagctctcagatcaagcaagaaccagaccccacgtggtagacctcttccctcctaggcttaaagtatcagtggttgagaagagcttttcggacctgttactaccccaagctgtgtaatatacttgtataacagaaataccttctatacaaacctttttttctacttttagatagaaatgtctactttttcagcagttctgtgaattaaagagcagagtgactgtgggtctggaatggctggtgtacttgggaatgtactatcaggattttacagcaatgctgggaaatgacagggaaaatgacaggaatgaatctcaccagattttttatgtactcagcagagccttgagttacggtgtttattttccaatcaagtgaagatatctcctacttctcctactggaacatctcagcttctgcagtgaagaaaaattcctgtgatagttcagttctttagtttttctatttgaaaaaaaaaaatcatttaaatgatcctttgttcacggctctccttaatgactgagtgaacagttcctatctgtatatttgactaaaccttttcctaagctatctctcatggttcctatgtttttttatcataattaaaagcaaaaccatctggatcacctaacagtcagaggtcagtatctcagcgtgtgaattatagaggaaatacagagagaacctcttccacttttacttttcgtccaaataaaatgcatggtgtaccagaagttgaagatcgggttgaggattggggctagctcgatgacactaaggccccaacatcgcgggacctgctgtggcgcggattcttaggaacgctgttctagccggccccctctccaggggtcgccgtggccggcattatttcctagttcttcttgtaaccctgaggtgccagcgcggggagtgaggaggggtcagggggctaaggatgcaacctctgacgttctgcgccttcctaggagagtcttacatgtgttgagatttcacaagcaatgcgagttgtaaaataccagctctacaagaagctaggctctgtgacggcatagttttcagtagctttatcacaatattcacaatggagaattatatgacatggtagcagaaataggcccttttatgtgttgcttctattttacctcaaattgtagatatagggtaatcaataaaatccatccatgcctttcacacactaagt

SEQ ID NO: 4111 - protein, 579 aa, Homo sapiens
MAQVAMSTLPVEDEESSESRMVVTFLMSALESMCKELAKSKAEVACIAVYETDVFVVGTERGRAFVNTRKDFQKDFVKYCVEEEEKAAEMHKMKSTTQANRMSVDAVEIETLRKTVEDYFCFCYGKALGKSTVVPVPYEKMLRDQSAVVVQGLPEGVAFKHPENYDLATLKWILENKAGISFIIKRPFLEPKKHVGGRVMVTDADRSILSPGGSCGPIKVKTEPTEDSGSHHSSEGNEGTEMEVPAEDSTQHVPSETSEDPEVEVTIEDDDYSPPSKRPKANELPQPPVPEPANAGKRKVREFNFEKWNARITDLRKQVEELFERKYAQAIKAKGPVTIPYPLFQSHVEDLYVEGLPEGIPFRRPSTYGIPRLERILLAKERIRFVIKKHELLNSTREDLQLDKPASGVKEEWYARITKLRKMVDQLFCKKFAEALGSTEAKAVPYQKFEAHPNDLYVEGLPENIPFRSPSWYGIPRLEKIIQVGNRIKFVIKRPELLTHSTTEVTQPRTNTPVKEDWNVRITKLRKQVEEIFNLKFAQALGLTEAVKVPYPVFESNPEFLKGSSAGVIKSSSLLKNLN

SEQ ID NO: 4112 - DNA, 4282 bp, Homo sapiens
aaaaaaaaaaaaaaaaaaaaaaaaaaaagaaaaaagaaaaaaaaaaggaggaggaggaggagggtgagagagaagctgggagagcagagaaaaggggccaccggtcgcccccccgcttccccgcacgcgctctccagccgcggccgcccgcctgccgcggtcaccccggcctctgcctctgtcccccagtgatcggatcaaggcgctgagcgaggccctgcctgcggggcggccatgcggcggtgacaggagcgcgaccgacacgcacgggcccctcgccccctctcgcctcccgtccgctcgccagctcccctcagccgaggctgctccgcggcggccgcagcccgcgcgcggcccacactcgcctcccctcggcacccccggccccggagctgcctggaggcggccgcactcggggatcatggcccaagttgcaatgtccaccctccccgttgaagatgaggagtcctcggagagcaggatggtggtgacattcctcatgtcagctctcgagtccatgtgtaaagaactggccaagtccaaagccgaagtggcctgcattgcagtgtatgaaacagacgtgtttgtcgtcggaactgaaagaggacgtgcttttgtcaataccagaaaggattttcaaaaagattttgtaaaatattgtgttgaagaagaagaaaaagctgcagagatgcataaaatgaaatctacaacccaggcaaatcggatgagtgtagatgctgtagaaattgaaacactcagaaaaacagttgaggactatttctgcttttgctatgggaaagctttaggcaaatccacagtggtacctgtaccatatgagaagatgctgcgagaccagtcggctgtggtagtgcaggggcttccggaaggtgttgcctttaaacaccccgagaactatgatcttgcaaccctgaaatggattttggagaacaaagcagggatttcattcatcattaagagaccttttttagagccaaagaagcatgtaggtggtcgtgtgatggtaacagatgctgacaggtcaatactatctccaggtggaagttgtggccccatcaaagtgaaaactgaacccacagaagattctggcatttccctggaaatggcagctgtgacagtaaaggaagaatcagaagatcctgattattatcaatataacattcaagcaggcccttctgaaactgatgatgttgatgaaaaacagcccctatcgaagcctttgcaaggaagccaccattcttcagagggcaatgaaggcacagaaatggaagtaccagcagaagattctactcaacatgtcccttcagaaacaagtgaggaccctgaagttgaggtgactattgaagatgatgattattctccaccgtctaagagaccaaaggccaatgagctaccgcagccaccagtcccggaacccgccaatgctgggaagcggaaagtgagggagttcaacttcgagaaatggaatgctcgcatcactgatctacgtaaacaagttgaagaattgtttgaaaggaaatatgctcaagccataaaagccaaaggtccggtgacgatcccgtaccctcttttccagtctcatgttgaagatctttatgtagaaggacttcctgaaggaattccttttagaaggccatctacttacggaattcctcgcctggagaggatattacttgcaaaggaaaggattcgttttgtgattaagaaacatgagcttctgaattcaacacgtgaagatttacagcttgataagccagcttcaggagtaaaggaagaatggtatgccagaatcactaaattaagaaagatggtggatcagcttttctgcaaaaaatttgcggaagccttggggagcactgaagccaaggctgtaccgtaccaaaaatttgaggcacacccgaatgatctgtacgtggaaggactgccagaaaacattcctttccgaagtccctcatggtatggaatcccaaggctggaaaaaatcattcaagtgggcaatcgaattaaatttgttattaaaagaccagaacttctgactcacagtaccactgaagttactcagccaagaacgaatacaccagctcaagctcttggactcaccgaggcagtaaaagtaccatatcctgtgtttgaatcaaacccggagttcttgtatgtggaaggcttgccagaggggattcccttccgaagccctacctggtttggaattccacgacttgaaaggatcgtccgcgggagtaataaaatcaagttcgttgttaaaaaacctgaactagttatttcctacttgcctcctgggatggctagtaaaataaacactaaagctttgcagtcccccaaaagaccacgaagtcctgggagtaattcaaaggttcctgaaattgaggtcaccgtggaaggccctaataacaacaatcctcaaacctcagctgttcgaaccccgacccagactaacggttctaacgttcccttcaagccacgagggagagagttttcctttgaggcctggaatgccaaaatcacggacctaaaacagaaagttgaaaatctcttcaatgagaaatgtggggaagctcttggccttaaacaagctgtgaaggtgccgttcgcgttatttgagtctttcccggaagacttttatgtggaaggcttacctgagggtgtgccattccgaagaccatcgacttttggcattccgaggctggagaagatactcagaaacaaagccaaaattaagttcatcattaaaaagcccgaaatgtttgagacggcgattaaggagagcacctcctctaagagccctcccagaaaaataaattcatcacccaatgttaatactactgcatcaggtgttgaagaccttaacatcattcaggtgacaattccagatgatgataatgaaagactctcgaaagttgaaaaagctagacagctaagagaacaagtgaatgacctctttagtcggaaatttggtgaagctattggtatgggttttcctgtgaaagttccctacaggaaaatcacaattaaccctggctgtgtggtggttgatggcatgcccccgggggtgtccttcaaagcccccagctacctggaaatcagctccatgagaaggatcttagactctgccgagtttatcaaattcacggtcattagaccatttccaggacttgtgattaataaccagctggttgatcagagtgagtcagaaggccccgtgatacaagaatcagctgaaccaagccagttggaagttccagccacagaagaaataaaagagactgatggaagctctcagatcaagcaagaaccagaccccacgtggtagacctcttccctcctaggcttaaagtatcagtggttgagaagagcttttcggacctgttactaccccaagctgtagccttgagttacggtgtttattttccaatcaagtgaagatatctcctacttctcctactggaacatctcagcttctgcagtgaagaaaaattcctgtgatagttcagttctttagtttttctatttgaaaaaaaaaaatcatttaaatgatcctttgttcacggctctccttaatgactgagtgaacagttcctatctgtatatttgactaaaccttttcctaagctatctctcatggttcctatgtttttttatcataattaaaagcaaaaccatctggatcacctaacagtcagaggtcagtatctcagcgtgtgaattatagaggaaatacagagagaacctcttccacttttacttttcgtccaaataaaatgcatggtgtaccagaagttgaagatcgggttgaggattggggctagctcgatgacactaaggccccaacatcgcgggacctgctgtggcgcggattcttaggaacgctgttctagccggccccctctccaggggtcgccgtggccggcattatttcctagttcttcttgtaaccctgaggtgccagcgcggggagtgaggaggggtcagggggctaaggatgcaacctctgacgttctgcgccttcctaggagagtcttacatgtgttgagatttcacaagcaatgcgagttgtaaaataccagctctacaagaagctaggctctgtgacggcatagttttcagtagctttatcacaatattcacaatggagaattatatgacatggtagcagaaataggcccttttatgtgttgcttctattttacctcaaattgtagatatagggtaatcaataaaatccatccatgcctttcacacactaagt

SEQ ID NO: 4113 - protein, 974 aa, Homo sapiens; identical to SEQ ID NO: 4101

SEQ ID NO: 4114 - DNA, 5214 bp, Homo sapiens
aaaaaaaaaaaaaaaaaaaaaaaaaaaagaaaaaagaaaaaaaaaaggaggaggaggaggagggtgagagagaagctgggagagcagagaaaaggggccaccggtcgcccccccgcttccccgcacgcgctctccagccgcggccgcccgcctgccgcggtcaccccggcctctgcctctgtcccccagtgatcggatcaaggcgctgagcgaggccctgcctgcggggcggccatgcggcggtgacaggagcgcgaccgacacgcacgggcccctcgccccctctcgcctcccgtccgctcgccagctcccctcagccgaggctgctccgcggcggccgcagcccgcgcgcggcccacactcgcctcccctcggcacccccggccccggagctgcctggaggcggccgcactcggggatcatggcccaagttgcaatgtccaccctccccgttgaagatgaggagtcctcggagagcaggatggtggtgacattcctcatgtcagctctcgagtccatgtgtaaagaactggccaagtccaaagccgaagtggcctgcattgcagtgtatgaaacagacgtgtttgtcgtcggaactgaaagaggacgtgcttttgtcaataccagaaaggattttcaaaaagattttgtaaaatattgtgttgaagaagaagaaaaagctgcagagatgcataaaatgaaatctacaacccaggcaaatcggatgagtgtagatgctgtagaaattgaaacactcagaaaaacagttgaggactatttctgcttttgctatgggaaagctttaggcaaatccacagtggtacctgtaccatatgagaagatgctgcgagaccagtcggctgtggtagtgcaggggcttccggaaggtgttgcctttaaacaccccgagaactatgatcttgcaaccctgaaatggattttggagaacaaagcagggatttcattcatcattaagagaccttttttagagccaaagaagcatgtaggtggtcgtgtgatggtaacagatgctgacaggtcaatactatctccaggtggaagttgtggccccatcaaagtgaaaactgaacccacagaagattctggcatttccctggaaatggcagctgtgacagtaaaggaagaatcagaagatcctgattattatcaatataacattcaaggaagccaccattcttcagagggcaatgaaggcacagaaatggaagtaccagcagaagattctactcaacatgtcccttcagaaacaagtgaggaccctgaagttgaggtgactattgaagatgatgattattctccaccgtctaagagaccaaaggccaatgagctaccgcagccaccagtcccggaacccgccaatgctgggaagcggaaagtgagggagttcaacttcgagaaatggaatgctcgcatcactgatctacgtaaacaagttgaagaattgtttgaaaggaaatatgctcaagccataaaagccaaaggtccggtgacgatcccgtaccctcttttccagtctcatgttgaagatctttatgtagaaggacttcctgaaggaattccttttagaaggccatctacttacggaattcctcgcctggagaggatattacttgcaaaggaaaggattcgttttgtgattaagaaacatgagcttctgaattcaacacgtgaagatttacagcttgataagccagcttcaggagtaaaggaagaatggtatgccagaatcactaaattaagaaagatggtggatcagcttttctgcaaaaaatttgcggaagccttggggagcactgaagccaaggctgtaccgtaccaaaaatttgaggcacacccgaatgatctgtacgtggaaggactgccagaaaacattcctttccgaagtccctcatggtatggaatcccaaggctggaaaaaatcattcaagtgggcaatcgaattaaatttgttattaaaagaccagaacttctgactcacagtaccactgaagttactcagccaagaacgaatacaccagtcaaagaagattggaatgtcagaattaccaagctacggaagcaagtggaagagatttttaatttgaaatttgctcaagctcttggactcaccgaggcagtaaaagtaccatatcctgtgtttgaatcaaacccggagttcttgtatgtggaaggcttgccagaggggattcccttccgaagccctacctggtttggaattccacgacttgaaaggatcgtccgcgggagtaataaaatcaagttcgttgttaaaaaacctgaactagttatttcctacttgcctcctgggatggctagtaaaataaacactaaagctttgcagtcccccaaaagaccacgaagtcctgggagtaattcaaaggttcctgaaattgaggtcaccgtggaaggccctaataacaacaatcctcaaacctcagctgttcgaaccccgacccagactaacggttctaacgttcccttcaagccacgagggagagagttttcctttgaggcctggaatgccaaaatcacggacctaaaacagaaagttgaaaatctcttcaatgagaaatgtggggaagctcttggccttaaacaagctgtgaaggtgccgttcgcgttatttgagtctttcccggaagacttttatgtggaaggcttacctgagggtgtgccattccgaagaccatcgacttttggcattccgaggctggagaagatactcagaaacaaagccaaaattaagttcatcattaaaaagcccgaaatgtttgagacggcgattaaggagagcacctcctctaagagccctcccagaaaaataaattcatcacccaatgttaatactactgcatcaggtgttgaagaccttaacatcattcaggtgacaattccagatgatgataatgaaagactctcgaaagttgaaaaagctagacagctaagagaacaagtgaatgacctctttagtcggaaatttggtgaagctattggtatgggttttcctgtgaaagttccctacaggaaaatcacaattaaccctggctgtgtggtggttgatggcatgcccccgggggtgtccttcaaagcccccagctacctggaaatcagctccatgagaaggatcttagactctgccgagtttatcaaattcacggtcattagaccatttccaggacttgtgattaataaccagctggttgatcagagtgagtcagaaggccccgtgatacaagaatcagctgaaccaagccagttggaagttccagccacagaagaaataaaagagactgatggaagctctcagatcaagcaagaaccagaccccacgtggtagacctcttccctcctagggtaaatcagcttctgtgtcagggatgctgtgtggtgtccatctgaaccccctgcatacgcgtagctaatgtgatctccccactttcacataagatggtggccctgccttcagggaatgtgggagccaggtgggagccttcccggatatttaagctagaagattctacagggagattctccttggatcaatatatgtctctcagtcaaagatgtaaaagcacttttgccttaaaaagaatgttctgtttctaaatagagtcaacgttgtcctcctcattggaattcactatgagtcagaatcattagactgacttttttttttccatagtaatagtattttgcagagtctcacagagctgcagatcttttgttcatcttgcagagttaacaagtctgatcctgttagtccagatttcttaaatttggccaagttataataggagcagtagcttgagacccgaagtcaggaaactttgacaatggatttttttttttaatccagagacttgtactggaatttgccttaccctgtcagctcatggacttaaggtttcatcccgctttatgagtgcttctgaatccaagtcattgttacctgaatttgcaaattaagttgtgatattcgtgactgttaaattcctgtaattagattaacctctttgcttgcttgtttgttttctctcctattttagcttaaagtatcagtggttgagaagagcttttcggacctgttactaccccaagctgtgtaatatacttgtataacagaaataccttctatacaaacctttttttctacttttagatagaaatgtctactttttcagcagttctgtgaattaaagagcagagtgactgtgggtctggaatggctggtgtacttgggaatgtactatcaggattttacagcaatgctgggaaatgacagggaaaatgacaggaatgaatctcaccagattttttatgtactcagcagagccttgagttacggtgtttattttccaatcaagtgaagatatctcctacttctcctactggaacatctcagcttctgcagtgaagaaaaattcctgtgatagttcagttctttagtttttctatttgaaaaaaaaaaatcatttaaatgatcctttgttcacggctctccttaatgactgagtgaacagttcctatctgtatatttgactaaaccttttcctaagctatctctcatggttcctatgtttttttatcataattaaaagcaaaaccatctggatcacctaacagtcagaggtcagtatctcagcgtgtgaattatagaggaaatacagagagaacctcttccacttttacttttcgtccaaataaaatgcatggtgtaccagaagttgaagatcgggttgaggattggggctagctcgatgacactaaggccccaacatcgcgggacctgctgtggcgcggattcttaggaacgctgttctagccggccccctctccaggggtcgccgtggccggcattatttcctagttcttcttgtaaccctgaggtgccagcgcggggagtgaggaggggtcagggggctaaggatgcaacctctgacgttctgcgccttcctaggagagtcttacatgtgttgagatttcacaagcaatgcgagttgtaaaataccagctctacaagaagctaggctctgtgacggcatagttttcagtagctttatcacaatattcacaatggagaattatatgacatggtagcagaaataggcccttttatgtgttgcttctattttacctcaaattgtagatatagggtaatcaataaaatccatccatgcctttcacacactaagt

SEQ ID NO: 4115 - protein, 978 aa, Homo sapiens; identical to SEQ ID NO: 470

SEQ ID NO: 4116 - DNA, 7213 bp, Homo sapiens
aaaaaaaaaaaaaaaaaaaaaaaaaaaagaaaaaagaaaaaaaaaaggaggaggaggaggagggtgagagagaagctgggagagcagagaaaaggggccaccggtcgcccccccgcttccccgcacgcgctctccagccgcggccgcccgcctgccgcggtcaccccggcctctgcctctgtcccccagtgatcggatcaaggcgctgagcgaggccctgcctgcggggcggccatgcggcggtgacaggagcgcgaccgacacgcacgggcccctcgccccctctcgcctcccgtccgctcgccagctcccctcagccgaggctgctccgcggcggccgcagcccgcgcgcggcccacactcgcctcccctcggcacccccggccccggagctgcctggaggcggccgcactcggggatcatggcccaagttgcaatgtccaccctccccgttgaagatgaggagtcctcggagagcaggatggtggtgacattcctcatgtcagctctcgagtccatgtgtaaagaactggccaagtccaaagccgaagtggcctgcattgcagtgtatgaaacagacgtgtttgtcgtcggaactgaaagaggacgtgcttttgtcaataccagaaaggattttcaaaaagattttgtaaaatattgtgttgaagaagaagaaaaagctgcagagatgcataaaatgaaatctacaacccaggcaaatcggatgagtgtagatgctgtagaaattgaaacactcagaaaaacagttgaggactatttctgcttttgctatgggaaagctttaggcaaatccacagtggtacctgtaccatatgagaagatgctgcgagaccagtcggctgtggtagtgcaggggcttccggaaggtgttgcctttaaacaccccgagaactatgatcttgcaaccctgaaatggattttggagaacaaagcagggatttcattcatcattaagagaccttttttagagccaaagaagcatgtaggtggtcgtgtgatggtaacagatgctgacaggtcaatactatctccaggtggaagttgtggccccatcaaagtgaaaactgaacccacagaagattctggcatttccctggaaatggcagctgtgacagtaaaggaagaatcagaagatcctgattattatcaatataacattcaagcaggcccttctgaaactgatgatgttgatgaaaaacagcccctatcgaagcctttgcaaggaagccaccattcttcagagggcaatgaaggcacagaaatggaagtaccagcagaagatgatgattattctccaccgtctaagagaccaaaggccaatgagctaccgcagccaccagtcccggaacccgccaatgctgggaagcggaaagtgagggagttcaacttcgagaaatggaatgctcgcatcactgatctacgtaaacaagttgaagaattgtttgaaaggaaatatgctcaagccataaaagccaaaggtccggtgacgatcccgtaccctcttttccagtctcatgttgaagatctttatgtagaaggacttcctgaaggaattccttttagaaggccatctacttacggaattcctcgcctggagaggatattacttgcaaaggaaaggattcgttttgtgattaagaaacatgagcttctgaattcaacacgtgaagatttacagcttgataagccagcttcaggagtaaaggaagaatggtatgccagaatcactaaattaagaaagatggtggatcagcttttctgcaaaaaatttgcggaagccttggggagcactgaagccaaggctgtaccgtaccaaaaatttgaggcacacccgaatgatctgtacgtggaaggactgccagaaaacattcctttccgaagtccctcatggtatggaatcccaaggctggaaaaaatcattcaagtgggcaatcgaattaaatttgttattaaaagaccagaacttctgactcacagtaccactgaagttactcagccaagaacgaatacaccagtcaaagaagattggaatgtcagaattaccaagctacggaagcaagtggaagagatttttaatttgaaatttgctcaagctcttggactcaccgaggcagtaaaagtaccatatcctgtgtttgaatcaaacccggagttcttgaaaggatcgtccgcgggagtaataaaatcaagttcgttgttaaaaaacctgaactagttatttcctacttgcctcctgggatggctagtaaaataaacactaaagctttgcagtcccccaaaagaccacgaagtcctgggagtaattcaaaggttcctgaaattgaggtcaccgtggaaggccctaataacaacaatcctcaaacctcagctgttcgaaccccgacccagactaacggttctaacgttcccttcaagccacgagggagagagttttcctttgaggcctggaatgccaaaatcacggacctaaaacagaaagttgaaaatctcttcaatgagaaatgtggggaagctcttggccttaaacaagctgtgaaggtgccgttcgcgttatttgagtctttcccggaagacttttatgtggaaggcttacctgagggtgtgccattccgaagaccatcgacttttggcattccgaggctggagaagatactcagaaacaaagccaaaattaagttcatcattaaaaagcccgaaatgtttgagacggcgattaaggagagcacctcctctaagagccctcccagaaaaataaattcatcacccaatgttaatactactgcatcaggtgttgaagaccttaacatcattcaggtgacaattccagatgatgataatgaaagactctcgaaagttgaaaaagctagacagctaagagaacaagtgaatgacctctttagtcggaaatttggtgaagctattggtatgggttttcctgtgaaagttccctacaggaaaatcacaattaaccctggctgtgtggtggttgatggcatgcccccgggggtgtccttcaaagcccccagctacctggaaatcagctccatgagaaggatcttagactctgccgagtttatcaaattcacggtcattaggtaagtgagagtttcctgcttagtcacaggagcgaatctggagctcatgaggctgactcttctaaaatgcagccacaggtagtcatcgaatccggcttcctatgctgtgcaatcaacaaatcaaaataacttgtgtcatcattagaatgtcagatgtgcttctacgaactaagctgactcttttaattctttggcaaagggttggcaaactaggactgtttgccaaattcaggctgcctcctatttttagagtcttcctgaaacacagctacacccgtattatccatggctgctttcctgtcacagtgagtaagtagctgggactgagaaggcatggcctccaaagtctaaaatatttactctctagcactttgtagaaaaaccttagctaggcacagtggctaacgcctgtaatcccagcattttgggaggccaaggcaggcagatcacctgaggtcaggagttccagaccagcctggccaacatggtgaaatcccatctctacaaaaataaaacagttagctgggcatgatggcgggtgcctgtaatcccagctactcgggaggctgaggcaggatagtcgcttgaacccaggaggtggaggttgcaatgagccaagatcatgccactgcactccagcctggacgacagagtgagactccatcacaagaaaaaaagaactttgtcaacctctgtcttagggcgccttgtcacaggcttcgggtcagacggattcaaccttgcatcagccatttgttagccaggtcactctgttctttgtctgtaaatgagattgatcgttgttcccactgagagtgtcagctccttcccgtagagcaggcatgatgattgtactcacctctgacaccattgtgagtgccacattccttcccacgtccttgtcactgtaagagatgcccacctgagcaccaaccccaggttatcttcccctttgtcttccagccccccagaaacagctacgactcaacctacccaatcatttcatcatcagattgccactgtctctagttcaggtctcttgggactggcactcagaaatctcataataaatcctcttgaggcttctcatacactcgtcttcttccaatcttctttccctcaaaatctcatattttggttccacttcacccaccgtcattctccatatcactcccaggagttaggcaaaaagccccttccgttcttccgtatgttaaacttagaatcactctgttccctgctctgcgtttctattttttgtttttcctccatttactagtagcttaacactttctaacagtgttcttattattgatacgtatctatctcttccataagcttataaggtcacggataatacttctcattgtagtacgtaaatgacgtgggctagatatgagttgaataaacagttatacctgtaaattcttacagagtgaaaataaattgttatactttacaatttgtttctctctttagaccatttccaggacttgtgattaataaccgtgagtattttgtgaagtgttttgtttttgttttttcctggggtctgacgtgtgtgcgtgtgagtgtgtatacatgcttaacgtatatcacgttacttcacctatgtcagtaaccaggccaaatacttgttttagccctcagtaaaaacaccaggcacttcctagttgtaaaattattcaagcttcttaacttcctatcctcgatgcacttaatcataaaatggtaataatagcaccgattttgggggagtcgttccagtagatggaaagcatctggaacaggtgtcagcaagctcctgccgacgtgtatgcataaagttttattgaaaccaccatcgtgtccatttgtttatggcagaactgagagatggcagcagcaagtgtgtgcctgcaaaacctaaaatatttactaattggctctgcaagaaaagagtttgcatccccctaacctagaacagtgtctagcctctagtatgtgtttagcctacagtatgtgctcagcgaatacaatctatatttattactgcttttatgactgttataattactgtgcttggatttcgttacaaagtaagtcacaatgtgcctgcttctgttagtatttcagcacagtgcctggcacacatggggctctcaaatattgctgagcgagtgaacaaatgtcctttcaattccttaacgttgatgtcattttcaatagtattttgagccaaacttaattttgcgagtgtgttttgttttcttaactttattattaaaaatgtataaaagtgaggccaggcgtggtggctcacgcctgtaatcccagcagtttgggaggctgaggcaggcggatcagttgaggttgggagttggagaccagcccgtccaacatggtgaaagcctgtctctactaaaaatacaaaaatcagctgggtgtggtggcgcgtgcctgtaatcccagctactcaggaggctgaggcaggagagttgcttgaatcctagaggtggaggttgcagtgagctgagatcgtgccattgcactccagcctgggcaacaagagcaaaactctgtcccaataaataaataaataaaatgttctcttttgttcctgttcttgtgcggtagtgtggtatagagttttatggtaattactgtgaattagtgattctgagggacatatcagaactctgaggtttgtttccttctcatcttgagggaaacagcaaatgtatgttaaaatgcttttccaagggaacaacacatccttacattatttaaaccaatctgcttcattttcagagctggttgatcagagtgagtcagaaggccccgtgatacaagaatcagctgaaccaagccagttggaagttccagccacagaagaaataaaagagactgatggaagctctcagatcaagcaagaaccagaccccacgtggtagacctcttccctcctaggcttaaagtatcagtggttgagaagagcttttcggacctgttactaccccaagctgtgtaatatacttgtataacagaaataccttctatacaaacctttttttctacttttagatagaaatgtctactttttcagcagttctgtgaattaaagagcagagtgactgtgggtctggaatggctggtgtacttgggaatgtactatcaggattttacagcaatgctgggaaatgacagggaaaatgacaggaatgaatctcaccagattttttatgtactcagcagagccttgagttacggtgtttattttccaatcaagtgaagatatctcctacttctcctactggaacatctcagcttctgcagtgaagaaaaattcctgtgatagttcagttctttagtttttctatttgaaaaaaaaaaatcatttaaatgatcctttgttcacggctctccttaatgactgagtgaacagttcctatctgtatatttgactaaaccttttcctaagctatctctcatggttcctatgtttttttatcataattaaaagcaaaaccatctggatcacctaacagtcagaggtcagtatctcagcgtgtgaattatagaggaaatacagagagaacctcttccacttttacttttcgtccaaataaaatgcatggtgtaccagaagttgaagatcgggttgaggattggggctagctcgatgacactaaggccccaacatcgcgggacctgctgtggcgcggattcttaggaacgctgttctagccggccccctctccaggggtcgccgtggccggcattatttcctagttcttcttgtaaccctgaggtgccagcgcggggagtgaggaggggtcagggggctaaggatgcaacctctgacgttctgcgccttcctaggagagtcttacatgtgttgagatttcacaagcaatgcgagttgtaaaataccagctctacaagaagctaggctctgtgacggcatagttttcagtagctttatcacaatattcacaatggagaattatatgacatggtagcagaaataggcccttttatgtgttgcttctattttacctcaaattgtagatatagggtaatcaataaaatccatccatgcctttcacacactaagt

SEQ ID NO: 4117 - protein, 604 aa, Homo sapiens
MAQVAMSTLPVEDEESSESRMVVTFLMSALESMCKELAKSKAEVACIAVYETDVFVVGTERGRAFVNTRKDFQKDFVKYCVEEEEKAAEMHKMKSTTQANRMSVDAVEIETLRKTVEDYFCFCYGKALGKSTVVPVPYEKMLRDQSAVVVQGLPEGVAFKHPENYDLATLKWILENKAGISFIIKRPFLEPKKHVGGRVMVTDADRSILSPGGSCGPIKVKTEPTEDSGISLEMAAVTVKEESEDPDYYQYNIQAGPSETDDVDEKQPLSKPLQGSHHSSEGNEGTEMEVPAEDDDYSPPSKRPKANELPQPPVPEPANAGKRKVREFNFEKWNARITDLRKQVEELFERKYAQAIKAKGPVTIPYPLFQSHVEDLYVEGLPEGIPFRRPSTYGIPRLERILLAKERIRFVIKKHELLNSTREDLQLDKPASGVKEEWYARITKLRKMVDQLFCKKFAEALGSTEAKAVPYQKFEAHPNDLYVEGLPENIPFRSPSWYGIPRLEKIIQVGNRIKFVIKRPELLTHSTTEVTQPRTNTPVKEDWNVRITKLRKQVEEIFNLKFAQALGLTEAVKVPYPVFESNPEFLKGSSAGVIKSSSLLKNLN

SEQ ID NO: 4118 - DNA, 3854 bp, Homo sapiens
aaaaaaaaaaaaaaaaaaaaaaaaaaaagaaaaaagaaaaaaaaaaggaggaggaggaggagggtgagagagaagctgggagagcagagaaaaggggccaccggtcgcccccccgcttccccgcacgcgctctccagccgcggccgcccgcctgccgcggtcaccccggcctctgcctctgtcccccagtgatcggatcaaggcgctgagcgaggccctgcctgcggggcggccatgcggcggtgacaggagcgcgaccgacacgcacgggcccctcgccccctctcgcctcccgtccgctcgccagctcccctcagccgaggctgctccgcggcggccgcagcccgcgcgcggcccacactcgcctcccctcggcacccccggccccggagctgcctggaggcggccgcactcggtgtaaagaactggccaagtccaaagccgaagtggcctgcattgcagtgtatgaaacagacgtgtttgtcgtcggaactgaaagaggacgtgcttttgtcaataccagaaaggattttcaaaaagattttgtaaaatattgtgttgaagaagaagaaaaagctgcagagatgcataaaatgaaatctacaacccaggcaaatcggatgagtgtagatgctgtagaaattgaaacactcagaaaaacagttgaggactatttctgcttttgctatgggaaagctttaggcaaatccacagtggtacctgtaccatatgagaagatgctgcgagaccagtcggctgtggtagtgcaggggcttccggaaggtgttgcctttaaacaccccgagaactatgatcttgcaaccctgaaatggattttggagaacaaagcagggatttcattcatcattaagagaccttttttagagccaaagaagcatgtaggtggtcgtgtgatggtaacagatgctgacaggtcaatactatctccaggtggaagttgtggccccatcaaagtgaaaactgaacccacagaagattctggcatttccctggaaatggcagctgtgacagtaaaggaagaatcagaagatcctgattattatcaatataacattcaagcaggcccttctgaaactgatgatgttgatgaaaaacagcccctatcgaagcctttgcaaggaagccaccattcttcagagggcaatgaaggcacagaaatggaagtaccagcagaagattctactcaacatgtcccttcagaaacaagtgaggaccctgaagttgaggtgactattgaagatgatgattattctccaccgtctaagagaccaaaggccaatgagctaccgcagccaccagtcccggaacccgccaatgctgggaagcggaaagtgagggagttcaacttcgagaaatggaatgctcgcatcactgatctacgtaaacaagttgaagaattgtttgaaaggaaatatgctcaagccataaaagccaaaggtccggtgacgatcccgtaccctcttttccagtctcatgttgaagatctttatgtagaaggacttcctgaaggaattccttttagaaggccatctacttacggaattcctcgcctggagaggatattacttgcaaaggaaaggattcgttttgtgattaagaaacatgagcttctgaattcaacacgtgaagatttacagcttgataagccagcttcaggagtaaaggaagaatggtatgccagaatcactaaattaagaaagatggtggatcagcttttctgcaaaaaatttgcggaagccttggggagcactgaagccaaggctgtaccgtaccaaaaatttgaggcacacccgaatgatctgtacgtggaaggactgccagaaaacattcctttccgaagtccctcatggtatggaatcccaaggctggaaaaaatcattcaagtgggcaatcgaattaaatttgttattaaaagaccagaacttctgactcacagtaccactgaagttactcagccaagaacgaatacaccagctcaagctcttggactcaccgaggcagtaaaagtaccatatcctgtgtttgaatcaaacccggagttcttgtatgtggaaggcttgccagaggggattcccttccgaagccctacctggtttggaattccacgacttgaaaggatcgtccgcgggagtaataaaatcaagttcgttgttaaaaaacctgaactagttatttcctacttgcctcctgggatggctagtaaaataaacactaaagctttgcagtcccccaaaagaccacgaagtcctgggagtaattcaaaggttcctgaaattgaggtcaccgtggaaggccctaataacaacaatcctcaaacctcagctgttcgaaccccgacccagactaacggttctaacgttcccttcaagccacgagggagagagttttcctttgaggcctggaatgccaaaatcacggacctaaaacagaaagttgaaaatctcttcaatgagaaatgtggggaagctcttggccttaaacaagctgtgaaggtgccgttcgcgttatttgagtctttcccggaagacttttatgtggaaggcttacctgagggtgtgccattccgaagaccatcgacttttggcattccgaggctggagaagatactcagaaacaaagccaaaattaagttcatcattaaaaagcccgaaatgtttgagacggcgattaaggagagcacctcctctaagagccctcccagaaaaataaattcatcacccaatgttaatactactgcatcaggtgttgaagaccttaacatcattcaggtgacaattccagatgatgataatgaaagactctcgaaagttgaaaaagctagacagctaagagaacaagtgaatgacctctttagtcggaaatttggtgaagctattggtatgggttttcctgtgaaagttccctacaggaaaatcacaattaaccctggctgtgtggtggttgatggcatgcccccgggggtgtccttcaaagcccccagctacctggaaatcagctccatgagaaggatcttagactctgccgagtttatcaaattcacggtcattagaccatttccaggacttgtgattaataaccagctggttgatcagagtgagtcagaaggccccgtgatacaagaatcagctgaaccaagccagttggaagttccagccacagaagaaataaaagagactgatggaagctctcagatcaagcaagaaccagaccccacgtggtagacctcttccctcctaggcaaaaccatctggatcacctaacagtcagaggtcagtatctcagcgtgtgaattatagaggaaatacagagagaacctcttccacttttacttttcgtccaaataaaatgcatggtgtaccagaagttgaagatcgggttgaggattggggctagctcgatgacactaaggccccaacatcgcgggacctgctgtggcgcggattcttaggaacgctgttctagccggccccctctccaggggtcgccgtggccggcattatttcctagttcttcttgtaaccctgaggtgccagcgcggggagtgaggaggggtcagggggctaaggatgcaacctctgacgttctgcgccttcctaggagagtcttacatgtgttgagatttcacaagcaatgcgagttgtaaaataccagctctacaagaagctaggctctgtgacggcatagttttcagtagctttatcacaatattcacaatggagaattatatgacatggtagcagaaataggcccttttatgtgttgcttctattttacctcaaattgtagatatagggtaatcaataaaatccatccatgcctttcacacactaagt

SEQ ID NO: 4119 - protein, 885 aa, Homo sapiens; identical to SEQ ID NO: 4109

SEQ ID NO: 4120 - DNA, 4938 bp, Homo sapiens
aaaaaaaaaaaaaaaaaaaaaaaaaaaagaaaaaagaaaaaaaaaaggaggaggaggaggagggtgagagagaagctgggagagcagagaaaaggggccaccggtcgcccccccgcttccccgcacgcgctctccagccgcggccgcccgcctgccgcggtcaccccggcctctgcctctgtcccccagtgatcggatcaaggcgctgagcgaggccctgcctgcggggcggccatgcggcggtgacaggagcgcgaccgacacgcacgggcccctcgccccctctcgcctcccgtccgctcgccagctcccctcagccgaggctgctccgcggcggccgcagcccgcgcgcggcccacactcgcctccccgttgaagatgaggagtcctcggagagcaggatggtggtgacattcctcatgtcagctctcgagtccatgtgtaaagaactggccaagtccaaagccgaagtggcctgcattgcagtgtatgaaacagacgtgtttgtcgtcggaactgaaagaggacgtgcttttgtcaataccagaaaggattttcaaaaagattttgtaaaatattgtgttgaagaagaagaaaaagctgcagagatgcataaaatgaaatctacaacccaggcaaatcggatgagtgtagatgctgtagaaattgaaacactcagaaaaacagttgaggactatttctgcttttgctatgggaaagctttaggcaaatccacagtggtacctgtaccatatgagaagatgctgcgagaccagtcggctgtggtagtgcaggggcttccggaaggtgttgcctttaaacaccccgagaactatgatcttgcaaccctgaaatggattttggagaacaaagcagggatttcattcatcattaagagaccttttttagagccaaagaagcatgtaggtggtcgtgtgatggtaacagatgctgacaggtcaatactatctccaggtggaagttgtggccccatcaaagtgaaaactgaacccacagaagattctggaagccaccattcttcagagggcaatgaaggcacagaaatggaagtaccagcagaagattctactcaacatgtcccttcagaaacaagtgaggaccctgaagttgaggtgactattgaagatgatgattattctccaccgtctaagagaccaaaggccaatgagctaccgcagccaccagtcccggaacccgccaatgctgggaagcggaaagtgagggagttcaacttcgagaaatggaatgctcgcatcactgatctacgtaaacaagttgaagaattgtttgaaaggaaatatgctcaagccataaaagccaaaggtccggtgacgatcccgtaccctcttttccagtctcatgttgaagatctttatgtagaaggacttcctgaaggaattccttttagaaggccatctacttacggaattcctcgcctggagaggatattacttgcaaaggaaaggattcgttttgtgattaagaaacatgagcttctgaattcaacacgtgaagatttacagcttgataagccagcttcaggagtaaaggaagaatggtatgccagaatcactaaattaagaaagatggtggatcagcttttctgcaaaaaatttgcggaagccttggggagcactgaagccaaggctgtaccgtaccaaaaatttgaggcacacccgaatgatctgtacgtggaaggactgccagaaaacattcctttccgaagtccctcatggtatggaatcccaaggctggaaaaaatcattcaagtgggcaatcgaattaaatttgttattaaaagaccagaacttctgactcacagtaccactgaagttactcagccaagaacgaatacaccagtcaaagaagattggaatgtcagaattaccaagctacggaagcaagtggaagagatttttaatttgaaatttgctcaagctcttggactcaccgaggcagtaaaagtaccatatcctgtgtttgaatcaaacccggagttcttgaaaggatcgtccgcgggagtaataaaatcaagttcgttgttaaaaaacctgaactagttatttcctacttgcctcctgggatggctagtaaaataaacactaaagctttgcagtcccccaaaagaccacgaagtcctgggagtaattcaaaggttcctgaaattgaggtcaccgtggaaggccctaataacaacaatcctcaaacctcagctgttcgaaccccgacccagactaacggttctaacgttcccttcaagccacgagggagagagttttcctttgaggcctggaatgccaaaatcacggacctaaaacagaaagttgaaaatctcttcaatgagaaatgtggggaagctcttggccttaaacaagctgtgaaggtgccgttcgcgttatttgagtctttcccggaagacttttatgtggaaggcttacctgagggtgtgccattccgaagaccatcgacttttggcattccgaggctggagaagatactcagaaacaaagccaaaattaagttcatcattaaaaagcccgaaatgtttgagacggcgattaaggagagcacctcctctaagagccctcccagaaaaataaattcatcacccaatgttaatactactgcatcaggtgttgaagaccttaacatcattcaggtgacaattccagatgatgataatgaaagactctcgaaagttgaaaaagctagacagctaagagaacaagtgaatgacctctttagtcggaaatttggtgaagctattggtatgggttttcctgtgaaagttccctacaggaaaatcacaattaaccctggctgtgtggtggttgatggcatgcccccgggggtgtccttcaaagcccccagctacctggaaatcagctccatgagaaggatcttagactctgccgagtttatcaaattcacggtcattagaccatttccaggacttgtgattaataaccagctggttgatcagagtgagtcagaaggccccgtgatacaagaatcagctgaaccaagccagttggaagttccagccacagaaggtaaaaggacctcttccctcctagggtaaatcagcttctgtgtcagggatgctgtgtggtgtccatctgaaccccctgcatacgcgtagctaatgtgatctccccactttcacataagatggtggccctgccttcagggaatgtgggagccaggtgggagccttcccggatatttaagctagaagattctacagggagattctccttggatcaatatatgtctctcagtcaaagatgtaaaagcacttttgccttaaaaagaatgttctgtttctaaatagagtcaacgttgtcctcctcattggaattcactatgagtcagaatcattagactgacttttttttttccatagtaatagtattttgcagagtctcacagagctgcagatcttttgttcatcttgcagagttaacaagtctgatcctgttagtccagatttcttaaatttggccaagttataataggagcagtagcttgagacccgaagtcaggaaactttgacaatggatttttttttttaatccagagacttgtactggaatttgccttaccctgtcagctcatggacttaaggtttcatcccgctttatgagtgcttctgaatccaagtcattgttacctgaatttgcaaattaagttgtgatattcgtgactgttaaattcctgtaattagattaacctctttgcttgcttgtttgttttctctcctattttagcttaaagtatcagtggttgagaagagcttttcggacctgttactaccccaagctgtgtaatatacttgtataacagaaataccttctatacaaacctttttttctacttttagatagaaatgtctactttttcagcagttctgtgaattaaagagcagagtgactgtgggtctggaatggctggtgtacttgggaatgtactatcaggattttacagcaatgctgggaaatgacagggaaaatgacaggaatgaatctcaccagattttttatgtactcagcagagccttgagttacggtgtttattttccaatcaagtgaagatatctcctacttctcctactggaacatctcagcttctgcagtgaagaaaaattcctgtgatagttcagttctttagtttttctatttgaaaaaaaaaaatcatttaaatgatcctttgttcacggctctccttaatgactgagtgaacagttcctatctgtatatttgactaaaccttttcctaagctatctctcatggttcctatgtttttttatcataattaaaagcaaaaccatctggatcacctaacagtcagaggtcagtatctcagcgtgtgaattatagaggaaatacagagagaacctcttccacttttacttttcgtccaaataaaatgcatggtgtaccagaagttgaagatcgggttgaggattggggctagctcgatgacactaaggccccaacatcgcgggacctgctgtggcgcggattcttaggaacgctgttctagccggccccctctccaggggtcgccgtggccggcattatttcctagttcttcttgtaaccctgaggtgccagcgcggggagtgaggaggggtcagggggctaaggatgcaacctctgacgttctgcgccttcctaggagagtcttacatgtgttgagatttcacaagcaatgcgagttgtaaaataccagctctacaagaagctaggctctgtgacggcatagttttcagtagctttatcacaatattcacaatggagaattatatgacatggtagcagaaataggcccttttatgtgttgcttctattttacctcaaattgtagatatagggtaatcaataaaatccatccatgcctttcacacactaagt

SEQ ID NO: 4121 - protein, 559 aa, Homo sapiens
MVVTFLMSALESMCKELAKSKAEVACIAVYETDVFVVGTERGRAFVNTRKDFQKDFVKYCVEEEEKAAEMHKMKSTTQANRMSVDAVEIETLRKTVEDYFCFCYGKALGKSTVVPVPYEKMLRDQSAVVVQGLPEGVAFKHPENYDLATLKWILENKAGISFIIKRPFLEPKKHVGGRVMVTDADRSILSPGGSCGPIKVKTEPTEDSGSHHSSEGNEGTEMEVPAEDSTQHVPSETSEDPEVEVTIEDDDYSPPSKRPKANELPQPPVPEPANAGKRKVREFNFEKWNARITDLRKQVEELFERKYAQAIKAKGPVTIPYPLFQSHVEDLYVEGLPEGIPFRRPSTYGIPRLERILLAKERIRFVIKKHELLNSTREDLQLDKPASGVKEEWYARITKLRKMVDQLFCKKFAEALGSTEAKAVPYQKFEAHPNDLYVEGLPENIPFRSPSWYGIPRLEKIIQVGNRIKFVIKRPELLTHSTTEVTQPRTNTPVKEDWNVRITKLRKQVEEIFNLKFAQALGLTEAVKVPYPVFESNPEFLKGSSAGVIKSSSLLKNLN

SEQ ID NO: 4122 - DNA, 3745 bp, Homo sapiens
aaaaaaaaaaaaaaaaaaaaaaaaaaaagaaaaaagaaaaaaaaaaggaggaggaggaggagggtgagagagaagctgggagagcagagaaaaggggccaccggtcgcccccccgcttccccgcacgcgctctccagccgcggccgcccgcctgccgcggtcaccccggcctctgcctctgtcccccagtgatcggatcaaggcgctgagcgaggccctgcctgcggggcggccatgcggcggtgacaggagcgcgaccgacacgcacgggcccctcgccccctctcgcctcccgtccgctcgccagctcccctcagccgaggctgctccgcggcggccgcagcccgcgcgcggcccacactcgcctccccgttgaagatgaggagtcctcggagagcaggatggtggtgacattcctcatgtcagctctcgagtccatgtgtaaagaactggccaagtccaaagccgaagtggcctgcattgcagtgtatgaaacagacgtgtttgtcgtcggaactgaaagaggacgtgcttttgtcaataccagaaaggattttcaaaaagattttgtaaaatattgtgttgaagaagaagaaaaagctgcagagatgcataaaatgaaatctacaacccaggcaaatcggatgagtgtagatgctgtagaaattgaaacactcagaaaaacagttgaggactatttctgcttttgctatgggaaagctttaggcaaatccacagtggtacctgtaccatatgagaagatgctgcgagaccagtcggctgtggtagtgcaggggcttccggaaggtgttgcctttaaacaccccgagaactatgatcttgcaaccctgaaatggattttggagaacaaagcagggatttcattcatcattaagagaccttttttagagccaaagaagcatgtaggtggtcgtgtgatggtaacagatgctgacaggtcaatactatctccaggtggaagttgtggccccatcaaagtgaaaactgaacccacagaagattctggaagccaccattcttcagagggcaatgaaggcacagaaatggaagtaccagcagaagattctactcaacatgtcccttcagaaacaagtgaggaccctgaagttgaggtgactattgaagatgatgattattctccaccgtctaagagaccaaaggccaatgagctaccgcagccaccagtcccggaacccgccaatgctgggaagcggaaagtgagggagttcaacttcgagaaatggaatgctcgcatcactgatctacgtaaacaagttgaagaattgtttgaaaggaaatatgctcaagccataaaagccaaaggtccggtgacgatcccgtaccctcttttccagtctcatgttgaagatctttatgtagaaggacttcctgaaggaattccttttagaaggccatctacttacggaattcctcgcctggagaggatattacttgcaaaggaaaggattcgttttgtgattaagaaacatgagcttctgaattcaacacgtgaagatttacagcttgataagccagcttcaggagtaaaggaagaatggtatgccagaatcactaaattaagaaagatggtggatcagcttttctgcaaaaaatttgcggaagccttggggagcactgaagccaaggctgtaccgtaccaaaaatttgaggcacacccgaatgatctgtacgtggaaggactgccagaaaacattcctttccgaagtccctcatggtatggaatcccaaggctggaaaaaatcattcaagtgggcaatcgaattaaatttgttattaaaagaccagaacttctgactcacagtaccactgaagttactcagccaagaacgaatacaccagtcaaagaagattggaatgtcagaattaccaagctacggaagcaagtggaagagatttttaatttgaaatttgctcaagctcttggactcaccgaggcagtaaaagtaccatatcctgtgtttgaatcaaacccggagttcttgaaaggatcgtccgcgggagtaataaaatcaagttcgttgttaaaaaacctgaactagttatttcctacttgcctcctgggatggctagtaaaataaacactaaagctttgcagtcccccaaaagaccacgaagtcctgggagtaattcaaaggttcctgaaattgaggtcaccgtggaaggccctaataacaacaatcctcaaacctcagctgttcgaaccccgacccagactaacggttctaacgttcccttcaagccacgagggagagagttttcctttgaggcctggaatgccaaaatcacggacctaaaacagaaagttgaaaatctcttcaatgagaaatgtggggaagctcttggccttaaacaagctgtgaaggtgccgttcgcgttatttgagtctttcccggaagacttttatgtggaaggcttacctgagggtgtgccattccgaagaccatcgacttttggcattccgaggctggagaagatactcagaaacaaagccaaaattaagttcatcattaaaaagcccgaaatgtttgagacggcgattaaggagagcacctcctctaagagccctcccagaaaaataaattcatcacccaatgttaatactactgcatcaggtgttgaagaccttaacatcattcaggtgacaattccagatgatgataatgaaagactctcgaaagttgaaaaagctagacagctaagagaacaagtgaatgacctctttagtcggaaatttggtgaagctattggtatgggttttcctgtgaaagttccctacaggaaaatcacaattaaccctggctgtgtggtggttgatggcatgcccccgggggtgtccttcaaagcccccagctacctggaaatcagctccatgagaaggatcttagactctgccgagtttatcaaattcacggtcattagaccatttccaggacttgtgattaataaccagctggttgatcagagtgagtcagaaggccccgtgatacaagaatcagctgaaccaagccagttggaagttccagccacagaagaaataaaagagactgatggaagctctcagatcaagcaagaaccagaccccacgtggtagacctcttccctcctaggcaaaaccatctggatcacctaacagtcagaggtcagtatctcagcgtgtgaattatagaggaaatacagagagaacctcttccacttttacttttcgtccaaataaaatgcatggtgtaccagaagttgaagatcgggttgaggattggggctagctcgatgacactaaggccccaacatcgcgggacctgctgtggcgcggattcttaggaacgctgttctagccggccccctctccaggggtcgccgtggccggcattatttcctagttcttcttgtaaccctgaggtgccagcgcggggagtgaggaggggtcagggggctaaggatgcaacctctgacgttctgcgccttcctaggagagtcttacatgtgttgagatttcacaagcaatgcgagttgtaaaataccagctctacaagaagctaggctctgtgacggcatagttttcagtagctttatcacaatattcacaatggagaattatatgacatggtagcagaaataggcccttttatgtgttgcttctattttacctcaaattgtagatatagggtaatcaataaaatccatccatgcctttcacacactaagt

SEQ ID NO: 4123 - protein, 559 aa, Homo sapiens; identical to SEQ ID NO: 4121

SEQ ID NO: 4124 - DNA, 5136 bp, Homo sapiens
aaaaaaaaaaaaaaaaaaaaaaaaaaaagaaaaaagaaaaaaaaaaggaggaggaggaggagggtgagagagaagctgggagagcagagaaaaggggccaccggtcgcccccccgcttccccgcacgcgctctccagccgcggccgcccgcctgccgcggtcaccccggcctctgcctctgtcccccagtgatcggatcaaggcgctgagcgaggccctgcctgcggggcggccatgcggcggtgacaggagcgcgaccgacacgcacgggcccctcgccccctctcgcctcccgtccgctcgccagctcccctcagccgaggctgctccgcggcggccgcagcccgcgcgcggcccacactcgcctcccctcggcacccccggccccggagctgcctggaggcggccgcactcggggatcatggcccaagttgcaatgtccaccctccccgttgaagatgaggagtcctcggagagcaggatggtggtgacattcctcatgtcagctctcgagtccatgtgtaaagaactggccaagtccaaagccgaagtggcctgcattgcagtgtatgaaacagacgtgtttgtcgtcggaactgaaagaggacgtgcttttgtcaataccagaaaggattttcaaaaagattttgtaaaatattgtgttgaagaagaagaaaaagctgcagagatgcataaaatgaaatctacaacccaggcaaatcggatgagtgtagatgctgtagaaattgaaacactcagaaaaacagttgaggactatttctgcttttgctatgggaaagctttaggcaaatccacagtggtacctgtaccatatgagaagatgctgcgagaccagtcggctgtggtagtgcaggggcttccggaaggtgttgcctttaaacaccccgagaactatgatcttgcaaccctgaaatggattttggagaacaaagcagggatttcattcatcattaagagaccttttttagagccaaagaagcatgtaggtggtcgtgtgatggtaacagatgctgacaggtcaatactatctccaggtggaagttgtggccccatcaaagtgaaaactgaacccacagaagattctggaagccaccattcttcagagggcaatgaaggcacagaaatggaagtaccagcagaagattctactcaacatgtcccttcagaaacaagtgaggaccctgaagttgaggtgactattgaagatgatgattattctccaccgtctaagagaccaaaggccaatgagctaccgcagccaccagtcccggaacccgccaatgctgggaagcggaaagtgagggagttcaacttcgagaaatggaatgctcgcatcactgatctacgtaaacaagttgaagaattgtttgaaaggaaatatgctcaagccataaaagccaaaggtccggtgacgatcccgtaccctcttttccagtctcatgttgaagatctttatgtagaaggacttcctgaaggaattccttttagaaggccatctacttacggaattcctcgcctggagaggatattacttgcaaaggaaaggattcgttttgtgattaagaaacatgagcttctgaattcaacacgtgaagatttacagcttgataagccagcttcaggagtaaaggaagaatggtatgccagaatcactaaattaagaaagatggtggatcagcttttctgcaaaaaatttgcggaagccttggggagcactgaagccaaggctgtaccgtaccaaaaatttgaggcacacccgaatgatctgtacgtggaaggactgccagaaaacattcctttccgaagtccctcatggtatggaatcccaaggctggaaaaaatcattcaagtgggcaatcgaattaaatttgttattaaaagaccagaacttctgactcacagtaccactgaagttactcagccaagaacgaatacaccagtcaaagaagattggaatgtcagaattaccaagctacggaagcaagtggaagagatttttaatttgaaatttgctcaagctcttggactcaccgaggcagtaaaagtaccatatcctgtgtttgaatcaaacccggagttcttgtatgtggaaggcttgccagaggggattcccttccgaagccctacctggtttggaattccacgacttgaaaggatcgtccgcgggagtaataaaatcaagttcgttgttaaaaaacctgaactagttatttcctacttgcctcctgggatggctagtaaaataaacactaaagctttgcagtcccccaaaagaccacgaagtcctgggagtaattcaaaggttcctgaaattgaggtcaccgtggaaggccctaataacaacaatcctcaaacctcagctgttcgaaccccgacccagactaacggttctaacgttcccttcaagccacgagggagagagttttcctttgaggcctggaatgccaaaatcacggacctaaaacagaaagttgaaaatctcttcaatgagaaatgtggggaagctcttggccttaaacaagctgtgaaggtgccgttcgcgttatttgagtctttcccggaagacttttatgtggaaggcttacctgagggtgtgccattccgaagaccatcgacttttggcattccgaggctggagaagatactcagaaacaaagccaaaattaagttcatcattaaaaagcccgaaatgtttgagacggcgattaaggagagcacctcctctaagagccctcccagaaaaataaattcatcacccaatgttaatactactgcatcaggtgttgaagaccttaacatcattcaggtgacaattccagatgatgataatgaaagactctcgaaagttgaaaaagctagacagctaagagaacaagtgaatgacctctttagtcggaaatttggtgaagctattggtatgggttttcctgtgaaagttccctacaggaaaatcacaattaaccctggctgtgtggtggttgatggcatgcccccgggggtgtccttcaaagcccccagctacctggaaatcagctccatgagaaggatcttagactctgccgagtttatcaaattcacggtcattagaccatttccaggacttgtgattaataaccagctggttgatcagagtgagtcagaaggccccgtgatacaagaatcagctgaaccaagccagttggaagttccagccacagaagaaataaaagagactgatggaagctctcagatcaagcaagaaccagaccccacgtggtagacctcttccctcctagggtaaatcagcttctgtgtcagggatgctgtgtggtgtccatctgaaccccctgcatacgcgtagctaatgtgatctccccactttcacataagatggtggccctgccttcagggaatgtgggagccaggtgggagccttcccggatatttaagctagaagattctacagggagattctccttggatcaatatatgtctctcagtcaaagatgtaaaagcacttttgccttaaaaagaatgttctgtttctaaatagagtcaacgttgtcctcctcattggaattcactatgagtcagaatcattagactgacttttttttttccatagtaatagtattttgcagagtctcacagagctgcagatcttttgttcatcttgcagagttaacaagtctgatcctgttagtccagatttcttaaatttggccaagttataataggagcagtagcttgagacccgaagtcaggaaactttgacaatggatttttttttttaatccagagacttgtactggaatttgccttaccctgtcagctcatggacttaaggtttcatcccgctttatgagtgcttctgaatccaagtcattgttacctgaatttgcaaattaagttgtgatattcgtgactgttaaattcctgtaattagattaacctctttgcttgcttgtttgttttctctcctattttagcttaaagtatcagtggttgagaagagcttttcggacctgttactaccccaagctgtgtaatatacttgtataacagaaataccttctatacaaacctttttttctacttttagatagaaatgtctactttttcagcagttctgtgaattaaagagcagagtgactgtgggtctggaatggctggtgtacttgggaatgtactatcaggattttacagcaatgctgggaaatgacagggaaaatgacaggaatgaatctcaccagattttttatgtactcagcagagccttgagttacggtgtttattttccaatcaagtgaagatatctcctacttctcctactggaacatctcagcttctgcagtgaagaaaaattcctgtgatagttcagttctttagtttttctatttgaaaaaaaaaaatcatttaaatgatcctttgttcacggctctccttaatgactgagtgaacagttcctatctgtatatttgactaaaccttttcctaagctatctctcatggttcctatgtttttttatcataattaaaagcaaaaccatctggatcacctaacagtcagaggtcagtatctcagcgtgtgaattatagaggaaatacagagagaacctcttccacttttacttttcgtccaaataaaatgcatggtgtaccagaagttgaagatcgggttgaggattggggctagctcgatgacactaaggccccaacatcgcgggacctgctgtggcgcggattcttaggaacgctgttctagccggccccctctccaggggtcgccgtggccggcattatttcctagttcttcttgtaaccctgaggtgccagcgcggggagtgaggaggggtcagggggctaaggatgcaacctctgacgttctgcgccttcctaggagagtcttacatgtgttgagatttcacaagcaatgcgagttgtaaaataccagctctacaagaagctaggctctgtgacggcatagttttcagtagctttatcacaatattcacaatggagaattatatgacatggtagcagaaataggcccttttatgtgttgcttctattttacctcaaattgtagatatagggtaatcaataaaatccatccatgcctttcacacactaagt

SEQ ID NO: 4125 - protein, 952 aa, Homo sapiens; identical to SEQ ID NO: 4069

SEQ ID NO: 4126 - DNA, 4131 bp, Homo sapiens
aaaaaaaaaaaaaaaaaaaaaaaaaaaagaaaaaagaaaaaaaaaaggaggaggaggaggagggtgagagagaagctgggagagcagagaaaaggggccaccggtcgcccccccgcttccccgcacgcgctctccagccgcggccgcccgcctgccgcggtcaccccggcctctgcctctgtcccccagtgatcggatcaaggcgctgagcgaggccctgcctgcggggcggccatgcggcggtgacaggagcgcgaccgacacgcacgggcccctcgccccctctcgcctcccgtccgctcgccagctcccctcagccgaggctgctccgcggcggccgcagcccgcgcgcggcccacactcgcctcccctcggcacccccggccccggagctgcctggaggcggccgcactcggtgtaaagaactggccaagtccaaagccgaagtggcctgcattgcagtgtatgaaacagacgtgtttgtcgtcggaactgaaagaggacgtgcttttgtcaataccagaaaggattttcaaaaagattttgtaaaatattgtgttgaagaagaagaaaaagctgcagagatgcataaaatgaaatctacaacccaggcaaatcggatgagtgtagatgctgtagaaattgaaacactcagaaaaacagttgaggactatttctgcttttgctatgggaaagctttaggcaaatccacagtggtacctgtaccatatgagaagatgctgcgagaccagtcggctgtggtagtgcaggggcttccggaaggtgttgcctttaaacaccccgagaactatgatcttgcaaccctgaaatggattttggagaacaaagcagggatttcattcatcattaagagaccttttttagagccaaagaagcatgtaggtggtcgtgtgatggtaacagatgctgacaggtcaatactatctccaggtggaagttgtggccccatcaaagtgaaaactgaacccacagaagattctggcatttccctggaaatggcagctgtgacagtaaaggaagaatcagaagatcctgattattatcaatataacattcaagcaggcccttctgaaactgatgatgttgatgaaaaacagcccctatcgaagcctttgcaaggaagccaccattcttcagagggcaatgaaggcacagaaatggaagtaccagcagaagatgatgattattctccaccgtctaagagaccaaaggccaatgagctaccgcagccaccagtcccggaacccgccaatgctgggaagcggaaagtgagggagttcaacttcgagaaatggaatgctcgcatcactgatctacgtaaacaagttgaagaattgtttgaaaggaaatatgctcaagccataaaagccaaaggtccggtgacgatcccgtaccctcttttccagtctcatgttgaagatctttatgtagaaggacttcctgaaggaattccttttagaaggccatctacttacggaattcctcgcctggagaggatattacttgcaaaggaaaggattcgttttgtgattaagaaacatgagcttctgaattcaacacgtgaagatttacagcttgataagccagcttcaggagtaaaggaagaatggtatgccagaatcactaaattaagaaagatggtggatcagcttttctgcaaaaaatttgcggaagccttggggagcactgaagccaaggctgtaccgtaccaaaaatttgaggcacacccgaatgatctgtacgtggaaggactgccagaaaacattcctttccgaagtccctcatggtatggaatcccaaggctggaaaaaatcattcaagtgggcaatcgaattaaatttgttattaaaagaccagaacttctgactcacagtaccactgaagttactcagccaagaacgaatacaccagtcaaagaagattggaatgtcagaattaccaagctacggaagcaagtggaagagatttttaatttgaaatttgctcaagctcttggactcaccgaggcagtaaaagtaccatatcctgtgtttgaatcaaacccggagttcttgtatgtggaaggcttgccagaggggattcccttccgaagccctacctggtttggaattccacgacttgaaaggatcgtccgcgggagtaataaaatcaagttcgttgttaaaaaacctgaactagttatttcctacttgcctcctgggatggctagtaaaataaacactaaagctttgcagtcccccaaaagaccacgaagtcctgggagtaattcaaaggttcctgaaattgaggtcaccgtggaaggccctaataacaacaatcctcaaacctcagctgttcgaaccccgacccagactaacggttctaacgttcccttcaagccacgagggagagagttttcctttgaggcctggaatgccaaaatcacggacctaaaacagaaagttgaaaatctcttcaatgagaaatgtggggaagctcttggccttaaacaagctgtgaaggtgccgttcgcgttatttgagtctttcccggaagacttttatgtggaaggcttacctgagggtgtgccattccgaagaccatcgacttttggcattccgaggctggagaagatactcagaaacaaagccaaaattaagttcatcattaaaaagcccgaaatgtttgagacggcgattaaggagagcacctcctctaagagccctcccagaaaaataaattcatcacccaatgttaatactactgcatcaggtgttgaagaccttaacatcattcaggtgacaattccagatgatgataatgaaagactctcgaaagttgaaaaagctagacagctaagagaacaagtgaatgacctctttagtcggaaatttggtgaagctattggtatgggttttcctgtgaaagttccctacaggaaaatcacaattaaccctggctgtgtggtggttgatggcatgcccccgggggtgtccttcaaagcccccagctacctggaaatcagctccatgagaaggatcttagactctgccgagtttatcaaattcacggtcattagaccatttccaggacttgtgattaataaccagctggttgatcagagtgagtcagaaggccccgtgatacaagaatcagctgaaccaagccagttggaagttccagccacagaagaaataaaagagactgatggaagctctcagatcaagcaagaaccagaccccacgtggtagacctcttccctcctaggagccttgagttacggtgtttattttccaatcaagtgaagatatctcctacttctcctactggaacatctcagcttctgcagtgaagaaaaattcctgtgatagttcagttctttagtttttctatttgaaaaaaaaaaatcatttaaatgatcctttgttcacggctctccttaatgactgagtgaacagttcctatctgtatatttgactaaaccttttcctaagctatctctcatggttcctatgtttttttatcataattaaaagcaaaaccatctggatcacctaacagtcagaggtcagtatctcagcgtgtgaattatagaggaaatacagagagaacctcttccacttttacttttcgtccaaataaaatgcatggtgtaccagaagttgaagatcgggttgaggattggggctagctcgatgacactaaggccccaacatcgcgggacctgctgtggcgcggattcttaggaacgctgttctagccggccccctctccaggggtcgccgtggccggcattatttcctagttcttcttgtaaccctgaggtgccagcgcggggagtgaggaggggtcagggggctaaggatgcaacctctgacgttctgcgccttcctaggagagtcttacatgtgttgagatttcacaagcaatgcgagttgtaaaataccagctctacaagaagctaggctctgtgacggcatagttttcagtagctttatcacaatattcacaatggagaattatatgacatggtagcagaaataggcccttttatgtgttgcttctattttacctcaaattgtagatatagggtaatcaataaaatccatccatgcctttcacacactaagt

SEQ ID NO: 4127 - protein, 888 aa, Homo sapiens; identical to SEQ ID NO: 4027

SEQ ID NO: 4128 - DNA, 3799 bp, Homo sapiens
aaaaaaaaaaaaaaaaaaaaaaaaaaaagaaaaaagaaaaaaaaaaggaggaggaggaggagggtgagagagaagctgggagagcagagaaaaggggccaccggtcgcccccccgcttccccgcacgcgctctccagccgcggccgcccgcctgccgcggtcaccccggcctctgcctctgtcccccagtgatcggatcaaggcgctgagcgaggccctgcctgcggggcggccatgcggcggtgacaggagcgcgaccgacacgcacgggcccctcgccccctctcgcctcccgtccgctcgccagctcccctcagccgaggctgctccgcggcggccgcagcccgcgcgcggcccacactcgcctcccctcggcacccccggccccggagctgcctggaggcggccgcactcggtgtaaagaactggccaagtccaaagccgaagtggcctgcattgcagtgtatgaaacagacgtgtttgtcgtcggaactgaaagaggacgtgcttttgtcaataccagaaaggattttcaaaaagattttgtaaaatattgtgttgaagaagaagaaaaagctgcagagatgcataaaatgaaatctacaacccaggcaaatcggatgagtgtagatgctgtagaaattgaaacactcagaaaaacagttgaggactatttctgcttttgctatgggaaagctttaggcaaatccacagtggtacctgtaccatatgagaagatgctgcgagaccagtcggctgtggtagtgcaggggcttccggaaggtgttgcctttaaacaccccgagaactatgatcttgcaaccctgaaatggattttggagaacaaagcagggatttcattcatcattaagagaccttttttagagccaaagaagcatgtaggtggtcgtgtgatggtaacagatgctgacaggtcaatactatctccaggtggaagttgtggccccatcaaagtgaaaactgaacccacagaagattctggcatttccctggaaatggcagctgtgacagtaaaggaagaatcagaagatcctgattattatcaatataacattcaaggaagccaccattcttcagagggcaatgaaggcacagaaatggaagtaccagcagaagattctactcaacatgtcccttcagaaacaagtgaggaccctgaagttgaggtgactattgaagatgatgattattctccaccgtctaagagaccaaaggccaatgagctaccgcagccaccagtcccggaacccgccaatgctgggaagcggaaagtgagggagttcaacttcgagaaatggaatgctcgcatcactgatctacgtaaacaagttgaagaattgtttgaaaggaaatatgctcaagccataaaagccaaaggtccggtgacgatcccgtaccctcttttccagtctcatgttgaagatctttatgtagaaggacttcctgaaggaattccttttagaaggccatctacttacggaattcctcgcctggagaggatattacttgcaaaggaaaggattcgttttgtgattaagaaacatgagcttctgaattcaacacgtgaagatttacagcttgataagccagcttcaggagtaaaggaagaatggtatgccagaatcactaaattaagaaagatggtggatcagcttttctgcaaaaaatttgcggaagccttggggagcactgaagccaaggctgtaccgtaccaaaaatttgaggcacacccgaatgatctgtacgtggaaggactgccagaaaacattcctttccgaagtccctcatggtatggaatcccaaggctggaaaaaatcattcaagtgggcaatcgaattaaatttgttattaaaagaccagaacttctgactcacagtaccactgaagttactcagccaagaacgaatacaccagtcaaagaagattggaatgtcagaattaccaagctacggaagcaagtggaagagatttttaatttgaaatttgctcaagctcttggactcaccgaggcagtaaaagtaccatatcctgtgtttgaatcaaacccggagttcttgaaaggatcgtccgcgggagtaataaaatcaagttcgttgttaaaaaacctgaactagttatttcctacttgcctcctgggatggctagtaaaataaacactaaagctttgcagtcccccaaaagaccacgaagtcctgggagtaattcaaaggttcctgaaattgaggtcaccgtggaaggccctaataacaacaatcctcaaacctcagctgttcgaaccccgacccagactaacggttctaacgttcccttcaagccacgagggagagagttttcctttgaggcctggaatgccaaaatcacggacctaaaacagaaagttgaaaatctcttcaatgagaaatgtggggaagctcttggccttaaacaagctgtgaaggtgccgttcgcgttatttgagtctttcccggaagacttttatgtggaaggcttacctgagggtgtgccattccgaagaccatcgacttttggcattccgaggctggagaagatactcagaaacaaagccaaaattaagttcatcattaaaaagcccgaaatgtttgagacggcgattaaggagagcacctcctctaagagccctcccagaaaaataaattcatcacccaatgttaatactactgcatcaggtgttgaagaccttaacatcattcaggtgacaattccagatgatgataatgaaagactctcgaaagttgaaaaagctagacagctaagagaacaagtgaatgacctctttagtcggaaatttggtgaagctattggtatgggttttcctgtgaaagttccctacaggaaaatcacaattaaccctggctgtgtggtggttgatggcatgcccccgggggtgtccttcaaagcccccagctacctggaaatcagctccatgagaaggatcttagactctgccgagtttatcaaattcacggtcattagaccatttccaggacttgtgattaataaccagctggttgatcagagtgagtcagaaggccccgtgatacaagaatcagctgaaccaagccagttggaagttccagccacagaagaaataaaagagactgatggaagctctcagatcaagcaagaaccagaccccacgtggtagacctcttccctcctaggcaaaaccatctggatcacctaacagtcagaggtcagtatctcagcgtgtgaattatagaggaaatacagagagaacctcttccacttttacttttcgtccaaataaaatgcatggtgtaccagaagttgaagatcgggttgaggattggggctagctcgatgacactaaggccccaacatcgcgggacctgctgtggcgcggattcttaggaacgctgttctagccggccccctctccaggggtcgccgtggccggcattatttcctagttcttcttgtaaccctgaggtgccagcgcggggagtgaggaggggtcagggggctaaggatgcaacctctgacgttctgcgccttcctaggagagtcttacatgtgttgagatttcacaagcaatgcgagttgtaaaataccagctctacaagaagctaggctctgtgacggcatagttttcagtagctttatcacaatattcacaatggagaattatatgacatggtagcagaaataggcccttttatgtgttgcttctattttacctcaaattgtagatatagggtaatcaataaaatccatccatgcctttcacacactaagt

SEQ ID NO: 4129 - protein, 516 aa, Homo sapiens
MHKMKSTTQANRMSVDAVEIETLRKTVEDYFCFCYGKALGKSTVVPVPYEKMLRDQSAVVVQGLPEGVAFKHPENYDLATLKWILENKAGISFIIKRPFLEPKKHVGGRVMVTDADRSILSPGGSCGPIKVKTEPTEDSGISLEMAAVTVKEESEDPDYYQYNIQGSHHSSEGNEGTEMEVPAEDSTQHVPSETSEDPEVEVTIEDDDYSPPSKRPKANELPQPPVPEPANAGKRKVREFNFEKWNARITDLRKQVEELFERKYAQAIKAKGPVTIPYPLFQSHVEDLYVEGLPEGIPFRRPSTYGIPRLERILLAKERIRFVIKKHELLNSTREDLQLDKPASGVKEEWYARITKLRKMVDQLFCKKFAEALGSTEAKAVPYQKFEAHPNDLYVEGLPENIPFRSPSWYGIPRLEKIIQVGNRIKFVIKRPELLTHSTTEVTQPRTNTPVKEDWNVRITKLRKQVEEIFNLKFAQALGLTEAVKVPYPVFESNPEFLKGSSAGVIKSSSLLKNLN

SEQ ID NO: 4130 - DNA, 4178 bp, Homo sapiens
aaaaaaaaaaaaaaaaaaaaaaaaaaaagaaaaaagaaaaaaaaaaggaggaggaggaggagggtgagagagaagctgggagagcagagaaaaggggccaccggtcgcccccccgcttccccgcacgcgctctccagccgcggccgcccgcctgccgcggtcaccccggcctctgcctctgtcccccagtgatcggatcaaggcgctgagcgaggccctgcctgcggggcggccatgcggcggtgacaggagcgcgaccgacacgcacgggcccctcgccccctctcgcctcccgtccgctcgccagctcccctcagccgaggctgctccgcggcggccgcagcccgcgcgcggcccacactcgcctcccctcggcacccccggccccggagctgcctggaggcggccgcactcggtgtaaagaactggccaagtccaaagccgaagtggcctgcattgcagtgtatgaaacagacgtgtttgtcgtcggaactgaaagaggacgtgcttttgtcaataccagaaaggattttcaaaaagattttgtaaaatattgtgttgaagaagaagaaaaagctgcagagatgcataaaatgaaatctacaacccaggcaaatcggatgagtgtagatgctgtagaaattgaaacactcagaaaaacagttgaggactatttctgcttttgctatgggaaagctttaggcaaatccacagtggtacctgtaccatatgagaagatgctgcgagaccagtcggctgtggtagtgcaggggcttccggaaggtgttgcctttaaacaccccgagaactatgatcttgcaaccctgaaatggattttggagaacaaagcagggatttcattcatcattaagagaccttttttagagccaaagaagcatgtaggtggtcgtgtgatggtaacagatgctgacaggtcaatactatctccaggtggaagttgtggccccatcaaagtgaaaactgaacccacagaagattctggcatttccctggaaatggcagctgtgacagtaaaggaagaatcagaagatcctgattattatcaatataacattcaagcaggcccttctgaaactgatgatgttgatgaaaaacagcccctatcgaagcctttgcaaggaagccaccattcttcagagggcaatgaaggcacagaaatggaagtaccagcagaagattctactcaacatgtcccttcagaaacaagtgaggaccctgaagttgaggtgactattgaagatgatgattattctccaccgtctaagagaccaaaggccaatgagctaccgcagccaccagtcccggaacccgccaatgctgggaagcggaaagtgagggagttcaacttcgagaaatggaatgctcgcatcactgatctacgtaaacaagttgaagaattgtttgaaaggaaatatgctcaagccataaaagccaaaggtccggtgacgatcccgtaccctcttttccagtctcatgttgaagatctttatgtagaaggacttcctgaaggaattccttttagaaggccatctacttacggaattcctcgcctggagaggatattacttgcaaaggaaaggattcgttttgtgattaagaaacatgagcttctgaattcaacacgtgaagatttacagcttgataagccagcttcaggagtaaaggaagaatggtatgccagaatcactaaattaagaaagatggtggatcagcttttctgcaaaaaatttgcggaagccttggggagcactgaagccaaggctgtaccgtaccaaaaatttgaggcacacccgaatgatctgtacgtggaaggactgccagaaaacattcctttccgaagtccctcatggtatggaatcccaaggctggaaaaaatcattcaagtgggcaatcgaattaaatttgttattaaaagaccagaacttctgactcacagtaccactgaagttactcagccaagaacgaatacaccagctcaagctcttggactcaccgaggcagtaaaagtaccatatcctgtgtttgaatcaaacccggagttcttgtatgtggaaggcttgccagaggggattcccttccgaagccctacctggtttggaattccacgacttgaaaggatcgtccgcgggagtaataaaatcaagttcgttgttaaaaaacctgaactagttatttcctacttgcctcctgggatggctagtaaaataaacactaaagctttgcagtcccccaaaagaccacgaagtcctgggagtaattcaaaggttcctgaaattgaggtcaccgtggaaggccctaataacaacaatcctcaaacctcagctgttcgaaccccgacccagactaacggttctaacgttcccttcaagccacgagggagagagttttcctttgaggcctggaatgccaaaatcacggacctaaaacagaaagttgaaaatctcttcaatgagaaatgtggggaagctcttggccttaaacaagctgtgaaggtgccgttcgcgttatttgagtctttcccggaagacttttatgtggaaggcttacctgagggtgtgccattccgaagaccatcgacttttggcattccgaggctggagaagatactcagaaacaaagccaaaattaagttcatcattaaaaagcccgaaatgtttgagacggcgattaaggagagcacctcctctaagagccctcccagaaaaataaattcatcacccaatgttaatactactgcatcaggtgttgaagaccttaacatcattcaggtgacaattccagatgatgataatgaaagactctcgaaagttgaaaaagctagacagctaagagaacaagtgaatgacctctttagtcggaaatttggtgaagctattggtatgggttttcctgtgaaagttccctacaggaaaatcacaattaaccctggctgtgtggtggttgatggcatgcccccgggggtgtccttcaaagcccccagctacctggaaatcagctccatgagaaggatcttagactctgccgagtttatcaaattcacggtcattagaccatttccaggacttgtgattaataaccagctggttgatcagagtgagtcagaaggccccgtgatacaagaatcagctgaaccaagccagttggaagttccagccacagaagaaataaaagagactgatggaagctctcagatcaagcaagaaccagaccccacgtggtagacctcttccctcctaggcttaaagtatcagtggttgagaagagcttttcggacctgttactaccccaagctgtagccttgagttacggtgtttattttccaatcaagtgaagatatctcctacttctcctactggaacatctcagcttctgcagtgaagaaaaattcctgtgatagttcagttctttagtttttctatttgaaaaaaaaaaatcatttaaatgatcctttgttcacggctctccttaatgactgagtgaacagttcctatctgtatatttgactaaaccttttcctaagctatctctcatggttcctatgtttttttatcataattaaaagcaaaaccatctggatcacctaacagtcagaggtcagtatctcagcgtgtgaattatagaggaaatacagagagaacctcttccacttttacttttcgtccaaataaaatgcatggtgtaccagaagttgaagatcgggttgaggattggggctagctcgatgacactaaggccccaacatcgcgggacctgctgtggcgcggattcttaggaacgctgttctagccggccccctctccaggggtcgccgtggccggcattatttcctagttcttcttgtaaccctgaggtgccagcgcggggagtgaggaggggtcagggggctaaggatgcaacctctgacgttctgcgccttcctaggagagtcttacatgtgttgagatttcacaagcaatgcgagttgtaaaataccagctctacaagaagctaggctctgtgacggcatagttttcagtagctttatcacaatattcacaatggagaattatatgacatggtagcagaaataggcccttttatgtgttgcttctattttacctcaaattgtagatatagggtaatcaataaaatccatccatgcctttcacacactaagt

SEQ ID NO: 4131 - protein, 885 aa, Homo sapiens; identical to SEQ ID NO: 4109

SEQ ID NO: 4132 - DNA, 7799 bp, Homo sapiens
aaaaaaaaaaaaaaaaaaaaaaaaaaaagaaaaaagaaaaaaaaaaggaggaggaggaggagggtgagagagaagctgggagagcagagaaaaggggccaccggtcgcccccccgcttccccgcacgcgctctccagccgcggccgcccgcctgccgcggtcaccccggcctctgcctctgtcccccagtgatcggatcaaggcgctgagcgaggccctgcctgcggggcggccatgcggcggtgacaggagcgcgaccgacacgcacgggcccctcgccccctctcgcctcccgtccgctcgccagctcccctcagccgaggctgctccgcggcggccgcagcccgcgcgcggcccacactcgcctcccctcggcacccccggccccggagctgcctggaggcggccgcactcggtgtaaagaactggccaagtccaaagccgaagtggcctgcattgcagtgtatgaaacagacgtgtttgtcgtcggaactgaaagaggacgtgcttttgtcaataccagaaaggattttcaaaaagattttgtaaaatattgtgttgaagaagaagaaaaagctgcagagatgcataaaatgaaatctacaacccaggcaaatcggatgagtgtagatgctgtagaaattgaaacactcagaaaaacagttgaggactatttctgcttttgctatgggaaagctttaggcaaatccacagtggtacctgtaccatatgagaagatgctgcgagaccagtcggctgtggtagtgcaggggcttccggaaggtgttgcctttaaacaccccgagaactatgatcttgcaaccctgaaatggattttggagaacaaagcagggatttcattcatcattaagagaccttttttagagccaaagaagcatgtaggtggtcgtgtgatggtaacagatgctgacaggtcaatactatctccaggtggaagttgtggccccatcaaagtgaaaactgaacccacagaagattctggcatttccctggaaatggcagctgtgacagtaaaggaagaatcagaagatcctgattattatcaatataacattcaaggaagccaccattcttcagagggcaatgaaggcacagaaatggaagtaccagcagaagattctactcaacatgtcccttcagaaacaagtgaggaccctgaagttgaggtgactattgaagatgatgattattctccaccgtctaagagaccaaaggccaatgagctaccgcagccaccagtcccggaacccgccaatgctgggaagcggaaagtgagggagttcaacttcgagaaatggaatgctcgcatcactgatctacgtaaacaagttgaagaattgtttgaaaggaaatatgctcaagccataaaagccaaaggtccggtgacgatcccgtaccctcttttccagtctcatgttgaagatctttatgtagaaggacttcctgaaggaattccttttagaaggccatctacttacggaattcctcgcctggagaggatattacttgcaaaggaaaggattcgttttgtgattaagaaacatgagcttctgaattcaacacgtgaagatttacagcttgataagccagcttcaggagtaaaggaagaatggtatgccagaatcactaaattaagaaagatggtggatcagcttttctgcaaaaaatttgcggaagccttggggagcactgaagccaaggctgtaccgtaccaaaaatttgaggcacacccgaatgatctgtacgtggaaggactgccagaaaacattcctttccgaagtccctcatggtatggaatcccaaggctggaaaaaatcattcaagtgggcaatcgaattaaatttgttattaaaagaccagaacttctgactcacagtaccactgaagttactcagccaagaacgaatacaccagctcaagctcttggactcaccgaggcagtaaaagtaccatatcctgtgtttgaatcaaacccggagttcttgtatgtggaaggcttgccagaggggattcccttccgaagccctacctggtttggaattccacgacttgaaaggatcgtccgcgggagtaataaaatcaagttcgttgttaaaaaacctgaactagttatttcctacttgcctcctgggatggctagtaaaataaacactaaagctttgcagtcccccaaaagaccacgaagtcctgggagtaattcaaaggttcctgaaattgaggtcaccgtggaaggccctaataacaacaatcctcaaacctcagctgttcgaaccccgacccagactaacggttctaacgttcccttcaagccacgagggagagagttttcctttgaggcctggaatgccaaaatcacggacctaaaacagaaagttgaaaatctcttcaatgagaaatgtggggaagctcttggccttaaacaagctgtgaaggtgccgttcgcgttatttgagtctttcccggaagacttttatgtggaaggcttacctgagggtgtgccattccgaagaccatcgacttttggcattccgaggctggagaagatactcagaaacaaagccaaaattaagttcatcattaaaaagcccgaaatgtttgagacggcgattaaggagagcacctcctctaagagccctcccagaaaaataaattcatcacccaatgttaatactactgcatcaggtgttgaagaccttaacatcattcaggtgacaattccagatgatgataatgaaagactctcgaaagttgaaaaagctagacagctaagagaacaagtgaatgacctctttagtcggaaatttggtgaagctattggtatgggttttcctgtgaaagttccctacaggaaaatcacaattaaccctggctgtgtggtggttgatggcatgcccccgggggtgtccttcaaagcccccagctacctggaaatcagctccatgagaaggatcttagactctgccgagtttatcaaattcacggtcattaggtaagtgagagtttcctgcttagtcacaggagcgaatctggagctcatgaggctgactcttctaaaatgcagccacaggtagtcatcgaatccggcttcctatgctgtgcaatcaacaaatcaaaataacttgtgtcatcattagaatgtcagatgtgcttctacgaactaagctgactcttttaattctttggcaaagggttggcaaactaggactgtttgccaaattcaggctgcctcctatttttagagtcttcctgaaacacagctacacccgtattatccatggctgctttcctgtcacagtgagtaagtagctgggactgagaaggcatggcctccaaagtctaaaatatttactctctagcactttgtagaaaaaccttagctaggcacagtggctaacgcctgtaatcccagcattttgggaggccaaggcaggcagatcacctgaggtcaggagttccagaccagcctggccaacatggtgaaatcccatctctacaaaaataaaacagttagctgggcatgatggcgggtgcctgtaatcccagctactcgggaggctgaggcaggatagtcgcttgaacccaggaggtggaggttgcaatgagccaagatcatgccactgcactccagcctggacgacagagtgagactccatcacaagaaaaaaagaactttgtcaacctctgtcttagggcgccttgtcacaggcttcgggtcagacggattcaaccttgcatcagccatttgttagccaggtcactctgttctttgtctgtaaatgagattgatcgttgttcccactgagagtgtcagctccttcccgtagagcaggcatgatgattgtactcacctctgacaccattgtgagtgccacattccttcccacgtccttgtcactgtaagagatgcccacctgagcaccaaccccaggttatcttcccctttgtcttccagccccccagaaacagctacgactcaacctacccaatcatttcatcatcagattgccactgtctctagttcaggtctcttgggactggcactcagaaatctcataataaatcctcttgaggcttctcatacactcgtcttcttccaatcttctttccctcaaaatctcatattttggttccacttcacccaccgtcattctccatatcactcccaggagttaggcaaaaagccccttccgttcttccgtatgttaaacttagaatcactctgttccctgctctgcgtttctattttttgtttttcctccatttactagtagcttaacactttctaacagtgttcttattattgatacgtatctatctcttccataagcttataaggtcacggataatacttctcattgtagtacgtaaatgacgtgggctagatatgagttgaataaacagttatacctgtaaattcttacagagtgaaaataaattgttatactttacaatttgtttctctctttagaccatttccaggacttgtgattaataaccgtgagtattttgtgaagtgttttgtttttgttttttcctggggtctgacgtgtgtgcgtgtgagtgtgtatacatgcttaacgtatatcacgttacttcacctatgtcagtaaccaggccaaatacttgttttagccctcagtaaaaacaccaggcacttcctagttgtaaaattattcaagcttcttaacttcctatcctcgatgcacttaatcataaaatggtaataatagcaccgattttgggggagtcgttccagtagatggaaagcatctggaacaggtgtcagcaagctcctgccgacgtgtatgcataaagttttattgaaaccaccatcgtgtccatttgtttatggcagaactgagagatggcagcagcaagtgtgtgcctgcaaaacctaaaatatttactaattggctctgcaagaaaagagtttgcatccccctaacctagaacagtgtctagcctctagtatgtgtttagcctacagtatgtgctcagcgaatacaatctatatttattactgcttttatgactgttataattactgtgcttggatttcgttacaaagtaagtcacaatgtgcctgcttctgttagtatttcagcacagtgcctggcacacatggggctctcaaatattgctgagcgagtgaacaaatgtcctttcaattccttaacgttgatgtcattttcaatagtattttgagccaaacttaattttgcgagtgtgttttgttttcttaactttattattaaaaatgtataaaagtgaggccaggcgtggtggctcacgcctgtaatcccagcagtttgggaggctgaggcaggcggatcagttgaggttgggagttggagaccagcccgtccaacatggtgaaagcctgtctctactaaaaatacaaaaatcagctgggtgtggtggcgcgtgcctgtaatcccagctactcaggaggctgaggcaggagagttgcttgaatcctagaggtggaggttgcagtgagctgagatcgtgccattgcactccagcctgggcaacaagagcaaaactctgtcccaataaataaataaataaaatgttctcttttgttcctgttcttgtgcggtagtgtggtatagagttttatggtaattactgtgaattagtgattctgagggacatatcagaactctgaggtttgtttccttctcatcttgagggaaacagcaaatgtatgttaaaatgcttttccaagggaacaacacatccttacattatttaaaccaatctgcttcattttcagagctggttgatcagagtgagtcagaaggccccgtgatacaagaatcagctgaaccaagccagttggaagttccagccacagaagaaataaaagagactgatggaagctctcagatcaagcaagaaccagaccccacgtggtagacctcttccctcctagggtaaatcagcttctgtgtcagggatgctgtgtggtgtccatctgaaccccctgcatacgcgtagctaatgtgatctccccactttcacataagatggtggccctgccttcagggaatgtgggagccaggtgggagccttcccggatatttaagctagaagattctacagggagattctccttggatcaatatatgtctctcagtcaaagatgtaaaagcacttttgccttaaaaagaatgttctgtttctaaatagagtcaacgttgtcctcctcattggaattcactatgagtcagaatcattagactgacttttttttttccatagtaatagtattttgcagagtctcacagagctgcagatcttttgttcatcttgcagagttaacaagtctgatcctgttagtccagatttcttaaatttggccaagttataataggagcagtagcttgagacccgaagtcaggaaactttgacaatggatttttttttttaatccagagacttgtactggaatttgccttaccctgtcagctcatggacttaaggtttcatcccgctttatgagtgcttctgaatccaagtcattgttacctgaatttgcaaattaagttgtgatattcgtgactgttaaattcctgtaattagattaacctctttgcttgcttgtttgttttctctcctattttagcttaaagtatcagtggttgagaagagcttttcggacctgttactaccccaagctgtgtaatatacttgtataacagaaataccttctatacaaacctttttttctacttttagatagaaatgtctactttttcagcagttctgtgaattaaagagcagagtgactgtgggtctggaatggctggtgtacttgggaatgtactatcaggattttacagcaatgctgggaaatgacagggaaaatgacaggaatgaatctcaccagattttttatgtactcagcagagccttgagttacggtgtttattttccaatcaagtgaagatatctcctacttctcctactggaacatctcagcttctgcagtgaagaaaaattcctgtgatagttcagttctttagtttttctatttgaaaaaaaaaaatcatttaaatgatcctttgttcacggctctccttaatgactgagtgaacagttcctatctgtatatttgactaaaccttttcctaagctatctctcatggttcctatgtttttttatcataattaaaagcaaaaccatctggatcacctaacagtcagaggtcagtatctcagcgtgtgaattatagaggaaatacagagagaacctcttccacttttacttttcgtccaaataaaatgcatggtgtaccagaagttgaagatcgggttgaggattggggctagctcgatgacactaaggccccaacatcgcgggacctgctgtggcgcggattcttaggaacgctgttctagccggccccctctccaggggtcgccgtggccggcattatttcctagttcttcttgtaaccctgaggtgccagcgcggggagtgaggaggggtcagggggctaaggatgcaacctctgacgttctgcgccttcctaggagagtcttacatgtgttgagatttcacaagcaatgcgagttgtaaaataccagctctacaagaagctaggctctgtgacggcatagttttcagtagctttatcacaatattcacaatggagaattatatgacatggtagcagaaataggcccttttatgtgttgcttctattttacctcaaattgtagatatagggtaatcaataaaatccatccatgcctttcacacactaagt

SEQ ID NO: 4133 - protein, 809 aa, Homo sapiens
MHKMKSTTQANRMSVDAVEIETLRKTVEDYFCFCYGKALGKSTVVPVPYEKMLRDQSAVVVQGLPEGVAFKHPENYDLATLKWILENKAGISFIIKRPFLEPKKHVGGRVMVTDADRSILSPGGSCGPIKVKTEPTEDSGISLEMAAVTVKEESEDPDYYQYNIQGSHHSSEGNEGTEMEVPAEDSTQHVPSETSEDPEVEVTIEDDDYSPPSKRPKANELPQPPVPEPANAGKRKVREFNFEKWNARITDLRKQVEELFERKYAQAIKAKGPVTIPYPLFQSHVEDLYVEGLPEGIPFRRPSTYGIPRLERILLAKERIRFVIKKHELLNSTREDLQLDKPASGVKEEWYARITKLRKMVDQLFCKKFAEALGSTEAKAVPYQKFEAHPNDLYVEGLPENIPFRSPSWYGIPRLEKIIQVGNRIKFVIKRPELLTHSTTEVTQPRTNTPAQALGLTEAVKVPYPVFESNPEFLYVEGLPEGIPFRSPTWFGIPRLERIVRGSNKIKFVVKKPELVISYLPPGMASKINTKALQSPKRPRSPGSNSKVPEIEVTVEGPNNNNPQTSAVRTPTQTNGSNVPFKPRGREFSFEAWNAKITDLKQKVENLFNEKCGEALGLKQAVKVPFALFESFPEDFYVEGLPEGVPFRRPSTFGIPRLEKILRNKAKIKFIIKKPEMFETAIKESTSSKSPPRKINSSPNVNTTASGVEDLNIIQVTIPDDDNERLSKVEKARQLREQVNDLFSRKFGEAIGMGFPVKVPYRKITINPGCVVVDGMPPGVSFKAPSYLEISSMRRILDSAEFIKFTVIR

SEQ ID NO: 4134 - DNA, 4224 bp, Homo sapiens
aaaaaaaaaaaaaaaaaaaaaaaaaaaagaaaaaagaaaaaaaaaaggaggaggaggaggagggtgagagagaagctgggagagcagagaaaaggggccaccggtcgcccccccgcttccccgcacgcgctctccagccgcggccgcccgcctgccgcggtcaccccggcctctgcctctgtcccccagtgatcggatcaaggcgctgagcgaggccctgcctgcggggcggccatgcggcggtgacaggagcgcgaccgacacgcacgggcccctcgccccctctcgcctcccgtccgctcgccagctcccctcagccgaggctgctccgcggcggccgcagcccgcgcgcggcccacactcgcctcccctcggcacccccggccccggagctgcctggaggcggccgcactcggggatcatggcccaagttgcaatgtccaccctccccgttgaagatgaggagtcctcggagagcaggatggtggtgacattcctcatgtcagctctcgagtccatgtgtaaagaactggccaagtccaaagccgaagtggcctgcattgcagtgtatgaaacagacgtgtttgtcgtcggaactgaaagaggacgtgcttttgtcaataccagaaaggattttcaaaaagattttgtaaaatattgtgttgaagaagaagaaaaagctgcagagatgcataaaatgaaatctacaacccaggcaaatcggatgagtgtagatgctgtagaaattgaaacactcagaaaaacagttgaggactatttctgcttttgctatgggaaagctttaggcaaatccacagtggtacctgtaccatatgagaagatgctgcgagaccagtcggctgtggtagtgcaggggcttccggaaggtgttgcctttaaacaccccgagaactatgatcttgcaaccctgaaatggattttggagaacaaagcagggatttcattcatcattaagagaccttttttagagccaaagaagcatgtaggtggtcgtgtgatggtaacagatgctgacaggtcaatactatctccaggtggaagttgtggccccatcaaagtgaaaactgaacccacagaagattctggcatttccctggaaatggcagctgtgacagtaaaggaagaatcagaagatcctgattattatcaatataacattcaagcaggcccttctgaaactgatgatgttgatgaaaaacagcccctatcgaagcctttgcaaggaagccaccattcttcagagggcaatgaaggcacagaaatggaagtaccagcagaagatgatgattattctccaccgtctaagagaccaaaggccaatgagctaccgcagccaccagtcccggaacccgccaatgctgggaagcggaaagtgagggagttcaacttcgagaaatggaatgctcgcatcactgatctacgtaaacaagttgaagaattgtttgaaaggaaatatgctcaagccataaaagccaaaggtccggtgacgatcccgtaccctcttttccagtctcatgttgaagatctttatgtagaaggacttcctgaaggaattccttttagaaggccatctacttacggaattcctcgcctggagaggatattacttgcaaaggaaaggattcgttttgtgattaagaaacatgagcttctgaattcaacacgtgaagatttacagcttgataagccagcttcaggagtaaaggaagaatggtatgccagaatcactaaattaagaaagatggtggatcagcttttctgcaaaaaatttgcggaagccttggggagcactgaagccaaggctgtaccgtaccaaaaatttgaggcacacccgaatgatctgtacgtggaaggactgccagaaaacattcctttccgaagtccctcatggtatggaatcccaaggctggaaaaaatcattcaagtgggcaatcgaattaaatttgttattaaaagaccagaacttctgactcacagtaccactgaagttactcagccaagaacgaatacaccagtcaaagaagattggaatgtcagaattaccaagctacggaagcaagtggaagagatttttaatttgaaatttgctcaagctcttggactcaccgaggcagtaaaagtaccatatcctgtgtttgaatcaaacccggagttcttgaaaggatcgtccgcgggagtaataaaatcaagttcgttgttaaaaaacctgaactagttatttcctacttgcctcctgggatggctagtaaaataaacactaaagctttgcagtcccccaaaagaccacgaagtcctgggagtaattcaaaggttcctgaaattgaggtcaccgtggaaggccctaataacaacaatcctcaaacctcagctgttcgaaccccgacccagactaacggttctaacgttcccttcaagccacgagggagagagttttcctttgaggcctggaatgccaaaatcacggacctaaaacagaaagttgaaaatctcttcaatgagaaatgtggggaagctcttggccttaaacaagctgtgaaggtgccgttcgcgttatttgagtctttcccggaagacttttatgtggaaggcttacctgagggtgtgccattccgaagaccatcgacttttggcattccgaggctggagaagatactcagaaacaaagccaaaattaagttcatcattaaaaagcccgaaatgtttgagacggcgattaaggagagcacctcctctaagagccctcccagaaaaataaattcatcacccaatgttaatactactgcatcaggtgttgaagaccttaacatcattcaggtgacaattccagatgatgataatgaaagactctcgaaagttgaaaaagctagacagctaagagaacaagtgaatgacctctttagtcggaaatttggtgaagctattggtatgggttttcctgtgaaagttccctacaggaaaatcacaattaaccctggctgtgtggtggttgatggcatgcccccgggggtgtccttcaaagcccccagctacctggaaatcagctccatgagaaggatcttagactctgccgagtttatcaaattcacggtcattagaccatttccaggacttgtgattaataaccagctggttgatcagagtgagtcagaaggccccgtgatacaagaatcagctgaaccaagccagttggaagttccagccacagaagaaataaaagagactgatggaagctctcagatcaagcaagaaccagaccccacgtggtagacctcttccctcctaggcttaaagtatcagtggttgagaagagcttttcggacctgttactaccccaagctgtagccttgagttacggtgtttattttccaatcaagtgaagatatctcctacttctcctactggaacatctcagcttctgcagtgaagaaaaattcctgtgatagttcagttctttagtttttctatttgaaaaaaaaaaatcatttaaatgatcctttgttcacggctctccttaatgactgagtgaacagttcctatctgtatatttgactaaaccttttcctaagctatctctcatggttcctatgtttttttatcataattaaaagcaaaaccatctggatcacctaacagtcagaggtcagtatctcagcgtgtgaattatagaggaaatacagagagaacctcttccacttttacttttcgtccaaataaaatgcatggtgtaccagaagttgaagatcgggttgaggattggggctagctcgatgacactaaggccccaacatcgcgggacctgctgtggcgcggattcttaggaacgctgttctagccggccccctctccaggggtcgccgtggccggcattatttcctagttcttcttgtaaccctgaggtgccagcgcggggagtgaggaggggtcagggggctaaggatgcaacctctgacgttctgcgccttcctaggagagtcttacatgtgttgagatttcacaagcaatgcgagttgtaaaataccagctctacaagaagctaggctctgtgacggcatagttttcagtagctttatcacaatattcacaatggagaattatatgacatggtagcagaaataggcccttttatgtgttgcttctattttacctcaaattgtagatatagggtaatcaataaaatccatccatgcctttcacacactaagt

SEQ ID NO: 4135 - protein, 604 aa, Homo sapiens; identical to SEQ ID NO: 4117

SEQ ID NO: 4136 - DNA, 7073 bp, Homo sapiens
aaaaaaaaaaaaaaaaaaaaaaaaaaaagaaaaaagaaaaaaaaaaggaggaggaggaggagggtgagagagaagctgggagagcagagaaaaggggccaccggtcgcccccccgcttccccgcacgcgctctccagccgcggccgcccgcctgccgcggtcaccccggcctctgcctctgtcccccagtgatcggatcaaggcgctgagcgaggccctgcctgcggggcggccatgcggcggtgacaggagcgcgaccgacacgcacgggcccctcgccccctctcgcctcccgtccgctcgccagctcccctcagccgaggctgctccgcggcggccgcagcccgcgcgcggcccacactcgcctccccgttgaagatgaggagtcctcggagagcaggatggtggtgacattcctcatgtcagctctcgagtccatgtgtaaagaactggccaagtccaaagccgaagtggcctgcattgcagtgtatgaaacagacgtgtttgtcgtcggaactgaaagaggacgtgcttttgtcaataccagaaaggattttcaaaaagattttgtaaaatattgtgttgaagaagaagaaaaagctgcagagatgcataaaatgaaatctacaacccaggcaaatcggatgagtgtagatgctgtagaaattgaaacactcagaaaaacagttgaggactatttctgcttttgctatgggaaagctttaggcaaatccacagtggtacctgtaccatatgagaagatgctgcgagaccagtcggctgtggtagtgcaggggcttccggaaggtgttgcctttaaacaccccgagaactatgatcttgcaaccctgaaatggattttggagaacaaagcagggatttcattcatcattaagagaccttttttagagccaaagaagcatgtaggtggtcgtgtgatggtaacagatgctgacaggtcaatactatctccaggtggaagttgtggccccatcaaagtgaaaactgaacccacagaagattctggcatttccctggaaatggcagctgtgacagtaaaggaagaatcagaagatcctgattattatcaatataacattcaaggaagccaccattcttcagagggcaatgaaggcacagaaatggaagtaccagcagaagatgatgattattctccaccgtctaagagaccaaaggccaatgagctaccgcagccaccagtcccggaacccgccaatgctgggaagcggaaagtgagggagttcaacttcgagaaatggaatgctcgcatcactgatctacgtaaacaagttgaagaattgtttgaaaggaaatatgctcaagccataaaagccaaaggtccggtgacgatcccgtaccctcttttccagtctcatgttgaagatctttatgtagaaggacttcctgaaggaattccttttagaaggccatctacttacggaattcctcgcctggagaggatattacttgcaaaggaaaggattcgttttgtgattaagaaacatgagcttctgaattcaacacgtgaagatttacagcttgataagccagcttcaggagtaaaggaagaatggtatgccagaatcactaaattaagaaagatggtggatcagcttttctgcaaaaaatttgcggaagccttggggagcactgaagccaaggctgtaccgtaccaaaaatttgaggcacacccgaatgatctgtacgtggaaggactgccagaaaacattcctttccgaagtccctcatggtatggaatcccaaggctggaaaaaatcattcaagtgggcaatcgaattaaatttgttattaaaagaccagaacttctgactcacagtaccactgaagttactcagccaagaacgaatacaccagtcaaagaagattggaatgtcagaattaccaagctacggaagcaagtggaagagatttttaatttgaaatttgctcaagctcttggactcaccgaggcagtaaaagtaccatatcctgtgtttgaatcaaacccggagttcttgaaaggatcgtccgcgggagtaataaaatcaagttcgttgttaaaaaacctgaactagttatttcctacttgcctcctgggatggctagtaaaataaacactaaagctttgcagtcccccaaaagaccacgaagtcctgggagtaattcaaaggttcctgaaattgaggtcaccgtggaaggccctaataacaacaatcctcaaacctcagctgttcgaaccccgacccagactaacggttctaacgttcccttcaagccacgagggagagagttttcctttgaggcctggaatgccaaaatcacggacctaaaacagaaagttgaaaatctcttcaatgagaaatgtggggaagctcttggccttaaacaagctgtgaaggtgccgttcgcgttatttgagtctttcccggaagacttttatgtggaaggcttacctgagggtgtgccattccgaagaccatcgacttttggcattccgaggctggagaagatactcagaaacaaagccaaaattaagttcatcattaaaaagcccgaaatgtttgagacggcgattaaggagagcacctcctctaagagccctcccagaaaaataaattcatcacccaatgttaatactactgcatcaggtgttgaagaccttaacatcattcaggtgacaattccagatgatgataatgaaagactctcgaaagttgaaaaagctagacagctaagagaacaagtgaatgacctctttagtcggaaatttggtgaagctattggtatgggttttcctgtgaaagttccctacaggaaaatcacaattaaccctggctgtgtggtggttgatggcatgcccccgggggtgtccttcaaagcccccagctacctggaaatcagctccatgagaaggatcttagactctgccgagtttatcaaattcacggtcattaggtaagtgagagtttcctgcttagtcacaggagcgaatctggagctcatgaggctgactcttctaaaatgcagccacaggtagtcatcgaatccggcttcctatgctgtgcaatcaacaaatcaaaataacttgtgtcatcattagaatgtcagatgtgcttctacgaactaagctgactcttttaattctttggcaaagggttggcaaactaggactgtttgccaaattcaggctgcctcctatttttagagtcttcctgaaacacagctacacccgtattatccatggctgctttcctgtcacagtgagtaagtagctgggactgagaaggcatggcctccaaagtctaaaatatttactctctagcactttgtagaaaaaccttagctaggcacagtggctaacgcctgtaatcccagcattttgggaggccaaggcaggcagatcacctgaggtcaggagttccagaccagcctggccaacatggtgaaatcccatctctacaaaaataaaacagttagctgggcatgatggcgggtgcctgtaatcccagctactcgggaggctgaggcaggatagtcgcttgaacccaggaggtggaggttgcaatgagccaagatcatgccactgcactccagcctggacgacagagtgagactccatcacaagaaaaaaagaactttgtcaacctctgtcttagggcgccttgtcacaggcttcgggtcagacggattcaaccttgcatcagccatttgttagccaggtcactctgttctttgtctgtaaatgagattgatcgttgttcccactgagagtgtcagctccttcccgtagagcaggcatgatgattgtactcacctctgacaccattgtgagtgccacattccttcccacgtccttgtcactgtaagagatgcccacctgagcaccaaccccaggttatcttcccctttgtcttccagccccccagaaacagctacgactcaacctacccaatcatttcatcatcagattgccactgtctctagttcaggtctcttgggactggcactcagaaatctcataataaatcctcttgaggcttctcatacactcgtcttcttccaatcttctttccctcaaaatctcatattttggttccacttcacccaccgtcattctccatatcactcccaggagttaggcaaaaagccccttccgttcttccgtatgttaaacttagaatcactctgttccctgctctgcgtttctattttttgtttttcctccatttactagtagcttaacactttctaacagtgttcttattattgatacgtatctatctcttccataagcttataaggtcacggataatacttctcattgtagtacgtaaatgacgtgggctagatatgagttgaataaacagttatacctgtaaattcttacagagtgaaaataaattgttatactttacaatttgtttctctctttagaccatttccaggacttgtgattaataaccgtgagtattttgtgaagtgttttgtttttgttttttcctggggtctgacgtgtgtgcgtgtgagtgtgtatacatgcttaacgtatatcacgttacttcacctatgtcagtaaccaggccaaatacttgttttagccctcagtaaaaacaccaggcacttcctagttgtaaaattattcaagcttcttaacttcctatcctcgatgcacttaatcataaaatggtaataatagcaccgattttgggggagtcgttccagtagatggaaagcatctggaacaggtgtcagcaagctcctgccgacgtgtatgcataaagttttattgaaaccaccatcgtgtccatttgtttatggcagaactgagagatggcagcagcaagtgtgtgcctgcaaaacctaaaatatttactaattggctctgcaagaaaagagtttgcatccccctaacctagaacagtgtctagcctctagtatgtgtttagcctacagtatgtgctcagcgaatacaatctatatttattactgcttttatgactgttataattactgtgcttggatttcgttacaaagtaagtcacaatgtgcctgcttctgttagtatttcagcacagtgcctggcacacatggggctctcaaatattgctgagcgagtgaacaaatgtcctttcaattccttaacgttgatgtcattttcaatagtattttgagccaaacttaattttgcgagtgtgttttgttttcttaactttattattaaaaatgtataaaagtgaggccaggcgtggtggctcacgcctgtaatcccagcagtttgggaggctgaggcaggcggatcagttgaggttgggagttggagaccagcccgtccaacatggtgaaagcctgtctctactaaaaatacaaaaatcagctgggtgtggtggcgcgtgcctgtaatcccagctactcaggaggctgaggcaggagagttgcttgaatcctagaggtggaggttgcagtgagctgagatcgtgccattgcactccagcctgggcaacaagagcaaaactctgtcccaataaataaataaataaaatgttctcttttgttcctgttcttgtgcggtagtgtggtatagagttttatggtaattactgtgaattagtgattctgagggacatatcagaactctgaggtttgtttccttctcatcttgagggaaacagcaaatgtatgttaaaatgcttttccaagggaacaacacatccttacattatttaaaccaatctgcttcattttcagagctggttgatcagagtgagtcagaaggccccgtgatacaagaatcagctgaaccaagccagttggaagttccagccacagaagaaataaaagagactgatggaagctctcagatcaagcaagaaccagaccccacgtggtagacctcttccctcctaggcttaaagtatcagtggttgagaagagcttttcggacctgttactaccccaagctgtgtaatatacttgtataacagaaataccttctatacaaacctttttttctacttttagatagaaatgtctactttttcagcagttctgtgaattaaagagcagagtgactgtgggtctggaatggctggtgtacttgggaatgtactatcaggattttacagcaatgctgggaaatgacagggaaaatgacaggaatgaatctcaccagattttttatgtactcagcagagccttgagttacggtgtttattttccaatcaagtgaagatatctcctacttctcctactggaacatctcagcttctgcagtgaagaaaaattcctgtgatagttcagttctttagtttttctatttgaaaaaaaaaaatcatttaaatgatcctttgttcacggctctccttaatgactgagtgaacagttcctatctgtatatttgactaaaccttttcctaagctatctctcatggttcctatgtttttttatcataattaaaagcaaaaccatctggatcacctaacagtcagaggtcagtatctcagcgtgtgaattatagaggaaatacagagagaacctcttccacttttacttttcgtccaaataaaatgcatggtgtaccagaagttgaagatcgggttgaggattggggctagctcgatgacactaaggccccaacatcgcgggacctgctgtggcgcggattcttaggaacgctgttctagccggccccctctccaggggtcgccgtggccggcattatttcctagttcttcttgtaaccctgaggtgccagcgcggggagtgaggaggggtcagggggctaaggatgcaacctctgacgttctgcgccttcctaggagagtcttacatgtgttgagatttcacaagcaatgcgagttgtaaaataccagctctacaagaagctaggctctgtgacggcatagttttcagtagctttatcacaatattcacaatggagaattatatgacatggtagcagaaataggcccttttatgtgttgcttctattttacctcaaattgtagatatagggtaatcaataaaatccatccatgcctttcacacactaagt

SEQ ID NO: 4137 - protein, 564 aa, Homo sapiens; identical to SEQ ID NO: 4023

SEQ ID NO: 4138 - DNA, 4302 bp, Homo sapiens
aaaaaaaaaaaaaaaaaaaaaaaaaaaagaaaaaagaaaaaaaaaaggaggaggaggaggagggtgagagagaagctgggagagcagagaaaaggggccaccggtcgcccccccgcttccccgcacgcgctctccagccgcggccgcccgcctgccgcggtcaccccggcctctgcctctgtcccccagtgatcggatcaaggcgctgagcgaggccctgcctgcggggcggccatgcggcggtgacaggagcgcgaccgacacgcacgggcccctcgccccctctcgcctcccgtccgctcgccagctcccctcagccgaggctgctccgcggcggccgcagcccgcgcgcggcccacactcgcctcccctcggcacccccggccccggagctgcctggaggcggccgcactcggtgtaaagaactggccaagtccaaagccgaagtggcctgcattgcagtgtatgaaacagacgtgtttgtcgtcggaactgaaagaggacgtgcttttgtcaataccagaaaggattttcaaaaagattttgtaaaatattgtgttgaagaagaagaaaaagctgcagagatgcataaaatgaaatctacaacccaggcaaatcggatgagtgtagatgctgtagaaattgaaacactcagaaaaacagttgaggactatttctgcttttgctatgggaaagctttaggcaaatccacagtggtacctgtaccatatgagaagatgctgcgagaccagtcggctgtggtagtgcaggggcttccggaaggtgttgcctttaaacaccccgagaactatgatcttgcaaccctgaaatggattttggagaacaaagcagggatttcattcatcattaagagaccttttttagagccaaagaagcatgtaggtggtcgtgtgatggtaacagatgctgacaggtcaatactatctccaggtggaagttgtggccccatcaaagtgaaaactgaacccacagaagattctggcatttccctggaaatggcagctgtgacagtaaaggaagaatcagaagatcctgattattatcaatataacattcaaggaagccaccattcttcagagggcaatgaaggcacagaaatggaagtaccagcagaagattctactcaacatgtcccttcagaaacaagtgaggaccctgaagttgaggtgactattgaagatgatgattattctccaccgtctaagagaccaaaggccaatgagctaccgcagccaccagtcccggaacccgccaatgctgggaagcggaaagtgagggagttcaacttcgagaaatggaatgctcgcatcactgatctacgtaaacaagttgaagaattgtttgaaaggaaatatgctcaagccataaaagccaaaggtccggtgacgatcccgtaccctcttttccagtctcatgttgaagatctttatgtagaaggacttcctgaaggaattccttttagaaggccatctacttacggaattcctcgcctggagaggatattacttgcaaaggaaaggattcgttttgtgattaagaaacatgagcttctgaattcaacacgtgaagatttacagcttgataagccagcttcaggagtaaaggaagaatggtatgccagaatcactaaattaagaaagatggtggatcagcttttctgcaaaaaatttgcggaagccttggggagcactgaagccaaggctgtaccgtaccaaaaatttgaggcacacccgaatgatctgtacgtggaaggactgccagaaaacattcctttccgaagtccctcatggtatggaatcccaaggctggaaaaaatcattcaagtgggcaatcgaattaaatttgttattaaaagaccagaacttctgactcacagtaccactgaagttactcagccaagaacgaatacaccagtcaaagaagattggaatgtcagaattaccaagctacggaagcaagtggaagagatttttaatttgaaatttgcttagatttgttgacagcggtttcctggagtgctgtcttgagaacgattctgaggaggctcagcaagaaagagtgtttcagttgattgggtgtgtctgtcatggagaaggaactcaagctcttggactcaccgaggcagtaaaagtaccatatcctgtgtttgaatcaaacccggagttcttgtatgtggaaggcttgccagaggggattcccttccgaagccctacctggtttggaattccacgacttgaaaggatcgtccgcgggagtaataaaatcaagttcgttgttaaaaaacctgaactagttatttcctacttgcctcctgggatggctagtaaaataaacactaaagctttgcagtcccccaaaagaccacgaagtcctgggagtaattcaaaggttcctgaaattgaggtcaccgtggaaggccctaataacaacaatcctcaaacctcagctgttcgaaccccgacccagactaacggttctaacgttcccttcaagccacgagggagagagttttcctttgaggcctggaatgccaaaatcacggacctaaaacagaaagttgaaaatctcttcaatgagaaatgtggggaagctcttggccttaaacaagctgtgaaggtgccgttcgcgttatttgagtctttcccggaagacttttatgtggaaggcttacctgagggtgtgccattccgaagaccatcgacttttggcattccgaggctggagaagatactcagaaacaaagccaaaattaagttcatcattaaaaagcccgaaatgtttgagacggcgattaaggagagcacctcctctaagagccctcccagaaaaataaattcatcacccaatgttaatactactgcatcaggtgttgaagaccttaacatcattcaggtgacaattccagatgatgataatgaaagactctcgaaagttgaaaaagctagacagctaagagaacaagtgaatgacctctttagtcggaaatttggtgaagctattggtatgggttttcctgtgaaagttccctacaggaaaatcacaattaaccctggctgtgtggtggttgatggcatgcccccgggggtgtccttcaaagcccccagctacctggaaatcagctccatgagaaggatcttagactctgccgagtttatcaaattcacggtcattagaccatttccaggacttgtgattaataaccagctggttgatcagagtgagtcagaaggccccgtgatacaagaatcagctgaaccaagccagttggaagttccagccacagaagaaataaaagagactgatggaagctctcagatcaagcaagaaccagaccccacgtggtagacctcttccctcctaggcttaaagtatcagtggttgagaagagcttttcggacctgttactaccccaagctgtagccttgagttacggtgtttattttccaatcaagtgaagatatctcctacttctcctactggaacatctcagcttctgcagtgaagaaaaattcctgtgatagttcagttctttagtttttctatttgaaaaaaaaaaatcatttaaatgatcctttgttcacggctctccttaatgactgagtgaacagttcctatctgtatatttgactaaaccttttcctaagctatctctcatggttcctatgtttttttatcataattaaaagcaaaaccatctggatcacctaacagtcagaggtcagtatctcagcgtgtgaattatagaggaaatacagagagaacctcttccacttttacttttcgtccaaataaaatgcatggtgtaccagaagttgaagatcgggttgaggattggggctagctcgatgacactaaggccccaacatcgcgggacctgctgtggcgcggattcttaggaacgctgttctagccggccccctctccaggggtcgccgtggccggcattatttcctagttcttcttgtaaccctgaggtgccagcgcggggagtgaggaggggtcagggggctaaggatgcaacctctgacgttctgcgccttcctaggagagtcttacatgtgttgagatttcacaagcaatgcgagttgtaaaataccagctctacaagaagctaggctctgtgacggcatagttttcagtagctttatcacaatattcacaatggagaattatatgacatggtagcagaaataggcccttttatgtgttgcttctattttacctcaaattgtagatatagggtaatcaataaaatccatccatgcctttcacacactaagt

SEQ ID NO: 4139 - protein, 475 aa, Homo sapiens
MHKMKSTTQANRMSVDAVEIETLRKTVEDYFCFCYGKALGKSTVVPVPYEKMLRDQSAVVVQGLPEGVAFKHPENYDLATLKWILENKAGISFIIKRPFLEPKKHVGGRVMVTDADRSILSPGGSCGPIKVKTEPTEDSGISLEMAAVTVKEESEDPDYYQYNIQGSHHSSEGNEGTEMEVPAEDSTQHVPSETSEDPEVEVTIEDDDYSPPSKRPKANELPQPPVPEPANAGKRKVREFNFEKWNARITDLRKQVEELFERKYAQAIKAKGPVTIPYPLFQSHVEDLYVEGLPEGIPFRRPSTYGIPRLERILLAKERIRFVIKKHELLNSTREDLQLDKPASGVKEEWYARITKLRKMVDQLFCKKFAEALGSTEAKAVPYQKFEAHPNDLYVEGLPENIPFRSPSWYGIPRLEKIIQVGNRIKFVIKRPELLTHSTTEVTQPRTNTPVKEDWNVRITKLRKQVEEIFNLKFA

SEQ ID NO: 4140 - DNA, 5207 bp, Homo sapiens
aaaaaaaaaaaaaaaaaaaaaaaaaaaagaaaaaagaaaaaaaaaaggaggaggaggaggagggtgagagagaagctgggagagcagagaaaaggggccaccggtcgcccccccgcttccccgcacgcgctctccagccgcggccgcccgcctgccgcggtcaccccggcctctgcctctgtcccccagtgatcggatcaaggcgctgagcgaggccctgcctgcggggcggccatgcggcggtgacaggagcgcgaccgacacgcacgggcccctcgccccctctcgcctcccgtccgctcgccagctcccctcagccgaggctgctccgcggcggccgcagcccgcgcgcggcccacactcgcctcccctcggcacccccggccccggagctgcctggaggcggccgcactcggggatcatggcccaagttgcaatgtccaccctccccgttgaagatgaggagtcctcggagagcaggatggtggtgacattcctcatgtcagctctcgagtccatgtgtaaagaactggccaagtccaaagccgaagtggcctgcattgcagtgtatgaaacagacgtgtttgtcgtcggaactgaaagaggacgtgcttttgtcaataccagaaaggattttcaaaaagattttgtaaaatattgtgttgaagaagaagaaaaagctgcagagatgcataaaatgaaatctacaacccaggcaaatcggatgagtgtagatgctgtagaaattgaaacactcagaaaaacagttgaggactatttctgcttttgctatgggaaagctttaggcaaatccacagtggtacctgtaccatatgagaagatgctgcgagaccagtcggctgtggtagtgcaggggcttccggaaggtgttgcctttaaacaccccgagaactatgatcttgcaaccctgaaatggattttggagaacaaagcagggatttcattcatcattaagagaccttttttagagccaaagaagcatgtaggtggtcgtgtgatggtaacagatgctgacaggtcaatactatctccaggtggaagttgtggccccatcaaagtgaaaactgaacccacagaagattctggcatttccctggaaatggcagctgtgacagtaaaggaagaatcagaagatcctgattattatcaatataacattcaagcaggcccttctgaaactgatgatgttgatgaaaaacagcccctatcgaagcctttgcaaggaagccaccattcttcagagggcaatgaaggcacagaaatggaagtaccagcagaagattctactcaacatgtcccttcagaaacaagtgaggaccctgaagttgaggtgactattgaagatgatgattattctccaccgtctaagagaccaaaggccaatgagctaccgcagccaccagtcccggaacccgccaatgctgggaagcggaaagtgagggagttcaacttcgagaaatggaatgctcgcatcactgatctacgtaaacaagttgaagaattgtttgaaaggaaatatgctcaagccataaaagccaaaggtccggtgacgatcccgtaccctcttttccagtctcatgttgaagatctttatgtagaaggacttcctgaaggaattccttttagaaggccatctacttacggaattcctcgcctggagaggatattacttgcaaaggaaaggattcgttttgtgattaagaaacatgagcttctgaattcaacacgtgaagatttacagcttgataagccagcttcaggagtaaaggaagaatggtatgccagaatcactaaattaagaaagatggtggatcagcttttctgcaaaaaatttgcggaagccttggggagcactgaagccaaggctgtaccgtaccaaaaatttgaggcacacccgaatgatctgtacgtggaaggactgccagaaaacattcctttccgaagtccctcatggtatggaatcccaaggctggaaaaaatcattcaagtgggcaatcgaattaaatttgttattaaaagaccagaacttctgactcacagtaccactgaagttactcagccaagaacgaatacaccagtcaaagaagattggaatgtcagaattaccaagctacggaagcaagtggaagagatttttaatttgaaatttgctcaagctcttggactcaccgaggcagtaaaagtaccatatcctgtgtttgaatcaaacccggagttcttgaaaggatcgtccgcgggagtaataaaatcaagttcgttgttaaaaaacctgaactagttatttcctacttgcctcctgggatggctagtaaaataaacactaaagctttgcagtcccccaaaagaccacgaagtcctgggagtaattcaaaggttcctgaaattgaggtcaccgtggaaggccctaataacaacaatcctcaaacctcagctgttcgaaccccgacccagactaacggttctaacgttcccttcaagccacgagggagagagttttcctttgaggcctggaatgccaaaatcacggacctaaaacagaaagttgaaaatctcttcaatgagaaatgtggggaagctcttggccttaaacaagctgtgaaggtgccgttcgcgttatttgagtctttcccggaagacttttatgtggaaggcttacctgagggtgtgccattccgaagaccatcgacttttggcattccgaggctggagaagatactcagaaacaaagccaaaattaagttcatcattaaaaagcccgaaatgtttgagacggcgattaaggagagcacctcctctaagagccctcccagaaaaataaattcatcacccaatgttaatactactgcatcaggtgttgaagaccttaacatcattcaggtgacaattccagatgatgataatgaaagactctcgaaagttgaaaaagctagacagctaagagaacaagtgaatgacctctttagtcggaaatttggtgaagctattggtatgggttttcctgtgaaagttccctacaggaaaatcacaattaaccctggctgtgtggtggttgatggcatgcccccgggggtgtccttcaaagcccccagctacctggaaatcagctccatgagaaggatcttagactctgccgagtttatcaaattcacggtcattagaccatttccaggacttgtgattaataaccagctggttgatcagagtgagtcagaaggccccgtgatacaagaatcagctgaaccaagccagttggaagttccagccacagaagaaataaaagagactgatggaagctctcagatcaagcaagaaccagaccccacgtggtagacctcttccctcctagggtaaatcagcttctgtgtcagggatgctgtgtggtgtccatctgaaccccctgcatacgcgtagctaatgtgatctccccactttcacataagatggtggccctgccttcagggaatgtgggagccaggtgggagccttcccggatatttaagctagaagattctacagggagattctccttggatcaatatatgtctctcagtcaaagatgtaaaagcacttttgccttaaaaagaatgttctgtttctaaatagagtcaacgttgtcctcctcattggaattcactatgagtcagaatcattagactgacttttttttttccatagtaatagtattttgcagagtctcacagagctgcagatcttttgttcatcttgcagagttaacaagtctgatcctgttagtccagatttcttaaatttggccaagttataataggagcagtagcttgagacccgaagtcaggaaactttgacaatggatttttttttttaatccagagacttgtactggaatttgccttaccctgtcagctcatggacttaaggtttcatcccgctttatgagtgcttctgaatccaagtcattgttacctgaatttgcaaattaagttgtgatattcgtgactgttaaattcctgtaattagattaacctctttgcttgcttgtttgttttctctcctattttagcttaaagtatcagtggttgagaagagcttttcggacctgttactaccccaagctgtgtaatatacttgtataacagaaataccttctatacaaacctttttttctacttttagatagaaatgtctactttttcagcagttctgtgaattaaagagcagagtgactgtgggtctggaatggctggtgtacttgggaatgtactatcaggattttacagcaatgctgggaaatgacagggaaaatgacaggaatgaatctcaccagattttttatgtactcagcagagccttgagttacggtgtttattttccaatcaagtgaagatatctcctacttctcctactggaacatctcagcttctgcagtgaagaaaaattcctgtgatagttcagttctttagtttttctatttgaaaaaaaaaaatcatttaaatgatcctttgttcacggctctccttaatgactgagtgaacagttcctatctgtatatttgactaaaccttttcctaagctatctctcatggttcctatgtttttttatcataattaaaagcaaaaccatctggatcacctaacagtcagaggtcagtatctcagcgtgtgaattatagaggaaatacagagagaacctcttccacttttacttttcgtccaaataaaatgcatggtgtaccagaagttgaagatcgggttgaggattggggctagctcgatgacactaaggccccaacatcgcgggacctgctgtggcgcggattcttaggaacgctgttctagccggccccctctccaggggtcgccgtggccggcattatttcctagttcttcttgtaaccctgaggtgccagcgcggggagtgaggaggggtcagggggctaaggatgcaacctctgacgttctgcgccttcctaggagagtcttacatgtgttgagatttcacaagcaatgcgagttgtaaaataccagctctacaagaagctaggctctgtgacggcatagttttcagtagctttatcacaatattcacaatggagaattatatgacatggtagcagaaataggcccttttatgtgttgcttctattttacctcaaattgtagatatagggtaatcaataaaatccatccatgcctttcacacactaagt

SEQ ID NO: 4141 - protein, 625 aa, Homo sapiens; identical to SEQ ID NO: 4033

SEQ ID NO: 4142 - DNA, 7830 bp, Homo sapiens
aaaaaaaaaaaaaaaaaaaaaaaaaaaagaaaaaagaaaaaaaaaaggaggaggaggaggagggtgagagagaagctgggagagcagagaaaaggggccaccggtcgcccccccgcttccccgcacgcgctctccagccgcggccgcccgcctgccgcggtcaccccggcctctgcctctgtcccccagtgatcggatcaaggcgctgagcgaggccctgcctgcggggcggccatgcggcggtgacaggagcgcgaccgacacgcacgggcccctcgccccctctcgcctcccgtccgctcgccagctcccctcagccgaggctgctccgcggcggccgcagcccgcgcgcggcccacactcgcctcccctcggcacccccggccccggagctgcctggaggcggccgcactcggggatcatggcccaagttgcaatgtccaccctccccgttgaagatgaggagtcctcggagagcaggatggtggtgacattcctcatgtcagctctcgagtccatgtgtaaagaactggccaagtccaaagccgaagtggcctgcattgcagtgtatgaaacagacgtgtttgtcgtcggaactgaaagaggacgtgcttttgtcaataccagaaaggattttcaaaaagattttgtaaaatattgtgttgaagaagaagaaaaagctgcagagatgcataaaatgaaatctacaacccaggcaaatcggatgagtgtagatgctgtagaaattgaaacactcagaaaaacagttgaggactatttctgcttttgctatgggaaagctttaggcaaatccacagtggtacctgtaccatatgagaagatgctgcgagaccagtcggctgtggtagtgcaggggcttccggaaggtgttgcctttaaacaccccgagaactatgatcttgcaaccctgaaatggattttggagaacaaagcagggatttcattcatcattaagagaccttttttagagccaaagaagcatgtaggtggtcgtgtgatggtaacagatgctgacaggtcaatactatctccaggtggaagttgtggccccatcaaagtgaaaactgaacccacagaagattctggaagccaccattcttcagagggcaatgaaggcacagaaatggaagtaccagcagaagattctactcaacatgtcccttcagaaacaagtgaggaccctgaagttgaggtgactattgaagatgatgattattctccaccgtctaagagaccaaaggccaatgagctaccgcagccaccagtcccggaacccgccaatgctgggaagcggaaagtgagggagttcaacttcgagaaatggaatgctcgcatcactgatctacgtaaacaagttgaagaattgtttgaaaggaaatatgctcaagccataaaagccaaaggtccggtgacgatcccgtaccctcttttccagtctcatgttgaagatctttatgtagaaggacttcctgaaggaattccttttagaaggccatctacttacggaattcctcgcctggagaggatattacttgcaaaggaaaggattcgttttgtgattaagaaacatgagcttctgaattcaacacgtgaagatttacagcttgataagccagcttcaggagtaaaggaagaatggtatgccagaatcactaaattaagaaagatggtggatcagcttttctgcaaaaaatttgcggaagccttggggagcactgaagccaaggctgtaccgtaccaaaaatttgaggcacacccgaatgatctgtacgtggaaggactgccagaaaacattcctttccgaagtccctcatggtatggaatcccaaggctggaaaaaatcattcaagtgggcaatcgaattaaatttgttattaaaagaccagaacttctgactcacagtaccactgaagttactcagccaagaacgaatacaccagtcaaagaagattggaatgtcagaattaccaagctacggaagcaagtggaagagatttttaatttgaaatttgctcaagctcttggactcaccgaggcagtaaaagtaccatatcctgtgtttgaatcaaacccggagttcttgaaaggatcgtccgcgggagtaataaaatcaagttcgttgttaaaaaacctgaactagttatttcctacttgcctcctgggatggctagtaaaataaacactaaagctttgcagtcccccaaaagaccacgaagtcctgggagtaattcaaaggttcctgaaattgaggtcaccgtggaaggccctaataacaacaatcctcaaacctcagctgttcgaaccccgacccagactaacggttctaacgttcccttcaagccacgagggagagagttttcctttgaggcctggaatgccaaaatcacggacctaaaacagaaagttgaaaatctcttcaatgagaaatgtggggaagctcttggccttaaacaagctgtgaaggtgccgttcgcgttatttgagtctttcccggaagacttttatgtggaaggcttacctgagggtgtgccattccgaagaccatcgacttttggcattccgaggctggagaagatactcagaaacaaagccaaaattaagttcatcattaaaaagcccgaaatgtttgagacggcgattaaggagagcacctcctctaagagccctcccagaaaaataaattcatcacccaatgttaatactactgcatcaggtgttgaagaccttaacatcattcaggtgacaattccagatgatgataatgaaagactctcgaaagttgaaaaagctagacagctaagagaacaagtgaatgacctctttagtcggaaatttggtgaagctattggtatgggttttcctgtgaaagttccctacaggaaaatcacaattaaccctggctgtgtggtggttgatggcatgcccccgggggtgtccttcaaagcccccagctacctggaaatcagctccatgagaaggatcttagactctgccgagtttatcaaattcacggtcattaggtaagtgagagtttcctgcttagtcacaggagcgaatctggagctcatgaggctgactcttctaaaatgcagccacaggtagtcatcgaatccggcttcctatgctgtgcaatcaacaaatcaaaataacttgtgtcatcattagaatgtcagatgtgcttctacgaactaagctgactcttttaattctttggcaaagggttggcaaactaggactgtttgccaaattcaggctgcctcctatttttagagtcttcctgaaacacagctacacccgtattatccatggctgctttcctgtcacagtgagtaagtagctgggactgagaaggcatggcctccaaagtctaaaatatttactctctagcactttgtagaaaaaccttagctaggcacagtggctaacgcctgtaatcccagcattttgggaggccaaggcaggcagatcacctgaggtcaggagttccagaccagcctggccaacatggtgaaatcccatctctacaaaaataaaacagttagctgggcatgatggcgggtgcctgtaatcccagctactcgggaggctgaggcaggatagtcgcttgaacccaggaggtggaggttgcaatgagccaagatcatgccactgcactccagcctggacgacagagtgagactccatcacaagaaaaaaagaactttgtcaacctctgtcttagggcgccttgtcacaggcttcgggtcagacggattcaaccttgcatcagccatttgttagccaggtcactctgttctttgtctgtaaatgagattgatcgttgttcccactgagagtgtcagctccttcccgtagagcaggcatgatgattgtactcacctctgacaccattgtgagtgccacattccttcccacgtccttgtcactgtaagagatgcccacctgagcaccaaccccaggttatcttcccctttgtcttccagccccccagaaacagctacgactcaacctacccaatcatttcatcatcagattgccactgtctctagttcaggtctcttgggactggcactcagaaatctcataataaatcctcttgaggcttctcatacactcgtcttcttccaatcttctttccctcaaaatctcatattttggttccacttcacccaccgtcattctccatatcactcccaggagttaggcaaaaagccccttccgttcttccgtatgttaaacttagaatcactctgttccctgctctgcgtttctattttttgtttttcctccatttactagtagcttaacactttctaacagtgttcttattattgatacgtatctatctcttccataagcttataaggtcacggataatacttctcattgtagtacgtaaatgacgtgggctagatatgagttgaataaacagttatacctgtaaattcttacagagtgaaaataaattgttatactttacaatttgtttctctctttagaccatttccaggacttgtgattaataaccgtgagtattttgtgaagtgttttgtttttgttttttcctggggtctgacgtgtgtgcgtgtgagtgtgtatacatgcttaacgtatatcacgttacttcacctatgtcagtaaccaggccaaatacttgttttagccctcagtaaaaacaccaggcacttcctagttgtaaaattattcaagcttcttaacttcctatcctcgatgcacttaatcataaaatggtaataatagcaccgattttgggggagtcgttccagtagatggaaagcatctggaacaggtgtcagcaagctcctgccgacgtgtatgcataaagttttattgaaaccaccatcgtgtccatttgtttatggcagaactgagagatggcagcagcaagtgtgtgcctgcaaaacctaaaatatttactaattggctctgcaagaaaagagtttgcatccccctaacctagaacagtgtctagcctctagtatgtgtttagcctacagtatgtgctcagcgaatacaatctatatttattactgcttttatgactgttataattactgtgcttggatttcgttacaaagtaagtcacaatgtgcctgcttctgttagtatttcagcacagtgcctggcacacatggggctctcaaatattgctgagcgagtgaacaaatgtcctttcaattccttaacgttgatgtcattttcaatagtattttgagccaaacttaattttgcgagtgtgttttgttttcttaactttattattaaaaatgtataaaagtgaggccaggcgtggtggctcacgcctgtaatcccagcagtttgggaggctgaggcaggcggatcagttgaggttgggagttggagaccagcccgtccaacatggtgaaagcctgtctctactaaaaatacaaaaatcagctgggtgtggtggcgcgtgcctgtaatcccagctactcaggaggctgaggcaggagagttgcttgaatcctagaggtggaggttgcagtgagctgagatcgtgccattgcactccagcctgggcaacaagagcaaaactctgtcccaataaataaataaataaaatgttctcttttgttcctgttcttgtgcggtagtgtggtatagagttttatggtaattactgtgaattagtgattctgagggacatatcagaactctgaggtttgtttccttctcatcttgagggaaacagcaaatgtatgttaaaatgcttttccaagggaacaacacatccttacattatttaaaccaatctgcttcattttcagagctggttgatcagagtgagtcagaaggccccgtgatacaagaatcagctgaaccaagccagttggaagttccagccacagaagaaataaaagagactgatggaagctctcagatcaagcaagaaccagaccccacgtggtagacctcttccctcctagggtaaatcagcttctgtgtcagggatgctgtgtggtgtccatctgaaccccctgcatacgcgtagctaatgtgatctccccactttcacataagatggtggccctgccttcagggaatgtgggagccaggtgggagccttcccggatatttaagctagaagattctacagggagattctccttggatcaatatatgtctctcagtcaaagatgtaaaagcacttttgccttaaaaagaatgttctgtttctaaatagagtcaacgttgtcctcctcattggaattcactatgagtcagaatcattagactgacttttttttttccatagtaatagtattttgcagagtctcacagagctgcagatcttttgttcatcttgcagagttaacaagtctgatcctgttagtccagatttcttaaatttggccaagttataataggagcagtagcttgagacccgaagtcaggaaactttgacaatggatttttttttttaatccagagacttgtactggaatttgccttaccctgtcagctcatggacttaaggtttcatcccgctttatgagtgcttctgaatccaagtcattgttacctgaatttgcaaattaagttgtgatattcgtgactgttaaattcctgtaattagattaacctctttgcttgcttgtttgttttctctcctattttagcttaaagtatcagtggttgagaagagcttttcggacctgttactaccccaagctgtgtaatatacttgtataacagaaataccttctatacaaacctttttttctacttttagatagaaatgtctactttttcagcagttctgtgaattaaagagcagagtgactgtgggtctggaatggctggtgtacttgggaatgtactatcaggattttacagcaatgctgggaaatgacagggaaaatgacaggaatgaatctcaccagattttttatgtactcagcagagccttgagttacggtgtttattttccaatcaagtgaagatatctcctacttctcctactggaacatctcagcttctgcagtgaagaaaaattcctgtgatagttcagttctttagtttttctatttgaaaaaaaaaaatcatttaaatgatcctttgttcacggctctccttaatgactgagtgaacagttcctatctgtatatttgactaaaccttttcctaagctatctctcatggttcctatgtttttttatcataattaaaagcaaaaccatctggatcacctaacagtcagaggtcagtatctcagcgtgtgaattatagaggaaatacagagagaacctcttccacttttacttttcgtccaaataaaatgcatggtgtaccagaagttgaagatcgggttgaggattggggctagctcgatgacactaaggccccaacatcgcgggacctgctgtggcgcggattcttaggaacgctgttctagccggccccctctccaggggtcgccgtggccggcattatttcctagttcttcttgtaaccctgaggtgccagcgcggggagtgaggaggggtcagggggctaaggatgcaacctctgacgttctgcgccttcctaggagagtcttacatgtgttgagatttcacaagcaatgcgagttgtaaaataccagctctacaagaagctaggctctgtgacggcatagttttcagtagctttatcacaatattcacaatggagaattatatgacatggtagcagaaataggcccttttatgtgttgcttctattttacctcaaattgtagatatagggtaatcaataaaatccatccatgcctttcacacactaagt

SEQ ID NO: 4143 - protein, 579 aa, Homo sapiens; identical to SEQ ID NO: 4111

SEQ ID NO: 4144 - DNA, 7736 bp, Homo sapiens
aaaaaaaaaaaaaaaaaaaaaaaaaaaagaaaaaagaaaaaaaaaaggaggaggaggaggagggtgagagagaagctgggagagcagagaaaaggggccaccggtcgcccccccgcttccccgcacgcgctctccagccgcggccgcccgcctgccgcggtcaccccggcctctgcctctgtcccccagtgatcggatcaaggcgctgagcgaggccctgcctgcggggcggccatgcggcggtgacaggagcgcgaccgacacgcacgggcccctcgccccctctcgcctcccgtccgctcgccagctcccctcagccgaggctgctccgcggcggccgcagcccgcgcgcggcccacactcgcctcccctcggcacccccggccccggagctgcctggaggcggccgcactcggtgtaaagaactggccaagtccaaagccgaagtggcctgcattgcagtgtatgaaacagacgtgtttgtcgtcggaactgaaagaggacgtgcttttgtcaataccagaaaggattttcaaaaagattttgtaaaatattgtgttgaagaagaagaaaaagctgcagagatgcataaaatgaaatctacaacccaggcaaatcggatgagtgtagatgctgtagaaattgaaacactcagaaaaacagttgaggactatttctgcttttgctatgggaaagctttaggcaaatccacagtggtacctgtaccatatgagaagatgctgcgagaccagtcggctgtggtagtgcaggggcttccggaaggtgttgcctttaaacaccccgagaactatgatcttgcaaccctgaaatggattttggagaacaaagcagggatttcattcatcattaagagaccttttttagagccaaagaagcatgtaggtggtcgtgtgatggtaacagatgctgacaggtcaatactatctccaggtggaagttgtggccccatcaaagtgaaaactgaacccacagaagattctggcatttccctggaaatggcagctgtgacagtaaaggaagaatcagaagatcctgattattatcaatataacattcaaggaagccaccattcttcagagggcaatgaaggcacagaaatggaagtaccagcagaagatgatgattattctccaccgtctaagagaccaaaggccaatgagctaccgcagccaccagtcccggaacccgccaatgctgggaagcggaaagtgagggagttcaacttcgagaaatggaatgctcgcatcactgatctacgtaaacaagttgaagaattgtttgaaaggaaatatgctcaagccataaaagccaaaggtccggtgacgatcccgtaccctcttttccagtctcatgttgaagatctttatgtagaaggacttcctgaaggaattccttttagaaggccatctacttacggaattcctcgcctggagaggatattacttgcaaaggaaaggattcgttttgtgattaagaaacatgagcttctgaattcaacacgtgaagatttacagcttgataagccagcttcaggagtaaaggaagaatggtatgccagaatcactaaattaagaaagatggtggatcagcttttctgcaaaaaatttgcggaagccttggggagcactgaagccaaggctgtaccgtaccaaaaatttgaggcacacccgaatgatctgtacgtggaaggactgccagaaaacattcctttccgaagtccctcatggtatggaatcccaaggctggaaaaaatcattcaagtgggcaatcgaattaaatttgttattaaaagaccagaacttctgactcacagtaccactgaagttactcagccaagaacgaatacaccagctcaagctcttggactcaccgaggcagtaaaagtaccatatcctgtgtttgaatcaaacccggagttcttgtatgtggaaggcttgccagaggggattcccttccgaagccctacctggtttggaattccacgacttgaaaggatcgtccgcgggagtaataaaatcaagttcgttgttaaaaaacctgaactagttatttcctacttgcctcctgggatggctagtaaaataaacactaaagctttgcagtcccccaaaagaccacgaagtcctgggagtaattcaaaggttcctgaaattgaggtcaccgtggaaggccctaataacaacaatcctcaaacctcagctgttcgaaccccgacccagactaacggttctaacgttcccttcaagccacgagggagagagttttcctttgaggcctggaatgccaaaatcacggacctaaaacagaaagttgaaaatctcttcaatgagaaatgtggggaagctcttggccttaaacaagctgtgaaggtgccgttcgcgttatttgagtctttcccggaagacttttatgtggaaggcttacctgagggtgtgccattccgaagaccatcgacttttggcattccgaggctggagaagatactcagaaacaaagccaaaattaagttcatcattaaaaagcccgaaatgtttgagacggcgattaaggagagcacctcctctaagagccctcccagaaaaataaattcatcacccaatgttaatactactgcatcaggtgttgaagaccttaacatcattcaggtgacaattccagatgatgataatgaaagactctcgaaagttgaaaaagctagacagctaagagaacaagtgaatgacctctttagtcggaaatttggtgaagctattggtatgggttttcctgtgaaagttccctacaggaaaatcacaattaaccctggctgtgtggtggttgatggcatgcccccgggggtgtccttcaaagcccccagctacctggaaatcagctccatgagaaggatcttagactctgccgagtttatcaaattcacggtcattaggtaagtgagagtttcctgcttagtcacaggagcgaatctggagctcatgaggctgactcttctaaaatgcagccacaggtagtcatcgaatccggcttcctatgctgtgcaatcaacaaatcaaaataacttgtgtcatcattagaatgtcagatgtgcttctacgaactaagctgactcttttaattctttggcaaagggttggcaaactaggactgtttgccaaattcaggctgcctcctatttttagagtcttcctgaaacacagctacacccgtattatccatggctgctttcctgtcacagtgagtaagtagctgggactgagaaggcatggcctccaaagtctaaaatatttactctctagcactttgtagaaaaaccttagctaggcacagtggctaacgcctgtaatcccagcattttgggaggccaaggcaggcagatcacctgaggtcaggagttccagaccagcctggccaacatggtgaaatcccatctctacaaaaataaaacagttagctgggcatgatggcgggtgcctgtaatcccagctactcgggaggctgaggcaggatagtcgcttgaacccaggaggtggaggttgcaatgagccaagatcatgccactgcactccagcctggacgacagagtgagactccatcacaagaaaaaaagaactttgtcaacctctgtcttagggcgccttgtcacaggcttcgggtcagacggattcaaccttgcatcagccatttgttagccaggtcactctgttctttgtctgtaaatgagattgatcgttgttcccactgagagtgtcagctccttcccgtagagcaggcatgatgattgtactcacctctgacaccattgtgagtgccacattccttcccacgtccttgtcactgtaagagatgcccacctgagcaccaaccccaggttatcttcccctttgtcttccagccccccagaaacagctacgactcaacctacccaatcatttcatcatcagattgccactgtctctagttcaggtctcttgggactggcactcagaaatctcataataaatcctcttgaggcttctcatacactcgtcttcttccaatcttctttccctcaaaatctcatattttggttccacttcacccaccgtcattctccatatcactcccaggagttaggcaaaaagccccttccgttcttccgtatgttaaacttagaatcactctgttccctgctctgcgtttctattttttgtttttcctccatttactagtagcttaacactttctaacagtgttcttattattgatacgtatctatctcttccataagcttataaggtcacggataatacttctcattgtagtacgtaaatgacgtgggctagatatgagttgaataaacagttatacctgtaaattcttacagagtgaaaataaattgttatactttacaatttgtttctctctttagaccatttccaggacttgtgattaataaccgtgagtattttgtgaagtgttttgtttttgttttttcctggggtctgacgtgtgtgcgtgtgagtgtgtatacatgcttaacgtatatcacgttacttcacctatgtcagtaaccaggccaaatacttgttttagccctcagtaaaaacaccaggcacttcctagttgtaaaattattcaagcttcttaacttcctatcctcgatgcacttaatcataaaatggtaataatagcaccgattttgggggagtcgttccagtagatggaaagcatctggaacaggtgtcagcaagctcctgccgacgtgtatgcataaagttttattgaaaccaccatcgtgtccatttgtttatggcagaactgagagatggcagcagcaagtgtgtgcctgcaaaacctaaaatatttactaattggctctgcaagaaaagagtttgcatccccctaacctagaacagtgtctagcctctagtatgtgtttagcctacagtatgtgctcagcgaatacaatctatatttattactgcttttatgactgttataattactgtgcttggatttcgttacaaagtaagtcacaatgtgcctgcttctgttagtatttcagcacagtgcctggcacacatggggctctcaaatattgctgagcgagtgaacaaatgtcctttcaattccttaacgttgatgtcattttcaatagtattttgagccaaacttaattttgcgagtgtgttttgttttcttaactttattattaaaaatgtataaaagtgaggccaggcgtggtggctcacgcctgtaatcccagcagtttgggaggctgaggcaggcggatcagttgaggttgggagttggagaccagcccgtccaacatggtgaaagcctgtctctactaaaaatacaaaaatcagctgggtgtggtggcgcgtgcctgtaatcccagctactcaggaggctgaggcaggagagttgcttgaatcctagaggtggaggttgcagtgagctgagatcgtgccattgcactccagcctgggcaacaagagcaaaactctgtcccaataaataaataaataaaatgttctcttttgttcctgttcttgtgcggtagtgtggtatagagttttatggtaattactgtgaattagtgattctgagggacatatcagaactctgaggtttgtttccttctcatcttgagggaaacagcaaatgtatgttaaaatgcttttccaagggaacaacacatccttacattatttaaaccaatctgcttcattttcagagctggttgatcagagtgagtcagaaggccccgtgatacaagaatcagctgaaccaagccagttggaagttccagccacagaagaaataaaagagactgatggaagctctcagatcaagcaagaaccagaccccacgtggtagacctcttccctcctagggtaaatcagcttctgtgtcagggatgctgtgtggtgtccatctgaaccccctgcatacgcgtagctaatgtgatctccccactttcacataagatggtggccctgccttcagggaatgtgggagccaggtgggagccttcccggatatttaagctagaagattctacagggagattctccttggatcaatatatgtctctcagtcaaagatgtaaaagcacttttgccttaaaaagaatgttctgtttctaaatagagtcaacgttgtcctcctcattggaattcactatgagtcagaatcattagactgacttttttttttccatagtaatagtattttgcagagtctcacagagctgcagatcttttgttcatcttgcagagttaacaagtctgatcctgttagtccagatttcttaaatttggccaagttataataggagcagtagcttgagacccgaagtcaggaaactttgacaatggatttttttttttaatccagagacttgtactggaatttgccttaccctgtcagctcatggacttaaggtttcatcccgctttatgagtgcttctgaatccaagtcattgttacctgaatttgcaaattaagttgtgatattcgtgactgttaaattcctgtaattagattaacctctttgcttgcttgtttgttttctctcctattttagcttaaagtatcagtggttgagaagagcttttcggacctgttactaccccaagctgtgtaatatacttgtataacagaaataccttctatacaaacctttttttctacttttagatagaaatgtctactttttcagcagttctgtgaattaaagagcagagtgactgtgggtctggaatggctggtgtacttgggaatgtactatcaggattttacagcaatgctgggaaatgacagggaaaatgacaggaatgaatctcaccagattttttatgtactcagcagagccttgagttacggtgtttattttccaatcaagtgaagatatctcctacttctcctactggaacatctcagcttctgcagtgaagaaaaattcctgtgatagttcagttctttagtttttctatttgaaaaaaaaaaatcatttaaatgatcctttgttcacggctctccttaatgactgagtgaacagttcctatctgtatatttgactaaaccttttcctaagctatctctcatggttcctatgtttttttatcataattaaaagcaaaaccatctggatcacctaacagtcagaggtcagtatctcagcgtgtgaattatagaggaaatacagagagaacctcttccacttttacttttcgtccaaataaaatgcatggtgtaccagaagttgaagatcgggttgaggattggggctagctcgatgacactaaggccccaacatcgcgggacctgctgtggcgcggattcttaggaacgctgttctagccggccccctctccaggggtcgccgtggccggcattatttcctagttcttcttgtaaccctgaggtgccagcgcggggagtgaggaggggtcagggggctaaggatgcaacctctgacgttctgcgccttcctaggagagtcttacatgtgttgagatttcacaagcaatgcgagttgtaaaataccagctctacaagaagctaggctctgtgacggcatagttttcagtagctttatcacaatattcacaatggagaattatatgacatggtagcagaaataggcccttttatgtgttgcttctattttacctcaaattgtagatatagggtaatcaataaaatccatccatgcctttcacacactaagt

SEQ ID NO: 4145 - protein, 788 aa, Homo sapiens
MHKMKSTTQANRMSVDAVEIETLRKTVEDYFCFCYGKALGKSTVVPVPYEKMLRDQSAVVVQGLPEGVAFKHPENYDLATLKWILENKAGISFIIKRPFLEPKKHVGGRVMVTDADRSILSPGGSCGPIKVKTEPTEDSGISLEMAAVTVKEESEDPDYYQYNIQGSHHSSEGNEGTEMEVPAEDDDYSPPSKRPKANELPQPPVPEPANAGKRKVREFNFEKWNARITDLRKQVEELFERKYAQAIKAKGPVTIPYPLFQSHVEDLYVEGLPEGIPFRRPSTYGIPRLERILLAKERIRFVIKKHELLNSTREDLQLDKPASGVKEEWYARITKLRKMVDQLFCKKFAEALGSTEAKAVPYQKFEAHPNDLYVEGLPENIPFRSPSWYGIPRLEKIIQVGNRIKFVIKRPELLTHSTTEVTQPRTNTPAQALGLTEAVKVPYPVFESNPEFLYVEGLPEGIPFRSPTWFGIPRLERIVRGSNKIKFVVKKPELVISYLPPGMASKINTKALQSPKRPRSPGSNSKVPEIEVTVEGPNNNNPQTSAVRTPTQTNGSNVPFKPRGREFSFEAWNAKITDLKQKVENLFNEKCGEALGLKQAVKVPFALFESFPEDFYVEGLPEGVPFRRPSTFGIPRLEKILRNKAKIKFIIKKPEMFETAIKESTSSKSPPRKINSSPNVNTTASGVEDLNIIQVTIPDDDNERLSKVEKARQLREQVNDLFSRKFGEAIGMGFPVKVPYRKITINPGCVVVDGMPPGVSFKAPSYLEISSMRRILDSAEFIKFTVIR

SEQ ID NO: 4146 - DNA, 7905 bp, Homo sapiens
aaaaaaaaaaaaaaaaaaaaaaaaaaaagaaaaaagaaaaaaaaaaggaggaggaggaggagggtgagagagaagctgggagagcagagaaaaggggccaccggtcgcccccccgcttccccgcacgcgctctccagccgcggccgcccgcctgccgcggtcaccccggcctctgcctctgtcccccagtgatcggatcaaggcgctgagcgaggccctgcctgcggggcggccatgcggcggtgacaggagcgcgaccgacacgcacgggcccctcgccccctctcgcctcccgtccgctcgccagctcccctcagccgaggctgctccgcggcggccgcagcccgcgcgcggcccacactcgcctcccctcggcacccccggccccggagctgcctggaggcggccgcactcggtgtaaagaactggccaagtccaaagccgaagtggcctgcattgcagtgtatgaaacagacgtgtttgtcgtcggaactgaaagaggacgtgcttttgtcaataccagaaaggattttcaaaaagattttgtaaaatattgtgttgaagaagaagaaaaagctgcagagatgcataaaatgaaatctacaacccaggcaaatcggatgagtgtagatgctgtagaaattgaaacactcagaaaaacagttgaggactatttctgcttttgctatgggaaagctttaggcaaatccacagtggtacctgtaccatatgagaagatgctgcgagaccagtcggctgtggtagtgcaggggcttccggaaggtgttgcctttaaacaccccgagaactatgatcttgcaaccctgaaatggattttggagaacaaagcagggatttcattcatcattaagagaccttttttagagccaaagaagcatgtaggtggtcgtgtgatggtaacagatgctgacaggtcaatactatctccaggtggaagttgtggccccatcaaagtgaaaactgaacccacagaagattctggaagccaccattcttcagagggcaatgaaggcacagaaatggaagtaccagcagaagattctactcaacatgtcccttcagaaacaagtgaggaccctgaagttgaggtgactattgaagatgatgattattctccaccgtctaagagaccaaaggccaatgagctaccgcagccaccagtcccggaacccgccaatgctgggaagcggaaagtgagggagttcaacttcgagaaatggaatgctcgcatcactgatctacgtaaacaagttgaagaattgtttgaaaggaaatatgctcaagccataaaagccaaaggtccggtgacgatcccgtaccctcttttccagtctcatgttgaagatctttatgtagaaggacttcctgaaggaattccttttagaaggccatctacttacggaattcctcgcctggagaggatattacttgcaaaggaaaggattcgttttgtgattaagaaacatgagcttctgaattcaacacgtgaagatttacagcttgataagccagcttcaggagtaaaggaagaatggtatgccagaatcactaaattaagaaagatggtggatcagcttttctgcaaaaaatttgcggaagccttggggagcactgaagccaaggctgtaccgtaccaaaaatttgaggcacacccgaatgatctgtacgtggaaggactgccagaaaacattcctttccgaagtccctcatggtatggaatcccaaggctggaaaaaatcattcaagtgggcaatcgaattaaatttgttattaaaagaccagaacttctgactcacagtaccactgaagttactcagccaagaacgaatacaccagtcaaagaagattggaatgtcagaattaccaagctacggaagcaagtggaagagatttttaatttgaaatttgcttagatttgttgacagcggtttcctggagtgctgtcttgagaacgattctgaggaggctcagcaagaaagagtgtttcagttgattgggtgtgtctgtcatggagaaggaactcaagctcttggactcaccgaggcagtaaaagtaccatatcctgtgtttgaatcaaacccggagttcttgtatgtggaaggcttgccagaggggattcccttccgaagccctacctggtttggaattccacgacttgaaaggatcgtccgcgggagtaataaaatcaagttcgttgttaaaaaacctgaactagttatttcctacttgcctcctgggatggctagtaaaataaacactaaagctttgcagtcccccaaaagaccacgaagtcctgggagtaattcaaaggttcctgaaattgaggtcaccgtggaaggccctaataacaacaatcctcaaacctcagctgttcgaaccccgacccagactaacggttctaacgttcccttcaagccacgagggagagagttttcctttgaggcctggaatgccaaaatcacggacctaaaacagaaagttgaaaatctcttcaatgagaaatgtggggaagctcttggccttaaacaagctgtgaaggtgccgttcgcgttatttgagtctttcccggaagacttttatgtggaaggcttacctgagggtgtgccattccgaagaccatcgacttttggcattccgaggctggagaagatactcagaaacaaagccaaaattaagttcatcattaaaaagcccgaaatgtttgagacggcgattaaggagagcacctcctctaagagccctcccagaaaaataaattcatcacccaatgttaatactactgcatcaggtgttgaagaccttaacatcattcaggtgacaattccagatgatgataatgaaagactctcgaaagttgaaaaagctagacagctaagagaacaagtgaatgacctctttagtcggaaatttggtgaagctattggtatgggttttcctgtgaaagttccctacaggaaaatcacaattaaccctggctgtgtggtggttgatggcatgcccccgggggtgtccttcaaagcccccagctacctggaaatcagctccatgagaaggatcttagactctgccgagtttatcaaattcacggtcattaggtaagtgagagtttcctgcttagtcacaggagcgaatctggagctcatgaggctgactcttctaaaatgcagccacaggtagtcatcgaatccggcttcctatgctgtgcaatcaacaaatcaaaataacttgtgtcatcattagaatgtcagatgtgcttctacgaactaagctgactcttttaattctttggcaaagggttggcaaactaggactgtttgccaaattcaggctgcctcctatttttagagtcttcctgaaacacagctacacccgtattatccatggctgctttcctgtcacagtgagtaagtagctgggactgagaaggcatggcctccaaagtctaaaatatttactctctagcactttgtagaaaaaccttagctaggcacagtggctaacgcctgtaatcccagcattttgggaggccaaggcaggcagatcacctgaggtcaggagttccagaccagcctggccaacatggtgaaatcccatctctacaaaaataaaacagttagctgggcatgatggcgggtgcctgtaatcccagctactcgggaggctgaggcaggatagtcgcttgaacccaggaggtggaggttgcaatgagccaagatcatgccactgcactccagcctggacgacagagtgagactccatcacaagaaaaaaagaactttgtcaacctctgtcttagggcgccttgtcacaggcttcgggtcagacggattcaaccttgcatcagccatttgttagccaggtcactctgttctttgtctgtaaatgagattgatcgttgttcccactgagagtgtcagctccttcccgtagagcaggcatgatgattgtactcacctctgacaccattgtgagtgccacattccttcccacgtccttgtcactgtaagagatgcccacctgagcaccaaccccaggttatcttcccctttgtcttccagccccccagaaacagctacgactcaacctacccaatcatttcatcatcagattgccactgtctctagttcaggtctcttgggactggcactcagaaatctcataataaatcctcttgaggcttctcatacactcgtcttcttccaatcttctttccctcaaaatctcatattttggttccacttcacccaccgtcattctccatatcactcccaggagttaggcaaaaagccccttccgttcttccgtatgttaaacttagaatcactctgttccctgctctgcgtttctattttttgtttttcctccatttactagtagcttaacactttctaacagtgttcttattattgatacgtatctatctcttccataagcttataaggtcacggataatacttctcattgtagtacgtaaatgacgtgggctagatatgagttgaataaacagttatacctgtaaattcttacagagtgaaaataaattgttatactttacaatttgtttctctctttagaccatttccaggacttgtgattaataaccgtgagtattttgtgaagtgttttgtttttgttttttcctggggtctgacgtgtgtgcgtgtgagtgtgtatacatgcttaacgtatatcacgttacttcacctatgtcagtaaccaggccaaatacttgttttagccctcagtaaaaacaccaggcacttcctagttgtaaaattattcaagcttcttaacttcctatcctcgatgcacttaatcataaaatggtaataatagcaccgattttgggggagtcgttccagtagatggaaagcatctggaacaggtgtcagcaagctcctgccgacgtgtatgcataaagttttattgaaaccaccatcgtgtccatttgtttatggcagaactgagagatggcagcagcaagtgtgtgcctgcaaaacctaaaatatttactaattggctctgcaagaaaagagtttgcatccccctaacctagaacagtgtctagcctctagtatgtgtttagcctacagtatgtgctcagcgaatacaatctatatttattactgcttttatgactgttataattactgtgcttggatttcgttacaaagtaagtcacaatgtgcctgcttctgttagtatttcagcacagtgcctggcacacatggggctctcaaatattgctgagcgagtgaacaaatgtcctttcaattccttaacgttgatgtcattttcaatagtattttgagccaaacttaattttgcgagtgtgttttgttttcttaactttattattaaaaatgtataaaagtgaggccaggcgtggtggctcacgcctgtaatcccagcagtttgggaggctgaggcaggcggatcagttgaggttgggagttggagaccagcccgtccaacatggtgaaagcctgtctctactaaaaatacaaaaatcagctgggtgtggtggcgcgtgcctgtaatcccagctactcaggaggctgaggcaggagagttgcttgaatcctagaggtggaggttgcagtgagctgagatcgtgccattgcactccagcctgggcaacaagagcaaaactctgtcccaataaataaataaataaaatgttctcttttgttcctgttcttgtgcggtagtgtggtatagagttttatggtaattactgtgaattagtgattctgagggacatatcagaactctgaggtttgtttccttctcatcttgagggaaacagcaaatgtatgttaaaatgcttttccaagggaacaacacatccttacattatttaaaccaatctgcttcattttcagagctggttgatcagagtgagtcagaaggccccgtgatacaagaatcagctgaaccaagccagttggaagttccagccacagaagaaataaaagagactgatggaagctctcagatcaagcaagaaccagaccccacgtggtagacctcttccctcctagggtaaatcagcttctgtgtcagggatgctgtgtggtgtccatctgaaccccctgcatacgcgtagctaatgtgatctccccactttcacataagatggtggccctgccttcagggaatgtgggagccaggtgggagccttcccggatatttaagctagaagattctacagggagattctccttggatcaatatatgtctctcagtcaaagatgtaaaagcacttttgccttaaaaagaatgttctgtttctaaatagagtcaacgttgtcctcctcattggaattcactatgagtcagaatcattagactgacttttttttttccatagtaatagtattttgcagagtctcacagagctgcagatcttttgttcatcttgcagagttaacaagtctgatcctgttagtccagatttcttaaatttggccaagttataataggagcagtagcttgagacccgaagtcaggaaactttgacaatggatttttttttttaatccagagacttgtactggaatttgccttaccctgtcagctcatggacttaaggtttcatcccgctttatgagtgcttctgaatccaagtcattgttacctgaatttgcaaattaagttgtgatattcgtgactgttaaattcctgtaattagattaacctctttgcttgcttgtttgttttctctcctattttagcttaaagtatcagtggttgagaagagcttttcggacctgttactaccccaagctgtgtaatatacttgtataacagaaataccttctatacaaacctttttttctacttttagatagaaatgtctactttttcagcagttctgtgaattaaagagcagagtgactgtgggtctggaatggctggtgtacttgggaatgtactatcaggattttacagcaatgctgggaaatgacagggaaaatgacaggaatgaatctcaccagattttttatgtactcagcagagccttgagttacggtgtttattttccaatcaagtgaagatatctcctacttctcctactggaacatctcagcttctgcagtgaagaaaaattcctgtgatagttcagttctttagtttttctatttgaaaaaaaaaaatcatttaaatgatcctttgttcacggctctccttaatgactgagtgaacagttcctatctgtatatttgactaaaccttttcctaagctatctctcatggttcctatgtttttttatcataattaaaagcaaaaccatctggatcacctaacagtcagaggtcagtatctcagcgtgtgaattatagaggaaatacagagagaacctcttccacttttacttttcgtccaaataaaatgcatggtgtaccagaagttgaagatcgggttgaggattggggctagctcgatgacactaaggccccaacatcgcgggacctgctgtggcgcggattcttaggaacgctgttctagccggccccctctccaggggtcgccgtggccggcattatttcctagttcttcttgtaaccctgaggtgccagcgcggggagtgaggaggggtcagggggctaaggatgcaacctctgacgttctgcgccttcctaggagagtcttacatgtgttgagatttcacaagcaatgcgagttgtaaaataccagctctacaagaagctaggctctgtgacggcatagttttcagtagctttatcacaatattcacaatggagaattatatgacatggtagcagaaataggcccttttatgtgttgcttctattttacctcaaattgtagatatagggtaatcaataaaatccatccatgcctttcacacactaagt

SEQ ID NO: 4147 - protein, 449 aa, Homo sapiens
MHKMKSTTQANRMSVDAVEIETLRKTVEDYFCFCYGKALGKSTVVPVPYEKMLRDQSAVVVQGLPEGVAFKHPENYDLATLKWILENKAGISFIIKRPFLEPKKHVGGRVMVTDADRSILSPGGSCGPIKVKTEPTEDSGSHHSSEGNEGTEMEVPAEDSTQHVPSETSEDPEVEVTIEDDDYSPPSKRPKANELPQPPVPEPANAGKRKVREFNFEKWNARITDLRKQVEELFERKYAQAIKAKGPVTIPYPLFQSHVEDLYVEGLPEGIPFRRPSTYGIPRLERILLAKERIRFVIKKHELLNSTREDLQLDKPASGVKEEWYARITKLRKMVDQLFCKKFAEALGSTEAKAVPYQKFEAHPNDLYVEGLPENIPFRSPSWYGIPRLEKIIQVGNRIKFVIKRPELLTHSTTEVTQPRTNTPVKEDWNVRITKLRKQVEEIFNLKFA

SEQ ID NO: 4148 - DNA, 4466 bp, Homo sapiens
aaaaaaaaaaaaaaaaaaaaaaaaaaaagaaaaaagaaaaaaaaaaggaggaggaggaggagggtgagagagaagctgggagagcagagaaaaggggccaccggtcgcccccccgcttccccgcacgcgctctccagccgcggccgcccgcctgccgcggtcaccccggcctctgcctctgtcccccagtgatcggatcaaggcgctgagcgaggccctgcctgcggggcggccatgcggcggtgacaggagcgcgaccgacacgcacgggcccctcgccccctctcgcctcccgtccgctcgccagctcccctcagccgaggctgctccgcggcggccgcagcccgcgcgcggcccacactcgcctcccctcggcacccccggccccggagctgcctggaggcggccgcactcggggatcatggcccaagttgcaatgtccaccctccccgttgaagatgaggagtcctcggagagcaggatggtggtgacattcctcatgtcagctctcgagtccatgtgtaaagaactggccaagtccaaagccgaagtggcctgcattgcagtgtatgaaacagacgtgtttgtcgtcggaactgaaagaggacgtgcttttgtcaataccagaaaggattttcaaaaagattttgtaaaatattgtgttgaagaagaagaaaaagctgcagagatgcataaaatgaaatctacaacccaggcaaatcggatgagtgtagatgctgtagaaattgaaacactcagaaaaacagttgaggactatttctgcttttgctatgggaaagctttaggcaaatccacagtggtacctgtaccatatgagaagatgctgcgagaccagtcggctgtggtagtgcaggggcttccggaaggtgttgcctttaaacaccccgagaactatgatcttgcaaccctgaaatggattttggagaacaaagcagggatttcattcatcattaagagaccttttttagagccaaagaagcatgtaggtggtcgtgtgatggtaacagatgctgacaggtcaatactatctccaggtggaagttgtggccccatcaaagtgaaaactgaacccacagaagattctggcatttccctggaaatggcagctgtgacagtaaaggaagaatcagaagatcctgattattatcaatataacattcaagcaggcccttctgaaactgatgatgttgatgaaaaacagcccctatcgaagcctttgcaaggaagccaccattcttcagagggcaatgaaggcacagaaatggaagtaccagcagaagattctactcaacatgtcccttcagaaacaagtgaggaccctgaagttgaggtgactattgaagatgatgattattctccaccgtctaagagaccaaaggccaatgagctaccgcagccaccagtcccggaacccgccaatgctgggaagcggaaagtgagggagttcaacttcgagaaatggaatgctcgcatcactgatctacgtaaacaagttgaagaattgtttgaaaggaaatatgctcaagccataaaagccaaaggtccggtgacgatcccgtaccctcttttccagtctcatgttgaagatctttatgtagaaggacttcctgaaggaattccttttagaaggccatctacttacggaattcctcgcctggagaggatattacttgcaaaggaaaggattcgttttgtgattaagaaacatgagcttctgaattcaacacgtgaagatttacagcttgataagccagcttcaggagtaaaggaagaatggtatgccagaatcactaaattaagaaagatggtggatcagcttttctgcaaaaaatttgcggaagccttggggagcactgaagccaaggctgtaccgtaccaaaaatttgaggcacacccgaatgatctgtacgtggaaggactgccagaaaacattcctttccgaagtccctcatggtatggaatcccaaggctggaaaaaatcattcaagtgggcaatcgaattaaatttgttattaaaagaccagaacttctgactcacagtaccactgaagttactcagccaagaacgaatacaccagtcaaagaagattggaatgtcagaattaccaagctacggaagcaagtggaagagatttttaatttgaaatttgcttagatttgttgacagcggtttcctggagtgctgtcttgagaacgattctgaggaggctcagcaagaaagagtgtttcagttgattgggtgtgtctgtcatggagaaggaactcaagctcttggactcaccgaggcagtaaaagtaccatatcctgtgtttgaatcaaacccggagttcttgtatgtggaaggcttgccagaggggattcccttccgaagccctacctggtttggaattccacgacttgaaaggatcgtccgcgggagtaataaaatcaagttcgttgttaaaaaacctgaactagttatttcctacttgcctcctgggatggctagtaaaataaacactaaagctttgcagtcccccaaaagaccacgaagtcctgggagtaattcaaaggttcctgaaattgaggtcaccgtggaaggccctaataacaacaatcctcaaacctcagctgttcgaaccccgacccagactaacggttctaacgttcccttcaagccacgagggagagagttttcctttgaggcctggaatgccaaaatcacggacctaaaacagaaagttgaaaatctcttcaatgagaaatgtggggaagctcttggccttaaacaagctgtgaaggtgccgttcgcgttatttgagtctttcccggaagacttttatgtggaaggcttacctgagggtgtgccattccgaagaccatcgacttttggcattccgaggctggagaagatactcagaaacaaagccaaaattaagttcatcattaaaaagcccgaaatgtttgagacggcgattaaggagagcacctcctctaagagccctcccagaaaaataaattcatcacccaatgttaatactactgcatcaggtgttgaagaccttaacatcattcaggtgacaattccagatgatgataatgaaagactctcgaaagttgaaaaagctagacagctaagagaacaagtgaatgacctctttagtcggaaatttggtgaagctattggtatgggttttcctgtgaaagttccctacaggaaaatcacaattaaccctggctgtgtggtggttgatggcatgcccccgggggtgtccttcaaagcccccagctacctggaaatcagctccatgagaaggatcttagactctgccgagtttatcaaattcacggtcattagaccatttccaggacttgtgattaataaccagctggttgatcagagtgagtcagaaggccccgtgatacaagaatcagctgaaccaagccagttggaagttccagccacagaagaaataaaagagactgatggaagctctcagatcaagcaagaaccagaccccacgtggtagacctcttccctcctaggcttaaagtatcagtggttgagaagagcttttcggacctgttactaccccaagctgtagccttgagttacggtgtttattttccaatcaagtgaagatatctcctacttctcctactggaacatctcagcttctgcagtgaagaaaaattcctgtgatagttcagttctttagtttttctatttgaaaaaaaaaaatcatttaaatgatcctttgttcacggctctccttaatgactgagtgaacagttcctatctgtatatttgactaaaccttttcctaagctatctctcatggttcctatgtttttttatcataattaaaagcaaaaccatctggatcacctaacagtcagaggtcagtatctcagcgtgtgaattatagaggaaatacagagagaacctcttccacttttacttttcgtccaaataaaatgcatggtgtaccagaagttgaagatcgggttgaggattggggctagctcgatgacactaaggccccaacatcgcgggacctgctgtggcgcggattcttaggaacgctgttctagccggccccctctccaggggtcgccgtggccggcattatttcctagttcttcttgtaaccctgaggtgccagcgcggggagtgaggaggggtcagggggctaaggatgcaacctctgacgttctgcgccttcctaggagagtcttacatgtgttgagatttcacaagcaatgcgagttgtaaaataccagctctacaagaagctaggctctgtgacggcatagttttcagtagctttatcacaatattcacaatggagaattatatgacatggtagcagaaataggcccttttatgtgttgcttctattttacctcaaattgtagatatagggtaatcaataaaatccatccatgcctttcacacactaagt

SEQ ID NO: 4149 - protein, 584 aa, Homo sapiens; identical to SEQ ID NO: 4053

SEQ ID NO: 4150 - DNA, 5020 bp, Homo sapiens
aaaaaaaaaaaaaaaaaaaaaaaaaaaagaaaaaagaaaaaaaaaaggaggaggaggaggagggtgagagagaagctgggagagcagagaaaaggggccaccggtcgcccccccgcttccccgcacgcgctctccagccgcggccgcccgcctgccgcggtcaccccggcctctgcctctgtcccccagtgatcggatcaaggcgctgagcgaggccctgcctgcggggcggccatgcggcggtgacaggagcgcgaccgacacgcacgggcccctcgccccctctcgcctcccgtccgctcgccagctcccctcagccgaggctgctccgcggcggccgcagcccgcgcgcggcccacactcgcctccccgttgaagatgaggagtcctcggagagcaggatggtggtgacattcctcatgtcagctctcgagtccatgtgtaaagaactggccaagtccaaagccgaagtggcctgcattgcagtgtatgaaacagacgtgtttgtcgtcggaactgaaagaggacgtgcttttgtcaataccagaaaggattttcaaaaagattttgtaaaatattgtgttgaagaagaagaaaaagctgcagagatgcataaaatgaaatctacaacccaggcaaatcggatgagtgtagatgctgtagaaattgaaacactcagaaaaacagttgaggactatttctgcttttgctatgggaaagctttaggcaaatccacagtggtacctgtaccatatgagaagatgctgcgagaccagtcggctgtggtagtgcaggggcttccggaaggtgttgcctttaaacaccccgagaactatgatcttgcaaccctgaaatggattttggagaacaaagcagggatttcattcatcattaagagaccttttttagagccaaagaagcatgtaggtggtcgtgtgatggtaacagatgctgacaggtcaatactatctccaggtggaagttgtggccccatcaaagtgaaaactgaacccacagaagattctggcatttccctggaaatggcagctgtgacagtaaaggaagaatcagaagatcctgattattatcaatataacattcaaggaagccaccattcttcagagggcaatgaaggcacagaaatggaagtaccagcagaagatgatgattattctccaccgtctaagagaccaaaggccaatgagctaccgcagccaccagtcccggaacccgccaatgctgggaagcggaaagtgagggagttcaacttcgagaaatggaatgctcgcatcactgatctacgtaaacaagttgaagaattgtttgaaaggaaatatgctcaagccataaaagccaaaggtccggtgacgatcccgtaccctcttttccagtctcatgttgaagatctttatgtagaaggacttcctgaaggaattccttttagaaggccatctacttacggaattcctcgcctggagaggatattacttgcaaaggaaaggattcgttttgtgattaagaaacatgagcttctgaattcaacacgtgaagatttacagcttgataagccagcttcaggagtaaaggaagaatggtatgccagaatcactaaattaagaaagatggtggatcagcttttctgcaaaaaatttgcggaagccttggggagcactgaagccaaggctgtaccgtaccaaaaatttgaggcacacccgaatgatctgtacgtggaaggactgccagaaaacattcctttccgaagtccctcatggtatggaatcccaaggctggaaaaaatcattcaagtgggcaatcgaattaaatttgttattaaaagaccagaacttctgactcacagtaccactgaagttactcagccaagaacgaatacaccagtcaaagaagattggaatgtcagaattaccaagctacggaagcaagtggaagagatttttaatttgaaatttgctcaagctcttggactcaccgaggcagtaaaagtaccatatcctgtgtttgaatcaaacccggagttcttgtatgtggaaggcttgccagaggggattcccttccgaagccctacctggtttggaattccacgacttgaaaggatcgtccgcgggagtaataaaatcaagttcgttgttaaaaaacctgaactagttatttcctacttgcctcctgggatggctagtaaaataaacactaaagctttgcagtcccccaaaagaccacgaagtcctgggagtaattcaaaggttcctgaaattgaggtcaccgtggaaggccctaataacaacaatcctcaaacctcagctgttcgaaccccgacccagactaacggttctaacgttcccttcaagccacgagggagagagttttcctttgaggcctggaatgccaaaatcacggacctaaaacagaaagttgaaaatctcttcaatgagaaatgtggggaagctcttggccttaaacaagctgtgaaggtgccgttcgcgttatttgagtctttcccggaagacttttatgtggaaggcttacctgagggtgtgccattccgaagaccatcgacttttggcattccgaggctggagaagatactcagaaacaaagccaaaattaagttcatcattaaaaagcccgaaatgtttgagacggcgattaaggagagcacctcctctaagagccctcccagaaaaataaattcatcacccaatgttaatactactgcatcaggtgttgaagaccttaacatcattcaggtgacaattccagatgatgataatgaaagactctcgaaagttgaaaaagctagacagctaagagaacaagtgaatgacctctttagtcggaaatttggtgaagctattggtatgggttttcctgtgaaagttccctacaggaaaatcacaattaaccctggctgtgtggtggttgatggcatgcccccgggggtgtccttcaaagcccccagctacctggaaatcagctccatgagaaggatcttagactctgccgagtttatcaaattcacggtcattagaccatttccaggacttgtgattaataaccagctggttgatcagagtgagtcagaaggccccgtgatacaagaatcagctgaaccaagccagttggaagttccagccacagaaggtaaaaggacctcttccctcctagggtaaatcagcttctgtgtcagggatgctgtgtggtgtccatctgaaccccctgcatacgcgtagctaatgtgatctccccactttcacataagatggtggccctgccttcagggaatgtgggagccaggtgggagccttcccggatatttaagctagaagattctacagggagattctccttggatcaatatatgtctctcagtcaaagatgtaaaagcacttttgccttaaaaagaatgttctgtttctaaatagagtcaacgttgtcctcctcattggaattcactatgagtcagaatcattagactgacttttttttttccatagtaatagtattttgcagagtctcacagagctgcagatcttttgttcatcttgcagagttaacaagtctgatcctgttagtccagatttcttaaatttggccaagttataataggagcagtagcttgagacccgaagtcaggaaactttgacaatggatttttttttttaatccagagacttgtactggaatttgccttaccctgtcagctcatggacttaaggtttcatcccgctttatgagtgcttctgaatccaagtcattgttacctgaatttgcaaattaagttgtgatattcgtgactgttaaattcctgtaattagattaacctctttgcttgcttgtttgttttctctcctattttagcttaaagtatcagtggttgagaagagcttttcggacctgttactaccccaagctgtgtaatatacttgtataacagaaataccttctatacaaacctttttttctacttttagatagaaatgtctactttttcagcagttctgtgaattaaagagcagagtgactgtgggtctggaatggctggtgtacttgggaatgtactatcaggattttacagcaatgctgggaaatgacagggaaaatgacaggaatgaatctcaccagattttttatgtactcagcagagccttgagttacggtgtttattttccaatcaagtgaagatatctcctacttctcctactggaacatctcagcttctgcagtgaagaaaaattcctgtgatagttcagttctttagtttttctatttgaaaaaaaaaaatcatttaaatgatcctttgttcacggctctccttaatgactgagtgaacagttcctatctgtatatttgactaaaccttttcctaagctatctctcatggttcctatgtttttttatcataattaaaagcaaaaccatctggatcacctaacagtcagaggtcagtatctcagcgtgtgaattatagaggaaatacagagagaacctcttccacttttacttttcgtccaaataaaatgcatggtgtaccagaagttgaagatcgggttgaggattggggctagctcgatgacactaaggccccaacatcgcgggacctgctgtggcgcggattcttaggaacgctgttctagccggccccctctccaggggtcgccgtggccggcattatttcctagttcttcttgtaaccctgaggtgccagcgcggggagtgaggaggggtcagggggctaaggatgcaacctctgacgttctgcgccttcctaggagagtcttacatgtgttgagatttcacaagcaatgcgagttgtaaaataccagctctacaagaagctaggctctgtgacggcatagttttcagtagctttatcacaatattcacaatggagaattatatgacatggtagcagaaataggcccttttatgtgttgcttctattttacctcaaattgtagatatagggtaatcaataaaatccatccatgcctttcacacactaagt

SEQ ID NO: 4151 - protein, 927 aa, Homo sapiens
MVVTFLMSALESMCKELAKSKAEVACIAVYETDVFVVGTERGRAFVNTRKDFQKDFVKYCVEEEEKAAEMHKMKSTTQANRMSVDAVEIETLRKTVEDYFCFCYGKALGKSTVVPVPYEKMLRDQSAVVVQGLPEGVAFKHPENYDLATLKWILENKAGISFIIKRPFLEPKKHVGGRVMVTDADRSILSPGGSCGPIKVKTEPTEDSGISLEMAAVTVKEESEDPDYYQYNIQGSHHSSEGNEGTEMEVPAEDDDYSPPSKRPKANELPQPPVPEPANAGKRKVREFNFEKWNARITDLRKQVEELFERKYAQAIKAKGPVTIPYPLFQSHVEDLYVEGLPEGIPFRRPSTYGIPRLERILLAKERIRFVIKKHELLNSTREDLQLDKPASGVKEEWYARITKLRKMVDQLFCKKFAEALGSTEAKAVPYQKFEAHPNDLYVEGLPENIPFRSPSWYGIPRLEKIIQVGNRIKFVIKRPELLTHSTTEVTQPRTNTPVKEDWNVRITKLRKQVEEIFNLKFAQALGLTEAVKVPYPVFESNPEFLYVEGLPEGIPFRSPTWFGIPRLERIVRGSNKIKFVVKKPELVISYLPPGMASKINTKALQSPKRPRSPGSNSKVPEIEVTVEGPNNNNPQTSAVRTPTQTNGSNVPFKPRGREFSFEAWNAKITDLKQKVENLFNEKCGEALGLKQAVKVPFALFESFPEDFYVEGLPEGVPFRRPSTFGIPRLEKILRNKAKIKFIIKKPEMFETAIKESTSSKSPPRKINSSPNVNTTASGVEDLNIIQVTIPDDDNERLSKVEKARQLREQVNDLFSRKFGEAIGMGFPVKVPYRKITINPGCVVVDGMPPGVSFKAPSYLEISSMRRILDSAEFIKFTVIRPFPGLVINNQLVDQSESEGPVIQESAEPSQLEVPATEGKRTSSLLG

SEQ ID NO: 4152 - DNA, 7058 bp, Homo sapiens
aaaaaaaaaaaaaaaaaaaaaaaaaaaagaaaaaagaaaaaaaaaaggaggaggaggaggagggtgagagagaagctgggagagcagagaaaaggggccaccggtcgcccccccgcttccccgcacgcgctctccagccgcggccgcccgcctgccgcggtcaccccggcctctgcctctgtcccccagtgatcggatcaaggcgctgagcgaggccctgcctgcggggcggccatgcggcggtgacaggagcgcgaccgacacgcacgggcccctcgccccctctcgcctcccgtccgctcgccagctcccctcagccgaggctgctccgcggcggccgcagcccgcgcgcggcccacactcgcctccccgttgaagatgaggagtcctcggagagcaggatggtggtgacattcctcatgtcagctctcgagtccatgtgtaaagaactggccaagtccaaagccgaagtggcctgcattgcagtgtatgaaacagacgtgtttgtcgtcggaactgaaagaggacgtgcttttgtcaataccagaaaggattttcaaaaagattttgtaaaatattgtgttgaagaagaagaaaaagctgcagagatgcataaaatgaaatctacaacccaggcaaatcggatgagtgtagatgctgtagaaattgaaacactcagaaaaacagttgaggactatttctgcttttgctatgggaaagctttaggcaaatccacagtggtacctgtaccatatgagaagatgctgcgagaccagtcggctgtggtagtgcaggggcttccggaaggtgttgcctttaaacaccccgagaactatgatcttgcaaccctgaaatggattttggagaacaaagcagggatttcattcatcattaagagaccttttttagagccaaagaagcatgtaggtggtcgtgtgatggtaacagatgctgacaggtcaatactatctccaggtggaagttgtggccccatcaaagtgaaaactgaacccacagaagattctggaagccaccattcttcagagggcaatgaaggcacagaaatggaagtaccagcagaagattctactcaacatgtcccttcagaaacaagtgaggaccctgaagttgaggtgactattgaagatgatgattattctccaccgtctaagagaccaaaggccaatgagctaccgcagccaccagtcccggaacccgccaatgctgggaagcggaaagtgagggagttcaacttcgagaaatggaatgctcgcatcactgatctacgtaaacaagttgaagaattgtttgaaaggaaatatgctcaagccataaaagccaaaggtccggtgacgatcccgtaccctcttttccagtctcatgttgaagatctttatgtagaaggacttcctgaaggaattccttttagaaggccatctacttacggaattcctcgcctggagaggatattacttgcaaaggaaaggattcgttttgtgattaagaaacatgagcttctgaattcaacacgtgaagatttacagcttgataagccagcttcaggagtaaaggaagaatggtatgccagaatcactaaattaagaaagatggtggatcagcttttctgcaaaaaatttgcggaagccttggggagcactgaagccaaggctgtaccgtaccaaaaatttgaggcacacccgaatgatctgtacgtggaaggactgccagaaaacattcctttccgaagtccctcatggtatggaatcccaaggctggaaaaaatcattcaagtgggcaatcgaattaaatttgttattaaaagaccagaacttctgactcacagtaccactgaagttactcagccaagaacgaatacaccagtcaaagaagattggaatgtcagaattaccaagctacggaagcaagtggaagagatttttaatttgaaatttgctcaagctcttggactcaccgaggcagtaaaagtaccatatcctgtgtttgaatcaaacccggagttcttgaaaggatcgtccgcgggagtaataaaatcaagttcgttgttaaaaaacctgaactagttatttcctacttgcctcctgggatggctagtaaaataaacactaaagctttgcagtcccccaaaagaccacgaagtcctgggagtaattcaaaggttcctgaaattgaggtcaccgtggaaggccctaataacaacaatcctcaaacctcagctgttcgaaccccgacccagactaacggttctaacgttcccttcaagccacgagggagagagttttcctttgaggcctggaatgccaaaatcacggacctaaaacagaaagttgaaaatctcttcaatgagaaatgtggggaagctcttggccttaaacaagctgtgaaggtgccgttcgcgttatttgagtctttcccggaagacttttatgtggaaggcttacctgagggtgtgccattccgaagaccatcgacttttggcattccgaggctggagaagatactcagaaacaaagccaaaattaagttcatcattaaaaagcccgaaatgtttgagacggcgattaaggagagcacctcctctaagagccctcccagaaaaataaattcatcacccaatgttaatactactgcatcaggtgttgaagaccttaacatcattcaggtgacaattccagatgatgataatgaaagactctcgaaagttgaaaaagctagacagctaagagaacaagtgaatgacctctttagtcggaaatttggtgaagctattggtatgggttttcctgtgaaagttccctacaggaaaatcacaattaaccctggctgtgtggtggttgatggcatgcccccgggggtgtccttcaaagcccccagctacctggaaatcagctccatgagaaggatcttagactctgccgagtttatcaaattcacggtcattaggtaagtgagagtttcctgcttagtcacaggagcgaatctggagctcatgaggctgactcttctaaaatgcagccacaggtagtcatcgaatccggcttcctatgctgtgcaatcaacaaatcaaaataacttgtgtcatcattagaatgtcagatgtgcttctacgaactaagctgactcttttaattctttggcaaagggttggcaaactaggactgtttgccaaattcaggctgcctcctatttttagagtcttcctgaaacacagctacacccgtattatccatggctgctttcctgtcacagtgagtaagtagctgggactgagaaggcatggcctccaaagtctaaaatatttactctctagcactttgtagaaaaaccttagctaggcacagtggctaacgcctgtaatcccagcattttgggaggccaaggcaggcagatcacctgaggtcaggagttccagaccagcctggccaacatggtgaaatcccatctctacaaaaataaaacagttagctgggcatgatggcgggtgcctgtaatcccagctactcgggaggctgaggcaggatagtcgcttgaacccaggaggtggaggttgcaatgagccaagatcatgccactgcactccagcctggacgacagagtgagactccatcacaagaaaaaaagaactttgtcaacctctgtcttagggcgccttgtcacaggcttcgggtcagacggattcaaccttgcatcagccatttgttagccaggtcactctgttctttgtctgtaaatgagattgatcgttgttcccactgagagtgtcagctccttcccgtagagcaggcatgatgattgtactcacctctgacaccattgtgagtgccacattccttcccacgtccttgtcactgtaagagatgcccacctgagcaccaaccccaggttatcttcccctttgtcttccagccccccagaaacagctacgactcaacctacccaatcatttcatcatcagattgccactgtctctagttcaggtctcttgggactggcactcagaaatctcataataaatcctcttgaggcttctcatacactcgtcttcttccaatcttctttccctcaaaatctcatattttggttccacttcacccaccgtcattctccatatcactcccaggagttaggcaaaaagccccttccgttcttccgtatgttaaacttagaatcactctgttccctgctctgcgtttctattttttgtttttcctccatttactagtagcttaacactttctaacagtgttcttattattgatacgtatctatctcttccataagcttataaggtcacggataatacttctcattgtagtacgtaaatgacgtgggctagatatgagttgaataaacagttatacctgtaaattcttacagagtgaaaataaattgttatactttacaatttgtttctctctttagaccatttccaggacttgtgattaataaccgtgagtattttgtgaagtgttttgtttttgttttttcctggggtctgacgtgtgtgcgtgtgagtgtgtatacatgcttaacgtatatcacgttacttcacctatgtcagtaaccaggccaaatacttgttttagccctcagtaaaaacaccaggcacttcctagttgtaaaattattcaagcttcttaacttcctatcctcgatgcacttaatcataaaatggtaataatagcaccgattttgggggagtcgttccagtagatggaaagcatctggaacaggtgtcagcaagctcctgccgacgtgtatgcataaagttttattgaaaccaccatcgtgtccatttgtttatggcagaactgagagatggcagcagcaagtgtgtgcctgcaaaacctaaaatatttactaattggctctgcaagaaaagagtttgcatccccctaacctagaacagtgtctagcctctagtatgtgtttagcctacagtatgtgctcagcgaatacaatctatatttattactgcttttatgactgttataattactgtgcttggatttcgttacaaagtaagtcacaatgtgcctgcttctgttagtatttcagcacagtgcctggcacacatggggctctcaaatattgctgagcgagtgaacaaatgtcctttcaattccttaacgttgatgtcattttcaatagtattttgagccaaacttaattttgcgagtgtgttttgttttcttaactttattattaaaaatgtataaaagtgaggccaggcgtggtggctcacgcctgtaatcccagcagtttgggaggctgaggcaggcggatcagttgaggttgggagttggagaccagcccgtccaacatggtgaaagcctgtctctactaaaaatacaaaaatcagctgggtgtggtggcgcgtgcctgtaatcccagctactcaggaggctgaggcaggagagttgcttgaatcctagaggtggaggttgcagtgagctgagatcgtgccattgcactccagcctgggcaacaagagcaaaactctgtcccaataaataaataaataaaatgttctcttttgttcctgttcttgtgcggtagtgtggtatagagttttatggtaattactgtgaattagtgattctgagggacatatcagaactctgaggtttgtttccttctcatcttgagggaaacagcaaatgtatgttaaaatgcttttccaagggaacaacacatccttacattatttaaaccaatctgcttcattttcagagctggttgatcagagtgagtcagaaggccccgtgatacaagaatcagctgaaccaagccagttggaagttccagccacagaagaaataaaagagactgatggaagctctcagatcaagcaagaaccagaccccacgtggtagacctcttccctcctaggcttaaagtatcagtggttgagaagagcttttcggacctgttactaccccaagctgtgtaatatacttgtataacagaaataccttctatacaaacctttttttctacttttagatagaaatgtctactttttcagcagttctgtgaattaaagagcagagtgactgtgggtctggaatggctggtgtacttgggaatgtactatcaggattttacagcaatgctgggaaatgacagggaaaatgacaggaatgaatctcaccagattttttatgtactcagcagagccttgagttacggtgtttattttccaatcaagtgaagatatctcctacttctcctactggaacatctcagcttctgcagtgaagaaaaattcctgtgatagttcagttctttagtttttctatttgaaaaaaaaaaatcatttaaatgatcctttgttcacggctctccttaatgactgagtgaacagttcctatctgtatatttgactaaaccttttcctaagctatctctcatggttcctatgtttttttatcataattaaaagcaaaaccatctggatcacctaacagtcagaggtcagtatctcagcgtgtgaattatagaggaaatacagagagaacctcttccacttttacttttcgtccaaataaaatgcatggtgtaccagaagttgaagatcgggttgaggattggggctagctcgatgacactaaggccccaacatcgcgggacctgctgtggcgcggattcttaggaacgctgttctagccggccccctctccaggggtcgccgtggccggcattatttcctagttcttcttgtaaccctgaggtgccagcgcggggagtgaggaggggtcagggggctaaggatgcaacctctgacgttctgcgccttcctaggagagtcttacatgtgttgagatttcacaagcaatgcgagttgtaaaataccagctctacaagaagctaggctctgtgacggcatagttttcagtagctttatcacaatattcacaatggagaattatatgacatggtagcagaaataggcccttttatgtgttgcttctattttacctcaaattgtagatatagggtaatcaataaaatccatccatgcctttcacacactaagt

SEQ ID NO: 4153 - protein, 559 aa, Homo sapiens; identical to SEQ ID NO: 4121

SEQ ID NO: 4154 - DNA, 4166 bp, Homo sapiens
aaaaaaaaaaaaaaaaaaaaaaaaaaaagaaaaaagaaaaaaaaaaggaggaggaggaggagggtgagagagaagctgggagagcagagaaaaggggccaccggtcgcccccccgcttccccgcacgcgctctccagccgcggccgcccgcctgccgcggtcaccccggcctctgcctctgtcccccagtgatcggatcaaggcgctgagcgaggccctgcctgcggggcggccatgcggcggtgacaggagcgcgaccgacacgcacgggcccctcgccccctctcgcctcccgtccgctcgccagctcccctcagccgaggctgctccgcggcggccgcagcccgcgcgcggcccacactcgcctcccctcggcacccccggccccggagctgcctggaggcggccgcactcggggatcatggcccaagttgcaatgtccaccctccccgttgaagatgaggagtcctcggagagcaggatggtggtgacattcctcatgtcagctctcgagtccatgtgtaaagaactggccaagtccaaagccgaagtggcctgcattgcagtgtatgaaacagacgtgtttgtcgtcggaactgaaagaggacgtgcttttgtcaataccagaaaggattttcaaaaagattttgtaaaatattgtgttgaagaagaagaaaaagctgcagagatgcataaaatgaaatctacaacccaggcaaatcggatgagtgtagatgctgtagaaattgaaacactcagaaaaacagttgaggactatttctgcttttgctatgggaaagctttaggcaaatccacagtggtacctgtaccatatgagaagatgctgcgagaccagtcggctgtggtagtgcaggggcttccggaaggtgttgcctttaaacaccccgagaactatgatcttgcaaccctgaaatggattttggagaacaaagcagggatttcattcatcattaagagaccttttttagagccaaagaagcatgtaggtggtcgtgtgatggtaacagatgctgacaggtcaatactatctccaggtggaagttgtggccccatcaaagtgaaaactgaacccacagaagattctggcatttccctggaaatggcagctgtgacagtaaaggaagaatcagaagatcctgattattatcaatataacattcaaggaagccaccattcttcagagggcaatgaaggcacagaaatggaagtaccagcagaagattctactcaacatgtcccttcagaaacaagtgaggaccctgaagttgaggtgactattgaagatgatgattattctccaccgtctaagagaccaaaggccaatgagctaccgcagccaccagtcccggaacccgccaatgctgggaagcggaaagtgagggagttcaacttcgagaaatggaatgctcgcatcactgatctacgtaaacaagttgaagaattgtttgaaaggaaatatgctcaagccataaaagccaaaggtccggtgacgatcccgtaccctcttttccagtctcatgttgaagatctttatgtagaaggacttcctgaaggaattccttttagaaggccatctacttacggaattcctcgcctggagaggatattacttgcaaaggaaaggattcgttttgtgattaagaaacatgagcttctgaattcaacacgtgaagatttacagcttgataagccagcttcaggagtaaaggaagaatggtatgccagaatcactaaattaagaaagatggtggatcagcttttctgcaaaaaatttgcggaagccttggggagcactgaagccaaggctgtaccgtaccaaaaatttgaggcacacccgaatgatctgtacgtggaaggactgccagaaaacattcctttccgaagtccctcatggtatggaatcccaaggctggaaaaaatcattcaagtgggcaatcgaattaaatttgttattaaaagaccagaacttctgactcacagtaccactgaagttactcagccaagaacgaatacaccagctcaagctcttggactcaccgaggcagtaaaagtaccatatcctgtgtttgaatcaaacccggagttcttgtatgtggaaggcttgccagaggggattcccttccgaagccctacctggtttggaattccacgacttgaaaggatcgtccgcgggagtaataaaatcaagttcgttgttaaaaaacctgaactagttatttcctacttgcctcctgggatggctagtaaaataaacactaaagctttgcagtcccccaaaagaccacgaagtcctgggagtaattcaaaggttcctgaaattgaggtcaccgtggaaggccctaataacaacaatcctcaaacctcagctgttcgaaccccgacccagactaacggttctaacgttcccttcaagccacgagggagagagttttcctttgaggcctggaatgccaaaatcacggacctaaaacagaaagttgaaaatctcttcaatgagaaatgtggggaagctcttggccttaaacaagctgtgaaggtgccgttcgcgttatttgagtctttcccggaagacttttatgtggaaggcttacctgagggtgtgccattccgaagaccatcgacttttggcattccgaggctggagaagatactcagaaacaaagccaaaattaagttcatcattaaaaagcccgaaatgtttgagacggcgattaaggagagcacctcctctaagagccctcccagaaaaataaattcatcacccaatgttaatactactgcatcaggtgttgaagaccttaacatcattcaggtgacaattccagatgatgataatgaaagactctcgaaagttgaaaaagctagacagctaagagaacaagtgaatgacctctttagtcggaaatttggtgaagctattggtatgggttttcctgtgaaagttccctacaggaaaatcacaattaaccctggctgtgtggtggttgatggcatgcccccgggggtgtccttcaaagcccccagctacctggaaatcagctccatgagaaggatcttagactctgccgagtttatcaaattcacggtcattagaccatttccaggacttgtgattaataaccagctggttgatcagagtgagtcagaaggccccgtgatacaagaatcagctgaaccaagccagttggaagttccagccacagaagaaataaaagagactgatggaagctctcagatcaagcaagaaccagaccccacgtggtagacctcttccctcctaggagccttgagttacggtgtttattttccaatcaagtgaagatatctcctacttctcctactggaacatctcagcttctgcagtgaagaaaaattcctgtgatagttcagttctttagtttttctatttgaaaaaaaaaaatcatttaaatgatcctttgttcacggctctccttaatgactgagtgaacagttcctatctgtatatttgactaaaccttttcctaagctatctctcatggttcctatgtttttttatcataattaaaagcaaaaccatctggatcacctaacagtcagaggtcagtatctcagcgtgtgaattatagaggaaatacagagagaacctcttccacttttacttttcgtccaaataaaatgcatggtgtaccagaagttgaagatcgggttgaggattggggctagctcgatgacactaaggccccaacatcgcgggacctgctgtggcgcggattcttaggaacgctgttctagccggccccctctccaggggtcgccgtggccggcattatttcctagttcttcttgtaaccctgaggtgccagcgcggggagtgaggaggggtcagggggctaaggatgcaacctctgacgttctgcgccttcctaggagagtcttacatgtgttgagatttcacaagcaatgcgagttgtaaaataccagctctacaagaagctaggctctgtgacggcatagttttcagtagctttatcacaatattcacaatggagaattatatgacatggtagcagaaataggcccttttatgtgttgcttctattttacctcaaattgtagatatagggtaatcaataaaatccatccatgcctttcacacactaagt

SEQ ID NO: 4155 - protein, 954 aa, Homo sapiens
MAQVAMSTLPVEDEESSESRMVVTFLMSALESMCKELAKSKAEVACIAVYETDVFVVGTERGRAFVNTRKDFQKDFVKYCVEEEEKAAEMHKMKSTTQANRMSVDAVEIETLRKTVEDYFCFCYGKALGKSTVVPVPYEKMLRDQSAVVVQGLPEGVAFKHPENYDLATLKWILENKAGISFIIKRPFLEPKKHVGGRVMVTDADRSILSPGGSCGPIKVKTEPTEDSGISLEMAAVTVKEESEDPDYYQYNIQGSHHSSEGNEGTEMEVPAEDSTQHVPSETSEDPEVEVTIEDDDYSPPSKRPKANELPQPPVPEPANAGKRKVREFNFEKWNARITDLRKQVEELFERKYAQAIKAKGPVTIPYPLFQSHVEDLYVEGLPEGIPFRRPSTYGIPRLERILLAKERIRFVIKKHELLNSTREDLQLDKPASGVKEEWYARITKLRKMVDQLFCKKFAEALGSTEAKAVPYQKFEAHPNDLYVEGLPENIPFRSPSWYGIPRLEKIIQVGNRIKFVIKRPELLTHSTTEVTQPRTNTPAQALGLTEAVKVPYPVFESNPEFLYVEGLPEGIPFRSPTWFGIPRLERIVRGSNKIKFVVKKPELVISYLPPGMASKINTKALQSPKRPRSPGSNSKVPEIEVTVEGPNNNNPQTSAVRTPTQTNGSNVPFKPRGREFSFEAWNAKITDLKQKVENLFNEKCGEALGLKQAVKVPFALFESFPEDFYVEGLPEGVPFRRPSTFGIPRLEKILRNKAKIKFIIKKPEMFETAIKESTSSKSPPRKINSSPNVNTTASGVEDLNIIQVTIPDDDNERLSKVEKARQLREQVNDLFSRKFGEAIGMGFPVKVPYRKITINPGCVVVDGMPPGVSFKAPSYLEISSMRRILDSAEFIKFTVIRPFPGLVINNQLVDQSESEGPVIQESAEPSQLEVPATEEIKETDGSSQIKQEPDPTW

SEQ ID NO: 4156 - DNA, 4502 bp, Homo sapiens
aaaaaaaaaaaaaaaaaaaaaaaaaaaagaaaaaagaaaaaaaaaaggaggaggaggaggagggtgagagagaagctgggagagcagagaaaaggggccaccggtcgcccccccgcttccccgcacgcgctctccagccgcggccgcccgcctgccgcggtcaccccggcctctgcctctgtcccccagtgatcggatcaaggcgctgagcgaggccctgcctgcggggcggccatgcggcggtgacaggagcgcgaccgacacgcacgggcccctcgccccctctcgcctcccgtccgctcgccagctcccctcagccgaggctgctccgcggcggccgcagcccgcgcgcggcccacactcgcctccccgttgaagatgaggagtcctcggagagcaggatggtggtgacattcctcatgtcagctctcgagtccatgtgtaaagaactggccaagtccaaagccgaagtggcctgcattgcagtgtatgaaacagacgtgtttgtcgtcggaactgaaagaggacgtgcttttgtcaataccagaaaggattttcaaaaagattttgtaaaatattgtgttgaagaagaagaaaaagctgcagagatgcataaaatgaaatctacaacccaggcaaatcggatgagtgtagatgctgtagaaattgaaacactcagaaaaacagttgaggactatttctgcttttgctatgggaaagctttaggcaaatccacagtggtacctgtaccatatgagaagatgctgcgagaccagtcggctgtggtagtgcaggggcttccggaaggtgttgcctttaaacaccccgagaactatgatcttgcaaccctgaaatggattttggagaacaaagcagggatttcattcatcattaagagaccttttttagagccaaagaagcatgtaggtggtcgtgtgatggtaacagatgctgacaggtcaatactatctccaggtggaagttgtggccccatcaaagtgaaaactgaacccacagaagattctggcatttccctggaaatggcagctgtgacagtaaaggaagaatcagaagatcctgattattatcaatataacattcaagcaggcccttctgaaactgatgatgttgatgaaaaacagcccctatcgaagcctttgcaaggaagccaccattcttcagagggcaatgaaggcacagaaatggaagtaccagcagaagattctactcaacatgtcccttcagaaacaagtgaggaccctgaagttgaggtgactattgaagatgatgattattctccaccgtctaagagaccaaaggccaatgagctaccgcagccaccagtcccggaacccgccaatgctgggaagcggaaagtgagggagttcaacttcgagaaatggaatgctcgcatcactgatctacgtaaacaagttgaagaattgtttgaaaggaaatatgctcaagccataaaagccaaaggtccggtgacgatcccgtaccctcttttccagtctcatgttgaagatctttatgtagaaggacttcctgaaggaattccttttagaaggccatctacttacggaattcctcgcctggagaggatattacttgcaaaggaaaggattcgttttgtgattaagaaacatgagcttctgaattcaacacgtgaagatttacagcttgataagccagcttcaggagtaaaggaagaatggtatgccagaatcactaaattaagaaagatggtggatcagcttttctgcaaaaaatttgcggaagccttggggagcactgaagccaaggctgtaccgtaccaaaaatttgaggcacacccgaatgatctgtacgtggaaggactgccagaaaacattcctttccgaagtccctcatggtatggaatcccaaggctggaaaaaatcattcaagtgggcaatcgaattaaatttgttattaaaagaccagaacttctgactcacagtaccactgaagttactcagccaagaacgaatacaccagtcaaagaagattggaatgtcagaattaccaagctacggaagcaagtggaagagatttttaatttgaaatttgctcaagctcttggactcaccgaggcagtaaaagtaccatatcctgtgtttgaatcaaacccggagttcttgtatgtggaaggcttgccagaggggattcccttccgaagccctacctggtttggaattccacgacttgaaaggatcgtccgcgggagtaataaaatcaagttcgttgttaaaaaacctgaactagttatttcctacttgcctcctgggatggctagtaaaataaacactaaagctttgcagtcccccaaaagaccacgaagtcctgggagtaattcaaaggttcctgaaattgaggtcaccgtggaaggccctaataacaacaatcctcaaacctcagctgttcgaaccccgacccagactaacggttctaacgttcccttcaagccacgagggagagagttttcctttgaggcctggaatgccaaaatcacggacctaaaacagaaagttgaaaatctcttcaatgagaaatgtggggaagctcttggccttaaacaagctgtgaaggtgccgttcgcgttatttgagtctttcccggaagacttttatgtggaaggcttacctgagggtgtgccattccgaagaccatcgacttttggcattccgaggctggagaagatactcagaaacaaagccaaaattaagttcatcattaaaaagcccgaaatgtttgagacggcgattaaggagagcacctcctctaagagccctcccagaaaaataaattcatcacccaatgttaatactactgcatcaggtgttgaagaccttaacatcattcaggtgacaattccagatgatgataatgaaagactctcgaaagttgaaaaagctagacagctaagagaacaagtgaatgacctctttagtcggaaatttggtgaagctattggtatgggttttcctgtgaaagttccctacaggaaaatcacaattaaccctggctgtgtggtggttgatggcatgcccccgggggtgtccttcaaagcccccagctacctggaaatcagctccatgagaaggatcttagactctgccgagtttatcaaattcacggtcattagaccatttccaggacttgtgattaataaccagctggttgatcagagtgagtcagaaggccccgtgatacaagaatcagctgaaccaagccagttggaagttccagccacagaagaaataaaagagactgatggaagctctcagatcaagcaagaaccagaccccacgtggtagacctcttccctcctaggcttaaagtatcagtggttgagaagagcttttcggacctgttactaccccaagctgtgtaatatacttgtataacagaaataccttctatacaaacctttttttctacttttagatagaaatgtctactttttcagcagttctgtgaattaaagagcagagtgactgtgggtctggaatggctggtgtacttgggaatgtactatcaggattttacagcaatgctgggaaatgacagggaaaatgacaggaatgaatctcaccagattttttatgtactcagcagagccttgagttacggtgtttattttccaatcaagtgaagatatctcctacttctcctactggaacatctcagcttctgcagtgaagaaaaattcctgtgatagttcagttctttagtttttctatttgaaaaaaaaaaatcatttaaatgatcctttgttcacggctctccttaatgactgagtgaacagttcctatctgtatatttgactaaaccttttcctaagctatctctcatggttcctatgtttttttatcataattaaaagcaaaaccatctggatcacctaacagtcagaggtcagtatctcagcgtgtgaattatagaggaaatacagagagaacctcttccacttttacttttcgtccaaataaaatgcatggtgtaccagaagttgaagatcgggttgaggattggggctagctcgatgacactaaggccccaacatcgcgggacctgctgtggcgcggattcttaggaacgctgttctagccggccccctctccaggggtcgccgtggccggcattatttcctagttcttcttgtaaccctgaggtgccagcgcggggagtgaggaggggtcagggggctaaggatgcaacctctgacgttctgcgccttcctaggagagtcttacatgtgttgagatttcacaagcaatgcgagttgtaaaataccagctctacaagaagctaggctctgtgacggcatagttttcagtagctttatcacaatattcacaatggagaattatatgacatggtagcagaaataggcccttttatgtgttgcttctattttacctcaaattgtagatatagggtaatcaataaaatccatccatgcctttcacacactaagt

SEQ ID NO: 4157 - protein, 978 aa, Homo sapiens
MVVTFLMSALESMCKELAKSKAEVACIAVYETDVFVVGTERGRAFVNTRKDFQKDFVKYCVEEEEKAAEMHKMKSTTQANRMSVDAVEIETLRKTVEDYFCFCYGKALGKSTVVPVPYEKMLRDQSAVVVQGLPEGVAFKHPENYDLATLKWILENKAGISFIIKRPFLEPKKHVGGRVMVTDADRSILSPGGSCGPIKVKTEPTEDSGISLEMAAVTVKEESEDPDYYQYNIQAGPSETDDVDEKQPLSKPLQGSHHSSEGNEGTEMEVPAEDSTQHVPSETSEDPEVEVTIEDDDYSPPSKRPKANELPQPPVPEPANAGKRKVREFNFEKWNARITDLRKQVEELFERKYAQAIKAKGPVTIPYPLFQSHVEDLYVEGLPEGIPFRRPSTYGIPRLERILLAKERIRFVIKKHELLNSTREDLQLDKPASGVKEEWYARITKLRKMVDQLFCKKFAEALGSTEAKAVPYQKFEAHPNDLYVEGLPENIPFRSPSWYGIPRLEKIIQVGNRIKFVIKRPELLTHSTTEVTQPRTNTPVKEDWNVRITKLRKQVEEIFNLKFAQALGLTEAVKVPYPVFESNPEFLYVEGLPEGIPFRSPTWFGIPRLERIVRGSNKIKFVVKKPELVISYLPPGMASKINTKALQSPKRPRSPGSNSKVPEIEVTVEGPNNNNPQTSAVRTPTQTNGSNVPFKPRGREFSFEAWNAKITDLKQKVENLFNEKCGEALGLKQAVKVPFALFESFPEDFYVEGLPEGVPFRRPSTFGIPRLEKILRNKAKIKFIIKKPEMFETAIKESTSSKSPPRKINSSPNVNTTASGVEDLNIIQVTIPDDDNERLSKVEKARQLREQVNDLFSRKFGEAIGMGFPVKVPYRKITINPGCVVVDGMPPGVSFKAPSYLEISSMRRILDSAEFIKFTVIRPFPGLVINNQLVDQSESEGPVIQESAEPSQLEVPATEEIKETDGSSQIKQEPDPTW

SEQ ID NO: 4158 - DNA, 7044 bp, Homo sapiens
aaaaaaaaaaaaaaaaaaaaaaaaaaaagaaaaaagaaaaaaaaaaggaggaggaggaggagggtgagagagaagctgggagagcagagaaaaggggccaccggtcgcccccccgcttccccgcacgcgctctccagccgcggccgcccgcctgccgcggtcaccccggcctctgcctctgtcccccagtgatcggatcaaggcgctgagcgaggccctgcctgcggggcggccatgcggcggtgacaggagcgcgaccgacacgcacgggcccctcgccccctctcgcctcccgtccgctcgccagctcccctcagccgaggctgctccgcggcggccgcagcccgcgcgcggcccacactcgcctcccctcggcacccccggccccggagctgcctggaggcggccgcactcggtgtaaagaactggccaagtccaaagccgaagtggcctgcattgcagtgtatgaaacagacgtgtttgtcgtcggaactgaaagaggacgtgcttttgtcaataccagaaaggattttcaaaaagattttgtaaaatattgtgttgaagaagaagaaaaagctgcagagatgcataaaatgaaatctacaacccaggcaaatcggatgagtgtagatgctgtagaaattgaaacactcagaaaaacagttgaggactatttctgcttttgctatgggaaagctttaggcaaatccacagtggtacctgtaccatatgagaagatgctgcgagaccagtcggctgtggtagtgcaggggcttccggaaggtgttgcctttaaacaccccgagaactatgatcttgcaaccctgaaatggattttggagaacaaagcagggatttcattcatcattaagagaccttttttagagccaaagaagcatgtaggtggtcgtgtgatggtaacagatgctgacaggtcaatactatctccaggtggaagttgtggccccatcaaagtgaaaactgaacccacagaagattctggcatttccctggaaatggcagctgtgacagtaaaggaagaatcagaagatcctgattattatcaatataacattcaaggaagccaccattcttcagagggcaatgaaggcacagaaatggaagtaccagcagaagatgatgattattctccaccgtctaagagaccaaaggccaatgagctaccgcagccaccagtcccggaacccgccaatgctgggaagcggaaagtgagggagttcaacttcgagaaatggaatgctcgcatcactgatctacgtaaacaagttgaagaattgtttgaaaggaaatatgctcaagccataaaagccaaaggtccggtgacgatcccgtaccctcttttccagtctcatgttgaagatctttatgtagaaggacttcctgaaggaattccttttagaaggccatctacttacggaattcctcgcctggagaggatattacttgcaaaggaaaggattcgttttgtgattaagaaacatgagcttctgaattcaacacgtgaagatttacagcttgataagccagcttcaggagtaaaggaagaatggtatgccagaatcactaaattaagaaagatggtggatcagcttttctgcaaaaaatttgcggaagccttggggagcactgaagccaaggctgtaccgtaccaaaaatttgaggcacacccgaatgatctgtacgtggaaggactgccagaaaacattcctttccgaagtccctcatggtatggaatcccaaggctggaaaaaatcattcaagtgggcaatcgaattaaatttgttattaaaagaccagaacttctgactcacagtaccactgaagttactcagccaagaacgaatacaccagctcaagctcttggactcaccgaggcagtaaaagtaccatatcctgtgtttgaatcaaacccggagttcttgtatgtggaaggcttgccagaggggattcccttccgaagccctacctggtttggaattccacgacttgaaaggatcgtccgcgggagtaataaaatcaagttcgttgttaaaaaacctgaactagttatttcctacttgcctcctgggatggctagtaaaataaacactaaagctttgcagtcccccaaaagaccacgaagtcctgggagtaattcaaaggttcctgaaattgaggtcaccgtggaaggccctaataacaacaatcctcaaacctcagctgttcgaaccccgacccagactaacggttctaacgttcccttcaagccacgagggagagagttttcctttgaggcctggaatgccaaaatcacggacctaaaacagaaagttgaaaatctcttcaatgagaaatgtggggaagctcttggccttaaacaagctgtgaaggtgccgttcgcgttatttgagtctttcccggaagacttttatgtggaaggcttacctgagggtgtgccattccgaagaccatcgacttttggcattccgaggctggagaagatactcagaaacaaagccaaaattaagttcatcattaaaaagcccgaaatgtttgagacggcgattaaggagagcacctcctctaagagccctcccagaaaaataaattcatcacccaatgttaatactactgcatcaggtgttgaagaccttaacatcattcaggtgacaattccagatgatgataatgaaagactctcgaaagttgaaaaagctagacagctaagagaacaagtgaatgacctctttagtcggaaatttggtgaagctattggtatgggttttcctgtgaaagttccctacaggaaaatcacaattaaccctggctgtgtggtggttgatggcatgcccccgggggtgtccttcaaagcccccagctacctggaaatcagctccatgagaaggatcttagactctgccgagtttatcaaattcacggtcattaggtaagtgagagtttcctgcttagtcacaggagcgaatctggagctcatgaggctgactcttctaaaatgcagccacaggtagtcatcgaatccggcttcctatgctgtgcaatcaacaaatcaaaataacttgtgtcatcattagaatgtcagatgtgcttctacgaactaagctgactcttttaattctttggcaaagggttggcaaactaggactgtttgccaaattcaggctgcctcctatttttagagtcttcctgaaacacagctacacccgtattatccatggctgctttcctgtcacagtgagtaagtagctgggactgagaaggcatggcctccaaagtctaaaatatttactctctagcactttgtagaaaaaccttagctaggcacagtggctaacgcctgtaatcccagcattttgggaggccaaggcaggcagatcacctgaggtcaggagttccagaccagcctggccaacatggtgaaatcccatctctacaaaaataaaacagttagctgggcatgatggcgggtgcctgtaatcccagctactcgggaggctgaggcaggatagtcgcttgaacccaggaggtggaggttgcaatgagccaagatcatgccactgcactccagcctggacgacagagtgagactccatcacaagaaaaaaagaactttgtcaacctctgtcttagggcgccttgtcacaggcttcgggtcagacggattcaaccttgcatcagccatttgttagccaggtcactctgttctttgtctgtaaatgagattgatcgttgttcccactgagagtgtcagctccttcccgtagagcaggcatgatgattgtactcacctctgacaccattgtgagtgccacattccttcccacgtccttgtcactgtaagagatgcccacctgagcaccaaccccaggttatcttcccctttgtcttccagccccccagaaacagctacgactcaacctacccaatcatttcatcatcagattgccactgtctctagttcaggtctcttgggactggcactcagaaatctcataataaatcctcttgaggcttctcatacactcgtcttcttccaatcttctttccctcaaaatctcatattttggttccacttcacccaccgtcattctccatatcactcccaggagttaggcaaaaagccccttccgttcttccgtatgttaaacttagaatcactctgttccctgctctgcgtttctattttttgtttttcctccatttactagtagcttaacactttctaacagtgttcttattattgatacgtatctatctcttccataagcttataaggtcacggataatacttctcattgtagtacgtaaatgacgtgggctagatatgagttgaataaacagttatacctgtaaattcttacagagtgaaaataaattgttatactttacaatttgtttctctctttagaccatttccaggacttgtgattaataaccgtgagtattttgtgaagtgttttgtttttgttttttcctggggtctgacgtgtgtgcgtgtgagtgtgtatacatgcttaacgtatatcacgttacttcacctatgtcagtaaccaggccaaatacttgttttagccctcagtaaaaacaccaggcacttcctagttgtaaaattattcaagcttcttaacttcctatcctcgatgcacttaatcataaaatggtaataatagcaccgattttgggggagtcgttccagtagatggaaagcatctggaacaggtgtcagcaagctcctgccgacgtgtatgcataaagttttattgaaaccaccatcgtgtccatttgtttatggcagaactgagagatggcagcagcaagtgtgtgcctgcaaaacctaaaatatttactaattggctctgcaagaaaagagtttgcatccccctaacctagaacagtgtctagcctctagtatgtgtttagcctacagtatgtgctcagcgaatacaatctatatttattactgcttttatgactgttataattactgtgcttggatttcgttacaaagtaagtcacaatgtgcctgcttctgttagtatttcagcacagtgcctggcacacatggggctctcaaatattgctgagcgagtgaacaaatgtcctttcaattccttaacgttgatgtcattttcaatagtattttgagccaaacttaattttgcgagtgtgttttgttttcttaactttattattaaaaatgtataaaagtgaggccaggcgtggtggctcacgcctgtaatcccagcagtttgggaggctgaggcaggcggatcagttgaggttgggagttggagaccagcccgtccaacatggtgaaagcctgtctctactaaaaatacaaaaatcagctgggtgtggtggcgcgtgcctgtaatcccagctactcaggaggctgaggcaggagagttgcttgaatcctagaggtggaggttgcagtgagctgagatcgtgccattgcactccagcctgggcaacaagagcaaaactctgtcccaataaataaataaataaaatgttctcttttgttcctgttcttgtgcggtagtgtggtatagagttttatggtaattactgtgaattagtgattctgagggacatatcagaactctgaggtttgtttccttctcatcttgagggaaacagcaaatgtatgttaaaatgcttttccaagggaacaacacatccttacattatttaaaccaatctgcttcattttcagagctggttgatcagagtgagtcagaaggccccgtgatacaagaatcagctgaaccaagccagttggaagttccagccacagaagaaataaaagagactgatggaagctctcagatcaagcaagaaccagaccccacgtggtagacctcttccctcctaggcttaaagtatcagtggttgagaagagcttttcggacctgttactaccccaagctgtgtaatatacttgtataacagaaataccttctatacaaacctttttttctacttttagatagaaatgtctactttttcagcagttctgtgaattaaagagcagagtgactgtgggtctggaatggctggtgtacttgggaatgtactatcaggattttacagcaatgctgggaaatgacagggaaaatgacaggaatgaatctcaccagattttttatgtactcagcagagccttgagttacggtgtttattttccaatcaagtgaagatatctcctacttctcctactggaacatctcagcttctgcagtgaagaaaaattcctgtgatagttcagttctttagtttttctatttgaaaaaaaaaaatcatttaaatgatcctttgttcacggctctccttaatgactgagtgaacagttcctatctgtatatttgactaaaccttttcctaagctatctctcatggttcctatgtttttttatcataattaaaagcaaaaccatctggatcacctaacagtcagaggtcagtatctcagcgtgtgaattatagaggaaatacagagagaacctcttccacttttacttttcgtccaaataaaatgcatggtgtaccagaagttgaagatcgggttgaggattggggctagctcgatgacactaaggccccaacatcgcgggacctgctgtggcgcggattcttaggaacgctgttctagccggccccctctccaggggtcgccgtggccggcattatttcctagttcttcttgtaaccctgaggtgccagcgcggggagtgaggaggggtcagggggctaaggatgcaacctctgacgttctgcgccttcctaggagagtcttacatgtgttgagatttcacaagcaatgcgagttgtaaaataccagctctacaagaagctaggctctgtgacggcatagttttcagtagctttatcacaatattcacaatggagaattatatgacatggtagcagaaataggcccttttatgtgttgcttctattttacctcaaattgtagatatagggtaatcaataaaatccatccatgcctttcacacactaagt

SEQ ID NO: 4159 - protein, 788 aa, Homo sapiens; identical to SEQ ID NO: 4145

SEQ ID NO: 4160 - DNA, 5282 bp, Homo sapiens
aaaaaaaaaaaaaaaaaaaaaaaaaaaagaaaaaagaaaaaaaaaaggaggaggaggaggagggtgagagagaagctgggagagcagagaaaaggggccaccggtcgcccccccgcttccccgcacgcgctctccagccgcggccgcccgcctgccgcggtcaccccggcctctgcctctgtcccccagtgatcggatcaaggcgctgagcgaggccctgcctgcggggcggccatgcggcggtgacaggagcgcgaccgacacgcacgggcccctcgccccctctcgcctcccgtccgctcgccagctcccctcagccgaggctgctccgcggcggccgcagcccgcgcgcggcccacactcgcctcccctcggcacccccggccccggagctgcctggaggcggccgcactcggtgtaaagaactggccaagtccaaagccgaagtggcctgcattgcagtgtatgaaacagacgtgtttgtcgtcggaactgaaagaggacgtgcttttgtcaataccagaaaggattttcaaaaagattttgtaaaatattgtgttgaagaagaagaaaaagctgcagagatgcataaaatgaaatctacaacccaggcaaatcggatgagtgtagatgctgtagaaattgaaacactcagaaaaacagttgaggactatttctgcttttgctatgggaaagctttaggcaaatccacagtggtacctgtaccatatgagaagatgctgcgagaccagtcggctgtggtagtgcaggggcttccggaaggtgttgcctttaaacaccccgagaactatgatcttgcaaccctgaaatggattttggagaacaaagcagggatttcattcatcattaagagaccttttttagagccaaagaagcatgtaggtggtcgtgtgatggtaacagatgctgacaggtcaatactatctccaggtggaagttgtggccccatcaaagtgaaaactgaacccacagaagattctggcatttccctggaaatggcagctgtgacagtaaaggaagaatcagaagatcctgattattatcaatataacattcaagcaggcccttctgaaactgatgatgttgatgaaaaacagcccctatcgaagcctttgcaaggaagccaccattcttcagagggcaatgaaggcacagaaatggaagtaccagcagaagattctactcaacatgtcccttcagaaacaagtgaggaccctgaagttgaggtgactattgaagatgatgattattctccaccgtctaagagaccaaaggccaatgagctaccgcagccaccagtcccggaacccgccaatgctgggaagcggaaagtgagggagttcaacttcgagaaatggaatgctcgcatcactgatctacgtaaacaagttgaagaattgtttgaaaggaaatatgctcaagccataaaagccaaaggtccggtgacgatcccgtaccctcttttccagtctcatgttgaagatctttatgtagaaggacttcctgaaggaattccttttagaaggccatctacttacggaattcctcgcctggagaggatattacttgcaaaggaaaggattcgttttgtgattaagaaacatgagcttctgaattcaacacgtgaagatttacagcttgataagccagcttcaggagtaaaggaagaatggtatgccagaatcactaaattaagaaagatggtggatcagcttttctgcaaaaaatttgcggaagccttggggagcactgaagccaaggctgtaccgtaccaaaaatttgaggcacacccgaatgatctgtacgtggaaggactgccagaaaacattcctttccgaagtccctcatggtatggaatcccaaggctggaaaaaatcattcaagtgggcaatcgaattaaatttgttattaaaagaccagaacttctgactcacagtaccactgaagttactcagccaagaacgaatacaccagtcaaagaagattggaatgtcagaattaccaagctacggaagcaagtggaagagatttttaatttgaaatttgcttagatttgttgacagcggtttcctggagtgctgtcttgagaacgattctgaggaggctcagcaagaaagagtgtttcagttgattgggtgtgtctgtcatggagaaggaactcaagctcttggactcaccgaggcagtaaaagtaccatatcctgtgtttgaatcaaacccggagttcttgtatgtggaaggcttgccagaggggattcccttccgaagccctacctggtttggaattccacgacttgaaaggatcgtccgcgggagtaataaaatcaagttcgttgttaaaaaacctgaactagttatttcctacttgcctcctgggatggctagtaaaataaacactaaagctttgcagtcccccaaaagaccacgaagtcctgggagtaattcaaaggttcctgaaattgaggtcaccgtggaaggccctaataacaacaatcctcaaacctcagctgttcgaaccccgacccagactaacggttctaacgttcccttcaagccacgagggagagagttttcctttgaggcctggaatgccaaaatcacggacctaaaacagaaagttgaaaatctcttcaatgagaaatgtggggaagctcttggccttaaacaagctgtgaaggtgccgttcgcgttatttgagtctttcccggaagacttttatgtggaaggcttacctgagggtgtgccattccgaagaccatcgacttttggcattccgaggctggagaagatactcagaaacaaagccaaaattaagttcatcattaaaaagcccgaaatgtttgagacggcgattaaggagagcacctcctctaagagccctcccagaaaaataaattcatcacccaatgttaatactactgcatcaggtgttgaagaccttaacatcattcaggtgacaattccagatgatgataatgaaagactctcgaaagttgaaaaagctagacagctaagagaacaagtgaatgacctctttagtcggaaatttggtgaagctattggtatgggttttcctgtgaaagttccctacaggaaaatcacaattaaccctggctgtgtggtggttgatggcatgcccccgggggtgtccttcaaagcccccagctacctggaaatcagctccatgagaaggatcttagactctgccgagtttatcaaattcacggtcattagaccatttccaggacttgtgattaataaccagctggttgatcagagtgagtcagaaggccccgtgatacaagaatcagctgaaccaagccagttggaagttccagccacagaagaaataaaagagactgatggaagctctcagatcaagcaagaaccagaccccacgtggtagacctcttccctcctagggtaaatcagcttctgtgtcagggatgctgtgtggtgtccatctgaaccccctgcatacgcgtagctaatgtgatctccccactttcacataagatggtggccctgccttcagggaatgtgggagccaggtgggagccttcccggatatttaagctagaagattctacagggagattctccttggatcaatatatgtctctcagtcaaagatgtaaaagcacttttgccttaaaaagaatgttctgtttctaaatagagtcaacgttgtcctcctcattggaattcactatgagtcagaatcattagactgacttttttttttccatagtaatagtattttgcagagtctcacagagctgcagatcttttgttcatcttgcagagttaacaagtctgatcctgttagtccagatttcttaaatttggccaagttataataggagcagtagcttgagacccgaagtcaggaaactttgacaatggatttttttttttaatccagagacttgtactggaatttgccttaccctgtcagctcatggacttaaggtttcatcccgctttatgagtgcttctgaatccaagtcattgttacctgaatttgcaaattaagttgtgatattcgtgactgttaaattcctgtaattagattaacctctttgcttgcttgtttgttttctctcctattttagcttaaagtatcagtggttgagaagagcttttcggacctgttactaccccaagctgtgtaatatacttgtataacagaaataccttctatacaaacctttttttctacttttagatagaaatgtctactttttcagcagttctgtgaattaaagagcagagtgactgtgggtctggaatggctggtgtacttgggaatgtactatcaggattttacagcaatgctgggaaatgacagggaaaatgacaggaatgaatctcaccagattttttatgtactcagcagagccttgagttacggtgtttattttccaatcaagtgaagatatctcctacttctcctactggaacatctcagcttctgcagtgaagaaaaattcctgtgatagttcagttctttagtttttctatttgaaaaaaaaaaatcatttaaatgatcctttgttcacggctctccttaatgactgagtgaacagttcctatctgtatatttgactaaaccttttcctaagctatctctcatggttcctatgtttttttatcataattaaaagcaaaaccatctggatcacctaacagtcagaggtcagtatctcagcgtgtgaattatagaggaaatacagagagaacctcttccacttttacttttcgtccaaataaaatgcatggtgtaccagaagttgaagatcgggttgaggattggggctagctcgatgacactaaggccccaacatcgcgggacctgctgtggcgcggattcttaggaacgctgttctagccggccccctctccaggggtcgccgtggccggcattatttcctagttcttcttgtaaccctgaggtgccagcgcggggagtgaggaggggtcagggggctaaggatgcaacctctgacgttctgcgccttcctaggagagtcttacatgtgttgagatttcacaagcaatgcgagttgtaaaataccagctctacaagaagctaggctctgtgacggcatagttttcagtagctttatcacaatattcacaatggagaattatatgacatggtagcagaaataggcccttttatgtgttgcttctattttacctcaaattgtagatatagggtaatcaataaaatccatccatgcctttcacacactaagt

SEQ ID NO: 4161 - protein, 495 aa, Homo sapiens; identical to SEQ ID NO: 4057

SEQ ID NO: 4162 - DNA, 5035 bp, Homo sapiens
aaaaaaaaaaaaaaaaaaaaaaaaaaaagaaaaaagaaaaaaaaaaggaggaggaggaggagggtgagagagaagctgggagagcagagaaaaggggccaccggtcgcccccccgcttccccgcacgcgctctccagccgcggccgcccgcctgccgcggtcaccccggcctctgcctctgtcccccagtgatcggatcaaggcgctgagcgaggccctgcctgcggggcggccatgcggcggtgacaggagcgcgaccgacacgcacgggcccctcgccccctctcgcctcccgtccgctcgccagctcccctcagccgaggctgctccgcggcggccgcagcccgcgcgcggcccacactcgcctcccctcggcacccccggccccggagctgcctggaggcggccgcactcggtgtaaagaactggccaagtccaaagccgaagtggcctgcattgcagtgtatgaaacagacgtgtttgtcgtcggaactgaaagaggacgtgcttttgtcaataccagaaaggattttcaaaaagattttgtaaaatattgtgttgaagaagaagaaaaagctgcagagatgcataaaatgaaatctacaacccaggcaaatcggatgagtgtagatgctgtagaaattgaaacactcagaaaaacagttgaggactatttctgcttttgctatgggaaagctttaggcaaatccacagtggtacctgtaccatatgagaagatgctgcgagaccagtcggctgtggtagtgcaggggcttccggaaggtgttgcctttaaacaccccgagaactatgatcttgcaaccctgaaatggattttggagaacaaagcagggatttcattcatcattaagagaccttttttagagccaaagaagcatgtaggtggtcgtgtgatggtaacagatgctgacaggtcaatactatctccaggtggaagttgtggccccatcaaagtgaaaactgaacccacagaagattctggcatttccctggaaatggcagctgtgacagtaaaggaagaatcagaagatcctgattattatcaatataacattcaagcaggcccttctgaaactgatgatgttgatgaaaaacagcccctatcgaagcctttgcaaggaagccaccattcttcagagggcaatgaaggcacagaaatggaagtaccagcagaagatgatgattattctccaccgtctaagagaccaaaggccaatgagctaccgcagccaccagtcccggaacccgccaatgctgggaagcggaaagtgagggagttcaacttcgagaaatggaatgctcgcatcactgatctacgtaaacaagttgaagaattgtttgaaaggaaatatgctcaagccataaaagccaaaggtccggtgacgatcccgtaccctcttttccagtctcatgttgaagatctttatgtagaaggacttcctgaaggaattccttttagaaggccatctacttacggaattcctcgcctggagaggatattacttgcaaaggaaaggattcgttttgtgattaagaaacatgagcttctgaattcaacacgtgaagatttacagcttgataagccagcttcaggagtaaaggaagaatggtatgccagaatcactaaattaagaaagatggtggatcagcttttctgcaaaaaatttgcggaagccttggggagcactgaagccaaggctgtaccgtaccaaaaatttgaggcacacccgaatgatctgtacgtggaaggactgccagaaaacattcctttccgaagtccctcatggtatggaatcccaaggctggaaaaaatcattcaagtgggcaatcgaattaaatttgttattaaaagaccagaacttctgactcacagtaccactgaagttactcagccaagaacgaatacaccagctcaagctcttggactcaccgaggcagtaaaagtaccatatcctgtgtttgaatcaaacccggagttcttgtatgtggaaggcttgccagaggggattcccttccgaagccctacctggtttggaattccacgacttgaaaggatcgtccgcgggagtaataaaatcaagttcgttgttaaaaaacctgaactagttatttcctacttgcctcctgggatggctagtaaaataaacactaaagctttgcagtcccccaaaagaccacgaagtcctgggagtaattcaaaggttcctgaaattgaggtcaccgtggaaggccctaataacaacaatcctcaaacctcagctgttcgaaccccgacccagactaacggttctaacgttcccttcaagccacgagggagagagttttcctttgaggcctggaatgccaaaatcacggacctaaaacagaaagttgaaaatctcttcaatgagaaatgtggggaagctcttggccttaaacaagctgtgaaggtgccgttcgcgttatttgagtctttcccggaagacttttatgtggaaggcttacctgagggtgtgccattccgaagaccatcgacttttggcattccgaggctggagaagatactcagaaacaaagccaaaattaagttcatcattaaaaagcccgaaatgtttgagacggcgattaaggagagcacctcctctaagagccctcccagaaaaataaattcatcacccaatgttaatactactgcatcaggtgttgaagaccttaacatcattcaggtgacaattccagatgatgataatgaaagactctcgaaagttgaaaaagctagacagctaagagaacaagtgaatgacctctttagtcggaaatttggtgaagctattggtatgggttttcctgtgaaagttccctacaggaaaatcacaattaaccctggctgtgtggtggttgatggcatgcccccgggggtgtccttcaaagcccccagctacctggaaatcagctccatgagaaggatcttagactctgccgagtttatcaaattcacggtcattagaccatttccaggacttgtgattaataaccagctggttgatcagagtgagtcagaaggccccgtgatacaagaatcagctgaaccaagccagttggaagttccagccacagaagaaataaaagagactgatggaagctctcagatcaagcaagaaccagaccccacgtggtagacctcttccctcctagggtaaatcagcttctgtgtcagggatgctgtgtggtgtccatctgaaccccctgcatacgcgtagctaatgtgatctccccactttcacataagatggtggccctgccttcagggaatgtgggagccaggtgggagccttcccggatatttaagctagaagattctacagggagattctccttggatcaatatatgtctctcagtcaaagatgtaaaagcacttttgccttaaaaagaatgttctgtttctaaatagagtcaacgttgtcctcctcattggaattcactatgagtcagaatcattagactgacttttttttttccatagtaatagtattttgcagagtctcacagagctgcagatcttttgttcatcttgcagagttaacaagtctgatcctgttagtccagatttcttaaatttggccaagttataataggagcagtagcttgagacccgaagtcaggaaactttgacaatggatttttttttttaatccagagacttgtactggaatttgccttaccctgtcagctcatggacttaaggtttcatcccgctttatgagtgcttctgaatccaagtcattgttacctgaatttgcaaattaagttgtgatattcgtgactgttaaattcctgtaattagattaacctctttgcttgcttgtttgttttctctcctattttagcttaaagtatcagtggttgagaagagcttttcggacctgttactaccccaagctgtgtaatatacttgtataacagaaataccttctatacaaacctttttttctacttttagatagaaatgtctactttttcagcagttctgtgaattaaagagcagagtgactgtgggtctggaatggctggtgtacttgggaatgtactatcaggattttacagcaatgctgggaaatgacagggaaaatgacaggaatgaatctcaccagattttttatgtactcagcagagccttgagttacggtgtttattttccaatcaagtgaagatatctcctacttctcctactggaacatctcagcttctgcagtgaagaaaaattcctgtgatagttcagttctttagtttttctatttgaaaaaaaaaaatcatttaaatgatcctttgttcacggctctccttaatgactgagtgaacagttcctatctgtatatttgactaaaccttttcctaagctatctctcatggttcctatgtttttttatcataattaaaagcaaaaccatctggatcacctaacagtcagaggtcagtatctcagcgtgtgaattatagaggaaatacagagagaacctcttccacttttacttttcgtccaaataaaatgcatggtgtaccagaagttgaagatcgggttgaggattggggctagctcgatgacactaaggccccaacatcgcgggacctgctgtggcgcggattcttaggaacgctgttctagccggccccctctccaggggtcgccgtggccggcattatttcctagttcttcttgtaaccctgaggtgccagcgcggggagtgaggaggggtcagggggctaaggatgcaacctctgacgttctgcgccttcctaggagagtcttacatgtgttgagatttcacaagcaatgcgagttgtaaaataccagctctacaagaagctaggctctgtgacggcatagttttcagtagctttatcacaatattcacaatggagaattatatgacatggtagcagaaataggcccttttatgtgttgcttctattttacctcaaattgtagatatagggtaatcaataaaatccatccatgcctttcacacactaagt

SEQ ID NO: 4163 - protein, 864 aa, Homo sapiens; identical to SEQ ID NO: 4019

SEQ ID NO: 4164 - DNA, 4554 bp, Homo sapiens
aaaaaaaaaaaaaaaaaaaaaaaaaaaagaaaaaagaaaaaaaaaaggaggaggaggaggagggtgagagagaagctgggagagcagagaaaaggggccaccggtcgcccccccgcttccccgcacgcgctctccagccgcggccgcccgcctgccgcggtcaccccggcctctgcctctgtcccccagtgatcggatcaaggcgctgagcgaggccctgcctgcggggcggccatgcggcggtgacaggagcgcgaccgacacgcacgggcccctcgccccctctcgcctcccgtccgctcgccagctcccctcagccgaggctgctccgcggcggccgcagcccgcgcgcggcccacactcgcctccccgttgaagatgaggagtcctcggagagcaggatggtggtgacattcctcatgtcagctctcgagtccatgtgtaaagaactggccaagtccaaagccgaagtggcctgcattgcagtgtatgaaacagacgtgtttgtcgtcggaactgaaagaggacgtgcttttgtcaataccagaaaggattttcaaaaagattttgtaaaatattgtgttgaagaagaagaaaaagctgcagagatgcataaaatgaaatctacaacccaggcaaatcggatgagtgtagatgctgtagaaattgaaacactcagaaaaacagttgaggactatttctgcttttgctatgggaaagctttaggcaaatccacagtggtacctgtaccatatgagaagatgctgcgagaccagtcggctgtggtagtgcaggggcttccggaaggtgttgcctttaaacaccccgagaactatgatcttgcaaccctgaaatggattttggagaacaaagcagggatttcattcatcattaagagaccttttttagagccaaagaagcatgtaggtggtcgtgtgatggtaacagatgctgacaggtcaatactatctccaggtggaagttgtggccccatcaaagtgaaaactgaacccacagaagattctggcatttccctggaaatggcagctgtgacagtaaaggaagaatcagaagatcctgattattatcaatataacattcaaggaagccaccattcttcagagggcaatgaaggcacagaaatggaagtaccagcagaagattctactcaacatgtcccttcagaaacaagtgaggaccctgaagttgaggtgactattgaagatgatgattattctccaccgtctaagagaccaaaggccaatgagctaccgcagccaccagtcccggaacccgccaatgctgggaagcggaaagtgagggagttcaacttcgagaaatggaatgctcgcatcactgatctacgtaaacaagttgaagaattgtttgaaaggaaatatgctcaagccataaaagccaaaggtccggtgacgatcccgtaccctcttttccagtctcatgttgaagatctttatgtagaaggacttcctgaaggaattccttttagaaggccatctacttacggaattcctcgcctggagaggatattacttgcaaaggaaaggattcgttttgtgattaagaaacatgagcttctgaattcaacacgtgaagatttacagcttgataagccagcttcaggagtaaaggaagaatggtatgccagaatcactaaattaagaaagatggtggatcagcttttctgcaaaaaatttgcggaagccttggggagcactgaagccaaggctgtaccgtaccaaaaatttgaggcacacccgaatgatctgtacgtggaaggactgccagaaaacattcctttccgaagtccctcatggtatggaatcccaaggctggaaaaaatcattcaagtgggcaatcgaattaaatttgttattaaaagaccagaacttctgactcacagtaccactgaagttactcagccaagaacgaatacaccagtcaaagaagattggaatgtcagaattaccaagctacggaagcaagtggaagagatttttaatttgaaatttgcttagatttgttgacagcggtttcctggagtgctgtcttgagaacgattctgaggaggctcagcaagaaagagtgtttcagttgattgggtgtgtctgtcatggagaaggaactcaagctcttggactcaccgaggcagtaaaagtaccatatcctgtgtttgaatcaaacccggagttcttgtatgtggaaggcttgccagaggggattcccttccgaagccctacctggtttggaattccacgacttgaaaggatcgtccgcgggagtaataaaatcaagttcgttgttaaaaaacctgaactagttatttcctacttgcctcctgggatggctagtaaaataaacactaaagctttgcagtcccccaaaagaccacgaagtcctgggagtaattcaaaggttcctgaaattgaggtcaccgtggaaggccctaataacaacaatcctcaaacctcagctgttcgaaccccgacccagactaacggttctaacgttcccttcaagccacgagggagagagttttcctttgaggcctggaatgccaaaatcacggacctaaaacagaaagttgaaaatctcttcaatgagaaatgtggggaagctcttggccttaaacaagctgtgaaggtgccgttcgcgttatttgagtctttcccggaagacttttatgtggaaggcttacctgagggtgtgccattccgaagaccatcgacttttggcattccgaggctggagaagatactcagaaacaaagccaaaattaagttcatcattaaaaagcccgaaatgtttgagacggcgattaaggagagcacctcctctaagagccctcccagaaaaataaattcatcacccaatgttaatactactgcatcaggtgttgaagaccttaacatcattcaggtgacaattccagatgatgataatgaaagactctcgaaagttgaaaaagctagacagctaagagaacaagtgaatgacctctttagtcggaaatttggtgaagctattggtatgggttttcctgtgaaagttccctacaggaaaatcacaattaaccctggctgtgtggtggttgatggcatgcccccgggggtgtccttcaaagcccccagctacctggaaatcagctccatgagaaggatcttagactctgccgagtttatcaaattcacggtcattagaccatttccaggacttgtgattaataaccagctggttgatcagagtgagtcagaaggccccgtgatacaagaatcagctgaaccaagccagttggaagttccagccacagaagaaataaaagagactgatggaagctctcagatcaagcaagaaccagaccccacgtggtagacctcttccctcctaggcttaaagtatcagtggttgagaagagcttttcggacctgttactaccccaagctgtgtaatatacttgtataacagaaataccttctatacaaacctttttttctacttttagatagaaatgtctactttttcagcagttctgtgaattaaagagcagagtgactgtgggtctggaatggctggtgtacttgggaatgtactatcaggattttacagcaatgctgggaaatgacagggaaaatgacaggaatgaatctcaccagattttttatgtactcagcagagccttgagttacggtgtttattttccaatcaagtgaagatatctcctacttctcctactggaacatctcagcttctgcagtgaagaaaaattcctgtgatagttcagttctttagtttttctatttgaaaaaaaaaaatcatttaaatgatcctttgttcacggctctccttaatgactgagtgaacagttcctatctgtatatttgactaaaccttttcctaagctatctctcatggttcctatgtttttttatcataattaaaagcaaaaccatctggatcacctaacagtcagaggtcagtatctcagcgtgtgaattatagaggaaatacagagagaacctcttccacttttacttttcgtccaaataaaatgcatggtgtaccagaagttgaagatcgggttgaggattggggctagctcgatgacactaaggccccaacatcgcgggacctgctgtggcgcggattcttaggaacgctgttctagccggccccctctccaggggtcgccgtggccggcattatttcctagttcttcttgtaaccctgaggtgccagcgcggggagtgaggaggggtcagggggctaaggatgcaacctctgacgttctgcgccttcctaggagagtcttacatgtgttgagatttcacaagcaatgcgagttgtaaaataccagctctacaagaagctaggctctgtgacggcatagttttcagtagctttatcacaatattcacaatggagaattatatgacatggtagcagaaataggcccttttatgtgttgcttctattttacctcaaattgtagatatagggtaatcaataaaatccatccatgcctttcacacactaagt

SEQ ID NO: 4165 - protein, 544 aa, Homo sapiens; identical to SEQ ID NO: 4045

SEQ ID NO: 4166 - DNA, 4634 bp, Homo sapiens
aaaaaaaaaaaaaaaaaaaaaaaaaaaagaaaaaagaaaaaaaaaaggaggaggaggaggagggtgagagagaagctgggagagcagagaaaaggggccaccggtcgcccccccgcttccccgcacgcgctctccagccgcggccgcccgcctgccgcggtcaccccggcctctgcctctgtcccccagtgatcggatcaaggcgctgagcgaggccctgcctgcggggcggccatgcggcggtgacaggagcgcgaccgacacgcacgggcccctcgccccctctcgcctcccgtccgctcgccagctcccctcagccgaggctgctccgcggcggccgcagcccgcgcgcggcccacactcgcctcccctcggcacccccggccccggagctgcctggaggcggccgcactcggggatcatggcccaagttgcaatgtccaccctccccgttgaagatgaggagtcctcggagagcaggatggtggtgacattcctcatgtcagctctcgagtccatgtgtaaagaactggccaagtccaaagccgaagtggcctgcattgcagtgtatgaaacagacgtgtttgtcgtcggaactgaaagaggacgtgcttttgtcaataccagaaaggattttcaaaaagattttgtaaaatattgtgttgaagaagaagaaaaagctgcagagatgcataaaatgaaatctacaacccaggcaaatcggatgagtgtagatgctgtagaaattgaaacactcagaaaaacagttgaggactatttctgcttttgctatgggaaagctttaggcaaatccacagtggtacctgtaccatatgagaagatgctgcgagaccagtcggctgtggtagtgcaggggcttccggaaggtgttgcctttaaacaccccgagaactatgatcttgcaaccctgaaatggattttggagaacaaagcagggatttcattcatcattaagagaccttttttagagccaaagaagcatgtaggtggtcgtgtgatggtaacagatgctgacaggtcaatactatctccaggtggaagttgtggccccatcaaagtgaaaactgaacccacagaagattctggcatttccctggaaatggcagctgtgacagtaaaggaagaatcagaagatcctgattattatcaatataacattcaaggaagccaccattcttcagagggcaatgaaggcacagaaatggaagtaccagcagaagattctactcaacatgtcccttcagaaacaagtgaggaccctgaagttgaggtgactattgaagatgatgattattctccaccgtctaagagaccaaaggccaatgagctaccgcagccaccagtcccggaacccgccaatgctgggaagcggaaagtgagggagttcaacttcgagaaatggaatgctcgcatcactgatctacgtaaacaagttgaagaattgtttgaaaggaaatatgctcaagccataaaagccaaaggtccggtgacgatcccgtaccctcttttccagtctcatgttgaagatctttatgtagaaggacttcctgaaggaattccttttagaaggccatctacttacggaattcctcgcctggagaggatattacttgcaaaggaaaggattcgttttgtgattaagaaacatgagcttctgaattcaacacgtgaagatttacagcttgataagccagcttcaggagtaaaggaagaatggtatgccagaatcactaaattaagaaagatggtggatcagcttttctgcaaaaaatttgcggaagccttggggagcactgaagccaaggctgtaccgtaccaaaaatttgaggcacacccgaatgatctgtacgtggaaggactgccagaaaacattcctttccgaagtccctcatggtatggaatcccaaggctggaaaaaatcattcaagtgggcaatcgaattaaatttgttattaaaagaccagaacttctgactcacagtaccactgaagttactcagccaagaacgaatacaccagtcaaagaagattggaatgtcagaattaccaagctacggaagcaagtggaagagatttttaatttgaaatttgcttagatttgttgacagcggtttcctggagtgctgtcttgagaacgattctgaggaggctcagcaagaaagagtgtttcagttgattgggtgtgtctgtcatggagaaggaactcaagctcttggactcaccgaggcagtaaaagtaccatatcctgtgtttgaatcaaacccggagttcttgtatgtggaaggcttgccagaggggattcccttccgaagccctacctggtttggaattccacgacttgaaaggatcgtccgcgggagtaataaaatcaagttcgttgttaaaaaacctgaactagttatttcctacttgcctcctgggatggctagtaaaataaacactaaagctttgcagtcccccaaaagaccacgaagtcctgggagtaattcaaaggttcctgaaattgaggtcaccgtggaaggccctaataacaacaatcctcaaacctcagctgttcgaaccccgacccagactaacggttctaacgttcccttcaagccacgagggagagagttttcctttgaggcctggaatgccaaaatcacggacctaaaacagaaagttgaaaatctcttcaatgagaaatgtggggaagctcttggccttaaacaagctgtgaaggtgccgttcgcgttatttgagtctttcccggaagacttttatgtggaaggcttacctgagggtgtgccattccgaagaccatcgacttttggcattccgaggctggagaagatactcagaaacaaagccaaaattaagttcatcattaaaaagcccgaaatgtttgagacggcgattaaggagagcacctcctctaagagccctcccagaaaaataaattcatcacccaatgttaatactactgcatcaggtgttgaagaccttaacatcattcaggtgacaattccagatgatgataatgaaagactctcgaaagttgaaaaagctagacagctaagagaacaagtgaatgacctctttagtcggaaatttggtgaagctattggtatgggttttcctgtgaaagttccctacaggaaaatcacaattaaccctggctgtgtggtggttgatggcatgcccccgggggtgtccttcaaagcccccagctacctggaaatcagctccatgagaaggatcttagactctgccgagtttatcaaattcacggtcattagaccatttccaggacttgtgattaataaccagctggttgatcagagtgagtcagaaggccccgtgatacaagaatcagctgaaccaagccagttggaagttccagccacagaagaaataaaagagactgatggaagctctcagatcaagcaagaaccagaccccacgtggtagacctcttccctcctaggcttaaagtatcagtggttgagaagagcttttcggacctgttactaccccaagctgtgtaatatacttgtataacagaaataccttctatacaaacctttttttctacttttagatagaaatgtctactttttcagcagttctgtgaattaaagagcagagtgactgtgggtctggaatggctggtgtacttgggaatgtactatcaggattttacagcaatgctgggaaatgacagggaaaatgacaggaatgaatctcaccagattttttatgtactcagcagagccttgagttacggtgtttattttccaatcaagtgaagatatctcctacttctcctactggaacatctcagcttctgcagtgaagaaaaattcctgtgatagttcagttctttagtttttctatttgaaaaaaaaaaatcatttaaatgatcctttgttcacggctctccttaatgactgagtgaacagttcctatctgtatatttgactaaaccttttcctaagctatctctcatggttcctatgtttttttatcataattaaaagcaaaaccatctggatcacctaacagtcagaggtcagtatctcagcgtgtgaattatagaggaaatacagagagaacctcttccacttttacttttcgtccaaataaaatgcatggtgtaccagaagttgaagatcgggttgaggattggggctagctcgatgacactaaggccccaacatcgcgggacctgctgtggcgcggattcttaggaacgctgttctagccggccccctctccaggggtcgccgtggccggcattatttcctagttcttcttgtaaccctgaggtgccagcgcggggagtgaggaggggtcagggggctaaggatgcaacctctgacgttctgcgccttcctaggagagtcttacatgtgttgagatttcacaagcaatgcgagttgtaaaataccagctctacaagaagctaggctctgtgacggcatagttttcagtagctttatcacaatattcacaatggagaattatatgacatggtagcagaaataggcccttttatgtgttgcttctattttacctcaaattgtagatatagggtaatcaataaaatccatccatgcctttcacacactaagt

SEQ ID NO: 4167 - protein, 564 aa, Homo sapiens; identical to SEQ ID NO: 4061

SEQ ID NO: 4168 - DNA, 7963 bp, Homo sapiens
aaaaaaaaaaaaaaaaaaaaaaaaaaaagaaaaaagaaaaaaaaaaggaggaggaggaggagggtgagagagaagctgggagagcagagaaaaggggccaccggtcgcccccccgcttccccgcacgcgctctccagccgcggccgcccgcctgccgcggtcaccccggcctctgcctctgtcccccagtgatcggatcaaggcgctgagcgaggccctgcctgcggggcggccatgcggcggtgacaggagcgcgaccgacacgcacgggcccctcgccccctctcgcctcccgtccgctcgccagctcccctcagccgaggctgctccgcggcggccgcagcccgcgcgcggcccacactcgcctcccctcggcacccccggccccggagctgcctggaggcggccgcactcggggatcatggcccaagttgcaatgtccaccctccccgttgaagatgaggagtcctcggagagcaggatggtggtgacattcctcatgtcagctctcgagtccatgtgtaaagaactggccaagtccaaagccgaagtggcctgcattgcagtgtatgaaacagacgtgtttgtcgtcggaactgaaagaggacgtgcttttgtcaataccagaaaggattttcaaaaagattttgtaaaatattgtgttgaagaagaagaaaaagctgcagagatgcataaaatgaaatctacaacccaggcaaatcggatgagtgtagatgctgtagaaattgaaacactcagaaaaacagttgaggactatttctgcttttgctatgggaaagctttaggcaaatccacagtggtacctgtaccatatgagaagatgctgcgagaccagtcggctgtggtagtgcaggggcttccggaaggtgttgcctttaaacaccccgagaactatgatcttgcaaccctgaaatggattttggagaacaaagcagggatttcattcatcattaagagaccttttttagagccaaagaagcatgtaggtggtcgtgtgatggtaacagatgctgacaggtcaatactatctccaggtggaagttgtggccccatcaaagtgaaaactgaacccacagaagattctggcatttccctggaaatggcagctgtgacagtaaaggaagaatcagaagatcctgattattatcaatataacattcaagcaggcccttctgaaactgatgatgttgatgaaaaacagcccctatcgaagcctttgcaaggaagccaccattcttcagagggcaatgaaggcacagaaatggaagtaccagcagaagattctactcaacatgtcccttcagaaacaagtgaggaccctgaagttgaggtgactattgaagatgatgattattctccaccgtctaagagaccaaaggccaatgagctaccgcagccaccagtcccggaacccgccaatgctgggaagcggaaagtgagggagttcaacttcgagaaatggaatgctcgcatcactgatctacgtaaacaagttgaagaattgtttgaaaggaaatatgctcaagccataaaagccaaaggtccggtgacgatcccgtaccctcttttccagtctcatgttgaagatctttatgtagaaggacttcctgaaggaattccttttagaaggccatctacttacggaattcctcgcctggagaggatattacttgcaaaggaaaggattcgttttgtgattaagaaacatgagcttctgaattcaacacgtgaagatttacagcttgataagccagcttcaggagtaaaggaagaatggtatgccagaatcactaaattaagaaagatggtggatcagcttttctgcaaaaaatttgcggaagccttggggagcactgaagccaaggctgtaccgtaccaaaaatttgaggcacacccgaatgatctgtacgtggaaggactgccagaaaacattcctttccgaagtccctcatggtatggaatcccaaggctggaaaaaatcattcaagtgggcaatcgaattaaatttgttattaaaagaccagaacttctgactcacagtaccactgaagttactcagccaagaacgaatacaccagctcaagctcttggactcaccgaggcagtaaaagtaccatatcctgtgtttgaatcaaacccggagttcttgtatgtggaaggcttgccagaggggattcccttccgaagccctacctggtttggaattccacgacttgaaaggatcgtccgcgggagtaataaaatcaagttcgttgttaaaaaacctgaactagttatttcctacttgcctcctgggatggctagtaaaataaacactaaagctttgcagtcccccaaaagaccacgaagtcctgggagtaattcaaaggttcctgaaattgaggtcaccgtggaaggccctaataacaacaatcctcaaacctcagctgttcgaaccccgacccagactaacggttctaacgttcccttcaagccacgagggagagagttttcctttgaggcctggaatgccaaaatcacggacctaaaacagaaagttgaaaatctcttcaatgagaaatgtggggaagctcttggccttaaacaagctgtgaaggtgccgttcgcgttatttgagtctttcccggaagacttttatgtggaaggcttacctgagggtgtgccattccgaagaccatcgacttttggcattccgaggctggagaagatactcagaaacaaagccaaaattaagttcatcattaaaaagcccgaaatgtttgagacggcgattaaggagagcacctcctctaagagccctcccagaaaaataaattcatcacccaatgttaatactactgcatcaggtgttgaagaccttaacatcattcaggtgacaattccagatgatgataatgaaagactctcgaaagttgaaaaagctagacagctaagagaacaagtgaatgacctctttagtcggaaatttggtgaagctattggtatgggttttcctgtgaaagttccctacaggaaaatcacaattaaccctggctgtgtggtggttgatggcatgcccccgggggtgtccttcaaagcccccagctacctggaaatcagctccatgagaaggatcttagactctgccgagtttatcaaattcacggtcattaggtaagtgagagtttcctgcttagtcacaggagcgaatctggagctcatgaggctgactcttctaaaatgcagccacaggtagtcatcgaatccggcttcctatgctgtgcaatcaacaaatcaaaataacttgtgtcatcattagaatgtcagatgtgcttctacgaactaagctgactcttttaattctttggcaaagggttggcaaactaggactgtttgccaaattcaggctgcctcctatttttagagtcttcctgaaacacagctacacccgtattatccatggctgctttcctgtcacagtgagtaagtagctgggactgagaaggcatggcctccaaagtctaaaatatttactctctagcactttgtagaaaaaccttagctaggcacagtggctaacgcctgtaatcccagcattttgggaggccaaggcaggcagatcacctgaggtcaggagttccagaccagcctggccaacatggtgaaatcccatctctacaaaaataaaacagttagctgggcatgatggcgggtgcctgtaatcccagctactcgggaggctgaggcaggatagtcgcttgaacccaggaggtggaggttgcaatgagccaagatcatgccactgcactccagcctggacgacagagtgagactccatcacaagaaaaaaagaactttgtcaacctctgtcttagggcgccttgtcacaggcttcgggtcagacggattcaaccttgcatcagccatttgttagccaggtcactctgttctttgtctgtaaatgagattgatcgttgttcccactgagagtgtcagctccttcccgtagagcaggcatgatgattgtactcacctctgacaccattgtgagtgccacattccttcccacgtccttgtcactgtaagagatgcccacctgagcaccaaccccaggttatcttcccctttgtcttccagccccccagaaacagctacgactcaacctacccaatcatttcatcatcagattgccactgtctctagttcaggtctcttgggactggcactcagaaatctcataataaatcctcttgaggcttctcatacactcgtcttcttccaatcttctttccctcaaaatctcatattttggttccacttcacccaccgtcattctccatatcactcccaggagttaggcaaaaagccccttccgttcttccgtatgttaaacttagaatcactctgttccctgctctgcgtttctattttttgtttttcctccatttactagtagcttaacactttctaacagtgttcttattattgatacgtatctatctcttccataagcttataaggtcacggataatacttctcattgtagtacgtaaatgacgtgggctagatatgagttgaataaacagttatacctgtaaattcttacagagtgaaaataaattgttatactttacaatttgtttctctctttagaccatttccaggacttgtgattaataaccgtgagtattttgtgaagtgttttgtttttgttttttcctggggtctgacgtgtgtgcgtgtgagtgtgtatacatgcttaacgtatatcacgttacttcacctatgtcagtaaccaggccaaatacttgttttagccctcagtaaaaacaccaggcacttcctagttgtaaaattattcaagcttcttaacttcctatcctcgatgcacttaatcataaaatggtaataatagcaccgattttgggggagtcgttccagtagatggaaagcatctggaacaggtgtcagcaagctcctgccgacgtgtatgcataaagttttattgaaaccaccatcgtgtccatttgtttatggcagaactgagagatggcagcagcaagtgtgtgcctgcaaaacctaaaatatttactaattggctctgcaagaaaagagtttgcatccccctaacctagaacagtgtctagcctctagtatgtgtttagcctacagtatgtgctcagcgaatacaatctatatttattactgcttttatgactgttataattactgtgcttggatttcgttacaaagtaagtcacaatgtgcctgcttctgttagtatttcagcacagtgcctggcacacatggggctctcaaatattgctgagcgagtgaacaaatgtcctttcaattccttaacgttgatgtcattttcaatagtattttgagccaaacttaattttgcgagtgtgttttgttttcttaactttattattaaaaatgtataaaagtgaggccaggcgtggtggctcacgcctgtaatcccagcagtttgggaggctgaggcaggcggatcagttgaggttgggagttggagaccagcccgtccaacatggtgaaagcctgtctctactaaaaatacaaaaatcagctgggtgtggtggcgcgtgcctgtaatcccagctactcaggaggctgaggcaggagagttgcttgaatcctagaggtggaggttgcagtgagctgagatcgtgccattgcactccagcctgggcaacaagagcaaaactctgtcccaataaataaataaataaaatgttctcttttgttcctgttcttgtgcggtagtgtggtatagagttttatggtaattactgtgaattagtgattctgagggacatatcagaactctgaggtttgtttccttctcatcttgagggaaacagcaaatgtatgttaaaatgcttttccaagggaacaacacatccttacattatttaaaccaatctgcttcattttcagagctggttgatcagagtgagtcagaaggccccgtgatacaagaatcagctgaaccaagccagttggaagttccagccacagaagaaataaaagagactgatggaagctctcagatcaagcaagaaccagaccccacgtggtagacctcttccctcctagggtaaatcagcttctgtgtcagggatgctgtgtggtgtccatctgaaccccctgcatacgcgtagctaatgtgatctccccactttcacataagatggtggccctgccttcagggaatgtgggagccaggtgggagccttcccggatatttaagctagaagattctacagggagattctccttggatcaatatatgtctctcagtcaaagatgtaaaagcacttttgccttaaaaagaatgttctgtttctaaatagagtcaacgttgtcctcctcattggaattcactatgagtcagaatcattagactgacttttttttttccatagtaatagtattttgcagagtctcacagagctgcagatcttttgttcatcttgcagagttaacaagtctgatcctgttagtccagatttcttaaatttggccaagttataataggagcagtagcttgagacccgaagtcaggaaactttgacaatggatttttttttttaatccagagacttgtactggaatttgccttaccctgtcagctcatggacttaaggtttcatcccgctttatgagtgcttctgaatccaagtcattgttacctgaatttgcaaattaagttgtgatattcgtgactgttaaattcctgtaattagattaacctctttgcttgcttgtttgttttctctcctattttagcttaaagtatcagtggttgagaagagcttttcggacctgttactaccccaagctgtgtaatatacttgtataacagaaataccttctatacaaacctttttttctacttttagatagaaatgtctactttttcagcagttctgtgaattaaagagcagagtgactgtgggtctggaatggctggtgtacttgggaatgtactatcaggattttacagcaatgctgggaaatgacagggaaaatgacaggaatgaatctcaccagattttttatgtactcagcagagccttgagttacggtgtttattttccaatcaagtgaagatatctcctacttctcctactggaacatctcagcttctgcagtgaagaaaaattcctgtgatagttcagttctttagtttttctatttgaaaaaaaaaaatcatttaaatgatcctttgttcacggctctccttaatgactgagtgaacagttcctatctgtatatttgactaaaccttttcctaagctatctctcatggttcctatgtttttttatcataattaaaagcaaaaccatctggatcacctaacagtcagaggtcagtatctcagcgtgtgaattatagaggaaatacagagagaacctcttccacttttacttttcgtccaaataaaatgcatggtgtaccagaagttgaagatcgggttgaggattggggctagctcgatgacactaaggccccaacatcgcgggacctgctgtggcgcggattcttaggaacgctgttctagccggccccctctccaggggtcgccgtggccggcattatttcctagttcttcttgtaaccctgaggtgccagcgcggggagtgaggaggggtcagggggctaaggatgcaacctctgacgttctgcgccttcctaggagagtcttacatgtgttgagatttcacaagcaatgcgagttgtaaaataccagctctacaagaagctaggctctgtgacggcatagttttcagtagctttatcacaatattcacaatggagaattatatgacatggtagcagaaataggcccttttatgtgttgcttctattttacctcaaattgtagatatagggtaatcaataaaatccatccatgcctttcacacactaagt

SEQ ID NO: 4169 - protein, 918 aa, Homo sapiens
MAQVAMSTLPVEDEESSESRMVVTFLMSALESMCKELAKSKAEVACIAVYETDVFVVGTERGRAFVNTRKDFQKDFVKYCVEEEEKAAEMHKMKSTTQANRMSVDAVEIETLRKTVEDYFCFCYGKALGKSTVVPVPYEKMLRDQSAVVVQGLPEGVAFKHPENYDLATLKWILENKAGISFIIKRPFLEPKKHVGGRVMVTDADRSILSPGGSCGPIKVKTEPTEDSGISLEMAAVTVKEESEDPDYYQYNIQAGPSETDDVDEKQPLSKPLQGSHHSSEGNEGTEMEVPAEDSTQHVPSETSEDPEVEVTIEDDDYSPPSKRPKANELPQPPVPEPANAGKRKVREFNFEKWNARITDLRKQVEELFERKYAQAIKAKGPVTIPYPLFQSHVEDLYVEGLPEGIPFRRPSTYGIPRLERILLAKERIRFVIKKHELLNSTREDLQLDKPASGVKEEWYARITKLRKMVDQLFCKKFAEALGSTEAKAVPYQKFEAHPNDLYVEGLPENIPFRSPSWYGIPRLEKIIQVGNRIKFVIKRPELLTHSTTEVTQPRTNTPAQALGLTEAVKVPYPVFESNPEFLYVEGLPEGIPFRSPTWFGIPRLERIVRGSNKIKFVVKKPELVISYLPPGMASKINTKALQSPKRPRSPGSNSKVPEIEVTVEGPNNNNPQTSAVRTPTQTNGSNVPFKPRGREFSFEAWNAKITDLKQKVENLFNEKCGEALGLKQAVKVPFALFESFPEDFYVEGLPEGVPFRRPSTFGIPRLEKILRNKAKIKFIIKKPEMFETAIKESTSSKSPPRKINSSPNVNTTASGVEDLNIIQVTIPDDDNERLSKVEKARQLREQVNDLFSRKFGEAIGMGFPVKVPYRKITINPGCVVVDGMPPGVSFKAPSYLEISSMRRILDSAEFIKFTVIR

SEQ ID NO: 4170 - DNA, 5085 bp, Homo sapiens
aaaaaaaaaaaaaaaaaaaaaaaaaaaagaaaaaagaaaaaaaaaaggaggaggaggaggagggtgagagagaagctgggagagcagagaaaaggggccaccggtcgcccccccgcttccccgcacgcgctctccagccgcggccgcccgcctgccgcggtcaccccggcctctgcctctgtcccccagtgatcggatcaaggcgctgagcgaggccctgcctgcggggcggccatgcggcggtgacaggagcgcgaccgacacgcacgggcccctcgccccctctcgcctcccgtccgctcgccagctcccctcagccgaggctgctccgcggcggccgcagcccgcgcgcggcccacactcgcctcccctcggcacccccggccccggagctgcctggaggcggccgcactcggggatcatggcccaagttgcaatgtccaccctccccgttgaagatgaggagtcctcggagagcaggatggtggtgacattcctcatgtcagctctcgagtccatgtgtaaagaactggccaagtccaaagccgaagtggcctgcattgcagtgtatgaaacagacgtgtttgtcgtcggaactgaaagaggacgtgcttttgtcaataccagaaaggattttcaaaaagattttgtaaaatattgtgttgaagaagaagaaaaagctgcagagatgcataaaatgaaatctacaacccaggcaaatcggatgagtgtagatgctgtagaaattgaaacactcagaaaaacagttgaggactatttctgcttttgctatgggaaagctttaggcaaatccacagtggtacctgtaccatatgagaagatgctgcgagaccagtcggctgtggtagtgcaggggcttccggaaggtgttgcctttaaacaccccgagaactatgatcttgcaaccctgaaatggattttggagaacaaagcagggatttcattcatcattaagagaccttttttagagccaaagaagcatgtaggtggtcgtgtgatggtaacagatgctgacaggtcaatactatctccaggtggaagttgtggccccatcaaagtgaaaactgaacccacagaagattctggaagccaccattcttcagagggcaatgaaggcacagaaatggaagtaccagcagaagattctactcaacatgtcccttcagaaacaagtgaggaccctgaagttgaggtgactattgaagatgatgattattctccaccgtctaagagaccaaaggccaatgagctaccgcagccaccagtcccggaacccgccaatgctgggaagcggaaagtgagggagttcaacttcgagaaatggaatgctcgcatcactgatctacgtaaacaagttgaagaattgtttgaaaggaaatatgctcaagccataaaagccaaaggtccggtgacgatcccgtaccctcttttccagtctcatgttgaagatctttatgtagaaggacttcctgaaggaattccttttagaaggccatctacttacggaattcctcgcctggagaggatattacttgcaaaggaaaggattcgttttgtgattaagaaacatgagcttctgaattcaacacgtgaagatttacagcttgataagccagcttcaggagtaaaggaagaatggtatgccagaatcactaaattaagaaagatggtggatcagcttttctgcaaaaaatttgcggaagccttggggagcactgaagccaaggctgtaccgtaccaaaaatttgaggcacacccgaatgatctgtacgtggaaggactgccagaaaacattcctttccgaagtccctcatggtatggaatcccaaggctggaaaaaatcattcaagtgggcaatcgaattaaatttgttattaaaagaccagaacttctgactcacagtaccactgaagttactcagccaagaacgaatacaccagtcaaagaagattggaatgtcagaattaccaagctacggaagcaagtggaagagatttttaatttgaaatttgctcaagctcttggactcaccgaggcagtaaaagtaccatatcctgtgtttgaatcaaacccggagttcttgtatgtggaaggcttgccagaggggattcccttccgaagccctacctggtttggaattccacgacttgaaaggatcgtccgcgggagtaataaaatcaagttcgttgttaaaaaacctgaactagttatttcctacttgcctcctgggatggctagtaaaataaacactaaagctttgcagtcccccaaaagaccacgaagtcctgggagtaattcaaaggttcctgaaattgaggtcaccgtggaaggccctaataacaacaatcctcaaacctcagctgttcgaaccccgacccagactaacggttctaacgttcccttcaagccacgagggagagagttttcctttgaggcctggaatgccaaaatcacggacctaaaacagaaagttgaaaatctcttcaatgagaaatgtggggaagctcttggccttaaacaagctgtgaaggtgccgttcgcgttatttgagtctttcccggaagacttttatgtggaaggcttacctgagggtgtgccattccgaagaccatcgacttttggcattccgaggctggagaagatactcagaaacaaagccaaaattaagttcatcattaaaaagcccgaaatgtttgagacggcgattaaggagagcacctcctctaagagccctcccagaaaaataaattcatcacccaatgttaatactactgcatcaggtgttgaagaccttaacatcattcaggtgacaattccagatgatgataatgaaagactctcgaaagttgaaaaagctagacagctaagagaacaagtgaatgacctctttagtcggaaatttggtgaagctattggtatgggttttcctgtgaaagttccctacaggaaaatcacaattaaccctggctgtgtggtggttgatggcatgcccccgggggtgtccttcaaagcccccagctacctggaaatcagctccatgagaaggatcttagactctgccgagtttatcaaattcacggtcattagaccatttccaggacttgtgattaataaccagctggttgatcagagtgagtcagaaggccccgtgatacaagaatcagctgaaccaagccagttggaagttccagccacagaaggtaaaaggacctcttccctcctagggtaaatcagcttctgtgtcagggatgctgtgtggtgtccatctgaaccccctgcatacgcgtagctaatgtgatctccccactttcacataagatggtggccctgccttcagggaatgtgggagccaggtgggagccttcccggatatttaagctagaagattctacagggagattctccttggatcaatatatgtctctcagtcaaagatgtaaaagcacttttgccttaaaaagaatgttctgtttctaaatagagtcaacgttgtcctcctcattggaattcactatgagtcagaatcattagactgacttttttttttccatagtaatagtattttgcagagtctcacagagctgcagatcttttgttcatcttgcagagttaacaagtctgatcctgttagtccagatttcttaaatttggccaagttataataggagcagtagcttgagacccgaagtcaggaaactttgacaatggatttttttttttaatccagagacttgtactggaatttgccttaccctgtcagctcatggacttaaggtttcatcccgctttatgagtgcttctgaatccaagtcattgttacctgaatttgcaaattaagttgtgatattcgtgactgttaaattcctgtaattagattaacctctttgcttgcttgtttgttttctctcctattttagcttaaagtatcagtggttgagaagagcttttcggacctgttactaccccaagctgtgtaatatacttgtataacagaaataccttctatacaaacctttttttctacttttagatagaaatgtctactttttcagcagttctgtgaattaaagagcagagtgactgtgggtctggaatggctggtgtacttgggaatgtactatcaggattttacagcaatgctgggaaatgacagggaaaatgacaggaatgaatctcaccagattttttatgtactcagcagagccttgagttacggtgtttattttccaatcaagtgaagatatctcctacttctcctactggaacatctcagcttctgcagtgaagaaaaattcctgtgatagttcagttctttagtttttctatttgaaaaaaaaaaatcatttaaatgatcctttgttcacggctctccttaatgactgagtgaacagttcctatctgtatatttgactaaaccttttcctaagctatctctcatggttcctatgtttttttatcataattaaaagcaaaaccatctggatcacctaacagtcagaggtcagtatctcagcgtgtgaattatagaggaaatacagagagaacctcttccacttttacttttcgtccaaataaaatgcatggtgtaccagaagttgaagatcgggttgaggattggggctagctcgatgacactaaggccccaacatcgcgggacctgctgtggcgcggattcttaggaacgctgttctagccggccccctctccaggggtcgccgtggccggcattatttcctagttcttcttgtaaccctgaggtgccagcgcggggagtgaggaggggtcagggggctaaggatgcaacctctgacgttctgcgccttcctaggagagtcttacatgtgttgagatttcacaagcaatgcgagttgtaaaataccagctctacaagaagctaggctctgtgacggcatagttttcagtagctttatcacaatattcacaatggagaattatatgacatggtagcagaaataggcccttttatgtgttgcttctattttacctcaaattgtagatatagggtaatcaataaaatccatccatgcctttcacacactaagt

SEQ ID NO: 4171 - protein, 942 aa, Homo sapiens
MAQVAMSTLPVEDEESSESRMVVTFLMSALESMCKELAKSKAEVACIAVYETDVFVVGTERGRAFVNTRKDFQKDFVKYCVEEEEKAAEMHKMKSTTQANRMSVDAVEIETLRKTVEDYFCFCYGKALGKSTVVPVPYEKMLRDQSAVVVQGLPEGVAFKHPENYDLATLKWILENKAGISFIIKRPFLEPKKHVGGRVMVTDADRSILSPGGSCGPIKVKTEPTEDSGSHHSSEGNEGTEMEVPAEDSTQHVPSETSEDPEVEVTIEDDDYSPPSKRPKANELPQPPVPEPANAGKRKVREFNFEKWNARITDLRKQVEELFERKYAQAIKAKGPVTIPYPLFQSHVEDLYVEGLPEGIPFRRPSTYGIPRLERILLAKERIRFVIKKHELLNSTREDLQLDKPASGVKEEWYARITKLRKMVDQLFCKKFAEALGSTEAKAVPYQKFEAHPNDLYVEGLPENIPFRSPSWYGIPRLEKIIQVGNRIKFVIKRPELLTHSTTEVTQPRTNTPVKEDWNVRITKLRKQVEEIFNLKFAQALGLTEAVKVPYPVFESNPEFLYVEGLPEGIPFRSPTWFGIPRLERIVRGSNKIKFVVKKPELVISYLPPGMASKINTKALQSPKRPRSPGSNSKVPEIEVTVEGPNNNNPQTSAVRTPTQTNGSNVPFKPRGREFSFEAWNAKITDLKQKVENLFNEKCGEALGLKQAVKVPFALFESFPEDFYVEGLPEGVPFRRPSTFGIPRLEKILRNKAKIKFIIKKPEMFETAIKESTSSKSPPRKINSSPNVNTTASGVEDLNIIQVTIPDDDNERLSKVEKARQLREQVNDLFSRKFGEAIGMGFPVKVPYRKITINPGCVVVDGMPPGVSFKAPSYLEISSMRRILDSAEFIKFTVIRPFPGLVINNQLVDQSESEGPVIQESAEPSQLEVPATEGKRTSSLLG

SEQ ID NO: 4172 - DNA, 4108 bp, Homo sapiens
aaaaaaaaaaaaaaaaaaaaaaaaaaaagaaaaaagaaaaaaaaaaggaggaggaggaggagggtgagagagaagctgggagagcagagaaaaggggccaccggtcgcccccccgcttccccgcacgcgctctccagccgcggccgcccgcctgccgcggtcaccccggcctctgcctctgtcccccagtgatcggatcaaggcgctgagcgaggccctgcctgcggggcggccatgcggcggtgacaggagcgcgaccgacacgcacgggcccctcgccccctctcgcctcccgtccgctcgccagctcccctcagccgaggctgctccgcggcggccgcagcccgcgcgcggcccacactcgcctcccctcggcacccccggccccggagctgcctggaggcggccgcactcggggatcatggcccaagttgcaatgtccaccctccccgttgaagatgaggagtcctcggagagcaggatggtggtgacattcctcatgtcagctctcgagtccatgtgtaaagaactggccaagtccaaagccgaagtggcctgcattgcagtgtatgaaacagacgtgtttgtcgtcggaactgaaagaggacgtgcttttgtcaataccagaaaggattttcaaaaagattttgtaaaatattgtgttgaagaagaagaaaaagctgcagagatgcataaaatgaaatctacaacccaggcaaatcggatgagtgtagatgctgtagaaattgaaacactcagaaaaacagttgaggactatttctgcttttgctatgggaaagctttaggcaaatccacagtggtacctgtaccatatgagaagatgctgcgagaccagtcggctgtggtagtgcaggggcttccggaaggtgttgcctttaaacaccccgagaactatgatcttgcaaccctgaaatggattttggagaacaaagcagggatttcattcatcattaagagaccttttttagagccaaagaagcatgtaggtggtcgtgtgatggtaacagatgctgacaggtcaatactatctccaggtggaagttgtggccccatcaaagtgaaaactgaacccacagaagattctggcatttccctggaaatggcagctgtgacagtaaaggaagaatcagaagatcctgattattatcaatataacattcaaggaagccaccattcttcagagggcaatgaaggcacagaaatggaagtaccagcagaagatgatgattattctccaccgtctaagagaccaaaggccaatgagctaccgcagccaccagtcccggaacccgccaatgctgggaagcggaaagtgagggagttcaacttcgagaaatggaatgctcgcatcactgatctacgtaaacaagttgaagaattgtttgaaaggaaatatgctcaagccataaaagccaaaggtccggtgacgatcccgtaccctcttttccagtctcatgttgaagatctttatgtagaaggacttcctgaaggaattccttttagaaggccatctacttacggaattcctcgcctggagaggatattacttgcaaaggaaaggattcgttttgtgattaagaaacatgagcttctgaattcaacacgtgaagatttacagcttgataagccagcttcaggagtaaaggaagaatggtatgccagaatcactaaattaagaaagatggtggatcagcttttctgcaaaaaatttgcggaagccttggggagcactgaagccaaggctgtaccgtaccaaaaatttgaggcacacccgaatgatctgtacgtggaaggactgccagaaaacattcctttccgaagtccctcatggtatggaatcccaaggctggaaaaaatcattcaagtgggcaatcgaattaaatttgttattaaaagaccagaacttctgactcacagtaccactgaagttactcagccaagaacgaatacaccagtcaaagaagattggaatgtcagaattaccaagctacggaagcaagtggaagagatttttaatttgaaatttgctcaagctcttggactcaccgaggcagtaaaagtaccatatcctgtgtttgaatcaaacccggagttcttgaaaggatcgtccgcgggagtaataaaatcaagttcgttgttaaaaaacctgaactagttatttcctacttgcctcctgggatggctagtaaaataaacactaaagctttgcagtcccccaaaagaccacgaagtcctgggagtaattcaaaggttcctgaaattgaggtcaccgtggaaggccctaataacaacaatcctcaaacctcagctgttcgaaccccgacccagactaacggttctaacgttcccttcaagccacgagggagagagttttcctttgaggcctggaatgccaaaatcacggacctaaaacagaaagttgaaaatctcttcaatgagaaatgtggggaagctcttggccttaaacaagctgtgaaggtgccgttcgcgttatttgagtctttcccggaagacttttatgtggaaggcttacctgagggtgtgccattccgaagaccatcgacttttggcattccgaggctggagaagatactcagaaacaaagccaaaattaagttcatcattaaaaagcccgaaatgtttgagacggcgattaaggagagcacctcctctaagagccctcccagaaaaataaattcatcacccaatgttaatactactgcatcaggtgttgaagaccttaacatcattcaggtgacaattccagatgatgataatgaaagactctcgaaagttgaaaaagctagacagctaagagaacaagtgaatgacctctttagtcggaaatttggtgaagctattggtatgggttttcctgtgaaagttccctacaggaaaatcacaattaaccctggctgtgtggtggttgatggcatgcccccgggggtgtccttcaaagcccccagctacctggaaatcagctccatgagaaggatcttagactctgccgagtttatcaaattcacggtcattagaccatttccaggacttgtgattaataaccagctggttgatcagagtgagtcagaaggccccgtgatacaagaatcagctgaaccaagccagttggaagttccagccacagaagaaataaaagagactgatggaagctctcagatcaagcaagaaccagaccccacgtggtagacctcttccctcctaggagccttgagttacggtgtttattttccaatcaagtgaagatatctcctacttctcctactggaacatctcagcttctgcagtgaagaaaaattcctgtgatagttcagttctttagtttttctatttgaaaaaaaaaaatcatttaaatgatcctttgttcacggctctccttaatgactgagtgaacagttcctatctgtatatttgactaaaccttttcctaagctatctctcatggttcctatgtttttttatcataattaaaagcaaaaccatctggatcacctaacagtcagaggtcagtatctcagcgtgtgaattatagaggaaatacagagagaacctcttccacttttacttttcgtccaaataaaatgcatggtgtaccagaagttgaagatcgggttgaggattggggctagctcgatgacactaaggccccaacatcgcgggacctgctgtggcgcggattcttaggaacgctgttctagccggccccctctccaggggtcgccgtggccggcattatttcctagttcttcttgtaaccctgaggtgccagcgcggggagtgaggaggggtcagggggctaaggatgcaacctctgacgttctgcgccttcctaggagagtcttacatgtgttgagatttcacaagcaatgcgagttgtaaaataccagctctacaagaagctaggctctgtgacggcatagttttcagtagctttatcacaatattcacaatggagaattatatgacatggtagcagaaataggcccttttatgtgttgcttctattttacctcaaattgtagatatagggtaatcaataaaatccatccatgcctttcacacactaagt

SEQ ID NO: 4173 - protein, 584 aa, Homo sapiens
MAQVAMSTLPVEDEESSESRMVVTFLMSALESMCKELAKSKAEVACIAVYETDVFVVGTERGRAFVNTRKDFQKDFVKYCVEEEEKAAEMHKMKSTTQANRMSVDAVEIETLRKTVEDYFCFCYGKALGKSTVVPVPYEKMLRDQSAVVVQGLPEGVAFKHPENYDLATLKWILENKAGISFIIKRPFLEPKKHVGGRVMVTDADRSILSPGGSCGPIKVKTEPTEDSGISLEMAAVTVKEESEDPDYYQYNIQGSHHSSEGNEGTEMEVPAEDDDYSPPSKRPKANELPQPPVPEPANAGKRKVREFNFEKWNARITDLRKQVEELFERKYAQAIKAKGPVTIPYPLFQSHVEDLYVEGLPEGIPFRRPSTYGIPRLERILLAKERIRFVIKKHELLNSTREDLQLDKPASGVKEEWYARITKLRKMVDQLFCKKFAEALGSTEAKAVPYQKFEAHPNDLYVEGLPENIPFRSPSWYGIPRLEKIIQVGNRIKFVIKRPELLTHSTTEVTQPRTNTPVKEDWNVRITKLRKQVEEIFNLKFAQALGLTEAVKVPYPVFESNPEFLKGSSAGVIKSSSLLKNLN

SEQ ID NO: 4174 - DNA, 5202 bp, Homo sapiens
aaaaaaaaaaaaaaaaaaaaaaaaaaaagaaaaaagaaaaaaaaaaggaggaggaggaggagggtgagagagaagctgggagagcagagaaaaggggccaccggtcgcccccccgcttccccgcacgcgctctccagccgcggccgcccgcctgccgcggtcaccccggcctctgcctctgtcccccagtgatcggatcaaggcgctgagcgaggccctgcctgcggggcggccatgcggcggtgacaggagcgcgaccgacacgcacgggcccctcgccccctctcgcctcccgtccgctcgccagctcccctcagccgaggctgctccgcggcggccgcagcccgcgcgcggcccacactcgcctcccctcggcacccccggccccggagctgcctggaggcggccgcactcggggatcatggcccaagttgcaatgtccaccctccccgttgaagatgaggagtcctcggagagcaggatggtggtgacattcctcatgtcagctctcgagtccatgtgtaaagaactggccaagtccaaagccgaagtggcctgcattgcagtgtatgaaacagacgtgtttgtcgtcggaactgaaagaggacgtgcttttgtcaataccagaaaggattttcaaaaagattttgtaaaatattgtgttgaagaagaagaaaaagctgcagagatgcataaaatgaaatctacaacccaggcaaatcggatgagtgtagatgctgtagaaattgaaacactcagaaaaacagttgaggactatttctgcttttgctatgggaaagctttaggcaaatccacagtggtacctgtaccatatgagaagatgctgcgagaccagtcggctgtggtagtgcaggggcttccggaaggtgttgcctttaaacaccccgagaactatgatcttgcaaccctgaaatggattttggagaacaaagcagggatttcattcatcattaagagaccttttttagagccaaagaagcatgtaggtggtcgtgtgatggtaacagatgctgacaggtcaatactatctccaggtggaagttgtggccccatcaaagtgaaaactgaacccacagaagattctggcatttccctggaaatggcagctgtgacagtaaaggaagaatcagaagatcctgattattatcaatataacattcaagcaggcccttctgaaactgatgatgttgatgaaaaacagcccctatcgaagcctttgcaaggaagccaccattcttcagagggcaatgaaggcacagaaatggaagtaccagcagaagattctactcaacatgtcccttcagaaacaagtgaggaccctgaagttgaggtgactattgaagatgatgattattctccaccgtctaagagaccaaaggccaatgagctaccgcagccaccagtcccggaacccgccaatgctgggaagcggaaagtgagggagttcaacttcgagaaatggaatgctcgcatcactgatctacgtaaacaagttgaagaattgtttgaaaggaaatatgctcaagccataaaagccaaaggtccggtgacgatcccgtaccctcttttccagtctcatgttgaagatctttatgtagaaggacttcctgaaggaattccttttagaaggccatctacttacggaattcctcgcctggagaggatattacttgcaaaggaaaggattcgttttgtgattaagaaacatgagcttctgaattcaacacgtgaagatttacagcttgataagccagcttcaggagtaaaggaagaatggtatgccagaatcactaaattaagaaagatggtggatcagcttttctgcaaaaaatttgcggaagccttggggagcactgaagccaaggctgtaccgtaccaaaaatttgaggcacacccgaatgatctgtacgtggaaggactgccagaaaacattcctttccgaagtccctcatggtatggaatcccaaggctggaaaaaatcattcaagtgggcaatcgaattaaatttgttattaaaagaccagaacttctgactcacagtaccactgaagttactcagccaagaacgaatacaccagctcaagctcttggactcaccgaggcagtaaaagtaccatatcctgtgtttgaatcaaacccggagttcttgtatgtggaaggcttgccagaggggattcccttccgaagccctacctggtttggaattccacgacttgaaaggatcgtccgcgggagtaataaaatcaagttcgttgttaaaaaacctgaactagttatttcctacttgcctcctgggatggctagtaaaataaacactaaagctttgcagtcccccaaaagaccacgaagtcctgggagtaattcaaaggttcctgaaattgaggtcaccgtggaaggccctaataacaacaatcctcaaacctcagctgttcgaaccccgacccagactaacggttctaacgttcccttcaagccacgagggagagagttttcctttgaggcctggaatgccaaaatcacggacctaaaacagaaagttgaaaatctcttcaatgagaaatgtggggaagctcttggccttaaacaagctgtgaaggtgccgttcgcgttatttgagtctttcccggaagacttttatgtggaaggcttacctgagggtgtgccattccgaagaccatcgacttttggcattccgaggctggagaagatactcagaaacaaagccaaaattaagttcatcattaaaaagcccgaaatgtttgagacggcgattaaggagagcacctcctctaagagccctcccagaaaaataaattcatcacccaatgttaatactactgcatcaggtgttgaagaccttaacatcattcaggtgacaattccagatgatgataatgaaagactctcgaaagttgaaaaagctagacagctaagagaacaagtgaatgacctctttagtcggaaatttggtgaagctattggtatgggttttcctgtgaaagttccctacaggaaaatcacaattaaccctggctgtgtggtggttgatggcatgcccccgggggtgtccttcaaagcccccagctacctggaaatcagctccatgagaaggatcttagactctgccgagtttatcaaattcacggtcattagaccatttccaggacttgtgattaataaccagctggttgatcagagtgagtcagaaggccccgtgatacaagaatcagctgaaccaagccagttggaagttccagccacagaagaaataaaagagactgatggaagctctcagatcaagcaagaaccagaccccacgtggtagacctcttccctcctagggtaaatcagcttctgtgtcagggatgctgtgtggtgtccatctgaaccccctgcatacgcgtagctaatgtgatctccccactttcacataagatggtggccctgccttcagggaatgtgggagccaggtgggagccttcccggatatttaagctagaagattctacagggagattctccttggatcaatatatgtctctcagtcaaagatgtaaaagcacttttgccttaaaaagaatgttctgtttctaaatagagtcaacgttgtcctcctcattggaattcactatgagtcagaatcattagactgacttttttttttccatagtaatagtattttgcagagtctcacagagctgcagatcttttgttcatcttgcagagttaacaagtctgatcctgttagtccagatttcttaaatttggccaagttataataggagcagtagcttgagacccgaagtcaggaaactttgacaatggatttttttttttaatccagagacttgtactggaatttgccttaccctgtcagctcatggacttaaggtttcatcccgctttatgagtgcttctgaatccaagtcattgttacctgaatttgcaaattaagttgtgatattcgtgactgttaaattcctgtaattagattaacctctttgcttgcttgtttgttttctctcctattttagcttaaagtatcagtggttgagaagagcttttcggacctgttactaccccaagctgtgtaatatacttgtataacagaaataccttctatacaaacctttttttctacttttagatagaaatgtctactttttcagcagttctgtgaattaaagagcagagtgactgtgggtctggaatggctggtgtacttgggaatgtactatcaggattttacagcaatgctgggaaatgacagggaaaatgacaggaatgaatctcaccagattttttatgtactcagcagagccttgagttacggtgtttattttccaatcaagtgaagatatctcctacttctcctactggaacatctcagcttctgcagtgaagaaaaattcctgtgatagttcagttctttagtttttctatttgaaaaaaaaaaatcatttaaatgatcctttgttcacggctctccttaatgactgagtgaacagttcctatctgtatatttgactaaaccttttcctaagctatctctcatggttcctatgtttttttatcataattaaaagcaaaaccatctggatcacctaacagtcagaggtcagtatctcagcgtgtgaattatagaggaaatacagagagaacctcttccacttttacttttcgtccaaataaaatgcatggtgtaccagaagttgaagatcgggttgaggattggggctagctcgatgacactaaggccccaacatcgcgggacctgctgtggcgcggattcttaggaacgctgttctagccggccccctctccaggggtcgccgtggccggcattatttcctagttcttcttgtaaccctgaggtgccagcgcggggagtgaggaggggtcagggggctaaggatgcaacctctgacgttctgcgccttcctaggagagtcttacatgtgttgagatttcacaagcaatgcgagttgtaaaataccagctctacaagaagctaggctctgtgacggcatagttttcagtagctttatcacaatattcacaatggagaattatatgacatggtagcagaaataggcccttttatgtgttgcttctattttacctcaaattgtagatatagggtaatcaataaaatccatccatgcctttcacacactaagt

SEQ ID NO: 4175 - protein, 974 aa, Homo sapiens; identical to SEQ ID NO: 4101

SEQ ID NO: 4176 - DNA, 7153 bp, Homo sapiens
aaaaaaaaaaaaaaaaaaaaaaaaaaaagaaaaaagaaaaaaaaaaggaggaggaggaggagggtgagagagaagctgggagagcagagaaaaggggccaccggtcgcccccccgcttccccgcacgcgctctccagccgcggccgcccgcctgccgcggtcaccccggcctctgcctctgtcccccagtgatcggatcaaggcgctgagcgaggccctgcctgcggggcggccatgcggcggtgacaggagcgcgaccgacacgcacgggcccctcgccccctctcgcctcccgtccgctcgccagctcccctcagccgaggctgctccgcggcggccgcagcccgcgcgcggcccacactcgcctcccctcggcacccccggccccggagctgcctggaggcggccgcactcggggatcatggcccaagttgcaatgtccaccctccccgttgaagatgaggagtcctcggagagcaggatggtggtgacattcctcatgtcagctctcgagtccatgtgtaaagaactggccaagtccaaagccgaagtggcctgcattgcagtgtatgaaacagacgtgtttgtcgtcggaactgaaagaggacgtgcttttgtcaataccagaaaggattttcaaaaagattttgtaaaatattgtgttgaagaagaagaaaaagctgcagagatgcataaaatgaaatctacaacccaggcaaatcggatgagtgtagatgctgtagaaattgaaacactcagaaaaacagttgaggactatttctgcttttgctatgggaaagctttaggcaaatccacagtggtacctgtaccatatgagaagatgctgcgagaccagtcggctgtggtagtgcaggggcttccggaaggtgttgcctttaaacaccccgagaactatgatcttgcaaccctgaaatggattttggagaacaaagcagggatttcattcatcattaagagaccttttttagagccaaagaagcatgtaggtggtcgtgtgatggtaacagatgctgacaggtcaatactatctccaggtggaagttgtggccccatcaaagtgaaaactgaacccacagaagattctggcatttccctggaaatggcagctgtgacagtaaaggaagaatcagaagatcctgattattatcaatataacattcaaggaagccaccattcttcagagggcaatgaaggcacagaaatggaagtaccagcagaagatgatgattattctccaccgtctaagagaccaaaggccaatgagctaccgcagccaccagtcccggaacccgccaatgctgggaagcggaaagtgagggagttcaacttcgagaaatggaatgctcgcatcactgatctacgtaaacaagttgaagaattgtttgaaaggaaatatgctcaagccataaaagccaaaggtccggtgacgatcccgtaccctcttttccagtctcatgttgaagatctttatgtagaaggacttcctgaaggaattccttttagaaggccatctacttacggaattcctcgcctggagaggatattacttgcaaaggaaaggattcgttttgtgattaagaaacatgagcttctgaattcaacacgtgaagatttacagcttgataagccagcttcaggagtaaaggaagaatggtatgccagaatcactaaattaagaaagatggtggatcagcttttctgcaaaaaatttgcggaagccttggggagcactgaagccaaggctgtaccgtaccaaaaatttgaggcacacccgaatgatctgtacgtggaaggactgccagaaaacattcctttccgaagtccctcatggtatggaatcccaaggctggaaaaaatcattcaagtgggcaatcgaattaaatttgttattaaaagaccagaacttctgactcacagtaccactgaagttactcagccaagaacgaatacaccagtcaaagaagattggaatgtcagaattaccaagctacggaagcaagtggaagagatttttaatttgaaatttgctcaagctcttggactcaccgaggcagtaaaagtaccatatcctgtgtttgaatcaaacccggagttcttgaaaggatcgtccgcgggagtaataaaatcaagttcgttgttaaaaaacctgaactagttatttcctacttgcctcctgggatggctagtaaaataaacactaaagctttgcagtcccccaaaagaccacgaagtcctgggagtaattcaaaggttcctgaaattgaggtcaccgtggaaggccctaataacaacaatcctcaaacctcagctgttcgaaccccgacccagactaacggttctaacgttcccttcaagccacgagggagagagttttcctttgaggcctggaatgccaaaatcacggacctaaaacagaaagttgaaaatctcttcaatgagaaatgtggggaagctcttggccttaaacaagctgtgaaggtgccgttcgcgttatttgagtctttcccggaagacttttatgtggaaggcttacctgagggtgtgccattccgaagaccatcgacttttggcattccgaggctggagaagatactcagaaacaaagccaaaattaagttcatcattaaaaagcccgaaatgtttgagacggcgattaaggagagcacctcctctaagagccctcccagaaaaataaattcatcacccaatgttaatactactgcatcaggtgttgaagaccttaacatcattcaggtgacaattccagatgatgataatgaaagactctcgaaagttgaaaaagctagacagctaagagaacaagtgaatgacctctttagtcggaaatttggtgaagctattggtatgggttttcctgtgaaagttccctacaggaaaatcacaattaaccctggctgtgtggtggttgatggcatgcccccgggggtgtccttcaaagcccccagctacctggaaatcagctccatgagaaggatcttagactctgccgagtttatcaaattcacggtcattaggtaagtgagagtttcctgcttagtcacaggagcgaatctggagctcatgaggctgactcttctaaaatgcagccacaggtagtcatcgaatccggcttcctatgctgtgcaatcaacaaatcaaaataacttgtgtcatcattagaatgtcagatgtgcttctacgaactaagctgactcttttaattctttggcaaagggttggcaaactaggactgtttgccaaattcaggctgcctcctatttttagagtcttcctgaaacacagctacacccgtattatccatggctgctttcctgtcacagtgagtaagtagctgggactgagaaggcatggcctccaaagtctaaaatatttactctctagcactttgtagaaaaaccttagctaggcacagtggctaacgcctgtaatcccagcattttgggaggccaaggcaggcagatcacctgaggtcaggagttccagaccagcctggccaacatggtgaaatcccatctctacaaaaataaaacagttagctgggcatgatggcgggtgcctgtaatcccagctactcgggaggctgaggcaggatagtcgcttgaacccaggaggtggaggttgcaatgagccaagatcatgccactgcactccagcctggacgacagagtgagactccatcacaagaaaaaaagaactttgtcaacctctgtcttagggcgccttgtcacaggcttcgggtcagacggattcaaccttgcatcagccatttgttagccaggtcactctgttctttgtctgtaaatgagattgatcgttgttcccactgagagtgtcagctccttcccgtagagcaggcatgatgattgtactcacctctgacaccattgtgagtgccacattccttcccacgtccttgtcactgtaagagatgcccacctgagcaccaaccccaggttatcttcccctttgtcttccagccccccagaaacagctacgactcaacctacccaatcatttcatcatcagattgccactgtctctagttcaggtctcttgggactggcactcagaaatctcataataaatcctcttgaggcttctcatacactcgtcttcttccaatcttctttccctcaaaatctcatattttggttccacttcacccaccgtcattctccatatcactcccaggagttaggcaaaaagccccttccgttcttccgtatgttaaacttagaatcactctgttccctgctctgcgtttctattttttgtttttcctccatttactagtagcttaacactttctaacagtgttcttattattgatacgtatctatctcttccataagcttataaggtcacggataatacttctcattgtagtacgtaaatgacgtgggctagatatgagttgaataaacagttatacctgtaaattcttacagagtgaaaataaattgttatactttacaatttgtttctctctttagaccatttccaggacttgtgattaataaccgtgagtattttgtgaagtgttttgtttttgttttttcctggggtctgacgtgtgtgcgtgtgagtgtgtatacatgcttaacgtatatcacgttacttcacctatgtcagtaaccaggccaaatacttgttttagccctcagtaaaaacaccaggcacttcctagttgtaaaattattcaagcttcttaacttcctatcctcgatgcacttaatcataaaatggtaataatagcaccgattttgggggagtcgttccagtagatggaaagcatctggaacaggtgtcagcaagctcctgccgacgtgtatgcataaagttttattgaaaccaccatcgtgtccatttgtttatggcagaactgagagatggcagcagcaagtgtgtgcctgcaaaacctaaaatatttactaattggctctgcaagaaaagagtttgcatccccctaacctagaacagtgtctagcctctagtatgtgtttagcctacagtatgtgctcagcgaatacaatctatatttattactgcttttatgactgttataattactgtgcttggatttcgttacaaagtaagtcacaatgtgcctgcttctgttagtatttcagcacagtgcctggcacacatggggctctcaaatattgctgagcgagtgaacaaatgtcctttcaattccttaacgttgatgtcattttcaatagtattttgagccaaacttaattttgcgagtgtgttttgttttcttaactttattattaaaaatgtataaaagtgaggccaggcgtggtggctcacgcctgtaatcccagcagtttgggaggctgaggcaggcggatcagttgaggttgggagttggagaccagcccgtccaacatggtgaaagcctgtctctactaaaaatacaaaaatcagctgggtgtggtggcgcgtgcctgtaatcccagctactcaggaggctgaggcaggagagttgcttgaatcctagaggtggaggttgcagtgagctgagatcgtgccattgcactccagcctgggcaacaagagcaaaactctgtcccaataaataaataaataaaatgttctcttttgttcctgttcttgtgcggtagtgtggtatagagttttatggtaattactgtgaattagtgattctgagggacatatcagaactctgaggtttgtttccttctcatcttgagggaaacagcaaatgtatgttaaaatgcttttccaagggaacaacacatccttacattatttaaaccaatctgcttcattttcagagctggttgatcagagtgagtcagaaggccccgtgatacaagaatcagctgaaccaagccagttggaagttccagccacagaagaaataaaagagactgatggaagctctcagatcaagcaagaaccagaccccacgtggtagacctcttccctcctaggcttaaagtatcagtggttgagaagagcttttcggacctgttactaccccaagctgtgtaatatacttgtataacagaaataccttctatacaaacctttttttctacttttagatagaaatgtctactttttcagcagttctgtgaattaaagagcagagtgactgtgggtctggaatggctggtgtacttgggaatgtactatcaggattttacagcaatgctgggaaatgacagggaaaatgacaggaatgaatctcaccagattttttatgtactcagcagagccttgagttacggtgtttattttccaatcaagtgaagatatctcctacttctcctactggaacatctcagcttctgcagtgaagaaaaattcctgtgatagttcagttctttagtttttctatttgaaaaaaaaaaatcatttaaatgatcctttgttcacggctctccttaatgactgagtgaacagttcctatctgtatatttgactaaaccttttcctaagctatctctcatggttcctatgtttttttatcataattaaaagcaaaaccatctggatcacctaacagtcagaggtcagtatctcagcgtgtgaattatagaggaaatacagagagaacctcttccacttttacttttcgtccaaataaaatgcatggtgtaccagaagttgaagatcgggttgaggattggggctagctcgatgacactaaggccccaacatcgcgggacctgctgtggcgcggattcttaggaacgctgttctagccggccccctctccaggggtcgccgtggccggcattatttcctagttcttcttgtaaccctgaggtgccagcgcggggagtgaggaggggtcagggggctaaggatgcaacctctgacgttctgcgccttcctaggagagtcttacatgtgttgagatttcacaagcaatgcgagttgtaaaataccagctctacaagaagctaggctctgtgacggcatagttttcagtagctttatcacaatattcacaatggagaattatatgacatggtagcagaaataggcccttttatgtgttgcttctattttacctcaaattgtagatatagggtaatcaataaaatccatccatgcctttcacacactaagt

SEQ ID NO: 4177 - protein, 584 aa, Homo sapiens; identical to SEQ ID NO: 4173

SEQ ID NO: 4178 - DNA, 4447 bp, Homo sapiens
aaaaaaaaaaaaaaaaaaaaaaaaaaaagaaaaaagaaaaaaaaaaggaggaggaggaggagggtgagagagaagctgggagagcagagaaaaggggccaccggtcgcccccccgcttccccgcacgcgctctccagccgcggccgcccgcctgccgcggtcaccccggcctctgcctctgtcccccagtgatcggatcaaggcgctgagcgaggccctgcctgcggggcggccatgcggcggtgacaggagcgcgaccgacacgcacgggcccctcgccccctctcgcctcccgtccgctcgccagctcccctcagccgaggctgctccgcggcggccgcagcccgcgcgcggcccacactcgcctcccctcggcacccccggccccggagctgcctggaggcggccgcactcggggatcatggcccaagttgcaatgtccaccctccccgttgaagatgaggagtcctcggagagcaggatggtggtgacattcctcatgtcagctctcgagtccatgtgtaaagaactggccaagtccaaagccgaagtggcctgcattgcagtgtatgaaacagacgtgtttgtcgtcggaactgaaagaggacgtgcttttgtcaataccagaaaggattttcaaaaagattttgtaaaatattgtgttgaagaagaagaaaaagctgcagagatgcataaaatgaaatctacaacccaggcaaatcggatgagtgtagatgctgtagaaattgaaacactcagaaaaacagttgaggactatttctgcttttgctatgggaaagctttaggcaaatccacagtggtacctgtaccatatgagaagatgctgcgagaccagtcggctgtggtagtgcaggggcttccggaaggtgttgcctttaaacaccccgagaactatgatcttgcaaccctgaaatggattttggagaacaaagcagggatttcattcatcattaagagaccttttttagagccaaagaagcatgtaggtggtcgtgtgatggtaacagatgctgacaggtcaatactatctccaggtggaagttgtggccccatcaaagtgaaaactgaacccacagaagattctggcatttccctggaaatggcagctgtgacagtaaaggaagaatcagaagatcctgattattatcaatataacattcaagcaggcccttctgaaactgatgatgttgatgaaaaacagcccctatcgaagcctttgcaaggaagccaccattcttcagagggcaatgaaggcacagaaatggaagtaccagcagaagatgatgattattctccaccgtctaagagaccaaaggccaatgagctaccgcagccaccagtcccggaacccgccaatgctgggaagcggaaagtgagggagttcaacttcgagaaatggaatgctcgcatcactgatctacgtaaacaagttgaagaattgtttgaaaggaaatatgctcaagccataaaagccaaaggtccggtgacgatcccgtaccctcttttccagtctcatgttgaagatctttatgtagaaggacttcctgaaggaattccttttagaaggccatctacttacggaattcctcgcctggagaggatattacttgcaaaggaaaggattcgttttgtgattaagaaacatgagcttctgaattcaacacgtgaagatttacagcttgataagccagcttcaggagtaaaggaagaatggtatgccagaatcactaaattaagaaagatggtggatcagcttttctgcaaaaaatttgcggaagccttggggagcactgaagccaaggctgtaccgtaccaaaaatttgaggcacacccgaatgatctgtacgtggaaggactgccagaaaacattcctttccgaagtccctcatggtatggaatcccaaggctggaaaaaatcattcaagtgggcaatcgaattaaatttgttattaaaagaccagaacttctgactcacagtaccactgaagttactcagccaagaacgaatacaccagctcaagctcttggactcaccgaggcagtaaaagtaccatatcctgtgtttgaatcaaacccggagttcttgtatgtggaaggcttgccagaggggattcccttccgaagccctacctggtttggaattccacgacttgaaaggatcgtccgcgggagtaataaaatcaagttcgttgttaaaaaacctgaactagttatttcctacttgcctcctgggatggctagtaaaataaacactaaagctttgcagtcccccaaaagaccacgaagtcctgggagtaattcaaaggttcctgaaattgaggtcaccgtggaaggccctaataacaacaatcctcaaacctcagctgttcgaaccccgacccagactaacggttctaacgttcccttcaagccacgagggagagagttttcctttgaggcctggaatgccaaaatcacggacctaaaacagaaagttgaaaatctcttcaatgagaaatgtggggaagctcttggccttaaacaagctgtgaaggtgccgttcgcgttatttgagtctttcccggaagacttttatgtggaaggcttacctgagggtgtgccattccgaagaccatcgacttttggcattccgaggctggagaagatactcagaaacaaagccaaaattaagttcatcattaaaaagcccgaaatgtttgagacggcgattaaggagagcacctcctctaagagccctcccagaaaaataaattcatcacccaatgttaatactactgcatcaggtgttgaagaccttaacatcattcaggtgacaattccagatgatgataatgaaagactctcgaaagttgaaaaagctagacagctaagagaacaagtgaatgacctctttagtcggaaatttggtgaagctattggtatgggttttcctgtgaaagttccctacaggaaaatcacaattaaccctggctgtgtggtggttgatggcatgcccccgggggtgtccttcaaagcccccagctacctggaaatcagctccatgagaaggatcttagactctgccgagtttatcaaattcacggtcattagaccatttccaggacttgtgattaataaccagctggttgatcagagtgagtcagaaggccccgtgatacaagaatcagctgaaccaagccagttggaagttccagccacagaagaaataaaagagactgatggaagctctcagatcaagcaagaaccagaccccacgtggtagacctcttccctcctaggcttaaagtatcagtggttgagaagagcttttcggacctgttactaccccaagctgtgtaatatacttgtataacagaaataccttctatacaaacctttttttctacttttagatagaaatgtctactttttcagcagttctgtgaattaaagagcagagtgactgtgggtctggaatggctggtgtacttgggaatgtactatcaggattttacagcaatgctgggaaatgacagggaaaatgacaggaatgaatctcaccagattttttatgtactcagcagagccttgagttacggtgtttattttccaatcaagtgaagatatctcctacttctcctactggaacatctcagcttctgcagtgaagaaaaattcctgtgatagttcagttctttagtttttctatttgaaaaaaaaaaatcatttaaatgatcctttgttcacggctctccttaatgactgagtgaacagttcctatctgtatatttgactaaaccttttcctaagctatctctcatggttcctatgtttttttatcataattaaaagcaaaaccatctggatcacctaacagtcagaggtcagtatctcagcgtgtgaattatagaggaaatacagagagaacctcttccacttttacttttcgtccaaataaaatgcatggtgtaccagaagttgaagatcgggttgaggattggggctagctcgatgacactaaggccccaacatcgcgggacctgctgtggcgcggattcttaggaacgctgttctagccggccccctctccaggggtcgccgtggccggcattatttcctagttcttcttgtaaccctgaggtgccagcgcggggagtgaggaggggtcagggggctaaggatgcaacctctgacgttctgcgccttcctaggagagtcttacatgtgttgagatttcacaagcaatgcgagttgtaaaataccagctctacaagaagctaggctctgtgacggcatagttttcagtagctttatcacaatattcacaatggagaattatatgacatggtagcagaaataggcccttttatgtgttgcttctattttacctcaaattgtagatatagggtaatcaataaaatccatccatgcctttcacacactaagt

SEQ ID NO: 4179 - protein, 953 aa, Homo sapiens
MAQVAMSTLPVEDEESSESRMVVTFLMSALESMCKELAKSKAEVACIAVYETDVFVVGTERGRAFVNTRKDFQKDFVKYCVEEEEKAAEMHKMKSTTQANRMSVDAVEIETLRKTVEDYFCFCYGKALGKSTVVPVPYEKMLRDQSAVVVQGLPEGVAFKHPENYDLATLKWILENKAGISFIIKRPFLEPKKHVGGRVMVTDADRSILSPGGSCGPIKVKTEPTEDSGISLEMAAVTVKEESEDPDYYQYNIQAGPSETDDVDEKQPLSKPLQGSHHSSEGNEGTEMEVPAEDDDYSPPSKRPKANELPQPPVPEPANAGKRKVREFNFEKWNARITDLRKQVEELFERKYAQAIKAKGPVTIPYPLFQSHVEDLYVEGLPEGIPFRRPSTYGIPRLERILLAKERIRFVIKKHELLNSTREDLQLDKPASGVKEEWYARITKLRKMVDQLFCKKFAEALGSTEAKAVPYQKFEAHPNDLYVEGLPENIPFRSPSWYGIPRLEKIIQVGNRIKFVIKRPELLTHSTTEVTQPRTNTPAQALGLTEAVKVPYPVFESNPEFLYVEGLPEGIPFRSPTWFGIPRLERIVRGSNKIKFVVKKPELVISYLPPGMASKINTKALQSPKRPRSPGSNSKVPEIEVTVEGPNNNNPQTSAVRTPTQTNGSNVPFKPRGREFSFEAWNAKITDLKQKVENLFNEKCGEALGLKQAVKVPFALFESFPEDFYVEGLPEGVPFRRPSTFGIPRLEKILRNKAKIKFIIKKPEMFETAIKESTSSKSPPRKINSSPNVNTTASGVEDLNIIQVTIPDDDNERLSKVEKARQLREQVNDLFSRKFGEAIGMGFPVKVPYRKITINPGCVVVDGMPPGVSFKAPSYLEISSMRRILDSAEFIKFTVIRPFPGLVINNQLVDQSESEGPVIQESAEPSQLEVPATEEIKETDGSSQIKQEPDPTW

SEQ ID NO: 4180 - DNA, 7049 bp, Homo sapiens
aaaaaaaaaaaaaaaaaaaaaaaaaaaagaaaaaagaaaaaaaaaaggaggaggaggaggagggtgagagagaagctgggagagcagagaaaaggggccaccggtcgcccccccgcttccccgcacgcgctctccagccgcggccgcccgcctgccgcggtcaccccggcctctgcctctgtcccccagtgatcggatcaaggcgctgagcgaggccctgcctgcggggcggccatgcggcggtgacaggagcgcgaccgacacgcacgggcccctcgccccctctcgcctcccgtccgctcgccagctcccctcagccgaggctgctccgcggcggccgcagcccgcgcgcggcccacactcgcctcccctcggcacccccggccccggagctgcctggaggcggccgcactcggtgtaaagaactggccaagtccaaagccgaagtggcctgcattgcagtgtatgaaacagacgtgtttgtcgtcggaactgaaagaggacgtgcttttgtcaataccagaaaggattttcaaaaagattttgtaaaatattgtgttgaagaagaagaaaaagctgcagagatgcataaaatgaaatctacaacccaggcaaatcggatgagtgtagatgctgtagaaattgaaacactcagaaaaacagttgaggactatttctgcttttgctatgggaaagctttaggcaaatccacagtggtacctgtaccatatgagaagatgctgcgagaccagtcggctgtggtagtgcaggggcttccggaaggtgttgcctttaaacaccccgagaactatgatcttgcaaccctgaaatggattttggagaacaaagcagggatttcattcatcattaagagaccttttttagagccaaagaagcatgtaggtggtcgtgtgatggtaacagatgctgacaggtcaatactatctccaggtggaagttgtggccccatcaaagtgaaaactgaacccacagaagattctggcatttccctggaaatggcagctgtgacagtaaaggaagaatcagaagatcctgattattatcaatataacattcaaggaagccaccattcttcagagggcaatgaaggcacagaaatggaagtaccagcagaagatgatgattattctccaccgtctaagagaccaaaggccaatgagctaccgcagccaccagtcccggaacccgccaatgctgggaagcggaaagtgagggagttcaacttcgagaaatggaatgctcgcatcactgatctacgtaaacaagttgaagaattgtttgaaaggaaatatgctcaagccataaaagccaaaggtccggtgacgatcccgtaccctcttttccagtctcatgttgaagatctttatgtagaaggacttcctgaaggaattccttttagaaggccatctacttacggaattcctcgcctggagaggatattacttgcaaaggaaaggattcgttttgtgattaagaaacatgagcttctgaattcaacacgtgaagatttacagcttgataagccagcttcaggagtaaaggaagaatggtatgccagaatcactaaattaagaaagatggtggatcagcttttctgcaaaaaatttgcggaagccttggggagcactgaagccaaggctgtaccgtaccaaaaatttgaggcacacccgaatgatctgtacgtggaaggactgccagaaaacattcctttccgaagtccctcatggtatggaatcccaaggctggaaaaaatcattcaagtgggcaatcgaattaaatttgttattaaaagaccagaacttctgactcacagtaccactgaagttactcagccaagaacgaatacaccagtcaaagaagattggaatgtcagaattaccaagctacggaagcaagtggaagagatttttaatttgaaatttgctcaagctcttggactcaccgaggcagtaaaagtaccatatcctgtgtttgaatcaaacccggagttcttgaaaggatcgtccgcgggagtaataaaatcaagttcgttgttaaaaaacctgaactagttatttcctacttgcctcctgggatggctagtaaaataaacactaaagctttgcagtcccccaaaagaccacgaagtcctgggagtaattcaaaggttcctgaaattgaggtcaccgtggaaggccctaataacaacaatcctcaaacctcagctgttcgaaccccgacccagactaacggttctaacgttcccttcaagccacgagggagagagttttcctttgaggcctggaatgccaaaatcacggacctaaaacagaaagttgaaaatctcttcaatgagaaatgtggggaagctcttggccttaaacaagctgtgaaggtgccgttcgcgttatttgagtctttcccggaagacttttatgtggaaggcttacctgagggtgtgccattccgaagaccatcgacttttggcattccgaggctggagaagatactcagaaacaaagccaaaattaagttcatcattaaaaagcccgaaatgtttgagacggcgattaaggagagcacctcctctaagagccctcccagaaaaataaattcatcacccaatgttaatactactgcatcaggtgttgaagaccttaacatcattcaggtgacaattccagatgatgataatgaaagactctcgaaagttgaaaaagctagacagctaagagaacaagtgaatgacctctttagtcggaaatttggtgaagctattggtatgggttttcctgtgaaagttccctacaggaaaatcacaattaaccctggctgtgtggtggttgatggcatgcccccgggggtgtccttcaaagcccccagctacctggaaatcagctccatgagaaggatcttagactctgccgagtttatcaaattcacggtcattaggtaagtgagagtttcctgcttagtcacaggagcgaatctggagctcatgaggctgactcttctaaaatgcagccacaggtagtcatcgaatccggcttcctatgctgtgcaatcaacaaatcaaaataacttgtgtcatcattagaatgtcagatgtgcttctacgaactaagctgactcttttaattctttggcaaagggttggcaaactaggactgtttgccaaattcaggctgcctcctatttttagagtcttcctgaaacacagctacacccgtattatccatggctgctttcctgtcacagtgagtaagtagctgggactgagaaggcatggcctccaaagtctaaaatatttactctctagcactttgtagaaaaaccttagctaggcacagtggctaacgcctgtaatcccagcattttgggaggccaaggcaggcagatcacctgaggtcaggagttccagaccagcctggccaacatggtgaaatcccatctctacaaaaataaaacagttagctgggcatgatggcgggtgcctgtaatcccagctactcgggaggctgaggcaggatagtcgcttgaacccaggaggtggaggttgcaatgagccaagatcatgccactgcactccagcctggacgacagagtgagactccatcacaagaaaaaaagaactttgtcaacctctgtcttagggcgccttgtcacaggcttcgggtcagacggattcaaccttgcatcagccatttgttagccaggtcactctgttctttgtctgtaaatgagattgatcgttgttcccactgagagtgtcagctccttcccgtagagcaggcatgatgattgtactcacctctgacaccattgtgagtgccacattccttcccacgtccttgtcactgtaagagatgcccacctgagcaccaaccccaggttatcttcccctttgtcttccagccccccagaaacagctacgactcaacctacccaatcatttcatcatcagattgccactgtctctagttcaggtctcttgggactggcactcagaaatctcataataaatcctcttgaggcttctcatacactcgtcttcttccaatcttctttccctcaaaatctcatattttggttccacttcacccaccgtcattctccatatcactcccaggagttaggcaaaaagccccttccgttcttccgtatgttaaacttagaatcactctgttccctgctctgcgtttctattttttgtttttcctccatttactagtagcttaacactttctaacagtgttcttattattgatacgtatctatctcttccataagcttataaggtcacggataatacttctcattgtagtacgtaaatgacgtgggctagatatgagttgaataaacagttatacctgtaaattcttacagagtgaaaataaattgttatactttacaatttgtttctctctttagaccatttccaggacttgtgattaataaccgtgagtattttgtgaagtgttttgtttttgttttttcctggggtctgacgtgtgtgcgtgtgagtgtgtatacatgcttaacgtatatcacgttacttcacctatgtcagtaaccaggccaaatacttgttttagccctcagtaaaaacaccaggcacttcctagttgtaaaattattcaagcttcttaacttcctatcctcgatgcacttaatcataaaatggtaataatagcaccgattttgggggagtcgttccagtagatggaaagcatctggaacaggtgtcagcaagctcctgccgacgtgtatgcataaagttttattgaaaccaccatcgtgtccatttgtttatggcagaactgagagatggcagcagcaagtgtgtgcctgcaaaacctaaaatatttactaattggctctgcaagaaaagagtttgcatccccctaacctagaacagtgtctagcctctagtatgtgtttagcctacagtatgtgctcagcgaatacaatctatatttattactgcttttatgactgttataattactgtgcttggatttcgttacaaagtaagtcacaatgtgcctgcttctgttagtatttcagcacagtgcctggcacacatggggctctcaaatattgctgagcgagtgaacaaatgtcctttcaattccttaacgttgatgtcattttcaatagtattttgagccaaacttaattttgcgagtgtgttttgttttcttaactttattattaaaaatgtataaaagtgaggccaggcgtggtggctcacgcctgtaatcccagcagtttgggaggctgaggcaggcggatcagttgaggttgggagttggagaccagcccgtccaacatggtgaaagcctgtctctactaaaaatacaaaaatcagctgggtgtggtggcgcgtgcctgtaatcccagctactcaggaggctgaggcaggagagttgcttgaatcctagaggtggaggttgcagtgagctgagatcgtgccattgcactccagcctgggcaacaagagcaaaactctgtcccaataaataaataaataaaatgttctcttttgttcctgttcttgtgcggtagtgtggtatagagttttatggtaattactgtgaattagtgattctgagggacatatcagaactctgaggtttgtttccttctcatcttgagggaaacagcaaatgtatgttaaaatgcttttccaagggaacaacacatccttacattatttaaaccaatctgcttcattttcagagctggttgatcagagtgagtcagaaggccccgtgatacaagaatcagctgaaccaagccagttggaagttccagccacagaagaaataaaagagactgatggaagctctcagatcaagcaagaaccagaccccacgtggtagacctcttccctcctaggcttaaagtatcagtggttgagaagagcttttcggacctgttactaccccaagctgtgtaatatacttgtataacagaaataccttctatacaaacctttttttctacttttagatagaaatgtctactttttcagcagttctgtgaattaaagagcagagtgactgtgggtctggaatggctggtgtacttgggaatgtactatcaggattttacagcaatgctgggaaatgacagggaaaatgacaggaatgaatctcaccagattttttatgtactcagcagagccttgagttacggtgtttattttccaatcaagtgaagatatctcctacttctcctactggaacatctcagcttctgcagtgaagaaaaattcctgtgatagttcagttctttagtttttctatttgaaaaaaaaaaatcatttaaatgatcctttgttcacggctctccttaatgactgagtgaacagttcctatctgtatatttgactaaaccttttcctaagctatctctcatggttcctatgtttttttatcataattaaaagcaaaaccatctggatcacctaacagtcagaggtcagtatctcagcgtgtgaattatagaggaaatacagagagaacctcttccacttttacttttcgtccaaataaaatgcatggtgtaccagaagttgaagatcgggttgaggattggggctagctcgatgacactaaggccccaacatcgcgggacctgctgtggcgcggattcttaggaacgctgttctagccggccccctctccaggggtcgccgtggccggcattatttcctagttcttcttgtaaccctgaggtgccagcgcggggagtgaggaggggtcagggggctaaggatgcaacctctgacgttctgcgccttcctaggagagtcttacatgtgttgagatttcacaagcaatgcgagttgtaaaataccagctctacaagaagctaggctctgtgacggcatagttttcagtagctttatcacaatattcacaatggagaattatatgacatggtagcagaaataggcccttttatgtgttgcttctattttacctcaaattgtagatatagggtaatcaataaaatccatccatgcctttcacacactaagt

SEQ ID NO: 4181 - protein, 495 aa, Homo sapiens
MHKMKSTTQANRMSVDAVEIETLRKTVEDYFCFCYGKALGKSTVVPVPYEKMLRDQSAVVVQGLPEGVAFKHPENYDLATLKWILENKAGISFIIKRPFLEPKKHVGGRVMVTDADRSILSPGGSCGPIKVKTEPTEDSGISLEMAAVTVKEESEDPDYYQYNIQGSHHSSEGNEGTEMEVPAEDDDYSPPSKRPKANELPQPPVPEPANAGKRKVREFNFEKWNARITDLRKQVEELFERKYAQAIKAKGPVTIPYPLFQSHVEDLYVEGLPEGIPFRRPSTYGIPRLERILLAKERIRFVIKKHELLNSTREDLQLDKPASGVKEEWYARITKLRKMVDQLFCKKFAEALGSTEAKAVPYQKFEAHPNDLYVEGLPENIPFRSPSWYGIPRLEKIIQVGNRIKFVIKRPELLTHSTTEVTQPRTNTPVKEDWNVRITKLRKQVEEIFNLKFAQALGLTEAVKVPYPVFESNPEFLKGSSAGVIKSSSLLKNLN

SEQ ID NO: 4182 - DNA, 8009 bp, Homo sapiens
aaaaaaaaaaaaaaaaaaaaaaaaaaaagaaaaaagaaaaaaaaaaggaggaggaggaggagggtgagagagaagctgggagagcagagaaaaggggccaccggtcgcccccccgcttccccgcacgcgctctccagccgcggccgcccgcctgccgcggtcaccccggcctctgcctctgtcccccagtgatcggatcaaggcgctgagcgaggccctgcctgcggggcggccatgcggcggtgacaggagcgcgaccgacacgcacgggcccctcgccccctctcgcctcccgtccgctcgccagctcccctcagccgaggctgctccgcggcggccgcagcccgcgcgcggcccacactcgcctcccctcggcacccccggccccggagctgcctggaggcggccgcactcggggatcatggcccaagttgcaatgtccaccctccccgttgaagatgaggagtcctcggagagcaggatggtggtgacattcctcatgtcagctctcgagtccatgtgtaaagaactggccaagtccaaagccgaagtggcctgcattgcagtgtatgaaacagacgtgtttgtcgtcggaactgaaagaggacgtgcttttgtcaataccagaaaggattttcaaaaagattttgtaaaatattgtgttgaagaagaagaaaaagctgcagagatgcataaaatgaaatctacaacccaggcaaatcggatgagtgtagatgctgtagaaattgaaacactcagaaaaacagttgaggactatttctgcttttgctatgggaaagctttaggcaaatccacagtggtacctgtaccatatgagaagatgctgcgagaccagtcggctgtggtagtgcaggggcttccggaaggtgttgcctttaaacaccccgagaactatgatcttgcaaccctgaaatggattttggagaacaaagcagggatttcattcatcattaagagaccttttttagagccaaagaagcatgtaggtggtcgtgtgatggtaacagatgctgacaggtcaatactatctccaggtggaagttgtggccccatcaaagtgaaaactgaacccacagaagattctggaagccaccattcttcagagggcaatgaaggcacagaaatggaagtaccagcagaagattctactcaacatgtcccttcagaaacaagtgaggaccctgaagttgaggtgactattgaagatgatgattattctccaccgtctaagagaccaaaggccaatgagctaccgcagccaccagtcccggaacccgccaatgctgggaagcggaaagtgagggagttcaacttcgagaaatggaatgctcgcatcactgatctacgtaaacaagttgaagaattgtttgaaaggaaatatgctcaagccataaaagccaaaggtccggtgacgatcccgtaccctcttttccagtctcatgttgaagatctttatgtagaaggacttcctgaaggaattccttttagaaggccatctacttacggaattcctcgcctggagaggatattacttgcaaaggaaaggattcgttttgtgattaagaaacatgagcttctgaattcaacacgtgaagatttacagcttgataagccagcttcaggagtaaaggaagaatggtatgccagaatcactaaattaagaaagatggtggatcagcttttctgcaaaaaatttgcggaagccttggggagcactgaagccaaggctgtaccgtaccaaaaatttgaggcacacccgaatgatctgtacgtggaaggactgccagaaaacattcctttccgaagtccctcatggtatggaatcccaaggctggaaaaaatcattcaagtgggcaatcgaattaaatttgttattaaaagaccagaacttctgactcacagtaccactgaagttactcagccaagaacgaatacaccagtcaaagaagattggaatgtcagaattaccaagctacggaagcaagtggaagagatttttaatttgaaatttgcttagatttgttgacagcggtttcctggagtgctgtcttgagaacgattctgaggaggctcagcaagaaagagtgtttcagttgattgggtgtgtctgtcatggagaaggaactcaagctcttggactcaccgaggcagtaaaagtaccatatcctgtgtttgaatcaaacccggagttcttgtatgtggaaggcttgccagaggggattcccttccgaagccctacctggtttggaattccacgacttgaaaggatcgtccgcgggagtaataaaatcaagttcgttgttaaaaaacctgaactagttatttcctacttgcctcctgggatggctagtaaaataaacactaaagctttgcagtcccccaaaagaccacgaagtcctgggagtaattcaaaggttcctgaaattgaggtcaccgtggaaggccctaataacaacaatcctcaaacctcagctgttcgaaccccgacccagactaacggttctaacgttcccttcaagccacgagggagagagttttcctttgaggcctggaatgccaaaatcacggacctaaaacagaaagttgaaaatctcttcaatgagaaatgtggggaagctcttggccttaaacaagctgtgaaggtgccgttcgcgttatttgagtctttcccggaagacttttatgtggaaggcttacctgagggtgtgccattccgaagaccatcgacttttggcattccgaggctggagaagatactcagaaacaaagccaaaattaagttcatcattaaaaagcccgaaatgtttgagacggcgattaaggagagcacctcctctaagagccctcccagaaaaataaattcatcacccaatgttaatactactgcatcaggtgttgaagaccttaacatcattcaggtgacaattccagatgatgataatgaaagactctcgaaagttgaaaaagctagacagctaagagaacaagtgaatgacctctttagtcggaaatttggtgaagctattggtatgggttttcctgtgaaagttccctacaggaaaatcacaattaaccctggctgtgtggtggttgatggcatgcccccgggggtgtccttcaaagcccccagctacctggaaatcagctccatgagaaggatcttagactctgccgagtttatcaaattcacggtcattaggtaagtgagagtttcctgcttagtcacaggagcgaatctggagctcatgaggctgactcttctaaaatgcagccacaggtagtcatcgaatccggcttcctatgctgtgcaatcaacaaatcaaaataacttgtgtcatcattagaatgtcagatgtgcttctacgaactaagctgactcttttaattctttggcaaagggttggcaaactaggactgtttgccaaattcaggctgcctcctatttttagagtcttcctgaaacacagctacacccgtattatccatggctgctttcctgtcacagtgagtaagtagctgggactgagaaggcatggcctccaaagtctaaaatatttactctctagcactttgtagaaaaaccttagctaggcacagtggctaacgcctgtaatcccagcattttgggaggccaaggcaggcagatcacctgaggtcaggagttccagaccagcctggccaacatggtgaaatcccatctctacaaaaataaaacagttagctgggcatgatggcgggtgcctgtaatcccagctactcgggaggctgaggcaggatagtcgcttgaacccaggaggtggaggttgcaatgagccaagatcatgccactgcactccagcctggacgacagagtgagactccatcacaagaaaaaaagaactttgtcaacctctgtcttagggcgccttgtcacaggcttcgggtcagacggattcaaccttgcatcagccatttgttagccaggtcactctgttctttgtctgtaaatgagattgatcgttgttcccactgagagtgtcagctccttcccgtagagcaggcatgatgattgtactcacctctgacaccattgtgagtgccacattccttcccacgtccttgtcactgtaagagatgcccacctgagcaccaaccccaggttatcttcccctttgtcttccagccccccagaaacagctacgactcaacctacccaatcatttcatcatcagattgccactgtctctagttcaggtctcttgggactggcactcagaaatctcataataaatcctcttgaggcttctcatacactcgtcttcttccaatcttctttccctcaaaatctcatattttggttccacttcacccaccgtcattctccatatcactcccaggagttaggcaaaaagccccttccgttcttccgtatgttaaacttagaatcactctgttccctgctctgcgtttctattttttgtttttcctccatttactagtagcttaacactttctaacagtgttcttattattgatacgtatctatctcttccataagcttataaggtcacggataatacttctcattgtagtacgtaaatgacgtgggctagatatgagttgaataaacagttatacctgtaaattcttacagagtgaaaataaattgttatactttacaatttgtttctctctttagaccatttccaggacttgtgattaataaccgtgagtattttgtgaagtgttttgtttttgttttttcctggggtctgacgtgtgtgcgtgtgagtgtgtatacatgcttaacgtatatcacgttacttcacctatgtcagtaaccaggccaaatacttgttttagccctcagtaaaaacaccaggcacttcctagttgtaaaattattcaagcttcttaacttcctatcctcgatgcacttaatcataaaatggtaataatagcaccgattttgggggagtcgttccagtagatggaaagcatctggaacaggtgtcagcaagctcctgccgacgtgtatgcataaagttttattgaaaccaccatcgtgtccatttgtttatggcagaactgagagatggcagcagcaagtgtgtgcctgcaaaacctaaaatatttactaattggctctgcaagaaaagagtttgcatccccctaacctagaacagtgtctagcctctagtatgtgtttagcctacagtatgtgctcagcgaatacaatctatatttattactgcttttatgactgttataattactgtgcttggatttcgttacaaagtaagtcacaatgtgcctgcttctgttagtatttcagcacagtgcctggcacacatggggctctcaaatattgctgagcgagtgaacaaatgtcctttcaattccttaacgttgatgtcattttcaatagtattttgagccaaacttaattttgcgagtgtgttttgttttcttaactttattattaaaaatgtataaaagtgaggccaggcgtggtggctcacgcctgtaatcccagcagtttgggaggctgaggcaggcggatcagttgaggttgggagttggagaccagcccgtccaacatggtgaaagcctgtctctactaaaaatacaaaaatcagctgggtgtggtggcgcgtgcctgtaatcccagctactcaggaggctgaggcaggagagttgcttgaatcctagaggtggaggttgcagtgagctgagatcgtgccattgcactccagcctgggcaacaagagcaaaactctgtcccaataaataaataaataaaatgttctcttttgttcctgttcttgtgcggtagtgtggtatagagttttatggtaattactgtgaattagtgattctgagggacatatcagaactctgaggtttgtttccttctcatcttgagggaaacagcaaatgtatgttaaaatgcttttccaagggaacaacacatccttacattatttaaaccaatctgcttcattttcagagctggttgatcagagtgagtcagaaggccccgtgatacaagaatcagctgaaccaagccagttggaagttccagccacagaagaaataaaagagactgatggaagctctcagatcaagcaagaaccagaccccacgtggtagacctcttccctcctagggtaaatcagcttctgtgtcagggatgctgtgtggtgtccatctgaaccccctgcatacgcgtagctaatgtgatctccccactttcacataagatggtggccctgccttcagggaatgtgggagccaggtgggagccttcccggatatttaagctagaagattctacagggagattctccttggatcaatatatgtctctcagtcaaagatgtaaaagcacttttgccttaaaaagaatgttctgtttctaaatagagtcaacgttgtcctcctcattggaattcactatgagtcagaatcattagactgacttttttttttccatagtaatagtattttgcagagtctcacagagctgcagatcttttgttcatcttgcagagttaacaagtctgatcctgttagtccagatttcttaaatttggccaagttataataggagcagtagcttgagacccgaagtcaggaaactttgacaatggatttttttttttaatccagagacttgtactggaatttgccttaccctgtcagctcatggacttaaggtttcatcccgctttatgagtgcttctgaatccaagtcattgttacctgaatttgcaaattaagttgtgatattcgtgactgttaaattcctgtaattagattaacctctttgcttgcttgtttgttttctctcctattttagcttaaagtatcagtggttgagaagagcttttcggacctgttactaccccaagctgtgtaatatacttgtataacagaaataccttctatacaaacctttttttctacttttagatagaaatgtctactttttcagcagttctgtgaattaaagagcagagtgactgtgggtctggaatggctggtgtacttgggaatgtactatcaggattttacagcaatgctgggaaatgacagggaaaatgacaggaatgaatctcaccagattttttatgtactcagcagagccttgagttacggtgtttattttccaatcaagtgaagatatctcctacttctcctactggaacatctcagcttctgcagtgaagaaaaattcctgtgatagttcagttctttagtttttctatttgaaaaaaaaaaatcatttaaatgatcctttgttcacggctctccttaatgactgagtgaacagttcctatctgtatatttgactaaaccttttcctaagctatctctcatggttcctatgtttttttatcataattaaaagcaaaaccatctggatcacctaacagtcagaggtcagtatctcagcgtgtgaattatagaggaaatacagagagaacctcttccacttttacttttcgtccaaataaaatgcatggtgtaccagaagttgaagatcgggttgaggattggggctagctcgatgacactaaggccccaacatcgcgggacctgctgtggcgcggattcttaggaacgctgttctagccggccccctctccaggggtcgccgtggccggcattatttcctagttcttcttgtaaccctgaggtgccagcgcggggagtgaggaggggtcagggggctaaggatgcaacctctgacgttctgcgccttcctaggagagtcttacatgtgttgagatttcacaagcaatgcgagttgtaaaataccagctctacaagaagctaggctctgtgacggcatagttttcagtagctttatcacaatattcacaatggagaattatatgacatggtagcagaaataggcccttttatgtgttgcttctattttacctcaaattgtagatatagggtaatcaataaaatccatccatgcctttcacacactaagt

SEQ ID NO: 4183 - protein, 538 aa, Homo sapiens
MAQVAMSTLPVEDEESSESRMVVTFLMSALESMCKELAKSKAEVACIAVYETDVFVVGTERGRAFVNTRKDFQKDFVKYCVEEEEKAAEMHKMKSTTQANRMSVDAVEIETLRKTVEDYFCFCYGKALGKSTVVPVPYEKMLRDQSAVVVQGLPEGVAFKHPENYDLATLKWILENKAGISFIIKRPFLEPKKHVGGRVMVTDADRSILSPGGSCGPIKVKTEPTEDSGSHHSSEGNEGTEMEVPAEDSTQHVPSETSEDPEVEVTIEDDDYSPPSKRPKANELPQPPVPEPANAGKRKVREFNFEKWNARITDLRKQVEELFERKYAQAIKAKGPVTIPYPLFQSHVEDLYVEGLPEGIPFRRPSTYGIPRLERILLAKERIRFVIKKHELLNSTREDLQLDKPASGVKEEWYARITKLRKMVDQLFCKKFAEALGSTEAKAVPYQKFEAHPNDLYVEGLPENIPFRSPSWYGIPRLEKIIQVGNRIKFVIKRPELLTHSTTEVTQPRTNTPVKEDWNVRITKLRKQVEEIFNLKFA

SEQ ID NO: 4184 - DNA, 3721 bp, Homo sapiens
aaaaaaaaaaaaaaaaaaaaaaaaaaaagaaaaaagaaaaaaaaaaggaggaggaggaggagggtgagagagaagctgggagagcagagaaaaggggccaccggtcgcccccccgcttccccgcacgcgctctccagccgcggccgcccgcctgccgcggtcaccccggcctctgcctctgtcccccagtgatcggatcaaggcgctgagcgaggccctgcctgcggggcggccatgcggcggtgacaggagcgcgaccgacacgcacgggcccctcgccccctctcgcctcccgtccgctcgccagctcccctcagccgaggctgctccgcggcggccgcagcccgcgcgcggcccacactcgcctcccctcggcacccccggccccggagctgcctggaggcggccgcactcggtgtaaagaactggccaagtccaaagccgaagtggcctgcattgcagtgtatgaaacagacgtgtttgtcgtcggaactgaaagaggacgtgcttttgtcaataccagaaaggattttcaaaaagattttgtaaaatattgtgttgaagaagaagaaaaagctgcagagatgcataaaatgaaatctacaacccaggcaaatcggatgagtgtagatgctgtagaaattgaaacactcagaaaaacagttgaggactatttctgcttttgctatgggaaagctttaggcaaatccacagtggtacctgtaccatatgagaagatgctgcgagaccagtcggctgtggtagtgcaggggcttccggaaggtgttgcctttaaacaccccgagaactatgatcttgcaaccctgaaatggattttggagaacaaagcagggatttcattcatcattaagagaccttttttagagccaaagaagcatgtaggtggtcgtgtgatggtaacagatgctgacaggtcaatactatctccaggtggaagttgtggccccatcaaagtgaaaactgaacccacagaagattctggaagccaccattcttcagagggcaatgaaggcacagaaatggaagtaccagcagaagattctactcaacatgtcccttcagaaacaagtgaggaccctgaagttgaggtgactattgaagatgatgattattctccaccgtctaagagaccaaaggccaatgagctaccgcagccaccagtcccggaacccgccaatgctgggaagcggaaagtgagggagttcaacttcgagaaatggaatgctcgcatcactgatctacgtaaacaagttgaagaattgtttgaaaggaaatatgctcaagccataaaagccaaaggtccggtgacgatcccgtaccctcttttccagtctcatgttgaagatctttatgtagaaggacttcctgaaggaattccttttagaaggccatctacttacggaattcctcgcctggagaggatattacttgcaaaggaaaggattcgttttgtgattaagaaacatgagcttctgaattcaacacgtgaagatttacagcttgataagccagcttcaggagtaaaggaagaatggtatgccagaatcactaaattaagaaagatggtggatcagcttttctgcaaaaaatttgcggaagccttggggagcactgaagccaaggctgtaccgtaccaaaaatttgaggcacacccgaatgatctgtacgtggaaggactgccagaaaacattcctttccgaagtccctcatggtatggaatcccaaggctggaaaaaatcattcaagtgggcaatcgaattaaatttgttattaaaagaccagaacttctgactcacagtaccactgaagttactcagccaagaacgaatacaccagtcaaagaagattggaatgtcagaattaccaagctacggaagcaagtggaagagatttttaatttgaaatttgctcaagctcttggactcaccgaggcagtaaaagtaccatatcctgtgtttgaatcaaacccggagttcttgaaaggatcgtccgcgggagtaataaaatcaagttcgttgttaaaaaacctgaactagttatttcctacttgcctcctgggatggctagtaaaataaacactaaagctttgcagtcccccaaaagaccacgaagtcctgggagtaattcaaaggttcctgaaattgaggtcaccgtggaaggccctaataacaacaatcctcaaacctcagctgttcgaaccccgacccagactaacggttctaacgttcccttcaagccacgagggagagagttttcctttgaggcctggaatgccaaaatcacggacctaaaacagaaagttgaaaatctcttcaatgagaaatgtggggaagctcttggccttaaacaagctgtgaaggtgccgttcgcgttatttgagtctttcccggaagacttttatgtggaaggcttacctgagggtgtgccattccgaagaccatcgacttttggcattccgaggctggagaagatactcagaaacaaagccaaaattaagttcatcattaaaaagcccgaaatgtttgagacggcgattaaggagagcacctcctctaagagccctcccagaaaaataaattcatcacccaatgttaatactactgcatcaggtgttgaagaccttaacatcattcaggtgacaattccagatgatgataatgaaagactctcgaaagttgaaaaagctagacagctaagagaacaagtgaatgacctctttagtcggaaatttggtgaagctattggtatgggttttcctgtgaaagttccctacaggaaaatcacaattaaccctggctgtgtggtggttgatggcatgcccccgggggtgtccttcaaagcccccagctacctggaaatcagctccatgagaaggatcttagactctgccgagtttatcaaattcacggtcattagaccatttccaggacttgtgattaataaccagctggttgatcagagtgagtcagaaggccccgtgatacaagaatcagctgaaccaagccagttggaagttccagccacagaagaaataaaagagactgatggaagctctcagatcaagcaagaaccagaccccacgtggtagacctcttccctcctaggcaaaaccatctggatcacctaacagtcagaggtcagtatctcagcgtgtgaattatagaggaaatacagagagaacctcttccacttttacttttcgtccaaataaaatgcatggtgtaccagaagttgaagatcgggttgaggattggggctagctcgatgacactaaggccccaacatcgcgggacctgctgtggcgcggattcttaggaacgctgttctagccggccccctctccaggggtcgccgtggccggcattatttcctagttcttcttgtaaccctgaggtgccagcgcggggagtgaggaggggtcagggggctaaggatgcaacctctgacgttctgcgccttcctaggagagtcttacatgtgttgagatttcacaagcaatgcgagttgtaaaataccagctctacaagaagctaggctctgtgacggcatagttttcagtagctttatcacaatattcacaatggagaattatatgacatggtagcagaaataggcccttttatgtgttgcttctattttacctcaaattgtagatatagggtaatcaataaaatccatccatgcctttcacacactaagt

SEQ ID NO: 4185 - protein, 490 aa, Homo sapiens; identical to SEQ ID NO: 4105

SEQ ID NO: 4186 - DNA, 7871 bp, Homo sapiens
aaaaaaaaaaaaaaaaaaaaaaaaaaaagaaaaaagaaaaaaaaaaggaggaggaggaggagggtgagagagaagctgggagagcagagaaaaggggccaccggtcgcccccccgcttccccgcacgcgctctccagccgcggccgcccgcctgccgcggtcaccccggcctctgcctctgtcccccagtgatcggatcaaggcgctgagcgaggccctgcctgcggggcggccatgcggcggtgacaggagcgcgaccgacacgcacgggcccctcgccccctctcgcctcccgtccgctcgccagctcccctcagccgaggctgctccgcggcggccgcagcccgcgcgcggcccacactcgcctcccctcggcacccccggccccggagctgcctggaggcggccgcactcggtgtaaagaactggccaagtccaaagccgaagtggcctgcattgcagtgtatgaaacagacgtgtttgtcgtcggaactgaaagaggacgtgcttttgtcaataccagaaaggattttcaaaaagattttgtaaaatattgtgttgaagaagaagaaaaagctgcagagatgcataaaatgaaatctacaacccaggcaaatcggatgagtgtagatgctgtagaaattgaaacactcagaaaaacagttgaggactatttctgcttttgctatgggaaagctttaggcaaatccacagtggtacctgtaccatatgagaagatgctgcgagaccagtcggctgtggtagtgcaggggcttccggaaggtgttgcctttaaacaccccgagaactatgatcttgcaaccctgaaatggattttggagaacaaagcagggatttcattcatcattaagagaccttttttagagccaaagaagcatgtaggtggtcgtgtgatggtaacagatgctgacaggtcaatactatctccaggtggaagttgtggccccatcaaagtgaaaactgaacccacagaagattctggcatttccctggaaatggcagctgtgacagtaaaggaagaatcagaagatcctgattattatcaatataacattcaaggaagccaccattcttcagagggcaatgaaggcacagaaatggaagtaccagcagaagattctactcaacatgtcccttcagaaacaagtgaggaccctgaagttgaggtgactattgaagatgatgattattctccaccgtctaagagaccaaaggccaatgagctaccgcagccaccagtcccggaacccgccaatgctgggaagcggaaagtgagggagttcaacttcgagaaatggaatgctcgcatcactgatctacgtaaacaagttgaagaattgtttgaaaggaaatatgctcaagccataaaagccaaaggtccggtgacgatcccgtaccctcttttccagtctcatgttgaagatctttatgtagaaggacttcctgaaggaattccttttagaaggccatctacttacggaattcctcgcctggagaggatattacttgcaaaggaaaggattcgttttgtgattaagaaacatgagcttctgaattcaacacgtgaagatttacagcttgataagccagcttcaggagtaaaggaagaatggtatgccagaatcactaaattaagaaagatggtggatcagcttttctgcaaaaaatttgcggaagccttggggagcactgaagccaaggctgtaccgtaccaaaaatttgaggcacacccgaatgatctgtacgtggaaggactgccagaaaacattcctttccgaagtccctcatggtatggaatcccaaggctggaaaaaatcattcaagtgggcaatcgaattaaatttgttattaaaagaccagaacttctgactcacagtaccactgaagttactcagccaagaacgaatacaccagtcaaagaagattggaatgtcagaattaccaagctacggaagcaagtggaagagatttttaatttgaaatttgctcaagctcttggactcaccgaggcagtaaaagtaccatatcctgtgtttgaatcaaacccggagttcttgtatgtggaaggcttgccagaggggattcccttccgaagccctacctggtttggaattccacgacttgaaaggatcgtccgcgggagtaataaaatcaagttcgttgttaaaaaacctgaactagttatttcctacttgcctcctgggatggctagtaaaataaacactaaagctttgcagtcccccaaaagaccacgaagtcctgggagtaattcaaaggttcctgaaattgaggtcaccgtggaaggccctaataacaacaatcctcaaacctcagctgttcgaaccccgacccagactaacggttctaacgttcccttcaagccacgagggagagagttttcctttgaggcctggaatgccaaaatcacggacctaaaacagaaagttgaaaatctcttcaatgagaaatgtggggaagctcttggccttaaacaagctgtgaaggtgccgttcgcgttatttgagtctttcccggaagacttttatgtggaaggcttacctgagggtgtgccattccgaagaccatcgacttttggcattccgaggctggagaagatactcagaaacaaagccaaaattaagttcatcattaaaaagcccgaaatgtttgagacggcgattaaggagagcacctcctctaagagccctcccagaaaaataaattcatcacccaatgttaatactactgcatcaggtgttgaagaccttaacatcattcaggtgacaattccagatgatgataatgaaagactctcgaaagttgaaaaagctagacagctaagagaacaagtgaatgacctctttagtcggaaatttggtgaagctattggtatgggttttcctgtgaaagttccctacaggaaaatcacaattaaccctggctgtgtggtggttgatggcatgcccccgggggtgtccttcaaagcccccagctacctggaaatcagctccatgagaaggatcttagactctgccgagtttatcaaattcacggtcattaggtaagtgagagtttcctgcttagtcacaggagcgaatctggagctcatgaggctgactcttctaaaatgcagccacaggtagtcatcgaatccggcttcctatgctgtgcaatcaacaaatcaaaataacttgtgtcatcattagaatgtcagatgtgcttctacgaactaagctgactcttttaattctttggcaaagggttggcaaactaggactgtttgccaaattcaggctgcctcctatttttagagtcttcctgaaacacagctacacccgtattatccatggctgctttcctgtcacagtgagtaagtagctgggactgagaaggcatggcctccaaagtctaaaatatttactctctagcactttgtagaaaaaccttagctaggcacagtggctaacgcctgtaatcccagcattttgggaggccaaggcaggcagatcacctgaggtcaggagttccagaccagcctggccaacatggtgaaatcccatctctacaaaaataaaacagttagctgggcatgatggcgggtgcctgtaatcccagctactcgggaggctgaggcaggatagtcgcttgaacccaggaggtggaggttgcaatgagccaagatcatgccactgcactccagcctggacgacagagtgagactccatcacaagaaaaaaagaactttgtcaacctctgtcttagggcgccttgtcacaggcttcgggtcagacggattcaaccttgcatcagccatttgttagccaggtcactctgttctttgtctgtaaatgagattgatcgttgttcccactgagagtgtcagctccttcccgtagagcaggcatgatgattgtactcacctctgacaccattgtgagtgccacattccttcccacgtccttgtcactgtaagagatgcccacctgagcaccaaccccaggttatcttcccctttgtcttccagccccccagaaacagctacgactcaacctacccaatcatttcatcatcagattgccactgtctctagttcaggtctcttgggactggcactcagaaatctcataataaatcctcttgaggcttctcatacactcgtcttcttccaatcttctttccctcaaaatctcatattttggttccacttcacccaccgtcattctccatatcactcccaggagttaggcaaaaagccccttccgttcttccgtatgttaaacttagaatcactctgttccctgctctgcgtttctattttttgtttttcctccatttactagtagcttaacactttctaacagtgttcttattattgatacgtatctatctcttccataagcttataaggtcacggataatacttctcattgtagtacgtaaatgacgtgggctagatatgagttgaataaacagttatacctgtaaattcttacagagtgaaaataaattgttatactttacaatttgtttctctctttagaccatttccaggacttgtgattaataaccgtgagtattttgtgaagtgttttgtttttgttttttcctggggtctgacgtgtgtgcgtgtgagtgtgtatacatgcttaacgtatatcacgttacttcacctatgtcagtaaccaggccaaatacttgttttagccctcagtaaaaacaccaggcacttcctagttgtaaaattattcaagcttcttaacttcctatcctcgatgcacttaatcataaaatggtaataatagcaccgattttgggggagtcgttccagtagatggaaagcatctggaacaggtgtcagcaagctcctgccgacgtgtatgcataaagttttattgaaaccaccatcgtgtccatttgtttatggcagaactgagagatggcagcagcaagtgtgtgcctgcaaaacctaaaatatttactaattggctctgcaagaaaagagtttgcatccccctaacctagaacagtgtctagcctctagtatgtgtttagcctacagtatgtgctcagcgaatacaatctatatttattactgcttttatgactgttataattactgtgcttggatttcgttacaaagtaagtcacaatgtgcctgcttctgttagtatttcagcacagtgcctggcacacatggggctctcaaatattgctgagcgagtgaacaaatgtcctttcaattccttaacgttgatgtcattttcaatagtattttgagccaaacttaattttgcgagtgtgttttgttttcttaactttattattaaaaatgtataaaagtgaggccaggcgtggtggctcacgcctgtaatcccagcagtttgggaggctgaggcaggcggatcagttgaggttgggagttggagaccagcccgtccaacatggtgaaagcctgtctctactaaaaatacaaaaatcagctgggtgtggtggcgcgtgcctgtaatcccagctactcaggaggctgaggcaggagagttgcttgaatcctagaggtggaggttgcagtgagctgagatcgtgccattgcactccagcctgggcaacaagagcaaaactctgtcccaataaataaataaataaaatgttctcttttgttcctgttcttgtgcggtagtgtggtatagagttttatggtaattactgtgaattagtgattctgagggacatatcagaactctgaggtttgtttccttctcatcttgagggaaacagcaaatgtatgttaaaatgcttttccaagggaacaacacatccttacattatttaaaccaatctgcttcattttcagagctggttgatcagagtgagtcagaaggccccgtgatacaagaatcagctgaaccaagccagttggaagttccagccacagaagaaataaaagagactgatggaagctctcagatcaagcaagaaccagaccccacgtggtagacctcttccctcctagggtaaatcagcttctgtgtcagggatgctgtgtggtgtccatctgaaccccctgcatacgcgtagctaatgtgatctccccactttcacataagatggtggccctgccttcagggaatgtgggagccaggtgggagccttcccggatatttaagctagaagattctacagggagattctccttggatcaatatatgtctctcagtcaaagatgtaaaagcacttttgccttaaaaagaatgttctgtttctaaatagagtcaacgttgtcctcctcattggaattcactatgagtcagaatcattagactgacttttttttttccatagtaatagtattttgcagagtctcacagagctgcagatcttttgttcatcttgcagagttaacaagtctgatcctgttagtccagatttcttaaatttggccaagttataataggagcagtagcttgagacccgaagtcaggaaactttgacaatggatttttttttttaatccagagacttgtactggaatttgccttaccctgtcagctcatggacttaaggtttcatcccgctttatgagtgcttctgaatccaagtcattgttacctgaatttgcaaattaagttgtgatattcgtgactgttaaattcctgtaattagattaacctctttgcttgcttgtttgttttctctcctattttagcttaaagtatcagtggttgagaagagcttttcggacctgttactaccccaagctgtgtaatatacttgtataacagaaataccttctatacaaacctttttttctacttttagatagaaatgtctactttttcagcagttctgtgaattaaagagcagagtgactgtgggtctggaatggctggtgtacttgggaatgtactatcaggattttacagcaatgctgggaaatgacagggaaaatgacaggaatgaatctcaccagattttttatgtactcagcagagccttgagttacggtgtttattttccaatcaagtgaagatatctcctacttctcctactggaacatctcagcttctgcagtgaagaaaaattcctgtgatagttcagttctttagtttttctatttgaaaaaaaaaaatcatttaaatgatcctttgttcacggctctccttaatgactgagtgaacagttcctatctgtatatttgactaaaccttttcctaagctatctctcatggttcctatgtttttttatcataattaaaagcaaaaccatctggatcacctaacagtcagaggtcagtatctcagcgtgtgaattatagaggaaatacagagagaacctcttccacttttacttttcgtccaaataaaatgcatggtgtaccagaagttgaagatcgggttgaggattggggctagctcgatgacactaaggccccaacatcgcgggacctgctgtggcgcggattcttaggaacgctgttctagccggccccctctccaggggtcgccgtggccggcattatttcctagttcttcttgtaaccctgaggtgccagcgcggggagtgaggaggggtcagggggctaaggatgcaacctctgacgttctgcgccttcctaggagagtcttacatgtgttgagatttcacaagcaatgcgagttgtaaaataccagctctacaagaagctaggctctgtgacggcatagttttcagtagctttatcacaatattcacaatggagaattatatgacatggtagcagaaataggcccttttatgtgttgcttctattttacctcaaattgtagatatagggtaatcaataaaatccatccatgcctttcacacactaagt

SEQ ID NO: 4187 - protein, 833 aa, Homo sapiens
MHKMKSTTQANRMSVDAVEIETLRKTVEDYFCFCYGKALGKSTVVPVPYEKMLRDQSAVVVQGLPEGVAFKHPENYDLATLKWILENKAGISFIIKRPFLEPKKHVGGRVMVTDADRSILSPGGSCGPIKVKTEPTEDSGISLEMAAVTVKEESEDPDYYQYNIQGSHHSSEGNEGTEMEVPAEDSTQHVPSETSEDPEVEVTIEDDDYSPPSKRPKANELPQPPVPEPANAGKRKVREFNFEKWNARITDLRKQVEELFERKYAQAIKAKGPVTIPYPLFQSHVEDLYVEGLPEGIPFRRPSTYGIPRLERILLAKERIRFVIKKHELLNSTREDLQLDKPASGVKEEWYARITKLRKMVDQLFCKKFAEALGSTEAKAVPYQKFEAHPNDLYVEGLPENIPFRSPSWYGIPRLEKIIQVGNRIKFVIKRPELLTHSTTEVTQPRTNTPVKEDWNVRITKLRKQVEEIFNLKFAQALGLTEAVKVPYPVFESNPEFLYVEGLPEGIPFRSPTWFGIPRLERIVRGSNKIKFVVKKPELVISYLPPGMASKINTKALQSPKRPRSPGSNSKVPEIEVTVEGPNNNNPQTSAVRTPTQTNGSNVPFKPRGREFSFEAWNAKITDLKQKVENLFNEKCGEALGLKQAVKVPFALFESFPEDFYVEGLPEGVPFRRPSTFGIPRLEKILRNKAKIKFIIKKPEMFETAIKESTSSKSPPRKINSSPNVNTTASGVEDLNIIQVTIPDDDNERLSKVEKARQLREQVNDLFSRKFGEAIGMGFPVKVPYRKITINPGCVVVDGMPPGVSFKAPSYLEISSMRRILDSAEFIKFTVIR

SEQ ID NO: 4188 - DNA, 4410 bp, Homo sapiens
aaaaaaaaaaaaaaaaaaaaaaaaaaaagaaaaaagaaaaaaaaaaggaggaggaggaggagggtgagagagaagctgggagagcagagaaaaggggccaccggtcgcccccccgcttccccgcacgcgctctccagccgcggccgcccgcctgccgcggtcaccccggcctctgcctctgtcccccagtgatcggatcaaggcgctgagcgaggccctgcctgcggggcggccatgcggcggtgacaggagcgcgaccgacacgcacgggcccctcgccccctctcgcctcccgtccgctcgccagctcccctcagccgaggctgctccgcggcggccgcagcccgcgcgcggcccacactcgcctcccctcggcacccccggccccggagctgcctggaggcggccgcactcggggatcatggcccaagttgcaatgtccaccctccccgttgaagatgaggagtcctcggagagcaggatggtggtgacattcctcatgtcagctctcgagtccatgtgtaaagaactggccaagtccaaagccgaagtggcctgcattgcagtgtatgaaacagacgtgtttgtcgtcggaactgaaagaggacgtgcttttgtcaataccagaaaggattttcaaaaagattttgtaaaatattgtgttgaagaagaagaaaaagctgcagagatgcataaaatgaaatctacaacccaggcaaatcggatgagtgtagatgctgtagaaattgaaacactcagaaaaacagttgaggactatttctgcttttgctatgggaaagctttaggcaaatccacagtggtacctgtaccatatgagaagatgctgcgagaccagtcggctgtggtagtgcaggggcttccggaaggtgttgcctttaaacaccccgagaactatgatcttgcaaccctgaaatggattttggagaacaaagcagggatttcattcatcattaagagaccttttttagagccaaagaagcatgtaggtggtcgtgtgatggtaacagatgctgacaggtcaatactatctccaggtggaagttgtggccccatcaaagtgaaaactgaacccacagaagattctggcatttccctggaaatggcagctgtgacagtaaaggaagaatcagaagatcctgattattatcaatataacattcaagcaggcccttctgaaactgatgatgttgatgaaaaacagcccctatcgaagcctttgcaaggaagccaccattcttcagagggcaatgaaggcacagaaatggaagtaccagcagaagattctactcaacatgtcccttcagaaacaagtgaggaccctgaagttgaggtgactattgaagatgatgattattctccaccgtctaagagaccaaaggccaatgagctaccgcagccaccagtcccggaacccgccaatgctgggaagcggaaagtgagggagttcaacttcgagaaatggaatgctcgcatcactgatctacgtaaacaagttgaagaattgtttgaaaggaaatatgctcaagccataaaagccaaaggtccggtgacgatcccgtaccctcttttccagtctcatgttgaagatctttatgtagaaggacttcctgaaggaattccttttagaaggccatctacttacggaattcctcgcctggagaggatattacttgcaaaggaaaggattcgttttgtgattaagaaacatgagcttctgaattcaacacgtgaagatttacagcttgataagccagcttcaggagtaaaggaagaatggtatgccagaatcactaaattaagaaagatggtggatcagcttttctgcaaaaaatttgcggaagccttggggagcactgaagccaaggctgtaccgtaccaaaaatttgaggcacacccgaatgatctgtacgtggaaggactgccagaaaacattcctttccgaagtccctcatggtatggaatcccaaggctggaaaaaatcattcaagtgggcaatcgaattaaatttgttattaaaagaccagaacttctgactcacagtaccactgaagttactcagccaagaacgaatacaccagtcaaagaagattggaatgtcagaattaccaagctacggaagcaagtggaagagatttttaatttgaaatttgcttagatttgttgacagcggtttcctggagtgctgtcttgagaacgattctgaggaggctcagcaagaaagagtgtttcagttgattgggtgtgtctgtcatggagaaggaactcaagctcttggactcaccgaggcagtaaaagtaccatatcctgtgtttgaatcaaacccggagttcttgtatgtggaaggcttgccagaggggattcccttccgaagccctacctggtttggaattccacgacttgaaaggatcgtccgcgggagtaataaaatcaagttcgttgttaaaaaacctgaactagttatttcctacttgcctcctgggatggctagtaaaataaacactaaagctttgcagtcccccaaaagaccacgaagtcctgggagtaattcaaaggttcctgaaattgaggtcaccgtggaaggccctaataacaacaatcctcaaacctcagctgttcgaaccccgacccagactaacggttctaacgttcccttcaagccacgagggagagagttttcctttgaggcctggaatgccaaaatcacggacctaaaacagaaagttgaaaatctcttcaatgagaaatgtggggaagctcttggccttaaacaagctgtgaaggtgccgttcgcgttatttgagtctttcccggaagacttttatgtggaaggcttacctgagggtgtgccattccgaagaccatcgacttttggcattccgaggctggagaagatactcagaaacaaagccaaaattaagttcatcattaaaaagcccgaaatgtttgagacggcgattaaggagagcacctcctctaagagccctcccagaaaaataaattcatcacccaatgttaatactactgcatcaggtgttgaagaccttaacatcattcaggtgacaattccagatgatgataatgaaagactctcgaaagttgaaaaagctagacagctaagagaacaagtgaatgacctctttagtcggaaatttggtgaagctattggtatgggttttcctgtgaaagttccctacaggaaaatcacaattaaccctggctgtgtggtggttgatggcatgcccccgggggtgtccttcaaagcccccagctacctggaaatcagctccatgagaaggatcttagactctgccgagtttatcaaattcacggtcattagaccatttccaggacttgtgattaataaccagctggttgatcagagtgagtcagaaggccccgtgatacaagaatcagctgaaccaagccagttggaagttccagccacagaagaaataaaagagactgatggaagctctcagatcaagcaagaaccagaccccacgtggtagacctcttccctcctaggagccttgagttacggtgtttattttccaatcaagtgaagatatctcctacttctcctactggaacatctcagcttctgcagtgaagaaaaattcctgtgatagttcagttctttagtttttctatttgaaaaaaaaaaatcatttaaatgatcctttgttcacggctctccttaatgactgagtgaacagttcctatctgtatatttgactaaaccttttcctaagctatctctcatggttcctatgtttttttatcataattaaaagcaaaaccatctggatcacctaacagtcagaggtcagtatctcagcgtgtgaattatagaggaaatacagagagaacctcttccacttttacttttcgtccaaataaaatgcatggtgtaccagaagttgaagatcgggttgaggattggggctagctcgatgacactaaggccccaacatcgcgggacctgctgtggcgcggattcttaggaacgctgttctagccggccccctctccaggggtcgccgtggccggcattatttcctagttcttcttgtaaccctgaggtgccagcgcggggagtgaggaggggtcagggggctaaggatgcaacctctgacgttctgcgccttcctaggagagtcttacatgtgttgagatttcacaagcaatgcgagttgtaaaataccagctctacaagaagctaggctctgtgacggcatagttttcagtagctttatcacaatattcacaatggagaattatatgacatggtagcagaaataggcccttttatgtgttgcttctattttacctcaaattgtagatatagggtaatcaataaaatccatccatgcctttcacacactaagt

SEQ ID NO: 4189 - protein, 584 aa, Homo sapiens; identical to SEQ ID NO: 4053

SEQ ID NO: 4190 - DNA, 3970 bp, Homo sapiens
aaaaaaaaaaaaaaaaaaaaaaaaaaaagaaaaaagaaaaaaaaaaggaggaggaggaggagggtgagagagaagctgggagagcagagaaaaggggccaccggtcgcccccccgcttccccgcacgcgctctccagccgcggccgcccgcctgccgcggtcaccccggcctctgcctctgtcccccagtgatcggatcaaggcgctgagcgaggccctgcctgcggggcggccatgcggcggtgacaggagcgcgaccgacacgcacgggcccctcgccccctctcgcctcccgtccgctcgccagctcccctcagccgaggctgctccgcggcggccgcagcccgcgcgcggcccacactcgcctcccctcggcacccccggccccggagctgcctggaggcggccgcactcggggatcatggcccaagttgcaatgtccaccctccccgttgaagatgaggagtcctcggagagcaggatggtggtgacattcctcatgtcagctctcgagtccatgtgtaaagaactggccaagtccaaagccgaagtggcctgcattgcagtgtatgaaacagacgtgtttgtcgtcggaactgaaagaggacgtgcttttgtcaataccagaaaggattttcaaaaagattttgtaaaatattgtgttgaagaagaagaaaaagctgcagagatgcataaaatgaaatctacaacccaggcaaatcggatgagtgtagatgctgtagaaattgaaacactcagaaaaacagttgaggactatttctgcttttgctatgggaaagctttaggcaaatccacagtggtacctgtaccatatgagaagatgctgcgagaccagtcggctgtggtagtgcaggggcttccggaaggtgttgcctttaaacaccccgagaactatgatcttgcaaccctgaaatggattttggagaacaaagcagggatttcattcatcattaagagaccttttttagagccaaagaagcatgtaggtggtcgtgtgatggtaacagatgctgacaggtcaatactatctccaggtggaagttgtggccccatcaaagtgaaaactgaacccacagaagattctggcatttccctggaaatggcagctgtgacagtaaaggaagaatcagaagatcctgattattatcaatataacattcaaggaagccaccattcttcagagggcaatgaaggcacagaaatggaagtaccagcagaagattctactcaacatgtcccttcagaaacaagtgaggaccctgaagttgaggtgactattgaagatgatgattattctccaccgtctaagagaccaaaggccaatgagctaccgcagccaccagtcccggaacccgccaatgctgggaagcggaaagtgagggagttcaacttcgagaaatggaatgctcgcatcactgatctacgtaaacaagttgaagaattgtttgaaaggaaatatgctcaagccataaaagccaaaggtccggtgacgatcccgtaccctcttttccagtctcatgttgaagatctttatgtagaaggacttcctgaaggaattccttttagaaggccatctacttacggaattcctcgcctggagaggatattacttgcaaaggaaaggattcgttttgtgattaagaaacatgagcttctgaattcaacacgtgaagatttacagcttgataagccagcttcaggagtaaaggaagaatggtatgccagaatcactaaattaagaaagatggtggatcagcttttctgcaaaaaatttgcggaagccttggggagcactgaagccaaggctgtaccgtaccaaaaatttgaggcacacccgaatgatctgtacgtggaaggactgccagaaaacattcctttccgaagtccctcatggtatggaatcccaaggctggaaaaaatcattcaagtgggcaatcgaattaaatttgttattaaaagaccagaacttctgactcacagtaccactgaagttactcagccaagaacgaatacaccagtcaaagaagattggaatgtcagaattaccaagctacggaagcaagtggaagagatttttaatttgaaatttgctcaagctcttggactcaccgaggcagtaaaagtaccatatcctgtgtttgaatcaaacccggagttcttgtatgtggaaggcttgccagaggggattcccttccgaagccctacctggtttggaattccacgacttgaaaggatcgtccgcgggagtaataaaatcaagttcgttgttaaaaaacctgaactagttatttcctacttgcctcctgggatggctagtaaaataaacactaaagctttgcagtcccccaaaagaccacgaagtcctgggagtaattcaaaggttcctgaaattgaggtcaccgtggaaggccctaataacaacaatcctcaaacctcagctgttcgaaccccgacccagactaacggttctaacgttcccttcaagccacgagggagagagttttcctttgaggcctggaatgccaaaatcacggacctaaaacagaaagttgaaaatctcttcaatgagaaatgtggggaagctcttggccttaaacaagctgtgaaggtgccgttcgcgttatttgagtctttcccggaagacttttatgtggaaggcttacctgagggtgtgccattccgaagaccatcgacttttggcattccgaggctggagaagatactcagaaacaaagccaaaattaagttcatcattaaaaagcccgaaatgtttgagacggcgattaaggagagcacctcctctaagagccctcccagaaaaataaattcatcacccaatgttaatactactgcatcaggtgttgaagaccttaacatcattcaggtgacaattccagatgatgataatgaaagactctcgaaagttgaaaaagctagacagctaagagaacaagtgaatgacctctttagtcggaaatttggtgaagctattggtatgggttttcctgtgaaagttccctacaggaaaatcacaattaaccctggctgtgtggtggttgatggcatgcccccgggggtgtccttcaaagcccccagctacctggaaatcagctccatgagaaggatcttagactctgccgagtttatcaaattcacggtcattagaccatttccaggacttgtgattaataaccagctggttgatcagagtgagtcagaaggccccgtgatacaagaatcagctgaaccaagccagttggaagttccagccacagaagaaataaaagagactgatggaagctctcagatcaagcaagaaccagaccccacgtggtagacctcttccctcctaggcaaaaccatctggatcacctaacagtcagaggtcagtatctcagcgtgtgaattatagaggaaatacagagagaacctcttccacttttacttttcgtccaaataaaatgcatggtgtaccagaagttgaagatcgggttgaggattggggctagctcgatgacactaaggccccaacatcgcgggacctgctgtggcgcggattcttaggaacgctgttctagccggccccctctccaggggtcgccgtggccggcattatttcctagttcttcttgtaaccctgaggtgccagcgcggggagtgaggaggggtcagggggctaaggatgcaacctctgacgttctgcgccttcctaggagagtcttacatgtgttgagatttcacaagcaatgcgagttgtaaaataccagctctacaagaagctaggctctgtgacggcatagttttcagtagctttatcacaatattcacaatggagaattatatgacatggtagcagaaataggcccttttatgtgttgcttctattttacctcaaattgtagatatagggtaatcaataaaatccatccatgcctttcacacactaagt

SEQ ID NO: 4191 - protein, 978 aa, Homo sapiens; identical to SEQ ID NO: 470

SEQ ID NO: 4192 - DNA, 4346 bp, Homo sapiens
aaaaaaaaaaaaaaaaaaaaaaaaaaaagaaaaaagaaaaaaaaaaggaggaggaggaggagggtgagagagaagctgggagagcagagaaaaggggccaccggtcgcccccccgcttccccgcacgcgctctccagccgcggccgcccgcctgccgcggtcaccccggcctctgcctctgtcccccagtgatcggatcaaggcgctgagcgaggccctgcctgcggggcggccatgcggcggtgacaggagcgcgaccgacacgcacgggcccctcgccccctctcgcctcccgtccgctcgccagctcccctcagccgaggctgctccgcggcggccgcagcccgcgcgcggcccacactcgcctcccctcggcacccccggccccggagctgcctggaggcggccgcactcggtgtaaagaactggccaagtccaaagccgaagtggcctgcattgcagtgtatgaaacagacgtgtttgtcgtcggaactgaaagaggacgtgcttttgtcaataccagaaaggattttcaaaaagattttgtaaaatattgtgttgaagaagaagaaaaagctgcagagatgcataaaatgaaatctacaacccaggcaaatcggatgagtgtagatgctgtagaaattgaaacactcagaaaaacagttgaggactatttctgcttttgctatgggaaagctttaggcaaatccacagtggtacctgtaccatatgagaagatgctgcgagaccagtcggctgtggtagtgcaggggcttccggaaggtgttgcctttaaacaccccgagaactatgatcttgcaaccctgaaatggattttggagaacaaagcagggatttcattcatcattaagagaccttttttagagccaaagaagcatgtaggtggtcgtgtgatggtaacagatgctgacaggtcaatactatctccaggtggaagttgtggccccatcaaagtgaaaactgaacccacagaagattctggcatttccctggaaatggcagctgtgacagtaaaggaagaatcagaagatcctgattattatcaatataacattcaaggaagccaccattcttcagagggcaatgaaggcacagaaatggaagtaccagcagaagattctactcaacatgtcccttcagaaacaagtgaggaccctgaagttgaggtgactattgaagatgatgattattctccaccgtctaagagaccaaaggccaatgagctaccgcagccaccagtcccggaacccgccaatgctgggaagcggaaagtgagggagttcaacttcgagaaatggaatgctcgcatcactgatctacgtaaacaagttgaagaattgtttgaaaggaaatatgctcaagccataaaagccaaaggtccggtgacgatcccgtaccctcttttccagtctcatgttgaagatctttatgtagaaggacttcctgaaggaattccttttagaaggccatctacttacggaattcctcgcctggagaggatattacttgcaaaggaaaggattcgttttgtgattaagaaacatgagcttctgaattcaacacgtgaagatttacagcttgataagccagcttcaggagtaaaggaagaatggtatgccagaatcactaaattaagaaagatggtggatcagcttttctgcaaaaaatttgcggaagccttggggagcactgaagccaaggctgtaccgtaccaaaaatttgaggcacacccgaatgatctgtacgtggaaggactgccagaaaacattcctttccgaagtccctcatggtatggaatcccaaggctggaaaaaatcattcaagtgggcaatcgaattaaatttgttattaaaagaccagaacttctgactcacagtaccactgaagttactcagccaagaacgaatacaccagctcaagctcttggactcaccgaggcagtaaaagtaccatatcctgtgtttgaatcaaacccggagttcttgtatgtggaaggcttgccagaggggattcccttccgaagccctacctggtttggaattccacgacttgaaaggatcgtccgcgggagtaataaaatcaagttcgttgttaaaaaacctgaactagttatttcctacttgcctcctgggatggctagtaaaataaacactaaagctttgcagtcccccaaaagaccacgaagtcctgggagtaattcaaaggttcctgaaattgaggtcaccgtggaaggccctaataacaacaatcctcaaacctcagctgttcgaaccccgacccagactaacggttctaacgttcccttcaagccacgagggagagagttttcctttgaggcctggaatgccaaaatcacggacctaaaacagaaagttgaaaatctcttcaatgagaaatgtggggaagctcttggccttaaacaagctgtgaaggtgccgttcgcgttatttgagtctttcccggaagacttttatgtggaaggcttacctgagggtgtgccattccgaagaccatcgacttttggcattccgaggctggagaagatactcagaaacaaagccaaaattaagttcatcattaaaaagcccgaaatgtttgagacggcgattaaggagagcacctcctctaagagccctcccagaaaaataaattcatcacccaatgttaatactactgcatcaggtgttgaagaccttaacatcattcaggtgacaattccagatgatgataatgaaagactctcgaaagttgaaaaagctagacagctaagagaacaagtgaatgacctctttagtcggaaatttggtgaagctattggtatgggttttcctgtgaaagttccctacaggaaaatcacaattaaccctggctgtgtggtggttgatggcatgcccccgggggtgtccttcaaagcccccagctacctggaaatcagctccatgagaaggatcttagactctgccgagtttatcaaattcacggtcattagaccatttccaggacttgtgattaataaccagctggttgatcagagtgagtcagaaggccccgtgatacaagaatcagctgaaccaagccagttggaagttccagccacagaagaaataaaagagactgatggaagctctcagatcaagcaagaaccagaccccacgtggtagacctcttccctcctaggcttaaagtatcagtggttgagaagagcttttcggacctgttactaccccaagctgtgtaatatacttgtataacagaaataccttctatacaaacctttttttctacttttagatagaaatgtctactttttcagcagttctgtgaattaaagagcagagtgactgtgggtctggaatggctggtgtacttgggaatgtactatcaggattttacagcaatgctgggaaatgacagggaaaatgacaggaatgaatctcaccagattttttatgtactcagcagagccttgagttacggtgtttattttccaatcaagtgaagatatctcctacttctcctactggaacatctcagcttctgcagtgaagaaaaattcctgtgatagttcagttctttagtttttctatttgaaaaaaaaaaatcatttaaatgatcctttgttcacggctctccttaatgactgagtgaacagttcctatctgtatatttgactaaaccttttcctaagctatctctcatggttcctatgtttttttatcataattaaaagcaaaaccatctggatcacctaacagtcagaggtcagtatctcagcgtgtgaattatagaggaaatacagagagaacctcttccacttttacttttcgtccaaataaaatgcatggtgtaccagaagttgaagatcgggttgaggattggggctagctcgatgacactaaggccccaacatcgcgggacctgctgtggcgcggattcttaggaacgctgttctagccggccccctctccaggggtcgccgtggccggcattatttcctagttcttcttgtaaccctgaggtgccagcgcggggagtgaggaggggtcagggggctaaggatgcaacctctgacgttctgcgccttcctaggagagtcttacatgtgttgagatttcacaagcaatgcgagttgtaaaataccagctctacaagaagctaggctctgtgacggcatagttttcagtagctttatcacaatattcacaatggagaattatatgacatggtagcagaaataggcccttttatgtgttgcttctattttacctcaaattgtagatatagggtaatcaataaaatccatccatgcctttcacacactaagt

SEQ ID NO: 4193 - protein, 865 aa, Homo sapiens; identical to SEQ ID NO: 4043

SEQ ID NO: 4194 - DNA, 4019 bp, Homo sapiens
aaaaaaaaaaaaaaaaaaaaaaaaaaaagaaaaaagaaaaaaaaaaggaggaggaggaggagggtgagagagaagctgggagagcagagaaaaggggccaccggtcgcccccccgcttccccgcacgcgctctccagccgcggccgcccgcctgccgcggtcaccccggcctctgcctctgtcccccagtgatcggatcaaggcgctgagcgaggccctgcctgcggggcggccatgcggcggtgacaggagcgcgaccgacacgcacgggcccctcgccccctctcgcctcccgtccgctcgccagctcccctcagccgaggctgctccgcggcggccgcagcccgcgcgcggcccacactcgcctcccctcggcacccccggccccggagctgcctggaggcggccgcactcggggatcatggcccaagttgcaatgtccaccctccccgttgaagatgaggagtcctcggagagcaggatggtggtgacattcctcatgtcagctctcgagtccatgtgtaaagaactggccaagtccaaagccgaagtggcctgcattgcagtgtatgaaacagacgtgtttgtcgtcggaactgaaagaggacgtgcttttgtcaataccagaaaggattttcaaaaagattttgtaaaatattgtgttgaagaagaagaaaaagctgcagagatgcataaaatgaaatctacaacccaggcaaatcggatgagtgtagatgctgtagaaattgaaacactcagaaaaacagttgaggactatttctgcttttgctatgggaaagctttaggcaaatccacagtggtacctgtaccatatgagaagatgctgcgagaccagtcggctgtggtagtgcaggggcttccggaaggtgttgcctttaaacaccccgagaactatgatcttgcaaccctgaaatggattttggagaacaaagcagggatttcattcatcattaagagaccttttttagagccaaagaagcatgtaggtggtcgtgtgatggtaacagatgctgacaggtcaatactatctccaggtggaagttgtggccccatcaaagtgaaaactgaacccacagaagattctggcatttccctggaaatggcagctgtgacagtaaaggaagaatcagaagatcctgattattatcaatataacattcaaggaagccaccattcttcagagggcaatgaaggcacagaaatggaagtaccagcagaagatgatgattattctccaccgtctaagagaccaaaggccaatgagctaccgcagccaccagtcccggaacccgccaatgctgggaagcggaaagtgagggagttcaacttcgagaaatggaatgctcgcatcactgatctacgtaaacaagttgaagaattgtttgaaaggaaatatgctcaagccataaaagccaaaggtccggtgacgatcccgtaccctcttttccagtctcatgttgaagatctttatgtagaaggacttcctgaaggaattccttttagaaggccatctacttacggaattcctcgcctggagaggatattacttgcaaaggaaaggattcgttttgtgattaagaaacatgagcttctgaattcaacacgtgaagatttacagcttgataagccagcttcaggagtaaaggaagaatggtatgccagaatcactaaattaagaaagatggtggatcagcttttctgcaaaaaatttgcggaagccttggggagcactgaagccaaggctgtaccgtaccaaaaatttgaggcacacccgaatgatctgtacgtggaaggactgccagaaaacattcctttccgaagtccctcatggtatggaatcccaaggctggaaaaaatcattcaagtgggcaatcgaattaaatttgttattaaaagaccagaacttctgactcacagtaccactgaagttactcagccaagaacgaatacaccagtcaaagaagattggaatgtcagaattaccaagctacggaagcaagtggaagagatttttaatttgaaatttgcttagatttgttgacagcggtttcctggagtgctgtcttgagaacgattctgaggaggctcagcaagaaagagtgtttcagttgattgggtgtgtctgtcatggagaaggaactcaagctcttggactcaccgaggcagtaaaagtaccatatcctgtgtttgaatcaaacccggagttcttgtatgtggaaggcttgccagaggggattcccttccgaagccctacctggtttggaattccacgacttgaaaggatcgtccgcgggagtaataaaatcaagttcgttgttaaaaaacctgaactagttatttcctacttgcctcctgggatggctagtaaaataaacactaaagctttgcagtcccccaaaagaccacgaagtcctgggagtaattcaaaggttcctgaaattgaggtcaccgtggaaggccctaataacaacaatcctcaaacctcagctgttcgaaccccgacccagactaacggttctaacgttcccttcaagccacgagggagagagttttcctttgaggcctggaatgccaaaatcacggacctaaaacagaaagttgaaaatctcttcaatgagaaatgtggggaagctcttggccttaaacaagctgtgaaggtgccgttcgcgttatttgagtctttcccggaagacttttatgtggaaggcttacctgagggtgtgccattccgaagaccatcgacttttggcattccgaggctggagaagatactcagaaacaaagccaaaattaagttcatcattaaaaagcccgaaatgtttgagacggcgattaaggagagcacctcctctaagagccctcccagaaaaataaattcatcacccaatgttaatactactgcatcaggtgttgaagaccttaacatcattcaggtgacaattccagatgatgataatgaaagactctcgaaagttgaaaaagctagacagctaagagaacaagtgaatgacctctttagtcggaaatttggtgaagctattggtatgggttttcctgtgaaagttccctacaggaaaatcacaattaaccctggctgtgtggtggttgatggcatgcccccgggggtgtccttcaaagcccccagctacctggaaatcagctccatgagaaggatcttagactctgccgagtttatcaaattcacggtcattagaccatttccaggacttgtgattaataaccagctggttgatcagagtgagtcagaaggccccgtgatacaagaatcagctgaaccaagccagttggaagttccagccacagaagaaataaaagagactgatggaagctctcagatcaagcaagaaccagaccccacgtggtagacctcttccctcctaggcaaaaccatctggatcacctaacagtcagaggtcagtatctcagcgtgtgaattatagaggaaatacagagagaacctcttccacttttacttttcgtccaaataaaatgcatggtgtaccagaagttgaagatcgggttgaggattggggctagctcgatgacactaaggccccaacatcgcgggacctgctgtggcgcggattcttaggaacgctgttctagccggccccctctccaggggtcgccgtggccggcattatttcctagttcttcttgtaaccctgaggtgccagcgcggggagtgaggaggggtcagggggctaaggatgcaacctctgacgttctgcgccttcctaggagagtcttacatgtgttgagatttcacaagcaatgcgagttgtaaaataccagctctacaagaagctaggctctgtgacggcatagttttcagtagctttatcacaatattcacaatggagaattatatgacatggtagcagaaataggcccttttatgtgttgcttctattttacctcaaattgtagatatagggtaatcaataaaatccatccatgcctttcacacactaagt

SEQ ID NO: 4195 - protein, 543 aa, Homo sapiens
MAQVAMSTLPVEDEESSESRMVVTFLMSALESMCKELAKSKAEVACIAVYETDVFVVGTERGRAFVNTRKDFQKDFVKYCVEEEEKAAEMHKMKSTTQANRMSVDAVEIETLRKTVEDYFCFCYGKALGKSTVVPVPYEKMLRDQSAVVVQGLPEGVAFKHPENYDLATLKWILENKAGISFIIKRPFLEPKKHVGGRVMVTDADRSILSPGGSCGPIKVKTEPTEDSGISLEMAAVTVKEESEDPDYYQYNIQGSHHSSEGNEGTEMEVPAEDDDYSPPSKRPKANELPQPPVPEPANAGKRKVREFNFEKWNARITDLRKQVEELFERKYAQAIKAKGPVTIPYPLFQSHVEDLYVEGLPEGIPFRRPSTYGIPRLERILLAKERIRFVIKKHELLNSTREDLQLDKPASGVKEEWYARITKLRKMVDQLFCKKFAEALGSTEAKAVPYQKFEAHPNDLYVEGLPENIPFRSPSWYGIPRLEKIIQVGNRIKFVIKRPELLTHSTTEVTQPRTNTPVKEDWNVRITKLRKQVEEIFNLKFA

SEQ ID NO: 4196 - DNA, 5013 bp, Homo sapiens
aaaaaaaaaaaaaaaaaaaaaaaaaaaagaaaaaagaaaaaaaaaaggaggaggaggaggagggtgagagagaagctgggagagcagagaaaaggggccaccggtcgcccccccgcttccccgcacgcgctctccagccgcggccgcccgcctgccgcggtcaccccggcctctgcctctgtcccccagtgatcggatcaaggcgctgagcgaggccctgcctgcggggcggccatgcggcggtgacaggagcgcgaccgacacgcacgggcccctcgccccctctcgcctcccgtccgctcgccagctcccctcagccgaggctgctccgcggcggccgcagcccgcgcgcggcccacactcgcctcccctcggcacccccggccccggagctgcctggaggcggccgcactcggggatcatggcccaagttgcaatgtccaccctccccgttgaagatgaggagtcctcggagagcaggatggtggtgacattcctcatgtcagctctcgagtccatgtgtaaagaactggccaagtccaaagccgaagtggcctgcattgcagtgtatgaaacagacgtgtttgtcgtcggaactgaaagaggacgtgcttttgtcaataccagaaaggattttcaaaaagattttgtaaaatattgtgttgaagaagaagaaaaagctgcagagatgcataaaatgaaatctacaacccaggcaaatcggatgagtgtagatgctgtagaaattgaaacactcagaaaaacagttgaggactatttctgcttttgctatgggaaagctttaggcaaatccacagtggtacctgtaccatatgagaagatgctgcgagaccagtcggctgtggtagtgcaggggcttccggaaggtgttgcctttaaacaccccgagaactatgatcttgcaaccctgaaatggattttggagaacaaagcagggatttcattcatcattaagagaccttttttagagccaaagaagcatgtaggtggtcgtgtgatggtaacagatgctgacaggtcaatactatctccaggtggaagttgtggccccatcaaagtgaaaactgaacccacagaagattctggaagccaccattcttcagagggcaatgaaggcacagaaatggaagtaccagcagaagattctactcaacatgtcccttcagaaacaagtgaggaccctgaagttgaggtgactattgaagatgatgattattctccaccgtctaagagaccaaaggccaatgagctaccgcagccaccagtcccggaacccgccaatgctgggaagcggaaagtgagggagttcaacttcgagaaatggaatgctcgcatcactgatctacgtaaacaagttgaagaattgtttgaaaggaaatatgctcaagccataaaagccaaaggtccggtgacgatcccgtaccctcttttccagtctcatgttgaagatctttatgtagaaggacttcctgaaggaattccttttagaaggccatctacttacggaattcctcgcctggagaggatattacttgcaaaggaaaggattcgttttgtgattaagaaacatgagcttctgaattcaacacgtgaagatttacagcttgataagccagcttcaggagtaaaggaagaatggtatgccagaatcactaaattaagaaagatggtggatcagcttttctgcaaaaaatttgcggaagccttggggagcactgaagccaaggctgtaccgtaccaaaaatttgaggcacacccgaatgatctgtacgtggaaggactgccagaaaacattcctttccgaagtccctcatggtatggaatcccaaggctggaaaaaatcattcaagtgggcaatcgaattaaatttgttattaaaagaccagaacttctgactcacagtaccactgaagttactcagccaagaacgaatacaccagctcaagctcttggactcaccgaggcagtaaaagtaccatatcctgtgtttgaatcaaacccggagttcttgtatgtggaaggcttgccagaggggattcccttccgaagccctacctggtttggaattccacgacttgaaaggatcgtccgcgggagtaataaaatcaagttcgttgttaaaaaacctgaactagttatttcctacttgcctcctgggatggctagtaaaataaacactaaagctttgcagtcccccaaaagaccacgaagtcctgggagtaattcaaaggttcctgaaattgaggtcaccgtggaaggccctaataacaacaatcctcaaacctcagctgttcgaaccccgacccagactaacggttctaacgttcccttcaagccacgagggagagagttttcctttgaggcctggaatgccaaaatcacggacctaaaacagaaagttgaaaatctcttcaatgagaaatgtggggaagctcttggccttaaacaagctgtgaaggtgccgttcgcgttatttgagtctttcccggaagacttttatgtggaaggcttacctgagggtgtgccattccgaagaccatcgacttttggcattccgaggctggagaagatactcagaaacaaagccaaaattaagttcatcattaaaaagcccgaaatgtttgagacggcgattaaggagagcacctcctctaagagccctcccagaaaaataaattcatcacccaatgttaatactactgcatcaggtgttgaagaccttaacatcattcaggtgacaattccagatgatgataatgaaagactctcgaaagttgaaaaagctagacagctaagagaacaagtgaatgacctctttagtcggaaatttggtgaagctattggtatgggttttcctgtgaaagttccctacaggaaaatcacaattaaccctggctgtgtggtggttgatggcatgcccccgggggtgtccttcaaagcccccagctacctggaaatcagctccatgagaaggatcttagactctgccgagtttatcaaattcacggtcattagaccatttccaggacttgtgattaataaccagctggttgatcagagtgagtcagaaggccccgtgatacaagaatcagctgaaccaagccagttggaagttccagccacagaaggtaaaaggacctcttccctcctagggtaaatcagcttctgtgtcagggatgctgtgtggtgtccatctgaaccccctgcatacgcgtagctaatgtgatctccccactttcacataagatggtggccctgccttcagggaatgtgggagccaggtgggagccttcccggatatttaagctagaagattctacagggagattctccttggatcaatatatgtctctcagtcaaagatgtaaaagcacttttgccttaaaaagaatgttctgtttctaaatagagtcaacgttgtcctcctcattggaattcactatgagtcagaatcattagactgacttttttttttccatagtaatagtattttgcagagtctcacagagctgcagatcttttgttcatcttgcagagttaacaagtctgatcctgttagtccagatttcttaaatttggccaagttataataggagcagtagcttgagacccgaagtcaggaaactttgacaatggatttttttttttaatccagagacttgtactggaatttgccttaccctgtcagctcatggacttaaggtttcatcccgctttatgagtgcttctgaatccaagtcattgttacctgaatttgcaaattaagttgtgatattcgtgactgttaaattcctgtaattagattaacctctttgcttgcttgtttgttttctctcctattttagcttaaagtatcagtggttgagaagagcttttcggacctgttactaccccaagctgtgtaatatacttgtataacagaaataccttctatacaaacctttttttctacttttagatagaaatgtctactttttcagcagttctgtgaattaaagagcagagtgactgtgggtctggaatggctggtgtacttgggaatgtactatcaggattttacagcaatgctgggaaatgacagggaaaatgacaggaatgaatctcaccagattttttatgtactcagcagagccttgagttacggtgtttattttccaatcaagtgaagatatctcctacttctcctactggaacatctcagcttctgcagtgaagaaaaattcctgtgatagttcagttctttagtttttctatttgaaaaaaaaaaatcatttaaatgatcctttgttcacggctctccttaatgactgagtgaacagttcctatctgtatatttgactaaaccttttcctaagctatctctcatggttcctatgtttttttatcataattaaaagcaaaaccatctggatcacctaacagtcagaggtcagtatctcagcgtgtgaattatagaggaaatacagagagaacctcttccacttttacttttcgtccaaataaaatgcatggtgtaccagaagttgaagatcgggttgaggattggggctagctcgatgacactaaggccccaacatcgcgggacctgctgtggcgcggattcttaggaacgctgttctagccggccccctctccaggggtcgccgtggccggcattatttcctagttcttcttgtaaccctgaggtgccagcgcggggagtgaggaggggtcagggggctaaggatgcaacctctgacgttctgcgccttcctaggagagtcttacatgtgttgagatttcacaagcaatgcgagttgtaaaataccagctctacaagaagctaggctctgtgacggcatagttttcagtagctttatcacaatattcacaatggagaattatatgacatggtagcagaaataggcccttttatgtgttgcttctattttacctcaaattgtagatatagggtaatcaataaaatccatccatgcctttcacacactaagt

SEQ ID NO: 4197 - protein, 918 aa, Homo sapiens
MAQVAMSTLPVEDEESSESRMVVTFLMSALESMCKELAKSKAEVACIAVYETDVFVVGTERGRAFVNTRKDFQKDFVKYCVEEEEKAAEMHKMKSTTQANRMSVDAVEIETLRKTVEDYFCFCYGKALGKSTVVPVPYEKMLRDQSAVVVQGLPEGVAFKHPENYDLATLKWILENKAGISFIIKRPFLEPKKHVGGRVMVTDADRSILSPGGSCGPIKVKTEPTEDSGSHHSSEGNEGTEMEVPAEDSTQHVPSETSEDPEVEVTIEDDDYSPPSKRPKANELPQPPVPEPANAGKRKVREFNFEKWNARITDLRKQVEELFERKYAQAIKAKGPVTIPYPLFQSHVEDLYVEGLPEGIPFRRPSTYGIPRLERILLAKERIRFVIKKHELLNSTREDLQLDKPASGVKEEWYARITKLRKMVDQLFCKKFAEALGSTEAKAVPYQKFEAHPNDLYVEGLPENIPFRSPSWYGIPRLEKIIQVGNRIKFVIKRPELLTHSTTEVTQPRTNTPAQALGLTEAVKVPYPVFESNPEFLYVEGLPEGIPFRSPTWFGIPRLERIVRGSNKIKFVVKKPELVISYLPPGMASKINTKALQSPKRPRSPGSNSKVPEIEVTVEGPNNNNPQTSAVRTPTQTNGSNVPFKPRGREFSFEAWNAKITDLKQKVENLFNEKCGEALGLKQAVKVPFALFESFPEDFYVEGLPEGVPFRRPSTFGIPRLEKILRNKAKIKFIIKKPEMFETAIKESTSSKSPPRKINSSPNVNTTASGVEDLNIIQVTIPDDDNERLSKVEKARQLREQVNDLFSRKFGEAIGMGFPVKVPYRKITINPGCVVVDGMPPGVSFKAPSYLEISSMRRILDSAEFIKFTVIRPFPGLVINNQLVDQSESEGPVIQESAEPSQLEVPATEGKRTSSLLG

SEQ ID NO: 4198 - DNA, 5016 bp, Homo sapiens
aaaaaaaaaaaaaaaaaaaaaaaaaaaagaaaaaagaaaaaaaaaaggaggaggaggaggagggtgagagagaagctgggagagcagagaaaaggggccaccggtcgcccccccgcttccccgcacgcgctctccagccgcggccgcccgcctgccgcggtcaccccggcctctgcctctgtcccccagtgatcggatcaaggcgctgagcgaggccctgcctgcggggcggccatgcggcggtgacaggagcgcgaccgacacgcacgggcccctcgccccctctcgcctcccgtccgctcgccagctcccctcagccgaggctgctccgcggcggccgcagcccgcgcgcggcccacactcgcctccccgttgaagatgaggagtcctcggagagcaggatggtggtgacattcctcatgtcagctctcgagtccatgtgtaaagaactggccaagtccaaagccgaagtggcctgcattgcagtgtatgaaacagacgtgtttgtcgtcggaactgaaagaggacgtgcttttgtcaataccagaaaggattttcaaaaagattttgtaaaatattgtgttgaagaagaagaaaaagctgcagagatgcataaaatgaaatctacaacccaggcaaatcggatgagtgtagatgctgtagaaattgaaacactcagaaaaacagttgaggactatttctgcttttgctatgggaaagctttaggcaaatccacagtggtacctgtaccatatgagaagatgctgcgagaccagtcggctgtggtagtgcaggggcttccggaaggtgttgcctttaaacaccccgagaactatgatcttgcaaccctgaaatggattttggagaacaaagcagggatttcattcatcattaagagaccttttttagagccaaagaagcatgtaggtggtcgtgtgatggtaacagatgctgacaggtcaatactatctccaggtggaagttgtggccccatcaaagtgaaaactgaacccacagaagattctggcatttccctggaaatggcagctgtgacagtaaaggaagaatcagaagatcctgattattatcaatataacattcaaggaagccaccattcttcagagggcaatgaaggcacagaaatggaagtaccagcagaagattctactcaacatgtcccttcagaaacaagtgaggaccctgaagttgaggtgactattgaagatgatgattattctccaccgtctaagagaccaaaggccaatgagctaccgcagccaccagtcccggaacccgccaatgctgggaagcggaaagtgagggagttcaacttcgagaaatggaatgctcgcatcactgatctacgtaaacaagttgaagaattgtttgaaaggaaatatgctcaagccataaaagccaaaggtccggtgacgatcccgtaccctcttttccagtctcatgttgaagatctttatgtagaaggacttcctgaaggaattccttttagaaggccatctacttacggaattcctcgcctggagaggatattacttgcaaaggaaaggattcgttttgtgattaagaaacatgagcttctgaattcaacacgtgaagatttacagcttgataagccagcttcaggagtaaaggaagaatggtatgccagaatcactaaattaagaaagatggtggatcagcttttctgcaaaaaatttgcggaagccttggggagcactgaagccaaggctgtaccgtaccaaaaatttgaggcacacccgaatgatctgtacgtggaaggactgccagaaaacattcctttccgaagtccctcatggtatggaatcccaaggctggaaaaaatcattcaagtgggcaatcgaattaaatttgttattaaaagaccagaacttctgactcacagtaccactgaagttactcagccaagaacgaatacaccagtcaaagaagattggaatgtcagaattaccaagctacggaagcaagtggaagagatttttaatttgaaatttgctcaagctcttggactcaccgaggcagtaaaagtaccatatcctgtgtttgaatcaaacccggagttcttgaaaggatcgtccgcgggagtaataaaatcaagttcgttgttaaaaaacctgaactagttatttcctacttgcctcctgggatggctagtaaaataaacactaaagctttgcagtcccccaaaagaccacgaagtcctgggagtaattcaaaggttcctgaaattgaggtcaccgtggaaggccctaataacaacaatcctcaaacctcagctgttcgaaccccgacccagactaacggttctaacgttcccttcaagccacgagggagagagttttcctttgaggcctggaatgccaaaatcacggacctaaaacagaaagttgaaaatctcttcaatgagaaatgtggggaagctcttggccttaaacaagctgtgaaggtgccgttcgcgttatttgagtctttcccggaagacttttatgtggaaggcttacctgagggtgtgccattccgaagaccatcgacttttggcattccgaggctggagaagatactcagaaacaaagccaaaattaagttcatcattaaaaagcccgaaatgtttgagacggcgattaaggagagcacctcctctaagagccctcccagaaaaataaattcatcacccaatgttaatactactgcatcaggtgttgaagaccttaacatcattcaggtgacaattccagatgatgataatgaaagactctcgaaagttgaaaaagctagacagctaagagaacaagtgaatgacctctttagtcggaaatttggtgaagctattggtatgggttttcctgtgaaagttccctacaggaaaatcacaattaaccctggctgtgtggtggttgatggcatgcccccgggggtgtccttcaaagcccccagctacctggaaatcagctccatgagaaggatcttagactctgccgagtttatcaaattcacggtcattagaccatttccaggacttgtgattaataaccagctggttgatcagagtgagtcagaaggccccgtgatacaagaatcagctgaaccaagccagttggaagttccagccacagaaggtaaaaggacctcttccctcctagggtaaatcagcttctgtgtcagggatgctgtgtggtgtccatctgaaccccctgcatacgcgtagctaatgtgatctccccactttcacataagatggtggccctgccttcagggaatgtgggagccaggtgggagccttcccggatatttaagctagaagattctacagggagattctccttggatcaatatatgtctctcagtcaaagatgtaaaagcacttttgccttaaaaagaatgttctgtttctaaatagagtcaacgttgtcctcctcattggaattcactatgagtcagaatcattagactgacttttttttttccatagtaatagtattttgcagagtctcacagagctgcagatcttttgttcatcttgcagagttaacaagtctgatcctgttagtccagatttcttaaatttggccaagttataataggagcagtagcttgagacccgaagtcaggaaactttgacaatggatttttttttttaatccagagacttgtactggaatttgccttaccctgtcagctcatggacttaaggtttcatcccgctttatgagtgcttctgaatccaagtcattgttacctgaatttgcaaattaagttgtgatattcgtgactgttaaattcctgtaattagattaacctctttgcttgcttgtttgttttctctcctattttagcttaaagtatcagtggttgagaagagcttttcggacctgttactaccccaagctgtgtaatatacttgtataacagaaataccttctatacaaacctttttttctacttttagatagaaatgtctactttttcagcagttctgtgaattaaagagcagagtgactgtgggtctggaatggctggtgtacttgggaatgtactatcaggattttacagcaatgctgggaaatgacagggaaaatgacaggaatgaatctcaccagattttttatgtactcagcagagccttgagttacggtgtttattttccaatcaagtgaagatatctcctacttctcctactggaacatctcagcttctgcagtgaagaaaaattcctgtgatagttcagttctttagtttttctatttgaaaaaaaaaaatcatttaaatgatcctttgttcacggctctccttaatgactgagtgaacagttcctatctgtatatttgactaaaccttttcctaagctatctctcatggttcctatgtttttttatcataattaaaagcaaaaccatctggatcacctaacagtcagaggtcagtatctcagcgtgtgaattatagaggaaatacagagagaacctcttccacttttacttttcgtccaaataaaatgcatggtgtaccagaagttgaagatcgggttgaggattggggctagctcgatgacactaaggccccaacatcgcgggacctgctgtggcgcggattcttaggaacgctgttctagccggccccctctccaggggtcgccgtggccggcattatttcctagttcttcttgtaaccctgaggtgccagcgcggggagtgaggaggggtcagggggctaaggatgcaacctctgacgttctgcgccttcctaggagagtcttacatgtgttgagatttcacaagcaatgcgagttgtaaaataccagctctacaagaagctaggctctgtgacggcatagttttcagtagctttatcacaatattcacaatggagaattatatgacatggtagcagaaataggcccttttatgtgttgcttctattttacctcaaattgtagatatagggtaatcaataaaatccatccatgcctttcacacactaagt

SEQ ID NO: 4199 - protein, 585 aa, Homo sapiens
MVVTFLMSALESMCKELAKSKAEVACIAVYETDVFVVGTERGRAFVNTRKDFQKDFVKYCVEEEEKAAEMHKMKSTTQANRMSVDAVEIETLRKTVEDYFCFCYGKALGKSTVVPVPYEKMLRDQSAVVVQGLPEGVAFKHPENYDLATLKWILENKAGISFIIKRPFLEPKKHVGGRVMVTDADRSILSPGGSCGPIKVKTEPTEDSGISLEMAAVTVKEESEDPDYYQYNIQGSHHSSEGNEGTEMEVPAEDSTQHVPSETSEDPEVEVTIEDDDYSPPSKRPKANELPQPPVPEPANAGKRKVREFNFEKWNARITDLRKQVEELFERKYAQAIKAKGPVTIPYPLFQSHVEDLYVEGLPEGIPFRRPSTYGIPRLERILLAKERIRFVIKKHELLNSTREDLQLDKPASGVKEEWYARITKLRKMVDQLFCKKFAEALGSTEAKAVPYQKFEAHPNDLYVEGLPENIPFRSPSWYGIPRLEKIIQVGNRIKFVIKRPELLTHSTTEVTQPRTNTPVKEDWNVRITKLRKQVEEIFNLKFAQALGLTEAVKVPYPVFESNPEFLKGSSAGVIKSSSLLKNLN

SEQ ID NO: 4200 - DNA, 4207 bp, Homo sapiens
aaaaaaaaaaaaaaaaaaaaaaaaaaaagaaaaaagaaaaaaaaaaggaggaggaggaggagggtgagagagaagctgggagagcagagaaaaggggccaccggtcgcccccccgcttccccgcacgcgctctccagccgcggccgcccgcctgccgcggtcaccccggcctctgcctctgtcccccagtgatcggatcaaggcgctgagcgaggccctgcctgcggggcggccatgcggcggtgacaggagcgcgaccgacacgcacgggcccctcgccccctctcgcctcccgtccgctcgccagctcccctcagccgaggctgctccgcggcggccgcagcccgcgcgcggcccacactcgcctccccgttgaagatgaggagtcctcggagagcaggatggtggtgacattcctcatgtcagctctcgagtccatgtgtaaagaactggccaagtccaaagccgaagtggcctgcattgcagtgtatgaaacagacgtgtttgtcgtcggaactgaaagaggacgtgcttttgtcaataccagaaaggattttcaaaaagattttgtaaaatattgtgttgaagaagaagaaaaagctgcagagatgcataaaatgaaatctacaacccaggcaaatcggatgagtgtagatgctgtagaaattgaaacactcagaaaaacagttgaggactatttctgcttttgctatgggaaagctttaggcaaatccacagtggtacctgtaccatatgagaagatgctgcgagaccagtcggctgtggtagtgcaggggcttccggaaggtgttgcctttaaacaccccgagaactatgatcttgcaaccctgaaatggattttggagaacaaagcagggatttcattcatcattaagagaccttttttagagccaaagaagcatgtaggtggtcgtgtgatggtaacagatgctgacaggtcaatactatctccaggtggaagttgtggccccatcaaagtgaaaactgaacccacagaagattctggcatttccctggaaatggcagctgtgacagtaaaggaagaatcagaagatcctgattattatcaatataacattcaaggaagccaccattcttcagagggcaatgaaggcacagaaatggaagtaccagcagaagatgatgattattctccaccgtctaagagaccaaaggccaatgagctaccgcagccaccagtcccggaacccgccaatgctgggaagcggaaagtgagggagttcaacttcgagaaatggaatgctcgcatcactgatctacgtaaacaagttgaagaattgtttgaaaggaaatatgctcaagccataaaagccaaaggtccggtgacgatcccgtaccctcttttccagtctcatgttgaagatctttatgtagaaggacttcctgaaggaattccttttagaaggccatctacttacggaattcctcgcctggagaggatattacttgcaaaggaaaggattcgttttgtgattaagaaacatgagcttctgaattcaacacgtgaagatttacagcttgataagccagcttcaggagtaaaggaagaatggtatgccagaatcactaaattaagaaagatggtggatcagcttttctgcaaaaaatttgcggaagccttggggagcactgaagccaaggctgtaccgtaccaaaaatttgaggcacacccgaatgatctgtacgtggaaggactgccagaaaacattcctttccgaagtccctcatggtatggaatcccaaggctggaaaaaatcattcaagtgggcaatcgaattaaatttgttattaaaagaccagaacttctgactcacagtaccactgaagttactcagccaagaacgaatacaccagtcaaagaagattggaatgtcagaattaccaagctacggaagcaagtggaagagatttttaatttgaaatttgcttagatttgttgacagcggtttcctggagtgctgtcttgagaacgattctgaggaggctcagcaagaaagagtgtttcagttgattgggtgtgtctgtcatggagaaggaactcaagctcttggactcaccgaggcagtaaaagtaccatatcctgtgtttgaatcaaacccggagttcttgtatgtggaaggcttgccagaggggattcccttccgaagccctacctggtttggaattccacgacttgaaaggatcgtccgcgggagtaataaaatcaagttcgttgttaaaaaacctgaactagttatttcctacttgcctcctgggatggctagtaaaataaacactaaagctttgcagtcccccaaaagaccacgaagtcctgggagtaattcaaaggttcctgaaattgaggtcaccgtggaaggccctaataacaacaatcctcaaacctcagctgttcgaaccccgacccagactaacggttctaacgttcccttcaagccacgagggagagagttttcctttgaggcctggaatgccaaaatcacggacctaaaacagaaagttgaaaatctcttcaatgagaaatgtggggaagctcttggccttaaacaagctgtgaaggtgccgttcgcgttatttgagtctttcccggaagacttttatgtggaaggcttacctgagggtgtgccattccgaagaccatcgacttttggcattccgaggctggagaagatactcagaaacaaagccaaaattaagttcatcattaaaaagcccgaaatgtttgagacggcgattaaggagagcacctcctctaagagccctcccagaaaaataaattcatcacccaatgttaatactactgcatcaggtgttgaagaccttaacatcattcaggtgacaattccagatgatgataatgaaagactctcgaaagttgaaaaagctagacagctaagagaacaagtgaatgacctctttagtcggaaatttggtgaagctattggtatgggttttcctgtgaaagttccctacaggaaaatcacaattaaccctggctgtgtggtggttgatggcatgcccccgggggtgtccttcaaagcccccagctacctggaaatcagctccatgagaaggatcttagactctgccgagtttatcaaattcacggtcattagaccatttccaggacttgtgattaataaccagctggttgatcagagtgagtcagaaggccccgtgatacaagaatcagctgaaccaagccagttggaagttccagccacagaagaaataaaagagactgatggaagctctcagatcaagcaagaaccagaccccacgtggtagacctcttccctcctaggagccttgagttacggtgtttattttccaatcaagtgaagatatctcctacttctcctactggaacatctcagcttctgcagtgaagaaaaattcctgtgatagttcagttctttagtttttctatttgaaaaaaaaaaatcatttaaatgatcctttgttcacggctctccttaatgactgagtgaacagttcctatctgtatatttgactaaaccttttcctaagctatctctcatggttcctatgtttttttatcataattaaaagcaaaaccatctggatcacctaacagtcagaggtcagtatctcagcgtgtgaattatagaggaaatacagagagaacctcttccacttttacttttcgtccaaataaaatgcatggtgtaccagaagttgaagatcgggttgaggattggggctagctcgatgacactaaggccccaacatcgcgggacctgctgtggcgcggattcttaggaacgctgttctagccggccccctctccaggggtcgccgtggccggcattatttcctagttcttcttgtaaccctgaggtgccagcgcggggagtgaggaggggtcagggggctaaggatgcaacctctgacgttctgcgccttcctaggagagtcttacatgtgttgagatttcacaagcaatgcgagttgtaaaataccagctctacaagaagctaggctctgtgacggcatagttttcagtagctttatcacaatattcacaatggagaattatatgacatggtagcagaaataggcccttttatgtgttgcttctattttacctcaaattgtagatatagggtaatcaataaaatccatccatgcctttcacacactaagt

SEQ ID NO: 4201 - protein, 523 aa, Homo sapiens
MVVTFLMSALESMCKELAKSKAEVACIAVYETDVFVVGTERGRAFVNTRKDFQKDFVKYCVEEEEKAAEMHKMKSTTQANRMSVDAVEIETLRKTVEDYFCFCYGKALGKSTVVPVPYEKMLRDQSAVVVQGLPEGVAFKHPENYDLATLKWILENKAGISFIIKRPFLEPKKHVGGRVMVTDADRSILSPGGSCGPIKVKTEPTEDSGISLEMAAVTVKEESEDPDYYQYNIQGSHHSSEGNEGTEMEVPAEDDDYSPPSKRPKANELPQPPVPEPANAGKRKVREFNFEKWNARITDLRKQVEELFERKYAQAIKAKGPVTIPYPLFQSHVEDLYVEGLPEGIPFRRPSTYGIPRLERILLAKERIRFVIKKHELLNSTREDLQLDKPASGVKEEWYARITKLRKMVDQLFCKKFAEALGSTEAKAVPYQKFEAHPNDLYVEGLPENIPFRSPSWYGIPRLEKIIQVGNRIKFVIKRPELLTHSTTEVTQPRTNTPVKEDWNVRITKLRKQVEEIFNLKFA

SEQ ID NO: 4202 - DNA, 7208 bp, Homo sapiens
aaaaaaaaaaaaaaaaaaaaaaaaaaaagaaaaaagaaaaaaaaaaggaggaggaggaggagggtgagagagaagctgggagagcagagaaaaggggccaccggtcgcccccccgcttccccgcacgcgctctccagccgcggccgcccgcctgccgcggtcaccccggcctctgcctctgtcccccagtgatcggatcaaggcgctgagcgaggccctgcctgcggggcggccatgcggcggtgacaggagcgcgaccgacacgcacgggcccctcgccccctctcgcctcccgtccgctcgccagctcccctcagccgaggctgctccgcggcggccgcagcccgcgcgcggcccacactcgcctcccctcggcacccccggccccggagctgcctggaggcggccgcactcggggatcatggcccaagttgcaatgtccaccctccccgttgaagatgaggagtcctcggagagcaggatggtggtgacattcctcatgtcagctctcgagtccatgtgtaaagaactggccaagtccaaagccgaagtggcctgcattgcagtgtatgaaacagacgtgtttgtcgtcggaactgaaagaggacgtgcttttgtcaataccagaaaggattttcaaaaagattttgtaaaatattgtgttgaagaagaagaaaaagctgcagagatgcataaaatgaaatctacaacccaggcaaatcggatgagtgtagatgctgtagaaattgaaacactcagaaaaacagttgaggactatttctgcttttgctatgggaaagctttaggcaaatccacagtggtacctgtaccatatgagaagatgctgcgagaccagtcggctgtggtagtgcaggggcttccggaaggtgttgcctttaaacaccccgagaactatgatcttgcaaccctgaaatggattttggagaacaaagcagggatttcattcatcattaagagaccttttttagagccaaagaagcatgtaggtggtcgtgtgatggtaacagatgctgacaggtcaatactatctccaggtggaagttgtggccccatcaaagtgaaaactgaacccacagaagattctggcatttccctggaaatggcagctgtgacagtaaaggaagaatcagaagatcctgattattatcaatataacattcaagcaggcccttctgaaactgatgatgttgatgaaaaacagcccctatcgaagcctttgcaaggaagccaccattcttcagagggcaatgaaggcacagaaatggaagtaccagcagaagatgatgattattctccaccgtctaagagaccaaaggccaatgagctaccgcagccaccagtcccggaacccgccaatgctgggaagcggaaagtgagggagttcaacttcgagaaatggaatgctcgcatcactgatctacgtaaacaagttgaagaattgtttgaaaggaaatatgctcaagccataaaagccaaaggtccggtgacgatcccgtaccctcttttccagtctcatgttgaagatctttatgtagaaggacttcctgaaggaattccttttagaaggccatctacttacggaattcctcgcctggagaggatattacttgcaaaggaaaggattcgttttgtgattaagaaacatgagcttctgaattcaacacgtgaagatttacagcttgataagccagcttcaggagtaaaggaagaatggtatgccagaatcactaaattaagaaagatggtggatcagcttttctgcaaaaaatttgcggaagccttggggagcactgaagccaaggctgtaccgtaccaaaaatttgaggcacacccgaatgatctgtacgtggaaggactgccagaaaacattcctttccgaagtccctcatggtatggaatcccaaggctggaaaaaatcattcaagtgggcaatcgaattaaatttgttattaaaagaccagaacttctgactcacagtaccactgaagttactcagccaagaacgaatacaccagctcaagctcttggactcaccgaggcagtaaaagtaccatatcctgtgtttgaatcaaacccggagttcttgtatgtggaaggcttgccagaggggattcccttccgaagccctacctggtttggaattccacgacttgaaaggatcgtccgcgggagtaataaaatcaagttcgttgttaaaaaacctgaactagttatttcctacttgcctcctgggatggctagtaaaataaacactaaagctttgcagtcccccaaaagaccacgaagtcctgggagtaattcaaaggttcctgaaattgaggtcaccgtggaaggccctaataacaacaatcctcaaacctcagctgttcgaaccccgacccagactaacggttctaacgttcccttcaagccacgagggagagagttttcctttgaggcctggaatgccaaaatcacggacctaaaacagaaagttgaaaatctcttcaatgagaaatgtggggaagctcttggccttaaacaagctgtgaaggtgccgttcgcgttatttgagtctttcccggaagacttttatgtggaaggcttacctgagggtgtgccattccgaagaccatcgacttttggcattccgaggctggagaagatactcagaaacaaagccaaaattaagttcatcattaaaaagcccgaaatgtttgagacggcgattaaggagagcacctcctctaagagccctcccagaaaaataaattcatcacccaatgttaatactactgcatcaggtgttgaagaccttaacatcattcaggtgacaattccagatgatgataatgaaagactctcgaaagttgaaaaagctagacagctaagagaacaagtgaatgacctctttagtcggaaatttggtgaagctattggtatgggttttcctgtgaaagttccctacaggaaaatcacaattaaccctggctgtgtggtggttgatggcatgcccccgggggtgtccttcaaagcccccagctacctggaaatcagctccatgagaaggatcttagactctgccgagtttatcaaattcacggtcattaggtaagtgagagtttcctgcttagtcacaggagcgaatctggagctcatgaggctgactcttctaaaatgcagccacaggtagtcatcgaatccggcttcctatgctgtgcaatcaacaaatcaaaataacttgtgtcatcattagaatgtcagatgtgcttctacgaactaagctgactcttttaattctttggcaaagggttggcaaactaggactgtttgccaaattcaggctgcctcctatttttagagtcttcctgaaacacagctacacccgtattatccatggctgctttcctgtcacagtgagtaagtagctgggactgagaaggcatggcctccaaagtctaaaatatttactctctagcactttgtagaaaaaccttagctaggcacagtggctaacgcctgtaatcccagcattttgggaggccaaggcaggcagatcacctgaggtcaggagttccagaccagcctggccaacatggtgaaatcccatctctacaaaaataaaacagttagctgggcatgatggcgggtgcctgtaatcccagctactcgggaggctgaggcaggatagtcgcttgaacccaggaggtggaggttgcaatgagccaagatcatgccactgcactccagcctggacgacagagtgagactccatcacaagaaaaaaagaactttgtcaacctctgtcttagggcgccttgtcacaggcttcgggtcagacggattcaaccttgcatcagccatttgttagccaggtcactctgttctttgtctgtaaatgagattgatcgttgttcccactgagagtgtcagctccttcccgtagagcaggcatgatgattgtactcacctctgacaccattgtgagtgccacattccttcccacgtccttgtcactgtaagagatgcccacctgagcaccaaccccaggttatcttcccctttgtcttccagccccccagaaacagctacgactcaacctacccaatcatttcatcatcagattgccactgtctctagttcaggtctcttgggactggcactcagaaatctcataataaatcctcttgaggcttctcatacactcgtcttcttccaatcttctttccctcaaaatctcatattttggttccacttcacccaccgtcattctccatatcactcccaggagttaggcaaaaagccccttccgttcttccgtatgttaaacttagaatcactctgttccctgctctgcgtttctattttttgtttttcctccatttactagtagcttaacactttctaacagtgttcttattattgatacgtatctatctcttccataagcttataaggtcacggataatacttctcattgtagtacgtaaatgacgtgggctagatatgagttgaataaacagttatacctgtaaattcttacagagtgaaaataaattgttatactttacaatttgtttctctctttagaccatttccaggacttgtgattaataaccgtgagtattttgtgaagtgttttgtttttgttttttcctggggtctgacgtgtgtgcgtgtgagtgtgtatacatgcttaacgtatatcacgttacttcacctatgtcagtaaccaggccaaatacttgttttagccctcagtaaaaacaccaggcacttcctagttgtaaaattattcaagcttcttaacttcctatcctcgatgcacttaatcataaaatggtaataatagcaccgattttgggggagtcgttccagtagatggaaagcatctggaacaggtgtcagcaagctcctgccgacgtgtatgcataaagttttattgaaaccaccatcgtgtccatttgtttatggcagaactgagagatggcagcagcaagtgtgtgcctgcaaaacctaaaatatttactaattggctctgcaagaaaagagtttgcatccccctaacctagaacagtgtctagcctctagtatgtgtttagcctacagtatgtgctcagcgaatacaatctatatttattactgcttttatgactgttataattactgtgcttggatttcgttacaaagtaagtcacaatgtgcctgcttctgttagtatttcagcacagtgcctggcacacatggggctctcaaatattgctgagcgagtgaacaaatgtcctttcaattccttaacgttgatgtcattttcaatagtattttgagccaaacttaattttgcgagtgtgttttgttttcttaactttattattaaaaatgtataaaagtgaggccaggcgtggtggctcacgcctgtaatcccagcagtttgggaggctgaggcaggcggatcagttgaggttgggagttggagaccagcccgtccaacatggtgaaagcctgtctctactaaaaatacaaaaatcagctgggtgtggtggcgcgtgcctgtaatcccagctactcaggaggctgaggcaggagagttgcttgaatcctagaggtggaggttgcagtgagctgagatcgtgccattgcactccagcctgggcaacaagagcaaaactctgtcccaataaataaataaataaaatgttctcttttgttcctgttcttgtgcggtagtgtggtatagagttttatggtaattactgtgaattagtgattctgagggacatatcagaactctgaggtttgtttccttctcatcttgagggaaacagcaaatgtatgttaaaatgcttttccaagggaacaacacatccttacattatttaaaccaatctgcttcattttcagagctggttgatcagagtgagtcagaaggccccgtgatacaagaatcagctgaaccaagccagttggaagttccagccacagaagaaataaaagagactgatggaagctctcagatcaagcaagaaccagaccccacgtggtagacctcttccctcctaggcttaaagtatcagtggttgagaagagcttttcggacctgttactaccccaagctgtgtaatatacttgtataacagaaataccttctatacaaacctttttttctacttttagatagaaatgtctactttttcagcagttctgtgaattaaagagcagagtgactgtgggtctggaatggctggtgtacttgggaatgtactatcaggattttacagcaatgctgggaaatgacagggaaaatgacaggaatgaatctcaccagattttttatgtactcagcagagccttgagttacggtgtttattttccaatcaagtgaagatatctcctacttctcctactggaacatctcagcttctgcagtgaagaaaaattcctgtgatagttcagttctttagtttttctatttgaaaaaaaaaaatcatttaaatgatcctttgttcacggctctccttaatgactgagtgaacagttcctatctgtatatttgactaaaccttttcctaagctatctctcatggttcctatgtttttttatcataattaaaagcaaaaccatctggatcacctaacagtcagaggtcagtatctcagcgtgtgaattatagaggaaatacagagagaacctcttccacttttacttttcgtccaaataaaatgcatggtgtaccagaagttgaagatcgggttgaggattggggctagctcgatgacactaaggccccaacatcgcgggacctgctgtggcgcggattcttaggaacgctgttctagccggccccctctccaggggtcgccgtggccggcattatttcctagttcttcttgtaaccctgaggtgccagcgcggggagtgaggaggggtcagggggctaaggatgcaacctctgacgttctgcgccttcctaggagagtcttacatgtgttgagatttcacaagcaatgcgagttgtaaaataccagctctacaagaagctaggctctgtgacggcatagttttcagtagctttatcacaatattcacaatggagaattatatgacatggtagcagaaataggcccttttatgtgttgcttctattttacctcaaattgtagatatagggtaatcaataaaatccatccatgcctttcacacactaagt

SEQ ID NO: 4203 - protein, 897 aa, Homo sapiens; identical to SEQ ID NO: 4087

SEQ ID NO: 4204 - DNA, 5192 bp, Homo sapiens
aaaaaaaaaaaaaaaaaaaaaaaaaaaagaaaaaagaaaaaaaaaaggaggaggaggaggagggtgagagagaagctgggagagcagagaaaaggggccaccggtcgcccccccgcttccccgcacgcgctctccagccgcggccgcccgcctgccgcggtcaccccggcctctgcctctgtcccccagtgatcggatcaaggcgctgagcgaggccctgcctgcggggcggccatgcggcggtgacaggagcgcgaccgacacgcacgggcccctcgccccctctcgcctcccgtccgctcgccagctcccctcagccgaggctgctccgcggcggccgcagcccgcgcgcggcccacactcgcctccccgttgaagatgaggagtcctcggagagcaggatggtggtgacattcctcatgtcagctctcgagtccatgtgtaaagaactggccaagtccaaagccgaagtggcctgcattgcagtgtatgaaacagacgtgtttgtcgtcggaactgaaagaggacgtgcttttgtcaataccagaaaggattttcaaaaagattttgtaaaatattgtgttgaagaagaagaaaaagctgcagagatgcataaaatgaaatctacaacccaggcaaatcggatgagtgtagatgctgtagaaattgaaacactcagaaaaacagttgaggactatttctgcttttgctatgggaaagctttaggcaaatccacagtggtacctgtaccatatgagaagatgctgcgagaccagtcggctgtggtagtgcaggggcttccggaaggtgttgcctttaaacaccccgagaactatgatcttgcaaccctgaaatggattttggagaacaaagcagggatttcattcatcattaagagaccttttttagagccaaagaagcatgtaggtggtcgtgtgatggtaacagatgctgacaggtcaatactatctccaggtggaagttgtggccccatcaaagtgaaaactgaacccacagaagattctggcatttccctggaaatggcagctgtgacagtaaaggaagaatcagaagatcctgattattatcaatataacattcaagcaggcccttctgaaactgatgatgttgatgaaaaacagcccctatcgaagcctttgcaaggaagccaccattcttcagagggcaatgaaggcacagaaatggaagtaccagcagaagatgatgattattctccaccgtctaagagaccaaaggccaatgagctaccgcagccaccagtcccggaacccgccaatgctgggaagcggaaagtgagggagttcaacttcgagaaatggaatgctcgcatcactgatctacgtaaacaagttgaagaattgtttgaaaggaaatatgctcaagccataaaagccaaaggtccggtgacgatcccgtaccctcttttccagtctcatgttgaagatctttatgtagaaggacttcctgaaggaattccttttagaaggccatctacttacggaattcctcgcctggagaggatattacttgcaaaggaaaggattcgttttgtgattaagaaacatgagcttctgaattcaacacgtgaagatttacagcttgataagccagcttcaggagtaaaggaagaatggtatgccagaatcactaaattaagaaagatggtggatcagcttttctgcaaaaaatttgcggaagccttggggagcactgaagccaaggctgtaccgtaccaaaaatttgaggcacacccgaatgatctgtacgtggaaggactgccagaaaacattcctttccgaagtccctcatggtatggaatcccaaggctggaaaaaatcattcaagtgggcaatcgaattaaatttgttattaaaagaccagaacttctgactcacagtaccactgaagttactcagccaagaacgaatacaccagtcaaagaagattggaatgtcagaattaccaagctacggaagcaagtggaagagatttttaatttgaaatttgcttagatttgttgacagcggtttcctggagtgctgtcttgagaacgattctgaggaggctcagcaagaaagagtgtttcagttgattgggtgtgtctgtcatggagaaggaactcaagctcttggactcaccgaggcagtaaaagtaccatatcctgtgtttgaatcaaacccggagttcttgtatgtggaaggcttgccagaggggattcccttccgaagccctacctggtttggaattccacgacttgaaaggatcgtccgcgggagtaataaaatcaagttcgttgttaaaaaacctgaactagttatttcctacttgcctcctgggatggctagtaaaataaacactaaagctttgcagtcccccaaaagaccacgaagtcctgggagtaattcaaaggttcctgaaattgaggtcaccgtggaaggccctaataacaacaatcctcaaacctcagctgttcgaaccccgacccagactaacggttctaacgttcccttcaagccacgagggagagagttttcctttgaggcctggaatgccaaaatcacggacctaaaacagaaagttgaaaatctcttcaatgagaaatgtggggaagctcttggccttaaacaagctgtgaaggtgccgttcgcgttatttgagtctttcccggaagacttttatgtggaaggcttacctgagggtgtgccattccgaagaccatcgacttttggcattccgaggctggagaagatactcagaaacaaagccaaaattaagttcatcattaaaaagcccgaaatgtttgagacggcgattaaggagagcacctcctctaagagccctcccagaaaaataaattcatcacccaatgttaatactactgcatcaggtgttgaagaccttaacatcattcaggtgacaattccagatgatgataatgaaagactctcgaaagttgaaaaagctagacagctaagagaacaagtgaatgacctctttagtcggaaatttggtgaagctattggtatgggttttcctgtgaaagttccctacaggaaaatcacaattaaccctggctgtgtggtggttgatggcatgcccccgggggtgtccttcaaagcccccagctacctggaaatcagctccatgagaaggatcttagactctgccgagtttatcaaattcacggtcattagaccatttccaggacttgtgattaataaccagctggttgatcagagtgagtcagaaggccccgtgatacaagaatcagctgaaccaagccagttggaagttccagccacagaaggtaaaaggacctcttccctcctagggtaaatcagcttctgtgtcagggatgctgtgtggtgtccatctgaaccccctgcatacgcgtagctaatgtgatctccccactttcacataagatggtggccctgccttcagggaatgtgggagccaggtgggagccttcccggatatttaagctagaagattctacagggagattctccttggatcaatatatgtctctcagtcaaagatgtaaaagcacttttgccttaaaaagaatgttctgtttctaaatagagtcaacgttgtcctcctcattggaattcactatgagtcagaatcattagactgacttttttttttccatagtaatagtattttgcagagtctcacagagctgcagatcttttgttcatcttgcagagttaacaagtctgatcctgttagtccagatttcttaaatttggccaagttataataggagcagtagcttgagacccgaagtcaggaaactttgacaatggatttttttttttaatccagagacttgtactggaatttgccttaccctgtcagctcatggacttaaggtttcatcccgctttatgagtgcttctgaatccaagtcattgttacctgaatttgcaaattaagttgtgatattcgtgactgttaaattcctgtaattagattaacctctttgcttgcttgtttgttttctctcctattttagcttaaagtatcagtggttgagaagagcttttcggacctgttactaccccaagctgtgtaatatacttgtataacagaaataccttctatacaaacctttttttctacttttagatagaaatgtctactttttcagcagttctgtgaattaaagagcagagtgactgtgggtctggaatggctggtgtacttgggaatgtactatcaggattttacagcaatgctgggaaatgacagggaaaatgacaggaatgaatctcaccagattttttatgtactcagcagagccttgagttacggtgtttattttccaatcaagtgaagatatctcctacttctcctactggaacatctcagcttctgcagtgaagaaaaattcctgtgatagttcagttctttagtttttctatttgaaaaaaaaaaatcatttaaatgatcctttgttcacggctctccttaatgactgagtgaacagttcctatctgtatatttgactaaaccttttcctaagctatctctcatggttcctatgtttttttatcataattaaaagcaaaaccatctggatcacctaacagtcagaggtcagtatctcagcgtgtgaattatagaggaaatacagagagaacctcttccacttttacttttcgtccaaataaaatgcatggtgtaccagaagttgaagatcgggttgaggattggggctagctcgatgacactaaggccccaacatcgcgggacctgctgtggcgcggattcttaggaacgctgttctagccggccccctctccaggggtcgccgtggccggcattatttcctagttcttcttgtaaccctgaggtgccagcgcggggagtgaggaggggtcagggggctaaggatgcaacctctgacgttctgcgccttcctaggagagtcttacatgtgttgagatttcacaagcaatgcgagttgtaaaataccagctctacaagaagctaggctctgtgacggcatagttttcagtagctttatcacaatattcacaatggagaattatatgacatggtagcagaaataggcccttttatgtgttgcttctattttacctcaaattgtagatatagggtaatcaataaaatccatccatgcctttcacacactaagt

SEQ ID NO: 4205 - protein, 543 aa, Homo sapiens
MVVTFLMSALESMCKELAKSKAEVACIAVYETDVFVVGTERGRAFVNTRKDFQKDFVKYCVEEEEKAAEMHKMKSTTQANRMSVDAVEIETLRKTVEDYFCFCYGKALGKSTVVPVPYEKMLRDQSAVVVQGLPEGVAFKHPENYDLATLKWILENKAGISFIIKRPFLEPKKHVGGRVMVTDADRSILSPGGSCGPIKVKTEPTEDSGISLEMAAVTVKEESEDPDYYQYNIQAGPSETDDVDEKQPLSKPLQGSHHSSEGNEGTEMEVPAEDDDYSPPSKRPKANELPQPPVPEPANAGKRKVREFNFEKWNARITDLRKQVEELFERKYAQAIKAKGPVTIPYPLFQSHVEDLYVEGLPEGIPFRRPSTYGIPRLERILLAKERIRFVIKKHELLNSTREDLQLDKPASGVKEEWYARITKLRKMVDQLFCKKFAEALGSTEAKAVPYQKFEAHPNDLYVEGLPENIPFRSPSWYGIPRLEKIIQVGNRIKFVIKRPELLTHSTTEVTQPRTNTPVKEDWNVRITKLRKQVEEIFNLKFA

SEQ ID NO: 4206 - DNA, 4155 bp, Homo sapiens
aaaaaaaaaaaaaaaaaaaaaaaaaaaagaaaaaagaaaaaaaaaaggaggaggaggaggagggtgagagagaagctgggagagcagagaaaaggggccaccggtcgcccccccgcttccccgcacgcgctctccagccgcggccgcccgcctgccgcggtcaccccggcctctgcctctgtcccccagtgatcggatcaaggcgctgagcgaggccctgcctgcggggcggccatgcggcggtgacaggagcgcgaccgacacgcacgggcccctcgccccctctcgcctcccgtccgctcgccagctcccctcagccgaggctgctccgcggcggccgcagcccgcgcgcggcccacactcgcctccccgttgaagatgaggagtcctcggagagcaggatggtggtgacattcctcatgtcagctctcgagtccatgtgtaaagaactggccaagtccaaagccgaagtggcctgcattgcagtgtatgaaacagacgtgtttgtcgtcggaactgaaagaggacgtgcttttgtcaataccagaaaggattttcaaaaagattttgtaaaatattgtgttgaagaagaagaaaaagctgcagagatgcataaaatgaaatctacaacccaggcaaatcggatgagtgtagatgctgtagaaattgaaacactcagaaaaacagttgaggactatttctgcttttgctatgggaaagctttaggcaaatccacagtggtacctgtaccatatgagaagatgctgcgagaccagtcggctgtggtagtgcaggggcttccggaaggtgttgcctttaaacaccccgagaactatgatcttgcaaccctgaaatggattttggagaacaaagcagggatttcattcatcattaagagaccttttttagagccaaagaagcatgtaggtggtcgtgtgatggtaacagatgctgacaggtcaatactatctccaggtggaagttgtggccccatcaaagtgaaaactgaacccacagaagattctggcatttccctggaaatggcagctgtgacagtaaaggaagaatcagaagatcctgattattatcaatataacattcaagcaggcccttctgaaactgatgatgttgatgaaaaacagcccctatcgaagcctttgcaaggaagccaccattcttcagagggcaatgaaggcacagaaatggaagtaccagcagaagatgatgattattctccaccgtctaagagaccaaaggccaatgagctaccgcagccaccagtcccggaacccgccaatgctgggaagcggaaagtgagggagttcaacttcgagaaatggaatgctcgcatcactgatctacgtaaacaagttgaagaattgtttgaaaggaaatatgctcaagccataaaagccaaaggtccggtgacgatcccgtaccctcttttccagtctcatgttgaagatctttatgtagaaggacttcctgaaggaattccttttagaaggccatctacttacggaattcctcgcctggagaggatattacttgcaaaggaaaggattcgttttgtgattaagaaacatgagcttctgaattcaacacgtgaagatttacagcttgataagccagcttcaggagtaaaggaagaatggtatgccagaatcactaaattaagaaagatggtggatcagcttttctgcaaaaaatttgcggaagccttggggagcactgaagccaaggctgtaccgtaccaaaaatttgaggcacacccgaatgatctgtacgtggaaggactgccagaaaacattcctttccgaagtccctcatggtatggaatcccaaggctggaaaaaatcattcaagtgggcaatcgaattaaatttgttattaaaagaccagaacttctgactcacagtaccactgaagttactcagccaagaacgaatacaccagtcaaagaagattggaatgtcagaattaccaagctacggaagcaagtggaagagatttttaatttgaaatttgctcaagctcttggactcaccgaggcagtaaaagtaccatatcctgtgtttgaatcaaacccggagttcttgtatgtggaaggcttgccagaggggattcccttccgaagccctacctggtttggaattccacgacttgaaaggatcgtccgcgggagtaataaaatcaagttcgttgttaaaaaacctgaactagttatttcctacttgcctcctgggatggctagtaaaataaacactaaagctttgcagtcccccaaaagaccacgaagtcctgggagtaattcaaaggttcctgaaattgaggtcaccgtggaaggccctaataacaacaatcctcaaacctcagctgttcgaaccccgacccagactaacggttctaacgttcccttcaagccacgagggagagagttttcctttgaggcctggaatgccaaaatcacggacctaaaacagaaagttgaaaatctcttcaatgagaaatgtggggaagctcttggccttaaacaagctgtgaaggtgccgttcgcgttatttgagtctttcccggaagacttttatgtggaaggcttacctgagggtgtgccattccgaagaccatcgacttttggcattccgaggctggagaagatactcagaaacaaagccaaaattaagttcatcattaaaaagcccgaaatgtttgagacggcgattaaggagagcacctcctctaagagccctcccagaaaaataaattcatcacccaatgttaatactactgcatcaggtgttgaagaccttaacatcattcaggtgacaattccagatgatgataatgaaagactctcgaaagttgaaaaagctagacagctaagagaacaagtgaatgacctctttagtcggaaatttggtgaagctattggtatgggttttcctgtgaaagttccctacaggaaaatcacaattaaccctggctgtgtggtggttgatggcatgcccccgggggtgtccttcaaagcccccagctacctggaaatcagctccatgagaaggatcttagactctgccgagtttatcaaattcacggtcattagaccatttccaggacttgtgattaataaccagctggttgatcagagtgagtcagaaggccccgtgatacaagaatcagctgaaccaagccagttggaagttccagccacagaagaaataaaagagactgatggaagctctcagatcaagcaagaaccagaccccacgtggtagacctcttccctcctaggagccttgagttacggtgtttattttccaatcaagtgaagatatctcctacttctcctactggaacatctcagcttctgcagtgaagaaaaattcctgtgatagttcagttctttagtttttctatttgaaaaaaaaaaatcatttaaatgatcctttgttcacggctctccttaatgactgagtgaacagttcctatctgtatatttgactaaaccttttcctaagctatctctcatggttcctatgtttttttatcataattaaaagcaaaaccatctggatcacctaacagtcagaggtcagtatctcagcgtgtgaattatagaggaaatacagagagaacctcttccacttttacttttcgtccaaataaaatgcatggtgtaccagaagttgaagatcgggttgaggattggggctagctcgatgacactaaggccccaacatcgcgggacctgctgtggcgcggattcttaggaacgctgttctagccggccccctctccaggggtcgccgtggccggcattatttcctagttcttcttgtaaccctgaggtgccagcgcggggagtgaggaggggtcagggggctaaggatgcaacctctgacgttctgcgccttcctaggagagtcttacatgtgttgagatttcacaagcaatgcgagttgtaaaataccagctctacaagaagctaggctctgtgacggcatagttttcagtagctttatcacaatattcacaatggagaattatatgacatggtagcagaaataggcccttttatgtgttgcttctattttacctcaaattgtagatatagggtaatcaataaaatccatccatgcctttcacacactaagt

SEQ ID NO: 4207 - protein, 957 aa, Homo sapiens; identical to SEQ ID NO: 4041

SEQ ID NO: 4208 - DNA, 7112 bp, Homo sapiens
aaaaaaaaaaaaaaaaaaaaaaaaaaaagaaaaaagaaaaaaaaaaggaggaggaggaggagggtgagagagaagctgggagagcagagaaaaggggccaccggtcgcccccccgcttccccgcacgcgctctccagccgcggccgcccgcctgccgcggtcaccccggcctctgcctctgtcccccagtgatcggatcaaggcgctgagcgaggccctgcctgcggggcggccatgcggcggtgacaggagcgcgaccgacacgcacgggcccctcgccccctctcgcctcccgtccgctcgccagctcccctcagccgaggctgctccgcggcggccgcagcccgcgcgcggcccacactcgcctcccctcggcacccccggccccggagctgcctggaggcggccgcactcggtgtaaagaactggccaagtccaaagccgaagtggcctgcattgcagtgtatgaaacagacgtgtttgtcgtcggaactgaaagaggacgtgcttttgtcaataccagaaaggattttcaaaaagattttgtaaaatattgtgttgaagaagaagaaaaagctgcagagatgcataaaatgaaatctacaacccaggcaaatcggatgagtgtagatgctgtagaaattgaaacactcagaaaaacagttgaggactatttctgcttttgctatgggaaagctttaggcaaatccacagtggtacctgtaccatatgagaagatgctgcgagaccagtcggctgtggtagtgcaggggcttccggaaggtgttgcctttaaacaccccgagaactatgatcttgcaaccctgaaatggattttggagaacaaagcagggatttcattcatcattaagagaccttttttagagccaaagaagcatgtaggtggtcgtgtgatggtaacagatgctgacaggtcaatactatctccaggtggaagttgtggccccatcaaagtgaaaactgaacccacagaagattctggcatttccctggaaatggcagctgtgacagtaaaggaagaatcagaagatcctgattattatcaatataacattcaaggaagccaccattcttcagagggcaatgaaggcacagaaatggaagtaccagcagaagattctactcaacatgtcccttcagaaacaagtgaggaccctgaagttgaggtgactattgaagatgatgattattctccaccgtctaagagaccaaaggccaatgagctaccgcagccaccagtcccggaacccgccaatgctgggaagcggaaagtgagggagttcaacttcgagaaatggaatgctcgcatcactgatctacgtaaacaagttgaagaattgtttgaaaggaaatatgctcaagccataaaagccaaaggtccggtgacgatcccgtaccctcttttccagtctcatgttgaagatctttatgtagaaggacttcctgaaggaattccttttagaaggccatctacttacggaattcctcgcctggagaggatattacttgcaaaggaaaggattcgttttgtgattaagaaacatgagcttctgaattcaacacgtgaagatttacagcttgataagccagcttcaggagtaaaggaagaatggtatgccagaatcactaaattaagaaagatggtggatcagcttttctgcaaaaaatttgcggaagccttggggagcactgaagccaaggctgtaccgtaccaaaaatttgaggcacacccgaatgatctgtacgtggaaggactgccagaaaacattcctttccgaagtccctcatggtatggaatcccaaggctggaaaaaatcattcaagtgggcaatcgaattaaatttgttattaaaagaccagaacttctgactcacagtaccactgaagttactcagccaagaacgaatacaccagtcaaagaagattggaatgtcagaattaccaagctacggaagcaagtggaagagatttttaatttgaaatttgctcaagctcttggactcaccgaggcagtaaaagtaccatatcctgtgtttgaatcaaacccggagttcttgaaaggatcgtccgcgggagtaataaaatcaagttcgttgttaaaaaacctgaactagttatttcctacttgcctcctgggatggctagtaaaataaacactaaagctttgcagtcccccaaaagaccacgaagtcctgggagtaattcaaaggttcctgaaattgaggtcaccgtggaaggccctaataacaacaatcctcaaacctcagctgttcgaaccccgacccagactaacggttctaacgttcccttcaagccacgagggagagagttttcctttgaggcctggaatgccaaaatcacggacctaaaacagaaagttgaaaatctcttcaatgagaaatgtggggaagctcttggccttaaacaagctgtgaaggtgccgttcgcgttatttgagtctttcccggaagacttttatgtggaaggcttacctgagggtgtgccattccgaagaccatcgacttttggcattccgaggctggagaagatactcagaaacaaagccaaaattaagttcatcattaaaaagcccgaaatgtttgagacggcgattaaggagagcacctcctctaagagccctcccagaaaaataaattcatcacccaatgttaatactactgcatcaggtgttgaagaccttaacatcattcaggtgacaattccagatgatgataatgaaagactctcgaaagttgaaaaagctagacagctaagagaacaagtgaatgacctctttagtcggaaatttggtgaagctattggtatgggttttcctgtgaaagttccctacaggaaaatcacaattaaccctggctgtgtggtggttgatggcatgcccccgggggtgtccttcaaagcccccagctacctggaaatcagctccatgagaaggatcttagactctgccgagtttatcaaattcacggtcattaggtaagtgagagtttcctgcttagtcacaggagcgaatctggagctcatgaggctgactcttctaaaatgcagccacaggtagtcatcgaatccggcttcctatgctgtgcaatcaacaaatcaaaataacttgtgtcatcattagaatgtcagatgtgcttctacgaactaagctgactcttttaattctttggcaaagggttggcaaactaggactgtttgccaaattcaggctgcctcctatttttagagtcttcctgaaacacagctacacccgtattatccatggctgctttcctgtcacagtgagtaagtagctgggactgagaaggcatggcctccaaagtctaaaatatttactctctagcactttgtagaaaaaccttagctaggcacagtggctaacgcctgtaatcccagcattttgggaggccaaggcaggcagatcacctgaggtcaggagttccagaccagcctggccaacatggtgaaatcccatctctacaaaaataaaacagttagctgggcatgatggcgggtgcctgtaatcccagctactcgggaggctgaggcaggatagtcgcttgaacccaggaggtggaggttgcaatgagccaagatcatgccactgcactccagcctggacgacagagtgagactccatcacaagaaaaaaagaactttgtcaacctctgtcttagggcgccttgtcacaggcttcgggtcagacggattcaaccttgcatcagccatttgttagccaggtcactctgttctttgtctgtaaatgagattgatcgttgttcccactgagagtgtcagctccttcccgtagagcaggcatgatgattgtactcacctctgacaccattgtgagtgccacattccttcccacgtccttgtcactgtaagagatgcccacctgagcaccaaccccaggttatcttcccctttgtcttccagccccccagaaacagctacgactcaacctacccaatcatttcatcatcagattgccactgtctctagttcaggtctcttgggactggcactcagaaatctcataataaatcctcttgaggcttctcatacactcgtcttcttccaatcttctttccctcaaaatctcatattttggttccacttcacccaccgtcattctccatatcactcccaggagttaggcaaaaagccccttccgttcttccgtatgttaaacttagaatcactctgttccctgctctgcgtttctattttttgtttttcctccatttactagtagcttaacactttctaacagtgttcttattattgatacgtatctatctcttccataagcttataaggtcacggataatacttctcattgtagtacgtaaatgacgtgggctagatatgagttgaataaacagttatacctgtaaattcttacagagtgaaaataaattgttatactttacaatttgtttctctctttagaccatttccaggacttgtgattaataaccgtgagtattttgtgaagtgttttgtttttgttttttcctggggtctgacgtgtgtgcgtgtgagtgtgtatacatgcttaacgtatatcacgttacttcacctatgtcagtaaccaggccaaatacttgttttagccctcagtaaaaacaccaggcacttcctagttgtaaaattattcaagcttcttaacttcctatcctcgatgcacttaatcataaaatggtaataatagcaccgattttgggggagtcgttccagtagatggaaagcatctggaacaggtgtcagcaagctcctgccgacgtgtatgcataaagttttattgaaaccaccatcgtgtccatttgtttatggcagaactgagagatggcagcagcaagtgtgtgcctgcaaaacctaaaatatttactaattggctctgcaagaaaagagtttgcatccccctaacctagaacagtgtctagcctctagtatgtgtttagcctacagtatgtgctcagcgaatacaatctatatttattactgcttttatgactgttataattactgtgcttggatttcgttacaaagtaagtcacaatgtgcctgcttctgttagtatttcagcacagtgcctggcacacatggggctctcaaatattgctgagcgagtgaacaaatgtcctttcaattccttaacgttgatgtcattttcaatagtattttgagccaaacttaattttgcgagtgtgttttgttttcttaactttattattaaaaatgtataaaagtgaggccaggcgtggtggctcacgcctgtaatcccagcagtttgggaggctgaggcaggcggatcagttgaggttgggagttggagaccagcccgtccaacatggtgaaagcctgtctctactaaaaatacaaaaatcagctgggtgtggtggcgcgtgcctgtaatcccagctactcaggaggctgaggcaggagagttgcttgaatcctagaggtggaggttgcagtgagctgagatcgtgccattgcactccagcctgggcaacaagagcaaaactctgtcccaataaataaataaataaaatgttctcttttgttcctgttcttgtgcggtagtgtggtatagagttttatggtaattactgtgaattagtgattctgagggacatatcagaactctgaggtttgtttccttctcatcttgagggaaacagcaaatgtatgttaaaatgcttttccaagggaacaacacatccttacattatttaaaccaatctgcttcattttcagagctggttgatcagagtgagtcagaaggccccgtgatacaagaatcagctgaaccaagccagttggaagttccagccacagaagaaataaaagagactgatggaagctctcagatcaagcaagaaccagaccccacgtggtagacctcttccctcctaggcttaaagtatcagtggttgagaagagcttttcggacctgttactaccccaagctgtgtaatatacttgtataacagaaataccttctatacaaacctttttttctacttttagatagaaatgtctactttttcagcagttctgtgaattaaagagcagagtgactgtgggtctggaatggctggtgtacttgggaatgtactatcaggattttacagcaatgctgggaaatgacagggaaaatgacaggaatgaatctcaccagattttttatgtactcagcagagccttgagttacggtgtttattttccaatcaagtgaagatatctcctacttctcctactggaacatctcagcttctgcagtgaagaaaaattcctgtgatagttcagttctttagtttttctatttgaaaaaaaaaaatcatttaaatgatcctttgttcacggctctccttaatgactgagtgaacagttcctatctgtatatttgactaaaccttttcctaagctatctctcatggttcctatgtttttttatcataattaaaagcaaaaccatctggatcacctaacagtcagaggtcagtatctcagcgtgtgaattatagaggaaatacagagagaacctcttccacttttacttttcgtccaaataaaatgcatggtgtaccagaagttgaagatcgggttgaggattggggctagctcgatgacactaaggccccaacatcgcgggacctgctgtggcgcggattcttaggaacgctgttctagccggccccctctccaggggtcgccgtggccggcattatttcctagttcttcttgtaaccctgaggtgccagcgcggggagtgaggaggggtcagggggctaaggatgcaacctctgacgttctgcgccttcctaggagagtcttacatgtgttgagatttcacaagcaatgcgagttgtaaaataccagctctacaagaagctaggctctgtgacggcatagttttcagtagctttatcacaatattcacaatggagaattatatgacatggtagcagaaataggcccttttatgtgttgcttctattttacctcaaattgtagatatagggtaatcaataaaatccatccatgcctttcacacactaagt

SEQ ID NO: 4209 - protein, 516 aa, Homo sapiens; identical to SEQ ID NO: 4129

SEQ ID NO: 4210 - DNA, 7796 bp, Homo sapiens
aaaaaaaaaaaaaaaaaaaaaaaaaaaagaaaaaagaaaaaaaaaaggaggaggaggaggagggtgagagagaagctgggagagcagagaaaaggggccaccggtcgcccccccgcttccccgcacgcgctctccagccgcggccgcccgcctgccgcggtcaccccggcctctgcctctgtcccccagtgatcggatcaaggcgctgagcgaggccctgcctgcggggcggccatgcggcggtgacaggagcgcgaccgacacgcacgggcccctcgccccctctcgcctcccgtccgctcgccagctcccctcagccgaggctgctccgcggcggccgcagcccgcgcgcggcccacactcgcctcccctcggcacccccggccccggagctgcctggaggcggccgcactcggtgtaaagaactggccaagtccaaagccgaagtggcctgcattgcagtgtatgaaacagacgtgtttgtcgtcggaactgaaagaggacgtgcttttgtcaataccagaaaggattttcaaaaagattttgtaaaatattgtgttgaagaagaagaaaaagctgcagagatgcataaaatgaaatctacaacccaggcaaatcggatgagtgtagatgctgtagaaattgaaacactcagaaaaacagttgaggactatttctgcttttgctatgggaaagctttaggcaaatccacagtggtacctgtaccatatgagaagatgctgcgagaccagtcggctgtggtagtgcaggggcttccggaaggtgttgcctttaaacaccccgagaactatgatcttgcaaccctgaaatggattttggagaacaaagcagggatttcattcatcattaagagaccttttttagagccaaagaagcatgtaggtggtcgtgtgatggtaacagatgctgacaggtcaatactatctccaggtggaagttgtggccccatcaaagtgaaaactgaacccacagaagattctggcatttccctggaaatggcagctgtgacagtaaaggaagaatcagaagatcctgattattatcaatataacattcaagcaggcccttctgaaactgatgatgttgatgaaaaacagcccctatcgaagcctttgcaaggaagccaccattcttcagagggcaatgaaggcacagaaatggaagtaccagcagaagatgatgattattctccaccgtctaagagaccaaaggccaatgagctaccgcagccaccagtcccggaacccgccaatgctgggaagcggaaagtgagggagttcaacttcgagaaatggaatgctcgcatcactgatctacgtaaacaagttgaagaattgtttgaaaggaaatatgctcaagccataaaagccaaaggtccggtgacgatcccgtaccctcttttccagtctcatgttgaagatctttatgtagaaggacttcctgaaggaattccttttagaaggccatctacttacggaattcctcgcctggagaggatattacttgcaaaggaaaggattcgttttgtgattaagaaacatgagcttctgaattcaacacgtgaagatttacagcttgataagccagcttcaggagtaaaggaagaatggtatgccagaatcactaaattaagaaagatggtggatcagcttttctgcaaaaaatttgcggaagccttggggagcactgaagccaaggctgtaccgtaccaaaaatttgaggcacacccgaatgatctgtacgtggaaggactgccagaaaacattcctttccgaagtccctcatggtatggaatcccaaggctggaaaaaatcattcaagtgggcaatcgaattaaatttgttattaaaagaccagaacttctgactcacagtaccactgaagttactcagccaagaacgaatacaccagctcaagctcttggactcaccgaggcagtaaaagtaccatatcctgtgtttgaatcaaacccggagttcttgtatgtggaaggcttgccagaggggattcccttccgaagccctacctggtttggaattccacgacttgaaaggatcgtccgcgggagtaataaaatcaagttcgttgttaaaaaacctgaactagttatttcctacttgcctcctgggatggctagtaaaataaacactaaagctttgcagtcccccaaaagaccacgaagtcctgggagtaattcaaaggttcctgaaattgaggtcaccgtggaaggccctaataacaacaatcctcaaacctcagctgttcgaaccccgacccagactaacggttctaacgttcccttcaagccacgagggagagagttttcctttgaggcctggaatgccaaaatcacggacctaaaacagaaagttgaaaatctcttcaatgagaaatgtggggaagctcttggccttaaacaagctgtgaaggtgccgttcgcgttatttgagtctttcccggaagacttttatgtggaaggcttacctgagggtgtgccattccgaagaccatcgacttttggcattccgaggctggagaagatactcagaaacaaagccaaaattaagttcatcattaaaaagcccgaaatgtttgagacggcgattaaggagagcacctcctctaagagccctcccagaaaaataaattcatcacccaatgttaatactactgcatcaggtgttgaagaccttaacatcattcaggtgacaattccagatgatgataatgaaagactctcgaaagttgaaaaagctagacagctaagagaacaagtgaatgacctctttagtcggaaatttggtgaagctattggtatgggttttcctgtgaaagttccctacaggaaaatcacaattaaccctggctgtgtggtggttgatggcatgcccccgggggtgtccttcaaagcccccagctacctggaaatcagctccatgagaaggatcttagactctgccgagtttatcaaattcacggtcattaggtaagtgagagtttcctgcttagtcacaggagcgaatctggagctcatgaggctgactcttctaaaatgcagccacaggtagtcatcgaatccggcttcctatgctgtgcaatcaacaaatcaaaataacttgtgtcatcattagaatgtcagatgtgcttctacgaactaagctgactcttttaattctttggcaaagggttggcaaactaggactgtttgccaaattcaggctgcctcctatttttagagtcttcctgaaacacagctacacccgtattatccatggctgctttcctgtcacagtgagtaagtagctgggactgagaaggcatggcctccaaagtctaaaatatttactctctagcactttgtagaaaaaccttagctaggcacagtggctaacgcctgtaatcccagcattttgggaggccaaggcaggcagatcacctgaggtcaggagttccagaccagcctggccaacatggtgaaatcccatctctacaaaaataaaacagttagctgggcatgatggcgggtgcctgtaatcccagctactcgggaggctgaggcaggatagtcgcttgaacccaggaggtggaggttgcaatgagccaagatcatgccactgcactccagcctggacgacagagtgagactccatcacaagaaaaaaagaactttgtcaacctctgtcttagggcgccttgtcacaggcttcgggtcagacggattcaaccttgcatcagccatttgttagccaggtcactctgttctttgtctgtaaatgagattgatcgttgttcccactgagagtgtcagctccttcccgtagagcaggcatgatgattgtactcacctctgacaccattgtgagtgccacattccttcccacgtccttgtcactgtaagagatgcccacctgagcaccaaccccaggttatcttcccctttgtcttccagccccccagaaacagctacgactcaacctacccaatcatttcatcatcagattgccactgtctctagttcaggtctcttgggactggcactcagaaatctcataataaatcctcttgaggcttctcatacactcgtcttcttccaatcttctttccctcaaaatctcatattttggttccacttcacccaccgtcattctccatatcactcccaggagttaggcaaaaagccccttccgttcttccgtatgttaaacttagaatcactctgttccctgctctgcgtttctattttttgtttttcctccatttactagtagcttaacactttctaacagtgttcttattattgatacgtatctatctcttccataagcttataaggtcacggataatacttctcattgtagtacgtaaatgacgtgggctagatatgagttgaataaacagttatacctgtaaattcttacagagtgaaaataaattgttatactttacaatttgtttctctctttagaccatttccaggacttgtgattaataaccgtgagtattttgtgaagtgttttgtttttgttttttcctggggtctgacgtgtgtgcgtgtgagtgtgtatacatgcttaacgtatatcacgttacttcacctatgtcagtaaccaggccaaatacttgttttagccctcagtaaaaacaccaggcacttcctagttgtaaaattattcaagcttcttaacttcctatcctcgatgcacttaatcataaaatggtaataatagcaccgattttgggggagtcgttccagtagatggaaagcatctggaacaggtgtcagcaagctcctgccgacgtgtatgcataaagttttattgaaaccaccatcgtgtccatttgtttatggcagaactgagagatggcagcagcaagtgtgtgcctgcaaaacctaaaatatttactaattggctctgcaagaaaagagtttgcatccccctaacctagaacagtgtctagcctctagtatgtgtttagcctacagtatgtgctcagcgaatacaatctatatttattactgcttttatgactgttataattactgtgcttggatttcgttacaaagtaagtcacaatgtgcctgcttctgttagtatttcagcacagtgcctggcacacatggggctctcaaatattgctgagcgagtgaacaaatgtcctttcaattccttaacgttgatgtcattttcaatagtattttgagccaaacttaattttgcgagtgtgttttgttttcttaactttattattaaaaatgtataaaagtgaggccaggcgtggtggctcacgcctgtaatcccagcagtttgggaggctgaggcaggcggatcagttgaggttgggagttggagaccagcccgtccaacatggtgaaagcctgtctctactaaaaatacaaaaatcagctgggtgtggtggcgcgtgcctgtaatcccagctactcaggaggctgaggcaggagagttgcttgaatcctagaggtggaggttgcagtgagctgagatcgtgccattgcactccagcctgggcaacaagagcaaaactctgtcccaataaataaataaataaaatgttctcttttgttcctgttcttgtgcggtagtgtggtatagagttttatggtaattactgtgaattagtgattctgagggacatatcagaactctgaggtttgtttccttctcatcttgagggaaacagcaaatgtatgttaaaatgcttttccaagggaacaacacatccttacattatttaaaccaatctgcttcattttcagagctggttgatcagagtgagtcagaaggccccgtgatacaagaatcagctgaaccaagccagttggaagttccagccacagaagaaataaaagagactgatggaagctctcagatcaagcaagaaccagaccccacgtggtagacctcttccctcctagggtaaatcagcttctgtgtcagggatgctgtgtggtgtccatctgaaccccctgcatacgcgtagctaatgtgatctccccactttcacataagatggtggccctgccttcagggaatgtgggagccaggtgggagccttcccggatatttaagctagaagattctacagggagattctccttggatcaatatatgtctctcagtcaaagatgtaaaagcacttttgccttaaaaagaatgttctgtttctaaatagagtcaacgttgtcctcctcattggaattcactatgagtcagaatcattagactgacttttttttttccatagtaatagtattttgcagagtctcacagagctgcagatcttttgttcatcttgcagagttaacaagtctgatcctgttagtccagatttcttaaatttggccaagttataataggagcagtagcttgagacccgaagtcaggaaactttgacaatggatttttttttttaatccagagacttgtactggaatttgccttaccctgtcagctcatggacttaaggtttcatcccgctttatgagtgcttctgaatccaagtcattgttacctgaatttgcaaattaagttgtgatattcgtgactgttaaattcctgtaattagattaacctctttgcttgcttgtttgttttctctcctattttagcttaaagtatcagtggttgagaagagcttttcggacctgttactaccccaagctgtgtaatatacttgtataacagaaataccttctatacaaacctttttttctacttttagatagaaatgtctactttttcagcagttctgtgaattaaagagcagagtgactgtgggtctggaatggctggtgtacttgggaatgtactatcaggattttacagcaatgctgggaaatgacagggaaaatgacaggaatgaatctcaccagattttttatgtactcagcagagccttgagttacggtgtttattttccaatcaagtgaagatatctcctacttctcctactggaacatctcagcttctgcagtgaagaaaaattcctgtgatagttcagttctttagtttttctatttgaaaaaaaaaaatcatttaaatgatcctttgttcacggctctccttaatgactgagtgaacagttcctatctgtatatttgactaaaccttttcctaagctatctctcatggttcctatgtttttttatcataattaaaagcaaaaccatctggatcacctaacagtcagaggtcagtatctcagcgtgtgaattatagaggaaatacagagagaacctcttccacttttacttttcgtccaaataaaatgcatggtgtaccagaagttgaagatcgggttgaggattggggctagctcgatgacactaaggccccaacatcgcgggacctgctgtggcgcggattcttaggaacgctgttctagccggccccctctccaggggtcgccgtggccggcattatttcctagttcttcttgtaaccctgaggtgccagcgcggggagtgaggaggggtcagggggctaaggatgcaacctctgacgttctgcgccttcctaggagagtcttacatgtgttgagatttcacaagcaatgcgagttgtaaaataccagctctacaagaagctaggctctgtgacggcatagttttcagtagctttatcacaatattcacaatggagaattatatgacatggtagcagaaataggcccttttatgtgttgcttctattttacctcaaattgtagatatagggtaatcaataaaatccatccatgcctttcacacactaagt

SEQ ID NO: 4211 - protein, 808 aa, Homo sapiens
MHKMKSTTQANRMSVDAVEIETLRKTVEDYFCFCYGKALGKSTVVPVPYEKMLRDQSAVVVQGLPEGVAFKHPENYDLATLKWILENKAGISFIIKRPFLEPKKHVGGRVMVTDADRSILSPGGSCGPIKVKTEPTEDSGISLEMAAVTVKEESEDPDYYQYNIQAGPSETDDVDEKQPLSKPLQGSHHSSEGNEGTEMEVPAEDDDYSPPSKRPKANELPQPPVPEPANAGKRKVREFNFEKWNARITDLRKQVEELFERKYAQAIKAKGPVTIPYPLFQSHVEDLYVEGLPEGIPFRRPSTYGIPRLERILLAKERIRFVIKKHELLNSTREDLQLDKPASGVKEEWYARITKLRKMVDQLFCKKFAEALGSTEAKAVPYQKFEAHPNDLYVEGLPENIPFRSPSWYGIPRLEKIIQVGNRIKFVIKRPELLTHSTTEVTQPRTNTPAQALGLTEAVKVPYPVFESNPEFLYVEGLPEGIPFRSPTWFGIPRLERIVRGSNKIKFVVKKPELVISYLPPGMASKINTKALQSPKRPRSPGSNSKVPEIEVTVEGPNNNNPQTSAVRTPTQTNGSNVPFKPRGREFSFEAWNAKITDLKQKVENLFNEKCGEALGLKQAVKVPFALFESFPEDFYVEGLPEGVPFRRPSTFGIPRLEKILRNKAKIKFIIKKPEMFETAIKESTSSKSPPRKINSSPNVNTTASGVEDLNIIQVTIPDDDNERLSKVEKARQLREQVNDLFSRKFGEAIGMGFPVKVPYRKITINPGCVVVDGMPPGVSFKAPSYLEISSMRRILDSAEFIKFTVIR

SEQ ID NO: 4212 - DNA, 4960 bp, Homo sapiens
aaaaaaaaaaaaaaaaaaaaaaaaaaaagaaaaaagaaaaaaaaaaggaggaggaggaggagggtgagagagaagctgggagagcagagaaaaggggccaccggtcgcccccccgcttccccgcacgcgctctccagccgcggccgcccgcctgccgcggtcaccccggcctctgcctctgtcccccagtgatcggatcaaggcgctgagcgaggccctgcctgcggggcggccatgcggcggtgacaggagcgcgaccgacacgcacgggcccctcgccccctctcgcctcccgtccgctcgccagctcccctcagccgaggctgctccgcggcggccgcagcccgcgcgcggcccacactcgcctcccctcggcacccccggccccggagctgcctggaggcggccgcactcggtgtaaagaactggccaagtccaaagccgaagtggcctgcattgcagtgtatgaaacagacgtgtttgtcgtcggaactgaaagaggacgtgcttttgtcaataccagaaaggattttcaaaaagattttgtaaaatattgtgttgaagaagaagaaaaagctgcagagatgcataaaatgaaatctacaacccaggcaaatcggatgagtgtagatgctgtagaaattgaaacactcagaaaaacagttgaggactatttctgcttttgctatgggaaagctttaggcaaatccacagtggtacctgtaccatatgagaagatgctgcgagaccagtcggctgtggtagtgcaggggcttccggaaggtgttgcctttaaacaccccgagaactatgatcttgcaaccctgaaatggattttggagaacaaagcagggatttcattcatcattaagagaccttttttagagccaaagaagcatgtaggtggtcgtgtgatggtaacagatgctgacaggtcaatactatctccaggtggaagttgtggccccatcaaagtgaaaactgaacccacagaagattctggaagccaccattcttcagagggcaatgaaggcacagaaatggaagtaccagcagaagattctactcaacatgtcccttcagaaacaagtgaggaccctgaagttgaggtgactattgaagatgatgattattctccaccgtctaagagaccaaaggccaatgagctaccgcagccaccagtcccggaacccgccaatgctgggaagcggaaagtgagggagttcaacttcgagaaatggaatgctcgcatcactgatctacgtaaacaagttgaagaattgtttgaaaggaaatatgctcaagccataaaagccaaaggtccggtgacgatcccgtaccctcttttccagtctcatgttgaagatctttatgtagaaggacttcctgaaggaattccttttagaaggccatctacttacggaattcctcgcctggagaggatattacttgcaaaggaaaggattcgttttgtgattaagaaacatgagcttctgaattcaacacgtgaagatttacagcttgataagccagcttcaggagtaaaggaagaatggtatgccagaatcactaaattaagaaagatggtggatcagcttttctgcaaaaaatttgcggaagccttggggagcactgaagccaaggctgtaccgtaccaaaaatttgaggcacacccgaatgatctgtacgtggaaggactgccagaaaacattcctttccgaagtccctcatggtatggaatcccaaggctggaaaaaatcattcaagtgggcaatcgaattaaatttgttattaaaagaccagaacttctgactcacagtaccactgaagttactcagccaagaacgaatacaccagctcaagctcttggactcaccgaggcagtaaaagtaccatatcctgtgtttgaatcaaacccggagttcttgtatgtggaaggcttgccagaggggattcccttccgaagccctacctggtttggaattccacgacttgaaaggatcgtccgcgggagtaataaaatcaagttcgttgttaaaaaacctgaactagttatttcctacttgcctcctgggatggctagtaaaataaacactaaagctttgcagtcccccaaaagaccacgaagtcctgggagtaattcaaaggttcctgaaattgaggtcaccgtggaaggccctaataacaacaatcctcaaacctcagctgttcgaaccccgacccagactaacggttctaacgttcccttcaagccacgagggagagagttttcctttgaggcctggaatgccaaaatcacggacctaaaacagaaagttgaaaatctcttcaatgagaaatgtggggaagctcttggccttaaacaagctgtgaaggtgccgttcgcgttatttgagtctttcccggaagacttttatgtggaaggcttacctgagggtgtgccattccgaagaccatcgacttttggcattccgaggctggagaagatactcagaaacaaagccaaaattaagttcatcattaaaaagcccgaaatgtttgagacggcgattaaggagagcacctcctctaagagccctcccagaaaaataaattcatcacccaatgttaatactactgcatcaggtgttgaagaccttaacatcattcaggtgacaattccagatgatgataatgaaagactctcgaaagttgaaaaagctagacagctaagagaacaagtgaatgacctctttagtcggaaatttggtgaagctattggtatgggttttcctgtgaaagttccctacaggaaaatcacaattaaccctggctgtgtggtggttgatggcatgcccccgggggtgtccttcaaagcccccagctacctggaaatcagctccatgagaaggatcttagactctgccgagtttatcaaattcacggtcattagaccatttccaggacttgtgattaataaccagctggttgatcagagtgagtcagaaggccccgtgatacaagaatcagctgaaccaagccagttggaagttccagccacagaagaaataaaagagactgatggaagctctcagatcaagcaagaaccagaccccacgtggtagacctcttccctcctagggtaaatcagcttctgtgtcagggatgctgtgtggtgtccatctgaaccccctgcatacgcgtagctaatgtgatctccccactttcacataagatggtggccctgccttcagggaatgtgggagccaggtgggagccttcccggatatttaagctagaagattctacagggagattctccttggatcaatatatgtctctcagtcaaagatgtaaaagcacttttgccttaaaaagaatgttctgtttctaaatagagtcaacgttgtcctcctcattggaattcactatgagtcagaatcattagactgacttttttttttccatagtaatagtattttgcagagtctcacagagctgcagatcttttgttcatcttgcagagttaacaagtctgatcctgttagtccagatttcttaaatttggccaagttataataggagcagtagcttgagacccgaagtcaggaaactttgacaatggatttttttttttaatccagagacttgtactggaatttgccttaccctgtcagctcatggacttaaggtttcatcccgctttatgagtgcttctgaatccaagtcattgttacctgaatttgcaaattaagttgtgatattcgtgactgttaaattcctgtaattagattaacctctttgcttgcttgtttgttttctctcctattttagcttaaagtatcagtggttgagaagagcttttcggacctgttactaccccaagctgtgtaatatacttgtataacagaaataccttctatacaaacctttttttctacttttagatagaaatgtctactttttcagcagttctgtgaattaaagagcagagtgactgtgggtctggaatggctggtgtacttgggaatgtactatcaggattttacagcaatgctgggaaatgacagggaaaatgacaggaatgaatctcaccagattttttatgtactcagcagagccttgagttacggtgtttattttccaatcaagtgaagatatctcctacttctcctactggaacatctcagcttctgcagtgaagaaaaattcctgtgatagttcagttctttagtttttctatttgaaaaaaaaaaatcatttaaatgatcctttgttcacggctctccttaatgactgagtgaacagttcctatctgtatatttgactaaaccttttcctaagctatctctcatggttcctatgtttttttatcataattaaaagcaaaaccatctggatcacctaacagtcagaggtcagtatctcagcgtgtgaattatagaggaaatacagagagaacctcttccacttttacttttcgtccaaataaaatgcatggtgtaccagaagttgaagatcgggttgaggattggggctagctcgatgacactaaggccccaacatcgcgggacctgctgtggcgcggattcttaggaacgctgttctagccggccccctctccaggggtcgccgtggccggcattatttcctagttcttcttgtaaccctgaggtgccagcgcggggagtgaggaggggtcagggggctaaggatgcaacctctgacgttctgcgccttcctaggagagtcttacatgtgttgagatttcacaagcaatgcgagttgtaaaataccagctctacaagaagctaggctctgtgacggcatagttttcagtagctttatcacaatattcacaatggagaattatatgacatggtagcagaaataggcccttttatgtgttgcttctattttacctcaaattgtagatatagggtaatcaataaaatccatccatgcctttcacacactaagt

SEQ ID NO: 4213 - protein, 839 aa, Homo sapiens
MHKMKSTTQANRMSVDAVEIETLRKTVEDYFCFCYGKALGKSTVVPVPYEKMLRDQSAVVVQGLPEGVAFKHPENYDLATLKWILENKAGISFIIKRPFLEPKKHVGGRVMVTDADRSILSPGGSCGPIKVKTEPTEDSGSHHSSEGNEGTEMEVPAEDSTQHVPSETSEDPEVEVTIEDDDYSPPSKRPKANELPQPPVPEPANAGKRKVREFNFEKWNARITDLRKQVEELFERKYAQAIKAKGPVTIPYPLFQSHVEDLYVEGLPEGIPFRRPSTYGIPRLERILLAKERIRFVIKKHELLNSTREDLQLDKPASGVKEEWYARITKLRKMVDQLFCKKFAEALGSTEAKAVPYQKFEAHPNDLYVEGLPENIPFRSPSWYGIPRLEKIIQVGNRIKFVIKRPELLTHSTTEVTQPRTNTPAQALGLTEAVKVPYPVFESNPEFLYVEGLPEGIPFRSPTWFGIPRLERIVRGSNKIKFVVKKPELVISYLPPGMASKINTKALQSPKRPRSPGSNSKVPEIEVTVEGPNNNNPQTSAVRTPTQTNGSNVPFKPRGREFSFEAWNAKITDLKQKVENLFNEKCGEALGLKQAVKVPFALFESFPEDFYVEGLPEGVPFRRPSTFGIPRLEKILRNKAKIKFIIKKPEMFETAIKESTSSKSPPRKINSSPNVNTTASGVEDLNIIQVTIPDDDNERLSKVEKARQLREQVNDLFSRKFGEAIGMGFPVKVPYRKITINPGCVVVDGMPPGVSFKAPSYLEISSMRRILDSAEFIKFTVIRPFPGLVINNQLVDQSESEGPVIQESAEPSQLEVPATEEIKETDGSSQIKQEPDPTW

SEQ ID NO: 4214 - DNA, 7104 bp, Homo sapiens
aaaaaaaaaaaaaaaaaaaaaaaaaaaagaaaaaagaaaaaaaaaaggaggaggaggaggagggtgagagagaagctgggagagcagagaaaaggggccaccggtcgcccccccgcttccccgcacgcgctctccagccgcggccgcccgcctgccgcggtcaccccggcctctgcctctgtcccccagtgatcggatcaaggcgctgagcgaggccctgcctgcggggcggccatgcggcggtgacaggagcgcgaccgacacgcacgggcccctcgccccctctcgcctcccgtccgctcgccagctcccctcagccgaggctgctccgcggcggccgcagcccgcgcgcggcccacactcgcctcccctcggcacccccggccccggagctgcctggaggcggccgcactcggtgtaaagaactggccaagtccaaagccgaagtggcctgcattgcagtgtatgaaacagacgtgtttgtcgtcggaactgaaagaggacgtgcttttgtcaataccagaaaggattttcaaaaagattttgtaaaatattgtgttgaagaagaagaaaaagctgcagagatgcataaaatgaaatctacaacccaggcaaatcggatgagtgtagatgctgtagaaattgaaacactcagaaaaacagttgaggactatttctgcttttgctatgggaaagctttaggcaaatccacagtggtacctgtaccatatgagaagatgctgcgagaccagtcggctgtggtagtgcaggggcttccggaaggtgttgcctttaaacaccccgagaactatgatcttgcaaccctgaaatggattttggagaacaaagcagggatttcattcatcattaagagaccttttttagagccaaagaagcatgtaggtggtcgtgtgatggtaacagatgctgacaggtcaatactatctccaggtggaagttgtggccccatcaaagtgaaaactgaacccacagaagattctggcatttccctggaaatggcagctgtgacagtaaaggaagaatcagaagatcctgattattatcaatataacattcaagcaggcccttctgaaactgatgatgttgatgaaaaacagcccctatcgaagcctttgcaaggaagccaccattcttcagagggcaatgaaggcacagaaatggaagtaccagcagaagatgatgattattctccaccgtctaagagaccaaaggccaatgagctaccgcagccaccagtcccggaacccgccaatgctgggaagcggaaagtgagggagttcaacttcgagaaatggaatgctcgcatcactgatctacgtaaacaagttgaagaattgtttgaaaggaaatatgctcaagccataaaagccaaaggtccggtgacgatcccgtaccctcttttccagtctcatgttgaagatctttatgtagaaggacttcctgaaggaattccttttagaaggccatctacttacggaattcctcgcctggagaggatattacttgcaaaggaaaggattcgttttgtgattaagaaacatgagcttctgaattcaacacgtgaagatttacagcttgataagccagcttcaggagtaaaggaagaatggtatgccagaatcactaaattaagaaagatggtggatcagcttttctgcaaaaaatttgcggaagccttggggagcactgaagccaaggctgtaccgtaccaaaaatttgaggcacacccgaatgatctgtacgtggaaggactgccagaaaacattcctttccgaagtccctcatggtatggaatcccaaggctggaaaaaatcattcaagtgggcaatcgaattaaatttgttattaaaagaccagaacttctgactcacagtaccactgaagttactcagccaagaacgaatacaccagctcaagctcttggactcaccgaggcagtaaaagtaccatatcctgtgtttgaatcaaacccggagttcttgtatgtggaaggcttgccagaggggattcccttccgaagccctacctggtttggaattccacgacttgaaaggatcgtccgcgggagtaataaaatcaagttcgttgttaaaaaacctgaactagttatttcctacttgcctcctgggatggctagtaaaataaacactaaagctttgcagtcccccaaaagaccacgaagtcctgggagtaattcaaaggttcctgaaattgaggtcaccgtggaaggccctaataacaacaatcctcaaacctcagctgttcgaaccccgacccagactaacggttctaacgttcccttcaagccacgagggagagagttttcctttgaggcctggaatgccaaaatcacggacctaaaacagaaagttgaaaatctcttcaatgagaaatgtggggaagctcttggccttaaacaagctgtgaaggtgccgttcgcgttatttgagtctttcccggaagacttttatgtggaaggcttacctgagggtgtgccattccgaagaccatcgacttttggcattccgaggctggagaagatactcagaaacaaagccaaaattaagttcatcattaaaaagcccgaaatgtttgagacggcgattaaggagagcacctcctctaagagccctcccagaaaaataaattcatcacccaatgttaatactactgcatcaggtgttgaagaccttaacatcattcaggtgacaattccagatgatgataatgaaagactctcgaaagttgaaaaagctagacagctaagagaacaagtgaatgacctctttagtcggaaatttggtgaagctattggtatgggttttcctgtgaaagttccctacaggaaaatcacaattaaccctggctgtgtggtggttgatggcatgcccccgggggtgtccttcaaagcccccagctacctggaaatcagctccatgagaaggatcttagactctgccgagtttatcaaattcacggtcattaggtaagtgagagtttcctgcttagtcacaggagcgaatctggagctcatgaggctgactcttctaaaatgcagccacaggtagtcatcgaatccggcttcctatgctgtgcaatcaacaaatcaaaataacttgtgtcatcattagaatgtcagatgtgcttctacgaactaagctgactcttttaattctttggcaaagggttggcaaactaggactgtttgccaaattcaggctgcctcctatttttagagtcttcctgaaacacagctacacccgtattatccatggctgctttcctgtcacagtgagtaagtagctgggactgagaaggcatggcctccaaagtctaaaatatttactctctagcactttgtagaaaaaccttagctaggcacagtggctaacgcctgtaatcccagcattttgggaggccaaggcaggcagatcacctgaggtcaggagttccagaccagcctggccaacatggtgaaatcccatctctacaaaaataaaacagttagctgggcatgatggcgggtgcctgtaatcccagctactcgggaggctgaggcaggatagtcgcttgaacccaggaggtggaggttgcaatgagccaagatcatgccactgcactccagcctggacgacagagtgagactccatcacaagaaaaaaagaactttgtcaacctctgtcttagggcgccttgtcacaggcttcgggtcagacggattcaaccttgcatcagccatttgttagccaggtcactctgttctttgtctgtaaatgagattgatcgttgttcccactgagagtgtcagctccttcccgtagagcaggcatgatgattgtactcacctctgacaccattgtgagtgccacattccttcccacgtccttgtcactgtaagagatgcccacctgagcaccaaccccaggttatcttcccctttgtcttccagccccccagaaacagctacgactcaacctacccaatcatttcatcatcagattgccactgtctctagttcaggtctcttgggactggcactcagaaatctcataataaatcctcttgaggcttctcatacactcgtcttcttccaatcttctttccctcaaaatctcatattttggttccacttcacccaccgtcattctccatatcactcccaggagttaggcaaaaagccccttccgttcttccgtatgttaaacttagaatcactctgttccctgctctgcgtttctattttttgtttttcctccatttactagtagcttaacactttctaacagtgttcttattattgatacgtatctatctcttccataagcttataaggtcacggataatacttctcattgtagtacgtaaatgacgtgggctagatatgagttgaataaacagttatacctgtaaattcttacagagtgaaaataaattgttatactttacaatttgtttctctctttagaccatttccaggacttgtgattaataaccgtgagtattttgtgaagtgttttgtttttgttttttcctggggtctgacgtgtgtgcgtgtgagtgtgtatacatgcttaacgtatatcacgttacttcacctatgtcagtaaccaggccaaatacttgttttagccctcagtaaaaacaccaggcacttcctagttgtaaaattattcaagcttcttaacttcctatcctcgatgcacttaatcataaaatggtaataatagcaccgattttgggggagtcgttccagtagatggaaagcatctggaacaggtgtcagcaagctcctgccgacgtgtatgcataaagttttattgaaaccaccatcgtgtccatttgtttatggcagaactgagagatggcagcagcaagtgtgtgcctgcaaaacctaaaatatttactaattggctctgcaagaaaagagtttgcatccccctaacctagaacagtgtctagcctctagtatgtgtttagcctacagtatgtgctcagcgaatacaatctatatttattactgcttttatgactgttataattactgtgcttggatttcgttacaaagtaagtcacaatgtgcctgcttctgttagtatttcagcacagtgcctggcacacatggggctctcaaatattgctgagcgagtgaacaaatgtcctttcaattccttaacgttgatgtcattttcaatagtattttgagccaaacttaattttgcgagtgtgttttgttttcttaactttattattaaaaatgtataaaagtgaggccaggcgtggtggctcacgcctgtaatcccagcagtttgggaggctgaggcaggcggatcagttgaggttgggagttggagaccagcccgtccaacatggtgaaagcctgtctctactaaaaatacaaaaatcagctgggtgtggtggcgcgtgcctgtaatcccagctactcaggaggctgaggcaggagagttgcttgaatcctagaggtggaggttgcagtgagctgagatcgtgccattgcactccagcctgggcaacaagagcaaaactctgtcccaataaataaataaataaaatgttctcttttgttcctgttcttgtgcggtagtgtggtatagagttttatggtaattactgtgaattagtgattctgagggacatatcagaactctgaggtttgtttccttctcatcttgagggaaacagcaaatgtatgttaaaatgcttttccaagggaacaacacatccttacattatttaaaccaatctgcttcattttcagagctggttgatcagagtgagtcagaaggccccgtgatacaagaatcagctgaaccaagccagttggaagttccagccacagaagaaataaaagagactgatggaagctctcagatcaagcaagaaccagaccccacgtggtagacctcttccctcctaggcttaaagtatcagtggttgagaagagcttttcggacctgttactaccccaagctgtgtaatatacttgtataacagaaataccttctatacaaacctttttttctacttttagatagaaatgtctactttttcagcagttctgtgaattaaagagcagagtgactgtgggtctggaatggctggtgtacttgggaatgtactatcaggattttacagcaatgctgggaaatgacagggaaaatgacaggaatgaatctcaccagattttttatgtactcagcagagccttgagttacggtgtttattttccaatcaagtgaagatatctcctacttctcctactggaacatctcagcttctgcagtgaagaaaaattcctgtgatagttcagttctttagtttttctatttgaaaaaaaaaaatcatttaaatgatcctttgttcacggctctccttaatgactgagtgaacagttcctatctgtatatttgactaaaccttttcctaagctatctctcatggttcctatgtttttttatcataattaaaagcaaaaccatctggatcacctaacagtcagaggtcagtatctcagcgtgtgaattatagaggaaatacagagagaacctcttccacttttacttttcgtccaaataaaatgcatggtgtaccagaagttgaagatcgggttgaggattggggctagctcgatgacactaaggccccaacatcgcgggacctgctgtggcgcggattcttaggaacgctgttctagccggccccctctccaggggtcgccgtggccggcattatttcctagttcttcttgtaaccctgaggtgccagcgcggggagtgaggaggggtcagggggctaaggatgcaacctctgacgttctgcgccttcctaggagagtcttacatgtgttgagatttcacaagcaatgcgagttgtaaaataccagctctacaagaagctaggctctgtgacggcatagttttcagtagctttatcacaatattcacaatggagaattatatgacatggtagcagaaataggcccttttatgtgttgcttctattttacctcaaattgtagatatagggtaatcaataaaatccatccatgcctttcacacactaagt

SEQ ID NO: 4215 - protein, 808 aa, Homo sapiens; identical to SEQ ID NO: 4211

SEQ ID NO: 4216 - DNA, 5056 bp, Homo sapiens
aaaaaaaaaaaaaaaaaaaaaaaaaaaagaaaaaagaaaaaaaaaaggaggaggaggaggagggtgagagagaagctgggagagcagagaaaaggggccaccggtcgcccccccgcttccccgcacgcgctctccagccgcggccgcccgcctgccgcggtcaccccggcctctgcctctgtcccccagtgatcggatcaaggcgctgagcgaggccctgcctgcggggcggccatgcggcggtgacaggagcgcgaccgacacgcacgggcccctcgccccctctcgcctcccgtccgctcgccagctcccctcagccgaggctgctccgcggcggccgcagcccgcgcgcggcccacactcgcctcccctcggcacccccggccccggagctgcctggaggcggccgcactcggtgtaaagaactggccaagtccaaagccgaagtggcctgcattgcagtgtatgaaacagacgtgtttgtcgtcggaactgaaagaggacgtgcttttgtcaataccagaaaggattttcaaaaagattttgtaaaatattgtgttgaagaagaagaaaaagctgcagagatgcataaaatgaaatctacaacccaggcaaatcggatgagtgtagatgctgtagaaattgaaacactcagaaaaacagttgaggactatttctgcttttgctatgggaaagctttaggcaaatccacagtggtacctgtaccatatgagaagatgctgcgagaccagtcggctgtggtagtgcaggggcttccggaaggtgttgcctttaaacaccccgagaactatgatcttgcaaccctgaaatggattttggagaacaaagcagggatttcattcatcattaagagaccttttttagagccaaagaagcatgtaggtggtcgtgtgatggtaacagatgctgacaggtcaatactatctccaggtggaagttgtggccccatcaaagtgaaaactgaacccacagaagattctggcatttccctggaaatggcagctgtgacagtaaaggaagaatcagaagatcctgattattatcaatataacattcaagcaggcccttctgaaactgatgatgttgatgaaaaacagcccctatcgaagcctttgcaaggaagccaccattcttcagagggcaatgaaggcacagaaatggaagtaccagcagaagatgatgattattctccaccgtctaagagaccaaaggccaatgagctaccgcagccaccagtcccggaacccgccaatgctgggaagcggaaagtgagggagttcaacttcgagaaatggaatgctcgcatcactgatctacgtaaacaagttgaagaattgtttgaaaggaaatatgctcaagccataaaagccaaaggtccggtgacgatcccgtaccctcttttccagtctcatgttgaagatctttatgtagaaggacttcctgaaggaattccttttagaaggccatctacttacggaattcctcgcctggagaggatattacttgcaaaggaaaggattcgttttgtgattaagaaacatgagcttctgaattcaacacgtgaagatttacagcttgataagccagcttcaggagtaaaggaagaatggtatgccagaatcactaaattaagaaagatggtggatcagcttttctgcaaaaaatttgcggaagccttggggagcactgaagccaaggctgtaccgtaccaaaaatttgaggcacacccgaatgatctgtacgtggaaggactgccagaaaacattcctttccgaagtccctcatggtatggaatcccaaggctggaaaaaatcattcaagtgggcaatcgaattaaatttgttattaaaagaccagaacttctgactcacagtaccactgaagttactcagccaagaacgaatacaccagtcaaagaagattggaatgtcagaattaccaagctacggaagcaagtggaagagatttttaatttgaaatttgctcaagctcttggactcaccgaggcagtaaaagtaccatatcctgtgtttgaatcaaacccggagttcttgtatgtggaaggcttgccagaggggattcccttccgaagccctacctggtttggaattccacgacttgaaaggatcgtccgcgggagtaataaaatcaagttcgttgttaaaaaacctgaactagttatttcctacttgcctcctgggatggctagtaaaataaacactaaagctttgcagtcccccaaaagaccacgaagtcctgggagtaattcaaaggttcctgaaattgaggtcaccgtggaaggccctaataacaacaatcctcaaacctcagctgttcgaaccccgacccagactaacggttctaacgttcccttcaagccacgagggagagagttttcctttgaggcctggaatgccaaaatcacggacctaaaacagaaagttgaaaatctcttcaatgagaaatgtggggaagctcttggccttaaacaagctgtgaaggtgccgttcgcgttatttgagtctttcccggaagacttttatgtggaaggcttacctgagggtgtgccattccgaagaccatcgacttttggcattccgaggctggagaagatactcagaaacaaagccaaaattaagttcatcattaaaaagcccgaaatgtttgagacggcgattaaggagagcacctcctctaagagccctcccagaaaaataaattcatcacccaatgttaatactactgcatcaggtgttgaagaccttaacatcattcaggtgacaattccagatgatgataatgaaagactctcgaaagttgaaaaagctagacagctaagagaacaagtgaatgacctctttagtcggaaatttggtgaagctattggtatgggttttcctgtgaaagttccctacaggaaaatcacaattaaccctggctgtgtggtggttgatggcatgcccccgggggtgtccttcaaagcccccagctacctggaaatcagctccatgagaaggatcttagactctgccgagtttatcaaattcacggtcattagaccatttccaggacttgtgattaataaccagctggttgatcagagtgagtcagaaggccccgtgatacaagaatcagctgaaccaagccagttggaagttccagccacagaaggtaaaaggacctcttccctcctagggtaaatcagcttctgtgtcagggatgctgtgtggtgtccatctgaaccccctgcatacgcgtagctaatgtgatctccccactttcacataagatggtggccctgccttcagggaatgtgggagccaggtgggagccttcccggatatttaagctagaagattctacagggagattctccttggatcaatatatgtctctcagtcaaagatgtaaaagcacttttgccttaaaaagaatgttctgtttctaaatagagtcaacgttgtcctcctcattggaattcactatgagtcagaatcattagactgacttttttttttccatagtaatagtattttgcagagtctcacagagctgcagatcttttgttcatcttgcagagttaacaagtctgatcctgttagtccagatttcttaaatttggccaagttataataggagcagtagcttgagacccgaagtcaggaaactttgacaatggatttttttttttaatccagagacttgtactggaatttgccttaccctgtcagctcatggacttaaggtttcatcccgctttatgagtgcttctgaatccaagtcattgttacctgaatttgcaaattaagttgtgatattcgtgactgttaaattcctgtaattagattaacctctttgcttgcttgtttgttttctctcctattttagcttaaagtatcagtggttgagaagagcttttcggacctgttactaccccaagctgtgtaatatacttgtataacagaaataccttctatacaaacctttttttctacttttagatagaaatgtctactttttcagcagttctgtgaattaaagagcagagtgactgtgggtctggaatggctggtgtacttgggaatgtactatcaggattttacagcaatgctgggaaatgacagggaaaatgacaggaatgaatctcaccagattttttatgtactcagcagagccttgagttacggtgtttattttccaatcaagtgaagatatctcctacttctcctactggaacatctcagcttctgcagtgaagaaaaattcctgtgatagttcagttctttagtttttctatttgaaaaaaaaaaatcatttaaatgatcctttgttcacggctctccttaatgactgagtgaacagttcctatctgtatatttgactaaaccttttcctaagctatctctcatggttcctatgtttttttatcataattaaaagcaaaaccatctggatcacctaacagtcagaggtcagtatctcagcgtgtgaattatagaggaaatacagagagaacctcttccacttttacttttcgtccaaataaaatgcatggtgtaccagaagttgaagatcgggttgaggattggggctagctcgatgacactaaggccccaacatcgcgggacctgctgtggcgcggattcttaggaacgctgttctagccggccccctctccaggggtcgccgtggccggcattatttcctagttcttcttgtaaccctgaggtgccagcgcggggagtgaggaggggtcagggggctaaggatgcaacctctgacgttctgcgccttcctaggagagtcttacatgtgttgagatttcacaagcaatgcgagttgtaaaataccagctctacaagaagctaggctctgtgacggcatagttttcagtagctttatcacaatattcacaatggagaattatatgacatggtagcagaaataggcccttttatgtgttgcttctattttacctcaaattgtagatatagggtaatcaataaaatccatccatgcctttcacacactaagt

SEQ ID NO: 4217 - protein, 878 aa, Homo sapiens
MHKMKSTTQANRMSVDAVEIETLRKTVEDYFCFCYGKALGKSTVVPVPYEKMLRDQSAVVVQGLPEGVAFKHPENYDLATLKWILENKAGISFIIKRPFLEPKKHVGGRVMVTDADRSILSPGGSCGPIKVKTEPTEDSGISLEMAAVTVKEESEDPDYYQYNIQAGPSETDDVDEKQPLSKPLQGSHHSSEGNEGTEMEVPAEDDDYSPPSKRPKANELPQPPVPEPANAGKRKVREFNFEKWNARITDLRKQVEELFERKYAQAIKAKGPVTIPYPLFQSHVEDLYVEGLPEGIPFRRPSTYGIPRLERILLAKERIRFVIKKHELLNSTREDLQLDKPASGVKEEWYARITKLRKMVDQLFCKKFAEALGSTEAKAVPYQKFEAHPNDLYVEGLPENIPFRSPSWYGIPRLEKIIQVGNRIKFVIKRPELLTHSTTEVTQPRTNTPVKEDWNVRITKLRKQVEEIFNLKFAQALGLTEAVKVPYPVFESNPEFLYVEGLPEGIPFRSPTWFGIPRLERIVRGSNKIKFVVKKPELVISYLPPGMASKINTKALQSPKRPRSPGSNSKVPEIEVTVEGPNNNNPQTSAVRTPTQTNGSNVPFKPRGREFSFEAWNAKITDLKQKVENLFNEKCGEALGLKQAVKVPFALFESFPEDFYVEGLPEGVPFRRPSTFGIPRLEKILRNKAKIKFIIKKPEMFETAIKESTSSKSPPRKINSSPNVNTTASGVEDLNIIQVTIPDDDNERLSKVEKARQLREQVNDLFSRKFGEAIGMGFPVKVPYRKITINPGCVVVDGMPPGVSFKAPSYLEISSMRRILDSAEFIKFTVIRPFPGLVINNQLVDQSESEGPVIQESAEPSQLEVPATEGKRTSSLLG

SEQ ID NO: 4218 - DNA, 4351 bp, Homo sapiens
aaaaaaaaaaaaaaaaaaaaaaaaaaaagaaaaaagaaaaaaaaaaggaggaggaggaggagggtgagagagaagctgggagagcagagaaaaggggccaccggtcgcccccccgcttccccgcacgcgctctccagccgcggccgcccgcctgccgcggtcaccccggcctctgcctctgtcccccagtgatcggatcaaggcgctgagcgaggccctgcctgcggggcggccatgcggcggtgacaggagcgcgaccgacacgcacgggcccctcgccccctctcgcctcccgtccgctcgccagctcccctcagccgaggctgctccgcggcggccgcagcccgcgcgcggcccacactcgcctcccctcggcacccccggccccggagctgcctggaggcggccgcactcggtgtaaagaactggccaagtccaaagccgaagtggcctgcattgcagtgtatgaaacagacgtgtttgtcgtcggaactgaaagaggacgtgcttttgtcaataccagaaaggattttcaaaaagattttgtaaaatattgtgttgaagaagaagaaaaagctgcagagatgcataaaatgaaatctacaacccaggcaaatcggatgagtgtagatgctgtagaaattgaaacactcagaaaaacagttgaggactatttctgcttttgctatgggaaagctttaggcaaatccacagtggtacctgtaccatatgagaagatgctgcgagaccagtcggctgtggtagtgcaggggcttccggaaggtgttgcctttaaacaccccgagaactatgatcttgcaaccctgaaatggattttggagaacaaagcagggatttcattcatcattaagagaccttttttagagccaaagaagcatgtaggtggtcgtgtgatggtaacagatgctgacaggtcaatactatctccaggtggaagttgtggccccatcaaagtgaaaactgaacccacagaagattctggcatttccctggaaatggcagctgtgacagtaaaggaagaatcagaagatcctgattattatcaatataacattcaaggaagccaccattcttcagagggcaatgaaggcacagaaatggaagtaccagcagaagattctactcaacatgtcccttcagaaacaagtgaggaccctgaagttgaggtgactattgaagatgatgattattctccaccgtctaagagaccaaaggccaatgagctaccgcagccaccagtcccggaacccgccaatgctgggaagcggaaagtgagggagttcaacttcgagaaatggaatgctcgcatcactgatctacgtaaacaagttgaagaattgtttgaaaggaaatatgctcaagccataaaagccaaaggtccggtgacgatcccgtaccctcttttccagtctcatgttgaagatctttatgtagaaggacttcctgaaggaattccttttagaaggccatctacttacggaattcctcgcctggagaggatattacttgcaaaggaaaggattcgttttgtgattaagaaacatgagcttctgaattcaacacgtgaagatttacagcttgataagccagcttcaggagtaaaggaagaatggtatgccagaatcactaaattaagaaagatggtggatcagcttttctgcaaaaaatttgcggaagccttggggagcactgaagccaaggctgtaccgtaccaaaaatttgaggcacacccgaatgatctgtacgtggaaggactgccagaaaacattcctttccgaagtccctcatggtatggaatcccaaggctggaaaaaatcattcaagtgggcaatcgaattaaatttgttattaaaagaccagaacttctgactcacagtaccactgaagttactcagccaagaacgaatacaccagtcaaagaagattggaatgtcagaattaccaagctacggaagcaagtggaagagatttttaatttgaaatttgctcaagctcttggactcaccgaggcagtaaaagtaccatatcctgtgtttgaatcaaacccggagttcttgaaaggatcgtccgcgggagtaataaaatcaagttcgttgttaaaaaacctgaactagttatttcctacttgcctcctgggatggctagtaaaataaacactaaagctttgcagtcccccaaaagaccacgaagtcctgggagtaattcaaaggttcctgaaattgaggtcaccgtggaaggccctaataacaacaatcctcaaacctcagctgttcgaaccccgacccagactaacggttctaacgttcccttcaagccacgagggagagagttttcctttgaggcctggaatgccaaaatcacggacctaaaacagaaagttgaaaatctcttcaatgagaaatgtggggaagctcttggccttaaacaagctgtgaaggtgccgttcgcgttatttgagtctttcccggaagacttttatgtggaaggcttacctgagggtgtgccattccgaagaccatcgacttttggcattccgaggctggagaagatactcagaaacaaagccaaaattaagttcatcattaaaaagcccgaaatgtttgagacggcgattaaggagagcacctcctctaagagccctcccagaaaaataaattcatcacccaatgttaatactactgcatcaggtgttgaagaccttaacatcattcaggtgacaattccagatgatgataatgaaagactctcgaaagttgaaaaagctagacagctaagagaacaagtgaatgacctctttagtcggaaatttggtgaagctattggtatgggttttcctgtgaaagttccctacaggaaaatcacaattaaccctggctgtgtggtggttgatggcatgcccccgggggtgtccttcaaagcccccagctacctggaaatcagctccatgagaaggatcttagactctgccgagtttatcaaattcacggtcattagaccatttccaggacttgtgattaataaccagctggttgatcagagtgagtcagaaggccccgtgatacaagaatcagctgaaccaagccagttggaagttccagccacagaagaaataaaagagactgatggaagctctcagatcaagcaagaaccagaccccacgtggtagacctcttccctcctaggcttaaagtatcagtggttgagaagagcttttcggacctgttactaccccaagctgtgtaatatacttgtataacagaaataccttctatacaaacctttttttctacttttagatagaaatgtctactttttcagcagttctgtgaattaaagagcagagtgactgtgggtctggaatggctggtgtacttgggaatgtactatcaggattttacagcaatgctgggaaatgacagggaaaatgacaggaatgaatctcaccagattttttatgtactcagcagagccttgagttacggtgtttattttccaatcaagtgaagatatctcctacttctcctactggaacatctcagcttctgcagtgaagaaaaattcctgtgatagttcagttctttagtttttctatttgaaaaaaaaaaatcatttaaatgatcctttgttcacggctctccttaatgactgagtgaacagttcctatctgtatatttgactaaaccttttcctaagctatctctcatggttcctatgtttttttatcataattaaaagcaaaaccatctggatcacctaacagtcagaggtcagtatctcagcgtgtgaattatagaggaaatacagagagaacctcttccacttttacttttcgtccaaataaaatgcatggtgtaccagaagttgaagatcgggttgaggattggggctagctcgatgacactaaggccccaacatcgcgggacctgctgtggcgcggattcttaggaacgctgttctagccggccccctctccaggggtcgccgtggccggcattatttcctagttcttcttgtaaccctgaggtgccagcgcggggagtgaggaggggtcagggggctaaggatgcaacctctgacgttctgcgccttcctaggagagtcttacatgtgttgagatttcacaagcaatgcgagttgtaaaataccagctctacaagaagctaggctctgtgacggcatagttttcagtagctttatcacaatattcacaatggagaattatatgacatggtagcagaaataggcccttttatgtgttgcttctattttacctcaaattgtagatatagggtaatcaataaaatccatccatgcctttcacacactaagt

SEQ ID NO: 4219 - protein, 516 aa, Homo sapiens; identical to SEQ ID NO: 4129

SEQ ID NO: 4220 - DNA, 3903 bp, Homo sapiens
aaaaaaaaaaaaaaaaaaaaaaaaaaaagaaaaaagaaaaaaaaaaggaggaggaggaggagggtgagagagaagctgggagagcagagaaaaggggccaccggtcgcccccccgcttccccgcacgcgctctccagccgcggccgcccgcctgccgcggtcaccccggcctctgcctctgtcccccagtgatcggatcaaggcgctgagcgaggccctgcctgcggggcggccatgcggcggtgacaggagcgcgaccgacacgcacgggcccctcgccccctctcgcctcccgtccgctcgccagctcccctcagccgaggctgctccgcggcggccgcagcccgcgcgcggcccacactcgcctcccctcggcacccccggccccggagctgcctggaggcggccgcactcggggatcatggcccaagttgcaatgtccaccctccccgttgaagatgaggagtcctcggagagcaggatggtggtgacattcctcatgtcagctctcgagtccatgtgtaaagaactggccaagtccaaagccgaagtggcctgcattgcagtgtatgaaacagacgtgtttgtcgtcggaactgaaagaggacgtgcttttgtcaataccagaaaggattttcaaaaagattttgtaaaatattgtgttgaagaagaagaaaaagctgcagagatgcataaaatgaaatctacaacccaggcaaatcggatgagtgtagatgctgtagaaattgaaacactcagaaaaacagttgaggactatttctgcttttgctatgggaaagctttaggcaaatccacagtggtacctgtaccatatgagaagatgctgcgagaccagtcggctgtggtagtgcaggggcttccggaaggtgttgcctttaaacaccccgagaactatgatcttgcaaccctgaaatggattttggagaacaaagcagggatttcattcatcattaagagaccttttttagagccaaagaagcatgtaggtggtcgtgtgatggtaacagatgctgacaggtcaatactatctccaggtggaagttgtggccccatcaaagtgaaaactgaacccacagaagattctggcatttccctggaaatggcagctgtgacagtaaaggaagaatcagaagatcctgattattatcaatataacattcaaggaagccaccattcttcagagggcaatgaaggcacagaaatggaagtaccagcagaagattctactcaacatgtcccttcagaaacaagtgaggaccctgaagttgaggtgactattgaagatgatgattattctccaccgtctaagagaccaaaggccaatgagctaccgcagccaccagtcccggaacccgccaatgctgggaagcggaaagtgagggagttcaacttcgagaaatggaatgctcgcatcactgatctacgtaaacaagttgaagaattgtttgaaaggaaatatgctcaagccataaaagccaaaggtccggtgacgatcccgtaccctcttttccagtctcatgttgaagatctttatgtagaaggacttcctgaaggaattccttttagaaggccatctacttacggaattcctcgcctggagaggatattacttgcaaaggaaaggattcgttttgtgattaagaaacatgagcttctgaattcaacacgtgaagatttacagcttgataagccagcttcaggagtaaaggaagaatggtatgccagaatcactaaattaagaaagatggtggatcagcttttctgcaaaaaatttgcggaagccttggggagcactgaagccaaggctgtaccgtaccaaaaatttgaggcacacccgaatgatctgtacgtggaaggactgccagaaaacattcctttccgaagtccctcatggtatggaatcccaaggctggaaaaaatcattcaagtgggcaatcgaattaaatttgttattaaaagaccagaacttctgactcacagtaccactgaagttactcagccaagaacgaatacaccagtcaaagaagattggaatgtcagaattaccaagctacggaagcaagtggaagagatttttaatttgaaatttgctcaagctcttggactcaccgaggcagtaaaagtaccatatcctgtgtttgaatcaaacccggagttcttgaaaggatcgtccgcgggagtaataaaatcaagttcgttgttaaaaaacctgaactagttatttcctacttgcctcctgggatggctagtaaaataaacactaaagctttgcagtcccccaaaagaccacgaagtcctgggagtaattcaaaggttcctgaaattgaggtcaccgtggaaggccctaataacaacaatcctcaaacctcagctgttcgaaccccgacccagactaacggttctaacgttcccttcaagccacgagggagagagttttcctttgaggcctggaatgccaaaatcacggacctaaaacagaaagttgaaaatctcttcaatgagaaatgtggggaagctcttggccttaaacaagctgtgaaggtgccgttcgcgttatttgagtctttcccggaagacttttatgtggaaggcttacctgagggtgtgccattccgaagaccatcgacttttggcattccgaggctggagaagatactcagaaacaaagccaaaattaagttcatcattaaaaagcccgaaatgtttgagacggcgattaaggagagcacctcctctaagagccctcccagaaaaataaattcatcacccaatgttaatactactgcatcaggtgttgaagaccttaacatcattcaggtgacaattccagatgatgataatgaaagactctcgaaagttgaaaaagctagacagctaagagaacaagtgaatgacctctttagtcggaaatttggtgaagctattggtatgggttttcctgtgaaagttccctacaggaaaatcacaattaaccctggctgtgtggtggttgatggcatgcccccgggggtgtccttcaaagcccccagctacctggaaatcagctccatgagaaggatcttagactctgccgagtttatcaaattcacggtcattagaccatttccaggacttgtgattaataaccagctggttgatcagagtgagtcagaaggccccgtgatacaagaatcagctgaaccaagccagttggaagttccagccacagaagaaataaaagagactgatggaagctctcagatcaagcaagaaccagaccccacgtggtagacctcttccctcctaggcaaaaccatctggatcacctaacagtcagaggtcagtatctcagcgtgtgaattatagaggaaatacagagagaacctcttccacttttacttttcgtccaaataaaatgcatggtgtaccagaagttgaagatcgggttgaggattggggctagctcgatgacactaaggccccaacatcgcgggacctgctgtggcgcggattcttaggaacgctgttctagccggccccctctccaggggtcgccgtggccggcattatttcctagttcttcttgtaaccctgaggtgccagcgcggggagtgaggaggggtcagggggctaaggatgcaacctctgacgttctgcgccttcctaggagagtcttacatgtgttgagatttcacaagcaatgcgagttgtaaaataccagctctacaagaagctaggctctgtgacggcatagttttcagtagctttatcacaatattcacaatggagaattatatgacatggtagcagaaataggcccttttatgtgttgcttctattttacctcaaattgtagatatagggtaatcaataaaatccatccatgcctttcacacactaagt

SEQ ID NO: 4221 - protein, 605 aa, Homo sapiens
MAQVAMSTLPVEDEESSESRMVVTFLMSALESMCKELAKSKAEVACIAVYETDVFVVGTERGRAFVNTRKDFQKDFVKYCVEEEEKAAEMHKMKSTTQANRMSVDAVEIETLRKTVEDYFCFCYGKALGKSTVVPVPYEKMLRDQSAVVVQGLPEGVAFKHPENYDLATLKWILENKAGISFIIKRPFLEPKKHVGGRVMVTDADRSILSPGGSCGPIKVKTEPTEDSGISLEMAAVTVKEESEDPDYYQYNIQGSHHSSEGNEGTEMEVPAEDSTQHVPSETSEDPEVEVTIEDDDYSPPSKRPKANELPQPPVPEPANAGKRKVREFNFEKWNARITDLRKQVEELFERKYAQAIKAKGPVTIPYPLFQSHVEDLYVEGLPEGIPFRRPSTYGIPRLERILLAKERIRFVIKKHELLNSTREDLQLDKPASGVKEEWYARITKLRKMVDQLFCKKFAEALGSTEAKAVPYQKFEAHPNDLYVEGLPENIPFRSPSWYGIPRLEKIIQVGNRIKFVIKRPELLTHSTTEVTQPRTNTPVKEDWNVRITKLRKQVEEIFNLKFAQALGLTEAVKVPYPVFESNPEFLKGSSAGVIKSSSLLKNLN

SEQ ID NO: 4222 - DNA, 4163 bp, Homo sapiens
aaaaaaaaaaaaaaaaaaaaaaaaaaaagaaaaaagaaaaaaaaaaggaggaggaggaggagggtgagagagaagctgggagagcagagaaaaggggccaccggtcgcccccccgcttccccgcacgcgctctccagccgcggccgcccgcctgccgcggtcaccccggcctctgcctctgtcccccagtgatcggatcaaggcgctgagcgaggccctgcctgcggggcggccatgcggcggtgacaggagcgcgaccgacacgcacgggcccctcgccccctctcgcctcccgtccgctcgccagctcccctcagccgaggctgctccgcggcggccgcagcccgcgcgcggcccacactcgcctcccctcggcacccccggccccggagctgcctggaggcggccgcactcggggatcatggcccaagttgcaatgtccaccctccccgttgaagatgaggagtcctcggagagcaggatggtggtgacattcctcatgtcagctctcgagtccatgtgtaaagaactggccaagtccaaagccgaagtggcctgcattgcagtgtatgaaacagacgtgtttgtcgtcggaactgaaagaggacgtgcttttgtcaataccagaaaggattttcaaaaagattttgtaaaatattgtgttgaagaagaagaaaaagctgcagagatgcataaaatgaaatctacaacccaggcaaatcggatgagtgtagatgctgtagaaattgaaacactcagaaaaacagttgaggactatttctgcttttgctatgggaaagctttaggcaaatccacagtggtacctgtaccatatgagaagatgctgcgagaccagtcggctgtggtagtgcaggggcttccggaaggtgttgcctttaaacaccccgagaactatgatcttgcaaccctgaaatggattttggagaacaaagcagggatttcattcatcattaagagaccttttttagagccaaagaagcatgtaggtggtcgtgtgatggtaacagatgctgacaggtcaatactatctccaggtggaagttgtggccccatcaaagtgaaaactgaacccacagaagattctggcatttccctggaaatggcagctgtgacagtaaaggaagaatcagaagatcctgattattatcaatataacattcaagcaggcccttctgaaactgatgatgttgatgaaaaacagcccctatcgaagcctttgcaaggaagccaccattcttcagagggcaatgaaggcacagaaatggaagtaccagcagaagatgatgattattctccaccgtctaagagaccaaaggccaatgagctaccgcagccaccagtcccggaacccgccaatgctgggaagcggaaagtgagggagttcaacttcgagaaatggaatgctcgcatcactgatctacgtaaacaagttgaagaattgtttgaaaggaaatatgctcaagccataaaagccaaaggtccggtgacgatcccgtaccctcttttccagtctcatgttgaagatctttatgtagaaggacttcctgaaggaattccttttagaaggccatctacttacggaattcctcgcctggagaggatattacttgcaaaggaaaggattcgttttgtgattaagaaacatgagcttctgaattcaacacgtgaagatttacagcttgataagccagcttcaggagtaaaggaagaatggtatgccagaatcactaaattaagaaagatggtggatcagcttttctgcaaaaaatttgcggaagccttggggagcactgaagccaaggctgtaccgtaccaaaaatttgaggcacacccgaatgatctgtacgtggaaggactgccagaaaacattcctttccgaagtccctcatggtatggaatcccaaggctggaaaaaatcattcaagtgggcaatcgaattaaatttgttattaaaagaccagaacttctgactcacagtaccactgaagttactcagccaagaacgaatacaccagctcaagctcttggactcaccgaggcagtaaaagtaccatatcctgtgtttgaatcaaacccggagttcttgtatgtggaaggcttgccagaggggattcccttccgaagccctacctggtttggaattccacgacttgaaaggatcgtccgcgggagtaataaaatcaagttcgttgttaaaaaacctgaactagttatttcctacttgcctcctgggatggctagtaaaataaacactaaagctttgcagtcccccaaaagaccacgaagtcctgggagtaattcaaaggttcctgaaattgaggtcaccgtggaaggccctaataacaacaatcctcaaacctcagctgttcgaaccccgacccagactaacggttctaacgttcccttcaagccacgagggagagagttttcctttgaggcctggaatgccaaaatcacggacctaaaacagaaagttgaaaatctcttcaatgagaaatgtggggaagctcttggccttaaacaagctgtgaaggtgccgttcgcgttatttgagtctttcccggaagacttttatgtggaaggcttacctgagggtgtgccattccgaagaccatcgacttttggcattccgaggctggagaagatactcagaaacaaagccaaaattaagttcatcattaaaaagcccgaaatgtttgagacggcgattaaggagagcacctcctctaagagccctcccagaaaaataaattcatcacccaatgttaatactactgcatcaggtgttgaagaccttaacatcattcaggtgacaattccagatgatgataatgaaagactctcgaaagttgaaaaagctagacagctaagagaacaagtgaatgacctctttagtcggaaatttggtgaagctattggtatgggttttcctgtgaaagttccctacaggaaaatcacaattaaccctggctgtgtggtggttgatggcatgcccccgggggtgtccttcaaagcccccagctacctggaaatcagctccatgagaaggatcttagactctgccgagtttatcaaattcacggtcattagaccatttccaggacttgtgattaataaccagctggttgatcagagtgagtcagaaggccccgtgatacaagaatcagctgaaccaagccagttggaagttccagccacagaagaaataaaagagactgatggaagctctcagatcaagcaagaaccagaccccacgtggtagacctcttccctcctaggagccttgagttacggtgtttattttccaatcaagtgaagatatctcctacttctcctactggaacatctcagcttctgcagtgaagaaaaattcctgtgatagttcagttctttagtttttctatttgaaaaaaaaaaatcatttaaatgatcctttgttcacggctctccttaatgactgagtgaacagttcctatctgtatatttgactaaaccttttcctaagctatctctcatggttcctatgtttttttatcataattaaaagcaaaaccatctggatcacctaacagtcagaggtcagtatctcagcgtgtgaattatagaggaaatacagagagaacctcttccacttttacttttcgtccaaataaaatgcatggtgtaccagaagttgaagatcgggttgaggattggggctagctcgatgacactaaggccccaacatcgcgggacctgctgtggcgcggattcttaggaacgctgttctagccggccccctctccaggggtcgccgtggccggcattatttcctagttcttcttgtaaccctgaggtgccagcgcggggagtgaggaggggtcagggggctaaggatgcaacctctgacgttctgcgccttcctaggagagtcttacatgtgttgagatttcacaagcaatgcgagttgtaaaataccagctctacaagaagctaggctctgtgacggcatagttttcagtagctttatcacaatattcacaatggagaattatatgacatggtagcagaaataggcccttttatgtgttgcttctattttacctcaaattgtagatatagggtaatcaataaaatccatccatgcctttcacacactaagt

SEQ ID NO: 4223 - protein, 953 aa, Homo sapiens; identical to SEQ ID NO: 4179

SEQ ID NO: 4224 - DNA, 4992 bp, Homo sapiens
aaaaaaaaaaaaaaaaaaaaaaaaaaaagaaaaaagaaaaaaaaaaggaggaggaggaggagggtgagagagaagctgggagagcagagaaaaggggccaccggtcgcccccccgcttccccgcacgcgctctccagccgcggccgcccgcctgccgcggtcaccccggcctctgcctctgtcccccagtgatcggatcaaggcgctgagcgaggccctgcctgcggggcggccatgcggcggtgacaggagcgcgaccgacacgcacgggcccctcgccccctctcgcctcccgtccgctcgccagctcccctcagccgaggctgctccgcggcggccgcagcccgcgcgcggcccacactcgcctcccctcggcacccccggccccggagctgcctggaggcggccgcactcggtgtaaagaactggccaagtccaaagccgaagtggcctgcattgcagtgtatgaaacagacgtgtttgtcgtcggaactgaaagaggacgtgcttttgtcaataccagaaaggattttcaaaaagattttgtaaaatattgtgttgaagaagaagaaaaagctgcagagatgcataaaatgaaatctacaacccaggcaaatcggatgagtgtagatgctgtagaaattgaaacactcagaaaaacagttgaggactatttctgcttttgctatgggaaagctttaggcaaatccacagtggtacctgtaccatatgagaagatgctgcgagaccagtcggctgtggtagtgcaggggcttccggaaggtgttgcctttaaacaccccgagaactatgatcttgcaaccctgaaatggattttggagaacaaagcagggatttcattcatcattaagagaccttttttagagccaaagaagcatgtaggtggtcgtgtgatggtaacagatgctgacaggtcaatactatctccaggtggaagttgtggccccatcaaagtgaaaactgaacccacagaagattctggcatttccctggaaatggcagctgtgacagtaaaggaagaatcagaagatcctgattattatcaatataacattcaaggaagccaccattcttcagagggcaatgaaggcacagaaatggaagtaccagcagaagattctactcaacatgtcccttcagaaacaagtgaggaccctgaagttgaggtgactattgaagatgatgattattctccaccgtctaagagaccaaaggccaatgagctaccgcagccaccagtcccggaacccgccaatgctgggaagcggaaagtgagggagttcaacttcgagaaatggaatgctcgcatcactgatctacgtaaacaagttgaagaattgtttgaaaggaaatatgctcaagccataaaagccaaaggtccggtgacgatcccgtaccctcttttccagtctcatgttgaagatctttatgtagaaggacttcctgaaggaattccttttagaaggccatctacttacggaattcctcgcctggagaggatattacttgcaaaggaaaggattcgttttgtgattaagaaacatgagcttctgaattcaacacgtgaagatttacagcttgataagccagcttcaggagtaaaggaagaatggtatgccagaatcactaaattaagaaagatggtggatcagcttttctgcaaaaaatttgcggaagccttggggagcactgaagccaaggctgtaccgtaccaaaaatttgaggcacacccgaatgatctgtacgtggaaggactgccagaaaacattcctttccgaagtccctcatggtatggaatcccaaggctggaaaaaatcattcaagtgggcaatcgaattaaatttgttattaaaagaccagaacttctgactcacagtaccactgaagttactcagccaagaacgaatacaccagtcaaagaagattggaatgtcagaattaccaagctacggaagcaagtggaagagatttttaatttgaaatttgctcaagctcttggactcaccgaggcagtaaaagtaccatatcctgtgtttgaatcaaacccggagttcttgaaaggatcgtccgcgggagtaataaaatcaagttcgttgttaaaaaacctgaactagttatttcctacttgcctcctgggatggctagtaaaataaacactaaagctttgcagtcccccaaaagaccacgaagtcctgggagtaattcaaaggttcctgaaattgaggtcaccgtggaaggccctaataacaacaatcctcaaacctcagctgttcgaaccccgacccagactaacggttctaacgttcccttcaagccacgagggagagagttttcctttgaggcctggaatgccaaaatcacggacctaaaacagaaagttgaaaatctcttcaatgagaaatgtggggaagctcttggccttaaacaagctgtgaaggtgccgttcgcgttatttgagtctttcccggaagacttttatgtggaaggcttacctgagggtgtgccattccgaagaccatcgacttttggcattccgaggctggagaagatactcagaaacaaagccaaaattaagttcatcattaaaaagcccgaaatgtttgagacggcgattaaggagagcacctcctctaagagccctcccagaaaaataaattcatcacccaatgttaatactactgcatcaggtgttgaagaccttaacatcattcaggtgacaattccagatgatgataatgaaagactctcgaaagttgaaaaagctagacagctaagagaacaagtgaatgacctctttagtcggaaatttggtgaagctattggtatgggttttcctgtgaaagttccctacaggaaaatcacaattaaccctggctgtgtggtggttgatggcatgcccccgggggtgtccttcaaagcccccagctacctggaaatcagctccatgagaaggatcttagactctgccgagtttatcaaattcacggtcattagaccatttccaggacttgtgattaataaccagctggttgatcagagtgagtcagaaggccccgtgatacaagaatcagctgaaccaagccagttggaagttccagccacagaaggtaaaaggacctcttccctcctagggtaaatcagcttctgtgtcagggatgctgtgtggtgtccatctgaaccccctgcatacgcgtagctaatgtgatctccccactttcacataagatggtggccctgccttcagggaatgtgggagccaggtgggagccttcccggatatttaagctagaagattctacagggagattctccttggatcaatatatgtctctcagtcaaagatgtaaaagcacttttgccttaaaaagaatgttctgtttctaaatagagtcaacgttgtcctcctcattggaattcactatgagtcagaatcattagactgacttttttttttccatagtaatagtattttgcagagtctcacagagctgcagatcttttgttcatcttgcagagttaacaagtctgatcctgttagtccagatttcttaaatttggccaagttataataggagcagtagcttgagacccgaagtcaggaaactttgacaatggatttttttttttaatccagagacttgtactggaatttgccttaccctgtcagctcatggacttaaggtttcatcccgctttatgagtgcttctgaatccaagtcattgttacctgaatttgcaaattaagttgtgatattcgtgactgttaaattcctgtaattagattaacctctttgcttgcttgtttgttttctctcctattttagcttaaagtatcagtggttgagaagagcttttcggacctgttactaccccaagctgtgtaatatacttgtataacagaaataccttctatacaaacctttttttctacttttagatagaaatgtctactttttcagcagttctgtgaattaaagagcagagtgactgtgggtctggaatggctggtgtacttgggaatgtactatcaggattttacagcaatgctgggaaatgacagggaaaatgacaggaatgaatctcaccagattttttatgtactcagcagagccttgagttacggtgtttattttccaatcaagtgaagatatctcctacttctcctactggaacatctcagcttctgcagtgaagaaaaattcctgtgatagttcagttctttagtttttctatttgaaaaaaaaaaatcatttaaatgatcctttgttcacggctctccttaatgactgagtgaacagttcctatctgtatatttgactaaaccttttcctaagctatctctcatggttcctatgtttttttatcataattaaaagcaaaaccatctggatcacctaacagtcagaggtcagtatctcagcgtgtgaattatagaggaaatacagagagaacctcttccacttttacttttcgtccaaataaaatgcatggtgtaccagaagttgaagatcgggttgaggattggggctagctcgatgacactaaggccccaacatcgcgggacctgctgtggcgcggattcttaggaacgctgttctagccggccccctctccaggggtcgccgtggccggcattatttcctagttcttcttgtaaccctgaggtgccagcgcggggagtgaggaggggtcagggggctaaggatgcaacctctgacgttctgcgccttcctaggagagtcttacatgtgttgagatttcacaagcaatgcgagttgtaaaataccagctctacaagaagctaggctctgtgacggcatagttttcagtagctttatcacaatattcacaatggagaattatatgacatggtagcagaaataggcccttttatgtgttgcttctattttacctcaaattgtagatatagggtaatcaataaaatccatccatgcctttcacacactaagt

SEQ ID NO: 4225 - protein, 516 aa, Homo sapiens; identical to SEQ ID NO: 4129

SEQ ID NO: 4226 - DNA, 4984 bp, Homo sapiens
aaaaaaaaaaaaaaaaaaaaaaaaaaaagaaaaaagaaaaaaaaaaggaggaggaggaggagggtgagagagaagctgggagagcagagaaaaggggccaccggtcgcccccccgcttccccgcacgcgctctccagccgcggccgcccgcctgccgcggtcaccccggcctctgcctctgtcccccagtgatcggatcaaggcgctgagcgaggccctgcctgcggggcggccatgcggcggtgacaggagcgcgaccgacacgcacgggcccctcgccccctctcgcctcccgtccgctcgccagctcccctcagccgaggctgctccgcggcggccgcagcccgcgcgcggcccacactcgcctccccgttgaagatgaggagtcctcggagagcaggatggtggtgacattcctcatgtcagctctcgagtccatgtgtaaagaactggccaagtccaaagccgaagtggcctgcattgcagtgtatgaaacagacgtgtttgtcgtcggaactgaaagaggacgtgcttttgtcaataccagaaaggattttcaaaaagattttgtaaaatattgtgttgaagaagaagaaaaagctgcagagatgcataaaatgaaatctacaacccaggcaaatcggatgagtgtagatgctgtagaaattgaaacactcagaaaaacagttgaggactatttctgcttttgctatgggaaagctttaggcaaatccacagtggtacctgtaccatatgagaagatgctgcgagaccagtcggctgtggtagtgcaggggcttccggaaggtgttgcctttaaacaccccgagaactatgatcttgcaaccctgaaatggattttggagaacaaagcagggatttcattcatcattaagagaccttttttagagccaaagaagcatgtaggtggtcgtgtgatggtaacagatgctgacaggtcaatactatctccaggtggaagttgtggccccatcaaagtgaaaactgaacccacagaagattctggaagccaccattcttcagagggcaatgaaggcacagaaatggaagtaccagcagaagattctactcaacatgtcccttcagaaacaagtgaggaccctgaagttgaggtgactattgaagatgatgattattctccaccgtctaagagaccaaaggccaatgagctaccgcagccaccagtcccggaacccgccaatgctgggaagcggaaagtgagggagttcaacttcgagaaatggaatgctcgcatcactgatctacgtaaacaagttgaagaattgtttgaaaggaaatatgctcaagccataaaagccaaaggtccggtgacgatcccgtaccctcttttccagtctcatgttgaagatctttatgtagaaggacttcctgaaggaattccttttagaaggccatctacttacggaattcctcgcctggagaggatattacttgcaaaggaaaggattcgttttgtgattaagaaacatgagcttctgaattcaacacgtgaagatttacagcttgataagccagcttcaggagtaaaggaagaatggtatgccagaatcactaaattaagaaagatggtggatcagcttttctgcaaaaaatttgcggaagccttggggagcactgaagccaaggctgtaccgtaccaaaaatttgaggcacacccgaatgatctgtacgtggaaggactgccagaaaacattcctttccgaagtccctcatggtatggaatcccaaggctggaaaaaatcattcaagtgggcaatcgaattaaatttgttattaaaagaccagaacttctgactcacagtaccactgaagttactcagccaagaacgaatacaccagctcaagctcttggactcaccgaggcagtaaaagtaccatatcctgtgtttgaatcaaacccggagttcttgtatgtggaaggcttgccagaggggattcccttccgaagccctacctggtttggaattccacgacttgaaaggatcgtccgcgggagtaataaaatcaagttcgttgttaaaaaacctgaactagttatttcctacttgcctcctgggatggctagtaaaataaacactaaagctttgcagtcccccaaaagaccacgaagtcctgggagtaattcaaaggttcctgaaattgaggtcaccgtggaaggccctaataacaacaatcctcaaacctcagctgttcgaaccccgacccagactaacggttctaacgttcccttcaagccacgagggagagagttttcctttgaggcctggaatgccaaaatcacggacctaaaacagaaagttgaaaatctcttcaatgagaaatgtggggaagctcttggccttaaacaagctgtgaaggtgccgttcgcgttatttgagtctttcccggaagacttttatgtggaaggcttacctgagggtgtgccattccgaagaccatcgacttttggcattccgaggctggagaagatactcagaaacaaagccaaaattaagttcatcattaaaaagcccgaaatgtttgagacggcgattaaggagagcacctcctctaagagccctcccagaaaaataaattcatcacccaatgttaatactactgcatcaggtgttgaagaccttaacatcattcaggtgacaattccagatgatgataatgaaagactctcgaaagttgaaaaagctagacagctaagagaacaagtgaatgacctctttagtcggaaatttggtgaagctattggtatgggttttcctgtgaaagttccctacaggaaaatcacaattaaccctggctgtgtggtggttgatggcatgcccccgggggtgtccttcaaagcccccagctacctggaaatcagctccatgagaaggatcttagactctgccgagtttatcaaattcacggtcattagaccatttccaggacttgtgattaataaccagctggttgatcagagtgagtcagaaggccccgtgatacaagaatcagctgaaccaagccagttggaagttccagccacagaagaaataaaagagactgatggaagctctcagatcaagcaagaaccagaccccacgtggtagacctcttccctcctagggtaaatcagcttctgtgtcagggatgctgtgtggtgtccatctgaaccccctgcatacgcgtagctaatgtgatctccccactttcacataagatggtggccctgccttcagggaatgtgggagccaggtgggagccttcccggatatttaagctagaagattctacagggagattctccttggatcaatatatgtctctcagtcaaagatgtaaaagcacttttgccttaaaaagaatgttctgtttctaaatagagtcaacgttgtcctcctcattggaattcactatgagtcagaatcattagactgacttttttttttccatagtaatagtattttgcagagtctcacagagctgcagatcttttgttcatcttgcagagttaacaagtctgatcctgttagtccagatttcttaaatttggccaagttataataggagcagtagcttgagacccgaagtcaggaaactttgacaatggatttttttttttaatccagagacttgtactggaatttgccttaccctgtcagctcatggacttaaggtttcatcccgctttatgagtgcttctgaatccaagtcattgttacctgaatttgcaaattaagttgtgatattcgtgactgttaaattcctgtaattagattaacctctttgcttgcttgtttgttttctctcctattttagcttaaagtatcagtggttgagaagagcttttcggacctgttactaccccaagctgtgtaatatacttgtataacagaaataccttctatacaaacctttttttctacttttagatagaaatgtctactttttcagcagttctgtgaattaaagagcagagtgactgtgggtctggaatggctggtgtacttgggaatgtactatcaggattttacagcaatgctgggaaatgacagggaaaatgacaggaatgaatctcaccagattttttatgtactcagcagagccttgagttacggtgtttattttccaatcaagtgaagatatctcctacttctcctactggaacatctcagcttctgcagtgaagaaaaattcctgtgatagttcagttctttagtttttctatttgaaaaaaaaaaatcatttaaatgatcctttgttcacggctctccttaatgactgagtgaacagttcctatctgtatatttgactaaaccttttcctaagctatctctcatggttcctatgtttttttatcataattaaaagcaaaaccatctggatcacctaacagtcagaggtcagtatctcagcgtgtgaattatagaggaaatacagagagaacctcttccacttttacttttcgtccaaataaaatgcatggtgtaccagaagttgaagatcgggttgaggattggggctagctcgatgacactaaggccccaacatcgcgggacctgctgtggcgcggattcttaggaacgctgttctagccggccccctctccaggggtcgccgtggccggcattatttcctagttcttcttgtaaccctgaggtgccagcgcggggagtgaggaggggtcagggggctaaggatgcaacctctgacgttctgcgccttcctaggagagtcttacatgtgttgagatttcacaagcaatgcgagttgtaaaataccagctctacaagaagctaggctctgtgacggcatagttttcagtagctttatcacaatattcacaatggagaattatatgacatggtagcagaaataggcccttttatgtgttgcttctattttacctcaaattgtagatatagggtaatcaataaaatccatccatgcctttcacacactaagt

SEQ ID NO: 4227 - protein, 908 aa, Homo sapiens
MVVTFLMSALESMCKELAKSKAEVACIAVYETDVFVVGTERGRAFVNTRKDFQKDFVKYCVEEEEKAAEMHKMKSTTQANRMSVDAVEIETLRKTVEDYFCFCYGKALGKSTVVPVPYEKMLRDQSAVVVQGLPEGVAFKHPENYDLATLKWILENKAGISFIIKRPFLEPKKHVGGRVMVTDADRSILSPGGSCGPIKVKTEPTEDSGSHHSSEGNEGTEMEVPAEDSTQHVPSETSEDPEVEVTIEDDDYSPPSKRPKANELPQPPVPEPANAGKRKVREFNFEKWNARITDLRKQVEELFERKYAQAIKAKGPVTIPYPLFQSHVEDLYVEGLPEGIPFRRPSTYGIPRLERILLAKERIRFVIKKHELLNSTREDLQLDKPASGVKEEWYARITKLRKMVDQLFCKKFAEALGSTEAKAVPYQKFEAHPNDLYVEGLPENIPFRSPSWYGIPRLEKIIQVGNRIKFVIKRPELLTHSTTEVTQPRTNTPAQALGLTEAVKVPYPVFESNPEFLYVEGLPEGIPFRSPTWFGIPRLERIVRGSNKIKFVVKKPELVISYLPPGMASKINTKALQSPKRPRSPGSNSKVPEIEVTVEGPNNNNPQTSAVRTPTQTNGSNVPFKPRGREFSFEAWNAKITDLKQKVENLFNEKCGEALGLKQAVKVPFALFESFPEDFYVEGLPEGVPFRRPSTFGIPRLEKILRNKAKIKFIIKKPEMFETAIKESTSSKSPPRKINSSPNVNTTASGVEDLNIIQVTIPDDDNERLSKVEKARQLREQVNDLFSRKFGEAIGMGFPVKVPYRKITINPGCVVVDGMPPGVSFKAPSYLEISSMRRILDSAEFIKFTVIRPFPGLVINNQLVDQSESEGPVIQESAEPSQLEVPATEEIKETDGSSQIKQEPDPTW

SEQ ID NO: 4228 - DNA, 5160 bp, Homo sapiens
aaaaaaaaaaaaaaaaaaaaaaaaaaaagaaaaaagaaaaaaaaaaggaggaggaggaggagggtgagagagaagctgggagagcagagaaaaggggccaccggtcgcccccccgcttccccgcacgcgctctccagccgcggccgcccgcctgccgcggtcaccccggcctctgcctctgtcccccagtgatcggatcaaggcgctgagcgaggccctgcctgcggggcggccatgcggcggtgacaggagcgcgaccgacacgcacgggcccctcgccccctctcgcctcccgtccgctcgccagctcccctcagccgaggctgctccgcggcggccgcagcccgcgcgcggcccacactcgcctcccctcggcacccccggccccggagctgcctggaggcggccgcactcggggatcatggcccaagttgcaatgtccaccctccccgttgaagatgaggagtcctcggagagcaggatggtggtgacattcctcatgtcagctctcgagtccatgtgtaaagaactggccaagtccaaagccgaagtggcctgcattgcagtgtatgaaacagacgtgtttgtcgtcggaactgaaagaggacgtgcttttgtcaataccagaaaggattttcaaaaagattttgtaaaatattgtgttgaagaagaagaaaaagctgcagagatgcataaaatgaaatctacaacccaggcaaatcggatgagtgtagatgctgtagaaattgaaacactcagaaaaacagttgaggactatttctgcttttgctatgggaaagctttaggcaaatccacagtggtacctgtaccatatgagaagatgctgcgagaccagtcggctgtggtagtgcaggggcttccggaaggtgttgcctttaaacaccccgagaactatgatcttgcaaccctgaaatggattttggagaacaaagcagggatttcattcatcattaagagaccttttttagagccaaagaagcatgtaggtggtcgtgtgatggtaacagatgctgacaggtcaatactatctccaggtggaagttgtggccccatcaaagtgaaaactgaacccacagaagattctggcatttccctggaaatggcagctgtgacagtaaaggaagaatcagaagatcctgattattatcaatataacattcaagcaggcccttctgaaactgatgatgttgatgaaaaacagcccctatcgaagcctttgcaaggaagccaccattcttcagagggcaatgaaggcacagaaatggaagtaccagcagaagatgatgattattctccaccgtctaagagaccaaaggccaatgagctaccgcagccaccagtcccggaacccgccaatgctgggaagcggaaagtgagggagttcaacttcgagaaatggaatgctcgcatcactgatctacgtaaacaagttgaagaattgtttgaaaggaaatatgctcaagccataaaagccaaaggtccggtgacgatcccgtaccctcttttccagtctcatgttgaagatctttatgtagaaggacttcctgaaggaattccttttagaaggccatctacttacggaattcctcgcctggagaggatattacttgcaaaggaaaggattcgttttgtgattaagaaacatgagcttctgaattcaacacgtgaagatttacagcttgataagccagcttcaggagtaaaggaagaatggtatgccagaatcactaaattaagaaagatggtggatcagcttttctgcaaaaaatttgcggaagccttggggagcactgaagccaaggctgtaccgtaccaaaaatttgaggcacacccgaatgatctgtacgtggaaggactgccagaaaacattcctttccgaagtccctcatggtatggaatcccaaggctggaaaaaatcattcaagtgggcaatcgaattaaatttgttattaaaagaccagaacttctgactcacagtaccactgaagttactcagccaagaacgaatacaccagtcaaagaagattggaatgtcagaattaccaagctacggaagcaagtggaagagatttttaatttgaaatttgctcaagctcttggactcaccgaggcagtaaaagtaccatatcctgtgtttgaatcaaacccggagttcttgtatgtggaaggcttgccagaggggattcccttccgaagccctacctggtttggaattccacgacttgaaaggatcgtccgcgggagtaataaaatcaagttcgttgttaaaaaacctgaactagttatttcctacttgcctcctgggatggctagtaaaataaacactaaagctttgcagtcccccaaaagaccacgaagtcctgggagtaattcaaaggttcctgaaattgaggtcaccgtggaaggccctaataacaacaatcctcaaacctcagctgttcgaaccccgacccagactaacggttctaacgttcccttcaagccacgagggagagagttttcctttgaggcctggaatgccaaaatcacggacctaaaacagaaagttgaaaatctcttcaatgagaaatgtggggaagctcttggccttaaacaagctgtgaaggtgccgttcgcgttatttgagtctttcccggaagacttttatgtggaaggcttacctgagggtgtgccattccgaagaccatcgacttttggcattccgaggctggagaagatactcagaaacaaagccaaaattaagttcatcattaaaaagcccgaaatgtttgagacggcgattaaggagagcacctcctctaagagccctcccagaaaaataaattcatcacccaatgttaatactactgcatcaggtgttgaagaccttaacatcattcaggtgacaattccagatgatgataatgaaagactctcgaaagttgaaaaagctagacagctaagagaacaagtgaatgacctctttagtcggaaatttggtgaagctattggtatgggttttcctgtgaaagttccctacaggaaaatcacaattaaccctggctgtgtggtggttgatggcatgcccccgggggtgtccttcaaagcccccagctacctggaaatcagctccatgagaaggatcttagactctgccgagtttatcaaattcacggtcattagaccatttccaggacttgtgattaataaccagctggttgatcagagtgagtcagaaggccccgtgatacaagaatcagctgaaccaagccagttggaagttccagccacagaaggtaaaaggacctcttccctcctagggtaaatcagcttctgtgtcagggatgctgtgtggtgtccatctgaaccccctgcatacgcgtagctaatgtgatctccccactttcacataagatggtggccctgccttcagggaatgtgggagccaggtgggagccttcccggatatttaagctagaagattctacagggagattctccttggatcaatatatgtctctcagtcaaagatgtaaaagcacttttgccttaaaaagaatgttctgtttctaaatagagtcaacgttgtcctcctcattggaattcactatgagtcagaatcattagactgacttttttttttccatagtaatagtattttgcagagtctcacagagctgcagatcttttgttcatcttgcagagttaacaagtctgatcctgttagtccagatttcttaaatttggccaagttataataggagcagtagcttgagacccgaagtcaggaaactttgacaatggatttttttttttaatccagagacttgtactggaatttgccttaccctgtcagctcatggacttaaggtttcatcccgctttatgagtgcttctgaatccaagtcattgttacctgaatttgcaaattaagttgtgatattcgtgactgttaaattcctgtaattagattaacctctttgcttgcttgtttgttttctctcctattttagcttaaagtatcagtggttgagaagagcttttcggacctgttactaccccaagctgtgtaatatacttgtataacagaaataccttctatacaaacctttttttctacttttagatagaaatgtctactttttcagcagttctgtgaattaaagagcagagtgactgtgggtctggaatggctggtgtacttgggaatgtactatcaggattttacagcaatgctgggaaatgacagggaaaatgacaggaatgaatctcaccagattttttatgtactcagcagagccttgagttacggtgtttattttccaatcaagtgaagatatctcctacttctcctactggaacatctcagcttctgcagtgaagaaaaattcctgtgatagttcagttctttagtttttctatttgaaaaaaaaaaatcatttaaatgatcctttgttcacggctctccttaatgactgagtgaacagttcctatctgtatatttgactaaaccttttcctaagctatctctcatggttcctatgtttttttatcataattaaaagcaaaaccatctggatcacctaacagtcagaggtcagtatctcagcgtgtgaattatagaggaaatacagagagaacctcttccacttttacttttcgtccaaataaaatgcatggtgtaccagaagttgaagatcgggttgaggattggggctagctcgatgacactaaggccccaacatcgcgggacctgctgtggcgcggattcttaggaacgctgttctagccggccccctctccaggggtcgccgtggccggcattatttcctagttcttcttgtaaccctgaggtgccagcgcggggagtgaggaggggtcagggggctaaggatgcaacctctgacgttctgcgccttcctaggagagtcttacatgtgttgagatttcacaagcaatgcgagttgtaaaataccagctctacaagaagctaggctctgtgacggcatagttttcagtagctttatcacaatattcacaatggagaattatatgacatggtagcagaaataggcccttttatgtgttgcttctattttacctcaaattgtagatatagggtaatcaataaaatccatccatgcctttcacacactaagt

SEQ ID NO: 4229 - protein, 967 aa, Homo sapiens
MAQVAMSTLPVEDEESSESRMVVTFLMSALESMCKELAKSKAEVACIAVYETDVFVVGTERGRAFVNTRKDFQKDFVKYCVEEEEKAAEMHKMKSTTQANRMSVDAVEIETLRKTVEDYFCFCYGKALGKSTVVPVPYEKMLRDQSAVVVQGLPEGVAFKHPENYDLATLKWILENKAGISFIIKRPFLEPKKHVGGRVMVTDADRSILSPGGSCGPIKVKTEPTEDSGISLEMAAVTVKEESEDPDYYQYNIQAGPSETDDVDEKQPLSKPLQGSHHSSEGNEGTEMEVPAEDDDYSPPSKRPKANELPQPPVPEPANAGKRKVREFNFEKWNARITDLRKQVEELFERKYAQAIKAKGPVTIPYPLFQSHVEDLYVEGLPEGIPFRRPSTYGIPRLERILLAKERIRFVIKKHELLNSTREDLQLDKPASGVKEEWYARITKLRKMVDQLFCKKFAEALGSTEAKAVPYQKFEAHPNDLYVEGLPENIPFRSPSWYGIPRLEKIIQVGNRIKFVIKRPELLTHSTTEVTQPRTNTPVKEDWNVRITKLRKQVEEIFNLKFAQALGLTEAVKVPYPVFESNPEFLYVEGLPEGIPFRSPTWFGIPRLERIVRGSNKIKFVVKKPELVISYLPPGMASKINTKALQSPKRPRSPGSNSKVPEIEVTVEGPNNNNPQTSAVRTPTQTNGSNVPFKPRGREFSFEAWNAKITDLKQKVENLFNEKCGEALGLKQAVKVPFALFESFPEDFYVEGLPEGVPFRRPSTFGIPRLEKILRNKAKIKFIIKKPEMFETAIKESTSSKSPPRKINSSPNVNTTASGVEDLNIIQVTIPDDDNERLSKVEKARQLREQVNDLFSRKFGEAIGMGFPVKVPYRKITINPGCVVVDGMPPGVSFKAPSYLEISSMRRILDSAEFIKFTVIRPFPGLVINNQLVDQSESEGPVIQESAEPSQLEVPATEGKRTSSLLG

SEQ ID NO: 4230 - DNA, 5132 bp, Homo sapiens
aaaaaaaaaaaaaaaaaaaaaaaaaaaagaaaaaagaaaaaaaaaaggaggaggaggaggagggtgagagagaagctgggagagcagagaaaaggggccaccggtcgcccccccgcttccccgcacgcgctctccagccgcggccgcccgcctgccgcggtcaccccggcctctgcctctgtcccccagtgatcggatcaaggcgctgagcgaggccctgcctgcggggcggccatgcggcggtgacaggagcgcgaccgacacgcacgggcccctcgccccctctcgcctcccgtccgctcgccagctcccctcagccgaggctgctccgcggcggccgcagcccgcgcgcggcccacactcgcctccccgttgaagatgaggagtcctcggagagcaggatggtggtgacattcctcatgtcagctctcgagtccatgtgtaaagaactggccaagtccaaagccgaagtggcctgcattgcagtgtatgaaacagacgtgtttgtcgtcggaactgaaagaggacgtgcttttgtcaataccagaaaggattttcaaaaagattttgtaaaatattgtgttgaagaagaagaaaaagctgcagagatgcataaaatgaaatctacaacccaggcaaatcggatgagtgtagatgctgtagaaattgaaacactcagaaaaacagttgaggactatttctgcttttgctatgggaaagctttaggcaaatccacagtggtacctgtaccatatgagaagatgctgcgagaccagtcggctgtggtagtgcaggggcttccggaaggtgttgcctttaaacaccccgagaactatgatcttgcaaccctgaaatggattttggagaacaaagcagggatttcattcatcattaagagaccttttttagagccaaagaagcatgtaggtggtcgtgtgatggtaacagatgctgacaggtcaatactatctccaggtggaagttgtggccccatcaaagtgaaaactgaacccacagaagattctggcatttccctggaaatggcagctgtgacagtaaaggaagaatcagaagatcctgattattatcaatataacattcaaggaagccaccattcttcagagggcaatgaaggcacagaaatggaagtaccagcagaagatgatgattattctccaccgtctaagagaccaaaggccaatgagctaccgcagccaccagtcccggaacccgccaatgctgggaagcggaaagtgagggagttcaacttcgagaaatggaatgctcgcatcactgatctacgtaaacaagttgaagaattgtttgaaaggaaatatgctcaagccataaaagccaaaggtccggtgacgatcccgtaccctcttttccagtctcatgttgaagatctttatgtagaaggacttcctgaaggaattccttttagaaggccatctacttacggaattcctcgcctggagaggatattacttgcaaaggaaaggattcgttttgtgattaagaaacatgagcttctgaattcaacacgtgaagatttacagcttgataagccagcttcaggagtaaaggaagaatggtatgccagaatcactaaattaagaaagatggtggatcagcttttctgcaaaaaatttgcggaagccttggggagcactgaagccaaggctgtaccgtaccaaaaatttgaggcacacccgaatgatctgtacgtggaaggactgccagaaaacattcctttccgaagtccctcatggtatggaatcccaaggctggaaaaaatcattcaagtgggcaatcgaattaaatttgttattaaaagaccagaacttctgactcacagtaccactgaagttactcagccaagaacgaatacaccagtcaaagaagattggaatgtcagaattaccaagctacggaagcaagtggaagagatttttaatttgaaatttgcttagatttgttgacagcggtttcctggagtgctgtcttgagaacgattctgaggaggctcagcaagaaagagtgtttcagttgattgggtgtgtctgtcatggagaaggaactcaagctcttggactcaccgaggcagtaaaagtaccatatcctgtgtttgaatcaaacccggagttcttgtatgtggaaggcttgccagaggggattcccttccgaagccctacctggtttggaattccacgacttgaaaggatcgtccgcgggagtaataaaatcaagttcgttgttaaaaaacctgaactagttatttcctacttgcctcctgggatggctagtaaaataaacactaaagctttgcagtcccccaaaagaccacgaagtcctgggagtaattcaaaggttcctgaaattgaggtcaccgtggaaggccctaataacaacaatcctcaaacctcagctgttcgaaccccgacccagactaacggttctaacgttcccttcaagccacgagggagagagttttcctttgaggcctggaatgccaaaatcacggacctaaaacagaaagttgaaaatctcttcaatgagaaatgtggggaagctcttggccttaaacaagctgtgaaggtgccgttcgcgttatttgagtctttcccggaagacttttatgtggaaggcttacctgagggtgtgccattccgaagaccatcgacttttggcattccgaggctggagaagatactcagaaacaaagccaaaattaagttcatcattaaaaagcccgaaatgtttgagacggcgattaaggagagcacctcctctaagagccctcccagaaaaataaattcatcacccaatgttaatactactgcatcaggtgttgaagaccttaacatcattcaggtgacaattccagatgatgataatgaaagactctcgaaagttgaaaaagctagacagctaagagaacaagtgaatgacctctttagtcggaaatttggtgaagctattggtatgggttttcctgtgaaagttccctacaggaaaatcacaattaaccctggctgtgtggtggttgatggcatgcccccgggggtgtccttcaaagcccccagctacctggaaatcagctccatgagaaggatcttagactctgccgagtttatcaaattcacggtcattagaccatttccaggacttgtgattaataaccagctggttgatcagagtgagtcagaaggccccgtgatacaagaatcagctgaaccaagccagttggaagttccagccacagaaggtaaaaggacctcttccctcctagggtaaatcagcttctgtgtcagggatgctgtgtggtgtccatctgaaccccctgcatacgcgtagctaatgtgatctccccactttcacataagatggtggccctgccttcagggaatgtgggagccaggtgggagccttcccggatatttaagctagaagattctacagggagattctccttggatcaatatatgtctctcagtcaaagatgtaaaagcacttttgccttaaaaagaatgttctgtttctaaatagagtcaacgttgtcctcctcattggaattcactatgagtcagaatcattagactgacttttttttttccatagtaatagtattttgcagagtctcacagagctgcagatcttttgttcatcttgcagagttaacaagtctgatcctgttagtccagatttcttaaatttggccaagttataataggagcagtagcttgagacccgaagtcaggaaactttgacaatggatttttttttttaatccagagacttgtactggaatttgccttaccctgtcagctcatggacttaaggtttcatcccgctttatgagtgcttctgaatccaagtcattgttacctgaatttgcaaattaagttgtgatattcgtgactgttaaattcctgtaattagattaacctctttgcttgcttgtttgttttctctcctattttagcttaaagtatcagtggttgagaagagcttttcggacctgttactaccccaagctgtgtaatatacttgtataacagaaataccttctatacaaacctttttttctacttttagatagaaatgtctactttttcagcagttctgtgaattaaagagcagagtgactgtgggtctggaatggctggtgtacttgggaatgtactatcaggattttacagcaatgctgggaaatgacagggaaaatgacaggaatgaatctcaccagattttttatgtactcagcagagccttgagttacggtgtttattttccaatcaagtgaagatatctcctacttctcctactggaacatctcagcttctgcagtgaagaaaaattcctgtgatagttcagttctttagtttttctatttgaaaaaaaaaaatcatttaaatgatcctttgttcacggctctccttaatgactgagtgaacagttcctatctgtatatttgactaaaccttttcctaagctatctctcatggttcctatgtttttttatcataattaaaagcaaaaccatctggatcacctaacagtcagaggtcagtatctcagcgtgtgaattatagaggaaatacagagagaacctcttccacttttacttttcgtccaaataaaatgcatggtgtaccagaagttgaagatcgggttgaggattggggctagctcgatgacactaaggccccaacatcgcgggacctgctgtggcgcggattcttaggaacgctgttctagccggccccctctccaggggtcgccgtggccggcattatttcctagttcttcttgtaaccctgaggtgccagcgcggggagtgaggaggggtcagggggctaaggatgcaacctctgacgttctgcgccttcctaggagagtcttacatgtgttgagatttcacaagcaatgcgagttgtaaaataccagctctacaagaagctaggctctgtgacggcatagttttcagtagctttatcacaatattcacaatggagaattatatgacatggtagcagaaataggcccttttatgtgttgcttctattttacctcaaattgtagatatagggtaatcaataaaatccatccatgcctttcacacactaagt

SEQ ID NO: 4231 - protein, 523 aa, Homo sapiens; identical to SEQ ID NO: 4201

SEQ ID NO: 4232 - DNA, 4614 bp, Homo sapiens
aaaaaaaaaaaaaaaaaaaaaaaaaaaagaaaaaagaaaaaaaaaaggaggaggaggaggagggtgagagagaagctgggagagcagagaaaaggggccaccggtcgcccccccgcttccccgcacgcgctctccagccgcggccgcccgcctgccgcggtcaccccggcctctgcctctgtcccccagtgatcggatcaaggcgctgagcgaggccctgcctgcggggcggccatgcggcggtgacaggagcgcgaccgacacgcacgggcccctcgccccctctcgcctcccgtccgctcgccagctcccctcagccgaggctgctccgcggcggccgcagcccgcgcgcggcccacactcgcctccccgttgaagatgaggagtcctcggagagcaggatggtggtgacattcctcatgtcagctctcgagtccatgtgtaaagaactggccaagtccaaagccgaagtggcctgcattgcagtgtatgaaacagacgtgtttgtcgtcggaactgaaagaggacgtgcttttgtcaataccagaaaggattttcaaaaagattttgtaaaatattgtgttgaagaagaagaaaaagctgcagagatgcataaaatgaaatctacaacccaggcaaatcggatgagtgtagatgctgtagaaattgaaacactcagaaaaacagttgaggactatttctgcttttgctatgggaaagctttaggcaaatccacagtggtacctgtaccatatgagaagatgctgcgagaccagtcggctgtggtagtgcaggggcttccggaaggtgttgcctttaaacaccccgagaactatgatcttgcaaccctgaaatggattttggagaacaaagcagggatttcattcatcattaagagaccttttttagagccaaagaagcatgtaggtggtcgtgtgatggtaacagatgctgacaggtcaatactatctccaggtggaagttgtggccccatcaaagtgaaaactgaacccacagaagattctggcatttccctggaaatggcagctgtgacagtaaaggaagaatcagaagatcctgattattatcaatataacattcaagcaggcccttctgaaactgatgatgttgatgaaaaacagcccctatcgaagcctttgcaaggaagccaccattcttcagagggcaatgaaggcacagaaatggaagtaccagcagaagattctactcaacatgtcccttcagaaacaagtgaggaccctgaagttgaggtgactattgaagatgatgattattctccaccgtctaagagaccaaaggccaatgagctaccgcagccaccagtcccggaacccgccaatgctgggaagcggaaagtgagggagttcaacttcgagaaatggaatgctcgcatcactgatctacgtaaacaagttgaagaattgtttgaaaggaaatatgctcaagccataaaagccaaaggtccggtgacgatcccgtaccctcttttccagtctcatgttgaagatctttatgtagaaggacttcctgaaggaattccttttagaaggccatctacttacggaattcctcgcctggagaggatattacttgcaaaggaaaggattcgttttgtgattaagaaacatgagcttctgaattcaacacgtgaagatttacagcttgataagccagcttcaggagtaaaggaagaatggtatgccagaatcactaaattaagaaagatggtggatcagcttttctgcaaaaaatttgcggaagccttggggagcactgaagccaaggctgtaccgtaccaaaaatttgaggcacacccgaatgatctgtacgtggaaggactgccagaaaacattcctttccgaagtccctcatggtatggaatcccaaggctggaaaaaatcattcaagtgggcaatcgaattaaatttgttattaaaagaccagaacttctgactcacagtaccactgaagttactcagccaagaacgaatacaccagtcaaagaagattggaatgtcagaattaccaagctacggaagcaagtggaagagatttttaatttgaaatttgcttagatttgttgacagcggtttcctggagtgctgtcttgagaacgattctgaggaggctcagcaagaaagagtgtttcagttgattgggtgtgtctgtcatggagaaggaactcaagctcttggactcaccgaggcagtaaaagtaccatatcctgtgtttgaatcaaacccggagttcttgtatgtggaaggcttgccagaggggattcccttccgaagccctacctggtttggaattccacgacttgaaaggatcgtccgcgggagtaataaaatcaagttcgttgttaaaaaacctgaactagttatttcctacttgcctcctgggatggctagtaaaataaacactaaagctttgcagtcccccaaaagaccacgaagtcctgggagtaattcaaaggttcctgaaattgaggtcaccgtggaaggccctaataacaacaatcctcaaacctcagctgttcgaaccccgacccagactaacggttctaacgttcccttcaagccacgagggagagagttttcctttgaggcctggaatgccaaaatcacggacctaaaacagaaagttgaaaatctcttcaatgagaaatgtggggaagctcttggccttaaacaagctgtgaaggtgccgttcgcgttatttgagtctttcccggaagacttttatgtggaaggcttacctgagggtgtgccattccgaagaccatcgacttttggcattccgaggctggagaagatactcagaaacaaagccaaaattaagttcatcattaaaaagcccgaaatgtttgagacggcgattaaggagagcacctcctctaagagccctcccagaaaaataaattcatcacccaatgttaatactactgcatcaggtgttgaagaccttaacatcattcaggtgacaattccagatgatgataatgaaagactctcgaaagttgaaaaagctagacagctaagagaacaagtgaatgacctctttagtcggaaatttggtgaagctattggtatgggttttcctgtgaaagttccctacaggaaaatcacaattaaccctggctgtgtggtggttgatggcatgcccccgggggtgtccttcaaagcccccagctacctggaaatcagctccatgagaaggatcttagactctgccgagtttatcaaattcacggtcattagaccatttccaggacttgtgattaataaccagctggttgatcagagtgagtcagaaggccccgtgatacaagaatcagctgaaccaagccagttggaagttccagccacagaagaaataaaagagactgatggaagctctcagatcaagcaagaaccagaccccacgtggtagacctcttccctcctaggcttaaagtatcagtggttgagaagagcttttcggacctgttactaccccaagctgtgtaatatacttgtataacagaaataccttctatacaaacctttttttctacttttagatagaaatgtctactttttcagcagttctgtgaattaaagagcagagtgactgtgggtctggaatggctggtgtacttgggaatgtactatcaggattttacagcaatgctgggaaatgacagggaaaatgacaggaatgaatctcaccagattttttatgtactcagcagagccttgagttacggtgtttattttccaatcaagtgaagatatctcctacttctcctactggaacatctcagcttctgcagtgaagaaaaattcctgtgatagttcagttctttagtttttctatttgaaaaaaaaaaatcatttaaatgatcctttgttcacggctctccttaatgactgagtgaacagttcctatctgtatatttgactaaaccttttcctaagctatctctcatggttcctatgtttttttatcataattaaaagcaaaaccatctggatcacctaacagtcagaggtcagtatctcagcgtgtgaattatagaggaaatacagagagaacctcttccacttttacttttcgtccaaataaaatgcatggtgtaccagaagttgaagatcgggttgaggattggggctagctcgatgacactaaggccccaacatcgcgggacctgctgtggcgcggattcttaggaacgctgttctagccggccccctctccaggggtcgccgtggccggcattatttcctagttcttcttgtaaccctgaggtgccagcgcggggagtgaggaggggtcagggggctaaggatgcaacctctgacgttctgcgccttcctaggagagtcttacatgtgttgagatttcacaagcaatgcgagttgtaaaataccagctctacaagaagctaggctctgtgacggcatagttttcagtagctttatcacaatattcacaatggagaattatatgacatggtagcagaaataggcccttttatgtgttgcttctattttacctcaaattgtagatatagggtaatcaataaaatccatccatgcctttcacacactaagt

SEQ ID NO: 4233 - protein, 564 aa, Homo sapiens; identical to SEQ ID NO: 4031

SEQ ID NO: 4234 - DNA, 3883 bp, Homo sapiens
aaaaaaaaaaaaaaaaaaaaaaaaaaaagaaaaaagaaaaaaaaaaggaggaggaggaggagggtgagagagaagctgggagagcagagaaaaggggccaccggtcgcccccccgcttccccgcacgcgctctccagccgcggccgcccgcctgccgcggtcaccccggcctctgcctctgtcccccagtgatcggatcaaggcgctgagcgaggccctgcctgcggggcggccatgcggcggtgacaggagcgcgaccgacacgcacgggcccctcgccccctctcgcctcccgtccgctcgccagctcccctcagccgaggctgctccgcggcggccgcagcccgcgcgcggcccacactcgcctccccgttgaagatgaggagtcctcggagagcaggatggtggtgacattcctcatgtcagctctcgagtccatgtgtaaagaactggccaagtccaaagccgaagtggcctgcattgcagtgtatgaaacagacgtgtttgtcgtcggaactgaaagaggacgtgcttttgtcaataccagaaaggattttcaaaaagattttgtaaaatattgtgttgaagaagaagaaaaagctgcagagatgcataaaatgaaatctacaacccaggcaaatcggatgagtgtagatgctgtagaaattgaaacactcagaaaaacagttgaggactatttctgcttttgctatgggaaagctttaggcaaatccacagtggtacctgtaccatatgagaagatgctgcgagaccagtcggctgtggtagtgcaggggcttccggaaggtgttgcctttaaacaccccgagaactatgatcttgcaaccctgaaatggattttggagaacaaagcagggatttcattcatcattaagagaccttttttagagccaaagaagcatgtaggtggtcgtgtgatggtaacagatgctgacaggtcaatactatctccaggtggaagttgtggccccatcaaagtgaaaactgaacccacagaagattctggcatttccctggaaatggcagctgtgacagtaaaggaagaatcagaagatcctgattattatcaatataacattcaagcaggcccttctgaaactgatgatgttgatgaaaaacagcccctatcgaagcctttgcaaggaagccaccattcttcagagggcaatgaaggcacagaaatggaagtaccagcagaagattctactcaacatgtcccttcagaaacaagtgaggaccctgaagttgaggtgactattgaagatgatgattattctccaccgtctaagagaccaaaggccaatgagctaccgcagccaccagtcccggaacccgccaatgctgggaagcggaaagtgagggagttcaacttcgagaaatggaatgctcgcatcactgatctacgtaaacaagttgaagaattgtttgaaaggaaatatgctcaagccataaaagccaaaggtccggtgacgatcccgtaccctcttttccagtctcatgttgaagatctttatgtagaaggacttcctgaaggaattccttttagaaggccatctacttacggaattcctcgcctggagaggatattacttgcaaaggaaaggattcgttttgtgattaagaaacatgagcttctgaattcaacacgtgaagatttacagcttgataagccagcttcaggagtaaaggaagaatggtatgccagaatcactaaattaagaaagatggtggatcagcttttctgcaaaaaatttgcggaagccttggggagcactgaagccaaggctgtaccgtaccaaaaatttgaggcacacccgaatgatctgtacgtggaaggactgccagaaaacattcctttccgaagtccctcatggtatggaatcccaaggctggaaaaaatcattcaagtgggcaatcgaattaaatttgttattaaaagaccagaacttctgactcacagtaccactgaagttactcagccaagaacgaatacaccagtcaaagaagattggaatgtcagaattaccaagctacggaagcaagtggaagagatttttaatttgaaatttgctcaagctcttggactcaccgaggcagtaaaagtaccatatcctgtgtttgaatcaaacccggagttcttgaaaggatcgtccgcgggagtaataaaatcaagttcgttgttaaaaaacctgaactagttatttcctacttgcctcctgggatggctagtaaaataaacactaaagctttgcagtcccccaaaagaccacgaagtcctgggagtaattcaaaggttcctgaaattgaggtcaccgtggaaggccctaataacaacaatcctcaaacctcagctgttcgaaccccgacccagactaacggttctaacgttcccttcaagccacgagggagagagttttcctttgaggcctggaatgccaaaatcacggacctaaaacagaaagttgaaaatctcttcaatgagaaatgtggggaagctcttggccttaaacaagctgtgaaggtgccgttcgcgttatttgagtctttcccggaagacttttatgtggaaggcttacctgagggtgtgccattccgaagaccatcgacttttggcattccgaggctggagaagatactcagaaacaaagccaaaattaagttcatcattaaaaagcccgaaatgtttgagacggcgattaaggagagcacctcctctaagagccctcccagaaaaataaattcatcacccaatgttaatactactgcatcaggtgttgaagaccttaacatcattcaggtgacaattccagatgatgataatgaaagactctcgaaagttgaaaaagctagacagctaagagaacaagtgaatgacctctttagtcggaaatttggtgaagctattggtatgggttttcctgtgaaagttccctacaggaaaatcacaattaaccctggctgtgtggtggttgatggcatgcccccgggggtgtccttcaaagcccccagctacctggaaatcagctccatgagaaggatcttagactctgccgagtttatcaaattcacggtcattagaccatttccaggacttgtgattaataaccagctggttgatcagagtgagtcagaaggccccgtgatacaagaatcagctgaaccaagccagttggaagttccagccacagaagaaataaaagagactgatggaagctctcagatcaagcaagaaccagaccccacgtggtagacctcttccctcctaggcaaaaccatctggatcacctaacagtcagaggtcagtatctcagcgtgtgaattatagaggaaatacagagagaacctcttccacttttacttttcgtccaaataaaatgcatggtgtaccagaagttgaagatcgggttgaggattggggctagctcgatgacactaaggccccaacatcgcgggacctgctgtggcgcggattcttaggaacgctgttctagccggccccctctccaggggtcgccgtggccggcattatttcctagttcttcttgtaaccctgaggtgccagcgcggggagtgaggaggggtcagggggctaaggatgcaacctctgacgttctgcgccttcctaggagagtcttacatgtgttgagatttcacaagcaatgcgagttgtaaaataccagctctacaagaagctaggctctgtgacggcatagttttcagtagctttatcacaatattcacaatggagaattatatgacatggtagcagaaataggcccttttatgtgttgcttctattttacctcaaattgtagatatagggtaatcaataaaatccatccatgcctttcacacactaagt

SEQ ID NO: 4235 - protein, 605 aa, Homo sapiens; identical to SEQ ID NO: 4017

SEQ ID NO: 4236 - DNA, 4144 bp, Homo sapiens
aaaaaaaaaaaaaaaaaaaaaaaaaaaagaaaaaagaaaaaaaaaaggaggaggaggaggagggtgagagagaagctgggagagcagagaaaaggggccaccggtcgcccccccgcttccccgcacgcgctctccagccgcggccgcccgcctgccgcggtcaccccggcctctgcctctgtcccccagtgatcggatcaaggcgctgagcgaggccctgcctgcggggcggccatgcggcggtgacaggagcgcgaccgacacgcacgggcccctcgccccctctcgcctcccgtccgctcgccagctcccctcagccgaggctgctccgcggcggccgcagcccgcgcgcggcccacactcgcctcccctcggcacccccggccccggagctgcctggaggcggccgcactcggggatcatggcccaagttgcaatgtccaccctccccgttgaagatgaggagtcctcggagagcaggatggtggtgacattcctcatgtcagctctcgagtccatgtgtaaagaactggccaagtccaaagccgaagtggcctgcattgcagtgtatgaaacagacgtgtttgtcgtcggaactgaaagaggacgtgcttttgtcaataccagaaaggattttcaaaaagattttgtaaaatattgtgttgaagaagaagaaaaagctgcagagatgcataaaatgaaatctacaacccaggcaaatcggatgagtgtagatgctgtagaaattgaaacactcagaaaaacagttgaggactatttctgcttttgctatgggaaagctttaggcaaatccacagtggtacctgtaccatatgagaagatgctgcgagaccagtcggctgtggtagtgcaggggcttccggaaggtgttgcctttaaacaccccgagaactatgatcttgcaaccctgaaatggattttggagaacaaagcagggatttcattcatcattaagagaccttttttagagccaaagaagcatgtaggtggtcgtgtgatggtaacagatgctgacaggtcaatactatctccaggtggaagttgtggccccatcaaagtgaaaactgaacccacagaagattctggaagccaccattcttcagagggcaatgaaggcacagaaatggaagtaccagcagaagattctactcaacatgtcccttcagaaacaagtgaggaccctgaagttgaggtgactattgaagatgatgattattctccaccgtctaagagaccaaaggccaatgagctaccgcagccaccagtcccggaacccgccaatgctgggaagcggaaagtgagggagttcaacttcgagaaatggaatgctcgcatcactgatctacgtaaacaagttgaagaattgtttgaaaggaaatatgctcaagccataaaagccaaaggtccggtgacgatcccgtaccctcttttccagtctcatgttgaagatctttatgtagaaggacttcctgaaggaattccttttagaaggccatctacttacggaattcctcgcctggagaggatattacttgcaaaggaaaggattcgttttgtgattaagaaacatgagcttctgaattcaacacgtgaagatttacagcttgataagccagcttcaggagtaaaggaagaatggtatgccagaatcactaaattaagaaagatggtggatcagcttttctgcaaaaaatttgcggaagccttggggagcactgaagccaaggctgtaccgtaccaaaaatttgaggcacacccgaatgatctgtacgtggaaggactgccagaaaacattcctttccgaagtccctcatggtatggaatcccaaggctggaaaaaatcattcaagtgggcaatcgaattaaatttgttattaaaagaccagaacttctgactcacagtaccactgaagttactcagccaagaacgaatacaccagctcaagctcttggactcaccgaggcagtaaaagtaccatatcctgtgtttgaatcaaacccggagttcttgtatgtggaaggcttgccagaggggattcccttccgaagccctacctggtttggaattccacgacttgaaaggatcgtccgcgggagtaataaaatcaagttcgttgttaaaaaacctgaactagttatttcctacttgcctcctgggatggctagtaaaataaacactaaagctttgcagtcccccaaaagaccacgaagtcctgggagtaattcaaaggttcctgaaattgaggtcaccgtggaaggccctaataacaacaatcctcaaacctcagctgttcgaaccccgacccagactaacggttctaacgttcccttcaagccacgagggagagagttttcctttgaggcctggaatgccaaaatcacggacctaaaacagaaagttgaaaatctcttcaatgagaaatgtggggaagctcttggccttaaacaagctgtgaaggtgccgttcgcgttatttgagtctttcccggaagacttttatgtggaaggcttacctgagggtgtgccattccgaagaccatcgacttttggcattccgaggctggagaagatactcagaaacaaagccaaaattaagttcatcattaaaaagcccgaaatgtttgagacggcgattaaggagagcacctcctctaagagccctcccagaaaaataaattcatcacccaatgttaatactactgcatcaggtgttgaagaccttaacatcattcaggtgacaattccagatgatgataatgaaagactctcgaaagttgaaaaagctagacagctaagagaacaagtgaatgacctctttagtcggaaatttggtgaagctattggtatgggttttcctgtgaaagttccctacaggaaaatcacaattaaccctggctgtgtggtggttgatggcatgcccccgggggtgtccttcaaagcccccagctacctggaaatcagctccatgagaaggatcttagactctgccgagtttatcaaattcacggtcattagaccatttccaggacttgtgattaataaccagctggttgatcagagtgagtcagaaggccccgtgatacaagaatcagctgaaccaagccagttggaagttccagccacagaagaaataaaagagactgatggaagctctcagatcaagcaagaaccagaccccacgtggtagacctcttccctcctaggcttaaagtatcagtggttgagaagagcttttcggacctgttactaccccaagctgtagccttgagttacggtgtttattttccaatcaagtgaagatatctcctacttctcctactggaacatctcagcttctgcagtgaagaaaaattcctgtgatagttcagttctttagtttttctatttgaaaaaaaaaaatcatttaaatgatcctttgttcacggctctccttaatgactgagtgaacagttcctatctgtatatttgactaaaccttttcctaagctatctctcatggttcctatgtttttttatcataattaaaagcaaaaccatctggatcacctaacagtcagaggtcagtatctcagcgtgtgaattatagaggaaatacagagagaacctcttccacttttacttttcgtccaaataaaatgcatggtgtaccagaagttgaagatcgggttgaggattggggctagctcgatgacactaaggccccaacatcgcgggacctgctgtggcgcggattcttaggaacgctgttctagccggccccctctccaggggtcgccgtggccggcattatttcctagttcttcttgtaaccctgaggtgccagcgcggggagtgaggaggggtcagggggctaaggatgcaacctctgacgttctgcgccttcctaggagagtcttacatgtgttgagatttcacaagcaatgcgagttgtaaaataccagctctacaagaagctaggctctgtgacggcatagttttcagtagctttatcacaatattcacaatggagaattatatgacatggtagcagaaataggcccttttatgtgttgcttctattttacctcaaattgtagatatagggtaatcaataaaatccatccatgcctttcacacactaagt

SEQ ID NO: 4237 - protein, 928 aa, Homo sapiens
MAQVAMSTLPVEDEESSESRMVVTFLMSALESMCKELAKSKAEVACIAVYETDVFVVGTERGRAFVNTRKDFQKDFVKYCVEEEEKAAEMHKMKSTTQANRMSVDAVEIETLRKTVEDYFCFCYGKALGKSTVVPVPYEKMLRDQSAVVVQGLPEGVAFKHPENYDLATLKWILENKAGISFIIKRPFLEPKKHVGGRVMVTDADRSILSPGGSCGPIKVKTEPTEDSGSHHSSEGNEGTEMEVPAEDSTQHVPSETSEDPEVEVTIEDDDYSPPSKRPKANELPQPPVPEPANAGKRKVREFNFEKWNARITDLRKQVEELFERKYAQAIKAKGPVTIPYPLFQSHVEDLYVEGLPEGIPFRRPSTYGIPRLERILLAKERIRFVIKKHELLNSTREDLQLDKPASGVKEEWYARITKLRKMVDQLFCKKFAEALGSTEAKAVPYQKFEAHPNDLYVEGLPENIPFRSPSWYGIPRLEKIIQVGNRIKFVIKRPELLTHSTTEVTQPRTNTPAQALGLTEAVKVPYPVFESNPEFLYVEGLPEGIPFRSPTWFGIPRLERIVRGSNKIKFVVKKPELVISYLPPGMASKINTKALQSPKRPRSPGSNSKVPEIEVTVEGPNNNNPQTSAVRTPTQTNGSNVPFKPRGREFSFEAWNAKITDLKQKVENLFNEKCGEALGLKQAVKVPFALFESFPEDFYVEGLPEGVPFRRPSTFGIPRLEKILRNKAKIKFIIKKPEMFETAIKESTSSKSPPRKINSSPNVNTTASGVEDLNIIQVTIPDDDNERLSKVEKARQLREQVNDLFSRKFGEAIGMGFPVKVPYRKITINPGCVVVDGMPPGVSFKAPSYLEISSMRRILDSAEFIKFTVIRPFPGLVINNQLVDQSESEGPVIQESAEPSQLEVPATEEIKETDGSSQIKQEPDPTW

SEQ ID NO: 4238 - DNA, 4467 bp, Homo sapiens
aaaaaaaaaaaaaaaaaaaaaaaaaaaagaaaaaagaaaaaaaaaaggaggaggaggaggagggtgagagagaagctgggagagcagagaaaaggggccaccggtcgcccccccgcttccccgcacgcgctctccagccgcggccgcccgcctgccgcggtcaccccggcctctgcctctgtcccccagtgatcggatcaaggcgctgagcgaggccctgcctgcggggcggccatgcggcggtgacaggagcgcgaccgacacgcacgggcccctcgccccctctcgcctcccgtccgctcgccagctcccctcagccgaggctgctccgcggcggccgcagcccgcgcgcggcccacactcgcctcccctcggcacccccggccccggagctgcctggaggcggccgcactcggtgtaaagaactggccaagtccaaagccgaagtggcctgcattgcagtgtatgaaacagacgtgtttgtcgtcggaactgaaagaggacgtgcttttgtcaataccagaaaggattttcaaaaagattttgtaaaatattgtgttgaagaagaagaaaaagctgcagagatgcataaaatgaaatctacaacccaggcaaatcggatgagtgtagatgctgtagaaattgaaacactcagaaaaacagttgaggactatttctgcttttgctatgggaaagctttaggcaaatccacagtggtacctgtaccatatgagaagatgctgcgagaccagtcggctgtggtagtgcaggggcttccggaaggtgttgcctttaaacaccccgagaactatgatcttgcaaccctgaaatggattttggagaacaaagcagggatttcattcatcattaagagaccttttttagagccaaagaagcatgtaggtggtcgtgtgatggtaacagatgctgacaggtcaatactatctccaggtggaagttgtggccccatcaaagtgaaaactgaacccacagaagattctggcatttccctggaaatggcagctgtgacagtaaaggaagaatcagaagatcctgattattatcaatataacattcaaggaagccaccattcttcagagggcaatgaaggcacagaaatggaagtaccagcagaagatgatgattattctccaccgtctaagagaccaaaggccaatgagctaccgcagccaccagtcccggaacccgccaatgctgggaagcggaaagtgagggagttcaacttcgagaaatggaatgctcgcatcactgatctacgtaaacaagttgaagaattgtttgaaaggaaatatgctcaagccataaaagccaaaggtccggtgacgatcccgtaccctcttttccagtctcatgttgaagatctttatgtagaaggacttcctgaaggaattccttttagaaggccatctacttacggaattcctcgcctggagaggatattacttgcaaaggaaaggattcgttttgtgattaagaaacatgagcttctgaattcaacacgtgaagatttacagcttgataagccagcttcaggagtaaaggaagaatggtatgccagaatcactaaattaagaaagatggtggatcagcttttctgcaaaaaatttgcggaagccttggggagcactgaagccaaggctgtaccgtaccaaaaatttgaggcacacccgaatgatctgtacgtggaaggactgccagaaaacattcctttccgaagtccctcatggtatggaatcccaaggctggaaaaaatcattcaagtgggcaatcgaattaaatttgttattaaaagaccagaacttctgactcacagtaccactgaagttactcagccaagaacgaatacaccagtcaaagaagattggaatgtcagaattaccaagctacggaagcaagtggaagagatttttaatttgaaatttgcttagatttgttgacagcggtttcctggagtgctgtcttgagaacgattctgaggaggctcagcaagaaagagtgtttcagttgattgggtgtgtctgtcatggagaaggaactcaagctcttggactcaccgaggcagtaaaagtaccatatcctgtgtttgaatcaaacccggagttcttgtatgtggaaggcttgccagaggggattcccttccgaagccctacctggtttggaattccacgacttgaaaggatcgtccgcgggagtaataaaatcaagttcgttgttaaaaaacctgaactagttatttcctacttgcctcctgggatggctagtaaaataaacactaaagctttgcagtcccccaaaagaccacgaagtcctgggagtaattcaaaggttcctgaaattgaggtcaccgtggaaggccctaataacaacaatcctcaaacctcagctgttcgaaccccgacccagactaacggttctaacgttcccttcaagccacgagggagagagttttcctttgaggcctggaatgccaaaatcacggacctaaaacagaaagttgaaaatctcttcaatgagaaatgtggggaagctcttggccttaaacaagctgtgaaggtgccgttcgcgttatttgagtctttcccggaagacttttatgtggaaggcttacctgagggtgtgccattccgaagaccatcgacttttggcattccgaggctggagaagatactcagaaacaaagccaaaattaagttcatcattaaaaagcccgaaatgtttgagacggcgattaaggagagcacctcctctaagagccctcccagaaaaataaattcatcacccaatgttaatactactgcatcaggtgttgaagaccttaacatcattcaggtgacaattccagatgatgataatgaaagactctcgaaagttgaaaaagctagacagctaagagaacaagtgaatgacctctttagtcggaaatttggtgaagctattggtatgggttttcctgtgaaagttccctacaggaaaatcacaattaaccctggctgtgtggtggttgatggcatgcccccgggggtgtccttcaaagcccccagctacctggaaatcagctccatgagaaggatcttagactctgccgagtttatcaaattcacggtcattagaccatttccaggacttgtgattaataaccagctggttgatcagagtgagtcagaaggccccgtgatacaagaatcagctgaaccaagccagttggaagttccagccacagaagaaataaaagagactgatggaagctctcagatcaagcaagaaccagaccccacgtggtagacctcttccctcctaggcttaaagtatcagtggttgagaagagcttttcggacctgttactaccccaagctgtgtaatatacttgtataacagaaataccttctatacaaacctttttttctacttttagatagaaatgtctactttttcagcagttctgtgaattaaagagcagagtgactgtgggtctggaatggctggtgtacttgggaatgtactatcaggattttacagcaatgctgggaaatgacagggaaaatgacaggaatgaatctcaccagattttttatgtactcagcagagccttgagttacggtgtttattttccaatcaagtgaagatatctcctacttctcctactggaacatctcagcttctgcagtgaagaaaaattcctgtgatagttcagttctttagtttttctatttgaaaaaaaaaaatcatttaaatgatcctttgttcacggctctccttaatgactgagtgaacagttcctatctgtatatttgactaaaccttttcctaagctatctctcatggttcctatgtttttttatcataattaaaagcaaaaccatctggatcacctaacagtcagaggtcagtatctcagcgtgtgaattatagaggaaatacagagagaacctcttccacttttacttttcgtccaaataaaatgcatggtgtaccagaagttgaagatcgggttgaggattggggctagctcgatgacactaaggccccaacatcgcgggacctgctgtggcgcggattcttaggaacgctgttctagccggccccctctccaggggtcgccgtggccggcattatttcctagttcttcttgtaaccctgaggtgccagcgcggggagtgaggaggggtcagggggctaaggatgcaacctctgacgttctgcgccttcctaggagagtcttacatgtgttgagatttcacaagcaatgcgagttgtaaaataccagctctacaagaagctaggctctgtgacggcatagttttcagtagctttatcacaatattcacaatggagaattatatgacatggtagcagaaataggcccttttatgtgttgcttctattttacctcaaattgtagatatagggtaatcaataaaatccatccatgcctttcacacactaagt

SEQ ID NO: 4239 - protein, 454 aa, Homo sapiens
MHKMKSTTQANRMSVDAVEIETLRKTVEDYFCFCYGKALGKSTVVPVPYEKMLRDQSAVVVQGLPEGVAFKHPENYDLATLKWILENKAGISFIIKRPFLEPKKHVGGRVMVTDADRSILSPGGSCGPIKVKTEPTEDSGISLEMAAVTVKEESEDPDYYQYNIQGSHHSSEGNEGTEMEVPAEDDDYSPPSKRPKANELPQPPVPEPANAGKRKVREFNFEKWNARITDLRKQVEELFERKYAQAIKAKGPVTIPYPLFQSHVEDLYVEGLPEGIPFRRPSTYGIPRLERILLAKERIRFVIKKHELLNSTREDLQLDKPASGVKEEWYARITKLRKMVDQLFCKKFAEALGSTEAKAVPYQKFEAHPNDLYVEGLPENIPFRSPSWYGIPRLEKIIQVGNRIKFVIKRPELLTHSTTEVTQPRTNTPVKEDWNVRITKLRKQVEEIFNLKFA

SEQ ID NO: 4240 - DNA, 7765 bp, Homo sapiens
aaaaaaaaaaaaaaaaaaaaaaaaaaaagaaaaaagaaaaaaaaaaggaggaggaggaggagggtgagagagaagctgggagagcagagaaaaggggccaccggtcgcccccccgcttccccgcacgcgctctccagccgcggccgcccgcctgccgcggtcaccccggcctctgcctctgtcccccagtgatcggatcaaggcgctgagcgaggccctgcctgcggggcggccatgcggcggtgacaggagcgcgaccgacacgcacgggcccctcgccccctctcgcctcccgtccgctcgccagctcccctcagccgaggctgctccgcggcggccgcagcccgcgcgcggcccacactcgcctccccgttgaagatgaggagtcctcggagagcaggatggtggtgacattcctcatgtcagctctcgagtccatgtgtaaagaactggccaagtccaaagccgaagtggcctgcattgcagtgtatgaaacagacgtgtttgtcgtcggaactgaaagaggacgtgcttttgtcaataccagaaaggattttcaaaaagattttgtaaaatattgtgttgaagaagaagaaaaagctgcagagatgcataaaatgaaatctacaacccaggcaaatcggatgagtgtagatgctgtagaaattgaaacactcagaaaaacagttgaggactatttctgcttttgctatgggaaagctttaggcaaatccacagtggtacctgtaccatatgagaagatgctgcgagaccagtcggctgtggtagtgcaggggcttccggaaggtgttgcctttaaacaccccgagaactatgatcttgcaaccctgaaatggattttggagaacaaagcagggatttcattcatcattaagagaccttttttagagccaaagaagcatgtaggtggtcgtgtgatggtaacagatgctgacaggtcaatactatctccaggtggaagttgtggccccatcaaagtgaaaactgaacccacagaagattctggcatttccctggaaatggcagctgtgacagtaaaggaagaatcagaagatcctgattattatcaatataacattcaaggaagccaccattcttcagagggcaatgaaggcacagaaatggaagtaccagcagaagatgatgattattctccaccgtctaagagaccaaaggccaatgagctaccgcagccaccagtcccggaacccgccaatgctgggaagcggaaagtgagggagttcaacttcgagaaatggaatgctcgcatcactgatctacgtaaacaagttgaagaattgtttgaaaggaaatatgctcaagccataaaagccaaaggtccggtgacgatcccgtaccctcttttccagtctcatgttgaagatctttatgtagaaggacttcctgaaggaattccttttagaaggccatctacttacggaattcctcgcctggagaggatattacttgcaaaggaaaggattcgttttgtgattaagaaacatgagcttctgaattcaacacgtgaagatttacagcttgataagccagcttcaggagtaaaggaagaatggtatgccagaatcactaaattaagaaagatggtggatcagcttttctgcaaaaaatttgcggaagccttggggagcactgaagccaaggctgtaccgtaccaaaaatttgaggcacacccgaatgatctgtacgtggaaggactgccagaaaacattcctttccgaagtccctcatggtatggaatcccaaggctggaaaaaatcattcaagtgggcaatcgaattaaatttgttattaaaagaccagaacttctgactcacagtaccactgaagttactcagccaagaacgaatacaccagtcaaagaagattggaatgtcagaattaccaagctacggaagcaagtggaagagatttttaatttgaaatttgctcaagctcttggactcaccgaggcagtaaaagtaccatatcctgtgtttgaatcaaacccggagttcttgaaaggatcgtccgcgggagtaataaaatcaagttcgttgttaaaaaacctgaactagttatttcctacttgcctcctgggatggctagtaaaataaacactaaagctttgcagtcccccaaaagaccacgaagtcctgggagtaattcaaaggttcctgaaattgaggtcaccgtggaaggccctaataacaacaatcctcaaacctcagctgttcgaaccccgacccagactaacggttctaacgttcccttcaagccacgagggagagagttttcctttgaggcctggaatgccaaaatcacggacctaaaacagaaagttgaaaatctcttcaatgagaaatgtggggaagctcttggccttaaacaagctgtgaaggtgccgttcgcgttatttgagtctttcccggaagacttttatgtggaaggcttacctgagggtgtgccattccgaagaccatcgacttttggcattccgaggctggagaagatactcagaaacaaagccaaaattaagttcatcattaaaaagcccgaaatgtttgagacggcgattaaggagagcacctcctctaagagccctcccagaaaaataaattcatcacccaatgttaatactactgcatcaggtgttgaagaccttaacatcattcaggtgacaattccagatgatgataatgaaagactctcgaaagttgaaaaagctagacagctaagagaacaagtgaatgacctctttagtcggaaatttggtgaagctattggtatgggttttcctgtgaaagttccctacaggaaaatcacaattaaccctggctgtgtggtggttgatggcatgcccccgggggtgtccttcaaagcccccagctacctggaaatcagctccatgagaaggatcttagactctgccgagtttatcaaattcacggtcattaggtaagtgagagtttcctgcttagtcacaggagcgaatctggagctcatgaggctgactcttctaaaatgcagccacaggtagtcatcgaatccggcttcctatgctgtgcaatcaacaaatcaaaataacttgtgtcatcattagaatgtcagatgtgcttctacgaactaagctgactcttttaattctttggcaaagggttggcaaactaggactgtttgccaaattcaggctgcctcctatttttagagtcttcctgaaacacagctacacccgtattatccatggctgctttcctgtcacagtgagtaagtagctgggactgagaaggcatggcctccaaagtctaaaatatttactctctagcactttgtagaaaaaccttagctaggcacagtggctaacgcctgtaatcccagcattttgggaggccaaggcaggcagatcacctgaggtcaggagttccagaccagcctggccaacatggtgaaatcccatctctacaaaaataaaacagttagctgggcatgatggcgggtgcctgtaatcccagctactcgggaggctgaggcaggatagtcgcttgaacccaggaggtggaggttgcaatgagccaagatcatgccactgcactccagcctggacgacagagtgagactccatcacaagaaaaaaagaactttgtcaacctctgtcttagggcgccttgtcacaggcttcgggtcagacggattcaaccttgcatcagccatttgttagccaggtcactctgttctttgtctgtaaatgagattgatcgttgttcccactgagagtgtcagctccttcccgtagagcaggcatgatgattgtactcacctctgacaccattgtgagtgccacattccttcccacgtccttgtcactgtaagagatgcccacctgagcaccaaccccaggttatcttcccctttgtcttccagccccccagaaacagctacgactcaacctacccaatcatttcatcatcagattgccactgtctctagttcaggtctcttgggactggcactcagaaatctcataataaatcctcttgaggcttctcatacactcgtcttcttccaatcttctttccctcaaaatctcatattttggttccacttcacccaccgtcattctccatatcactcccaggagttaggcaaaaagccccttccgttcttccgtatgttaaacttagaatcactctgttccctgctctgcgtttctattttttgtttttcctccatttactagtagcttaacactttctaacagtgttcttattattgatacgtatctatctcttccataagcttataaggtcacggataatacttctcattgtagtacgtaaatgacgtgggctagatatgagttgaataaacagttatacctgtaaattcttacagagtgaaaataaattgttatactttacaatttgtttctctctttagaccatttccaggacttgtgattaataaccgtgagtattttgtgaagtgttttgtttttgttttttcctggggtctgacgtgtgtgcgtgtgagtgtgtatacatgcttaacgtatatcacgttacttcacctatgtcagtaaccaggccaaatacttgttttagccctcagtaaaaacaccaggcacttcctagttgtaaaattattcaagcttcttaacttcctatcctcgatgcacttaatcataaaatggtaataatagcaccgattttgggggagtcgttccagtagatggaaagcatctggaacaggtgtcagcaagctcctgccgacgtgtatgcataaagttttattgaaaccaccatcgtgtccatttgtttatggcagaactgagagatggcagcagcaagtgtgtgcctgcaaaacctaaaatatttactaattggctctgcaagaaaagagtttgcatccccctaacctagaacagtgtctagcctctagtatgtgtttagcctacagtatgtgctcagcgaatacaatctatatttattactgcttttatgactgttataattactgtgcttggatttcgttacaaagtaagtcacaatgtgcctgcttctgttagtatttcagcacagtgcctggcacacatggggctctcaaatattgctgagcgagtgaacaaatgtcctttcaattccttaacgttgatgtcattttcaatagtattttgagccaaacttaattttgcgagtgtgttttgttttcttaactttattattaaaaatgtataaaagtgaggccaggcgtggtggctcacgcctgtaatcccagcagtttgggaggctgaggcaggcggatcagttgaggttgggagttggagaccagcccgtccaacatggtgaaagcctgtctctactaaaaatacaaaaatcagctgggtgtggtggcgcgtgcctgtaatcccagctactcaggaggctgaggcaggagagttgcttgaatcctagaggtggaggttgcagtgagctgagatcgtgccattgcactccagcctgggcaacaagagcaaaactctgtcccaataaataaataaataaaatgttctcttttgttcctgttcttgtgcggtagtgtggtatagagttttatggtaattactgtgaattagtgattctgagggacatatcagaactctgaggtttgtttccttctcatcttgagggaaacagcaaatgtatgttaaaatgcttttccaagggaacaacacatccttacattatttaaaccaatctgcttcattttcagagctggttgatcagagtgagtcagaaggccccgtgatacaagaatcagctgaaccaagccagttggaagttccagccacagaagaaataaaagagactgatggaagctctcagatcaagcaagaaccagaccccacgtggtagacctcttccctcctagggtaaatcagcttctgtgtcagggatgctgtgtggtgtccatctgaaccccctgcatacgcgtagctaatgtgatctccccactttcacataagatggtggccctgccttcagggaatgtgggagccaggtgggagccttcccggatatttaagctagaagattctacagggagattctccttggatcaatatatgtctctcagtcaaagatgtaaaagcacttttgccttaaaaagaatgttctgtttctaaatagagtcaacgttgtcctcctcattggaattcactatgagtcagaatcattagactgacttttttttttccatagtaatagtattttgcagagtctcacagagctgcagatcttttgttcatcttgcagagttaacaagtctgatcctgttagtccagatttcttaaatttggccaagttataataggagcagtagcttgagacccgaagtcaggaaactttgacaatggatttttttttttaatccagagacttgtactggaatttgccttaccctgtcagctcatggacttaaggtttcatcccgctttatgagtgcttctgaatccaagtcattgttacctgaatttgcaaattaagttgtgatattcgtgactgttaaattcctgtaattagattaacctctttgcttgcttgtttgttttctctcctattttagcttaaagtatcagtggttgagaagagcttttcggacctgttactaccccaagctgtgtaatatacttgtataacagaaataccttctatacaaacctttttttctacttttagatagaaatgtctactttttcagcagttctgtgaattaaagagcagagtgactgtgggtctggaatggctggtgtacttgggaatgtactatcaggattttacagcaatgctgggaaatgacagggaaaatgacaggaatgaatctcaccagattttttatgtactcagcagagccttgagttacggtgtttattttccaatcaagtgaagatatctcctacttctcctactggaacatctcagcttctgcagtgaagaaaaattcctgtgatagttcagttctttagtttttctatttgaaaaaaaaaaatcatttaaatgatcctttgttcacggctctccttaatgactgagtgaacagttcctatctgtatatttgactaaaccttttcctaagctatctctcatggttcctatgtttttttatcataattaaaagcaaaaccatctggatcacctaacagtcagaggtcagtatctcagcgtgtgaattatagaggaaatacagagagaacctcttccacttttacttttcgtccaaataaaatgcatggtgtaccagaagttgaagatcgggttgaggattggggctagctcgatgacactaaggccccaacatcgcgggacctgctgtggcgcggattcttaggaacgctgttctagccggccccctctccaggggtcgccgtggccggcattatttcctagttcttcttgtaaccctgaggtgccagcgcggggagtgaggaggggtcagggggctaaggatgcaacctctgacgttctgcgccttcctaggagagtcttacatgtgttgagatttcacaagcaatgcgagttgtaaaataccagctctacaagaagctaggctctgtgacggcatagttttcagtagctttatcacaatattcacaatggagaattatatgacatggtagcagaaataggcccttttatgtgttgcttctattttacctcaaattgtagatatagggtaatcaataaaatccatccatgcctttcacacactaagt

SEQ ID NO: 4241 - protein, 564 aa, Homo sapiens; identical to SEQ ID NO: 4023

SEQ ID NO: 4242 - DNA, 3815 bp, Homo sapiens
aaaaaaaaaaaaaaaaaaaaaaaaaaaagaaaaaagaaaaaaaaaaggaggaggaggaggagggtgagagagaagctgggagagcagagaaaaggggccaccggtcgcccccccgcttccccgcacgcgctctccagccgcggccgcccgcctgccgcggtcaccccggcctctgcctctgtcccccagtgatcggatcaaggcgctgagcgaggccctgcctgcggggcggccatgcggcggtgacaggagcgcgaccgacacgcacgggcccctcgccccctctcgcctcccgtccgctcgccagctcccctcagccgaggctgctccgcggcggccgcagcccgcgcgcggcccacactcgcctccccgttgaagatgaggagtcctcggagagcaggatggtggtgacattcctcatgtcagctctcgagtccatgtgtaaagaactggccaagtccaaagccgaagtggcctgcattgcagtgtatgaaacagacgtgtttgtcgtcggaactgaaagaggacgtgcttttgtcaataccagaaaggattttcaaaaagattttgtaaaatattgtgttgaagaagaagaaaaagctgcagagatgcataaaatgaaatctacaacccaggcaaatcggatgagtgtagatgctgtagaaattgaaacactcagaaaaacagttgaggactatttctgcttttgctatgggaaagctttaggcaaatccacagtggtacctgtaccatatgagaagatgctgcgagaccagtcggctgtggtagtgcaggggcttccggaaggtgttgcctttaaacaccccgagaactatgatcttgcaaccctgaaatggattttggagaacaaagcagggatttcattcatcattaagagaccttttttagagccaaagaagcatgtaggtggtcgtgtgatggtaacagatgctgacaggtcaatactatctccaggtggaagttgtggccccatcaaagtgaaaactgaacccacagaagattctggcatttccctggaaatggcagctgtgacagtaaaggaagaatcagaagatcctgattattatcaatataacattcaagcaggcccttctgaaactgatgatgttgatgaaaaacagcccctatcgaagcctttgcaaggaagccaccattcttcagagggcaatgaaggcacagaaatggaagtaccagcagaagatgatgattattctccaccgtctaagagaccaaaggccaatgagctaccgcagccaccagtcccggaacccgccaatgctgggaagcggaaagtgagggagttcaacttcgagaaatggaatgctcgcatcactgatctacgtaaacaagttgaagaattgtttgaaaggaaatatgctcaagccataaaagccaaaggtccggtgacgatcccgtaccctcttttccagtctcatgttgaagatctttatgtagaaggacttcctgaaggaattccttttagaaggccatctacttacggaattcctcgcctggagaggatattacttgcaaaggaaaggattcgttttgtgattaagaaacatgagcttctgaattcaacacgtgaagatttacagcttgataagccagcttcaggagtaaaggaagaatggtatgccagaatcactaaattaagaaagatggtggatcagcttttctgcaaaaaatttgcggaagccttggggagcactgaagccaaggctgtaccgtaccaaaaatttgaggcacacccgaatgatctgtacgtggaaggactgccagaaaacattcctttccgaagtccctcatggtatggaatcccaaggctggaaaaaatcattcaagtgggcaatcgaattaaatttgttattaaaagaccagaacttctgactcacagtaccactgaagttactcagccaagaacgaatacaccagctcaagctcttggactcaccgaggcagtaaaagtaccatatcctgtgtttgaatcaaacccggagttcttgtatgtggaaggcttgccagaggggattcccttccgaagccctacctggtttggaattccacgacttgaaaggatcgtccgcgggagtaataaaatcaagttcgttgttaaaaaacctgaactagttatttcctacttgcctcctgggatggctagtaaaataaacactaaagctttgcagtcccccaaaagaccacgaagtcctgggagtaattcaaaggttcctgaaattgaggtcaccgtggaaggccctaataacaacaatcctcaaacctcagctgttcgaaccccgacccagactaacggttctaacgttcccttcaagccacgagggagagagttttcctttgaggcctggaatgccaaaatcacggacctaaaacagaaagttgaaaatctcttcaatgagaaatgtggggaagctcttggccttaaacaagctgtgaaggtgccgttcgcgttatttgagtctttcccggaagacttttatgtggaaggcttacctgagggtgtgccattccgaagaccatcgacttttggcattccgaggctggagaagatactcagaaacaaagccaaaattaagttcatcattaaaaagcccgaaatgtttgagacggcgattaaggagagcacctcctctaagagccctcccagaaaaataaattcatcacccaatgttaatactactgcatcaggtgttgaagaccttaacatcattcaggtgacaattccagatgatgataatgaaagactctcgaaagttgaaaaagctagacagctaagagaacaagtgaatgacctctttagtcggaaatttggtgaagctattggtatgggttttcctgtgaaagttccctacaggaaaatcacaattaaccctggctgtgtggtggttgatggcatgcccccgggggtgtccttcaaagcccccagctacctggaaatcagctccatgagaaggatcttagactctgccgagtttatcaaattcacggtcattagaccatttccaggacttgtgattaataaccagctggttgatcagagtgagtcagaaggccccgtgatacaagaatcagctgaaccaagccagttggaagttccagccacagaagaaataaaagagactgatggaagctctcagatcaagcaagaaccagaccccacgtggtagacctcttccctcctaggcaaaaccatctggatcacctaacagtcagaggtcagtatctcagcgtgtgaattatagaggaaatacagagagaacctcttccacttttacttttcgtccaaataaaatgcatggtgtaccagaagttgaagatcgggttgaggattggggctagctcgatgacactaaggccccaacatcgcgggacctgctgtggcgcggattcttaggaacgctgttctagccggccccctctccaggggtcgccgtggccggcattatttcctagttcttcttgtaaccctgaggtgccagcgcggggagtgaggaggggtcagggggctaaggatgcaacctctgacgttctgcgccttcctaggagagtcttacatgtgttgagatttcacaagcaatgcgagttgtaaaataccagctctacaagaagctaggctctgtgacggcatagttttcagtagctttatcacaatattcacaatggagaattatatgacatggtagcagaaataggcccttttatgtgttgcttctattttacctcaaattgtagatatagggtaatcaataaaatccatccatgcctttcacacactaagt

SEQ ID NO: 4243 - protein, 933 aa, Homo sapiens; identical to SEQ ID NO: 4083

SEQ ID NO: 4244 - DNA, 4272 bp, Homo sapiens
aaaaaaaaaaaaaaaaaaaaaaaaaaaagaaaaaagaaaaaaaaaaggaggaggaggaggagggtgagagagaagctgggagagcagagaaaaggggccaccggtcgcccccccgcttccccgcacgcgctctccagccgcggccgcccgcctgccgcggtcaccccggcctctgcctctgtcccccagtgatcggatcaaggcgctgagcgaggccctgcctgcggggcggccatgcggcggtgacaggagcgcgaccgacacgcacgggcccctcgccccctctcgcctcccgtccgctcgccagctcccctcagccgaggctgctccgcggcggccgcagcccgcgcgcggcccacactcgcctcccctcggcacccccggccccggagctgcctggaggcggccgcactcggggatcatggcccaagttgcaatgtccaccctccccgttgaagatgaggagtcctcggagagcaggatggtggtgacattcctcatgtcagctctcgagtccatgtgtaaagaactggccaagtccaaagccgaagtggcctgcattgcagtgtatgaaacagacgtgtttgtcgtcggaactgaaagaggacgtgcttttgtcaataccagaaaggattttcaaaaagattttgtaaaatattgtgttgaagaagaagaaaaagctgcagagatgcataaaatgaaatctacaacccaggcaaatcggatgagtgtagatgctgtagaaattgaaacactcagaaaaacagttgaggactatttctgcttttgctatgggaaagctttaggcaaatccacagtggtacctgtaccatatgagaagatgctgcgagaccagtcggctgtggtagtgcaggggcttccggaaggtgttgcctttaaacaccccgagaactatgatcttgcaaccctgaaatggattttggagaacaaagcagggatttcattcatcattaagagaccttttttagagccaaagaagcatgtaggtggtcgtgtgatggtaacagatgctgacaggtcaatactatctccaggtggaagttgtggccccatcaaagtgaaaactgaacccacagaagattctggaagccaccattcttcagagggcaatgaaggcacagaaatggaagtaccagcagaagattctactcaacatgtcccttcagaaacaagtgaggaccctgaagttgaggtgactattgaagatgatgattattctccaccgtctaagagaccaaaggccaatgagctaccgcagccaccagtcccggaacccgccaatgctgggaagcggaaagtgagggagttcaacttcgagaaatggaatgctcgcatcactgatctacgtaaacaagttgaagaattgtttgaaaggaaatatgctcaagccataaaagccaaaggtccggtgacgatcccgtaccctcttttccagtctcatgttgaagatctttatgtagaaggacttcctgaaggaattccttttagaaggccatctacttacggaattcctcgcctggagaggatattacttgcaaaggaaaggattcgttttgtgattaagaaacatgagcttctgaattcaacacgtgaagatttacagcttgataagccagcttcaggagtaaaggaagaatggtatgccagaatcactaaattaagaaagatggtggatcagcttttctgcaaaaaatttgcggaagccttggggagcactgaagccaaggctgtaccgtaccaaaaatttgaggcacacccgaatgatctgtacgtggaaggactgccagaaaacattcctttccgaagtccctcatggtatggaatcccaaggctggaaaaaatcattcaagtgggcaatcgaattaaatttgttattaaaagaccagaacttctgactcacagtaccactgaagttactcagccaagaacgaatacaccagtcaaagaagattggaatgtcagaattaccaagctacggaagcaagtggaagagatttttaatttgaaatttgcttagatttgttgacagcggtttcctggagtgctgtcttgagaacgattctgaggaggctcagcaagaaagagtgtttcagttgattgggtgtgtctgtcatggagaaggaactcaagctcttggactcaccgaggcagtaaaagtaccatatcctgtgtttgaatcaaacccggagttcttgtatgtggaaggcttgccagaggggattcccttccgaagccctacctggtttggaattccacgacttgaaaggatcgtccgcgggagtaataaaatcaagttcgttgttaaaaaacctgaactagttatttcctacttgcctcctgggatggctagtaaaataaacactaaagctttgcagtcccccaaaagaccacgaagtcctgggagtaattcaaaggttcctgaaattgaggtcaccgtggaaggccctaataacaacaatcctcaaacctcagctgttcgaaccccgacccagactaacggttctaacgttcccttcaagccacgagggagagagttttcctttgaggcctggaatgccaaaatcacggacctaaaacagaaagttgaaaatctcttcaatgagaaatgtggggaagctcttggccttaaacaagctgtgaaggtgccgttcgcgttatttgagtctttcccggaagacttttatgtggaaggcttacctgagggtgtgccattccgaagaccatcgacttttggcattccgaggctggagaagatactcagaaacaaagccaaaattaagttcatcattaaaaagcccgaaatgtttgagacggcgattaaggagagcacctcctctaagagccctcccagaaaaataaattcatcacccaatgttaatactactgcatcaggtgttgaagaccttaacatcattcaggtgacaattccagatgatgataatgaaagactctcgaaagttgaaaaagctagacagctaagagaacaagtgaatgacctctttagtcggaaatttggtgaagctattggtatgggttttcctgtgaaagttccctacaggaaaatcacaattaaccctggctgtgtggtggttgatggcatgcccccgggggtgtccttcaaagcccccagctacctggaaatcagctccatgagaaggatcttagactctgccgagtttatcaaattcacggtcattagaccatttccaggacttgtgattaataaccagctggttgatcagagtgagtcagaaggccccgtgatacaagaatcagctgaaccaagccagttggaagttccagccacagaagaaataaaagagactgatggaagctctcagatcaagcaagaaccagaccccacgtggtagacctcttccctcctaggagccttgagttacggtgtttattttccaatcaagtgaagatatctcctacttctcctactggaacatctcagcttctgcagtgaagaaaaattcctgtgatagttcagttctttagtttttctatttgaaaaaaaaaaatcatttaaatgatcctttgttcacggctctccttaatgactgagtgaacagttcctatctgtatatttgactaaaccttttcctaagctatctctcatggttcctatgtttttttatcataattaaaagcaaaaccatctggatcacctaacagtcagaggtcagtatctcagcgtgtgaattatagaggaaatacagagagaacctcttccacttttacttttcgtccaaataaaatgcatggtgtaccagaagttgaagatcgggttgaggattggggctagctcgatgacactaaggccccaacatcgcgggacctgctgtggcgcggattcttaggaacgctgttctagccggccccctctccaggggtcgccgtggccggcattatttcctagttcttcttgtaaccctgaggtgccagcgcggggagtgaggaggggtcagggggctaaggatgcaacctctgacgttctgcgccttcctaggagagtcttacatgtgttgagatttcacaagcaatgcgagttgtaaaataccagctctacaagaagctaggctctgtgacggcatagttttcagtagctttatcacaatattcacaatggagaattatatgacatggtagcagaaataggcccttttatgtgttgcttctattttacctcaaattgtagatatagggtaatcaataaaatccatccatgcctttcacacactaagt

SEQ ID NO: 4245 - protein, 538 aa, Homo sapiens; identical to SEQ ID NO: 4183

SEQ ID NO: 4246 - DNA, 4283 bp, Homo sapiens
aaaaaaaaaaaaaaaaaaaaaaaaaaaagaaaaaagaaaaaaaaaaggaggaggaggaggagggtgagagagaagctgggagagcagagaaaaggggccaccggtcgcccccccgcttccccgcacgcgctctccagccgcggccgcccgcctgccgcggtcaccccggcctctgcctctgtcccccagtgatcggatcaaggcgctgagcgaggccctgcctgcggggcggccatgcggcggtgacaggagcgcgaccgacacgcacgggcccctcgccccctctcgcctcccgtccgctcgccagctcccctcagccgaggctgctccgcggcggccgcagcccgcgcgcggcccacactcgcctcccctcggcacccccggccccggagctgcctggaggcggccgcactcggtgtaaagaactggccaagtccaaagccgaagtggcctgcattgcagtgtatgaaacagacgtgtttgtcgtcggaactgaaagaggacgtgcttttgtcaataccagaaaggattttcaaaaagattttgtaaaatattgtgttgaagaagaagaaaaagctgcagagatgcataaaatgaaatctacaacccaggcaaatcggatgagtgtagatgctgtagaaattgaaacactcagaaaaacagttgaggactatttctgcttttgctatgggaaagctttaggcaaatccacagtggtacctgtaccatatgagaagatgctgcgagaccagtcggctgtggtagtgcaggggcttccggaaggtgttgcctttaaacaccccgagaactatgatcttgcaaccctgaaatggattttggagaacaaagcagggatttcattcatcattaagagaccttttttagagccaaagaagcatgtaggtggtcgtgtgatggtaacagatgctgacaggtcaatactatctccaggtggaagttgtggccccatcaaagtgaaaactgaacccacagaagattctggcatttccctggaaatggcagctgtgacagtaaaggaagaatcagaagatcctgattattatcaatataacattcaaggaagccaccattcttcagagggcaatgaaggcacagaaatggaagtaccagcagaagatgatgattattctccaccgtctaagagaccaaaggccaatgagctaccgcagccaccagtcccggaacccgccaatgctgggaagcggaaagtgagggagttcaacttcgagaaatggaatgctcgcatcactgatctacgtaaacaagttgaagaattgtttgaaaggaaatatgctcaagccataaaagccaaaggtccggtgacgatcccgtaccctcttttccagtctcatgttgaagatctttatgtagaaggacttcctgaaggaattccttttagaaggccatctacttacggaattcctcgcctggagaggatattacttgcaaaggaaaggattcgttttgtgattaagaaacatgagcttctgaattcaacacgtgaagatttacagcttgataagccagcttcaggagtaaaggaagaatggtatgccagaatcactaaattaagaaagatggtggatcagcttttctgcaaaaaatttgcggaagccttggggagcactgaagccaaggctgtaccgtaccaaaaatttgaggcacacccgaatgatctgtacgtggaaggactgccagaaaacattcctttccgaagtccctcatggtatggaatcccaaggctggaaaaaatcattcaagtgggcaatcgaattaaatttgttattaaaagaccagaacttctgactcacagtaccactgaagttactcagccaagaacgaatacaccagctcaagctcttggactcaccgaggcagtaaaagtaccatatcctgtgtttgaatcaaacccggagttcttgtatgtggaaggcttgccagaggggattcccttccgaagccctacctggtttggaattccacgacttgaaaggatcgtccgcgggagtaataaaatcaagttcgttgttaaaaaacctgaactagttatttcctacttgcctcctgggatggctagtaaaataaacactaaagctttgcagtcccccaaaagaccacgaagtcctgggagtaattcaaaggttcctgaaattgaggtcaccgtggaaggccctaataacaacaatcctcaaacctcagctgttcgaaccccgacccagactaacggttctaacgttcccttcaagccacgagggagagagttttcctttgaggcctggaatgccaaaatcacggacctaaaacagaaagttgaaaatctcttcaatgagaaatgtggggaagctcttggccttaaacaagctgtgaaggtgccgttcgcgttatttgagtctttcccggaagacttttatgtggaaggcttacctgagggtgtgccattccgaagaccatcgacttttggcattccgaggctggagaagatactcagaaacaaagccaaaattaagttcatcattaaaaagcccgaaatgtttgagacggcgattaaggagagcacctcctctaagagccctcccagaaaaataaattcatcacccaatgttaatactactgcatcaggtgttgaagaccttaacatcattcaggtgacaattccagatgatgataatgaaagactctcgaaagttgaaaaagctagacagctaagagaacaagtgaatgacctctttagtcggaaatttggtgaagctattggtatgggttttcctgtgaaagttccctacaggaaaatcacaattaaccctggctgtgtggtggttgatggcatgcccccgggggtgtccttcaaagcccccagctacctggaaatcagctccatgagaaggatcttagactctgccgagtttatcaaattcacggtcattagaccatttccaggacttgtgattaataaccagctggttgatcagagtgagtcagaaggccccgtgatacaagaatcagctgaaccaagccagttggaagttccagccacagaagaaataaaagagactgatggaagctctcagatcaagcaagaaccagaccccacgtggtagacctcttccctcctaggcttaaagtatcagtggttgagaagagcttttcggacctgttactaccccaagctgtgtaatatacttgtataacagaaataccttctatacaaacctttttttctacttttagatagaaatgtctactttttcagcagttctgtgaattaaagagcagagtgactgtgggtctggaatggctggtgtacttgggaatgtactatcaggattttacagcaatgctgggaaatgacagggaaaatgacaggaatgaatctcaccagattttttatgtactcagcagagccttgagttacggtgtttattttccaatcaagtgaagatatctcctacttctcctactggaacatctcagcttctgcagtgaagaaaaattcctgtgatagttcagttctttagtttttctatttgaaaaaaaaaaatcatttaaatgatcctttgttcacggctctccttaatgactgagtgaacagttcctatctgtatatttgactaaaccttttcctaagctatctctcatggttcctatgtttttttatcataattaaaagcaaaaccatctggatcacctaacagtcagaggtcagtatctcagcgtgtgaattatagaggaaatacagagagaacctcttccacttttacttttcgtccaaataaaatgcatggtgtaccagaagttgaagatcgggttgaggattggggctagctcgatgacactaaggccccaacatcgcgggacctgctgtggcgcggattcttaggaacgctgttctagccggccccctctccaggggtcgccgtggccggcattatttcctagttcttcttgtaaccctgaggtgccagcgcggggagtgaggaggggtcagggggctaaggatgcaacctctgacgttctgcgccttcctaggagagtcttacatgtgttgagatttcacaagcaatgcgagttgtaaaataccagctctacaagaagctaggctctgtgacggcatagttttcagtagctttatcacaatattcacaatggagaattatatgacatggtagcagaaataggcccttttatgtgttgcttctattttacctcaaattgtagatatagggtaatcaataaaatccatccatgcctttcacacactaagt

SEQ ID NO: 4247 - protein, 844 aa, Homo sapiens
MHKMKSTTQANRMSVDAVEIETLRKTVEDYFCFCYGKALGKSTVVPVPYEKMLRDQSAVVVQGLPEGVAFKHPENYDLATLKWILENKAGISFIIKRPFLEPKKHVGGRVMVTDADRSILSPGGSCGPIKVKTEPTEDSGISLEMAAVTVKEESEDPDYYQYNIQGSHHSSEGNEGTEMEVPAEDDDYSPPSKRPKANELPQPPVPEPANAGKRKVREFNFEKWNARITDLRKQVEELFERKYAQAIKAKGPVTIPYPLFQSHVEDLYVEGLPEGIPFRRPSTYGIPRLERILLAKERIRFVIKKHELLNSTREDLQLDKPASGVKEEWYARITKLRKMVDQLFCKKFAEALGSTEAKAVPYQKFEAHPNDLYVEGLPENIPFRSPSWYGIPRLEKIIQVGNRIKFVIKRPELLTHSTTEVTQPRTNTPAQALGLTEAVKVPYPVFESNPEFLYVEGLPEGIPFRSPTWFGIPRLERIVRGSNKIKFVVKKPELVISYLPPGMASKINTKALQSPKRPRSPGSNSKVPEIEVTVEGPNNNNPQTSAVRTPTQTNGSNVPFKPRGREFSFEAWNAKITDLKQKVENLFNEKCGEALGLKQAVKVPFALFESFPEDFYVEGLPEGVPFRRPSTFGIPRLEKILRNKAKIKFIIKKPEMFETAIKESTSSKSPPRKINSSPNVNTTASGVEDLNIIQVTIPDDDNERLSKVEKARQLREQVNDLFSRKFGEAIGMGFPVKVPYRKITINPGCVVVDGMPPGVSFKAPSYLEISSMRRILDSAEFIKFTVIRPFPGLVINNQLVDQSESEGPVIQESAEPSQLEVPATEEIKETDGSSQIKQEPDPTW

SEQ ID NO: 4248 - DNA, 5122 bp, Homo sapiens
aaaaaaaaaaaaaaaaaaaaaaaaaaaagaaaaaagaaaaaaaaaaggaggaggaggaggagggtgagagagaagctgggagagcagagaaaaggggccaccggtcgcccccccgcttccccgcacgcgctctccagccgcggccgcccgcctgccgcggtcaccccggcctctgcctctgtcccccagtgatcggatcaaggcgctgagcgaggccctgcctgcggggcggccatgcggcggtgacaggagcgcgaccgacacgcacgggcccctcgccccctctcgcctcccgtccgctcgccagctcccctcagccgaggctgctccgcggcggccgcagcccgcgcgcggcccacactcgcctccccgttgaagatgaggagtcctcggagagcaggatggtggtgacattcctcatgtcagctctcgagtccatgtgtaaagaactggccaagtccaaagccgaagtggcctgcattgcagtgtatgaaacagacgtgtttgtcgtcggaactgaaagaggacgtgcttttgtcaataccagaaaggattttcaaaaagattttgtaaaatattgtgttgaagaagaagaaaaagctgcagagatgcataaaatgaaatctacaacccaggcaaatcggatgagtgtagatgctgtagaaattgaaacactcagaaaaacagttgaggactatttctgcttttgctatgggaaagctttaggcaaatccacagtggtacctgtaccatatgagaagatgctgcgagaccagtcggctgtggtagtgcaggggcttccggaaggtgttgcctttaaacaccccgagaactatgatcttgcaaccctgaaatggattttggagaacaaagcagggatttcattcatcattaagagaccttttttagagccaaagaagcatgtaggtggtcgtgtgatggtaacagatgctgacaggtcaatactatctccaggtggaagttgtggccccatcaaagtgaaaactgaacccacagaagattctggcatttccctggaaatggcagctgtgacagtaaaggaagaatcagaagatcctgattattatcaatataacattcaagcaggcccttctgaaactgatgatgttgatgaaaaacagcccctatcgaagcctttgcaaggaagccaccattcttcagagggcaatgaaggcacagaaatggaagtaccagcagaagattctactcaacatgtcccttcagaaacaagtgaggaccctgaagttgaggtgactattgaagatgatgattattctccaccgtctaagagaccaaaggccaatgagctaccgcagccaccagtcccggaacccgccaatgctgggaagcggaaagtgagggagttcaacttcgagaaatggaatgctcgcatcactgatctacgtaaacaagttgaagaattgtttgaaaggaaatatgctcaagccataaaagccaaaggtccggtgacgatcccgtaccctcttttccagtctcatgttgaagatctttatgtagaaggacttcctgaaggaattccttttagaaggccatctacttacggaattcctcgcctggagaggatattacttgcaaaggaaaggattcgttttgtgattaagaaacatgagcttctgaattcaacacgtgaagatttacagcttgataagccagcttcaggagtaaaggaagaatggtatgccagaatcactaaattaagaaagatggtggatcagcttttctgcaaaaaatttgcggaagccttggggagcactgaagccaaggctgtaccgtaccaaaaatttgaggcacacccgaatgatctgtacgtggaaggactgccagaaaacattcctttccgaagtccctcatggtatggaatcccaaggctggaaaaaatcattcaagtgggcaatcgaattaaatttgttattaaaagaccagaacttctgactcacagtaccactgaagttactcagccaagaacgaatacaccagctcaagctcttggactcaccgaggcagtaaaagtaccatatcctgtgtttgaatcaaacccggagttcttgtatgtggaaggcttgccagaggggattcccttccgaagccctacctggtttggaattccacgacttgaaaggatcgtccgcgggagtaataaaatcaagttcgttgttaaaaaacctgaactagttatttcctacttgcctcctgggatggctagtaaaataaacactaaagctttgcagtcccccaaaagaccacgaagtcctgggagtaattcaaaggttcctgaaattgaggtcaccgtggaaggccctaataacaacaatcctcaaacctcagctgttcgaaccccgacccagactaacggttctaacgttcccttcaagccacgagggagagagttttcctttgaggcctggaatgccaaaatcacggacctaaaacagaaagttgaaaatctcttcaatgagaaatgtggggaagctcttggccttaaacaagctgtgaaggtgccgttcgcgttatttgagtctttcccggaagacttttatgtggaaggcttacctgagggtgtgccattccgaagaccatcgacttttggcattccgaggctggagaagatactcagaaacaaagccaaaattaagttcatcattaaaaagcccgaaatgtttgagacggcgattaaggagagcacctcctctaagagccctcccagaaaaataaattcatcacccaatgttaatactactgcatcaggtgttgaagaccttaacatcattcaggtgacaattccagatgatgataatgaaagactctcgaaagttgaaaaagctagacagctaagagaacaagtgaatgacctctttagtcggaaatttggtgaagctattggtatgggttttcctgtgaaagttccctacaggaaaatcacaattaaccctggctgtgtggtggttgatggcatgcccccgggggtgtccttcaaagcccccagctacctggaaatcagctccatgagaaggatcttagactctgccgagtttatcaaattcacggtcattagaccatttccaggacttgtgattaataaccagctggttgatcagagtgagtcagaaggccccgtgatacaagaatcagctgaaccaagccagttggaagttccagccacagaagaaataaaagagactgatggaagctctcagatcaagcaagaaccagaccccacgtggtagacctcttccctcctagggtaaatcagcttctgtgtcagggatgctgtgtggtgtccatctgaaccccctgcatacgcgtagctaatgtgatctccccactttcacataagatggtggccctgccttcagggaatgtgggagccaggtgggagccttcccggatatttaagctagaagattctacagggagattctccttggatcaatatatgtctctcagtcaaagatgtaaaagcacttttgccttaaaaagaatgttctgtttctaaatagagtcaacgttgtcctcctcattggaattcactatgagtcagaatcattagactgacttttttttttccatagtaatagtattttgcagagtctcacagagctgcagatcttttgttcatcttgcagagttaacaagtctgatcctgttagtccagatttcttaaatttggccaagttataataggagcagtagcttgagacccgaagtcaggaaactttgacaatggatttttttttttaatccagagacttgtactggaatttgccttaccctgtcagctcatggacttaaggtttcatcccgctttatgagtgcttctgaatccaagtcattgttacctgaatttgcaaattaagttgtgatattcgtgactgttaaattcctgtaattagattaacctctttgcttgcttgtttgttttctctcctattttagcttaaagtatcagtggttgagaagagcttttcggacctgttactaccccaagctgtgtaatatacttgtataacagaaataccttctatacaaacctttttttctacttttagatagaaatgtctactttttcagcagttctgtgaattaaagagcagagtgactgtgggtctggaatggctggtgtacttgggaatgtactatcaggattttacagcaatgctgggaaatgacagggaaaatgacaggaatgaatctcaccagattttttatgtactcagcagagccttgagttacggtgtttattttccaatcaagtgaagatatctcctacttctcctactggaacatctcagcttctgcagtgaagaaaaattcctgtgatagttcagttctttagtttttctatttgaaaaaaaaaaatcatttaaatgatcctttgttcacggctctccttaatgactgagtgaacagttcctatctgtatatttgactaaaccttttcctaagctatctctcatggttcctatgtttttttatcataattaaaagcaaaaccatctggatcacctaacagtcagaggtcagtatctcagcgtgtgaattatagaggaaatacagagagaacctcttccacttttacttttcgtccaaataaaatgcatggtgtaccagaagttgaagatcgggttgaggattggggctagctcgatgacactaaggccccaacatcgcgggacctgctgtggcgcggattcttaggaacgctgttctagccggccccctctccaggggtcgccgtggccggcattatttcctagttcttcttgtaaccctgaggtgccagcgcggggagtgaggaggggtcagggggctaaggatgcaacctctgacgttctgcgccttcctaggagagtcttacatgtgttgagatttcacaagcaatgcgagttgtaaaataccagctctacaagaagctaggctctgtgacggcatagttttcagtagctttatcacaatattcacaatggagaattatatgacatggtagcagaaataggcccttttatgtgttgcttctattttacctcaaattgtagatatagggtaatcaataaaatccatccatgcctttcacacactaagt

SEQ ID NO: 4249 - protein, 954 aa, Homo sapiens
MVVTFLMSALESMCKELAKSKAEVACIAVYETDVFVVGTERGRAFVNTRKDFQKDFVKYCVEEEEKAAEMHKMKSTTQANRMSVDAVEIETLRKTVEDYFCFCYGKALGKSTVVPVPYEKMLRDQSAVVVQGLPEGVAFKHPENYDLATLKWILENKAGISFIIKRPFLEPKKHVGGRVMVTDADRSILSPGGSCGPIKVKTEPTEDSGISLEMAAVTVKEESEDPDYYQYNIQAGPSETDDVDEKQPLSKPLQGSHHSSEGNEGTEMEVPAEDSTQHVPSETSEDPEVEVTIEDDDYSPPSKRPKANELPQPPVPEPANAGKRKVREFNFEKWNARITDLRKQVEELFERKYAQAIKAKGPVTIPYPLFQSHVEDLYVEGLPEGIPFRRPSTYGIPRLERILLAKERIRFVIKKHELLNSTREDLQLDKPASGVKEEWYARITKLRKMVDQLFCKKFAEALGSTEAKAVPYQKFEAHPNDLYVEGLPENIPFRSPSWYGIPRLEKIIQVGNRIKFVIKRPELLTHSTTEVTQPRTNTPAQALGLTEAVKVPYPVFESNPEFLYVEGLPEGIPFRSPTWFGIPRLERIVRGSNKIKFVVKKPELVISYLPPGMASKINTKALQSPKRPRSPGSNSKVPEIEVTVEGPNNNNPQTSAVRTPTQTNGSNVPFKPRGREFSFEAWNAKITDLKQKVENLFNEKCGEALGLKQAVKVPFALFESFPEDFYVEGLPEGVPFRRPSTFGIPRLEKILRNKAKIKFIIKKPEMFETAIKESTSSKSPPRKINSSPNVNTTASGVEDLNIIQVTIPDDDNERLSKVEKARQLREQVNDLFSRKFGEAIGMGFPVKVPYRKITINPGCVVVDGMPPGVSFKAPSYLEISSMRRILDSAEFIKFTVIRPFPGLVINNQLVDQSESEGPVIQESAEPSQLEVPATEEIKETDGSSQIKQEPDPTW

SEQ ID NO: 4250 - DNA, 5067 bp, Homo sapiens
aaaaaaaaaaaaaaaaaaaaaaaaaaaagaaaaaagaaaaaaaaaaggaggaggaggaggagggtgagagagaagctgggagagcagagaaaaggggccaccggtcgcccccccgcttccccgcacgcgctctccagccgcggccgcccgcctgccgcggtcaccccggcctctgcctctgtcccccagtgatcggatcaaggcgctgagcgaggccctgcctgcggggcggccatgcggcggtgacaggagcgcgaccgacacgcacgggcccctcgccccctctcgcctcccgtccgctcgccagctcccctcagccgaggctgctccgcggcggccgcagcccgcgcgcggcccacactcgcctccccgttgaagatgaggagtcctcggagagcaggatggtggtgacattcctcatgtcagctctcgagtccatgtgtaaagaactggccaagtccaaagccgaagtggcctgcattgcagtgtatgaaacagacgtgtttgtcgtcggaactgaaagaggacgtgcttttgtcaataccagaaaggattttcaaaaagattttgtaaaatattgtgttgaagaagaagaaaaagctgcagagatgcataaaatgaaatctacaacccaggcaaatcggatgagtgtagatgctgtagaaattgaaacactcagaaaaacagttgaggactatttctgcttttgctatgggaaagctttaggcaaatccacagtggtacctgtaccatatgagaagatgctgcgagaccagtcggctgtggtagtgcaggggcttccggaaggtgttgcctttaaacaccccgagaactatgatcttgcaaccctgaaatggattttggagaacaaagcagggatttcattcatcattaagagaccttttttagagccaaagaagcatgtaggtggtcgtgtgatggtaacagatgctgacaggtcaatactatctccaggtggaagttgtggccccatcaaagtgaaaactgaacccacagaagattctggcatttccctggaaatggcagctgtgacagtaaaggaagaatcagaagatcctgattattatcaatataacattcaaggaagccaccattcttcagagggcaatgaaggcacagaaatggaagtaccagcagaagattctactcaacatgtcccttcagaaacaagtgaggaccctgaagttgaggtgactattgaagatgatgattattctccaccgtctaagagaccaaaggccaatgagctaccgcagccaccagtcccggaacccgccaatgctgggaagcggaaagtgagggagttcaacttcgagaaatggaatgctcgcatcactgatctacgtaaacaagttgaagaattgtttgaaaggaaatatgctcaagccataaaagccaaaggtccggtgacgatcccgtaccctcttttccagtctcatgttgaagatctttatgtagaaggacttcctgaaggaattccttttagaaggccatctacttacggaattcctcgcctggagaggatattacttgcaaaggaaaggattcgttttgtgattaagaaacatgagcttctgaattcaacacgtgaagatttacagcttgataagccagcttcaggagtaaaggaagaatggtatgccagaatcactaaattaagaaagatggtggatcagcttttctgcaaaaaatttgcggaagccttggggagcactgaagccaaggctgtaccgtaccaaaaatttgaggcacacccgaatgatctgtacgtggaaggactgccagaaaacattcctttccgaagtccctcatggtatggaatcccaaggctggaaaaaatcattcaagtgggcaatcgaattaaatttgttattaaaagaccagaacttctgactcacagtaccactgaagttactcagccaagaacgaatacaccagtcaaagaagattggaatgtcagaattaccaagctacggaagcaagtggaagagatttttaatttgaaatttgctcaagctcttggactcaccgaggcagtaaaagtaccatatcctgtgtttgaatcaaacccggagttcttgaaaggatcgtccgcgggagtaataaaatcaagttcgttgttaaaaaacctgaactagttatttcctacttgcctcctgggatggctagtaaaataaacactaaagctttgcagtcccccaaaagaccacgaagtcctgggagtaattcaaaggttcctgaaattgaggtcaccgtggaaggccctaataacaacaatcctcaaacctcagctgttcgaaccccgacccagactaacggttctaacgttcccttcaagccacgagggagagagttttcctttgaggcctggaatgccaaaatcacggacctaaaacagaaagttgaaaatctcttcaatgagaaatgtggggaagctcttggccttaaacaagctgtgaaggtgccgttcgcgttatttgagtctttcccggaagacttttatgtggaaggcttacctgagggtgtgccattccgaagaccatcgacttttggcattccgaggctggagaagatactcagaaacaaagccaaaattaagttcatcattaaaaagcccgaaatgtttgagacggcgattaaggagagcacctcctctaagagccctcccagaaaaataaattcatcacccaatgttaatactactgcatcaggtgttgaagaccttaacatcattcaggtgacaattccagatgatgataatgaaagactctcgaaagttgaaaaagctagacagctaagagaacaagtgaatgacctctttagtcggaaatttggtgaagctattggtatgggttttcctgtgaaagttccctacaggaaaatcacaattaaccctggctgtgtggtggttgatggcatgcccccgggggtgtccttcaaagcccccagctacctggaaatcagctccatgagaaggatcttagactctgccgagtttatcaaattcacggtcattagaccatttccaggacttgtgattaataaccagctggttgatcagagtgagtcagaaggccccgtgatacaagaatcagctgaaccaagccagttggaagttccagccacagaagaaataaaagagactgatggaagctctcagatcaagcaagaaccagaccccacgtggtagacctcttccctcctagggtaaatcagcttctgtgtcagggatgctgtgtggtgtccatctgaaccccctgcatacgcgtagctaatgtgatctccccactttcacataagatggtggccctgccttcagggaatgtgggagccaggtgggagccttcccggatatttaagctagaagattctacagggagattctccttggatcaatatatgtctctcagtcaaagatgtaaaagcacttttgccttaaaaagaatgttctgtttctaaatagagtcaacgttgtcctcctcattggaattcactatgagtcagaatcattagactgacttttttttttccatagtaatagtattttgcagagtctcacagagctgcagatcttttgttcatcttgcagagttaacaagtctgatcctgttagtccagatttcttaaatttggccaagttataataggagcagtagcttgagacccgaagtcaggaaactttgacaatggatttttttttttaatccagagacttgtactggaatttgccttaccctgtcagctcatggacttaaggtttcatcccgctttatgagtgcttctgaatccaagtcattgttacctgaatttgcaaattaagttgtgatattcgtgactgttaaattcctgtaattagattaacctctttgcttgcttgtttgttttctctcctattttagcttaaagtatcagtggttgagaagagcttttcggacctgttactaccccaagctgtgtaatatacttgtataacagaaataccttctatacaaacctttttttctacttttagatagaaatgtctactttttcagcagttctgtgaattaaagagcagagtgactgtgggtctggaatggctggtgtacttgggaatgtactatcaggattttacagcaatgctgggaaatgacagggaaaatgacaggaatgaatctcaccagattttttatgtactcagcagagccttgagttacggtgtttattttccaatcaagtgaagatatctcctacttctcctactggaacatctcagcttctgcagtgaagaaaaattcctgtgatagttcagttctttagtttttctatttgaaaaaaaaaaatcatttaaatgatcctttgttcacggctctccttaatgactgagtgaacagttcctatctgtatatttgactaaaccttttcctaagctatctctcatggttcctatgtttttttatcataattaaaagcaaaaccatctggatcacctaacagtcagaggtcagtatctcagcgtgtgaattatagaggaaatacagagagaacctcttccacttttacttttcgtccaaataaaatgcatggtgtaccagaagttgaagatcgggttgaggattggggctagctcgatgacactaaggccccaacatcgcgggacctgctgtggcgcggattcttaggaacgctgttctagccggccccctctccaggggtcgccgtggccggcattatttcctagttcttcttgtaaccctgaggtgccagcgcggggagtgaggaggggtcagggggctaaggatgcaacctctgacgttctgcgccttcctaggagagtcttacatgtgttgagatttcacaagcaatgcgagttgtaaaataccagctctacaagaagctaggctctgtgacggcatagttttcagtagctttatcacaatattcacaatggagaattatatgacatggtagcagaaataggcccttttatgtgttgcttctattttacctcaaattgtagatatagggtaatcaataaaatccatccatgcctttcacacactaagt

SEQ ID NO: 4251 - protein, 585 aa, Homo sapiens; identical to SEQ ID NO: 4199

SEQ ID NO: 4252 - DNA, 7239 bp, Homo sapiens
aaaaaaaaaaaaaaaaaaaaaaaaaaaagaaaaaagaaaaaaaaaaggaggaggaggaggagggtgagagagaagctgggagagcagagaaaaggggccaccggtcgcccccccgcttccccgcacgcgctctccagccgcggccgcccgcctgccgcggtcaccccggcctctgcctctgtcccccagtgatcggatcaaggcgctgagcgaggccctgcctgcggggcggccatgcggcggtgacaggagcgcgaccgacacgcacgggcccctcgccccctctcgcctcccgtccgctcgccagctcccctcagccgaggctgctccgcggcggccgcagcccgcgcgcggcccacactcgcctcccctcggcacccccggccccggagctgcctggaggcggccgcactcggtgtaaagaactggccaagtccaaagccgaagtggcctgcattgcagtgtatgaaacagacgtgtttgtcgtcggaactgaaagaggacgtgcttttgtcaataccagaaaggattttcaaaaagattttgtaaaatattgtgttgaagaagaagaaaaagctgcagagatgcataaaatgaaatctacaacccaggcaaatcggatgagtgtagatgctgtagaaattgaaacactcagaaaaacagttgaggactatttctgcttttgctatgggaaagctttaggcaaatccacagtggtacctgtaccatatgagaagatgctgcgagaccagtcggctgtggtagtgcaggggcttccggaaggtgttgcctttaaacaccccgagaactatgatcttgcaaccctgaaatggattttggagaacaaagcagggatttcattcatcattaagagaccttttttagagccaaagaagcatgtaggtggtcgtgtgatggtaacagatgctgacaggtcaatactatctccaggtggaagttgtggccccatcaaagtgaaaactgaacccacagaagattctggcatttccctggaaatggcagctgtgacagtaaaggaagaatcagaagatcctgattattatcaatataacattcaagcaggcccttctgaaactgatgatgttgatgaaaaacagcccctatcgaagcctttgcaaggaagccaccattcttcagagggcaatgaaggcacagaaatggaagtaccagcagaagattctactcaacatgtcccttcagaaacaagtgaggaccctgaagttgaggtgactattgaagatgatgattattctccaccgtctaagagaccaaaggccaatgagctaccgcagccaccagtcccggaacccgccaatgctgggaagcggaaagtgagggagttcaacttcgagaaatggaatgctcgcatcactgatctacgtaaacaagttgaagaattgtttgaaaggaaatatgctcaagccataaaagccaaaggtccggtgacgatcccgtaccctcttttccagtctcatgttgaagatctttatgtagaaggacttcctgaaggaattccttttagaaggccatctacttacggaattcctcgcctggagaggatattacttgcaaaggaaaggattcgttttgtgattaagaaacatgagcttctgaattcaacacgtgaagatttacagcttgataagccagcttcaggagtaaaggaagaatggtatgccagaatcactaaattaagaaagatggtggatcagcttttctgcaaaaaatttgcggaagccttggggagcactgaagccaaggctgtaccgtaccaaaaatttgaggcacacccgaatgatctgtacgtggaaggactgccagaaaacattcctttccgaagtccctcatggtatggaatcccaaggctggaaaaaatcattcaagtgggcaatcgaattaaatttgttattaaaagaccagaacttctgactcacagtaccactgaagttactcagccaagaacgaatacaccagtcaaagaagattggaatgtcagaattaccaagctacggaagcaagtggaagagatttttaatttgaaatttgctcaagctcttggactcaccgaggcagtaaaagtaccatatcctgtgtttgaatcaaacccggagttcttgtatgtggaaggcttgccagaggggattcccttccgaagccctacctggtttggaattccacgacttgaaaggatcgtccgcgggagtaataaaatcaagttcgttgttaaaaaacctgaactagttatttcctacttgcctcctgggatggctagtaaaataaacactaaagctttgcagtcccccaaaagaccacgaagtcctgggagtaattcaaaggttcctgaaattgaggtcaccgtggaaggccctaataacaacaatcctcaaacctcagctgttcgaaccccgacccagactaacggttctaacgttcccttcaagccacgagggagagagttttcctttgaggcctggaatgccaaaatcacggacctaaaacagaaagttgaaaatctcttcaatgagaaatgtggggaagctcttggccttaaacaagctgtgaaggtgccgttcgcgttatttgagtctttcccggaagacttttatgtggaaggcttacctgagggtgtgccattccgaagaccatcgacttttggcattccgaggctggagaagatactcagaaacaaagccaaaattaagttcatcattaaaaagcccgaaatgtttgagacggcgattaaggagagcacctcctctaagagccctcccagaaaaataaattcatcacccaatgttaatactactgcatcaggtgttgaagaccttaacatcattcaggtgacaattccagatgatgataatgaaagactctcgaaagttgaaaaagctagacagctaagagaacaagtgaatgacctctttagtcggaaatttggtgaagctattggtatgggttttcctgtgaaagttccctacaggaaaatcacaattaaccctggctgtgtggtggttgatggcatgcccccgggggtgtccttcaaagcccccagctacctggaaatcagctccatgagaaggatcttagactctgccgagtttatcaaattcacggtcattaggtaagtgagagtttcctgcttagtcacaggagcgaatctggagctcatgaggctgactcttctaaaatgcagccacaggtagtcatcgaatccggcttcctatgctgtgcaatcaacaaatcaaaataacttgtgtcatcattagaatgtcagatgtgcttctacgaactaagctgactcttttaattctttggcaaagggttggcaaactaggactgtttgccaaattcaggctgcctcctatttttagagtcttcctgaaacacagctacacccgtattatccatggctgctttcctgtcacagtgagtaagtagctgggactgagaaggcatggcctccaaagtctaaaatatttactctctagcactttgtagaaaaaccttagctaggcacagtggctaacgcctgtaatcccagcattttgggaggccaaggcaggcagatcacctgaggtcaggagttccagaccagcctggccaacatggtgaaatcccatctctacaaaaataaaacagttagctgggcatgatggcgggtgcctgtaatcccagctactcgggaggctgaggcaggatagtcgcttgaacccaggaggtggaggttgcaatgagccaagatcatgccactgcactccagcctggacgacagagtgagactccatcacaagaaaaaaagaactttgtcaacctctgtcttagggcgccttgtcacaggcttcgggtcagacggattcaaccttgcatcagccatttgttagccaggtcactctgttctttgtctgtaaatgagattgatcgttgttcccactgagagtgtcagctccttcccgtagagcaggcatgatgattgtactcacctctgacaccattgtgagtgccacattccttcccacgtccttgtcactgtaagagatgcccacctgagcaccaaccccaggttatcttcccctttgtcttccagccccccagaaacagctacgactcaacctacccaatcatttcatcatcagattgccactgtctctagttcaggtctcttgggactggcactcagaaatctcataataaatcctcttgaggcttctcatacactcgtcttcttccaatcttctttccctcaaaatctcatattttggttccacttcacccaccgtcattctccatatcactcccaggagttaggcaaaaagccccttccgttcttccgtatgttaaacttagaatcactctgttccctgctctgcgtttctattttttgtttttcctccatttactagtagcttaacactttctaacagtgttcttattattgatacgtatctatctcttccataagcttataaggtcacggataatacttctcattgtagtacgtaaatgacgtgggctagatatgagttgaataaacagttatacctgtaaattcttacagagtgaaaataaattgttatactttacaatttgtttctctctttagaccatttccaggacttgtgattaataaccgtgagtattttgtgaagtgttttgtttttgttttttcctggggtctgacgtgtgtgcgtgtgagtgtgtatacatgcttaacgtatatcacgttacttcacctatgtcagtaaccaggccaaatacttgttttagccctcagtaaaaacaccaggcacttcctagttgtaaaattattcaagcttcttaacttcctatcctcgatgcacttaatcataaaatggtaataatagcaccgattttgggggagtcgttccagtagatggaaagcatctggaacaggtgtcagcaagctcctgccgacgtgtatgcataaagttttattgaaaccaccatcgtgtccatttgtttatggcagaactgagagatggcagcagcaagtgtgtgcctgcaaaacctaaaatatttactaattggctctgcaagaaaagagtttgcatccccctaacctagaacagtgtctagcctctagtatgtgtttagcctacagtatgtgctcagcgaatacaatctatatttattactgcttttatgactgttataattactgtgcttggatttcgttacaaagtaagtcacaatgtgcctgcttctgttagtatttcagcacagtgcctggcacacatggggctctcaaatattgctgagcgagtgaacaaatgtcctttcaattccttaacgttgatgtcattttcaatagtattttgagccaaacttaattttgcgagtgtgttttgttttcttaactttattattaaaaatgtataaaagtgaggccaggcgtggtggctcacgcctgtaatcccagcagtttgggaggctgaggcaggcggatcagttgaggttgggagttggagaccagcccgtccaacatggtgaaagcctgtctctactaaaaatacaaaaatcagctgggtgtggtggcgcgtgcctgtaatcccagctactcaggaggctgaggcaggagagttgcttgaatcctagaggtggaggttgcagtgagctgagatcgtgccattgcactccagcctgggcaacaagagcaaaactctgtcccaataaataaataaataaaatgttctcttttgttcctgttcttgtgcggtagtgtggtatagagttttatggtaattactgtgaattagtgattctgagggacatatcagaactctgaggtttgtttccttctcatcttgagggaaacagcaaatgtatgttaaaatgcttttccaagggaacaacacatccttacattatttaaaccaatctgcttcattttcagagctggttgatcagagtgagtcagaaggccccgtgatacaagaatcagctgaaccaagccagttggaagttccagccacagaagaaataaaagagactgatggaagctctcagatcaagcaagaaccagaccccacgtggtagacctcttccctcctaggcttaaagtatcagtggttgagaagagcttttcggacctgttactaccccaagctgtgtaatatacttgtataacagaaataccttctatacaaacctttttttctacttttagatagaaatgtctactttttcagcagttctgtgaattaaagagcagagtgactgtgggtctggaatggctggtgtacttgggaatgtactatcaggattttacagcaatgctgggaaatgacagggaaaatgacaggaatgaatctcaccagattttttatgtactcagcagagccttgagttacggtgtttattttccaatcaagtgaagatatctcctacttctcctactggaacatctcagcttctgcagtgaagaaaaattcctgtgatagttcagttctttagtttttctatttgaaaaaaaaaaatcatttaaatgatcctttgttcacggctctccttaatgactgagtgaacagttcctatctgtatatttgactaaaccttttcctaagctatctctcatggttcctatgtttttttatcataattaaaagcaaaaccatctggatcacctaacagtcagaggtcagtatctcagcgtgtgaattatagaggaaatacagagagaacctcttccacttttacttttcgtccaaataaaatgcatggtgtaccagaagttgaagatcgggttgaggattggggctagctcgatgacactaaggccccaacatcgcgggacctgctgtggcgcggattcttaggaacgctgttctagccggccccctctccaggggtcgccgtggccggcattatttcctagttcttcttgtaaccctgaggtgccagcgcggggagtgaggaggggtcagggggctaaggatgcaacctctgacgttctgcgccttcctaggagagtcttacatgtgttgagatttcacaagcaatgcgagttgtaaaataccagctctacaagaagctaggctctgtgacggcatagttttcagtagctttatcacaatattcacaatggagaattatatgacatggtagcagaaataggcccttttatgtgttgcttctattttacctcaaattgtagatatagggtaatcaataaaatccatccatgcctttcacacactaagt

SEQ ID NO: 4253 - protein, 853 aa, Homo sapiens
MHKMKSTTQANRMSVDAVEIETLRKTVEDYFCFCYGKALGKSTVVPVPYEKMLRDQSAVVVQGLPEGVAFKHPENYDLATLKWILENKAGISFIIKRPFLEPKKHVGGRVMVTDADRSILSPGGSCGPIKVKTEPTEDSGISLEMAAVTVKEESEDPDYYQYNIQAGPSETDDVDEKQPLSKPLQGSHHSSEGNEGTEMEVPAEDSTQHVPSETSEDPEVEVTIEDDDYSPPSKRPKANELPQPPVPEPANAGKRKVREFNFEKWNARITDLRKQVEELFERKYAQAIKAKGPVTIPYPLFQSHVEDLYVEGLPEGIPFRRPSTYGIPRLERILLAKERIRFVIKKHELLNSTREDLQLDKPASGVKEEWYARITKLRKMVDQLFCKKFAEALGSTEAKAVPYQKFEAHPNDLYVEGLPENIPFRSPSWYGIPRLEKIIQVGNRIKFVIKRPELLTHSTTEVTQPRTNTPVKEDWNVRITKLRKQVEEIFNLKFAQALGLTEAVKVPYPVFESNPEFLYVEGLPEGIPFRSPTWFGIPRLERIVRGSNKIKFVVKKPELVISYLPPGMASKINTKALQSPKRPRSPGSNSKVPEIEVTVEGPNNNNPQTSAVRTPTQTNGSNVPFKPRGREFSFEAWNAKITDLKQKVENLFNEKCGEALGLKQAVKVPFALFESFPEDFYVEGLPEGVPFRRPSTFGIPRLEKILRNKAKIKFIIKKPEMFETAIKESTSSKSPPRKINSSPNVNTTASGVEDLNIIQVTIPDDDNERLSKVEKARQLREQVNDLFSRKFGEAIGMGFPVKVPYRKITINPGCVVVDGMPPGVSFKAPSYLEISSMRRILDSAEFIKFTVIR

SEQ ID NO: 4254 - DNA, 4136 bp, Homo sapiens
aaaaaaaaaaaaaaaaaaaaaaaaaaaagaaaaaagaaaaaaaaaaggaggaggaggaggagggtgagagagaagctgggagagcagagaaaaggggccaccggtcgcccccccgcttccccgcacgcgctctccagccgcggccgcccgcctgccgcggtcaccccggcctctgcctctgtcccccagtgatcggatcaaggcgctgagcgaggccctgcctgcggggcggccatgcggcggtgacaggagcgcgaccgacacgcacgggcccctcgccccctctcgcctcccgtccgctcgccagctcccctcagccgaggctgctccgcggcggccgcagcccgcgcgcggcccacactcgcctccccgttgaagatgaggagtcctcggagagcaggatggtggtgacattcctcatgtcagctctcgagtccatgtgtaaagaactggccaagtccaaagccgaagtggcctgcattgcagtgtatgaaacagacgtgtttgtcgtcggaactgaaagaggacgtgcttttgtcaataccagaaaggattttcaaaaagattttgtaaaatattgtgttgaagaagaagaaaaagctgcagagatgcataaaatgaaatctacaacccaggcaaatcggatgagtgtagatgctgtagaaattgaaacactcagaaaaacagttgaggactatttctgcttttgctatgggaaagctttaggcaaatccacagtggtacctgtaccatatgagaagatgctgcgagaccagtcggctgtggtagtgcaggggcttccggaaggtgttgcctttaaacaccccgagaactatgatcttgcaaccctgaaatggattttggagaacaaagcagggatttcattcatcattaagagaccttttttagagccaaagaagcatgtaggtggtcgtgtgatggtaacagatgctgacaggtcaatactatctccaggtggaagttgtggccccatcaaagtgaaaactgaacccacagaagattctggaagccaccattcttcagagggcaatgaaggcacagaaatggaagtaccagcagaagattctactcaacatgtcccttcagaaacaagtgaggaccctgaagttgaggtgactattgaagatgatgattattctccaccgtctaagagaccaaaggccaatgagctaccgcagccaccagtcccggaacccgccaatgctgggaagcggaaagtgagggagttcaacttcgagaaatggaatgctcgcatcactgatctacgtaaacaagttgaagaattgtttgaaaggaaatatgctcaagccataaaagccaaaggtccggtgacgatcccgtaccctcttttccagtctcatgttgaagatctttatgtagaaggacttcctgaaggaattccttttagaaggccatctacttacggaattcctcgcctggagaggatattacttgcaaaggaaaggattcgttttgtgattaagaaacatgagcttctgaattcaacacgtgaagatttacagcttgataagccagcttcaggagtaaaggaagaatggtatgccagaatcactaaattaagaaagatggtggatcagcttttctgcaaaaaatttgcggaagccttggggagcactgaagccaaggctgtaccgtaccaaaaatttgaggcacacccgaatgatctgtacgtggaaggactgccagaaaacattcctttccgaagtccctcatggtatggaatcccaaggctggaaaaaatcattcaagtgggcaatcgaattaaatttgttattaaaagaccagaacttctgactcacagtaccactgaagttactcagccaagaacgaatacaccagtcaaagaagattggaatgtcagaattaccaagctacggaagcaagtggaagagatttttaatttgaaatttgctcaagctcttggactcaccgaggcagtaaaagtaccatatcctgtgtttgaatcaaacccggagttcttgtatgtggaaggcttgccagaggggattcccttccgaagccctacctggtttggaattccacgacttgaaaggatcgtccgcgggagtaataaaatcaagttcgttgttaaaaaacctgaactagttatttcctacttgcctcctgggatggctagtaaaataaacactaaagctttgcagtcccccaaaagaccacgaagtcctgggagtaattcaaaggttcctgaaattgaggtcaccgtggaaggccctaataacaacaatcctcaaacctcagctgttcgaaccccgacccagactaacggttctaacgttcccttcaagccacgagggagagagttttcctttgaggcctggaatgccaaaatcacggacctaaaacagaaagttgaaaatctcttcaatgagaaatgtggggaagctcttggccttaaacaagctgtgaaggtgccgttcgcgttatttgagtctttcccggaagacttttatgtggaaggcttacctgagggtgtgccattccgaagaccatcgacttttggcattccgaggctggagaagatactcagaaacaaagccaaaattaagttcatcattaaaaagcccgaaatgtttgagacggcgattaaggagagcacctcctctaagagccctcccagaaaaataaattcatcacccaatgttaatactactgcatcaggtgttgaagaccttaacatcattcaggtgacaattccagatgatgataatgaaagactctcgaaagttgaaaaagctagacagctaagagaacaagtgaatgacctctttagtcggaaatttggtgaagctattggtatgggttttcctgtgaaagttccctacaggaaaatcacaattaaccctggctgtgtggtggttgatggcatgcccccgggggtgtccttcaaagcccccagctacctggaaatcagctccatgagaaggatcttagactctgccgagtttatcaaattcacggtcattagaccatttccaggacttgtgattaataaccagctggttgatcagagtgagtcagaaggccccgtgatacaagaatcagctgaaccaagccagttggaagttccagccacagaagaaataaaagagactgatggaagctctcagatcaagcaagaaccagaccccacgtggtagacctcttccctcctaggcttaaagtatcagtggttgagaagagcttttcggacctgttactaccccaagctgtagccttgagttacggtgtttattttccaatcaagtgaagatatctcctacttctcctactggaacatctcagcttctgcagtgaagaaaaattcctgtgatagttcagttctttagtttttctatttgaaaaaaaaaaatcatttaaatgatcctttgttcacggctctccttaatgactgagtgaacagttcctatctgtatatttgactaaaccttttcctaagctatctctcatggttcctatgtttttttatcataattaaaagcaaaaccatctggatcacctaacagtcagaggtcagtatctcagcgtgtgaattatagaggaaatacagagagaacctcttccacttttacttttcgtccaaataaaatgcatggtgtaccagaagttgaagatcgggttgaggattggggctagctcgatgacactaaggccccaacatcgcgggacctgctgtggcgcggattcttaggaacgctgttctagccggccccctctccaggggtcgccgtggccggcattatttcctagttcttcttgtaaccctgaggtgccagcgcggggagtgaggaggggtcagggggctaaggatgcaacctctgacgttctgcgccttcctaggagagtcttacatgtgttgagatttcacaagcaatgcgagttgtaaaataccagctctacaagaagctaggctctgtgacggcatagttttcagtagctttatcacaatattcacaatggagaattatatgacatggtagcagaaataggcccttttatgtgttgcttctattttacctcaaattgtagatatagggtaatcaataaaatccatccatgcctttcacacactaagt

SEQ ID NO: 4255 - protein, 932 aa, Homo sapiens; identical to SEQ ID NO: 4065

SEQ ID NO: 4256 - DNA, 7276 bp, Homo sapiens
aaaaaaaaaaaaaaaaaaaaaaaaaaaagaaaaaagaaaaaaaaaaggaggaggaggaggagggtgagagagaagctgggagagcagagaaaaggggccaccggtcgcccccccgcttccccgcacgcgctctccagccgcggccgcccgcctgccgcggtcaccccggcctctgcctctgtcccccagtgatcggatcaaggcgctgagcgaggccctgcctgcggggcggccatgcggcggtgacaggagcgcgaccgacacgcacgggcccctcgccccctctcgcctcccgtccgctcgccagctcccctcagccgaggctgctccgcggcggccgcagcccgcgcgcggcccacactcgcctcccctcggcacccccggccccggagctgcctggaggcggccgcactcggggatcatggcccaagttgcaatgtccaccctccccgttgaagatgaggagtcctcggagagcaggatggtggtgacattcctcatgtcagctctcgagtccatgtgtaaagaactggccaagtccaaagccgaagtggcctgcattgcagtgtatgaaacagacgtgtttgtcgtcggaactgaaagaggacgtgcttttgtcaataccagaaaggattttcaaaaagattttgtaaaatattgtgttgaagaagaagaaaaagctgcagagatgcataaaatgaaatctacaacccaggcaaatcggatgagtgtagatgctgtagaaattgaaacactcagaaaaacagttgaggactatttctgcttttgctatgggaaagctttaggcaaatccacagtggtacctgtaccatatgagaagatgctgcgagaccagtcggctgtggtagtgcaggggcttccggaaggtgttgcctttaaacaccccgagaactatgatcttgcaaccctgaaatggattttggagaacaaagcagggatttcattcatcattaagagaccttttttagagccaaagaagcatgtaggtggtcgtgtgatggtaacagatgctgacaggtcaatactatctccaggtggaagttgtggccccatcaaagtgaaaactgaacccacagaagattctggcatttccctggaaatggcagctgtgacagtaaaggaagaatcagaagatcctgattattatcaatataacattcaagcaggcccttctgaaactgatgatgttgatgaaaaacagcccctatcgaagcctttgcaaggaagccaccattcttcagagggcaatgaaggcacagaaatggaagtaccagcagaagattctactcaacatgtcccttcagaaacaagtgaggaccctgaagttgaggtgactattgaagatgatgattattctccaccgtctaagagaccaaaggccaatgagctaccgcagccaccagtcccggaacccgccaatgctgggaagcggaaagtgagggagttcaacttcgagaaatggaatgctcgcatcactgatctacgtaaacaagttgaagaattgtttgaaaggaaatatgctcaagccataaaagccaaaggtccggtgacgatcccgtaccctcttttccagtctcatgttgaagatctttatgtagaaggacttcctgaaggaattccttttagaaggccatctacttacggaattcctcgcctggagaggatattacttgcaaaggaaaggattcgttttgtgattaagaaacatgagcttctgaattcaacacgtgaagatttacagcttgataagccagcttcaggagtaaaggaagaatggtatgccagaatcactaaattaagaaagatggtggatcagcttttctgcaaaaaatttgcggaagccttggggagcactgaagccaaggctgtaccgtaccaaaaatttgaggcacacccgaatgatctgtacgtggaaggactgccagaaaacattcctttccgaagtccctcatggtatggaatcccaaggctggaaaaaatcattcaagtgggcaatcgaattaaatttgttattaaaagaccagaacttctgactcacagtaccactgaagttactcagccaagaacgaatacaccagtcaaagaagattggaatgtcagaattaccaagctacggaagcaagtggaagagatttttaatttgaaatttgctcaagctcttggactcaccgaggcagtaaaagtaccatatcctgtgtttgaatcaaacccggagttcttgaaaggatcgtccgcgggagtaataaaatcaagttcgttgttaaaaaacctgaactagttatttcctacttgcctcctgggatggctagtaaaataaacactaaagctttgcagtcccccaaaagaccacgaagtcctgggagtaattcaaaggttcctgaaattgaggtcaccgtggaaggccctaataacaacaatcctcaaacctcagctgttcgaaccccgacccagactaacggttctaacgttcccttcaagccacgagggagagagttttcctttgaggcctggaatgccaaaatcacggacctaaaacagaaagttgaaaatctcttcaatgagaaatgtggggaagctcttggccttaaacaagctgtgaaggtgccgttcgcgttatttgagtctttcccggaagacttttatgtggaaggcttacctgagggtgtgccattccgaagaccatcgacttttggcattccgaggctggagaagatactcagaaacaaagccaaaattaagttcatcattaaaaagcccgaaatgtttgagacggcgattaaggagagcacctcctctaagagccctcccagaaaaataaattcatcacccaatgttaatactactgcatcaggtgttgaagaccttaacatcattcaggtgacaattccagatgatgataatgaaagactctcgaaagttgaaaaagctagacagctaagagaacaagtgaatgacctctttagtcggaaatttggtgaagctattggtatgggttttcctgtgaaagttccctacaggaaaatcacaattaaccctggctgtgtggtggttgatggcatgcccccgggggtgtccttcaaagcccccagctacctggaaatcagctccatgagaaggatcttagactctgccgagtttatcaaattcacggtcattaggtaagtgagagtttcctgcttagtcacaggagcgaatctggagctcatgaggctgactcttctaaaatgcagccacaggtagtcatcgaatccggcttcctatgctgtgcaatcaacaaatcaaaataacttgtgtcatcattagaatgtcagatgtgcttctacgaactaagctgactcttttaattctttggcaaagggttggcaaactaggactgtttgccaaattcaggctgcctcctatttttagagtcttcctgaaacacagctacacccgtattatccatggctgctttcctgtcacagtgagtaagtagctgggactgagaaggcatggcctccaaagtctaaaatatttactctctagcactttgtagaaaaaccttagctaggcacagtggctaacgcctgtaatcccagcattttgggaggccaaggcaggcagatcacctgaggtcaggagttccagaccagcctggccaacatggtgaaatcccatctctacaaaaataaaacagttagctgggcatgatggcgggtgcctgtaatcccagctactcgggaggctgaggcaggatagtcgcttgaacccaggaggtggaggttgcaatgagccaagatcatgccactgcactccagcctggacgacagagtgagactccatcacaagaaaaaaagaactttgtcaacctctgtcttagggcgccttgtcacaggcttcgggtcagacggattcaaccttgcatcagccatttgttagccaggtcactctgttctttgtctgtaaatgagattgatcgttgttcccactgagagtgtcagctccttcccgtagagcaggcatgatgattgtactcacctctgacaccattgtgagtgccacattccttcccacgtccttgtcactgtaagagatgcccacctgagcaccaaccccaggttatcttcccctttgtcttccagccccccagaaacagctacgactcaacctacccaatcatttcatcatcagattgccactgtctctagttcaggtctcttgggactggcactcagaaatctcataataaatcctcttgaggcttctcatacactcgtcttcttccaatcttctttccctcaaaatctcatattttggttccacttcacccaccgtcattctccatatcactcccaggagttaggcaaaaagccccttccgttcttccgtatgttaaacttagaatcactctgttccctgctctgcgtttctattttttgtttttcctccatttactagtagcttaacactttctaacagtgttcttattattgatacgtatctatctcttccataagcttataaggtcacggataatacttctcattgtagtacgtaaatgacgtgggctagatatgagttgaataaacagttatacctgtaaattcttacagagtgaaaataaattgttatactttacaatttgtttctctctttagaccatttccaggacttgtgattaataaccgtgagtattttgtgaagtgttttgtttttgttttttcctggggtctgacgtgtgtgcgtgtgagtgtgtatacatgcttaacgtatatcacgttacttcacctatgtcagtaaccaggccaaatacttgttttagccctcagtaaaaacaccaggcacttcctagttgtaaaattattcaagcttcttaacttcctatcctcgatgcacttaatcataaaatggtaataatagcaccgattttgggggagtcgttccagtagatggaaagcatctggaacaggtgtcagcaagctcctgccgacgtgtatgcataaagttttattgaaaccaccatcgtgtccatttgtttatggcagaactgagagatggcagcagcaagtgtgtgcctgcaaaacctaaaatatttactaattggctctgcaagaaaagagtttgcatccccctaacctagaacagtgtctagcctctagtatgtgtttagcctacagtatgtgctcagcgaatacaatctatatttattactgcttttatgactgttataattactgtgcttggatttcgttacaaagtaagtcacaatgtgcctgcttctgttagtatttcagcacagtgcctggcacacatggggctctcaaatattgctgagcgagtgaacaaatgtcctttcaattccttaacgttgatgtcattttcaatagtattttgagccaaacttaattttgcgagtgtgttttgttttcttaactttattattaaaaatgtataaaagtgaggccaggcgtggtggctcacgcctgtaatcccagcagtttgggaggctgaggcaggcggatcagttgaggttgggagttggagaccagcccgtccaacatggtgaaagcctgtctctactaaaaatacaaaaatcagctgggtgtggtggcgcgtgcctgtaatcccagctactcaggaggctgaggcaggagagttgcttgaatcctagaggtggaggttgcagtgagctgagatcgtgccattgcactccagcctgggcaacaagagcaaaactctgtcccaataaataaataaataaaatgttctcttttgttcctgttcttgtgcggtagtgtggtatagagttttatggtaattactgtgaattagtgattctgagggacatatcagaactctgaggtttgtttccttctcatcttgagggaaacagcaaatgtatgttaaaatgcttttccaagggaacaacacatccttacattatttaaaccaatctgcttcattttcagagctggttgatcagagtgagtcagaaggccccgtgatacaagaatcagctgaaccaagccagttggaagttccagccacagaagaaataaaagagactgatggaagctctcagatcaagcaagaaccagaccccacgtggtagacctcttccctcctaggcttaaagtatcagtggttgagaagagcttttcggacctgttactaccccaagctgtgtaatatacttgtataacagaaataccttctatacaaacctttttttctacttttagatagaaatgtctactttttcagcagttctgtgaattaaagagcagagtgactgtgggtctggaatggctggtgtacttgggaatgtactatcaggattttacagcaatgctgggaaatgacagggaaaatgacaggaatgaatctcaccagattttttatgtactcagcagagccttgagttacggtgtttattttccaatcaagtgaagatatctcctacttctcctactggaacatctcagcttctgcagtgaagaaaaattcctgtgatagttcagttctttagtttttctatttgaaaaaaaaaaatcatttaaatgatcctttgttcacggctctccttaatgactgagtgaacagttcctatctgtatatttgactaaaccttttcctaagctatctctcatggttcctatgtttttttatcataattaaaagcaaaaccatctggatcacctaacagtcagaggtcagtatctcagcgtgtgaattatagaggaaatacagagagaacctcttccacttttacttttcgtccaaataaaatgcatggtgtaccagaagttgaagatcgggttgaggattggggctagctcgatgacactaaggccccaacatcgcgggacctgctgtggcgcggattcttaggaacgctgttctagccggccccctctccaggggtcgccgtggccggcattatttcctagttcttcttgtaaccctgaggtgccagcgcggggagtgaggaggggtcagggggctaaggatgcaacctctgacgttctgcgccttcctaggagagtcttacatgtgttgagatttcacaagcaatgcgagttgtaaaataccagctctacaagaagctaggctctgtgacggcatagttttcagtagctttatcacaatattcacaatggagaattatatgacatggtagcagaaataggcccttttatgtgttgcttctattttacctcaaattgtagatatagggtaatcaataaaatccatccatgcctttcacacactaagt

SEQ ID NO: 4257 - protein, 625 aa, Homo sapiens; identical to SEQ ID NO: 4033

SEQ ID NO: 4258 - DNA, 8024 bp, Homo sapiens
aaaaaaaaaaaaaaaaaaaaaaaaaaaagaaaaaagaaaaaaaaaaggaggaggaggaggagggtgagagagaagctgggagagcagagaaaaggggccaccggtcgcccccccgcttccccgcacgcgctctccagccgcggccgcccgcctgccgcggtcaccccggcctctgcctctgtcccccagtgatcggatcaaggcgctgagcgaggccctgcctgcggggcggccatgcggcggtgacaggagcgcgaccgacacgcacgggcccctcgccccctctcgcctcccgtccgctcgccagctcccctcagccgaggctgctccgcggcggccgcagcccgcgcgcggcccacactcgcctcccctcggcacccccggccccggagctgcctggaggcggccgcactcggggatcatggcccaagttgcaatgtccaccctccccgttgaagatgaggagtcctcggagagcaggatggtggtgacattcctcatgtcagctctcgagtccatgtgtaaagaactggccaagtccaaagccgaagtggcctgcattgcagtgtatgaaacagacgtgtttgtcgtcggaactgaaagaggacgtgcttttgtcaataccagaaaggattttcaaaaagattttgtaaaatattgtgttgaagaagaagaaaaagctgcagagatgcataaaatgaaatctacaacccaggcaaatcggatgagtgtagatgctgtagaaattgaaacactcagaaaaacagttgaggactatttctgcttttgctatgggaaagctttaggcaaatccacagtggtacctgtaccatatgagaagatgctgcgagaccagtcggctgtggtagtgcaggggcttccggaaggtgttgcctttaaacaccccgagaactatgatcttgcaaccctgaaatggattttggagaacaaagcagggatttcattcatcattaagagaccttttttagagccaaagaagcatgtaggtggtcgtgtgatggtaacagatgctgacaggtcaatactatctccaggtggaagttgtggccccatcaaagtgaaaactgaacccacagaagattctggcatttccctggaaatggcagctgtgacagtaaaggaagaatcagaagatcctgattattatcaatataacattcaaggaagccaccattcttcagagggcaatgaaggcacagaaatggaagtaccagcagaagatgatgattattctccaccgtctaagagaccaaaggccaatgagctaccgcagccaccagtcccggaacccgccaatgctgggaagcggaaagtgagggagttcaacttcgagaaatggaatgctcgcatcactgatctacgtaaacaagttgaagaattgtttgaaaggaaatatgctcaagccataaaagccaaaggtccggtgacgatcccgtaccctcttttccagtctcatgttgaagatctttatgtagaaggacttcctgaaggaattccttttagaaggccatctacttacggaattcctcgcctggagaggatattacttgcaaaggaaaggattcgttttgtgattaagaaacatgagcttctgaattcaacacgtgaagatttacagcttgataagccagcttcaggagtaaaggaagaatggtatgccagaatcactaaattaagaaagatggtggatcagcttttctgcaaaaaatttgcggaagccttggggagcactgaagccaaggctgtaccgtaccaaaaatttgaggcacacccgaatgatctgtacgtggaaggactgccagaaaacattcctttccgaagtccctcatggtatggaatcccaaggctggaaaaaatcattcaagtgggcaatcgaattaaatttgttattaaaagaccagaacttctgactcacagtaccactgaagttactcagccaagaacgaatacaccagtcaaagaagattggaatgtcagaattaccaagctacggaagcaagtggaagagatttttaatttgaaatttgcttagatttgttgacagcggtttcctggagtgctgtcttgagaacgattctgaggaggctcagcaagaaagagtgtttcagttgattgggtgtgtctgtcatggagaaggaactcaagctcttggactcaccgaggcagtaaaagtaccatatcctgtgtttgaatcaaacccggagttcttgtatgtggaaggcttgccagaggggattcccttccgaagccctacctggtttggaattccacgacttgaaaggatcgtccgcgggagtaataaaatcaagttcgttgttaaaaaacctgaactagttatttcctacttgcctcctgggatggctagtaaaataaacactaaagctttgcagtcccccaaaagaccacgaagtcctgggagtaattcaaaggttcctgaaattgaggtcaccgtggaaggccctaataacaacaatcctcaaacctcagctgttcgaaccccgacccagactaacggttctaacgttcccttcaagccacgagggagagagttttcctttgaggcctggaatgccaaaatcacggacctaaaacagaaagttgaaaatctcttcaatgagaaatgtggggaagctcttggccttaaacaagctgtgaaggtgccgttcgcgttatttgagtctttcccggaagacttttatgtggaaggcttacctgagggtgtgccattccgaagaccatcgacttttggcattccgaggctggagaagatactcagaaacaaagccaaaattaagttcatcattaaaaagcccgaaatgtttgagacggcgattaaggagagcacctcctctaagagccctcccagaaaaataaattcatcacccaatgttaatactactgcatcaggtgttgaagaccttaacatcattcaggtgacaattccagatgatgataatgaaagactctcgaaagttgaaaaagctagacagctaagagaacaagtgaatgacctctttagtcggaaatttggtgaagctattggtatgggttttcctgtgaaagttccctacaggaaaatcacaattaaccctggctgtgtggtggttgatggcatgcccccgggggtgtccttcaaagcccccagctacctggaaatcagctccatgagaaggatcttagactctgccgagtttatcaaattcacggtcattaggtaagtgagagtttcctgcttagtcacaggagcgaatctggagctcatgaggctgactcttctaaaatgcagccacaggtagtcatcgaatccggcttcctatgctgtgcaatcaacaaatcaaaataacttgtgtcatcattagaatgtcagatgtgcttctacgaactaagctgactcttttaattctttggcaaagggttggcaaactaggactgtttgccaaattcaggctgcctcctatttttagagtcttcctgaaacacagctacacccgtattatccatggctgctttcctgtcacagtgagtaagtagctgggactgagaaggcatggcctccaaagtctaaaatatttactctctagcactttgtagaaaaaccttagctaggcacagtggctaacgcctgtaatcccagcattttgggaggccaaggcaggcagatcacctgaggtcaggagttccagaccagcctggccaacatggtgaaatcccatctctacaaaaataaaacagttagctgggcatgatggcgggtgcctgtaatcccagctactcgggaggctgaggcaggatagtcgcttgaacccaggaggtggaggttgcaatgagccaagatcatgccactgcactccagcctggacgacagagtgagactccatcacaagaaaaaaagaactttgtcaacctctgtcttagggcgccttgtcacaggcttcgggtcagacggattcaaccttgcatcagccatttgttagccaggtcactctgttctttgtctgtaaatgagattgatcgttgttcccactgagagtgtcagctccttcccgtagagcaggcatgatgattgtactcacctctgacaccattgtgagtgccacattccttcccacgtccttgtcactgtaagagatgcccacctgagcaccaaccccaggttatcttcccctttgtcttccagccccccagaaacagctacgactcaacctacccaatcatttcatcatcagattgccactgtctctagttcaggtctcttgggactggcactcagaaatctcataataaatcctcttgaggcttctcatacactcgtcttcttccaatcttctttccctcaaaatctcatattttggttccacttcacccaccgtcattctccatatcactcccaggagttaggcaaaaagccccttccgttcttccgtatgttaaacttagaatcactctgttccctgctctgcgtttctattttttgtttttcctccatttactagtagcttaacactttctaacagtgttcttattattgatacgtatctatctcttccataagcttataaggtcacggataatacttctcattgtagtacgtaaatgacgtgggctagatatgagttgaataaacagttatacctgtaaattcttacagagtgaaaataaattgttatactttacaatttgtttctctctttagaccatttccaggacttgtgattaataaccgtgagtattttgtgaagtgttttgtttttgttttttcctggggtctgacgtgtgtgcgtgtgagtgtgtatacatgcttaacgtatatcacgttacttcacctatgtcagtaaccaggccaaatacttgttttagccctcagtaaaaacaccaggcacttcctagttgtaaaattattcaagcttcttaacttcctatcctcgatgcacttaatcataaaatggtaataatagcaccgattttgggggagtcgttccagtagatggaaagcatctggaacaggtgtcagcaagctcctgccgacgtgtatgcataaagttttattgaaaccaccatcgtgtccatttgtttatggcagaactgagagatggcagcagcaagtgtgtgcctgcaaaacctaaaatatttactaattggctctgcaagaaaagagtttgcatccccctaacctagaacagtgtctagcctctagtatgtgtttagcctacagtatgtgctcagcgaatacaatctatatttattactgcttttatgactgttataattactgtgcttggatttcgttacaaagtaagtcacaatgtgcctgcttctgttagtatttcagcacagtgcctggcacacatggggctctcaaatattgctgagcgagtgaacaaatgtcctttcaattccttaacgttgatgtcattttcaatagtattttgagccaaacttaattttgcgagtgtgttttgttttcttaactttattattaaaaatgtataaaagtgaggccaggcgtggtggctcacgcctgtaatcccagcagtttgggaggctgaggcaggcggatcagttgaggttgggagttggagaccagcccgtccaacatggtgaaagcctgtctctactaaaaatacaaaaatcagctgggtgtggtggcgcgtgcctgtaatcccagctactcaggaggctgaggcaggagagttgcttgaatcctagaggtggaggttgcagtgagctgagatcgtgccattgcactccagcctgggcaacaagagcaaaactctgtcccaataaataaataaataaaatgttctcttttgttcctgttcttgtgcggtagtgtggtatagagttttatggtaattactgtgaattagtgattctgagggacatatcagaactctgaggtttgtttccttctcatcttgagggaaacagcaaatgtatgttaaaatgcttttccaagggaacaacacatccttacattatttaaaccaatctgcttcattttcagagctggttgatcagagtgagtcagaaggccccgtgatacaagaatcagctgaaccaagccagttggaagttccagccacagaagaaataaaagagactgatggaagctctcagatcaagcaagaaccagaccccacgtggtagacctcttccctcctagggtaaatcagcttctgtgtcagggatgctgtgtggtgtccatctgaaccccctgcatacgcgtagctaatgtgatctccccactttcacataagatggtggccctgccttcagggaatgtgggagccaggtgggagccttcccggatatttaagctagaagattctacagggagattctccttggatcaatatatgtctctcagtcaaagatgtaaaagcacttttgccttaaaaagaatgttctgtttctaaatagagtcaacgttgtcctcctcattggaattcactatgagtcagaatcattagactgacttttttttttccatagtaatagtattttgcagagtctcacagagctgcagatcttttgttcatcttgcagagttaacaagtctgatcctgttagtccagatttcttaaatttggccaagttataataggagcagtagcttgagacccgaagtcaggaaactttgacaatggatttttttttttaatccagagacttgtactggaatttgccttaccctgtcagctcatggacttaaggtttcatcccgctttatgagtgcttctgaatccaagtcattgttacctgaatttgcaaattaagttgtgatattcgtgactgttaaattcctgtaattagattaacctctttgcttgcttgtttgttttctctcctattttagcttaaagtatcagtggttgagaagagcttttcggacctgttactaccccaagctgtgtaatatacttgtataacagaaataccttctatacaaacctttttttctacttttagatagaaatgtctactttttcagcagttctgtgaattaaagagcagagtgactgtgggtctggaatggctggtgtacttgggaatgtactatcaggattttacagcaatgctgggaaatgacagggaaaatgacaggaatgaatctcaccagattttttatgtactcagcagagccttgagttacggtgtttattttccaatcaagtgaagatatctcctacttctcctactggaacatctcagcttctgcagtgaagaaaaattcctgtgatagttcagttctttagtttttctatttgaaaaaaaaaaatcatttaaatgatcctttgttcacggctctccttaatgactgagtgaacagttcctatctgtatatttgactaaaccttttcctaagctatctctcatggttcctatgtttttttatcataattaaaagcaaaaccatctggatcacctaacagtcagaggtcagtatctcagcgtgtgaattatagaggaaatacagagagaacctcttccacttttacttttcgtccaaataaaatgcatggtgtaccagaagttgaagatcgggttgaggattggggctagctcgatgacactaaggccccaacatcgcgggacctgctgtggcgcggattcttaggaacgctgttctagccggccccctctccaggggtcgccgtggccggcattatttcctagttcttcttgtaaccctgaggtgccagcgcggggagtgaggaggggtcagggggctaaggatgcaacctctgacgttctgcgccttcctaggagagtcttacatgtgttgagatttcacaagcaatgcgagttgtaaaataccagctctacaagaagctaggctctgtgacggcatagttttcagtagctttatcacaatattcacaatggagaattatatgacatggtagcagaaataggcccttttatgtgttgcttctattttacctcaaattgtagatatagggtaatcaataaaatccatccatgcctttcacacactaagt

SEQ ID NO: 4259 - protein, 543 aa, Homo sapiens; identical to SEQ ID NO: 4195

SEQ ID NO: 4260 - DNA, 7721 bp, Homo sapiens
aaaaaaaaaaaaaaaaaaaaaaaaaaaagaaaaaagaaaaaaaaaaggaggaggaggaggagggtgagagagaagctgggagagcagagaaaaggggccaccggtcgcccccccgcttccccgcacgcgctctccagccgcggccgcccgcctgccgcggtcaccccggcctctgcctctgtcccccagtgatcggatcaaggcgctgagcgaggccctgcctgcggggcggccatgcggcggtgacaggagcgcgaccgacacgcacgggcccctcgccccctctcgcctcccgtccgctcgccagctcccctcagccgaggctgctccgcggcggccgcagcccgcgcgcggcccacactcgcctcccctcggcacccccggccccggagctgcctggaggcggccgcactcggtgtaaagaactggccaagtccaaagccgaagtggcctgcattgcagtgtatgaaacagacgtgtttgtcgtcggaactgaaagaggacgtgcttttgtcaataccagaaaggattttcaaaaagattttgtaaaatattgtgttgaagaagaagaaaaagctgcagagatgcataaaatgaaatctacaacccaggcaaatcggatgagtgtagatgctgtagaaattgaaacactcagaaaaacagttgaggactatttctgcttttgctatgggaaagctttaggcaaatccacagtggtacctgtaccatatgagaagatgctgcgagaccagtcggctgtggtagtgcaggggcttccggaaggtgttgcctttaaacaccccgagaactatgatcttgcaaccctgaaatggattttggagaacaaagcagggatttcattcatcattaagagaccttttttagagccaaagaagcatgtaggtggtcgtgtgatggtaacagatgctgacaggtcaatactatctccaggtggaagttgtggccccatcaaagtgaaaactgaacccacagaagattctggaagccaccattcttcagagggcaatgaaggcacagaaatggaagtaccagcagaagattctactcaacatgtcccttcagaaacaagtgaggaccctgaagttgaggtgactattgaagatgatgattattctccaccgtctaagagaccaaaggccaatgagctaccgcagccaccagtcccggaacccgccaatgctgggaagcggaaagtgagggagttcaacttcgagaaatggaatgctcgcatcactgatctacgtaaacaagttgaagaattgtttgaaaggaaatatgctcaagccataaaagccaaaggtccggtgacgatcccgtaccctcttttccagtctcatgttgaagatctttatgtagaaggacttcctgaaggaattccttttagaaggccatctacttacggaattcctcgcctggagaggatattacttgcaaaggaaaggattcgttttgtgattaagaaacatgagcttctgaattcaacacgtgaagatttacagcttgataagccagcttcaggagtaaaggaagaatggtatgccagaatcactaaattaagaaagatggtggatcagcttttctgcaaaaaatttgcggaagccttggggagcactgaagccaaggctgtaccgtaccaaaaatttgaggcacacccgaatgatctgtacgtggaaggactgccagaaaacattcctttccgaagtccctcatggtatggaatcccaaggctggaaaaaatcattcaagtgggcaatcgaattaaatttgttattaaaagaccagaacttctgactcacagtaccactgaagttactcagccaagaacgaatacaccagctcaagctcttggactcaccgaggcagtaaaagtaccatatcctgtgtttgaatcaaacccggagttcttgtatgtggaaggcttgccagaggggattcccttccgaagccctacctggtttggaattccacgacttgaaaggatcgtccgcgggagtaataaaatcaagttcgttgttaaaaaacctgaactagttatttcctacttgcctcctgggatggctagtaaaataaacactaaagctttgcagtcccccaaaagaccacgaagtcctgggagtaattcaaaggttcctgaaattgaggtcaccgtggaaggccctaataacaacaatcctcaaacctcagctgttcgaaccccgacccagactaacggttctaacgttcccttcaagccacgagggagagagttttcctttgaggcctggaatgccaaaatcacggacctaaaacagaaagttgaaaatctcttcaatgagaaatgtggggaagctcttggccttaaacaagctgtgaaggtgccgttcgcgttatttgagtctttcccggaagacttttatgtggaaggcttacctgagggtgtgccattccgaagaccatcgacttttggcattccgaggctggagaagatactcagaaacaaagccaaaattaagttcatcattaaaaagcccgaaatgtttgagacggcgattaaggagagcacctcctctaagagccctcccagaaaaataaattcatcacccaatgttaatactactgcatcaggtgttgaagaccttaacatcattcaggtgacaattccagatgatgataatgaaagactctcgaaagttgaaaaagctagacagctaagagaacaagtgaatgacctctttagtcggaaatttggtgaagctattggtatgggttttcctgtgaaagttccctacaggaaaatcacaattaaccctggctgtgtggtggttgatggcatgcccccgggggtgtccttcaaagcccccagctacctggaaatcagctccatgagaaggatcttagactctgccgagtttatcaaattcacggtcattaggtaagtgagagtttcctgcttagtcacaggagcgaatctggagctcatgaggctgactcttctaaaatgcagccacaggtagtcatcgaatccggcttcctatgctgtgcaatcaacaaatcaaaataacttgtgtcatcattagaatgtcagatgtgcttctacgaactaagctgactcttttaattctttggcaaagggttggcaaactaggactgtttgccaaattcaggctgcctcctatttttagagtcttcctgaaacacagctacacccgtattatccatggctgctttcctgtcacagtgagtaagtagctgggactgagaaggcatggcctccaaagtctaaaatatttactctctagcactttgtagaaaaaccttagctaggcacagtggctaacgcctgtaatcccagcattttgggaggccaaggcaggcagatcacctgaggtcaggagttccagaccagcctggccaacatggtgaaatcccatctctacaaaaataaaacagttagctgggcatgatggcgggtgcctgtaatcccagctactcgggaggctgaggcaggatagtcgcttgaacccaggaggtggaggttgcaatgagccaagatcatgccactgcactccagcctggacgacagagtgagactccatcacaagaaaaaaagaactttgtcaacctctgtcttagggcgccttgtcacaggcttcgggtcagacggattcaaccttgcatcagccatttgttagccaggtcactctgttctttgtctgtaaatgagattgatcgttgttcccactgagagtgtcagctccttcccgtagagcaggcatgatgattgtactcacctctgacaccattgtgagtgccacattccttcccacgtccttgtcactgtaagagatgcccacctgagcaccaaccccaggttatcttcccctttgtcttccagccccccagaaacagctacgactcaacctacccaatcatttcatcatcagattgccactgtctctagttcaggtctcttgggactggcactcagaaatctcataataaatcctcttgaggcttctcatacactcgtcttcttccaatcttctttccctcaaaatctcatattttggttccacttcacccaccgtcattctccatatcactcccaggagttaggcaaaaagccccttccgttcttccgtatgttaaacttagaatcactctgttccctgctctgcgtttctattttttgtttttcctccatttactagtagcttaacactttctaacagtgttcttattattgatacgtatctatctcttccataagcttataaggtcacggataatacttctcattgtagtacgtaaatgacgtgggctagatatgagttgaataaacagttatacctgtaaattcttacagagtgaaaataaattgttatactttacaatttgtttctctctttagaccatttccaggacttgtgattaataaccgtgagtattttgtgaagtgttttgtttttgttttttcctggggtctgacgtgtgtgcgtgtgagtgtgtatacatgcttaacgtatatcacgttacttcacctatgtcagtaaccaggccaaatacttgttttagccctcagtaaaaacaccaggcacttcctagttgtaaaattattcaagcttcttaacttcctatcctcgatgcacttaatcataaaatggtaataatagcaccgattttgggggagtcgttccagtagatggaaagcatctggaacaggtgtcagcaagctcctgccgacgtgtatgcataaagttttattgaaaccaccatcgtgtccatttgtttatggcagaactgagagatggcagcagcaagtgtgtgcctgcaaaacctaaaatatttactaattggctctgcaagaaaagagtttgcatccccctaacctagaacagtgtctagcctctagtatgtgtttagcctacagtatgtgctcagcgaatacaatctatatttattactgcttttatgactgttataattactgtgcttggatttcgttacaaagtaagtcacaatgtgcctgcttctgttagtatttcagcacagtgcctggcacacatggggctctcaaatattgctgagcgagtgaacaaatgtcctttcaattccttaacgttgatgtcattttcaatagtattttgagccaaacttaattttgcgagtgtgttttgttttcttaactttattattaaaaatgtataaaagtgaggccaggcgtggtggctcacgcctgtaatcccagcagtttgggaggctgaggcaggcggatcagttgaggttgggagttggagaccagcccgtccaacatggtgaaagcctgtctctactaaaaatacaaaaatcagctgggtgtggtggcgcgtgcctgtaatcccagctactcaggaggctgaggcaggagagttgcttgaatcctagaggtggaggttgcagtgagctgagatcgtgccattgcactccagcctgggcaacaagagcaaaactctgtcccaataaataaataaataaaatgttctcttttgttcctgttcttgtgcggtagtgtggtatagagttttatggtaattactgtgaattagtgattctgagggacatatcagaactctgaggtttgtttccttctcatcttgagggaaacagcaaatgtatgttaaaatgcttttccaagggaacaacacatccttacattatttaaaccaatctgcttcattttcagagctggttgatcagagtgagtcagaaggccccgtgatacaagaatcagctgaaccaagccagttggaagttccagccacagaagaaataaaagagactgatggaagctctcagatcaagcaagaaccagaccccacgtggtagacctcttccctcctagggtaaatcagcttctgtgtcagggatgctgtgtggtgtccatctgaaccccctgcatacgcgtagctaatgtgatctccccactttcacataagatggtggccctgccttcagggaatgtgggagccaggtgggagccttcccggatatttaagctagaagattctacagggagattctccttggatcaatatatgtctctcagtcaaagatgtaaaagcacttttgccttaaaaagaatgttctgtttctaaatagagtcaacgttgtcctcctcattggaattcactatgagtcagaatcattagactgacttttttttttccatagtaatagtattttgcagagtctcacagagctgcagatcttttgttcatcttgcagagttaacaagtctgatcctgttagtccagatttcttaaatttggccaagttataataggagcagtagcttgagacccgaagtcaggaaactttgacaatggatttttttttttaatccagagacttgtactggaatttgccttaccctgtcagctcatggacttaaggtttcatcccgctttatgagtgcttctgaatccaagtcattgttacctgaatttgcaaattaagttgtgatattcgtgactgttaaattcctgtaattagattaacctctttgcttgcttgtttgttttctctcctattttagcttaaagtatcagtggttgagaagagcttttcggacctgttactaccccaagctgtgtaatatacttgtataacagaaataccttctatacaaacctttttttctacttttagatagaaatgtctactttttcagcagttctgtgaattaaagagcagagtgactgtgggtctggaatggctggtgtacttgggaatgtactatcaggattttacagcaatgctgggaaatgacagggaaaatgacaggaatgaatctcaccagattttttatgtactcagcagagccttgagttacggtgtttattttccaatcaagtgaagatatctcctacttctcctactggaacatctcagcttctgcagtgaagaaaaattcctgtgatagttcagttctttagtttttctatttgaaaaaaaaaaatcatttaaatgatcctttgttcacggctctccttaatgactgagtgaacagttcctatctgtatatttgactaaaccttttcctaagctatctctcatggttcctatgtttttttatcataattaaaagcaaaaccatctggatcacctaacagtcagaggtcagtatctcagcgtgtgaattatagaggaaatacagagagaacctcttccacttttacttttcgtccaaataaaatgcatggtgtaccagaagttgaagatcgggttgaggattggggctagctcgatgacactaaggccccaacatcgcgggacctgctgtggcgcggattcttaggaacgctgttctagccggccccctctccaggggtcgccgtggccggcattatttcctagttcttcttgtaaccctgaggtgccagcgcggggagtgaggaggggtcagggggctaaggatgcaacctctgacgttctgcgccttcctaggagagtcttacatgtgttgagatttcacaagcaatgcgagttgtaaaataccagctctacaagaagctaggctctgtgacggcatagttttcagtagctttatcacaatattcacaatggagaattatatgacatggtagcagaaataggcccttttatgtgttgcttctattttacctcaaattgtagatatagggtaatcaataaaatccatccatgcctttcacacactaagt

SEQ ID NO: 4261 - protein, 783 aa, Homo sapiens
MHKMKSTTQANRMSVDAVEIETLRKTVEDYFCFCYGKALGKSTVVPVPYEKMLRDQSAVVVQGLPEGVAFKHPENYDLATLKWILENKAGISFIIKRPFLEPKKHVGGRVMVTDADRSILSPGGSCGPIKVKTEPTEDSGSHHSSEGNEGTEMEVPAEDSTQHVPSETSEDPEVEVTIEDDDYSPPSKRPKANELPQPPVPEPANAGKRKVREFNFEKWNARITDLRKQVEELFERKYAQAIKAKGPVTIPYPLFQSHVEDLYVEGLPEGIPFRRPSTYGIPRLERILLAKERIRFVIKKHELLNSTREDLQLDKPASGVKEEWYARITKLRKMVDQLFCKKFAEALGSTEAKAVPYQKFEAHPNDLYVEGLPENIPFRSPSWYGIPRLEKIIQVGNRIKFVIKRPELLTHSTTEVTQPRTNTPAQALGLTEAVKVPYPVFESNPEFLYVEGLPEGIPFRSPTWFGIPRLERIVRGSNKIKFVVKKPELVISYLPPGMASKINTKALQSPKRPRSPGSNSKVPEIEVTVEGPNNNNPQTSAVRTPTQTNGSNVPFKPRGREFSFEAWNAKITDLKQKVENLFNEKCGEALGLKQAVKVPFALFESFPEDFYVEGLPEGVPFRRPSTFGIPRLEKILRNKAKIKFIIKKPEMFETAIKESTSSKSPPRKINSSPNVNTTASGVEDLNIIQVTIPDDDNERLSKVEKARQLREQVNDLFSRKFGEAIGMGFPVKVPYRKITINPGCVVVDGMPPGVSFKAPSYLEISSMRRILDSAEFIKFTVIR

SEQ ID NO: 4262 - DNA, 4291 bp, Homo sapiens
aaaaaaaaaaaaaaaaaaaaaaaaaaaagaaaaaagaaaaaaaaaaggaggaggaggaggagggtgagagagaagctgggagagcagagaaaaggggccaccggtcgcccccccgcttccccgcacgcgctctccagccgcggccgcccgcctgccgcggtcaccccggcctctgcctctgtcccccagtgatcggatcaaggcgctgagcgaggccctgcctgcggggcggccatgcggcggtgacaggagcgcgaccgacacgcacgggcccctcgccccctctcgcctcccgtccgctcgccagctcccctcagccgaggctgctccgcggcggccgcagcccgcgcgcggcccacactcgcctcccctcggcacccccggccccggagctgcctggaggcggccgcactcggggatcatggcccaagttgcaatgtccaccctccccgttgaagatgaggagtcctcggagagcaggatggtggtgacattcctcatgtcagctctcgagtccatgtgtaaagaactggccaagtccaaagccgaagtggcctgcattgcagtgtatgaaacagacgtgtttgtcgtcggaactgaaagaggacgtgcttttgtcaataccagaaaggattttcaaaaagattttgtaaaatattgtgttgaagaagaagaaaaagctgcagagatgcataaaatgaaatctacaacccaggcaaatcggatgagtgtagatgctgtagaaattgaaacactcagaaaaacagttgaggactatttctgcttttgctatgggaaagctttaggcaaatccacagtggtacctgtaccatatgagaagatgctgcgagaccagtcggctgtggtagtgcaggggcttccggaaggtgttgcctttaaacaccccgagaactatgatcttgcaaccctgaaatggattttggagaacaaagcagggatttcattcatcattaagagaccttttttagagccaaagaagcatgtaggtggtcgtgtgatggtaacagatgctgacaggtcaatactatctccaggtggaagttgtggccccatcaaagtgaaaactgaacccacagaagattctggcatttccctggaaatggcagctgtgacagtaaaggaagaatcagaagatcctgattattatcaatataacattcaagcaggcccttctgaaactgatgatgttgatgaaaaacagcccctatcgaagcctttgcaaggaagccaccattcttcagagggcaatgaaggcacagaaatggaagtaccagcagaagatgatgattattctccaccgtctaagagaccaaaggccaatgagctaccgcagccaccagtcccggaacccgccaatgctgggaagcggaaagtgagggagttcaacttcgagaaatggaatgctcgcatcactgatctacgtaaacaagttgaagaattgtttgaaaggaaatatgctcaagccataaaagccaaaggtccggtgacgatcccgtaccctcttttccagtctcatgttgaagatctttatgtagaaggacttcctgaaggaattccttttagaaggccatctacttacggaattcctcgcctggagaggatattacttgcaaaggaaaggattcgttttgtgattaagaaacatgagcttctgaattcaacacgtgaagatttacagcttgataagccagcttcaggagtaaaggaagaatggtatgccagaatcactaaattaagaaagatggtggatcagcttttctgcaaaaaatttgcggaagccttggggagcactgaagccaaggctgtaccgtaccaaaaatttgaggcacacccgaatgatctgtacgtggaaggactgccagaaaacattcctttccgaagtccctcatggtatggaatcccaaggctggaaaaaatcattcaagtgggcaatcgaattaaatttgttattaaaagaccagaacttctgactcacagtaccactgaagttactcagccaagaacgaatacaccagtcaaagaagattggaatgtcagaattaccaagctacggaagcaagtggaagagatttttaatttgaaatttgctcaagctcttggactcaccgaggcagtaaaagtaccatatcctgtgtttgaatcaaacccggagttcttgtatgtggaaggcttgccagaggggattcccttccgaagccctacctggtttggaattccacgacttgaaaggatcgtccgcgggagtaataaaatcaagttcgttgttaaaaaacctgaactagttatttcctacttgcctcctgggatggctagtaaaataaacactaaagctttgcagtcccccaaaagaccacgaagtcctgggagtaattcaaaggttcctgaaattgaggtcaccgtggaaggccctaataacaacaatcctcaaacctcagctgttcgaaccccgacccagactaacggttctaacgttcccttcaagccacgagggagagagttttcctttgaggcctggaatgccaaaatcacggacctaaaacagaaagttgaaaatctcttcaatgagaaatgtggggaagctcttggccttaaacaagctgtgaaggtgccgttcgcgttatttgagtctttcccggaagacttttatgtggaaggcttacctgagggtgtgccattccgaagaccatcgacttttggcattccgaggctggagaagatactcagaaacaaagccaaaattaagttcatcattaaaaagcccgaaatgtttgagacggcgattaaggagagcacctcctctaagagccctcccagaaaaataaattcatcacccaatgttaatactactgcatcaggtgttgaagaccttaacatcattcaggtgacaattccagatgatgataatgaaagactctcgaaagttgaaaaagctagacagctaagagaacaagtgaatgacctctttagtcggaaatttggtgaagctattggtatgggttttcctgtgaaagttccctacaggaaaatcacaattaaccctggctgtgtggtggttgatggcatgcccccgggggtgtccttcaaagcccccagctacctggaaatcagctccatgagaaggatcttagactctgccgagtttatcaaattcacggtcattagaccatttccaggacttgtgattaataaccagctggttgatcagagtgagtcagaaggccccgtgatacaagaatcagctgaaccaagccagttggaagttccagccacagaagaaataaaagagactgatggaagctctcagatcaagcaagaaccagaccccacgtggtagacctcttccctcctaggcttaaagtatcagtggttgagaagagcttttcggacctgttactaccccaagctgtagccttgagttacggtgtttattttccaatcaagtgaagatatctcctacttctcctactggaacatctcagcttctgcagtgaagaaaaattcctgtgatagttcagttctttagtttttctatttgaaaaaaaaaaatcatttaaatgatcctttgttcacggctctccttaatgactgagtgaacagttcctatctgtatatttgactaaaccttttcctaagctatctctcatggttcctatgtttttttatcataattaaaagcaaaaccatctggatcacctaacagtcagaggtcagtatctcagcgtgtgaattatagaggaaatacagagagaacctcttccacttttacttttcgtccaaataaaatgcatggtgtaccagaagttgaagatcgggttgaggattggggctagctcgatgacactaaggccccaacatcgcgggacctgctgtggcgcggattcttaggaacgctgttctagccggccccctctccaggggtcgccgtggccggcattatttcctagttcttcttgtaaccctgaggtgccagcgcggggagtgaggaggggtcagggggctaaggatgcaacctctgacgttctgcgccttcctaggagagtcttacatgtgttgagatttcacaagcaatgcgagttgtaaaataccagctctacaagaagctaggctctgtgacggcatagttttcagtagctttatcacaatattcacaatggagaattatatgacatggtagcagaaataggcccttttatgtgttgcttctattttacctcaaattgtagatatagggtaatcaataaaatccatccatgcctttcacacactaagt

SEQ ID NO: 4263 - protein, 977 aa, Homo sapiens; identical to SEQ ID NO: 472

SEQ ID NO: 4264 - DNA, 4160 bp, Homo sapiens
aaaaaaaaaaaaaaaaaaaaaaaaaaaagaaaaaagaaaaaaaaaaggaggaggaggaggagggtgagagagaagctgggagagcagagaaaaggggccaccggtcgcccccccgcttccccgcacgcgctctccagccgcggccgcccgcctgccgcggtcaccccggcctctgcctctgtcccccagtgatcggatcaaggcgctgagcgaggccctgcctgcggggcggccatgcggcggtgacaggagcgcgaccgacacgcacgggcccctcgccccctctcgcctcccgtccgctcgccagctcccctcagccgaggctgctccgcggcggccgcagcccgcgcgcggcccacactcgcctcccctcggcacccccggccccggagctgcctggaggcggccgcactcggggatcatggcccaagttgcaatgtccaccctccccgttgaagatgaggagtcctcggagagcaggatggtggtgacattcctcatgtcagctctcgagtccatgtgtaaagaactggccaagtccaaagccgaagtggcctgcattgcagtgtatgaaacagacgtgtttgtcgtcggaactgaaagaggacgtgcttttgtcaataccagaaaggattttcaaaaagattttgtaaaatattgtgttgaagaagaagaaaaagctgcagagatgcataaaatgaaatctacaacccaggcaaatcggatgagtgtagatgctgtagaaattgaaacactcagaaaaacagttgaggactatttctgcttttgctatgggaaagctttaggcaaatccacagtggtacctgtaccatatgagaagatgctgcgagaccagtcggctgtggtagtgcaggggcttccggaaggtgttgcctttaaacaccccgagaactatgatcttgcaaccctgaaatggattttggagaacaaagcagggatttcattcatcattaagagaccttttttagagccaaagaagcatgtaggtggtcgtgtgatggtaacagatgctgacaggtcaatactatctccaggtggaagttgtggccccatcaaagtgaaaactgaacccacagaagattctggaagccaccattcttcagagggcaatgaaggcacagaaatggaagtaccagcagaagattctactcaacatgtcccttcagaaacaagtgaggaccctgaagttgaggtgactattgaagatgatgattattctccaccgtctaagagaccaaaggccaatgagctaccgcagccaccagtcccggaacccgccaatgctgggaagcggaaagtgagggagttcaacttcgagaaatggaatgctcgcatcactgatctacgtaaacaagttgaagaattgtttgaaaggaaatatgctcaagccataaaagccaaaggtccggtgacgatcccgtaccctcttttccagtctcatgttgaagatctttatgtagaaggacttcctgaaggaattccttttagaaggccatctacttacggaattcctcgcctggagaggatattacttgcaaaggaaaggattcgttttgtgattaagaaacatgagcttctgaattcaacacgtgaagatttacagcttgataagccagcttcaggagtaaaggaagaatggtatgccagaatcactaaattaagaaagatggtggatcagcttttctgcaaaaaatttgcggaagccttggggagcactgaagccaaggctgtaccgtaccaaaaatttgaggcacacccgaatgatctgtacgtggaaggactgccagaaaacattcctttccgaagtccctcatggtatggaatcccaaggctggaaaaaatcattcaagtgggcaatcgaattaaatttgttattaaaagaccagaacttctgactcacagtaccactgaagttactcagccaagaacgaatacaccagtcaaagaagattggaatgtcagaattaccaagctacggaagcaagtggaagagatttttaatttgaaatttgctcaagctcttggactcaccgaggcagtaaaagtaccatatcctgtgtttgaatcaaacccggagttcttgtatgtggaaggcttgccagaggggattcccttccgaagccctacctggtttggaattccacgacttgaaaggatcgtccgcgggagtaataaaatcaagttcgttgttaaaaaacctgaactagttatttcctacttgcctcctgggatggctagtaaaataaacactaaagctttgcagtcccccaaaagaccacgaagtcctgggagtaattcaaaggttcctgaaattgaggtcaccgtggaaggccctaataacaacaatcctcaaacctcagctgttcgaaccccgacccagactaacggttctaacgttcccttcaagccacgagggagagagttttcctttgaggcctggaatgccaaaatcacggacctaaaacagaaagttgaaaatctcttcaatgagaaatgtggggaagctcttggccttaaacaagctgtgaaggtgccgttcgcgttatttgagtctttcccggaagacttttatgtggaaggcttacctgagggtgtgccattccgaagaccatcgacttttggcattccgaggctggagaagatactcagaaacaaagccaaaattaagttcatcattaaaaagcccgaaatgtttgagacggcgattaaggagagcacctcctctaagagccctcccagaaaaataaattcatcacccaatgttaatactactgcatcaggtgttgaagaccttaacatcattcaggtgacaattccagatgatgataatgaaagactctcgaaagttgaaaaagctagacagctaagagaacaagtgaatgacctctttagtcggaaatttggtgaagctattggtatgggttttcctgtgaaagttccctacaggaaaatcacaattaaccctggctgtgtggtggttgatggcatgcccccgggggtgtccttcaaagcccccagctacctggaaatcagctccatgagaaggatcttagactctgccgagtttatcaaattcacggtcattagaccatttccaggacttgtgattaataaccagctggttgatcagagtgagtcagaaggccccgtgatacaagaatcagctgaaccaagccagttggaagttccagccacagaagaaataaaagagactgatggaagctctcagatcaagcaagaaccagaccccacgtggtagacctcttccctcctaggagccttgagttacggtgtttattttccaatcaagtgaagatatctcctacttctcctactggaacatctcagcttctgcagtgaagaaaaattcctgtgatagttcagttctttagtttttctatttgaaaaaaaaaaatcatttaaatgatcctttgttcacggctctccttaatgactgagtgaacagttcctatctgtatatttgactaaaccttttcctaagctatctctcatggttcctatgtttttttatcataattaaaagcaaaaccatctggatcacctaacagtcagaggtcagtatctcagcgtgtgaattatagaggaaatacagagagaacctcttccacttttacttttcgtccaaataaaatgcatggtgtaccagaagttgaagatcgggttgaggattggggctagctcgatgacactaaggccccaacatcgcgggacctgctgtggcgcggattcttaggaacgctgttctagccggccccctctccaggggtcgccgtggccggcattatttcctagttcttcttgtaaccctgaggtgccagcgcggggagtgaggaggggtcagggggctaaggatgcaacctctgacgttctgcgccttcctaggagagtcttacatgtgttgagatttcacaagcaatgcgagttgtaaaataccagctctacaagaagctaggctctgtgacggcatagttttcagtagctttatcacaatattcacaatggagaattatatgacatggtagcagaaataggcccttttatgtgttgcttctattttacctcaaattgtagatatagggtaatcaataaaatccatccatgcctttcacacactaagt

SEQ ID NO: 4265 - protein, 952 aa, Homo sapiens; identical to SEQ ID NO: 4069

SEQ ID NO: 4266 - DNA, 7351 bp, Homo sapiens
aaaaaaaaaaaaaaaaaaaaaaaaaaaagaaaaaagaaaaaaaaaaggaggaggaggaggagggtgagagagaagctgggagagcagagaaaaggggccaccggtcgcccccccgcttccccgcacgcgctctccagccgcggccgcccgcctgccgcggtcaccccggcctctgcctctgtcccccagtgatcggatcaaggcgctgagcgaggccctgcctgcggggcggccatgcggcggtgacaggagcgcgaccgacacgcacgggcccctcgccccctctcgcctcccgtccgctcgccagctcccctcagccgaggctgctccgcggcggccgcagcccgcgcgcggcccacactcgcctcccctcggcacccccggccccggagctgcctggaggcggccgcactcggtgtaaagaactggccaagtccaaagccgaagtggcctgcattgcagtgtatgaaacagacgtgtttgtcgtcggaactgaaagaggacgtgcttttgtcaataccagaaaggattttcaaaaagattttgtaaaatattgtgttgaagaagaagaaaaagctgcagagatgcataaaatgaaatctacaacccaggcaaatcggatgagtgtagatgctgtagaaattgaaacactcagaaaaacagttgaggactatttctgcttttgctatgggaaagctttaggcaaatccacagtggtacctgtaccatatgagaagatgctgcgagaccagtcggctgtggtagtgcaggggcttccggaaggtgttgcctttaaacaccccgagaactatgatcttgcaaccctgaaatggattttggagaacaaagcagggatttcattcatcattaagagaccttttttagagccaaagaagcatgtaggtggtcgtgtgatggtaacagatgctgacaggtcaatactatctccaggtggaagttgtggccccatcaaagtgaaaactgaacccacagaagattctggcatttccctggaaatggcagctgtgacagtaaaggaagaatcagaagatcctgattattatcaatataacattcaagcaggcccttctgaaactgatgatgttgatgaaaaacagcccctatcgaagcctttgcaaggaagccaccattcttcagagggcaatgaaggcacagaaatggaagtaccagcagaagattctactcaacatgtcccttcagaaacaagtgaggaccctgaagttgaggtgactattgaagatgatgattattctccaccgtctaagagaccaaaggccaatgagctaccgcagccaccagtcccggaacccgccaatgctgggaagcggaaagtgagggagttcaacttcgagaaatggaatgctcgcatcactgatctacgtaaacaagttgaagaattgtttgaaaggaaatatgctcaagccataaaagccaaaggtccggtgacgatcccgtaccctcttttccagtctcatgttgaagatctttatgtagaaggacttcctgaaggaattccttttagaaggccatctacttacggaattcctcgcctggagaggatattacttgcaaaggaaaggattcgttttgtgattaagaaacatgagcttctgaattcaacacgtgaagatttacagcttgataagccagcttcaggagtaaaggaagaatggtatgccagaatcactaaattaagaaagatggtggatcagcttttctgcaaaaaatttgcggaagccttggggagcactgaagccaaggctgtaccgtaccaaaaatttgaggcacacccgaatgatctgtacgtggaaggactgccagaaaacattcctttccgaagtccctcatggtatggaatcccaaggctggaaaaaatcattcaagtgggcaatcgaattaaatttgttattaaaagaccagaacttctgactcacagtaccactgaagttactcagccaagaacgaatacaccagtcaaagaagattggaatgtcagaattaccaagctacggaagcaagtggaagagatttttaatttgaaatttgcttagatttgttgacagcggtttcctggagtgctgtcttgagaacgattctgaggaggctcagcaagaaagagtgtttcagttgattgggtgtgtctgtcatggagaaggaactcaagctcttggactcaccgaggcagtaaaagtaccatatcctgtgtttgaatcaaacccggagttcttgtatgtggaaggcttgccagaggggattcccttccgaagccctacctggtttggaattccacgacttgaaaggatcgtccgcgggagtaataaaatcaagttcgttgttaaaaaacctgaactagttatttcctacttgcctcctgggatggctagtaaaataaacactaaagctttgcagtcccccaaaagaccacgaagtcctgggagtaattcaaaggttcctgaaattgaggtcaccgtggaaggccctaataacaacaatcctcaaacctcagctgttcgaaccccgacccagactaacggttctaacgttcccttcaagccacgagggagagagttttcctttgaggcctggaatgccaaaatcacggacctaaaacagaaagttgaaaatctcttcaatgagaaatgtggggaagctcttggccttaaacaagctgtgaaggtgccgttcgcgttatttgagtctttcccggaagacttttatgtggaaggcttacctgagggtgtgccattccgaagaccatcgacttttggcattccgaggctggagaagatactcagaaacaaagccaaaattaagttcatcattaaaaagcccgaaatgtttgagacggcgattaaggagagcacctcctctaagagccctcccagaaaaataaattcatcacccaatgttaatactactgcatcaggtgttgaagaccttaacatcattcaggtgacaattccagatgatgataatgaaagactctcgaaagttgaaaaagctagacagctaagagaacaagtgaatgacctctttagtcggaaatttggtgaagctattggtatgggttttcctgtgaaagttccctacaggaaaatcacaattaaccctggctgtgtggtggttgatggcatgcccccgggggtgtccttcaaagcccccagctacctggaaatcagctccatgagaaggatcttagactctgccgagtttatcaaattcacggtcattaggtaagtgagagtttcctgcttagtcacaggagcgaatctggagctcatgaggctgactcttctaaaatgcagccacaggtagtcatcgaatccggcttcctatgctgtgcaatcaacaaatcaaaataacttgtgtcatcattagaatgtcagatgtgcttctacgaactaagctgactcttttaattctttggcaaagggttggcaaactaggactgtttgccaaattcaggctgcctcctatttttagagtcttcctgaaacacagctacacccgtattatccatggctgctttcctgtcacagtgagtaagtagctgggactgagaaggcatggcctccaaagtctaaaatatttactctctagcactttgtagaaaaaccttagctaggcacagtggctaacgcctgtaatcccagcattttgggaggccaaggcaggcagatcacctgaggtcaggagttccagaccagcctggccaacatggtgaaatcccatctctacaaaaataaaacagttagctgggcatgatggcgggtgcctgtaatcccagctactcgggaggctgaggcaggatagtcgcttgaacccaggaggtggaggttgcaatgagccaagatcatgccactgcactccagcctggacgacagagtgagactccatcacaagaaaaaaagaactttgtcaacctctgtcttagggcgccttgtcacaggcttcgggtcagacggattcaaccttgcatcagccatttgttagccaggtcactctgttctttgtctgtaaatgagattgatcgttgttcccactgagagtgtcagctccttcccgtagagcaggcatgatgattgtactcacctctgacaccattgtgagtgccacattccttcccacgtccttgtcactgtaagagatgcccacctgagcaccaaccccaggttatcttcccctttgtcttccagccccccagaaacagctacgactcaacctacccaatcatttcatcatcagattgccactgtctctagttcaggtctcttgggactggcactcagaaatctcataataaatcctcttgaggcttctcatacactcgtcttcttccaatcttctttccctcaaaatctcatattttggttccacttcacccaccgtcattctccatatcactcccaggagttaggcaaaaagccccttccgttcttccgtatgttaaacttagaatcactctgttccctgctctgcgtttctattttttgtttttcctccatttactagtagcttaacactttctaacagtgttcttattattgatacgtatctatctcttccataagcttataaggtcacggataatacttctcattgtagtacgtaaatgacgtgggctagatatgagttgaataaacagttatacctgtaaattcttacagagtgaaaataaattgttatactttacaatttgtttctctctttagaccatttccaggacttgtgattaataaccgtgagtattttgtgaagtgttttgtttttgttttttcctggggtctgacgtgtgtgcgtgtgagtgtgtatacatgcttaacgtatatcacgttacttcacctatgtcagtaaccaggccaaatacttgttttagccctcagtaaaaacaccaggcacttcctagttgtaaaattattcaagcttcttaacttcctatcctcgatgcacttaatcataaaatggtaataatagcaccgattttgggggagtcgttccagtagatggaaagcatctggaacaggtgtcagcaagctcctgccgacgtgtatgcataaagttttattgaaaccaccatcgtgtccatttgtttatggcagaactgagagatggcagcagcaagtgtgtgcctgcaaaacctaaaatatttactaattggctctgcaagaaaagagtttgcatccccctaacctagaacagtgtctagcctctagtatgtgtttagcctacagtatgtgctcagcgaatacaatctatatttattactgcttttatgactgttataattactgtgcttggatttcgttacaaagtaagtcacaatgtgcctgcttctgttagtatttcagcacagtgcctggcacacatggggctctcaaatattgctgagcgagtgaacaaatgtcctttcaattccttaacgttgatgtcattttcaatagtattttgagccaaacttaattttgcgagtgtgttttgttttcttaactttattattaaaaatgtataaaagtgaggccaggcgtggtggctcacgcctgtaatcccagcagtttgggaggctgaggcaggcggatcagttgaggttgggagttggagaccagcccgtccaacatggtgaaagcctgtctctactaaaaatacaaaaatcagctgggtgtggtggcgcgtgcctgtaatcccagctactcaggaggctgaggcaggagagttgcttgaatcctagaggtggaggttgcagtgagctgagatcgtgccattgcactccagcctgggcaacaagagcaaaactctgtcccaataaataaataaataaaatgttctcttttgttcctgttcttgtgcggtagtgtggtatagagttttatggtaattactgtgaattagtgattctgagggacatatcagaactctgaggtttgtttccttctcatcttgagggaaacagcaaatgtatgttaaaatgcttttccaagggaacaacacatccttacattatttaaaccaatctgcttcattttcagagctggttgatcagagtgagtcagaaggccccgtgatacaagaatcagctgaaccaagccagttggaagttccagccacagaagaaataaaagagactgatggaagctctcagatcaagcaagaaccagaccccacgtggtagacctcttccctcctaggcttaaagtatcagtggttgagaagagcttttcggacctgttactaccccaagctgtgtaatatacttgtataacagaaataccttctatacaaacctttttttctacttttagatagaaatgtctactttttcagcagttctgtgaattaaagagcagagtgactgtgggtctggaatggctggtgtacttgggaatgtactatcaggattttacagcaatgctgggaaatgacagggaaaatgacaggaatgaatctcaccagattttttatgtactcagcagagccttgagttacggtgtttattttccaatcaagtgaagatatctcctacttctcctactggaacatctcagcttctgcagtgaagaaaaattcctgtgatagttcagttctttagtttttctatttgaaaaaaaaaaatcatttaaatgatcctttgttcacggctctccttaatgactgagtgaacagttcctatctgtatatttgactaaaccttttcctaagctatctctcatggttcctatgtttttttatcataattaaaagcaaaaccatctggatcacctaacagtcagaggtcagtatctcagcgtgtgaattatagaggaaatacagagagaacctcttccacttttacttttcgtccaaataaaatgcatggtgtaccagaagttgaagatcgggttgaggattggggctagctcgatgacactaaggccccaacatcgcgggacctgctgtggcgcggattcttaggaacgctgttctagccggccccctctccaggggtcgccgtggccggcattatttcctagttcttcttgtaaccctgaggtgccagcgcggggagtgaggaggggtcagggggctaaggatgcaacctctgacgttctgcgccttcctaggagagtcttacatgtgttgagatttcacaagcaatgcgagttgtaaaataccagctctacaagaagctaggctctgtgacggcatagttttcagtagctttatcacaatattcacaatggagaattatatgacatggtagcagaaataggcccttttatgtgttgcttctattttacctcaaattgtagatatagggtaatcaataaaatccatccatgcctttcacacactaagt

SEQ ID NO: 4267 - protein, 495 aa, Homo sapiens; identical to SEQ ID NO: 4057

SEQ ID NO: 4268 - DNA, 7291 bp, Homo sapiens
aaaaaaaaaaaaaaaaaaaaaaaaaaaagaaaaaagaaaaaaaaaaggaggaggaggaggagggtgagagagaagctgggagagcagagaaaaggggccaccggtcgcccccccgcttccccgcacgcgctctccagccgcggccgcccgcctgccgcggtcaccccggcctctgcctctgtcccccagtgatcggatcaaggcgctgagcgaggccctgcctgcggggcggccatgcggcggtgacaggagcgcgaccgacacgcacgggcccctcgccccctctcgcctcccgtccgctcgccagctcccctcagccgaggctgctccgcggcggccgcagcccgcgcgcggcccacactcgcctcccctcggcacccccggccccggagctgcctggaggcggccgcactcggtgtaaagaactggccaagtccaaagccgaagtggcctgcattgcagtgtatgaaacagacgtgtttgtcgtcggaactgaaagaggacgtgcttttgtcaataccagaaaggattttcaaaaagattttgtaaaatattgtgttgaagaagaagaaaaagctgcagagatgcataaaatgaaatctacaacccaggcaaatcggatgagtgtagatgctgtagaaattgaaacactcagaaaaacagttgaggactatttctgcttttgctatgggaaagctttaggcaaatccacagtggtacctgtaccatatgagaagatgctgcgagaccagtcggctgtggtagtgcaggggcttccggaaggtgttgcctttaaacaccccgagaactatgatcttgcaaccctgaaatggattttggagaacaaagcagggatttcattcatcattaagagaccttttttagagccaaagaagcatgtaggtggtcgtgtgatggtaacagatgctgacaggtcaatactatctccaggtggaagttgtggccccatcaaagtgaaaactgaacccacagaagattctggcatttccctggaaatggcagctgtgacagtaaaggaagaatcagaagatcctgattattatcaatataacattcaaggaagccaccattcttcagagggcaatgaaggcacagaaatggaagtaccagcagaagattctactcaacatgtcccttcagaaacaagtgaggaccctgaagttgaggtgactattgaagatgatgattattctccaccgtctaagagaccaaaggccaatgagctaccgcagccaccagtcccggaacccgccaatgctgggaagcggaaagtgagggagttcaacttcgagaaatggaatgctcgcatcactgatctacgtaaacaagttgaagaattgtttgaaaggaaatatgctcaagccataaaagccaaaggtccggtgacgatcccgtaccctcttttccagtctcatgttgaagatctttatgtagaaggacttcctgaaggaattccttttagaaggccatctacttacggaattcctcgcctggagaggatattacttgcaaaggaaaggattcgttttgtgattaagaaacatgagcttctgaattcaacacgtgaagatttacagcttgataagccagcttcaggagtaaaggaagaatggtatgccagaatcactaaattaagaaagatggtggatcagcttttctgcaaaaaatttgcggaagccttggggagcactgaagccaaggctgtaccgtaccaaaaatttgaggcacacccgaatgatctgtacgtggaaggactgccagaaaacattcctttccgaagtccctcatggtatggaatcccaaggctggaaaaaatcattcaagtgggcaatcgaattaaatttgttattaaaagaccagaacttctgactcacagtaccactgaagttactcagccaagaacgaatacaccagtcaaagaagattggaatgtcagaattaccaagctacggaagcaagtggaagagatttttaatttgaaatttgcttagatttgttgacagcggtttcctggagtgctgtcttgagaacgattctgaggaggctcagcaagaaagagtgtttcagttgattgggtgtgtctgtcatggagaaggaactcaagctcttggactcaccgaggcagtaaaagtaccatatcctgtgtttgaatcaaacccggagttcttgtatgtggaaggcttgccagaggggattcccttccgaagccctacctggtttggaattccacgacttgaaaggatcgtccgcgggagtaataaaatcaagttcgttgttaaaaaacctgaactagttatttcctacttgcctcctgggatggctagtaaaataaacactaaagctttgcagtcccccaaaagaccacgaagtcctgggagtaattcaaaggttcctgaaattgaggtcaccgtggaaggccctaataacaacaatcctcaaacctcagctgttcgaaccccgacccagactaacggttctaacgttcccttcaagccacgagggagagagttttcctttgaggcctggaatgccaaaatcacggacctaaaacagaaagttgaaaatctcttcaatgagaaatgtggggaagctcttggccttaaacaagctgtgaaggtgccgttcgcgttatttgagtctttcccggaagacttttatgtggaaggcttacctgagggtgtgccattccgaagaccatcgacttttggcattccgaggctggagaagatactcagaaacaaagccaaaattaagttcatcattaaaaagcccgaaatgtttgagacggcgattaaggagagcacctcctctaagagccctcccagaaaaataaattcatcacccaatgttaatactactgcatcaggtgttgaagaccttaacatcattcaggtgacaattccagatgatgataatgaaagactctcgaaagttgaaaaagctagacagctaagagaacaagtgaatgacctctttagtcggaaatttggtgaagctattggtatgggttttcctgtgaaagttccctacaggaaaatcacaattaaccctggctgtgtggtggttgatggcatgcccccgggggtgtccttcaaagcccccagctacctggaaatcagctccatgagaaggatcttagactctgccgagtttatcaaattcacggtcattaggtaagtgagagtttcctgcttagtcacaggagcgaatctggagctcatgaggctgactcttctaaaatgcagccacaggtagtcatcgaatccggcttcctatgctgtgcaatcaacaaatcaaaataacttgtgtcatcattagaatgtcagatgtgcttctacgaactaagctgactcttttaattctttggcaaagggttggcaaactaggactgtttgccaaattcaggctgcctcctatttttagagtcttcctgaaacacagctacacccgtattatccatggctgctttcctgtcacagtgagtaagtagctgggactgagaaggcatggcctccaaagtctaaaatatttactctctagcactttgtagaaaaaccttagctaggcacagtggctaacgcctgtaatcccagcattttgggaggccaaggcaggcagatcacctgaggtcaggagttccagaccagcctggccaacatggtgaaatcccatctctacaaaaataaaacagttagctgggcatgatggcgggtgcctgtaatcccagctactcgggaggctgaggcaggatagtcgcttgaacccaggaggtggaggttgcaatgagccaagatcatgccactgcactccagcctggacgacagagtgagactccatcacaagaaaaaaagaactttgtcaacctctgtcttagggcgccttgtcacaggcttcgggtcagacggattcaaccttgcatcagccatttgttagccaggtcactctgttctttgtctgtaaatgagattgatcgttgttcccactgagagtgtcagctccttcccgtagagcaggcatgatgattgtactcacctctgacaccattgtgagtgccacattccttcccacgtccttgtcactgtaagagatgcccacctgagcaccaaccccaggttatcttcccctttgtcttccagccccccagaaacagctacgactcaacctacccaatcatttcatcatcagattgccactgtctctagttcaggtctcttgggactggcactcagaaatctcataataaatcctcttgaggcttctcatacactcgtcttcttccaatcttctttccctcaaaatctcatattttggttccacttcacccaccgtcattctccatatcactcccaggagttaggcaaaaagccccttccgttcttccgtatgttaaacttagaatcactctgttccctgctctgcgtttctattttttgtttttcctccatttactagtagcttaacactttctaacagtgttcttattattgatacgtatctatctcttccataagcttataaggtcacggataatacttctcattgtagtacgtaaatgacgtgggctagatatgagttgaataaacagttatacctgtaaattcttacagagtgaaaataaattgttatactttacaatttgtttctctctttagaccatttccaggacttgtgattaataaccgtgagtattttgtgaagtgttttgtttttgttttttcctggggtctgacgtgtgtgcgtgtgagtgtgtatacatgcttaacgtatatcacgttacttcacctatgtcagtaaccaggccaaatacttgttttagccctcagtaaaaacaccaggcacttcctagttgtaaaattattcaagcttcttaacttcctatcctcgatgcacttaatcataaaatggtaataatagcaccgattttgggggagtcgttccagtagatggaaagcatctggaacaggtgtcagcaagctcctgccgacgtgtatgcataaagttttattgaaaccaccatcgtgtccatttgtttatggcagaactgagagatggcagcagcaagtgtgtgcctgcaaaacctaaaatatttactaattggctctgcaagaaaagagtttgcatccccctaacctagaacagtgtctagcctctagtatgtgtttagcctacagtatgtgctcagcgaatacaatctatatttattactgcttttatgactgttataattactgtgcttggatttcgttacaaagtaagtcacaatgtgcctgcttctgttagtatttcagcacagtgcctggcacacatggggctctcaaatattgctgagcgagtgaacaaatgtcctttcaattccttaacgttgatgtcattttcaatagtattttgagccaaacttaattttgcgagtgtgttttgttttcttaactttattattaaaaatgtataaaagtgaggccaggcgtggtggctcacgcctgtaatcccagcagtttgggaggctgaggcaggcggatcagttgaggttgggagttggagaccagcccgtccaacatggtgaaagcctgtctctactaaaaatacaaaaatcagctgggtgtggtggcgcgtgcctgtaatcccagctactcaggaggctgaggcaggagagttgcttgaatcctagaggtggaggttgcagtgagctgagatcgtgccattgcactccagcctgggcaacaagagcaaaactctgtcccaataaataaataaataaaatgttctcttttgttcctgttcttgtgcggtagtgtggtatagagttttatggtaattactgtgaattagtgattctgagggacatatcagaactctgaggtttgtttccttctcatcttgagggaaacagcaaatgtatgttaaaatgcttttccaagggaacaacacatccttacattatttaaaccaatctgcttcattttcagagctggttgatcagagtgagtcagaaggccccgtgatacaagaatcagctgaaccaagccagttggaagttccagccacagaagaaataaaagagactgatggaagctctcagatcaagcaagaaccagaccccacgtggtagacctcttccctcctaggcttaaagtatcagtggttgagaagagcttttcggacctgttactaccccaagctgtgtaatatacttgtataacagaaataccttctatacaaacctttttttctacttttagatagaaatgtctactttttcagcagttctgtgaattaaagagcagagtgactgtgggtctggaatggctggtgtacttgggaatgtactatcaggattttacagcaatgctgggaaatgacagggaaaatgacaggaatgaatctcaccagattttttatgtactcagcagagccttgagttacggtgtttattttccaatcaagtgaagatatctcctacttctcctactggaacatctcagcttctgcagtgaagaaaaattcctgtgatagttcagttctttagtttttctatttgaaaaaaaaaaatcatttaaatgatcctttgttcacggctctccttaatgactgagtgaacagttcctatctgtatatttgactaaaccttttcctaagctatctctcatggttcctatgtttttttatcataattaaaagcaaaaccatctggatcacctaacagtcagaggtcagtatctcagcgtgtgaattatagaggaaatacagagagaacctcttccacttttacttttcgtccaaataaaatgcatggtgtaccagaagttgaagatcgggttgaggattggggctagctcgatgacactaaggccccaacatcgcgggacctgctgtggcgcggattcttaggaacgctgttctagccggccccctctccaggggtcgccgtggccggcattatttcctagttcttcttgtaaccctgaggtgccagcgcggggagtgaggaggggtcagggggctaaggatgcaacctctgacgttctgcgccttcctaggagagtcttacatgtgttgagatttcacaagcaatgcgagttgtaaaataccagctctacaagaagctaggctctgtgacggcatagttttcagtagctttatcacaatattcacaatggagaattatatgacatggtagcagaaataggcccttttatgtgttgcttctattttacctcaaattgtagatatagggtaatcaataaaatccatccatgcctttcacacactaagt

SEQ ID NO: 4269 - protein, 475 aa, Homo sapiens; identical to SEQ ID NO: 4139

SEQ ID NO: 4270 - DNA, 5194 bp, Homo sapiens
aaaaaaaaaaaaaaaaaaaaaaaaaaaagaaaaaagaaaaaaaaaaggaggaggaggaggagggtgagagagaagctgggagagcagagaaaaggggccaccggtcgcccccccgcttccccgcacgcgctctccagccgcggccgcccgcctgccgcggtcaccccggcctctgcctctgtcccccagtgatcggatcaaggcgctgagcgaggccctgcctgcggggcggccatgcggcggtgacaggagcgcgaccgacacgcacgggcccctcgccccctctcgcctcccgtccgctcgccagctcccctcagccgaggctgctccgcggcggccgcagcccgcgcgcggcccacactcgcctccccgttgaagatgaggagtcctcggagagcaggatggtggtgacattcctcatgtcagctctcgagtccatgtgtaaagaactggccaagtccaaagccgaagtggcctgcattgcagtgtatgaaacagacgtgtttgtcgtcggaactgaaagaggacgtgcttttgtcaataccagaaaggattttcaaaaagattttgtaaaatattgtgttgaagaagaagaaaaagctgcagagatgcataaaatgaaatctacaacccaggcaaatcggatgagtgtagatgctgtagaaattgaaacactcagaaaaacagttgaggactatttctgcttttgctatgggaaagctttaggcaaatccacagtggtacctgtaccatatgagaagatgctgcgagaccagtcggctgtggtagtgcaggggcttccggaaggtgttgcctttaaacaccccgagaactatgatcttgcaaccctgaaatggattttggagaacaaagcagggatttcattcatcattaagagaccttttttagagccaaagaagcatgtaggtggtcgtgtgatggtaacagatgctgacaggtcaatactatctccaggtggaagttgtggccccatcaaagtgaaaactgaacccacagaagattctggcatttccctggaaatggcagctgtgacagtaaaggaagaatcagaagatcctgattattatcaatataacattcaagcaggcccttctgaaactgatgatgttgatgaaaaacagcccctatcgaagcctttgcaaggaagccaccattcttcagagggcaatgaaggcacagaaatggaagtaccagcagaagattctactcaacatgtcccttcagaaacaagtgaggaccctgaagttgaggtgactattgaagatgatgattattctccaccgtctaagagaccaaaggccaatgagctaccgcagccaccagtcccggaacccgccaatgctgggaagcggaaagtgagggagttcaacttcgagaaatggaatgctcgcatcactgatctacgtaaacaagttgaagaattgtttgaaaggaaatatgctcaagccataaaagccaaaggtccggtgacgatcccgtaccctcttttccagtctcatgttgaagatctttatgtagaaggacttcctgaaggaattccttttagaaggccatctacttacggaattcctcgcctggagaggatattacttgcaaaggaaaggattcgttttgtgattaagaaacatgagcttctgaattcaacacgtgaagatttacagcttgataagccagcttcaggagtaaaggaagaatggtatgccagaatcactaaattaagaaagatggtggatcagcttttctgcaaaaaatttgcggaagccttggggagcactgaagccaaggctgtaccgtaccaaaaatttgaggcacacccgaatgatctgtacgtggaaggactgccagaaaacattcctttccgaagtccctcatggtatggaatcccaaggctggaaaaaatcattcaagtgggcaatcgaattaaatttgttattaaaagaccagaacttctgactcacagtaccactgaagttactcagccaagaacgaatacaccagtcaaagaagattggaatgtcagaattaccaagctacggaagcaagtggaagagatttttaatttgaaatttgctcaagctcttggactcaccgaggcagtaaaagtaccatatcctgtgtttgaatcaaacccggagttcttgtatgtggaaggcttgccagaggggattcccttccgaagccctacctggtttggaattccacgacttgaaaggatcgtccgcgggagtaataaaatcaagttcgttgttaaaaaacctgaactagttatttcctacttgcctcctgggatggctagtaaaataaacactaaagctttgcagtcccccaaaagaccacgaagtcctgggagtaattcaaaggttcctgaaattgaggtcaccgtggaaggccctaataacaacaatcctcaaacctcagctgttcgaaccccgacccagactaacggttctaacgttcccttcaagccacgagggagagagttttcctttgaggcctggaatgccaaaatcacggacctaaaacagaaagttgaaaatctcttcaatgagaaatgtggggaagctcttggccttaaacaagctgtgaaggtgccgttcgcgttatttgagtctttcccggaagacttttatgtggaaggcttacctgagggtgtgccattccgaagaccatcgacttttggcattccgaggctggagaagatactcagaaacaaagccaaaattaagttcatcattaaaaagcccgaaatgtttgagacggcgattaaggagagcacctcctctaagagccctcccagaaaaataaattcatcacccaatgttaatactactgcatcaggtgttgaagaccttaacatcattcaggtgacaattccagatgatgataatgaaagactctcgaaagttgaaaaagctagacagctaagagaacaagtgaatgacctctttagtcggaaatttggtgaagctattggtatgggttttcctgtgaaagttccctacaggaaaatcacaattaaccctggctgtgtggtggttgatggcatgcccccgggggtgtccttcaaagcccccagctacctggaaatcagctccatgagaaggatcttagactctgccgagtttatcaaattcacggtcattagaccatttccaggacttgtgattaataaccagctggttgatcagagtgagtcagaaggccccgtgatacaagaatcagctgaaccaagccagttggaagttccagccacagaagaaataaaagagactgatggaagctctcagatcaagcaagaaccagaccccacgtggtagacctcttccctcctagggtaaatcagcttctgtgtcagggatgctgtgtggtgtccatctgaaccccctgcatacgcgtagctaatgtgatctccccactttcacataagatggtggccctgccttcagggaatgtgggagccaggtgggagccttcccggatatttaagctagaagattctacagggagattctccttggatcaatatatgtctctcagtcaaagatgtaaaagcacttttgccttaaaaagaatgttctgtttctaaatagagtcaacgttgtcctcctcattggaattcactatgagtcagaatcattagactgacttttttttttccatagtaatagtattttgcagagtctcacagagctgcagatcttttgttcatcttgcagagttaacaagtctgatcctgttagtccagatttcttaaatttggccaagttataataggagcagtagcttgagacccgaagtcaggaaactttgacaatggatttttttttttaatccagagacttgtactggaatttgccttaccctgtcagctcatggacttaaggtttcatcccgctttatgagtgcttctgaatccaagtcattgttacctgaatttgcaaattaagttgtgatattcgtgactgttaaattcctgtaattagattaacctctttgcttgcttgtttgttttctctcctattttagcttaaagtatcagtggttgagaagagcttttcggacctgttactaccccaagctgtgtaatatacttgtataacagaaataccttctatacaaacctttttttctacttttagatagaaatgtctactttttcagcagttctgtgaattaaagagcagagtgactgtgggtctggaatggctggtgtacttgggaatgtactatcaggattttacagcaatgctgggaaatgacagggaaaatgacaggaatgaatctcaccagattttttatgtactcagcagagccttgagttacggtgtttattttccaatcaagtgaagatatctcctacttctcctactggaacatctcagcttctgcagtgaagaaaaattcctgtgatagttcagttctttagtttttctatttgaaaaaaaaaaatcatttaaatgatcctttgttcacggctctccttaatgactgagtgaacagttcctatctgtatatttgactaaaccttttcctaagctatctctcatggttcctatgtttttttatcataattaaaagcaaaaccatctggatcacctaacagtcagaggtcagtatctcagcgtgtgaattatagaggaaatacagagagaacctcttccacttttacttttcgtccaaataaaatgcatggtgtaccagaagttgaagatcgggttgaggattggggctagctcgatgacactaaggccccaacatcgcgggacctgctgtggcgcggattcttaggaacgctgttctagccggccccctctccaggggtcgccgtggccggcattatttcctagttcttcttgtaaccctgaggtgccagcgcggggagtgaggaggggtcagggggctaaggatgcaacctctgacgttctgcgccttcctaggagagtcttacatgtgttgagatttcacaagcaatgcgagttgtaaaataccagctctacaagaagctaggctctgtgacggcatagttttcagtagctttatcacaatattcacaatggagaattatatgacatggtagcagaaataggcccttttatgtgttgcttctattttacctcaaattgtagatatagggtaatcaataaaatccatccatgcctttcacacactaagt

SEQ ID NO: 4271 - protein, 978 aa, Homo sapiens; identical to SEQ ID NO: 4157

SEQ ID NO: 4272 - DNA, 5274 bp, Homo sapiens
aaaaaaaaaaaaaaaaaaaaaaaaaaaagaaaaaagaaaaaaaaaaggaggaggaggaggagggtgagagagaagctgggagagcagagaaaaggggccaccggtcgcccccccgcttccccgcacgcgctctccagccgcggccgcccgcctgccgcggtcaccccggcctctgcctctgtcccccagtgatcggatcaaggcgctgagcgaggccctgcctgcggggcggccatgcggcggtgacaggagcgcgaccgacacgcacgggcccctcgccccctctcgcctcccgtccgctcgccagctcccctcagccgaggctgctccgcggcggccgcagcccgcgcgcggcccacactcgcctcccctcggcacccccggccccggagctgcctggaggcggccgcactcggggatcatggcccaagttgcaatgtccaccctccccgttgaagatgaggagtcctcggagagcaggatggtggtgacattcctcatgtcagctctcgagtccatgtgtaaagaactggccaagtccaaagccgaagtggcctgcattgcagtgtatgaaacagacgtgtttgtcgtcggaactgaaagaggacgtgcttttgtcaataccagaaaggattttcaaaaagattttgtaaaatattgtgttgaagaagaagaaaaagctgcagagatgcataaaatgaaatctacaacccaggcaaatcggatgagtgtagatgctgtagaaattgaaacactcagaaaaacagttgaggactatttctgcttttgctatgggaaagctttaggcaaatccacagtggtacctgtaccatatgagaagatgctgcgagaccagtcggctgtggtagtgcaggggcttccggaaggtgttgcctttaaacaccccgagaactatgatcttgcaaccctgaaatggattttggagaacaaagcagggatttcattcatcattaagagaccttttttagagccaaagaagcatgtaggtggtcgtgtgatggtaacagatgctgacaggtcaatactatctccaggtggaagttgtggccccatcaaagtgaaaactgaacccacagaagattctggcatttccctggaaatggcagctgtgacagtaaaggaagaatcagaagatcctgattattatcaatataacattcaagcaggcccttctgaaactgatgatgttgatgaaaaacagcccctatcgaagcctttgcaaggaagccaccattcttcagagggcaatgaaggcacagaaatggaagtaccagcagaagattctactcaacatgtcccttcagaaacaagtgaggaccctgaagttgaggtgactattgaagatgatgattattctccaccgtctaagagaccaaaggccaatgagctaccgcagccaccagtcccggaacccgccaatgctgggaagcggaaagtgagggagttcaacttcgagaaatggaatgctcgcatcactgatctacgtaaacaagttgaagaattgtttgaaaggaaatatgctcaagccataaaagccaaaggtccggtgacgatcccgtaccctcttttccagtctcatgttgaagatctttatgtagaaggacttcctgaaggaattccttttagaaggccatctacttacggaattcctcgcctggagaggatattacttgcaaaggaaaggattcgttttgtgattaagaaacatgagcttctgaattcaacacgtgaagatttacagcttgataagccagcttcaggagtaaaggaagaatggtatgccagaatcactaaattaagaaagatggtggatcagcttttctgcaaaaaatttgcggaagccttggggagcactgaagccaaggctgtaccgtaccaaaaatttgaggcacacccgaatgatctgtacgtggaaggactgccagaaaacattcctttccgaagtccctcatggtatggaatcccaaggctggaaaaaatcattcaagtgggcaatcgaattaaatttgttattaaaagaccagaacttctgactcacagtaccactgaagttactcagccaagaacgaatacaccagtcaaagaagattggaatgtcagaattaccaagctacggaagcaagtggaagagatttttaatttgaaatttgctcaagctcttggactcaccgaggcagtaaaagtaccatatcctgtgtttgaatcaaacccggagttcttgtatgtggaaggcttgccagaggggattcccttccgaagccctacctggtttggaattccacgacttgaaaggatcgtccgcgggagtaataaaatcaagttcgttgttaaaaaacctgaactagttatttcctacttgcctcctgggatggctagtaaaataaacactaaagctttgcagtcccccaaaagaccacgaagtcctgggagtaattcaaaggttcctgaaattgaggtcaccgtggaaggccctaataacaacaatcctcaaacctcagctgttcgaaccccgacccagactaacggttctaacgttcccttcaagccacgagggagagagttttcctttgaggcctggaatgccaaaatcacggacctaaaacagaaagttgaaaatctcttcaatgagaaatgtggggaagctcttggccttaaacaagctgtgaaggtgccgttcgcgttatttgagtctttcccggaagacttttatgtggaaggcttacctgagggtgtgccattccgaagaccatcgacttttggcattccgaggctggagaagatactcagaaacaaagccaaaattaagttcatcattaaaaagcccgaaatgtttgagacggcgattaaggagagcacctcctctaagagccctcccagaaaaataaattcatcacccaatgttaatactactgcatcaggtgttgaagaccttaacatcattcaggtgacaattccagatgatgataatgaaagactctcgaaagttgaaaaagctagacagctaagagaacaagtgaatgacctctttagtcggaaatttggtgaagctattggtatgggttttcctgtgaaagttccctacaggaaaatcacaattaaccctggctgtgtggtggttgatggcatgcccccgggggtgtccttcaaagcccccagctacctggaaatcagctccatgagaaggatcttagactctgccgagtttatcaaattcacggtcattagaccatttccaggacttgtgattaataaccagctggttgatcagagtgagtcagaaggccccgtgatacaagaatcagctgaaccaagccagttggaagttccagccacagaagaaataaaagagactgatggaagctctcagatcaagcaagaaccagaccccacgtggtagacctcttccctcctagggtaaatcagcttctgtgtcagggatgctgtgtggtgtccatctgaaccccctgcatacgcgtagctaatgtgatctccccactttcacataagatggtggccctgccttcagggaatgtgggagccaggtgggagccttcccggatatttaagctagaagattctacagggagattctccttggatcaatatatgtctctcagtcaaagatgtaaaagcacttttgccttaaaaagaatgttctgtttctaaatagagtcaacgttgtcctcctcattggaattcactatgagtcagaatcattagactgacttttttttttccatagtaatagtattttgcagagtctcacagagctgcagatcttttgttcatcttgcagagttaacaagtctgatcctgttagtccagatttcttaaatttggccaagttataataggagcagtagcttgagacccgaagtcaggaaactttgacaatggatttttttttttaatccagagacttgtactggaatttgccttaccctgtcagctcatggacttaaggtttcatcccgctttatgagtgcttctgaatccaagtcattgttacctgaatttgcaaattaagttgtgatattcgtgactgttaaattcctgtaattagattaacctctttgcttgcttgtttgttttctctcctattttagcttaaagtatcagtggttgagaagagcttttcggacctgttactaccccaagctgtgtaatatacttgtataacagaaataccttctatacaaacctttttttctacttttagatagaaatgtctactttttcagcagttctgtgaattaaagagcagagtgactgtgggtctggaatggctggtgtacttgggaatgtactatcaggattttacagcaatgctgggaaatgacagggaaaatgacaggaatgaatctcaccagattttttatgtactcagcagagccttgagttacggtgtttattttccaatcaagtgaagatatctcctacttctcctactggaacatctcagcttctgcagtgaagaaaaattcctgtgatagttcagttctttagtttttctatttgaaaaaaaaaaatcatttaaatgatcctttgttcacggctctccttaatgactgagtgaacagttcctatctgtatatttgactaaaccttttcctaagctatctctcatggttcctatgtttttttatcataattaaaagcaaaaccatctggatcacctaacagtcagaggtcagtatctcagcgtgtgaattatagaggaaatacagagagaacctcttccacttttacttttcgtccaaataaaatgcatggtgtaccagaagttgaagatcgggttgaggattggggctagctcgatgacactaaggccccaacatcgcgggacctgctgtggcgcggattcttaggaacgctgttctagccggccccctctccaggggtcgccgtggccggcattatttcctagttcttcttgtaaccctgaggtgccagcgcggggagtgaggaggggtcagggggctaaggatgcaacctctgacgttctgcgccttcctaggagagtcttacatgtgttgagatttcacaagcaatgcgagttgtaaaataccagctctacaagaagctaggctctgtgacggcatagttttcagtagctttatcacaatattcacaatggagaattatatgacatggtagcagaaataggcccttttatgtgttgcttctattttacctcaaattgtagatatagggtaatcaataaaatccatccatgcctttcacacactaagt

SEQ ID NO: 4273 - protein, 998 aa, Homo sapiens; identical to SEQ ID NO: 468

SEQ ID NO: 4274 - DNA, 4556 bp, Homo sapiens
aaaaaaaaaaaaaaaaaaaaaaaaaaaagaaaaaagaaaaaaaaaaggaggaggaggaggagggtgagagagaagctgggagagcagagaaaaggggccaccggtcgcccccccgcttccccgcacgcgctctccagccgcggccgcccgcctgccgcggtcaccccggcctctgcctctgtcccccagtgatcggatcaaggcgctgagcgaggccctgcctgcggggcggccatgcggcggtgacaggagcgcgaccgacacgcacgggcccctcgccccctctcgcctcccgtccgctcgccagctcccctcagccgaggctgctccgcggcggccgcagcccgcgcgcggcccacactcgcctcccctcggcacccccggccccggagctgcctggaggcggccgcactcggggatcatggcccaagttgcaatgtccaccctccccgttgaagatgaggagtcctcggagagcaggatggtggtgacattcctcatgtcagctctcgagtccatgtgtaaagaactggccaagtccaaagccgaagtggcctgcattgcagtgtatgaaacagacgtgtttgtcgtcggaactgaaagaggacgtgcttttgtcaataccagaaaggattttcaaaaagattttgtaaaatattgtgttgaagaagaagaaaaagctgcagagatgcataaaatgaaatctacaacccaggcaaatcggatgagtgtagatgctgtagaaattgaaacactcagaaaaacagttgaggactatttctgcttttgctatgggaaagctttaggcaaatccacagtggtacctgtaccatatgagaagatgctgcgagaccagtcggctgtggtagtgcaggggcttccggaaggtgttgcctttaaacaccccgagaactatgatcttgcaaccctgaaatggattttggagaacaaagcagggatttcattcatcattaagagaccttttttagagccaaagaagcatgtaggtggtcgtgtgatggtaacagatgctgacaggtcaatactatctccaggtggaagttgtggccccatcaaagtgaaaactgaacccacagaagattctggaagccaccattcttcagagggcaatgaaggcacagaaatggaagtaccagcagaagattctactcaacatgtcccttcagaaacaagtgaggaccctgaagttgaggtgactattgaagatgatgattattctccaccgtctaagagaccaaaggccaatgagctaccgcagccaccagtcccggaacccgccaatgctgggaagcggaaagtgagggagttcaacttcgagaaatggaatgctcgcatcactgatctacgtaaacaagttgaagaattgtttgaaaggaaatatgctcaagccataaaagccaaaggtccggtgacgatcccgtaccctcttttccagtctcatgttgaagatctttatgtagaaggacttcctgaaggaattccttttagaaggccatctacttacggaattcctcgcctggagaggatattacttgcaaaggaaaggattcgttttgtgattaagaaacatgagcttctgaattcaacacgtgaagatttacagcttgataagccagcttcaggagtaaaggaagaatggtatgccagaatcactaaattaagaaagatggtggatcagcttttctgcaaaaaatttgcggaagccttggggagcactgaagccaaggctgtaccgtaccaaaaatttgaggcacacccgaatgatctgtacgtggaaggactgccagaaaacattcctttccgaagtccctcatggtatggaatcccaaggctggaaaaaatcattcaagtgggcaatcgaattaaatttgttattaaaagaccagaacttctgactcacagtaccactgaagttactcagccaagaacgaatacaccagtcaaagaagattggaatgtcagaattaccaagctacggaagcaagtggaagagatttttaatttgaaatttgcttagatttgttgacagcggtttcctggagtgctgtcttgagaacgattctgaggaggctcagcaagaaagagtgtttcagttgattgggtgtgtctgtcatggagaaggaactcaagctcttggactcaccgaggcagtaaaagtaccatatcctgtgtttgaatcaaacccggagttcttgtatgtggaaggcttgccagaggggattcccttccgaagccctacctggtttggaattccacgacttgaaaggatcgtccgcgggagtaataaaatcaagttcgttgttaaaaaacctgaactagttatttcctacttgcctcctgggatggctagtaaaataaacactaaagctttgcagtcccccaaaagaccacgaagtcctgggagtaattcaaaggttcctgaaattgaggtcaccgtggaaggccctaataacaacaatcctcaaacctcagctgttcgaaccccgacccagactaacggttctaacgttcccttcaagccacgagggagagagttttcctttgaggcctggaatgccaaaatcacggacctaaaacagaaagttgaaaatctcttcaatgagaaatgtggggaagctcttggccttaaacaagctgtgaaggtgccgttcgcgttatttgagtctttcccggaagacttttatgtggaaggcttacctgagggtgtgccattccgaagaccatcgacttttggcattccgaggctggagaagatactcagaaacaaagccaaaattaagttcatcattaaaaagcccgaaatgtttgagacggcgattaaggagagcacctcctctaagagccctcccagaaaaataaattcatcacccaatgttaatactactgcatcaggtgttgaagaccttaacatcattcaggtgacaattccagatgatgataatgaaagactctcgaaagttgaaaaagctagacagctaagagaacaagtgaatgacctctttagtcggaaatttggtgaagctattggtatgggttttcctgtgaaagttccctacaggaaaatcacaattaaccctggctgtgtggtggttgatggcatgcccccgggggtgtccttcaaagcccccagctacctggaaatcagctccatgagaaggatcttagactctgccgagtttatcaaattcacggtcattagaccatttccaggacttgtgattaataaccagctggttgatcagagtgagtcagaaggccccgtgatacaagaatcagctgaaccaagccagttggaagttccagccacagaagaaataaaagagactgatggaagctctcagatcaagcaagaaccagaccccacgtggtagacctcttccctcctaggcttaaagtatcagtggttgagaagagcttttcggacctgttactaccccaagctgtgtaatatacttgtataacagaaataccttctatacaaacctttttttctacttttagatagaaatgtctactttttcagcagttctgtgaattaaagagcagagtgactgtgggtctggaatggctggtgtacttgggaatgtactatcaggattttacagcaatgctgggaaatgacagggaaaatgacaggaatgaatctcaccagattttttatgtactcagcagagccttgagttacggtgtttattttccaatcaagtgaagatatctcctacttctcctactggaacatctcagcttctgcagtgaagaaaaattcctgtgatagttcagttctttagtttttctatttgaaaaaaaaaaatcatttaaatgatcctttgttcacggctctccttaatgactgagtgaacagttcctatctgtatatttgactaaaccttttcctaagctatctctcatggttcctatgtttttttatcataattaaaagcaaaaccatctggatcacctaacagtcagaggtcagtatctcagcgtgtgaattatagaggaaatacagagagaacctcttccacttttacttttcgtccaaataaaatgcatggtgtaccagaagttgaagatcgggttgaggattggggctagctcgatgacactaaggccccaacatcgcgggacctgctgtggcgcggattcttaggaacgctgttctagccggccccctctccaggggtcgccgtggccggcattatttcctagttcttcttgtaaccctgaggtgccagcgcggggagtgaggaggggtcagggggctaaggatgcaacctctgacgttctgcgccttcctaggagagtcttacatgtgttgagatttcacaagcaatgcgagttgtaaaataccagctctacaagaagctaggctctgtgacggcatagttttcagtagctttatcacaatattcacaatggagaattatatgacatggtagcagaaataggcccttttatgtgttgcttctattttacctcaaattgtagatatagggtaatcaataaaatccatccatgcctttcacacactaagt

SEQ ID NO: 4275 - protein, 538 aa, Homo sapiens; identical to SEQ ID NO: 4183

SEQ ID NO: 4276 - DNA, 4989 bp, Homo sapiens
aaaaaaaaaaaaaaaaaaaaaaaaaaaagaaaaaagaaaaaaaaaaggaggaggaggaggagggtgagagagaagctgggagagcagagaaaaggggccaccggtcgcccccccgcttccccgcacgcgctctccagccgcggccgcccgcctgccgcggtcaccccggcctctgcctctgtcccccagtgatcggatcaaggcgctgagcgaggccctgcctgcggggcggccatgcggcggtgacaggagcgcgaccgacacgcacgggcccctcgccccctctcgcctcccgtccgctcgccagctcccctcagccgaggctgctccgcggcggccgcagcccgcgcgcggcccacactcgcctccccgttgaagatgaggagtcctcggagagcaggatggtggtgacattcctcatgtcagctctcgagtccatgtgtaaagaactggccaagtccaaagccgaagtggcctgcattgcagtgtatgaaacagacgtgtttgtcgtcggaactgaaagaggacgtgcttttgtcaataccagaaaggattttcaaaaagattttgtaaaatattgtgttgaagaagaagaaaaagctgcagagatgcataaaatgaaatctacaacccaggcaaatcggatgagtgtagatgctgtagaaattgaaacactcagaaaaacagttgaggactatttctgcttttgctatgggaaagctttaggcaaatccacagtggtacctgtaccatatgagaagatgctgcgagaccagtcggctgtggtagtgcaggggcttccggaaggtgttgcctttaaacaccccgagaactatgatcttgcaaccctgaaatggattttggagaacaaagcagggatttcattcatcattaagagaccttttttagagccaaagaagcatgtaggtggtcgtgtgatggtaacagatgctgacaggtcaatactatctccaggtggaagttgtggccccatcaaagtgaaaactgaacccacagaagattctggaagccaccattcttcagagggcaatgaaggcacagaaatggaagtaccagcagaagattctactcaacatgtcccttcagaaacaagtgaggaccctgaagttgaggtgactattgaagatgatgattattctccaccgtctaagagaccaaaggccaatgagctaccgcagccaccagtcccggaacccgccaatgctgggaagcggaaagtgagggagttcaacttcgagaaatggaatgctcgcatcactgatctacgtaaacaagttgaagaattgtttgaaaggaaatatgctcaagccataaaagccaaaggtccggtgacgatcccgtaccctcttttccagtctcatgttgaagatctttatgtagaaggacttcctgaaggaattccttttagaaggccatctacttacggaattcctcgcctggagaggatattacttgcaaaggaaaggattcgttttgtgattaagaaacatgagcttctgaattcaacacgtgaagatttacagcttgataagccagcttcaggagtaaaggaagaatggtatgccagaatcactaaattaagaaagatggtggatcagcttttctgcaaaaaatttgcggaagccttggggagcactgaagccaaggctgtaccgtaccaaaaatttgaggcacacccgaatgatctgtacgtggaaggactgccagaaaacattcctttccgaagtccctcatggtatggaatcccaaggctggaaaaaatcattcaagtgggcaatcgaattaaatttgttattaaaagaccagaacttctgactcacagtaccactgaagttactcagccaagaacgaatacaccagtcaaagaagattggaatgtcagaattaccaagctacggaagcaagtggaagagatttttaatttgaaatttgctcaagctcttggactcaccgaggcagtaaaagtaccatatcctgtgtttgaatcaaacccggagttcttgaaaggatcgtccgcgggagtaataaaatcaagttcgttgttaaaaaacctgaactagttatttcctacttgcctcctgggatggctagtaaaataaacactaaagctttgcagtcccccaaaagaccacgaagtcctgggagtaattcaaaggttcctgaaattgaggtcaccgtggaaggccctaataacaacaatcctcaaacctcagctgttcgaaccccgacccagactaacggttctaacgttcccttcaagccacgagggagagagttttcctttgaggcctggaatgccaaaatcacggacctaaaacagaaagttgaaaatctcttcaatgagaaatgtggggaagctcttggccttaaacaagctgtgaaggtgccgttcgcgttatttgagtctttcccggaagacttttatgtggaaggcttacctgagggtgtgccattccgaagaccatcgacttttggcattccgaggctggagaagatactcagaaacaaagccaaaattaagttcatcattaaaaagcccgaaatgtttgagacggcgattaaggagagcacctcctctaagagccctcccagaaaaataaattcatcacccaatgttaatactactgcatcaggtgttgaagaccttaacatcattcaggtgacaattccagatgatgataatgaaagactctcgaaagttgaaaaagctagacagctaagagaacaagtgaatgacctctttagtcggaaatttggtgaagctattggtatgggttttcctgtgaaagttccctacaggaaaatcacaattaaccctggctgtgtggtggttgatggcatgcccccgggggtgtccttcaaagcccccagctacctggaaatcagctccatgagaaggatcttagactctgccgagtttatcaaattcacggtcattagaccatttccaggacttgtgattaataaccagctggttgatcagagtgagtcagaaggccccgtgatacaagaatcagctgaaccaagccagttggaagttccagccacagaagaaataaaagagactgatggaagctctcagatcaagcaagaaccagaccccacgtggtagacctcttccctcctagggtaaatcagcttctgtgtcagggatgctgtgtggtgtccatctgaaccccctgcatacgcgtagctaatgtgatctccccactttcacataagatggtggccctgccttcagggaatgtgggagccaggtgggagccttcccggatatttaagctagaagattctacagggagattctccttggatcaatatatgtctctcagtcaaagatgtaaaagcacttttgccttaaaaagaatgttctgtttctaaatagagtcaacgttgtcctcctcattggaattcactatgagtcagaatcattagactgacttttttttttccatagtaatagtattttgcagagtctcacagagctgcagatcttttgttcatcttgcagagttaacaagtctgatcctgttagtccagatttcttaaatttggccaagttataataggagcagtagcttgagacccgaagtcaggaaactttgacaatggatttttttttttaatccagagacttgtactggaatttgccttaccctgtcagctcatggacttaaggtttcatcccgctttatgagtgcttctgaatccaagtcattgttacctgaatttgcaaattaagttgtgatattcgtgactgttaaattcctgtaattagattaacctctttgcttgcttgtttgttttctctcctattttagcttaaagtatcagtggttgagaagagcttttcggacctgttactaccccaagctgtgtaatatacttgtataacagaaataccttctatacaaacctttttttctacttttagatagaaatgtctactttttcagcagttctgtgaattaaagagcagagtgactgtgggtctggaatggctggtgtacttgggaatgtactatcaggattttacagcaatgctgggaaatgacagggaaaatgacaggaatgaatctcaccagattttttatgtactcagcagagccttgagttacggtgtttattttccaatcaagtgaagatatctcctacttctcctactggaacatctcagcttctgcagtgaagaaaaattcctgtgatagttcagttctttagtttttctatttgaaaaaaaaaaatcatttaaatgatcctttgttcacggctctccttaatgactgagtgaacagttcctatctgtatatttgactaaaccttttcctaagctatctctcatggttcctatgtttttttatcataattaaaagcaaaaccatctggatcacctaacagtcagaggtcagtatctcagcgtgtgaattatagaggaaatacagagagaacctcttccacttttacttttcgtccaaataaaatgcatggtgtaccagaagttgaagatcgggttgaggattggggctagctcgatgacactaaggccccaacatcgcgggacctgctgtggcgcggattcttaggaacgctgttctagccggccccctctccaggggtcgccgtggccggcattatttcctagttcttcttgtaaccctgaggtgccagcgcggggagtgaggaggggtcagggggctaaggatgcaacctctgacgttctgcgccttcctaggagagtcttacatgtgttgagatttcacaagcaatgcgagttgtaaaataccagctctacaagaagctaggctctgtgacggcatagttttcagtagctttatcacaatattcacaatggagaattatatgacatggtagcagaaataggcccttttatgtgttgcttctattttacctcaaattgtagatatagggtaatcaataaaatccatccatgcctttcacacactaagt

SEQ ID NO: 4277 - protein, 559 aa, Homo sapiens; identical to SEQ ID NO: 4121

SEQ ID NO: 4278 - DNA, 4219 bp, Homo sapiens
aaaaaaaaaaaaaaaaaaaaaaaaaaaagaaaaaagaaaaaaaaaaggaggaggaggaggagggtgagagagaagctgggagagcagagaaaaggggccaccggtcgcccccccgcttccccgcacgcgctctccagccgcggccgcccgcctgccgcggtcaccccggcctctgcctctgtcccccagtgatcggatcaaggcgctgagcgaggccctgcctgcggggcggccatgcggcggtgacaggagcgcgaccgacacgcacgggcccctcgccccctctcgcctcccgtccgctcgccagctcccctcagccgaggctgctccgcggcggccgcagcccgcgcgcggcccacactcgcctcccctcggcacccccggccccggagctgcctggaggcggccgcactcggggatcatggcccaagttgcaatgtccaccctccccgttgaagatgaggagtcctcggagagcaggatggtggtgacattcctcatgtcagctctcgagtccatgtgtaaagaactggccaagtccaaagccgaagtggcctgcattgcagtgtatgaaacagacgtgtttgtcgtcggaactgaaagaggacgtgcttttgtcaataccagaaaggattttcaaaaagattttgtaaaatattgtgttgaagaagaagaaaaagctgcagagatgcataaaatgaaatctacaacccaggcaaatcggatgagtgtagatgctgtagaaattgaaacactcagaaaaacagttgaggactatttctgcttttgctatgggaaagctttaggcaaatccacagtggtacctgtaccatatgagaagatgctgcgagaccagtcggctgtggtagtgcaggggcttccggaaggtgttgcctttaaacaccccgagaactatgatcttgcaaccctgaaatggattttggagaacaaagcagggatttcattcatcattaagagaccttttttagagccaaagaagcatgtaggtggtcgtgtgatggtaacagatgctgacaggtcaatactatctccaggtggaagttgtggccccatcaaagtgaaaactgaacccacagaagattctggcatttccctggaaatggcagctgtgacagtaaaggaagaatcagaagatcctgattattatcaatataacattcaagcaggcccttctgaaactgatgatgttgatgaaaaacagcccctatcgaagcctttgcaaggaagccaccattcttcagagggcaatgaaggcacagaaatggaagtaccagcagaagatgatgattattctccaccgtctaagagaccaaaggccaatgagctaccgcagccaccagtcccggaacccgccaatgctgggaagcggaaagtgagggagttcaacttcgagaaatggaatgctcgcatcactgatctacgtaaacaagttgaagaattgtttgaaaggaaatatgctcaagccataaaagccaaaggtccggtgacgatcccgtaccctcttttccagtctcatgttgaagatctttatgtagaaggacttcctgaaggaattccttttagaaggccatctacttacggaattcctcgcctggagaggatattacttgcaaaggaaaggattcgttttgtgattaagaaacatgagcttctgaattcaacacgtgaagatttacagcttgataagccagcttcaggagtaaaggaagaatggtatgccagaatcactaaattaagaaagatggtggatcagcttttctgcaaaaaatttgcggaagccttggggagcactgaagccaaggctgtaccgtaccaaaaatttgaggcacacccgaatgatctgtacgtggaaggactgccagaaaacattcctttccgaagtccctcatggtatggaatcccaaggctggaaaaaatcattcaagtgggcaatcgaattaaatttgttattaaaagaccagaacttctgactcacagtaccactgaagttactcagccaagaacgaatacaccagctcaagctcttggactcaccgaggcagtaaaagtaccatatcctgtgtttgaatcaaacccggagttcttgtatgtggaaggcttgccagaggggattcccttccgaagccctacctggtttggaattccacgacttgaaaggatcgtccgcgggagtaataaaatcaagttcgttgttaaaaaacctgaactagttatttcctacttgcctcctgggatggctagtaaaataaacactaaagctttgcagtcccccaaaagaccacgaagtcctgggagtaattcaaaggttcctgaaattgaggtcaccgtggaaggccctaataacaacaatcctcaaacctcagctgttcgaaccccgacccagactaacggttctaacgttcccttcaagccacgagggagagagttttcctttgaggcctggaatgccaaaatcacggacctaaaacagaaagttgaaaatctcttcaatgagaaatgtggggaagctcttggccttaaacaagctgtgaaggtgccgttcgcgttatttgagtctttcccggaagacttttatgtggaaggcttacctgagggtgtgccattccgaagaccatcgacttttggcattccgaggctggagaagatactcagaaacaaagccaaaattaagttcatcattaaaaagcccgaaatgtttgagacggcgattaaggagagcacctcctctaagagccctcccagaaaaataaattcatcacccaatgttaatactactgcatcaggtgttgaagaccttaacatcattcaggtgacaattccagatgatgataatgaaagactctcgaaagttgaaaaagctagacagctaagagaacaagtgaatgacctctttagtcggaaatttggtgaagctattggtatgggttttcctgtgaaagttccctacaggaaaatcacaattaaccctggctgtgtggtggttgatggcatgcccccgggggtgtccttcaaagcccccagctacctggaaatcagctccatgagaaggatcttagactctgccgagtttatcaaattcacggtcattagaccatttccaggacttgtgattaataaccagctggttgatcagagtgagtcagaaggccccgtgatacaagaatcagctgaaccaagccagttggaagttccagccacagaagaaataaaagagactgatggaagctctcagatcaagcaagaaccagaccccacgtggtagacctcttccctcctaggcttaaagtatcagtggttgagaagagcttttcggacctgttactaccccaagctgtagccttgagttacggtgtttattttccaatcaagtgaagatatctcctacttctcctactggaacatctcagcttctgcagtgaagaaaaattcctgtgatagttcagttctttagtttttctatttgaaaaaaaaaaatcatttaaatgatcctttgttcacggctctccttaatgactgagtgaacagttcctatctgtatatttgactaaaccttttcctaagctatctctcatggttcctatgtttttttatcataattaaaagcaaaaccatctggatcacctaacagtcagaggtcagtatctcagcgtgtgaattatagaggaaatacagagagaacctcttccacttttacttttcgtccaaataaaatgcatggtgtaccagaagttgaagatcgggttgaggattggggctagctcgatgacactaaggccccaacatcgcgggacctgctgtggcgcggattcttaggaacgctgttctagccggccccctctccaggggtcgccgtggccggcattatttcctagttcttcttgtaaccctgaggtgccagcgcggggagtgaggaggggtcagggggctaaggatgcaacctctgacgttctgcgccttcctaggagagtcttacatgtgttgagatttcacaagcaatgcgagttgtaaaataccagctctacaagaagctaggctctgtgacggcatagttttcagtagctttatcacaatattcacaatggagaattatatgacatggtagcagaaataggcccttttatgtgttgcttctattttacctcaaattgtagatatagggtaatcaataaaatccatccatgcctttcacacactaagt

SEQ ID NO: 4279 - protein, 953 aa, Homo sapiens; identical to SEQ ID NO: 4179

SEQ ID NO: 4280 - DNA, 4450 bp, Homo sapiens
aaaaaaaaaaaaaaaaaaaaaaaaaaaagaaaaaagaaaaaaaaaaggaggaggaggaggagggtgagagagaagctgggagagcagagaaaaggggccaccggtcgcccccccgcttccccgcacgcgctctccagccgcggccgcccgcctgccgcggtcaccccggcctctgcctctgtcccccagtgatcggatcaaggcgctgagcgaggccctgcctgcggggcggccatgcggcggtgacaggagcgcgaccgacacgcacgggcccctcgccccctctcgcctcccgtccgctcgccagctcccctcagccgaggctgctccgcggcggccgcagcccgcgcgcggcccacactcgcctcccctcggcacccccggccccggagctgcctggaggcggccgcactcggggatcatggcccaagttgcaatgtccaccctccccgttgaagatgaggagtcctcggagagcaggatggtggtgacattcctcatgtcagctctcgagtccatgtgtaaagaactggccaagtccaaagccgaagtggcctgcattgcagtgtatgaaacagacgtgtttgtcgtcggaactgaaagaggacgtgcttttgtcaataccagaaaggattttcaaaaagattttgtaaaatattgtgttgaagaagaagaaaaagctgcagagatgcataaaatgaaatctacaacccaggcaaatcggatgagtgtagatgctgtagaaattgaaacactcagaaaaacagttgaggactatttctgcttttgctatgggaaagctttaggcaaatccacagtggtacctgtaccatatgagaagatgctgcgagaccagtcggctgtggtagtgcaggggcttccggaaggtgttgcctttaaacaccccgagaactatgatcttgcaaccctgaaatggattttggagaacaaagcagggatttcattcatcattaagagaccttttttagagccaaagaagcatgtaggtggtcgtgtgatggtaacagatgctgacaggtcaatactatctccaggtggaagttgtggccccatcaaagtgaaaactgaacccacagaagattctggcatttccctggaaatggcagctgtgacagtaaaggaagaatcagaagatcctgattattatcaatataacattcaaggaagccaccattcttcagagggcaatgaaggcacagaaatggaagtaccagcagaagattctactcaacatgtcccttcagaaacaagtgaggaccctgaagttgaggtgactattgaagatgatgattattctccaccgtctaagagaccaaaggccaatgagctaccgcagccaccagtcccggaacccgccaatgctgggaagcggaaagtgagggagttcaacttcgagaaatggaatgctcgcatcactgatctacgtaaacaagttgaagaattgtttgaaaggaaatatgctcaagccataaaagccaaaggtccggtgacgatcccgtaccctcttttccagtctcatgttgaagatctttatgtagaaggacttcctgaaggaattccttttagaaggccatctacttacggaattcctcgcctggagaggatattacttgcaaaggaaaggattcgttttgtgattaagaaacatgagcttctgaattcaacacgtgaagatttacagcttgataagccagcttcaggagtaaaggaagaatggtatgccagaatcactaaattaagaaagatggtggatcagcttttctgcaaaaaatttgcggaagccttggggagcactgaagccaaggctgtaccgtaccaaaaatttgaggcacacccgaatgatctgtacgtggaaggactgccagaaaacattcctttccgaagtccctcatggtatggaatcccaaggctggaaaaaatcattcaagtgggcaatcgaattaaatttgttattaaaagaccagaacttctgactcacagtaccactgaagttactcagccaagaacgaatacaccagctcaagctcttggactcaccgaggcagtaaaagtaccatatcctgtgtttgaatcaaacccggagttcttgtatgtggaaggcttgccagaggggattcccttccgaagccctacctggtttggaattccacgacttgaaaggatcgtccgcgggagtaataaaatcaagttcgttgttaaaaaacctgaactagttatttcctacttgcctcctgggatggctagtaaaataaacactaaagctttgcagtcccccaaaagaccacgaagtcctgggagtaattcaaaggttcctgaaattgaggtcaccgtggaaggccctaataacaacaatcctcaaacctcagctgttcgaaccccgacccagactaacggttctaacgttcccttcaagccacgagggagagagttttcctttgaggcctggaatgccaaaatcacggacctaaaacagaaagttgaaaatctcttcaatgagaaatgtggggaagctcttggccttaaacaagctgtgaaggtgccgttcgcgttatttgagtctttcccggaagacttttatgtggaaggcttacctgagggtgtgccattccgaagaccatcgacttttggcattccgaggctggagaagatactcagaaacaaagccaaaattaagttcatcattaaaaagcccgaaatgtttgagacggcgattaaggagagcacctcctctaagagccctcccagaaaaataaattcatcacccaatgttaatactactgcatcaggtgttgaagaccttaacatcattcaggtgacaattccagatgatgataatgaaagactctcgaaagttgaaaaagctagacagctaagagaacaagtgaatgacctctttagtcggaaatttggtgaagctattggtatgggttttcctgtgaaagttccctacaggaaaatcacaattaaccctggctgtgtggtggttgatggcatgcccccgggggtgtccttcaaagcccccagctacctggaaatcagctccatgagaaggatcttagactctgccgagtttatcaaattcacggtcattagaccatttccaggacttgtgattaataaccagctggttgatcagagtgagtcagaaggccccgtgatacaagaatcagctgaaccaagccagttggaagttccagccacagaagaaataaaagagactgatggaagctctcagatcaagcaagaaccagaccccacgtggtagacctcttccctcctaggcttaaagtatcagtggttgagaagagcttttcggacctgttactaccccaagctgtgtaatatacttgtataacagaaataccttctatacaaacctttttttctacttttagatagaaatgtctactttttcagcagttctgtgaattaaagagcagagtgactgtgggtctggaatggctggtgtacttgggaatgtactatcaggattttacagcaatgctgggaaatgacagggaaaatgacaggaatgaatctcaccagattttttatgtactcagcagagccttgagttacggtgtttattttccaatcaagtgaagatatctcctacttctcctactggaacatctcagcttctgcagtgaagaaaaattcctgtgatagttcagttctttagtttttctatttgaaaaaaaaaaatcatttaaatgatcctttgttcacggctctccttaatgactgagtgaacagttcctatctgtatatttgactaaaccttttcctaagctatctctcatggttcctatgtttttttatcataattaaaagcaaaaccatctggatcacctaacagtcagaggtcagtatctcagcgtgtgaattatagaggaaatacagagagaacctcttccacttttacttttcgtccaaataaaatgcatggtgtaccagaagttgaagatcgggttgaggattggggctagctcgatgacactaaggccccaacatcgcgggacctgctgtggcgcggattcttaggaacgctgttctagccggccccctctccaggggtcgccgtggccggcattatttcctagttcttcttgtaaccctgaggtgccagcgcggggagtgaggaggggtcagggggctaaggatgcaacctctgacgttctgcgccttcctaggagagtcttacatgtgttgagatttcacaagcaatgcgagttgtaaaataccagctctacaagaagctaggctctgtgacggcatagttttcagtagctttatcacaatattcacaatggagaattatatgacatggtagcagaaataggcccttttatgtgttgcttctattttacctcaaattgtagatatagggtaatcaataaaatccatccatgcctttcacacactaagt

SEQ ID NO: 4281 - protein, 954 aa, Homo sapiens; identical to SEQ ID NO: 4155

SEQ ID NO: 4282 - DNA, 4326 bp, Homo sapiens
aaaaaaaaaaaaaaaaaaaaaaaaaaaagaaaaaagaaaaaaaaaaggaggaggaggaggagggtgagagagaagctgggagagcagagaaaaggggccaccggtcgcccccccgcttccccgcacgcgctctccagccgcggccgcccgcctgccgcggtcaccccggcctctgcctctgtcccccagtgatcggatcaaggcgctgagcgaggccctgcctgcggggcggccatgcggcggtgacaggagcgcgaccgacacgcacgggcccctcgccccctctcgcctcccgtccgctcgccagctcccctcagccgaggctgctccgcggcggccgcagcccgcgcgcggcccacactcgcctccccgttgaagatgaggagtcctcggagagcaggatggtggtgacattcctcatgtcagctctcgagtccatgtgtaaagaactggccaagtccaaagccgaagtggcctgcattgcagtgtatgaaacagacgtgtttgtcgtcggaactgaaagaggacgtgcttttgtcaataccagaaaggattttcaaaaagattttgtaaaatattgtgttgaagaagaagaaaaagctgcagagatgcataaaatgaaatctacaacccaggcaaatcggatgagtgtagatgctgtagaaattgaaacactcagaaaaacagttgaggactatttctgcttttgctatgggaaagctttaggcaaatccacagtggtacctgtaccatatgagaagatgctgcgagaccagtcggctgtggtagtgcaggggcttccggaaggtgttgcctttaaacaccccgagaactatgatcttgcaaccctgaaatggattttggagaacaaagcagggatttcattcatcattaagagaccttttttagagccaaagaagcatgtaggtggtcgtgtgatggtaacagatgctgacaggtcaatactatctccaggtggaagttgtggccccatcaaagtgaaaactgaacccacagaagattctggcatttccctggaaatggcagctgtgacagtaaaggaagaatcagaagatcctgattattatcaatataacattcaaggaagccaccattcttcagagggcaatgaaggcacagaaatggaagtaccagcagaagattctactcaacatgtcccttcagaaacaagtgaggaccctgaagttgaggtgactattgaagatgatgattattctccaccgtctaagagaccaaaggccaatgagctaccgcagccaccagtcccggaacccgccaatgctgggaagcggaaagtgagggagttcaacttcgagaaatggaatgctcgcatcactgatctacgtaaacaagttgaagaattgtttgaaaggaaatatgctcaagccataaaagccaaaggtccggtgacgatcccgtaccctcttttccagtctcatgttgaagatctttatgtagaaggacttcctgaaggaattccttttagaaggccatctacttacggaattcctcgcctggagaggatattacttgcaaaggaaaggattcgttttgtgattaagaaacatgagcttctgaattcaacacgtgaagatttacagcttgataagccagcttcaggagtaaaggaagaatggtatgccagaatcactaaattaagaaagatggtggatcagcttttctgcaaaaaatttgcggaagccttggggagcactgaagccaaggctgtaccgtaccaaaaatttgaggcacacccgaatgatctgtacgtggaaggactgccagaaaacattcctttccgaagtccctcatggtatggaatcccaaggctggaaaaaatcattcaagtgggcaatcgaattaaatttgttattaaaagaccagaacttctgactcacagtaccactgaagttactcagccaagaacgaatacaccagtcaaagaagattggaatgtcagaattaccaagctacggaagcaagtggaagagatttttaatttgaaatttgcttagatttgttgacagcggtttcctggagtgctgtcttgagaacgattctgaggaggctcagcaagaaagagtgtttcagttgattgggtgtgtctgtcatggagaaggaactcaagctcttggactcaccgaggcagtaaaagtaccatatcctgtgtttgaatcaaacccggagttcttgtatgtggaaggcttgccagaggggattcccttccgaagccctacctggtttggaattccacgacttgaaaggatcgtccgcgggagtaataaaatcaagttcgttgttaaaaaacctgaactagttatttcctacttgcctcctgggatggctagtaaaataaacactaaagctttgcagtcccccaaaagaccacgaagtcctgggagtaattcaaaggttcctgaaattgaggtcaccgtggaaggccctaataacaacaatcctcaaacctcagctgttcgaaccccgacccagactaacggttctaacgttcccttcaagccacgagggagagagttttcctttgaggcctggaatgccaaaatcacggacctaaaacagaaagttgaaaatctcttcaatgagaaatgtggggaagctcttggccttaaacaagctgtgaaggtgccgttcgcgttatttgagtctttcccggaagacttttatgtggaaggcttacctgagggtgtgccattccgaagaccatcgacttttggcattccgaggctggagaagatactcagaaacaaagccaaaattaagttcatcattaaaaagcccgaaatgtttgagacggcgattaaggagagcacctcctctaagagccctcccagaaaaataaattcatcacccaatgttaatactactgcatcaggtgttgaagaccttaacatcattcaggtgacaattccagatgatgataatgaaagactctcgaaagttgaaaaagctagacagctaagagaacaagtgaatgacctctttagtcggaaatttggtgaagctattggtatgggttttcctgtgaaagttccctacaggaaaatcacaattaaccctggctgtgtggtggttgatggcatgcccccgggggtgtccttcaaagcccccagctacctggaaatcagctccatgagaaggatcttagactctgccgagtttatcaaattcacggtcattagaccatttccaggacttgtgattaataaccagctggttgatcagagtgagtcagaaggccccgtgatacaagaatcagctgaaccaagccagttggaagttccagccacagaagaaataaaagagactgatggaagctctcagatcaagcaagaaccagaccccacgtggtagacctcttccctcctaggcttaaagtatcagtggttgagaagagcttttcggacctgttactaccccaagctgtagccttgagttacggtgtttattttccaatcaagtgaagatatctcctacttctcctactggaacatctcagcttctgcagtgaagaaaaattcctgtgatagttcagttctttagtttttctatttgaaaaaaaaaaatcatttaaatgatcctttgttcacggctctccttaatgactgagtgaacagttcctatctgtatatttgactaaaccttttcctaagctatctctcatggttcctatgtttttttatcataattaaaagcaaaaccatctggatcacctaacagtcagaggtcagtatctcagcgtgtgaattatagaggaaatacagagagaacctcttccacttttacttttcgtccaaataaaatgcatggtgtaccagaagttgaagatcgggttgaggattggggctagctcgatgacactaaggccccaacatcgcgggacctgctgtggcgcggattcttaggaacgctgttctagccggccccctctccaggggtcgccgtggccggcattatttcctagttcttcttgtaaccctgaggtgccagcgcggggagtgaggaggggtcagggggctaaggatgcaacctctgacgttctgcgccttcctaggagagtcttacatgtgttgagatttcacaagcaatgcgagttgtaaaataccagctctacaagaagctaggctctgtgacggcatagttttcagtagctttatcacaatattcacaatggagaattatatgacatggtagcagaaataggcccttttatgtgttgcttctattttacctcaaattgtagatatagggtaatcaataaaatccatccatgcctttcacacactaagt

SEQ ID NO: 4283 - protein, 544 aa, Homo sapiens; identical to SEQ ID NO: 4045

SEQ ID NO: 4284 - DNA, 7745 bp, Homo sapiens
aaaaaaaaaaaaaaaaaaaaaaaaaaaagaaaaaagaaaaaaaaaaggaggaggaggaggagggtgagagagaagctgggagagcagagaaaaggggccaccggtcgcccccccgcttccccgcacgcgctctccagccgcggccgcccgcctgccgcggtcaccccggcctctgcctctgtcccccagtgatcggatcaaggcgctgagcgaggccctgcctgcggggcggccatgcggcggtgacaggagcgcgaccgacacgcacgggcccctcgccccctctcgcctcccgtccgctcgccagctcccctcagccgaggctgctccgcggcggccgcagcccgcgcgcggcccacactcgcctccccgttgaagatgaggagtcctcggagagcaggatggtggtgacattcctcatgtcagctctcgagtccatgtgtaaagaactggccaagtccaaagccgaagtggcctgcattgcagtgtatgaaacagacgtgtttgtcgtcggaactgaaagaggacgtgcttttgtcaataccagaaaggattttcaaaaagattttgtaaaatattgtgttgaagaagaagaaaaagctgcagagatgcataaaatgaaatctacaacccaggcaaatcggatgagtgtagatgctgtagaaattgaaacactcagaaaaacagttgaggactatttctgcttttgctatgggaaagctttaggcaaatccacagtggtacctgtaccatatgagaagatgctgcgagaccagtcggctgtggtagtgcaggggcttccggaaggtgttgcctttaaacaccccgagaactatgatcttgcaaccctgaaatggattttggagaacaaagcagggatttcattcatcattaagagaccttttttagagccaaagaagcatgtaggtggtcgtgtgatggtaacagatgctgacaggtcaatactatctccaggtggaagttgtggccccatcaaagtgaaaactgaacccacagaagattctggaagccaccattcttcagagggcaatgaaggcacagaaatggaagtaccagcagaagattctactcaacatgtcccttcagaaacaagtgaggaccctgaagttgaggtgactattgaagatgatgattattctccaccgtctaagagaccaaaggccaatgagctaccgcagccaccagtcccggaacccgccaatgctgggaagcggaaagtgagggagttcaacttcgagaaatggaatgctcgcatcactgatctacgtaaacaagttgaagaattgtttgaaaggaaatatgctcaagccataaaagccaaaggtccggtgacgatcccgtaccctcttttccagtctcatgttgaagatctttatgtagaaggacttcctgaaggaattccttttagaaggccatctacttacggaattcctcgcctggagaggatattacttgcaaaggaaaggattcgttttgtgattaagaaacatgagcttctgaattcaacacgtgaagatttacagcttgataagccagcttcaggagtaaaggaagaatggtatgccagaatcactaaattaagaaagatggtggatcagcttttctgcaaaaaatttgcggaagccttggggagcactgaagccaaggctgtaccgtaccaaaaatttgaggcacacccgaatgatctgtacgtggaaggactgccagaaaacattcctttccgaagtccctcatggtatggaatcccaaggctggaaaaaatcattcaagtgggcaatcgaattaaatttgttattaaaagaccagaacttctgactcacagtaccactgaagttactcagccaagaacgaatacaccagctcaagctcttggactcaccgaggcagtaaaagtaccatatcctgtgtttgaatcaaacccggagttcttgtatgtggaaggcttgccagaggggattcccttccgaagccctacctggtttggaattccacgacttgaaaggatcgtccgcgggagtaataaaatcaagttcgttgttaaaaaacctgaactagttatttcctacttgcctcctgggatggctagtaaaataaacactaaagctttgcagtcccccaaaagaccacgaagtcctgggagtaattcaaaggttcctgaaattgaggtcaccgtggaaggccctaataacaacaatcctcaaacctcagctgttcgaaccccgacccagactaacggttctaacgttcccttcaagccacgagggagagagttttcctttgaggcctggaatgccaaaatcacggacctaaaacagaaagttgaaaatctcttcaatgagaaatgtggggaagctcttggccttaaacaagctgtgaaggtgccgttcgcgttatttgagtctttcccggaagacttttatgtggaaggcttacctgagggtgtgccattccgaagaccatcgacttttggcattccgaggctggagaagatactcagaaacaaagccaaaattaagttcatcattaaaaagcccgaaatgtttgagacggcgattaaggagagcacctcctctaagagccctcccagaaaaataaattcatcacccaatgttaatactactgcatcaggtgttgaagaccttaacatcattcaggtgacaattccagatgatgataatgaaagactctcgaaagttgaaaaagctagacagctaagagaacaagtgaatgacctctttagtcggaaatttggtgaagctattggtatgggttttcctgtgaaagttccctacaggaaaatcacaattaaccctggctgtgtggtggttgatggcatgcccccgggggtgtccttcaaagcccccagctacctggaaatcagctccatgagaaggatcttagactctgccgagtttatcaaattcacggtcattaggtaagtgagagtttcctgcttagtcacaggagcgaatctggagctcatgaggctgactcttctaaaatgcagccacaggtagtcatcgaatccggcttcctatgctgtgcaatcaacaaatcaaaataacttgtgtcatcattagaatgtcagatgtgcttctacgaactaagctgactcttttaattctttggcaaagggttggcaaactaggactgtttgccaaattcaggctgcctcctatttttagagtcttcctgaaacacagctacacccgtattatccatggctgctttcctgtcacagtgagtaagtagctgggactgagaaggcatggcctccaaagtctaaaatatttactctctagcactttgtagaaaaaccttagctaggcacagtggctaacgcctgtaatcccagcattttgggaggccaaggcaggcagatcacctgaggtcaggagttccagaccagcctggccaacatggtgaaatcccatctctacaaaaataaaacagttagctgggcatgatggcgggtgcctgtaatcccagctactcgggaggctgaggcaggatagtcgcttgaacccaggaggtggaggttgcaatgagccaagatcatgccactgcactccagcctggacgacagagtgagactccatcacaagaaaaaaagaactttgtcaacctctgtcttagggcgccttgtcacaggcttcgggtcagacggattcaaccttgcatcagccatttgttagccaggtcactctgttctttgtctgtaaatgagattgatcgttgttcccactgagagtgtcagctccttcccgtagagcaggcatgatgattgtactcacctctgacaccattgtgagtgccacattccttcccacgtccttgtcactgtaagagatgcccacctgagcaccaaccccaggttatcttcccctttgtcttccagccccccagaaacagctacgactcaacctacccaatcatttcatcatcagattgccactgtctctagttcaggtctcttgggactggcactcagaaatctcataataaatcctcttgaggcttctcatacactcgtcttcttccaatcttctttccctcaaaatctcatattttggttccacttcacccaccgtcattctccatatcactcccaggagttaggcaaaaagccccttccgttcttccgtatgttaaacttagaatcactctgttccctgctctgcgtttctattttttgtttttcctccatttactagtagcttaacactttctaacagtgttcttattattgatacgtatctatctcttccataagcttataaggtcacggataatacttctcattgtagtacgtaaatgacgtgggctagatatgagttgaataaacagttatacctgtaaattcttacagagtgaaaataaattgttatactttacaatttgtttctctctttagaccatttccaggacttgtgattaataaccgtgagtattttgtgaagtgttttgtttttgttttttcctggggtctgacgtgtgtgcgtgtgagtgtgtatacatgcttaacgtatatcacgttacttcacctatgtcagtaaccaggccaaatacttgttttagccctcagtaaaaacaccaggcacttcctagttgtaaaattattcaagcttcttaacttcctatcctcgatgcacttaatcataaaatggtaataatagcaccgattttgggggagtcgttccagtagatggaaagcatctggaacaggtgtcagcaagctcctgccgacgtgtatgcataaagttttattgaaaccaccatcgtgtccatttgtttatggcagaactgagagatggcagcagcaagtgtgtgcctgcaaaacctaaaatatttactaattggctctgcaagaaaagagtttgcatccccctaacctagaacagtgtctagcctctagtatgtgtttagcctacagtatgtgctcagcgaatacaatctatatttattactgcttttatgactgttataattactgtgcttggatttcgttacaaagtaagtcacaatgtgcctgcttctgttagtatttcagcacagtgcctggcacacatggggctctcaaatattgctgagcgagtgaacaaatgtcctttcaattccttaacgttgatgtcattttcaatagtattttgagccaaacttaattttgcgagtgtgttttgttttcttaactttattattaaaaatgtataaaagtgaggccaggcgtggtggctcacgcctgtaatcccagcagtttgggaggctgaggcaggcggatcagttgaggttgggagttggagaccagcccgtccaacatggtgaaagcctgtctctactaaaaatacaaaaatcagctgggtgtggtggcgcgtgcctgtaatcccagctactcaggaggctgaggcaggagagttgcttgaatcctagaggtggaggttgcagtgagctgagatcgtgccattgcactccagcctgggcaacaagagcaaaactctgtcccaataaataaataaataaaatgttctcttttgttcctgttcttgtgcggtagtgtggtatagagttttatggtaattactgtgaattagtgattctgagggacatatcagaactctgaggtttgtttccttctcatcttgagggaaacagcaaatgtatgttaaaatgcttttccaagggaacaacacatccttacattatttaaaccaatctgcttcattttcagagctggttgatcagagtgagtcagaaggccccgtgatacaagaatcagctgaaccaagccagttggaagttccagccacagaagaaataaaagagactgatggaagctctcagatcaagcaagaaccagaccccacgtggtagacctcttccctcctagggtaaatcagcttctgtgtcagggatgctgtgtggtgtccatctgaaccccctgcatacgcgtagctaatgtgatctccccactttcacataagatggtggccctgccttcagggaatgtgggagccaggtgggagccttcccggatatttaagctagaagattctacagggagattctccttggatcaatatatgtctctcagtcaaagatgtaaaagcacttttgccttaaaaagaatgttctgtttctaaatagagtcaacgttgtcctcctcattggaattcactatgagtcagaatcattagactgacttttttttttccatagtaatagtattttgcagagtctcacagagctgcagatcttttgttcatcttgcagagttaacaagtctgatcctgttagtccagatttcttaaatttggccaagttataataggagcagtagcttgagacccgaagtcaggaaactttgacaatggatttttttttttaatccagagacttgtactggaatttgccttaccctgtcagctcatggacttaaggtttcatcccgctttatgagtgcttctgaatccaagtcattgttacctgaatttgcaaattaagttgtgatattcgtgactgttaaattcctgtaattagattaacctctttgcttgcttgtttgttttctctcctattttagcttaaagtatcagtggttgagaagagcttttcggacctgttactaccccaagctgtgtaatatacttgtataacagaaataccttctatacaaacctttttttctacttttagatagaaatgtctactttttcagcagttctgtgaattaaagagcagagtgactgtgggtctggaatggctggtgtacttgggaatgtactatcaggattttacagcaatgctgggaaatgacagggaaaatgacaggaatgaatctcaccagattttttatgtactcagcagagccttgagttacggtgtttattttccaatcaagtgaagatatctcctacttctcctactggaacatctcagcttctgcagtgaagaaaaattcctgtgatagttcagttctttagtttttctatttgaaaaaaaaaaatcatttaaatgatcctttgttcacggctctccttaatgactgagtgaacagttcctatctgtatatttgactaaaccttttcctaagctatctctcatggttcctatgtttttttatcataattaaaagcaaaaccatctggatcacctaacagtcagaggtcagtatctcagcgtgtgaattatagaggaaatacagagagaacctcttccacttttacttttcgtccaaataaaatgcatggtgtaccagaagttgaagatcgggttgaggattggggctagctcgatgacactaaggccccaacatcgcgggacctgctgtggcgcggattcttaggaacgctgttctagccggccccctctccaggggtcgccgtggccggcattatttcctagttcttcttgtaaccctgaggtgccagcgcggggagtgaggaggggtcagggggctaaggatgcaacctctgacgttctgcgccttcctaggagagtcttacatgtgttgagatttcacaagcaatgcgagttgtaaaataccagctctacaagaagctaggctctgtgacggcatagttttcagtagctttatcacaatattcacaatggagaattatatgacatggtagcagaaataggcccttttatgtgttgcttctattttacctcaaattgtagatatagggtaatcaataaaatccatccatgcctttcacacactaagt

SEQ ID NO: 4285 - protein, 852 aa, Homo sapiens
MVVTFLMSALESMCKELAKSKAEVACIAVYETDVFVVGTERGRAFVNTRKDFQKDFVKYCVEEEEKAAEMHKMKSTTQANRMSVDAVEIETLRKTVEDYFCFCYGKALGKSTVVPVPYEKMLRDQSAVVVQGLPEGVAFKHPENYDLATLKWILENKAGISFIIKRPFLEPKKHVGGRVMVTDADRSILSPGGSCGPIKVKTEPTEDSGSHHSSEGNEGTEMEVPAEDSTQHVPSETSEDPEVEVTIEDDDYSPPSKRPKANELPQPPVPEPANAGKRKVREFNFEKWNARITDLRKQVEELFERKYAQAIKAKGPVTIPYPLFQSHVEDLYVEGLPEGIPFRRPSTYGIPRLERILLAKERIRFVIKKHELLNSTREDLQLDKPASGVKEEWYARITKLRKMVDQLFCKKFAEALGSTEAKAVPYQKFEAHPNDLYVEGLPENIPFRSPSWYGIPRLEKIIQVGNRIKFVIKRPELLTHSTTEVTQPRTNTPAQALGLTEAVKVPYPVFESNPEFLYVEGLPEGIPFRSPTWFGIPRLERIVRGSNKIKFVVKKPELVISYLPPGMASKINTKALQSPKRPRSPGSNSKVPEIEVTVEGPNNNNPQTSAVRTPTQTNGSNVPFKPRGREFSFEAWNAKITDLKQKVENLFNEKCGEALGLKQAVKVPFALFESFPEDFYVEGLPEGVPFRRPSTFGIPRLEKILRNKAKIKFIIKKPEMFETAIKESTSSKSPPRKINSSPNVNTTASGVEDLNIIQVTIPDDDNERLSKVEKARQLREQVNDLFSRKFGEAIGMGFPVKVPYRKITINPGCVVVDGMPPGVSFKAPSYLEISSMRRILDSAEFIKFTVIR

SEQ ID NO: 4286 - DNA, 4268 bp, Homo sapiens
aaaaaaaaaaaaaaaaaaaaaaaaaaaagaaaaaagaaaaaaaaaaggaggaggaggaggagggtgagagagaagctgggagagcagagaaaaggggccaccggtcgcccccccgcttccccgcacgcgctctccagccgcggccgcccgcctgccgcggtcaccccggcctctgcctctgtcccccagtgatcggatcaaggcgctgagcgaggccctgcctgcggggcggccatgcggcggtgacaggagcgcgaccgacacgcacgggcccctcgccccctctcgcctcccgtccgctcgccagctcccctcagccgaggctgctccgcggcggccgcagcccgcgcgcggcccacactcgcctcccctcggcacccccggccccggagctgcctggaggcggccgcactcggtgtaaagaactggccaagtccaaagccgaagtggcctgcattgcagtgtatgaaacagacgtgtttgtcgtcggaactgaaagaggacgtgcttttgtcaataccagaaaggattttcaaaaagattttgtaaaatattgtgttgaagaagaagaaaaagctgcagagatgcataaaatgaaatctacaacccaggcaaatcggatgagtgtagatgctgtagaaattgaaacactcagaaaaacagttgaggactatttctgcttttgctatgggaaagctttaggcaaatccacagtggtacctgtaccatatgagaagatgctgcgagaccagtcggctgtggtagtgcaggggcttccggaaggtgttgcctttaaacaccccgagaactatgatcttgcaaccctgaaatggattttggagaacaaagcagggatttcattcatcattaagagaccttttttagagccaaagaagcatgtaggtggtcgtgtgatggtaacagatgctgacaggtcaatactatctccaggtggaagttgtggccccatcaaagtgaaaactgaacccacagaagattctggaagccaccattcttcagagggcaatgaaggcacagaaatggaagtaccagcagaagattctactcaacatgtcccttcagaaacaagtgaggaccctgaagttgaggtgactattgaagatgatgattattctccaccgtctaagagaccaaaggccaatgagctaccgcagccaccagtcccggaacccgccaatgctgggaagcggaaagtgagggagttcaacttcgagaaatggaatgctcgcatcactgatctacgtaaacaagttgaagaattgtttgaaaggaaatatgctcaagccataaaagccaaaggtccggtgacgatcccgtaccctcttttccagtctcatgttgaagatctttatgtagaaggacttcctgaaggaattccttttagaaggccatctacttacggaattcctcgcctggagaggatattacttgcaaaggaaaggattcgttttgtgattaagaaacatgagcttctgaattcaacacgtgaagatttacagcttgataagccagcttcaggagtaaaggaagaatggtatgccagaatcactaaattaagaaagatggtggatcagcttttctgcaaaaaatttgcggaagccttggggagcactgaagccaaggctgtaccgtaccaaaaatttgaggcacacccgaatgatctgtacgtggaaggactgccagaaaacattcctttccgaagtccctcatggtatggaatcccaaggctggaaaaaatcattcaagtgggcaatcgaattaaatttgttattaaaagaccagaacttctgactcacagtaccactgaagttactcagccaagaacgaatacaccagctcaagctcttggactcaccgaggcagtaaaagtaccatatcctgtgtttgaatcaaacccggagttcttgtatgtggaaggcttgccagaggggattcccttccgaagccctacctggtttggaattccacgacttgaaaggatcgtccgcgggagtaataaaatcaagttcgttgttaaaaaacctgaactagttatttcctacttgcctcctgggatggctagtaaaataaacactaaagctttgcagtcccccaaaagaccacgaagtcctgggagtaattcaaaggttcctgaaattgaggtcaccgtggaaggccctaataacaacaatcctcaaacctcagctgttcgaaccccgacccagactaacggttctaacgttcccttcaagccacgagggagagagttttcctttgaggcctggaatgccaaaatcacggacctaaaacagaaagttgaaaatctcttcaatgagaaatgtggggaagctcttggccttaaacaagctgtgaaggtgccgttcgcgttatttgagtctttcccggaagacttttatgtggaaggcttacctgagggtgtgccattccgaagaccatcgacttttggcattccgaggctggagaagatactcagaaacaaagccaaaattaagttcatcattaaaaagcccgaaatgtttgagacggcgattaaggagagcacctcctctaagagccctcccagaaaaataaattcatcacccaatgttaatactactgcatcaggtgttgaagaccttaacatcattcaggtgacaattccagatgatgataatgaaagactctcgaaagttgaaaaagctagacagctaagagaacaagtgaatgacctctttagtcggaaatttggtgaagctattggtatgggttttcctgtgaaagttccctacaggaaaatcacaattaaccctggctgtgtggtggttgatggcatgcccccgggggtgtccttcaaagcccccagctacctggaaatcagctccatgagaaggatcttagactctgccgagtttatcaaattcacggtcattagaccatttccaggacttgtgattaataaccagctggttgatcagagtgagtcagaaggccccgtgatacaagaatcagctgaaccaagccagttggaagttccagccacagaagaaataaaagagactgatggaagctctcagatcaagcaagaaccagaccccacgtggtagacctcttccctcctaggcttaaagtatcagtggttgagaagagcttttcggacctgttactaccccaagctgtgtaatatacttgtataacagaaataccttctatacaaacctttttttctacttttagatagaaatgtctactttttcagcagttctgtgaattaaagagcagagtgactgtgggtctggaatggctggtgtacttgggaatgtactatcaggattttacagcaatgctgggaaatgacagggaaaatgacaggaatgaatctcaccagattttttatgtactcagcagagccttgagttacggtgtttattttccaatcaagtgaagatatctcctacttctcctactggaacatctcagcttctgcagtgaagaaaaattcctgtgatagttcagttctttagtttttctatttgaaaaaaaaaaatcatttaaatgatcctttgttcacggctctccttaatgactgagtgaacagttcctatctgtatatttgactaaaccttttcctaagctatctctcatggttcctatgtttttttatcataattaaaagcaaaaccatctggatcacctaacagtcagaggtcagtatctcagcgtgtgaattatagaggaaatacagagagaacctcttccacttttacttttcgtccaaataaaatgcatggtgtaccagaagttgaagatcgggttgaggattggggctagctcgatgacactaaggccccaacatcgcgggacctgctgtggcgcggattcttaggaacgctgttctagccggccccctctccaggggtcgccgtggccggcattatttcctagttcttcttgtaaccctgaggtgccagcgcggggagtgaggaggggtcagggggctaaggatgcaacctctgacgttctgcgccttcctaggagagtcttacatgtgttgagatttcacaagcaatgcgagttgtaaaataccagctctacaagaagctaggctctgtgacggcatagttttcagtagctttatcacaatattcacaatggagaattatatgacatggtagcagaaataggcccttttatgtgttgcttctattttacctcaaattgtagatatagggtaatcaataaaatccatccatgcctttcacacactaagt

SEQ ID NO: 4287 - protein, 839 aa, Homo sapiens; identical to SEQ ID NO: 4213

SEQ ID NO: 4288 - DNA, 4079 bp, Homo sapiens
aaaaaaaaaaaaaaaaaaaaaaaaaaaagaaaaaagaaaaaaaaaaggaggaggaggaggagggtgagagagaagctgggagagcagagaaaaggggccaccggtcgcccccccgcttccccgcacgcgctctccagccgcggccgcccgcctgccgcggtcaccccggcctctgcctctgtcccccagtgatcggatcaaggcgctgagcgaggccctgcctgcggggcggccatgcggcggtgacaggagcgcgaccgacacgcacgggcccctcgccccctctcgcctcccgtccgctcgccagctcccctcagccgaggctgctccgcggcggccgcagcccgcgcgcggcccacactcgcctccccgttgaagatgaggagtcctcggagagcaggatggtggtgacattcctcatgtcagctctcgagtccatgtgtaaagaactggccaagtccaaagccgaagtggcctgcattgcagtgtatgaaacagacgtgtttgtcgtcggaactgaaagaggacgtgcttttgtcaataccagaaaggattttcaaaaagattttgtaaaatattgtgttgaagaagaagaaaaagctgcagagatgcataaaatgaaatctacaacccaggcaaatcggatgagtgtagatgctgtagaaattgaaacactcagaaaaacagttgaggactatttctgcttttgctatgggaaagctttaggcaaatccacagtggtacctgtaccatatgagaagatgctgcgagaccagtcggctgtggtagtgcaggggcttccggaaggtgttgcctttaaacaccccgagaactatgatcttgcaaccctgaaatggattttggagaacaaagcagggatttcattcatcattaagagaccttttttagagccaaagaagcatgtaggtggtcgtgtgatggtaacagatgctgacaggtcaatactatctccaggtggaagttgtggccccatcaaagtgaaaactgaacccacagaagattctggcatttccctggaaatggcagctgtgacagtaaaggaagaatcagaagatcctgattattatcaatataacattcaaggaagccaccattcttcagagggcaatgaaggcacagaaatggaagtaccagcagaagatgatgattattctccaccgtctaagagaccaaaggccaatgagctaccgcagccaccagtcccggaacccgccaatgctgggaagcggaaagtgagggagttcaacttcgagaaatggaatgctcgcatcactgatctacgtaaacaagttgaagaattgtttgaaaggaaatatgctcaagccataaaagccaaaggtccggtgacgatcccgtaccctcttttccagtctcatgttgaagatctttatgtagaaggacttcctgaaggaattccttttagaaggccatctacttacggaattcctcgcctggagaggatattacttgcaaaggaaaggattcgttttgtgattaagaaacatgagcttctgaattcaacacgtgaagatttacagcttgataagccagcttcaggagtaaaggaagaatggtatgccagaatcactaaattaagaaagatggtggatcagcttttctgcaaaaaatttgcggaagccttggggagcactgaagccaaggctgtaccgtaccaaaaatttgaggcacacccgaatgatctgtacgtggaaggactgccagaaaacattcctttccgaagtccctcatggtatggaatcccaaggctggaaaaaatcattcaagtgggcaatcgaattaaatttgttattaaaagaccagaacttctgactcacagtaccactgaagttactcagccaagaacgaatacaccagctcaagctcttggactcaccgaggcagtaaaagtaccatatcctgtgtttgaatcaaacccggagttcttgtatgtggaaggcttgccagaggggattcccttccgaagccctacctggtttggaattccacgacttgaaaggatcgtccgcgggagtaataaaatcaagttcgttgttaaaaaacctgaactagttatttcctacttgcctcctgggatggctagtaaaataaacactaaagctttgcagtcccccaaaagaccacgaagtcctgggagtaattcaaaggttcctgaaattgaggtcaccgtggaaggccctaataacaacaatcctcaaacctcagctgttcgaaccccgacccagactaacggttctaacgttcccttcaagccacgagggagagagttttcctttgaggcctggaatgccaaaatcacggacctaaaacagaaagttgaaaatctcttcaatgagaaatgtggggaagctcttggccttaaacaagctgtgaaggtgccgttcgcgttatttgagtctttcccggaagacttttatgtggaaggcttacctgagggtgtgccattccgaagaccatcgacttttggcattccgaggctggagaagatactcagaaacaaagccaaaattaagttcatcattaaaaagcccgaaatgtttgagacggcgattaaggagagcacctcctctaagagccctcccagaaaaataaattcatcacccaatgttaatactactgcatcaggtgttgaagaccttaacatcattcaggtgacaattccagatgatgataatgaaagactctcgaaagttgaaaaagctagacagctaagagaacaagtgaatgacctctttagtcggaaatttggtgaagctattggtatgggttttcctgtgaaagttccctacaggaaaatcacaattaaccctggctgtgtggtggttgatggcatgcccccgggggtgtccttcaaagcccccagctacctggaaatcagctccatgagaaggatcttagactctgccgagtttatcaaattcacggtcattagaccatttccaggacttgtgattaataaccagctggttgatcagagtgagtcagaaggccccgtgatacaagaatcagctgaaccaagccagttggaagttccagccacagaagaaataaaagagactgatggaagctctcagatcaagcaagaaccagaccccacgtggtagacctcttccctcctaggcttaaagtatcagtggttgagaagagcttttcggacctgttactaccccaagctgtagccttgagttacggtgtttattttccaatcaagtgaagatatctcctacttctcctactggaacatctcagcttctgcagtgaagaaaaattcctgtgatagttcagttctttagtttttctatttgaaaaaaaaaaatcatttaaatgatcctttgttcacggctctccttaatgactgagtgaacagttcctatctgtatatttgactaaaccttttcctaagctatctctcatggttcctatgtttttttatcataattaaaagcaaaaccatctggatcacctaacagtcagaggtcagtatctcagcgtgtgaattatagaggaaatacagagagaacctcttccacttttacttttcgtccaaataaaatgcatggtgtaccagaagttgaagatcgggttgaggattggggctagctcgatgacactaaggccccaacatcgcgggacctgctgtggcgcggattcttaggaacgctgttctagccggccccctctccaggggtcgccgtggccggcattatttcctagttcttcttgtaaccctgaggtgccagcgcggggagtgaggaggggtcagggggctaaggatgcaacctctgacgttctgcgccttcctaggagagtcttacatgtgttgagatttcacaagcaatgcgagttgtaaaataccagctctacaagaagctaggctctgtgacggcatagttttcagtagctttatcacaatattcacaatggagaattatatgacatggtagcagaaataggcccttttatgtgttgcttctattttacctcaaattgtagatatagggtaatcaataaaatccatccatgcctttcacacactaagt

SEQ ID NO: 4289 - protein, 913 aa, Homo sapiens; identical to SEQ ID NO: 4089

SEQ ID NO: 4290 - DNA, 4123 bp, Homo sapiens
aaaaaaaaaaaaaaaaaaaaaaaaaaaagaaaaaagaaaaaaaaaaggaggaggaggaggagggtgagagagaagctgggagagcagagaaaaggggccaccggtcgcccccccgcttccccgcacgcgctctccagccgcggccgcccgcctgccgcggtcaccccggcctctgcctctgtcccccagtgatcggatcaaggcgctgagcgaggccctgcctgcggggcggccatgcggcggtgacaggagcgcgaccgacacgcacgggcccctcgccccctctcgcctcccgtccgctcgccagctcccctcagccgaggctgctccgcggcggccgcagcccgcgcgcggcccacactcgcctcccctcggcacccccggccccggagctgcctggaggcggccgcactcggtgtaaagaactggccaagtccaaagccgaagtggcctgcattgcagtgtatgaaacagacgtgtttgtcgtcggaactgaaagaggacgtgcttttgtcaataccagaaaggattttcaaaaagattttgtaaaatattgtgttgaagaagaagaaaaagctgcagagatgcataaaatgaaatctacaacccaggcaaatcggatgagtgtagatgctgtagaaattgaaacactcagaaaaacagttgaggactatttctgcttttgctatgggaaagctttaggcaaatccacagtggtacctgtaccatatgagaagatgctgcgagaccagtcggctgtggtagtgcaggggcttccggaaggtgttgcctttaaacaccccgagaactatgatcttgcaaccctgaaatggattttggagaacaaagcagggatttcattcatcattaagagaccttttttagagccaaagaagcatgtaggtggtcgtgtgatggtaacagatgctgacaggtcaatactatctccaggtggaagttgtggccccatcaaagtgaaaactgaacccacagaagattctggcatttccctggaaatggcagctgtgacagtaaaggaagaatcagaagatcctgattattatcaatataacattcaaggaagccaccattcttcagagggcaatgaaggcacagaaatggaagtaccagcagaagattctactcaacatgtcccttcagaaacaagtgaggaccctgaagttgaggtgactattgaagatgatgattattctccaccgtctaagagaccaaaggccaatgagctaccgcagccaccagtcccggaacccgccaatgctgggaagcggaaagtgagggagttcaacttcgagaaatggaatgctcgcatcactgatctacgtaaacaagttgaagaattgtttgaaaggaaatatgctcaagccataaaagccaaaggtccggtgacgatcccgtaccctcttttccagtctcatgttgaagatctttatgtagaaggacttcctgaaggaattccttttagaaggccatctacttacggaattcctcgcctggagaggatattacttgcaaaggaaaggattcgttttgtgattaagaaacatgagcttctgaattcaacacgtgaagatttacagcttgataagccagcttcaggagtaaaggaagaatggtatgccagaatcactaaattaagaaagatggtggatcagcttttctgcaaaaaatttgcggaagccttggggagcactgaagccaaggctgtaccgtaccaaaaatttgaggcacacccgaatgatctgtacgtggaaggactgccagaaaacattcctttccgaagtccctcatggtatggaatcccaaggctggaaaaaatcattcaagtgggcaatcgaattaaatttgttattaaaagaccagaacttctgactcacagtaccactgaagttactcagccaagaacgaatacaccagtcaaagaagattggaatgtcagaattaccaagctacggaagcaagtggaagagatttttaatttgaaatttgctcaagctcttggactcaccgaggcagtaaaagtaccatatcctgtgtttgaatcaaacccggagttcttgaaaggatcgtccgcgggagtaataaaatcaagttcgttgttaaaaaacctgaactagttatttcctacttgcctcctgggatggctagtaaaataaacactaaagctttgcagtcccccaaaagaccacgaagtcctgggagtaattcaaaggttcctgaaattgaggtcaccgtggaaggccctaataacaacaatcctcaaacctcagctgttcgaaccccgacccagactaacggttctaacgttcccttcaagccacgagggagagagttttcctttgaggcctggaatgccaaaatcacggacctaaaacagaaagttgaaaatctcttcaatgagaaatgtggggaagctcttggccttaaacaagctgtgaaggtgccgttcgcgttatttgagtctttcccggaagacttttatgtggaaggcttacctgagggtgtgccattccgaagaccatcgacttttggcattccgaggctggagaagatactcagaaacaaagccaaaattaagttcatcattaaaaagcccgaaatgtttgagacggcgattaaggagagcacctcctctaagagccctcccagaaaaataaattcatcacccaatgttaatactactgcatcaggtgttgaagaccttaacatcattcaggtgacaattccagatgatgataatgaaagactctcgaaagttgaaaaagctagacagctaagagaacaagtgaatgacctctttagtcggaaatttggtgaagctattggtatgggttttcctgtgaaagttccctacaggaaaatcacaattaaccctggctgtgtggtggttgatggcatgcccccgggggtgtccttcaaagcccccagctacctggaaatcagctccatgagaaggatcttagactctgccgagtttatcaaattcacggtcattagaccatttccaggacttgtgattaataaccagctggttgatcagagtgagtcagaaggccccgtgatacaagaatcagctgaaccaagccagttggaagttccagccacagaagaaataaaagagactgatggaagctctcagatcaagcaagaaccagaccccacgtggtagacctcttccctcctaggcttaaagtatcagtggttgagaagagcttttcggacctgttactaccccaagctgtagccttgagttacggtgtttattttccaatcaagtgaagatatctcctacttctcctactggaacatctcagcttctgcagtgaagaaaaattcctgtgatagttcagttctttagtttttctatttgaaaaaaaaaaatcatttaaatgatcctttgttcacggctctccttaatgactgagtgaacagttcctatctgtatatttgactaaaccttttcctaagctatctctcatggttcctatgtttttttatcataattaaaagcaaaaccatctggatcacctaacagtcagaggtcagtatctcagcgtgtgaattatagaggaaatacagagagaacctcttccacttttacttttcgtccaaataaaatgcatggtgtaccagaagttgaagatcgggttgaggattggggctagctcgatgacactaaggccccaacatcgcgggacctgctgtggcgcggattcttaggaacgctgttctagccggccccctctccaggggtcgccgtggccggcattatttcctagttcttcttgtaaccctgaggtgccagcgcggggagtgaggaggggtcagggggctaaggatgcaacctctgacgttctgcgccttcctaggagagtcttacatgtgttgagatttcacaagcaatgcgagttgtaaaataccagctctacaagaagctaggctctgtgacggcatagttttcagtagctttatcacaatattcacaatggagaattatatgacatggtagcagaaataggcccttttatgtgttgcttctattttacctcaaattgtagatatagggtaatcaataaaatccatccatgcctttcacacactaagt

SEQ ID NO: 4291 - protein, 516 aa, Homo sapiens; identical to SEQ ID NO: 4129

SEQ ID NO: 4292 - DNA, 5134 bp, Homo sapiens
aaaaaaaaaaaaaaaaaaaaaaaaaaaagaaaaaagaaaaaaaaaaggaggaggaggaggagggtgagagagaagctgggagagcagagaaaaggggccaccggtcgcccccccgcttccccgcacgcgctctccagccgcggccgcccgcctgccgcggtcaccccggcctctgcctctgtcccccagtgatcggatcaaggcgctgagcgaggccctgcctgcggggcggccatgcggcggtgacaggagcgcgaccgacacgcacgggcccctcgccccctctcgcctcccgtccgctcgccagctcccctcagccgaggctgctccgcggcggccgcagcccgcgcgcggcccacactcgcctccccgttgaagatgaggagtcctcggagagcaggatggtggtgacattcctcatgtcagctctcgagtccatgtgtaaagaactggccaagtccaaagccgaagtggcctgcattgcagtgtatgaaacagacgtgtttgtcgtcggaactgaaagaggacgtgcttttgtcaataccagaaaggattttcaaaaagattttgtaaaatattgtgttgaagaagaagaaaaagctgcagagatgcataaaatgaaatctacaacccaggcaaatcggatgagtgtagatgctgtagaaattgaaacactcagaaaaacagttgaggactatttctgcttttgctatgggaaagctttaggcaaatccacagtggtacctgtaccatatgagaagatgctgcgagaccagtcggctgtggtagtgcaggggcttccggaaggtgttgcctttaaacaccccgagaactatgatcttgcaaccctgaaatggattttggagaacaaagcagggatttcattcatcattaagagaccttttttagagccaaagaagcatgtaggtggtcgtgtgatggtaacagatgctgacaggtcaatactatctccaggtggaagttgtggccccatcaaagtgaaaactgaacccacagaagattctggcatttccctggaaatggcagctgtgacagtaaaggaagaatcagaagatcctgattattatcaatataacattcaaggaagccaccattcttcagagggcaatgaaggcacagaaatggaagtaccagcagaagattctactcaacatgtcccttcagaaacaagtgaggaccctgaagttgaggtgactattgaagatgatgattattctccaccgtctaagagaccaaaggccaatgagctaccgcagccaccagtcccggaacccgccaatgctgggaagcggaaagtgagggagttcaacttcgagaaatggaatgctcgcatcactgatctacgtaaacaagttgaagaattgtttgaaaggaaatatgctcaagccataaaagccaaaggtccggtgacgatcccgtaccctcttttccagtctcatgttgaagatctttatgtagaaggacttcctgaaggaattccttttagaaggccatctacttacggaattcctcgcctggagaggatattacttgcaaaggaaaggattcgttttgtgattaagaaacatgagcttctgaattcaacacgtgaagatttacagcttgataagccagcttcaggagtaaaggaagaatggtatgccagaatcactaaattaagaaagatggtggatcagcttttctgcaaaaaatttgcggaagccttggggagcactgaagccaaggctgtaccgtaccaaaaatttgaggcacacccgaatgatctgtacgtggaaggactgccagaaaacattcctttccgaagtccctcatggtatggaatcccaaggctggaaaaaatcattcaagtgggcaatcgaattaaatttgttattaaaagaccagaacttctgactcacagtaccactgaagttactcagccaagaacgaatacaccagtcaaagaagattggaatgtcagaattaccaagctacggaagcaagtggaagagatttttaatttgaaatttgctcaagctcttggactcaccgaggcagtaaaagtaccatatcctgtgtttgaatcaaacccggagttcttgtatgtggaaggcttgccagaggggattcccttccgaagccctacctggtttggaattccacgacttgaaaggatcgtccgcgggagtaataaaatcaagttcgttgttaaaaaacctgaactagttatttcctacttgcctcctgggatggctagtaaaataaacactaaagctttgcagtcccccaaaagaccacgaagtcctgggagtaattcaaaggttcctgaaattgaggtcaccgtggaaggccctaataacaacaatcctcaaacctcagctgttcgaaccccgacccagactaacggttctaacgttcccttcaagccacgagggagagagttttcctttgaggcctggaatgccaaaatcacggacctaaaacagaaagttgaaaatctcttcaatgagaaatgtggggaagctcttggccttaaacaagctgtgaaggtgccgttcgcgttatttgagtctttcccggaagacttttatgtggaaggcttacctgagggtgtgccattccgaagaccatcgacttttggcattccgaggctggagaagatactcagaaacaaagccaaaattaagttcatcattaaaaagcccgaaatgtttgagacggcgattaaggagagcacctcctctaagagccctcccagaaaaataaattcatcacccaatgttaatactactgcatcaggtgttgaagaccttaacatcattcaggtgacaattccagatgatgataatgaaagactctcgaaagttgaaaaagctagacagctaagagaacaagtgaatgacctctttagtcggaaatttggtgaagctattggtatgggttttcctgtgaaagttccctacaggaaaatcacaattaaccctggctgtgtggtggttgatggcatgcccccgggggtgtccttcaaagcccccagctacctggaaatcagctccatgagaaggatcttagactctgccgagtttatcaaattcacggtcattagaccatttccaggacttgtgattaataaccagctggttgatcagagtgagtcagaaggccccgtgatacaagaatcagctgaaccaagccagttggaagttccagccacagaagaaataaaagagactgatggaagctctcagatcaagcaagaaccagaccccacgtggtagacctcttccctcctagggtaaatcagcttctgtgtcagggatgctgtgtggtgtccatctgaaccccctgcatacgcgtagctaatgtgatctccccactttcacataagatggtggccctgccttcagggaatgtgggagccaggtgggagccttcccggatatttaagctagaagattctacagggagattctccttggatcaatatatgtctctcagtcaaagatgtaaaagcacttttgccttaaaaagaatgttctgtttctaaatagagtcaacgttgtcctcctcattggaattcactatgagtcagaatcattagactgacttttttttttccatagtaatagtattttgcagagtctcacagagctgcagatcttttgttcatcttgcagagttaacaagtctgatcctgttagtccagatttcttaaatttggccaagttataataggagcagtagcttgagacccgaagtcaggaaactttgacaatggatttttttttttaatccagagacttgtactggaatttgccttaccctgtcagctcatggacttaaggtttcatcccgctttatgagtgcttctgaatccaagtcattgttacctgaatttgcaaattaagttgtgatattcgtgactgttaaattcctgtaattagattaacctctttgcttgcttgtttgttttctctcctattttagcttaaagtatcagtggttgagaagagcttttcggacctgttactaccccaagctgtgtaatatacttgtataacagaaataccttctatacaaacctttttttctacttttagatagaaatgtctactttttcagcagttctgtgaattaaagagcagagtgactgtgggtctggaatggctggtgtacttgggaatgtactatcaggattttacagcaatgctgggaaatgacagggaaaatgacaggaatgaatctcaccagattttttatgtactcagcagagccttgagttacggtgtttattttccaatcaagtgaagatatctcctacttctcctactggaacatctcagcttctgcagtgaagaaaaattcctgtgatagttcagttctttagtttttctatttgaaaaaaaaaaatcatttaaatgatcctttgttcacggctctccttaatgactgagtgaacagttcctatctgtatatttgactaaaccttttcctaagctatctctcatggttcctatgtttttttatcataattaaaagcaaaaccatctggatcacctaacagtcagaggtcagtatctcagcgtgtgaattatagaggaaatacagagagaacctcttccacttttacttttcgtccaaataaaatgcatggtgtaccagaagttgaagatcgggttgaggattggggctagctcgatgacactaaggccccaacatcgcgggacctgctgtggcgcggattcttaggaacgctgttctagccggccccctctccaggggtcgccgtggccggcattatttcctagttcttcttgtaaccctgaggtgccagcgcggggagtgaggaggggtcagggggctaaggatgcaacctctgacgttctgcgccttcctaggagagtcttacatgtgttgagatttcacaagcaatgcgagttgtaaaataccagctctacaagaagctaggctctgtgacggcatagttttcagtagctttatcacaatattcacaatggagaattatatgacatggtagcagaaataggcccttttatgtgttgcttctattttacctcaaattgtagatatagggtaatcaataaaatccatccatgcctttcacacactaagt

SEQ ID NO: 4293 - protein, 958 aa, Homo sapiens [sequence omitted]

SEQ ID NO: 4294 - DNA, 4364 bp, Homo sapiens
aaaaaaaaaaaaaaaaaaaaaaaaaaaagaaaaaagaaaaaaaaaaggaggaggaggaggagggtgagagagaagctgggagagcagagaaaaggggccaccggtcgcccccccgcttccccgcacgcgctctccagccgcggccgcccgcctgccgcggtcaccccggcctctgcctctgtcccccagtgatcggatcaaggcgctgagcgaggccctgcctgcggggcggccatgcggcggtgacaggagcgcgaccgacacgcacgggcccctcgccccctctcgcctcccgtccgctcgccagctcccctcagccgaggctgctccgcggcggccgcagcccgcgcgcggcccacactcgcctccccgttgaagatgaggagtcctcggagagcaggatggtggtgacattcctcatgtcagctctcgagtccatgtgtaaagaactggccaagtccaaagccgaagtggcctgcattgcagtgtatgaaacagacgtgtttgtcgtcggaactgaaagaggacgtgcttttgtcaataccagaaaggattttcaaaaagattttgtaaaatattgtgttgaagaagaagaaaaagctgcagagatgcataaaatgaaatctacaacccaggcaaatcggatgagtgtagatgctgtagaaattgaaacactcagaaaaacagttgaggactatttctgcttttgctatgggaaagctttaggcaaatccacagtggtacctgtaccatatgagaagatgctgcgagaccagtcggctgtggtagtgcaggggcttccggaaggtgttgcctttaaacaccccgagaactatgatcttgcaaccctgaaatggattttggagaacaaagcagggatttcattcatcattaagagaccttttttagagccaaagaagcatgtaggtggtcgtgtgatggtaacagatgctgacaggtcaatactatctccaggtggaagttgtggccccatcaaagtgaaaactgaacccacagaagattctggaagccaccattcttcagagggcaatgaaggcacagaaatggaagtaccagcagaagattctactcaacatgtcccttcagaaacaagtgaggaccctgaagttgaggtgactattgaagatgatgattattctccaccgtctaagagaccaaaggccaatgagctaccgcagccaccagtcccggaacccgccaatgctgggaagcggaaagtgagggagttcaacttcgagaaatggaatgctcgcatcactgatctacgtaaacaagttgaagaattgtttgaaaggaaatatgctcaagccataaaagccaaaggtccggtgacgatcccgtaccctcttttccagtctcatgttgaagatctttatgtagaaggacttcctgaaggaattccttttagaaggccatctacttacggaattcctcgcctggagaggatattacttgcaaaggaaaggattcgttttgtgattaagaaacatgagcttctgaattcaacacgtgaagatttacagcttgataagccagcttcaggagtaaaggaagaatggtatgccagaatcactaaattaagaaagatggtggatcagcttttctgcaaaaaatttgcggaagccttggggagcactgaagccaaggctgtaccgtaccaaaaatttgaggcacacccgaatgatctgtacgtggaaggactgccagaaaacattcctttccgaagtccctcatggtatggaatcccaaggctggaaaaaatcattcaagtgggcaatcgaattaaatttgttattaaaagaccagaacttctgactcacagtaccactgaagttactcagccaagaacgaatacaccagtcaaagaagattggaatgtcagaattaccaagctacggaagcaagtggaagagatttttaatttgaaatttgctcaagctcttggactcaccgaggcagtaaaagtaccatatcctgtgtttgaatcaaacccggagttcttgtatgtggaaggcttgccagaggggattcccttccgaagccctacctggtttggaattccacgacttgaaaggatcgtccgcgggagtaataaaatcaagttcgttgttaaaaaacctgaactagttatttcctacttgcctcctgggatggctagtaaaataaacactaaagctttgcagtcccccaaaagaccacgaagtcctgggagtaattcaaaggttcctgaaattgaggtcaccgtggaaggccctaataacaacaatcctcaaacctcagctgttcgaaccccgacccagactaacggttctaacgttcccttcaagccacgagggagagagttttcctttgaggcctggaatgccaaaatcacggacctaaaacagaaagttgaaaatctcttcaatgagaaatgtggggaagctcttggccttaaacaagctgtgaaggtgccgttcgcgttatttgagtctttcccggaagacttttatgtggaaggcttacctgagggtgtgccattccgaagaccatcgacttttggcattccgaggctggagaagatactcagaaacaaagccaaaattaagttcatcattaaaaagcccgaaatgtttgagacggcgattaaggagagcacctcctctaagagccctcccagaaaaataaattcatcacccaatgttaatactactgcatcaggtgttgaagaccttaacatcattcaggtgacaattccagatgatgataatgaaagactctcgaaagttgaaaaagctagacagctaagagaacaagtgaatgacctctttagtcggaaatttggtgaagctattggtatgggttttcctgtgaaagttccctacaggaaaatcacaattaaccctggctgtgtggtggttgatggcatgcccccgggggtgtccttcaaagcccccagctacctggaaatcagctccatgagaaggatcttagactctgccgagtttatcaaattcacggtcattagaccatttccaggacttgtgattaataaccagctggttgatcagagtgagtcagaaggccccgtgatacaagaatcagctgaaccaagccagttggaagttccagccacagaagaaataaaagagactgatggaagctctcagatcaagcaagaaccagaccccacgtggtagacctcttccctcctaggcttaaagtatcagtggttgagaagagcttttcggacctgttactaccccaagctgtgtaatatacttgtataacagaaataccttctatacaaacctttttttctacttttagatagaaatgtctactttttcagcagttctgtgaattaaagagcagagtgactgtgggtctggaatggctggtgtacttgggaatgtactatcaggattttacagcaatgctgggaaatgacagggaaaatgacaggaatgaatctcaccagattttttatgtactcagcagagccttgagttacggtgtttattttccaatcaagtgaagatatctcctacttctcctactggaacatctcagcttctgcagtgaagaaaaattcctgtgatagttcagttctttagtttttctatttgaaaaaaaaaaatcatttaaatgatcctttgttcacggctctccttaatgactgagtgaacagttcctatctgtatatttgactaaaccttttcctaagctatctctcatggttcctatgtttttttatcataattaaaagcaaaaccatctggatcacctaacagtcagaggtcagtatctcagcgtgtgaattatagaggaaatacagagagaacctcttccacttttacttttcgtccaaataaaatgcatggtgtaccagaagttgaagatcgggttgaggattggggctagctcgatgacactaaggccccaacatcgcgggacctgctgtggcgcggattcttaggaacgctgttctagccggccccctctccaggggtcgccgtggccggcattatttcctagttcttcttgtaaccctgaggtgccagcgcggggagtgaggaggggtcagggggctaaggatgcaacctctgacgttctgcgccttcctaggagagtcttacatgtgttgagatttcacaagcaatgcgagttgtaaaataccagctctacaagaagctaggctctgtgacggcatagttttcagtagctttatcacaatattcacaatggagaattatatgacatggtagcagaaataggcccttttatgtgttgcttctattttacctcaaattgtagatatagggtaatcaataaaatccatccatgcctttcacacactaagt

SEQ ID NO: 4295 - protein, 932 aa, Homo sapiens; identical to SEQ ID NO: 4065

SEQ ID NO: 4296 - DNA, 4218 bp, Homo sapiens
aaaaaaaaaaaaaaaaaaaaaaaaaaaagaaaaaagaaaaaaaaaaggaggaggaggaggagggtgagagagaagctgggagagcagagaaaaggggccaccggtcgcccccccgcttccccgcacgcgctctccagccgcggccgcccgcctgccgcggtcaccccggcctctgcctctgtcccccagtgatcggatcaaggcgctgagcgaggccctgcctgcggggcggccatgcggcggtgacaggagcgcgaccgacacgcacgggcccctcgccccctctcgcctcccgtccgctcgccagctcccctcagccgaggctgctccgcggcggccgcagcccgcgcgcggcccacactcgcctccccgttgaagatgaggagtcctcggagagcaggatggtggtgacattcctcatgtcagctctcgagtccatgtgtaaagaactggccaagtccaaagccgaagtggcctgcattgcagtgtatgaaacagacgtgtttgtcgtcggaactgaaagaggacgtgcttttgtcaataccagaaaggattttcaaaaagattttgtaaaatattgtgttgaagaagaagaaaaagctgcagagatgcataaaatgaaatctacaacccaggcaaatcggatgagtgtagatgctgtagaaattgaaacactcagaaaaacagttgaggactatttctgcttttgctatgggaaagctttaggcaaatccacagtggtacctgtaccatatgagaagatgctgcgagaccagtcggctgtggtagtgcaggggcttccggaaggtgttgcctttaaacaccccgagaactatgatcttgcaaccctgaaatggattttggagaacaaagcagggatttcattcatcattaagagaccttttttagagccaaagaagcatgtaggtggtcgtgtgatggtaacagatgctgacaggtcaatactatctccaggtggaagttgtggccccatcaaagtgaaaactgaacccacagaagattctggcatttccctggaaatggcagctgtgacagtaaaggaagaatcagaagatcctgattattatcaatataacattcaagcaggcccttctgaaactgatgatgttgatgaaaaacagcccctatcgaagcctttgcaaggaagccaccattcttcagagggcaatgaaggcacagaaatggaagtaccagcagaagattctactcaacatgtcccttcagaaacaagtgaggaccctgaagttgaggtgactattgaagatgatgattattctccaccgtctaagagaccaaaggccaatgagctaccgcagccaccagtcccggaacccgccaatgctgggaagcggaaagtgagggagttcaacttcgagaaatggaatgctcgcatcactgatctacgtaaacaagttgaagaattgtttgaaaggaaatatgctcaagccataaaagccaaaggtccggtgacgatcccgtaccctcttttccagtctcatgttgaagatctttatgtagaaggacttcctgaaggaattccttttagaaggccatctacttacggaattcctcgcctggagaggatattacttgcaaaggaaaggattcgttttgtgattaagaaacatgagcttctgaattcaacacgtgaagatttacagcttgataagccagcttcaggagtaaaggaagaatggtatgccagaatcactaaattaagaaagatggtggatcagcttttctgcaaaaaatttgcggaagccttggggagcactgaagccaaggctgtaccgtaccaaaaatttgaggcacacccgaatgatctgtacgtggaaggactgccagaaaacattcctttccgaagtccctcatggtatggaatcccaaggctggaaaaaatcattcaagtgggcaatcgaattaaatttgttattaaaagaccagaacttctgactcacagtaccactgaagttactcagccaagaacgaatacaccagtcaaagaagattggaatgtcagaattaccaagctacggaagcaagtggaagagatttttaatttgaaatttgctcaagctcttggactcaccgaggcagtaaaagtaccatatcctgtgtttgaatcaaacccggagttcttgtatgtggaaggcttgccagaggggattcccttccgaagccctacctggtttggaattccacgacttgaaaggatcgtccgcgggagtaataaaatcaagttcgttgttaaaaaacctgaactagttatttcctacttgcctcctgggatggctagtaaaataaacactaaagctttgcagtcccccaaaagaccacgaagtcctgggagtaattcaaaggttcctgaaattgaggtcaccgtggaaggccctaataacaacaatcctcaaacctcagctgttcgaaccccgacccagactaacggttctaacgttcccttcaagccacgagggagagagttttcctttgaggcctggaatgccaaaatcacggacctaaaacagaaagttgaaaatctcttcaatgagaaatgtggggaagctcttggccttaaacaagctgtgaaggtgccgttcgcgttatttgagtctttcccggaagacttttatgtggaaggcttacctgagggtgtgccattccgaagaccatcgacttttggcattccgaggctggagaagatactcagaaacaaagccaaaattaagttcatcattaaaaagcccgaaatgtttgagacggcgattaaggagagcacctcctctaagagccctcccagaaaaataaattcatcacccaatgttaatactactgcatcaggtgttgaagaccttaacatcattcaggtgacaattccagatgatgataatgaaagactctcgaaagttgaaaaagctagacagctaagagaacaagtgaatgacctctttagtcggaaatttggtgaagctattggtatgggttttcctgtgaaagttccctacaggaaaatcacaattaaccctggctgtgtggtggttgatggcatgcccccgggggtgtccttcaaagcccccagctacctggaaatcagctccatgagaaggatcttagactctgccgagtttatcaaattcacggtcattagaccatttccaggacttgtgattaataaccagctggttgatcagagtgagtcagaaggccccgtgatacaagaatcagctgaaccaagccagttggaagttccagccacagaagaaataaaagagactgatggaagctctcagatcaagcaagaaccagaccccacgtggtagacctcttccctcctaggagccttgagttacggtgtttattttccaatcaagtgaagatatctcctacttctcctactggaacatctcagcttctgcagtgaagaaaaattcctgtgatagttcagttctttagtttttctatttgaaaaaaaaaaatcatttaaatgatcctttgttcacggctctccttaatgactgagtgaacagttcctatctgtatatttgactaaaccttttcctaagctatctctcatggttcctatgtttttttatcataattaaaagcaaaaccatctggatcacctaacagtcagaggtcagtatctcagcgtgtgaattatagaggaaatacagagagaacctcttccacttttacttttcgtccaaataaaatgcatggtgtaccagaagttgaagatcgggttgaggattggggctagctcgatgacactaaggccccaacatcgcgggacctgctgtggcgcggattcttaggaacgctgttctagccggccccctctccaggggtcgccgtggccggcattatttcctagttcttcttgtaaccctgaggtgccagcgcggggagtgaggaggggtcagggggctaaggatgcaacctctgacgttctgcgccttcctaggagagtcttacatgtgttgagatttcacaagcaatgcgagttgtaaaataccagctctacaagaagctaggctctgtgacggcatagttttcagtagctttatcacaatattcacaatggagaattatatgacatggtagcagaaataggcccttttatgtgttgcttctattttacctcaaattgtagatatagggtaatcaataaaatccatccatgcctttcacacactaagt

SEQ ID NO: 4297 - protein, 978 aa, Homo sapiens; identical to SEQ ID NO: 4157

SEQ ID NO: 4298 - DNA, 4273 bp, Homo sapiens
aaaaaaaaaaaaaaaaaaaaaaaaaaaagaaaaaagaaaaaaaaaaggaggaggaggaggagggtgagagagaagctgggagagcagagaaaaggggccaccggtcgcccccccgcttccccgcacgcgctctccagccgcggccgcccgcctgccgcggtcaccccggcctctgcctctgtcccccagtgatcggatcaaggcgctgagcgaggccctgcctgcggggcggccatgcggcggtgacaggagcgcgaccgacacgcacgggcccctcgccccctctcgcctcccgtccgctcgccagctcccctcagccgaggctgctccgcggcggccgcagcccgcgcgcggcccacactcgcctcccctcggcacccccggccccggagctgcctggaggcggccgcactcggtgtaaagaactggccaagtccaaagccgaagtggcctgcattgcagtgtatgaaacagacgtgtttgtcgtcggaactgaaagaggacgtgcttttgtcaataccagaaaggattttcaaaaagattttgtaaaatattgtgttgaagaagaagaaaaagctgcagagatgcataaaatgaaatctacaacccaggcaaatcggatgagtgtagatgctgtagaaattgaaacactcagaaaaacagttgaggactatttctgcttttgctatgggaaagctttaggcaaatccacagtggtacctgtaccatatgagaagatgctgcgagaccagtcggctgtggtagtgcaggggcttccggaaggtgttgcctttaaacaccccgagaactatgatcttgcaaccctgaaatggattttggagaacaaagcagggatttcattcatcattaagagaccttttttagagccaaagaagcatgtaggtggtcgtgtgatggtaacagatgctgacaggtcaatactatctccaggtggaagttgtggccccatcaaagtgaaaactgaacccacagaagattctggaagccaccattcttcagagggcaatgaaggcacagaaatggaagtaccagcagaagattctactcaacatgtcccttcagaaacaagtgaggaccctgaagttgaggtgactattgaagatgatgattattctccaccgtctaagagaccaaaggccaatgagctaccgcagccaccagtcccggaacccgccaatgctgggaagcggaaagtgagggagttcaacttcgagaaatggaatgctcgcatcactgatctacgtaaacaagttgaagaattgtttgaaaggaaatatgctcaagccataaaagccaaaggtccggtgacgatcccgtaccctcttttccagtctcatgttgaagatctttatgtagaaggacttcctgaaggaattccttttagaaggccatctacttacggaattcctcgcctggagaggatattacttgcaaaggaaaggattcgttttgtgattaagaaacatgagcttctgaattcaacacgtgaagatttacagcttgataagccagcttcaggagtaaaggaagaatggtatgccagaatcactaaattaagaaagatggtggatcagcttttctgcaaaaaatttgcggaagccttggggagcactgaagccaaggctgtaccgtaccaaaaatttgaggcacacccgaatgatctgtacgtggaaggactgccagaaaacattcctttccgaagtccctcatggtatggaatcccaaggctggaaaaaatcattcaagtgggcaatcgaattaaatttgttattaaaagaccagaacttctgactcacagtaccactgaagttactcagccaagaacgaatacaccagtcaaagaagattggaatgtcagaattaccaagctacggaagcaagtggaagagatttttaatttgaaatttgctcaagctcttggactcaccgaggcagtaaaagtaccatatcctgtgtttgaatcaaacccggagttcttgaaaggatcgtccgcgggagtaataaaatcaagttcgttgttaaaaaacctgaactagttatttcctacttgcctcctgggatggctagtaaaataaacactaaagctttgcagtcccccaaaagaccacgaagtcctgggagtaattcaaaggttcctgaaattgaggtcaccgtggaaggccctaataacaacaatcctcaaacctcagctgttcgaaccccgacccagactaacggttctaacgttcccttcaagccacgagggagagagttttcctttgaggcctggaatgccaaaatcacggacctaaaacagaaagttgaaaatctcttcaatgagaaatgtggggaagctcttggccttaaacaagctgtgaaggtgccgttcgcgttatttgagtctttcccggaagacttttatgtggaaggcttacctgagggtgtgccattccgaagaccatcgacttttggcattccgaggctggagaagatactcagaaacaaagccaaaattaagttcatcattaaaaagcccgaaatgtttgagacggcgattaaggagagcacctcctctaagagccctcccagaaaaataaattcatcacccaatgttaatactactgcatcaggtgttgaagaccttaacatcattcaggtgacaattccagatgatgataatgaaagactctcgaaagttgaaaaagctagacagctaagagaacaagtgaatgacctctttagtcggaaatttggtgaagctattggtatgggttttcctgtgaaagttccctacaggaaaatcacaattaaccctggctgtgtggtggttgatggcatgcccccgggggtgtccttcaaagcccccagctacctggaaatcagctccatgagaaggatcttagactctgccgagtttatcaaattcacggtcattagaccatttccaggacttgtgattaataaccagctggttgatcagagtgagtcagaaggccccgtgatacaagaatcagctgaaccaagccagttggaagttccagccacagaagaaataaaagagactgatggaagctctcagatcaagcaagaaccagaccccacgtggtagacctcttccctcctaggcttaaagtatcagtggttgagaagagcttttcggacctgttactaccccaagctgtgtaatatacttgtataacagaaataccttctatacaaacctttttttctacttttagatagaaatgtctactttttcagcagttctgtgaattaaagagcagagtgactgtgggtctggaatggctggtgtacttgggaatgtactatcaggattttacagcaatgctgggaaatgacagggaaaatgacaggaatgaatctcaccagattttttatgtactcagcagagccttgagttacggtgtttattttccaatcaagtgaagatatctcctacttctcctactggaacatctcagcttctgcagtgaagaaaaattcctgtgatagttcagttctttagtttttctatttgaaaaaaaaaaatcatttaaatgatcctttgttcacggctctccttaatgactgagtgaacagttcctatctgtatatttgactaaaccttttcctaagctatctctcatggttcctatgtttttttatcataattaaaagcaaaaccatctggatcacctaacagtcagaggtcagtatctcagcgtgtgaattatagaggaaatacagagagaacctcttccacttttacttttcgtccaaataaaatgcatggtgtaccagaagttgaagatcgggttgaggattggggctagctcgatgacactaaggccccaacatcgcgggacctgctgtggcgcggattcttaggaacgctgttctagccggccccctctccaggggtcgccgtggccggcattatttcctagttcttcttgtaaccctgaggtgccagcgcggggagtgaggaggggtcagggggctaaggatgcaacctctgacgttctgcgccttcctaggagagtcttacatgtgttgagatttcacaagcaatgcgagttgtaaaataccagctctacaagaagctaggctctgtgacggcatagttttcagtagctttatcacaatattcacaatggagaattatatgacatggtagcagaaataggcccttttatgtgttgcttctattttacctcaaattgtagatatagggtaatcaataaaatccatccatgcctttcacacactaagt

SEQ ID NO: 4299 - protein, 490 aa, Homo sapiens; identical to SEQ ID NO: 4105

SEQ ID NO: 4300 - DNA, 5079 bp, Homo sapiens
aaaaaaaaaaaaaaaaaaaaaaaaaaaagaaaaaagaaaaaaaaaaggaggaggaggaggagggtgagagagaagctgggagagcagagaaaaggggccaccggtcgcccccccgcttccccgcacgcgctctccagccgcggccgcccgcctgccgcggtcaccccggcctctgcctctgtcccccagtgatcggatcaaggcgctgagcgaggccctgcctgcggggcggccatgcggcggtgacaggagcgcgaccgacacgcacgggcccctcgccccctctcgcctcccgtccgctcgccagctcccctcagccgaggctgctccgcggcggccgcagcccgcgcgcggcccacactcgcctcccctcggcacccccggccccggagctgcctggaggcggccgcactcggggatcatggcccaagttgcaatgtccaccctccccgttgaagatgaggagtcctcggagagcaggatggtggtgacattcctcatgtcagctctcgagtccatgtgtaaagaactggccaagtccaaagccgaagtggcctgcattgcagtgtatgaaacagacgtgtttgtcgtcggaactgaaagaggacgtgcttttgtcaataccagaaaggattttcaaaaagattttgtaaaatattgtgttgaagaagaagaaaaagctgcagagatgcataaaatgaaatctacaacccaggcaaatcggatgagtgtagatgctgtagaaattgaaacactcagaaaaacagttgaggactatttctgcttttgctatgggaaagctttaggcaaatccacagtggtacctgtaccatatgagaagatgctgcgagaccagtcggctgtggtagtgcaggggcttccggaaggtgttgcctttaaacaccccgagaactatgatcttgcaaccctgaaatggattttggagaacaaagcagggatttcattcatcattaagagaccttttttagagccaaagaagcatgtaggtggtcgtgtgatggtaacagatgctgacaggtcaatactatctccaggtggaagttgtggccccatcaaagtgaaaactgaacccacagaagattctggcatttccctggaaatggcagctgtgacagtaaaggaagaatcagaagatcctgattattatcaatataacattcaaggaagccaccattcttcagagggcaatgaaggcacagaaatggaagtaccagcagaagatgatgattattctccaccgtctaagagaccaaaggccaatgagctaccgcagccaccagtcccggaacccgccaatgctgggaagcggaaagtgagggagttcaacttcgagaaatggaatgctcgcatcactgatctacgtaaacaagttgaagaattgtttgaaaggaaatatgctcaagccataaaagccaaaggtccggtgacgatcccgtaccctcttttccagtctcatgttgaagatctttatgtagaaggacttcctgaaggaattccttttagaaggccatctacttacggaattcctcgcctggagaggatattacttgcaaaggaaaggattcgttttgtgattaagaaacatgagcttctgaattcaacacgtgaagatttacagcttgataagccagcttcaggagtaaaggaagaatggtatgccagaatcactaaattaagaaagatggtggatcagcttttctgcaaaaaatttgcggaagccttggggagcactgaagccaaggctgtaccgtaccaaaaatttgaggcacacccgaatgatctgtacgtggaaggactgccagaaaacattcctttccgaagtccctcatggtatggaatcccaaggctggaaaaaatcattcaagtgggcaatcgaattaaatttgttattaaaagaccagaacttctgactcacagtaccactgaagttactcagccaagaacgaatacaccagctcaagctcttggactcaccgaggcagtaaaagtaccatatcctgtgtttgaatcaaacccggagttcttgtatgtggaaggcttgccagaggggattcccttccgaagccctacctggtttggaattccacgacttgaaaggatcgtccgcgggagtaataaaatcaagttcgttgttaaaaaacctgaactagttatttcctacttgcctcctgggatggctagtaaaataaacactaaagctttgcagtcccccaaaagaccacgaagtcctgggagtaattcaaaggttcctgaaattgaggtcaccgtggaaggccctaataacaacaatcctcaaacctcagctgttcgaaccccgacccagactaacggttctaacgttcccttcaagccacgagggagagagttttcctttgaggcctggaatgccaaaatcacggacctaaaacagaaagttgaaaatctcttcaatgagaaatgtggggaagctcttggccttaaacaagctgtgaaggtgccgttcgcgttatttgagtctttcccggaagacttttatgtggaaggcttacctgagggtgtgccattccgaagaccatcgacttttggcattccgaggctggagaagatactcagaaacaaagccaaaattaagttcatcattaaaaagcccgaaatgtttgagacggcgattaaggagagcacctcctctaagagccctcccagaaaaataaattcatcacccaatgttaatactactgcatcaggtgttgaagaccttaacatcattcaggtgacaattccagatgatgataatgaaagactctcgaaagttgaaaaagctagacagctaagagaacaagtgaatgacctctttagtcggaaatttggtgaagctattggtatgggttttcctgtgaaagttccctacaggaaaatcacaattaaccctggctgtgtggtggttgatggcatgcccccgggggtgtccttcaaagcccccagctacctggaaatcagctccatgagaaggatcttagactctgccgagtttatcaaattcacggtcattagaccatttccaggacttgtgattaataaccagctggttgatcagagtgagtcagaaggccccgtgatacaagaatcagctgaaccaagccagttggaagttccagccacagaagaaataaaagagactgatggaagctctcagatcaagcaagaaccagaccccacgtggtagacctcttccctcctagggtaaatcagcttctgtgtcagggatgctgtgtggtgtccatctgaaccccctgcatacgcgtagctaatgtgatctccccactttcacataagatggtggccctgccttcagggaatgtgggagccaggtgggagccttcccggatatttaagctagaagattctacagggagattctccttggatcaatatatgtctctcagtcaaagatgtaaaagcacttttgccttaaaaagaatgttctgtttctaaatagagtcaacgttgtcctcctcattggaattcactatgagtcagaatcattagactgacttttttttttccatagtaatagtattttgcagagtctcacagagctgcagatcttttgttcatcttgcagagttaacaagtctgatcctgttagtccagatttcttaaatttggccaagttataataggagcagtagcttgagacccgaagtcaggaaactttgacaatggatttttttttttaatccagagacttgtactggaatttgccttaccctgtcagctcatggacttaaggtttcatcccgctttatgagtgcttctgaatccaagtcattgttacctgaatttgcaaattaagttgtgatattcgtgactgttaaattcctgtaattagattaacctctttgcttgcttgtttgttttctctcctattttagcttaaagtatcagtggttgagaagagcttttcggacctgttactaccccaagctgtgtaatatacttgtataacagaaataccttctatacaaacctttttttctacttttagatagaaatgtctactttttcagcagttctgtgaattaaagagcagagtgactgtgggtctggaatggctggtgtacttgggaatgtactatcaggattttacagcaatgctgggaaatgacagggaaaatgacaggaatgaatctcaccagattttttatgtactcagcagagccttgagttacggtgtttattttccaatcaagtgaagatatctcctacttctcctactggaacatctcagcttctgcagtgaagaaaaattcctgtgatagttcagttctttagtttttctatttgaaaaaaaaaaatcatttaaatgatcctttgttcacggctctccttaatgactgagtgaacagttcctatctgtatatttgactaaaccttttcctaagctatctctcatggttcctatgtttttttatcataattaaaagcaaaaccatctggatcacctaacagtcagaggtcagtatctcagcgtgtgaattatagaggaaatacagagagaacctcttccacttttacttttcgtccaaataaaatgcatggtgtaccagaagttgaagatcgggttgaggattggggctagctcgatgacactaaggccccaacatcgcgggacctgctgtggcgcggattcttaggaacgctgttctagccggccccctctccaggggtcgccgtggccggcattatttcctagttcttcttgtaaccctgaggtgccagcgcggggagtgaggaggggtcagggggctaaggatgcaacctctgacgttctgcgccttcctaggagagtcttacatgtgttgagatttcacaagcaatgcgagttgtaaaataccagctctacaagaagctaggctctgtgacggcatagttttcagtagctttatcacaatattcacaatggagaattatatgacatggtagcagaaataggcccttttatgtgttgcttctattttacctcaaattgtagatatagggtaatcaataaaatccatccatgcctttcacacactaagt

SEQ ID NO: 4301 - protein, 933 aa, Homo sapiens; identical to SEQ ID NO: 4067

SEQ ID NO: 4302 - DNA, 4231 bp, Homo sapiens
aaaaaaaaaaaaaaaaaaaaaaaaaaaagaaaaaagaaaaaaaaaaggaggaggaggaggagggtgagagagaagctgggagagcagagaaaaggggccaccggtcgcccccccgcttccccgcacgcgctctccagccgcggccgcccgcctgccgcggtcaccccggcctctgcctctgtcccccagtgatcggatcaaggcgctgagcgaggccctgcctgcggggcggccatgcggcggtgacaggagcgcgaccgacacgcacgggcccctcgccccctctcgcctcccgtccgctcgccagctcccctcagccgaggctgctccgcggcggccgcagcccgcgcgcggcccacactcgcctcccctcggcacccccggccccggagctgcctggaggcggccgcactcggggatcatggcccaagttgcaatgtccaccctccccgttgaagatgaggagtcctcggagagcaggatggtggtgacattcctcatgtcagctctcgagtccatgtgtaaagaactggccaagtccaaagccgaagtggcctgcattgcagtgtatgaaacagacgtgtttgtcgtcggaactgaaagaggacgtgcttttgtcaataccagaaaggattttcaaaaagattttgtaaaatattgtgttgaagaagaagaaaaagctgcagagatgcataaaatgaaatctacaacccaggcaaatcggatgagtgtagatgctgtagaaattgaaacactcagaaaaacagttgaggactatttctgcttttgctatgggaaagctttaggcaaatccacagtggtacctgtaccatatgagaagatgctgcgagaccagtcggctgtggtagtgcaggggcttccggaaggtgttgcctttaaacaccccgagaactatgatcttgcaaccctgaaatggattttggagaacaaagcagggatttcattcatcattaagagaccttttttagagccaaagaagcatgtaggtggtcgtgtgatggtaacagatgctgacaggtcaatactatctccaggtggaagttgtggccccatcaaagtgaaaactgaacccacagaagattctggcatttccctggaaatggcagctgtgacagtaaaggaagaatcagaagatcctgattattatcaatataacattcaaggaagccaccattcttcagagggcaatgaaggcacagaaatggaagtaccagcagaagatgatgattattctccaccgtctaagagaccaaaggccaatgagctaccgcagccaccagtcccggaacccgccaatgctgggaagcggaaagtgagggagttcaacttcgagaaatggaatgctcgcatcactgatctacgtaaacaagttgaagaattgtttgaaaggaaatatgctcaagccataaaagccaaaggtccggtgacgatcccgtaccctcttttccagtctcatgttgaagatctttatgtagaaggacttcctgaaggaattccttttagaaggccatctacttacggaattcctcgcctggagaggatattacttgcaaaggaaaggattcgttttgtgattaagaaacatgagcttctgaattcaacacgtgaagatttacagcttgataagccagcttcaggagtaaaggaagaatggtatgccagaatcactaaattaagaaagatggtggatcagcttttctgcaaaaaatttgcggaagccttggggagcactgaagccaaggctgtaccgtaccaaaaatttgaggcacacccgaatgatctgtacgtggaaggactgccagaaaacattcctttccgaagtccctcatggtatggaatcccaaggctggaaaaaatcattcaagtgggcaatcgaattaaatttgttattaaaagaccagaacttctgactcacagtaccactgaagttactcagccaagaacgaatacaccagtcaaagaagattggaatgtcagaattaccaagctacggaagcaagtggaagagatttttaatttgaaatttgctcaagctcttggactcaccgaggcagtaaaagtaccatatcctgtgtttgaatcaaacccggagttcttgtatgtggaaggcttgccagaggggattcccttccgaagccctacctggtttggaattccacgacttgaaaggatcgtccgcgggagtaataaaatcaagttcgttgttaaaaaacctgaactagttatttcctacttgcctcctgggatggctagtaaaataaacactaaagctttgcagtcccccaaaagaccacgaagtcctgggagtaattcaaaggttcctgaaattgaggtcaccgtggaaggccctaataacaacaatcctcaaacctcagctgttcgaaccccgacccagactaacggttctaacgttcccttcaagccacgagggagagagttttcctttgaggcctggaatgccaaaatcacggacctaaaacagaaagttgaaaatctcttcaatgagaaatgtggggaagctcttggccttaaacaagctgtgaaggtgccgttcgcgttatttgagtctttcccggaagacttttatgtggaaggcttacctgagggtgtgccattccgaagaccatcgacttttggcattccgaggctggagaagatactcagaaacaaagccaaaattaagttcatcattaaaaagcccgaaatgtttgagacggcgattaaggagagcacctcctctaagagccctcccagaaaaataaattcatcacccaatgttaatactactgcatcaggtgttgaagaccttaacatcattcaggtgacaattccagatgatgataatgaaagactctcgaaagttgaaaaagctagacagctaagagaacaagtgaatgacctctttagtcggaaatttggtgaagctattggtatgggttttcctgtgaaagttccctacaggaaaatcacaattaaccctggctgtgtggtggttgatggcatgcccccgggggtgtccttcaaagcccccagctacctggaaatcagctccatgagaaggatcttagactctgccgagtttatcaaattcacggtcattagaccatttccaggacttgtgattaataaccagctggttgatcagagtgagtcagaaggccccgtgatacaagaatcagctgaaccaagccagttggaagttccagccacagaagaaataaaagagactgatggaagctctcagatcaagcaagaaccagaccccacgtggtagacctcttccctcctaggcttaaagtatcagtggttgagaagagcttttcggacctgttactaccccaagctgtagccttgagttacggtgtttattttccaatcaagtgaagatatctcctacttctcctactggaacatctcagcttctgcagtgaagaaaaattcctgtgatagttcagttctttagtttttctatttgaaaaaaaaaaatcatttaaatgatcctttgttcacggctctccttaatgactgagtgaacagttcctatctgtatatttgactaaaccttttcctaagctatctctcatggttcctatgtttttttatcataattaaaagcaaaaccatctggatcacctaacagtcagaggtcagtatctcagcgtgtgaattatagaggaaatacagagagaacctcttccacttttacttttcgtccaaataaaatgcatggtgtaccagaagttgaagatcgggttgaggattggggctagctcgatgacactaaggccccaacatcgcgggacctgctgtggcgcggattcttaggaacgctgttctagccggccccctctccaggggtcgccgtggccggcattatttcctagttcttcttgtaaccctgaggtgccagcgcggggagtgaggaggggtcagggggctaaggatgcaacctctgacgttctgcgccttcctaggagagtcttacatgtgttgagatttcacaagcaatgcgagttgtaaaataccagctctacaagaagctaggctctgtgacggcatagttttcagtagctttatcacaatattcacaatggagaattatatgacatggtagcagaaataggcccttttatgtgttgcttctattttacctcaaattgtagatatagggtaatcaataaaatccatccatgcctttcacacactaagt

SEQ ID NO: 4303 - protein, 957 aa, Homo sapiens
MAQVAMSTLPVEDEESSESRMVVTFLMSALESMCKELAKSKAEVACIAVYETDVFVVGTERGRAFVNTRKDFQKDFVKYCVEEEEKAAEMHKMKSTTQANRMSVDAVEIETLRKTVEDYFCFCYGKALGKSTVVPVPYEKMLRDQSAVVVQGLPEGVAFKHPENYDLATLKWILENKAGISFIIKRPFLEPKKHVGGRVMVTDADRSILSPGGSCGPIKVKTEPTEDSGISLEMAAVTVKEESEDPDYYQYNIQGSHHSSEGNEGTEMEVPAEDDDYSPPSKRPKANELPQPPVPEPANAGKRKVREFNFEKWNARITDLRKQVEELFERKYAQAIKAKGPVTIPYPLFQSHVEDLYVEGLPEGIPFRRPSTYGIPRLERILLAKERIRFVIKKHELLNSTREDLQLDKPASGVKEEWYARITKLRKMVDQLFCKKFAEALGSTEAKAVPYQKFEAHPNDLYVEGLPENIPFRSPSWYGIPRLEKIIQVGNRIKFVIKRPELLTHSTTEVTQPRTNTPVKEDWNVRITKLRKQVEEIFNLKFAQALGLTEAVKVPYPVFESNPEFLYVEGLPEGIPFRSPTWFGIPRLERIVRGSNKIKFVVKKPELVISYLPPGMASKINTKALQSPKRPRSPGSNSKVPEIEVTVEGPNNNNPQTSAVRTPTQTNGSNVPFKPRGREFSFEAWNAKITDLKQKVENLFNEKCGEALGLKQAVKVPFALFESFPEDFYVEGLPEGVPFRRPSTFGIPRLEKILRNKAKIKFIIKKPEMFETAIKESTSSKSPPRKINSSPNVNTTASGVEDLNIIQVTIPDDDNERLSKVEKARQLREQVNDLFSRKFGEAIGMGFPVKVPYRKITINPGCVVVDGMPPGVSFKAPSYLEISSMRRILDSAEFIKFTVIRPFPGLVINNQLVDQSESEGPVIQESAEPSQLEVPATEEIKETDGSSQIKQEPDPTW

SEQ ID NO: 4304 - DNA, 7101 bp, Homo sapiens
aaaaaaaaaaaaaaaaaaaaaaaaaaaagaaaaaagaaaaaaaaaaggaggaggaggaggagggtgagagagaagctgggagagcagagaaaaggggccaccggtcgcccccccgcttccccgcacgcgctctccagccgcggccgcccgcctgccgcggtcaccccggcctctgcctctgtcccccagtgatcggatcaaggcgctgagcgaggccctgcctgcggggcggccatgcggcggtgacaggagcgcgaccgacacgcacgggcccctcgccccctctcgcctcccgtccgctcgccagctcccctcagccgaggctgctccgcggcggccgcagcccgcgcgcggcccacactcgcctcccctcggcacccccggccccggagctgcctggaggcggccgcactcggtgtaaagaactggccaagtccaaagccgaagtggcctgcattgcagtgtatgaaacagacgtgtttgtcgtcggaactgaaagaggacgtgcttttgtcaataccagaaaggattttcaaaaagattttgtaaaatattgtgttgaagaagaagaaaaagctgcagagatgcataaaatgaaatctacaacccaggcaaatcggatgagtgtagatgctgtagaaattgaaacactcagaaaaacagttgaggactatttctgcttttgctatgggaaagctttaggcaaatccacagtggtacctgtaccatatgagaagatgctgcgagaccagtcggctgtggtagtgcaggggcttccggaaggtgttgcctttaaacaccccgagaactatgatcttgcaaccctgaaatggattttggagaacaaagcagggatttcattcatcattaagagaccttttttagagccaaagaagcatgtaggtggtcgtgtgatggtaacagatgctgacaggtcaatactatctccaggtggaagttgtggccccatcaaagtgaaaactgaacccacagaagattctggaagccaccattcttcagagggcaatgaaggcacagaaatggaagtaccagcagaagattctactcaacatgtcccttcagaaacaagtgaggaccctgaagttgaggtgactattgaagatgatgattattctccaccgtctaagagaccaaaggccaatgagctaccgcagccaccagtcccggaacccgccaatgctgggaagcggaaagtgagggagttcaacttcgagaaatggaatgctcgcatcactgatctacgtaaacaagttgaagaattgtttgaaaggaaatatgctcaagccataaaagccaaaggtccggtgacgatcccgtaccctcttttccagtctcatgttgaagatctttatgtagaaggacttcctgaaggaattccttttagaaggccatctacttacggaattcctcgcctggagaggatattacttgcaaaggaaaggattcgttttgtgattaagaaacatgagcttctgaattcaacacgtgaagatttacagcttgataagccagcttcaggagtaaaggaagaatggtatgccagaatcactaaattaagaaagatggtggatcagcttttctgcaaaaaatttgcggaagccttggggagcactgaagccaaggctgtaccgtaccaaaaatttgaggcacacccgaatgatctgtacgtggaaggactgccagaaaacattcctttccgaagtccctcatggtatggaatcccaaggctggaaaaaatcattcaagtgggcaatcgaattaaatttgttattaaaagaccagaacttctgactcacagtaccactgaagttactcagccaagaacgaatacaccagtcaaagaagattggaatgtcagaattaccaagctacggaagcaagtggaagagatttttaatttgaaatttgctcaagctcttggactcaccgaggcagtaaaagtaccatatcctgtgtttgaatcaaacccggagttcttgtatgtggaaggcttgccagaggggattcccttccgaagccctacctggtttggaattccacgacttgaaaggatcgtccgcgggagtaataaaatcaagttcgttgttaaaaaacctgaactagttatttcctacttgcctcctgggatggctagtaaaataaacactaaagctttgcagtcccccaaaagaccacgaagtcctgggagtaattcaaaggttcctgaaattgaggtcaccgtggaaggccctaataacaacaatcctcaaacctcagctgttcgaaccccgacccagactaacggttctaacgttcccttcaagccacgagggagagagttttcctttgaggcctggaatgccaaaatcacggacctaaaacagaaagttgaaaatctcttcaatgagaaatgtggggaagctcttggccttaaacaagctgtgaaggtgccgttcgcgttatttgagtctttcccggaagacttttatgtggaaggcttacctgagggtgtgccattccgaagaccatcgacttttggcattccgaggctggagaagatactcagaaacaaagccaaaattaagttcatcattaaaaagcccgaaatgtttgagacggcgattaaggagagcacctcctctaagagccctcccagaaaaataaattcatcacccaatgttaatactactgcatcaggtgttgaagaccttaacatcattcaggtgacaattccagatgatgataatgaaagactctcgaaagttgaaaaagctagacagctaagagaacaagtgaatgacctctttagtcggaaatttggtgaagctattggtatgggttttcctgtgaaagttccctacaggaaaatcacaattaaccctggctgtgtggtggttgatggcatgcccccgggggtgtccttcaaagcccccagctacctggaaatcagctccatgagaaggatcttagactctgccgagtttatcaaattcacggtcattaggtaagtgagagtttcctgcttagtcacaggagcgaatctggagctcatgaggctgactcttctaaaatgcagccacaggtagtcatcgaatccggcttcctatgctgtgcaatcaacaaatcaaaataacttgtgtcatcattagaatgtcagatgtgcttctacgaactaagctgactcttttaattctttggcaaagggttggcaaactaggactgtttgccaaattcaggctgcctcctatttttagagtcttcctgaaacacagctacacccgtattatccatggctgctttcctgtcacagtgagtaagtagctgggactgagaaggcatggcctccaaagtctaaaatatttactctctagcactttgtagaaaaaccttagctaggcacagtggctaacgcctgtaatcccagcattttgggaggccaaggcaggcagatcacctgaggtcaggagttccagaccagcctggccaacatggtgaaatcccatctctacaaaaataaaacagttagctgggcatgatggcgggtgcctgtaatcccagctactcgggaggctgaggcaggatagtcgcttgaacccaggaggtggaggttgcaatgagccaagatcatgccactgcactccagcctggacgacagagtgagactccatcacaagaaaaaaagaactttgtcaacctctgtcttagggcgccttgtcacaggcttcgggtcagacggattcaaccttgcatcagccatttgttagccaggtcactctgttctttgtctgtaaatgagattgatcgttgttcccactgagagtgtcagctccttcccgtagagcaggcatgatgattgtactcacctctgacaccattgtgagtgccacattccttcccacgtccttgtcactgtaagagatgcccacctgagcaccaaccccaggttatcttcccctttgtcttccagccccccagaaacagctacgactcaacctacccaatcatttcatcatcagattgccactgtctctagttcaggtctcttgggactggcactcagaaatctcataataaatcctcttgaggcttctcatacactcgtcttcttccaatcttctttccctcaaaatctcatattttggttccacttcacccaccgtcattctccatatcactcccaggagttaggcaaaaagccccttccgttcttccgtatgttaaacttagaatcactctgttccctgctctgcgtttctattttttgtttttcctccatttactagtagcttaacactttctaacagtgttcttattattgatacgtatctatctcttccataagcttataaggtcacggataatacttctcattgtagtacgtaaatgacgtgggctagatatgagttgaataaacagttatacctgtaaattcttacagagtgaaaataaattgttatactttacaatttgtttctctctttagaccatttccaggacttgtgattaataaccgtgagtattttgtgaagtgttttgtttttgttttttcctggggtctgacgtgtgtgcgtgtgagtgtgtatacatgcttaacgtatatcacgttacttcacctatgtcagtaaccaggccaaatacttgttttagccctcagtaaaaacaccaggcacttcctagttgtaaaattattcaagcttcttaacttcctatcctcgatgcacttaatcataaaatggtaataatagcaccgattttgggggagtcgttccagtagatggaaagcatctggaacaggtgtcagcaagctcctgccgacgtgtatgcataaagttttattgaaaccaccatcgtgtccatttgtttatggcagaactgagagatggcagcagcaagtgtgtgcctgcaaaacctaaaatatttactaattggctctgcaagaaaagagtttgcatccccctaacctagaacagtgtctagcctctagtatgtgtttagcctacagtatgtgctcagcgaatacaatctatatttattactgcttttatgactgttataattactgtgcttggatttcgttacaaagtaagtcacaatgtgcctgcttctgttagtatttcagcacagtgcctggcacacatggggctctcaaatattgctgagcgagtgaacaaatgtcctttcaattccttaacgttgatgtcattttcaatagtattttgagccaaacttaattttgcgagtgtgttttgttttcttaactttattattaaaaatgtataaaagtgaggccaggcgtggtggctcacgcctgtaatcccagcagtttgggaggctgaggcaggcggatcagttgaggttgggagttggagaccagcccgtccaacatggtgaaagcctgtctctactaaaaatacaaaaatcagctgggtgtggtggcgcgtgcctgtaatcccagctactcaggaggctgaggcaggagagttgcttgaatcctagaggtggaggttgcagtgagctgagatcgtgccattgcactccagcctgggcaacaagagcaaaactctgtcccaataaataaataaataaaatgttctcttttgttcctgttcttgtgcggtagtgtggtatagagttttatggtaattactgtgaattagtgattctgagggacatatcagaactctgaggtttgtttccttctcatcttgagggaaacagcaaatgtatgttaaaatgcttttccaagggaacaacacatccttacattatttaaaccaatctgcttcattttcagagctggttgatcagagtgagtcagaaggccccgtgatacaagaatcagctgaaccaagccagttggaagttccagccacagaagaaataaaagagactgatggaagctctcagatcaagcaagaaccagaccccacgtggtagacctcttccctcctaggcttaaagtatcagtggttgagaagagcttttcggacctgttactaccccaagctgtgtaatatacttgtataacagaaataccttctatacaaacctttttttctacttttagatagaaatgtctactttttcagcagttctgtgaattaaagagcagagtgactgtgggtctggaatggctggtgtacttgggaatgtactatcaggattttacagcaatgctgggaaatgacagggaaaatgacaggaatgaatctcaccagattttttatgtactcagcagagccttgagttacggtgtttattttccaatcaagtgaagatatctcctacttctcctactggaacatctcagcttctgcagtgaagaaaaattcctgtgatagttcagttctttagtttttctatttgaaaaaaaaaaatcatttaaatgatcctttgttcacggctctccttaatgactgagtgaacagttcctatctgtatatttgactaaaccttttcctaagctatctctcatggttcctatgtttttttatcataattaaaagcaaaaccatctggatcacctaacagtcagaggtcagtatctcagcgtgtgaattatagaggaaatacagagagaacctcttccacttttacttttcgtccaaataaaatgcatggtgtaccagaagttgaagatcgggttgaggattggggctagctcgatgacactaaggccccaacatcgcgggacctgctgtggcgcggattcttaggaacgctgttctagccggccccctctccaggggtcgccgtggccggcattatttcctagttcttcttgtaaccctgaggtgccagcgcggggagtgaggaggggtcagggggctaaggatgcaacctctgacgttctgcgccttcctaggagagtcttacatgtgttgagatttcacaagcaatgcgagttgtaaaataccagctctacaagaagctaggctctgtgacggcatagttttcagtagctttatcacaatattcacaatggagaattatatgacatggtagcagaaataggcccttttatgtgttgcttctattttacctcaaattgtagatatagggtaatcaataaaatccatccatgcctttcacacactaagt

SEQ ID NO: 4305 - protein, 807 aa, Homo sapiens; identical to SEQ ID NO: 4095

SEQ ID NO: 4306 - DNA, 4288 bp, Homo sapiens
aaaaaaaaaaaaaaaaaaaaaaaaaaaagaaaaaagaaaaaaaaaaggaggaggaggaggagggtgagagagaagctgggagagcagagaaaaggggccaccggtcgcccccccgcttccccgcacgcgctctccagccgcggccgcccgcctgccgcggtcaccccggcctctgcctctgtcccccagtgatcggatcaaggcgctgagcgaggccctgcctgcggggcggccatgcggcggtgacaggagcgcgaccgacacgcacgggcccctcgccccctctcgcctcccgtccgctcgccagctcccctcagccgaggctgctccgcggcggccgcagcccgcgcgcggcccacactcgcctcccctcggcacccccggccccggagctgcctggaggcggccgcactcggtgtaaagaactggccaagtccaaagccgaagtggcctgcattgcagtgtatgaaacagacgtgtttgtcgtcggaactgaaagaggacgtgcttttgtcaataccagaaaggattttcaaaaagattttgtaaaatattgtgttgaagaagaagaaaaagctgcagagatgcataaaatgaaatctacaacccaggcaaatcggatgagtgtagatgctgtagaaattgaaacactcagaaaaacagttgaggactatttctgcttttgctatgggaaagctttaggcaaatccacagtggtacctgtaccatatgagaagatgctgcgagaccagtcggctgtggtagtgcaggggcttccggaaggtgttgcctttaaacaccccgagaactatgatcttgcaaccctgaaatggattttggagaacaaagcagggatttcattcatcattaagagaccttttttagagccaaagaagcatgtaggtggtcgtgtgatggtaacagatgctgacaggtcaatactatctccaggtggaagttgtggccccatcaaagtgaaaactgaacccacagaagattctggcatttccctggaaatggcagctgtgacagtaaaggaagaatcagaagatcctgattattatcaatataacattcaaggaagccaccattcttcagagggcaatgaaggcacagaaatggaagtaccagcagaagatgatgattattctccaccgtctaagagaccaaaggccaatgagctaccgcagccaccagtcccggaacccgccaatgctgggaagcggaaagtgagggagttcaacttcgagaaatggaatgctcgcatcactgatctacgtaaacaagttgaagaattgtttgaaaggaaatatgctcaagccataaaagccaaaggtccggtgacgatcccgtaccctcttttccagtctcatgttgaagatctttatgtagaaggacttcctgaaggaattccttttagaaggccatctacttacggaattcctcgcctggagaggatattacttgcaaaggaaaggattcgttttgtgattaagaaacatgagcttctgaattcaacacgtgaagatttacagcttgataagccagcttcaggagtaaaggaagaatggtatgccagaatcactaaattaagaaagatggtggatcagcttttctgcaaaaaatttgcggaagccttggggagcactgaagccaaggctgtaccgtaccaaaaatttgaggcacacccgaatgatctgtacgtggaaggactgccagaaaacattcctttccgaagtccctcatggtatggaatcccaaggctggaaaaaatcattcaagtgggcaatcgaattaaatttgttattaaaagaccagaacttctgactcacagtaccactgaagttactcagccaagaacgaatacaccagtcaaagaagattggaatgtcagaattaccaagctacggaagcaagtggaagagatttttaatttgaaatttgctcaagctcttggactcaccgaggcagtaaaagtaccatatcctgtgtttgaatcaaacccggagttcttgaaaggatcgtccgcgggagtaataaaatcaagttcgttgttaaaaaacctgaactagttatttcctacttgcctcctgggatggctagtaaaataaacactaaagctttgcagtcccccaaaagaccacgaagtcctgggagtaattcaaaggttcctgaaattgaggtcaccgtggaaggccctaataacaacaatcctcaaacctcagctgttcgaaccccgacccagactaacggttctaacgttcccttcaagccacgagggagagagttttcctttgaggcctggaatgccaaaatcacggacctaaaacagaaagttgaaaatctcttcaatgagaaatgtggggaagctcttggccttaaacaagctgtgaaggtgccgttcgcgttatttgagtctttcccggaagacttttatgtggaaggcttacctgagggtgtgccattccgaagaccatcgacttttggcattccgaggctggagaagatactcagaaacaaagccaaaattaagttcatcattaaaaagcccgaaatgtttgagacggcgattaaggagagcacctcctctaagagccctcccagaaaaataaattcatcacccaatgttaatactactgcatcaggtgttgaagaccttaacatcattcaggtgacaattccagatgatgataatgaaagactctcgaaagttgaaaaagctagacagctaagagaacaagtgaatgacctctttagtcggaaatttggtgaagctattggtatgggttttcctgtgaaagttccctacaggaaaatcacaattaaccctggctgtgtggtggttgatggcatgcccccgggggtgtccttcaaagcccccagctacctggaaatcagctccatgagaaggatcttagactctgccgagtttatcaaattcacggtcattagaccatttccaggacttgtgattaataaccagctggttgatcagagtgagtcagaaggccccgtgatacaagaatcagctgaaccaagccagttggaagttccagccacagaagaaataaaagagactgatggaagctctcagatcaagcaagaaccagaccccacgtggtagacctcttccctcctaggcttaaagtatcagtggttgagaagagcttttcggacctgttactaccccaagctgtgtaatatacttgtataacagaaataccttctatacaaacctttttttctacttttagatagaaatgtctactttttcagcagttctgtgaattaaagagcagagtgactgtgggtctggaatggctggtgtacttgggaatgtactatcaggattttacagcaatgctgggaaatgacagggaaaatgacaggaatgaatctcaccagattttttatgtactcagcagagccttgagttacggtgtttattttccaatcaagtgaagatatctcctacttctcctactggaacatctcagcttctgcagtgaagaaaaattcctgtgatagttcagttctttagtttttctatttgaaaaaaaaaaatcatttaaatgatcctttgttcacggctctccttaatgactgagtgaacagttcctatctgtatatttgactaaaccttttcctaagctatctctcatggttcctatgtttttttatcataattaaaagcaaaaccatctggatcacctaacagtcagaggtcagtatctcagcgtgtgaattatagaggaaatacagagagaacctcttccacttttacttttcgtccaaataaaatgcatggtgtaccagaagttgaagatcgggttgaggattggggctagctcgatgacactaaggccccaacatcgcgggacctgctgtggcgcggattcttaggaacgctgttctagccggccccctctccaggggtcgccgtggccggcattatttcctagttcttcttgtaaccctgaggtgccagcgcggggagtgaggaggggtcagggggctaaggatgcaacctctgacgttctgcgccttcctaggagagtcttacatgtgttgagatttcacaagcaatgcgagttgtaaaataccagctctacaagaagctaggctctgtgacggcatagttttcagtagctttatcacaatattcacaatggagaattatatgacatggtagcagaaataggcccttttatgtgttgcttctattttacctcaaattgtagatatagggtaatcaataaaatccatccatgcctttcacacactaagt

SEQ ID NO: 4307 - protein, 495 aa, Homo sapiens; identical to SEQ ID NO: 4181

SEQ ID NO: 4308 - DNA, 3978 bp, Homo sapiens
aaaaaaaaaaaaaaaaaaaaaaaaaaaagaaaaaagaaaaaaaaaaggaggaggaggaggagggtgagagagaagctgggagagcagagaaaaggggccaccggtcgcccccccgcttccccgcacgcgctctccagccgcggccgcccgcctgccgcggtcaccccggcctctgcctctgtcccccagtgatcggatcaaggcgctgagcgaggccctgcctgcggggcggccatgcggcggtgacaggagcgcgaccgacacgcacgggcccctcgccccctctcgcctcccgtccgctcgccagctcccctcagccgaggctgctccgcggcggccgcagcccgcgcgcggcccacactcgcctcccctcggcacccccggccccggagctgcctggaggcggccgcactcggtgtaaagaactggccaagtccaaagccgaagtggcctgcattgcagtgtatgaaacagacgtgtttgtcgtcggaactgaaagaggacgtgcttttgtcaataccagaaaggattttcaaaaagattttgtaaaatattgtgttgaagaagaagaaaaagctgcagagatgcataaaatgaaatctacaacccaggcaaatcggatgagtgtagatgctgtagaaattgaaacactcagaaaaacagttgaggactatttctgcttttgctatgggaaagctttaggcaaatccacagtggtacctgtaccatatgagaagatgctgcgagaccagtcggctgtggtagtgcaggggcttccggaaggtgttgcctttaaacaccccgagaactatgatcttgcaaccctgaaatggattttggagaacaaagcagggatttcattcatcattaagagaccttttttagagccaaagaagcatgtaggtggtcgtgtgatggtaacagatgctgacaggtcaatactatctccaggtggaagttgtggccccatcaaagtgaaaactgaacccacagaagattctggcatttccctggaaatggcagctgtgacagtaaaggaagaatcagaagatcctgattattatcaatataacattcaaggaagccaccattcttcagagggcaatgaaggcacagaaatggaagtaccagcagaagattctactcaacatgtcccttcagaaacaagtgaggaccctgaagttgaggtgactattgaagatgatgattattctccaccgtctaagagaccaaaggccaatgagctaccgcagccaccagtcccggaacccgccaatgctgggaagcggaaagtgagggagttcaacttcgagaaatggaatgctcgcatcactgatctacgtaaacaagttgaagaattgtttgaaaggaaatatgctcaagccataaaagccaaaggtccggtgacgatcccgtaccctcttttccagtctcatgttgaagatctttatgtagaaggacttcctgaaggaattccttttagaaggccatctacttacggaattcctcgcctggagaggatattacttgcaaaggaaaggattcgttttgtgattaagaaacatgagcttctgaattcaacacgtgaagatttacagcttgataagccagcttcaggagtaaaggaagaatggtatgccagaatcactaaattaagaaagatggtggatcagcttttctgcaaaaaatttgcggaagccttggggagcactgaagccaaggctgtaccgtaccaaaaatttgaggcacacccgaatgatctgtacgtggaaggactgccagaaaacattcctttccgaagtccctcatggtatggaatcccaaggctggaaaaaatcattcaagtgggcaatcgaattaaatttgttattaaaagaccagaacttctgactcacagtaccactgaagttactcagccaagaacgaatacaccagtcaaagaagattggaatgtcagaattaccaagctacggaagcaagtggaagagatttttaatttgaaatttgcttagatttgttgacagcggtttcctggagtgctgtcttgagaacgattctgaggaggctcagcaagaaagagtgtttcagttgattgggtgtgtctgtcatggagaaggaactcaagctcttggactcaccgaggcagtaaaagtaccatatcctgtgtttgaatcaaacccggagttcttgtatgtggaaggcttgccagaggggattcccttccgaagccctacctggtttggaattccacgacttgaaaggatcgtccgcgggagtaataaaatcaagttcgttgttaaaaaacctgaactagttatttcctacttgcctcctgggatggctagtaaaataaacactaaagctttgcagtcccccaaaagaccacgaagtcctgggagtaattcaaaggttcctgaaattgaggtcaccgtggaaggccctaataacaacaatcctcaaacctcagctgttcgaaccccgacccagactaacggttctaacgttcccttcaagccacgagggagagagttttcctttgaggcctggaatgccaaaatcacggacctaaaacagaaagttgaaaatctcttcaatgagaaatgtggggaagctcttggccttaaacaagctgtgaaggtgccgttcgcgttatttgagtctttcccggaagacttttatgtggaaggcttacctgagggtgtgccattccgaagaccatcgacttttggcattccgaggctggagaagatactcagaaacaaagccaaaattaagttcatcattaaaaagcccgaaatgtttgagacggcgattaaggagagcacctcctctaagagccctcccagaaaaataaattcatcacccaatgttaatactactgcatcaggtgttgaagaccttaacatcattcaggtgacaattccagatgatgataatgaaagactctcgaaagttgaaaaagctagacagctaagagaacaagtgaatgacctctttagtcggaaatttggtgaagctattggtatgggttttcctgtgaaagttccctacaggaaaatcacaattaaccctggctgtgtggtggttgatggcatgcccccgggggtgtccttcaaagcccccagctacctggaaatcagctccatgagaaggatcttagactctgccgagtttatcaaattcacggtcattagaccatttccaggacttgtgattaataaccagctggttgatcagagtgagtcagaaggccccgtgatacaagaatcagctgaaccaagccagttggaagttccagccacagaagaaataaaagagactgatggaagctctcagatcaagcaagaaccagaccccacgtggtagacctcttccctcctaggcaaaaccatctggatcacctaacagtcagaggtcagtatctcagcgtgtgaattatagaggaaatacagagagaacctcttccacttttacttttcgtccaaataaaatgcatggtgtaccagaagttgaagatcgggttgaggattggggctagctcgatgacactaaggccccaacatcgcgggacctgctgtggcgcggattcttaggaacgctgttctagccggccccctctccaggggtcgccgtggccggcattatttcctagttcttcttgtaaccctgaggtgccagcgcggggagtgaggaggggtcagggggctaaggatgcaacctctgacgttctgcgccttcctaggagagtcttacatgtgttgagatttcacaagcaatgcgagttgtaaaataccagctctacaagaagctaggctctgtgacggcatagttttcagtagctttatcacaatattcacaatggagaattatatgacatggtagcagaaataggcccttttatgtgttgcttctattttacctcaaattgtagatatagggtaatcaataaaatccatccatgcctttcacacactaagt

SEQ ID NO: 4309 - protein, 475 aa, Homo sapiens; identical to SEQ ID NO: 4139

SEQ ID NO: 4310 - DNA, 4403 bp, Homo sapiens
aaaaaaaaaaaaaaaaaaaaaaaaaaaagaaaaaagaaaaaaaaaaggaggaggaggaggagggtgagagagaagctgggagagcagagaaaaggggccaccggtcgcccccccgcttccccgcacgcgctctccagccgcggccgcccgcctgccgcggtcaccccggcctctgcctctgtcccccagtgatcggatcaaggcgctgagcgaggccctgcctgcggggcggccatgcggcggtgacaggagcgcgaccgacacgcacgggcccctcgccccctctcgcctcccgtccgctcgccagctcccctcagccgaggctgctccgcggcggccgcagcccgcgcgcggcccacactcgcctcccctcggcacccccggccccggagctgcctggaggcggccgcactcggggatcatggcccaagttgcaatgtccaccctccccgttgaagatgaggagtcctcggagagcaggatggtggtgacattcctcatgtcagctctcgagtccatgtgtaaagaactggccaagtccaaagccgaagtggcctgcattgcagtgtatgaaacagacgtgtttgtcgtcggaactgaaagaggacgtgcttttgtcaataccagaaaggattttcaaaaagattttgtaaaatattgtgttgaagaagaagaaaaagctgcagagatgcataaaatgaaatctacaacccaggcaaatcggatgagtgtagatgctgtagaaattgaaacactcagaaaaacagttgaggactatttctgcttttgctatgggaaagctttaggcaaatccacagtggtacctgtaccatatgagaagatgctgcgagaccagtcggctgtggtagtgcaggggcttccggaaggtgttgcctttaaacaccccgagaactatgatcttgcaaccctgaaatggattttggagaacaaagcagggatttcattcatcattaagagaccttttttagagccaaagaagcatgtaggtggtcgtgtgatggtaacagatgctgacaggtcaatactatctccaggtggaagttgtggccccatcaaagtgaaaactgaacccacagaagattctggcatttccctggaaatggcagctgtgacagtaaaggaagaatcagaagatcctgattattatcaatataacattcaagcaggcccttctgaaactgatgatgttgatgaaaaacagcccctatcgaagcctttgcaaggaagccaccattcttcagagggcaatgaaggcacagaaatggaagtaccagcagaagatgatgattattctccaccgtctaagagaccaaaggccaatgagctaccgcagccaccagtcccggaacccgccaatgctgggaagcggaaagtgagggagttcaacttcgagaaatggaatgctcgcatcactgatctacgtaaacaagttgaagaattgtttgaaaggaaatatgctcaagccataaaagccaaaggtccggtgacgatcccgtaccctcttttccagtctcatgttgaagatctttatgtagaaggacttcctgaaggaattccttttagaaggccatctacttacggaattcctcgcctggagaggatattacttgcaaaggaaaggattcgttttgtgattaagaaacatgagcttctgaattcaacacgtgaagatttacagcttgataagccagcttcaggagtaaaggaagaatggtatgccagaatcactaaattaagaaagatggtggatcagcttttctgcaaaaaatttgcggaagccttggggagcactgaagccaaggctgtaccgtaccaaaaatttgaggcacacccgaatgatctgtacgtggaaggactgccagaaaacattcctttccgaagtccctcatggtatggaatcccaaggctggaaaaaatcattcaagtgggcaatcgaattaaatttgttattaaaagaccagaacttctgactcacagtaccactgaagttactcagccaagaacgaatacaccagtcaaagaagattggaatgtcagaattaccaagctacggaagcaagtggaagagatttttaatttgaaatttgcttagatttgttgacagcggtttcctggagtgctgtcttgagaacgattctgaggaggctcagcaagaaagagtgtttcagttgattgggtgtgtctgtcatggagaaggaactcaagctcttggactcaccgaggcagtaaaagtaccatatcctgtgtttgaatcaaacccggagttcttgtatgtggaaggcttgccagaggggattcccttccgaagccctacctggtttggaattccacgacttgaaaggatcgtccgcgggagtaataaaatcaagttcgttgttaaaaaacctgaactagttatttcctacttgcctcctgggatggctagtaaaataaacactaaagctttgcagtcccccaaaagaccacgaagtcctgggagtaattcaaaggttcctgaaattgaggtcaccgtggaaggccctaataacaacaatcctcaaacctcagctgttcgaaccccgacccagactaacggttctaacgttcccttcaagccacgagggagagagttttcctttgaggcctggaatgccaaaatcacggacctaaaacagaaagttgaaaatctcttcaatgagaaatgtggggaagctcttggccttaaacaagctgtgaaggtgccgttcgcgttatttgagtctttcccggaagacttttatgtggaaggcttacctgagggtgtgccattccgaagaccatcgacttttggcattccgaggctggagaagatactcagaaacaaagccaaaattaagttcatcattaaaaagcccgaaatgtttgagacggcgattaaggagagcacctcctctaagagccctcccagaaaaataaattcatcacccaatgttaatactactgcatcaggtgttgaagaccttaacatcattcaggtgacaattccagatgatgataatgaaagactctcgaaagttgaaaaagctagacagctaagagaacaagtgaatgacctctttagtcggaaatttggtgaagctattggtatgggttttcctgtgaaagttccctacaggaaaatcacaattaaccctggctgtgtggtggttgatggcatgcccccgggggtgtccttcaaagcccccagctacctggaaatcagctccatgagaaggatcttagactctgccgagtttatcaaattcacggtcattagaccatttccaggacttgtgattaataaccagctggttgatcagagtgagtcagaaggccccgtgatacaagaatcagctgaaccaagccagttggaagttccagccacagaagaaataaaagagactgatggaagctctcagatcaagcaagaaccagaccccacgtggtagacctcttccctcctaggcttaaagtatcagtggttgagaagagcttttcggacctgttactaccccaagctgtagccttgagttacggtgtttattttccaatcaagtgaagatatctcctacttctcctactggaacatctcagcttctgcagtgaagaaaaattcctgtgatagttcagttctttagtttttctatttgaaaaaaaaaaatcatttaaatgatcctttgttcacggctctccttaatgactgagtgaacagttcctatctgtatatttgactaaaccttttcctaagctatctctcatggttcctatgtttttttatcataattaaaagcaaaaccatctggatcacctaacagtcagaggtcagtatctcagcgtgtgaattatagaggaaatacagagagaacctcttccacttttacttttcgtccaaataaaatgcatggtgtaccagaagttgaagatcgggttgaggattggggctagctcgatgacactaaggccccaacatcgcgggacctgctgtggcgcggattcttaggaacgctgttctagccggccccctctccaggggtcgccgtggccggcattatttcctagttcttcttgtaaccctgaggtgccagcgcggggagtgaggaggggtcagggggctaaggatgcaacctctgacgttctgcgccttcctaggagagtcttacatgtgttgagatttcacaagcaatgcgagttgtaaaataccagctctacaagaagctaggctctgtgacggcatagttttcagtagctttatcacaatattcacaatggagaattatatgacatggtagcagaaataggcccttttatgtgttgcttctattttacctcaaattgtagatatagggtaatcaataaaatccatccatgcctttcacacactaagt

SEQ ID NO: 4311 - protein, 563 aa, Homo sapiens; identical to SEQ ID NO: 4097

SEQ ID NO: 4312 - DNA, 4953 bp, Homo sapiens
aaaaaaaaaaaaaaaaaaaaaaaaaaaagaaaaaagaaaaaaaaaaggaggaggaggaggagggtgagagagaagctgggagagcagagaaaaggggccaccggtcgcccccccgcttccccgcacgcgctctccagccgcggccgcccgcctgccgcggtcaccccggcctctgcctctgtcccccagtgatcggatcaaggcgctgagcgaggccctgcctgcggggcggccatgcggcggtgacaggagcgcgaccgacacgcacgggcccctcgccccctctcgcctcccgtccgctcgccagctcccctcagccgaggctgctccgcggcggccgcagcccgcgcgcggcccacactcgcctccccgttgaagatgaggagtcctcggagagcaggatggtggtgacattcctcatgtcagctctcgagtccatgtgtaaagaactggccaagtccaaagccgaagtggcctgcattgcagtgtatgaaacagacgtgtttgtcgtcggaactgaaagaggacgtgcttttgtcaataccagaaaggattttcaaaaagattttgtaaaatattgtgttgaagaagaagaaaaagctgcagagatgcataaaatgaaatctacaacccaggcaaatcggatgagtgtagatgctgtagaaattgaaacactcagaaaaacagttgaggactatttctgcttttgctatgggaaagctttaggcaaatccacagtggtacctgtaccatatgagaagatgctgcgagaccagtcggctgtggtagtgcaggggcttccggaaggtgttgcctttaaacaccccgagaactatgatcttgcaaccctgaaatggattttggagaacaaagcagggatttcattcatcattaagagaccttttttagagccaaagaagcatgtaggtggtcgtgtgatggtaacagatgctgacaggtcaatactatctccaggtggaagttgtggccccatcaaagtgaaaactgaacccacagaagattctggcatttccctggaaatggcagctgtgacagtaaaggaagaatcagaagatcctgattattatcaatataacattcaaggaagccaccattcttcagagggcaatgaaggcacagaaatggaagtaccagcagaagatgatgattattctccaccgtctaagagaccaaaggccaatgagctaccgcagccaccagtcccggaacccgccaatgctgggaagcggaaagtgagggagttcaacttcgagaaatggaatgctcgcatcactgatctacgtaaacaagttgaagaattgtttgaaaggaaatatgctcaagccataaaagccaaaggtccggtgacgatcccgtaccctcttttccagtctcatgttgaagatctttatgtagaaggacttcctgaaggaattccttttagaaggccatctacttacggaattcctcgcctggagaggatattacttgcaaaggaaaggattcgttttgtgattaagaaacatgagcttctgaattcaacacgtgaagatttacagcttgataagccagcttcaggagtaaaggaagaatggtatgccagaatcactaaattaagaaagatggtggatcagcttttctgcaaaaaatttgcggaagccttggggagcactgaagccaaggctgtaccgtaccaaaaatttgaggcacacccgaatgatctgtacgtggaaggactgccagaaaacattcctttccgaagtccctcatggtatggaatcccaaggctggaaaaaatcattcaagtgggcaatcgaattaaatttgttattaaaagaccagaacttctgactcacagtaccactgaagttactcagccaagaacgaatacaccagtcaaagaagattggaatgtcagaattaccaagctacggaagcaagtggaagagatttttaatttgaaatttgctcaagctcttggactcaccgaggcagtaaaagtaccatatcctgtgtttgaatcaaacccggagttcttgaaaggatcgtccgcgggagtaataaaatcaagttcgttgttaaaaaacctgaactagttatttcctacttgcctcctgggatggctagtaaaataaacactaaagctttgcagtcccccaaaagaccacgaagtcctgggagtaattcaaaggttcctgaaattgaggtcaccgtggaaggccctaataacaacaatcctcaaacctcagctgttcgaaccccgacccagactaacggttctaacgttcccttcaagccacgagggagagagttttcctttgaggcctggaatgccaaaatcacggacctaaaacagaaagttgaaaatctcttcaatgagaaatgtggggaagctcttggccttaaacaagctgtgaaggtgccgttcgcgttatttgagtctttcccggaagacttttatgtggaaggcttacctgagggtgtgccattccgaagaccatcgacttttggcattccgaggctggagaagatactcagaaacaaagccaaaattaagttcatcattaaaaagcccgaaatgtttgagacggcgattaaggagagcacctcctctaagagccctcccagaaaaataaattcatcacccaatgttaatactactgcatcaggtgttgaagaccttaacatcattcaggtgacaattccagatgatgataatgaaagactctcgaaagttgaaaaagctagacagctaagagaacaagtgaatgacctctttagtcggaaatttggtgaagctattggtatgggttttcctgtgaaagttccctacaggaaaatcacaattaaccctggctgtgtggtggttgatggcatgcccccgggggtgtccttcaaagcccccagctacctggaaatcagctccatgagaaggatcttagactctgccgagtttatcaaattcacggtcattagaccatttccaggacttgtgattaataaccagctggttgatcagagtgagtcagaaggccccgtgatacaagaatcagctgaaccaagccagttggaagttccagccacagaaggtaaaaggacctcttccctcctagggtaaatcagcttctgtgtcagggatgctgtgtggtgtccatctgaaccccctgcatacgcgtagctaatgtgatctccccactttcacataagatggtggccctgccttcagggaatgtgggagccaggtgggagccttcccggatatttaagctagaagattctacagggagattctccttggatcaatatatgtctctcagtcaaagatgtaaaagcacttttgccttaaaaagaatgttctgtttctaaatagagtcaacgttgtcctcctcattggaattcactatgagtcagaatcattagactgacttttttttttccatagtaatagtattttgcagagtctcacagagctgcagatcttttgttcatcttgcagagttaacaagtctgatcctgttagtccagatttcttaaatttggccaagttataataggagcagtagcttgagacccgaagtcaggaaactttgacaatggatttttttttttaatccagagacttgtactggaatttgccttaccctgtcagctcatggacttaaggtttcatcccgctttatgagtgcttctgaatccaagtcattgttacctgaatttgcaaattaagttgtgatattcgtgactgttaaattcctgtaattagattaacctctttgcttgcttgtttgttttctctcctattttagcttaaagtatcagtggttgagaagagcttttcggacctgttactaccccaagctgtgtaatatacttgtataacagaaataccttctatacaaacctttttttctacttttagatagaaatgtctactttttcagcagttctgtgaattaaagagcagagtgactgtgggtctggaatggctggtgtacttgggaatgtactatcaggattttacagcaatgctgggaaatgacagggaaaatgacaggaatgaatctcaccagattttttatgtactcagcagagccttgagttacggtgtttattttccaatcaagtgaagatatctcctacttctcctactggaacatctcagcttctgcagtgaagaaaaattcctgtgatagttcagttctttagtttttctatttgaaaaaaaaaaatcatttaaatgatcctttgttcacggctctccttaatgactgagtgaacagttcctatctgtatatttgactaaaccttttcctaagctatctctcatggttcctatgtttttttatcataattaaaagcaaaaccatctggatcacctaacagtcagaggtcagtatctcagcgtgtgaattatagaggaaatacagagagaacctcttccacttttacttttcgtccaaataaaatgcatggtgtaccagaagttgaagatcgggttgaggattggggctagctcgatgacactaaggccccaacatcgcgggacctgctgtggcgcggattcttaggaacgctgttctagccggccccctctccaggggtcgccgtggccggcattatttcctagttcttcttgtaaccctgaggtgccagcgcggggagtgaggaggggtcagggggctaaggatgcaacctctgacgttctgcgccttcctaggagagtcttacatgtgttgagatttcacaagcaatgcgagttgtaaaataccagctctacaagaagctaggctctgtgacggcatagttttcagtagctttatcacaatattcacaatggagaattatatgacatggtagcagaaataggcccttttatgtgttgcttctattttacctcaaattgtagatatagggtaatcaataaaatccatccatgcctttcacacactaagt

SEQ ID NO: 4313 - protein, 564 aa, Homo sapiens; identical to SEQ ID NO: 4023

SEQ ID NO: 4314 - DNA, 4298 bp, Homo sapiens
aaaaaaaaaaaaaaaaaaaaaaaaaaaagaaaaaagaaaaaaaaaaggaggaggaggaggagggtgagagagaagctgggagagcagagaaaaggggccaccggtcgcccccccgcttccccgcacgcgctctccagccgcggccgcccgcctgccgcggtcaccccggcctctgcctctgtcccccagtgatcggatcaaggcgctgagcgaggccctgcctgcggggcggccatgcggcggtgacaggagcgcgaccgacacgcacgggcccctcgccccctctcgcctcccgtccgctcgccagctcccctcagccgaggctgctccgcggcggccgcagcccgcgcgcggcccacactcgcctcccctcggcacccccggccccggagctgcctggaggcggccgcactcggggatcatggcccaagttgcaatgtccaccctccccgttgaagatgaggagtcctcggagagcaggatggtggtgacattcctcatgtcagctctcgagtccatgtgtaaagaactggccaagtccaaagccgaagtggcctgcattgcagtgtatgaaacagacgtgtttgtcgtcggaactgaaagaggacgtgcttttgtcaataccagaaaggattttcaaaaagattttgtaaaatattgtgttgaagaagaagaaaaagctgcagagatgcataaaatgaaatctacaacccaggcaaatcggatgagtgtagatgctgtagaaattgaaacactcagaaaaacagttgaggactatttctgcttttgctatgggaaagctttaggcaaatccacagtggtacctgtaccatatgagaagatgctgcgagaccagtcggctgtggtagtgcaggggcttccggaaggtgttgcctttaaacaccccgagaactatgatcttgcaaccctgaaatggattttggagaacaaagcagggatttcattcatcattaagagaccttttttagagccaaagaagcatgtaggtggtcgtgtgatggtaacagatgctgacaggtcaatactatctccaggtggaagttgtggccccatcaaagtgaaaactgaacccacagaagattctggcatttccctggaaatggcagctgtgacagtaaaggaagaatcagaagatcctgattattatcaatataacattcaagcaggcccttctgaaactgatgatgttgatgaaaaacagcccctatcgaagcctttgcaaggaagccaccattcttcagagggcaatgaaggcacagaaatggaagtaccagcagaagattctactcaacatgtcccttcagaaacaagtgaggaccctgaagttgaggtgactattgaagatgatgattattctccaccgtctaagagaccaaaggccaatgagctaccgcagccaccagtcccggaacccgccaatgctgggaagcggaaagtgagggagttcaacttcgagaaatggaatgctcgcatcactgatctacgtaaacaagttgaagaattgtttgaaaggaaatatgctcaagccataaaagccaaaggtccggtgacgatcccgtaccctcttttccagtctcatgttgaagatctttatgtagaaggacttcctgaaggaattccttttagaaggccatctacttacggaattcctcgcctggagaggatattacttgcaaaggaaaggattcgttttgtgattaagaaacatgagcttctgaattcaacacgtgaagatttacagcttgataagccagcttcaggagtaaaggaagaatggtatgccagaatcactaaattaagaaagatggtggatcagcttttctgcaaaaaatttgcggaagccttggggagcactgaagccaaggctgtaccgtaccaaaaatttgaggcacacccgaatgatctgtacgtggaaggactgccagaaaacattcctttccgaagtccctcatggtatggaatcccaaggctggaaaaaatcattcaagtgggcaatcgaattaaatttgttattaaaagaccagaacttctgactcacagtaccactgaagttactcagccaagaacgaatacaccagtcaaagaagattggaatgtcagaattaccaagctacggaagcaagtggaagagatttttaatttgaaatttgctcaagctcttggactcaccgaggcagtaaaagtaccatatcctgtgtttgaatcaaacccggagttcttgtatgtggaaggcttgccagaggggattcccttccgaagccctacctggtttggaattccacgacttgaaaggatcgtccgcgggagtaataaaatcaagttcgttgttaaaaaacctgaactagttatttcctacttgcctcctgggatggctagtaaaataaacactaaagctttgcagtcccccaaaagaccacgaagtcctgggagtaattcaaaggttcctgaaattgaggtcaccgtggaaggccctaataacaacaatcctcaaacctcagctgttcgaaccccgacccagactaacggttctaacgttcccttcaagccacgagggagagagttttcctttgaggcctggaatgccaaaatcacggacctaaaacagaaagttgaaaatctcttcaatgagaaatgtggggaagctcttggccttaaacaagctgtgaaggtgccgttcgcgttatttgagtctttcccggaagacttttatgtggaaggcttacctgagggtgtgccattccgaagaccatcgacttttggcattccgaggctggagaagatactcagaaacaaagccaaaattaagttcatcattaaaaagcccgaaatgtttgagacggcgattaaggagagcacctcctctaagagccctcccagaaaaataaattcatcacccaatgttaatactactgcatcaggtgttgaagaccttaacatcattcaggtgacaattccagatgatgataatgaaagactctcgaaagttgaaaaagctagacagctaagagaacaagtgaatgacctctttagtcggaaatttggtgaagctattggtatgggttttcctgtgaaagttccctacaggaaaatcacaattaaccctggctgtgtggtggttgatggcatgcccccgggggtgtccttcaaagcccccagctacctggaaatcagctccatgagaaggatcttagactctgccgagtttatcaaattcacggtcattagaccatttccaggacttgtgattaataaccagctggttgatcagagtgagtcagaaggccccgtgatacaagaatcagctgaaccaagccagttggaagttccagccacagaagaaataaaagagactgatggaagctctcagatcaagcaagaaccagaccccacgtggtagacctcttccctcctaggagccttgagttacggtgtttattttccaatcaagtgaagatatctcctacttctcctactggaacatctcagcttctgcagtgaagaaaaattcctgtgatagttcagttctttagtttttctatttgaaaaaaaaaaatcatttaaatgatcctttgttcacggctctccttaatgactgagtgaacagttcctatctgtatatttgactaaaccttttcctaagctatctctcatggttcctatgtttttttatcataattaaaagcaaaaccatctggatcacctaacagtcagaggtcagtatctcagcgtgtgaattatagaggaaatacagagagaacctcttccacttttacttttcgtccaaataaaatgcatggtgtaccagaagttgaagatcgggttgaggattggggctagctcgatgacactaaggccccaacatcgcgggacctgctgtggcgcggattcttaggaacgctgttctagccggccccctctccaggggtcgccgtggccggcattatttcctagttcttcttgtaaccctgaggtgccagcgcggggagtgaggaggggtcagggggctaaggatgcaacctctgacgttctgcgccttcctaggagagtcttacatgtgttgagatttcacaagcaatgcgagttgtaaaataccagctctacaagaagctaggctctgtgacggcatagttttcagtagctttatcacaatattcacaatggagaattatatgacatggtagcagaaataggcccttttatgtgttgcttctattttacctcaaattgtagatatagggtaatcaataaaatccatccatgcctttcacacactaagt

SEQ ID NO: 4315 - protein, 998 aa, Homo sapiens; identical to SEQ ID NO: 468

SEQ ID NO: 4316 - DNA, 4452 bp, Homo sapiens
aaaaaaaaaaaaaaaaaaaaaaaaaaaagaaaaaagaaaaaaaaaaggaggaggaggaggagggtgagagagaagctgggagagcagagaaaaggggccaccggtcgcccccccgcttccccgcacgcgctctccagccgcggccgcccgcctgccgcggtcaccccggcctctgcctctgtcccccagtgatcggatcaaggcgctgagcgaggccctgcctgcggggcggccatgcggcggtgacaggagcgcgaccgacacgcacgggcccctcgccccctctcgcctcccgtccgctcgccagctcccctcagccgaggctgctccgcggcggccgcagcccgcgcgcggcccacactcgcctcccctcggcacccccggccccggagctgcctggaggcggccgcactcggtgtaaagaactggccaagtccaaagccgaagtggcctgcattgcagtgtatgaaacagacgtgtttgtcgtcggaactgaaagaggacgtgcttttgtcaataccagaaaggattttcaaaaagattttgtaaaatattgtgttgaagaagaagaaaaagctgcagagatgcataaaatgaaatctacaacccaggcaaatcggatgagtgtagatgctgtagaaattgaaacactcagaaaaacagttgaggactatttctgcttttgctatgggaaagctttaggcaaatccacagtggtacctgtaccatatgagaagatgctgcgagaccagtcggctgtggtagtgcaggggcttccggaaggtgttgcctttaaacaccccgagaactatgatcttgcaaccctgaaatggattttggagaacaaagcagggatttcattcatcattaagagaccttttttagagccaaagaagcatgtaggtggtcgtgtgatggtaacagatgctgacaggtcaatactatctccaggtggaagttgtggccccatcaaagtgaaaactgaacccacagaagattctggaagccaccattcttcagagggcaatgaaggcacagaaatggaagtaccagcagaagattctactcaacatgtcccttcagaaacaagtgaggaccctgaagttgaggtgactattgaagatgatgattattctccaccgtctaagagaccaaaggccaatgagctaccgcagccaccagtcccggaacccgccaatgctgggaagcggaaagtgagggagttcaacttcgagaaatggaatgctcgcatcactgatctacgtaaacaagttgaagaattgtttgaaaggaaatatgctcaagccataaaagccaaaggtccggtgacgatcccgtaccctcttttccagtctcatgttgaagatctttatgtagaaggacttcctgaaggaattccttttagaaggccatctacttacggaattcctcgcctggagaggatattacttgcaaaggaaaggattcgttttgtgattaagaaacatgagcttctgaattcaacacgtgaagatttacagcttgataagccagcttcaggagtaaaggaagaatggtatgccagaatcactaaattaagaaagatggtggatcagcttttctgcaaaaaatttgcggaagccttggggagcactgaagccaaggctgtaccgtaccaaaaatttgaggcacacccgaatgatctgtacgtggaaggactgccagaaaacattcctttccgaagtccctcatggtatggaatcccaaggctggaaaaaatcattcaagtgggcaatcgaattaaatttgttattaaaagaccagaacttctgactcacagtaccactgaagttactcagccaagaacgaatacaccagtcaaagaagattggaatgtcagaattaccaagctacggaagcaagtggaagagatttttaatttgaaatttgcttagatttgttgacagcggtttcctggagtgctgtcttgagaacgattctgaggaggctcagcaagaaagagtgtttcagttgattgggtgtgtctgtcatggagaaggaactcaagctcttggactcaccgaggcagtaaaagtaccatatcctgtgtttgaatcaaacccggagttcttgtatgtggaaggcttgccagaggggattcccttccgaagccctacctggtttggaattccacgacttgaaaggatcgtccgcgggagtaataaaatcaagttcgttgttaaaaaacctgaactagttatttcctacttgcctcctgggatggctagtaaaataaacactaaagctttgcagtcccccaaaagaccacgaagtcctgggagtaattcaaaggttcctgaaattgaggtcaccgtggaaggccctaataacaacaatcctcaaacctcagctgttcgaaccccgacccagactaacggttctaacgttcccttcaagccacgagggagagagttttcctttgaggcctggaatgccaaaatcacggacctaaaacagaaagttgaaaatctcttcaatgagaaatgtggggaagctcttggccttaaacaagctgtgaaggtgccgttcgcgttatttgagtctttcccggaagacttttatgtggaaggcttacctgagggtgtgccattccgaagaccatcgacttttggcattccgaggctggagaagatactcagaaacaaagccaaaattaagttcatcattaaaaagcccgaaatgtttgagacggcgattaaggagagcacctcctctaagagccctcccagaaaaataaattcatcacccaatgttaatactactgcatcaggtgttgaagaccttaacatcattcaggtgacaattccagatgatgataatgaaagactctcgaaagttgaaaaagctagacagctaagagaacaagtgaatgacctctttagtcggaaatttggtgaagctattggtatgggttttcctgtgaaagttccctacaggaaaatcacaattaaccctggctgtgtggtggttgatggcatgcccccgggggtgtccttcaaagcccccagctacctggaaatcagctccatgagaaggatcttagactctgccgagtttatcaaattcacggtcattagaccatttccaggacttgtgattaataaccagctggttgatcagagtgagtcagaaggccccgtgatacaagaatcagctgaaccaagccagttggaagttccagccacagaagaaataaaagagactgatggaagctctcagatcaagcaagaaccagaccccacgtggtagacctcttccctcctaggcttaaagtatcagtggttgagaagagcttttcggacctgttactaccccaagctgtgtaatatacttgtataacagaaataccttctatacaaacctttttttctacttttagatagaaatgtctactttttcagcagttctgtgaattaaagagcagagtgactgtgggtctggaatggctggtgtacttgggaatgtactatcaggattttacagcaatgctgggaaatgacagggaaaatgacaggaatgaatctcaccagattttttatgtactcagcagagccttgagttacggtgtttattttccaatcaagtgaagatatctcctacttctcctactggaacatctcagcttctgcagtgaagaaaaattcctgtgatagttcagttctttagtttttctatttgaaaaaaaaaaatcatttaaatgatcctttgttcacggctctccttaatgactgagtgaacagttcctatctgtatatttgactaaaccttttcctaagctatctctcatggttcctatgtttttttatcataattaaaagcaaaaccatctggatcacctaacagtcagaggtcagtatctcagcgtgtgaattatagaggaaatacagagagaacctcttccacttttacttttcgtccaaataaaatgcatggtgtaccagaagttgaagatcgggttgaggattggggctagctcgatgacactaaggccccaacatcgcgggacctgctgtggcgcggattcttaggaacgctgttctagccggccccctctccaggggtcgccgtggccggcattatttcctagttcttcttgtaaccctgaggtgccagcgcggggagtgaggaggggtcagggggctaaggatgcaacctctgacgttctgcgccttcctaggagagtcttacatgtgttgagatttcacaagcaatgcgagttgtaaaataccagctctacaagaagctaggctctgtgacggcatagttttcagtagctttatcacaatattcacaatggagaattatatgacatggtagcagaaataggcccttttatgtgttgcttctattttacctcaaattgtagatatagggtaatcaataaaatccatccatgcctttcacacactaagt

SEQ ID NO: 4317 - protein, 449 aa, Homo sapiens; identical to SEQ ID NO: 4147

SEQ ID NO: 4318 - DNA, 4297 bp, Homo sapiens
aaaaaaaaaaaaaaaaaaaaaaaaaaaagaaaaaagaaaaaaaaaaggaggaggaggaggagggtgagagagaagctgggagagcagagaaaaggggccaccggtcgcccccccgcttccccgcacgcgctctccagccgcggccgcccgcctgccgcggtcaccccggcctctgcctctgtcccccagtgatcggatcaaggcgctgagcgaggccctgcctgcggggcggccatgcggcggtgacaggagcgcgaccgacacgcacgggcccctcgccccctctcgcctcccgtccgctcgccagctcccctcagccgaggctgctccgcggcggccgcagcccgcgcgcggcccacactcgcctccccgttgaagatgaggagtcctcggagagcaggatggtggtgacattcctcatgtcagctctcgagtccatgtgtaaagaactggccaagtccaaagccgaagtggcctgcattgcagtgtatgaaacagacgtgtttgtcgtcggaactgaaagaggacgtgcttttgtcaataccagaaaggattttcaaaaagattttgtaaaatattgtgttgaagaagaagaaaaagctgcagagatgcataaaatgaaatctacaacccaggcaaatcggatgagtgtagatgctgtagaaattgaaacactcagaaaaacagttgaggactatttctgcttttgctatgggaaagctttaggcaaatccacagtggtacctgtaccatatgagaagatgctgcgagaccagtcggctgtggtagtgcaggggcttccggaaggtgttgcctttaaacaccccgagaactatgatcttgcaaccctgaaatggattttggagaacaaagcagggatttcattcatcattaagagaccttttttagagccaaagaagcatgtaggtggtcgtgtgatggtaacagatgctgacaggtcaatactatctccaggtggaagttgtggccccatcaaagtgaaaactgaacccacagaagattctggaagccaccattcttcagagggcaatgaaggcacagaaatggaagtaccagcagaagattctactcaacatgtcccttcagaaacaagtgaggaccctgaagttgaggtgactattgaagatgatgattattctccaccgtctaagagaccaaaggccaatgagctaccgcagccaccagtcccggaacccgccaatgctgggaagcggaaagtgagggagttcaacttcgagaaatggaatgctcgcatcactgatctacgtaaacaagttgaagaattgtttgaaaggaaatatgctcaagccataaaagccaaaggtccggtgacgatcccgtaccctcttttccagtctcatgttgaagatctttatgtagaaggacttcctgaaggaattccttttagaaggccatctacttacggaattcctcgcctggagaggatattacttgcaaaggaaaggattcgttttgtgattaagaaacatgagcttctgaattcaacacgtgaagatttacagcttgataagccagcttcaggagtaaaggaagaatggtatgccagaatcactaaattaagaaagatggtggatcagcttttctgcaaaaaatttgcggaagccttggggagcactgaagccaaggctgtaccgtaccaaaaatttgaggcacacccgaatgatctgtacgtggaaggactgccagaaaacattcctttccgaagtccctcatggtatggaatcccaaggctggaaaaaatcattcaagtgggcaatcgaattaaatttgttattaaaagaccagaacttctgactcacagtaccactgaagttactcagccaagaacgaatacaccagtcaaagaagattggaatgtcagaattaccaagctacggaagcaagtggaagagatttttaatttgaaatttgctcaagctcttggactcaccgaggcagtaaaagtaccatatcctgtgtttgaatcaaacccggagttcttgaaaggatcgtccgcgggagtaataaaatcaagttcgttgttaaaaaacctgaactagttatttcctacttgcctcctgggatggctagtaaaataaacactaaagctttgcagtcccccaaaagaccacgaagtcctgggagtaattcaaaggttcctgaaattgaggtcaccgtggaaggccctaataacaacaatcctcaaacctcagctgttcgaaccccgacccagactaacggttctaacgttcccttcaagccacgagggagagagttttcctttgaggcctggaatgccaaaatcacggacctaaaacagaaagttgaaaatctcttcaatgagaaatgtggggaagctcttggccttaaacaagctgtgaaggtgccgttcgcgttatttgagtctttcccggaagacttttatgtggaaggcttacctgagggtgtgccattccgaagaccatcgacttttggcattccgaggctggagaagatactcagaaacaaagccaaaattaagttcatcattaaaaagcccgaaatgtttgagacggcgattaaggagagcacctcctctaagagccctcccagaaaaataaattcatcacccaatgttaatactactgcatcaggtgttgaagaccttaacatcattcaggtgacaattccagatgatgataatgaaagactctcgaaagttgaaaaagctagacagctaagagaacaagtgaatgacctctttagtcggaaatttggtgaagctattggtatgggttttcctgtgaaagttccctacaggaaaatcacaattaaccctggctgtgtggtggttgatggcatgcccccgggggtgtccttcaaagcccccagctacctggaaatcagctccatgagaaggatcttagactctgccgagtttatcaaattcacggtcattagaccatttccaggacttgtgattaataaccagctggttgatcagagtgagtcagaaggccccgtgatacaagaatcagctgaaccaagccagttggaagttccagccacagaagaaataaaagagactgatggaagctctcagatcaagcaagaaccagaccccacgtggtagacctcttccctcctaggcttaaagtatcagtggttgagaagagcttttcggacctgttactaccccaagctgtgtaatatacttgtataacagaaataccttctatacaaacctttttttctacttttagatagaaatgtctactttttcagcagttctgtgaattaaagagcagagtgactgtgggtctggaatggctggtgtacttgggaatgtactatcaggattttacagcaatgctgggaaatgacagggaaaatgacaggaatgaatctcaccagattttttatgtactcagcagagccttgagttacggtgtttattttccaatcaagtgaagatatctcctacttctcctactggaacatctcagcttctgcagtgaagaaaaattcctgtgatagttcagttctttagtttttctatttgaaaaaaaaaaatcatttaaatgatcctttgttcacggctctccttaatgactgagtgaacagttcctatctgtatatttgactaaaccttttcctaagctatctctcatggttcctatgtttttttatcataattaaaagcaaaaccatctggatcacctaacagtcagaggtcagtatctcagcgtgtgaattatagaggaaatacagagagaacctcttccacttttacttttcgtccaaataaaatgcatggtgtaccagaagttgaagatcgggttgaggattggggctagctcgatgacactaaggccccaacatcgcgggacctgctgtggcgcggattcttaggaacgctgttctagccggccccctctccaggggtcgccgtggccggcattatttcctagttcttcttgtaaccctgaggtgccagcgcggggagtgaggaggggtcagggggctaaggatgcaacctctgacgttctgcgccttcctaggagagtcttacatgtgttgagatttcacaagcaatgcgagttgtaaaataccagctctacaagaagctaggctctgtgacggcatagttttcagtagctttatcacaatattcacaatggagaattatatgacatggtagcagaaataggcccttttatgtgttgcttctattttacctcaaattgtagatatagggtaatcaataaaatccatccatgcctttcacacactaagt

SEQ ID NO: 4319 - protein, 559 aa, Homo sapiens; identical to SEQ ID NO: 4121

SEQ ID NO: 4320 - DNA, 3900 bp, Homo sapiens
aaaaaaaaaaaaaaaaaaaaaaaaaaaagaaaaaagaaaaaaaaaaggaggaggaggaggagggtgagagagaagctgggagagcagagaaaaggggccaccggtcgcccccccgcttccccgcacgcgctctccagccgcggccgcccgcctgccgcggtcaccccggcctctgcctctgtcccccagtgatcggatcaaggcgctgagcgaggccctgcctgcggggcggccatgcggcggtgacaggagcgcgaccgacacgcacgggcccctcgccccctctcgcctcccgtccgctcgccagctcccctcagccgaggctgctccgcggcggccgcagcccgcgcgcggcccacactcgcctcccctcggcacccccggccccggagctgcctggaggcggccgcactcggtgtaaagaactggccaagtccaaagccgaagtggcctgcattgcagtgtatgaaacagacgtgtttgtcgtcggaactgaaagaggacgtgcttttgtcaataccagaaaggattttcaaaaagattttgtaaaatattgtgttgaagaagaagaaaaagctgcagagatgcataaaatgaaatctacaacccaggcaaatcggatgagtgtagatgctgtagaaattgaaacactcagaaaaacagttgaggactatttctgcttttgctatgggaaagctttaggcaaatccacagtggtacctgtaccatatgagaagatgctgcgagaccagtcggctgtggtagtgcaggggcttccggaaggtgttgcctttaaacaccccgagaactatgatcttgcaaccctgaaatggattttggagaacaaagcagggatttcattcatcattaagagaccttttttagagccaaagaagcatgtaggtggtcgtgtgatggtaacagatgctgacaggtcaatactatctccaggtggaagttgtggccccatcaaagtgaaaactgaacccacagaagattctggaagccaccattcttcagagggcaatgaaggcacagaaatggaagtaccagcagaagattctactcaacatgtcccttcagaaacaagtgaggaccctgaagttgaggtgactattgaagatgatgattattctccaccgtctaagagaccaaaggccaatgagctaccgcagccaccagtcccggaacccgccaatgctgggaagcggaaagtgagggagttcaacttcgagaaatggaatgctcgcatcactgatctacgtaaacaagttgaagaattgtttgaaaggaaatatgctcaagccataaaagccaaaggtccggtgacgatcccgtaccctcttttccagtctcatgttgaagatctttatgtagaaggacttcctgaaggaattccttttagaaggccatctacttacggaattcctcgcctggagaggatattacttgcaaaggaaaggattcgttttgtgattaagaaacatgagcttctgaattcaacacgtgaagatttacagcttgataagccagcttcaggagtaaaggaagaatggtatgccagaatcactaaattaagaaagatggtggatcagcttttctgcaaaaaatttgcggaagccttggggagcactgaagccaaggctgtaccgtaccaaaaatttgaggcacacccgaatgatctgtacgtggaaggactgccagaaaacattcctttccgaagtccctcatggtatggaatcccaaggctggaaaaaatcattcaagtgggcaatcgaattaaatttgttattaaaagaccagaacttctgactcacagtaccactgaagttactcagccaagaacgaatacaccagtcaaagaagattggaatgtcagaattaccaagctacggaagcaagtggaagagatttttaatttgaaatttgcttagatttgttgacagcggtttcctggagtgctgtcttgagaacgattctgaggaggctcagcaagaaagagtgtttcagttgattgggtgtgtctgtcatggagaaggaactcaagctcttggactcaccgaggcagtaaaagtaccatatcctgtgtttgaatcaaacccggagttcttgtatgtggaaggcttgccagaggggattcccttccgaagccctacctggtttggaattccacgacttgaaaggatcgtccgcgggagtaataaaatcaagttcgttgttaaaaaacctgaactagttatttcctacttgcctcctgggatggctagtaaaataaacactaaagctttgcagtcccccaaaagaccacgaagtcctgggagtaattcaaaggttcctgaaattgaggtcaccgtggaaggccctaataacaacaatcctcaaacctcagctgttcgaaccccgacccagactaacggttctaacgttcccttcaagccacgagggagagagttttcctttgaggcctggaatgccaaaatcacggacctaaaacagaaagttgaaaatctcttcaatgagaaatgtggggaagctcttggccttaaacaagctgtgaaggtgccgttcgcgttatttgagtctttcccggaagacttttatgtggaaggcttacctgagggtgtgccattccgaagaccatcgacttttggcattccgaggctggagaagatactcagaaacaaagccaaaattaagttcatcattaaaaagcccgaaatgtttgagacggcgattaaggagagcacctcctctaagagccctcccagaaaaataaattcatcacccaatgttaatactactgcatcaggtgttgaagaccttaacatcattcaggtgacaattccagatgatgataatgaaagactctcgaaagttgaaaaagctagacagctaagagaacaagtgaatgacctctttagtcggaaatttggtgaagctattggtatgggttttcctgtgaaagttccctacaggaaaatcacaattaaccctggctgtgtggtggttgatggcatgcccccgggggtgtccttcaaagcccccagctacctggaaatcagctccatgagaaggatcttagactctgccgagtttatcaaattcacggtcattagaccatttccaggacttgtgattaataaccagctggttgatcagagtgagtcagaaggccccgtgatacaagaatcagctgaaccaagccagttggaagttccagccacagaagaaataaaagagactgatggaagctctcagatcaagcaagaaccagaccccacgtggtagacctcttccctcctaggcaaaaccatctggatcacctaacagtcagaggtcagtatctcagcgtgtgaattatagaggaaatacagagagaacctcttccacttttacttttcgtccaaataaaatgcatggtgtaccagaagttgaagatcgggttgaggattggggctagctcgatgacactaaggccccaacatcgcgggacctgctgtggcgcggattcttaggaacgctgttctagccggccccctctccaggggtcgccgtggccggcattatttcctagttcttcttgtaaccctgaggtgccagcgcggggagtgaggaggggtcagggggctaaggatgcaacctctgacgttctgcgccttcctaggagagtcttacatgtgttgagatttcacaagcaatgcgagttgtaaaataccagctctacaagaagctaggctctgtgacggcatagttttcagtagctttatcacaatattcacaatggagaattatatgacatggtagcagaaataggcccttttatgtgttgcttctattttacctcaaattgtagatatagggtaatcaataaaatccatccatgcctttcacacactaagt

SEQ ID NO: 4321 - protein, 449 aa, Homo sapiens; identical to SEQ ID NO: 4147

SEQ ID NO: 4322 - DNA, 3740 bp, Homo sapiens
aaaaaaaaaaaaaaaaaaaaaaaaaaaagaaaaaagaaaaaaaaaaggaggaggaggaggagggtgagagagaagctgggagagcagagaaaaggggccaccggtcgcccccccgcttccccgcacgcgctctccagccgcggccgcccgcctgccgcggtcaccccggcctctgcctctgtcccccagtgatcggatcaaggcgctgagcgaggccctgcctgcggggcggccatgcggcggtgacaggagcgcgaccgacacgcacgggcccctcgccccctctcgcctcccgtccgctcgccagctcccctcagccgaggctgctccgcggcggccgcagcccgcgcgcggcccacactcgcctccccgttgaagatgaggagtcctcggagagcaggatggtggtgacattcctcatgtcagctctcgagtccatgtgtaaagaactggccaagtccaaagccgaagtggcctgcattgcagtgtatgaaacagacgtgtttgtcgtcggaactgaaagaggacgtgcttttgtcaataccagaaaggattttcaaaaagattttgtaaaatattgtgttgaagaagaagaaaaagctgcagagatgcataaaatgaaatctacaacccaggcaaatcggatgagtgtagatgctgtagaaattgaaacactcagaaaaacagttgaggactatttctgcttttgctatgggaaagctttaggcaaatccacagtggtacctgtaccatatgagaagatgctgcgagaccagtcggctgtggtagtgcaggggcttccggaaggtgttgcctttaaacaccccgagaactatgatcttgcaaccctgaaatggattttggagaacaaagcagggatttcattcatcattaagagaccttttttagagccaaagaagcatgtaggtggtcgtgtgatggtaacagatgctgacaggtcaatactatctccaggtggaagttgtggccccatcaaagtgaaaactgaacccacagaagattctggaagccaccattcttcagagggcaatgaaggcacagaaatggaagtaccagcagaagattctactcaacatgtcccttcagaaacaagtgaggaccctgaagttgaggtgactattgaagatgatgattattctccaccgtctaagagaccaaaggccaatgagctaccgcagccaccagtcccggaacccgccaatgctgggaagcggaaagtgagggagttcaacttcgagaaatggaatgctcgcatcactgatctacgtaaacaagttgaagaattgtttgaaaggaaatatgctcaagccataaaagccaaaggtccggtgacgatcccgtaccctcttttccagtctcatgttgaagatctttatgtagaaggacttcctgaaggaattccttttagaaggccatctacttacggaattcctcgcctggagaggatattacttgcaaaggaaaggattcgttttgtgattaagaaacatgagcttctgaattcaacacgtgaagatttacagcttgataagccagcttcaggagtaaaggaagaatggtatgccagaatcactaaattaagaaagatggtggatcagcttttctgcaaaaaatttgcggaagccttggggagcactgaagccaaggctgtaccgtaccaaaaatttgaggcacacccgaatgatctgtacgtggaaggactgccagaaaacattcctttccgaagtccctcatggtatggaatcccaaggctggaaaaaatcattcaagtgggcaatcgaattaaatttgttattaaaagaccagaacttctgactcacagtaccactgaagttactcagccaagaacgaatacaccagctcaagctcttggactcaccgaggcagtaaaagtaccatatcctgtgtttgaatcaaacccggagttcttgtatgtggaaggcttgccagaggggattcccttccgaagccctacctggtttggaattccacgacttgaaaggatcgtccgcgggagtaataaaatcaagttcgttgttaaaaaacctgaactagttatttcctacttgcctcctgggatggctagtaaaataaacactaaagctttgcagtcccccaaaagaccacgaagtcctgggagtaattcaaaggttcctgaaattgaggtcaccgtggaaggccctaataacaacaatcctcaaacctcagctgttcgaaccccgacccagactaacggttctaacgttcccttcaagccacgagggagagagttttcctttgaggcctggaatgccaaaatcacggacctaaaacagaaagttgaaaatctcttcaatgagaaatgtggggaagctcttggccttaaacaagctgtgaaggtgccgttcgcgttatttgagtctttcccggaagacttttatgtggaaggcttacctgagggtgtgccattccgaagaccatcgacttttggcattccgaggctggagaagatactcagaaacaaagccaaaattaagttcatcattaaaaagcccgaaatgtttgagacggcgattaaggagagcacctcctctaagagccctcccagaaaaataaattcatcacccaatgttaatactactgcatcaggtgttgaagaccttaacatcattcaggtgacaattccagatgatgataatgaaagactctcgaaagttgaaaaagctagacagctaagagaacaagtgaatgacctctttagtcggaaatttggtgaagctattggtatgggttttcctgtgaaagttccctacaggaaaatcacaattaaccctggctgtgtggtggttgatggcatgcccccgggggtgtccttcaaagcccccagctacctggaaatcagctccatgagaaggatcttagactctgccgagtttatcaaattcacggtcattagaccatttccaggacttgtgattaataaccagctggttgatcagagtgagtcagaaggccccgtgatacaagaatcagctgaaccaagccagttggaagttccagccacagaagaaataaaagagactgatggaagctctcagatcaagcaagaaccagaccccacgtggtagacctcttccctcctaggcaaaaccatctggatcacctaacagtcagaggtcagtatctcagcgtgtgaattatagaggaaatacagagagaacctcttccacttttacttttcgtccaaataaaatgcatggtgtaccagaagttgaagatcgggttgaggattggggctagctcgatgacactaaggccccaacatcgcgggacctgctgtggcgcggattcttaggaacgctgttctagccggccccctctccaggggtcgccgtggccggcattatttcctagttcttcttgtaaccctgaggtgccagcgcggggagtgaggaggggtcagggggctaaggatgcaacctctgacgttctgcgccttcctaggagagtcttacatgtgttgagatttcacaagcaatgcgagttgtaaaataccagctctacaagaagctaggctctgtgacggcatagttttcagtagctttatcacaatattcacaatggagaattatatgacatggtagcagaaataggcccttttatgtgttgcttctattttacctcaaattgtagatatagggtaatcaataaaatccatccatgcctttcacacactaagt

SEQ ID NO: 4323 - protein, 908 aa, Homo sapiens; identical to SEQ ID NO: 4227

SEQ ID NO: 4324 - DNA, 7107 bp, Homo sapiens
aaaaaaaaaaaaaaaaaaaaaaaaaaaagaaaaaagaaaaaaaaaaggaggaggaggaggagggtgagagagaagctgggagagcagagaaaaggggccaccggtcgcccccccgcttccccgcacgcgctctccagccgcggccgcccgcctgccgcggtcaccccggcctctgcctctgtcccccagtgatcggatcaaggcgctgagcgaggccctgcctgcggggcggccatgcggcggtgacaggagcgcgaccgacacgcacgggcccctcgccccctctcgcctcccgtccgctcgccagctcccctcagccgaggctgctccgcggcggccgcagcccgcgcgcggcccacactcgcctcccctcggcacccccggccccggagctgcctggaggcggccgcactcggtgtaaagaactggccaagtccaaagccgaagtggcctgcattgcagtgtatgaaacagacgtgtttgtcgtcggaactgaaagaggacgtgcttttgtcaataccagaaaggattttcaaaaagattttgtaaaatattgtgttgaagaagaagaaaaagctgcagagatgcataaaatgaaatctacaacccaggcaaatcggatgagtgtagatgctgtagaaattgaaacactcagaaaaacagttgaggactatttctgcttttgctatgggaaagctttaggcaaatccacagtggtacctgtaccatatgagaagatgctgcgagaccagtcggctgtggtagtgcaggggcttccggaaggtgttgcctttaaacaccccgagaactatgatcttgcaaccctgaaatggattttggagaacaaagcagggatttcattcatcattaagagaccttttttagagccaaagaagcatgtaggtggtcgtgtgatggtaacagatgctgacaggtcaatactatctccaggtggaagttgtggccccatcaaagtgaaaactgaacccacagaagattctggcatttccctggaaatggcagctgtgacagtaaaggaagaatcagaagatcctgattattatcaatataacattcaaggaagccaccattcttcagagggcaatgaaggcacagaaatggaagtaccagcagaagattctactcaacatgtcccttcagaaacaagtgaggaccctgaagttgaggtgactattgaagatgatgattattctccaccgtctaagagaccaaaggccaatgagctaccgcagccaccagtcccggaacccgccaatgctgggaagcggaaagtgagggagttcaacttcgagaaatggaatgctcgcatcactgatctacgtaaacaagttgaagaattgtttgaaaggaaatatgctcaagccataaaagccaaaggtccggtgacgatcccgtaccctcttttccagtctcatgttgaagatctttatgtagaaggacttcctgaaggaattccttttagaaggccatctacttacggaattcctcgcctggagaggatattacttgcaaaggaaaggattcgttttgtgattaagaaacatgagcttctgaattcaacacgtgaagatttacagcttgataagccagcttcaggagtaaaggaagaatggtatgccagaatcactaaattaagaaagatggtggatcagcttttctgcaaaaaatttgcggaagccttggggagcactgaagccaaggctgtaccgtaccaaaaatttgaggcacacccgaatgatctgtacgtggaaggactgccagaaaacattcctttccgaagtccctcatggtatggaatcccaaggctggaaaaaatcattcaagtgggcaatcgaattaaatttgttattaaaagaccagaacttctgactcacagtaccactgaagttactcagccaagaacgaatacaccagctcaagctcttggactcaccgaggcagtaaaagtaccatatcctgtgtttgaatcaaacccggagttcttgtatgtggaaggcttgccagaggggattcccttccgaagccctacctggtttggaattccacgacttgaaaggatcgtccgcgggagtaataaaatcaagttcgttgttaaaaaacctgaactagttatttcctacttgcctcctgggatggctagtaaaataaacactaaagctttgcagtcccccaaaagaccacgaagtcctgggagtaattcaaaggttcctgaaattgaggtcaccgtggaaggccctaataacaacaatcctcaaacctcagctgttcgaaccccgacccagactaacggttctaacgttcccttcaagccacgagggagagagttttcctttgaggcctggaatgccaaaatcacggacctaaaacagaaagttgaaaatctcttcaatgagaaatgtggggaagctcttggccttaaacaagctgtgaaggtgccgttcgcgttatttgagtctttcccggaagacttttatgtggaaggcttacctgagggtgtgccattccgaagaccatcgacttttggcattccgaggctggagaagatactcagaaacaaagccaaaattaagttcatcattaaaaagcccgaaatgtttgagacggcgattaaggagagcacctcctctaagagccctcccagaaaaataaattcatcacccaatgttaatactactgcatcaggtgttgaagaccttaacatcattcaggtgacaattccagatgatgataatgaaagactctcgaaagttgaaaaagctagacagctaagagaacaagtgaatgacctctttagtcggaaatttggtgaagctattggtatgggttttcctgtgaaagttccctacaggaaaatcacaattaaccctggctgtgtggtggttgatggcatgcccccgggggtgtccttcaaagcccccagctacctggaaatcagctccatgagaaggatcttagactctgccgagtttatcaaattcacggtcattaggtaagtgagagtttcctgcttagtcacaggagcgaatctggagctcatgaggctgactcttctaaaatgcagccacaggtagtcatcgaatccggcttcctatgctgtgcaatcaacaaatcaaaataacttgtgtcatcattagaatgtcagatgtgcttctacgaactaagctgactcttttaattctttggcaaagggttggcaaactaggactgtttgccaaattcaggctgcctcctatttttagagtcttcctgaaacacagctacacccgtattatccatggctgctttcctgtcacagtgagtaagtagctgggactgagaaggcatggcctccaaagtctaaaatatttactctctagcactttgtagaaaaaccttagctaggcacagtggctaacgcctgtaatcccagcattttgggaggccaaggcaggcagatcacctgaggtcaggagttccagaccagcctggccaacatggtgaaatcccatctctacaaaaataaaacagttagctgggcatgatggcgggtgcctgtaatcccagctactcgggaggctgaggcaggatagtcgcttgaacccaggaggtggaggttgcaatgagccaagatcatgccactgcactccagcctggacgacagagtgagactccatcacaagaaaaaaagaactttgtcaacctctgtcttagggcgccttgtcacaggcttcgggtcagacggattcaaccttgcatcagccatttgttagccaggtcactctgttctttgtctgtaaatgagattgatcgttgttcccactgagagtgtcagctccttcccgtagagcaggcatgatgattgtactcacctctgacaccattgtgagtgccacattccttcccacgtccttgtcactgtaagagatgcccacctgagcaccaaccccaggttatcttcccctttgtcttccagccccccagaaacagctacgactcaacctacccaatcatttcatcatcagattgccactgtctctagttcaggtctcttgggactggcactcagaaatctcataataaatcctcttgaggcttctcatacactcgtcttcttccaatcttctttccctcaaaatctcatattttggttccacttcacccaccgtcattctccatatcactcccaggagttaggcaaaaagccccttccgttcttccgtatgttaaacttagaatcactctgttccctgctctgcgtttctattttttgtttttcctccatttactagtagcttaacactttctaacagtgttcttattattgatacgtatctatctcttccataagcttataaggtcacggataatacttctcattgtagtacgtaaatgacgtgggctagatatgagttgaataaacagttatacctgtaaattcttacagagtgaaaataaattgttatactttacaatttgtttctctctttagaccatttccaggacttgtgattaataaccgtgagtattttgtgaagtgttttgtttttgttttttcctggggtctgacgtgtgtgcgtgtgagtgtgtatacatgcttaacgtatatcacgttacttcacctatgtcagtaaccaggccaaatacttgttttagccctcagtaaaaacaccaggcacttcctagttgtaaaattattcaagcttcttaacttcctatcctcgatgcacttaatcataaaatggtaataatagcaccgattttgggggagtcgttccagtagatggaaagcatctggaacaggtgtcagcaagctcctgccgacgtgtatgcataaagttttattgaaaccaccatcgtgtccatttgtttatggcagaactgagagatggcagcagcaagtgtgtgcctgcaaaacctaaaatatttactaattggctctgcaagaaaagagtttgcatccccctaacctagaacagtgtctagcctctagtatgtgtttagcctacagtatgtgctcagcgaatacaatctatatttattactgcttttatgactgttataattactgtgcttggatttcgttacaaagtaagtcacaatgtgcctgcttctgttagtatttcagcacagtgcctggcacacatggggctctcaaatattgctgagcgagtgaacaaatgtcctttcaattccttaacgttgatgtcattttcaatagtattttgagccaaacttaattttgcgagtgtgttttgttttcttaactttattattaaaaatgtataaaagtgaggccaggcgtggtggctcacgcctgtaatcccagcagtttgggaggctgaggcaggcggatcagttgaggttgggagttggagaccagcccgtccaacatggtgaaagcctgtctctactaaaaatacaaaaatcagctgggtgtggtggcgcgtgcctgtaatcccagctactcaggaggctgaggcaggagagttgcttgaatcctagaggtggaggttgcagtgagctgagatcgtgccattgcactccagcctgggcaacaagagcaaaactctgtcccaataaataaataaataaaatgttctcttttgttcctgttcttgtgcggtagtgtggtatagagttttatggtaattactgtgaattagtgattctgagggacatatcagaactctgaggtttgtttccttctcatcttgagggaaacagcaaatgtatgttaaaatgcttttccaagggaacaacacatccttacattatttaaaccaatctgcttcattttcagagctggttgatcagagtgagtcagaaggccccgtgatacaagaatcagctgaaccaagccagttggaagttccagccacagaagaaataaaagagactgatggaagctctcagatcaagcaagaaccagaccccacgtggtagacctcttccctcctaggcttaaagtatcagtggttgagaagagcttttcggacctgttactaccccaagctgtgtaatatacttgtataacagaaataccttctatacaaacctttttttctacttttagatagaaatgtctactttttcagcagttctgtgaattaaagagcagagtgactgtgggtctggaatggctggtgtacttgggaatgtactatcaggattttacagcaatgctgggaaatgacagggaaaatgacaggaatgaatctcaccagattttttatgtactcagcagagccttgagttacggtgtttattttccaatcaagtgaagatatctcctacttctcctactggaacatctcagcttctgcagtgaagaaaaattcctgtgatagttcagttctttagtttttctatttgaaaaaaaaaaatcatttaaatgatcctttgttcacggctctccttaatgactgagtgaacagttcctatctgtatatttgactaaaccttttcctaagctatctctcatggttcctatgtttttttatcataattaaaagcaaaaccatctggatcacctaacagtcagaggtcagtatctcagcgtgtgaattatagaggaaatacagagagaacctcttccacttttacttttcgtccaaataaaatgcatggtgtaccagaagttgaagatcgggttgaggattggggctagctcgatgacactaaggccccaacatcgcgggacctgctgtggcgcggattcttaggaacgctgttctagccggccccctctccaggggtcgccgtggccggcattatttcctagttcttcttgtaaccctgaggtgccagcgcggggagtgaggaggggtcagggggctaaggatgcaacctctgacgttctgcgccttcctaggagagtcttacatgtgttgagatttcacaagcaatgcgagttgtaaaataccagctctacaagaagctaggctctgtgacggcatagttttcagtagctttatcacaatattcacaatggagaattatatgacatggtagcagaaataggcccttttatgtgttgcttctattttacctcaaattgtagatatagggtaatcaataaaatccatccatgcctttcacacactaagt

SEQ ID NO: 4325 - protein, 809 aa, Homo sapiens; identical to SEQ ID NO: 4133

SEQ ID NO: 4326 - DNA, 4226 bp, Homo sapiens
aaaaaaaaaaaaaaaaaaaaaaaaaaaagaaaaaagaaaaaaaaaaggaggaggaggaggagggtgagagagaagctgggagagcagagaaaaggggccaccggtcgcccccccgcttccccgcacgcgctctccagccgcggccgcccgcctgccgcggtcaccccggcctctgcctctgtcccccagtgatcggatcaaggcgctgagcgaggccctgcctgcggggcggccatgcggcggtgacaggagcgcgaccgacacgcacgggcccctcgccccctctcgcctcccgtccgctcgccagctcccctcagccgaggctgctccgcggcggccgcagcccgcgcgcggcccacactcgcctcccctcggcacccccggccccggagctgcctggaggcggccgcactcggggatcatggcccaagttgcaatgtccaccctccccgttgaagatgaggagtcctcggagagcaggatggtggtgacattcctcatgtcagctctcgagtccatgtgtaaagaactggccaagtccaaagccgaagtggcctgcattgcagtgtatgaaacagacgtgtttgtcgtcggaactgaaagaggacgtgcttttgtcaataccagaaaggattttcaaaaagattttgtaaaatattgtgttgaagaagaagaaaaagctgcagagatgcataaaatgaaatctacaacccaggcaaatcggatgagtgtagatgctgtagaaattgaaacactcagaaaaacagttgaggactatttctgcttttgctatgggaaagctttaggcaaatccacagtggtacctgtaccatatgagaagatgctgcgagaccagtcggctgtggtagtgcaggggcttccggaaggtgttgcctttaaacaccccgagaactatgatcttgcaaccctgaaatggattttggagaacaaagcagggatttcattcatcattaagagaccttttttagagccaaagaagcatgtaggtggtcgtgtgatggtaacagatgctgacaggtcaatactatctccaggtggaagttgtggccccatcaaagtgaaaactgaacccacagaagattctggcatttccctggaaatggcagctgtgacagtaaaggaagaatcagaagatcctgattattatcaatataacattcaagcaggcccttctgaaactgatgatgttgatgaaaaacagcccctatcgaagcctttgcaaggaagccaccattcttcagagggcaatgaaggcacagaaatggaagtaccagcagaagattctactcaacatgtcccttcagaaacaagtgaggaccctgaagttgaggtgactattgaagatgatgattattctccaccgtctaagagaccaaaggccaatgagctaccgcagccaccagtcccggaacccgccaatgctgggaagcggaaagtgagggagttcaacttcgagaaatggaatgctcgcatcactgatctacgtaaacaagttgaagaattgtttgaaaggaaatatgctcaagccataaaagccaaaggtccggtgacgatcccgtaccctcttttccagtctcatgttgaagatctttatgtagaaggacttcctgaaggaattccttttagaaggccatctacttacggaattcctcgcctggagaggatattacttgcaaaggaaaggattcgttttgtgattaagaaacatgagcttctgaattcaacacgtgaagatttacagcttgataagccagcttcaggagtaaaggaagaatggtatgccagaatcactaaattaagaaagatggtggatcagcttttctgcaaaaaatttgcggaagccttggggagcactgaagccaaggctgtaccgtaccaaaaatttgaggcacacccgaatgatctgtacgtggaaggactgccagaaaacattcctttccgaagtccctcatggtatggaatcccaaggctggaaaaaatcattcaagtgggcaatcgaattaaatttgttattaaaagaccagaacttctgactcacagtaccactgaagttactcagccaagaacgaatacaccagctcaagctcttggactcaccgaggcagtaaaagtaccatatcctgtgtttgaatcaaacccggagttcttgtatgtggaaggcttgccagaggggattcccttccgaagccctacctggtttggaattccacgacttgaaaggatcgtccgcgggagtaataaaatcaagttcgttgttaaaaaacctgaactagttatttcctacttgcctcctgggatggctagtaaaataaacactaaagctttgcagtcccccaaaagaccacgaagtcctgggagtaattcaaaggttcctgaaattgaggtcaccgtggaaggccctaataacaacaatcctcaaacctcagctgttcgaaccccgacccagactaacggttctaacgttcccttcaagccacgagggagagagttttcctttgaggcctggaatgccaaaatcacggacctaaaacagaaagttgaaaatctcttcaatgagaaatgtggggaagctcttggccttaaacaagctgtgaaggtgccgttcgcgttatttgagtctttcccggaagacttttatgtggaaggcttacctgagggtgtgccattccgaagaccatcgacttttggcattccgaggctggagaagatactcagaaacaaagccaaaattaagttcatcattaaaaagcccgaaatgtttgagacggcgattaaggagagcacctcctctaagagccctcccagaaaaataaattcatcacccaatgttaatactactgcatcaggtgttgaagaccttaacatcattcaggtgacaattccagatgatgataatgaaagactctcgaaagttgaaaaagctagacagctaagagaacaagtgaatgacctctttagtcggaaatttggtgaagctattggtatgggttttcctgtgaaagttccctacaggaaaatcacaattaaccctggctgtgtggtggttgatggcatgcccccgggggtgtccttcaaagcccccagctacctggaaatcagctccatgagaaggatcttagactctgccgagtttatcaaattcacggtcattagaccatttccaggacttgtgattaataaccagctggttgatcagagtgagtcagaaggccccgtgatacaagaatcagctgaaccaagccagttggaagttccagccacagaagaaataaaagagactgatggaagctctcagatcaagcaagaaccagaccccacgtggtagacctcttccctcctaggagccttgagttacggtgtttattttccaatcaagtgaagatatctcctacttctcctactggaacatctcagcttctgcagtgaagaaaaattcctgtgatagttcagttctttagtttttctatttgaaaaaaaaaaatcatttaaatgatcctttgttcacggctctccttaatgactgagtgaacagttcctatctgtatatttgactaaaccttttcctaagctatctctcatggttcctatgtttttttatcataattaaaagcaaaaccatctggatcacctaacagtcagaggtcagtatctcagcgtgtgaattatagaggaaatacagagagaacctcttccacttttacttttcgtccaaataaaatgcatggtgtaccagaagttgaagatcgggttgaggattggggctagctcgatgacactaaggccccaacatcgcgggacctgctgtggcgcggattcttaggaacgctgttctagccggccccctctccaggggtcgccgtggccggcattatttcctagttcttcttgtaaccctgaggtgccagcgcggggagtgaggaggggtcagggggctaaggatgcaacctctgacgttctgcgccttcctaggagagtcttacatgtgttgagatttcacaagcaatgcgagttgtaaaataccagctctacaagaagctaggctctgtgacggcatagttttcagtagctttatcacaatattcacaatggagaattatatgacatggtagcagaaataggcccttttatgtgttgcttctattttacctcaaattgtagatatagggtaatcaataaaatccatccatgcctttcacacactaagt

SEQ ID NO: 4327 - protein, 974 aa, Homo sapiens; identical to SEQ ID NO: 4101

SEQ ID NO: 4328 - DNA, 5110 bp, Homo sapiens
aaaaaaaaaaaaaaaaaaaaaaaaaaaagaaaaaagaaaaaaaaaaggaggaggaggaggagggtgagagagaagctgggagagcagagaaaaggggccaccggtcgcccccccgcttccccgcacgcgctctccagccgcggccgcccgcctgccgcggtcaccccggcctctgcctctgtcccccagtgatcggatcaaggcgctgagcgaggccctgcctgcggggcggccatgcggcggtgacaggagcgcgaccgacacgcacgggcccctcgccccctctcgcctcccgtccgctcgccagctcccctcagccgaggctgctccgcggcggccgcagcccgcgcgcggcccacactcgcctcccctcggcacccccggccccggagctgcctggaggcggccgcactcggtgtaaagaactggccaagtccaaagccgaagtggcctgcattgcagtgtatgaaacagacgtgtttgtcgtcggaactgaaagaggacgtgcttttgtcaataccagaaaggattttcaaaaagattttgtaaaatattgtgttgaagaagaagaaaaagctgcagagatgcataaaatgaaatctacaacccaggcaaatcggatgagtgtagatgctgtagaaattgaaacactcagaaaaacagttgaggactatttctgcttttgctatgggaaagctttaggcaaatccacagtggtacctgtaccatatgagaagatgctgcgagaccagtcggctgtggtagtgcaggggcttccggaaggtgttgcctttaaacaccccgagaactatgatcttgcaaccctgaaatggattttggagaacaaagcagggatttcattcatcattaagagaccttttttagagccaaagaagcatgtaggtggtcgtgtgatggtaacagatgctgacaggtcaatactatctccaggtggaagttgtggccccatcaaagtgaaaactgaacccacagaagattctggcatttccctggaaatggcagctgtgacagtaaaggaagaatcagaagatcctgattattatcaatataacattcaaggaagccaccattcttcagagggcaatgaaggcacagaaatggaagtaccagcagaagattctactcaacatgtcccttcagaaacaagtgaggaccctgaagttgaggtgactattgaagatgatgattattctccaccgtctaagagaccaaaggccaatgagctaccgcagccaccagtcccggaacccgccaatgctgggaagcggaaagtgagggagttcaacttcgagaaatggaatgctcgcatcactgatctacgtaaacaagttgaagaattgtttgaaaggaaatatgctcaagccataaaagccaaaggtccggtgacgatcccgtaccctcttttccagtctcatgttgaagatctttatgtagaaggacttcctgaaggaattccttttagaaggccatctacttacggaattcctcgcctggagaggatattacttgcaaaggaaaggattcgttttgtgattaagaaacatgagcttctgaattcaacacgtgaagatttacagcttgataagccagcttcaggagtaaaggaagaatggtatgccagaatcactaaattaagaaagatggtggatcagcttttctgcaaaaaatttgcggaagccttggggagcactgaagccaaggctgtaccgtaccaaaaatttgaggcacacccgaatgatctgtacgtggaaggactgccagaaaacattcctttccgaagtccctcatggtatggaatcccaaggctggaaaaaatcattcaagtgggcaatcgaattaaatttgttattaaaagaccagaacttctgactcacagtaccactgaagttactcagccaagaacgaatacaccagtcaaagaagattggaatgtcagaattaccaagctacggaagcaagtggaagagatttttaatttgaaatttgctcaagctcttggactcaccgaggcagtaaaagtaccatatcctgtgtttgaatcaaacccggagttcttgtatgtggaaggcttgccagaggggattcccttccgaagccctacctggtttggaattccacgacttgaaaggatcgtccgcgggagtaataaaatcaagttcgttgttaaaaaacctgaactagttatttcctacttgcctcctgggatggctagtaaaataaacactaaagctttgcagtcccccaaaagaccacgaagtcctgggagtaattcaaaggttcctgaaattgaggtcaccgtggaaggccctaataacaacaatcctcaaacctcagctgttcgaaccccgacccagactaacggttctaacgttcccttcaagccacgagggagagagttttcctttgaggcctggaatgccaaaatcacggacctaaaacagaaagttgaaaatctcttcaatgagaaatgtggggaagctcttggccttaaacaagctgtgaaggtgccgttcgcgttatttgagtctttcccggaagacttttatgtggaaggcttacctgagggtgtgccattccgaagaccatcgacttttggcattccgaggctggagaagatactcagaaacaaagccaaaattaagttcatcattaaaaagcccgaaatgtttgagacggcgattaaggagagcacctcctctaagagccctcccagaaaaataaattcatcacccaatgttaatactactgcatcaggtgttgaagaccttaacatcattcaggtgacaattccagatgatgataatgaaagactctcgaaagttgaaaaagctagacagctaagagaacaagtgaatgacctctttagtcggaaatttggtgaagctattggtatgggttttcctgtgaaagttccctacaggaaaatcacaattaaccctggctgtgtggtggttgatggcatgcccccgggggtgtccttcaaagcccccagctacctggaaatcagctccatgagaaggatcttagactctgccgagtttatcaaattcacggtcattagaccatttccaggacttgtgattaataaccagctggttgatcagagtgagtcagaaggccccgtgatacaagaatcagctgaaccaagccagttggaagttccagccacagaagaaataaaagagactgatggaagctctcagatcaagcaagaaccagaccccacgtggtagacctcttccctcctagggtaaatcagcttctgtgtcagggatgctgtgtggtgtccatctgaaccccctgcatacgcgtagctaatgtgatctccccactttcacataagatggtggccctgccttcagggaatgtgggagccaggtgggagccttcccggatatttaagctagaagattctacagggagattctccttggatcaatatatgtctctcagtcaaagatgtaaaagcacttttgccttaaaaagaatgttctgtttctaaatagagtcaacgttgtcctcctcattggaattcactatgagtcagaatcattagactgacttttttttttccatagtaatagtattttgcagagtctcacagagctgcagatcttttgttcatcttgcagagttaacaagtctgatcctgttagtccagatttcttaaatttggccaagttataataggagcagtagcttgagacccgaagtcaggaaactttgacaatggatttttttttttaatccagagacttgtactggaatttgccttaccctgtcagctcatggacttaaggtttcatcccgctttatgagtgcttctgaatccaagtcattgttacctgaatttgcaaattaagttgtgatattcgtgactgttaaattcctgtaattagattaacctctttgcttgcttgtttgttttctctcctattttagcttaaagtatcagtggttgagaagagcttttcggacctgttactaccccaagctgtgtaatatacttgtataacagaaataccttctatacaaacctttttttctacttttagatagaaatgtctactttttcagcagttctgtgaattaaagagcagagtgactgtgggtctggaatggctggtgtacttgggaatgtactatcaggattttacagcaatgctgggaaatgacagggaaaatgacaggaatgaatctcaccagattttttatgtactcagcagagccttgagttacggtgtttattttccaatcaagtgaagatatctcctacttctcctactggaacatctcagcttctgcagtgaagaaaaattcctgtgatagttcagttctttagtttttctatttgaaaaaaaaaaatcatttaaatgatcctttgttcacggctctccttaatgactgagtgaacagttcctatctgtatatttgactaaaccttttcctaagctatctctcatggttcctatgtttttttatcataattaaaagcaaaaccatctggatcacctaacagtcagaggtcagtatctcagcgtgtgaattatagaggaaatacagagagaacctcttccacttttacttttcgtccaaataaaatgcatggtgtaccagaagttgaagatcgggttgaggattggggctagctcgatgacactaaggccccaacatcgcgggacctgctgtggcgcggattcttaggaacgctgttctagccggccccctctccaggggtcgccgtggccggcattatttcctagttcttcttgtaaccctgaggtgccagcgcggggagtgaggaggggtcagggggctaaggatgcaacctctgacgttctgcgccttcctaggagagtcttacatgtgttgagatttcacaagcaatgcgagttgtaaaataccagctctacaagaagctaggctctgtgacggcatagttttcagtagctttatcacaatattcacaatggagaattatatgacatggtagcagaaataggcccttttatgtgttgcttctattttacctcaaattgtagatatagggtaatcaataaaatccatccatgcctttcacacactaagt

SEQ ID NO: 4329 - protein, 889 aa, Homo sapiens; identical to SEQ ID NO: 4073

SEQ ID NO: 4330 - DNA, 4144 bp, Homo sapiens
aaaaaaaaaaaaaaaaaaaaaaaaaaaagaaaaaagaaaaaaaaaaggaggaggaggaggagggtgagagagaagctgggagagcagagaaaaggggccaccggtcgcccccccgcttccccgcacgcgctctccagccgcggccgcccgcctgccgcggtcaccccggcctctgcctctgtcccccagtgatcggatcaaggcgctgagcgaggccctgcctgcggggcggccatgcggcggtgacaggagcgcgaccgacacgcacgggcccctcgccccctctcgcctcccgtccgctcgccagctcccctcagccgaggctgctccgcggcggccgcagcccgcgcgcggcccacactcgcctccccgttgaagatgaggagtcctcggagagcaggatggtggtgacattcctcatgtcagctctcgagtccatgtgtaaagaactggccaagtccaaagccgaagtggcctgcattgcagtgtatgaaacagacgtgtttgtcgtcggaactgaaagaggacgtgcttttgtcaataccagaaaggattttcaaaaagattttgtaaaatattgtgttgaagaagaagaaaaagctgcagagatgcataaaatgaaatctacaacccaggcaaatcggatgagtgtagatgctgtagaaattgaaacactcagaaaaacagttgaggactatttctgcttttgctatgggaaagctttaggcaaatccacagtggtacctgtaccatatgagaagatgctgcgagaccagtcggctgtggtagtgcaggggcttccggaaggtgttgcctttaaacaccccgagaactatgatcttgcaaccctgaaatggattttggagaacaaagcagggatttcattcatcattaagagaccttttttagagccaaagaagcatgtaggtggtcgtgtgatggtaacagatgctgacaggtcaatactatctccaggtggaagttgtggccccatcaaagtgaaaactgaacccacagaagattctggcatttccctggaaatggcagctgtgacagtaaaggaagaatcagaagatcctgattattatcaatataacattcaagcaggcccttctgaaactgatgatgttgatgaaaaacagcccctatcgaagcctttgcaaggaagccaccattcttcagagggcaatgaaggcacagaaatggaagtaccagcagaagatgatgattattctccaccgtctaagagaccaaaggccaatgagctaccgcagccaccagtcccggaacccgccaatgctgggaagcggaaagtgagggagttcaacttcgagaaatggaatgctcgcatcactgatctacgtaaacaagttgaagaattgtttgaaaggaaatatgctcaagccataaaagccaaaggtccggtgacgatcccgtaccctcttttccagtctcatgttgaagatctttatgtagaaggacttcctgaaggaattccttttagaaggccatctacttacggaattcctcgcctggagaggatattacttgcaaaggaaaggattcgttttgtgattaagaaacatgagcttctgaattcaacacgtgaagatttacagcttgataagccagcttcaggagtaaaggaagaatggtatgccagaatcactaaattaagaaagatggtggatcagcttttctgcaaaaaatttgcggaagccttggggagcactgaagccaaggctgtaccgtaccaaaaatttgaggcacacccgaatgatctgtacgtggaaggactgccagaaaacattcctttccgaagtccctcatggtatggaatcccaaggctggaaaaaatcattcaagtgggcaatcgaattaaatttgttattaaaagaccagaacttctgactcacagtaccactgaagttactcagccaagaacgaatacaccagtcaaagaagattggaatgtcagaattaccaagctacggaagcaagtggaagagatttttaatttgaaatttgctcaagctcttggactcaccgaggcagtaaaagtaccatatcctgtgtttgaatcaaacccggagttcttgaaaggatcgtccgcgggagtaataaaatcaagttcgttgttaaaaaacctgaactagttatttcctacttgcctcctgggatggctagtaaaataaacactaaagctttgcagtcccccaaaagaccacgaagtcctgggagtaattcaaaggttcctgaaattgaggtcaccgtggaaggccctaataacaacaatcctcaaacctcagctgttcgaaccccgacccagactaacggttctaacgttcccttcaagccacgagggagagagttttcctttgaggcctggaatgccaaaatcacggacctaaaacagaaagttgaaaatctcttcaatgagaaatgtggggaagctcttggccttaaacaagctgtgaaggtgccgttcgcgttatttgagtctttcccggaagacttttatgtggaaggcttacctgagggtgtgccattccgaagaccatcgacttttggcattccgaggctggagaagatactcagaaacaaagccaaaattaagttcatcattaaaaagcccgaaatgtttgagacggcgattaaggagagcacctcctctaagagccctcccagaaaaataaattcatcacccaatgttaatactactgcatcaggtgttgaagaccttaacatcattcaggtgacaattccagatgatgataatgaaagactctcgaaagttgaaaaagctagacagctaagagaacaagtgaatgacctctttagtcggaaatttggtgaagctattggtatgggttttcctgtgaaagttccctacaggaaaatcacaattaaccctggctgtgtggtggttgatggcatgcccccgggggtgtccttcaaagcccccagctacctggaaatcagctccatgagaaggatcttagactctgccgagtttatcaaattcacggtcattagaccatttccaggacttgtgattaataaccagctggttgatcagagtgagtcagaaggccccgtgatacaagaatcagctgaaccaagccagttggaagttccagccacagaagaaataaaagagactgatggaagctctcagatcaagcaagaaccagaccccacgtggtagacctcttccctcctaggcttaaagtatcagtggttgagaagagcttttcggacctgttactaccccaagctgtagccttgagttacggtgtttattttccaatcaagtgaagatatctcctacttctcctactggaacatctcagcttctgcagtgaagaaaaattcctgtgatagttcagttctttagtttttctatttgaaaaaaaaaaatcatttaaatgatcctttgttcacggctctccttaatgactgagtgaacagttcctatctgtatatttgactaaaccttttcctaagctatctctcatggttcctatgtttttttatcataattaaaagcaaaaccatctggatcacctaacagtcagaggtcagtatctcagcgtgtgaattatagaggaaatacagagagaacctcttccacttttacttttcgtccaaataaaatgcatggtgtaccagaagttgaagatcgggttgaggattggggctagctcgatgacactaaggccccaacatcgcgggacctgctgtggcgcggattcttaggaacgctgttctagccggccccctctccaggggtcgccgtggccggcattatttcctagttcttcttgtaaccctgaggtgccagcgcggggagtgaggaggggtcagggggctaaggatgcaacctctgacgttctgcgccttcctaggagagtcttacatgtgttgagatttcacaagcaatgcgagttgtaaaataccagctctacaagaagctaggctctgtgacggcatagttttcagtagctttatcacaatattcacaatggagaattatatgacatggtagcagaaataggcccttttatgtgttgcttctattttacctcaaattgtagatatagggtaatcaataaaatccatccatgcctttcacacactaagt

SEQ ID NO: 4331 - protein, 584 aa, Homo sapiens; identical to SEQ ID NO: 4077

SEQ ID NO: 4332 - DNA, 3825 bp, Homo sapiens
aaaaaaaaaaaaaaaaaaaaaaaaaaaagaaaaaagaaaaaaaaaaggaggaggaggaggagggtgagagagaagctgggagagcagagaaaaggggccaccggtcgcccccccgcttccccgcacgcgctctccagccgcggccgcccgcctgccgcggtcaccccggcctctgcctctgtcccccagtgatcggatcaaggcgctgagcgaggccctgcctgcggggcggccatgcggcggtgacaggagcgcgaccgacacgcacgggcccctcgccccctctcgcctcccgtccgctcgccagctcccctcagccgaggctgctccgcggcggccgcagcccgcgcgcggcccacactcgcctcccctcggcacccccggccccggagctgcctggaggcggccgcactcggggatcatggcccaagttgcaatgtccaccctccccgttgaagatgaggagtcctcggagagcaggatggtggtgacattcctcatgtcagctctcgagtccatgtgtaaagaactggccaagtccaaagccgaagtggcctgcattgcagtgtatgaaacagacgtgtttgtcgtcggaactgaaagaggacgtgcttttgtcaataccagaaaggattttcaaaaagattttgtaaaatattgtgttgaagaagaagaaaaagctgcagagatgcataaaatgaaatctacaacccaggcaaatcggatgagtgtagatgctgtagaaattgaaacactcagaaaaacagttgaggactatttctgcttttgctatgggaaagctttaggcaaatccacagtggtacctgtaccatatgagaagatgctgcgagaccagtcggctgtggtagtgcaggggcttccggaaggtgttgcctttaaacaccccgagaactatgatcttgcaaccctgaaatggattttggagaacaaagcagggatttcattcatcattaagagaccttttttagagccaaagaagcatgtaggtggtcgtgtgatggtaacagatgctgacaggtcaatactatctccaggtggaagttgtggccccatcaaagtgaaaactgaacccacagaagattctggaagccaccattcttcagagggcaatgaaggcacagaaatggaagtaccagcagaagattctactcaacatgtcccttcagaaacaagtgaggaccctgaagttgaggtgactattgaagatgatgattattctccaccgtctaagagaccaaaggccaatgagctaccgcagccaccagtcccggaacccgccaatgctgggaagcggaaagtgagggagttcaacttcgagaaatggaatgctcgcatcactgatctacgtaaacaagttgaagaattgtttgaaaggaaatatgctcaagccataaaagccaaaggtccggtgacgatcccgtaccctcttttccagtctcatgttgaagatctttatgtagaaggacttcctgaaggaattccttttagaaggccatctacttacggaattcctcgcctggagaggatattacttgcaaaggaaaggattcgttttgtgattaagaaacatgagcttctgaattcaacacgtgaagatttacagcttgataagccagcttcaggagtaaaggaagaatggtatgccagaatcactaaattaagaaagatggtggatcagcttttctgcaaaaaatttgcggaagccttggggagcactgaagccaaggctgtaccgtaccaaaaatttgaggcacacccgaatgatctgtacgtggaaggactgccagaaaacattcctttccgaagtccctcatggtatggaatcccaaggctggaaaaaatcattcaagtgggcaatcgaattaaatttgttattaaaagaccagaacttctgactcacagtaccactgaagttactcagccaagaacgaatacaccagtcaaagaagattggaatgtcagaattaccaagctacggaagcaagtggaagagatttttaatttgaaatttgctcaagctcttggactcaccgaggcagtaaaagtaccatatcctgtgtttgaatcaaacccggagttcttgaaaggatcgtccgcgggagtaataaaatcaagttcgttgttaaaaaacctgaactagttatttcctacttgcctcctgggatggctagtaaaataaacactaaagctttgcagtcccccaaaagaccacgaagtcctgggagtaattcaaaggttcctgaaattgaggtcaccgtggaaggccctaataacaacaatcctcaaacctcagctgttcgaaccccgacccagactaacggttctaacgttcccttcaagccacgagggagagagttttcctttgaggcctggaatgccaaaatcacggacctaaaacagaaagttgaaaatctcttcaatgagaaatgtggggaagctcttggccttaaacaagctgtgaaggtgccgttcgcgttatttgagtctttcccggaagacttttatgtggaaggcttacctgagggtgtgccattccgaagaccatcgacttttggcattccgaggctggagaagatactcagaaacaaagccaaaattaagttcatcattaaaaagcccgaaatgtttgagacggcgattaaggagagcacctcctctaagagccctcccagaaaaataaattcatcacccaatgttaatactactgcatcaggtgttgaagaccttaacatcattcaggtgacaattccagatgatgataatgaaagactctcgaaagttgaaaaagctagacagctaagagaacaagtgaatgacctctttagtcggaaatttggtgaagctattggtatgggttttcctgtgaaagttccctacaggaaaatcacaattaaccctggctgtgtggtggttgatggcatgcccccgggggtgtccttcaaagcccccagctacctggaaatcagctccatgagaaggatcttagactctgccgagtttatcaaattcacggtcattagaccatttccaggacttgtgattaataaccagctggttgatcagagtgagtcagaaggccccgtgatacaagaatcagctgaaccaagccagttggaagttccagccacagaagaaataaaagagactgatggaagctctcagatcaagcaagaaccagaccccacgtggtagacctcttccctcctaggcaaaaccatctggatcacctaacagtcagaggtcagtatctcagcgtgtgaattatagaggaaatacagagagaacctcttccacttttacttttcgtccaaataaaatgcatggtgtaccagaagttgaagatcgggttgaggattggggctagctcgatgacactaaggccccaacatcgcgggacctgctgtggcgcggattcttaggaacgctgttctagccggccccctctccaggggtcgccgtggccggcattatttcctagttcttcttgtaaccctgaggtgccagcgcggggagtgaggaggggtcagggggctaaggatgcaacctctgacgttctgcgccttcctaggagagtcttacatgtgttgagatttcacaagcaatgcgagttgtaaaataccagctctacaagaagctaggctctgtgacggcatagttttcagtagctttatcacaatattcacaatggagaattatatgacatggtagcagaaataggcccttttatgtgttgcttctattttacctcaaattgtagatatagggtaatcaataaaatccatccatgcctttcacacactaagt

SEQ ID NO: 4333 - protein, 579 aa, Homo sapiens; identical to SEQ ID NO: 4111

SEQ ID NO: 4334 - DNA, 4267 bp, Homo sapiens
aaaaaaaaaaaaaaaaaaaaaaaaaaaagaaaaaagaaaaaaaaaaggaggaggaggaggagggtgagagagaagctgggagagcagagaaaaggggccaccggtcgcccccccgcttccccgcacgcgctctccagccgcggccgcccgcctgccgcggtcaccccggcctctgcctctgtcccccagtgatcggatcaaggcgctgagcgaggccctgcctgcggggcggccatgcggcggtgacaggagcgcgaccgacacgcacgggcccctcgccccctctcgcctcccgtccgctcgccagctcccctcagccgaggctgctccgcggcggccgcagcccgcgcgcggcccacactcgcctccccgttgaagatgaggagtcctcggagagcaggatggtggtgacattcctcatgtcagctctcgagtccatgtgtaaagaactggccaagtccaaagccgaagtggcctgcattgcagtgtatgaaacagacgtgtttgtcgtcggaactgaaagaggacgtgcttttgtcaataccagaaaggattttcaaaaagattttgtaaaatattgtgttgaagaagaagaaaaagctgcagagatgcataaaatgaaatctacaacccaggcaaatcggatgagtgtagatgctgtagaaattgaaacactcagaaaaacagttgaggactatttctgcttttgctatgggaaagctttaggcaaatccacagtggtacctgtaccatatgagaagatgctgcgagaccagtcggctgtggtagtgcaggggcttccggaaggtgttgcctttaaacaccccgagaactatgatcttgcaaccctgaaatggattttggagaacaaagcagggatttcattcatcattaagagaccttttttagagccaaagaagcatgtaggtggtcgtgtgatggtaacagatgctgacaggtcaatactatctccaggtggaagttgtggccccatcaaagtgaaaactgaacccacagaagattctggcatttccctggaaatggcagctgtgacagtaaaggaagaatcagaagatcctgattattatcaatataacattcaagcaggcccttctgaaactgatgatgttgatgaaaaacagcccctatcgaagcctttgcaaggaagccaccattcttcagagggcaatgaaggcacagaaatggaagtaccagcagaagatgatgattattctccaccgtctaagagaccaaaggccaatgagctaccgcagccaccagtcccggaacccgccaatgctgggaagcggaaagtgagggagttcaacttcgagaaatggaatgctcgcatcactgatctacgtaaacaagttgaagaattgtttgaaaggaaatatgctcaagccataaaagccaaaggtccggtgacgatcccgtaccctcttttccagtctcatgttgaagatctttatgtagaaggacttcctgaaggaattccttttagaaggccatctacttacggaattcctcgcctggagaggatattacttgcaaaggaaaggattcgttttgtgattaagaaacatgagcttctgaattcaacacgtgaagatttacagcttgataagccagcttcaggagtaaaggaagaatggtatgccagaatcactaaattaagaaagatggtggatcagcttttctgcaaaaaatttgcggaagccttggggagcactgaagccaaggctgtaccgtaccaaaaatttgaggcacacccgaatgatctgtacgtggaaggactgccagaaaacattcctttccgaagtccctcatggtatggaatcccaaggctggaaaaaatcattcaagtgggcaatcgaattaaatttgttattaaaagaccagaacttctgactcacagtaccactgaagttactcagccaagaacgaatacaccagtcaaagaagattggaatgtcagaattaccaagctacggaagcaagtggaagagatttttaatttgaaatttgcttagatttgttgacagcggtttcctggagtgctgtcttgagaacgattctgaggaggctcagcaagaaagagtgtttcagttgattgggtgtgtctgtcatggagaaggaactcaagctcttggactcaccgaggcagtaaaagtaccatatcctgtgtttgaatcaaacccggagttcttgtatgtggaaggcttgccagaggggattcccttccgaagccctacctggtttggaattccacgacttgaaaggatcgtccgcgggagtaataaaatcaagttcgttgttaaaaaacctgaactagttatttcctacttgcctcctgggatggctagtaaaataaacactaaagctttgcagtcccccaaaagaccacgaagtcctgggagtaattcaaaggttcctgaaattgaggtcaccgtggaaggccctaataacaacaatcctcaaacctcagctgttcgaaccccgacccagactaacggttctaacgttcccttcaagccacgagggagagagttttcctttgaggcctggaatgccaaaatcacggacctaaaacagaaagttgaaaatctcttcaatgagaaatgtggggaagctcttggccttaaacaagctgtgaaggtgccgttcgcgttatttgagtctttcccggaagacttttatgtggaaggcttacctgagggtgtgccattccgaagaccatcgacttttggcattccgaggctggagaagatactcagaaacaaagccaaaattaagttcatcattaaaaagcccgaaatgtttgagacggcgattaaggagagcacctcctctaagagccctcccagaaaaataaattcatcacccaatgttaatactactgcatcaggtgttgaagaccttaacatcattcaggtgacaattccagatgatgataatgaaagactctcgaaagttgaaaaagctagacagctaagagaacaagtgaatgacctctttagtcggaaatttggtgaagctattggtatgggttttcctgtgaaagttccctacaggaaaatcacaattaaccctggctgtgtggtggttgatggcatgcccccgggggtgtccttcaaagcccccagctacctggaaatcagctccatgagaaggatcttagactctgccgagtttatcaaattcacggtcattagaccatttccaggacttgtgattaataaccagctggttgatcagagtgagtcagaaggccccgtgatacaagaatcagctgaaccaagccagttggaagttccagccacagaagaaataaaagagactgatggaagctctcagatcaagcaagaaccagaccccacgtggtagacctcttccctcctaggagccttgagttacggtgtttattttccaatcaagtgaagatatctcctacttctcctactggaacatctcagcttctgcagtgaagaaaaattcctgtgatagttcagttctttagtttttctatttgaaaaaaaaaaatcatttaaatgatcctttgttcacggctctccttaatgactgagtgaacagttcctatctgtatatttgactaaaccttttcctaagctatctctcatggttcctatgtttttttatcataattaaaagcaaaaccatctggatcacctaacagtcagaggtcagtatctcagcgtgtgaattatagaggaaatacagagagaacctcttccacttttacttttcgtccaaataaaatgcatggtgtaccagaagttgaagatcgggttgaggattggggctagctcgatgacactaaggccccaacatcgcgggacctgctgtggcgcggattcttaggaacgctgttctagccggccccctctccaggggtcgccgtggccggcattatttcctagttcttcttgtaaccctgaggtgccagcgcggggagtgaggaggggtcagggggctaaggatgcaacctctgacgttctgcgccttcctaggagagtcttacatgtgttgagatttcacaagcaatgcgagttgtaaaataccagctctacaagaagctaggctctgtgacggcatagttttcagtagctttatcacaatattcacaatggagaattatatgacatggtagcagaaataggcccttttatgtgttgcttctattttacctcaaattgtagatatagggtaatcaataaaatccatccatgcctttcacacactaagt

SEQ ID NO: 4335 - protein, 543 aa, Homo sapiens; identical to SEQ ID NO: 4205

SEQ ID NO: 4336 - DNA, 4965 bp, Homo sapiens
aaaaaaaaaaaaaaaaaaaaaaaaaaaagaaaaaagaaaaaaaaaaggaggaggaggaggagggtgagagagaagctgggagagcagagaaaaggggccaccggtcgcccccccgcttccccgcacgcgctctccagccgcggccgcccgcctgccgcggtcaccccggcctctgcctctgtcccccagtgatcggatcaaggcgctgagcgaggccctgcctgcggggcggccatgcggcggtgacaggagcgcgaccgacacgcacgggcccctcgccccctctcgcctcccgtccgctcgccagctcccctcagccgaggctgctccgcggcggccgcagcccgcgcgcggcccacactcgcctcccctcggcacccccggccccggagctgcctggaggcggccgcactcggtgtaaagaactggccaagtccaaagccgaagtggcctgcattgcagtgtatgaaacagacgtgtttgtcgtcggaactgaaagaggacgtgcttttgtcaataccagaaaggattttcaaaaagattttgtaaaatattgtgttgaagaagaagaaaaagctgcagagatgcataaaatgaaatctacaacccaggcaaatcggatgagtgtagatgctgtagaaattgaaacactcagaaaaacagttgaggactatttctgcttttgctatgggaaagctttaggcaaatccacagtggtacctgtaccatatgagaagatgctgcgagaccagtcggctgtggtagtgcaggggcttccggaaggtgttgcctttaaacaccccgagaactatgatcttgcaaccctgaaatggattttggagaacaaagcagggatttcattcatcattaagagaccttttttagagccaaagaagcatgtaggtggtcgtgtgatggtaacagatgctgacaggtcaatactatctccaggtggaagttgtggccccatcaaagtgaaaactgaacccacagaagattctggaagccaccattcttcagagggcaatgaaggcacagaaatggaagtaccagcagaagattctactcaacatgtcccttcagaaacaagtgaggaccctgaagttgaggtgactattgaagatgatgattattctccaccgtctaagagaccaaaggccaatgagctaccgcagccaccagtcccggaacccgccaatgctgggaagcggaaagtgagggagttcaacttcgagaaatggaatgctcgcatcactgatctacgtaaacaagttgaagaattgtttgaaaggaaatatgctcaagccataaaagccaaaggtccggtgacgatcccgtaccctcttttccagtctcatgttgaagatctttatgtagaaggacttcctgaaggaattccttttagaaggccatctacttacggaattcctcgcctggagaggatattacttgcaaaggaaaggattcgttttgtgattaagaaacatgagcttctgaattcaacacgtgaagatttacagcttgataagccagcttcaggagtaaaggaagaatggtatgccagaatcactaaattaagaaagatggtggatcagcttttctgcaaaaaatttgcggaagccttggggagcactgaagccaaggctgtaccgtaccaaaaatttgaggcacacccgaatgatctgtacgtggaaggactgccagaaaacattcctttccgaagtccctcatggtatggaatcccaaggctggaaaaaatcattcaagtgggcaatcgaattaaatttgttattaaaagaccagaacttctgactcacagtaccactgaagttactcagccaagaacgaatacaccagtcaaagaagattggaatgtcagaattaccaagctacggaagcaagtggaagagatttttaatttgaaatttgctcaagctcttggactcaccgaggcagtaaaagtaccatatcctgtgtttgaatcaaacccggagttcttgaaaggatcgtccgcgggagtaataaaatcaagttcgttgttaaaaaacctgaactagttatttcctacttgcctcctgggatggctagtaaaataaacactaaagctttgcagtcccccaaaagaccacgaagtcctgggagtaattcaaaggttcctgaaattgaggtcaccgtggaaggccctaataacaacaatcctcaaacctcagctgttcgaaccccgacccagactaacggttctaacgttcccttcaagccacgagggagagagttttcctttgaggcctggaatgccaaaatcacggacctaaaacagaaagttgaaaatctcttcaatgagaaatgtggggaagctcttggccttaaacaagctgtgaaggtgccgttcgcgttatttgagtctttcccggaagacttttatgtggaaggcttacctgagggtgtgccattccgaagaccatcgacttttggcattccgaggctggagaagatactcagaaacaaagccaaaattaagttcatcattaaaaagcccgaaatgtttgagacggcgattaaggagagcacctcctctaagagccctcccagaaaaataaattcatcacccaatgttaatactactgcatcaggtgttgaagaccttaacatcattcaggtgacaattccagatgatgataatgaaagactctcgaaagttgaaaaagctagacagctaagagaacaagtgaatgacctctttagtcggaaatttggtgaagctattggtatgggttttcctgtgaaagttccctacaggaaaatcacaattaaccctggctgtgtggtggttgatggcatgcccccgggggtgtccttcaaagcccccagctacctggaaatcagctccatgagaaggatcttagactctgccgagtttatcaaattcacggtcattagaccatttccaggacttgtgattaataaccagctggttgatcagagtgagtcagaaggccccgtgatacaagaatcagctgaaccaagccagttggaagttccagccacagaagaaataaaagagactgatggaagctctcagatcaagcaagaaccagaccccacgtggtagacctcttccctcctagggtaaatcagcttctgtgtcagggatgctgtgtggtgtccatctgaaccccctgcatacgcgtagctaatgtgatctccccactttcacataagatggtggccctgccttcagggaatgtgggagccaggtgggagccttcccggatatttaagctagaagattctacagggagattctccttggatcaatatatgtctctcagtcaaagatgtaaaagcacttttgccttaaaaagaatgttctgtttctaaatagagtcaacgttgtcctcctcattggaattcactatgagtcagaatcattagactgacttttttttttccatagtaatagtattttgcagagtctcacagagctgcagatcttttgttcatcttgcagagttaacaagtctgatcctgttagtccagatttcttaaatttggccaagttataataggagcagtagcttgagacccgaagtcaggaaactttgacaatggatttttttttttaatccagagacttgtactggaatttgccttaccctgtcagctcatggacttaaggtttcatcccgctttatgagtgcttctgaatccaagtcattgttacctgaatttgcaaattaagttgtgatattcgtgactgttaaattcctgtaattagattaacctctttgcttgcttgtttgttttctctcctattttagcttaaagtatcagtggttgagaagagcttttcggacctgttactaccccaagctgtgtaatatacttgtataacagaaataccttctatacaaacctttttttctacttttagatagaaatgtctactttttcagcagttctgtgaattaaagagcagagtgactgtgggtctggaatggctggtgtacttgggaatgtactatcaggattttacagcaatgctgggaaatgacagggaaaatgacaggaatgaatctcaccagattttttatgtactcagcagagccttgagttacggtgtttattttccaatcaagtgaagatatctcctacttctcctactggaacatctcagcttctgcagtgaagaaaaattcctgtgatagttcagttctttagtttttctatttgaaaaaaaaaaatcatttaaatgatcctttgttcacggctctccttaatgactgagtgaacagttcctatctgtatatttgactaaaccttttcctaagctatctctcatggttcctatgtttttttatcataattaaaagcaaaaccatctggatcacctaacagtcagaggtcagtatctcagcgtgtgaattatagaggaaatacagagagaacctcttccacttttacttttcgtccaaataaaatgcatggtgtaccagaagttgaagatcgggttgaggattggggctagctcgatgacactaaggccccaacatcgcgggacctgctgtggcgcggattcttaggaacgctgttctagccggccccctctccaggggtcgccgtggccggcattatttcctagttcttcttgtaaccctgaggtgccagcgcggggagtgaggaggggtcagggggctaaggatgcaacctctgacgttctgcgccttcctaggagagtcttacatgtgttgagatttcacaagcaatgcgagttgtaaaataccagctctacaagaagctaggctctgtgacggcatagttttcagtagctttatcacaatattcacaatggagaattatatgacatggtagcagaaataggcccttttatgtgttgcttctattttacctcaaattgtagatatagggtaatcaataaaatccatccatgcctttcacacactaagt

SEQ ID NO: 4337 - protein, 490 aa, Homo sapiens; identical to SEQ ID NO: 4105

SEQ ID NO: 4338 - DNA, 4069 bp, Homo sapiens
aaaaaaaaaaaaaaaaaaaaaaaaaaaagaaaaaagaaaaaaaaaaggaggaggaggaggagggtgagagagaagctgggagagcagagaaaaggggccaccggtcgcccccccgcttccccgcacgcgctctccagccgcggccgcccgcctgccgcggtcaccccggcctctgcctctgtcccccagtgatcggatcaaggcgctgagcgaggccctgcctgcggggcggccatgcggcggtgacaggagcgcgaccgacacgcacgggcccctcgccccctctcgcctcccgtccgctcgccagctcccctcagccgaggctgctccgcggcggccgcagcccgcgcgcggcccacactcgcctccccgttgaagatgaggagtcctcggagagcaggatggtggtgacattcctcatgtcagctctcgagtccatgtgtaaagaactggccaagtccaaagccgaagtggcctgcattgcagtgtatgaaacagacgtgtttgtcgtcggaactgaaagaggacgtgcttttgtcaataccagaaaggattttcaaaaagattttgtaaaatattgtgttgaagaagaagaaaaagctgcagagatgcataaaatgaaatctacaacccaggcaaatcggatgagtgtagatgctgtagaaattgaaacactcagaaaaacagttgaggactatttctgcttttgctatgggaaagctttaggcaaatccacagtggtacctgtaccatatgagaagatgctgcgagaccagtcggctgtggtagtgcaggggcttccggaaggtgttgcctttaaacaccccgagaactatgatcttgcaaccctgaaatggattttggagaacaaagcagggatttcattcatcattaagagaccttttttagagccaaagaagcatgtaggtggtcgtgtgatggtaacagatgctgacaggtcaatactatctccaggtggaagttgtggccccatcaaagtgaaaactgaacccacagaagattctggaagccaccattcttcagagggcaatgaaggcacagaaatggaagtaccagcagaagattctactcaacatgtcccttcagaaacaagtgaggaccctgaagttgaggtgactattgaagatgatgattattctccaccgtctaagagaccaaaggccaatgagctaccgcagccaccagtcccggaacccgccaatgctgggaagcggaaagtgagggagttcaacttcgagaaatggaatgctcgcatcactgatctacgtaaacaagttgaagaattgtttgaaaggaaatatgctcaagccataaaagccaaaggtccggtgacgatcccgtaccctcttttccagtctcatgttgaagatctttatgtagaaggacttcctgaaggaattccttttagaaggccatctacttacggaattcctcgcctggagaggatattacttgcaaaggaaaggattcgttttgtgattaagaaacatgagcttctgaattcaacacgtgaagatttacagcttgataagccagcttcaggagtaaaggaagaatggtatgccagaatcactaaattaagaaagatggtggatcagcttttctgcaaaaaatttgcggaagccttggggagcactgaagccaaggctgtaccgtaccaaaaatttgaggcacacccgaatgatctgtacgtggaaggactgccagaaaacattcctttccgaagtccctcatggtatggaatcccaaggctggaaaaaatcattcaagtgggcaatcgaattaaatttgttattaaaagaccagaacttctgactcacagtaccactgaagttactcagccaagaacgaatacaccagtcaaagaagattggaatgtcagaattaccaagctacggaagcaagtggaagagatttttaatttgaaatttgctcaagctcttggactcaccgaggcagtaaaagtaccatatcctgtgtttgaatcaaacccggagttcttgaaaggatcgtccgcgggagtaataaaatcaagttcgttgttaaaaaacctgaactagttatttcctacttgcctcctgggatggctagtaaaataaacactaaagctttgcagtcccccaaaagaccacgaagtcctgggagtaattcaaaggttcctgaaattgaggtcaccgtggaaggccctaataacaacaatcctcaaacctcagctgttcgaaccccgacccagactaacggttctaacgttcccttcaagccacgagggagagagttttcctttgaggcctggaatgccaaaatcacggacctaaaacagaaagttgaaaatctcttcaatgagaaatgtggggaagctcttggccttaaacaagctgtgaaggtgccgttcgcgttatttgagtctttcccggaagacttttatgtggaaggcttacctgagggtgtgccattccgaagaccatcgacttttggcattccgaggctggagaagatactcagaaacaaagccaaaattaagttcatcattaaaaagcccgaaatgtttgagacggcgattaaggagagcacctcctctaagagccctcccagaaaaataaattcatcacccaatgttaatactactgcatcaggtgttgaagaccttaacatcattcaggtgacaattccagatgatgataatgaaagactctcgaaagttgaaaaagctagacagctaagagaacaagtgaatgacctctttagtcggaaatttggtgaagctattggtatgggttttcctgtgaaagttccctacaggaaaatcacaattaaccctggctgtgtggtggttgatggcatgcccccgggggtgtccttcaaagcccccagctacctggaaatcagctccatgagaaggatcttagactctgccgagtttatcaaattcacggtcattagaccatttccaggacttgtgattaataaccagctggttgatcagagtgagtcagaaggccccgtgatacaagaatcagctgaaccaagccagttggaagttccagccacagaagaaataaaagagactgatggaagctctcagatcaagcaagaaccagaccccacgtggtagacctcttccctcctaggcttaaagtatcagtggttgagaagagcttttcggacctgttactaccccaagctgtagccttgagttacggtgtttattttccaatcaagtgaagatatctcctacttctcctactggaacatctcagcttctgcagtgaagaaaaattcctgtgatagttcagttctttagtttttctatttgaaaaaaaaaaatcatttaaatgatcctttgttcacggctctccttaatgactgagtgaacagttcctatctgtatatttgactaaaccttttcctaagctatctctcatggttcctatgtttttttatcataattaaaagcaaaaccatctggatcacctaacagtcagaggtcagtatctcagcgtgtgaattatagaggaaatacagagagaacctcttccacttttacttttcgtccaaataaaatgcatggtgtaccagaagttgaagatcgggttgaggattggggctagctcgatgacactaaggccccaacatcgcgggacctgctgtggcgcggattcttaggaacgctgttctagccggccccctctccaggggtcgccgtggccggcattatttcctagttcttcttgtaaccctgaggtgccagcgcggggagtgaggaggggtcagggggctaaggatgcaacctctgacgttctgcgccttcctaggagagtcttacatgtgttgagatttcacaagcaatgcgagttgtaaaataccagctctacaagaagctaggctctgtgacggcatagttttcagtagctttatcacaatattcacaatggagaattatatgacatggtagcagaaataggcccttttatgtgttgcttctattttacctcaaattgtagatatagggtaatcaataaaatccatccatgcctttcacacactaagt

SEQ ID NO: 4339 - protein, 559 aa, Homo sapiens; identical to SEQ ID NO: 4121

SEQ ID NO: 4340 - DNA, 4175 bp, Homo sapiens
aaaaaaaaaaaaaaaaaaaaaaaaaaaagaaaaaagaaaaaaaaaaggaggaggaggaggagggtgagagagaagctgggagagcagagaaaaggggccaccggtcgcccccccgcttccccgcacgcgctctccagccgcggccgcccgcctgccgcggtcaccccggcctctgcctctgtcccccagtgatcggatcaaggcgctgagcgaggccctgcctgcggggcggccatgcggcggtgacaggagcgcgaccgacacgcacgggcccctcgccccctctcgcctcccgtccgctcgccagctcccctcagccgaggctgctccgcggcggccgcagcccgcgcgcggcccacactcgcctcccctcggcacccccggccccggagctgcctggaggcggccgcactcggggatcatggcccaagttgcaatgtccaccctccccgttgaagatgaggagtcctcggagagcaggatggtggtgacattcctcatgtcagctctcgagtccatgtgtaaagaactggccaagtccaaagccgaagtggcctgcattgcagtgtatgaaacagacgtgtttgtcgtcggaactgaaagaggacgtgcttttgtcaataccagaaaggattttcaaaaagattttgtaaaatattgtgttgaagaagaagaaaaagctgcagagatgcataaaatgaaatctacaacccaggcaaatcggatgagtgtagatgctgtagaaattgaaacactcagaaaaacagttgaggactatttctgcttttgctatgggaaagctttaggcaaatccacagtggtacctgtaccatatgagaagatgctgcgagaccagtcggctgtggtagtgcaggggcttccggaaggtgttgcctttaaacaccccgagaactatgatcttgcaaccctgaaatggattttggagaacaaagcagggatttcattcatcattaagagaccttttttagagccaaagaagcatgtaggtggtcgtgtgatggtaacagatgctgacaggtcaatactatctccaggtggaagttgtggccccatcaaagtgaaaactgaacccacagaagattctggcatttccctggaaatggcagctgtgacagtaaaggaagaatcagaagatcctgattattatcaatataacattcaaggaagccaccattcttcagagggcaatgaaggcacagaaatggaagtaccagcagaagatgatgattattctccaccgtctaagagaccaaaggccaatgagctaccgcagccaccagtcccggaacccgccaatgctgggaagcggaaagtgagggagttcaacttcgagaaatggaatgctcgcatcactgatctacgtaaacaagttgaagaattgtttgaaaggaaatatgctcaagccataaaagccaaaggtccggtgacgatcccgtaccctcttttccagtctcatgttgaagatctttatgtagaaggacttcctgaaggaattccttttagaaggccatctacttacggaattcctcgcctggagaggatattacttgcaaaggaaaggattcgttttgtgattaagaaacatgagcttctgaattcaacacgtgaagatttacagcttgataagccagcttcaggagtaaaggaagaatggtatgccagaatcactaaattaagaaagatggtggatcagcttttctgcaaaaaatttgcggaagccttggggagcactgaagccaaggctgtaccgtaccaaaaatttgaggcacacccgaatgatctgtacgtggaaggactgccagaaaacattcctttccgaagtccctcatggtatggaatcccaaggctggaaaaaatcattcaagtgggcaatcgaattaaatttgttattaaaagaccagaacttctgactcacagtaccactgaagttactcagccaagaacgaatacaccagtcaaagaagattggaatgtcagaattaccaagctacggaagcaagtggaagagatttttaatttgaaatttgctcaagctcttggactcaccgaggcagtaaaagtaccatatcctgtgtttgaatcaaacccggagttcttgtatgtggaaggcttgccagaggggattcccttccgaagccctacctggtttggaattccacgacttgaaaggatcgtccgcgggagtaataaaatcaagttcgttgttaaaaaacctgaactagttatttcctacttgcctcctgggatggctagtaaaataaacactaaagctttgcagtcccccaaaagaccacgaagtcctgggagtaattcaaaggttcctgaaattgaggtcaccgtggaaggccctaataacaacaatcctcaaacctcagctgttcgaaccccgacccagactaacggttctaacgttcccttcaagccacgagggagagagttttcctttgaggcctggaatgccaaaatcacggacctaaaacagaaagttgaaaatctcttcaatgagaaatgtggggaagctcttggccttaaacaagctgtgaaggtgccgttcgcgttatttgagtctttcccggaagacttttatgtggaaggcttacctgagggtgtgccattccgaagaccatcgacttttggcattccgaggctggagaagatactcagaaacaaagccaaaattaagttcatcattaaaaagcccgaaatgtttgagacggcgattaaggagagcacctcctctaagagccctcccagaaaaataaattcatcacccaatgttaatactactgcatcaggtgttgaagaccttaacatcattcaggtgacaattccagatgatgataatgaaagactctcgaaagttgaaaaagctagacagctaagagaacaagtgaatgacctctttagtcggaaatttggtgaagctattggtatgggttttcctgtgaaagttccctacaggaaaatcacaattaaccctggctgtgtggtggttgatggcatgcccccgggggtgtccttcaaagcccccagctacctggaaatcagctccatgagaaggatcttagactctgccgagtttatcaaattcacggtcattagaccatttccaggacttgtgattaataaccagctggttgatcagagtgagtcagaaggccccgtgatacaagaatcagctgaaccaagccagttggaagttccagccacagaagaaataaaagagactgatggaagctctcagatcaagcaagaaccagaccccacgtggtagacctcttccctcctaggagccttgagttacggtgtttattttccaatcaagtgaagatatctcctacttctcctactggaacatctcagcttctgcagtgaagaaaaattcctgtgatagttcagttctttagtttttctatttgaaaaaaaaaaatcatttaaatgatcctttgttcacggctctccttaatgactgagtgaacagttcctatctgtatatttgactaaaccttttcctaagctatctctcatggttcctatgtttttttatcataattaaaagcaaaaccatctggatcacctaacagtcagaggtcagtatctcagcgtgtgaattatagaggaaatacagagagaacctcttccacttttacttttcgtccaaataaaatgcatggtgtaccagaagttgaagatcgggttgaggattggggctagctcgatgacactaaggccccaacatcgcgggacctgctgtggcgcggattcttaggaacgctgttctagccggccccctctccaggggtcgccgtggccggcattatttcctagttcttcttgtaaccctgaggtgccagcgcggggagtgaggaggggtcagggggctaaggatgcaacctctgacgttctgcgccttcctaggagagtcttacatgtgttgagatttcacaagcaatgcgagttgtaaaataccagctctacaagaagctaggctctgtgacggcatagttttcagtagctttatcacaatattcacaatggagaattatatgacatggtagcagaaataggcccttttatgtgttgcttctattttacctcaaattgtagatatagggtaatcaataaaatccatccatgcctttcacacactaagt

SEQ ID NO: 4341 - protein, 957 aa, Homo sapiens; identical to SEQ ID NO: 4303

SEQ ID NO: 4342 - DNA, 5139 bp, Homo sapiens
aaaaaaaaaaaaaaaaaaaaaaaaaaaagaaaaaagaaaaaaaaaaggaggaggaggaggagggtgagagagaagctgggagagcagagaaaaggggccaccggtcgcccccccgcttccccgcacgcgctctccagccgcggccgcccgcctgccgcggtcaccccggcctctgcctctgtcccccagtgatcggatcaaggcgctgagcgaggccctgcctgcggggcggccatgcggcggtgacaggagcgcgaccgacacgcacgggcccctcgccccctctcgcctcccgtccgctcgccagctcccctcagccgaggctgctccgcggcggccgcagcccgcgcgcggcccacactcgcctcccctcggcacccccggccccggagctgcctggaggcggccgcactcggggatcatggcccaagttgcaatgtccaccctccccgttgaagatgaggagtcctcggagagcaggatggtggtgacattcctcatgtcagctctcgagtccatgtgtaaagaactggccaagtccaaagccgaagtggcctgcattgcagtgtatgaaacagacgtgtttgtcgtcggaactgaaagaggacgtgcttttgtcaataccagaaaggattttcaaaaagattttgtaaaatattgtgttgaagaagaagaaaaagctgcagagatgcataaaatgaaatctacaacccaggcaaatcggatgagtgtagatgctgtagaaattgaaacactcagaaaaacagttgaggactatttctgcttttgctatgggaaagctttaggcaaatccacagtggtacctgtaccatatgagaagatgctgcgagaccagtcggctgtggtagtgcaggggcttccggaaggtgttgcctttaaacaccccgagaactatgatcttgcaaccctgaaatggattttggagaacaaagcagggatttcattcatcattaagagaccttttttagagccaaagaagcatgtaggtggtcgtgtgatggtaacagatgctgacaggtcaatactatctccaggtggaagttgtggccccatcaaagtgaaaactgaacccacagaagattctggcatttccctggaaatggcagctgtgacagtaaaggaagaatcagaagatcctgattattatcaatataacattcaagcaggcccttctgaaactgatgatgttgatgaaaaacagcccctatcgaagcctttgcaaggaagccaccattcttcagagggcaatgaaggcacagaaatggaagtaccagcagaagatgatgattattctccaccgtctaagagaccaaaggccaatgagctaccgcagccaccagtcccggaacccgccaatgctgggaagcggaaagtgagggagttcaacttcgagaaatggaatgctcgcatcactgatctacgtaaacaagttgaagaattgtttgaaaggaaatatgctcaagccataaaagccaaaggtccggtgacgatcccgtaccctcttttccagtctcatgttgaagatctttatgtagaaggacttcctgaaggaattccttttagaaggccatctacttacggaattcctcgcctggagaggatattacttgcaaaggaaaggattcgttttgtgattaagaaacatgagcttctgaattcaacacgtgaagatttacagcttgataagccagcttcaggagtaaaggaagaatggtatgccagaatcactaaattaagaaagatggtggatcagcttttctgcaaaaaatttgcggaagccttggggagcactgaagccaaggctgtaccgtaccaaaaatttgaggcacacccgaatgatctgtacgtggaaggactgccagaaaacattcctttccgaagtccctcatggtatggaatcccaaggctggaaaaaatcattcaagtgggcaatcgaattaaatttgttattaaaagaccagaacttctgactcacagtaccactgaagttactcagccaagaacgaatacaccagctcaagctcttggactcaccgaggcagtaaaagtaccatatcctgtgtttgaatcaaacccggagttcttgtatgtggaaggcttgccagaggggattcccttccgaagccctacctggtttggaattccacgacttgaaaggatcgtccgcgggagtaataaaatcaagttcgttgttaaaaaacctgaactagttatttcctacttgcctcctgggatggctagtaaaataaacactaaagctttgcagtcccccaaaagaccacgaagtcctgggagtaattcaaaggttcctgaaattgaggtcaccgtggaaggccctaataacaacaatcctcaaacctcagctgttcgaaccccgacccagactaacggttctaacgttcccttcaagccacgagggagagagttttcctttgaggcctggaatgccaaaatcacggacctaaaacagaaagttgaaaatctcttcaatgagaaatgtggggaagctcttggccttaaacaagctgtgaaggtgccgttcgcgttatttgagtctttcccggaagacttttatgtggaaggcttacctgagggtgtgccattccgaagaccatcgacttttggcattccgaggctggagaagatactcagaaacaaagccaaaattaagttcatcattaaaaagcccgaaatgtttgagacggcgattaaggagagcacctcctctaagagccctcccagaaaaataaattcatcacccaatgttaatactactgcatcaggtgttgaagaccttaacatcattcaggtgacaattccagatgatgataatgaaagactctcgaaagttgaaaaagctagacagctaagagaacaagtgaatgacctctttagtcggaaatttggtgaagctattggtatgggttttcctgtgaaagttccctacaggaaaatcacaattaaccctggctgtgtggtggttgatggcatgcccccgggggtgtccttcaaagcccccagctacctggaaatcagctccatgagaaggatcttagactctgccgagtttatcaaattcacggtcattagaccatttccaggacttgtgattaataaccagctggttgatcagagtgagtcagaaggccccgtgatacaagaatcagctgaaccaagccagttggaagttccagccacagaagaaataaaagagactgatggaagctctcagatcaagcaagaaccagaccccacgtggtagacctcttccctcctagggtaaatcagcttctgtgtcagggatgctgtgtggtgtccatctgaaccccctgcatacgcgtagctaatgtgatctccccactttcacataagatggtggccctgccttcagggaatgtgggagccaggtgggagccttcccggatatttaagctagaagattctacagggagattctccttggatcaatatatgtctctcagtcaaagatgtaaaagcacttttgccttaaaaagaatgttctgtttctaaatagagtcaacgttgtcctcctcattggaattcactatgagtcagaatcattagactgacttttttttttccatagtaatagtattttgcagagtctcacagagctgcagatcttttgttcatcttgcagagttaacaagtctgatcctgttagtccagatttcttaaatttggccaagttataataggagcagtagcttgagacccgaagtcaggaaactttgacaatggatttttttttttaatccagagacttgtactggaatttgccttaccctgtcagctcatggacttaaggtttcatcccgctttatgagtgcttctgaatccaagtcattgttacctgaatttgcaaattaagttgtgatattcgtgactgttaaattcctgtaattagattaacctctttgcttgcttgtttgttttctctcctattttagcttaaagtatcagtggttgagaagagcttttcggacctgttactaccccaagctgtgtaatatacttgtataacagaaataccttctatacaaacctttttttctacttttagatagaaatgtctactttttcagcagttctgtgaattaaagagcagagtgactgtgggtctggaatggctggtgtacttgggaatgtactatcaggattttacagcaatgctgggaaatgacagggaaaatgacaggaatgaatctcaccagattttttatgtactcagcagagccttgagttacggtgtttattttccaatcaagtgaagatatctcctacttctcctactggaacatctcagcttctgcagtgaagaaaaattcctgtgatagttcagttctttagtttttctatttgaaaaaaaaaaatcatttaaatgatcctttgttcacggctctccttaatgactgagtgaacagttcctatctgtatatttgactaaaccttttcctaagctatctctcatggttcctatgtttttttatcataattaaaagcaaaaccatctggatcacctaacagtcagaggtcagtatctcagcgtgtgaattatagaggaaatacagagagaacctcttccacttttacttttcgtccaaataaaatgcatggtgtaccagaagttgaagatcgggttgaggattggggctagctcgatgacactaaggccccaacatcgcgggacctgctgtggcgcggattcttaggaacgctgttctagccggccccctctccaggggtcgccgtggccggcattatttcctagttcttcttgtaaccctgaggtgccagcgcggggagtgaggaggggtcagggggctaaggatgcaacctctgacgttctgcgccttcctaggagagtcttacatgtgttgagatttcacaagcaatgcgagttgtaaaataccagctctacaagaagctaggctctgtgacggcatagttttcagtagctttatcacaatattcacaatggagaattatatgacatggtagcagaaataggcccttttatgtgttgcttctattttacctcaaattgtagatatagggtaatcaataaaatccatccatgcctttcacacactaagt

SEQ ID NO: 4343 - protein, 953 aa, Homo sapiens; identical to SEQ ID NO: 4179

SEQ ID NO: 4344 - DNA, 4418 bp, Homo sapiens
aaaaaaaaaaaaaaaaaaaaaaaaaaaagaaaaaagaaaaaaaaaaggaggaggaggaggagggtgagagagaagctgggagagcagagaaaaggggccaccggtcgcccccccgcttccccgcacgcgctctccagccgcggccgcccgcctgccgcggtcaccccggcctctgcctctgtcccccagtgatcggatcaaggcgctgagcgaggccctgcctgcggggcggccatgcggcggtgacaggagcgcgaccgacacgcacgggcccctcgccccctctcgcctcccgtccgctcgccagctcccctcagccgaggctgctccgcggcggccgcagcccgcgcgcggcccacactcgcctcccctcggcacccccggccccggagctgcctggaggcggccgcactcggtgtaaagaactggccaagtccaaagccgaagtggcctgcattgcagtgtatgaaacagacgtgtttgtcgtcggaactgaaagaggacgtgcttttgtcaataccagaaaggattttcaaaaagattttgtaaaatattgtgttgaagaagaagaaaaagctgcagagatgcataaaatgaaatctacaacccaggcaaatcggatgagtgtagatgctgtagaaattgaaacactcagaaaaacagttgaggactatttctgcttttgctatgggaaagctttaggcaaatccacagtggtacctgtaccatatgagaagatgctgcgagaccagtcggctgtggtagtgcaggggcttccggaaggtgttgcctttaaacaccccgagaactatgatcttgcaaccctgaaatggattttggagaacaaagcagggatttcattcatcattaagagaccttttttagagccaaagaagcatgtaggtggtcgtgtgatggtaacagatgctgacaggtcaatactatctccaggtggaagttgtggccccatcaaagtgaaaactgaacccacagaagattctggcatttccctggaaatggcagctgtgacagtaaaggaagaatcagaagatcctgattattatcaatataacattcaaggaagccaccattcttcagagggcaatgaaggcacagaaatggaagtaccagcagaagattctactcaacatgtcccttcagaaacaagtgaggaccctgaagttgaggtgactattgaagatgatgattattctccaccgtctaagagaccaaaggccaatgagctaccgcagccaccagtcccggaacccgccaatgctgggaagcggaaagtgagggagttcaacttcgagaaatggaatgctcgcatcactgatctacgtaaacaagttgaagaattgtttgaaaggaaatatgctcaagccataaaagccaaaggtccggtgacgatcccgtaccctcttttccagtctcatgttgaagatctttatgtagaaggacttcctgaaggaattccttttagaaggccatctacttacggaattcctcgcctggagaggatattacttgcaaaggaaaggattcgttttgtgattaagaaacatgagcttctgaattcaacacgtgaagatttacagcttgataagccagcttcaggagtaaaggaagaatggtatgccagaatcactaaattaagaaagatggtggatcagcttttctgcaaaaaatttgcggaagccttggggagcactgaagccaaggctgtaccgtaccaaaaatttgaggcacacccgaatgatctgtacgtggaaggactgccagaaaacattcctttccgaagtccctcatggtatggaatcccaaggctggaaaaaatcattcaagtgggcaatcgaattaaatttgttattaaaagaccagaacttctgactcacagtaccactgaagttactcagccaagaacgaatacaccagtcaaagaagattggaatgtcagaattaccaagctacggaagcaagtggaagagatttttaatttgaaatttgctcaagctcttggactcaccgaggcagtaaaagtaccatatcctgtgtttgaatcaaacccggagttcttgtatgtggaaggcttgccagaggggattcccttccgaagccctacctggtttggaattccacgacttgaaaggatcgtccgcgggagtaataaaatcaagttcgttgttaaaaaacctgaactagttatttcctacttgcctcctgggatggctagtaaaataaacactaaagctttgcagtcccccaaaagaccacgaagtcctgggagtaattcaaaggttcctgaaattgaggtcaccgtggaaggccctaataacaacaatcctcaaacctcagctgttcgaaccccgacccagactaacggttctaacgttcccttcaagccacgagggagagagttttcctttgaggcctggaatgccaaaatcacggacctaaaacagaaagttgaaaatctcttcaatgagaaatgtggggaagctcttggccttaaacaagctgtgaaggtgccgttcgcgttatttgagtctttcccggaagacttttatgtggaaggcttacctgagggtgtgccattccgaagaccatcgacttttggcattccgaggctggagaagatactcagaaacaaagccaaaattaagttcatcattaaaaagcccgaaatgtttgagacggcgattaaggagagcacctcctctaagagccctcccagaaaaataaattcatcacccaatgttaatactactgcatcaggtgttgaagaccttaacatcattcaggtgacaattccagatgatgataatgaaagactctcgaaagttgaaaaagctagacagctaagagaacaagtgaatgacctctttagtcggaaatttggtgaagctattggtatgggttttcctgtgaaagttccctacaggaaaatcacaattaaccctggctgtgtggtggttgatggcatgcccccgggggtgtccttcaaagcccccagctacctggaaatcagctccatgagaaggatcttagactctgccgagtttatcaaattcacggtcattagaccatttccaggacttgtgattaataaccagctggttgatcagagtgagtcagaaggccccgtgatacaagaatcagctgaaccaagccagttggaagttccagccacagaagaaataaaagagactgatggaagctctcagatcaagcaagaaccagaccccacgtggtagacctcttccctcctaggcttaaagtatcagtggttgagaagagcttttcggacctgttactaccccaagctgtgtaatatacttgtataacagaaataccttctatacaaacctttttttctacttttagatagaaatgtctactttttcagcagttctgtgaattaaagagcagagtgactgtgggtctggaatggctggtgtacttgggaatgtactatcaggattttacagcaatgctgggaaatgacagggaaaatgacaggaatgaatctcaccagattttttatgtactcagcagagccttgagttacggtgtttattttccaatcaagtgaagatatctcctacttctcctactggaacatctcagcttctgcagtgaagaaaaattcctgtgatagttcagttctttagtttttctatttgaaaaaaaaaaatcatttaaatgatcctttgttcacggctctccttaatgactgagtgaacagttcctatctgtatatttgactaaaccttttcctaagctatctctcatggttcctatgtttttttatcataattaaaagcaaaaccatctggatcacctaacagtcagaggtcagtatctcagcgtgtgaattatagaggaaatacagagagaacctcttccacttttacttttcgtccaaataaaatgcatggtgtaccagaagttgaagatcgggttgaggattggggctagctcgatgacactaaggccccaacatcgcgggacctgctgtggcgcggattcttaggaacgctgttctagccggccccctctccaggggtcgccgtggccggcattatttcctagttcttcttgtaaccctgaggtgccagcgcggggagtgaggaggggtcagggggctaaggatgcaacctctgacgttctgcgccttcctaggagagtcttacatgtgttgagatttcacaagcaatgcgagttgtaaaataccagctctacaagaagctaggctctgtgacggcatagttttcagtagctttatcacaatattcacaatggagaattatatgacatggtagcagaaataggcccttttatgtgttgcttctattttacctcaaattgtagatatagggtaatcaataaaatccatccatgcctttcacacactaagt

SEQ ID NO: 4345 - protein, 889 aa, Homo sapiens; identical to SEQ ID NO: 4073

SEQ ID NO: 4346 - DNA, 3999 bp, Homo sapiens
aaaaaaaaaaaaaaaaaaaaaaaaaaaagaaaaaagaaaaaaaaaaggaggaggaggaggagggtgagagagaagctgggagagcagagaaaaggggccaccggtcgcccccccgcttccccgcacgcgctctccagccgcggccgcccgcctgccgcggtcaccccggcctctgcctctgtcccccagtgatcggatcaaggcgctgagcgaggccctgcctgcggggcggccatgcggcggtgacaggagcgcgaccgacacgcacgggcccctcgccccctctcgcctcccgtccgctcgccagctcccctcagccgaggctgctccgcggcggccgcagcccgcgcgcggcccacactcgcctcccctcggcacccccggccccggagctgcctggaggcggccgcactcggtgtaaagaactggccaagtccaaagccgaagtggcctgcattgcagtgtatgaaacagacgtgtttgtcgtcggaactgaaagaggacgtgcttttgtcaataccagaaaggattttcaaaaagattttgtaaaatattgtgttgaagaagaagaaaaagctgcagagatgcataaaatgaaatctacaacccaggcaaatcggatgagtgtagatgctgtagaaattgaaacactcagaaaaacagttgaggactatttctgcttttgctatgggaaagctttaggcaaatccacagtggtacctgtaccatatgagaagatgctgcgagaccagtcggctgtggtagtgcaggggcttccggaaggtgttgcctttaaacaccccgagaactatgatcttgcaaccctgaaatggattttggagaacaaagcagggatttcattcatcattaagagaccttttttagagccaaagaagcatgtaggtggtcgtgtgatggtaacagatgctgacaggtcaatactatctccaggtggaagttgtggccccatcaaagtgaaaactgaacccacagaagattctggcatttccctggaaatggcagctgtgacagtaaaggaagaatcagaagatcctgattattatcaatataacattcaaggaagccaccattcttcagagggcaatgaaggcacagaaatggaagtaccagcagaagatgatgattattctccaccgtctaagagaccaaaggccaatgagctaccgcagccaccagtcccggaacccgccaatgctgggaagcggaaagtgagggagttcaacttcgagaaatggaatgctcgcatcactgatctacgtaaacaagttgaagaattgtttgaaaggaaatatgctcaagccataaaagccaaaggtccggtgacgatcccgtaccctcttttccagtctcatgttgaagatctttatgtagaaggacttcctgaaggaattccttttagaaggccatctacttacggaattcctcgcctggagaggatattacttgcaaaggaaaggattcgttttgtgattaagaaacatgagcttctgaattcaacacgtgaagatttacagcttgataagccagcttcaggagtaaaggaagaatggtatgccagaatcactaaattaagaaagatggtggatcagcttttctgcaaaaaatttgcggaagccttggggagcactgaagccaaggctgtaccgtaccaaaaatttgaggcacacccgaatgatctgtacgtggaaggactgccagaaaacattcctttccgaagtccctcatggtatggaatcccaaggctggaaaaaatcattcaagtgggcaatcgaattaaatttgttattaaaagaccagaacttctgactcacagtaccactgaagttactcagccaagaacgaatacaccagctcaagctcttggactcaccgaggcagtaaaagtaccatatcctgtgtttgaatcaaacccggagttcttgtatgtggaaggcttgccagaggggattcccttccgaagccctacctggtttggaattccacgacttgaaaggatcgtccgcgggagtaataaaatcaagttcgttgttaaaaaacctgaactagttatttcctacttgcctcctgggatggctagtaaaataaacactaaagctttgcagtcccccaaaagaccacgaagtcctgggagtaattcaaaggttcctgaaattgaggtcaccgtggaaggccctaataacaacaatcctcaaacctcagctgttcgaaccccgacccagactaacggttctaacgttcccttcaagccacgagggagagagttttcctttgaggcctggaatgccaaaatcacggacctaaaacagaaagttgaaaatctcttcaatgagaaatgtggggaagctcttggccttaaacaagctgtgaaggtgccgttcgcgttatttgagtctttcccggaagacttttatgtggaaggcttacctgagggtgtgccattccgaagaccatcgacttttggcattccgaggctggagaagatactcagaaacaaagccaaaattaagttcatcattaaaaagcccgaaatgtttgagacggcgattaaggagagcacctcctctaagagccctcccagaaaaataaattcatcacccaatgttaatactactgcatcaggtgttgaagaccttaacatcattcaggtgacaattccagatgatgataatgaaagactctcgaaagttgaaaaagctagacagctaagagaacaagtgaatgacctctttagtcggaaatttggtgaagctattggtatgggttttcctgtgaaagttccctacaggaaaatcacaattaaccctggctgtgtggtggttgatggcatgcccccgggggtgtccttcaaagcccccagctacctggaaatcagctccatgagaaggatcttagactctgccgagtttatcaaattcacggtcattagaccatttccaggacttgtgattaataaccagctggttgatcagagtgagtcagaaggccccgtgatacaagaatcagctgaaccaagccagttggaagttccagccacagaagaaataaaagagactgatggaagctctcagatcaagcaagaaccagaccccacgtggtagacctcttccctcctaggagccttgagttacggtgtttattttccaatcaagtgaagatatctcctacttctcctactggaacatctcagcttctgcagtgaagaaaaattcctgtgatagttcagttctttagtttttctatttgaaaaaaaaaaatcatttaaatgatcctttgttcacggctctccttaatgactgagtgaacagttcctatctgtatatttgactaaaccttttcctaagctatctctcatggttcctatgtttttttatcataattaaaagcaaaaccatctggatcacctaacagtcagaggtcagtatctcagcgtgtgaattatagaggaaatacagagagaacctcttccacttttacttttcgtccaaataaaatgcatggtgtaccagaagttgaagatcgggttgaggattggggctagctcgatgacactaaggccccaacatcgcgggacctgctgtggcgcggattcttaggaacgctgttctagccggccccctctccaggggtcgccgtggccggcattatttcctagttcttcttgtaaccctgaggtgccagcgcggggagtgaggaggggtcagggggctaaggatgcaacctctgacgttctgcgccttcctaggagagtcttacatgtgttgagatttcacaagcaatgcgagttgtaaaataccagctctacaagaagctaggctctgtgacggcatagttttcagtagctttatcacaatattcacaatggagaattatatgacatggtagcagaaataggcccttttatgtgttgcttctattttacctcaaattgtagatatagggtaatcaataaaatccatccatgcctttcacacactaagt

SEQ ID NO: 4347 - protein, 844 aa, Homo sapiens; identical to SEQ ID NO: 4247

SEQ ID NO: 4348 - DNA, 4062 bp, Homo sapiens
aaaaaaaaaaaaaaaaaaaaaaaaaaaagaaaaaagaaaaaaaaaaggaggaggaggaggagggtgagagagaagctgggagagcagagaaaaggggccaccggtcgcccccccgcttccccgcacgcgctctccagccgcggccgcccgcctgccgcggtcaccccggcctctgcctctgtcccccagtgatcggatcaaggcgctgagcgaggccctgcctgcggggcggccatgcggcggtgacaggagcgcgaccgacacgcacgggcccctcgccccctctcgcctcccgtccgctcgccagctcccctcagccgaggctgctccgcggcggccgcagcccgcgcgcggcccacactcgcctcccctcggcacccccggccccggagctgcctggaggcggccgcactcggtgtaaagaactggccaagtccaaagccgaagtggcctgcattgcagtgtatgaaacagacgtgtttgtcgtcggaactgaaagaggacgtgcttttgtcaataccagaaaggattttcaaaaagattttgtaaaatattgtgttgaagaagaagaaaaagctgcagagatgcataaaatgaaatctacaacccaggcaaatcggatgagtgtagatgctgtagaaattgaaacactcagaaaaacagttgaggactatttctgcttttgctatgggaaagctttaggcaaatccacagtggtacctgtaccatatgagaagatgctgcgagaccagtcggctgtggtagtgcaggggcttccggaaggtgttgcctttaaacaccccgagaactatgatcttgcaaccctgaaatggattttggagaacaaagcagggatttcattcatcattaagagaccttttttagagccaaagaagcatgtaggtggtcgtgtgatggtaacagatgctgacaggtcaatactatctccaggtggaagttgtggccccatcaaagtgaaaactgaacccacagaagattctggcatttccctggaaatggcagctgtgacagtaaaggaagaatcagaagatcctgattattatcaatataacattcaaggaagccaccattcttcagagggcaatgaaggcacagaaatggaagtaccagcagaagattctactcaacatgtcccttcagaaacaagtgaggaccctgaagttgaggtgactattgaagatgatgattattctccaccgtctaagagaccaaaggccaatgagctaccgcagccaccagtcccggaacccgccaatgctgggaagcggaaagtgagggagttcaacttcgagaaatggaatgctcgcatcactgatctacgtaaacaagttgaagaattgtttgaaaggaaatatgctcaagccataaaagccaaaggtccggtgacgatcccgtaccctcttttccagtctcatgttgaagatctttatgtagaaggacttcctgaaggaattccttttagaaggccatctacttacggaattcctcgcctggagaggatattacttgcaaaggaaaggattcgttttgtgattaagaaacatgagcttctgaattcaacacgtgaagatttacagcttgataagccagcttcaggagtaaaggaagaatggtatgccagaatcactaaattaagaaagatggtggatcagcttttctgcaaaaaatttgcggaagccttggggagcactgaagccaaggctgtaccgtaccaaaaatttgaggcacacccgaatgatctgtacgtggaaggactgccagaaaacattcctttccgaagtccctcatggtatggaatcccaaggctggaaaaaatcattcaagtgggcaatcgaattaaatttgttattaaaagaccagaacttctgactcacagtaccactgaagttactcagccaagaacgaatacaccagctcaagctcttggactcaccgaggcagtaaaagtaccatatcctgtgtttgaatcaaacccggagttcttgtatgtggaaggcttgccagaggggattcccttccgaagccctacctggtttggaattccacgacttgaaaggatcgtccgcgggagtaataaaatcaagttcgttgttaaaaaacctgaactagttatttcctacttgcctcctgggatggctagtaaaataaacactaaagctttgcagtcccccaaaagaccacgaagtcctgggagtaattcaaaggttcctgaaattgaggtcaccgtggaaggccctaataacaacaatcctcaaacctcagctgttcgaaccccgacccagactaacggttctaacgttcccttcaagccacgagggagagagttttcctttgaggcctggaatgccaaaatcacggacctaaaacagaaagttgaaaatctcttcaatgagaaatgtggggaagctcttggccttaaacaagctgtgaaggtgccgttcgcgttatttgagtctttcccggaagacttttatgtggaaggcttacctgagggtgtgccattccgaagaccatcgacttttggcattccgaggctggagaagatactcagaaacaaagccaaaattaagttcatcattaaaaagcccgaaatgtttgagacggcgattaaggagagcacctcctctaagagccctcccagaaaaataaattcatcacccaatgttaatactactgcatcaggtgttgaagaccttaacatcattcaggtgacaattccagatgatgataatgaaagactctcgaaagttgaaaaagctagacagctaagagaacaagtgaatgacctctttagtcggaaatttggtgaagctattggtatgggttttcctgtgaaagttccctacaggaaaatcacaattaaccctggctgtgtggtggttgatggcatgcccccgggggtgtccttcaaagcccccagctacctggaaatcagctccatgagaaggatcttagactctgccgagtttatcaaattcacggtcattagaccatttccaggacttgtgattaataaccagctggttgatcagagtgagtcagaaggccccgtgatacaagaatcagctgaaccaagccagttggaagttccagccacagaagaaataaaagagactgatggaagctctcagatcaagcaagaaccagaccccacgtggtagacctcttccctcctaggagccttgagttacggtgtttattttccaatcaagtgaagatatctcctacttctcctactggaacatctcagcttctgcagtgaagaaaaattcctgtgatagttcagttctttagtttttctatttgaaaaaaaaaaatcatttaaatgatcctttgttcacggctctccttaatgactgagtgaacagttcctatctgtatatttgactaaaccttttcctaagctatctctcatggttcctatgtttttttatcataattaaaagcaaaaccatctggatcacctaacagtcagaggtcagtatctcagcgtgtgaattatagaggaaatacagagagaacctcttccacttttacttttcgtccaaataaaatgcatggtgtaccagaagttgaagatcgggttgaggattggggctagctcgatgacactaaggccccaacatcgcgggacctgctgtggcgcggattcttaggaacgctgttctagccggccccctctccaggggtcgccgtggccggcattatttcctagttcttcttgtaaccctgaggtgccagcgcggggagtgaggaggggtcagggggctaaggatgcaacctctgacgttctgcgccttcctaggagagtcttacatgtgttgagatttcacaagcaatgcgagttgtaaaataccagctctacaagaagctaggctctgtgacggcatagttttcagtagctttatcacaatattcacaatggagaattatatgacatggtagcagaaataggcccttttatgtgttgcttctattttacctcaaattgtagatatagggtaatcaataaaatccatccatgcctttcacacactaagt

SEQ ID NO: 4349 - protein, 865 aa, Homo sapiens; identical to SEQ ID NO: 4043

SEQ ID NO: 4350 - DNA, 5231 bp, Homo sapiens
aaaaaaaaaaaaaaaaaaaaaaaaaaaagaaaaaagaaaaaaaaaaggaggaggaggaggagggtgagagagaagctgggagagcagagaaaaggggccaccggtcgcccccccgcttccccgcacgcgctctccagccgcggccgcccgcctgccgcggtcaccccggcctctgcctctgtcccccagtgatcggatcaaggcgctgagcgaggccctgcctgcggggcggccatgcggcggtgacaggagcgcgaccgacacgcacgggcccctcgccccctctcgcctcccgtccgctcgccagctcccctcagccgaggctgctccgcggcggccgcagcccgcgcgcggcccacactcgcctcccctcggcacccccggccccggagctgcctggaggcggccgcactcggtgtaaagaactggccaagtccaaagccgaagtggcctgcattgcagtgtatgaaacagacgtgtttgtcgtcggaactgaaagaggacgtgcttttgtcaataccagaaaggattttcaaaaagattttgtaaaatattgtgttgaagaagaagaaaaagctgcagagatgcataaaatgaaatctacaacccaggcaaatcggatgagtgtagatgctgtagaaattgaaacactcagaaaaacagttgaggactatttctgcttttgctatgggaaagctttaggcaaatccacagtggtacctgtaccatatgagaagatgctgcgagaccagtcggctgtggtagtgcaggggcttccggaaggtgttgcctttaaacaccccgagaactatgatcttgcaaccctgaaatggattttggagaacaaagcagggatttcattcatcattaagagaccttttttagagccaaagaagcatgtaggtggtcgtgtgatggtaacagatgctgacaggtcaatactatctccaggtggaagttgtggccccatcaaagtgaaaactgaacccacagaagattctggcatttccctggaaatggcagctgtgacagtaaaggaagaatcagaagatcctgattattatcaatataacattcaagcaggcccttctgaaactgatgatgttgatgaaaaacagcccctatcgaagcctttgcaaggaagccaccattcttcagagggcaatgaaggcacagaaatggaagtaccagcagaagattctactcaacatgtcccttcagaaacaagtgaggaccctgaagttgaggtgactattgaagatgatgattattctccaccgtctaagagaccaaaggccaatgagctaccgcagccaccagtcccggaacccgccaatgctgggaagcggaaagtgagggagttcaacttcgagaaatggaatgctcgcatcactgatctacgtaaacaagttgaagaattgtttgaaaggaaatatgctcaagccataaaagccaaaggtccggtgacgatcccgtaccctcttttccagtctcatgttgaagatctttatgtagaaggacttcctgaaggaattccttttagaaggccatctacttacggaattcctcgcctggagaggatattacttgcaaaggaaaggattcgttttgtgattaagaaacatgagcttctgaattcaacacgtgaagatttacagcttgataagccagcttcaggagtaaaggaagaatggtatgccagaatcactaaattaagaaagatggtggatcagcttttctgcaaaaaatttgcggaagccttggggagcactgaagccaaggctgtaccgtaccaaaaatttgaggcacacccgaatgatctgtacgtggaaggactgccagaaaacattcctttccgaagtccctcatggtatggaatcccaaggctggaaaaaatcattcaagtgggcaatcgaattaaatttgttattaaaagaccagaacttctgactcacagtaccactgaagttactcagccaagaacgaatacaccagtcaaagaagattggaatgtcagaattaccaagctacggaagcaagtggaagagatttttaatttgaaatttgcttagatttgttgacagcggtttcctggagtgctgtcttgagaacgattctgaggaggctcagcaagaaagagtgtttcagttgattgggtgtgtctgtcatggagaaggaactcaagctcttggactcaccgaggcagtaaaagtaccatatcctgtgtttgaatcaaacccggagttcttgtatgtggaaggcttgccagaggggattcccttccgaagccctacctggtttggaattccacgacttgaaaggatcgtccgcgggagtaataaaatcaagttcgttgttaaaaaacctgaactagttatttcctacttgcctcctgggatggctagtaaaataaacactaaagctttgcagtcccccaaaagaccacgaagtcctgggagtaattcaaaggttcctgaaattgaggtcaccgtggaaggccctaataacaacaatcctcaaacctcagctgttcgaaccccgacccagactaacggttctaacgttcccttcaagccacgagggagagagttttcctttgaggcctggaatgccaaaatcacggacctaaaacagaaagttgaaaatctcttcaatgagaaatgtggggaagctcttggccttaaacaagctgtgaaggtgccgttcgcgttatttgagtctttcccggaagacttttatgtggaaggcttacctgagggtgtgccattccgaagaccatcgacttttggcattccgaggctggagaagatactcagaaacaaagccaaaattaagttcatcattaaaaagcccgaaatgtttgagacggcgattaaggagagcacctcctctaagagccctcccagaaaaataaattcatcacccaatgttaatactactgcatcaggtgttgaagaccttaacatcattcaggtgacaattccagatgatgataatgaaagactctcgaaagttgaaaaagctagacagctaagagaacaagtgaatgacctctttagtcggaaatttggtgaagctattggtatgggttttcctgtgaaagttccctacaggaaaatcacaattaaccctggctgtgtggtggttgatggcatgcccccgggggtgtccttcaaagcccccagctacctggaaatcagctccatgagaaggatcttagactctgccgagtttatcaaattcacggtcattagaccatttccaggacttgtgattaataaccagctggttgatcagagtgagtcagaaggccccgtgatacaagaatcagctgaaccaagccagttggaagttccagccacagaaggtaaaaggacctcttccctcctagggtaaatcagcttctgtgtcagggatgctgtgtggtgtccatctgaaccccctgcatacgcgtagctaatgtgatctccccactttcacataagatggtggccctgccttcagggaatgtgggagccaggtgggagccttcccggatatttaagctagaagattctacagggagattctccttggatcaatatatgtctctcagtcaaagatgtaaaagcacttttgccttaaaaagaatgttctgtttctaaatagagtcaacgttgtcctcctcattggaattcactatgagtcagaatcattagactgacttttttttttccatagtaatagtattttgcagagtctcacagagctgcagatcttttgttcatcttgcagagttaacaagtctgatcctgttagtccagatttcttaaatttggccaagttataataggagcagtagcttgagacccgaagtcaggaaactttgacaatggatttttttttttaatccagagacttgtactggaatttgccttaccctgtcagctcatggacttaaggtttcatcccgctttatgagtgcttctgaatccaagtcattgttacctgaatttgcaaattaagttgtgatattcgtgactgttaaattcctgtaattagattaacctctttgcttgcttgtttgttttctctcctattttagcttaaagtatcagtggttgagaagagcttttcggacctgttactaccccaagctgtgtaatatacttgtataacagaaataccttctatacaaacctttttttctacttttagatagaaatgtctactttttcagcagttctgtgaattaaagagcagagtgactgtgggtctggaatggctggtgtacttgggaatgtactatcaggattttacagcaatgctgggaaatgacagggaaaatgacaggaatgaatctcaccagattttttatgtactcagcagagccttgagttacggtgtttattttccaatcaagtgaagatatctcctacttctcctactggaacatctcagcttctgcagtgaagaaaaattcctgtgatagttcagttctttagtttttctatttgaaaaaaaaaaatcatttaaatgatcctttgttcacggctctccttaatgactgagtgaacagttcctatctgtatatttgactaaaccttttcctaagctatctctcatggttcctatgtttttttatcataattaaaagcaaaaccatctggatcacctaacagtcagaggtcagtatctcagcgtgtgaattatagaggaaatacagagagaacctcttccacttttacttttcgtccaaataaaatgcatggtgtaccagaagttgaagatcgggttgaggattggggctagctcgatgacactaaggccccaacatcgcgggacctgctgtggcgcggattcttaggaacgctgttctagccggccccctctccaggggtcgccgtggccggcattatttcctagttcttcttgtaaccctgaggtgccagcgcggggagtgaggaggggtcagggggctaaggatgcaacctctgacgttctgcgccttcctaggagagtcttacatgtgttgagatttcacaagcaatgcgagttgtaaaataccagctctacaagaagctaggctctgtgacggcatagttttcagtagctttatcacaatattcacaatggagaattatatgacatggtagcagaaataggcccttttatgtgttgcttctattttacctcaaattgtagatatagggtaatcaataaaatccatccatgcctttcacacactaagt

SEQ ID NO: 4351 - protein, 495 aa, Homo sapiens; identical to SEQ ID NO: 4057

SEQ ID NO: 4352 - DNA, 4694 bp, Homo sapiens
aaaaaaaaaaaaaaaaaaaaaaaaaaaagaaaaaagaaaaaaaaaaggaggaggaggaggagggtgagagagaagctgggagagcagagaaaaggggccaccggtcgcccccccgcttccccgcacgcgctctccagccgcggccgcccgcctgccgcggtcaccccggcctctgcctctgtcccccagtgatcggatcaaggcgctgagcgaggccctgcctgcggggcggccatgcggcggtgacaggagcgcgaccgacacgcacgggcccctcgccccctctcgcctcccgtccgctcgccagctcccctcagccgaggctgctccgcggcggccgcagcccgcgcgcggcccacactcgcctcccctcggcacccccggccccggagctgcctggaggcggccgcactcggggatcatggcccaagttgcaatgtccaccctccccgttgaagatgaggagtcctcggagagcaggatggtggtgacattcctcatgtcagctctcgagtccatgtgtaaagaactggccaagtccaaagccgaagtggcctgcattgcagtgtatgaaacagacgtgtttgtcgtcggaactgaaagaggacgtgcttttgtcaataccagaaaggattttcaaaaagattttgtaaaatattgtgttgaagaagaagaaaaagctgcagagatgcataaaatgaaatctacaacccaggcaaatcggatgagtgtagatgctgtagaaattgaaacactcagaaaaacagttgaggactatttctgcttttgctatgggaaagctttaggcaaatccacagtggtacctgtaccatatgagaagatgctgcgagaccagtcggctgtggtagtgcaggggcttccggaaggtgttgcctttaaacaccccgagaactatgatcttgcaaccctgaaatggattttggagaacaaagcagggatttcattcatcattaagagaccttttttagagccaaagaagcatgtaggtggtcgtgtgatggtaacagatgctgacaggtcaatactatctccaggtggaagttgtggccccatcaaagtgaaaactgaacccacagaagattctggcatttccctggaaatggcagctgtgacagtaaaggaagaatcagaagatcctgattattatcaatataacattcaagcaggcccttctgaaactgatgatgttgatgaaaaacagcccctatcgaagcctttgcaaggaagccaccattcttcagagggcaatgaaggcacagaaatggaagtaccagcagaagattctactcaacatgtcccttcagaaacaagtgaggaccctgaagttgaggtgactattgaagatgatgattattctccaccgtctaagagaccaaaggccaatgagctaccgcagccaccagtcccggaacccgccaatgctgggaagcggaaagtgagggagttcaacttcgagaaatggaatgctcgcatcactgatctacgtaaacaagttgaagaattgtttgaaaggaaatatgctcaagccataaaagccaaaggtccggtgacgatcccgtaccctcttttccagtctcatgttgaagatctttatgtagaaggacttcctgaaggaattccttttagaaggccatctacttacggaattcctcgcctggagaggatattacttgcaaaggaaaggattcgttttgtgattaagaaacatgagcttctgaattcaacacgtgaagatttacagcttgataagccagcttcaggagtaaaggaagaatggtatgccagaatcactaaattaagaaagatggtggatcagcttttctgcaaaaaatttgcggaagccttggggagcactgaagccaaggctgtaccgtaccaaaaatttgaggcacacccgaatgatctgtacgtggaaggactgccagaaaacattcctttccgaagtccctcatggtatggaatcccaaggctggaaaaaatcattcaagtgggcaatcgaattaaatttgttattaaaagaccagaacttctgactcacagtaccactgaagttactcagccaagaacgaatacaccagtcaaagaagattggaatgtcagaattaccaagctacggaagcaagtggaagagatttttaatttgaaatttgcttagatttgttgacagcggtttcctggagtgctgtcttgagaacgattctgaggaggctcagcaagaaagagtgtttcagttgattgggtgtgtctgtcatggagaaggaactcaagctcttggactcaccgaggcagtaaaagtaccatatcctgtgtttgaatcaaacccggagttcttgtatgtggaaggcttgccagaggggattcccttccgaagccctacctggtttggaattccacgacttgaaaggatcgtccgcgggagtaataaaatcaagttcgttgttaaaaaacctgaactagttatttcctacttgcctcctgggatggctagtaaaataaacactaaagctttgcagtcccccaaaagaccacgaagtcctgggagtaattcaaaggttcctgaaattgaggtcaccgtggaaggccctaataacaacaatcctcaaacctcagctgttcgaaccccgacccagactaacggttctaacgttcccttcaagccacgagggagagagttttcctttgaggcctggaatgccaaaatcacggacctaaaacagaaagttgaaaatctcttcaatgagaaatgtggggaagctcttggccttaaacaagctgtgaaggtgccgttcgcgttatttgagtctttcccggaagacttttatgtggaaggcttacctgagggtgtgccattccgaagaccatcgacttttggcattccgaggctggagaagatactcagaaacaaagccaaaattaagttcatcattaaaaagcccgaaatgtttgagacggcgattaaggagagcacctcctctaagagccctcccagaaaaataaattcatcacccaatgttaatactactgcatcaggtgttgaagaccttaacatcattcaggtgacaattccagatgatgataatgaaagactctcgaaagttgaaaaagctagacagctaagagaacaagtgaatgacctctttagtcggaaatttggtgaagctattggtatgggttttcctgtgaaagttccctacaggaaaatcacaattaaccctggctgtgtggtggttgatggcatgcccccgggggtgtccttcaaagcccccagctacctggaaatcagctccatgagaaggatcttagactctgccgagtttatcaaattcacggtcattagaccatttccaggacttgtgattaataaccagctggttgatcagagtgagtcagaaggccccgtgatacaagaatcagctgaaccaagccagttggaagttccagccacagaagaaataaaagagactgatggaagctctcagatcaagcaagaaccagaccccacgtggtagacctcttccctcctaggcttaaagtatcagtggttgagaagagcttttcggacctgttactaccccaagctgtgtaatatacttgtataacagaaataccttctatacaaacctttttttctacttttagatagaaatgtctactttttcagcagttctgtgaattaaagagcagagtgactgtgggtctggaatggctggtgtacttgggaatgtactatcaggattttacagcaatgctgggaaatgacagggaaaatgacaggaatgaatctcaccagattttttatgtactcagcagagccttgagttacggtgtttattttccaatcaagtgaagatatctcctacttctcctactggaacatctcagcttctgcagtgaagaaaaattcctgtgatagttcagttctttagtttttctatttgaaaaaaaaaaatcatttaaatgatcctttgttcacggctctccttaatgactgagtgaacagttcctatctgtatatttgactaaaccttttcctaagctatctctcatggttcctatgtttttttatcataattaaaagcaaaaccatctggatcacctaacagtcagaggtcagtatctcagcgtgtgaattatagaggaaatacagagagaacctcttccacttttacttttcgtccaaataaaatgcatggtgtaccagaagttgaagatcgggttgaggattggggctagctcgatgacactaaggccccaacatcgcgggacctgctgtggcgcggattcttaggaacgctgttctagccggccccctctccaggggtcgccgtggccggcattatttcctagttcttcttgtaaccctgaggtgccagcgcggggagtgaggaggggtcagggggctaaggatgcaacctctgacgttctgcgccttcctaggagagtcttacatgtgttgagatttcacaagcaatgcgagttgtaaaataccagctctacaagaagctaggctctgtgacggcatagttttcagtagctttatcacaatattcacaatggagaattatatgacatggtagcagaaataggcccttttatgtgttgcttctattttacctcaaattgtagatatagggtaatcaataaaatccatccatgcctttcacacactaagt

SEQ ID NO: 4353 - protein, 584 aa, Homo sapiens; identical to SEQ ID NO: 4053

SEQ ID NO: 4354 - DNA, 4343 bp, Homo sapiens
aaaaaaaaaaaaaaaaaaaaaaaaaaaagaaaaaagaaaaaaaaaaggaggaggaggaggagggtgagagagaagctgggagagcagagaaaaggggccaccggtcgcccccccgcttccccgcacgcgctctccagccgcggccgcccgcctgccgcggtcaccccggcctctgcctctgtcccccagtgatcggatcaaggcgctgagcgaggccctgcctgcggggcggccatgcggcggtgacaggagcgcgaccgacacgcacgggcccctcgccccctctcgcctcccgtccgctcgccagctcccctcagccgaggctgctccgcggcggccgcagcccgcgcgcggcccacactcgcctcccctcggcacccccggccccggagctgcctggaggcggccgcactcggtgtaaagaactggccaagtccaaagccgaagtggcctgcattgcagtgtatgaaacagacgtgtttgtcgtcggaactgaaagaggacgtgcttttgtcaataccagaaaggattttcaaaaagattttgtaaaatattgtgttgaagaagaagaaaaagctgcagagatgcataaaatgaaatctacaacccaggcaaatcggatgagtgtagatgctgtagaaattgaaacactcagaaaaacagttgaggactatttctgcttttgctatgggaaagctttaggcaaatccacagtggtacctgtaccatatgagaagatgctgcgagaccagtcggctgtggtagtgcaggggcttccggaaggtgttgcctttaaacaccccgagaactatgatcttgcaaccctgaaatggattttggagaacaaagcagggatttcattcatcattaagagaccttttttagagccaaagaagcatgtaggtggtcgtgtgatggtaacagatgctgacaggtcaatactatctccaggtggaagttgtggccccatcaaagtgaaaactgaacccacagaagattctggcatttccctggaaatggcagctgtgacagtaaaggaagaatcagaagatcctgattattatcaatataacattcaagcaggcccttctgaaactgatgatgttgatgaaaaacagcccctatcgaagcctttgcaaggaagccaccattcttcagagggcaatgaaggcacagaaatggaagtaccagcagaagatgatgattattctccaccgtctaagagaccaaaggccaatgagctaccgcagccaccagtcccggaacccgccaatgctgggaagcggaaagtgagggagttcaacttcgagaaatggaatgctcgcatcactgatctacgtaaacaagttgaagaattgtttgaaaggaaatatgctcaagccataaaagccaaaggtccggtgacgatcccgtaccctcttttccagtctcatgttgaagatctttatgtagaaggacttcctgaaggaattccttttagaaggccatctacttacggaattcctcgcctggagaggatattacttgcaaaggaaaggattcgttttgtgattaagaaacatgagcttctgaattcaacacgtgaagatttacagcttgataagccagcttcaggagtaaaggaagaatggtatgccagaatcactaaattaagaaagatggtggatcagcttttctgcaaaaaatttgcggaagccttggggagcactgaagccaaggctgtaccgtaccaaaaatttgaggcacacccgaatgatctgtacgtggaaggactgccagaaaacattcctttccgaagtccctcatggtatggaatcccaaggctggaaaaaatcattcaagtgggcaatcgaattaaatttgttattaaaagaccagaacttctgactcacagtaccactgaagttactcagccaagaacgaatacaccagctcaagctcttggactcaccgaggcagtaaaagtaccatatcctgtgtttgaatcaaacccggagttcttgtatgtggaaggcttgccagaggggattcccttccgaagccctacctggtttggaattccacgacttgaaaggatcgtccgcgggagtaataaaatcaagttcgttgttaaaaaacctgaactagttatttcctacttgcctcctgggatggctagtaaaataaacactaaagctttgcagtcccccaaaagaccacgaagtcctgggagtaattcaaaggttcctgaaattgaggtcaccgtggaaggccctaataacaacaatcctcaaacctcagctgttcgaaccccgacccagactaacggttctaacgttcccttcaagccacgagggagagagttttcctttgaggcctggaatgccaaaatcacggacctaaaacagaaagttgaaaatctcttcaatgagaaatgtggggaagctcttggccttaaacaagctgtgaaggtgccgttcgcgttatttgagtctttcccggaagacttttatgtggaaggcttacctgagggtgtgccattccgaagaccatcgacttttggcattccgaggctggagaagatactcagaaacaaagccaaaattaagttcatcattaaaaagcccgaaatgtttgagacggcgattaaggagagcacctcctctaagagccctcccagaaaaataaattcatcacccaatgttaatactactgcatcaggtgttgaagaccttaacatcattcaggtgacaattccagatgatgataatgaaagactctcgaaagttgaaaaagctagacagctaagagaacaagtgaatgacctctttagtcggaaatttggtgaagctattggtatgggttttcctgtgaaagttccctacaggaaaatcacaattaaccctggctgtgtggtggttgatggcatgcccccgggggtgtccttcaaagcccccagctacctggaaatcagctccatgagaaggatcttagactctgccgagtttatcaaattcacggtcattagaccatttccaggacttgtgattaataaccagctggttgatcagagtgagtcagaaggccccgtgatacaagaatcagctgaaccaagccagttggaagttccagccacagaagaaataaaagagactgatggaagctctcagatcaagcaagaaccagaccccacgtggtagacctcttccctcctaggcttaaagtatcagtggttgagaagagcttttcggacctgttactaccccaagctgtgtaatatacttgtataacagaaataccttctatacaaacctttttttctacttttagatagaaatgtctactttttcagcagttctgtgaattaaagagcagagtgactgtgggtctggaatggctggtgtacttgggaatgtactatcaggattttacagcaatgctgggaaatgacagggaaaatgacaggaatgaatctcaccagattttttatgtactcagcagagccttgagttacggtgtttattttccaatcaagtgaagatatctcctacttctcctactggaacatctcagcttctgcagtgaagaaaaattcctgtgatagttcagttctttagtttttctatttgaaaaaaaaaaatcatttaaatgatcctttgttcacggctctccttaatgactgagtgaacagttcctatctgtatatttgactaaaccttttcctaagctatctctcatggttcctatgtttttttatcataattaaaagcaaaaccatctggatcacctaacagtcagaggtcagtatctcagcgtgtgaattatagaggaaatacagagagaacctcttccacttttacttttcgtccaaataaaatgcatggtgtaccagaagttgaagatcgggttgaggattggggctagctcgatgacactaaggccccaacatcgcgggacctgctgtggcgcggattcttaggaacgctgttctagccggccccctctccaggggtcgccgtggccggcattatttcctagttcttcttgtaaccctgaggtgccagcgcggggagtgaggaggggtcagggggctaaggatgcaacctctgacgttctgcgccttcctaggagagtcttacatgtgttgagatttcacaagcaatgcgagttgtaaaataccagctctacaagaagctaggctctgtgacggcatagttttcagtagctttatcacaatattcacaatggagaattatatgacatggtagcagaaataggcccttttatgtgttgcttctattttacctcaaattgtagatatagggtaatcaataaaatccatccatgcctttcacacactaagt

SEQ ID NO: 4355 - protein, 864 aa, Homo sapiens; identical to SEQ ID NO: 4019

SEQ ID NO: 4356 - DNA, 4060 bp, Homo sapiens
aaaaaaaaaaaaaaaaaaaaaaaaaaaagaaaaaagaaaaaaaaaaggaggaggaggaggagggtgagagagaagctgggagagcagagaaaaggggccaccggtcgcccccccgcttccccgcacgcgctctccagccgcggccgcccgcctgccgcggtcaccccggcctctgcctctgtcccccagtgatcggatcaaggcgctgagcgaggccctgcctgcggggcggccatgcggcggtgacaggagcgcgaccgacacgcacgggcccctcgccccctctcgcctcccgtccgctcgccagctcccctcagccgaggctgctccgcggcggccgcagcccgcgcgcggcccacactcgcctcccctcggcacccccggccccggagctgcctggaggcggccgcactcggtgtaaagaactggccaagtccaaagccgaagtggcctgcattgcagtgtatgaaacagacgtgtttgtcgtcggaactgaaagaggacgtgcttttgtcaataccagaaaggattttcaaaaagattttgtaaaatattgtgttgaagaagaagaaaaagctgcagagatgcataaaatgaaatctacaacccaggcaaatcggatgagtgtagatgctgtagaaattgaaacactcagaaaaacagttgaggactatttctgcttttgctatgggaaagctttaggcaaatccacagtggtacctgtaccatatgagaagatgctgcgagaccagtcggctgtggtagtgcaggggcttccggaaggtgttgcctttaaacaccccgagaactatgatcttgcaaccctgaaatggattttggagaacaaagcagggatttcattcatcattaagagaccttttttagagccaaagaagcatgtaggtggtcgtgtgatggtaacagatgctgacaggtcaatactatctccaggtggaagttgtggccccatcaaagtgaaaactgaacccacagaagattctggcatttccctggaaatggcagctgtgacagtaaaggaagaatcagaagatcctgattattatcaatataacattcaaggaagccaccattcttcagagggcaatgaaggcacagaaatggaagtaccagcagaagatgatgattattctccaccgtctaagagaccaaaggccaatgagctaccgcagccaccagtcccggaacccgccaatgctgggaagcggaaagtgagggagttcaacttcgagaaatggaatgctcgcatcactgatctacgtaaacaagttgaagaattgtttgaaaggaaatatgctcaagccataaaagccaaaggtccggtgacgatcccgtaccctcttttccagtctcatgttgaagatctttatgtagaaggacttcctgaaggaattccttttagaaggccatctacttacggaattcctcgcctggagaggatattacttgcaaaggaaaggattcgttttgtgattaagaaacatgagcttctgaattcaacacgtgaagatttacagcttgataagccagcttcaggagtaaaggaagaatggtatgccagaatcactaaattaagaaagatggtggatcagcttttctgcaaaaaatttgcggaagccttggggagcactgaagccaaggctgtaccgtaccaaaaatttgaggcacacccgaatgatctgtacgtggaaggactgccagaaaacattcctttccgaagtccctcatggtatggaatcccaaggctggaaaaaatcattcaagtgggcaatcgaattaaatttgttattaaaagaccagaacttctgactcacagtaccactgaagttactcagccaagaacgaatacaccagtcaaagaagattggaatgtcagaattaccaagctacggaagcaagtggaagagatttttaatttgaaatttgctcaagctcttggactcaccgaggcagtaaaagtaccatatcctgtgtttgaatcaaacccggagttcttgaaaggatcgtccgcgggagtaataaaatcaagttcgttgttaaaaaacctgaactagttatttcctacttgcctcctgggatggctagtaaaataaacactaaagctttgcagtcccccaaaagaccacgaagtcctgggagtaattcaaaggttcctgaaattgaggtcaccgtggaaggccctaataacaacaatcctcaaacctcagctgttcgaaccccgacccagactaacggttctaacgttcccttcaagccacgagggagagagttttcctttgaggcctggaatgccaaaatcacggacctaaaacagaaagttgaaaatctcttcaatgagaaatgtggggaagctcttggccttaaacaagctgtgaaggtgccgttcgcgttatttgagtctttcccggaagacttttatgtggaaggcttacctgagggtgtgccattccgaagaccatcgacttttggcattccgaggctggagaagatactcagaaacaaagccaaaattaagttcatcattaaaaagcccgaaatgtttgagacggcgattaaggagagcacctcctctaagagccctcccagaaaaataaattcatcacccaatgttaatactactgcatcaggtgttgaagaccttaacatcattcaggtgacaattccagatgatgataatgaaagactctcgaaagttgaaaaagctagacagctaagagaacaagtgaatgacctctttagtcggaaatttggtgaagctattggtatgggttttcctgtgaaagttccctacaggaaaatcacaattaaccctggctgtgtggtggttgatggcatgcccccgggggtgtccttcaaagcccccagctacctggaaatcagctccatgagaaggatcttagactctgccgagtttatcaaattcacggtcattagaccatttccaggacttgtgattaataaccagctggttgatcagagtgagtcagaaggccccgtgatacaagaatcagctgaaccaagccagttggaagttccagccacagaagaaataaaagagactgatggaagctctcagatcaagcaagaaccagaccccacgtggtagacctcttccctcctaggcttaaagtatcagtggttgagaagagcttttcggacctgttactaccccaagctgtagccttgagttacggtgtttattttccaatcaagtgaagatatctcctacttctcctactggaacatctcagcttctgcagtgaagaaaaattcctgtgatagttcagttctttagtttttctatttgaaaaaaaaaaatcatttaaatgatcctttgttcacggctctccttaatgactgagtgaacagttcctatctgtatatttgactaaaccttttcctaagctatctctcatggttcctatgtttttttatcataattaaaagcaaaaccatctggatcacctaacagtcagaggtcagtatctcagcgtgtgaattatagaggaaatacagagagaacctcttccacttttacttttcgtccaaataaaatgcatggtgtaccagaagttgaagatcgggttgaggattggggctagctcgatgacactaaggccccaacatcgcgggacctgctgtggcgcggattcttaggaacgctgttctagccggccccctctccaggggtcgccgtggccggcattatttcctagttcttcttgtaaccctgaggtgccagcgcggggagtgaggaggggtcagggggctaaggatgcaacctctgacgttctgcgccttcctaggagagtcttacatgtgttgagatttcacaagcaatgcgagttgtaaaataccagctctacaagaagctaggctctgtgacggcatagttttcagtagctttatcacaatattcacaatggagaattatatgacatggtagcagaaataggcccttttatgtgttgcttctattttacctcaaattgtagatatagggtaatcaataaaatccatccatgcctttcacacactaagt

SEQ ID NO: 4357 - protein, 495 aa, Homo sapiens; identical to SEQ ID NO: 4181

SEQ ID NO: 4358 - DNA, 4142 bp, Homo sapiens
aaaaaaaaaaaaaaaaaaaaaaaaaaaagaaaaaagaaaaaaaaaaggaggaggaggaggagggtgagagagaagctgggagagcagagaaaaggggccaccggtcgcccccccgcttccccgcacgcgctctccagccgcggccgcccgcctgccgcggtcaccccggcctctgcctctgtcccccagtgatcggatcaaggcgctgagcgaggccctgcctgcggggcggccatgcggcggtgacaggagcgcgaccgacacgcacgggcccctcgccccctctcgcctcccgtccgctcgccagctcccctcagccgaggctgctccgcggcggccgcagcccgcgcgcggcccacactcgcctccccgttgaagatgaggagtcctcggagagcaggatggtggtgacattcctcatgtcagctctcgagtccatgtgtaaagaactggccaagtccaaagccgaagtggcctgcattgcagtgtatgaaacagacgtgtttgtcgtcggaactgaaagaggacgtgcttttgtcaataccagaaaggattttcaaaaagattttgtaaaatattgtgttgaagaagaagaaaaagctgcagagatgcataaaatgaaatctacaacccaggcaaatcggatgagtgtagatgctgtagaaattgaaacactcagaaaaacagttgaggactatttctgcttttgctatgggaaagctttaggcaaatccacagtggtacctgtaccatatgagaagatgctgcgagaccagtcggctgtggtagtgcaggggcttccggaaggtgttgcctttaaacaccccgagaactatgatcttgcaaccctgaaatggattttggagaacaaagcagggatttcattcatcattaagagaccttttttagagccaaagaagcatgtaggtggtcgtgtgatggtaacagatgctgacaggtcaatactatctccaggtggaagttgtggccccatcaaagtgaaaactgaacccacagaagattctggcatttccctggaaatggcagctgtgacagtaaaggaagaatcagaagatcctgattattatcaatataacattcaaggaagccaccattcttcagagggcaatgaaggcacagaaatggaagtaccagcagaagattctactcaacatgtcccttcagaaacaagtgaggaccctgaagttgaggtgactattgaagatgatgattattctccaccgtctaagagaccaaaggccaatgagctaccgcagccaccagtcccggaacccgccaatgctgggaagcggaaagtgagggagttcaacttcgagaaatggaatgctcgcatcactgatctacgtaaacaagttgaagaattgtttgaaaggaaatatgctcaagccataaaagccaaaggtccggtgacgatcccgtaccctcttttccagtctcatgttgaagatctttatgtagaaggacttcctgaaggaattccttttagaaggccatctacttacggaattcctcgcctggagaggatattacttgcaaaggaaaggattcgttttgtgattaagaaacatgagcttctgaattcaacacgtgaagatttacagcttgataagccagcttcaggagtaaaggaagaatggtatgccagaatcactaaattaagaaagatggtggatcagcttttctgcaaaaaatttgcggaagccttggggagcactgaagccaaggctgtaccgtaccaaaaatttgaggcacacccgaatgatctgtacgtggaaggactgccagaaaacattcctttccgaagtccctcatggtatggaatcccaaggctggaaaaaatcattcaagtgggcaatcgaattaaatttgttattaaaagaccagaacttctgactcacagtaccactgaagttactcagccaagaacgaatacaccagctcaagctcttggactcaccgaggcagtaaaagtaccatatcctgtgtttgaatcaaacccggagttcttgtatgtggaaggcttgccagaggggattcccttccgaagccctacctggtttggaattccacgacttgaaaggatcgtccgcgggagtaataaaatcaagttcgttgttaaaaaacctgaactagttatttcctacttgcctcctgggatggctagtaaaataaacactaaagctttgcagtcccccaaaagaccacgaagtcctgggagtaattcaaaggttcctgaaattgaggtcaccgtggaaggccctaataacaacaatcctcaaacctcagctgttcgaaccccgacccagactaacggttctaacgttcccttcaagccacgagggagagagttttcctttgaggcctggaatgccaaaatcacggacctaaaacagaaagttgaaaatctcttcaatgagaaatgtggggaagctcttggccttaaacaagctgtgaaggtgccgttcgcgttatttgagtctttcccggaagacttttatgtggaaggcttacctgagggtgtgccattccgaagaccatcgacttttggcattccgaggctggagaagatactcagaaacaaagccaaaattaagttcatcattaaaaagcccgaaatgtttgagacggcgattaaggagagcacctcctctaagagccctcccagaaaaataaattcatcacccaatgttaatactactgcatcaggtgttgaagaccttaacatcattcaggtgacaattccagatgatgataatgaaagactctcgaaagttgaaaaagctagacagctaagagaacaagtgaatgacctctttagtcggaaatttggtgaagctattggtatgggttttcctgtgaaagttccctacaggaaaatcacaattaaccctggctgtgtggtggttgatggcatgcccccgggggtgtccttcaaagcccccagctacctggaaatcagctccatgagaaggatcttagactctgccgagtttatcaaattcacggtcattagaccatttccaggacttgtgattaataaccagctggttgatcagagtgagtcagaaggccccgtgatacaagaatcagctgaaccaagccagttggaagttccagccacagaagaaataaaagagactgatggaagctctcagatcaagcaagaaccagaccccacgtggtagacctcttccctcctaggcttaaagtatcagtggttgagaagagcttttcggacctgttactaccccaagctgtagccttgagttacggtgtttattttccaatcaagtgaagatatctcctacttctcctactggaacatctcagcttctgcagtgaagaaaaattcctgtgatagttcagttctttagtttttctatttgaaaaaaaaaaatcatttaaatgatcctttgttcacggctctccttaatgactgagtgaacagttcctatctgtatatttgactaaaccttttcctaagctatctctcatggttcctatgtttttttatcataattaaaagcaaaaccatctggatcacctaacagtcagaggtcagtatctcagcgtgtgaattatagaggaaatacagagagaacctcttccacttttacttttcgtccaaataaaatgcatggtgtaccagaagttgaagatcgggttgaggattggggctagctcgatgacactaaggccccaacatcgcgggacctgctgtggcgcggattcttaggaacgctgttctagccggccccctctccaggggtcgccgtggccggcattatttcctagttcttcttgtaaccctgaggtgccagcgcggggagtgaggaggggtcagggggctaaggatgcaacctctgacgttctgcgccttcctaggagagtcttacatgtgttgagatttcacaagcaatgcgagttgtaaaataccagctctacaagaagctaggctctgtgacggcatagttttcagtagctttatcacaatattcacaatggagaattatatgacatggtagcagaaataggcccttttatgtgttgcttctattttacctcaaattgtagatatagggtaatcaataaaatccatccatgcctttcacacactaagt

SEQ ID NO: 4359 - protein, 934 aa, Homo sapiens; identical to SEQ ID NO: 4085

SEQ ID NO: 4360 - DNA, 7955 bp, Homo sapiens
aaaaaaaaaaaaaaaaaaaaaaaaaaaagaaaaaagaaaaaaaaaaggaggaggaggaggagggtgagagagaagctgggagagcagagaaaaggggccaccggtcgcccccccgcttccccgcacgcgctctccagccgcggccgcccgcctgccgcggtcaccccggcctctgcctctgtcccccagtgatcggatcaaggcgctgagcgaggccctgcctgcggggcggccatgcggcggtgacaggagcgcgaccgacacgcacgggcccctcgccccctctcgcctcccgtccgctcgccagctcccctcagccgaggctgctccgcggcggccgcagcccgcgcgcggcccacactcgcctccccgttgaagatgaggagtcctcggagagcaggatggtggtgacattcctcatgtcagctctcgagtccatgtgtaaagaactggccaagtccaaagccgaagtggcctgcattgcagtgtatgaaacagacgtgtttgtcgtcggaactgaaagaggacgtgcttttgtcaataccagaaaggattttcaaaaagattttgtaaaatattgtgttgaagaagaagaaaaagctgcagagatgcataaaatgaaatctacaacccaggcaaatcggatgagtgtagatgctgtagaaattgaaacactcagaaaaacagttgaggactatttctgcttttgctatgggaaagctttaggcaaatccacagtggtacctgtaccatatgagaagatgctgcgagaccagtcggctgtggtagtgcaggggcttccggaaggtgttgcctttaaacaccccgagaactatgatcttgcaaccctgaaatggattttggagaacaaagcagggatttcattcatcattaagagaccttttttagagccaaagaagcatgtaggtggtcgtgtgatggtaacagatgctgacaggtcaatactatctccaggtggaagttgtggccccatcaaagtgaaaactgaacccacagaagattctggcatttccctggaaatggcagctgtgacagtaaaggaagaatcagaagatcctgattattatcaatataacattcaagcaggcccttctgaaactgatgatgttgatgaaaaacagcccctatcgaagcctttgcaaggaagccaccattcttcagagggcaatgaaggcacagaaatggaagtaccagcagaagattctactcaacatgtcccttcagaaacaagtgaggaccctgaagttgaggtgactattgaagatgatgattattctccaccgtctaagagaccaaaggccaatgagctaccgcagccaccagtcccggaacccgccaatgctgggaagcggaaagtgagggagttcaacttcgagaaatggaatgctcgcatcactgatctacgtaaacaagttgaagaattgtttgaaaggaaatatgctcaagccataaaagccaaaggtccggtgacgatcccgtaccctcttttccagtctcatgttgaagatctttatgtagaaggacttcctgaaggaattccttttagaaggccatctacttacggaattcctcgcctggagaggatattacttgcaaaggaaaggattcgttttgtgattaagaaacatgagcttctgaattcaacacgtgaagatttacagcttgataagccagcttcaggagtaaaggaagaatggtatgccagaatcactaaattaagaaagatggtggatcagcttttctgcaaaaaatttgcggaagccttggggagcactgaagccaaggctgtaccgtaccaaaaatttgaggcacacccgaatgatctgtacgtggaaggactgccagaaaacattcctttccgaagtccctcatggtatggaatcccaaggctggaaaaaatcattcaagtgggcaatcgaattaaatttgttattaaaagaccagaacttctgactcacagtaccactgaagttactcagccaagaacgaatacaccagtcaaagaagattggaatgtcagaattaccaagctacggaagcaagtggaagagatttttaatttgaaatttgctcaagctcttggactcaccgaggcagtaaaagtaccatatcctgtgtttgaatcaaacccggagttcttgtatgtggaaggcttgccagaggggattcccttccgaagccctacctggtttggaattccacgacttgaaaggatcgtccgcgggagtaataaaatcaagttcgttgttaaaaaacctgaactagttatttcctacttgcctcctgggatggctagtaaaataaacactaaagctttgcagtcccccaaaagaccacgaagtcctgggagtaattcaaaggttcctgaaattgaggtcaccgtggaaggccctaataacaacaatcctcaaacctcagctgttcgaaccccgacccagactaacggttctaacgttcccttcaagccacgagggagagagttttcctttgaggcctggaatgccaaaatcacggacctaaaacagaaagttgaaaatctcttcaatgagaaatgtggggaagctcttggccttaaacaagctgtgaaggtgccgttcgcgttatttgagtctttcccggaagacttttatgtggaaggcttacctgagggtgtgccattccgaagaccatcgacttttggcattccgaggctggagaagatactcagaaacaaagccaaaattaagttcatcattaaaaagcccgaaatgtttgagacggcgattaaggagagcacctcctctaagagccctcccagaaaaataaattcatcacccaatgttaatactactgcatcaggtgttgaagaccttaacatcattcaggtgacaattccagatgatgataatgaaagactctcgaaagttgaaaaagctagacagctaagagaacaagtgaatgacctctttagtcggaaatttggtgaagctattggtatgggttttcctgtgaaagttccctacaggaaaatcacaattaaccctggctgtgtggtggttgatggcatgcccccgggggtgtccttcaaagcccccagctacctggaaatcagctccatgagaaggatcttagactctgccgagtttatcaaattcacggtcattaggtaagtgagagtttcctgcttagtcacaggagcgaatctggagctcatgaggctgactcttctaaaatgcagccacaggtagtcatcgaatccggcttcctatgctgtgcaatcaacaaatcaaaataacttgtgtcatcattagaatgtcagatgtgcttctacgaactaagctgactcttttaattctttggcaaagggttggcaaactaggactgtttgccaaattcaggctgcctcctatttttagagtcttcctgaaacacagctacacccgtattatccatggctgctttcctgtcacagtgagtaagtagctgggactgagaaggcatggcctccaaagtctaaaatatttactctctagcactttgtagaaaaaccttagctaggcacagtggctaacgcctgtaatcccagcattttgggaggccaaggcaggcagatcacctgaggtcaggagttccagaccagcctggccaacatggtgaaatcccatctctacaaaaataaaacagttagctgggcatgatggcgggtgcctgtaatcccagctactcgggaggctgaggcaggatagtcgcttgaacccaggaggtggaggttgcaatgagccaagatcatgccactgcactccagcctggacgacagagtgagactccatcacaagaaaaaaagaactttgtcaacctctgtcttagggcgccttgtcacaggcttcgggtcagacggattcaaccttgcatcagccatttgttagccaggtcactctgttctttgtctgtaaatgagattgatcgttgttcccactgagagtgtcagctccttcccgtagagcaggcatgatgattgtactcacctctgacaccattgtgagtgccacattccttcccacgtccttgtcactgtaagagatgcccacctgagcaccaaccccaggttatcttcccctttgtcttccagccccccagaaacagctacgactcaacctacccaatcatttcatcatcagattgccactgtctctagttcaggtctcttgggactggcactcagaaatctcataataaatcctcttgaggcttctcatacactcgtcttcttccaatcttctttccctcaaaatctcatattttggttccacttcacccaccgtcattctccatatcactcccaggagttaggcaaaaagccccttccgttcttccgtatgttaaacttagaatcactctgttccctgctctgcgtttctattttttgtttttcctccatttactagtagcttaacactttctaacagtgttcttattattgatacgtatctatctcttccataagcttataaggtcacggataatacttctcattgtagtacgtaaatgacgtgggctagatatgagttgaataaacagttatacctgtaaattcttacagagtgaaaataaattgttatactttacaatttgtttctctctttagaccatttccaggacttgtgattaataaccgtgagtattttgtgaagtgttttgtttttgttttttcctggggtctgacgtgtgtgcgtgtgagtgtgtatacatgcttaacgtatatcacgttacttcacctatgtcagtaaccaggccaaatacttgttttagccctcagtaaaaacaccaggcacttcctagttgtaaaattattcaagcttcttaacttcctatcctcgatgcacttaatcataaaatggtaataatagcaccgattttgggggagtcgttccagtagatggaaagcatctggaacaggtgtcagcaagctcctgccgacgtgtatgcataaagttttattgaaaccaccatcgtgtccatttgtttatggcagaactgagagatggcagcagcaagtgtgtgcctgcaaaacctaaaatatttactaattggctctgcaagaaaagagtttgcatccccctaacctagaacagtgtctagcctctagtatgtgtttagcctacagtatgtgctcagcgaatacaatctatatttattactgcttttatgactgttataattactgtgcttggatttcgttacaaagtaagtcacaatgtgcctgcttctgttagtatttcagcacagtgcctggcacacatggggctctcaaatattgctgagcgagtgaacaaatgtcctttcaattccttaacgttgatgtcattttcaatagtattttgagccaaacttaattttgcgagtgtgttttgttttcttaactttattattaaaaatgtataaaagtgaggccaggcgtggtggctcacgcctgtaatcccagcagtttgggaggctgaggcaggcggatcagttgaggttgggagttggagaccagcccgtccaacatggtgaaagcctgtctctactaaaaatacaaaaatcagctgggtgtggtggcgcgtgcctgtaatcccagctactcaggaggctgaggcaggagagttgcttgaatcctagaggtggaggttgcagtgagctgagatcgtgccattgcactccagcctgggcaacaagagcaaaactctgtcccaataaataaataaataaaatgttctcttttgttcctgttcttgtgcggtagtgtggtatagagttttatggtaattactgtgaattagtgattctgagggacatatcagaactctgaggtttgtttccttctcatcttgagggaaacagcaaatgtatgttaaaatgcttttccaagggaacaacacatccttacattatttaaaccaatctgcttcattttcagagctggttgatcagagtgagtcagaaggccccgtgatacaagaatcagctgaaccaagccagttggaagttccagccacagaagaaataaaagagactgatggaagctctcagatcaagcaagaaccagaccccacgtggtagacctcttccctcctagggtaaatcagcttctgtgtcagggatgctgtgtggtgtccatctgaaccccctgcatacgcgtagctaatgtgatctccccactttcacataagatggtggccctgccttcagggaatgtgggagccaggtgggagccttcccggatatttaagctagaagattctacagggagattctccttggatcaatatatgtctctcagtcaaagatgtaaaagcacttttgccttaaaaagaatgttctgtttctaaatagagtcaacgttgtcctcctcattggaattcactatgagtcagaatcattagactgacttttttttttccatagtaatagtattttgcagagtctcacagagctgcagatcttttgttcatcttgcagagttaacaagtctgatcctgttagtccagatttcttaaatttggccaagttataataggagcagtagcttgagacccgaagtcaggaaactttgacaatggatttttttttttaatccagagacttgtactggaatttgccttaccctgtcagctcatggacttaaggtttcatcccgctttatgagtgcttctgaatccaagtcattgttacctgaatttgcaaattaagttgtgatattcgtgactgttaaattcctgtaattagattaacctctttgcttgcttgtttgttttctctcctattttagcttaaagtatcagtggttgagaagagcttttcggacctgttactaccccaagctgtgtaatatacttgtataacagaaataccttctatacaaacctttttttctacttttagatagaaatgtctactttttcagcagttctgtgaattaaagagcagagtgactgtgggtctggaatggctggtgtacttgggaatgtactatcaggattttacagcaatgctgggaaatgacagggaaaatgacaggaatgaatctcaccagattttttatgtactcagcagagccttgagttacggtgtttattttccaatcaagtgaagatatctcctacttctcctactggaacatctcagcttctgcagtgaagaaaaattcctgtgatagttcagttctttagtttttctatttgaaaaaaaaaaatcatttaaatgatcctttgttcacggctctccttaatgactgagtgaacagttcctatctgtatatttgactaaaccttttcctaagctatctctcatggttcctatgtttttttatcataattaaaagcaaaaccatctggatcacctaacagtcagaggtcagtatctcagcgtgtgaattatagaggaaatacagagagaacctcttccacttttacttttcgtccaaataaaatgcatggtgtaccagaagttgaagatcgggttgaggattggggctagctcgatgacactaaggccccaacatcgcgggacctgctgtggcgcggattcttaggaacgctgttctagccggccccctctccaggggtcgccgtggccggcattatttcctagttcttcttgtaaccctgaggtgccagcgcggggagtgaggaggggtcagggggctaaggatgcaacctctgacgttctgcgccttcctaggagagtcttacatgtgttgagatttcacaagcaatgcgagttgtaaaataccagctctacaagaagctaggctctgtgacggcatagttttcagtagctttatcacaatattcacaatggagaattatatgacatggtagcagaaataggcccttttatgtgttgcttctattttacctcaaattgtagatatagggtaatcaataaaatccatccatgcctttcacacactaagt

SEQ ID NO: 4361 - protein, 922 aa, Homo sapiens
MVVTFLMSALESMCKELAKSKAEVACIAVYETDVFVVGTERGRAFVNTRKDFQKDFVKYCVEEEEKAAEMHKMKSTTQANRMSVDAVEIETLRKTVEDYFCFCYGKALGKSTVVPVPYEKMLRDQSAVVVQGLPEGVAFKHPENYDLATLKWILENKAGISFIIKRPFLEPKKHVGGRVMVTDADRSILSPGGSCGPIKVKTEPTEDSGISLEMAAVTVKEESEDPDYYQYNIQAGPSETDDVDEKQPLSKPLQGSHHSSEGNEGTEMEVPAEDSTQHVPSETSEDPEVEVTIEDDDYSPPSKRPKANELPQPPVPEPANAGKRKVREFNFEKWNARITDLRKQVEELFERKYAQAIKAKGPVTIPYPLFQSHVEDLYVEGLPEGIPFRRPSTYGIPRLERILLAKERIRFVIKKHELLNSTREDLQLDKPASGVKEEWYARITKLRKMVDQLFCKKFAEALGSTEAKAVPYQKFEAHPNDLYVEGLPENIPFRSPSWYGIPRLEKIIQVGNRIKFVIKRPELLTHSTTEVTQPRTNTPVKEDWNVRITKLRKQVEEIFNLKFAQALGLTEAVKVPYPVFESNPEFLYVEGLPEGIPFRSPTWFGIPRLERIVRGSNKIKFVVKKPELVISYLPPGMASKINTKALQSPKRPRSPGSNSKVPEIEVTVEGPNNNNPQTSAVRTPTQTNGSNVPFKPRGREFSFEAWNAKITDLKQKVENLFNEKCGEALGLKQAVKVPFALFESFPEDFYVEGLPEGVPFRRPSTFGIPRLEKILRNKAKIKFIIKKPEMFETAIKESTSSKSPPRKINSSPNVNTTASGVEDLNIIQVTIPDDDNERLSKVEKARQLREQVNDLFSRKFGEAIGMGFPVKVPYRKITINPGCVVVDGMPPGVSFKAPSYLEISSMRRILDSAEFIKFTVIR

SEQ ID NO: 4362 - DNA, 7868 bp, Homo sapiens
aaaaaaaaaaaaaaaaaaaaaaaaaaaagaaaaaagaaaaaaaaaaggaggaggaggaggagggtgagagagaagctgggagagcagagaaaaggggccaccggtcgcccccccgcttccccgcacgcgctctccagccgcggccgcccgcctgccgcggtcaccccggcctctgcctctgtcccccagtgatcggatcaaggcgctgagcgaggccctgcctgcggggcggccatgcggcggtgacaggagcgcgaccgacacgcacgggcccctcgccccctctcgcctcccgtccgctcgccagctcccctcagccgaggctgctccgcggcggccgcagcccgcgcgcggcccacactcgcctcccctcggcacccccggccccggagctgcctggaggcggccgcactcggtgtaaagaactggccaagtccaaagccgaagtggcctgcattgcagtgtatgaaacagacgtgtttgtcgtcggaactgaaagaggacgtgcttttgtcaataccagaaaggattttcaaaaagattttgtaaaatattgtgttgaagaagaagaaaaagctgcagagatgcataaaatgaaatctacaacccaggcaaatcggatgagtgtagatgctgtagaaattgaaacactcagaaaaacagttgaggactatttctgcttttgctatgggaaagctttaggcaaatccacagtggtacctgtaccatatgagaagatgctgcgagaccagtcggctgtggtagtgcaggggcttccggaaggtgttgcctttaaacaccccgagaactatgatcttgcaaccctgaaatggattttggagaacaaagcagggatttcattcatcattaagagaccttttttagagccaaagaagcatgtaggtggtcgtgtgatggtaacagatgctgacaggtcaatactatctccaggtggaagttgtggccccatcaaagtgaaaactgaacccacagaagattctggcatttccctggaaatggcagctgtgacagtaaaggaagaatcagaagatcctgattattatcaatataacattcaagcaggcccttctgaaactgatgatgttgatgaaaaacagcccctatcgaagcctttgcaaggaagccaccattcttcagagggcaatgaaggcacagaaatggaagtaccagcagaagatgatgattattctccaccgtctaagagaccaaaggccaatgagctaccgcagccaccagtcccggaacccgccaatgctgggaagcggaaagtgagggagttcaacttcgagaaatggaatgctcgcatcactgatctacgtaaacaagttgaagaattgtttgaaaggaaatatgctcaagccataaaagccaaaggtccggtgacgatcccgtaccctcttttccagtctcatgttgaagatctttatgtagaaggacttcctgaaggaattccttttagaaggccatctacttacggaattcctcgcctggagaggatattacttgcaaaggaaaggattcgttttgtgattaagaaacatgagcttctgaattcaacacgtgaagatttacagcttgataagccagcttcaggagtaaaggaagaatggtatgccagaatcactaaattaagaaagatggtggatcagcttttctgcaaaaaatttgcggaagccttggggagcactgaagccaaggctgtaccgtaccaaaaatttgaggcacacccgaatgatctgtacgtggaaggactgccagaaaacattcctttccgaagtccctcatggtatggaatcccaaggctggaaaaaatcattcaagtgggcaatcgaattaaatttgttattaaaagaccagaacttctgactcacagtaccactgaagttactcagccaagaacgaatacaccagtcaaagaagattggaatgtcagaattaccaagctacggaagcaagtggaagagatttttaatttgaaatttgctcaagctcttggactcaccgaggcagtaaaagtaccatatcctgtgtttgaatcaaacccggagttcttgtatgtggaaggcttgccagaggggattcccttccgaagccctacctggtttggaattccacgacttgaaaggatcgtccgcgggagtaataaaatcaagttcgttgttaaaaaacctgaactagttatttcctacttgcctcctgggatggctagtaaaataaacactaaagctttgcagtcccccaaaagaccacgaagtcctgggagtaattcaaaggttcctgaaattgaggtcaccgtggaaggccctaataacaacaatcctcaaacctcagctgttcgaaccccgacccagactaacggttctaacgttcccttcaagccacgagggagagagttttcctttgaggcctggaatgccaaaatcacggacctaaaacagaaagttgaaaatctcttcaatgagaaatgtggggaagctcttggccttaaacaagctgtgaaggtgccgttcgcgttatttgagtctttcccggaagacttttatgtggaaggcttacctgagggtgtgccattccgaagaccatcgacttttggcattccgaggctggagaagatactcagaaacaaagccaaaattaagttcatcattaaaaagcccgaaatgtttgagacggcgattaaggagagcacctcctctaagagccctcccagaaaaataaattcatcacccaatgttaatactactgcatcaggtgttgaagaccttaacatcattcaggtgacaattccagatgatgataatgaaagactctcgaaagttgaaaaagctagacagctaagagaacaagtgaatgacctctttagtcggaaatttggtgaagctattggtatgggttttcctgtgaaagttccctacaggaaaatcacaattaaccctggctgtgtggtggttgatggcatgcccccgggggtgtccttcaaagcccccagctacctggaaatcagctccatgagaaggatcttagactctgccgagtttatcaaattcacggtcattaggtaagtgagagtttcctgcttagtcacaggagcgaatctggagctcatgaggctgactcttctaaaatgcagccacaggtagtcatcgaatccggcttcctatgctgtgcaatcaacaaatcaaaataacttgtgtcatcattagaatgtcagatgtgcttctacgaactaagctgactcttttaattctttggcaaagggttggcaaactaggactgtttgccaaattcaggctgcctcctatttttagagtcttcctgaaacacagctacacccgtattatccatggctgctttcctgtcacagtgagtaagtagctgggactgagaaggcatggcctccaaagtctaaaatatttactctctagcactttgtagaaaaaccttagctaggcacagtggctaacgcctgtaatcccagcattttgggaggccaaggcaggcagatcacctgaggtcaggagttccagaccagcctggccaacatggtgaaatcccatctctacaaaaataaaacagttagctgggcatgatggcgggtgcctgtaatcccagctactcgggaggctgaggcaggatagtcgcttgaacccaggaggtggaggttgcaatgagccaagatcatgccactgcactccagcctggacgacagagtgagactccatcacaagaaaaaaagaactttgtcaacctctgtcttagggcgccttgtcacaggcttcgggtcagacggattcaaccttgcatcagccatttgttagccaggtcactctgttctttgtctgtaaatgagattgatcgttgttcccactgagagtgtcagctccttcccgtagagcaggcatgatgattgtactcacctctgacaccattgtgagtgccacattccttcccacgtccttgtcactgtaagagatgcccacctgagcaccaaccccaggttatcttcccctttgtcttccagccccccagaaacagctacgactcaacctacccaatcatttcatcatcagattgccactgtctctagttcaggtctcttgggactggcactcagaaatctcataataaatcctcttgaggcttctcatacactcgtcttcttccaatcttctttccctcaaaatctcatattttggttccacttcacccaccgtcattctccatatcactcccaggagttaggcaaaaagccccttccgttcttccgtatgttaaacttagaatcactctgttccctgctctgcgtttctattttttgtttttcctccatttactagtagcttaacactttctaacagtgttcttattattgatacgtatctatctcttccataagcttataaggtcacggataatacttctcattgtagtacgtaaatgacgtgggctagatatgagttgaataaacagttatacctgtaaattcttacagagtgaaaataaattgttatactttacaatttgtttctctctttagaccatttccaggacttgtgattaataaccgtgagtattttgtgaagtgttttgtttttgttttttcctggggtctgacgtgtgtgcgtgtgagtgtgtatacatgcttaacgtatatcacgttacttcacctatgtcagtaaccaggccaaatacttgttttagccctcagtaaaaacaccaggcacttcctagttgtaaaattattcaagcttcttaacttcctatcctcgatgcacttaatcataaaatggtaataatagcaccgattttgggggagtcgttccagtagatggaaagcatctggaacaggtgtcagcaagctcctgccgacgtgtatgcataaagttttattgaaaccaccatcgtgtccatttgtttatggcagaactgagagatggcagcagcaagtgtgtgcctgcaaaacctaaaatatttactaattggctctgcaagaaaagagtttgcatccccctaacctagaacagtgtctagcctctagtatgtgtttagcctacagtatgtgctcagcgaatacaatctatatttattactgcttttatgactgttataattactgtgcttggatttcgttacaaagtaagtcacaatgtgcctgcttctgttagtatttcagcacagtgcctggcacacatggggctctcaaatattgctgagcgagtgaacaaatgtcctttcaattccttaacgttgatgtcattttcaatagtattttgagccaaacttaattttgcgagtgtgttttgttttcttaactttattattaaaaatgtataaaagtgaggccaggcgtggtggctcacgcctgtaatcccagcagtttgggaggctgaggcaggcggatcagttgaggttgggagttggagaccagcccgtccaacatggtgaaagcctgtctctactaaaaatacaaaaatcagctgggtgtggtggcgcgtgcctgtaatcccagctactcaggaggctgaggcaggagagttgcttgaatcctagaggtggaggttgcagtgagctgagatcgtgccattgcactccagcctgggcaacaagagcaaaactctgtcccaataaataaataaataaaatgttctcttttgttcctgttcttgtgcggtagtgtggtatagagttttatggtaattactgtgaattagtgattctgagggacatatcagaactctgaggtttgtttccttctcatcttgagggaaacagcaaatgtatgttaaaatgcttttccaagggaacaacacatccttacattatttaaaccaatctgcttcattttcagagctggttgatcagagtgagtcagaaggccccgtgatacaagaatcagctgaaccaagccagttggaagttccagccacagaagaaataaaagagactgatggaagctctcagatcaagcaagaaccagaccccacgtggtagacctcttccctcctagggtaaatcagcttctgtgtcagggatgctgtgtggtgtccatctgaaccccctgcatacgcgtagctaatgtgatctccccactttcacataagatggtggccctgccttcagggaatgtgggagccaggtgggagccttcccggatatttaagctagaagattctacagggagattctccttggatcaatatatgtctctcagtcaaagatgtaaaagcacttttgccttaaaaagaatgttctgtttctaaatagagtcaacgttgtcctcctcattggaattcactatgagtcagaatcattagactgacttttttttttccatagtaatagtattttgcagagtctcacagagctgcagatcttttgttcatcttgcagagttaacaagtctgatcctgttagtccagatttcttaaatttggccaagttataataggagcagtagcttgagacccgaagtcaggaaactttgacaatggatttttttttttaatccagagacttgtactggaatttgccttaccctgtcagctcatggacttaaggtttcatcccgctttatgagtgcttctgaatccaagtcattgttacctgaatttgcaaattaagttgtgatattcgtgactgttaaattcctgtaattagattaacctctttgcttgcttgtttgttttctctcctattttagcttaaagtatcagtggttgagaagagcttttcggacctgttactaccccaagctgtgtaatatacttgtataacagaaataccttctatacaaacctttttttctacttttagatagaaatgtctactttttcagcagttctgtgaattaaagagcagagtgactgtgggtctggaatggctggtgtacttgggaatgtactatcaggattttacagcaatgctgggaaatgacagggaaaatgacaggaatgaatctcaccagattttttatgtactcagcagagccttgagttacggtgtttattttccaatcaagtgaagatatctcctacttctcctactggaacatctcagcttctgcagtgaagaaaaattcctgtgatagttcagttctttagtttttctatttgaaaaaaaaaaatcatttaaatgatcctttgttcacggctctccttaatgactgagtgaacagttcctatctgtatatttgactaaaccttttcctaagctatctctcatggttcctatgtttttttatcataattaaaagcaaaaccatctggatcacctaacagtcagaggtcagtatctcagcgtgtgaattatagaggaaatacagagagaacctcttccacttttacttttcgtccaaataaaatgcatggtgtaccagaagttgaagatcgggttgaggattggggctagctcgatgacactaaggccccaacatcgcgggacctgctgtggcgcggattcttaggaacgctgttctagccggccccctctccaggggtcgccgtggccggcattatttcctagttcttcttgtaaccctgaggtgccagcgcggggagtgaggaggggtcagggggctaaggatgcaacctctgacgttctgcgccttcctaggagagtcttacatgtgttgagatttcacaagcaatgcgagttgtaaaataccagctctacaagaagctaggctctgtgacggcatagttttcagtagctttatcacaatattcacaatggagaattatatgacatggtagcagaaataggcccttttatgtgttgcttctattttacctcaaattgtagatatagggtaatcaataaaatccatccatgcctttcacacactaagt

SEQ ID NO: 4363 - protein, 832 aa, Homo sapiens
MHKMKSTTQANRMSVDAVEIETLRKTVEDYFCFCYGKALGKSTVVPVPYEKMLRDQSAVVVQGLPEGVAFKHPENYDLATLKWILENKAGISFIIKRPFLEPKKHVGGRVMVTDADRSILSPGGSCGPIKVKTEPTEDSGISLEMAAVTVKEESEDPDYYQYNIQAGPSETDDVDEKQPLSKPLQGSHHSSEGNEGTEMEVPAEDDDYSPPSKRPKANELPQPPVPEPANAGKRKVREFNFEKWNARITDLRKQVEELFERKYAQAIKAKGPVTIPYPLFQSHVEDLYVEGLPEGIPFRRPSTYGIPRLERILLAKERIRFVIKKHELLNSTREDLQLDKPASGVKEEWYARITKLRKMVDQLFCKKFAEALGSTEAKAVPYQKFEAHPNDLYVEGLPENIPFRSPSWYGIPRLEKIIQVGNRIKFVIKRPELLTHSTTEVTQPRTNTPVKEDWNVRITKLRKQVEEIFNLKFAQALGLTEAVKVPYPVFESNPEFLYVEGLPEGIPFRSPTWFGIPRLERIVRGSNKIKFVVKKPELVISYLPPGMASKINTKALQSPKRPRSPGSNSKVPEIEVTVEGPNNNNPQTSAVRTPTQTNGSNVPFKPRGREFSFEAWNAKITDLKQKVENLFNEKCGEALGLKQAVKVPFALFESFPEDFYVEGLPEGVPFRRPSTFGIPRLEKILRNKAKIKFIIKKPEMFETAIKESTSSKSPPRKINSSPNVNTTASGVEDLNIIQVTIPDDDNERLSKVEKARQLREQVNDLFSRKFGEAIGMGFPVKVPYRKITINPGCVVVDGMPPGVSFKAPSYLEISSMRRILDSAEFIKFTVIR

SEQ ID NO: 4364 - DNA, 4190 bp, Homo sapiens
aaaaaaaaaaaaaaaaaaaaaaaaaaaagaaaaaagaaaaaaaaaaggaggaggaggaggagggtgagagagaagctgggagagcagagaaaaggggccaccggtcgcccccccgcttccccgcacgcgctctccagccgcggccgcccgcctgccgcggtcaccccggcctctgcctctgtcccccagtgatcggatcaaggcgctgagcgaggccctgcctgcggggcggccatgcggcggtgacaggagcgcgaccgacacgcacgggcccctcgccccctctcgcctcccgtccgctcgccagctcccctcagccgaggctgctccgcggcggccgcagcccgcgcgcggcccacactcgcctcccctcggcacccccggccccggagctgcctggaggcggccgcactcggtgtaaagaactggccaagtccaaagccgaagtggcctgcattgcagtgtatgaaacagacgtgtttgtcgtcggaactgaaagaggacgtgcttttgtcaataccagaaaggattttcaaaaagattttgtaaaatattgtgttgaagaagaagaaaaagctgcagagatgcataaaatgaaatctacaacccaggcaaatcggatgagtgtagatgctgtagaaattgaaacactcagaaaaacagttgaggactatttctgcttttgctatgggaaagctttaggcaaatccacagtggtacctgtaccatatgagaagatgctgcgagaccagtcggctgtggtagtgcaggggcttccggaaggtgttgcctttaaacaccccgagaactatgatcttgcaaccctgaaatggattttggagaacaaagcagggatttcattcatcattaagagaccttttttagagccaaagaagcatgtaggtggtcgtgtgatggtaacagatgctgacaggtcaatactatctccaggtggaagttgtggccccatcaaagtgaaaactgaacccacagaagattctggcatttccctggaaatggcagctgtgacagtaaaggaagaatcagaagatcctgattattatcaatataacattcaaggaagccaccattcttcagagggcaatgaaggcacagaaatggaagtaccagcagaagattctactcaacatgtcccttcagaaacaagtgaggaccctgaagttgaggtgactattgaagatgatgattattctccaccgtctaagagaccaaaggccaatgagctaccgcagccaccagtcccggaacccgccaatgctgggaagcggaaagtgagggagttcaacttcgagaaatggaatgctcgcatcactgatctacgtaaacaagttgaagaattgtttgaaaggaaatatgctcaagccataaaagccaaaggtccggtgacgatcccgtaccctcttttccagtctcatgttgaagatctttatgtagaaggacttcctgaaggaattccttttagaaggccatctacttacggaattcctcgcctggagaggatattacttgcaaaggaaaggattcgttttgtgattaagaaacatgagcttctgaattcaacacgtgaagatttacagcttgataagccagcttcaggagtaaaggaagaatggtatgccagaatcactaaattaagaaagatggtggatcagcttttctgcaaaaaatttgcggaagccttggggagcactgaagccaaggctgtaccgtaccaaaaatttgaggcacacccgaatgatctgtacgtggaaggactgccagaaaacattcctttccgaagtccctcatggtatggaatcccaaggctggaaaaaatcattcaagtgggcaatcgaattaaatttgttattaaaagaccagaacttctgactcacagtaccactgaagttactcagccaagaacgaatacaccagtcaaagaagattggaatgtcagaattaccaagctacggaagcaagtggaagagatttttaatttgaaatttgctcaagctcttggactcaccgaggcagtaaaagtaccatatcctgtgtttgaatcaaacccggagttcttgtatgtggaaggcttgccagaggggattcccttccgaagccctacctggtttggaattccacgacttgaaaggatcgtccgcgggagtaataaaatcaagttcgttgttaaaaaacctgaactagttatttcctacttgcctcctgggatggctagtaaaataaacactaaagctttgcagtcccccaaaagaccacgaagtcctgggagtaattcaaaggttcctgaaattgaggtcaccgtggaaggccctaataacaacaatcctcaaacctcagctgttcgaaccccgacccagactaacggttctaacgttcccttcaagccacgagggagagagttttcctttgaggcctggaatgccaaaatcacggacctaaaacagaaagttgaaaatctcttcaatgagaaatgtggggaagctcttggccttaaacaagctgtgaaggtgccgttcgcgttatttgagtctttcccggaagacttttatgtggaaggcttacctgagggtgtgccattccgaagaccatcgacttttggcattccgaggctggagaagatactcagaaacaaagccaaaattaagttcatcattaaaaagcccgaaatgtttgagacggcgattaaggagagcacctcctctaagagccctcccagaaaaataaattcatcacccaatgttaatactactgcatcaggtgttgaagaccttaacatcattcaggtgacaattccagatgatgataatgaaagactctcgaaagttgaaaaagctagacagctaagagaacaagtgaatgacctctttagtcggaaatttggtgaagctattggtatgggttttcctgtgaaagttccctacaggaaaatcacaattaaccctggctgtgtggtggttgatggcatgcccccgggggtgtccttcaaagcccccagctacctggaaatcagctccatgagaaggatcttagactctgccgagtttatcaaattcacggtcattagaccatttccaggacttgtgattaataaccagctggttgatcagagtgagtcagaaggccccgtgatacaagaatcagctgaaccaagccagttggaagttccagccacagaagaaataaaagagactgatggaagctctcagatcaagcaagaaccagaccccacgtggtagacctcttccctcctaggcttaaagtatcagtggttgagaagagcttttcggacctgttactaccccaagctgtagccttgagttacggtgtttattttccaatcaagtgaagatatctcctacttctcctactggaacatctcagcttctgcagtgaagaaaaattcctgtgatagttcagttctttagtttttctatttgaaaaaaaaaaatcatttaaatgatcctttgttcacggctctccttaatgactgagtgaacagttcctatctgtatatttgactaaaccttttcctaagctatctctcatggttcctatgtttttttatcataattaaaagcaaaaccatctggatcacctaacagtcagaggtcagtatctcagcgtgtgaattatagaggaaatacagagagaacctcttccacttttacttttcgtccaaataaaatgcatggtgtaccagaagttgaagatcgggttgaggattggggctagctcgatgacactaaggccccaacatcgcgggacctgctgtggcgcggattcttaggaacgctgttctagccggccccctctccaggggtcgccgtggccggcattatttcctagttcttcttgtaaccctgaggtgccagcgcggggagtgaggaggggtcagggggctaaggatgcaacctctgacgttctgcgccttcctaggagagtcttacatgtgttgagatttcacaagcaatgcgagttgtaaaataccagctctacaagaagctaggctctgtgacggcatagttttcagtagctttatcacaatattcacaatggagaattatatgacatggtagcagaaataggcccttttatgtgttgcttctattttacctcaaattgtagatatagggtaatcaataaaatccatccatgcctttcacacactaagt

SEQ ID NO: 4365 - protein, 889 aa, Homo sapiens; identical to SEQ ID NO: 4073

SEQ ID NO: 4366 - DNA, 7903 bp, Homo sapiens
aaaaaaaaaaaaaaaaaaaaaaaaaaaagaaaaaagaaaaaaaaaaggaggaggaggaggagggtgagagagaagctgggagagcagagaaaaggggccaccggtcgcccccccgcttccccgcacgcgctctccagccgcggccgcccgcctgccgcggtcaccccggcctctgcctctgtcccccagtgatcggatcaaggcgctgagcgaggccctgcctgcggggcggccatgcggcggtgacaggagcgcgaccgacacgcacgggcccctcgccccctctcgcctcccgtccgctcgccagctcccctcagccgaggctgctccgcggcggccgcagcccgcgcgcggcccacactcgcctcccctcggcacccccggccccggagctgcctggaggcggccgcactcggggatcatggcccaagttgcaatgtccaccctccccgttgaagatgaggagtcctcggagagcaggatggtggtgacattcctcatgtcagctctcgagtccatgtgtaaagaactggccaagtccaaagccgaagtggcctgcattgcagtgtatgaaacagacgtgtttgtcgtcggaactgaaagaggacgtgcttttgtcaataccagaaaggattttcaaaaagattttgtaaaatattgtgttgaagaagaagaaaaagctgcagagatgcataaaatgaaatctacaacccaggcaaatcggatgagtgtagatgctgtagaaattgaaacactcagaaaaacagttgaggactatttctgcttttgctatgggaaagctttaggcaaatccacagtggtacctgtaccatatgagaagatgctgcgagaccagtcggctgtggtagtgcaggggcttccggaaggtgttgcctttaaacaccccgagaactatgatcttgcaaccctgaaatggattttggagaacaaagcagggatttcattcatcattaagagaccttttttagagccaaagaagcatgtaggtggtcgtgtgatggtaacagatgctgacaggtcaatactatctccaggtggaagttgtggccccatcaaagtgaaaactgaacccacagaagattctggcatttccctggaaatggcagctgtgacagtaaaggaagaatcagaagatcctgattattatcaatataacattcaaggaagccaccattcttcagagggcaatgaaggcacagaaatggaagtaccagcagaagattctactcaacatgtcccttcagaaacaagtgaggaccctgaagttgaggtgactattgaagatgatgattattctccaccgtctaagagaccaaaggccaatgagctaccgcagccaccagtcccggaacccgccaatgctgggaagcggaaagtgagggagttcaacttcgagaaatggaatgctcgcatcactgatctacgtaaacaagttgaagaattgtttgaaaggaaatatgctcaagccataaaagccaaaggtccggtgacgatcccgtaccctcttttccagtctcatgttgaagatctttatgtagaaggacttcctgaaggaattccttttagaaggccatctacttacggaattcctcgcctggagaggatattacttgcaaaggaaaggattcgttttgtgattaagaaacatgagcttctgaattcaacacgtgaagatttacagcttgataagccagcttcaggagtaaaggaagaatggtatgccagaatcactaaattaagaaagatggtggatcagcttttctgcaaaaaatttgcggaagccttggggagcactgaagccaaggctgtaccgtaccaaaaatttgaggcacacccgaatgatctgtacgtggaaggactgccagaaaacattcctttccgaagtccctcatggtatggaatcccaaggctggaaaaaatcattcaagtgggcaatcgaattaaatttgttattaaaagaccagaacttctgactcacagtaccactgaagttactcagccaagaacgaatacaccagctcaagctcttggactcaccgaggcagtaaaagtaccatatcctgtgtttgaatcaaacccggagttcttgtatgtggaaggcttgccagaggggattcccttccgaagccctacctggtttggaattccacgacttgaaaggatcgtccgcgggagtaataaaatcaagttcgttgttaaaaaacctgaactagttatttcctacttgcctcctgggatggctagtaaaataaacactaaagctttgcagtcccccaaaagaccacgaagtcctgggagtaattcaaaggttcctgaaattgaggtcaccgtggaaggccctaataacaacaatcctcaaacctcagctgttcgaaccccgacccagactaacggttctaacgttcccttcaagccacgagggagagagttttcctttgaggcctggaatgccaaaatcacggacctaaaacagaaagttgaaaatctcttcaatgagaaatgtggggaagctcttggccttaaacaagctgtgaaggtgccgttcgcgttatttgagtctttcccggaagacttttatgtggaaggcttacctgagggtgtgccattccgaagaccatcgacttttggcattccgaggctggagaagatactcagaaacaaagccaaaattaagttcatcattaaaaagcccgaaatgtttgagacggcgattaaggagagcacctcctctaagagccctcccagaaaaataaattcatcacccaatgttaatactactgcatcaggtgttgaagaccttaacatcattcaggtgacaattccagatgatgataatgaaagactctcgaaagttgaaaaagctagacagctaagagaacaagtgaatgacctctttagtcggaaatttggtgaagctattggtatgggttttcctgtgaaagttccctacaggaaaatcacaattaaccctggctgtgtggtggttgatggcatgcccccgggggtgtccttcaaagcccccagctacctggaaatcagctccatgagaaggatcttagactctgccgagtttatcaaattcacggtcattaggtaagtgagagtttcctgcttagtcacaggagcgaatctggagctcatgaggctgactcttctaaaatgcagccacaggtagtcatcgaatccggcttcctatgctgtgcaatcaacaaatcaaaataacttgtgtcatcattagaatgtcagatgtgcttctacgaactaagctgactcttttaattctttggcaaagggttggcaaactaggactgtttgccaaattcaggctgcctcctatttttagagtcttcctgaaacacagctacacccgtattatccatggctgctttcctgtcacagtgagtaagtagctgggactgagaaggcatggcctccaaagtctaaaatatttactctctagcactttgtagaaaaaccttagctaggcacagtggctaacgcctgtaatcccagcattttgggaggccaaggcaggcagatcacctgaggtcaggagttccagaccagcctggccaacatggtgaaatcccatctctacaaaaataaaacagttagctgggcatgatggcgggtgcctgtaatcccagctactcgggaggctgaggcaggatagtcgcttgaacccaggaggtggaggttgcaatgagccaagatcatgccactgcactccagcctggacgacagagtgagactccatcacaagaaaaaaagaactttgtcaacctctgtcttagggcgccttgtcacaggcttcgggtcagacggattcaaccttgcatcagccatttgttagccaggtcactctgttctttgtctgtaaatgagattgatcgttgttcccactgagagtgtcagctccttcccgtagagcaggcatgatgattgtactcacctctgacaccattgtgagtgccacattccttcccacgtccttgtcactgtaagagatgcccacctgagcaccaaccccaggttatcttcccctttgtcttccagccccccagaaacagctacgactcaacctacccaatcatttcatcatcagattgccactgtctctagttcaggtctcttgggactggcactcagaaatctcataataaatcctcttgaggcttctcatacactcgtcttcttccaatcttctttccctcaaaatctcatattttggttccacttcacccaccgtcattctccatatcactcccaggagttaggcaaaaagccccttccgttcttccgtatgttaaacttagaatcactctgttccctgctctgcgtttctattttttgtttttcctccatttactagtagcttaacactttctaacagtgttcttattattgatacgtatctatctcttccataagcttataaggtcacggataatacttctcattgtagtacgtaaatgacgtgggctagatatgagttgaataaacagttatacctgtaaattcttacagagtgaaaataaattgttatactttacaatttgtttctctctttagaccatttccaggacttgtgattaataaccgtgagtattttgtgaagtgttttgtttttgttttttcctggggtctgacgtgtgtgcgtgtgagtgtgtatacatgcttaacgtatatcacgttacttcacctatgtcagtaaccaggccaaatacttgttttagccctcagtaaaaacaccaggcacttcctagttgtaaaattattcaagcttcttaacttcctatcctcgatgcacttaatcataaaatggtaataatagcaccgattttgggggagtcgttccagtagatggaaagcatctggaacaggtgtcagcaagctcctgccgacgtgtatgcataaagttttattgaaaccaccatcgtgtccatttgtttatggcagaactgagagatggcagcagcaagtgtgtgcctgcaaaacctaaaatatttactaattggctctgcaagaaaagagtttgcatccccctaacctagaacagtgtctagcctctagtatgtgtttagcctacagtatgtgctcagcgaatacaatctatatttattactgcttttatgactgttataattactgtgcttggatttcgttacaaagtaagtcacaatgtgcctgcttctgttagtatttcagcacagtgcctggcacacatggggctctcaaatattgctgagcgagtgaacaaatgtcctttcaattccttaacgttgatgtcattttcaatagtattttgagccaaacttaattttgcgagtgtgttttgttttcttaactttattattaaaaatgtataaaagtgaggccaggcgtggtggctcacgcctgtaatcccagcagtttgggaggctgaggcaggcggatcagttgaggttgggagttggagaccagcccgtccaacatggtgaaagcctgtctctactaaaaatacaaaaatcagctgggtgtggtggcgcgtgcctgtaatcccagctactcaggaggctgaggcaggagagttgcttgaatcctagaggtggaggttgcagtgagctgagatcgtgccattgcactccagcctgggcaacaagagcaaaactctgtcccaataaataaataaataaaatgttctcttttgttcctgttcttgtgcggtagtgtggtatagagttttatggtaattactgtgaattagtgattctgagggacatatcagaactctgaggtttgtttccttctcatcttgagggaaacagcaaatgtatgttaaaatgcttttccaagggaacaacacatccttacattatttaaaccaatctgcttcattttcagagctggttgatcagagtgagtcagaaggccccgtgatacaagaatcagctgaaccaagccagttggaagttccagccacagaagaaataaaagagactgatggaagctctcagatcaagcaagaaccagaccccacgtggtagacctcttccctcctagggtaaatcagcttctgtgtcagggatgctgtgtggtgtccatctgaaccccctgcatacgcgtagctaatgtgatctccccactttcacataagatggtggccctgccttcagggaatgtgggagccaggtgggagccttcccggatatttaagctagaagattctacagggagattctccttggatcaatatatgtctctcagtcaaagatgtaaaagcacttttgccttaaaaagaatgttctgtttctaaatagagtcaacgttgtcctcctcattggaattcactatgagtcagaatcattagactgacttttttttttccatagtaatagtattttgcagagtctcacagagctgcagatcttttgttcatcttgcagagttaacaagtctgatcctgttagtccagatttcttaaatttggccaagttataataggagcagtagcttgagacccgaagtcaggaaactttgacaatggatttttttttttaatccagagacttgtactggaatttgccttaccctgtcagctcatggacttaaggtttcatcccgctttatgagtgcttctgaatccaagtcattgttacctgaatttgcaaattaagttgtgatattcgtgactgttaaattcctgtaattagattaacctctttgcttgcttgtttgttttctctcctattttagcttaaagtatcagtggttgagaagagcttttcggacctgttactaccccaagctgtgtaatatacttgtataacagaaataccttctatacaaacctttttttctacttttagatagaaatgtctactttttcagcagttctgtgaattaaagagcagagtgactgtgggtctggaatggctggtgtacttgggaatgtactatcaggattttacagcaatgctgggaaatgacagggaaaatgacaggaatgaatctcaccagattttttatgtactcagcagagccttgagttacggtgtttattttccaatcaagtgaagatatctcctacttctcctactggaacatctcagcttctgcagtgaagaaaaattcctgtgatagttcagttctttagtttttctatttgaaaaaaaaaaatcatttaaatgatcctttgttcacggctctccttaatgactgagtgaacagttcctatctgtatatttgactaaaccttttcctaagctatctctcatggttcctatgtttttttatcataattaaaagcaaaaccatctggatcacctaacagtcagaggtcagtatctcagcgtgtgaattatagaggaaatacagagagaacctcttccacttttacttttcgtccaaataaaatgcatggtgtaccagaagttgaagatcgggttgaggattggggctagctcgatgacactaaggccccaacatcgcgggacctgctgtggcgcggattcttaggaacgctgttctagccggccccctctccaggggtcgccgtggccggcattatttcctagttcttcttgtaaccctgaggtgccagcgcggggagtgaggaggggtcagggggctaaggatgcaacctctgacgttctgcgccttcctaggagagtcttacatgtgttgagatttcacaagcaatgcgagttgtaaaataccagctctacaagaagctaggctctgtgacggcatagttttcagtagctttatcacaatattcacaatggagaattatatgacatggtagcagaaataggcccttttatgtgttgcttctattttacctcaaattgtagatatagggtaatcaataaaatccatccatgcctttcacacactaagt

SEQ ID NO: 4367 - protein, 898 aa, Homo sapiens
MAQVAMSTLPVEDEESSESRMVVTFLMSALESMCKELAKSKAEVACIAVYETDVFVVGTERGRAFVNTRKDFQKDFVKYCVEEEEKAAEMHKMKSTTQANRMSVDAVEIETLRKTVEDYFCFCYGKALGKSTVVPVPYEKMLRDQSAVVVQGLPEGVAFKHPENYDLATLKWILENKAGISFIIKRPFLEPKKHVGGRVMVTDADRSILSPGGSCGPIKVKTEPTEDSGISLEMAAVTVKEESEDPDYYQYNIQGSHHSSEGNEGTEMEVPAEDSTQHVPSETSEDPEVEVTIEDDDYSPPSKRPKANELPQPPVPEPANAGKRKVREFNFEKWNARITDLRKQVEELFERKYAQAIKAKGPVTIPYPLFQSHVEDLYVEGLPEGIPFRRPSTYGIPRLERILLAKERIRFVIKKHELLNSTREDLQLDKPASGVKEEWYARITKLRKMVDQLFCKKFAEALGSTEAKAVPYQKFEAHPNDLYVEGLPENIPFRSPSWYGIPRLEKIIQVGNRIKFVIKRPELLTHSTTEVTQPRTNTPAQALGLTEAVKVPYPVFESNPEFLYVEGLPEGIPFRSPTWFGIPRLERIVRGSNKIKFVVKKPELVISYLPPGMASKINTKALQSPKRPRSPGSNSKVPEIEVTVEGPNNNNPQTSAVRTPTQTNGSNVPFKPRGREFSFEAWNAKITDLKQKVENLFNEKCGEALGLKQAVKVPFALFESFPEDFYVEGLPEGVPFRRPSTFGIPRLEKILRNKAKIKFIIKKPEMFETAIKESTSSKSPPRKINSSPNVNTTASGVEDLNIIQVTIPDDDNERLSKVEKARQLREQVNDLFSRKFGEAIGMGFPVKVPYRKITINPGCVVVDGMPPGVSFKAPSYLEISSMRRILDSAEFIKFTVIR

SEQ ID NO: 4368 - DNA, 4158 bp, Homo sapiens
aaaaaaaaaaaaaaaaaaaaaaaaaaaagaaaaaagaaaaaaaaaaggaggaggaggaggagggtgagagagaagctgggagagcagagaaaaggggccaccggtcgcccccccgcttccccgcacgcgctctccagccgcggccgcccgcctgccgcggtcaccccggcctctgcctctgtcccccagtgatcggatcaaggcgctgagcgaggccctgcctgcggggcggccatgcggcggtgacaggagcgcgaccgacacgcacgggcccctcgccccctctcgcctcccgtccgctcgccagctcccctcagccgaggctgctccgcggcggccgcagcccgcgcgcggcccacactcgcctccccgttgaagatgaggagtcctcggagagcaggatggtggtgacattcctcatgtcagctctcgagtccatgtgtaaagaactggccaagtccaaagccgaagtggcctgcattgcagtgtatgaaacagacgtgtttgtcgtcggaactgaaagaggacgtgcttttgtcaataccagaaaggattttcaaaaagattttgtaaaatattgtgttgaagaagaagaaaaagctgcagagatgcataaaatgaaatctacaacccaggcaaatcggatgagtgtagatgctgtagaaattgaaacactcagaaaaacagttgaggactatttctgcttttgctatgggaaagctttaggcaaatccacagtggtacctgtaccatatgagaagatgctgcgagaccagtcggctgtggtagtgcaggggcttccggaaggtgttgcctttaaacaccccgagaactatgatcttgcaaccctgaaatggattttggagaacaaagcagggatttcattcatcattaagagaccttttttagagccaaagaagcatgtaggtggtcgtgtgatggtaacagatgctgacaggtcaatactatctccaggtggaagttgtggccccatcaaagtgaaaactgaacccacagaagattctggcatttccctggaaatggcagctgtgacagtaaaggaagaatcagaagatcctgattattatcaatataacattcaaggaagccaccattcttcagagggcaatgaaggcacagaaatggaagtaccagcagaagattctactcaacatgtcccttcagaaacaagtgaggaccctgaagttgaggtgactattgaagatgatgattattctccaccgtctaagagaccaaaggccaatgagctaccgcagccaccagtcccggaacccgccaatgctgggaagcggaaagtgagggagttcaacttcgagaaatggaatgctcgcatcactgatctacgtaaacaagttgaagaattgtttgaaaggaaatatgctcaagccataaaagccaaaggtccggtgacgatcccgtaccctcttttccagtctcatgttgaagatctttatgtagaaggacttcctgaaggaattccttttagaaggccatctacttacggaattcctcgcctggagaggatattacttgcaaaggaaaggattcgttttgtgattaagaaacatgagcttctgaattcaacacgtgaagatttacagcttgataagccagcttcaggagtaaaggaagaatggtatgccagaatcactaaattaagaaagatggtggatcagcttttctgcaaaaaatttgcggaagccttggggagcactgaagccaaggctgtaccgtaccaaaaatttgaggcacacccgaatgatctgtacgtggaaggactgccagaaaacattcctttccgaagtccctcatggtatggaatcccaaggctggaaaaaatcattcaagtgggcaatcgaattaaatttgttattaaaagaccagaacttctgactcacagtaccactgaagttactcagccaagaacgaatacaccagtcaaagaagattggaatgtcagaattaccaagctacggaagcaagtggaagagatttttaatttgaaatttgctcaagctcttggactcaccgaggcagtaaaagtaccatatcctgtgtttgaatcaaacccggagttcttgtatgtggaaggcttgccagaggggattcccttccgaagccctacctggtttggaattccacgacttgaaaggatcgtccgcgggagtaataaaatcaagttcgttgttaaaaaacctgaactagttatttcctacttgcctcctgggatggctagtaaaataaacactaaagctttgcagtcccccaaaagaccacgaagtcctgggagtaattcaaaggttcctgaaattgaggtcaccgtggaaggccctaataacaacaatcctcaaacctcagctgttcgaaccccgacccagactaacggttctaacgttcccttcaagccacgagggagagagttttcctttgaggcctggaatgccaaaatcacggacctaaaacagaaagttgaaaatctcttcaatgagaaatgtggggaagctcttggccttaaacaagctgtgaaggtgccgttcgcgttatttgagtctttcccggaagacttttatgtggaaggcttacctgagggtgtgccattccgaagaccatcgacttttggcattccgaggctggagaagatactcagaaacaaagccaaaattaagttcatcattaaaaagcccgaaatgtttgagacggcgattaaggagagcacctcctctaagagccctcccagaaaaataaattcatcacccaatgttaatactactgcatcaggtgttgaagaccttaacatcattcaggtgacaattccagatgatgataatgaaagactctcgaaagttgaaaaagctagacagctaagagaacaagtgaatgacctctttagtcggaaatttggtgaagctattggtatgggttttcctgtgaaagttccctacaggaaaatcacaattaaccctggctgtgtggtggttgatggcatgcccccgggggtgtccttcaaagcccccagctacctggaaatcagctccatgagaaggatcttagactctgccgagtttatcaaattcacggtcattagaccatttccaggacttgtgattaataaccagctggttgatcagagtgagtcagaaggccccgtgatacaagaatcagctgaaccaagccagttggaagttccagccacagaagaaataaaagagactgatggaagctctcagatcaagcaagaaccagaccccacgtggtagacctcttccctcctaggagccttgagttacggtgtttattttccaatcaagtgaagatatctcctacttctcctactggaacatctcagcttctgcagtgaagaaaaattcctgtgatagttcagttctttagtttttctatttgaaaaaaaaaaatcatttaaatgatcctttgttcacggctctccttaatgactgagtgaacagttcctatctgtatatttgactaaaccttttcctaagctatctctcatggttcctatgtttttttatcataattaaaagcaaaaccatctggatcacctaacagtcagaggtcagtatctcagcgtgtgaattatagaggaaatacagagagaacctcttccacttttacttttcgtccaaataaaatgcatggtgtaccagaagttgaagatcgggttgaggattggggctagctcgatgacactaaggccccaacatcgcgggacctgctgtggcgcggattcttaggaacgctgttctagccggccccctctccaggggtcgccgtggccggcattatttcctagttcttcttgtaaccctgaggtgccagcgcggggagtgaggaggggtcagggggctaaggatgcaacctctgacgttctgcgccttcctaggagagtcttacatgtgttgagatttcacaagcaatgcgagttgtaaaataccagctctacaagaagctaggctctgtgacggcatagttttcagtagctttatcacaatattcacaatggagaattatatgacatggtagcagaaataggcccttttatgtgttgcttctattttacctcaaattgtagatatagggtaatcaataaaatccatccatgcctttcacacactaagt

SEQ ID NO: 4369 - protein, 958 aa, Homo sapiens [sequence omitted]

SEQ ID NO: 4370 - DNA, 4933 bp, Homo sapiens
aaaaaaaaaaaaaaaaaaaaaaaaaaaagaaaaaagaaaaaaaaaaggaggaggaggaggagggtgagagagaagctgggagagcagagaaaaggggccaccggtcgcccccccgcttccccgcacgcgctctccagccgcggccgcccgcctgccgcggtcaccccggcctctgcctctgtcccccagtgatcggatcaaggcgctgagcgaggccctgcctgcggggcggccatgcggcggtgacaggagcgcgaccgacacgcacgggcccctcgccccctctcgcctcccgtccgctcgccagctcccctcagccgaggctgctccgcggcggccgcagcccgcgcgcggcccacactcgcctccccgttgaagatgaggagtcctcggagagcaggatggtggtgacattcctcatgtcagctctcgagtccatgtgtaaagaactggccaagtccaaagccgaagtggcctgcattgcagtgtatgaaacagacgtgtttgtcgtcggaactgaaagaggacgtgcttttgtcaataccagaaaggattttcaaaaagattttgtaaaatattgtgttgaagaagaagaaaaagctgcagagatgcataaaatgaaatctacaacccaggcaaatcggatgagtgtagatgctgtagaaattgaaacactcagaaaaacagttgaggactatttctgcttttgctatgggaaagctttaggcaaatccacagtggtacctgtaccatatgagaagatgctgcgagaccagtcggctgtggtagtgcaggggcttccggaaggtgttgcctttaaacaccccgagaactatgatcttgcaaccctgaaatggattttggagaacaaagcagggatttcattcatcattaagagaccttttttagagccaaagaagcatgtaggtggtcgtgtgatggtaacagatgctgacaggtcaatactatctccaggtggaagttgtggccccatcaaagtgaaaactgaacccacagaagattctggaagccaccattcttcagagggcaatgaaggcacagaaatggaagtaccagcagaagattctactcaacatgtcccttcagaaacaagtgaggaccctgaagttgaggtgactattgaagatgatgattattctccaccgtctaagagaccaaaggccaatgagctaccgcagccaccagtcccggaacccgccaatgctgggaagcggaaagtgagggagttcaacttcgagaaatggaatgctcgcatcactgatctacgtaaacaagttgaagaattgtttgaaaggaaatatgctcaagccataaaagccaaaggtccggtgacgatcccgtaccctcttttccagtctcatgttgaagatctttatgtagaaggacttcctgaaggaattccttttagaaggccatctacttacggaattcctcgcctggagaggatattacttgcaaaggaaaggattcgttttgtgattaagaaacatgagcttctgaattcaacacgtgaagatttacagcttgataagccagcttcaggagtaaaggaagaatggtatgccagaatcactaaattaagaaagatggtggatcagcttttctgcaaaaaatttgcggaagccttggggagcactgaagccaaggctgtaccgtaccaaaaatttgaggcacacccgaatgatctgtacgtggaaggactgccagaaaacattcctttccgaagtccctcatggtatggaatcccaaggctggaaaaaatcattcaagtgggcaatcgaattaaatttgttattaaaagaccagaacttctgactcacagtaccactgaagttactcagccaagaacgaatacaccagctcaagctcttggactcaccgaggcagtaaaagtaccatatcctgtgtttgaatcaaacccggagttcttgtatgtggaaggcttgccagaggggattcccttccgaagccctacctggtttggaattccacgacttgaaaggatcgtccgcgggagtaataaaatcaagttcgttgttaaaaaacctgaactagttatttcctacttgcctcctgggatggctagtaaaataaacactaaagctttgcagtcccccaaaagaccacgaagtcctgggagtaattcaaaggttcctgaaattgaggtcaccgtggaaggccctaataacaacaatcctcaaacctcagctgttcgaaccccgacccagactaacggttctaacgttcccttcaagccacgagggagagagttttcctttgaggcctggaatgccaaaatcacggacctaaaacagaaagttgaaaatctcttcaatgagaaatgtggggaagctcttggccttaaacaagctgtgaaggtgccgttcgcgttatttgagtctttcccggaagacttttatgtggaaggcttacctgagggtgtgccattccgaagaccatcgacttttggcattccgaggctggagaagatactcagaaacaaagccaaaattaagttcatcattaaaaagcccgaaatgtttgagacggcgattaaggagagcacctcctctaagagccctcccagaaaaataaattcatcacccaatgttaatactactgcatcaggtgttgaagaccttaacatcattcaggtgacaattccagatgatgataatgaaagactctcgaaagttgaaaaagctagacagctaagagaacaagtgaatgacctctttagtcggaaatttggtgaagctattggtatgggttttcctgtgaaagttccctacaggaaaatcacaattaaccctggctgtgtggtggttgatggcatgcccccgggggtgtccttcaaagcccccagctacctggaaatcagctccatgagaaggatcttagactctgccgagtttatcaaattcacggtcattagaccatttccaggacttgtgattaataaccagctggttgatcagagtgagtcagaaggccccgtgatacaagaatcagctgaaccaagccagttggaagttccagccacagaaggtaaaaggacctcttccctcctagggtaaatcagcttctgtgtcagggatgctgtgtggtgtccatctgaaccccctgcatacgcgtagctaatgtgatctccccactttcacataagatggtggccctgccttcagggaatgtgggagccaggtgggagccttcccggatatttaagctagaagattctacagggagattctccttggatcaatatatgtctctcagtcaaagatgtaaaagcacttttgccttaaaaagaatgttctgtttctaaatagagtcaacgttgtcctcctcattggaattcactatgagtcagaatcattagactgacttttttttttccatagtaatagtattttgcagagtctcacagagctgcagatcttttgttcatcttgcagagttaacaagtctgatcctgttagtccagatttcttaaatttggccaagttataataggagcagtagcttgagacccgaagtcaggaaactttgacaatggatttttttttttaatccagagacttgtactggaatttgccttaccctgtcagctcatggacttaaggtttcatcccgctttatgagtgcttctgaatccaagtcattgttacctgaatttgcaaattaagttgtgatattcgtgactgttaaattcctgtaattagattaacctctttgcttgcttgtttgttttctctcctattttagcttaaagtatcagtggttgagaagagcttttcggacctgttactaccccaagctgtgtaatatacttgtataacagaaataccttctatacaaacctttttttctacttttagatagaaatgtctactttttcagcagttctgtgaattaaagagcagagtgactgtgggtctggaatggctggtgtacttgggaatgtactatcaggattttacagcaatgctgggaaatgacagggaaaatgacaggaatgaatctcaccagattttttatgtactcagcagagccttgagttacggtgtttattttccaatcaagtgaagatatctcctacttctcctactggaacatctcagcttctgcagtgaagaaaaattcctgtgatagttcagttctttagtttttctatttgaaaaaaaaaaatcatttaaatgatcctttgttcacggctctccttaatgactgagtgaacagttcctatctgtatatttgactaaaccttttcctaagctatctctcatggttcctatgtttttttatcataattaaaagcaaaaccatctggatcacctaacagtcagaggtcagtatctcagcgtgtgaattatagaggaaatacagagagaacctcttccacttttacttttcgtccaaataaaatgcatggtgtaccagaagttgaagatcgggttgaggattggggctagctcgatgacactaaggccccaacatcgcgggacctgctgtggcgcggattcttaggaacgctgttctagccggccccctctccaggggtcgccgtggccggcattatttcctagttcttcttgtaaccctgaggtgccagcgcggggagtgaggaggggtcagggggctaaggatgcaacctctgacgttctgcgccttcctaggagagtcttacatgtgttgagatttcacaagcaatgcgagttgtaaaataccagctctacaagaagctaggctctgtgacggcatagttttcagtagctttatcacaatattcacaatggagaattatatgacatggtagcagaaataggcccttttatgtgttgcttctattttacctcaaattgtagatatagggtaatcaataaaatccatccatgcctttcacacactaagt

SEQ ID NO: 4371 - protein, 898 aa, Homo sapiens
MVVTFLMSALESMCKELAKSKAEVACIAVYETDVFVVGTERGRAFVNTRKDFQKDFVKYCVEEEEKAAEMHKMKSTTQANRMSVDAVEIETLRKTVEDYFCFCYGKALGKSTVVPVPYEKMLRDQSAVVVQGLPEGVAFKHPENYDLATLKWILENKAGISFIIKRPFLEPKKHVGGRVMVTDADRSILSPGGSCGPIKVKTEPTEDSGSHHSSEGNEGTEMEVPAEDSTQHVPSETSEDPEVEVTIEDDDYSPPSKRPKANELPQPPVPEPANAGKRKVREFNFEKWNARITDLRKQVEELFERKYAQAIKAKGPVTIPYPLFQSHVEDLYVEGLPEGIPFRRPSTYGIPRLERILLAKERIRFVIKKHELLNSTREDLQLDKPASGVKEEWYARITKLRKMVDQLFCKKFAEALGSTEAKAVPYQKFEAHPNDLYVEGLPENIPFRSPSWYGIPRLEKIIQVGNRIKFVIKRPELLTHSTTEVTQPRTNTPAQALGLTEAVKVPYPVFESNPEFLYVEGLPEGIPFRSPTWFGIPRLERIVRGSNKIKFVVKKPELVISYLPPGMASKINTKALQSPKRPRSPGSNSKVPEIEVTVEGPNNNNPQTSAVRTPTQTNGSNVPFKPRGREFSFEAWNAKITDLKQKVENLFNEKCGEALGLKQAVKVPFALFESFPEDFYVEGLPEGVPFRRPSTFGIPRLEKILRNKAKIKFIIKKPEMFETAIKESTSSKSPPRKINSSPNVNTTASGVEDLNIIQVTIPDDDNERLSKVEKARQLREQVNDLFSRKFGEAIGMGFPVKVPYRKITINPGCVVVDGMPPGVSFKAPSYLEISSMRRILDSAEFIKFTVIRPFPGLVINNQLVDQSESEGPVIQESAEPSQLEVPATEGKRTSSLLG

SEQ ID NO: 4372 - DNA, 4030 bp, Homo sapiens
aaaaaaaaaaaaaaaaaaaaaaaaaaaagaaaaaagaaaaaaaaaaggaggaggaggaggagggtgagagagaagctgggagagcagagaaaaggggccaccggtcgcccccccgcttccccgcacgcgctctccagccgcggccgcccgcctgccgcggtcaccccggcctctgcctctgtcccccagtgatcggatcaaggcgctgagcgaggccctgcctgcggggcggccatgcggcggtgacaggagcgcgaccgacacgcacgggcccctcgccccctctcgcctcccgtccgctcgccagctcccctcagccgaggctgctccgcggcggccgcagcccgcgcgcggcccacactcgcctcccctcggcacccccggccccggagctgcctggaggcggccgcactcggggatcatggcccaagttgcaatgtccaccctccccgttgaagatgaggagtcctcggagagcaggatggtggtgacattcctcatgtcagctctcgagtccatgtgtaaagaactggccaagtccaaagccgaagtggcctgcattgcagtgtatgaaacagacgtgtttgtcgtcggaactgaaagaggacgtgcttttgtcaataccagaaaggattttcaaaaagattttgtaaaatattgtgttgaagaagaagaaaaagctgcagagatgcataaaatgaaatctacaacccaggcaaatcggatgagtgtagatgctgtagaaattgaaacactcagaaaaacagttgaggactatttctgcttttgctatgggaaagctttaggcaaatccacagtggtacctgtaccatatgagaagatgctgcgagaccagtcggctgtggtagtgcaggggcttccggaaggtgttgcctttaaacaccccgagaactatgatcttgcaaccctgaaatggattttggagaacaaagcagggatttcattcatcattaagagaccttttttagagccaaagaagcatgtaggtggtcgtgtgatggtaacagatgctgacaggtcaatactatctccaggtggaagttgtggccccatcaaagtgaaaactgaacccacagaagattctggcatttccctggaaatggcagctgtgacagtaaaggaagaatcagaagatcctgattattatcaatataacattcaagcaggcccttctgaaactgatgatgttgatgaaaaacagcccctatcgaagcctttgcaaggaagccaccattcttcagagggcaatgaaggcacagaaatggaagtaccagcagaagattctactcaacatgtcccttcagaaacaagtgaggaccctgaagttgaggtgactattgaagatgatgattattctccaccgtctaagagaccaaaggccaatgagctaccgcagccaccagtcccggaacccgccaatgctgggaagcggaaagtgagggagttcaacttcgagaaatggaatgctcgcatcactgatctacgtaaacaagttgaagaattgtttgaaaggaaatatgctcaagccataaaagccaaaggtccggtgacgatcccgtaccctcttttccagtctcatgttgaagatctttatgtagaaggacttcctgaaggaattccttttagaaggccatctacttacggaattcctcgcctggagaggatattacttgcaaaggaaaggattcgttttgtgattaagaaacatgagcttctgaattcaacacgtgaagatttacagcttgataagccagcttcaggagtaaaggaagaatggtatgccagaatcactaaattaagaaagatggtggatcagcttttctgcaaaaaatttgcggaagccttggggagcactgaagccaaggctgtaccgtaccaaaaatttgaggcacacccgaatgatctgtacgtggaaggactgccagaaaacattcctttccgaagtccctcatggtatggaatcccaaggctggaaaaaatcattcaagtgggcaatcgaattaaatttgttattaaaagaccagaacttctgactcacagtaccactgaagttactcagccaagaacgaatacaccagtcaaagaagattggaatgtcagaattaccaagctacggaagcaagtggaagagatttttaatttgaaatttgctcaagctcttggactcaccgaggcagtaaaagtaccatatcctgtgtttgaatcaaacccggagttcttgtatgtggaaggcttgccagaggggattcccttccgaagccctacctggtttggaattccacgacttgaaaggatcgtccgcgggagtaataaaatcaagttcgttgttaaaaaacctgaactagttatttcctacttgcctcctgggatggctagtaaaataaacactaaagctttgcagtcccccaaaagaccacgaagtcctgggagtaattcaaaggttcctgaaattgaggtcaccgtggaaggccctaataacaacaatcctcaaacctcagctgttcgaaccccgacccagactaacggttctaacgttcccttcaagccacgagggagagagttttcctttgaggcctggaatgccaaaatcacggacctaaaacagaaagttgaaaatctcttcaatgagaaatgtggggaagctcttggccttaaacaagctgtgaaggtgccgttcgcgttatttgagtctttcccggaagacttttatgtggaaggcttacctgagggtgtgccattccgaagaccatcgacttttggcattccgaggctggagaagatactcagaaacaaagccaaaattaagttcatcattaaaaagcccgaaatgtttgagacggcgattaaggagagcacctcctctaagagccctcccagaaaaataaattcatcacccaatgttaatactactgcatcaggtgttgaagaccttaacatcattcaggtgacaattccagatgatgataatgaaagactctcgaaagttgaaaaagctagacagctaagagaacaagtgaatgacctctttagtcggaaatttggtgaagctattggtatgggttttcctgtgaaagttccctacaggaaaatcacaattaaccctggctgtgtggtggttgatggcatgcccccgggggtgtccttcaaagcccccagctacctggaaatcagctccatgagaaggatcttagactctgccgagtttatcaaattcacggtcattagaccatttccaggacttgtgattaataaccagctggttgatcagagtgagtcagaaggccccgtgatacaagaatcagctgaaccaagccagttggaagttccagccacagaagaaataaaagagactgatggaagctctcagatcaagcaagaaccagaccccacgtggtagacctcttccctcctaggcaaaaccatctggatcacctaacagtcagaggtcagtatctcagcgtgtgaattatagaggaaatacagagagaacctcttccacttttacttttcgtccaaataaaatgcatggtgtaccagaagttgaagatcgggttgaggattggggctagctcgatgacactaaggccccaacatcgcgggacctgctgtggcgcggattcttaggaacgctgttctagccggccccctctccaggggtcgccgtggccggcattatttcctagttcttcttgtaaccctgaggtgccagcgcggggagtgaggaggggtcagggggctaaggatgcaacctctgacgttctgcgccttcctaggagagtcttacatgtgttgagatttcacaagcaatgcgagttgtaaaataccagctctacaagaagctaggctctgtgacggcatagttttcagtagctttatcacaatattcacaatggagaattatatgacatggtagcagaaataggcccttttatgtgttgcttctattttacctcaaattgtagatatagggtaatcaataaaatccatccatgcctttcacacactaagt

SEQ ID NO: 4373 - protein, 998 aa, Homo sapiens; identical to SEQ ID NO: 468

SEQ ID NO: 4374 - DNA, 4996 bp, Homo sapiens
aaaaaaaaaaaaaaaaaaaaaaaaaaaagaaaaaagaaaaaaaaaaggaggaggaggaggagggtgagagagaagctgggagagcagagaaaaggggccaccggtcgcccccccgcttccccgcacgcgctctccagccgcggccgcccgcctgccgcggtcaccccggcctctgcctctgtcccccagtgatcggatcaaggcgctgagcgaggccctgcctgcggggcggccatgcggcggtgacaggagcgcgaccgacacgcacgggcccctcgccccctctcgcctcccgtccgctcgccagctcccctcagccgaggctgctccgcggcggccgcagcccgcgcgcggcccacactcgcctcccctcggcacccccggccccggagctgcctggaggcggccgcactcggtgtaaagaactggccaagtccaaagccgaagtggcctgcattgcagtgtatgaaacagacgtgtttgtcgtcggaactgaaagaggacgtgcttttgtcaataccagaaaggattttcaaaaagattttgtaaaatattgtgttgaagaagaagaaaaagctgcagagatgcataaaatgaaatctacaacccaggcaaatcggatgagtgtagatgctgtagaaattgaaacactcagaaaaacagttgaggactatttctgcttttgctatgggaaagctttaggcaaatccacagtggtacctgtaccatatgagaagatgctgcgagaccagtcggctgtggtagtgcaggggcttccggaaggtgttgcctttaaacaccccgagaactatgatcttgcaaccctgaaatggattttggagaacaaagcagggatttcattcatcattaagagaccttttttagagccaaagaagcatgtaggtggtcgtgtgatggtaacagatgctgacaggtcaatactatctccaggtggaagttgtggccccatcaaagtgaaaactgaacccacagaagattctggcatttccctggaaatggcagctgtgacagtaaaggaagaatcagaagatcctgattattatcaatataacattcaaggaagccaccattcttcagagggcaatgaaggcacagaaatggaagtaccagcagaagatgatgattattctccaccgtctaagagaccaaaggccaatgagctaccgcagccaccagtcccggaacccgccaatgctgggaagcggaaagtgagggagttcaacttcgagaaatggaatgctcgcatcactgatctacgtaaacaagttgaagaattgtttgaaaggaaatatgctcaagccataaaagccaaaggtccggtgacgatcccgtaccctcttttccagtctcatgttgaagatctttatgtagaaggacttcctgaaggaattccttttagaaggccatctacttacggaattcctcgcctggagaggatattacttgcaaaggaaaggattcgttttgtgattaagaaacatgagcttctgaattcaacacgtgaagatttacagcttgataagccagcttcaggagtaaaggaagaatggtatgccagaatcactaaattaagaaagatggtggatcagcttttctgcaaaaaatttgcggaagccttggggagcactgaagccaaggctgtaccgtaccaaaaatttgaggcacacccgaatgatctgtacgtggaaggactgccagaaaacattcctttccgaagtccctcatggtatggaatcccaaggctggaaaaaatcattcaagtgggcaatcgaattaaatttgttattaaaagaccagaacttctgactcacagtaccactgaagttactcagccaagaacgaatacaccagtcaaagaagattggaatgtcagaattaccaagctacggaagcaagtggaagagatttttaatttgaaatttgctcaagctcttggactcaccgaggcagtaaaagtaccatatcctgtgtttgaatcaaacccggagttcttgtatgtggaaggcttgccagaggggattcccttccgaagccctacctggtttggaattccacgacttgaaaggatcgtccgcgggagtaataaaatcaagttcgttgttaaaaaacctgaactagttatttcctacttgcctcctgggatggctagtaaaataaacactaaagctttgcagtcccccaaaagaccacgaagtcctgggagtaattcaaaggttcctgaaattgaggtcaccgtggaaggccctaataacaacaatcctcaaacctcagctgttcgaaccccgacccagactaacggttctaacgttcccttcaagccacgagggagagagttttcctttgaggcctggaatgccaaaatcacggacctaaaacagaaagttgaaaatctcttcaatgagaaatgtggggaagctcttggccttaaacaagctgtgaaggtgccgttcgcgttatttgagtctttcccggaagacttttatgtggaaggcttacctgagggtgtgccattccgaagaccatcgacttttggcattccgaggctggagaagatactcagaaacaaagccaaaattaagttcatcattaaaaagcccgaaatgtttgagacggcgattaaggagagcacctcctctaagagccctcccagaaaaataaattcatcacccaatgttaatactactgcatcaggtgttgaagaccttaacatcattcaggtgacaattccagatgatgataatgaaagactctcgaaagttgaaaaagctagacagctaagagaacaagtgaatgacctctttagtcggaaatttggtgaagctattggtatgggttttcctgtgaaagttccctacaggaaaatcacaattaaccctggctgtgtggtggttgatggcatgcccccgggggtgtccttcaaagcccccagctacctggaaatcagctccatgagaaggatcttagactctgccgagtttatcaaattcacggtcattagaccatttccaggacttgtgattaataaccagctggttgatcagagtgagtcagaaggccccgtgatacaagaatcagctgaaccaagccagttggaagttccagccacagaaggtaaaaggacctcttccctcctagggtaaatcagcttctgtgtcagggatgctgtgtggtgtccatctgaaccccctgcatacgcgtagctaatgtgatctccccactttcacataagatggtggccctgccttcagggaatgtgggagccaggtgggagccttcccggatatttaagctagaagattctacagggagattctccttggatcaatatatgtctctcagtcaaagatgtaaaagcacttttgccttaaaaagaatgttctgtttctaaatagagtcaacgttgtcctcctcattggaattcactatgagtcagaatcattagactgacttttttttttccatagtaatagtattttgcagagtctcacagagctgcagatcttttgttcatcttgcagagttaacaagtctgatcctgttagtccagatttcttaaatttggccaagttataataggagcagtagcttgagacccgaagtcaggaaactttgacaatggatttttttttttaatccagagacttgtactggaatttgccttaccctgtcagctcatggacttaaggtttcatcccgctttatgagtgcttctgaatccaagtcattgttacctgaatttgcaaattaagttgtgatattcgtgactgttaaattcctgtaattagattaacctctttgcttgcttgtttgttttctctcctattttagcttaaagtatcagtggttgagaagagcttttcggacctgttactaccccaagctgtgtaatatacttgtataacagaaataccttctatacaaacctttttttctacttttagatagaaatgtctactttttcagcagttctgtgaattaaagagcagagtgactgtgggtctggaatggctggtgtacttgggaatgtactatcaggattttacagcaatgctgggaaatgacagggaaaatgacaggaatgaatctcaccagattttttatgtactcagcagagccttgagttacggtgtttattttccaatcaagtgaagatatctcctacttctcctactggaacatctcagcttctgcagtgaagaaaaattcctgtgatagttcagttctttagtttttctatttgaaaaaaaaaaatcatttaaatgatcctttgttcacggctctccttaatgactgagtgaacagttcctatctgtatatttgactaaaccttttcctaagctatctctcatggttcctatgtttttttatcataattaaaagcaaaaccatctggatcacctaacagtcagaggtcagtatctcagcgtgtgaattatagaggaaatacagagagaacctcttccacttttacttttcgtccaaataaaatgcatggtgtaccagaagttgaagatcgggttgaggattggggctagctcgatgacactaaggccccaacatcgcgggacctgctgtggcgcggattcttaggaacgctgttctagccggccccctctccaggggtcgccgtggccggcattatttcctagttcttcttgtaaccctgaggtgccagcgcggggagtgaggaggggtcagggggctaaggatgcaacctctgacgttctgcgccttcctaggagagtcttacatgtgttgagatttcacaagcaatgcgagttgtaaaataccagctctacaagaagctaggctctgtgacggcatagttttcagtagctttatcacaatattcacaatggagaattatatgacatggtagcagaaataggcccttttatgtgttgcttctattttacctcaaattgtagatatagggtaatcaataaaatccatccatgcctttcacacactaagt

SEQ ID NO: 4375 - protein, 858 aa, Homo sapiens
MHKMKSTTQANRMSVDAVEIETLRKTVEDYFCFCYGKALGKSTVVPVPYEKMLRDQSAVVVQGLPEGVAFKHPENYDLATLKWILENKAGISFIIKRPFLEPKKHVGGRVMVTDADRSILSPGGSCGPIKVKTEPTEDSGISLEMAAVTVKEESEDPDYYQYNIQGSHHSSEGNEGTEMEVPAEDDDYSPPSKRPKANELPQPPVPEPANAGKRKVREFNFEKWNARITDLRKQVEELFERKYAQAIKAKGPVTIPYPLFQSHVEDLYVEGLPEGIPFRRPSTYGIPRLERILLAKERIRFVIKKHELLNSTREDLQLDKPASGVKEEWYARITKLRKMVDQLFCKKFAEALGSTEAKAVPYQKFEAHPNDLYVEGLPENIPFRSPSWYGIPRLEKIIQVGNRIKFVIKRPELLTHSTTEVTQPRTNTPVKEDWNVRITKLRKQVEEIFNLKFAQALGLTEAVKVPYPVFESNPEFLYVEGLPEGIPFRSPTWFGIPRLERIVRGSNKIKFVVKKPELVISYLPPGMASKINTKALQSPKRPRSPGSNSKVPEIEVTVEGPNNNNPQTSAVRTPTQTNGSNVPFKPRGREFSFEAWNAKITDLKQKVENLFNEKCGEALGLKQAVKVPFALFESFPEDFYVEGLPEGVPFRRPSTFGIPRLEKILRNKAKIKFIIKKPEMFETAIKESTSSKSPPRKINSSPNVNTTASGVEDLNIIQVTIPDDDNERLSKVEKARQLREQVNDLFSRKFGEAIGMGFPVKVPYRKITINPGCVVVDGMPPGVSFKAPSYLEISSMRRILDSAEFIKFTVIRPFPGLVINNQLVDQSESEGPVIQESAEPSQLEVPATEGKRTSSLLG

SEQ ID NO: 4376 - DNA, 4375 bp, Homo sapiens
aaaaaaaaaaaaaaaaaaaaaaaaaaaagaaaaaagaaaaaaaaaaggaggaggaggaggagggtgagagagaagctgggagagcagagaaaaggggccaccggtcgcccccccgcttccccgcacgcgctctccagccgcggccgcccgcctgccgcggtcaccccggcctctgcctctgtcccccagtgatcggatcaaggcgctgagcgaggccctgcctgcggggcggccatgcggcggtgacaggagcgcgaccgacacgcacgggcccctcgccccctctcgcctcccgtccgctcgccagctcccctcagccgaggctgctccgcggcggccgcagcccgcgcgcggcccacactcgcctccccgttgaagatgaggagtcctcggagagcaggatggtggtgacattcctcatgtcagctctcgagtccatgtgtaaagaactggccaagtccaaagccgaagtggcctgcattgcagtgtatgaaacagacgtgtttgtcgtcggaactgaaagaggacgtgcttttgtcaataccagaaaggattttcaaaaagattttgtaaaatattgtgttgaagaagaagaaaaagctgcagagatgcataaaatgaaatctacaacccaggcaaatcggatgagtgtagatgctgtagaaattgaaacactcagaaaaacagttgaggactatttctgcttttgctatgggaaagctttaggcaaatccacagtggtacctgtaccatatgagaagatgctgcgagaccagtcggctgtggtagtgcaggggcttccggaaggtgttgcctttaaacaccccgagaactatgatcttgcaaccctgaaatggattttggagaacaaagcagggatttcattcatcattaagagaccttttttagagccaaagaagcatgtaggtggtcgtgtgatggtaacagatgctgacaggtcaatactatctccaggtggaagttgtggccccatcaaagtgaaaactgaacccacagaagattctggcatttccctggaaatggcagctgtgacagtaaaggaagaatcagaagatcctgattattatcaatataacattcaaggaagccaccattcttcagagggcaatgaaggcacagaaatggaagtaccagcagaagattctactcaacatgtcccttcagaaacaagtgaggaccctgaagttgaggtgactattgaagatgatgattattctccaccgtctaagagaccaaaggccaatgagctaccgcagccaccagtcccggaacccgccaatgctgggaagcggaaagtgagggagttcaacttcgagaaatggaatgctcgcatcactgatctacgtaaacaagttgaagaattgtttgaaaggaaatatgctcaagccataaaagccaaaggtccggtgacgatcccgtaccctcttttccagtctcatgttgaagatctttatgtagaaggacttcctgaaggaattccttttagaaggccatctacttacggaattcctcgcctggagaggatattacttgcaaaggaaaggattcgttttgtgattaagaaacatgagcttctgaattcaacacgtgaagatttacagcttgataagccagcttcaggagtaaaggaagaatggtatgccagaatcactaaattaagaaagatggtggatcagcttttctgcaaaaaatttgcggaagccttggggagcactgaagccaaggctgtaccgtaccaaaaatttgaggcacacccgaatgatctgtacgtggaaggactgccagaaaacattcctttccgaagtccctcatggtatggaatcccaaggctggaaaaaatcattcaagtgggcaatcgaattaaatttgttattaaaagaccagaacttctgactcacagtaccactgaagttactcagccaagaacgaatacaccagtcaaagaagattggaatgtcagaattaccaagctacggaagcaagtggaagagatttttaatttgaaatttgctcaagctcttggactcaccgaggcagtaaaagtaccatatcctgtgtttgaatcaaacccggagttcttgaaaggatcgtccgcgggagtaataaaatcaagttcgttgttaaaaaacctgaactagttatttcctacttgcctcctgggatggctagtaaaataaacactaaagctttgcagtcccccaaaagaccacgaagtcctgggagtaattcaaaggttcctgaaattgaggtcaccgtggaaggccctaataacaacaatcctcaaacctcagctgttcgaaccccgacccagactaacggttctaacgttcccttcaagccacgagggagagagttttcctttgaggcctggaatgccaaaatcacggacctaaaacagaaagttgaaaatctcttcaatgagaaatgtggggaagctcttggccttaaacaagctgtgaaggtgccgttcgcgttatttgagtctttcccggaagacttttatgtggaaggcttacctgagggtgtgccattccgaagaccatcgacttttggcattccgaggctggagaagatactcagaaacaaagccaaaattaagttcatcattaaaaagcccgaaatgtttgagacggcgattaaggagagcacctcctctaagagccctcccagaaaaataaattcatcacccaatgttaatactactgcatcaggtgttgaagaccttaacatcattcaggtgacaattccagatgatgataatgaaagactctcgaaagttgaaaaagctagacagctaagagaacaagtgaatgacctctttagtcggaaatttggtgaagctattggtatgggttttcctgtgaaagttccctacaggaaaatcacaattaaccctggctgtgtggtggttgatggcatgcccccgggggtgtccttcaaagcccccagctacctggaaatcagctccatgagaaggatcttagactctgccgagtttatcaaattcacggtcattagaccatttccaggacttgtgattaataaccagctggttgatcagagtgagtcagaaggccccgtgatacaagaatcagctgaaccaagccagttggaagttccagccacagaagaaataaaagagactgatggaagctctcagatcaagcaagaaccagaccccacgtggtagacctcttccctcctaggcttaaagtatcagtggttgagaagagcttttcggacctgttactaccccaagctgtgtaatatacttgtataacagaaataccttctatacaaacctttttttctacttttagatagaaatgtctactttttcagcagttctgtgaattaaagagcagagtgactgtgggtctggaatggctggtgtacttgggaatgtactatcaggattttacagcaatgctgggaaatgacagggaaaatgacaggaatgaatctcaccagattttttatgtactcagcagagccttgagttacggtgtttattttccaatcaagtgaagatatctcctacttctcctactggaacatctcagcttctgcagtgaagaaaaattcctgtgatagttcagttctttagtttttctatttgaaaaaaaaaaatcatttaaatgatcctttgttcacggctctccttaatgactgagtgaacagttcctatctgtatatttgactaaaccttttcctaagctatctctcatggttcctatgtttttttatcataattaaaagcaaaaccatctggatcacctaacagtcagaggtcagtatctcagcgtgtgaattatagaggaaatacagagagaacctcttccacttttacttttcgtccaaataaaatgcatggtgtaccagaagttgaagatcgggttgaggattggggctagctcgatgacactaaggccccaacatcgcgggacctgctgtggcgcggattcttaggaacgctgttctagccggccccctctccaggggtcgccgtggccggcattatttcctagttcttcttgtaaccctgaggtgccagcgcggggagtgaggaggggtcagggggctaaggatgcaacctctgacgttctgcgccttcctaggagagtcttacatgtgttgagatttcacaagcaatgcgagttgtaaaataccagctctacaagaagctaggctctgtgacggcatagttttcagtagctttatcacaatattcacaatggagaattatatgacatggtagcagaaataggcccttttatgtgttgcttctattttacctcaaattgtagatatagggtaatcaataaaatccatccatgcctttcacacactaagt

SEQ ID NO: 4377 - protein, 585 aa, Homo sapiens; identical to SEQ ID NO: 4199

SEQ ID NO: 4378 - DNA, 4222 bp, Homo sapiens
aaaaaaaaaaaaaaaaaaaaaaaaaaaagaaaaaagaaaaaaaaaaggaggaggaggaggagggtgagagagaagctgggagagcagagaaaaggggccaccggtcgcccccccgcttccccgcacgcgctctccagccgcggccgcccgcctgccgcggtcaccccggcctctgcctctgtcccccagtgatcggatcaaggcgctgagcgaggccctgcctgcggggcggccatgcggcggtgacaggagcgcgaccgacacgcacgggcccctcgccccctctcgcctcccgtccgctcgccagctcccctcagccgaggctgctccgcggcggccgcagcccgcgcgcggcccacactcgcctcccctcggcacccccggccccggagctgcctggaggcggccgcactcggggatcatggcccaagttgcaatgtccaccctccccgttgaagatgaggagtcctcggagagcaggatggtggtgacattcctcatgtcagctctcgagtccatgtgtaaagaactggccaagtccaaagccgaagtggcctgcattgcagtgtatgaaacagacgtgtttgtcgtcggaactgaaagaggacgtgcttttgtcaataccagaaaggattttcaaaaagattttgtaaaatattgtgttgaagaagaagaaaaagctgcagagatgcataaaatgaaatctacaacccaggcaaatcggatgagtgtagatgctgtagaaattgaaacactcagaaaaacagttgaggactatttctgcttttgctatgggaaagctttaggcaaatccacagtggtacctgtaccatatgagaagatgctgcgagaccagtcggctgtggtagtgcaggggcttccggaaggtgttgcctttaaacaccccgagaactatgatcttgcaaccctgaaatggattttggagaacaaagcagggatttcattcatcattaagagaccttttttagagccaaagaagcatgtaggtggtcgtgtgatggtaacagatgctgacaggtcaatactatctccaggtggaagttgtggccccatcaaagtgaaaactgaacccacagaagattctggcatttccctggaaatggcagctgtgacagtaaaggaagaatcagaagatcctgattattatcaatataacattcaaggaagccaccattcttcagagggcaatgaaggcacagaaatggaagtaccagcagaagattctactcaacatgtcccttcagaaacaagtgaggaccctgaagttgaggtgactattgaagatgatgattattctccaccgtctaagagaccaaaggccaatgagctaccgcagccaccagtcccggaacccgccaatgctgggaagcggaaagtgagggagttcaacttcgagaaatggaatgctcgcatcactgatctacgtaaacaagttgaagaattgtttgaaaggaaatatgctcaagccataaaagccaaaggtccggtgacgatcccgtaccctcttttccagtctcatgttgaagatctttatgtagaaggacttcctgaaggaattccttttagaaggccatctacttacggaattcctcgcctggagaggatattacttgcaaaggaaaggattcgttttgtgattaagaaacatgagcttctgaattcaacacgtgaagatttacagcttgataagccagcttcaggagtaaaggaagaatggtatgccagaatcactaaattaagaaagatggtggatcagcttttctgcaaaaaatttgcggaagccttggggagcactgaagccaaggctgtaccgtaccaaaaatttgaggcacacccgaatgatctgtacgtggaaggactgccagaaaacattcctttccgaagtccctcatggtatggaatcccaaggctggaaaaaatcattcaagtgggcaatcgaattaaatttgttattaaaagaccagaacttctgactcacagtaccactgaagttactcagccaagaacgaatacaccagctcaagctcttggactcaccgaggcagtaaaagtaccatatcctgtgtttgaatcaaacccggagttcttgtatgtggaaggcttgccagaggggattcccttccgaagccctacctggtttggaattccacgacttgaaaggatcgtccgcgggagtaataaaatcaagttcgttgttaaaaaacctgaactagttatttcctacttgcctcctgggatggctagtaaaataaacactaaagctttgcagtcccccaaaagaccacgaagtcctgggagtaattcaaaggttcctgaaattgaggtcaccgtggaaggccctaataacaacaatcctcaaacctcagctgttcgaaccccgacccagactaacggttctaacgttcccttcaagccacgagggagagagttttcctttgaggcctggaatgccaaaatcacggacctaaaacagaaagttgaaaatctcttcaatgagaaatgtggggaagctcttggccttaaacaagctgtgaaggtgccgttcgcgttatttgagtctttcccggaagacttttatgtggaaggcttacctgagggtgtgccattccgaagaccatcgacttttggcattccgaggctggagaagatactcagaaacaaagccaaaattaagttcatcattaaaaagcccgaaatgtttgagacggcgattaaggagagcacctcctctaagagccctcccagaaaaataaattcatcacccaatgttaatactactgcatcaggtgttgaagaccttaacatcattcaggtgacaattccagatgatgataatgaaagactctcgaaagttgaaaaagctagacagctaagagaacaagtgaatgacctctttagtcggaaatttggtgaagctattggtatgggttttcctgtgaaagttccctacaggaaaatcacaattaaccctggctgtgtggtggttgatggcatgcccccgggggtgtccttcaaagcccccagctacctggaaatcagctccatgagaaggatcttagactctgccgagtttatcaaattcacggtcattagaccatttccaggacttgtgattaataaccagctggttgatcagagtgagtcagaaggccccgtgatacaagaatcagctgaaccaagccagttggaagttccagccacagaagaaataaaagagactgatggaagctctcagatcaagcaagaaccagaccccacgtggtagacctcttccctcctaggcttaaagtatcagtggttgagaagagcttttcggacctgttactaccccaagctgtagccttgagttacggtgtttattttccaatcaagtgaagatatctcctacttctcctactggaacatctcagcttctgcagtgaagaaaaattcctgtgatagttcagttctttagtttttctatttgaaaaaaaaaaatcatttaaatgatcctttgttcacggctctccttaatgactgagtgaacagttcctatctgtatatttgactaaaccttttcctaagctatctctcatggttcctatgtttttttatcataattaaaagcaaaaccatctggatcacctaacagtcagaggtcagtatctcagcgtgtgaattatagaggaaatacagagagaacctcttccacttttacttttcgtccaaataaaatgcatggtgtaccagaagttgaagatcgggttgaggattggggctagctcgatgacactaaggccccaacatcgcgggacctgctgtggcgcggattcttaggaacgctgttctagccggccccctctccaggggtcgccgtggccggcattatttcctagttcttcttgtaaccctgaggtgccagcgcggggagtgaggaggggtcagggggctaaggatgcaacctctgacgttctgcgccttcctaggagagtcttacatgtgttgagatttcacaagcaatgcgagttgtaaaataccagctctacaagaagctaggctctgtgacggcatagttttcagtagctttatcacaatattcacaatggagaattatatgacatggtagcagaaataggcccttttatgtgttgcttctattttacctcaaattgtagatatagggtaatcaataaaatccatccatgcctttcacacactaagt

SEQ ID NO: 4379 - protein, 954 aa, Homo sapiens; identical to SEQ ID NO: 4155

SEQ ID NO: 4380 - DNA, 4312 bp, Homo sapiens
aaaaaaaaaaaaaaaaaaaaaaaaaaaagaaaaaagaaaaaaaaaaggaggaggaggaggagggtgagagagaagctgggagagcagagaaaaggggccaccggtcgcccccccgcttccccgcacgcgctctccagccgcggccgcccgcctgccgcggtcaccccggcctctgcctctgtcccccagtgatcggatcaaggcgctgagcgaggccctgcctgcggggcggccatgcggcggtgacaggagcgcgaccgacacgcacgggcccctcgccccctctcgcctcccgtccgctcgccagctcccctcagccgaggctgctccgcggcggccgcagcccgcgcgcggcccacactcgcctccccgttgaagatgaggagtcctcggagagcaggatggtggtgacattcctcatgtcagctctcgagtccatgtgtaaagaactggccaagtccaaagccgaagtggcctgcattgcagtgtatgaaacagacgtgtttgtcgtcggaactgaaagaggacgtgcttttgtcaataccagaaaggattttcaaaaagattttgtaaaatattgtgttgaagaagaagaaaaagctgcagagatgcataaaatgaaatctacaacccaggcaaatcggatgagtgtagatgctgtagaaattgaaacactcagaaaaacagttgaggactatttctgcttttgctatgggaaagctttaggcaaatccacagtggtacctgtaccatatgagaagatgctgcgagaccagtcggctgtggtagtgcaggggcttccggaaggtgttgcctttaaacaccccgagaactatgatcttgcaaccctgaaatggattttggagaacaaagcagggatttcattcatcattaagagaccttttttagagccaaagaagcatgtaggtggtcgtgtgatggtaacagatgctgacaggtcaatactatctccaggtggaagttgtggccccatcaaagtgaaaactgaacccacagaagattctggcatttccctggaaatggcagctgtgacagtaaaggaagaatcagaagatcctgattattatcaatataacattcaaggaagccaccattcttcagagggcaatgaaggcacagaaatggaagtaccagcagaagatgatgattattctccaccgtctaagagaccaaaggccaatgagctaccgcagccaccagtcccggaacccgccaatgctgggaagcggaaagtgagggagttcaacttcgagaaatggaatgctcgcatcactgatctacgtaaacaagttgaagaattgtttgaaaggaaatatgctcaagccataaaagccaaaggtccggtgacgatcccgtaccctcttttccagtctcatgttgaagatctttatgtagaaggacttcctgaaggaattccttttagaaggccatctacttacggaattcctcgcctggagaggatattacttgcaaaggaaaggattcgttttgtgattaagaaacatgagcttctgaattcaacacgtgaagatttacagcttgataagccagcttcaggagtaaaggaagaatggtatgccagaatcactaaattaagaaagatggtggatcagcttttctgcaaaaaatttgcggaagccttggggagcactgaagccaaggctgtaccgtaccaaaaatttgaggcacacccgaatgatctgtacgtggaaggactgccagaaaacattcctttccgaagtccctcatggtatggaatcccaaggctggaaaaaatcattcaagtgggcaatcgaattaaatttgttattaaaagaccagaacttctgactcacagtaccactgaagttactcagccaagaacgaatacaccagtcaaagaagattggaatgtcagaattaccaagctacggaagcaagtggaagagatttttaatttgaaatttgctcaagctcttggactcaccgaggcagtaaaagtaccatatcctgtgtttgaatcaaacccggagttcttgaaaggatcgtccgcgggagtaataaaatcaagttcgttgttaaaaaacctgaactagttatttcctacttgcctcctgggatggctagtaaaataaacactaaagctttgcagtcccccaaaagaccacgaagtcctgggagtaattcaaaggttcctgaaattgaggtcaccgtggaaggccctaataacaacaatcctcaaacctcagctgttcgaaccccgacccagactaacggttctaacgttcccttcaagccacgagggagagagttttcctttgaggcctggaatgccaaaatcacggacctaaaacagaaagttgaaaatctcttcaatgagaaatgtggggaagctcttggccttaaacaagctgtgaaggtgccgttcgcgttatttgagtctttcccggaagacttttatgtggaaggcttacctgagggtgtgccattccgaagaccatcgacttttggcattccgaggctggagaagatactcagaaacaaagccaaaattaagttcatcattaaaaagcccgaaatgtttgagacggcgattaaggagagcacctcctctaagagccctcccagaaaaataaattcatcacccaatgttaatactactgcatcaggtgttgaagaccttaacatcattcaggtgacaattccagatgatgataatgaaagactctcgaaagttgaaaaagctagacagctaagagaacaagtgaatgacctctttagtcggaaatttggtgaagctattggtatgggttttcctgtgaaagttccctacaggaaaatcacaattaaccctggctgtgtggtggttgatggcatgcccccgggggtgtccttcaaagcccccagctacctggaaatcagctccatgagaaggatcttagactctgccgagtttatcaaattcacggtcattagaccatttccaggacttgtgattaataaccagctggttgatcagagtgagtcagaaggccccgtgatacaagaatcagctgaaccaagccagttggaagttccagccacagaagaaataaaagagactgatggaagctctcagatcaagcaagaaccagaccccacgtggtagacctcttccctcctaggcttaaagtatcagtggttgagaagagcttttcggacctgttactaccccaagctgtgtaatatacttgtataacagaaataccttctatacaaacctttttttctacttttagatagaaatgtctactttttcagcagttctgtgaattaaagagcagagtgactgtgggtctggaatggctggtgtacttgggaatgtactatcaggattttacagcaatgctgggaaatgacagggaaaatgacaggaatgaatctcaccagattttttatgtactcagcagagccttgagttacggtgtttattttccaatcaagtgaagatatctcctacttctcctactggaacatctcagcttctgcagtgaagaaaaattcctgtgatagttcagttctttagtttttctatttgaaaaaaaaaaatcatttaaatgatcctttgttcacggctctccttaatgactgagtgaacagttcctatctgtatatttgactaaaccttttcctaagctatctctcatggttcctatgtttttttatcataattaaaagcaaaaccatctggatcacctaacagtcagaggtcagtatctcagcgtgtgaattatagaggaaatacagagagaacctcttccacttttacttttcgtccaaataaaatgcatggtgtaccagaagttgaagatcgggttgaggattggggctagctcgatgacactaaggccccaacatcgcgggacctgctgtggcgcggattcttaggaacgctgttctagccggccccctctccaggggtcgccgtggccggcattatttcctagttcttcttgtaaccctgaggtgccagcgcggggagtgaggaggggtcagggggctaaggatgcaacctctgacgttctgcgccttcctaggagagtcttacatgtgttgagatttcacaagcaatgcgagttgtaaaataccagctctacaagaagctaggctctgtgacggcatagttttcagtagctttatcacaatattcacaatggagaattatatgacatggtagcagaaataggcccttttatgtgttgcttctattttacctcaaattgtagatatagggtaatcaataaaatccatccatgcctttcacacactaagt

SEQ ID NO: 4381 - protein, 564 aa, Homo sapiens; identical to SEQ ID NO: 4023

SEQ ID NO: 4382 - DNA, 5335 bp, Homo sapiens
aaaaaaaaaaaaaaaaaaaaaaaaaaaagaaaaaagaaaaaaaaaaggaggaggaggaggagggtgagagagaagctgggagagcagagaaaaggggccaccggtcgcccccccgcttccccgcacgcgctctccagccgcggccgcccgcctgccgcggtcaccccggcctctgcctctgtcccccagtgatcggatcaaggcgctgagcgaggccctgcctgcggggcggccatgcggcggtgacaggagcgcgaccgacacgcacgggcccctcgccccctctcgcctcccgtccgctcgccagctcccctcagccgaggctgctccgcggcggccgcagcccgcgcgcggcccacactcgcctcccctcggcacccccggccccggagctgcctggaggcggccgcactcggggatcatggcccaagttgcaatgtccaccctccccgttgaagatgaggagtcctcggagagcaggatggtggtgacattcctcatgtcagctctcgagtccatgtgtaaagaactggccaagtccaaagccgaagtggcctgcattgcagtgtatgaaacagacgtgtttgtcgtcggaactgaaagaggacgtgcttttgtcaataccagaaaggattttcaaaaagattttgtaaaatattgtgttgaagaagaagaaaaagctgcagagatgcataaaatgaaatctacaacccaggcaaatcggatgagtgtagatgctgtagaaattgaaacactcagaaaaacagttgaggactatttctgcttttgctatgggaaagctttaggcaaatccacagtggtacctgtaccatatgagaagatgctgcgagaccagtcggctgtggtagtgcaggggcttccggaaggtgttgcctttaaacaccccgagaactatgatcttgcaaccctgaaatggattttggagaacaaagcagggatttcattcatcattaagagaccttttttagagccaaagaagcatgtaggtggtcgtgtgatggtaacagatgctgacaggtcaatactatctccaggtggaagttgtggccccatcaaagtgaaaactgaacccacagaagattctggcatttccctggaaatggcagctgtgacagtaaaggaagaatcagaagatcctgattattatcaatataacattcaagcaggcccttctgaaactgatgatgttgatgaaaaacagcccctatcgaagcctttgcaaggaagccaccattcttcagagggcaatgaaggcacagaaatggaagtaccagcagaagattctactcaacatgtcccttcagaaacaagtgaggaccctgaagttgaggtgactattgaagatgatgattattctccaccgtctaagagaccaaaggccaatgagctaccgcagccaccagtcccggaacccgccaatgctgggaagcggaaagtgagggagttcaacttcgagaaatggaatgctcgcatcactgatctacgtaaacaagttgaagaattgtttgaaaggaaatatgctcaagccataaaagccaaaggtccggtgacgatcccgtaccctcttttccagtctcatgttgaagatctttatgtagaaggacttcctgaaggaattccttttagaaggccatctacttacggaattcctcgcctggagaggatattacttgcaaaggaaaggattcgttttgtgattaagaaacatgagcttctgaattcaacacgtgaagatttacagcttgataagccagcttcaggagtaaaggaagaatggtatgccagaatcactaaattaagaaagatggtggatcagcttttctgcaaaaaatttgcggaagccttggggagcactgaagccaaggctgtaccgtaccaaaaatttgaggcacacccgaatgatctgtacgtggaaggactgccagaaaacattcctttccgaagtccctcatggtatggaatcccaaggctggaaaaaatcattcaagtgggcaatcgaattaaatttgttattaaaagaccagaacttctgactcacagtaccactgaagttactcagccaagaacgaatacaccagtcaaagaagattggaatgtcagaattaccaagctacggaagcaagtggaagagatttttaatttgaaatttgcttagatttgttgacagcggtttcctggagtgctgtcttgagaacgattctgaggaggctcagcaagaaagagtgtttcagttgattgggtgtgtctgtcatggagaaggaactcaagctcttggactcaccgaggcagtaaaagtaccatatcctgtgtttgaatcaaacccggagttcttgtatgtggaaggcttgccagaggggattcccttccgaagccctacctggtttggaattccacgacttgaaaggatcgtccgcgggagtaataaaatcaagttcgttgttaaaaaacctgaactagttatttcctacttgcctcctgggatggctagtaaaataaacactaaagctttgcagtcccccaaaagaccacgaagtcctgggagtaattcaaaggttcctgaaattgaggtcaccgtggaaggccctaataacaacaatcctcaaacctcagctgttcgaaccccgacccagactaacggttctaacgttcccttcaagccacgagggagagagttttcctttgaggcctggaatgccaaaatcacggacctaaaacagaaagttgaaaatctcttcaatgagaaatgtggggaagctcttggccttaaacaagctgtgaaggtgccgttcgcgttatttgagtctttcccggaagacttttatgtggaaggcttacctgagggtgtgccattccgaagaccatcgacttttggcattccgaggctggagaagatactcagaaacaaagccaaaattaagttcatcattaaaaagcccgaaatgtttgagacggcgattaaggagagcacctcctctaagagccctcccagaaaaataaattcatcacccaatgttaatactactgcatcaggtgttgaagaccttaacatcattcaggtgacaattccagatgatgataatgaaagactctcgaaagttgaaaaagctagacagctaagagaacaagtgaatgacctctttagtcggaaatttggtgaagctattggtatgggttttcctgtgaaagttccctacaggaaaatcacaattaaccctggctgtgtggtggttgatggcatgcccccgggggtgtccttcaaagcccccagctacctggaaatcagctccatgagaaggatcttagactctgccgagtttatcaaattcacggtcattagaccatttccaggacttgtgattaataaccagctggttgatcagagtgagtcagaaggccccgtgatacaagaatcagctgaaccaagccagttggaagttccagccacagaaggtaaaaggacctcttccctcctagggtaaatcagcttctgtgtcagggatgctgtgtggtgtccatctgaaccccctgcatacgcgtagctaatgtgatctccccactttcacataagatggtggccctgccttcagggaatgtgggagccaggtgggagccttcccggatatttaagctagaagattctacagggagattctccttggatcaatatatgtctctcagtcaaagatgtaaaagcacttttgccttaaaaagaatgttctgtttctaaatagagtcaacgttgtcctcctcattggaattcactatgagtcagaatcattagactgacttttttttttccatagtaatagtattttgcagagtctcacagagctgcagatcttttgttcatcttgcagagttaacaagtctgatcctgttagtccagatttcttaaatttggccaagttataataggagcagtagcttgagacccgaagtcaggaaactttgacaatggatttttttttttaatccagagacttgtactggaatttgccttaccctgtcagctcatggacttaaggtttcatcccgctttatgagtgcttctgaatccaagtcattgttacctgaatttgcaaattaagttgtgatattcgtgactgttaaattcctgtaattagattaacctctttgcttgcttgtttgttttctctcctattttagcttaaagtatcagtggttgagaagagcttttcggacctgttactaccccaagctgtgtaatatacttgtataacagaaataccttctatacaaacctttttttctacttttagatagaaatgtctactttttcagcagttctgtgaattaaagagcagagtgactgtgggtctggaatggctggtgtacttgggaatgtactatcaggattttacagcaatgctgggaaatgacagggaaaatgacaggaatgaatctcaccagattttttatgtactcagcagagccttgagttacggtgtttattttccaatcaagtgaagatatctcctacttctcctactggaacatctcagcttctgcagtgaagaaaaattcctgtgatagttcagttctttagtttttctatttgaaaaaaaaaaatcatttaaatgatcctttgttcacggctctccttaatgactgagtgaacagttcctatctgtatatttgactaaaccttttcctaagctatctctcatggttcctatgtttttttatcataattaaaagcaaaaccatctggatcacctaacagtcagaggtcagtatctcagcgtgtgaattatagaggaaatacagagagaacctcttccacttttacttttcgtccaaataaaatgcatggtgtaccagaagttgaagatcgggttgaggattggggctagctcgatgacactaaggccccaacatcgcgggacctgctgtggcgcggattcttaggaacgctgttctagccggccccctctccaggggtcgccgtggccggcattatttcctagttcttcttgtaaccctgaggtgccagcgcggggagtgaggaggggtcagggggctaaggatgcaacctctgacgttctgcgccttcctaggagagtcttacatgtgttgagatttcacaagcaatgcgagttgtaaaataccagctctacaagaagctaggctctgtgacggcatagttttcagtagctttatcacaatattcacaatggagaattatatgacatggtagcagaaataggcccttttatgtgttgcttctattttacctcaaattgtagatatagggtaatcaataaaatccatccatgcctttcacacactaagt

SEQ ID NO: 4383 - protein, 584 aa, Homo sapiens; identical to SEQ ID NO: 4053

SEQ ID NO: 4384 - DNA, 3863 bp, Homo sapiens
aaaaaaaaaaaaaaaaaaaaaaaaaaaagaaaaaagaaaaaaaaaaggaggaggaggaggagggtgagagagaagctgggagagcagagaaaaggggccaccggtcgcccccccgcttccccgcacgcgctctccagccgcggccgcccgcctgccgcggtcaccccggcctctgcctctgtcccccagtgatcggatcaaggcgctgagcgaggccctgcctgcggggcggccatgcggcggtgacaggagcgcgaccgacacgcacgggcccctcgccccctctcgcctcccgtccgctcgccagctcccctcagccgaggctgctccgcggcggccgcagcccgcgcgcggcccacactcgcctcccctcggcacccccggccccggagctgcctggaggcggccgcactcggtgtaaagaactggccaagtccaaagccgaagtggcctgcattgcagtgtatgaaacagacgtgtttgtcgtcggaactgaaagaggacgtgcttttgtcaataccagaaaggattttcaaaaagattttgtaaaatattgtgttgaagaagaagaaaaagctgcagagatgcataaaatgaaatctacaacccaggcaaatcggatgagtgtagatgctgtagaaattgaaacactcagaaaaacagttgaggactatttctgcttttgctatgggaaagctttaggcaaatccacagtggtacctgtaccatatgagaagatgctgcgagaccagtcggctgtggtagtgcaggggcttccggaaggtgttgcctttaaacaccccgagaactatgatcttgcaaccctgaaatggattttggagaacaaagcagggatttcattcatcattaagagaccttttttagagccaaagaagcatgtaggtggtcgtgtgatggtaacagatgctgacaggtcaatactatctccaggtggaagttgtggccccatcaaagtgaaaactgaacccacagaagattctggcatttccctggaaatggcagctgtgacagtaaaggaagaatcagaagatcctgattattatcaatataacattcaagcaggcccttctgaaactgatgatgttgatgaaaaacagcccctatcgaagcctttgcaaggaagccaccattcttcagagggcaatgaaggcacagaaatggaagtaccagcagaagatgatgattattctccaccgtctaagagaccaaaggccaatgagctaccgcagccaccagtcccggaacccgccaatgctgggaagcggaaagtgagggagttcaacttcgagaaatggaatgctcgcatcactgatctacgtaaacaagttgaagaattgtttgaaaggaaatatgctcaagccataaaagccaaaggtccggtgacgatcccgtaccctcttttccagtctcatgttgaagatctttatgtagaaggacttcctgaaggaattccttttagaaggccatctacttacggaattcctcgcctggagaggatattacttgcaaaggaaaggattcgttttgtgattaagaaacatgagcttctgaattcaacacgtgaagatttacagcttgataagccagcttcaggagtaaaggaagaatggtatgccagaatcactaaattaagaaagatggtggatcagcttttctgcaaaaaatttgcggaagccttggggagcactgaagccaaggctgtaccgtaccaaaaatttgaggcacacccgaatgatctgtacgtggaaggactgccagaaaacattcctttccgaagtccctcatggtatggaatcccaaggctggaaaaaatcattcaagtgggcaatcgaattaaatttgttattaaaagaccagaacttctgactcacagtaccactgaagttactcagccaagaacgaatacaccagtcaaagaagattggaatgtcagaattaccaagctacggaagcaagtggaagagatttttaatttgaaatttgctcaagctcttggactcaccgaggcagtaaaagtaccatatcctgtgtttgaatcaaacccggagttcttgtatgtggaaggcttgccagaggggattcccttccgaagccctacctggtttggaattccacgacttgaaaggatcgtccgcgggagtaataaaatcaagttcgttgttaaaaaacctgaactagttatttcctacttgcctcctgggatggctagtaaaataaacactaaagctttgcagtcccccaaaagaccacgaagtcctgggagtaattcaaaggttcctgaaattgaggtcaccgtggaaggccctaataacaacaatcctcaaacctcagctgttcgaaccccgacccagactaacggttctaacgttcccttcaagccacgagggagagagttttcctttgaggcctggaatgccaaaatcacggacctaaaacagaaagttgaaaatctcttcaatgagaaatgtggggaagctcttggccttaaacaagctgtgaaggtgccgttcgcgttatttgagtctttcccggaagacttttatgtggaaggcttacctgagggtgtgccattccgaagaccatcgacttttggcattccgaggctggagaagatactcagaaacaaagccaaaattaagttcatcattaaaaagcccgaaatgtttgagacggcgattaaggagagcacctcctctaagagccctcccagaaaaataaattcatcacccaatgttaatactactgcatcaggtgttgaagaccttaacatcattcaggtgacaattccagatgatgataatgaaagactctcgaaagttgaaaaagctagacagctaagagaacaagtgaatgacctctttagtcggaaatttggtgaagctattggtatgggttttcctgtgaaagttccctacaggaaaatcacaattaaccctggctgtgtggtggttgatggcatgcccccgggggtgtccttcaaagcccccagctacctggaaatcagctccatgagaaggatcttagactctgccgagtttatcaaattcacggtcattagaccatttccaggacttgtgattaataaccagctggttgatcagagtgagtcagaaggccccgtgatacaagaatcagctgaaccaagccagttggaagttccagccacagaagaaataaaagagactgatggaagctctcagatcaagcaagaaccagaccccacgtggtagacctcttccctcctaggcaaaaccatctggatcacctaacagtcagaggtcagtatctcagcgtgtgaattatagaggaaatacagagagaacctcttccacttttacttttcgtccaaataaaatgcatggtgtaccagaagttgaagatcgggttgaggattggggctagctcgatgacactaaggccccaacatcgcgggacctgctgtggcgcggattcttaggaacgctgttctagccggccccctctccaggggtcgccgtggccggcattatttcctagttcttcttgtaaccctgaggtgccagcgcggggagtgaggaggggtcagggggctaaggatgcaacctctgacgttctgcgccttcctaggagagtcttacatgtgttgagatttcacaagcaatgcgagttgtaaaataccagctctacaagaagctaggctctgtgacggcatagttttcagtagctttatcacaatattcacaatggagaattatatgacatggtagcagaaataggcccttttatgtgttgcttctattttacctcaaattgtagatatagggtaatcaataaaatccatccatgcctttcacacactaagt

SEQ ID NO: 4385 - protein, 888 aa, Homo sapiens; identical to SEQ ID NO: 4027

SEQ ID NO: 4386 - DNA, 7845 bp, Homo sapiens
aaaaaaaaaaaaaaaaaaaaaaaaaaaagaaaaaagaaaaaaaaaaggaggaggaggaggagggtgagagagaagctgggagagcagagaaaaggggccaccggtcgcccccccgcttccccgcacgcgctctccagccgcggccgcccgcctgccgcggtcaccccggcctctgcctctgtcccccagtgatcggatcaaggcgctgagcgaggccctgcctgcggggcggccatgcggcggtgacaggagcgcgaccgacacgcacgggcccctcgccccctctcgcctcccgtccgctcgccagctcccctcagccgaggctgctccgcggcggccgcagcccgcgcgcggcccacactcgcctcccctcggcacccccggccccggagctgcctggaggcggccgcactcggggatcatggcccaagttgcaatgtccaccctccccgttgaagatgaggagtcctcggagagcaggatggtggtgacattcctcatgtcagctctcgagtccatgtgtaaagaactggccaagtccaaagccgaagtggcctgcattgcagtgtatgaaacagacgtgtttgtcgtcggaactgaaagaggacgtgcttttgtcaataccagaaaggattttcaaaaagattttgtaaaatattgtgttgaagaagaagaaaaagctgcagagatgcataaaatgaaatctacaacccaggcaaatcggatgagtgtagatgctgtagaaattgaaacactcagaaaaacagttgaggactatttctgcttttgctatgggaaagctttaggcaaatccacagtggtacctgtaccatatgagaagatgctgcgagaccagtcggctgtggtagtgcaggggcttccggaaggtgttgcctttaaacaccccgagaactatgatcttgcaaccctgaaatggattttggagaacaaagcagggatttcattcatcattaagagaccttttttagagccaaagaagcatgtaggtggtcgtgtgatggtaacagatgctgacaggtcaatactatctccaggtggaagttgtggccccatcaaagtgaaaactgaacccacagaagattctggcatttccctggaaatggcagctgtgacagtaaaggaagaatcagaagatcctgattattatcaatataacattcaaggaagccaccattcttcagagggcaatgaaggcacagaaatggaagtaccagcagaagatgatgattattctccaccgtctaagagaccaaaggccaatgagctaccgcagccaccagtcccggaacccgccaatgctgggaagcggaaagtgagggagttcaacttcgagaaatggaatgctcgcatcactgatctacgtaaacaagttgaagaattgtttgaaaggaaatatgctcaagccataaaagccaaaggtccggtgacgatcccgtaccctcttttccagtctcatgttgaagatctttatgtagaaggacttcctgaaggaattccttttagaaggccatctacttacggaattcctcgcctggagaggatattacttgcaaaggaaaggattcgttttgtgattaagaaacatgagcttctgaattcaacacgtgaagatttacagcttgataagccagcttcaggagtaaaggaagaatggtatgccagaatcactaaattaagaaagatggtggatcagcttttctgcaaaaaatttgcggaagccttggggagcactgaagccaaggctgtaccgtaccaaaaatttgaggcacacccgaatgatctgtacgtggaaggactgccagaaaacattcctttccgaagtccctcatggtatggaatcccaaggctggaaaaaatcattcaagtgggcaatcgaattaaatttgttattaaaagaccagaacttctgactcacagtaccactgaagttactcagccaagaacgaatacaccagtcaaagaagattggaatgtcagaattaccaagctacggaagcaagtggaagagatttttaatttgaaatttgctcaagctcttggactcaccgaggcagtaaaagtaccatatcctgtgtttgaatcaaacccggagttcttgaaaggatcgtccgcgggagtaataaaatcaagttcgttgttaaaaaacctgaactagttatttcctacttgcctcctgggatggctagtaaaataaacactaaagctttgcagtcccccaaaagaccacgaagtcctgggagtaattcaaaggttcctgaaattgaggtcaccgtggaaggccctaataacaacaatcctcaaacctcagctgttcgaaccccgacccagactaacggttctaacgttcccttcaagccacgagggagagagttttcctttgaggcctggaatgccaaaatcacggacctaaaacagaaagttgaaaatctcttcaatgagaaatgtggggaagctcttggccttaaacaagctgtgaaggtgccgttcgcgttatttgagtctttcccggaagacttttatgtggaaggcttacctgagggtgtgccattccgaagaccatcgacttttggcattccgaggctggagaagatactcagaaacaaagccaaaattaagttcatcattaaaaagcccgaaatgtttgagacggcgattaaggagagcacctcctctaagagccctcccagaaaaataaattcatcacccaatgttaatactactgcatcaggtgttgaagaccttaacatcattcaggtgacaattccagatgatgataatgaaagactctcgaaagttgaaaaagctagacagctaagagaacaagtgaatgacctctttagtcggaaatttggtgaagctattggtatgggttttcctgtgaaagttccctacaggaaaatcacaattaaccctggctgtgtggtggttgatggcatgcccccgggggtgtccttcaaagcccccagctacctggaaatcagctccatgagaaggatcttagactctgccgagtttatcaaattcacggtcattaggtaagtgagagtttcctgcttagtcacaggagcgaatctggagctcatgaggctgactcttctaaaatgcagccacaggtagtcatcgaatccggcttcctatgctgtgcaatcaacaaatcaaaataacttgtgtcatcattagaatgtcagatgtgcttctacgaactaagctgactcttttaattctttggcaaagggttggcaaactaggactgtttgccaaattcaggctgcctcctatttttagagtcttcctgaaacacagctacacccgtattatccatggctgctttcctgtcacagtgagtaagtagctgggactgagaaggcatggcctccaaagtctaaaatatttactctctagcactttgtagaaaaaccttagctaggcacagtggctaacgcctgtaatcccagcattttgggaggccaaggcaggcagatcacctgaggtcaggagttccagaccagcctggccaacatggtgaaatcccatctctacaaaaataaaacagttagctgggcatgatggcgggtgcctgtaatcccagctactcgggaggctgaggcaggatagtcgcttgaacccaggaggtggaggttgcaatgagccaagatcatgccactgcactccagcctggacgacagagtgagactccatcacaagaaaaaaagaactttgtcaacctctgtcttagggcgccttgtcacaggcttcgggtcagacggattcaaccttgcatcagccatttgttagccaggtcactctgttctttgtctgtaaatgagattgatcgttgttcccactgagagtgtcagctccttcccgtagagcaggcatgatgattgtactcacctctgacaccattgtgagtgccacattccttcccacgtccttgtcactgtaagagatgcccacctgagcaccaaccccaggttatcttcccctttgtcttccagccccccagaaacagctacgactcaacctacccaatcatttcatcatcagattgccactgtctctagttcaggtctcttgggactggcactcagaaatctcataataaatcctcttgaggcttctcatacactcgtcttcttccaatcttctttccctcaaaatctcatattttggttccacttcacccaccgtcattctccatatcactcccaggagttaggcaaaaagccccttccgttcttccgtatgttaaacttagaatcactctgttccctgctctgcgtttctattttttgtttttcctccatttactagtagcttaacactttctaacagtgttcttattattgatacgtatctatctcttccataagcttataaggtcacggataatacttctcattgtagtacgtaaatgacgtgggctagatatgagttgaataaacagttatacctgtaaattcttacagagtgaaaataaattgttatactttacaatttgtttctctctttagaccatttccaggacttgtgattaataaccgtgagtattttgtgaagtgttttgtttttgttttttcctggggtctgacgtgtgtgcgtgtgagtgtgtatacatgcttaacgtatatcacgttacttcacctatgtcagtaaccaggccaaatacttgttttagccctcagtaaaaacaccaggcacttcctagttgtaaaattattcaagcttcttaacttcctatcctcgatgcacttaatcataaaatggtaataatagcaccgattttgggggagtcgttccagtagatggaaagcatctggaacaggtgtcagcaagctcctgccgacgtgtatgcataaagttttattgaaaccaccatcgtgtccatttgtttatggcagaactgagagatggcagcagcaagtgtgtgcctgcaaaacctaaaatatttactaattggctctgcaagaaaagagtttgcatccccctaacctagaacagtgtctagcctctagtatgtgtttagcctacagtatgtgctcagcgaatacaatctatatttattactgcttttatgactgttataattactgtgcttggatttcgttacaaagtaagtcacaatgtgcctgcttctgttagtatttcagcacagtgcctggcacacatggggctctcaaatattgctgagcgagtgaacaaatgtcctttcaattccttaacgttgatgtcattttcaatagtattttgagccaaacttaattttgcgagtgtgttttgttttcttaactttattattaaaaatgtataaaagtgaggccaggcgtggtggctcacgcctgtaatcccagcagtttgggaggctgaggcaggcggatcagttgaggttgggagttggagaccagcccgtccaacatggtgaaagcctgtctctactaaaaatacaaaaatcagctgggtgtggtggcgcgtgcctgtaatcccagctactcaggaggctgaggcaggagagttgcttgaatcctagaggtggaggttgcagtgagctgagatcgtgccattgcactccagcctgggcaacaagagcaaaactctgtcccaataaataaataaataaaatgttctcttttgttcctgttcttgtgcggtagtgtggtatagagttttatggtaattactgtgaattagtgattctgagggacatatcagaactctgaggtttgtttccttctcatcttgagggaaacagcaaatgtatgttaaaatgcttttccaagggaacaacacatccttacattatttaaaccaatctgcttcattttcagagctggttgatcagagtgagtcagaaggccccgtgatacaagaatcagctgaaccaagccagttggaagttccagccacagaagaaataaaagagactgatggaagctctcagatcaagcaagaaccagaccccacgtggtagacctcttccctcctagggtaaatcagcttctgtgtcagggatgctgtgtggtgtccatctgaaccccctgcatacgcgtagctaatgtgatctccccactttcacataagatggtggccctgccttcagggaatgtgggagccaggtgggagccttcccggatatttaagctagaagattctacagggagattctccttggatcaatatatgtctctcagtcaaagatgtaaaagcacttttgccttaaaaagaatgttctgtttctaaatagagtcaacgttgtcctcctcattggaattcactatgagtcagaatcattagactgacttttttttttccatagtaatagtattttgcagagtctcacagagctgcagatcttttgttcatcttgcagagttaacaagtctgatcctgttagtccagatttcttaaatttggccaagttataataggagcagtagcttgagacccgaagtcaggaaactttgacaatggatttttttttttaatccagagacttgtactggaatttgccttaccctgtcagctcatggacttaaggtttcatcccgctttatgagtgcttctgaatccaagtcattgttacctgaatttgcaaattaagttgtgatattcgtgactgttaaattcctgtaattagattaacctctttgcttgcttgtttgttttctctcctattttagcttaaagtatcagtggttgagaagagcttttcggacctgttactaccccaagctgtgtaatatacttgtataacagaaataccttctatacaaacctttttttctacttttagatagaaatgtctactttttcagcagttctgtgaattaaagagcagagtgactgtgggtctggaatggctggtgtacttgggaatgtactatcaggattttacagcaatgctgggaaatgacagggaaaatgacaggaatgaatctcaccagattttttatgtactcagcagagccttgagttacggtgtttattttccaatcaagtgaagatatctcctacttctcctactggaacatctcagcttctgcagtgaagaaaaattcctgtgatagttcagttctttagtttttctatttgaaaaaaaaaaatcatttaaatgatcctttgttcacggctctccttaatgactgagtgaacagttcctatctgtatatttgactaaaccttttcctaagctatctctcatggttcctatgtttttttatcataattaaaagcaaaaccatctggatcacctaacagtcagaggtcagtatctcagcgtgtgaattatagaggaaatacagagagaacctcttccacttttacttttcgtccaaataaaatgcatggtgtaccagaagttgaagatcgggttgaggattggggctagctcgatgacactaaggccccaacatcgcgggacctgctgtggcgcggattcttaggaacgctgttctagccggccccctctccaggggtcgccgtggccggcattatttcctagttcttcttgtaaccctgaggtgccagcgcggggagtgaggaggggtcagggggctaaggatgcaacctctgacgttctgcgccttcctaggagagtcttacatgtgttgagatttcacaagcaatgcgagttgtaaaataccagctctacaagaagctaggctctgtgacggcatagttttcagtagctttatcacaatattcacaatggagaattatatgacatggtagcagaaataggcccttttatgtgttgcttctattttacctcaaattgtagatatagggtaatcaataaaatccatccatgcctttcacacactaagt

SEQ ID NO: 4387 - protein, 584 aa, Homo sapiens; identical to SEQ ID NO: 4173

SEQ ID NO: 4388 - DNA, 4340 bp, Homo sapiens
aaaaaaaaaaaaaaaaaaaaaaaaaaaagaaaaaagaaaaaaaaaaggaggaggaggaggagggtgagagagaagctgggagagcagagaaaaggggccaccggtcgcccccccgcttccccgcacgcgctctccagccgcggccgcccgcctgccgcggtcaccccggcctctgcctctgtcccccagtgatcggatcaaggcgctgagcgaggccctgcctgcggggcggccatgcggcggtgacaggagcgcgaccgacacgcacgggcccctcgccccctctcgcctcccgtccgctcgccagctcccctcagccgaggctgctccgcggcggccgcagcccgcgcgcggcccacactcgcctcccctcggcacccccggccccggagctgcctggaggcggccgcactcggtgtaaagaactggccaagtccaaagccgaagtggcctgcattgcagtgtatgaaacagacgtgtttgtcgtcggaactgaaagaggacgtgcttttgtcaataccagaaaggattttcaaaaagattttgtaaaatattgtgttgaagaagaagaaaaagctgcagagatgcataaaatgaaatctacaacccaggcaaatcggatgagtgtagatgctgtagaaattgaaacactcagaaaaacagttgaggactatttctgcttttgctatgggaaagctttaggcaaatccacagtggtacctgtaccatatgagaagatgctgcgagaccagtcggctgtggtagtgcaggggcttccggaaggtgttgcctttaaacaccccgagaactatgatcttgcaaccctgaaatggattttggagaacaaagcagggatttcattcatcattaagagaccttttttagagccaaagaagcatgtaggtggtcgtgtgatggtaacagatgctgacaggtcaatactatctccaggtggaagttgtggccccatcaaagtgaaaactgaacccacagaagattctggaagccaccattcttcagagggcaatgaaggcacagaaatggaagtaccagcagaagattctactcaacatgtcccttcagaaacaagtgaggaccctgaagttgaggtgactattgaagatgatgattattctccaccgtctaagagaccaaaggccaatgagctaccgcagccaccagtcccggaacccgccaatgctgggaagcggaaagtgagggagttcaacttcgagaaatggaatgctcgcatcactgatctacgtaaacaagttgaagaattgtttgaaaggaaatatgctcaagccataaaagccaaaggtccggtgacgatcccgtaccctcttttccagtctcatgttgaagatctttatgtagaaggacttcctgaaggaattccttttagaaggccatctacttacggaattcctcgcctggagaggatattacttgcaaaggaaaggattcgttttgtgattaagaaacatgagcttctgaattcaacacgtgaagatttacagcttgataagccagcttcaggagtaaaggaagaatggtatgccagaatcactaaattaagaaagatggtggatcagcttttctgcaaaaaatttgcggaagccttggggagcactgaagccaaggctgtaccgtaccaaaaatttgaggcacacccgaatgatctgtacgtggaaggactgccagaaaacattcctttccgaagtccctcatggtatggaatcccaaggctggaaaaaatcattcaagtgggcaatcgaattaaatttgttattaaaagaccagaacttctgactcacagtaccactgaagttactcagccaagaacgaatacaccagtcaaagaagattggaatgtcagaattaccaagctacggaagcaagtggaagagatttttaatttgaaatttgctcaagctcttggactcaccgaggcagtaaaagtaccatatcctgtgtttgaatcaaacccggagttcttgtatgtggaaggcttgccagaggggattcccttccgaagccctacctggtttggaattccacgacttgaaaggatcgtccgcgggagtaataaaatcaagttcgttgttaaaaaacctgaactagttatttcctacttgcctcctgggatggctagtaaaataaacactaaagctttgcagtcccccaaaagaccacgaagtcctgggagtaattcaaaggttcctgaaattgaggtcaccgtggaaggccctaataacaacaatcctcaaacctcagctgttcgaaccccgacccagactaacggttctaacgttcccttcaagccacgagggagagagttttcctttgaggcctggaatgccaaaatcacggacctaaaacagaaagttgaaaatctcttcaatgagaaatgtggggaagctcttggccttaaacaagctgtgaaggtgccgttcgcgttatttgagtctttcccggaagacttttatgtggaaggcttacctgagggtgtgccattccgaagaccatcgacttttggcattccgaggctggagaagatactcagaaacaaagccaaaattaagttcatcattaaaaagcccgaaatgtttgagacggcgattaaggagagcacctcctctaagagccctcccagaaaaataaattcatcacccaatgttaatactactgcatcaggtgttgaagaccttaacatcattcaggtgacaattccagatgatgataatgaaagactctcgaaagttgaaaaagctagacagctaagagaacaagtgaatgacctctttagtcggaaatttggtgaagctattggtatgggttttcctgtgaaagttccctacaggaaaatcacaattaaccctggctgtgtggtggttgatggcatgcccccgggggtgtccttcaaagcccccagctacctggaaatcagctccatgagaaggatcttagactctgccgagtttatcaaattcacggtcattagaccatttccaggacttgtgattaataaccagctggttgatcagagtgagtcagaaggccccgtgatacaagaatcagctgaaccaagccagttggaagttccagccacagaagaaataaaagagactgatggaagctctcagatcaagcaagaaccagaccccacgtggtagacctcttccctcctaggcttaaagtatcagtggttgagaagagcttttcggacctgttactaccccaagctgtgtaatatacttgtataacagaaataccttctatacaaacctttttttctacttttagatagaaatgtctactttttcagcagttctgtgaattaaagagcagagtgactgtgggtctggaatggctggtgtacttgggaatgtactatcaggattttacagcaatgctgggaaatgacagggaaaatgacaggaatgaatctcaccagattttttatgtactcagcagagccttgagttacggtgtttattttccaatcaagtgaagatatctcctacttctcctactggaacatctcagcttctgcagtgaagaaaaattcctgtgatagttcagttctttagtttttctatttgaaaaaaaaaaatcatttaaatgatcctttgttcacggctctccttaatgactgagtgaacagttcctatctgtatatttgactaaaccttttcctaagctatctctcatggttcctatgtttttttatcataattaaaagcaaaaccatctggatcacctaacagtcagaggtcagtatctcagcgtgtgaattatagaggaaatacagagagaacctcttccacttttacttttcgtccaaataaaatgcatggtgtaccagaagttgaagatcgggttgaggattggggctagctcgatgacactaaggccccaacatcgcgggacctgctgtggcgcggattcttaggaacgctgttctagccggccccctctccaggggtcgccgtggccggcattatttcctagttcttcttgtaaccctgaggtgccagcgcggggagtgaggaggggtcagggggctaaggatgcaacctctgacgttctgcgccttcctaggagagtcttacatgtgttgagatttcacaagcaatgcgagttgtaaaataccagctctacaagaagctaggctctgtgacggcatagttttcagtagctttatcacaatattcacaatggagaattatatgacatggtagcagaaataggcccttttatgtgttgcttctattttacctcaaattgtagatatagggtaatcaataaaatccatccatgcctttcacacactaagt

SEQ ID NO: 4389 - protein, 863 aa, Homo sapiens; identical to SEQ ID NO: 4039

SEQ ID NO: 4390 - DNA, 4168 bp, Homo sapiens
aaaaaaaaaaaaaaaaaaaaaaaaaaaagaaaaaagaaaaaaaaaaggaggaggaggaggagggtgagagagaagctgggagagcagagaaaaggggccaccggtcgcccccccgcttccccgcacgcgctctccagccgcggccgcccgcctgccgcggtcaccccggcctctgcctctgtcccccagtgatcggatcaaggcgctgagcgaggccctgcctgcggggcggccatgcggcggtgacaggagcgcgaccgacacgcacgggcccctcgccccctctcgcctcccgtccgctcgccagctcccctcagccgaggctgctccgcggcggccgcagcccgcgcgcggcccacactcgcctcccctcggcacccccggccccggagctgcctggaggcggccgcactcggggatcatggcccaagttgcaatgtccaccctccccgttgaagatgaggagtcctcggagagcaggatggtggtgacattcctcatgtcagctctcgagtccatgtgtaaagaactggccaagtccaaagccgaagtggcctgcattgcagtgtatgaaacagacgtgtttgtcgtcggaactgaaagaggacgtgcttttgtcaataccagaaaggattttcaaaaagattttgtaaaatattgtgttgaagaagaagaaaaagctgcagagatgcataaaatgaaatctacaacccaggcaaatcggatgagtgtagatgctgtagaaattgaaacactcagaaaaacagttgaggactatttctgcttttgctatgggaaagctttaggcaaatccacagtggtacctgtaccatatgagaagatgctgcgagaccagtcggctgtggtagtgcaggggcttccggaaggtgttgcctttaaacaccccgagaactatgatcttgcaaccctgaaatggattttggagaacaaagcagggatttcattcatcattaagagaccttttttagagccaaagaagcatgtaggtggtcgtgtgatggtaacagatgctgacaggtcaatactatctccaggtggaagttgtggccccatcaaagtgaaaactgaacccacagaagattctggcatttccctggaaatggcagctgtgacagtaaaggaagaatcagaagatcctgattattatcaatataacattcaagcaggcccttctgaaactgatgatgttgatgaaaaacagcccctatcgaagcctttgcaaggaagccaccattcttcagagggcaatgaaggcacagaaatggaagtaccagcagaagatgatgattattctccaccgtctaagagaccaaaggccaatgagctaccgcagccaccagtcccggaacccgccaatgctgggaagcggaaagtgagggagttcaacttcgagaaatggaatgctcgcatcactgatctacgtaaacaagttgaagaattgtttgaaaggaaatatgctcaagccataaaagccaaaggtccggtgacgatcccgtaccctcttttccagtctcatgttgaagatctttatgtagaaggacttcctgaaggaattccttttagaaggccatctacttacggaattcctcgcctggagaggatattacttgcaaaggaaaggattcgttttgtgattaagaaacatgagcttctgaattcaacacgtgaagatttacagcttgataagccagcttcaggagtaaaggaagaatggtatgccagaatcactaaattaagaaagatggtggatcagcttttctgcaaaaaatttgcggaagccttggggagcactgaagccaaggctgtaccgtaccaaaaatttgaggcacacccgaatgatctgtacgtggaaggactgccagaaaacattcctttccgaagtccctcatggtatggaatcccaaggctggaaaaaatcattcaagtgggcaatcgaattaaatttgttattaaaagaccagaacttctgactcacagtaccactgaagttactcagccaagaacgaatacaccagtcaaagaagattggaatgtcagaattaccaagctacggaagcaagtggaagagatttttaatttgaaatttgctcaagctcttggactcaccgaggcagtaaaagtaccatatcctgtgtttgaatcaaacccggagttcttgaaaggatcgtccgcgggagtaataaaatcaagttcgttgttaaaaaacctgaactagttatttcctacttgcctcctgggatggctagtaaaataaacactaaagctttgcagtcccccaaaagaccacgaagtcctgggagtaattcaaaggttcctgaaattgaggtcaccgtggaaggccctaataacaacaatcctcaaacctcagctgttcgaaccccgacccagactaacggttctaacgttcccttcaagccacgagggagagagttttcctttgaggcctggaatgccaaaatcacggacctaaaacagaaagttgaaaatctcttcaatgagaaatgtggggaagctcttggccttaaacaagctgtgaaggtgccgttcgcgttatttgagtctttcccggaagacttttatgtggaaggcttacctgagggtgtgccattccgaagaccatcgacttttggcattccgaggctggagaagatactcagaaacaaagccaaaattaagttcatcattaaaaagcccgaaatgtttgagacggcgattaaggagagcacctcctctaagagccctcccagaaaaataaattcatcacccaatgttaatactactgcatcaggtgttgaagaccttaacatcattcaggtgacaattccagatgatgataatgaaagactctcgaaagttgaaaaagctagacagctaagagaacaagtgaatgacctctttagtcggaaatttggtgaagctattggtatgggttttcctgtgaaagttccctacaggaaaatcacaattaaccctggctgtgtggtggttgatggcatgcccccgggggtgtccttcaaagcccccagctacctggaaatcagctccatgagaaggatcttagactctgccgagtttatcaaattcacggtcattagaccatttccaggacttgtgattaataaccagctggttgatcagagtgagtcagaaggccccgtgatacaagaatcagctgaaccaagccagttggaagttccagccacagaagaaataaaagagactgatggaagctctcagatcaagcaagaaccagaccccacgtggtagacctcttccctcctaggagccttgagttacggtgtttattttccaatcaagtgaagatatctcctacttctcctactggaacatctcagcttctgcagtgaagaaaaattcctgtgatagttcagttctttagtttttctatttgaaaaaaaaaaatcatttaaatgatcctttgttcacggctctccttaatgactgagtgaacagttcctatctgtatatttgactaaaccttttcctaagctatctctcatggttcctatgtttttttatcataattaaaagcaaaaccatctggatcacctaacagtcagaggtcagtatctcagcgtgtgaattatagaggaaatacagagagaacctcttccacttttacttttcgtccaaataaaatgcatggtgtaccagaagttgaagatcgggttgaggattggggctagctcgatgacactaaggccccaacatcgcgggacctgctgtggcgcggattcttaggaacgctgttctagccggccccctctccaggggtcgccgtggccggcattatttcctagttcttcttgtaaccctgaggtgccagcgcggggagtgaggaggggtcagggggctaaggatgcaacctctgacgttctgcgccttcctaggagagtcttacatgtgttgagatttcacaagcaatgcgagttgtaaaataccagctctacaagaagctaggctctgtgacggcatagttttcagtagctttatcacaatattcacaatggagaattatatgacatggtagcagaaataggcccttttatgtgttgcttctattttacctcaaattgtagatatagggtaatcaataaaatccatccatgcctttcacacactaagt

SEQ ID NO: 4391 - protein, 604 aa, Homo sapiens; identical to SEQ ID NO: 4117

SEQ ID NO: 4392 - DNA, 5222 bp, Homo sapiens
aaaaaaaaaaaaaaaaaaaaaaaaaaaagaaaaaagaaaaaaaaaaggaggaggaggaggagggtgagagagaagctgggagagcagagaaaaggggccaccggtcgcccccccgcttccccgcacgcgctctccagccgcggccgcccgcctgccgcggtcaccccggcctctgcctctgtcccccagtgatcggatcaaggcgctgagcgaggccctgcctgcggggcggccatgcggcggtgacaggagcgcgaccgacacgcacgggcccctcgccccctctcgcctcccgtccgctcgccagctcccctcagccgaggctgctccgcggcggccgcagcccgcgcgcggcccacactcgcctcccctcggcacccccggccccggagctgcctggaggcggccgcactcggtgtaaagaactggccaagtccaaagccgaagtggcctgcattgcagtgtatgaaacagacgtgtttgtcgtcggaactgaaagaggacgtgcttttgtcaataccagaaaggattttcaaaaagattttgtaaaatattgtgttgaagaagaagaaaaagctgcagagatgcataaaatgaaatctacaacccaggcaaatcggatgagtgtagatgctgtagaaattgaaacactcagaaaaacagttgaggactatttctgcttttgctatgggaaagctttaggcaaatccacagtggtacctgtaccatatgagaagatgctgcgagaccagtcggctgtggtagtgcaggggcttccggaaggtgttgcctttaaacaccccgagaactatgatcttgcaaccctgaaatggattttggagaacaaagcagggatttcattcatcattaagagaccttttttagagccaaagaagcatgtaggtggtcgtgtgatggtaacagatgctgacaggtcaatactatctccaggtggaagttgtggccccatcaaagtgaaaactgaacccacagaagattctggcatttccctggaaatggcagctgtgacagtaaaggaagaatcagaagatcctgattattatcaatataacattcaaggaagccaccattcttcagagggcaatgaaggcacagaaatggaagtaccagcagaagattctactcaacatgtcccttcagaaacaagtgaggaccctgaagttgaggtgactattgaagatgatgattattctccaccgtctaagagaccaaaggccaatgagctaccgcagccaccagtcccggaacccgccaatgctgggaagcggaaagtgagggagttcaacttcgagaaatggaatgctcgcatcactgatctacgtaaacaagttgaagaattgtttgaaaggaaatatgctcaagccataaaagccaaaggtccggtgacgatcccgtaccctcttttccagtctcatgttgaagatctttatgtagaaggacttcctgaaggaattccttttagaaggccatctacttacggaattcctcgcctggagaggatattacttgcaaaggaaaggattcgttttgtgattaagaaacatgagcttctgaattcaacacgtgaagatttacagcttgataagccagcttcaggagtaaaggaagaatggtatgccagaatcactaaattaagaaagatggtggatcagcttttctgcaaaaaatttgcggaagccttggggagcactgaagccaaggctgtaccgtaccaaaaatttgaggcacacccgaatgatctgtacgtggaaggactgccagaaaacattcctttccgaagtccctcatggtatggaatcccaaggctggaaaaaatcattcaagtgggcaatcgaattaaatttgttattaaaagaccagaacttctgactcacagtaccactgaagttactcagccaagaacgaatacaccagtcaaagaagattggaatgtcagaattaccaagctacggaagcaagtggaagagatttttaatttgaaatttgcttagatttgttgacagcggtttcctggagtgctgtcttgagaacgattctgaggaggctcagcaagaaagagtgtttcagttgattgggtgtgtctgtcatggagaaggaactcaagctcttggactcaccgaggcagtaaaagtaccatatcctgtgtttgaatcaaacccggagttcttgtatgtggaaggcttgccagaggggattcccttccgaagccctacctggtttggaattccacgacttgaaaggatcgtccgcgggagtaataaaatcaagttcgttgttaaaaaacctgaactagttatttcctacttgcctcctgggatggctagtaaaataaacactaaagctttgcagtcccccaaaagaccacgaagtcctgggagtaattcaaaggttcctgaaattgaggtcaccgtggaaggccctaataacaacaatcctcaaacctcagctgttcgaaccccgacccagactaacggttctaacgttcccttcaagccacgagggagagagttttcctttgaggcctggaatgccaaaatcacggacctaaaacagaaagttgaaaatctcttcaatgagaaatgtggggaagctcttggccttaaacaagctgtgaaggtgccgttcgcgttatttgagtctttcccggaagacttttatgtggaaggcttacctgagggtgtgccattccgaagaccatcgacttttggcattccgaggctggagaagatactcagaaacaaagccaaaattaagttcatcattaaaaagcccgaaatgtttgagacggcgattaaggagagcacctcctctaagagccctcccagaaaaataaattcatcacccaatgttaatactactgcatcaggtgttgaagaccttaacatcattcaggtgacaattccagatgatgataatgaaagactctcgaaagttgaaaaagctagacagctaagagaacaagtgaatgacctctttagtcggaaatttggtgaagctattggtatgggttttcctgtgaaagttccctacaggaaaatcacaattaaccctggctgtgtggtggttgatggcatgcccccgggggtgtccttcaaagcccccagctacctggaaatcagctccatgagaaggatcttagactctgccgagtttatcaaattcacggtcattagaccatttccaggacttgtgattaataaccagctggttgatcagagtgagtcagaaggccccgtgatacaagaatcagctgaaccaagccagttggaagttccagccacagaagaaataaaagagactgatggaagctctcagatcaagcaagaaccagaccccacgtggtagacctcttccctcctagggtaaatcagcttctgtgtcagggatgctgtgtggtgtccatctgaaccccctgcatacgcgtagctaatgtgatctccccactttcacataagatggtggccctgccttcagggaatgtgggagccaggtgggagccttcccggatatttaagctagaagattctacagggagattctccttggatcaatatatgtctctcagtcaaagatgtaaaagcacttttgccttaaaaagaatgttctgtttctaaatagagtcaacgttgtcctcctcattggaattcactatgagtcagaatcattagactgacttttttttttccatagtaatagtattttgcagagtctcacagagctgcagatcttttgttcatcttgcagagttaacaagtctgatcctgttagtccagatttcttaaatttggccaagttataataggagcagtagcttgagacccgaagtcaggaaactttgacaatggatttttttttttaatccagagacttgtactggaatttgccttaccctgtcagctcatggacttaaggtttcatcccgctttatgagtgcttctgaatccaagtcattgttacctgaatttgcaaattaagttgtgatattcgtgactgttaaattcctgtaattagattaacctctttgcttgcttgtttgttttctctcctattttagcttaaagtatcagtggttgagaagagcttttcggacctgttactaccccaagctgtgtaatatacttgtataacagaaataccttctatacaaacctttttttctacttttagatagaaatgtctactttttcagcagttctgtgaattaaagagcagagtgactgtgggtctggaatggctggtgtacttgggaatgtactatcaggattttacagcaatgctgggaaatgacagggaaaatgacaggaatgaatctcaccagattttttatgtactcagcagagccttgagttacggtgtttattttccaatcaagtgaagatatctcctacttctcctactggaacatctcagcttctgcagtgaagaaaaattcctgtgatagttcagttctttagtttttctatttgaaaaaaaaaaatcatttaaatgatcctttgttcacggctctccttaatgactgagtgaacagttcctatctgtatatttgactaaaccttttcctaagctatctctcatggttcctatgtttttttatcataattaaaagcaaaaccatctggatcacctaacagtcagaggtcagtatctcagcgtgtgaattatagaggaaatacagagagaacctcttccacttttacttttcgtccaaataaaatgcatggtgtaccagaagttgaagatcgggttgaggattggggctagctcgatgacactaaggccccaacatcgcgggacctgctgtggcgcggattcttaggaacgctgttctagccggccccctctccaggggtcgccgtggccggcattatttcctagttcttcttgtaaccctgaggtgccagcgcggggagtgaggaggggtcagggggctaaggatgcaacctctgacgttctgcgccttcctaggagagtcttacatgtgttgagatttcacaagcaatgcgagttgtaaaataccagctctacaagaagctaggctctgtgacggcatagttttcagtagctttatcacaatattcacaatggagaattatatgacatggtagcagaaataggcccttttatgtgttgcttctattttacctcaaattgtagatatagggtaatcaataaaatccatccatgcctttcacacactaagt

SEQ ID NO: 4393 - protein, 475 aa, Homo sapiens; identical to SEQ ID NO: 4139

SEQ ID NO: 4394 - DNA, 5119 bp, Homo sapiens
aaaaaaaaaaaaaaaaaaaaaaaaaaaagaaaaaagaaaaaaaaaaggaggaggaggaggagggtgagagagaagctgggagagcagagaaaaggggccaccggtcgcccccccgcttccccgcacgcgctctccagccgcggccgcccgcctgccgcggtcaccccggcctctgcctctgtcccccagtgatcggatcaaggcgctgagcgaggccctgcctgcggggcggccatgcggcggtgacaggagcgcgaccgacacgcacgggcccctcgccccctctcgcctcccgtccgctcgccagctcccctcagccgaggctgctccgcggcggccgcagcccgcgcgcggcccacactcgcctcccctcggcacccccggccccggagctgcctggaggcggccgcactcggtgtaaagaactggccaagtccaaagccgaagtggcctgcattgcagtgtatgaaacagacgtgtttgtcgtcggaactgaaagaggacgtgcttttgtcaataccagaaaggattttcaaaaagattttgtaaaatattgtgttgaagaagaagaaaaagctgcagagatgcataaaatgaaatctacaacccaggcaaatcggatgagtgtagatgctgtagaaattgaaacactcagaaaaacagttgaggactatttctgcttttgctatgggaaagctttaggcaaatccacagtggtacctgtaccatatgagaagatgctgcgagaccagtcggctgtggtagtgcaggggcttccggaaggtgttgcctttaaacaccccgagaactatgatcttgcaaccctgaaatggattttggagaacaaagcagggatttcattcatcattaagagaccttttttagagccaaagaagcatgtaggtggtcgtgtgatggtaacagatgctgacaggtcaatactatctccaggtggaagttgtggccccatcaaagtgaaaactgaacccacagaagattctggcatttccctggaaatggcagctgtgacagtaaaggaagaatcagaagatcctgattattatcaatataacattcaagcaggcccttctgaaactgatgatgttgatgaaaaacagcccctatcgaagcctttgcaaggaagccaccattcttcagagggcaatgaaggcacagaaatggaagtaccagcagaagattctactcaacatgtcccttcagaaacaagtgaggaccctgaagttgaggtgactattgaagatgatgattattctccaccgtctaagagaccaaaggccaatgagctaccgcagccaccagtcccggaacccgccaatgctgggaagcggaaagtgagggagttcaacttcgagaaatggaatgctcgcatcactgatctacgtaaacaagttgaagaattgtttgaaaggaaatatgctcaagccataaaagccaaaggtccggtgacgatcccgtaccctcttttccagtctcatgttgaagatctttatgtagaaggacttcctgaaggaattccttttagaaggccatctacttacggaattcctcgcctggagaggatattacttgcaaaggaaaggattcgttttgtgattaagaaacatgagcttctgaattcaacacgtgaagatttacagcttgataagccagcttcaggagtaaaggaagaatggtatgccagaatcactaaattaagaaagatggtggatcagcttttctgcaaaaaatttgcggaagccttggggagcactgaagccaaggctgtaccgtaccaaaaatttgaggcacacccgaatgatctgtacgtggaaggactgccagaaaacattcctttccgaagtccctcatggtatggaatcccaaggctggaaaaaatcattcaagtgggcaatcgaattaaatttgttattaaaagaccagaacttctgactcacagtaccactgaagttactcagccaagaacgaatacaccagtcaaagaagattggaatgtcagaattaccaagctacggaagcaagtggaagagatttttaatttgaaatttgctcaagctcttggactcaccgaggcagtaaaagtaccatatcctgtgtttgaatcaaacccggagttcttgtatgtggaaggcttgccagaggggattcccttccgaagccctacctggtttggaattccacgacttgaaaggatcgtccgcgggagtaataaaatcaagttcgttgttaaaaaacctgaactagttatttcctacttgcctcctgggatggctagtaaaataaacactaaagctttgcagtcccccaaaagaccacgaagtcctgggagtaattcaaaggttcctgaaattgaggtcaccgtggaaggccctaataacaacaatcctcaaacctcagctgttcgaaccccgacccagactaacggttctaacgttcccttcaagccacgagggagagagttttcctttgaggcctggaatgccaaaatcacggacctaaaacagaaagttgaaaatctcttcaatgagaaatgtggggaagctcttggccttaaacaagctgtgaaggtgccgttcgcgttatttgagtctttcccggaagacttttatgtggaaggcttacctgagggtgtgccattccgaagaccatcgacttttggcattccgaggctggagaagatactcagaaacaaagccaaaattaagttcatcattaaaaagcccgaaatgtttgagacggcgattaaggagagcacctcctctaagagccctcccagaaaaataaattcatcacccaatgttaatactactgcatcaggtgttgaagaccttaacatcattcaggtgacaattccagatgatgataatgaaagactctcgaaagttgaaaaagctagacagctaagagaacaagtgaatgacctctttagtcggaaatttggtgaagctattggtatgggttttcctgtgaaagttccctacaggaaaatcacaattaaccctggctgtgtggtggttgatggcatgcccccgggggtgtccttcaaagcccccagctacctggaaatcagctccatgagaaggatcttagactctgccgagtttatcaaattcacggtcattagaccatttccaggacttgtgattaataaccagctggttgatcagagtgagtcagaaggccccgtgatacaagaatcagctgaaccaagccagttggaagttccagccacagaaggtaaaaggacctcttccctcctagggtaaatcagcttctgtgtcagggatgctgtgtggtgtccatctgaaccccctgcatacgcgtagctaatgtgatctccccactttcacataagatggtggccctgccttcagggaatgtgggagccaggtgggagccttcccggatatttaagctagaagattctacagggagattctccttggatcaatatatgtctctcagtcaaagatgtaaaagcacttttgccttaaaaagaatgttctgtttctaaatagagtcaacgttgtcctcctcattggaattcactatgagtcagaatcattagactgacttttttttttccatagtaatagtattttgcagagtctcacagagctgcagatcttttgttcatcttgcagagttaacaagtctgatcctgttagtccagatttcttaaatttggccaagttataataggagcagtagcttgagacccgaagtcaggaaactttgacaatggatttttttttttaatccagagacttgtactggaatttgccttaccctgtcagctcatggacttaaggtttcatcccgctttatgagtgcttctgaatccaagtcattgttacctgaatttgcaaattaagttgtgatattcgtgactgttaaattcctgtaattagattaacctctttgcttgcttgtttgttttctctcctattttagcttaaagtatcagtggttgagaagagcttttcggacctgttactaccccaagctgtgtaatatacttgtataacagaaataccttctatacaaacctttttttctacttttagatagaaatgtctactttttcagcagttctgtgaattaaagagcagagtgactgtgggtctggaatggctggtgtacttgggaatgtactatcaggattttacagcaatgctgggaaatgacagggaaaatgacaggaatgaatctcaccagattttttatgtactcagcagagccttgagttacggtgtttattttccaatcaagtgaagatatctcctacttctcctactggaacatctcagcttctgcagtgaagaaaaattcctgtgatagttcagttctttagtttttctatttgaaaaaaaaaaatcatttaaatgatcctttgttcacggctctccttaatgactgagtgaacagttcctatctgtatatttgactaaaccttttcctaagctatctctcatggttcctatgtttttttatcataattaaaagcaaaaccatctggatcacctaacagtcagaggtcagtatctcagcgtgtgaattatagaggaaatacagagagaacctcttccacttttacttttcgtccaaataaaatgcatggtgtaccagaagttgaagatcgggttgaggattggggctagctcgatgacactaaggccccaacatcgcgggacctgctgtggcgcggattcttaggaacgctgttctagccggccccctctccaggggtcgccgtggccggcattatttcctagttcttcttgtaaccctgaggtgccagcgcggggagtgaggaggggtcagggggctaaggatgcaacctctgacgttctgcgccttcctaggagagtcttacatgtgttgagatttcacaagcaatgcgagttgtaaaataccagctctacaagaagctaggctctgtgacggcatagttttcagtagctttatcacaatattcacaatggagaattatatgacatggtagcagaaataggcccttttatgtgttgcttctattttacctcaaattgtagatatagggtaatcaataaaatccatccatgcctttcacacactaagt

SEQ ID NO: 4395 - protein, 899 aa, Homo sapiens
MHKMKSTTQANRMSVDAVEIETLRKTVEDYFCFCYGKALGKSTVVPVPYEKMLRDQSAVVVQGLPEGVAFKHPENYDLATLKWILENKAGISFIIKRPFLEPKKHVGGRVMVTDADRSILSPGGSCGPIKVKTEPTEDSGISLEMAAVTVKEESEDPDYYQYNIQAGPSETDDVDEKQPLSKPLQGSHHSSEGNEGTEMEVPAEDSTQHVPSETSEDPEVEVTIEDDDYSPPSKRPKANELPQPPVPEPANAGKRKVREFNFEKWNARITDLRKQVEELFERKYAQAIKAKGPVTIPYPLFQSHVEDLYVEGLPEGIPFRRPSTYGIPRLERILLAKERIRFVIKKHELLNSTREDLQLDKPASGVKEEWYARITKLRKMVDQLFCKKFAEALGSTEAKAVPYQKFEAHPNDLYVEGLPENIPFRSPSWYGIPRLEKIIQVGNRIKFVIKRPELLTHSTTEVTQPRTNTPVKEDWNVRITKLRKQVEEIFNLKFAQALGLTEAVKVPYPVFESNPEFLYVEGLPEGIPFRSPTWFGIPRLERIVRGSNKIKFVVKKPELVISYLPPGMASKINTKALQSPKRPRSPGSNSKVPEIEVTVEGPNNNNPQTSAVRTPTQTNGSNVPFKPRGREFSFEAWNAKITDLKQKVENLFNEKCGEALGLKQAVKVPFALFESFPEDFYVEGLPEGVPFRRPSTFGIPRLEKILRNKAKIKFIIKKPEMFETAIKESTSSKSPPRKINSSPNVNTTASGVEDLNIIQVTIPDDDNERLSKVEKARQLREQVNDLFSRKFGEAIGMGFPVKVPYRKITINPGCVVVDGMPPGVSFKAPSYLEISSMRRILDSAEFIKFTVIRPFPGLVINNQLVDQSESEGPVIQESAEPSQLEVPATEGKRTSSLLG

SEQ ID NO: 4396 - DNA, 7929 bp, Homo sapiens
aaaaaaaaaaaaaaaaaaaaaaaaaaaagaaaaaagaaaaaaaaaaggaggaggaggaggagggtgagagagaagctgggagagcagagaaaaggggccaccggtcgcccccccgcttccccgcacgcgctctccagccgcggccgcccgcctgccgcggtcaccccggcctctgcctctgtcccccagtgatcggatcaaggcgctgagcgaggccctgcctgcggggcggccatgcggcggtgacaggagcgcgaccgacacgcacgggcccctcgccccctctcgcctcccgtccgctcgccagctcccctcagccgaggctgctccgcggcggccgcagcccgcgcgcggcccacactcgcctccccgttgaagatgaggagtcctcggagagcaggatggtggtgacattcctcatgtcagctctcgagtccatgtgtaaagaactggccaagtccaaagccgaagtggcctgcattgcagtgtatgaaacagacgtgtttgtcgtcggaactgaaagaggacgtgcttttgtcaataccagaaaggattttcaaaaagattttgtaaaatattgtgttgaagaagaagaaaaagctgcagagatgcataaaatgaaatctacaacccaggcaaatcggatgagtgtagatgctgtagaaattgaaacactcagaaaaacagttgaggactatttctgcttttgctatgggaaagctttaggcaaatccacagtggtacctgtaccatatgagaagatgctgcgagaccagtcggctgtggtagtgcaggggcttccggaaggtgttgcctttaaacaccccgagaactatgatcttgcaaccctgaaatggattttggagaacaaagcagggatttcattcatcattaagagaccttttttagagccaaagaagcatgtaggtggtcgtgtgatggtaacagatgctgacaggtcaatactatctccaggtggaagttgtggccccatcaaagtgaaaactgaacccacagaagattctggaagccaccattcttcagagggcaatgaaggcacagaaatggaagtaccagcagaagattctactcaacatgtcccttcagaaacaagtgaggaccctgaagttgaggtgactattgaagatgatgattattctccaccgtctaagagaccaaaggccaatgagctaccgcagccaccagtcccggaacccgccaatgctgggaagcggaaagtgagggagttcaacttcgagaaatggaatgctcgcatcactgatctacgtaaacaagttgaagaattgtttgaaaggaaatatgctcaagccataaaagccaaaggtccggtgacgatcccgtaccctcttttccagtctcatgttgaagatctttatgtagaaggacttcctgaaggaattccttttagaaggccatctacttacggaattcctcgcctggagaggatattacttgcaaaggaaaggattcgttttgtgattaagaaacatgagcttctgaattcaacacgtgaagatttacagcttgataagccagcttcaggagtaaaggaagaatggtatgccagaatcactaaattaagaaagatggtggatcagcttttctgcaaaaaatttgcggaagccttggggagcactgaagccaaggctgtaccgtaccaaaaatttgaggcacacccgaatgatctgtacgtggaaggactgccagaaaacattcctttccgaagtccctcatggtatggaatcccaaggctggaaaaaatcattcaagtgggcaatcgaattaaatttgttattaaaagaccagaacttctgactcacagtaccactgaagttactcagccaagaacgaatacaccagtcaaagaagattggaatgtcagaattaccaagctacggaagcaagtggaagagatttttaatttgaaatttgcttagatttgttgacagcggtttcctggagtgctgtcttgagaacgattctgaggaggctcagcaagaaagagtgtttcagttgattgggtgtgtctgtcatggagaaggaactcaagctcttggactcaccgaggcagtaaaagtaccatatcctgtgtttgaatcaaacccggagttcttgtatgtggaaggcttgccagaggggattcccttccgaagccctacctggtttggaattccacgacttgaaaggatcgtccgcgggagtaataaaatcaagttcgttgttaaaaaacctgaactagttatttcctacttgcctcctgggatggctagtaaaataaacactaaagctttgcagtcccccaaaagaccacgaagtcctgggagtaattcaaaggttcctgaaattgaggtcaccgtggaaggccctaataacaacaatcctcaaacctcagctgttcgaaccccgacccagactaacggttctaacgttcccttcaagccacgagggagagagttttcctttgaggcctggaatgccaaaatcacggacctaaaacagaaagttgaaaatctcttcaatgagaaatgtggggaagctcttggccttaaacaagctgtgaaggtgccgttcgcgttatttgagtctttcccggaagacttttatgtggaaggcttacctgagggtgtgccattccgaagaccatcgacttttggcattccgaggctggagaagatactcagaaacaaagccaaaattaagttcatcattaaaaagcccgaaatgtttgagacggcgattaaggagagcacctcctctaagagccctcccagaaaaataaattcatcacccaatgttaatactactgcatcaggtgttgaagaccttaacatcattcaggtgacaattccagatgatgataatgaaagactctcgaaagttgaaaaagctagacagctaagagaacaagtgaatgacctctttagtcggaaatttggtgaagctattggtatgggttttcctgtgaaagttccctacaggaaaatcacaattaaccctggctgtgtggtggttgatggcatgcccccgggggtgtccttcaaagcccccagctacctggaaatcagctccatgagaaggatcttagactctgccgagtttatcaaattcacggtcattaggtaagtgagagtttcctgcttagtcacaggagcgaatctggagctcatgaggctgactcttctaaaatgcagccacaggtagtcatcgaatccggcttcctatgctgtgcaatcaacaaatcaaaataacttgtgtcatcattagaatgtcagatgtgcttctacgaactaagctgactcttttaattctttggcaaagggttggcaaactaggactgtttgccaaattcaggctgcctcctatttttagagtcttcctgaaacacagctacacccgtattatccatggctgctttcctgtcacagtgagtaagtagctgggactgagaaggcatggcctccaaagtctaaaatatttactctctagcactttgtagaaaaaccttagctaggcacagtggctaacgcctgtaatcccagcattttgggaggccaaggcaggcagatcacctgaggtcaggagttccagaccagcctggccaacatggtgaaatcccatctctacaaaaataaaacagttagctgggcatgatggcgggtgcctgtaatcccagctactcgggaggctgaggcaggatagtcgcttgaacccaggaggtggaggttgcaatgagccaagatcatgccactgcactccagcctggacgacagagtgagactccatcacaagaaaaaaagaactttgtcaacctctgtcttagggcgccttgtcacaggcttcgggtcagacggattcaaccttgcatcagccatttgttagccaggtcactctgttctttgtctgtaaatgagattgatcgttgttcccactgagagtgtcagctccttcccgtagagcaggcatgatgattgtactcacctctgacaccattgtgagtgccacattccttcccacgtccttgtcactgtaagagatgcccacctgagcaccaaccccaggttatcttcccctttgtcttccagccccccagaaacagctacgactcaacctacccaatcatttcatcatcagattgccactgtctctagttcaggtctcttgggactggcactcagaaatctcataataaatcctcttgaggcttctcatacactcgtcttcttccaatcttctttccctcaaaatctcatattttggttccacttcacccaccgtcattctccatatcactcccaggagttaggcaaaaagccccttccgttcttccgtatgttaaacttagaatcactctgttccctgctctgcgtttctattttttgtttttcctccatttactagtagcttaacactttctaacagtgttcttattattgatacgtatctatctcttccataagcttataaggtcacggataatacttctcattgtagtacgtaaatgacgtgggctagatatgagttgaataaacagttatacctgtaaattcttacagagtgaaaataaattgttatactttacaatttgtttctctctttagaccatttccaggacttgtgattaataaccgtgagtattttgtgaagtgttttgtttttgttttttcctggggtctgacgtgtgtgcgtgtgagtgtgtatacatgcttaacgtatatcacgttacttcacctatgtcagtaaccaggccaaatacttgttttagccctcagtaaaaacaccaggcacttcctagttgtaaaattattcaagcttcttaacttcctatcctcgatgcacttaatcataaaatggtaataatagcaccgattttgggggagtcgttccagtagatggaaagcatctggaacaggtgtcagcaagctcctgccgacgtgtatgcataaagttttattgaaaccaccatcgtgtccatttgtttatggcagaactgagagatggcagcagcaagtgtgtgcctgcaaaacctaaaatatttactaattggctctgcaagaaaagagtttgcatccccctaacctagaacagtgtctagcctctagtatgtgtttagcctacagtatgtgctcagcgaatacaatctatatttattactgcttttatgactgttataattactgtgcttggatttcgttacaaagtaagtcacaatgtgcctgcttctgttagtatttcagcacagtgcctggcacacatggggctctcaaatattgctgagcgagtgaacaaatgtcctttcaattccttaacgttgatgtcattttcaatagtattttgagccaaacttaattttgcgagtgtgttttgttttcttaactttattattaaaaatgtataaaagtgaggccaggcgtggtggctcacgcctgtaatcccagcagtttgggaggctgaggcaggcggatcagttgaggttgggagttggagaccagcccgtccaacatggtgaaagcctgtctctactaaaaatacaaaaatcagctgggtgtggtggcgcgtgcctgtaatcccagctactcaggaggctgaggcaggagagttgcttgaatcctagaggtggaggttgcagtgagctgagatcgtgccattgcactccagcctgggcaacaagagcaaaactctgtcccaataaataaataaataaaatgttctcttttgttcctgttcttgtgcggtagtgtggtatagagttttatggtaattactgtgaattagtgattctgagggacatatcagaactctgaggtttgtttccttctcatcttgagggaaacagcaaatgtatgttaaaatgcttttccaagggaacaacacatccttacattatttaaaccaatctgcttcattttcagagctggttgatcagagtgagtcagaaggccccgtgatacaagaatcagctgaaccaagccagttggaagttccagccacagaagaaataaaagagactgatggaagctctcagatcaagcaagaaccagaccccacgtggtagacctcttccctcctagggtaaatcagcttctgtgtcagggatgctgtgtggtgtccatctgaaccccctgcatacgcgtagctaatgtgatctccccactttcacataagatggtggccctgccttcagggaatgtgggagccaggtgggagccttcccggatatttaagctagaagattctacagggagattctccttggatcaatatatgtctctcagtcaaagatgtaaaagcacttttgccttaaaaagaatgttctgtttctaaatagagtcaacgttgtcctcctcattggaattcactatgagtcagaatcattagactgacttttttttttccatagtaatagtattttgcagagtctcacagagctgcagatcttttgttcatcttgcagagttaacaagtctgatcctgttagtccagatttcttaaatttggccaagttataataggagcagtagcttgagacccgaagtcaggaaactttgacaatggatttttttttttaatccagagacttgtactggaatttgccttaccctgtcagctcatggacttaaggtttcatcccgctttatgagtgcttctgaatccaagtcattgttacctgaatttgcaaattaagttgtgatattcgtgactgttaaattcctgtaattagattaacctctttgcttgcttgtttgttttctctcctattttagcttaaagtatcagtggttgagaagagcttttcggacctgttactaccccaagctgtgtaatatacttgtataacagaaataccttctatacaaacctttttttctacttttagatagaaatgtctactttttcagcagttctgtgaattaaagagcagagtgactgtgggtctggaatggctggtgtacttgggaatgtactatcaggattttacagcaatgctgggaaatgacagggaaaatgacaggaatgaatctcaccagattttttatgtactcagcagagccttgagttacggtgtttattttccaatcaagtgaagatatctcctacttctcctactggaacatctcagcttctgcagtgaagaaaaattcctgtgatagttcagttctttagtttttctatttgaaaaaaaaaaatcatttaaatgatcctttgttcacggctctccttaatgactgagtgaacagttcctatctgtatatttgactaaaccttttcctaagctatctctcatggttcctatgtttttttatcataattaaaagcaaaaccatctggatcacctaacagtcagaggtcagtatctcagcgtgtgaattatagaggaaatacagagagaacctcttccacttttacttttcgtccaaataaaatgcatggtgtaccagaagttgaagatcgggttgaggattggggctagctcgatgacactaaggccccaacatcgcgggacctgctgtggcgcggattcttaggaacgctgttctagccggccccctctccaggggtcgccgtggccggcattatttcctagttcttcttgtaaccctgaggtgccagcgcggggagtgaggaggggtcagggggctaaggatgcaacctctgacgttctgcgccttcctaggagagtcttacatgtgttgagatttcacaagcaatgcgagttgtaaaataccagctctacaagaagctaggctctgtgacggcatagttttcagtagctttatcacaatattcacaatggagaattatatgacatggtagcagaaataggcccttttatgtgttgcttctattttacctcaaattgtagatatagggtaatcaataaaatccatccatgcctttcacacactaagt

SEQ ID NO: 4397 - protein, 518 aa, Homo sapiens; identical to SEQ ID NO: 4051

SEQ ID NO: 4398 - DNA, 3975 bp, Homo sapiens
aaaaaaaaaaaaaaaaaaaaaaaaaaaagaaaaaagaaaaaaaaaaggaggaggaggaggagggtgagagagaagctgggagagcagagaaaaggggccaccggtcgcccccccgcttccccgcacgcgctctccagccgcggccgcccgcctgccgcggtcaccccggcctctgcctctgtcccccagtgatcggatcaaggcgctgagcgaggccctgcctgcggggcggccatgcggcggtgacaggagcgcgaccgacacgcacgggcccctcgccccctctcgcctcccgtccgctcgccagctcccctcagccgaggctgctccgcggcggccgcagcccgcgcgcggcccacactcgcctcccctcggcacccccggccccggagctgcctggaggcggccgcactcggtgtaaagaactggccaagtccaaagccgaagtggcctgcattgcagtgtatgaaacagacgtgtttgtcgtcggaactgaaagaggacgtgcttttgtcaataccagaaaggattttcaaaaagattttgtaaaatattgtgttgaagaagaagaaaaagctgcagagatgcataaaatgaaatctacaacccaggcaaatcggatgagtgtagatgctgtagaaattgaaacactcagaaaaacagttgaggactatttctgcttttgctatgggaaagctttaggcaaatccacagtggtacctgtaccatatgagaagatgctgcgagaccagtcggctgtggtagtgcaggggcttccggaaggtgttgcctttaaacaccccgagaactatgatcttgcaaccctgaaatggattttggagaacaaagcagggatttcattcatcattaagagaccttttttagagccaaagaagcatgtaggtggtcgtgtgatggtaacagatgctgacaggtcaatactatctccaggtggaagttgtggccccatcaaagtgaaaactgaacccacagaagattctggcatttccctggaaatggcagctgtgacagtaaaggaagaatcagaagatcctgattattatcaatataacattcaagcaggcccttctgaaactgatgatgttgatgaaaaacagcccctatcgaagcctttgcaaggaagccaccattcttcagagggcaatgaaggcacagaaatggaagtaccagcagaagatgatgattattctccaccgtctaagagaccaaaggccaatgagctaccgcagccaccagtcccggaacccgccaatgctgggaagcggaaagtgagggagttcaacttcgagaaatggaatgctcgcatcactgatctacgtaaacaagttgaagaattgtttgaaaggaaatatgctcaagccataaaagccaaaggtccggtgacgatcccgtaccctcttttccagtctcatgttgaagatctttatgtagaaggacttcctgaaggaattccttttagaaggccatctacttacggaattcctcgcctggagaggatattacttgcaaaggaaaggattcgttttgtgattaagaaacatgagcttctgaattcaacacgtgaagatttacagcttgataagccagcttcaggagtaaaggaagaatggtatgccagaatcactaaattaagaaagatggtggatcagcttttctgcaaaaaatttgcggaagccttggggagcactgaagccaaggctgtaccgtaccaaaaatttgaggcacacccgaatgatctgtacgtggaaggactgccagaaaacattcctttccgaagtccctcatggtatggaatcccaaggctggaaaaaatcattcaagtgggcaatcgaattaaatttgttattaaaagaccagaacttctgactcacagtaccactgaagttactcagccaagaacgaatacaccagtcaaagaagattggaatgtcagaattaccaagctacggaagcaagtggaagagatttttaatttgaaatttgcttagatttgttgacagcggtttcctggagtgctgtcttgagaacgattctgaggaggctcagcaagaaagagtgtttcagttgattgggtgtgtctgtcatggagaaggaactcaagctcttggactcaccgaggcagtaaaagtaccatatcctgtgtttgaatcaaacccggagttcttgtatgtggaaggcttgccagaggggattcccttccgaagccctacctggtttggaattccacgacttgaaaggatcgtccgcgggagtaataaaatcaagttcgttgttaaaaaacctgaactagttatttcctacttgcctcctgggatggctagtaaaataaacactaaagctttgcagtcccccaaaagaccacgaagtcctgggagtaattcaaaggttcctgaaattgaggtcaccgtggaaggccctaataacaacaatcctcaaacctcagctgttcgaaccccgacccagactaacggttctaacgttcccttcaagccacgagggagagagttttcctttgaggcctggaatgccaaaatcacggacctaaaacagaaagttgaaaatctcttcaatgagaaatgtggggaagctcttggccttaaacaagctgtgaaggtgccgttcgcgttatttgagtctttcccggaagacttttatgtggaaggcttacctgagggtgtgccattccgaagaccatcgacttttggcattccgaggctggagaagatactcagaaacaaagccaaaattaagttcatcattaaaaagcccgaaatgtttgagacggcgattaaggagagcacctcctctaagagccctcccagaaaaataaattcatcacccaatgttaatactactgcatcaggtgttgaagaccttaacatcattcaggtgacaattccagatgatgataatgaaagactctcgaaagttgaaaaagctagacagctaagagaacaagtgaatgacctctttagtcggaaatttggtgaagctattggtatgggttttcctgtgaaagttccctacaggaaaatcacaattaaccctggctgtgtggtggttgatggcatgcccccgggggtgtccttcaaagcccccagctacctggaaatcagctccatgagaaggatcttagactctgccgagtttatcaaattcacggtcattagaccatttccaggacttgtgattaataaccagctggttgatcagagtgagtcagaaggccccgtgatacaagaatcagctgaaccaagccagttggaagttccagccacagaagaaataaaagagactgatggaagctctcagatcaagcaagaaccagaccccacgtggtagacctcttccctcctaggcaaaaccatctggatcacctaacagtcagaggtcagtatctcagcgtgtgaattatagaggaaatacagagagaacctcttccacttttacttttcgtccaaataaaatgcatggtgtaccagaagttgaagatcgggttgaggattggggctagctcgatgacactaaggccccaacatcgcgggacctgctgtggcgcggattcttaggaacgctgttctagccggccccctctccaggggtcgccgtggccggcattatttcctagttcttcttgtaaccctgaggtgccagcgcggggagtgaggaggggtcagggggctaaggatgcaacctctgacgttctgcgccttcctaggagagtcttacatgtgttgagatttcacaagcaatgcgagttgtaaaataccagctctacaagaagctaggctctgtgacggcatagttttcagtagctttatcacaatattcacaatggagaattatatgacatggtagcagaaataggcccttttatgtgttgcttctattttacctcaaattgtagatatagggtaatcaataaaatccatccatgcctttcacacactaagt

SEQ ID NO: 4399 - protein, 474 aa, Homo sapiens; identical to SEQ ID NO: 4025

SEQ ID NO: 4400 - DNA, 5008 bp, Homo sapiens
aaaaaaaaaaaaaaaaaaaaaaaaaaaagaaaaaagaaaaaaaaaaggaggaggaggaggagggtgagagagaagctgggagagcagagaaaaggggccaccggtcgcccccccgcttccccgcacgcgctctccagccgcggccgcccgcctgccgcggtcaccccggcctctgcctctgtcccccagtgatcggatcaaggcgctgagcgaggccctgcctgcggggcggccatgcggcggtgacaggagcgcgaccgacacgcacgggcccctcgccccctctcgcctcccgtccgctcgccagctcccctcagccgaggctgctccgcggcggccgcagcccgcgcgcggcccacactcgcctccccgttgaagatgaggagtcctcggagagcaggatggtggtgacattcctcatgtcagctctcgagtccatgtgtaaagaactggccaagtccaaagccgaagtggcctgcattgcagtgtatgaaacagacgtgtttgtcgtcggaactgaaagaggacgtgcttttgtcaataccagaaaggattttcaaaaagattttgtaaaatattgtgttgaagaagaagaaaaagctgcagagatgcataaaatgaaatctacaacccaggcaaatcggatgagtgtagatgctgtagaaattgaaacactcagaaaaacagttgaggactatttctgcttttgctatgggaaagctttaggcaaatccacagtggtacctgtaccatatgagaagatgctgcgagaccagtcggctgtggtagtgcaggggcttccggaaggtgttgcctttaaacaccccgagaactatgatcttgcaaccctgaaatggattttggagaacaaagcagggatttcattcatcattaagagaccttttttagagccaaagaagcatgtaggtggtcgtgtgatggtaacagatgctgacaggtcaatactatctccaggtggaagttgtggccccatcaaagtgaaaactgaacccacagaagattctggcatttccctggaaatggcagctgtgacagtaaaggaagaatcagaagatcctgattattatcaatataacattcaagcaggcccttctgaaactgatgatgttgatgaaaaacagcccctatcgaagcctttgcaaggaagccaccattcttcagagggcaatgaaggcacagaaatggaagtaccagcagaagatgatgattattctccaccgtctaagagaccaaaggccaatgagctaccgcagccaccagtcccggaacccgccaatgctgggaagcggaaagtgagggagttcaacttcgagaaatggaatgctcgcatcactgatctacgtaaacaagttgaagaattgtttgaaaggaaatatgctcaagccataaaagccaaaggtccggtgacgatcccgtaccctcttttccagtctcatgttgaagatctttatgtagaaggacttcctgaaggaattccttttagaaggccatctacttacggaattcctcgcctggagaggatattacttgcaaaggaaaggattcgttttgtgattaagaaacatgagcttctgaattcaacacgtgaagatttacagcttgataagccagcttcaggagtaaaggaagaatggtatgccagaatcactaaattaagaaagatggtggatcagcttttctgcaaaaaatttgcggaagccttggggagcactgaagccaaggctgtaccgtaccaaaaatttgaggcacacccgaatgatctgtacgtggaaggactgccagaaaacattcctttccgaagtccctcatggtatggaatcccaaggctggaaaaaatcattcaagtgggcaatcgaattaaatttgttattaaaagaccagaacttctgactcacagtaccactgaagttactcagccaagaacgaatacaccagctcaagctcttggactcaccgaggcagtaaaagtaccatatcctgtgtttgaatcaaacccggagttcttgtatgtggaaggcttgccagaggggattcccttccgaagccctacctggtttggaattccacgacttgaaaggatcgtccgcgggagtaataaaatcaagttcgttgttaaaaaacctgaactagttatttcctacttgcctcctgggatggctagtaaaataaacactaaagctttgcagtcccccaaaagaccacgaagtcctgggagtaattcaaaggttcctgaaattgaggtcaccgtggaaggccctaataacaacaatcctcaaacctcagctgttcgaaccccgacccagactaacggttctaacgttcccttcaagccacgagggagagagttttcctttgaggcctggaatgccaaaatcacggacctaaaacagaaagttgaaaatctcttcaatgagaaatgtggggaagctcttggccttaaacaagctgtgaaggtgccgttcgcgttatttgagtctttcccggaagacttttatgtggaaggcttacctgagggtgtgccattccgaagaccatcgacttttggcattccgaggctggagaagatactcagaaacaaagccaaaattaagttcatcattaaaaagcccgaaatgtttgagacggcgattaaggagagcacctcctctaagagccctcccagaaaaataaattcatcacccaatgttaatactactgcatcaggtgttgaagaccttaacatcattcaggtgacaattccagatgatgataatgaaagactctcgaaagttgaaaaagctagacagctaagagaacaagtgaatgacctctttagtcggaaatttggtgaagctattggtatgggttttcctgtgaaagttccctacaggaaaatcacaattaaccctggctgtgtggtggttgatggcatgcccccgggggtgtccttcaaagcccccagctacctggaaatcagctccatgagaaggatcttagactctgccgagtttatcaaattcacggtcattagaccatttccaggacttgtgattaataaccagctggttgatcagagtgagtcagaaggccccgtgatacaagaatcagctgaaccaagccagttggaagttccagccacagaaggtaaaaggacctcttccctcctagggtaaatcagcttctgtgtcagggatgctgtgtggtgtccatctgaaccccctgcatacgcgtagctaatgtgatctccccactttcacataagatggtggccctgccttcagggaatgtgggagccaggtgggagccttcccggatatttaagctagaagattctacagggagattctccttggatcaatatatgtctctcagtcaaagatgtaaaagcacttttgccttaaaaagaatgttctgtttctaaatagagtcaacgttgtcctcctcattggaattcactatgagtcagaatcattagactgacttttttttttccatagtaatagtattttgcagagtctcacagagctgcagatcttttgttcatcttgcagagttaacaagtctgatcctgttagtccagatttcttaaatttggccaagttataataggagcagtagcttgagacccgaagtcaggaaactttgacaatggatttttttttttaatccagagacttgtactggaatttgccttaccctgtcagctcatggacttaaggtttcatcccgctttatgagtgcttctgaatccaagtcattgttacctgaatttgcaaattaagttgtgatattcgtgactgttaaattcctgtaattagattaacctctttgcttgcttgtttgttttctctcctattttagcttaaagtatcagtggttgagaagagcttttcggacctgttactaccccaagctgtgtaatatacttgtataacagaaataccttctatacaaacctttttttctacttttagatagaaatgtctactttttcagcagttctgtgaattaaagagcagagtgactgtgggtctggaatggctggtgtacttgggaatgtactatcaggattttacagcaatgctgggaaatgacagggaaaatgacaggaatgaatctcaccagattttttatgtactcagcagagccttgagttacggtgtttattttccaatcaagtgaagatatctcctacttctcctactggaacatctcagcttctgcagtgaagaaaaattcctgtgatagttcagttctttagtttttctatttgaaaaaaaaaaatcatttaaatgatcctttgttcacggctctccttaatgactgagtgaacagttcctatctgtatatttgactaaaccttttcctaagctatctctcatggttcctatgtttttttatcataattaaaagcaaaaccatctggatcacctaacagtcagaggtcagtatctcagcgtgtgaattatagaggaaatacagagagaacctcttccacttttacttttcgtccaaataaaatgcatggtgtaccagaagttgaagatcgggttgaggattggggctagctcgatgacactaaggccccaacatcgcgggacctgctgtggcgcggattcttaggaacgctgttctagccggccccctctccaggggtcgccgtggccggcattatttcctagttcttcttgtaaccctgaggtgccagcgcggggagtgaggaggggtcagggggctaaggatgcaacctctgacgttctgcgccttcctaggagagtcttacatgtgttgagatttcacaagcaatgcgagttgtaaaataccagctctacaagaagctaggctctgtgacggcatagttttcagtagctttatcacaatattcacaatggagaattatatgacatggtagcagaaataggcccttttatgtgttgcttctattttacctcaaattgtagatatagggtaatcaataaaatccatccatgcctttcacacactaagt

SEQ ID NO: 4401 - protein, 923 aa, Homo sapiens
MVVTFLMSALESMCKELAKSKAEVACIAVYETDVFVVGTERGRAFVNTRKDFQKDFVKYCVEEEEKAAEMHKMKSTTQANRMSVDAVEIETLRKTVEDYFCFCYGKALGKSTVVPVPYEKMLRDQSAVVVQGLPEGVAFKHPENYDLATLKWILENKAGISFIIKRPFLEPKKHVGGRVMVTDADRSILSPGGSCGPIKVKTEPTEDSGISLEMAAVTVKEESEDPDYYQYNIQAGPSETDDVDEKQPLSKPLQGSHHSSEGNEGTEMEVPAEDDDYSPPSKRPKANELPQPPVPEPANAGKRKVREFNFEKWNARITDLRKQVEELFERKYAQAIKAKGPVTIPYPLFQSHVEDLYVEGLPEGIPFRRPSTYGIPRLERILLAKERIRFVIKKHELLNSTREDLQLDKPASGVKEEWYARITKLRKMVDQLFCKKFAEALGSTEAKAVPYQKFEAHPNDLYVEGLPENIPFRSPSWYGIPRLEKIIQVGNRIKFVIKRPELLTHSTTEVTQPRTNTPAQALGLTEAVKVPYPVFESNPEFLYVEGLPEGIPFRSPTWFGIPRLERIVRGSNKIKFVVKKPELVISYLPPGMASKINTKALQSPKRPRSPGSNSKVPEIEVTVEGPNNNNPQTSAVRTPTQTNGSNVPFKPRGREFSFEAWNAKITDLKQKVENLFNEKCGEALGLKQAVKVPFALFESFPEDFYVEGLPEGVPFRRPSTFGIPRLEKILRNKAKIKFIIKKPEMFETAIKESTSSKSPPRKINSSPNVNTTASGVEDLNIIQVTIPDDDNERLSKVEKARQLREQVNDLFSRKFGEAIGMGFPVKVPYRKITINPGCVVVDGMPPGVSFKAPSYLEISSMRRILDSAEFIKFTVIRPFPGLVINNQLVDQSESEGPVIQESAEPSQLEVPATEGKRTSSLLG

SEQ ID NO: 4402 - DNA, 3878 bp, Homo sapiens
aaaaaaaaaaaaaaaaaaaaaaaaaaaagaaaaaagaaaaaaaaaaggaggaggaggaggagggtgagagagaagctgggagagcagagaaaaggggccaccggtcgcccccccgcttccccgcacgcgctctccagccgcggccgcccgcctgccgcggtcaccccggcctctgcctctgtcccccagtgatcggatcaaggcgctgagcgaggccctgcctgcggggcggccatgcggcggtgacaggagcgcgaccgacacgcacgggcccctcgccccctctcgcctcccgtccgctcgccagctcccctcagccgaggctgctccgcggcggccgcagcccgcgcgcggcccacactcgcctccccgttgaagatgaggagtcctcggagagcaggatggtggtgacattcctcatgtcagctctcgagtccatgtgtaaagaactggccaagtccaaagccgaagtggcctgcattgcagtgtatgaaacagacgtgtttgtcgtcggaactgaaagaggacgtgcttttgtcaataccagaaaggattttcaaaaagattttgtaaaatattgtgttgaagaagaagaaaaagctgcagagatgcataaaatgaaatctacaacccaggcaaatcggatgagtgtagatgctgtagaaattgaaacactcagaaaaacagttgaggactatttctgcttttgctatgggaaagctttaggcaaatccacagtggtacctgtaccatatgagaagatgctgcgagaccagtcggctgtggtagtgcaggggcttccggaaggtgttgcctttaaacaccccgagaactatgatcttgcaaccctgaaatggattttggagaacaaagcagggatttcattcatcattaagagaccttttttagagccaaagaagcatgtaggtggtcgtgtgatggtaacagatgctgacaggtcaatactatctccaggtggaagttgtggccccatcaaagtgaaaactgaacccacagaagattctggcatttccctggaaatggcagctgtgacagtaaaggaagaatcagaagatcctgattattatcaatataacattcaagcaggcccttctgaaactgatgatgttgatgaaaaacagcccctatcgaagcctttgcaaggaagccaccattcttcagagggcaatgaaggcacagaaatggaagtaccagcagaagattctactcaacatgtcccttcagaaacaagtgaggaccctgaagttgaggtgactattgaagatgatgattattctccaccgtctaagagaccaaaggccaatgagctaccgcagccaccagtcccggaacccgccaatgctgggaagcggaaagtgagggagttcaacttcgagaaatggaatgctcgcatcactgatctacgtaaacaagttgaagaattgtttgaaaggaaatatgctcaagccataaaagccaaaggtccggtgacgatcccgtaccctcttttccagtctcatgttgaagatctttatgtagaaggacttcctgaaggaattccttttagaaggccatctacttacggaattcctcgcctggagaggatattacttgcaaaggaaaggattcgttttgtgattaagaaacatgagcttctgaattcaacacgtgaagatttacagcttgataagccagcttcaggagtaaaggaagaatggtatgccagaatcactaaattaagaaagatggtggatcagcttttctgcaaaaaatttgcggaagccttggggagcactgaagccaaggctgtaccgtaccaaaaatttgaggcacacccgaatgatctgtacgtggaaggactgccagaaaacattcctttccgaagtccctcatggtatggaatcccaaggctggaaaaaatcattcaagtgggcaatcgaattaaatttgttattaaaagaccagaacttctgactcacagtaccactgaagttactcagccaagaacgaatacaccagctcaagctcttggactcaccgaggcagtaaaagtaccatatcctgtgtttgaatcaaacccggagttcttgtatgtggaaggcttgccagaggggattcccttccgaagccctacctggtttggaattccacgacttgaaaggatcgtccgcgggagtaataaaatcaagttcgttgttaaaaaacctgaactagttatttcctacttgcctcctgggatggctagtaaaataaacactaaagctttgcagtcccccaaaagaccacgaagtcctgggagtaattcaaaggttcctgaaattgaggtcaccgtggaaggccctaataacaacaatcctcaaacctcagctgttcgaaccccgacccagactaacggttctaacgttcccttcaagccacgagggagagagttttcctttgaggcctggaatgccaaaatcacggacctaaaacagaaagttgaaaatctcttcaatgagaaatgtggggaagctcttggccttaaacaagctgtgaaggtgccgttcgcgttatttgagtctttcccggaagacttttatgtggaaggcttacctgagggtgtgccattccgaagaccatcgacttttggcattccgaggctggagaagatactcagaaacaaagccaaaattaagttcatcattaaaaagcccgaaatgtttgagacggcgattaaggagagcacctcctctaagagccctcccagaaaaataaattcatcacccaatgttaatactactgcatcaggtgttgaagaccttaacatcattcaggtgacaattccagatgatgataatgaaagactctcgaaagttgaaaaagctagacagctaagagaacaagtgaatgacctctttagtcggaaatttggtgaagctattggtatgggttttcctgtgaaagttccctacaggaaaatcacaattaaccctggctgtgtggtggttgatggcatgcccccgggggtgtccttcaaagcccccagctacctggaaatcagctccatgagaaggatcttagactctgccgagtttatcaaattcacggtcattagaccatttccaggacttgtgattaataaccagctggttgatcagagtgagtcagaaggccccgtgatacaagaatcagctgaaccaagccagttggaagttccagccacagaagaaataaaagagactgatggaagctctcagatcaagcaagaaccagaccccacgtggtagacctcttccctcctaggcaaaaccatctggatcacctaacagtcagaggtcagtatctcagcgtgtgaattatagaggaaatacagagagaacctcttccacttttacttttcgtccaaataaaatgcatggtgtaccagaagttgaagatcgggttgaggattggggctagctcgatgacactaaggccccaacatcgcgggacctgctgtggcgcggattcttaggaacgctgttctagccggccccctctccaggggtcgccgtggccggcattatttcctagttcttcttgtaaccctgaggtgccagcgcggggagtgaggaggggtcagggggctaaggatgcaacctctgacgttctgcgccttcctaggagagtcttacatgtgttgagatttcacaagcaatgcgagttgtaaaataccagctctacaagaagctaggctctgtgacggcatagttttcagtagctttatcacaatattcacaatggagaattatatgacatggtagcagaaataggcccttttatgtgttgcttctattttacctcaaattgtagatatagggtaatcaataaaatccatccatgcctttcacacactaagt

SEQ ID NO: 4403 - protein, 954 aa, Homo sapiens; identical to SEQ ID NO: 4249

SEQ ID NO: 4404 - DNA, 7167 bp, Homo sapiens
aaaaaaaaaaaaaaaaaaaaaaaaaaaagaaaaaagaaaaaaaaaaggaggaggaggaggagggtgagagagaagctgggagagcagagaaaaggggccaccggtcgcccccccgcttccccgcacgcgctctccagccgcggccgcccgcctgccgcggtcaccccggcctctgcctctgtcccccagtgatcggatcaaggcgctgagcgaggccctgcctgcggggcggccatgcggcggtgacaggagcgcgaccgacacgcacgggcccctcgccccctctcgcctcccgtccgctcgccagctcccctcagccgaggctgctccgcggcggccgcagcccgcgcgcggcccacactcgcctcccctcggcacccccggccccggagctgcctggaggcggccgcactcggtgtaaagaactggccaagtccaaagccgaagtggcctgcattgcagtgtatgaaacagacgtgtttgtcgtcggaactgaaagaggacgtgcttttgtcaataccagaaaggattttcaaaaagattttgtaaaatattgtgttgaagaagaagaaaaagctgcagagatgcataaaatgaaatctacaacccaggcaaatcggatgagtgtagatgctgtagaaattgaaacactcagaaaaacagttgaggactatttctgcttttgctatgggaaagctttaggcaaatccacagtggtacctgtaccatatgagaagatgctgcgagaccagtcggctgtggtagtgcaggggcttccggaaggtgttgcctttaaacaccccgagaactatgatcttgcaaccctgaaatggattttggagaacaaagcagggatttcattcatcattaagagaccttttttagagccaaagaagcatgtaggtggtcgtgtgatggtaacagatgctgacaggtcaatactatctccaggtggaagttgtggccccatcaaagtgaaaactgaacccacagaagattctggcatttccctggaaatggcagctgtgacagtaaaggaagaatcagaagatcctgattattatcaatataacattcaagcaggcccttctgaaactgatgatgttgatgaaaaacagcccctatcgaagcctttgcaaggaagccaccattcttcagagggcaatgaaggcacagaaatggaagtaccagcagaagattctactcaacatgtcccttcagaaacaagtgaggaccctgaagttgaggtgactattgaagatgatgattattctccaccgtctaagagaccaaaggccaatgagctaccgcagccaccagtcccggaacccgccaatgctgggaagcggaaagtgagggagttcaacttcgagaaatggaatgctcgcatcactgatctacgtaaacaagttgaagaattgtttgaaaggaaatatgctcaagccataaaagccaaaggtccggtgacgatcccgtaccctcttttccagtctcatgttgaagatctttatgtagaaggacttcctgaaggaattccttttagaaggccatctacttacggaattcctcgcctggagaggatattacttgcaaaggaaaggattcgttttgtgattaagaaacatgagcttctgaattcaacacgtgaagatttacagcttgataagccagcttcaggagtaaaggaagaatggtatgccagaatcactaaattaagaaagatggtggatcagcttttctgcaaaaaatttgcggaagccttggggagcactgaagccaaggctgtaccgtaccaaaaatttgaggcacacccgaatgatctgtacgtggaaggactgccagaaaacattcctttccgaagtccctcatggtatggaatcccaaggctggaaaaaatcattcaagtgggcaatcgaattaaatttgttattaaaagaccagaacttctgactcacagtaccactgaagttactcagccaagaacgaatacaccagctcaagctcttggactcaccgaggcagtaaaagtaccatatcctgtgtttgaatcaaacccggagttcttgtatgtggaaggcttgccagaggggattcccttccgaagccctacctggtttggaattccacgacttgaaaggatcgtccgcgggagtaataaaatcaagttcgttgttaaaaaacctgaactagttatttcctacttgcctcctgggatggctagtaaaataaacactaaagctttgcagtcccccaaaagaccacgaagtcctgggagtaattcaaaggttcctgaaattgaggtcaccgtggaaggccctaataacaacaatcctcaaacctcagctgttcgaaccccgacccagactaacggttctaacgttcccttcaagccacgagggagagagttttcctttgaggcctggaatgccaaaatcacggacctaaaacagaaagttgaaaatctcttcaatgagaaatgtggggaagctcttggccttaaacaagctgtgaaggtgccgttcgcgttatttgagtctttcccggaagacttttatgtggaaggcttacctgagggtgtgccattccgaagaccatcgacttttggcattccgaggctggagaagatactcagaaacaaagccaaaattaagttcatcattaaaaagcccgaaatgtttgagacggcgattaaggagagcacctcctctaagagccctcccagaaaaataaattcatcacccaatgttaatactactgcatcaggtgttgaagaccttaacatcattcaggtgacaattccagatgatgataatgaaagactctcgaaagttgaaaaagctagacagctaagagaacaagtgaatgacctctttagtcggaaatttggtgaagctattggtatgggttttcctgtgaaagttccctacaggaaaatcacaattaaccctggctgtgtggtggttgatggcatgcccccgggggtgtccttcaaagcccccagctacctggaaatcagctccatgagaaggatcttagactctgccgagtttatcaaattcacggtcattaggtaagtgagagtttcctgcttagtcacaggagcgaatctggagctcatgaggctgactcttctaaaatgcagccacaggtagtcatcgaatccggcttcctatgctgtgcaatcaacaaatcaaaataacttgtgtcatcattagaatgtcagatgtgcttctacgaactaagctgactcttttaattctttggcaaagggttggcaaactaggactgtttgccaaattcaggctgcctcctatttttagagtcttcctgaaacacagctacacccgtattatccatggctgctttcctgtcacagtgagtaagtagctgggactgagaaggcatggcctccaaagtctaaaatatttactctctagcactttgtagaaaaaccttagctaggcacagtggctaacgcctgtaatcccagcattttgggaggccaaggcaggcagatcacctgaggtcaggagttccagaccagcctggccaacatggtgaaatcccatctctacaaaaataaaacagttagctgggcatgatggcgggtgcctgtaatcccagctactcgggaggctgaggcaggatagtcgcttgaacccaggaggtggaggttgcaatgagccaagatcatgccactgcactccagcctggacgacagagtgagactccatcacaagaaaaaaagaactttgtcaacctctgtcttagggcgccttgtcacaggcttcgggtcagacggattcaaccttgcatcagccatttgttagccaggtcactctgttctttgtctgtaaatgagattgatcgttgttcccactgagagtgtcagctccttcccgtagagcaggcatgatgattgtactcacctctgacaccattgtgagtgccacattccttcccacgtccttgtcactgtaagagatgcccacctgagcaccaaccccaggttatcttcccctttgtcttccagccccccagaaacagctacgactcaacctacccaatcatttcatcatcagattgccactgtctctagttcaggtctcttgggactggcactcagaaatctcataataaatcctcttgaggcttctcatacactcgtcttcttccaatcttctttccctcaaaatctcatattttggttccacttcacccaccgtcattctccatatcactcccaggagttaggcaaaaagccccttccgttcttccgtatgttaaacttagaatcactctgttccctgctctgcgtttctattttttgtttttcctccatttactagtagcttaacactttctaacagtgttcttattattgatacgtatctatctcttccataagcttataaggtcacggataatacttctcattgtagtacgtaaatgacgtgggctagatatgagttgaataaacagttatacctgtaaattcttacagagtgaaaataaattgttatactttacaatttgtttctctctttagaccatttccaggacttgtgattaataaccgtgagtattttgtgaagtgttttgtttttgttttttcctggggtctgacgtgtgtgcgtgtgagtgtgtatacatgcttaacgtatatcacgttacttcacctatgtcagtaaccaggccaaatacttgttttagccctcagtaaaaacaccaggcacttcctagttgtaaaattattcaagcttcttaacttcctatcctcgatgcacttaatcataaaatggtaataatagcaccgattttgggggagtcgttccagtagatggaaagcatctggaacaggtgtcagcaagctcctgccgacgtgtatgcataaagttttattgaaaccaccatcgtgtccatttgtttatggcagaactgagagatggcagcagcaagtgtgtgcctgcaaaacctaaaatatttactaattggctctgcaagaaaagagtttgcatccccctaacctagaacagtgtctagcctctagtatgtgtttagcctacagtatgtgctcagcgaatacaatctatatttattactgcttttatgactgttataattactgtgcttggatttcgttacaaagtaagtcacaatgtgcctgcttctgttagtatttcagcacagtgcctggcacacatggggctctcaaatattgctgagcgagtgaacaaatgtcctttcaattccttaacgttgatgtcattttcaatagtattttgagccaaacttaattttgcgagtgtgttttgttttcttaactttattattaaaaatgtataaaagtgaggccaggcgtggtggctcacgcctgtaatcccagcagtttgggaggctgaggcaggcggatcagttgaggttgggagttggagaccagcccgtccaacatggtgaaagcctgtctctactaaaaatacaaaaatcagctgggtgtggtggcgcgtgcctgtaatcccagctactcaggaggctgaggcaggagagttgcttgaatcctagaggtggaggttgcagtgagctgagatcgtgccattgcactccagcctgggcaacaagagcaaaactctgtcccaataaataaataaataaaatgttctcttttgttcctgttcttgtgcggtagtgtggtatagagttttatggtaattactgtgaattagtgattctgagggacatatcagaactctgaggtttgtttccttctcatcttgagggaaacagcaaatgtatgttaaaatgcttttccaagggaacaacacatccttacattatttaaaccaatctgcttcattttcagagctggttgatcagagtgagtcagaaggccccgtgatacaagaatcagctgaaccaagccagttggaagttccagccacagaagaaataaaagagactgatggaagctctcagatcaagcaagaaccagaccccacgtggtagacctcttccctcctaggcttaaagtatcagtggttgagaagagcttttcggacctgttactaccccaagctgtgtaatatacttgtataacagaaataccttctatacaaacctttttttctacttttagatagaaatgtctactttttcagcagttctgtgaattaaagagcagagtgactgtgggtctggaatggctggtgtacttgggaatgtactatcaggattttacagcaatgctgggaaatgacagggaaaatgacaggaatgaatctcaccagattttttatgtactcagcagagccttgagttacggtgtttattttccaatcaagtgaagatatctcctacttctcctactggaacatctcagcttctgcagtgaagaaaaattcctgtgatagttcagttctttagtttttctatttgaaaaaaaaaaatcatttaaatgatcctttgttcacggctctccttaatgactgagtgaacagttcctatctgtatatttgactaaaccttttcctaagctatctctcatggttcctatgtttttttatcataattaaaagcaaaaccatctggatcacctaacagtcagaggtcagtatctcagcgtgtgaattatagaggaaatacagagagaacctcttccacttttacttttcgtccaaataaaatgcatggtgtaccagaagttgaagatcgggttgaggattggggctagctcgatgacactaaggccccaacatcgcgggacctgctgtggcgcggattcttaggaacgctgttctagccggccccctctccaggggtcgccgtggccggcattatttcctagttcttcttgtaaccctgaggtgccagcgcggggagtgaggaggggtcagggggctaaggatgcaacctctgacgttctgcgccttcctaggagagtcttacatgtgttgagatttcacaagcaatgcgagttgtaaaataccagctctacaagaagctaggctctgtgacggcatagttttcagtagctttatcacaatattcacaatggagaattatatgacatggtagcagaaataggcccttttatgtgttgcttctattttacctcaaattgtagatatagggtaatcaataaaatccatccatgcctttcacacactaagt

SEQ ID NO: 4405 - protein, 829 aa, Homo sapiens
MHKMKSTTQANRMSVDAVEIETLRKTVEDYFCFCYGKALGKSTVVPVPYEKMLRDQSAVVVQGLPEGVAFKHPENYDLATLKWILENKAGISFIIKRPFLEPKKHVGGRVMVTDADRSILSPGGSCGPIKVKTEPTEDSGISLEMAAVTVKEESEDPDYYQYNIQAGPSETDDVDEKQPLSKPLQGSHHSSEGNEGTEMEVPAEDSTQHVPSETSEDPEVEVTIEDDDYSPPSKRPKANELPQPPVPEPANAGKRKVREFNFEKWNARITDLRKQVEELFERKYAQAIKAKGPVTIPYPLFQSHVEDLYVEGLPEGIPFRRPSTYGIPRLERILLAKERIRFVIKKHELLNSTREDLQLDKPASGVKEEWYARITKLRKMVDQLFCKKFAEALGSTEAKAVPYQKFEAHPNDLYVEGLPENIPFRSPSWYGIPRLEKIIQVGNRIKFVIKRPELLTHSTTEVTQPRTNTPAQALGLTEAVKVPYPVFESNPEFLYVEGLPEGIPFRSPTWFGIPRLERIVRGSNKIKFVVKKPELVISYLPPGMASKINTKALQSPKRPRSPGSNSKVPEIEVTVEGPNNNNPQTSAVRTPTQTNGSNVPFKPRGREFSFEAWNAKITDLKQKVENLFNEKCGEALGLKQAVKVPFALFESFPEDFYVEGLPEGVPFRRPSTFGIPRLEKILRNKAKIKFIIKKPEMFETAIKESTSSKSPPRKINSSPNVNTTASGVEDLNIIQVTIPDDDNERLSKVEKARQLREQVNDLFSRKFGEAIGMGFPVKVPYRKITINPGCVVVDGMPPGVSFKAPSYLEISSMRRILDSAEFIKFTVIR

SEQ ID NO: 4406 - DNA, 4055 bp, Homo sapiens
aaaaaaaaaaaaaaaaaaaaaaaaaaaagaaaaaagaaaaaaaaaaggaggaggaggaggagggtgagagagaagctgggagagcagagaaaaggggccaccggtcgcccccccgcttccccgcacgcgctctccagccgcggccgcccgcctgccgcggtcaccccggcctctgcctctgtcccccagtgatcggatcaaggcgctgagcgaggccctgcctgcggggcggccatgcggcggtgacaggagcgcgaccgacacgcacgggcccctcgccccctctcgcctcccgtccgctcgccagctcccctcagccgaggctgctccgcggcggccgcagcccgcgcgcggcccacactcgcctcccctcggcacccccggccccggagctgcctggaggcggccgcactcggtgtaaagaactggccaagtccaaagccgaagtggcctgcattgcagtgtatgaaacagacgtgtttgtcgtcggaactgaaagaggacgtgcttttgtcaataccagaaaggattttcaaaaagattttgtaaaatattgtgttgaagaagaagaaaaagctgcagagatgcataaaatgaaatctacaacccaggcaaatcggatgagtgtagatgctgtagaaattgaaacactcagaaaaacagttgaggactatttctgcttttgctatgggaaagctttaggcaaatccacagtggtacctgtaccatatgagaagatgctgcgagaccagtcggctgtggtagtgcaggggcttccggaaggtgttgcctttaaacaccccgagaactatgatcttgcaaccctgaaatggattttggagaacaaagcagggatttcattcatcattaagagaccttttttagagccaaagaagcatgtaggtggtcgtgtgatggtaacagatgctgacaggtcaatactatctccaggtggaagttgtggccccatcaaagtgaaaactgaacccacagaagattctggcatttccctggaaatggcagctgtgacagtaaaggaagaatcagaagatcctgattattatcaatataacattcaaggaagccaccattcttcagagggcaatgaaggcacagaaatggaagtaccagcagaagatgatgattattctccaccgtctaagagaccaaaggccaatgagctaccgcagccaccagtcccggaacccgccaatgctgggaagcggaaagtgagggagttcaacttcgagaaatggaatgctcgcatcactgatctacgtaaacaagttgaagaattgtttgaaaggaaatatgctcaagccataaaagccaaaggtccggtgacgatcccgtaccctcttttccagtctcatgttgaagatctttatgtagaaggacttcctgaaggaattccttttagaaggccatctacttacggaattcctcgcctggagaggatattacttgcaaaggaaaggattcgttttgtgattaagaaacatgagcttctgaattcaacacgtgaagatttacagcttgataagccagcttcaggagtaaaggaagaatggtatgccagaatcactaaattaagaaagatggtggatcagcttttctgcaaaaaatttgcggaagccttggggagcactgaagccaaggctgtaccgtaccaaaaatttgaggcacacccgaatgatctgtacgtggaaggactgccagaaaacattcctttccgaagtccctcatggtatggaatcccaaggctggaaaaaatcattcaagtgggcaatcgaattaaatttgttattaaaagaccagaacttctgactcacagtaccactgaagttactcagccaagaacgaatacaccagctcaagctcttggactcaccgaggcagtaaaagtaccatatcctgtgtttgaatcaaacccggagttcttgtatgtggaaggcttgccagaggggattcccttccgaagccctacctggtttggaattccacgacttgaaaggatcgtccgcgggagtaataaaatcaagttcgttgttaaaaaacctgaactagttatttcctacttgcctcctgggatggctagtaaaataaacactaaagctttgcagtcccccaaaagaccacgaagtcctgggagtaattcaaaggttcctgaaattgaggtcaccgtggaaggccctaataacaacaatcctcaaacctcagctgttcgaaccccgacccagactaacggttctaacgttcccttcaagccacgagggagagagttttcctttgaggcctggaatgccaaaatcacggacctaaaacagaaagttgaaaatctcttcaatgagaaatgtggggaagctcttggccttaaacaagctgtgaaggtgccgttcgcgttatttgagtctttcccggaagacttttatgtggaaggcttacctgagggtgtgccattccgaagaccatcgacttttggcattccgaggctggagaagatactcagaaacaaagccaaaattaagttcatcattaaaaagcccgaaatgtttgagacggcgattaaggagagcacctcctctaagagccctcccagaaaaataaattcatcacccaatgttaatactactgcatcaggtgttgaagaccttaacatcattcaggtgacaattccagatgatgataatgaaagactctcgaaagttgaaaaagctagacagctaagagaacaagtgaatgacctctttagtcggaaatttggtgaagctattggtatgggttttcctgtgaaagttccctacaggaaaatcacaattaaccctggctgtgtggtggttgatggcatgcccccgggggtgtccttcaaagcccccagctacctggaaatcagctccatgagaaggatcttagactctgccgagtttatcaaattcacggtcattagaccatttccaggacttgtgattaataaccagctggttgatcagagtgagtcagaaggccccgtgatacaagaatcagctgaaccaagccagttggaagttccagccacagaagaaataaaagagactgatggaagctctcagatcaagcaagaaccagaccccacgtggtagacctcttccctcctaggcttaaagtatcagtggttgagaagagcttttcggacctgttactaccccaagctgtagccttgagttacggtgtttattttccaatcaagtgaagatatctcctacttctcctactggaacatctcagcttctgcagtgaagaaaaattcctgtgatagttcagttctttagtttttctatttgaaaaaaaaaaatcatttaaatgatcctttgttcacggctctccttaatgactgagtgaacagttcctatctgtatatttgactaaaccttttcctaagctatctctcatggttcctatgtttttttatcataattaaaagcaaaaccatctggatcacctaacagtcagaggtcagtatctcagcgtgtgaattatagaggaaatacagagagaacctcttccacttttacttttcgtccaaataaaatgcatggtgtaccagaagttgaagatcgggttgaggattggggctagctcgatgacactaaggccccaacatcgcgggacctgctgtggcgcggattcttaggaacgctgttctagccggccccctctccaggggtcgccgtggccggcattatttcctagttcttcttgtaaccctgaggtgccagcgcggggagtgaggaggggtcagggggctaaggatgcaacctctgacgttctgcgccttcctaggagagtcttacatgtgttgagatttcacaagcaatgcgagttgtaaaataccagctctacaagaagctaggctctgtgacggcatagttttcagtagctttatcacaatattcacaatggagaattatatgacatggtagcagaaataggcccttttatgtgttgcttctattttacctcaaattgtagatatagggtaatcaataaaatccatccatgcctttcacacactaagt

SEQ ID NO: 4407 - protein, 844 aa, Homo sapiens; identical to SEQ ID NO: 4247

SEQ ID NO: 4408 - DNA, 4354 bp, Homo sapiens
aaaaaaaaaaaaaaaaaaaaaaaaaaaagaaaaaagaaaaaaaaaaggaggaggaggaggagggtgagagagaagctgggagagcagagaaaaggggccaccggtcgcccccccgcttccccgcacgcgctctccagccgcggccgcccgcctgccgcggtcaccccggcctctgcctctgtcccccagtgatcggatcaaggcgctgagcgaggccctgcctgcggggcggccatgcggcggtgacaggagcgcgaccgacacgcacgggcccctcgccccctctcgcctcccgtccgctcgccagctcccctcagccgaggctgctccgcggcggccgcagcccgcgcgcggcccacactcgcctcccctcggcacccccggccccggagctgcctggaggcggccgcactcggggatcatggcccaagttgcaatgtccaccctccccgttgaagatgaggagtcctcggagagcaggatggtggtgacattcctcatgtcagctctcgagtccatgtgtaaagaactggccaagtccaaagccgaagtggcctgcattgcagtgtatgaaacagacgtgtttgtcgtcggaactgaaagaggacgtgcttttgtcaataccagaaaggattttcaaaaagattttgtaaaatattgtgttgaagaagaagaaaaagctgcagagatgcataaaatgaaatctacaacccaggcaaatcggatgagtgtagatgctgtagaaattgaaacactcagaaaaacagttgaggactatttctgcttttgctatgggaaagctttaggcaaatccacagtggtacctgtaccatatgagaagatgctgcgagaccagtcggctgtggtagtgcaggggcttccggaaggtgttgcctttaaacaccccgagaactatgatcttgcaaccctgaaatggattttggagaacaaagcagggatttcattcatcattaagagaccttttttagagccaaagaagcatgtaggtggtcgtgtgatggtaacagatgctgacaggtcaatactatctccaggtggaagttgtggccccatcaaagtgaaaactgaacccacagaagattctggcatttccctggaaatggcagctgtgacagtaaaggaagaatcagaagatcctgattattatcaatataacattcaagcaggcccttctgaaactgatgatgttgatgaaaaacagcccctatcgaagcctttgcaaggaagccaccattcttcagagggcaatgaaggcacagaaatggaagtaccagcagaagattctactcaacatgtcccttcagaaacaagtgaggaccctgaagttgaggtgactattgaagatgatgattattctccaccgtctaagagaccaaaggccaatgagctaccgcagccaccagtcccggaacccgccaatgctgggaagcggaaagtgagggagttcaacttcgagaaatggaatgctcgcatcactgatctacgtaaacaagttgaagaattgtttgaaaggaaatatgctcaagccataaaagccaaaggtccggtgacgatcccgtaccctcttttccagtctcatgttgaagatctttatgtagaaggacttcctgaaggaattccttttagaaggccatctacttacggaattcctcgcctggagaggatattacttgcaaaggaaaggattcgttttgtgattaagaaacatgagcttctgaattcaacacgtgaagatttacagcttgataagccagcttcaggagtaaaggaagaatggtatgccagaatcactaaattaagaaagatggtggatcagcttttctgcaaaaaatttgcggaagccttggggagcactgaagccaaggctgtaccgtaccaaaaatttgaggcacacccgaatgatctgtacgtggaaggactgccagaaaacattcctttccgaagtccctcatggtatggaatcccaaggctggaaaaaatcattcaagtgggcaatcgaattaaatttgttattaaaagaccagaacttctgactcacagtaccactgaagttactcagccaagaacgaatacaccagtcaaagaagattggaatgtcagaattaccaagctacggaagcaagtggaagagatttttaatttgaaatttgctcaagctcttggactcaccgaggcagtaaaagtaccatatcctgtgtttgaatcaaacccggagttcttgtatgtggaaggcttgccagaggggattcccttccgaagccctacctggtttggaattccacgacttgaaaggatcgtccgcgggagtaataaaatcaagttcgttgttaaaaaacctgaactagttatttcctacttgcctcctgggatggctagtaaaataaacactaaagctttgcagtcccccaaaagaccacgaagtcctgggagtaattcaaaggttcctgaaattgaggtcaccgtggaaggccctaataacaacaatcctcaaacctcagctgttcgaaccccgacccagactaacggttctaacgttcccttcaagccacgagggagagagttttcctttgaggcctggaatgccaaaatcacggacctaaaacagaaagttgaaaatctcttcaatgagaaatgtggggaagctcttggccttaaacaagctgtgaaggtgccgttcgcgttatttgagtctttcccggaagacttttatgtggaaggcttacctgagggtgtgccattccgaagaccatcgacttttggcattccgaggctggagaagatactcagaaacaaagccaaaattaagttcatcattaaaaagcccgaaatgtttgagacggcgattaaggagagcacctcctctaagagccctcccagaaaaataaattcatcacccaatgttaatactactgcatcaggtgttgaagaccttaacatcattcaggtgacaattccagatgatgataatgaaagactctcgaaagttgaaaaagctagacagctaagagaacaagtgaatgacctctttagtcggaaatttggtgaagctattggtatgggttttcctgtgaaagttccctacaggaaaatcacaattaaccctggctgtgtggtggttgatggcatgcccccgggggtgtccttcaaagcccccagctacctggaaatcagctccatgagaaggatcttagactctgccgagtttatcaaattcacggtcattagaccatttccaggacttgtgattaataaccagctggttgatcagagtgagtcagaaggccccgtgatacaagaatcagctgaaccaagccagttggaagttccagccacagaagaaataaaagagactgatggaagctctcagatcaagcaagaaccagaccccacgtggtagacctcttccctcctaggcttaaagtatcagtggttgagaagagcttttcggacctgttactaccccaagctgtagccttgagttacggtgtttattttccaatcaagtgaagatatctcctacttctcctactggaacatctcagcttctgcagtgaagaaaaattcctgtgatagttcagttctttagtttttctatttgaaaaaaaaaaatcatttaaatgatcctttgttcacggctctccttaatgactgagtgaacagttcctatctgtatatttgactaaaccttttcctaagctatctctcatggttcctatgtttttttatcataattaaaagcaaaaccatctggatcacctaacagtcagaggtcagtatctcagcgtgtgaattatagaggaaatacagagagaacctcttccacttttacttttcgtccaaataaaatgcatggtgtaccagaagttgaagatcgggttgaggattggggctagctcgatgacactaaggccccaacatcgcgggacctgctgtggcgcggattcttaggaacgctgttctagccggccccctctccaggggtcgccgtggccggcattatttcctagttcttcttgtaaccctgaggtgccagcgcggggagtgaggaggggtcagggggctaaggatgcaacctctgacgttctgcgccttcctaggagagtcttacatgtgttgagatttcacaagcaatgcgagttgtaaaataccagctctacaagaagctaggctctgtgacggcatagttttcagtagctttatcacaatattcacaatggagaattatatgacatggtagcagaaataggcccttttatgtgttgcttctattttacctcaaattgtagatatagggtaatcaataaaatccatccatgcctttcacacactaagt

SEQ ID NO: 4409 - protein, 998 aa, Homo sapiens; identical to SEQ ID NO: 468

SEQ ID NO: 4410 - DNA, 3840 bp, Homo sapiens
aaaaaaaaaaaaaaaaaaaaaaaaaaaagaaaaaagaaaaaaaaaaggaggaggaggaggagggtgagagagaagctgggagagcagagaaaaggggccaccggtcgcccccccgcttccccgcacgcgctctccagccgcggccgcccgcctgccgcggtcaccccggcctctgcctctgtcccccagtgatcggatcaaggcgctgagcgaggccctgcctgcggggcggccatgcggcggtgacaggagcgcgaccgacacgcacgggcccctcgccccctctcgcctcccgtccgctcgccagctcccctcagccgaggctgctccgcggcggccgcagcccgcgcgcggcccacactcgcctcccctcggcacccccggccccggagctgcctggaggcggccgcactcggggatcatggcccaagttgcaatgtccaccctccccgttgaagatgaggagtcctcggagagcaggatggtggtgacattcctcatgtcagctctcgagtccatgtgtaaagaactggccaagtccaaagccgaagtggcctgcattgcagtgtatgaaacagacgtgtttgtcgtcggaactgaaagaggacgtgcttttgtcaataccagaaaggattttcaaaaagattttgtaaaatattgtgttgaagaagaagaaaaagctgcagagatgcataaaatgaaatctacaacccaggcaaatcggatgagtgtagatgctgtagaaattgaaacactcagaaaaacagttgaggactatttctgcttttgctatgggaaagctttaggcaaatccacagtggtacctgtaccatatgagaagatgctgcgagaccagtcggctgtggtagtgcaggggcttccggaaggtgttgcctttaaacaccccgagaactatgatcttgcaaccctgaaatggattttggagaacaaagcagggatttcattcatcattaagagaccttttttagagccaaagaagcatgtaggtggtcgtgtgatggtaacagatgctgacaggtcaatactatctccaggtggaagttgtggccccatcaaagtgaaaactgaacccacagaagattctggcatttccctggaaatggcagctgtgacagtaaaggaagaatcagaagatcctgattattatcaatataacattcaaggaagccaccattcttcagagggcaatgaaggcacagaaatggaagtaccagcagaagatgatgattattctccaccgtctaagagaccaaaggccaatgagctaccgcagccaccagtcccggaacccgccaatgctgggaagcggaaagtgagggagttcaacttcgagaaatggaatgctcgcatcactgatctacgtaaacaagttgaagaattgtttgaaaggaaatatgctcaagccataaaagccaaaggtccggtgacgatcccgtaccctcttttccagtctcatgttgaagatctttatgtagaaggacttcctgaaggaattccttttagaaggccatctacttacggaattcctcgcctggagaggatattacttgcaaaggaaaggattcgttttgtgattaagaaacatgagcttctgaattcaacacgtgaagatttacagcttgataagccagcttcaggagtaaaggaagaatggtatgccagaatcactaaattaagaaagatggtggatcagcttttctgcaaaaaatttgcggaagccttggggagcactgaagccaaggctgtaccgtaccaaaaatttgaggcacacccgaatgatctgtacgtggaaggactgccagaaaacattcctttccgaagtccctcatggtatggaatcccaaggctggaaaaaatcattcaagtgggcaatcgaattaaatttgttattaaaagaccagaacttctgactcacagtaccactgaagttactcagccaagaacgaatacaccagtcaaagaagattggaatgtcagaattaccaagctacggaagcaagtggaagagatttttaatttgaaatttgctcaagctcttggactcaccgaggcagtaaaagtaccatatcctgtgtttgaatcaaacccggagttcttgaaaggatcgtccgcgggagtaataaaatcaagttcgttgttaaaaaacctgaactagttatttcctacttgcctcctgggatggctagtaaaataaacactaaagctttgcagtcccccaaaagaccacgaagtcctgggagtaattcaaaggttcctgaaattgaggtcaccgtggaaggccctaataacaacaatcctcaaacctcagctgttcgaaccccgacccagactaacggttctaacgttcccttcaagccacgagggagagagttttcctttgaggcctggaatgccaaaatcacggacctaaaacagaaagttgaaaatctcttcaatgagaaatgtggggaagctcttggccttaaacaagctgtgaaggtgccgttcgcgttatttgagtctttcccggaagacttttatgtggaaggcttacctgagggtgtgccattccgaagaccatcgacttttggcattccgaggctggagaagatactcagaaacaaagccaaaattaagttcatcattaaaaagcccgaaatgtttgagacggcgattaaggagagcacctcctctaagagccctcccagaaaaataaattcatcacccaatgttaatactactgcatcaggtgttgaagaccttaacatcattcaggtgacaattccagatgatgataatgaaagactctcgaaagttgaaaaagctagacagctaagagaacaagtgaatgacctctttagtcggaaatttggtgaagctattggtatgggttttcctgtgaaagttccctacaggaaaatcacaattaaccctggctgtgtggtggttgatggcatgcccccgggggtgtccttcaaagcccccagctacctggaaatcagctccatgagaaggatcttagactctgccgagtttatcaaattcacggtcattagaccatttccaggacttgtgattaataaccagctggttgatcagagtgagtcagaaggccccgtgatacaagaatcagctgaaccaagccagttggaagttccagccacagaagaaataaaagagactgatggaagctctcagatcaagcaagaaccagaccccacgtggtagacctcttccctcctaggcaaaaccatctggatcacctaacagtcagaggtcagtatctcagcgtgtgaattatagaggaaatacagagagaacctcttccacttttacttttcgtccaaataaaatgcatggtgtaccagaagttgaagatcgggttgaggattggggctagctcgatgacactaaggccccaacatcgcgggacctgctgtggcgcggattcttaggaacgctgttctagccggccccctctccaggggtcgccgtggccggcattatttcctagttcttcttgtaaccctgaggtgccagcgcggggagtgaggaggggtcagggggctaaggatgcaacctctgacgttctgcgccttcctaggagagtcttacatgtgttgagatttcacaagcaatgcgagttgtaaaataccagctctacaagaagctaggctctgtgacggcatagttttcagtagctttatcacaatattcacaatggagaattatatgacatggtagcagaaataggcccttttatgtgttgcttctattttacctcaaattgtagatatagggtaatcaataaaatccatccatgcctttcacacactaagt

SEQ ID NO: 4411 - protein, 584 aa, Homo sapiens; identical to SEQ ID NO: 4173

SEQ ID NO: 4412 - DNA, 3866 bp, Homo sapiens
aaaaaaaaaaaaaaaaaaaaaaaaaaaagaaaaaagaaaaaaaaaaggaggaggaggaggagggtgagagagaagctgggagagcagagaaaaggggccaccggtcgcccccccgcttccccgcacgcgctctccagccgcggccgcccgcctgccgcggtcaccccggcctctgcctctgtcccccagtgatcggatcaaggcgctgagcgaggccctgcctgcggggcggccatgcggcggtgacaggagcgcgaccgacacgcacgggcccctcgccccctctcgcctcccgtccgctcgccagctcccctcagccgaggctgctccgcggcggccgcagcccgcgcgcggcccacactcgcctcccctcggcacccccggccccggagctgcctggaggcggccgcactcggtgtaaagaactggccaagtccaaagccgaagtggcctgcattgcagtgtatgaaacagacgtgtttgtcgtcggaactgaaagaggacgtgcttttgtcaataccagaaaggattttcaaaaagattttgtaaaatattgtgttgaagaagaagaaaaagctgcagagatgcataaaatgaaatctacaacccaggcaaatcggatgagtgtagatgctgtagaaattgaaacactcagaaaaacagttgaggactatttctgcttttgctatgggaaagctttaggcaaatccacagtggtacctgtaccatatgagaagatgctgcgagaccagtcggctgtggtagtgcaggggcttccggaaggtgttgcctttaaacaccccgagaactatgatcttgcaaccctgaaatggattttggagaacaaagcagggatttcattcatcattaagagaccttttttagagccaaagaagcatgtaggtggtcgtgtgatggtaacagatgctgacaggtcaatactatctccaggtggaagttgtggccccatcaaagtgaaaactgaacccacagaagattctggcatttccctggaaatggcagctgtgacagtaaaggaagaatcagaagatcctgattattatcaatataacattcaaggaagccaccattcttcagagggcaatgaaggcacagaaatggaagtaccagcagaagattctactcaacatgtcccttcagaaacaagtgaggaccctgaagttgaggtgactattgaagatgatgattattctccaccgtctaagagaccaaaggccaatgagctaccgcagccaccagtcccggaacccgccaatgctgggaagcggaaagtgagggagttcaacttcgagaaatggaatgctcgcatcactgatctacgtaaacaagttgaagaattgtttgaaaggaaatatgctcaagccataaaagccaaaggtccggtgacgatcccgtaccctcttttccagtctcatgttgaagatctttatgtagaaggacttcctgaaggaattccttttagaaggccatctacttacggaattcctcgcctggagaggatattacttgcaaaggaaaggattcgttttgtgattaagaaacatgagcttctgaattcaacacgtgaagatttacagcttgataagccagcttcaggagtaaaggaagaatggtatgccagaatcactaaattaagaaagatggtggatcagcttttctgcaaaaaatttgcggaagccttggggagcactgaagccaaggctgtaccgtaccaaaaatttgaggcacacccgaatgatctgtacgtggaaggactgccagaaaacattcctttccgaagtccctcatggtatggaatcccaaggctggaaaaaatcattcaagtgggcaatcgaattaaatttgttattaaaagaccagaacttctgactcacagtaccactgaagttactcagccaagaacgaatacaccagtcaaagaagattggaatgtcagaattaccaagctacggaagcaagtggaagagatttttaatttgaaatttgctcaagctcttggactcaccgaggcagtaaaagtaccatatcctgtgtttgaatcaaacccggagttcttgtatgtggaaggcttgccagaggggattcccttccgaagccctacctggtttggaattccacgacttgaaaggatcgtccgcgggagtaataaaatcaagttcgttgttaaaaaacctgaactagttatttcctacttgcctcctgggatggctagtaaaataaacactaaagctttgcagtcccccaaaagaccacgaagtcctgggagtaattcaaaggttcctgaaattgaggtcaccgtggaaggccctaataacaacaatcctcaaacctcagctgttcgaaccccgacccagactaacggttctaacgttcccttcaagccacgagggagagagttttcctttgaggcctggaatgccaaaatcacggacctaaaacagaaagttgaaaatctcttcaatgagaaatgtggggaagctcttggccttaaacaagctgtgaaggtgccgttcgcgttatttgagtctttcccggaagacttttatgtggaaggcttacctgagggtgtgccattccgaagaccatcgacttttggcattccgaggctggagaagatactcagaaacaaagccaaaattaagttcatcattaaaaagcccgaaatgtttgagacggcgattaaggagagcacctcctctaagagccctcccagaaaaataaattcatcacccaatgttaatactactgcatcaggtgttgaagaccttaacatcattcaggtgacaattccagatgatgataatgaaagactctcgaaagttgaaaaagctagacagctaagagaacaagtgaatgacctctttagtcggaaatttggtgaagctattggtatgggttttcctgtgaaagttccctacaggaaaatcacaattaaccctggctgtgtggtggttgatggcatgcccccgggggtgtccttcaaagcccccagctacctggaaatcagctccatgagaaggatcttagactctgccgagtttatcaaattcacggtcattagaccatttccaggacttgtgattaataaccagctggttgatcagagtgagtcagaaggccccgtgatacaagaatcagctgaaccaagccagttggaagttccagccacagaagaaataaaagagactgatggaagctctcagatcaagcaagaaccagaccccacgtggtagacctcttccctcctaggcaaaaccatctggatcacctaacagtcagaggtcagtatctcagcgtgtgaattatagaggaaatacagagagaacctcttccacttttacttttcgtccaaataaaatgcatggtgtaccagaagttgaagatcgggttgaggattggggctagctcgatgacactaaggccccaacatcgcgggacctgctgtggcgcggattcttaggaacgctgttctagccggccccctctccaggggtcgccgtggccggcattatttcctagttcttcttgtaaccctgaggtgccagcgcggggagtgaggaggggtcagggggctaaggatgcaacctctgacgttctgcgccttcctaggagagtcttacatgtgttgagatttcacaagcaatgcgagttgtaaaataccagctctacaagaagctaggctctgtgacggcatagttttcagtagctttatcacaatattcacaatggagaattatatgacatggtagcagaaataggcccttttatgtgttgcttctattttacctcaaattgtagatatagggtaatcaataaaatccatccatgcctttcacacactaagt

SEQ ID NO: 4413 - protein, 889 aa, Homo sapiens; identical to SEQ ID NO: 4073

SEQ ID NO: 4414 - DNA, 5071 bp, Homo sapiens
aaaaaaaaaaaaaaaaaaaaaaaaaaaagaaaaaagaaaaaaaaaaggaggaggaggaggagggtgagagagaagctgggagagcagagaaaaggggccaccggtcgcccccccgcttccccgcacgcgctctccagccgcggccgcccgcctgccgcggtcaccccggcctctgcctctgtcccccagtgatcggatcaaggcgctgagcgaggccctgcctgcggggcggccatgcggcggtgacaggagcgcgaccgacacgcacgggcccctcgccccctctcgcctcccgtccgctcgccagctcccctcagccgaggctgctccgcggcggccgcagcccgcgcgcggcccacactcgcctccccgttgaagatgaggagtcctcggagagcaggatggtggtgacattcctcatgtcagctctcgagtccatgtgtaaagaactggccaagtccaaagccgaagtggcctgcattgcagtgtatgaaacagacgtgtttgtcgtcggaactgaaagaggacgtgcttttgtcaataccagaaaggattttcaaaaagattttgtaaaatattgtgttgaagaagaagaaaaagctgcagagatgcataaaatgaaatctacaacccaggcaaatcggatgagtgtagatgctgtagaaattgaaacactcagaaaaacagttgaggactatttctgcttttgctatgggaaagctttaggcaaatccacagtggtacctgtaccatatgagaagatgctgcgagaccagtcggctgtggtagtgcaggggcttccggaaggtgttgcctttaaacaccccgagaactatgatcttgcaaccctgaaatggattttggagaacaaagcagggatttcattcatcattaagagaccttttttagagccaaagaagcatgtaggtggtcgtgtgatggtaacagatgctgacaggtcaatactatctccaggtggaagttgtggccccatcaaagtgaaaactgaacccacagaagattctggcatttccctggaaatggcagctgtgacagtaaaggaagaatcagaagatcctgattattatcaatataacattcaaggaagccaccattcttcagagggcaatgaaggcacagaaatggaagtaccagcagaagatgatgattattctccaccgtctaagagaccaaaggccaatgagctaccgcagccaccagtcccggaacccgccaatgctgggaagcggaaagtgagggagttcaacttcgagaaatggaatgctcgcatcactgatctacgtaaacaagttgaagaattgtttgaaaggaaatatgctcaagccataaaagccaaaggtccggtgacgatcccgtaccctcttttccagtctcatgttgaagatctttatgtagaaggacttcctgaaggaattccttttagaaggccatctacttacggaattcctcgcctggagaggatattacttgcaaaggaaaggattcgttttgtgattaagaaacatgagcttctgaattcaacacgtgaagatttacagcttgataagccagcttcaggagtaaaggaagaatggtatgccagaatcactaaattaagaaagatggtggatcagcttttctgcaaaaaatttgcggaagccttggggagcactgaagccaaggctgtaccgtaccaaaaatttgaggcacacccgaatgatctgtacgtggaaggactgccagaaaacattcctttccgaagtccctcatggtatggaatcccaaggctggaaaaaatcattcaagtgggcaatcgaattaaatttgttattaaaagaccagaacttctgactcacagtaccactgaagttactcagccaagaacgaatacaccagtcaaagaagattggaatgtcagaattaccaagctacggaagcaagtggaagagatttttaatttgaaatttgctcaagctcttggactcaccgaggcagtaaaagtaccatatcctgtgtttgaatcaaacccggagttcttgtatgtggaaggcttgccagaggggattcccttccgaagccctacctggtttggaattccacgacttgaaaggatcgtccgcgggagtaataaaatcaagttcgttgttaaaaaacctgaactagttatttcctacttgcctcctgggatggctagtaaaataaacactaaagctttgcagtcccccaaaagaccacgaagtcctgggagtaattcaaaggttcctgaaattgaggtcaccgtggaaggccctaataacaacaatcctcaaacctcagctgttcgaaccccgacccagactaacggttctaacgttcccttcaagccacgagggagagagttttcctttgaggcctggaatgccaaaatcacggacctaaaacagaaagttgaaaatctcttcaatgagaaatgtggggaagctcttggccttaaacaagctgtgaaggtgccgttcgcgttatttgagtctttcccggaagacttttatgtggaaggcttacctgagggtgtgccattccgaagaccatcgacttttggcattccgaggctggagaagatactcagaaacaaagccaaaattaagttcatcattaaaaagcccgaaatgtttgagacggcgattaaggagagcacctcctctaagagccctcccagaaaaataaattcatcacccaatgttaatactactgcatcaggtgttgaagaccttaacatcattcaggtgacaattccagatgatgataatgaaagactctcgaaagttgaaaaagctagacagctaagagaacaagtgaatgacctctttagtcggaaatttggtgaagctattggtatgggttttcctgtgaaagttccctacaggaaaatcacaattaaccctggctgtgtggtggttgatggcatgcccccgggggtgtccttcaaagcccccagctacctggaaatcagctccatgagaaggatcttagactctgccgagtttatcaaattcacggtcattagaccatttccaggacttgtgattaataaccagctggttgatcagagtgagtcagaaggccccgtgatacaagaatcagctgaaccaagccagttggaagttccagccacagaagaaataaaagagactgatggaagctctcagatcaagcaagaaccagaccccacgtggtagacctcttccctcctagggtaaatcagcttctgtgtcagggatgctgtgtggtgtccatctgaaccccctgcatacgcgtagctaatgtgatctccccactttcacataagatggtggccctgccttcagggaatgtgggagccaggtgggagccttcccggatatttaagctagaagattctacagggagattctccttggatcaatatatgtctctcagtcaaagatgtaaaagcacttttgccttaaaaagaatgttctgtttctaaatagagtcaacgttgtcctcctcattggaattcactatgagtcagaatcattagactgacttttttttttccatagtaatagtattttgcagagtctcacagagctgcagatcttttgttcatcttgcagagttaacaagtctgatcctgttagtccagatttcttaaatttggccaagttataataggagcagtagcttgagacccgaagtcaggaaactttgacaatggatttttttttttaatccagagacttgtactggaatttgccttaccctgtcagctcatggacttaaggtttcatcccgctttatgagtgcttctgaatccaagtcattgttacctgaatttgcaaattaagttgtgatattcgtgactgttaaattcctgtaattagattaacctctttgcttgcttgtttgttttctctcctattttagcttaaagtatcagtggttgagaagagcttttcggacctgttactaccccaagctgtgtaatatacttgtataacagaaataccttctatacaaacctttttttctacttttagatagaaatgtctactttttcagcagttctgtgaattaaagagcagagtgactgtgggtctggaatggctggtgtacttgggaatgtactatcaggattttacagcaatgctgggaaatgacagggaaaatgacaggaatgaatctcaccagattttttatgtactcagcagagccttgagttacggtgtttattttccaatcaagtgaagatatctcctacttctcctactggaacatctcagcttctgcagtgaagaaaaattcctgtgatagttcagttctttagtttttctatttgaaaaaaaaaaatcatttaaatgatcctttgttcacggctctccttaatgactgagtgaacagttcctatctgtatatttgactaaaccttttcctaagctatctctcatggttcctatgtttttttatcataattaaaagcaaaaccatctggatcacctaacagtcagaggtcagtatctcagcgtgtgaattatagaggaaatacagagagaacctcttccacttttacttttcgtccaaataaaatgcatggtgtaccagaagttgaagatcgggttgaggattggggctagctcgatgacactaaggccccaacatcgcgggacctgctgtggcgcggattcttaggaacgctgttctagccggccccctctccaggggtcgccgtggccggcattatttcctagttcttcttgtaaccctgaggtgccagcgcggggagtgaggaggggtcagggggctaaggatgcaacctctgacgttctgcgccttcctaggagagtcttacatgtgttgagatttcacaagcaatgcgagttgtaaaataccagctctacaagaagctaggctctgtgacggcatagttttcagtagctttatcacaatattcacaatggagaattatatgacatggtagcagaaataggcccttttatgtgttgcttctattttacctcaaattgtagatatagggtaatcaataaaatccatccatgcctttcacacactaagt

SEQ ID NO: 4415 - protein, 937 aa, Homo sapiens [sequence omitted]

SEQ ID NO: 4416 - DNA, 7983 bp, Homo sapiens
aaaaaaaaaaaaaaaaaaaaaaaaaaaagaaaaaagaaaaaaaaaaggaggaggaggaggagggtgagagagaagctgggagagcagagaaaaggggccaccggtcgcccccccgcttccccgcacgcgctctccagccgcggccgcccgcctgccgcggtcaccccggcctctgcctctgtcccccagtgatcggatcaaggcgctgagcgaggccctgcctgcggggcggccatgcggcggtgacaggagcgcgaccgacacgcacgggcccctcgccccctctcgcctcccgtccgctcgccagctcccctcagccgaggctgctccgcggcggccgcagcccgcgcgcggcccacactcgcctcccctcggcacccccggccccggagctgcctggaggcggccgcactcggtgtaaagaactggccaagtccaaagccgaagtggcctgcattgcagtgtatgaaacagacgtgtttgtcgtcggaactgaaagaggacgtgcttttgtcaataccagaaaggattttcaaaaagattttgtaaaatattgtgttgaagaagaagaaaaagctgcagagatgcataaaatgaaatctacaacccaggcaaatcggatgagtgtagatgctgtagaaattgaaacactcagaaaaacagttgaggactatttctgcttttgctatgggaaagctttaggcaaatccacagtggtacctgtaccatatgagaagatgctgcgagaccagtcggctgtggtagtgcaggggcttccggaaggtgttgcctttaaacaccccgagaactatgatcttgcaaccctgaaatggattttggagaacaaagcagggatttcattcatcattaagagaccttttttagagccaaagaagcatgtaggtggtcgtgtgatggtaacagatgctgacaggtcaatactatctccaggtggaagttgtggccccatcaaagtgaaaactgaacccacagaagattctggcatttccctggaaatggcagctgtgacagtaaaggaagaatcagaagatcctgattattatcaatataacattcaaggaagccaccattcttcagagggcaatgaaggcacagaaatggaagtaccagcagaagattctactcaacatgtcccttcagaaacaagtgaggaccctgaagttgaggtgactattgaagatgatgattattctccaccgtctaagagaccaaaggccaatgagctaccgcagccaccagtcccggaacccgccaatgctgggaagcggaaagtgagggagttcaacttcgagaaatggaatgctcgcatcactgatctacgtaaacaagttgaagaattgtttgaaaggaaatatgctcaagccataaaagccaaaggtccggtgacgatcccgtaccctcttttccagtctcatgttgaagatctttatgtagaaggacttcctgaaggaattccttttagaaggccatctacttacggaattcctcgcctggagaggatattacttgcaaaggaaaggattcgttttgtgattaagaaacatgagcttctgaattcaacacgtgaagatttacagcttgataagccagcttcaggagtaaaggaagaatggtatgccagaatcactaaattaagaaagatggtggatcagcttttctgcaaaaaatttgcggaagccttggggagcactgaagccaaggctgtaccgtaccaaaaatttgaggcacacccgaatgatctgtacgtggaaggactgccagaaaacattcctttccgaagtccctcatggtatggaatcccaaggctggaaaaaatcattcaagtgggcaatcgaattaaatttgttattaaaagaccagaacttctgactcacagtaccactgaagttactcagccaagaacgaatacaccagtcaaagaagattggaatgtcagaattaccaagctacggaagcaagtggaagagatttttaatttgaaatttgcttagatttgttgacagcggtttcctggagtgctgtcttgagaacgattctgaggaggctcagcaagaaagagtgtttcagttgattgggtgtgtctgtcatggagaaggaactcaagctcttggactcaccgaggcagtaaaagtaccatatcctgtgtttgaatcaaacccggagttcttgtatgtggaaggcttgccagaggggattcccttccgaagccctacctggtttggaattccacgacttgaaaggatcgtccgcgggagtaataaaatcaagttcgttgttaaaaaacctgaactagttatttcctacttgcctcctgggatggctagtaaaataaacactaaagctttgcagtcccccaaaagaccacgaagtcctgggagtaattcaaaggttcctgaaattgaggtcaccgtggaaggccctaataacaacaatcctcaaacctcagctgttcgaaccccgacccagactaacggttctaacgttcccttcaagccacgagggagagagttttcctttgaggcctggaatgccaaaatcacggacctaaaacagaaagttgaaaatctcttcaatgagaaatgtggggaagctcttggccttaaacaagctgtgaaggtgccgttcgcgttatttgagtctttcccggaagacttttatgtggaaggcttacctgagggtgtgccattccgaagaccatcgacttttggcattccgaggctggagaagatactcagaaacaaagccaaaattaagttcatcattaaaaagcccgaaatgtttgagacggcgattaaggagagcacctcctctaagagccctcccagaaaaataaattcatcacccaatgttaatactactgcatcaggtgttgaagaccttaacatcattcaggtgacaattccagatgatgataatgaaagactctcgaaagttgaaaaagctagacagctaagagaacaagtgaatgacctctttagtcggaaatttggtgaagctattggtatgggttttcctgtgaaagttccctacaggaaaatcacaattaaccctggctgtgtggtggttgatggcatgcccccgggggtgtccttcaaagcccccagctacctggaaatcagctccatgagaaggatcttagactctgccgagtttatcaaattcacggtcattaggtaagtgagagtttcctgcttagtcacaggagcgaatctggagctcatgaggctgactcttctaaaatgcagccacaggtagtcatcgaatccggcttcctatgctgtgcaatcaacaaatcaaaataacttgtgtcatcattagaatgtcagatgtgcttctacgaactaagctgactcttttaattctttggcaaagggttggcaaactaggactgtttgccaaattcaggctgcctcctatttttagagtcttcctgaaacacagctacacccgtattatccatggctgctttcctgtcacagtgagtaagtagctgggactgagaaggcatggcctccaaagtctaaaatatttactctctagcactttgtagaaaaaccttagctaggcacagtggctaacgcctgtaatcccagcattttgggaggccaaggcaggcagatcacctgaggtcaggagttccagaccagcctggccaacatggtgaaatcccatctctacaaaaataaaacagttagctgggcatgatggcgggtgcctgtaatcccagctactcgggaggctgaggcaggatagtcgcttgaacccaggaggtggaggttgcaatgagccaagatcatgccactgcactccagcctggacgacagagtgagactccatcacaagaaaaaaagaactttgtcaacctctgtcttagggcgccttgtcacaggcttcgggtcagacggattcaaccttgcatcagccatttgttagccaggtcactctgttctttgtctgtaaatgagattgatcgttgttcccactgagagtgtcagctccttcccgtagagcaggcatgatgattgtactcacctctgacaccattgtgagtgccacattccttcccacgtccttgtcactgtaagagatgcccacctgagcaccaaccccaggttatcttcccctttgtcttccagccccccagaaacagctacgactcaacctacccaatcatttcatcatcagattgccactgtctctagttcaggtctcttgggactggcactcagaaatctcataataaatcctcttgaggcttctcatacactcgtcttcttccaatcttctttccctcaaaatctcatattttggttccacttcacccaccgtcattctccatatcactcccaggagttaggcaaaaagccccttccgttcttccgtatgttaaacttagaatcactctgttccctgctctgcgtttctattttttgtttttcctccatttactagtagcttaacactttctaacagtgttcttattattgatacgtatctatctcttccataagcttataaggtcacggataatacttctcattgtagtacgtaaatgacgtgggctagatatgagttgaataaacagttatacctgtaaattcttacagagtgaaaataaattgttatactttacaatttgtttctctctttagaccatttccaggacttgtgattaataaccgtgagtattttgtgaagtgttttgtttttgttttttcctggggtctgacgtgtgtgcgtgtgagtgtgtatacatgcttaacgtatatcacgttacttcacctatgtcagtaaccaggccaaatacttgttttagccctcagtaaaaacaccaggcacttcctagttgtaaaattattcaagcttcttaacttcctatcctcgatgcacttaatcataaaatggtaataatagcaccgattttgggggagtcgttccagtagatggaaagcatctggaacaggtgtcagcaagctcctgccgacgtgtatgcataaagttttattgaaaccaccatcgtgtccatttgtttatggcagaactgagagatggcagcagcaagtgtgtgcctgcaaaacctaaaatatttactaattggctctgcaagaaaagagtttgcatccccctaacctagaacagtgtctagcctctagtatgtgtttagcctacagtatgtgctcagcgaatacaatctatatttattactgcttttatgactgttataattactgtgcttggatttcgttacaaagtaagtcacaatgtgcctgcttctgttagtatttcagcacagtgcctggcacacatggggctctcaaatattgctgagcgagtgaacaaatgtcctttcaattccttaacgttgatgtcattttcaatagtattttgagccaaacttaattttgcgagtgtgttttgttttcttaactttattattaaaaatgtataaaagtgaggccaggcgtggtggctcacgcctgtaatcccagcagtttgggaggctgaggcaggcggatcagttgaggttgggagttggagaccagcccgtccaacatggtgaaagcctgtctctactaaaaatacaaaaatcagctgggtgtggtggcgcgtgcctgtaatcccagctactcaggaggctgaggcaggagagttgcttgaatcctagaggtggaggttgcagtgagctgagatcgtgccattgcactccagcctgggcaacaagagcaaaactctgtcccaataaataaataaataaaatgttctcttttgttcctgttcttgtgcggtagtgtggtatagagttttatggtaattactgtgaattagtgattctgagggacatatcagaactctgaggtttgtttccttctcatcttgagggaaacagcaaatgtatgttaaaatgcttttccaagggaacaacacatccttacattatttaaaccaatctgcttcattttcagagctggttgatcagagtgagtcagaaggccccgtgatacaagaatcagctgaaccaagccagttggaagttccagccacagaagaaataaaagagactgatggaagctctcagatcaagcaagaaccagaccccacgtggtagacctcttccctcctagggtaaatcagcttctgtgtcagggatgctgtgtggtgtccatctgaaccccctgcatacgcgtagctaatgtgatctccccactttcacataagatggtggccctgccttcagggaatgtgggagccaggtgggagccttcccggatatttaagctagaagattctacagggagattctccttggatcaatatatgtctctcagtcaaagatgtaaaagcacttttgccttaaaaagaatgttctgtttctaaatagagtcaacgttgtcctcctcattggaattcactatgagtcagaatcattagactgacttttttttttccatagtaatagtattttgcagagtctcacagagctgcagatcttttgttcatcttgcagagttaacaagtctgatcctgttagtccagatttcttaaatttggccaagttataataggagcagtagcttgagacccgaagtcaggaaactttgacaatggatttttttttttaatccagagacttgtactggaatttgccttaccctgtcagctcatggacttaaggtttcatcccgctttatgagtgcttctgaatccaagtcattgttacctgaatttgcaaattaagttgtgatattcgtgactgttaaattcctgtaattagattaacctctttgcttgcttgtttgttttctctcctattttagcttaaagtatcagtggttgagaagagcttttcggacctgttactaccccaagctgtgtaatatacttgtataacagaaataccttctatacaaacctttttttctacttttagatagaaatgtctactttttcagcagttctgtgaattaaagagcagagtgactgtgggtctggaatggctggtgtacttgggaatgtactatcaggattttacagcaatgctgggaaatgacagggaaaatgacaggaatgaatctcaccagattttttatgtactcagcagagccttgagttacggtgtttattttccaatcaagtgaagatatctcctacttctcctactggaacatctcagcttctgcagtgaagaaaaattcctgtgatagttcagttctttagtttttctatttgaaaaaaaaaaatcatttaaatgatcctttgttcacggctctccttaatgactgagtgaacagttcctatctgtatatttgactaaaccttttcctaagctatctctcatggttcctatgtttttttatcataattaaaagcaaaaccatctggatcacctaacagtcagaggtcagtatctcagcgtgtgaattatagaggaaatacagagagaacctcttccacttttacttttcgtccaaataaaatgcatggtgtaccagaagttgaagatcgggttgaggattggggctagctcgatgacactaaggccccaacatcgcgggacctgctgtggcgcggattcttaggaacgctgttctagccggccccctctccaggggtcgccgtggccggcattatttcctagttcttcttgtaaccctgaggtgccagcgcggggagtgaggaggggtcagggggctaaggatgcaacctctgacgttctgcgccttcctaggagagtcttacatgtgttgagatttcacaagcaatgcgagttgtaaaataccagctctacaagaagctaggctctgtgacggcatagttttcagtagctttatcacaatattcacaatggagaattatatgacatggtagcagaaataggcccttttatgtgttgcttctattttacctcaaattgtagatatagggtaatcaataaaatccatccatgcctttcacacactaagt

SEQ ID NO: 4417 - protein, 475 aa, Homo sapiens; identical to SEQ ID NO: 4139

SEQ ID NO: 4418 - DNA, 3900 bp, Homo sapiens
aaaaaaaaaaaaaaaaaaaaaaaaaaaagaaaaaagaaaaaaaaaaggaggaggaggaggagggtgagagagaagctgggagagcagagaaaaggggccaccggtcgcccccccgcttccccgcacgcgctctccagccgcggccgcccgcctgccgcggtcaccccggcctctgcctctgtcccccagtgatcggatcaaggcgctgagcgaggccctgcctgcggggcggccatgcggcggtgacaggagcgcgaccgacacgcacgggcccctcgccccctctcgcctcccgtccgctcgccagctcccctcagccgaggctgctccgcggcggccgcagcccgcgcgcggcccacactcgcctcccctcggcacccccggccccggagctgcctggaggcggccgcactcggggatcatggcccaagttgcaatgtccaccctccccgttgaagatgaggagtcctcggagagcaggatggtggtgacattcctcatgtcagctctcgagtccatgtgtaaagaactggccaagtccaaagccgaagtggcctgcattgcagtgtatgaaacagacgtgtttgtcgtcggaactgaaagaggacgtgcttttgtcaataccagaaaggattttcaaaaagattttgtaaaatattgtgttgaagaagaagaaaaagctgcagagatgcataaaatgaaatctacaacccaggcaaatcggatgagtgtagatgctgtagaaattgaaacactcagaaaaacagttgaggactatttctgcttttgctatgggaaagctttaggcaaatccacagtggtacctgtaccatatgagaagatgctgcgagaccagtcggctgtggtagtgcaggggcttccggaaggtgttgcctttaaacaccccgagaactatgatcttgcaaccctgaaatggattttggagaacaaagcagggatttcattcatcattaagagaccttttttagagccaaagaagcatgtaggtggtcgtgtgatggtaacagatgctgacaggtcaatactatctccaggtggaagttgtggccccatcaaagtgaaaactgaacccacagaagattctggcatttccctggaaatggcagctgtgacagtaaaggaagaatcagaagatcctgattattatcaatataacattcaagcaggcccttctgaaactgatgatgttgatgaaaaacagcccctatcgaagcctttgcaaggaagccaccattcttcagagggcaatgaaggcacagaaatggaagtaccagcagaagatgatgattattctccaccgtctaagagaccaaaggccaatgagctaccgcagccaccagtcccggaacccgccaatgctgggaagcggaaagtgagggagttcaacttcgagaaatggaatgctcgcatcactgatctacgtaaacaagttgaagaattgtttgaaaggaaatatgctcaagccataaaagccaaaggtccggtgacgatcccgtaccctcttttccagtctcatgttgaagatctttatgtagaaggacttcctgaaggaattccttttagaaggccatctacttacggaattcctcgcctggagaggatattacttgcaaaggaaaggattcgttttgtgattaagaaacatgagcttctgaattcaacacgtgaagatttacagcttgataagccagcttcaggagtaaaggaagaatggtatgccagaatcactaaattaagaaagatggtggatcagcttttctgcaaaaaatttgcggaagccttggggagcactgaagccaaggctgtaccgtaccaaaaatttgaggcacacccgaatgatctgtacgtggaaggactgccagaaaacattcctttccgaagtccctcatggtatggaatcccaaggctggaaaaaatcattcaagtgggcaatcgaattaaatttgttattaaaagaccagaacttctgactcacagtaccactgaagttactcagccaagaacgaatacaccagtcaaagaagattggaatgtcagaattaccaagctacggaagcaagtggaagagatttttaatttgaaatttgctcaagctcttggactcaccgaggcagtaaaagtaccatatcctgtgtttgaatcaaacccggagttcttgaaaggatcgtccgcgggagtaataaaatcaagttcgttgttaaaaaacctgaactagttatttcctacttgcctcctgggatggctagtaaaataaacactaaagctttgcagtcccccaaaagaccacgaagtcctgggagtaattcaaaggttcctgaaattgaggtcaccgtggaaggccctaataacaacaatcctcaaacctcagctgttcgaaccccgacccagactaacggttctaacgttcccttcaagccacgagggagagagttttcctttgaggcctggaatgccaaaatcacggacctaaaacagaaagttgaaaatctcttcaatgagaaatgtggggaagctcttggccttaaacaagctgtgaaggtgccgttcgcgttatttgagtctttcccggaagacttttatgtggaaggcttacctgagggtgtgccattccgaagaccatcgacttttggcattccgaggctggagaagatactcagaaacaaagccaaaattaagttcatcattaaaaagcccgaaatgtttgagacggcgattaaggagagcacctcctctaagagccctcccagaaaaataaattcatcacccaatgttaatactactgcatcaggtgttgaagaccttaacatcattcaggtgacaattccagatgatgataatgaaagactctcgaaagttgaaaaagctagacagctaagagaacaagtgaatgacctctttagtcggaaatttggtgaagctattggtatgggttttcctgtgaaagttccctacaggaaaatcacaattaaccctggctgtgtggtggttgatggcatgcccccgggggtgtccttcaaagcccccagctacctggaaatcagctccatgagaaggatcttagactctgccgagtttatcaaattcacggtcattagaccatttccaggacttgtgattaataaccagctggttgatcagagtgagtcagaaggccccgtgatacaagaatcagctgaaccaagccagttggaagttccagccacagaagaaataaaagagactgatggaagctctcagatcaagcaagaaccagaccccacgtggtagacctcttccctcctaggcaaaaccatctggatcacctaacagtcagaggtcagtatctcagcgtgtgaattatagaggaaatacagagagaacctcttccacttttacttttcgtccaaataaaatgcatggtgtaccagaagttgaagatcgggttgaggattggggctagctcgatgacactaaggccccaacatcgcgggacctgctgtggcgcggattcttaggaacgctgttctagccggccccctctccaggggtcgccgtggccggcattatttcctagttcttcttgtaaccctgaggtgccagcgcggggagtgaggaggggtcagggggctaaggatgcaacctctgacgttctgcgccttcctaggagagtcttacatgtgttgagatttcacaagcaatgcgagttgtaaaataccagctctacaagaagctaggctctgtgacggcatagttttcagtagctttatcacaatattcacaatggagaattatatgacatggtagcagaaataggcccttttatgtgttgcttctattttacctcaaattgtagatatagggtaatcaataaaatccatccatgcctttcacacactaagt

SEQ ID NO: 4419 - protein, 604 aa, Homo sapiens; identical to SEQ ID NO: 4117

SEQ ID NO: 4420 - DNA, 4151 bp, Homo sapiens
aaaaaaaaaaaaaaaaaaaaaaaaaaaagaaaaaagaaaaaaaaaaggaggaggaggaggagggtgagagagaagctgggagagcagagaaaaggggccaccggtcgcccccccgcttccccgcacgcgctctccagccgcggccgcccgcctgccgcggtcaccccggcctctgcctctgtcccccagtgatcggatcaaggcgctgagcgaggccctgcctgcggggcggccatgcggcggtgacaggagcgcgaccgacacgcacgggcccctcgccccctctcgcctcccgtccgctcgccagctcccctcagccgaggctgctccgcggcggccgcagcccgcgcgcggcccacactcgcctccccgttgaagatgaggagtcctcggagagcaggatggtggtgacattcctcatgtcagctctcgagtccatgtgtaaagaactggccaagtccaaagccgaagtggcctgcattgcagtgtatgaaacagacgtgtttgtcgtcggaactgaaagaggacgtgcttttgtcaataccagaaaggattttcaaaaagattttgtaaaatattgtgttgaagaagaagaaaaagctgcagagatgcataaaatgaaatctacaacccaggcaaatcggatgagtgtagatgctgtagaaattgaaacactcagaaaaacagttgaggactatttctgcttttgctatgggaaagctttaggcaaatccacagtggtacctgtaccatatgagaagatgctgcgagaccagtcggctgtggtagtgcaggggcttccggaaggtgttgcctttaaacaccccgagaactatgatcttgcaaccctgaaatggattttggagaacaaagcagggatttcattcatcattaagagaccttttttagagccaaagaagcatgtaggtggtcgtgtgatggtaacagatgctgacaggtcaatactatctccaggtggaagttgtggccccatcaaagtgaaaactgaacccacagaagattctggcatttccctggaaatggcagctgtgacagtaaaggaagaatcagaagatcctgattattatcaatataacattcaagcaggcccttctgaaactgatgatgttgatgaaaaacagcccctatcgaagcctttgcaaggaagccaccattcttcagagggcaatgaaggcacagaaatggaagtaccagcagaagattctactcaacatgtcccttcagaaacaagtgaggaccctgaagttgaggtgactattgaagatgatgattattctccaccgtctaagagaccaaaggccaatgagctaccgcagccaccagtcccggaacccgccaatgctgggaagcggaaagtgagggagttcaacttcgagaaatggaatgctcgcatcactgatctacgtaaacaagttgaagaattgtttgaaaggaaatatgctcaagccataaaagccaaaggtccggtgacgatcccgtaccctcttttccagtctcatgttgaagatctttatgtagaaggacttcctgaaggaattccttttagaaggccatctacttacggaattcctcgcctggagaggatattacttgcaaaggaaaggattcgttttgtgattaagaaacatgagcttctgaattcaacacgtgaagatttacagcttgataagccagcttcaggagtaaaggaagaatggtatgccagaatcactaaattaagaaagatggtggatcagcttttctgcaaaaaatttgcggaagccttggggagcactgaagccaaggctgtaccgtaccaaaaatttgaggcacacccgaatgatctgtacgtggaaggactgccagaaaacattcctttccgaagtccctcatggtatggaatcccaaggctggaaaaaatcattcaagtgggcaatcgaattaaatttgttattaaaagaccagaacttctgactcacagtaccactgaagttactcagccaagaacgaatacaccagtcaaagaagattggaatgtcagaattaccaagctacggaagcaagtggaagagatttttaatttgaaatttgctcaagctcttggactcaccgaggcagtaaaagtaccatatcctgtgtttgaatcaaacccggagttcttgaaaggatcgtccgcgggagtaataaaatcaagttcgttgttaaaaaacctgaactagttatttcctacttgcctcctgggatggctagtaaaataaacactaaagctttgcagtcccccaaaagaccacgaagtcctgggagtaattcaaaggttcctgaaattgaggtcaccgtggaaggccctaataacaacaatcctcaaacctcagctgttcgaaccccgacccagactaacggttctaacgttcccttcaagccacgagggagagagttttcctttgaggcctggaatgccaaaatcacggacctaaaacagaaagttgaaaatctcttcaatgagaaatgtggggaagctcttggccttaaacaagctgtgaaggtgccgttcgcgttatttgagtctttcccggaagacttttatgtggaaggcttacctgagggtgtgccattccgaagaccatcgacttttggcattccgaggctggagaagatactcagaaacaaagccaaaattaagttcatcattaaaaagcccgaaatgtttgagacggcgattaaggagagcacctcctctaagagccctcccagaaaaataaattcatcacccaatgttaatactactgcatcaggtgttgaagaccttaacatcattcaggtgacaattccagatgatgataatgaaagactctcgaaagttgaaaaagctagacagctaagagaacaagtgaatgacctctttagtcggaaatttggtgaagctattggtatgggttttcctgtgaaagttccctacaggaaaatcacaattaaccctggctgtgtggtggttgatggcatgcccccgggggtgtccttcaaagcccccagctacctggaaatcagctccatgagaaggatcttagactctgccgagtttatcaaattcacggtcattagaccatttccaggacttgtgattaataaccagctggttgatcagagtgagtcagaaggccccgtgatacaagaatcagctgaaccaagccagttggaagttccagccacagaagaaataaaagagactgatggaagctctcagatcaagcaagaaccagaccccacgtggtagacctcttccctcctaggagccttgagttacggtgtttattttccaatcaagtgaagatatctcctacttctcctactggaacatctcagcttctgcagtgaagaaaaattcctgtgatagttcagttctttagtttttctatttgaaaaaaaaaaatcatttaaatgatcctttgttcacggctctccttaatgactgagtgaacagttcctatctgtatatttgactaaaccttttcctaagctatctctcatggttcctatgtttttttatcataattaaaagcaaaaccatctggatcacctaacagtcagaggtcagtatctcagcgtgtgaattatagaggaaatacagagagaacctcttccacttttacttttcgtccaaataaaatgcatggtgtaccagaagttgaagatcgggttgaggattggggctagctcgatgacactaaggccccaacatcgcgggacctgctgtggcgcggattcttaggaacgctgttctagccggccccctctccaggggtcgccgtggccggcattatttcctagttcttcttgtaaccctgaggtgccagcgcggggagtgaggaggggtcagggggctaaggatgcaacctctgacgttctgcgccttcctaggagagtcttacatgtgttgagatttcacaagcaatgcgagttgtaaaataccagctctacaagaagctaggctctgtgacggcatagttttcagtagctttatcacaatattcacaatggagaattatatgacatggtagcagaaataggcccttttatgtgttgcttctattttacctcaaattgtagatatagggtaatcaataaaatccatccatgcctttcacacactaagt

SEQ ID NO: 4421 - protein, 605 aa, Homo sapiens; identical to SEQ ID NO: 4017

SEQ ID NO: 4422 - DNA, 4151 bp, Homo sapiens
aaaaaaaaaaaaaaaaaaaaaaaaaaaagaaaaaagaaaaaaaaaaggaggaggaggaggagggtgagagagaagctgggagagcagagaaaaggggccaccggtcgcccccccgcttccccgcacgcgctctccagccgcggccgcccgcctgccgcggtcaccccggcctctgcctctgtcccccagtgatcggatcaaggcgctgagcgaggccctgcctgcggggcggccatgcggcggtgacaggagcgcgaccgacacgcacgggcccctcgccccctctcgcctcccgtccgctcgccagctcccctcagccgaggctgctccgcggcggccgcagcccgcgcgcggcccacactcgcctccccgttgaagatgaggagtcctcggagagcaggatggtggtgacattcctcatgtcagctctcgagtccatgtgtaaagaactggccaagtccaaagccgaagtggcctgcattgcagtgtatgaaacagacgtgtttgtcgtcggaactgaaagaggacgtgcttttgtcaataccagaaaggattttcaaaaagattttgtaaaatattgtgttgaagaagaagaaaaagctgcagagatgcataaaatgaaatctacaacccaggcaaatcggatgagtgtagatgctgtagaaattgaaacactcagaaaaacagttgaggactatttctgcttttgctatgggaaagctttaggcaaatccacagtggtacctgtaccatatgagaagatgctgcgagaccagtcggctgtggtagtgcaggggcttccggaaggtgttgcctttaaacaccccgagaactatgatcttgcaaccctgaaatggattttggagaacaaagcagggatttcattcatcattaagagaccttttttagagccaaagaagcatgtaggtggtcgtgtgatggtaacagatgctgacaggtcaatactatctccaggtggaagttgtggccccatcaaagtgaaaactgaacccacagaagattctggcatttccctggaaatggcagctgtgacagtaaaggaagaatcagaagatcctgattattatcaatataacattcaaggaagccaccattcttcagagggcaatgaaggcacagaaatggaagtaccagcagaagatgatgattattctccaccgtctaagagaccaaaggccaatgagctaccgcagccaccagtcccggaacccgccaatgctgggaagcggaaagtgagggagttcaacttcgagaaatggaatgctcgcatcactgatctacgtaaacaagttgaagaattgtttgaaaggaaatatgctcaagccataaaagccaaaggtccggtgacgatcccgtaccctcttttccagtctcatgttgaagatctttatgtagaaggacttcctgaaggaattccttttagaaggccatctacttacggaattcctcgcctggagaggatattacttgcaaaggaaaggattcgttttgtgattaagaaacatgagcttctgaattcaacacgtgaagatttacagcttgataagccagcttcaggagtaaaggaagaatggtatgccagaatcactaaattaagaaagatggtggatcagcttttctgcaaaaaatttgcggaagccttggggagcactgaagccaaggctgtaccgtaccaaaaatttgaggcacacccgaatgatctgtacgtggaaggactgccagaaaacattcctttccgaagtccctcatggtatggaatcccaaggctggaaaaaatcattcaagtgggcaatcgaattaaatttgttattaaaagaccagaacttctgactcacagtaccactgaagttactcagccaagaacgaatacaccagtcaaagaagattggaatgtcagaattaccaagctacggaagcaagtggaagagatttttaatttgaaatttgctcaagctcttggactcaccgaggcagtaaaagtaccatatcctgtgtttgaatcaaacccggagttcttgtatgtggaaggcttgccagaggggattcccttccgaagccctacctggtttggaattccacgacttgaaaggatcgtccgcgggagtaataaaatcaagttcgttgttaaaaaacctgaactagttatttcctacttgcctcctgggatggctagtaaaataaacactaaagctttgcagtcccccaaaagaccacgaagtcctgggagtaattcaaaggttcctgaaattgaggtcaccgtggaaggccctaataacaacaatcctcaaacctcagctgttcgaaccccgacccagactaacggttctaacgttcccttcaagccacgagggagagagttttcctttgaggcctggaatgccaaaatcacggacctaaaacagaaagttgaaaatctcttcaatgagaaatgtggggaagctcttggccttaaacaagctgtgaaggtgccgttcgcgttatttgagtctttcccggaagacttttatgtggaaggcttacctgagggtgtgccattccgaagaccatcgacttttggcattccgaggctggagaagatactcagaaacaaagccaaaattaagttcatcattaaaaagcccgaaatgtttgagacggcgattaaggagagcacctcctctaagagccctcccagaaaaataaattcatcacccaatgttaatactactgcatcaggtgttgaagaccttaacatcattcaggtgacaattccagatgatgataatgaaagactctcgaaagttgaaaaagctagacagctaagagaacaagtgaatgacctctttagtcggaaatttggtgaagctattggtatgggttttcctgtgaaagttccctacaggaaaatcacaattaaccctggctgtgtggtggttgatggcatgcccccgggggtgtccttcaaagcccccagctacctggaaatcagctccatgagaaggatcttagactctgccgagtttatcaaattcacggtcattagaccatttccaggacttgtgattaataaccagctggttgatcagagtgagtcagaaggccccgtgatacaagaatcagctgaaccaagccagttggaagttccagccacagaagaaataaaagagactgatggaagctctcagatcaagcaagaaccagaccccacgtggtagacctcttccctcctaggcttaaagtatcagtggttgagaagagcttttcggacctgttactaccccaagctgtagccttgagttacggtgtttattttccaatcaagtgaagatatctcctacttctcctactggaacatctcagcttctgcagtgaagaaaaattcctgtgatagttcagttctttagtttttctatttgaaaaaaaaaaatcatttaaatgatcctttgttcacggctctccttaatgactgagtgaacagttcctatctgtatatttgactaaaccttttcctaagctatctctcatggttcctatgtttttttatcataattaaaagcaaaaccatctggatcacctaacagtcagaggtcagtatctcagcgtgtgaattatagaggaaatacagagagaacctcttccacttttacttttcgtccaaataaaatgcatggtgtaccagaagttgaagatcgggttgaggattggggctagctcgatgacactaaggccccaacatcgcgggacctgctgtggcgcggattcttaggaacgctgttctagccggccccctctccaggggtcgccgtggccggcattatttcctagttcttcttgtaaccctgaggtgccagcgcggggagtgaggaggggtcagggggctaaggatgcaacctctgacgttctgcgccttcctaggagagtcttacatgtgttgagatttcacaagcaatgcgagttgtaaaataccagctctacaagaagctaggctctgtgacggcatagttttcagtagctttatcacaatattcacaatggagaattatatgacatggtagcagaaataggcccttttatgtgttgcttctattttacctcaaattgtagatatagggtaatcaataaaatccatccatgcctttcacacactaagt

SEQ ID NO: 4423 - protein, 937 aa, Homo sapiens [sequence omitted]

SEQ ID NO: 4424 - DNA, 4013 bp, Homo sapiens
aaaaaaaaaaaaaaaaaaaaaaaaaaaagaaaaaagaaaaaaaaaaggaggaggaggaggagggtgagagagaagctgggagagcagagaaaaggggccaccggtcgcccccccgcttccccgcacgcgctctccagccgcggccgcccgcctgccgcggtcaccccggcctctgcctctgtcccccagtgatcggatcaaggcgctgagcgaggccctgcctgcggggcggccatgcggcggtgacaggagcgcgaccgacacgcacgggcccctcgccccctctcgcctcccgtccgctcgccagctcccctcagccgaggctgctccgcggcggccgcagcccgcgcgcggcccacactcgcctccccgttgaagatgaggagtcctcggagagcaggatggtggtgacattcctcatgtcagctctcgagtccatgtgtaaagaactggccaagtccaaagccgaagtggcctgcattgcagtgtatgaaacagacgtgtttgtcgtcggaactgaaagaggacgtgcttttgtcaataccagaaaggattttcaaaaagattttgtaaaatattgtgttgaagaagaagaaaaagctgcagagatgcataaaatgaaatctacaacccaggcaaatcggatgagtgtagatgctgtagaaattgaaacactcagaaaaacagttgaggactatttctgcttttgctatgggaaagctttaggcaaatccacagtggtacctgtaccatatgagaagatgctgcgagaccagtcggctgtggtagtgcaggggcttccggaaggtgttgcctttaaacaccccgagaactatgatcttgcaaccctgaaatggattttggagaacaaagcagggatttcattcatcattaagagaccttttttagagccaaagaagcatgtaggtggtcgtgtgatggtaacagatgctgacaggtcaatactatctccaggtggaagttgtggccccatcaaagtgaaaactgaacccacagaagattctggaagccaccattcttcagagggcaatgaaggcacagaaatggaagtaccagcagaagattctactcaacatgtcccttcagaaacaagtgaggaccctgaagttgaggtgactattgaagatgatgattattctccaccgtctaagagaccaaaggccaatgagctaccgcagccaccagtcccggaacccgccaatgctgggaagcggaaagtgagggagttcaacttcgagaaatggaatgctcgcatcactgatctacgtaaacaagttgaagaattgtttgaaaggaaatatgctcaagccataaaagccaaaggtccggtgacgatcccgtaccctcttttccagtctcatgttgaagatctttatgtagaaggacttcctgaaggaattccttttagaaggccatctacttacggaattcctcgcctggagaggatattacttgcaaaggaaaggattcgttttgtgattaagaaacatgagcttctgaattcaacacgtgaagatttacagcttgataagccagcttcaggagtaaaggaagaatggtatgccagaatcactaaattaagaaagatggtggatcagcttttctgcaaaaaatttgcggaagccttggggagcactgaagccaaggctgtaccgtaccaaaaatttgaggcacacccgaatgatctgtacgtggaaggactgccagaaaacattcctttccgaagtccctcatggtatggaatcccaaggctggaaaaaatcattcaagtgggcaatcgaattaaatttgttattaaaagaccagaacttctgactcacagtaccactgaagttactcagccaagaacgaatacaccagtcaaagaagattggaatgtcagaattaccaagctacggaagcaagtggaagagatttttaatttgaaatttgctcaagctcttggactcaccgaggcagtaaaagtaccatatcctgtgtttgaatcaaacccggagttcttgaaaggatcgtccgcgggagtaataaaatcaagttcgttgttaaaaaacctgaactagttatttcctacttgcctcctgggatggctagtaaaataaacactaaagctttgcagtcccccaaaagaccacgaagtcctgggagtaattcaaaggttcctgaaattgaggtcaccgtggaaggccctaataacaacaatcctcaaacctcagctgttcgaaccccgacccagactaacggttctaacgttcccttcaagccacgagggagagagttttcctttgaggcctggaatgccaaaatcacggacctaaaacagaaagttgaaaatctcttcaatgagaaatgtggggaagctcttggccttaaacaagctgtgaaggtgccgttcgcgttatttgagtctttcccggaagacttttatgtggaaggcttacctgagggtgtgccattccgaagaccatcgacttttggcattccgaggctggagaagatactcagaaacaaagccaaaattaagttcatcattaaaaagcccgaaatgtttgagacggcgattaaggagagcacctcctctaagagccctcccagaaaaataaattcatcacccaatgttaatactactgcatcaggtgttgaagaccttaacatcattcaggtgacaattccagatgatgataatgaaagactctcgaaagttgaaaaagctagacagctaagagaacaagtgaatgacctctttagtcggaaatttggtgaagctattggtatgggttttcctgtgaaagttccctacaggaaaatcacaattaaccctggctgtgtggtggttgatggcatgcccccgggggtgtccttcaaagcccccagctacctggaaatcagctccatgagaaggatcttagactctgccgagtttatcaaattcacggtcattagaccatttccaggacttgtgattaataaccagctggttgatcagagtgagtcagaaggccccgtgatacaagaatcagctgaaccaagccagttggaagttccagccacagaagaaataaaagagactgatggaagctctcagatcaagcaagaaccagaccccacgtggtagacctcttccctcctaggagccttgagttacggtgtttattttccaatcaagtgaagatatctcctacttctcctactggaacatctcagcttctgcagtgaagaaaaattcctgtgatagttcagttctttagtttttctatttgaaaaaaaaaaatcatttaaatgatcctttgttcacggctctccttaatgactgagtgaacagttcctatctgtatatttgactaaaccttttcctaagctatctctcatggttcctatgtttttttatcataattaaaagcaaaaccatctggatcacctaacagtcagaggtcagtatctcagcgtgtgaattatagaggaaatacagagagaacctcttccacttttacttttcgtccaaataaaatgcatggtgtaccagaagttgaagatcgggttgaggattggggctagctcgatgacactaaggccccaacatcgcgggacctgctgtggcgcggattcttaggaacgctgttctagccggccccctctccaggggtcgccgtggccggcattatttcctagttcttcttgtaaccctgaggtgccagcgcggggagtgaggaggggtcagggggctaaggatgcaacctctgacgttctgcgccttcctaggagagtcttacatgtgttgagatttcacaagcaatgcgagttgtaaaataccagctctacaagaagctaggctctgtgacggcatagttttcagtagctttatcacaatattcacaatggagaattatatgacatggtagcagaaataggcccttttatgtgttgcttctattttacctcaaattgtagatatagggtaatcaataaaatccatccatgcctttcacacactaagt

SEQ ID NO: 4425 - protein, 559 aa, Homo sapiens; identical to SEQ ID NO: 4121

SEQ ID NO: 4426 - DNA, 7859 bp, Homo sapiens
aaaaaaaaaaaaaaaaaaaaaaaaaaaagaaaaaagaaaaaaaaaaggaggaggaggaggagggtgagagagaagctgggagagcagagaaaaggggccaccggtcgcccccccgcttccccgcacgcgctctccagccgcggccgcccgcctgccgcggtcaccccggcctctgcctctgtcccccagtgatcggatcaaggcgctgagcgaggccctgcctgcggggcggccatgcggcggtgacaggagcgcgaccgacacgcacgggcccctcgccccctctcgcctcccgtccgctcgccagctcccctcagccgaggctgctccgcggcggccgcagcccgcgcgcggcccacactcgcctcccctcggcacccccggccccggagctgcctggaggcggccgcactcggtgtaaagaactggccaagtccaaagccgaagtggcctgcattgcagtgtatgaaacagacgtgtttgtcgtcggaactgaaagaggacgtgcttttgtcaataccagaaaggattttcaaaaagattttgtaaaatattgtgttgaagaagaagaaaaagctgcagagatgcataaaatgaaatctacaacccaggcaaatcggatgagtgtagatgctgtagaaattgaaacactcagaaaaacagttgaggactatttctgcttttgctatgggaaagctttaggcaaatccacagtggtacctgtaccatatgagaagatgctgcgagaccagtcggctgtggtagtgcaggggcttccggaaggtgttgcctttaaacaccccgagaactatgatcttgcaaccctgaaatggattttggagaacaaagcagggatttcattcatcattaagagaccttttttagagccaaagaagcatgtaggtggtcgtgtgatggtaacagatgctgacaggtcaatactatctccaggtggaagttgtggccccatcaaagtgaaaactgaacccacagaagattctggcatttccctggaaatggcagctgtgacagtaaaggaagaatcagaagatcctgattattatcaatataacattcaagcaggcccttctgaaactgatgatgttgatgaaaaacagcccctatcgaagcctttgcaaggaagccaccattcttcagagggcaatgaaggcacagaaatggaagtaccagcagaagattctactcaacatgtcccttcagaaacaagtgaggaccctgaagttgaggtgactattgaagatgatgattattctccaccgtctaagagaccaaaggccaatgagctaccgcagccaccagtcccggaacccgccaatgctgggaagcggaaagtgagggagttcaacttcgagaaatggaatgctcgcatcactgatctacgtaaacaagttgaagaattgtttgaaaggaaatatgctcaagccataaaagccaaaggtccggtgacgatcccgtaccctcttttccagtctcatgttgaagatctttatgtagaaggacttcctgaaggaattccttttagaaggccatctacttacggaattcctcgcctggagaggatattacttgcaaaggaaaggattcgttttgtgattaagaaacatgagcttctgaattcaacacgtgaagatttacagcttgataagccagcttcaggagtaaaggaagaatggtatgccagaatcactaaattaagaaagatggtggatcagcttttctgcaaaaaatttgcggaagccttggggagcactgaagccaaggctgtaccgtaccaaaaatttgaggcacacccgaatgatctgtacgtggaaggactgccagaaaacattcctttccgaagtccctcatggtatggaatcccaaggctggaaaaaatcattcaagtgggcaatcgaattaaatttgttattaaaagaccagaacttctgactcacagtaccactgaagttactcagccaagaacgaatacaccagctcaagctcttggactcaccgaggcagtaaaagtaccatatcctgtgtttgaatcaaacccggagttcttgtatgtggaaggcttgccagaggggattcccttccgaagccctacctggtttggaattccacgacttgaaaggatcgtccgcgggagtaataaaatcaagttcgttgttaaaaaacctgaactagttatttcctacttgcctcctgggatggctagtaaaataaacactaaagctttgcagtcccccaaaagaccacgaagtcctgggagtaattcaaaggttcctgaaattgaggtcaccgtggaaggccctaataacaacaatcctcaaacctcagctgttcgaaccccgacccagactaacggttctaacgttcccttcaagccacgagggagagagttttcctttgaggcctggaatgccaaaatcacggacctaaaacagaaagttgaaaatctcttcaatgagaaatgtggggaagctcttggccttaaacaagctgtgaaggtgccgttcgcgttatttgagtctttcccggaagacttttatgtggaaggcttacctgagggtgtgccattccgaagaccatcgacttttggcattccgaggctggagaagatactcagaaacaaagccaaaattaagttcatcattaaaaagcccgaaatgtttgagacggcgattaaggagagcacctcctctaagagccctcccagaaaaataaattcatcacccaatgttaatactactgcatcaggtgttgaagaccttaacatcattcaggtgacaattccagatgatgataatgaaagactctcgaaagttgaaaaagctagacagctaagagaacaagtgaatgacctctttagtcggaaatttggtgaagctattggtatgggttttcctgtgaaagttccctacaggaaaatcacaattaaccctggctgtgtggtggttgatggcatgcccccgggggtgtccttcaaagcccccagctacctggaaatcagctccatgagaaggatcttagactctgccgagtttatcaaattcacggtcattaggtaagtgagagtttcctgcttagtcacaggagcgaatctggagctcatgaggctgactcttctaaaatgcagccacaggtagtcatcgaatccggcttcctatgctgtgcaatcaacaaatcaaaataacttgtgtcatcattagaatgtcagatgtgcttctacgaactaagctgactcttttaattctttggcaaagggttggcaaactaggactgtttgccaaattcaggctgcctcctatttttagagtcttcctgaaacacagctacacccgtattatccatggctgctttcctgtcacagtgagtaagtagctgggactgagaaggcatggcctccaaagtctaaaatatttactctctagcactttgtagaaaaaccttagctaggcacagtggctaacgcctgtaatcccagcattttgggaggccaaggcaggcagatcacctgaggtcaggagttccagaccagcctggccaacatggtgaaatcccatctctacaaaaataaaacagttagctgggcatgatggcgggtgcctgtaatcccagctactcgggaggctgaggcaggatagtcgcttgaacccaggaggtggaggttgcaatgagccaagatcatgccactgcactccagcctggacgacagagtgagactccatcacaagaaaaaaagaactttgtcaacctctgtcttagggcgccttgtcacaggcttcgggtcagacggattcaaccttgcatcagccatttgttagccaggtcactctgttctttgtctgtaaatgagattgatcgttgttcccactgagagtgtcagctccttcccgtagagcaggcatgatgattgtactcacctctgacaccattgtgagtgccacattccttcccacgtccttgtcactgtaagagatgcccacctgagcaccaaccccaggttatcttcccctttgtcttccagccccccagaaacagctacgactcaacctacccaatcatttcatcatcagattgccactgtctctagttcaggtctcttgggactggcactcagaaatctcataataaatcctcttgaggcttctcatacactcgtcttcttccaatcttctttccctcaaaatctcatattttggttccacttcacccaccgtcattctccatatcactcccaggagttaggcaaaaagccccttccgttcttccgtatgttaaacttagaatcactctgttccctgctctgcgtttctattttttgtttttcctccatttactagtagcttaacactttctaacagtgttcttattattgatacgtatctatctcttccataagcttataaggtcacggataatacttctcattgtagtacgtaaatgacgtgggctagatatgagttgaataaacagttatacctgtaaattcttacagagtgaaaataaattgttatactttacaatttgtttctctctttagaccatttccaggacttgtgattaataaccgtgagtattttgtgaagtgttttgtttttgttttttcctggggtctgacgtgtgtgcgtgtgagtgtgtatacatgcttaacgtatatcacgttacttcacctatgtcagtaaccaggccaaatacttgttttagccctcagtaaaaacaccaggcacttcctagttgtaaaattattcaagcttcttaacttcctatcctcgatgcacttaatcataaaatggtaataatagcaccgattttgggggagtcgttccagtagatggaaagcatctggaacaggtgtcagcaagctcctgccgacgtgtatgcataaagttttattgaaaccaccatcgtgtccatttgtttatggcagaactgagagatggcagcagcaagtgtgtgcctgcaaaacctaaaatatttactaattggctctgcaagaaaagagtttgcatccccctaacctagaacagtgtctagcctctagtatgtgtttagcctacagtatgtgctcagcgaatacaatctatatttattactgcttttatgactgttataattactgtgcttggatttcgttacaaagtaagtcacaatgtgcctgcttctgttagtatttcagcacagtgcctggcacacatggggctctcaaatattgctgagcgagtgaacaaatgtcctttcaattccttaacgttgatgtcattttcaatagtattttgagccaaacttaattttgcgagtgtgttttgttttcttaactttattattaaaaatgtataaaagtgaggccaggcgtggtggctcacgcctgtaatcccagcagtttgggaggctgaggcaggcggatcagttgaggttgggagttggagaccagcccgtccaacatggtgaaagcctgtctctactaaaaatacaaaaatcagctgggtgtggtggcgcgtgcctgtaatcccagctactcaggaggctgaggcaggagagttgcttgaatcctagaggtggaggttgcagtgagctgagatcgtgccattgcactccagcctgggcaacaagagcaaaactctgtcccaataaataaataaataaaatgttctcttttgttcctgttcttgtgcggtagtgtggtatagagttttatggtaattactgtgaattagtgattctgagggacatatcagaactctgaggtttgtttccttctcatcttgagggaaacagcaaatgtatgttaaaatgcttttccaagggaacaacacatccttacattatttaaaccaatctgcttcattttcagagctggttgatcagagtgagtcagaaggccccgtgatacaagaatcagctgaaccaagccagttggaagttccagccacagaagaaataaaagagactgatggaagctctcagatcaagcaagaaccagaccccacgtggtagacctcttccctcctagggtaaatcagcttctgtgtcagggatgctgtgtggtgtccatctgaaccccctgcatacgcgtagctaatgtgatctccccactttcacataagatggtggccctgccttcagggaatgtgggagccaggtgggagccttcccggatatttaagctagaagattctacagggagattctccttggatcaatatatgtctctcagtcaaagatgtaaaagcacttttgccttaaaaagaatgttctgtttctaaatagagtcaacgttgtcctcctcattggaattcactatgagtcagaatcattagactgacttttttttttccatagtaatagtattttgcagagtctcacagagctgcagatcttttgttcatcttgcagagttaacaagtctgatcctgttagtccagatttcttaaatttggccaagttataataggagcagtagcttgagacccgaagtcaggaaactttgacaatggatttttttttttaatccagagacttgtactggaatttgccttaccctgtcagctcatggacttaaggtttcatcccgctttatgagtgcttctgaatccaagtcattgttacctgaatttgcaaattaagttgtgatattcgtgactgttaaattcctgtaattagattaacctctttgcttgcttgtttgttttctctcctattttagcttaaagtatcagtggttgagaagagcttttcggacctgttactaccccaagctgtgtaatatacttgtataacagaaataccttctatacaaacctttttttctacttttagatagaaatgtctactttttcagcagttctgtgaattaaagagcagagtgactgtgggtctggaatggctggtgtacttgggaatgtactatcaggattttacagcaatgctgggaaatgacagggaaaatgacaggaatgaatctcaccagattttttatgtactcagcagagccttgagttacggtgtttattttccaatcaagtgaagatatctcctacttctcctactggaacatctcagcttctgcagtgaagaaaaattcctgtgatagttcagttctttagtttttctatttgaaaaaaaaaaatcatttaaatgatcctttgttcacggctctccttaatgactgagtgaacagttcctatctgtatatttgactaaaccttttcctaagctatctctcatggttcctatgtttttttatcataattaaaagcaaaaccatctggatcacctaacagtcagaggtcagtatctcagcgtgtgaattatagaggaaatacagagagaacctcttccacttttacttttcgtccaaataaaatgcatggtgtaccagaagttgaagatcgggttgaggattggggctagctcgatgacactaaggccccaacatcgcgggacctgctgtggcgcggattcttaggaacgctgttctagccggccccctctccaggggtcgccgtggccggcattatttcctagttcttcttgtaaccctgaggtgccagcgcggggagtgaggaggggtcagggggctaaggatgcaacctctgacgttctgcgccttcctaggagagtcttacatgtgttgagatttcacaagcaatgcgagttgtaaaataccagctctacaagaagctaggctctgtgacggcatagttttcagtagctttatcacaatattcacaatggagaattatatgacatggtagcagaaataggcccttttatgtgttgcttctattttacctcaaattgtagatatagggtaatcaataaaatccatccatgcctttcacacactaagt

SEQ ID NO: 4427 - protein, 829 aa, Homo sapiens; identical to SEQ ID NO: 4405

SEQ ID NO: 4428 - DNA, 5084 bp, Homo sapiens
aaaaaaaaaaaaaaaaaaaaaaaaaaaagaaaaaagaaaaaaaaaaggaggaggaggaggagggtgagagagaagctgggagagcagagaaaaggggccaccggtcgcccccccgcttccccgcacgcgctctccagccgcggccgcccgcctgccgcggtcaccccggcctctgcctctgtcccccagtgatcggatcaaggcgctgagcgaggccctgcctgcggggcggccatgcggcggtgacaggagcgcgaccgacacgcacgggcccctcgccccctctcgcctcccgtccgctcgccagctcccctcagccgaggctgctccgcggcggccgcagcccgcgcgcggcccacactcgcctcccctcggcacccccggccccggagctgcctggaggcggccgcactcggggatcatggcccaagttgcaatgtccaccctccccgttgaagatgaggagtcctcggagagcaggatggtggtgacattcctcatgtcagctctcgagtccatgtgtaaagaactggccaagtccaaagccgaagtggcctgcattgcagtgtatgaaacagacgtgtttgtcgtcggaactgaaagaggacgtgcttttgtcaataccagaaaggattttcaaaaagattttgtaaaatattgtgttgaagaagaagaaaaagctgcagagatgcataaaatgaaatctacaacccaggcaaatcggatgagtgtagatgctgtagaaattgaaacactcagaaaaacagttgaggactatttctgcttttgctatgggaaagctttaggcaaatccacagtggtacctgtaccatatgagaagatgctgcgagaccagtcggctgtggtagtgcaggggcttccggaaggtgttgcctttaaacaccccgagaactatgatcttgcaaccctgaaatggattttggagaacaaagcagggatttcattcatcattaagagaccttttttagagccaaagaagcatgtaggtggtcgtgtgatggtaacagatgctgacaggtcaatactatctccaggtggaagttgtggccccatcaaagtgaaaactgaacccacagaagattctggcatttccctggaaatggcagctgtgacagtaaaggaagaatcagaagatcctgattattatcaatataacattcaaggaagccaccattcttcagagggcaatgaaggcacagaaatggaagtaccagcagaagatgatgattattctccaccgtctaagagaccaaaggccaatgagctaccgcagccaccagtcccggaacccgccaatgctgggaagcggaaagtgagggagttcaacttcgagaaatggaatgctcgcatcactgatctacgtaaacaagttgaagaattgtttgaaaggaaatatgctcaagccataaaagccaaaggtccggtgacgatcccgtaccctcttttccagtctcatgttgaagatctttatgtagaaggacttcctgaaggaattccttttagaaggccatctacttacggaattcctcgcctggagaggatattacttgcaaaggaaaggattcgttttgtgattaagaaacatgagcttctgaattcaacacgtgaagatttacagcttgataagccagcttcaggagtaaaggaagaatggtatgccagaatcactaaattaagaaagatggtggatcagcttttctgcaaaaaatttgcggaagccttggggagcactgaagccaaggctgtaccgtaccaaaaatttgaggcacacccgaatgatctgtacgtggaaggactgccagaaaacattcctttccgaagtccctcatggtatggaatcccaaggctggaaaaaatcattcaagtgggcaatcgaattaaatttgttattaaaagaccagaacttctgactcacagtaccactgaagttactcagccaagaacgaatacaccagtcaaagaagattggaatgtcagaattaccaagctacggaagcaagtggaagagatttttaatttgaaatttgctcaagctcttggactcaccgaggcagtaaaagtaccatatcctgtgtttgaatcaaacccggagttcttgaaaggatcgtccgcgggagtaataaaatcaagttcgttgttaaaaaacctgaactagttatttcctacttgcctcctgggatggctagtaaaataaacactaaagctttgcagtcccccaaaagaccacgaagtcctgggagtaattcaaaggttcctgaaattgaggtcaccgtggaaggccctaataacaacaatcctcaaacctcagctgttcgaaccccgacccagactaacggttctaacgttcccttcaagccacgagggagagagttttcctttgaggcctggaatgccaaaatcacggacctaaaacagaaagttgaaaatctcttcaatgagaaatgtggggaagctcttggccttaaacaagctgtgaaggtgccgttcgcgttatttgagtctttcccggaagacttttatgtggaaggcttacctgagggtgtgccattccgaagaccatcgacttttggcattccgaggctggagaagatactcagaaacaaagccaaaattaagttcatcattaaaaagcccgaaatgtttgagacggcgattaaggagagcacctcctctaagagccctcccagaaaaataaattcatcacccaatgttaatactactgcatcaggtgttgaagaccttaacatcattcaggtgacaattccagatgatgataatgaaagactctcgaaagttgaaaaagctagacagctaagagaacaagtgaatgacctctttagtcggaaatttggtgaagctattggtatgggttttcctgtgaaagttccctacaggaaaatcacaattaaccctggctgtgtggtggttgatggcatgcccccgggggtgtccttcaaagcccccagctacctggaaatcagctccatgagaaggatcttagactctgccgagtttatcaaattcacggtcattagaccatttccaggacttgtgattaataaccagctggttgatcagagtgagtcagaaggccccgtgatacaagaatcagctgaaccaagccagttggaagttccagccacagaagaaataaaagagactgatggaagctctcagatcaagcaagaaccagaccccacgtggtagacctcttccctcctagggtaaatcagcttctgtgtcagggatgctgtgtggtgtccatctgaaccccctgcatacgcgtagctaatgtgatctccccactttcacataagatggtggccctgccttcagggaatgtgggagccaggtgggagccttcccggatatttaagctagaagattctacagggagattctccttggatcaatatatgtctctcagtcaaagatgtaaaagcacttttgccttaaaaagaatgttctgtttctaaatagagtcaacgttgtcctcctcattggaattcactatgagtcagaatcattagactgacttttttttttccatagtaatagtattttgcagagtctcacagagctgcagatcttttgttcatcttgcagagttaacaagtctgatcctgttagtccagatttcttaaatttggccaagttataataggagcagtagcttgagacccgaagtcaggaaactttgacaatggatttttttttttaatccagagacttgtactggaatttgccttaccctgtcagctcatggacttaaggtttcatcccgctttatgagtgcttctgaatccaagtcattgttacctgaatttgcaaattaagttgtgatattcgtgactgttaaattcctgtaattagattaacctctttgcttgcttgtttgttttctctcctattttagcttaaagtatcagtggttgagaagagcttttcggacctgttactaccccaagctgtgtaatatacttgtataacagaaataccttctatacaaacctttttttctacttttagatagaaatgtctactttttcagcagttctgtgaattaaagagcagagtgactgtgggtctggaatggctggtgtacttgggaatgtactatcaggattttacagcaatgctgggaaatgacagggaaaatgacaggaatgaatctcaccagattttttatgtactcagcagagccttgagttacggtgtttattttccaatcaagtgaagatatctcctacttctcctactggaacatctcagcttctgcagtgaagaaaaattcctgtgatagttcagttctttagtttttctatttgaaaaaaaaaaatcatttaaatgatcctttgttcacggctctccttaatgactgagtgaacagttcctatctgtatatttgactaaaccttttcctaagctatctctcatggttcctatgtttttttatcataattaaaagcaaaaccatctggatcacctaacagtcagaggtcagtatctcagcgtgtgaattatagaggaaatacagagagaacctcttccacttttacttttcgtccaaataaaatgcatggtgtaccagaagttgaagatcgggttgaggattggggctagctcgatgacactaaggccccaacatcgcgggacctgctgtggcgcggattcttaggaacgctgttctagccggccccctctccaggggtcgccgtggccggcattatttcctagttcttcttgtaaccctgaggtgccagcgcggggagtgaggaggggtcagggggctaaggatgcaacctctgacgttctgcgccttcctaggagagtcttacatgtgttgagatttcacaagcaatgcgagttgtaaaataccagctctacaagaagctaggctctgtgacggcatagttttcagtagctttatcacaatattcacaatggagaattatatgacatggtagcagaaataggcccttttatgtgttgcttctattttacctcaaattgtagatatagggtaatcaataaaatccatccatgcctttcacacactaagt

SEQ ID NO: 4429 - protein, 584 aa, Homo sapiens; identical to SEQ ID NO: 4173

SEQ ID NO: 4430 - DNA, 4088 bp, Homo sapiens
aaaaaaaaaaaaaaaaaaaaaaaaaaaagaaaaaagaaaaaaaaaaggaggaggaggaggagggtgagagagaagctgggagagcagagaaaaggggccaccggtcgcccccccgcttccccgcacgcgctctccagccgcggccgcccgcctgccgcggtcaccccggcctctgcctctgtcccccagtgatcggatcaaggcgctgagcgaggccctgcctgcggggcggccatgcggcggtgacaggagcgcgaccgacacgcacgggcccctcgccccctctcgcctcccgtccgctcgccagctcccctcagccgaggctgctccgcggcggccgcagcccgcgcgcggcccacactcgcctcccctcggcacccccggccccggagctgcctggaggcggccgcactcggggatcatggcccaagttgcaatgtccaccctccccgttgaagatgaggagtcctcggagagcaggatggtggtgacattcctcatgtcagctctcgagtccatgtgtaaagaactggccaagtccaaagccgaagtggcctgcattgcagtgtatgaaacagacgtgtttgtcgtcggaactgaaagaggacgtgcttttgtcaataccagaaaggattttcaaaaagattttgtaaaatattgtgttgaagaagaagaaaaagctgcagagatgcataaaatgaaatctacaacccaggcaaatcggatgagtgtagatgctgtagaaattgaaacactcagaaaaacagttgaggactatttctgcttttgctatgggaaagctttaggcaaatccacagtggtacctgtaccatatgagaagatgctgcgagaccagtcggctgtggtagtgcaggggcttccggaaggtgttgcctttaaacaccccgagaactatgatcttgcaaccctgaaatggattttggagaacaaagcagggatttcattcatcattaagagaccttttttagagccaaagaagcatgtaggtggtcgtgtgatggtaacagatgctgacaggtcaatactatctccaggtggaagttgtggccccatcaaagtgaaaactgaacccacagaagattctggaagccaccattcttcagagggcaatgaaggcacagaaatggaagtaccagcagaagattctactcaacatgtcccttcagaaacaagtgaggaccctgaagttgaggtgactattgaagatgatgattattctccaccgtctaagagaccaaaggccaatgagctaccgcagccaccagtcccggaacccgccaatgctgggaagcggaaagtgagggagttcaacttcgagaaatggaatgctcgcatcactgatctacgtaaacaagttgaagaattgtttgaaaggaaatatgctcaagccataaaagccaaaggtccggtgacgatcccgtaccctcttttccagtctcatgttgaagatctttatgtagaaggacttcctgaaggaattccttttagaaggccatctacttacggaattcctcgcctggagaggatattacttgcaaaggaaaggattcgttttgtgattaagaaacatgagcttctgaattcaacacgtgaagatttacagcttgataagccagcttcaggagtaaaggaagaatggtatgccagaatcactaaattaagaaagatggtggatcagcttttctgcaaaaaatttgcggaagccttggggagcactgaagccaaggctgtaccgtaccaaaaatttgaggcacacccgaatgatctgtacgtggaaggactgccagaaaacattcctttccgaagtccctcatggtatggaatcccaaggctggaaaaaatcattcaagtgggcaatcgaattaaatttgttattaaaagaccagaacttctgactcacagtaccactgaagttactcagccaagaacgaatacaccagctcaagctcttggactcaccgaggcagtaaaagtaccatatcctgtgtttgaatcaaacccggagttcttgtatgtggaaggcttgccagaggggattcccttccgaagccctacctggtttggaattccacgacttgaaaggatcgtccgcgggagtaataaaatcaagttcgttgttaaaaaacctgaactagttatttcctacttgcctcctgggatggctagtaaaataaacactaaagctttgcagtcccccaaaagaccacgaagtcctgggagtaattcaaaggttcctgaaattgaggtcaccgtggaaggccctaataacaacaatcctcaaacctcagctgttcgaaccccgacccagactaacggttctaacgttcccttcaagccacgagggagagagttttcctttgaggcctggaatgccaaaatcacggacctaaaacagaaagttgaaaatctcttcaatgagaaatgtggggaagctcttggccttaaacaagctgtgaaggtgccgttcgcgttatttgagtctttcccggaagacttttatgtggaaggcttacctgagggtgtgccattccgaagaccatcgacttttggcattccgaggctggagaagatactcagaaacaaagccaaaattaagttcatcattaaaaagcccgaaatgtttgagacggcgattaaggagagcacctcctctaagagccctcccagaaaaataaattcatcacccaatgttaatactactgcatcaggtgttgaagaccttaacatcattcaggtgacaattccagatgatgataatgaaagactctcgaaagttgaaaaagctagacagctaagagaacaagtgaatgacctctttagtcggaaatttggtgaagctattggtatgggttttcctgtgaaagttccctacaggaaaatcacaattaaccctggctgtgtggtggttgatggcatgcccccgggggtgtccttcaaagcccccagctacctggaaatcagctccatgagaaggatcttagactctgccgagtttatcaaattcacggtcattagaccatttccaggacttgtgattaataaccagctggttgatcagagtgagtcagaaggccccgtgatacaagaatcagctgaaccaagccagttggaagttccagccacagaagaaataaaagagactgatggaagctctcagatcaagcaagaaccagaccccacgtggtagacctcttccctcctaggagccttgagttacggtgtttattttccaatcaagtgaagatatctcctacttctcctactggaacatctcagcttctgcagtgaagaaaaattcctgtgatagttcagttctttagtttttctatttgaaaaaaaaaaatcatttaaatgatcctttgttcacggctctccttaatgactgagtgaacagttcctatctgtatatttgactaaaccttttcctaagctatctctcatggttcctatgtttttttatcataattaaaagcaaaaccatctggatcacctaacagtcagaggtcagtatctcagcgtgtgaattatagaggaaatacagagagaacctcttccacttttacttttcgtccaaataaaatgcatggtgtaccagaagttgaagatcgggttgaggattggggctagctcgatgacactaaggccccaacatcgcgggacctgctgtggcgcggattcttaggaacgctgttctagccggccccctctccaggggtcgccgtggccggcattatttcctagttcttcttgtaaccctgaggtgccagcgcggggagtgaggaggggtcagggggctaaggatgcaacctctgacgttctgcgccttcctaggagagtcttacatgtgttgagatttcacaagcaatgcgagttgtaaaataccagctctacaagaagctaggctctgtgacggcatagttttcagtagctttatcacaatattcacaatggagaattatatgacatggtagcagaaataggcccttttatgtgttgcttctattttacctcaaattgtagatatagggtaatcaataaaatccatccatgcctttcacacactaagt

SEQ ID NO: 4431 - protein, 928 aa, Homo sapiens; identical to SEQ ID NO: 4237

SEQ ID NO: 4432 - DNA, 7897 bp, Homo sapiens
aaaaaaaaaaaaaaaaaaaaaaaaaaaagaaaaaagaaaaaaaaaaggaggaggaggaggagggtgagagagaagctgggagagcagagaaaaggggccaccggtcgcccccccgcttccccgcacgcgctctccagccgcggccgcccgcctgccgcggtcaccccggcctctgcctctgtcccccagtgatcggatcaaggcgctgagcgaggccctgcctgcggggcggccatgcggcggtgacaggagcgcgaccgacacgcacgggcccctcgccccctctcgcctcccgtccgctcgccagctcccctcagccgaggctgctccgcggcggccgcagcccgcgcgcggcccacactcgcctcccctcggcacccccggccccggagctgcctggaggcggccgcactcggggatcatggcccaagttgcaatgtccaccctccccgttgaagatgaggagtcctcggagagcaggatggtggtgacattcctcatgtcagctctcgagtccatgtgtaaagaactggccaagtccaaagccgaagtggcctgcattgcagtgtatgaaacagacgtgtttgtcgtcggaactgaaagaggacgtgcttttgtcaataccagaaaggattttcaaaaagattttgtaaaatattgtgttgaagaagaagaaaaagctgcagagatgcataaaatgaaatctacaacccaggcaaatcggatgagtgtagatgctgtagaaattgaaacactcagaaaaacagttgaggactatttctgcttttgctatgggaaagctttaggcaaatccacagtggtacctgtaccatatgagaagatgctgcgagaccagtcggctgtggtagtgcaggggcttccggaaggtgttgcctttaaacaccccgagaactatgatcttgcaaccctgaaatggattttggagaacaaagcagggatttcattcatcattaagagaccttttttagagccaaagaagcatgtaggtggtcgtgtgatggtaacagatgctgacaggtcaatactatctccaggtggaagttgtggccccatcaaagtgaaaactgaacccacagaagattctggaagccaccattcttcagagggcaatgaaggcacagaaatggaagtaccagcagaagattctactcaacatgtcccttcagaaacaagtgaggaccctgaagttgaggtgactattgaagatgatgattattctccaccgtctaagagaccaaaggccaatgagctaccgcagccaccagtcccggaacccgccaatgctgggaagcggaaagtgagggagttcaacttcgagaaatggaatgctcgcatcactgatctacgtaaacaagttgaagaattgtttgaaaggaaatatgctcaagccataaaagccaaaggtccggtgacgatcccgtaccctcttttccagtctcatgttgaagatctttatgtagaaggacttcctgaaggaattccttttagaaggccatctacttacggaattcctcgcctggagaggatattacttgcaaaggaaaggattcgttttgtgattaagaaacatgagcttctgaattcaacacgtgaagatttacagcttgataagccagcttcaggagtaaaggaagaatggtatgccagaatcactaaattaagaaagatggtggatcagcttttctgcaaaaaatttgcggaagccttggggagcactgaagccaaggctgtaccgtaccaaaaatttgaggcacacccgaatgatctgtacgtggaaggactgccagaaaacattcctttccgaagtccctcatggtatggaatcccaaggctggaaaaaatcattcaagtgggcaatcgaattaaatttgttattaaaagaccagaacttctgactcacagtaccactgaagttactcagccaagaacgaatacaccagtcaaagaagattggaatgtcagaattaccaagctacggaagcaagtggaagagatttttaatttgaaatttgctcaagctcttggactcaccgaggcagtaaaagtaccatatcctgtgtttgaatcaaacccggagttcttgtatgtggaaggcttgccagaggggattcccttccgaagccctacctggtttggaattccacgacttgaaaggatcgtccgcgggagtaataaaatcaagttcgttgttaaaaaacctgaactagttatttcctacttgcctcctgggatggctagtaaaataaacactaaagctttgcagtcccccaaaagaccacgaagtcctgggagtaattcaaaggttcctgaaattgaggtcaccgtggaaggccctaataacaacaatcctcaaacctcagctgttcgaaccccgacccagactaacggttctaacgttcccttcaagccacgagggagagagttttcctttgaggcctggaatgccaaaatcacggacctaaaacagaaagttgaaaatctcttcaatgagaaatgtggggaagctcttggccttaaacaagctgtgaaggtgccgttcgcgttatttgagtctttcccggaagacttttatgtggaaggcttacctgagggtgtgccattccgaagaccatcgacttttggcattccgaggctggagaagatactcagaaacaaagccaaaattaagttcatcattaaaaagcccgaaatgtttgagacggcgattaaggagagcacctcctctaagagccctcccagaaaaataaattcatcacccaatgttaatactactgcatcaggtgttgaagaccttaacatcattcaggtgacaattccagatgatgataatgaaagactctcgaaagttgaaaaagctagacagctaagagaacaagtgaatgacctctttagtcggaaatttggtgaagctattggtatgggttttcctgtgaaagttccctacaggaaaatcacaattaaccctggctgtgtggtggttgatggcatgcccccgggggtgtccttcaaagcccccagctacctggaaatcagctccatgagaaggatcttagactctgccgagtttatcaaattcacggtcattaggtaagtgagagtttcctgcttagtcacaggagcgaatctggagctcatgaggctgactcttctaaaatgcagccacaggtagtcatcgaatccggcttcctatgctgtgcaatcaacaaatcaaaataacttgtgtcatcattagaatgtcagatgtgcttctacgaactaagctgactcttttaattctttggcaaagggttggcaaactaggactgtttgccaaattcaggctgcctcctatttttagagtcttcctgaaacacagctacacccgtattatccatggctgctttcctgtcacagtgagtaagtagctgggactgagaaggcatggcctccaaagtctaaaatatttactctctagcactttgtagaaaaaccttagctaggcacagtggctaacgcctgtaatcccagcattttgggaggccaaggcaggcagatcacctgaggtcaggagttccagaccagcctggccaacatggtgaaatcccatctctacaaaaataaaacagttagctgggcatgatggcgggtgcctgtaatcccagctactcgggaggctgaggcaggatagtcgcttgaacccaggaggtggaggttgcaatgagccaagatcatgccactgcactccagcctggacgacagagtgagactccatcacaagaaaaaaagaactttgtcaacctctgtcttagggcgccttgtcacaggcttcgggtcagacggattcaaccttgcatcagccatttgttagccaggtcactctgttctttgtctgtaaatgagattgatcgttgttcccactgagagtgtcagctccttcccgtagagcaggcatgatgattgtactcacctctgacaccattgtgagtgccacattccttcccacgtccttgtcactgtaagagatgcccacctgagcaccaaccccaggttatcttcccctttgtcttccagccccccagaaacagctacgactcaacctacccaatcatttcatcatcagattgccactgtctctagttcaggtctcttgggactggcactcagaaatctcataataaatcctcttgaggcttctcatacactcgtcttcttccaatcttctttccctcaaaatctcatattttggttccacttcacccaccgtcattctccatatcactcccaggagttaggcaaaaagccccttccgttcttccgtatgttaaacttagaatcactctgttccctgctctgcgtttctattttttgtttttcctccatttactagtagcttaacactttctaacagtgttcttattattgatacgtatctatctcttccataagcttataaggtcacggataatacttctcattgtagtacgtaaatgacgtgggctagatatgagttgaataaacagttatacctgtaaattcttacagagtgaaaataaattgttatactttacaatttgtttctctctttagaccatttccaggacttgtgattaataaccgtgagtattttgtgaagtgttttgtttttgttttttcctggggtctgacgtgtgtgcgtgtgagtgtgtatacatgcttaacgtatatcacgttacttcacctatgtcagtaaccaggccaaatacttgttttagccctcagtaaaaacaccaggcacttcctagttgtaaaattattcaagcttcttaacttcctatcctcgatgcacttaatcataaaatggtaataatagcaccgattttgggggagtcgttccagtagatggaaagcatctggaacaggtgtcagcaagctcctgccgacgtgtatgcataaagttttattgaaaccaccatcgtgtccatttgtttatggcagaactgagagatggcagcagcaagtgtgtgcctgcaaaacctaaaatatttactaattggctctgcaagaaaagagtttgcatccccctaacctagaacagtgtctagcctctagtatgtgtttagcctacagtatgtgctcagcgaatacaatctatatttattactgcttttatgactgttataattactgtgcttggatttcgttacaaagtaagtcacaatgtgcctgcttctgttagtatttcagcacagtgcctggcacacatggggctctcaaatattgctgagcgagtgaacaaatgtcctttcaattccttaacgttgatgtcattttcaatagtattttgagccaaacttaattttgcgagtgtgttttgttttcttaactttattattaaaaatgtataaaagtgaggccaggcgtggtggctcacgcctgtaatcccagcagtttgggaggctgaggcaggcggatcagttgaggttgggagttggagaccagcccgtccaacatggtgaaagcctgtctctactaaaaatacaaaaatcagctgggtgtggtggcgcgtgcctgtaatcccagctactcaggaggctgaggcaggagagttgcttgaatcctagaggtggaggttgcagtgagctgagatcgtgccattgcactccagcctgggcaacaagagcaaaactctgtcccaataaataaataaataaaatgttctcttttgttcctgttcttgtgcggtagtgtggtatagagttttatggtaattactgtgaattagtgattctgagggacatatcagaactctgaggtttgtttccttctcatcttgagggaaacagcaaatgtatgttaaaatgcttttccaagggaacaacacatccttacattatttaaaccaatctgcttcattttcagagctggttgatcagagtgagtcagaaggccccgtgatacaagaatcagctgaaccaagccagttggaagttccagccacagaagaaataaaagagactgatggaagctctcagatcaagcaagaaccagaccccacgtggtagacctcttccctcctagggtaaatcagcttctgtgtcagggatgctgtgtggtgtccatctgaaccccctgcatacgcgtagctaatgtgatctccccactttcacataagatggtggccctgccttcagggaatgtgggagccaggtgggagccttcccggatatttaagctagaagattctacagggagattctccttggatcaatatatgtctctcagtcaaagatgtaaaagcacttttgccttaaaaagaatgttctgtttctaaatagagtcaacgttgtcctcctcattggaattcactatgagtcagaatcattagactgacttttttttttccatagtaatagtattttgcagagtctcacagagctgcagatcttttgttcatcttgcagagttaacaagtctgatcctgttagtccagatttcttaaatttggccaagttataataggagcagtagcttgagacccgaagtcaggaaactttgacaatggatttttttttttaatccagagacttgtactggaatttgccttaccctgtcagctcatggacttaaggtttcatcccgctttatgagtgcttctgaatccaagtcattgttacctgaatttgcaaattaagttgtgatattcgtgactgttaaattcctgtaattagattaacctctttgcttgcttgtttgttttctctcctattttagcttaaagtatcagtggttgagaagagcttttcggacctgttactaccccaagctgtgtaatatacttgtataacagaaataccttctatacaaacctttttttctacttttagatagaaatgtctactttttcagcagttctgtgaattaaagagcagagtgactgtgggtctggaatggctggtgtacttgggaatgtactatcaggattttacagcaatgctgggaaatgacagggaaaatgacaggaatgaatctcaccagattttttatgtactcagcagagccttgagttacggtgtttattttccaatcaagtgaagatatctcctacttctcctactggaacatctcagcttctgcagtgaagaaaaattcctgtgatagttcagttctttagtttttctatttgaaaaaaaaaaatcatttaaatgatcctttgttcacggctctccttaatgactgagtgaacagttcctatctgtatatttgactaaaccttttcctaagctatctctcatggttcctatgtttttttatcataattaaaagcaaaaccatctggatcacctaacagtcagaggtcagtatctcagcgtgtgaattatagaggaaatacagagagaacctcttccacttttacttttcgtccaaataaaatgcatggtgtaccagaagttgaagatcgggttgaggattggggctagctcgatgacactaaggccccaacatcgcgggacctgctgtggcgcggattcttaggaacgctgttctagccggccccctctccaggggtcgccgtggccggcattatttcctagttcttcttgtaaccctgaggtgccagcgcggggagtgaggaggggtcagggggctaaggatgcaacctctgacgttctgcgccttcctaggagagtcttacatgtgttgagatttcacaagcaatgcgagttgtaaaataccagctctacaagaagctaggctctgtgacggcatagttttcagtagctttatcacaatattcacaatggagaattatatgacatggtagcagaaataggcccttttatgtgttgcttctattttacctcaaattgtagatatagggtaatcaataaaatccatccatgcctttcacacactaagt

SEQ ID NO: 4433 - protein, 896 aa, Homo sapiens
MAQVAMSTLPVEDEESSESRMVVTFLMSALESMCKELAKSKAEVACIAVYETDVFVVGTERGRAFVNTRKDFQKDFVKYCVEEEEKAAEMHKMKSTTQANRMSVDAVEIETLRKTVEDYFCFCYGKALGKSTVVPVPYEKMLRDQSAVVVQGLPEGVAFKHPENYDLATLKWILENKAGISFIIKRPFLEPKKHVGGRVMVTDADRSILSPGGSCGPIKVKTEPTEDSGSHHSSEGNEGTEMEVPAEDSTQHVPSETSEDPEVEVTIEDDDYSPPSKRPKANELPQPPVPEPANAGKRKVREFNFEKWNARITDLRKQVEELFERKYAQAIKAKGPVTIPYPLFQSHVEDLYVEGLPEGIPFRRPSTYGIPRLERILLAKERIRFVIKKHELLNSTREDLQLDKPASGVKEEWYARITKLRKMVDQLFCKKFAEALGSTEAKAVPYQKFEAHPNDLYVEGLPENIPFRSPSWYGIPRLEKIIQVGNRIKFVIKRPELLTHSTTEVTQPRTNTPVKEDWNVRITKLRKQVEEIFNLKFAQALGLTEAVKVPYPVFESNPEFLYVEGLPEGIPFRSPTWFGIPRLERIVRGSNKIKFVVKKPELVISYLPPGMASKINTKALQSPKRPRSPGSNSKVPEIEVTVEGPNNNNPQTSAVRTPTQTNGSNVPFKPRGREFSFEAWNAKITDLKQKVENLFNEKCGEALGLKQAVKVPFALFESFPEDFYVEGLPEGVPFRRPSTFGIPRLEKILRNKAKIKFIIKKPEMFETAIKESTSSKSPPRKINSSPNVNTTASGVEDLNIIQVTIPDDDNERLSKVEKARQLREQVNDLFSRKFGEAIGMGFPVKVPYRKITINPGCVVVDGMPPGVSFKAPSYLEISSMRRILDSAEFIKFTVIR

SEQ ID NO: 4434 - DNA, 5144 bp, Homo sapiens
aaaaaaaaaaaaaaaaaaaaaaaaaaaagaaaaaagaaaaaaaaaaggaggaggaggaggagggtgagagagaagctgggagagcagagaaaaggggccaccggtcgcccccccgcttccccgcacgcgctctccagccgcggccgcccgcctgccgcggtcaccccggcctctgcctctgtcccccagtgatcggatcaaggcgctgagcgaggccctgcctgcggggcggccatgcggcggtgacaggagcgcgaccgacacgcacgggcccctcgccccctctcgcctcccgtccgctcgccagctcccctcagccgaggctgctccgcggcggccgcagcccgcgcgcggcccacactcgcctcccctcggcacccccggccccggagctgcctggaggcggccgcactcggggatcatggcccaagttgcaatgtccaccctccccgttgaagatgaggagtcctcggagagcaggatggtggtgacattcctcatgtcagctctcgagtccatgtgtaaagaactggccaagtccaaagccgaagtggcctgcattgcagtgtatgaaacagacgtgtttgtcgtcggaactgaaagaggacgtgcttttgtcaataccagaaaggattttcaaaaagattttgtaaaatattgtgttgaagaagaagaaaaagctgcagagatgcataaaatgaaatctacaacccaggcaaatcggatgagtgtagatgctgtagaaattgaaacactcagaaaaacagttgaggactatttctgcttttgctatgggaaagctttaggcaaatccacagtggtacctgtaccatatgagaagatgctgcgagaccagtcggctgtggtagtgcaggggcttccggaaggtgttgcctttaaacaccccgagaactatgatcttgcaaccctgaaatggattttggagaacaaagcagggatttcattcatcattaagagaccttttttagagccaaagaagcatgtaggtggtcgtgtgatggtaacagatgctgacaggtcaatactatctccaggtggaagttgtggccccatcaaagtgaaaactgaacccacagaagattctggcatttccctggaaatggcagctgtgacagtaaaggaagaatcagaagatcctgattattatcaatataacattcaagcaggcccttctgaaactgatgatgttgatgaaaaacagcccctatcgaagcctttgcaaggaagccaccattcttcagagggcaatgaaggcacagaaatggaagtaccagcagaagatgatgattattctccaccgtctaagagaccaaaggccaatgagctaccgcagccaccagtcccggaacccgccaatgctgggaagcggaaagtgagggagttcaacttcgagaaatggaatgctcgcatcactgatctacgtaaacaagttgaagaattgtttgaaaggaaatatgctcaagccataaaagccaaaggtccggtgacgatcccgtaccctcttttccagtctcatgttgaagatctttatgtagaaggacttcctgaaggaattccttttagaaggccatctacttacggaattcctcgcctggagaggatattacttgcaaaggaaaggattcgttttgtgattaagaaacatgagcttctgaattcaacacgtgaagatttacagcttgataagccagcttcaggagtaaaggaagaatggtatgccagaatcactaaattaagaaagatggtggatcagcttttctgcaaaaaatttgcggaagccttggggagcactgaagccaaggctgtaccgtaccaaaaatttgaggcacacccgaatgatctgtacgtggaaggactgccagaaaacattcctttccgaagtccctcatggtatggaatcccaaggctggaaaaaatcattcaagtgggcaatcgaattaaatttgttattaaaagaccagaacttctgactcacagtaccactgaagttactcagccaagaacgaatacaccagtcaaagaagattggaatgtcagaattaccaagctacggaagcaagtggaagagatttttaatttgaaatttgctcaagctcttggactcaccgaggcagtaaaagtaccatatcctgtgtttgaatcaaacccggagttcttgaaaggatcgtccgcgggagtaataaaatcaagttcgttgttaaaaaacctgaactagttatttcctacttgcctcctgggatggctagtaaaataaacactaaagctttgcagtcccccaaaagaccacgaagtcctgggagtaattcaaaggttcctgaaattgaggtcaccgtggaaggccctaataacaacaatcctcaaacctcagctgttcgaaccccgacccagactaacggttctaacgttcccttcaagccacgagggagagagttttcctttgaggcctggaatgccaaaatcacggacctaaaacagaaagttgaaaatctcttcaatgagaaatgtggggaagctcttggccttaaacaagctgtgaaggtgccgttcgcgttatttgagtctttcccggaagacttttatgtggaaggcttacctgagggtgtgccattccgaagaccatcgacttttggcattccgaggctggagaagatactcagaaacaaagccaaaattaagttcatcattaaaaagcccgaaatgtttgagacggcgattaaggagagcacctcctctaagagccctcccagaaaaataaattcatcacccaatgttaatactactgcatcaggtgttgaagaccttaacatcattcaggtgacaattccagatgatgataatgaaagactctcgaaagttgaaaaagctagacagctaagagaacaagtgaatgacctctttagtcggaaatttggtgaagctattggtatgggttttcctgtgaaagttccctacaggaaaatcacaattaaccctggctgtgtggtggttgatggcatgcccccgggggtgtccttcaaagcccccagctacctggaaatcagctccatgagaaggatcttagactctgccgagtttatcaaattcacggtcattagaccatttccaggacttgtgattaataaccagctggttgatcagagtgagtcagaaggccccgtgatacaagaatcagctgaaccaagccagttggaagttccagccacagaagaaataaaagagactgatggaagctctcagatcaagcaagaaccagaccccacgtggtagacctcttccctcctagggtaaatcagcttctgtgtcagggatgctgtgtggtgtccatctgaaccccctgcatacgcgtagctaatgtgatctccccactttcacataagatggtggccctgccttcagggaatgtgggagccaggtgggagccttcccggatatttaagctagaagattctacagggagattctccttggatcaatatatgtctctcagtcaaagatgtaaaagcacttttgccttaaaaagaatgttctgtttctaaatagagtcaacgttgtcctcctcattggaattcactatgagtcagaatcattagactgacttttttttttccatagtaatagtattttgcagagtctcacagagctgcagatcttttgttcatcttgcagagttaacaagtctgatcctgttagtccagatttcttaaatttggccaagttataataggagcagtagcttgagacccgaagtcaggaaactttgacaatggatttttttttttaatccagagacttgtactggaatttgccttaccctgtcagctcatggacttaaggtttcatcccgctttatgagtgcttctgaatccaagtcattgttacctgaatttgcaaattaagttgtgatattcgtgactgttaaattcctgtaattagattaacctctttgcttgcttgtttgttttctctcctattttagcttaaagtatcagtggttgagaagagcttttcggacctgttactaccccaagctgtgtaatatacttgtataacagaaataccttctatacaaacctttttttctacttttagatagaaatgtctactttttcagcagttctgtgaattaaagagcagagtgactgtgggtctggaatggctggtgtacttgggaatgtactatcaggattttacagcaatgctgggaaatgacagggaaaatgacaggaatgaatctcaccagattttttatgtactcagcagagccttgagttacggtgtttattttccaatcaagtgaagatatctcctacttctcctactggaacatctcagcttctgcagtgaagaaaaattcctgtgatagttcagttctttagtttttctatttgaaaaaaaaaaatcatttaaatgatcctttgttcacggctctccttaatgactgagtgaacagttcctatctgtatatttgactaaaccttttcctaagctatctctcatggttcctatgtttttttatcataattaaaagcaaaaccatctggatcacctaacagtcagaggtcagtatctcagcgtgtgaattatagaggaaatacagagagaacctcttccacttttacttttcgtccaaataaaatgcatggtgtaccagaagttgaagatcgggttgaggattggggctagctcgatgacactaaggccccaacatcgcgggacctgctgtggcgcggattcttaggaacgctgttctagccggccccctctccaggggtcgccgtggccggcattatttcctagttcttcttgtaaccctgaggtgccagcgcggggagtgaggaggggtcagggggctaaggatgcaacctctgacgttctgcgccttcctaggagagtcttacatgtgttgagatttcacaagcaatgcgagttgtaaaataccagctctacaagaagctaggctctgtgacggcatagttttcagtagctttatcacaatattcacaatggagaattatatgacatggtagcagaaataggcccttttatgtgttgcttctattttacctcaaattgtagatatagggtaatcaataaaatccatccatgcctttcacacactaagt

SEQ ID NO: 4435 - protein, 604 aa, Homo sapiens; identical to SEQ ID NO: 4117

SEQ ID NO: 4436 - DNA, 5038 bp, Homo sapiens
aaaaaaaaaaaaaaaaaaaaaaaaaaaagaaaaaagaaaaaaaaaaggaggaggaggaggagggtgagagagaagctgggagagcagagaaaaggggccaccggtcgcccccccgcttccccgcacgcgctctccagccgcggccgcccgcctgccgcggtcaccccggcctctgcctctgtcccccagtgatcggatcaaggcgctgagcgaggccctgcctgcggggcggccatgcggcggtgacaggagcgcgaccgacacgcacgggcccctcgccccctctcgcctcccgtccgctcgccagctcccctcagccgaggctgctccgcggcggccgcagcccgcgcgcggcccacactcgcctcccctcggcacccccggccccggagctgcctggaggcggccgcactcggtgtaaagaactggccaagtccaaagccgaagtggcctgcattgcagtgtatgaaacagacgtgtttgtcgtcggaactgaaagaggacgtgcttttgtcaataccagaaaggattttcaaaaagattttgtaaaatattgtgttgaagaagaagaaaaagctgcagagatgcataaaatgaaatctacaacccaggcaaatcggatgagtgtagatgctgtagaaattgaaacactcagaaaaacagttgaggactatttctgcttttgctatgggaaagctttaggcaaatccacagtggtacctgtaccatatgagaagatgctgcgagaccagtcggctgtggtagtgcaggggcttccggaaggtgttgcctttaaacaccccgagaactatgatcttgcaaccctgaaatggattttggagaacaaagcagggatttcattcatcattaagagaccttttttagagccaaagaagcatgtaggtggtcgtgtgatggtaacagatgctgacaggtcaatactatctccaggtggaagttgtggccccatcaaagtgaaaactgaacccacagaagattctggcatttccctggaaatggcagctgtgacagtaaaggaagaatcagaagatcctgattattatcaatataacattcaaggaagccaccattcttcagagggcaatgaaggcacagaaatggaagtaccagcagaagattctactcaacatgtcccttcagaaacaagtgaggaccctgaagttgaggtgactattgaagatgatgattattctccaccgtctaagagaccaaaggccaatgagctaccgcagccaccagtcccggaacccgccaatgctgggaagcggaaagtgagggagttcaacttcgagaaatggaatgctcgcatcactgatctacgtaaacaagttgaagaattgtttgaaaggaaatatgctcaagccataaaagccaaaggtccggtgacgatcccgtaccctcttttccagtctcatgttgaagatctttatgtagaaggacttcctgaaggaattccttttagaaggccatctacttacggaattcctcgcctggagaggatattacttgcaaaggaaaggattcgttttgtgattaagaaacatgagcttctgaattcaacacgtgaagatttacagcttgataagccagcttcaggagtaaaggaagaatggtatgccagaatcactaaattaagaaagatggtggatcagcttttctgcaaaaaatttgcggaagccttggggagcactgaagccaaggctgtaccgtaccaaaaatttgaggcacacccgaatgatctgtacgtggaaggactgccagaaaacattcctttccgaagtccctcatggtatggaatcccaaggctggaaaaaatcattcaagtgggcaatcgaattaaatttgttattaaaagaccagaacttctgactcacagtaccactgaagttactcagccaagaacgaatacaccagctcaagctcttggactcaccgaggcagtaaaagtaccatatcctgtgtttgaatcaaacccggagttcttgtatgtggaaggcttgccagaggggattcccttccgaagccctacctggtttggaattccacgacttgaaaggatcgtccgcgggagtaataaaatcaagttcgttgttaaaaaacctgaactagttatttcctacttgcctcctgggatggctagtaaaataaacactaaagctttgcagtcccccaaaagaccacgaagtcctgggagtaattcaaaggttcctgaaattgaggtcaccgtggaaggccctaataacaacaatcctcaaacctcagctgttcgaaccccgacccagactaacggttctaacgttcccttcaagccacgagggagagagttttcctttgaggcctggaatgccaaaatcacggacctaaaacagaaagttgaaaatctcttcaatgagaaatgtggggaagctcttggccttaaacaagctgtgaaggtgccgttcgcgttatttgagtctttcccggaagacttttatgtggaaggcttacctgagggtgtgccattccgaagaccatcgacttttggcattccgaggctggagaagatactcagaaacaaagccaaaattaagttcatcattaaaaagcccgaaatgtttgagacggcgattaaggagagcacctcctctaagagccctcccagaaaaataaattcatcacccaatgttaatactactgcatcaggtgttgaagaccttaacatcattcaggtgacaattccagatgatgataatgaaagactctcgaaagttgaaaaagctagacagctaagagaacaagtgaatgacctctttagtcggaaatttggtgaagctattggtatgggttttcctgtgaaagttccctacaggaaaatcacaattaaccctggctgtgtggtggttgatggcatgcccccgggggtgtccttcaaagcccccagctacctggaaatcagctccatgagaaggatcttagactctgccgagtttatcaaattcacggtcattagaccatttccaggacttgtgattaataaccagctggttgatcagagtgagtcagaaggccccgtgatacaagaatcagctgaaccaagccagttggaagttccagccacagaagaaataaaagagactgatggaagctctcagatcaagcaagaaccagaccccacgtggtagacctcttccctcctagggtaaatcagcttctgtgtcagggatgctgtgtggtgtccatctgaaccccctgcatacgcgtagctaatgtgatctccccactttcacataagatggtggccctgccttcagggaatgtgggagccaggtgggagccttcccggatatttaagctagaagattctacagggagattctccttggatcaatatatgtctctcagtcaaagatgtaaaagcacttttgccttaaaaagaatgttctgtttctaaatagagtcaacgttgtcctcctcattggaattcactatgagtcagaatcattagactgacttttttttttccatagtaatagtattttgcagagtctcacagagctgcagatcttttgttcatcttgcagagttaacaagtctgatcctgttagtccagatttcttaaatttggccaagttataataggagcagtagcttgagacccgaagtcaggaaactttgacaatggatttttttttttaatccagagacttgtactggaatttgccttaccctgtcagctcatggacttaaggtttcatcccgctttatgagtgcttctgaatccaagtcattgttacctgaatttgcaaattaagttgtgatattcgtgactgttaaattcctgtaattagattaacctctttgcttgcttgtttgttttctctcctattttagcttaaagtatcagtggttgagaagagcttttcggacctgttactaccccaagctgtgtaatatacttgtataacagaaataccttctatacaaacctttttttctacttttagatagaaatgtctactttttcagcagttctgtgaattaaagagcagagtgactgtgggtctggaatggctggtgtacttgggaatgtactatcaggattttacagcaatgctgggaaatgacagggaaaatgacaggaatgaatctcaccagattttttatgtactcagcagagccttgagttacggtgtttattttccaatcaagtgaagatatctcctacttctcctactggaacatctcagcttctgcagtgaagaaaaattcctgtgatagttcagttctttagtttttctatttgaaaaaaaaaaatcatttaaatgatcctttgttcacggctctccttaatgactgagtgaacagttcctatctgtatatttgactaaaccttttcctaagctatctctcatggttcctatgtttttttatcataattaaaagcaaaaccatctggatcacctaacagtcagaggtcagtatctcagcgtgtgaattatagaggaaatacagagagaacctcttccacttttacttttcgtccaaataaaatgcatggtgtaccagaagttgaagatcgggttgaggattggggctagctcgatgacactaaggccccaacatcgcgggacctgctgtggcgcggattcttaggaacgctgttctagccggccccctctccaggggtcgccgtggccggcattatttcctagttcttcttgtaaccctgaggtgccagcgcggggagtgaggaggggtcagggggctaaggatgcaacctctgacgttctgcgccttcctaggagagtcttacatgtgttgagatttcacaagcaatgcgagttgtaaaataccagctctacaagaagctaggctctgtgacggcatagttttcagtagctttatcacaatattcacaatggagaattatatgacatggtagcagaaataggcccttttatgtgttgcttctattttacctcaaattgtagatatagggtaatcaataaaatccatccatgcctttcacacactaagt

SEQ ID NO: 4437 - protein, 865 aa, Homo sapiens; identical to SEQ ID NO: 4043

SEQ ID NO: 4438 - DNA, 4002 bp, Homo sapiens
aaaaaaaaaaaaaaaaaaaaaaaaaaaagaaaaaagaaaaaaaaaaggaggaggaggaggagggtgagagagaagctgggagagcagagaaaaggggccaccggtcgcccccccgcttccccgcacgcgctctccagccgcggccgcccgcctgccgcggtcaccccggcctctgcctctgtcccccagtgatcggatcaaggcgctgagcgaggccctgcctgcggggcggccatgcggcggtgacaggagcgcgaccgacacgcacgggcccctcgccccctctcgcctcccgtccgctcgccagctcccctcagccgaggctgctccgcggcggccgcagcccgcgcgcggcccacactcgcctccccgttgaagatgaggagtcctcggagagcaggatggtggtgacattcctcatgtcagctctcgagtccatgtgtaaagaactggccaagtccaaagccgaagtggcctgcattgcagtgtatgaaacagacgtgtttgtcgtcggaactgaaagaggacgtgcttttgtcaataccagaaaggattttcaaaaagattttgtaaaatattgtgttgaagaagaagaaaaagctgcagagatgcataaaatgaaatctacaacccaggcaaatcggatgagtgtagatgctgtagaaattgaaacactcagaaaaacagttgaggactatttctgcttttgctatgggaaagctttaggcaaatccacagtggtacctgtaccatatgagaagatgctgcgagaccagtcggctgtggtagtgcaggggcttccggaaggtgttgcctttaaacaccccgagaactatgatcttgcaaccctgaaatggattttggagaacaaagcagggatttcattcatcattaagagaccttttttagagccaaagaagcatgtaggtggtcgtgtgatggtaacagatgctgacaggtcaatactatctccaggtggaagttgtggccccatcaaagtgaaaactgaacccacagaagattctggcatttccctggaaatggcagctgtgacagtaaaggaagaatcagaagatcctgattattatcaatataacattcaaggaagccaccattcttcagagggcaatgaaggcacagaaatggaagtaccagcagaagattctactcaacatgtcccttcagaaacaagtgaggaccctgaagttgaggtgactattgaagatgatgattattctccaccgtctaagagaccaaaggccaatgagctaccgcagccaccagtcccggaacccgccaatgctgggaagcggaaagtgagggagttcaacttcgagaaatggaatgctcgcatcactgatctacgtaaacaagttgaagaattgtttgaaaggaaatatgctcaagccataaaagccaaaggtccggtgacgatcccgtaccctcttttccagtctcatgttgaagatctttatgtagaaggacttcctgaaggaattccttttagaaggccatctacttacggaattcctcgcctggagaggatattacttgcaaaggaaaggattcgttttgtgattaagaaacatgagcttctgaattcaacacgtgaagatttacagcttgataagccagcttcaggagtaaaggaagaatggtatgccagaatcactaaattaagaaagatggtggatcagcttttctgcaaaaaatttgcggaagccttggggagcactgaagccaaggctgtaccgtaccaaaaatttgaggcacacccgaatgatctgtacgtggaaggactgccagaaaacattcctttccgaagtccctcatggtatggaatcccaaggctggaaaaaatcattcaagtgggcaatcgaattaaatttgttattaaaagaccagaacttctgactcacagtaccactgaagttactcagccaagaacgaatacaccagtcaaagaagattggaatgtcagaattaccaagctacggaagcaagtggaagagatttttaatttgaaatttgcttagatttgttgacagcggtttcctggagtgctgtcttgagaacgattctgaggaggctcagcaagaaagagtgtttcagttgattgggtgtgtctgtcatggagaaggaactcaagctcttggactcaccgaggcagtaaaagtaccatatcctgtgtttgaatcaaacccggagttcttgtatgtggaaggcttgccagaggggattcccttccgaagccctacctggtttggaattccacgacttgaaaggatcgtccgcgggagtaataaaatcaagttcgttgttaaaaaacctgaactagttatttcctacttgcctcctgggatggctagtaaaataaacactaaagctttgcagtcccccaaaagaccacgaagtcctgggagtaattcaaaggttcctgaaattgaggtcaccgtggaaggccctaataacaacaatcctcaaacctcagctgttcgaaccccgacccagactaacggttctaacgttcccttcaagccacgagggagagagttttcctttgaggcctggaatgccaaaatcacggacctaaaacagaaagttgaaaatctcttcaatgagaaatgtggggaagctcttggccttaaacaagctgtgaaggtgccgttcgcgttatttgagtctttcccggaagacttttatgtggaaggcttacctgagggtgtgccattccgaagaccatcgacttttggcattccgaggctggagaagatactcagaaacaaagccaaaattaagttcatcattaaaaagcccgaaatgtttgagacggcgattaaggagagcacctcctctaagagccctcccagaaaaataaattcatcacccaatgttaatactactgcatcaggtgttgaagaccttaacatcattcaggtgacaattccagatgatgataatgaaagactctcgaaagttgaaaaagctagacagctaagagaacaagtgaatgacctctttagtcggaaatttggtgaagctattggtatgggttttcctgtgaaagttccctacaggaaaatcacaattaaccctggctgtgtggtggttgatggcatgcccccgggggtgtccttcaaagcccccagctacctggaaatcagctccatgagaaggatcttagactctgccgagtttatcaaattcacggtcattagaccatttccaggacttgtgattaataaccagctggttgatcagagtgagtcagaaggccccgtgatacaagaatcagctgaaccaagccagttggaagttccagccacagaagaaataaaagagactgatggaagctctcagatcaagcaagaaccagaccccacgtggtagacctcttccctcctaggcaaaaccatctggatcacctaacagtcagaggtcagtatctcagcgtgtgaattatagaggaaatacagagagaacctcttccacttttacttttcgtccaaataaaatgcatggtgtaccagaagttgaagatcgggttgaggattggggctagctcgatgacactaaggccccaacatcgcgggacctgctgtggcgcggattcttaggaacgctgttctagccggccccctctccaggggtcgccgtggccggcattatttcctagttcttcttgtaaccctgaggtgccagcgcggggagtgaggaggggtcagggggctaaggatgcaacctctgacgttctgcgccttcctaggagagtcttacatgtgttgagatttcacaagcaatgcgagttgtaaaataccagctctacaagaagctaggctctgtgacggcatagttttcagtagctttatcacaatattcacaatggagaattatatgacatggtagcagaaataggcccttttatgtgttgcttctattttacctcaaattgtagatatagggtaatcaataaaatccatccatgcctttcacacactaagt

SEQ ID NO: 4439 - protein, 544 aa, Homo sapiens; identical to SEQ ID NO: 4045

SEQ ID NO: 4440 - DNA, 5212 bp, Homo sapiens
aaaaaaaaaaaaaaaaaaaaaaaaaaaagaaaaaagaaaaaaaaaaggaggaggaggaggagggtgagagagaagctgggagagcagagaaaaggggccaccggtcgcccccccgcttccccgcacgcgctctccagccgcggccgcccgcctgccgcggtcaccccggcctctgcctctgtcccccagtgatcggatcaaggcgctgagcgaggccctgcctgcggggcggccatgcggcggtgacaggagcgcgaccgacacgcacgggcccctcgccccctctcgcctcccgtccgctcgccagctcccctcagccgaggctgctccgcggcggccgcagcccgcgcgcggcccacactcgcctcccctcggcacccccggccccggagctgcctggaggcggccgcactcggggatcatggcccaagttgcaatgtccaccctccccgttgaagatgaggagtcctcggagagcaggatggtggtgacattcctcatgtcagctctcgagtccatgtgtaaagaactggccaagtccaaagccgaagtggcctgcattgcagtgtatgaaacagacgtgtttgtcgtcggaactgaaagaggacgtgcttttgtcaataccagaaaggattttcaaaaagattttgtaaaatattgtgttgaagaagaagaaaaagctgcagagatgcataaaatgaaatctacaacccaggcaaatcggatgagtgtagatgctgtagaaattgaaacactcagaaaaacagttgaggactatttctgcttttgctatgggaaagctttaggcaaatccacagtggtacctgtaccatatgagaagatgctgcgagaccagtcggctgtggtagtgcaggggcttccggaaggtgttgcctttaaacaccccgagaactatgatcttgcaaccctgaaatggattttggagaacaaagcagggatttcattcatcattaagagaccttttttagagccaaagaagcatgtaggtggtcgtgtgatggtaacagatgctgacaggtcaatactatctccaggtggaagttgtggccccatcaaagtgaaaactgaacccacagaagattctggcatttccctggaaatggcagctgtgacagtaaaggaagaatcagaagatcctgattattatcaatataacattcaaggaagccaccattcttcagagggcaatgaaggcacagaaatggaagtaccagcagaagatgatgattattctccaccgtctaagagaccaaaggccaatgagctaccgcagccaccagtcccggaacccgccaatgctgggaagcggaaagtgagggagttcaacttcgagaaatggaatgctcgcatcactgatctacgtaaacaagttgaagaattgtttgaaaggaaatatgctcaagccataaaagccaaaggtccggtgacgatcccgtaccctcttttccagtctcatgttgaagatctttatgtagaaggacttcctgaaggaattccttttagaaggccatctacttacggaattcctcgcctggagaggatattacttgcaaaggaaaggattcgttttgtgattaagaaacatgagcttctgaattcaacacgtgaagatttacagcttgataagccagcttcaggagtaaaggaagaatggtatgccagaatcactaaattaagaaagatggtggatcagcttttctgcaaaaaatttgcggaagccttggggagcactgaagccaaggctgtaccgtaccaaaaatttgaggcacacccgaatgatctgtacgtggaaggactgccagaaaacattcctttccgaagtccctcatggtatggaatcccaaggctggaaaaaatcattcaagtgggcaatcgaattaaatttgttattaaaagaccagaacttctgactcacagtaccactgaagttactcagccaagaacgaatacaccagtcaaagaagattggaatgtcagaattaccaagctacggaagcaagtggaagagatttttaatttgaaatttgcttagatttgttgacagcggtttcctggagtgctgtcttgagaacgattctgaggaggctcagcaagaaagagtgtttcagttgattgggtgtgtctgtcatggagaaggaactcaagctcttggactcaccgaggcagtaaaagtaccatatcctgtgtttgaatcaaacccggagttcttgtatgtggaaggcttgccagaggggattcccttccgaagccctacctggtttggaattccacgacttgaaaggatcgtccgcgggagtaataaaatcaagttcgttgttaaaaaacctgaactagttatttcctacttgcctcctgggatggctagtaaaataaacactaaagctttgcagtcccccaaaagaccacgaagtcctgggagtaattcaaaggttcctgaaattgaggtcaccgtggaaggccctaataacaacaatcctcaaacctcagctgttcgaaccccgacccagactaacggttctaacgttcccttcaagccacgagggagagagttttcctttgaggcctggaatgccaaaatcacggacctaaaacagaaagttgaaaatctcttcaatgagaaatgtggggaagctcttggccttaaacaagctgtgaaggtgccgttcgcgttatttgagtctttcccggaagacttttatgtggaaggcttacctgagggtgtgccattccgaagaccatcgacttttggcattccgaggctggagaagatactcagaaacaaagccaaaattaagttcatcattaaaaagcccgaaatgtttgagacggcgattaaggagagcacctcctctaagagccctcccagaaaaataaattcatcacccaatgttaatactactgcatcaggtgttgaagaccttaacatcattcaggtgacaattccagatgatgataatgaaagactctcgaaagttgaaaaagctagacagctaagagaacaagtgaatgacctctttagtcggaaatttggtgaagctattggtatgggttttcctgtgaaagttccctacaggaaaatcacaattaaccctggctgtgtggtggttgatggcatgcccccgggggtgtccttcaaagcccccagctacctggaaatcagctccatgagaaggatcttagactctgccgagtttatcaaattcacggtcattagaccatttccaggacttgtgattaataaccagctggttgatcagagtgagtcagaaggccccgtgatacaagaatcagctgaaccaagccagttggaagttccagccacagaaggtaaaaggacctcttccctcctagggtaaatcagcttctgtgtcagggatgctgtgtggtgtccatctgaaccccctgcatacgcgtagctaatgtgatctccccactttcacataagatggtggccctgccttcagggaatgtgggagccaggtgggagccttcccggatatttaagctagaagattctacagggagattctccttggatcaatatatgtctctcagtcaaagatgtaaaagcacttttgccttaaaaagaatgttctgtttctaaatagagtcaacgttgtcctcctcattggaattcactatgagtcagaatcattagactgacttttttttttccatagtaatagtattttgcagagtctcacagagctgcagatcttttgttcatcttgcagagttaacaagtctgatcctgttagtccagatttcttaaatttggccaagttataataggagcagtagcttgagacccgaagtcaggaaactttgacaatggatttttttttttaatccagagacttgtactggaatttgccttaccctgtcagctcatggacttaaggtttcatcccgctttatgagtgcttctgaatccaagtcattgttacctgaatttgcaaattaagttgtgatattcgtgactgttaaattcctgtaattagattaacctctttgcttgcttgtttgttttctctcctattttagcttaaagtatcagtggttgagaagagcttttcggacctgttactaccccaagctgtgtaatatacttgtataacagaaataccttctatacaaacctttttttctacttttagatagaaatgtctactttttcagcagttctgtgaattaaagagcagagtgactgtgggtctggaatggctggtgtacttgggaatgtactatcaggattttacagcaatgctgggaaatgacagggaaaatgacaggaatgaatctcaccagattttttatgtactcagcagagccttgagttacggtgtttattttccaatcaagtgaagatatctcctacttctcctactggaacatctcagcttctgcagtgaagaaaaattcctgtgatagttcagttctttagtttttctatttgaaaaaaaaaaatcatttaaatgatcctttgttcacggctctccttaatgactgagtgaacagttcctatctgtatatttgactaaaccttttcctaagctatctctcatggttcctatgtttttttatcataattaaaagcaaaaccatctggatcacctaacagtcagaggtcagtatctcagcgtgtgaattatagaggaaatacagagagaacctcttccacttttacttttcgtccaaataaaatgcatggtgtaccagaagttgaagatcgggttgaggattggggctagctcgatgacactaaggccccaacatcgcgggacctgctgtggcgcggattcttaggaacgctgttctagccggccccctctccaggggtcgccgtggccggcattatttcctagttcttcttgtaaccctgaggtgccagcgcggggagtgaggaggggtcagggggctaaggatgcaacctctgacgttctgcgccttcctaggagagtcttacatgtgttgagatttcacaagcaatgcgagttgtaaaataccagctctacaagaagctaggctctgtgacggcatagttttcagtagctttatcacaatattcacaatggagaattatatgacatggtagcagaaataggcccttttatgtgttgcttctattttacctcaaattgtagatatagggtaatcaataaaatccatccatgcctttcacacactaagt

SEQ ID NO: 4441 - protein, 543 aa, Homo sapiens; identical to SEQ ID NO: 4195

SEQ ID NO: 4442 - DNA, 4299 bp, Homo sapiens
aaaaaaaaaaaaaaaaaaaaaaaaaaaagaaaaaagaaaaaaaaaaggaggaggaggaggagggtgagagagaagctgggagagcagagaaaaggggccaccggtcgcccccccgcttccccgcacgcgctctccagccgcggccgcccgcctgccgcggtcaccccggcctctgcctctgtcccccagtgatcggatcaaggcgctgagcgaggccctgcctgcggggcggccatgcggcggtgacaggagcgcgaccgacacgcacgggcccctcgccccctctcgcctcccgtccgctcgccagctcccctcagccgaggctgctccgcggcggccgcagcccgcgcgcggcccacactcgcctcccctcggcacccccggccccggagctgcctggaggcggccgcactcggtgtaaagaactggccaagtccaaagccgaagtggcctgcattgcagtgtatgaaacagacgtgtttgtcgtcggaactgaaagaggacgtgcttttgtcaataccagaaaggattttcaaaaagattttgtaaaatattgtgttgaagaagaagaaaaagctgcagagatgcataaaatgaaatctacaacccaggcaaatcggatgagtgtagatgctgtagaaattgaaacactcagaaaaacagttgaggactatttctgcttttgctatgggaaagctttaggcaaatccacagtggtacctgtaccatatgagaagatgctgcgagaccagtcggctgtggtagtgcaggggcttccggaaggtgttgcctttaaacaccccgagaactatgatcttgcaaccctgaaatggattttggagaacaaagcagggatttcattcatcattaagagaccttttttagagccaaagaagcatgtaggtggtcgtgtgatggtaacagatgctgacaggtcaatactatctccaggtggaagttgtggccccatcaaagtgaaaactgaacccacagaagattctggcatttccctggaaatggcagctgtgacagtaaaggaagaatcagaagatcctgattattatcaatataacattcaagcaggcccttctgaaactgatgatgttgatgaaaaacagcccctatcgaagcctttgcaaggaagccaccattcttcagagggcaatgaaggcacagaaatggaagtaccagcagaagatgatgattattctccaccgtctaagagaccaaaggccaatgagctaccgcagccaccagtcccggaacccgccaatgctgggaagcggaaagtgagggagttcaacttcgagaaatggaatgctcgcatcactgatctacgtaaacaagttgaagaattgtttgaaaggaaatatgctcaagccataaaagccaaaggtccggtgacgatcccgtaccctcttttccagtctcatgttgaagatctttatgtagaaggacttcctgaaggaattccttttagaaggccatctacttacggaattcctcgcctggagaggatattacttgcaaaggaaaggattcgttttgtgattaagaaacatgagcttctgaattcaacacgtgaagatttacagcttgataagccagcttcaggagtaaaggaagaatggtatgccagaatcactaaattaagaaagatggtggatcagcttttctgcaaaaaatttgcggaagccttggggagcactgaagccaaggctgtaccgtaccaaaaatttgaggcacacccgaatgatctgtacgtggaaggactgccagaaaacattcctttccgaagtccctcatggtatggaatcccaaggctggaaaaaatcattcaagtgggcaatcgaattaaatttgttattaaaagaccagaacttctgactcacagtaccactgaagttactcagccaagaacgaatacaccagtcaaagaagattggaatgtcagaattaccaagctacggaagcaagtggaagagatttttaatttgaaatttgcttagatttgttgacagcggtttcctggagtgctgtcttgagaacgattctgaggaggctcagcaagaaagagtgtttcagttgattgggtgtgtctgtcatggagaaggaactcaagctcttggactcaccgaggcagtaaaagtaccatatcctgtgtttgaatcaaacccggagttcttgtatgtggaaggcttgccagaggggattcccttccgaagccctacctggtttggaattccacgacttgaaaggatcgtccgcgggagtaataaaatcaagttcgttgttaaaaaacctgaactagttatttcctacttgcctcctgggatggctagtaaaataaacactaaagctttgcagtcccccaaaagaccacgaagtcctgggagtaattcaaaggttcctgaaattgaggtcaccgtggaaggccctaataacaacaatcctcaaacctcagctgttcgaaccccgacccagactaacggttctaacgttcccttcaagccacgagggagagagttttcctttgaggcctggaatgccaaaatcacggacctaaaacagaaagttgaaaatctcttcaatgagaaatgtggggaagctcttggccttaaacaagctgtgaaggtgccgttcgcgttatttgagtctttcccggaagacttttatgtggaaggcttacctgagggtgtgccattccgaagaccatcgacttttggcattccgaggctggagaagatactcagaaacaaagccaaaattaagttcatcattaaaaagcccgaaatgtttgagacggcgattaaggagagcacctcctctaagagccctcccagaaaaataaattcatcacccaatgttaatactactgcatcaggtgttgaagaccttaacatcattcaggtgacaattccagatgatgataatgaaagactctcgaaagttgaaaaagctagacagctaagagaacaagtgaatgacctctttagtcggaaatttggtgaagctattggtatgggttttcctgtgaaagttccctacaggaaaatcacaattaaccctggctgtgtggtggttgatggcatgcccccgggggtgtccttcaaagcccccagctacctggaaatcagctccatgagaaggatcttagactctgccgagtttatcaaattcacggtcattagaccatttccaggacttgtgattaataaccagctggttgatcagagtgagtcagaaggccccgtgatacaagaatcagctgaaccaagccagttggaagttccagccacagaagaaataaaagagactgatggaagctctcagatcaagcaagaaccagaccccacgtggtagacctcttccctcctaggcttaaagtatcagtggttgagaagagcttttcggacctgttactaccccaagctgtagccttgagttacggtgtttattttccaatcaagtgaagatatctcctacttctcctactggaacatctcagcttctgcagtgaagaaaaattcctgtgatagttcagttctttagtttttctatttgaaaaaaaaaaatcatttaaatgatcctttgttcacggctctccttaatgactgagtgaacagttcctatctgtatatttgactaaaccttttcctaagctatctctcatggttcctatgtttttttatcataattaaaagcaaaaccatctggatcacctaacagtcagaggtcagtatctcagcgtgtgaattatagaggaaatacagagagaacctcttccacttttacttttcgtccaaataaaatgcatggtgtaccagaagttgaagatcgggttgaggattggggctagctcgatgacactaaggccccaacatcgcgggacctgctgtggcgcggattcttaggaacgctgttctagccggccccctctccaggggtcgccgtggccggcattatttcctagttcttcttgtaaccctgaggtgccagcgcggggagtgaggaggggtcagggggctaaggatgcaacctctgacgttctgcgccttcctaggagagtcttacatgtgttgagatttcacaagcaatgcgagttgtaaaataccagctctacaagaagctaggctctgtgacggcatagttttcagtagctttatcacaatattcacaatggagaattatatgacatggtagcagaaataggcccttttatgtgttgcttctattttacctcaaattgtagatatagggtaatcaataaaatccatccatgcctttcacacactaagt

SEQ ID NO: 4443 - protein, 474 aa, Homo sapiens; identical to SEQ ID NO: 4025

SEQ ID NO: 4444 - DNA, 4239 bp, Homo sapiens
aaaaaaaaaaaaaaaaaaaaaaaaaaaagaaaaaagaaaaaaaaaaggaggaggaggaggagggtgagagagaagctgggagagcagagaaaaggggccaccggtcgcccccccgcttccccgcacgcgctctccagccgcggccgcccgcctgccgcggtcaccccggcctctgcctctgtcccccagtgatcggatcaaggcgctgagcgaggccctgcctgcggggcggccatgcggcggtgacaggagcgcgaccgacacgcacgggcccctcgccccctctcgcctcccgtccgctcgccagctcccctcagccgaggctgctccgcggcggccgcagcccgcgcgcggcccacactcgcctcccctcggcacccccggccccggagctgcctggaggcggccgcactcggtgtaaagaactggccaagtccaaagccgaagtggcctgcattgcagtgtatgaaacagacgtgtttgtcgtcggaactgaaagaggacgtgcttttgtcaataccagaaaggattttcaaaaagattttgtaaaatattgtgttgaagaagaagaaaaagctgcagagatgcataaaatgaaatctacaacccaggcaaatcggatgagtgtagatgctgtagaaattgaaacactcagaaaaacagttgaggactatttctgcttttgctatgggaaagctttaggcaaatccacagtggtacctgtaccatatgagaagatgctgcgagaccagtcggctgtggtagtgcaggggcttccggaaggtgttgcctttaaacaccccgagaactatgatcttgcaaccctgaaatggattttggagaacaaagcagggatttcattcatcattaagagaccttttttagagccaaagaagcatgtaggtggtcgtgtgatggtaacagatgctgacaggtcaatactatctccaggtggaagttgtggccccatcaaagtgaaaactgaacccacagaagattctggcatttccctggaaatggcagctgtgacagtaaaggaagaatcagaagatcctgattattatcaatataacattcaaggaagccaccattcttcagagggcaatgaaggcacagaaatggaagtaccagcagaagatgatgattattctccaccgtctaagagaccaaaggccaatgagctaccgcagccaccagtcccggaacccgccaatgctgggaagcggaaagtgagggagttcaacttcgagaaatggaatgctcgcatcactgatctacgtaaacaagttgaagaattgtttgaaaggaaatatgctcaagccataaaagccaaaggtccggtgacgatcccgtaccctcttttccagtctcatgttgaagatctttatgtagaaggacttcctgaaggaattccttttagaaggccatctacttacggaattcctcgcctggagaggatattacttgcaaaggaaaggattcgttttgtgattaagaaacatgagcttctgaattcaacacgtgaagatttacagcttgataagccagcttcaggagtaaaggaagaatggtatgccagaatcactaaattaagaaagatggtggatcagcttttctgcaaaaaatttgcggaagccttggggagcactgaagccaaggctgtaccgtaccaaaaatttgaggcacacccgaatgatctgtacgtggaaggactgccagaaaacattcctttccgaagtccctcatggtatggaatcccaaggctggaaaaaatcattcaagtgggcaatcgaattaaatttgttattaaaagaccagaacttctgactcacagtaccactgaagttactcagccaagaacgaatacaccagtcaaagaagattggaatgtcagaattaccaagctacggaagcaagtggaagagatttttaatttgaaatttgcttagatttgttgacagcggtttcctggagtgctgtcttgagaacgattctgaggaggctcagcaagaaagagtgtttcagttgattgggtgtgtctgtcatggagaaggaactcaagctcttggactcaccgaggcagtaaaagtaccatatcctgtgtttgaatcaaacccggagttcttgtatgtggaaggcttgccagaggggattcccttccgaagccctacctggtttggaattccacgacttgaaaggatcgtccgcgggagtaataaaatcaagttcgttgttaaaaaacctgaactagttatttcctacttgcctcctgggatggctagtaaaataaacactaaagctttgcagtcccccaaaagaccacgaagtcctgggagtaattcaaaggttcctgaaattgaggtcaccgtggaaggccctaataacaacaatcctcaaacctcagctgttcgaaccccgacccagactaacggttctaacgttcccttcaagccacgagggagagagttttcctttgaggcctggaatgccaaaatcacggacctaaaacagaaagttgaaaatctcttcaatgagaaatgtggggaagctcttggccttaaacaagctgtgaaggtgccgttcgcgttatttgagtctttcccggaagacttttatgtggaaggcttacctgagggtgtgccattccgaagaccatcgacttttggcattccgaggctggagaagatactcagaaacaaagccaaaattaagttcatcattaaaaagcccgaaatgtttgagacggcgattaaggagagcacctcctctaagagccctcccagaaaaataaattcatcacccaatgttaatactactgcatcaggtgttgaagaccttaacatcattcaggtgacaattccagatgatgataatgaaagactctcgaaagttgaaaaagctagacagctaagagaacaagtgaatgacctctttagtcggaaatttggtgaagctattggtatgggttttcctgtgaaagttccctacaggaaaatcacaattaaccctggctgtgtggtggttgatggcatgcccccgggggtgtccttcaaagcccccagctacctggaaatcagctccatgagaaggatcttagactctgccgagtttatcaaattcacggtcattagaccatttccaggacttgtgattaataaccagctggttgatcagagtgagtcagaaggccccgtgatacaagaatcagctgaaccaagccagttggaagttccagccacagaagaaataaaagagactgatggaagctctcagatcaagcaagaaccagaccccacgtggtagacctcttccctcctaggcttaaagtatcagtggttgagaagagcttttcggacctgttactaccccaagctgtagccttgagttacggtgtttattttccaatcaagtgaagatatctcctacttctcctactggaacatctcagcttctgcagtgaagaaaaattcctgtgatagttcagttctttagtttttctatttgaaaaaaaaaaatcatttaaatgatcctttgttcacggctctccttaatgactgagtgaacagttcctatctgtatatttgactaaaccttttcctaagctatctctcatggttcctatgtttttttatcataattaaaagcaaaaccatctggatcacctaacagtcagaggtcagtatctcagcgtgtgaattatagaggaaatacagagagaacctcttccacttttacttttcgtccaaataaaatgcatggtgtaccagaagttgaagatcgggttgaggattggggctagctcgatgacactaaggccccaacatcgcgggacctgctgtggcgcggattcttaggaacgctgttctagccggccccctctccaggggtcgccgtggccggcattatttcctagttcttcttgtaaccctgaggtgccagcgcggggagtgaggaggggtcagggggctaaggatgcaacctctgacgttctgcgccttcctaggagagtcttacatgtgttgagatttcacaagcaatgcgagttgtaaaataccagctctacaagaagctaggctctgtgacggcatagttttcagtagctttatcacaatattcacaatggagaattatatgacatggtagcagaaataggcccttttatgtgttgcttctattttacctcaaattgtagatatagggtaatcaataaaatccatccatgcctttcacacactaagt

SEQ ID NO: 4445 - protein, 454 aa, Homo sapiens; identical to SEQ ID NO: 4239

SEQ ID NO: 4446 - DNA, 5197 bp, Homo sapiens
aaaaaaaaaaaaaaaaaaaaaaaaaaaagaaaaaagaaaaaaaaaaggaggaggaggaggagggtgagagagaagctgggagagcagagaaaaggggccaccggtcgcccccccgcttccccgcacgcgctctccagccgcggccgcccgcctgccgcggtcaccccggcctctgcctctgtcccccagtgatcggatcaaggcgctgagcgaggccctgcctgcggggcggccatgcggcggtgacaggagcgcgaccgacacgcacgggcccctcgccccctctcgcctcccgtccgctcgccagctcccctcagccgaggctgctccgcggcggccgcagcccgcgcgcggcccacactcgcctcccctcggcacccccggccccggagctgcctggaggcggccgcactcggggatcatggcccaagttgcaatgtccaccctccccgttgaagatgaggagtcctcggagagcaggatggtggtgacattcctcatgtcagctctcgagtccatgtgtaaagaactggccaagtccaaagccgaagtggcctgcattgcagtgtatgaaacagacgtgtttgtcgtcggaactgaaagaggacgtgcttttgtcaataccagaaaggattttcaaaaagattttgtaaaatattgtgttgaagaagaagaaaaagctgcagagatgcataaaatgaaatctacaacccaggcaaatcggatgagtgtagatgctgtagaaattgaaacactcagaaaaacagttgaggactatttctgcttttgctatgggaaagctttaggcaaatccacagtggtacctgtaccatatgagaagatgctgcgagaccagtcggctgtggtagtgcaggggcttccggaaggtgttgcctttaaacaccccgagaactatgatcttgcaaccctgaaatggattttggagaacaaagcagggatttcattcatcattaagagaccttttttagagccaaagaagcatgtaggtggtcgtgtgatggtaacagatgctgacaggtcaatactatctccaggtggaagttgtggccccatcaaagtgaaaactgaacccacagaagattctggaagccaccattcttcagagggcaatgaaggcacagaaatggaagtaccagcagaagattctactcaacatgtcccttcagaaacaagtgaggaccctgaagttgaggtgactattgaagatgatgattattctccaccgtctaagagaccaaaggccaatgagctaccgcagccaccagtcccggaacccgccaatgctgggaagcggaaagtgagggagttcaacttcgagaaatggaatgctcgcatcactgatctacgtaaacaagttgaagaattgtttgaaaggaaatatgctcaagccataaaagccaaaggtccggtgacgatcccgtaccctcttttccagtctcatgttgaagatctttatgtagaaggacttcctgaaggaattccttttagaaggccatctacttacggaattcctcgcctggagaggatattacttgcaaaggaaaggattcgttttgtgattaagaaacatgagcttctgaattcaacacgtgaagatttacagcttgataagccagcttcaggagtaaaggaagaatggtatgccagaatcactaaattaagaaagatggtggatcagcttttctgcaaaaaatttgcggaagccttggggagcactgaagccaaggctgtaccgtaccaaaaatttgaggcacacccgaatgatctgtacgtggaaggactgccagaaaacattcctttccgaagtccctcatggtatggaatcccaaggctggaaaaaatcattcaagtgggcaatcgaattaaatttgttattaaaagaccagaacttctgactcacagtaccactgaagttactcagccaagaacgaatacaccagtcaaagaagattggaatgtcagaattaccaagctacggaagcaagtggaagagatttttaatttgaaatttgcttagatttgttgacagcggtttcctggagtgctgtcttgagaacgattctgaggaggctcagcaagaaagagtgtttcagttgattgggtgtgtctgtcatggagaaggaactcaagctcttggactcaccgaggcagtaaaagtaccatatcctgtgtttgaatcaaacccggagttcttgtatgtggaaggcttgccagaggggattcccttccgaagccctacctggtttggaattccacgacttgaaaggatcgtccgcgggagtaataaaatcaagttcgttgttaaaaaacctgaactagttatttcctacttgcctcctgggatggctagtaaaataaacactaaagctttgcagtcccccaaaagaccacgaagtcctgggagtaattcaaaggttcctgaaattgaggtcaccgtggaaggccctaataacaacaatcctcaaacctcagctgttcgaaccccgacccagactaacggttctaacgttcccttcaagccacgagggagagagttttcctttgaggcctggaatgccaaaatcacggacctaaaacagaaagttgaaaatctcttcaatgagaaatgtggggaagctcttggccttaaacaagctgtgaaggtgccgttcgcgttatttgagtctttcccggaagacttttatgtggaaggcttacctgagggtgtgccattccgaagaccatcgacttttggcattccgaggctggagaagatactcagaaacaaagccaaaattaagttcatcattaaaaagcccgaaatgtttgagacggcgattaaggagagcacctcctctaagagccctcccagaaaaataaattcatcacccaatgttaatactactgcatcaggtgttgaagaccttaacatcattcaggtgacaattccagatgatgataatgaaagactctcgaaagttgaaaaagctagacagctaagagaacaagtgaatgacctctttagtcggaaatttggtgaagctattggtatgggttttcctgtgaaagttccctacaggaaaatcacaattaaccctggctgtgtggtggttgatggcatgcccccgggggtgtccttcaaagcccccagctacctggaaatcagctccatgagaaggatcttagactctgccgagtttatcaaattcacggtcattagaccatttccaggacttgtgattaataaccagctggttgatcagagtgagtcagaaggccccgtgatacaagaatcagctgaaccaagccagttggaagttccagccacagaaggtaaaaggacctcttccctcctagggtaaatcagcttctgtgtcagggatgctgtgtggtgtccatctgaaccccctgcatacgcgtagctaatgtgatctccccactttcacataagatggtggccctgccttcagggaatgtgggagccaggtgggagccttcccggatatttaagctagaagattctacagggagattctccttggatcaatatatgtctctcagtcaaagatgtaaaagcacttttgccttaaaaagaatgttctgtttctaaatagagtcaacgttgtcctcctcattggaattcactatgagtcagaatcattagactgacttttttttttccatagtaatagtattttgcagagtctcacagagctgcagatcttttgttcatcttgcagagttaacaagtctgatcctgttagtccagatttcttaaatttggccaagttataataggagcagtagcttgagacccgaagtcaggaaactttgacaatggatttttttttttaatccagagacttgtactggaatttgccttaccctgtcagctcatggacttaaggtttcatcccgctttatgagtgcttctgaatccaagtcattgttacctgaatttgcaaattaagttgtgatattcgtgactgttaaattcctgtaattagattaacctctttgcttgcttgtttgttttctctcctattttagcttaaagtatcagtggttgagaagagcttttcggacctgttactaccccaagctgtgtaatatacttgtataacagaaataccttctatacaaacctttttttctacttttagatagaaatgtctactttttcagcagttctgtgaattaaagagcagagtgactgtgggtctggaatggctggtgtacttgggaatgtactatcaggattttacagcaatgctgggaaatgacagggaaaatgacaggaatgaatctcaccagattttttatgtactcagcagagccttgagttacggtgtttattttccaatcaagtgaagatatctcctacttctcctactggaacatctcagcttctgcagtgaagaaaaattcctgtgatagttcagttctttagtttttctatttgaaaaaaaaaaatcatttaaatgatcctttgttcacggctctccttaatgactgagtgaacagttcctatctgtatatttgactaaaccttttcctaagctatctctcatggttcctatgtttttttatcataattaaaagcaaaaccatctggatcacctaacagtcagaggtcagtatctcagcgtgtgaattatagaggaaatacagagagaacctcttccacttttacttttcgtccaaataaaatgcatggtgtaccagaagttgaagatcgggttgaggattggggctagctcgatgacactaaggccccaacatcgcgggacctgctgtggcgcggattcttaggaacgctgttctagccggccccctctccaggggtcgccgtggccggcattatttcctagttcttcttgtaaccctgaggtgccagcgcggggagtgaggaggggtcagggggctaaggatgcaacctctgacgttctgcgccttcctaggagagtcttacatgtgttgagatttcacaagcaatgcgagttgtaaaataccagctctacaagaagctaggctctgtgacggcatagttttcagtagctttatcacaatattcacaatggagaattatatgacatggtagcagaaataggcccttttatgtgttgcttctattttacctcaaattgtagatatagggtaatcaataaaatccatccatgcctttcacacactaagt

SEQ ID NO: 4447 - protein, 538 aa, Homo sapiens; identical to SEQ ID NO: 4183

SEQ ID NO: 4448 - DNA, 3835 bp, Homo sapiens
aaaaaaaaaaaaaaaaaaaaaaaaaaaagaaaaaagaaaaaaaaaaggaggaggaggaggagggtgagagagaagctgggagagcagagaaaaggggccaccggtcgcccccccgcttccccgcacgcgctctccagccgcggccgcccgcctgccgcggtcaccccggcctctgcctctgtcccccagtgatcggatcaaggcgctgagcgaggccctgcctgcggggcggccatgcggcggtgacaggagcgcgaccgacacgcacgggcccctcgccccctctcgcctcccgtccgctcgccagctcccctcagccgaggctgctccgcggcggccgcagcccgcgcgcggcccacactcgcctcccctcggcacccccggccccggagctgcctggaggcggccgcactcggggatcatggcccaagttgcaatgtccaccctccccgttgaagatgaggagtcctcggagagcaggatggtggtgacattcctcatgtcagctctcgagtccatgtgtaaagaactggccaagtccaaagccgaagtggcctgcattgcagtgtatgaaacagacgtgtttgtcgtcggaactgaaagaggacgtgcttttgtcaataccagaaaggattttcaaaaagattttgtaaaatattgtgttgaagaagaagaaaaagctgcagagatgcataaaatgaaatctacaacccaggcaaatcggatgagtgtagatgctgtagaaattgaaacactcagaaaaacagttgaggactatttctgcttttgctatgggaaagctttaggcaaatccacagtggtacctgtaccatatgagaagatgctgcgagaccagtcggctgtggtagtgcaggggcttccggaaggtgttgcctttaaacaccccgagaactatgatcttgcaaccctgaaatggattttggagaacaaagcagggatttcattcatcattaagagaccttttttagagccaaagaagcatgtaggtggtcgtgtgatggtaacagatgctgacaggtcaatactatctccaggtggaagttgtggccccatcaaagtgaaaactgaacccacagaagattctggcatttccctggaaatggcagctgtgacagtaaaggaagaatcagaagatcctgattattatcaatataacattcaaggaagccaccattcttcagagggcaatgaaggcacagaaatggaagtaccagcagaagatgatgattattctccaccgtctaagagaccaaaggccaatgagctaccgcagccaccagtcccggaacccgccaatgctgggaagcggaaagtgagggagttcaacttcgagaaatggaatgctcgcatcactgatctacgtaaacaagttgaagaattgtttgaaaggaaatatgctcaagccataaaagccaaaggtccggtgacgatcccgtaccctcttttccagtctcatgttgaagatctttatgtagaaggacttcctgaaggaattccttttagaaggccatctacttacggaattcctcgcctggagaggatattacttgcaaaggaaaggattcgttttgtgattaagaaacatgagcttctgaattcaacacgtgaagatttacagcttgataagccagcttcaggagtaaaggaagaatggtatgccagaatcactaaattaagaaagatggtggatcagcttttctgcaaaaaatttgcggaagccttggggagcactgaagccaaggctgtaccgtaccaaaaatttgaggcacacccgaatgatctgtacgtggaaggactgccagaaaacattcctttccgaagtccctcatggtatggaatcccaaggctggaaaaaatcattcaagtgggcaatcgaattaaatttgttattaaaagaccagaacttctgactcacagtaccactgaagttactcagccaagaacgaatacaccagctcaagctcttggactcaccgaggcagtaaaagtaccatatcctgtgtttgaatcaaacccggagttcttgtatgtggaaggcttgccagaggggattcccttccgaagccctacctggtttggaattccacgacttgaaaggatcgtccgcgggagtaataaaatcaagttcgttgttaaaaaacctgaactagttatttcctacttgcctcctgggatggctagtaaaataaacactaaagctttgcagtcccccaaaagaccacgaagtcctgggagtaattcaaaggttcctgaaattgaggtcaccgtggaaggccctaataacaacaatcctcaaacctcagctgttcgaaccccgacccagactaacggttctaacgttcccttcaagccacgagggagagagttttcctttgaggcctggaatgccaaaatcacggacctaaaacagaaagttgaaaatctcttcaatgagaaatgtggggaagctcttggccttaaacaagctgtgaaggtgccgttcgcgttatttgagtctttcccggaagacttttatgtggaaggcttacctgagggtgtgccattccgaagaccatcgacttttggcattccgaggctggagaagatactcagaaacaaagccaaaattaagttcatcattaaaaagcccgaaatgtttgagacggcgattaaggagagcacctcctctaagagccctcccagaaaaataaattcatcacccaatgttaatactactgcatcaggtgttgaagaccttaacatcattcaggtgacaattccagatgatgataatgaaagactctcgaaagttgaaaaagctagacagctaagagaacaagtgaatgacctctttagtcggaaatttggtgaagctattggtatgggttttcctgtgaaagttccctacaggaaaatcacaattaaccctggctgtgtggtggttgatggcatgcccccgggggtgtccttcaaagcccccagctacctggaaatcagctccatgagaaggatcttagactctgccgagtttatcaaattcacggtcattagaccatttccaggacttgtgattaataaccagctggttgatcagagtgagtcagaaggccccgtgatacaagaatcagctgaaccaagccagttggaagttccagccacagaagaaataaaagagactgatggaagctctcagatcaagcaagaaccagaccccacgtggtagacctcttccctcctaggcaaaaccatctggatcacctaacagtcagaggtcagtatctcagcgtgtgaattatagaggaaatacagagagaacctcttccacttttacttttcgtccaaataaaatgcatggtgtaccagaagttgaagatcgggttgaggattggggctagctcgatgacactaaggccccaacatcgcgggacctgctgtggcgcggattcttaggaacgctgttctagccggccccctctccaggggtcgccgtggccggcattatttcctagttcttcttgtaaccctgaggtgccagcgcggggagtgaggaggggtcagggggctaaggatgcaacctctgacgttctgcgccttcctaggagagtcttacatgtgttgagatttcacaagcaatgcgagttgtaaaataccagctctacaagaagctaggctctgtgacggcatagttttcagtagctttatcacaatattcacaatggagaattatatgacatggtagcagaaataggcccttttatgtgttgcttctattttacctcaaattgtagatatagggtaatcaataaaatccatccatgcctttcacacactaagt

SEQ ID NO: 4449 - protein, 933 aa, Homo sapiens; identical to SEQ ID NO: 4067

SEQ ID NO: 4450 - DNA, 7029 bp, Homo sapiens
aaaaaaaaaaaaaaaaaaaaaaaaaaaagaaaaaagaaaaaaaaaaggaggaggaggaggagggtgagagagaagctgggagagcagagaaaaggggccaccggtcgcccccccgcttccccgcacgcgctctccagccgcggccgcccgcctgccgcggtcaccccggcctctgcctctgtcccccagtgatcggatcaaggcgctgagcgaggccctgcctgcggggcggccatgcggcggtgacaggagcgcgaccgacacgcacgggcccctcgccccctctcgcctcccgtccgctcgccagctcccctcagccgaggctgctccgcggcggccgcagcccgcgcgcggcccacactcgcctcccctcggcacccccggccccggagctgcctggaggcggccgcactcggtgtaaagaactggccaagtccaaagccgaagtggcctgcattgcagtgtatgaaacagacgtgtttgtcgtcggaactgaaagaggacgtgcttttgtcaataccagaaaggattttcaaaaagattttgtaaaatattgtgttgaagaagaagaaaaagctgcagagatgcataaaatgaaatctacaacccaggcaaatcggatgagtgtagatgctgtagaaattgaaacactcagaaaaacagttgaggactatttctgcttttgctatgggaaagctttaggcaaatccacagtggtacctgtaccatatgagaagatgctgcgagaccagtcggctgtggtagtgcaggggcttccggaaggtgttgcctttaaacaccccgagaactatgatcttgcaaccctgaaatggattttggagaacaaagcagggatttcattcatcattaagagaccttttttagagccaaagaagcatgtaggtggtcgtgtgatggtaacagatgctgacaggtcaatactatctccaggtggaagttgtggccccatcaaagtgaaaactgaacccacagaagattctggaagccaccattcttcagagggcaatgaaggcacagaaatggaagtaccagcagaagattctactcaacatgtcccttcagaaacaagtgaggaccctgaagttgaggtgactattgaagatgatgattattctccaccgtctaagagaccaaaggccaatgagctaccgcagccaccagtcccggaacccgccaatgctgggaagcggaaagtgagggagttcaacttcgagaaatggaatgctcgcatcactgatctacgtaaacaagttgaagaattgtttgaaaggaaatatgctcaagccataaaagccaaaggtccggtgacgatcccgtaccctcttttccagtctcatgttgaagatctttatgtagaaggacttcctgaaggaattccttttagaaggccatctacttacggaattcctcgcctggagaggatattacttgcaaaggaaaggattcgttttgtgattaagaaacatgagcttctgaattcaacacgtgaagatttacagcttgataagccagcttcaggagtaaaggaagaatggtatgccagaatcactaaattaagaaagatggtggatcagcttttctgcaaaaaatttgcggaagccttggggagcactgaagccaaggctgtaccgtaccaaaaatttgaggcacacccgaatgatctgtacgtggaaggactgccagaaaacattcctttccgaagtccctcatggtatggaatcccaaggctggaaaaaatcattcaagtgggcaatcgaattaaatttgttattaaaagaccagaacttctgactcacagtaccactgaagttactcagccaagaacgaatacaccagctcaagctcttggactcaccgaggcagtaaaagtaccatatcctgtgtttgaatcaaacccggagttcttgtatgtggaaggcttgccagaggggattcccttccgaagccctacctggtttggaattccacgacttgaaaggatcgtccgcgggagtaataaaatcaagttcgttgttaaaaaacctgaactagttatttcctacttgcctcctgggatggctagtaaaataaacactaaagctttgcagtcccccaaaagaccacgaagtcctgggagtaattcaaaggttcctgaaattgaggtcaccgtggaaggccctaataacaacaatcctcaaacctcagctgttcgaaccccgacccagactaacggttctaacgttcccttcaagccacgagggagagagttttcctttgaggcctggaatgccaaaatcacggacctaaaacagaaagttgaaaatctcttcaatgagaaatgtggggaagctcttggccttaaacaagctgtgaaggtgccgttcgcgttatttgagtctttcccggaagacttttatgtggaaggcttacctgagggtgtgccattccgaagaccatcgacttttggcattccgaggctggagaagatactcagaaacaaagccaaaattaagttcatcattaaaaagcccgaaatgtttgagacggcgattaaggagagcacctcctctaagagccctcccagaaaaataaattcatcacccaatgttaatactactgcatcaggtgttgaagaccttaacatcattcaggtgacaattccagatgatgataatgaaagactctcgaaagttgaaaaagctagacagctaagagaacaagtgaatgacctctttagtcggaaatttggtgaagctattggtatgggttttcctgtgaaagttccctacaggaaaatcacaattaaccctggctgtgtggtggttgatggcatgcccccgggggtgtccttcaaagcccccagctacctggaaatcagctccatgagaaggatcttagactctgccgagtttatcaaattcacggtcattaggtaagtgagagtttcctgcttagtcacaggagcgaatctggagctcatgaggctgactcttctaaaatgcagccacaggtagtcatcgaatccggcttcctatgctgtgcaatcaacaaatcaaaataacttgtgtcatcattagaatgtcagatgtgcttctacgaactaagctgactcttttaattctttggcaaagggttggcaaactaggactgtttgccaaattcaggctgcctcctatttttagagtcttcctgaaacacagctacacccgtattatccatggctgctttcctgtcacagtgagtaagtagctgggactgagaaggcatggcctccaaagtctaaaatatttactctctagcactttgtagaaaaaccttagctaggcacagtggctaacgcctgtaatcccagcattttgggaggccaaggcaggcagatcacctgaggtcaggagttccagaccagcctggccaacatggtgaaatcccatctctacaaaaataaaacagttagctgggcatgatggcgggtgcctgtaatcccagctactcgggaggctgaggcaggatagtcgcttgaacccaggaggtggaggttgcaatgagccaagatcatgccactgcactccagcctggacgacagagtgagactccatcacaagaaaaaaagaactttgtcaacctctgtcttagggcgccttgtcacaggcttcgggtcagacggattcaaccttgcatcagccatttgttagccaggtcactctgttctttgtctgtaaatgagattgatcgttgttcccactgagagtgtcagctccttcccgtagagcaggcatgatgattgtactcacctctgacaccattgtgagtgccacattccttcccacgtccttgtcactgtaagagatgcccacctgagcaccaaccccaggttatcttcccctttgtcttccagccccccagaaacagctacgactcaacctacccaatcatttcatcatcagattgccactgtctctagttcaggtctcttgggactggcactcagaaatctcataataaatcctcttgaggcttctcatacactcgtcttcttccaatcttctttccctcaaaatctcatattttggttccacttcacccaccgtcattctccatatcactcccaggagttaggcaaaaagccccttccgttcttccgtatgttaaacttagaatcactctgttccctgctctgcgtttctattttttgtttttcctccatttactagtagcttaacactttctaacagtgttcttattattgatacgtatctatctcttccataagcttataaggtcacggataatacttctcattgtagtacgtaaatgacgtgggctagatatgagttgaataaacagttatacctgtaaattcttacagagtgaaaataaattgttatactttacaatttgtttctctctttagaccatttccaggacttgtgattaataaccgtgagtattttgtgaagtgttttgtttttgttttttcctggggtctgacgtgtgtgcgtgtgagtgtgtatacatgcttaacgtatatcacgttacttcacctatgtcagtaaccaggccaaatacttgttttagccctcagtaaaaacaccaggcacttcctagttgtaaaattattcaagcttcttaacttcctatcctcgatgcacttaatcataaaatggtaataatagcaccgattttgggggagtcgttccagtagatggaaagcatctggaacaggtgtcagcaagctcctgccgacgtgtatgcataaagttttattgaaaccaccatcgtgtccatttgtttatggcagaactgagagatggcagcagcaagtgtgtgcctgcaaaacctaaaatatttactaattggctctgcaagaaaagagtttgcatccccctaacctagaacagtgtctagcctctagtatgtgtttagcctacagtatgtgctcagcgaatacaatctatatttattactgcttttatgactgttataattactgtgcttggatttcgttacaaagtaagtcacaatgtgcctgcttctgttagtatttcagcacagtgcctggcacacatggggctctcaaatattgctgagcgagtgaacaaatgtcctttcaattccttaacgttgatgtcattttcaatagtattttgagccaaacttaattttgcgagtgtgttttgttttcttaactttattattaaaaatgtataaaagtgaggccaggcgtggtggctcacgcctgtaatcccagcagtttgggaggctgaggcaggcggatcagttgaggttgggagttggagaccagcccgtccaacatggtgaaagcctgtctctactaaaaatacaaaaatcagctgggtgtggtggcgcgtgcctgtaatcccagctactcaggaggctgaggcaggagagttgcttgaatcctagaggtggaggttgcagtgagctgagatcgtgccattgcactccagcctgggcaacaagagcaaaactctgtcccaataaataaataaataaaatgttctcttttgttcctgttcttgtgcggtagtgtggtatagagttttatggtaattactgtgaattagtgattctgagggacatatcagaactctgaggtttgtttccttctcatcttgagggaaacagcaaatgtatgttaaaatgcttttccaagggaacaacacatccttacattatttaaaccaatctgcttcattttcagagctggttgatcagagtgagtcagaaggccccgtgatacaagaatcagctgaaccaagccagttggaagttccagccacagaagaaataaaagagactgatggaagctctcagatcaagcaagaaccagaccccacgtggtagacctcttccctcctaggcttaaagtatcagtggttgagaagagcttttcggacctgttactaccccaagctgtgtaatatacttgtataacagaaataccttctatacaaacctttttttctacttttagatagaaatgtctactttttcagcagttctgtgaattaaagagcagagtgactgtgggtctggaatggctggtgtacttgggaatgtactatcaggattttacagcaatgctgggaaatgacagggaaaatgacaggaatgaatctcaccagattttttatgtactcagcagagccttgagttacggtgtttattttccaatcaagtgaagatatctcctacttctcctactggaacatctcagcttctgcagtgaagaaaaattcctgtgatagttcagttctttagtttttctatttgaaaaaaaaaaatcatttaaatgatcctttgttcacggctctccttaatgactgagtgaacagttcctatctgtatatttgactaaaccttttcctaagctatctctcatggttcctatgtttttttatcataattaaaagcaaaaccatctggatcacctaacagtcagaggtcagtatctcagcgtgtgaattatagaggaaatacagagagaacctcttccacttttacttttcgtccaaataaaatgcatggtgtaccagaagttgaagatcgggttgaggattggggctagctcgatgacactaaggccccaacatcgcgggacctgctgtggcgcggattcttaggaacgctgttctagccggccccctctccaggggtcgccgtggccggcattatttcctagttcttcttgtaaccctgaggtgccagcgcggggagtgaggaggggtcagggggctaaggatgcaacctctgacgttctgcgccttcctaggagagtcttacatgtgttgagatttcacaagcaatgcgagttgtaaaataccagctctacaagaagctaggctctgtgacggcatagttttcagtagctttatcacaatattcacaatggagaattatatgacatggtagcagaaataggcccttttatgtgttgcttctattttacctcaaattgtagatatagggtaatcaataaaatccatccatgcctttcacacactaagt

SEQ ID NO: 4451 - protein, 783 aa, Homo sapiens; identical to SEQ ID NO: 4261

SEQ ID NO: 4452 - DNA, 7172 bp, Homo sapiens
aaaaaaaaaaaaaaaaaaaaaaaaaaaagaaaaaagaaaaaaaaaaggaggaggaggaggagggtgagagagaagctgggagagcagagaaaaggggccaccggtcgcccccccgcttccccgcacgcgctctccagccgcggccgcccgcctgccgcggtcaccccggcctctgcctctgtcccccagtgatcggatcaaggcgctgagcgaggccctgcctgcggggcggccatgcggcggtgacaggagcgcgaccgacacgcacgggcccctcgccccctctcgcctcccgtccgctcgccagctcccctcagccgaggctgctccgcggcggccgcagcccgcgcgcggcccacactcgcctcccctcggcacccccggccccggagctgcctggaggcggccgcactcggtgtaaagaactggccaagtccaaagccgaagtggcctgcattgcagtgtatgaaacagacgtgtttgtcgtcggaactgaaagaggacgtgcttttgtcaataccagaaaggattttcaaaaagattttgtaaaatattgtgttgaagaagaagaaaaagctgcagagatgcataaaatgaaatctacaacccaggcaaatcggatgagtgtagatgctgtagaaattgaaacactcagaaaaacagttgaggactatttctgcttttgctatgggaaagctttaggcaaatccacagtggtacctgtaccatatgagaagatgctgcgagaccagtcggctgtggtagtgcaggggcttccggaaggtgttgcctttaaacaccccgagaactatgatcttgcaaccctgaaatggattttggagaacaaagcagggatttcattcatcattaagagaccttttttagagccaaagaagcatgtaggtggtcgtgtgatggtaacagatgctgacaggtcaatactatctccaggtggaagttgtggccccatcaaagtgaaaactgaacccacagaagattctggcatttccctggaaatggcagctgtgacagtaaaggaagaatcagaagatcctgattattatcaatataacattcaagcaggcccttctgaaactgatgatgttgatgaaaaacagcccctatcgaagcctttgcaaggaagccaccattcttcagagggcaatgaaggcacagaaatggaagtaccagcagaagattctactcaacatgtcccttcagaaacaagtgaggaccctgaagttgaggtgactattgaagatgatgattattctccaccgtctaagagaccaaaggccaatgagctaccgcagccaccagtcccggaacccgccaatgctgggaagcggaaagtgagggagttcaacttcgagaaatggaatgctcgcatcactgatctacgtaaacaagttgaagaattgtttgaaaggaaatatgctcaagccataaaagccaaaggtccggtgacgatcccgtaccctcttttccagtctcatgttgaagatctttatgtagaaggacttcctgaaggaattccttttagaaggccatctacttacggaattcctcgcctggagaggatattacttgcaaaggaaaggattcgttttgtgattaagaaacatgagcttctgaattcaacacgtgaagatttacagcttgataagccagcttcaggagtaaaggaagaatggtatgccagaatcactaaattaagaaagatggtggatcagcttttctgcaaaaaatttgcggaagccttggggagcactgaagccaaggctgtaccgtaccaaaaatttgaggcacacccgaatgatctgtacgtggaaggactgccagaaaacattcctttccgaagtccctcatggtatggaatcccaaggctggaaaaaatcattcaagtgggcaatcgaattaaatttgttattaaaagaccagaacttctgactcacagtaccactgaagttactcagccaagaacgaatacaccagtcaaagaagattggaatgtcagaattaccaagctacggaagcaagtggaagagatttttaatttgaaatttgctcaagctcttggactcaccgaggcagtaaaagtaccatatcctgtgtttgaatcaaacccggagttcttgaaaggatcgtccgcgggagtaataaaatcaagttcgttgttaaaaaacctgaactagttatttcctacttgcctcctgggatggctagtaaaataaacactaaagctttgcagtcccccaaaagaccacgaagtcctgggagtaattcaaaggttcctgaaattgaggtcaccgtggaaggccctaataacaacaatcctcaaacctcagctgttcgaaccccgacccagactaacggttctaacgttcccttcaagccacgagggagagagttttcctttgaggcctggaatgccaaaatcacggacctaaaacagaaagttgaaaatctcttcaatgagaaatgtggggaagctcttggccttaaacaagctgtgaaggtgccgttcgcgttatttgagtctttcccggaagacttttatgtggaaggcttacctgagggtgtgccattccgaagaccatcgacttttggcattccgaggctggagaagatactcagaaacaaagccaaaattaagttcatcattaaaaagcccgaaatgtttgagacggcgattaaggagagcacctcctctaagagccctcccagaaaaataaattcatcacccaatgttaatactactgcatcaggtgttgaagaccttaacatcattcaggtgacaattccagatgatgataatgaaagactctcgaaagttgaaaaagctagacagctaagagaacaagtgaatgacctctttagtcggaaatttggtgaagctattggtatgggttttcctgtgaaagttccctacaggaaaatcacaattaaccctggctgtgtggtggttgatggcatgcccccgggggtgtccttcaaagcccccagctacctggaaatcagctccatgagaaggatcttagactctgccgagtttatcaaattcacggtcattaggtaagtgagagtttcctgcttagtcacaggagcgaatctggagctcatgaggctgactcttctaaaatgcagccacaggtagtcatcgaatccggcttcctatgctgtgcaatcaacaaatcaaaataacttgtgtcatcattagaatgtcagatgtgcttctacgaactaagctgactcttttaattctttggcaaagggttggcaaactaggactgtttgccaaattcaggctgcctcctatttttagagtcttcctgaaacacagctacacccgtattatccatggctgctttcctgtcacagtgagtaagtagctgggactgagaaggcatggcctccaaagtctaaaatatttactctctagcactttgtagaaaaaccttagctaggcacagtggctaacgcctgtaatcccagcattttgggaggccaaggcaggcagatcacctgaggtcaggagttccagaccagcctggccaacatggtgaaatcccatctctacaaaaataaaacagttagctgggcatgatggcgggtgcctgtaatcccagctactcgggaggctgaggcaggatagtcgcttgaacccaggaggtggaggttgcaatgagccaagatcatgccactgcactccagcctggacgacagagtgagactccatcacaagaaaaaaagaactttgtcaacctctgtcttagggcgccttgtcacaggcttcgggtcagacggattcaaccttgcatcagccatttgttagccaggtcactctgttctttgtctgtaaatgagattgatcgttgttcccactgagagtgtcagctccttcccgtagagcaggcatgatgattgtactcacctctgacaccattgtgagtgccacattccttcccacgtccttgtcactgtaagagatgcccacctgagcaccaaccccaggttatcttcccctttgtcttccagccccccagaaacagctacgactcaacctacccaatcatttcatcatcagattgccactgtctctagttcaggtctcttgggactggcactcagaaatctcataataaatcctcttgaggcttctcatacactcgtcttcttccaatcttctttccctcaaaatctcatattttggttccacttcacccaccgtcattctccatatcactcccaggagttaggcaaaaagccccttccgttcttccgtatgttaaacttagaatcactctgttccctgctctgcgtttctattttttgtttttcctccatttactagtagcttaacactttctaacagtgttcttattattgatacgtatctatctcttccataagcttataaggtcacggataatacttctcattgtagtacgtaaatgacgtgggctagatatgagttgaataaacagttatacctgtaaattcttacagagtgaaaataaattgttatactttacaatttgtttctctctttagaccatttccaggacttgtgattaataaccgtgagtattttgtgaagtgttttgtttttgttttttcctggggtctgacgtgtgtgcgtgtgagtgtgtatacatgcttaacgtatatcacgttacttcacctatgtcagtaaccaggccaaatacttgttttagccctcagtaaaaacaccaggcacttcctagttgtaaaattattcaagcttcttaacttcctatcctcgatgcacttaatcataaaatggtaataatagcaccgattttgggggagtcgttccagtagatggaaagcatctggaacaggtgtcagcaagctcctgccgacgtgtatgcataaagttttattgaaaccaccatcgtgtccatttgtttatggcagaactgagagatggcagcagcaagtgtgtgcctgcaaaacctaaaatatttactaattggctctgcaagaaaagagtttgcatccccctaacctagaacagtgtctagcctctagtatgtgtttagcctacagtatgtgctcagcgaatacaatctatatttattactgcttttatgactgttataattactgtgcttggatttcgttacaaagtaagtcacaatgtgcctgcttctgttagtatttcagcacagtgcctggcacacatggggctctcaaatattgctgagcgagtgaacaaatgtcctttcaattccttaacgttgatgtcattttcaatagtattttgagccaaacttaattttgcgagtgtgttttgttttcttaactttattattaaaaatgtataaaagtgaggccaggcgtggtggctcacgcctgtaatcccagcagtttgggaggctgaggcaggcggatcagttgaggttgggagttggagaccagcccgtccaacatggtgaaagcctgtctctactaaaaatacaaaaatcagctgggtgtggtggcgcgtgcctgtaatcccagctactcaggaggctgaggcaggagagttgcttgaatcctagaggtggaggttgcagtgagctgagatcgtgccattgcactccagcctgggcaacaagagcaaaactctgtcccaataaataaataaataaaatgttctcttttgttcctgttcttgtgcggtagtgtggtatagagttttatggtaattactgtgaattagtgattctgagggacatatcagaactctgaggtttgtttccttctcatcttgagggaaacagcaaatgtatgttaaaatgcttttccaagggaacaacacatccttacattatttaaaccaatctgcttcattttcagagctggttgatcagagtgagtcagaaggccccgtgatacaagaatcagctgaaccaagccagttggaagttccagccacagaagaaataaaagagactgatggaagctctcagatcaagcaagaaccagaccccacgtggtagacctcttccctcctaggcttaaagtatcagtggttgagaagagcttttcggacctgttactaccccaagctgtgtaatatacttgtataacagaaataccttctatacaaacctttttttctacttttagatagaaatgtctactttttcagcagttctgtgaattaaagagcagagtgactgtgggtctggaatggctggtgtacttgggaatgtactatcaggattttacagcaatgctgggaaatgacagggaaaatgacaggaatgaatctcaccagattttttatgtactcagcagagccttgagttacggtgtttattttccaatcaagtgaagatatctcctacttctcctactggaacatctcagcttctgcagtgaagaaaaattcctgtgatagttcagttctttagtttttctatttgaaaaaaaaaaatcatttaaatgatcctttgttcacggctctccttaatgactgagtgaacagttcctatctgtatatttgactaaaccttttcctaagctatctctcatggttcctatgtttttttatcataattaaaagcaaaaccatctggatcacctaacagtcagaggtcagtatctcagcgtgtgaattatagaggaaatacagagagaacctcttccacttttacttttcgtccaaataaaatgcatggtgtaccagaagttgaagatcgggttgaggattggggctagctcgatgacactaaggccccaacatcgcgggacctgctgtggcgcggattcttaggaacgctgttctagccggccccctctccaggggtcgccgtggccggcattatttcctagttcttcttgtaaccctgaggtgccagcgcggggagtgaggaggggtcagggggctaaggatgcaacctctgacgttctgcgccttcctaggagagtcttacatgtgttgagatttcacaagcaatgcgagttgtaaaataccagctctacaagaagctaggctctgtgacggcatagttttcagtagctttatcacaatattcacaatggagaattatatgacatggtagcagaaataggcccttttatgtgttgcttctattttacctcaaattgtagatatagggtaatcaataaaatccatccatgcctttcacacactaagt

SEQ ID NO: 4453 - protein, 536 aa, Homo sapiens; identical to SEQ ID NO: 4021

SEQ ID NO: 4454 - DNA, 5018 bp, Homo sapiens
aaaaaaaaaaaaaaaaaaaaaaaaaaaagaaaaaagaaaaaaaaaaggaggaggaggaggagggtgagagagaagctgggagagcagagaaaaggggccaccggtcgcccccccgcttccccgcacgcgctctccagccgcggccgcccgcctgccgcggtcaccccggcctctgcctctgtcccccagtgatcggatcaaggcgctgagcgaggccctgcctgcggggcggccatgcggcggtgacaggagcgcgaccgacacgcacgggcccctcgccccctctcgcctcccgtccgctcgccagctcccctcagccgaggctgctccgcggcggccgcagcccgcgcgcggcccacactcgcctcccctcggcacccccggccccggagctgcctggaggcggccgcactcggggatcatggcccaagttgcaatgtccaccctccccgttgaagatgaggagtcctcggagagcaggatggtggtgacattcctcatgtcagctctcgagtccatgtgtaaagaactggccaagtccaaagccgaagtggcctgcattgcagtgtatgaaacagacgtgtttgtcgtcggaactgaaagaggacgtgcttttgtcaataccagaaaggattttcaaaaagattttgtaaaatattgtgttgaagaagaagaaaaagctgcagagatgcataaaatgaaatctacaacccaggcaaatcggatgagtgtagatgctgtagaaattgaaacactcagaaaaacagttgaggactatttctgcttttgctatgggaaagctttaggcaaatccacagtggtacctgtaccatatgagaagatgctgcgagaccagtcggctgtggtagtgcaggggcttccggaaggtgttgcctttaaacaccccgagaactatgatcttgcaaccctgaaatggattttggagaacaaagcagggatttcattcatcattaagagaccttttttagagccaaagaagcatgtaggtggtcgtgtgatggtaacagatgctgacaggtcaatactatctccaggtggaagttgtggccccatcaaagtgaaaactgaacccacagaagattctggaagccaccattcttcagagggcaatgaaggcacagaaatggaagtaccagcagaagattctactcaacatgtcccttcagaaacaagtgaggaccctgaagttgaggtgactattgaagatgatgattattctccaccgtctaagagaccaaaggccaatgagctaccgcagccaccagtcccggaacccgccaatgctgggaagcggaaagtgagggagttcaacttcgagaaatggaatgctcgcatcactgatctacgtaaacaagttgaagaattgtttgaaaggaaatatgctcaagccataaaagccaaaggtccggtgacgatcccgtaccctcttttccagtctcatgttgaagatctttatgtagaaggacttcctgaaggaattccttttagaaggccatctacttacggaattcctcgcctggagaggatattacttgcaaaggaaaggattcgttttgtgattaagaaacatgagcttctgaattcaacacgtgaagatttacagcttgataagccagcttcaggagtaaaggaagaatggtatgccagaatcactaaattaagaaagatggtggatcagcttttctgcaaaaaatttgcggaagccttggggagcactgaagccaaggctgtaccgtaccaaaaatttgaggcacacccgaatgatctgtacgtggaaggactgccagaaaacattcctttccgaagtccctcatggtatggaatcccaaggctggaaaaaatcattcaagtgggcaatcgaattaaatttgttattaaaagaccagaacttctgactcacagtaccactgaagttactcagccaagaacgaatacaccagtcaaagaagattggaatgtcagaattaccaagctacggaagcaagtggaagagatttttaatttgaaatttgctcaagctcttggactcaccgaggcagtaaaagtaccatatcctgtgtttgaatcaaacccggagttcttgaaaggatcgtccgcgggagtaataaaatcaagttcgttgttaaaaaacctgaactagttatttcctacttgcctcctgggatggctagtaaaataaacactaaagctttgcagtcccccaaaagaccacgaagtcctgggagtaattcaaaggttcctgaaattgaggtcaccgtggaaggccctaataacaacaatcctcaaacctcagctgttcgaaccccgacccagactaacggttctaacgttcccttcaagccacgagggagagagttttcctttgaggcctggaatgccaaaatcacggacctaaaacagaaagttgaaaatctcttcaatgagaaatgtggggaagctcttggccttaaacaagctgtgaaggtgccgttcgcgttatttgagtctttcccggaagacttttatgtggaaggcttacctgagggtgtgccattccgaagaccatcgacttttggcattccgaggctggagaagatactcagaaacaaagccaaaattaagttcatcattaaaaagcccgaaatgtttgagacggcgattaaggagagcacctcctctaagagccctcccagaaaaataaattcatcacccaatgttaatactactgcatcaggtgttgaagaccttaacatcattcaggtgacaattccagatgatgataatgaaagactctcgaaagttgaaaaagctagacagctaagagaacaagtgaatgacctctttagtcggaaatttggtgaagctattggtatgggttttcctgtgaaagttccctacaggaaaatcacaattaaccctggctgtgtggtggttgatggcatgcccccgggggtgtccttcaaagcccccagctacctggaaatcagctccatgagaaggatcttagactctgccgagtttatcaaattcacggtcattagaccatttccaggacttgtgattaataaccagctggttgatcagagtgagtcagaaggccccgtgatacaagaatcagctgaaccaagccagttggaagttccagccacagaaggtaaaaggacctcttccctcctagggtaaatcagcttctgtgtcagggatgctgtgtggtgtccatctgaaccccctgcatacgcgtagctaatgtgatctccccactttcacataagatggtggccctgccttcagggaatgtgggagccaggtgggagccttcccggatatttaagctagaagattctacagggagattctccttggatcaatatatgtctctcagtcaaagatgtaaaagcacttttgccttaaaaagaatgttctgtttctaaatagagtcaacgttgtcctcctcattggaattcactatgagtcagaatcattagactgacttttttttttccatagtaatagtattttgcagagtctcacagagctgcagatcttttgttcatcttgcagagttaacaagtctgatcctgttagtccagatttcttaaatttggccaagttataataggagcagtagcttgagacccgaagtcaggaaactttgacaatggatttttttttttaatccagagacttgtactggaatttgccttaccctgtcagctcatggacttaaggtttcatcccgctttatgagtgcttctgaatccaagtcattgttacctgaatttgcaaattaagttgtgatattcgtgactgttaaattcctgtaattagattaacctctttgcttgcttgtttgttttctctcctattttagcttaaagtatcagtggttgagaagagcttttcggacctgttactaccccaagctgtgtaatatacttgtataacagaaataccttctatacaaacctttttttctacttttagatagaaatgtctactttttcagcagttctgtgaattaaagagcagagtgactgtgggtctggaatggctggtgtacttgggaatgtactatcaggattttacagcaatgctgggaaatgacagggaaaatgacaggaatgaatctcaccagattttttatgtactcagcagagccttgagttacggtgtttattttccaatcaagtgaagatatctcctacttctcctactggaacatctcagcttctgcagtgaagaaaaattcctgtgatagttcagttctttagtttttctatttgaaaaaaaaaaatcatttaaatgatcctttgttcacggctctccttaatgactgagtgaacagttcctatctgtatatttgactaaaccttttcctaagctatctctcatggttcctatgtttttttatcataattaaaagcaaaaccatctggatcacctaacagtcagaggtcagtatctcagcgtgtgaattatagaggaaatacagagagaacctcttccacttttacttttcgtccaaataaaatgcatggtgtaccagaagttgaagatcgggttgaggattggggctagctcgatgacactaaggccccaacatcgcgggacctgctgtggcgcggattcttaggaacgctgttctagccggccccctctccaggggtcgccgtggccggcattatttcctagttcttcttgtaaccctgaggtgccagcgcggggagtgaggaggggtcagggggctaaggatgcaacctctgacgttctgcgccttcctaggagagtcttacatgtgttgagatttcacaagcaatgcgagttgtaaaataccagctctacaagaagctaggctctgtgacggcatagttttcagtagctttatcacaatattcacaatggagaattatatgacatggtagcagaaataggcccttttatgtgttgcttctattttacctcaaattgtagatatagggtaatcaataaaatccatccatgcctttcacacactaagt

SEQ ID NO: 4455 - protein, 579 aa, Homo sapiens; identical to SEQ ID NO: 4111

SEQ ID NO: 4456 - DNA, 4455 bp, Homo sapiens
aaaaaaaaaaaaaaaaaaaaaaaaaaaagaaaaaagaaaaaaaaaaggaggaggaggaggagggtgagagagaagctgggagagcagagaaaaggggccaccggtcgcccccccgcttccccgcacgcgctctccagccgcggccgcccgcctgccgcggtcaccccggcctctgcctctgtcccccagtgatcggatcaaggcgctgagcgaggccctgcctgcggggcggccatgcggcggtgacaggagcgcgaccgacacgcacgggcccctcgccccctctcgcctcccgtccgctcgccagctcccctcagccgaggctgctccgcggcggccgcagcccgcgcgcggcccacactcgcctcccctcggcacccccggccccggagctgcctggaggcggccgcactcggggatcatggcccaagttgcaatgtccaccctccccgttgaagatgaggagtcctcggagagcaggatggtggtgacattcctcatgtcagctctcgagtccatgtgtaaagaactggccaagtccaaagccgaagtggcctgcattgcagtgtatgaaacagacgtgtttgtcgtcggaactgaaagaggacgtgcttttgtcaataccagaaaggattttcaaaaagattttgtaaaatattgtgttgaagaagaagaaaaagctgcagagatgcataaaatgaaatctacaacccaggcaaatcggatgagtgtagatgctgtagaaattgaaacactcagaaaaacagttgaggactatttctgcttttgctatgggaaagctttaggcaaatccacagtggtacctgtaccatatgagaagatgctgcgagaccagtcggctgtggtagtgcaggggcttccggaaggtgttgcctttaaacaccccgagaactatgatcttgcaaccctgaaatggattttggagaacaaagcagggatttcattcatcattaagagaccttttttagagccaaagaagcatgtaggtggtcgtgtgatggtaacagatgctgacaggtcaatactatctccaggtggaagttgtggccccatcaaagtgaaaactgaacccacagaagattctggcatttccctggaaatggcagctgtgacagtaaaggaagaatcagaagatcctgattattatcaatataacattcaaggaagccaccattcttcagagggcaatgaaggcacagaaatggaagtaccagcagaagattctactcaacatgtcccttcagaaacaagtgaggaccctgaagttgaggtgactattgaagatgatgattattctccaccgtctaagagaccaaaggccaatgagctaccgcagccaccagtcccggaacccgccaatgctgggaagcggaaagtgagggagttcaacttcgagaaatggaatgctcgcatcactgatctacgtaaacaagttgaagaattgtttgaaaggaaatatgctcaagccataaaagccaaaggtccggtgacgatcccgtaccctcttttccagtctcatgttgaagatctttatgtagaaggacttcctgaaggaattccttttagaaggccatctacttacggaattcctcgcctggagaggatattacttgcaaaggaaaggattcgttttgtgattaagaaacatgagcttctgaattcaacacgtgaagatttacagcttgataagccagcttcaggagtaaaggaagaatggtatgccagaatcactaaattaagaaagatggtggatcagcttttctgcaaaaaatttgcggaagccttggggagcactgaagccaaggctgtaccgtaccaaaaatttgaggcacacccgaatgatctgtacgtggaaggactgccagaaaacattcctttccgaagtccctcatggtatggaatcccaaggctggaaaaaatcattcaagtgggcaatcgaattaaatttgttattaaaagaccagaacttctgactcacagtaccactgaagttactcagccaagaacgaatacaccagtcaaagaagattggaatgtcagaattaccaagctacggaagcaagtggaagagatttttaatttgaaatttgctcaagctcttggactcaccgaggcagtaaaagtaccatatcctgtgtttgaatcaaacccggagttcttgaaaggatcgtccgcgggagtaataaaatcaagttcgttgttaaaaaacctgaactagttatttcctacttgcctcctgggatggctagtaaaataaacactaaagctttgcagtcccccaaaagaccacgaagtcctgggagtaattcaaaggttcctgaaattgaggtcaccgtggaaggccctaataacaacaatcctcaaacctcagctgttcgaaccccgacccagactaacggttctaacgttcccttcaagccacgagggagagagttttcctttgaggcctggaatgccaaaatcacggacctaaaacagaaagttgaaaatctcttcaatgagaaatgtggggaagctcttggccttaaacaagctgtgaaggtgccgttcgcgttatttgagtctttcccggaagacttttatgtggaaggcttacctgagggtgtgccattccgaagaccatcgacttttggcattccgaggctggagaagatactcagaaacaaagccaaaattaagttcatcattaaaaagcccgaaatgtttgagacggcgattaaggagagcacctcctctaagagccctcccagaaaaataaattcatcacccaatgttaatactactgcatcaggtgttgaagaccttaacatcattcaggtgacaattccagatgatgataatgaaagactctcgaaagttgaaaaagctagacagctaagagaacaagtgaatgacctctttagtcggaaatttggtgaagctattggtatgggttttcctgtgaaagttccctacaggaaaatcacaattaaccctggctgtgtggtggttgatggcatgcccccgggggtgtccttcaaagcccccagctacctggaaatcagctccatgagaaggatcttagactctgccgagtttatcaaattcacggtcattagaccatttccaggacttgtgattaataaccagctggttgatcagagtgagtcagaaggccccgtgatacaagaatcagctgaaccaagccagttggaagttccagccacagaagaaataaaagagactgatggaagctctcagatcaagcaagaaccagaccccacgtggtagacctcttccctcctaggcttaaagtatcagtggttgagaagagcttttcggacctgttactaccccaagctgtgtaatatacttgtataacagaaataccttctatacaaacctttttttctacttttagatagaaatgtctactttttcagcagttctgtgaattaaagagcagagtgactgtgggtctggaatggctggtgtacttgggaatgtactatcaggattttacagcaatgctgggaaatgacagggaaaatgacaggaatgaatctcaccagattttttatgtactcagcagagccttgagttacggtgtttattttccaatcaagtgaagatatctcctacttctcctactggaacatctcagcttctgcagtgaagaaaaattcctgtgatagttcagttctttagtttttctatttgaaaaaaaaaaatcatttaaatgatcctttgttcacggctctccttaatgactgagtgaacagttcctatctgtatatttgactaaaccttttcctaagctatctctcatggttcctatgtttttttatcataattaaaagcaaaaccatctggatcacctaacagtcagaggtcagtatctcagcgtgtgaattatagaggaaatacagagagaacctcttccacttttacttttcgtccaaataaaatgcatggtgtaccagaagttgaagatcgggttgaggattggggctagctcgatgacactaaggccccaacatcgcgggacctgctgtggcgcggattcttaggaacgctgttctagccggccccctctccaggggtcgccgtggccggcattatttcctagttcttcttgtaaccctgaggtgccagcgcggggagtgaggaggggtcagggggctaaggatgcaacctctgacgttctgcgccttcctaggagagtcttacatgtgttgagatttcacaagcaatgcgagttgtaaaataccagctctacaagaagctaggctctgtgacggcatagttttcagtagctttatcacaatattcacaatggagaattatatgacatggtagcagaaataggcccttttatgtgttgcttctattttacctcaaattgtagatatagggtaatcaataaaatccatccatgcctttcacacactaagt

SEQ ID NO: 4457 - protein, 605 aa, Homo sapiens; identical to SEQ ID NO: 4221

SEQ ID NO: 4458 - DNA, 4294 bp, Homo sapiens
aaaaaaaaaaaaaaaaaaaaaaaaaaaagaaaaaagaaaaaaaaaaggaggaggaggaggagggtgagagagaagctgggagagcagagaaaaggggccaccggtcgcccccccgcttccccgcacgcgctctccagccgcggccgcccgcctgccgcggtcaccccggcctctgcctctgtcccccagtgatcggatcaaggcgctgagcgaggccctgcctgcggggcggccatgcggcggtgacaggagcgcgaccgacacgcacgggcccctcgccccctctcgcctcccgtccgctcgccagctcccctcagccgaggctgctccgcggcggccgcagcccgcgcgcggcccacactcgcctcccctcggcacccccggccccggagctgcctggaggcggccgcactcggggatcatggcccaagttgcaatgtccaccctccccgttgaagatgaggagtcctcggagagcaggatggtggtgacattcctcatgtcagctctcgagtccatgtgtaaagaactggccaagtccaaagccgaagtggcctgcattgcagtgtatgaaacagacgtgtttgtcgtcggaactgaaagaggacgtgcttttgtcaataccagaaaggattttcaaaaagattttgtaaaatattgtgttgaagaagaagaaaaagctgcagagatgcataaaatgaaatctacaacccaggcaaatcggatgagtgtagatgctgtagaaattgaaacactcagaaaaacagttgaggactatttctgcttttgctatgggaaagctttaggcaaatccacagtggtacctgtaccatatgagaagatgctgcgagaccagtcggctgtggtagtgcaggggcttccggaaggtgttgcctttaaacaccccgagaactatgatcttgcaaccctgaaatggattttggagaacaaagcagggatttcattcatcattaagagaccttttttagagccaaagaagcatgtaggtggtcgtgtgatggtaacagatgctgacaggtcaatactatctccaggtggaagttgtggccccatcaaagtgaaaactgaacccacagaagattctggcatttccctggaaatggcagctgtgacagtaaaggaagaatcagaagatcctgattattatcaatataacattcaaggaagccaccattcttcagagggcaatgaaggcacagaaatggaagtaccagcagaagattctactcaacatgtcccttcagaaacaagtgaggaccctgaagttgaggtgactattgaagatgatgattattctccaccgtctaagagaccaaaggccaatgagctaccgcagccaccagtcccggaacccgccaatgctgggaagcggaaagtgagggagttcaacttcgagaaatggaatgctcgcatcactgatctacgtaaacaagttgaagaattgtttgaaaggaaatatgctcaagccataaaagccaaaggtccggtgacgatcccgtaccctcttttccagtctcatgttgaagatctttatgtagaaggacttcctgaaggaattccttttagaaggccatctacttacggaattcctcgcctggagaggatattacttgcaaaggaaaggattcgttttgtgattaagaaacatgagcttctgaattcaacacgtgaagatttacagcttgataagccagcttcaggagtaaaggaagaatggtatgccagaatcactaaattaagaaagatggtggatcagcttttctgcaaaaaatttgcggaagccttggggagcactgaagccaaggctgtaccgtaccaaaaatttgaggcacacccgaatgatctgtacgtggaaggactgccagaaaacattcctttccgaagtccctcatggtatggaatcccaaggctggaaaaaatcattcaagtgggcaatcgaattaaatttgttattaaaagaccagaacttctgactcacagtaccactgaagttactcagccaagaacgaatacaccagtcaaagaagattggaatgtcagaattaccaagctacggaagcaagtggaagagatttttaatttgaaatttgctcaagctcttggactcaccgaggcagtaaaagtaccatatcctgtgtttgaatcaaacccggagttcttgtatgtggaaggcttgccagaggggattcccttccgaagccctacctggtttggaattccacgacttgaaaggatcgtccgcgggagtaataaaatcaagttcgttgttaaaaaacctgaactagttatttcctacttgcctcctgggatggctagtaaaataaacactaaagctttgcagtcccccaaaagaccacgaagtcctgggagtaattcaaaggttcctgaaattgaggtcaccgtggaaggccctaataacaacaatcctcaaacctcagctgttcgaaccccgacccagactaacggttctaacgttcccttcaagccacgagggagagagttttcctttgaggcctggaatgccaaaatcacggacctaaaacagaaagttgaaaatctcttcaatgagaaatgtggggaagctcttggccttaaacaagctgtgaaggtgccgttcgcgttatttgagtctttcccggaagacttttatgtggaaggcttacctgagggtgtgccattccgaagaccatcgacttttggcattccgaggctggagaagatactcagaaacaaagccaaaattaagttcatcattaaaaagcccgaaatgtttgagacggcgattaaggagagcacctcctctaagagccctcccagaaaaataaattcatcacccaatgttaatactactgcatcaggtgttgaagaccttaacatcattcaggtgacaattccagatgatgataatgaaagactctcgaaagttgaaaaagctagacagctaagagaacaagtgaatgacctctttagtcggaaatttggtgaagctattggtatgggttttcctgtgaaagttccctacaggaaaatcacaattaaccctggctgtgtggtggttgatggcatgcccccgggggtgtccttcaaagcccccagctacctggaaatcagctccatgagaaggatcttagactctgccgagtttatcaaattcacggtcattagaccatttccaggacttgtgattaataaccagctggttgatcagagtgagtcagaaggccccgtgatacaagaatcagctgaaccaagccagttggaagttccagccacagaagaaataaaagagactgatggaagctctcagatcaagcaagaaccagaccccacgtggtagacctcttccctcctaggcttaaagtatcagtggttgagaagagcttttcggacctgttactaccccaagctgtagccttgagttacggtgtttattttccaatcaagtgaagatatctcctacttctcctactggaacatctcagcttctgcagtgaagaaaaattcctgtgatagttcagttctttagtttttctatttgaaaaaaaaaaatcatttaaatgatcctttgttcacggctctccttaatgactgagtgaacagttcctatctgtatatttgactaaaccttttcctaagctatctctcatggttcctatgtttttttatcataattaaaagcaaaaccatctggatcacctaacagtcagaggtcagtatctcagcgtgtgaattatagaggaaatacagagagaacctcttccacttttacttttcgtccaaataaaatgcatggtgtaccagaagttgaagatcgggttgaggattggggctagctcgatgacactaaggccccaacatcgcgggacctgctgtggcgcggattcttaggaacgctgttctagccggccccctctccaggggtcgccgtggccggcattatttcctagttcttcttgtaaccctgaggtgccagcgcggggagtgaggaggggtcagggggctaaggatgcaacctctgacgttctgcgccttcctaggagagtcttacatgtgttgagatttcacaagcaatgcgagttgtaaaataccagctctacaagaagctaggctctgtgacggcatagttttcagtagctttatcacaatattcacaatggagaattatatgacatggtagcagaaataggcccttttatgtgttgcttctattttacctcaaattgtagatatagggtaatcaataaaatccatccatgcctttcacacactaagt

SEQ ID NO: 4459 - protein, 978 aa, Homo sapiens; identical to SEQ ID NO: 470

SEQ ID NO: 4460 - DNA, 4146 bp, Homo sapiens
aaaaaaaaaaaaaaaaaaaaaaaaaaaagaaaaaagaaaaaaaaaaggaggaggaggaggagggtgagagagaagctgggagagcagagaaaaggggccaccggtcgcccccccgcttccccgcacgcgctctccagccgcggccgcccgcctgccgcggtcaccccggcctctgcctctgtcccccagtgatcggatcaaggcgctgagcgaggccctgcctgcggggcggccatgcggcggtgacaggagcgcgaccgacacgcacgggcccctcgccccctctcgcctcccgtccgctcgccagctcccctcagccgaggctgctccgcggcggccgcagcccgcgcgcggcccacactcgcctccccgttgaagatgaggagtcctcggagagcaggatggtggtgacattcctcatgtcagctctcgagtccatgtgtaaagaactggccaagtccaaagccgaagtggcctgcattgcagtgtatgaaacagacgtgtttgtcgtcggaactgaaagaggacgtgcttttgtcaataccagaaaggattttcaaaaagattttgtaaaatattgtgttgaagaagaagaaaaagctgcagagatgcataaaatgaaatctacaacccaggcaaatcggatgagtgtagatgctgtagaaattgaaacactcagaaaaacagttgaggactatttctgcttttgctatgggaaagctttaggcaaatccacagtggtacctgtaccatatgagaagatgctgcgagaccagtcggctgtggtagtgcaggggcttccggaaggtgttgcctttaaacaccccgagaactatgatcttgcaaccctgaaatggattttggagaacaaagcagggatttcattcatcattaagagaccttttttagagccaaagaagcatgtaggtggtcgtgtgatggtaacagatgctgacaggtcaatactatctccaggtggaagttgtggccccatcaaagtgaaaactgaacccacagaagattctggcatttccctggaaatggcagctgtgacagtaaaggaagaatcagaagatcctgattattatcaatataacattcaagcaggcccttctgaaactgatgatgttgatgaaaaacagcccctatcgaagcctttgcaaggaagccaccattcttcagagggcaatgaaggcacagaaatggaagtaccagcagaagattctactcaacatgtcccttcagaaacaagtgaggaccctgaagttgaggtgactattgaagatgatgattattctccaccgtctaagagaccaaaggccaatgagctaccgcagccaccagtcccggaacccgccaatgctgggaagcggaaagtgagggagttcaacttcgagaaatggaatgctcgcatcactgatctacgtaaacaagttgaagaattgtttgaaaggaaatatgctcaagccataaaagccaaaggtccggtgacgatcccgtaccctcttttccagtctcatgttgaagatctttatgtagaaggacttcctgaaggaattccttttagaaggccatctacttacggaattcctcgcctggagaggatattacttgcaaaggaaaggattcgttttgtgattaagaaacatgagcttctgaattcaacacgtgaagatttacagcttgataagccagcttcaggagtaaaggaagaatggtatgccagaatcactaaattaagaaagatggtggatcagcttttctgcaaaaaatttgcggaagccttggggagcactgaagccaaggctgtaccgtaccaaaaatttgaggcacacccgaatgatctgtacgtggaaggactgccagaaaacattcctttccgaagtccctcatggtatggaatcccaaggctggaaaaaatcattcaagtgggcaatcgaattaaatttgttattaaaagaccagaacttctgactcacagtaccactgaagttactcagccaagaacgaatacaccagctcaagctcttggactcaccgaggcagtaaaagtaccatatcctgtgtttgaatcaaacccggagttcttgtatgtggaaggcttgccagaggggattcccttccgaagccctacctggtttggaattccacgacttgaaaggatcgtccgcgggagtaataaaatcaagttcgttgttaaaaaacctgaactagttatttcctacttgcctcctgggatggctagtaaaataaacactaaagctttgcagtcccccaaaagaccacgaagtcctgggagtaattcaaaggttcctgaaattgaggtcaccgtggaaggccctaataacaacaatcctcaaacctcagctgttcgaaccccgacccagactaacggttctaacgttcccttcaagccacgagggagagagttttcctttgaggcctggaatgccaaaatcacggacctaaaacagaaagttgaaaatctcttcaatgagaaatgtggggaagctcttggccttaaacaagctgtgaaggtgccgttcgcgttatttgagtctttcccggaagacttttatgtggaaggcttacctgagggtgtgccattccgaagaccatcgacttttggcattccgaggctggagaagatactcagaaacaaagccaaaattaagttcatcattaaaaagcccgaaatgtttgagacggcgattaaggagagcacctcctctaagagccctcccagaaaaataaattcatcacccaatgttaatactactgcatcaggtgttgaagaccttaacatcattcaggtgacaattccagatgatgataatgaaagactctcgaaagttgaaaaagctagacagctaagagaacaagtgaatgacctctttagtcggaaatttggtgaagctattggtatgggttttcctgtgaaagttccctacaggaaaatcacaattaaccctggctgtgtggtggttgatggcatgcccccgggggtgtccttcaaagcccccagctacctggaaatcagctccatgagaaggatcttagactctgccgagtttatcaaattcacggtcattagaccatttccaggacttgtgattaataaccagctggttgatcagagtgagtcagaaggccccgtgatacaagaatcagctgaaccaagccagttggaagttccagccacagaagaaataaaagagactgatggaagctctcagatcaagcaagaaccagaccccacgtggtagacctcttccctcctaggagccttgagttacggtgtttattttccaatcaagtgaagatatctcctacttctcctactggaacatctcagcttctgcagtgaagaaaaattcctgtgatagttcagttctttagtttttctatttgaaaaaaaaaaatcatttaaatgatcctttgttcacggctctccttaatgactgagtgaacagttcctatctgtatatttgactaaaccttttcctaagctatctctcatggttcctatgtttttttatcataattaaaagcaaaaccatctggatcacctaacagtcagaggtcagtatctcagcgtgtgaattatagaggaaatacagagagaacctcttccacttttacttttcgtccaaataaaatgcatggtgtaccagaagttgaagatcgggttgaggattggggctagctcgatgacactaaggccccaacatcgcgggacctgctgtggcgcggattcttaggaacgctgttctagccggccccctctccaggggtcgccgtggccggcattatttcctagttcttcttgtaaccctgaggtgccagcgcggggagtgaggaggggtcagggggctaaggatgcaacctctgacgttctgcgccttcctaggagagtcttacatgtgttgagatttcacaagcaatgcgagttgtaaaataccagctctacaagaagctaggctctgtgacggcatagttttcagtagctttatcacaatattcacaatggagaattatatgacatggtagcagaaataggcccttttatgtgttgcttctattttacctcaaattgtagatatagggtaatcaataaaatccatccatgcctttcacacactaagt

SEQ ID NO: 4461 - protein, 954 aa, Homo sapiens; identical to SEQ ID NO: 4249

SEQ ID NO: 4462 - DNA, 3859 bp, Homo sapiens
aaaaaaaaaaaaaaaaaaaaaaaaaaaagaaaaaagaaaaaaaaaaggaggaggaggaggagggtgagagagaagctgggagagcagagaaaaggggccaccggtcgcccccccgcttccccgcacgcgctctccagccgcggccgcccgcctgccgcggtcaccccggcctctgcctctgtcccccagtgatcggatcaaggcgctgagcgaggccctgcctgcggggcggccatgcggcggtgacaggagcgcgaccgacacgcacgggcccctcgccccctctcgcctcccgtccgctcgccagctcccctcagccgaggctgctccgcggcggccgcagcccgcgcgcggcccacactcgcctcccctcggcacccccggccccggagctgcctggaggcggccgcactcggtgtaaagaactggccaagtccaaagccgaagtggcctgcattgcagtgtatgaaacagacgtgtttgtcgtcggaactgaaagaggacgtgcttttgtcaataccagaaaggattttcaaaaagattttgtaaaatattgtgttgaagaagaagaaaaagctgcagagatgcataaaatgaaatctacaacccaggcaaatcggatgagtgtagatgctgtagaaattgaaacactcagaaaaacagttgaggactatttctgcttttgctatgggaaagctttaggcaaatccacagtggtacctgtaccatatgagaagatgctgcgagaccagtcggctgtggtagtgcaggggcttccggaaggtgttgcctttaaacaccccgagaactatgatcttgcaaccctgaaatggattttggagaacaaagcagggatttcattcatcattaagagaccttttttagagccaaagaagcatgtaggtggtcgtgtgatggtaacagatgctgacaggtcaatactatctccaggtggaagttgtggccccatcaaagtgaaaactgaacccacagaagattctggcatttccctggaaatggcagctgtgacagtaaaggaagaatcagaagatcctgattattatcaatataacattcaagcaggcccttctgaaactgatgatgttgatgaaaaacagcccctatcgaagcctttgcaaggaagccaccattcttcagagggcaatgaaggcacagaaatggaagtaccagcagaagattctactcaacatgtcccttcagaaacaagtgaggaccctgaagttgaggtgactattgaagatgatgattattctccaccgtctaagagaccaaaggccaatgagctaccgcagccaccagtcccggaacccgccaatgctgggaagcggaaagtgagggagttcaacttcgagaaatggaatgctcgcatcactgatctacgtaaacaagttgaagaattgtttgaaaggaaatatgctcaagccataaaagccaaaggtccggtgacgatcccgtaccctcttttccagtctcatgttgaagatctttatgtagaaggacttcctgaaggaattccttttagaaggccatctacttacggaattcctcgcctggagaggatattacttgcaaaggaaaggattcgttttgtgattaagaaacatgagcttctgaattcaacacgtgaagatttacagcttgataagccagcttcaggagtaaaggaagaatggtatgccagaatcactaaattaagaaagatggtggatcagcttttctgcaaaaaatttgcggaagccttggggagcactgaagccaaggctgtaccgtaccaaaaatttgaggcacacccgaatgatctgtacgtggaaggactgccagaaaacattcctttccgaagtccctcatggtatggaatcccaaggctggaaaaaatcattcaagtgggcaatcgaattaaatttgttattaaaagaccagaacttctgactcacagtaccactgaagttactcagccaagaacgaatacaccagtcaaagaagattggaatgtcagaattaccaagctacggaagcaagtggaagagatttttaatttgaaatttgctcaagctcttggactcaccgaggcagtaaaagtaccatatcctgtgtttgaatcaaacccggagttcttgaaaggatcgtccgcgggagtaataaaatcaagttcgttgttaaaaaacctgaactagttatttcctacttgcctcctgggatggctagtaaaataaacactaaagctttgcagtcccccaaaagaccacgaagtcctgggagtaattcaaaggttcctgaaattgaggtcaccgtggaaggccctaataacaacaatcctcaaacctcagctgttcgaaccccgacccagactaacggttctaacgttcccttcaagccacgagggagagagttttcctttgaggcctggaatgccaaaatcacggacctaaaacagaaagttgaaaatctcttcaatgagaaatgtggggaagctcttggccttaaacaagctgtgaaggtgccgttcgcgttatttgagtctttcccggaagacttttatgtggaaggcttacctgagggtgtgccattccgaagaccatcgacttttggcattccgaggctggagaagatactcagaaacaaagccaaaattaagttcatcattaaaaagcccgaaatgtttgagacggcgattaaggagagcacctcctctaagagccctcccagaaaaataaattcatcacccaatgttaatactactgcatcaggtgttgaagaccttaacatcattcaggtgacaattccagatgatgataatgaaagactctcgaaagttgaaaaagctagacagctaagagaacaagtgaatgacctctttagtcggaaatttggtgaagctattggtatgggttttcctgtgaaagttccctacaggaaaatcacaattaaccctggctgtgtggtggttgatggcatgcccccgggggtgtccttcaaagcccccagctacctggaaatcagctccatgagaaggatcttagactctgccgagtttatcaaattcacggtcattagaccatttccaggacttgtgattaataaccagctggttgatcagagtgagtcagaaggccccgtgatacaagaatcagctgaaccaagccagttggaagttccagccacagaagaaataaaagagactgatggaagctctcagatcaagcaagaaccagaccccacgtggtagacctcttccctcctaggcaaaaccatctggatcacctaacagtcagaggtcagtatctcagcgtgtgaattatagaggaaatacagagagaacctcttccacttttacttttcgtccaaataaaatgcatggtgtaccagaagttgaagatcgggttgaggattggggctagctcgatgacactaaggccccaacatcgcgggacctgctgtggcgcggattcttaggaacgctgttctagccggccccctctccaggggtcgccgtggccggcattatttcctagttcttcttgtaaccctgaggtgccagcgcggggagtgaggaggggtcagggggctaaggatgcaacctctgacgttctgcgccttcctaggagagtcttacatgtgttgagatttcacaagcaatgcgagttgtaaaataccagctctacaagaagctaggctctgtgacggcatagttttcagtagctttatcacaatattcacaatggagaattatatgacatggtagcagaaataggcccttttatgtgttgcttctattttacctcaaattgtagatatagggtaatcaataaaatccatccatgcctttcacacactaagt

SEQ ID NO: 4463 - protein, 536 aa, Homo sapiens; identical to SEQ ID NO: 4021

SEQ ID NO: 4464 - DNA, 8004 bp, Homo sapiens
aaaaaaaaaaaaaaaaaaaaaaaaaaaagaaaaaagaaaaaaaaaaggaggaggaggaggagggtgagagagaagctgggagagcagagaaaaggggccaccggtcgcccccccgcttccccgcacgcgctctccagccgcggccgcccgcctgccgcggtcaccccggcctctgcctctgtcccccagtgatcggatcaaggcgctgagcgaggccctgcctgcggggcggccatgcggcggtgacaggagcgcgaccgacacgcacgggcccctcgccccctctcgcctcccgtccgctcgccagctcccctcagccgaggctgctccgcggcggccgcagcccgcgcgcggcccacactcgcctccccgttgaagatgaggagtcctcggagagcaggatggtggtgacattcctcatgtcagctctcgagtccatgtgtaaagaactggccaagtccaaagccgaagtggcctgcattgcagtgtatgaaacagacgtgtttgtcgtcggaactgaaagaggacgtgcttttgtcaataccagaaaggattttcaaaaagattttgtaaaatattgtgttgaagaagaagaaaaagctgcagagatgcataaaatgaaatctacaacccaggcaaatcggatgagtgtagatgctgtagaaattgaaacactcagaaaaacagttgaggactatttctgcttttgctatgggaaagctttaggcaaatccacagtggtacctgtaccatatgagaagatgctgcgagaccagtcggctgtggtagtgcaggggcttccggaaggtgttgcctttaaacaccccgagaactatgatcttgcaaccctgaaatggattttggagaacaaagcagggatttcattcatcattaagagaccttttttagagccaaagaagcatgtaggtggtcgtgtgatggtaacagatgctgacaggtcaatactatctccaggtggaagttgtggccccatcaaagtgaaaactgaacccacagaagattctggcatttccctggaaatggcagctgtgacagtaaaggaagaatcagaagatcctgattattatcaatataacattcaagcaggcccttctgaaactgatgatgttgatgaaaaacagcccctatcgaagcctttgcaaggaagccaccattcttcagagggcaatgaaggcacagaaatggaagtaccagcagaagatgatgattattctccaccgtctaagagaccaaaggccaatgagctaccgcagccaccagtcccggaacccgccaatgctgggaagcggaaagtgagggagttcaacttcgagaaatggaatgctcgcatcactgatctacgtaaacaagttgaagaattgtttgaaaggaaatatgctcaagccataaaagccaaaggtccggtgacgatcccgtaccctcttttccagtctcatgttgaagatctttatgtagaaggacttcctgaaggaattccttttagaaggccatctacttacggaattcctcgcctggagaggatattacttgcaaaggaaaggattcgttttgtgattaagaaacatgagcttctgaattcaacacgtgaagatttacagcttgataagccagcttcaggagtaaaggaagaatggtatgccagaatcactaaattaagaaagatggtggatcagcttttctgcaaaaaatttgcggaagccttggggagcactgaagccaaggctgtaccgtaccaaaaatttgaggcacacccgaatgatctgtacgtggaaggactgccagaaaacattcctttccgaagtccctcatggtatggaatcccaaggctggaaaaaatcattcaagtgggcaatcgaattaaatttgttattaaaagaccagaacttctgactcacagtaccactgaagttactcagccaagaacgaatacaccagtcaaagaagattggaatgtcagaattaccaagctacggaagcaagtggaagagatttttaatttgaaatttgcttagatttgttgacagcggtttcctggagtgctgtcttgagaacgattctgaggaggctcagcaagaaagagtgtttcagttgattgggtgtgtctgtcatggagaaggaactcaagctcttggactcaccgaggcagtaaaagtaccatatcctgtgtttgaatcaaacccggagttcttgtatgtggaaggcttgccagaggggattcccttccgaagccctacctggtttggaattccacgacttgaaaggatcgtccgcgggagtaataaaatcaagttcgttgttaaaaaacctgaactagttatttcctacttgcctcctgggatggctagtaaaataaacactaaagctttgcagtcccccaaaagaccacgaagtcctgggagtaattcaaaggttcctgaaattgaggtcaccgtggaaggccctaataacaacaatcctcaaacctcagctgttcgaaccccgacccagactaacggttctaacgttcccttcaagccacgagggagagagttttcctttgaggcctggaatgccaaaatcacggacctaaaacagaaagttgaaaatctcttcaatgagaaatgtggggaagctcttggccttaaacaagctgtgaaggtgccgttcgcgttatttgagtctttcccggaagacttttatgtggaaggcttacctgagggtgtgccattccgaagaccatcgacttttggcattccgaggctggagaagatactcagaaacaaagccaaaattaagttcatcattaaaaagcccgaaatgtttgagacggcgattaaggagagcacctcctctaagagccctcccagaaaaataaattcatcacccaatgttaatactactgcatcaggtgttgaagaccttaacatcattcaggtgacaattccagatgatgataatgaaagactctcgaaagttgaaaaagctagacagctaagagaacaagtgaatgacctctttagtcggaaatttggtgaagctattggtatgggttttcctgtgaaagttccctacaggaaaatcacaattaaccctggctgtgtggtggttgatggcatgcccccgggggtgtccttcaaagcccccagctacctggaaatcagctccatgagaaggatcttagactctgccgagtttatcaaattcacggtcattaggtaagtgagagtttcctgcttagtcacaggagcgaatctggagctcatgaggctgactcttctaaaatgcagccacaggtagtcatcgaatccggcttcctatgctgtgcaatcaacaaatcaaaataacttgtgtcatcattagaatgtcagatgtgcttctacgaactaagctgactcttttaattctttggcaaagggttggcaaactaggactgtttgccaaattcaggctgcctcctatttttagagtcttcctgaaacacagctacacccgtattatccatggctgctttcctgtcacagtgagtaagtagctgggactgagaaggcatggcctccaaagtctaaaatatttactctctagcactttgtagaaaaaccttagctaggcacagtggctaacgcctgtaatcccagcattttgggaggccaaggcaggcagatcacctgaggtcaggagttccagaccagcctggccaacatggtgaaatcccatctctacaaaaataaaacagttagctgggcatgatggcgggtgcctgtaatcccagctactcgggaggctgaggcaggatagtcgcttgaacccaggaggtggaggttgcaatgagccaagatcatgccactgcactccagcctggacgacagagtgagactccatcacaagaaaaaaagaactttgtcaacctctgtcttagggcgccttgtcacaggcttcgggtcagacggattcaaccttgcatcagccatttgttagccaggtcactctgttctttgtctgtaaatgagattgatcgttgttcccactgagagtgtcagctccttcccgtagagcaggcatgatgattgtactcacctctgacaccattgtgagtgccacattccttcccacgtccttgtcactgtaagagatgcccacctgagcaccaaccccaggttatcttcccctttgtcttccagccccccagaaacagctacgactcaacctacccaatcatttcatcatcagattgccactgtctctagttcaggtctcttgggactggcactcagaaatctcataataaatcctcttgaggcttctcatacactcgtcttcttccaatcttctttccctcaaaatctcatattttggttccacttcacccaccgtcattctccatatcactcccaggagttaggcaaaaagccccttccgttcttccgtatgttaaacttagaatcactctgttccctgctctgcgtttctattttttgtttttcctccatttactagtagcttaacactttctaacagtgttcttattattgatacgtatctatctcttccataagcttataaggtcacggataatacttctcattgtagtacgtaaatgacgtgggctagatatgagttgaataaacagttatacctgtaaattcttacagagtgaaaataaattgttatactttacaatttgtttctctctttagaccatttccaggacttgtgattaataaccgtgagtattttgtgaagtgttttgtttttgttttttcctggggtctgacgtgtgtgcgtgtgagtgtgtatacatgcttaacgtatatcacgttacttcacctatgtcagtaaccaggccaaatacttgttttagccctcagtaaaaacaccaggcacttcctagttgtaaaattattcaagcttcttaacttcctatcctcgatgcacttaatcataaaatggtaataatagcaccgattttgggggagtcgttccagtagatggaaagcatctggaacaggtgtcagcaagctcctgccgacgtgtatgcataaagttttattgaaaccaccatcgtgtccatttgtttatggcagaactgagagatggcagcagcaagtgtgtgcctgcaaaacctaaaatatttactaattggctctgcaagaaaagagtttgcatccccctaacctagaacagtgtctagcctctagtatgtgtttagcctacagtatgtgctcagcgaatacaatctatatttattactgcttttatgactgttataattactgtgcttggatttcgttacaaagtaagtcacaatgtgcctgcttctgttagtatttcagcacagtgcctggcacacatggggctctcaaatattgctgagcgagtgaacaaatgtcctttcaattccttaacgttgatgtcattttcaatagtattttgagccaaacttaattttgcgagtgtgttttgttttcttaactttattattaaaaatgtataaaagtgaggccaggcgtggtggctcacgcctgtaatcccagcagtttgggaggctgaggcaggcggatcagttgaggttgggagttggagaccagcccgtccaacatggtgaaagcctgtctctactaaaaatacaaaaatcagctgggtgtggtggcgcgtgcctgtaatcccagctactcaggaggctgaggcaggagagttgcttgaatcctagaggtggaggttgcagtgagctgagatcgtgccattgcactccagcctgggcaacaagagcaaaactctgtcccaataaataaataaataaaatgttctcttttgttcctgttcttgtgcggtagtgtggtatagagttttatggtaattactgtgaattagtgattctgagggacatatcagaactctgaggtttgtttccttctcatcttgagggaaacagcaaatgtatgttaaaatgcttttccaagggaacaacacatccttacattatttaaaccaatctgcttcattttcagagctggttgatcagagtgagtcagaaggccccgtgatacaagaatcagctgaaccaagccagttggaagttccagccacagaagaaataaaagagactgatggaagctctcagatcaagcaagaaccagaccccacgtggtagacctcttccctcctagggtaaatcagcttctgtgtcagggatgctgtgtggtgtccatctgaaccccctgcatacgcgtagctaatgtgatctccccactttcacataagatggtggccctgccttcagggaatgtgggagccaggtgggagccttcccggatatttaagctagaagattctacagggagattctccttggatcaatatatgtctctcagtcaaagatgtaaaagcacttttgccttaaaaagaatgttctgtttctaaatagagtcaacgttgtcctcctcattggaattcactatgagtcagaatcattagactgacttttttttttccatagtaatagtattttgcagagtctcacagagctgcagatcttttgttcatcttgcagagttaacaagtctgatcctgttagtccagatttcttaaatttggccaagttataataggagcagtagcttgagacccgaagtcaggaaactttgacaatggatttttttttttaatccagagacttgtactggaatttgccttaccctgtcagctcatggacttaaggtttcatcccgctttatgagtgcttctgaatccaagtcattgttacctgaatttgcaaattaagttgtgatattcgtgactgttaaattcctgtaattagattaacctctttgcttgcttgtttgttttctctcctattttagcttaaagtatcagtggttgagaagagcttttcggacctgttactaccccaagctgtgtaatatacttgtataacagaaataccttctatacaaacctttttttctacttttagatagaaatgtctactttttcagcagttctgtgaattaaagagcagagtgactgtgggtctggaatggctggtgtacttgggaatgtactatcaggattttacagcaatgctgggaaatgacagggaaaatgacaggaatgaatctcaccagattttttatgtactcagcagagccttgagttacggtgtttattttccaatcaagtgaagatatctcctacttctcctactggaacatctcagcttctgcagtgaagaaaaattcctgtgatagttcagttctttagtttttctatttgaaaaaaaaaaatcatttaaatgatcctttgttcacggctctccttaatgactgagtgaacagttcctatctgtatatttgactaaaccttttcctaagctatctctcatggttcctatgtttttttatcataattaaaagcaaaaccatctggatcacctaacagtcagaggtcagtatctcagcgtgtgaattatagaggaaatacagagagaacctcttccacttttacttttcgtccaaataaaatgcatggtgtaccagaagttgaagatcgggttgaggattggggctagctcgatgacactaaggccccaacatcgcgggacctgctgtggcgcggattcttaggaacgctgttctagccggccccctctccaggggtcgccgtggccggcattatttcctagttcttcttgtaaccctgaggtgccagcgcggggagtgaggaggggtcagggggctaaggatgcaacctctgacgttctgcgccttcctaggagagtcttacatgtgttgagatttcacaagcaatgcgagttgtaaaataccagctctacaagaagctaggctctgtgacggcatagttttcagtagctttatcacaatattcacaatggagaattatatgacatggtagcagaaataggcccttttatgtgttgcttctattttacctcaaattgtagatatagggtaatcaataaaatccatccatgcctttcacacactaagt

SEQ ID NO: 4465 - protein, 543 aa, Homo sapiens; identical to SEQ ID NO: 4205

SEQ ID NO: 4466 - DNA, 4367 bp, Homo sapiens
aaaaaaaaaaaaaaaaaaaaaaaaaaaagaaaaaagaaaaaaaaaaggaggaggaggaggagggtgagagagaagctgggagagcagagaaaaggggccaccggtcgcccccccgcttccccgcacgcgctctccagccgcggccgcccgcctgccgcggtcaccccggcctctgcctctgtcccccagtgatcggatcaaggcgctgagcgaggccctgcctgcggggcggccatgcggcggtgacaggagcgcgaccgacacgcacgggcccctcgccccctctcgcctcccgtccgctcgccagctcccctcagccgaggctgctccgcggcggccgcagcccgcgcgcggcccacactcgcctccccgttgaagatgaggagtcctcggagagcaggatggtggtgacattcctcatgtcagctctcgagtccatgtgtaaagaactggccaagtccaaagccgaagtggcctgcattgcagtgtatgaaacagacgtgtttgtcgtcggaactgaaagaggacgtgcttttgtcaataccagaaaggattttcaaaaagattttgtaaaatattgtgttgaagaagaagaaaaagctgcagagatgcataaaatgaaatctacaacccaggcaaatcggatgagtgtagatgctgtagaaattgaaacactcagaaaaacagttgaggactatttctgcttttgctatgggaaagctttaggcaaatccacagtggtacctgtaccatatgagaagatgctgcgagaccagtcggctgtggtagtgcaggggcttccggaaggtgttgcctttaaacaccccgagaactatgatcttgcaaccctgaaatggattttggagaacaaagcagggatttcattcatcattaagagaccttttttagagccaaagaagcatgtaggtggtcgtgtgatggtaacagatgctgacaggtcaatactatctccaggtggaagttgtggccccatcaaagtgaaaactgaacccacagaagattctggcatttccctggaaatggcagctgtgacagtaaaggaagaatcagaagatcctgattattatcaatataacattcaagcaggcccttctgaaactgatgatgttgatgaaaaacagcccctatcgaagcctttgcaaggaagccaccattcttcagagggcaatgaaggcacagaaatggaagtaccagcagaagatgatgattattctccaccgtctaagagaccaaaggccaatgagctaccgcagccaccagtcccggaacccgccaatgctgggaagcggaaagtgagggagttcaacttcgagaaatggaatgctcgcatcactgatctacgtaaacaagttgaagaattgtttgaaaggaaatatgctcaagccataaaagccaaaggtccggtgacgatcccgtaccctcttttccagtctcatgttgaagatctttatgtagaaggacttcctgaaggaattccttttagaaggccatctacttacggaattcctcgcctggagaggatattacttgcaaaggaaaggattcgttttgtgattaagaaacatgagcttctgaattcaacacgtgaagatttacagcttgataagccagcttcaggagtaaaggaagaatggtatgccagaatcactaaattaagaaagatggtggatcagcttttctgcaaaaaatttgcggaagccttggggagcactgaagccaaggctgtaccgtaccaaaaatttgaggcacacccgaatgatctgtacgtggaaggactgccagaaaacattcctttccgaagtccctcatggtatggaatcccaaggctggaaaaaatcattcaagtgggcaatcgaattaaatttgttattaaaagaccagaacttctgactcacagtaccactgaagttactcagccaagaacgaatacaccagctcaagctcttggactcaccgaggcagtaaaagtaccatatcctgtgtttgaatcaaacccggagttcttgtatgtggaaggcttgccagaggggattcccttccgaagccctacctggtttggaattccacgacttgaaaggatcgtccgcgggagtaataaaatcaagttcgttgttaaaaaacctgaactagttatttcctacttgcctcctgggatggctagtaaaataaacactaaagctttgcagtcccccaaaagaccacgaagtcctgggagtaattcaaaggttcctgaaattgaggtcaccgtggaaggccctaataacaacaatcctcaaacctcagctgttcgaaccccgacccagactaacggttctaacgttcccttcaagccacgagggagagagttttcctttgaggcctggaatgccaaaatcacggacctaaaacagaaagttgaaaatctcttcaatgagaaatgtggggaagctcttggccttaaacaagctgtgaaggtgccgttcgcgttatttgagtctttcccggaagacttttatgtggaaggcttacctgagggtgtgccattccgaagaccatcgacttttggcattccgaggctggagaagatactcagaaacaaagccaaaattaagttcatcattaaaaagcccgaaatgtttgagacggcgattaaggagagcacctcctctaagagccctcccagaaaaataaattcatcacccaatgttaatactactgcatcaggtgttgaagaccttaacatcattcaggtgacaattccagatgatgataatgaaagactctcgaaagttgaaaaagctagacagctaagagaacaagtgaatgacctctttagtcggaaatttggtgaagctattggtatgggttttcctgtgaaagttccctacaggaaaatcacaattaaccctggctgtgtggtggttgatggcatgcccccgggggtgtccttcaaagcccccagctacctggaaatcagctccatgagaaggatcttagactctgccgagtttatcaaattcacggtcattagaccatttccaggacttgtgattaataaccagctggttgatcagagtgagtcagaaggccccgtgatacaagaatcagctgaaccaagccagttggaagttccagccacagaagaaataaaagagactgatggaagctctcagatcaagcaagaaccagaccccacgtggtagacctcttccctcctaggcttaaagtatcagtggttgagaagagcttttcggacctgttactaccccaagctgtgtaatatacttgtataacagaaataccttctatacaaacctttttttctacttttagatagaaatgtctactttttcagcagttctgtgaattaaagagcagagtgactgtgggtctggaatggctggtgtacttgggaatgtactatcaggattttacagcaatgctgggaaatgacagggaaaatgacaggaatgaatctcaccagattttttatgtactcagcagagccttgagttacggtgtttattttccaatcaagtgaagatatctcctacttctcctactggaacatctcagcttctgcagtgaagaaaaattcctgtgatagttcagttctttagtttttctatttgaaaaaaaaaaatcatttaaatgatcctttgttcacggctctccttaatgactgagtgaacagttcctatctgtatatttgactaaaccttttcctaagctatctctcatggttcctatgtttttttatcataattaaaagcaaaaccatctggatcacctaacagtcagaggtcagtatctcagcgtgtgaattatagaggaaatacagagagaacctcttccacttttacttttcgtccaaataaaatgcatggtgtaccagaagttgaagatcgggttgaggattggggctagctcgatgacactaaggccccaacatcgcgggacctgctgtggcgcggattcttaggaacgctgttctagccggccccctctccaggggtcgccgtggccggcattatttcctagttcttcttgtaaccctgaggtgccagcgcggggagtgaggaggggtcagggggctaaggatgcaacctctgacgttctgcgccttcctaggagagtcttacatgtgttgagatttcacaagcaatgcgagttgtaaaataccagctctacaagaagctaggctctgtgacggcatagttttcagtagctttatcacaatattcacaatggagaattatatgacatggtagcagaaataggcccttttatgtgttgcttctattttacctcaaattgtagatatagggtaatcaataaaatccatccatgcctttcacacactaagt

SEQ ID NO: 4467 - protein, 933 aa, Homo sapiens; identical to SEQ ID NO: 4083

SEQ ID NO: 4468 - DNA, 4118 bp, Homo sapiens
aaaaaaaaaaaaaaaaaaaaaaaaaaaagaaaaaagaaaaaaaaaaggaggaggaggaggagggtgagagagaagctgggagagcagagaaaaggggccaccggtcgcccccccgcttccccgcacgcgctctccagccgcggccgcccgcctgccgcggtcaccccggcctctgcctctgtcccccagtgatcggatcaaggcgctgagcgaggccctgcctgcggggcggccatgcggcggtgacaggagcgcgaccgacacgcacgggcccctcgccccctctcgcctcccgtccgctcgccagctcccctcagccgaggctgctccgcggcggccgcagcccgcgcgcggcccacactcgcctcccctcggcacccccggccccggagctgcctggaggcggccgcactcggtgtaaagaactggccaagtccaaagccgaagtggcctgcattgcagtgtatgaaacagacgtgtttgtcgtcggaactgaaagaggacgtgcttttgtcaataccagaaaggattttcaaaaagattttgtaaaatattgtgttgaagaagaagaaaaagctgcagagatgcataaaatgaaatctacaacccaggcaaatcggatgagtgtagatgctgtagaaattgaaacactcagaaaaacagttgaggactatttctgcttttgctatgggaaagctttaggcaaatccacagtggtacctgtaccatatgagaagatgctgcgagaccagtcggctgtggtagtgcaggggcttccggaaggtgttgcctttaaacaccccgagaactatgatcttgcaaccctgaaatggattttggagaacaaagcagggatttcattcatcattaagagaccttttttagagccaaagaagcatgtaggtggtcgtgtgatggtaacagatgctgacaggtcaatactatctccaggtggaagttgtggccccatcaaagtgaaaactgaacccacagaagattctggcatttccctggaaatggcagctgtgacagtaaaggaagaatcagaagatcctgattattatcaatataacattcaaggaagccaccattcttcagagggcaatgaaggcacagaaatggaagtaccagcagaagattctactcaacatgtcccttcagaaacaagtgaggaccctgaagttgaggtgactattgaagatgatgattattctccaccgtctaagagaccaaaggccaatgagctaccgcagccaccagtcccggaacccgccaatgctgggaagcggaaagtgagggagttcaacttcgagaaatggaatgctcgcatcactgatctacgtaaacaagttgaagaattgtttgaaaggaaatatgctcaagccataaaagccaaaggtccggtgacgatcccgtaccctcttttccagtctcatgttgaagatctttatgtagaaggacttcctgaaggaattccttttagaaggccatctacttacggaattcctcgcctggagaggatattacttgcaaaggaaaggattcgttttgtgattaagaaacatgagcttctgaattcaacacgtgaagatttacagcttgataagccagcttcaggagtaaaggaagaatggtatgccagaatcactaaattaagaaagatggtggatcagcttttctgcaaaaaatttgcggaagccttggggagcactgaagccaaggctgtaccgtaccaaaaatttgaggcacacccgaatgatctgtacgtggaaggactgccagaaaacattcctttccgaagtccctcatggtatggaatcccaaggctggaaaaaatcattcaagtgggcaatcgaattaaatttgttattaaaagaccagaacttctgactcacagtaccactgaagttactcagccaagaacgaatacaccagctcaagctcttggactcaccgaggcagtaaaagtaccatatcctgtgtttgaatcaaacccggagttcttgtatgtggaaggcttgccagaggggattcccttccgaagccctacctggtttggaattccacgacttgaaaggatcgtccgcgggagtaataaaatcaagttcgttgttaaaaaacctgaactagttatttcctacttgcctcctgggatggctagtaaaataaacactaaagctttgcagtcccccaaaagaccacgaagtcctgggagtaattcaaaggttcctgaaattgaggtcaccgtggaaggccctaataacaacaatcctcaaacctcagctgttcgaaccccgacccagactaacggttctaacgttcccttcaagccacgagggagagagttttcctttgaggcctggaatgccaaaatcacggacctaaaacagaaagttgaaaatctcttcaatgagaaatgtggggaagctcttggccttaaacaagctgtgaaggtgccgttcgcgttatttgagtctttcccggaagacttttatgtggaaggcttacctgagggtgtgccattccgaagaccatcgacttttggcattccgaggctggagaagatactcagaaacaaagccaaaattaagttcatcattaaaaagcccgaaatgtttgagacggcgattaaggagagcacctcctctaagagccctcccagaaaaataaattcatcacccaatgttaatactactgcatcaggtgttgaagaccttaacatcattcaggtgacaattccagatgatgataatgaaagactctcgaaagttgaaaaagctagacagctaagagaacaagtgaatgacctctttagtcggaaatttggtgaagctattggtatgggttttcctgtgaaagttccctacaggaaaatcacaattaaccctggctgtgtggtggttgatggcatgcccccgggggtgtccttcaaagcccccagctacctggaaatcagctccatgagaaggatcttagactctgccgagtttatcaaattcacggtcattagaccatttccaggacttgtgattaataaccagctggttgatcagagtgagtcagaaggccccgtgatacaagaatcagctgaaccaagccagttggaagttccagccacagaagaaataaaagagactgatggaagctctcagatcaagcaagaaccagaccccacgtggtagacctcttccctcctaggcttaaagtatcagtggttgagaagagcttttcggacctgttactaccccaagctgtagccttgagttacggtgtttattttccaatcaagtgaagatatctcctacttctcctactggaacatctcagcttctgcagtgaagaaaaattcctgtgatagttcagttctttagtttttctatttgaaaaaaaaaaatcatttaaatgatcctttgttcacggctctccttaatgactgagtgaacagttcctatctgtatatttgactaaaccttttcctaagctatctctcatggttcctatgtttttttatcataattaaaagcaaaaccatctggatcacctaacagtcagaggtcagtatctcagcgtgtgaattatagaggaaatacagagagaacctcttccacttttacttttcgtccaaataaaatgcatggtgtaccagaagttgaagatcgggttgaggattggggctagctcgatgacactaaggccccaacatcgcgggacctgctgtggcgcggattcttaggaacgctgttctagccggccccctctccaggggtcgccgtggccggcattatttcctagttcttcttgtaaccctgaggtgccagcgcggggagtgaggaggggtcagggggctaaggatgcaacctctgacgttctgcgccttcctaggagagtcttacatgtgttgagatttcacaagcaatgcgagttgtaaaataccagctctacaagaagctaggctctgtgacggcatagttttcagtagctttatcacaatattcacaatggagaattatatgacatggtagcagaaataggcccttttatgtgttgcttctattttacctcaaattgtagatatagggtaatcaataaaatccatccatgcctttcacacactaagt

SEQ ID NO: 4469 - protein, 865 aa, Homo sapiens; identical to SEQ ID NO: 4043

SEQ ID NO: 4470 - DNA, 7864 bp, Homo sapiens
aaaaaaaaaaaaaaaaaaaaaaaaaaaagaaaaaagaaaaaaaaaaggaggaggaggaggagggtgagagagaagctgggagagcagagaaaaggggccaccggtcgcccccccgcttccccgcacgcgctctccagccgcggccgcccgcctgccgcggtcaccccggcctctgcctctgtcccccagtgatcggatcaaggcgctgagcgaggccctgcctgcggggcggccatgcggcggtgacaggagcgcgaccgacacgcacgggcccctcgccccctctcgcctcccgtccgctcgccagctcccctcagccgaggctgctccgcggcggccgcagcccgcgcgcggcccacactcgcctcccctcggcacccccggccccggagctgcctggaggcggccgcactcggtgtaaagaactggccaagtccaaagccgaagtggcctgcattgcagtgtatgaaacagacgtgtttgtcgtcggaactgaaagaggacgtgcttttgtcaataccagaaaggattttcaaaaagattttgtaaaatattgtgttgaagaagaagaaaaagctgcagagatgcataaaatgaaatctacaacccaggcaaatcggatgagtgtagatgctgtagaaattgaaacactcagaaaaacagttgaggactatttctgcttttgctatgggaaagctttaggcaaatccacagtggtacctgtaccatatgagaagatgctgcgagaccagtcggctgtggtagtgcaggggcttccggaaggtgttgcctttaaacaccccgagaactatgatcttgcaaccctgaaatggattttggagaacaaagcagggatttcattcatcattaagagaccttttttagagccaaagaagcatgtaggtggtcgtgtgatggtaacagatgctgacaggtcaatactatctccaggtggaagttgtggccccatcaaagtgaaaactgaacccacagaagattctggcatttccctggaaatggcagctgtgacagtaaaggaagaatcagaagatcctgattattatcaatataacattcaagcaggcccttctgaaactgatgatgttgatgaaaaacagcccctatcgaagcctttgcaaggaagccaccattcttcagagggcaatgaaggcacagaaatggaagtaccagcagaagattctactcaacatgtcccttcagaaacaagtgaggaccctgaagttgaggtgactattgaagatgatgattattctccaccgtctaagagaccaaaggccaatgagctaccgcagccaccagtcccggaacccgccaatgctgggaagcggaaagtgagggagttcaacttcgagaaatggaatgctcgcatcactgatctacgtaaacaagttgaagaattgtttgaaaggaaatatgctcaagccataaaagccaaaggtccggtgacgatcccgtaccctcttttccagtctcatgttgaagatctttatgtagaaggacttcctgaaggaattccttttagaaggccatctacttacggaattcctcgcctggagaggatattacttgcaaaggaaaggattcgttttgtgattaagaaacatgagcttctgaattcaacacgtgaagatttacagcttgataagccagcttcaggagtaaaggaagaatggtatgccagaatcactaaattaagaaagatggtggatcagcttttctgcaaaaaatttgcggaagccttggggagcactgaagccaaggctgtaccgtaccaaaaatttgaggcacacccgaatgatctgtacgtggaaggactgccagaaaacattcctttccgaagtccctcatggtatggaatcccaaggctggaaaaaatcattcaagtgggcaatcgaattaaatttgttattaaaagaccagaacttctgactcacagtaccactgaagttactcagccaagaacgaatacaccagtcaaagaagattggaatgtcagaattaccaagctacggaagcaagtggaagagatttttaatttgaaatttgctcaagctcttggactcaccgaggcagtaaaagtaccatatcctgtgtttgaatcaaacccggagttcttgaaaggatcgtccgcgggagtaataaaatcaagttcgttgttaaaaaacctgaactagttatttcctacttgcctcctgggatggctagtaaaataaacactaaagctttgcagtcccccaaaagaccacgaagtcctgggagtaattcaaaggttcctgaaattgaggtcaccgtggaaggccctaataacaacaatcctcaaacctcagctgttcgaaccccgacccagactaacggttctaacgttcccttcaagccacgagggagagagttttcctttgaggcctggaatgccaaaatcacggacctaaaacagaaagttgaaaatctcttcaatgagaaatgtggggaagctcttggccttaaacaagctgtgaaggtgccgttcgcgttatttgagtctttcccggaagacttttatgtggaaggcttacctgagggtgtgccattccgaagaccatcgacttttggcattccgaggctggagaagatactcagaaacaaagccaaaattaagttcatcattaaaaagcccgaaatgtttgagacggcgattaaggagagcacctcctctaagagccctcccagaaaaataaattcatcacccaatgttaatactactgcatcaggtgttgaagaccttaacatcattcaggtgacaattccagatgatgataatgaaagactctcgaaagttgaaaaagctagacagctaagagaacaagtgaatgacctctttagtcggaaatttggtgaagctattggtatgggttttcctgtgaaagttccctacaggaaaatcacaattaaccctggctgtgtggtggttgatggcatgcccccgggggtgtccttcaaagcccccagctacctggaaatcagctccatgagaaggatcttagactctgccgagtttatcaaattcacggtcattaggtaagtgagagtttcctgcttagtcacaggagcgaatctggagctcatgaggctgactcttctaaaatgcagccacaggtagtcatcgaatccggcttcctatgctgtgcaatcaacaaatcaaaataacttgtgtcatcattagaatgtcagatgtgcttctacgaactaagctgactcttttaattctttggcaaagggttggcaaactaggactgtttgccaaattcaggctgcctcctatttttagagtcttcctgaaacacagctacacccgtattatccatggctgctttcctgtcacagtgagtaagtagctgggactgagaaggcatggcctccaaagtctaaaatatttactctctagcactttgtagaaaaaccttagctaggcacagtggctaacgcctgtaatcccagcattttgggaggccaaggcaggcagatcacctgaggtcaggagttccagaccagcctggccaacatggtgaaatcccatctctacaaaaataaaacagttagctgggcatgatggcgggtgcctgtaatcccagctactcgggaggctgaggcaggatagtcgcttgaacccaggaggtggaggttgcaatgagccaagatcatgccactgcactccagcctggacgacagagtgagactccatcacaagaaaaaaagaactttgtcaacctctgtcttagggcgccttgtcacaggcttcgggtcagacggattcaaccttgcatcagccatttgttagccaggtcactctgttctttgtctgtaaatgagattgatcgttgttcccactgagagtgtcagctccttcccgtagagcaggcatgatgattgtactcacctctgacaccattgtgagtgccacattccttcccacgtccttgtcactgtaagagatgcccacctgagcaccaaccccaggttatcttcccctttgtcttccagccccccagaaacagctacgactcaacctacccaatcatttcatcatcagattgccactgtctctagttcaggtctcttgggactggcactcagaaatctcataataaatcctcttgaggcttctcatacactcgtcttcttccaatcttctttccctcaaaatctcatattttggttccacttcacccaccgtcattctccatatcactcccaggagttaggcaaaaagccccttccgttcttccgtatgttaaacttagaatcactctgttccctgctctgcgtttctattttttgtttttcctccatttactagtagcttaacactttctaacagtgttcttattattgatacgtatctatctcttccataagcttataaggtcacggataatacttctcattgtagtacgtaaatgacgtgggctagatatgagttgaataaacagttatacctgtaaattcttacagagtgaaaataaattgttatactttacaatttgtttctctctttagaccatttccaggacttgtgattaataaccgtgagtattttgtgaagtgttttgtttttgttttttcctggggtctgacgtgtgtgcgtgtgagtgtgtatacatgcttaacgtatatcacgttacttcacctatgtcagtaaccaggccaaatacttgttttagccctcagtaaaaacaccaggcacttcctagttgtaaaattattcaagcttcttaacttcctatcctcgatgcacttaatcataaaatggtaataatagcaccgattttgggggagtcgttccagtagatggaaagcatctggaacaggtgtcagcaagctcctgccgacgtgtatgcataaagttttattgaaaccaccatcgtgtccatttgtttatggcagaactgagagatggcagcagcaagtgtgtgcctgcaaaacctaaaatatttactaattggctctgcaagaaaagagtttgcatccccctaacctagaacagtgtctagcctctagtatgtgtttagcctacagtatgtgctcagcgaatacaatctatatttattactgcttttatgactgttataattactgtgcttggatttcgttacaaagtaagtcacaatgtgcctgcttctgttagtatttcagcacagtgcctggcacacatggggctctcaaatattgctgagcgagtgaacaaatgtcctttcaattccttaacgttgatgtcattttcaatagtattttgagccaaacttaattttgcgagtgtgttttgttttcttaactttattattaaaaatgtataaaagtgaggccaggcgtggtggctcacgcctgtaatcccagcagtttgggaggctgaggcaggcggatcagttgaggttgggagttggagaccagcccgtccaacatggtgaaagcctgtctctactaaaaatacaaaaatcagctgggtgtggtggcgcgtgcctgtaatcccagctactcaggaggctgaggcaggagagttgcttgaatcctagaggtggaggttgcagtgagctgagatcgtgccattgcactccagcctgggcaacaagagcaaaactctgtcccaataaataaataaataaaatgttctcttttgttcctgttcttgtgcggtagtgtggtatagagttttatggtaattactgtgaattagtgattctgagggacatatcagaactctgaggtttgtttccttctcatcttgagggaaacagcaaatgtatgttaaaatgcttttccaagggaacaacacatccttacattatttaaaccaatctgcttcattttcagagctggttgatcagagtgagtcagaaggccccgtgatacaagaatcagctgaaccaagccagttggaagttccagccacagaagaaataaaagagactgatggaagctctcagatcaagcaagaaccagaccccacgtggtagacctcttccctcctagggtaaatcagcttctgtgtcagggatgctgtgtggtgtccatctgaaccccctgcatacgcgtagctaatgtgatctccccactttcacataagatggtggccctgccttcagggaatgtgggagccaggtgggagccttcccggatatttaagctagaagattctacagggagattctccttggatcaatatatgtctctcagtcaaagatgtaaaagcacttttgccttaaaaagaatgttctgtttctaaatagagtcaacgttgtcctcctcattggaattcactatgagtcagaatcattagactgacttttttttttccatagtaatagtattttgcagagtctcacagagctgcagatcttttgttcatcttgcagagttaacaagtctgatcctgttagtccagatttcttaaatttggccaagttataataggagcagtagcttgagacccgaagtcaggaaactttgacaatggatttttttttttaatccagagacttgtactggaatttgccttaccctgtcagctcatggacttaaggtttcatcccgctttatgagtgcttctgaatccaagtcattgttacctgaatttgcaaattaagttgtgatattcgtgactgttaaattcctgtaattagattaacctctttgcttgcttgtttgttttctctcctattttagcttaaagtatcagtggttgagaagagcttttcggacctgttactaccccaagctgtgtaatatacttgtataacagaaataccttctatacaaacctttttttctacttttagatagaaatgtctactttttcagcagttctgtgaattaaagagcagagtgactgtgggtctggaatggctggtgtacttgggaatgtactatcaggattttacagcaatgctgggaaatgacagggaaaatgacaggaatgaatctcaccagattttttatgtactcagcagagccttgagttacggtgtttattttccaatcaagtgaagatatctcctacttctcctactggaacatctcagcttctgcagtgaagaaaaattcctgtgatagttcagttctttagtttttctatttgaaaaaaaaaaatcatttaaatgatcctttgttcacggctctccttaatgactgagtgaacagttcctatctgtatatttgactaaaccttttcctaagctatctctcatggttcctatgtttttttatcataattaaaagcaaaaccatctggatcacctaacagtcagaggtcagtatctcagcgtgtgaattatagaggaaatacagagagaacctcttccacttttacttttcgtccaaataaaatgcatggtgtaccagaagttgaagatcgggttgaggattggggctagctcgatgacactaaggccccaacatcgcgggacctgctgtggcgcggattcttaggaacgctgttctagccggccccctctccaggggtcgccgtggccggcattatttcctagttcttcttgtaaccctgaggtgccagcgcggggagtgaggaggggtcagggggctaaggatgcaacctctgacgttctgcgccttcctaggagagtcttacatgtgttgagatttcacaagcaatgcgagttgtaaaataccagctctacaagaagctaggctctgtgacggcatagttttcagtagctttatcacaatattcacaatggagaattatatgacatggtagcagaaataggcccttttatgtgttgcttctattttacctcaaattgtagatatagggtaatcaataaaatccatccatgcctttcacacactaagt

SEQ ID NO: 4471 - protein, 536 aa, Homo sapiens; identical to SEQ ID NO: 4021

SEQ ID NO: 4472 - DNA, 4183 bp, Homo sapiens
aaaaaaaaaaaaaaaaaaaaaaaaaaaagaaaaaagaaaaaaaaaaggaggaggaggaggagggtgagagagaagctgggagagcagagaaaaggggccaccggtcgcccccccgcttccccgcacgcgctctccagccgcggccgcccgcctgccgcggtcaccccggcctctgcctctgtcccccagtgatcggatcaaggcgctgagcgaggccctgcctgcggggcggccatgcggcggtgacaggagcgcgaccgacacgcacgggcccctcgccccctctcgcctcccgtccgctcgccagctcccctcagccgaggctgctccgcggcggccgcagcccgcgcgcggcccacactcgcctcccctcggcacccccggccccggagctgcctggaggcggccgcactcggtgtaaagaactggccaagtccaaagccgaagtggcctgcattgcagtgtatgaaacagacgtgtttgtcgtcggaactgaaagaggacgtgcttttgtcaataccagaaaggattttcaaaaagattttgtaaaatattgtgttgaagaagaagaaaaagctgcagagatgcataaaatgaaatctacaacccaggcaaatcggatgagtgtagatgctgtagaaattgaaacactcagaaaaacagttgaggactatttctgcttttgctatgggaaagctttaggcaaatccacagtggtacctgtaccatatgagaagatgctgcgagaccagtcggctgtggtagtgcaggggcttccggaaggtgttgcctttaaacaccccgagaactatgatcttgcaaccctgaaatggattttggagaacaaagcagggatttcattcatcattaagagaccttttttagagccaaagaagcatgtaggtggtcgtgtgatggtaacagatgctgacaggtcaatactatctccaggtggaagttgtggccccatcaaagtgaaaactgaacccacagaagattctggcatttccctggaaatggcagctgtgacagtaaaggaagaatcagaagatcctgattattatcaatataacattcaagcaggcccttctgaaactgatgatgttgatgaaaaacagcccctatcgaagcctttgcaaggaagccaccattcttcagagggcaatgaaggcacagaaatggaagtaccagcagaagattctactcaacatgtcccttcagaaacaagtgaggaccctgaagttgaggtgactattgaagatgatgattattctccaccgtctaagagaccaaaggccaatgagctaccgcagccaccagtcccggaacccgccaatgctgggaagcggaaagtgagggagttcaacttcgagaaatggaatgctcgcatcactgatctacgtaaacaagttgaagaattgtttgaaaggaaatatgctcaagccataaaagccaaaggtccggtgacgatcccgtaccctcttttccagtctcatgttgaagatctttatgtagaaggacttcctgaaggaattccttttagaaggccatctacttacggaattcctcgcctggagaggatattacttgcaaaggaaaggattcgttttgtgattaagaaacatgagcttctgaattcaacacgtgaagatttacagcttgataagccagcttcaggagtaaaggaagaatggtatgccagaatcactaaattaagaaagatggtggatcagcttttctgcaaaaaatttgcggaagccttggggagcactgaagccaaggctgtaccgtaccaaaaatttgaggcacacccgaatgatctgtacgtggaaggactgccagaaaacattcctttccgaagtccctcatggtatggaatcccaaggctggaaaaaatcattcaagtgggcaatcgaattaaatttgttattaaaagaccagaacttctgactcacagtaccactgaagttactcagccaagaacgaatacaccagtcaaagaagattggaatgtcagaattaccaagctacggaagcaagtggaagagatttttaatttgaaatttgctcaagctcttggactcaccgaggcagtaaaagtaccatatcctgtgtttgaatcaaacccggagttcttgaaaggatcgtccgcgggagtaataaaatcaagttcgttgttaaaaaacctgaactagttatttcctacttgcctcctgggatggctagtaaaataaacactaaagctttgcagtcccccaaaagaccacgaagtcctgggagtaattcaaaggttcctgaaattgaggtcaccgtggaaggccctaataacaacaatcctcaaacctcagctgttcgaaccccgacccagactaacggttctaacgttcccttcaagccacgagggagagagttttcctttgaggcctggaatgccaaaatcacggacctaaaacagaaagttgaaaatctcttcaatgagaaatgtggggaagctcttggccttaaacaagctgtgaaggtgccgttcgcgttatttgagtctttcccggaagacttttatgtggaaggcttacctgagggtgtgccattccgaagaccatcgacttttggcattccgaggctggagaagatactcagaaacaaagccaaaattaagttcatcattaaaaagcccgaaatgtttgagacggcgattaaggagagcacctcctctaagagccctcccagaaaaataaattcatcacccaatgttaatactactgcatcaggtgttgaagaccttaacatcattcaggtgacaattccagatgatgataatgaaagactctcgaaagttgaaaaagctagacagctaagagaacaagtgaatgacctctttagtcggaaatttggtgaagctattggtatgggttttcctgtgaaagttccctacaggaaaatcacaattaaccctggctgtgtggtggttgatggcatgcccccgggggtgtccttcaaagcccccagctacctggaaatcagctccatgagaaggatcttagactctgccgagtttatcaaattcacggtcattagaccatttccaggacttgtgattaataaccagctggttgatcagagtgagtcagaaggccccgtgatacaagaatcagctgaaccaagccagttggaagttccagccacagaagaaataaaagagactgatggaagctctcagatcaagcaagaaccagaccccacgtggtagacctcttccctcctaggcttaaagtatcagtggttgagaagagcttttcggacctgttactaccccaagctgtagccttgagttacggtgtttattttccaatcaagtgaagatatctcctacttctcctactggaacatctcagcttctgcagtgaagaaaaattcctgtgatagttcagttctttagtttttctatttgaaaaaaaaaaatcatttaaatgatcctttgttcacggctctccttaatgactgagtgaacagttcctatctgtatatttgactaaaccttttcctaagctatctctcatggttcctatgtttttttatcataattaaaagcaaaaccatctggatcacctaacagtcagaggtcagtatctcagcgtgtgaattatagaggaaatacagagagaacctcttccacttttacttttcgtccaaataaaatgcatggtgtaccagaagttgaagatcgggttgaggattggggctagctcgatgacactaaggccccaacatcgcgggacctgctgtggcgcggattcttaggaacgctgttctagccggccccctctccaggggtcgccgtggccggcattatttcctagttcttcttgtaaccctgaggtgccagcgcggggagtgaggaggggtcagggggctaaggatgcaacctctgacgttctgcgccttcctaggagagtcttacatgtgttgagatttcacaagcaatgcgagttgtaaaataccagctctacaagaagctaggctctgtgacggcatagttttcagtagctttatcacaatattcacaatggagaattatatgacatggtagcagaaataggcccttttatgtgttgcttctattttacctcaaattgtagatatagggtaatcaataaaatccatccatgcctttcacacactaagt

SEQ ID NO: 4473 - protein, 536 aa, Homo sapiens; identical to SEQ ID NO: 4021

SEQ ID NO: 4474 - DNA, 7817 bp, Homo sapiens
aaaaaaaaaaaaaaaaaaaaaaaaaaaagaaaaaagaaaaaaaaaaggaggaggaggaggagggtgagagagaagctgggagagcagagaaaaggggccaccggtcgcccccccgcttccccgcacgcgctctccagccgcggccgcccgcctgccgcggtcaccccggcctctgcctctgtcccccagtgatcggatcaaggcgctgagcgaggccctgcctgcggggcggccatgcggcggtgacaggagcgcgaccgacacgcacgggcccctcgccccctctcgcctcccgtccgctcgccagctcccctcagccgaggctgctccgcggcggccgcagcccgcgcgcggcccacactcgcctccccgttgaagatgaggagtcctcggagagcaggatggtggtgacattcctcatgtcagctctcgagtccatgtgtaaagaactggccaagtccaaagccgaagtggcctgcattgcagtgtatgaaacagacgtgtttgtcgtcggaactgaaagaggacgtgcttttgtcaataccagaaaggattttcaaaaagattttgtaaaatattgtgttgaagaagaagaaaaagctgcagagatgcataaaatgaaatctacaacccaggcaaatcggatgagtgtagatgctgtagaaattgaaacactcagaaaaacagttgaggactatttctgcttttgctatgggaaagctttaggcaaatccacagtggtacctgtaccatatgagaagatgctgcgagaccagtcggctgtggtagtgcaggggcttccggaaggtgttgcctttaaacaccccgagaactatgatcttgcaaccctgaaatggattttggagaacaaagcagggatttcattcatcattaagagaccttttttagagccaaagaagcatgtaggtggtcgtgtgatggtaacagatgctgacaggtcaatactatctccaggtggaagttgtggccccatcaaagtgaaaactgaacccacagaagattctggaagccaccattcttcagagggcaatgaaggcacagaaatggaagtaccagcagaagattctactcaacatgtcccttcagaaacaagtgaggaccctgaagttgaggtgactattgaagatgatgattattctccaccgtctaagagaccaaaggccaatgagctaccgcagccaccagtcccggaacccgccaatgctgggaagcggaaagtgagggagttcaacttcgagaaatggaatgctcgcatcactgatctacgtaaacaagttgaagaattgtttgaaaggaaatatgctcaagccataaaagccaaaggtccggtgacgatcccgtaccctcttttccagtctcatgttgaagatctttatgtagaaggacttcctgaaggaattccttttagaaggccatctacttacggaattcctcgcctggagaggatattacttgcaaaggaaaggattcgttttgtgattaagaaacatgagcttctgaattcaacacgtgaagatttacagcttgataagccagcttcaggagtaaaggaagaatggtatgccagaatcactaaattaagaaagatggtggatcagcttttctgcaaaaaatttgcggaagccttggggagcactgaagccaaggctgtaccgtaccaaaaatttgaggcacacccgaatgatctgtacgtggaaggactgccagaaaacattcctttccgaagtccctcatggtatggaatcccaaggctggaaaaaatcattcaagtgggcaatcgaattaaatttgttattaaaagaccagaacttctgactcacagtaccactgaagttactcagccaagaacgaatacaccagtcaaagaagattggaatgtcagaattaccaagctacggaagcaagtggaagagatttttaatttgaaatttgctcaagctcttggactcaccgaggcagtaaaagtaccatatcctgtgtttgaatcaaacccggagttcttgtatgtggaaggcttgccagaggggattcccttccgaagccctacctggtttggaattccacgacttgaaaggatcgtccgcgggagtaataaaatcaagttcgttgttaaaaaacctgaactagttatttcctacttgcctcctgggatggctagtaaaataaacactaaagctttgcagtcccccaaaagaccacgaagtcctgggagtaattcaaaggttcctgaaattgaggtcaccgtggaaggccctaataacaacaatcctcaaacctcagctgttcgaaccccgacccagactaacggttctaacgttcccttcaagccacgagggagagagttttcctttgaggcctggaatgccaaaatcacggacctaaaacagaaagttgaaaatctcttcaatgagaaatgtggggaagctcttggccttaaacaagctgtgaaggtgccgttcgcgttatttgagtctttcccggaagacttttatgtggaaggcttacctgagggtgtgccattccgaagaccatcgacttttggcattccgaggctggagaagatactcagaaacaaagccaaaattaagttcatcattaaaaagcccgaaatgtttgagacggcgattaaggagagcacctcctctaagagccctcccagaaaaataaattcatcacccaatgttaatactactgcatcaggtgttgaagaccttaacatcattcaggtgacaattccagatgatgataatgaaagactctcgaaagttgaaaaagctagacagctaagagaacaagtgaatgacctctttagtcggaaatttggtgaagctattggtatgggttttcctgtgaaagttccctacaggaaaatcacaattaaccctggctgtgtggtggttgatggcatgcccccgggggtgtccttcaaagcccccagctacctggaaatcagctccatgagaaggatcttagactctgccgagtttatcaaattcacggtcattaggtaagtgagagtttcctgcttagtcacaggagcgaatctggagctcatgaggctgactcttctaaaatgcagccacaggtagtcatcgaatccggcttcctatgctgtgcaatcaacaaatcaaaataacttgtgtcatcattagaatgtcagatgtgcttctacgaactaagctgactcttttaattctttggcaaagggttggcaaactaggactgtttgccaaattcaggctgcctcctatttttagagtcttcctgaaacacagctacacccgtattatccatggctgctttcctgtcacagtgagtaagtagctgggactgagaaggcatggcctccaaagtctaaaatatttactctctagcactttgtagaaaaaccttagctaggcacagtggctaacgcctgtaatcccagcattttgggaggccaaggcaggcagatcacctgaggtcaggagttccagaccagcctggccaacatggtgaaatcccatctctacaaaaataaaacagttagctgggcatgatggcgggtgcctgtaatcccagctactcgggaggctgaggcaggatagtcgcttgaacccaggaggtggaggttgcaatgagccaagatcatgccactgcactccagcctggacgacagagtgagactccatcacaagaaaaaaagaactttgtcaacctctgtcttagggcgccttgtcacaggcttcgggtcagacggattcaaccttgcatcagccatttgttagccaggtcactctgttctttgtctgtaaatgagattgatcgttgttcccactgagagtgtcagctccttcccgtagagcaggcatgatgattgtactcacctctgacaccattgtgagtgccacattccttcccacgtccttgtcactgtaagagatgcccacctgagcaccaaccccaggttatcttcccctttgtcttccagccccccagaaacagctacgactcaacctacccaatcatttcatcatcagattgccactgtctctagttcaggtctcttgggactggcactcagaaatctcataataaatcctcttgaggcttctcatacactcgtcttcttccaatcttctttccctcaaaatctcatattttggttccacttcacccaccgtcattctccatatcactcccaggagttaggcaaaaagccccttccgttcttccgtatgttaaacttagaatcactctgttccctgctctgcgtttctattttttgtttttcctccatttactagtagcttaacactttctaacagtgttcttattattgatacgtatctatctcttccataagcttataaggtcacggataatacttctcattgtagtacgtaaatgacgtgggctagatatgagttgaataaacagttatacctgtaaattcttacagagtgaaaataaattgttatactttacaatttgtttctctctttagaccatttccaggacttgtgattaataaccgtgagtattttgtgaagtgttttgtttttgttttttcctggggtctgacgtgtgtgcgtgtgagtgtgtatacatgcttaacgtatatcacgttacttcacctatgtcagtaaccaggccaaatacttgttttagccctcagtaaaaacaccaggcacttcctagttgtaaaattattcaagcttcttaacttcctatcctcgatgcacttaatcataaaatggtaataatagcaccgattttgggggagtcgttccagtagatggaaagcatctggaacaggtgtcagcaagctcctgccgacgtgtatgcataaagttttattgaaaccaccatcgtgtccatttgtttatggcagaactgagagatggcagcagcaagtgtgtgcctgcaaaacctaaaatatttactaattggctctgcaagaaaagagtttgcatccccctaacctagaacagtgtctagcctctagtatgtgtttagcctacagtatgtgctcagcgaatacaatctatatttattactgcttttatgactgttataattactgtgcttggatttcgttacaaagtaagtcacaatgtgcctgcttctgttagtatttcagcacagtgcctggcacacatggggctctcaaatattgctgagcgagtgaacaaatgtcctttcaattccttaacgttgatgtcattttcaatagtattttgagccaaacttaattttgcgagtgtgttttgttttcttaactttattattaaaaatgtataaaagtgaggccaggcgtggtggctcacgcctgtaatcccagcagtttgggaggctgaggcaggcggatcagttgaggttgggagttggagaccagcccgtccaacatggtgaaagcctgtctctactaaaaatacaaaaatcagctgggtgtggtggcgcgtgcctgtaatcccagctactcaggaggctgaggcaggagagttgcttgaatcctagaggtggaggttgcagtgagctgagatcgtgccattgcactccagcctgggcaacaagagcaaaactctgtcccaataaataaataaataaaatgttctcttttgttcctgttcttgtgcggtagtgtggtatagagttttatggtaattactgtgaattagtgattctgagggacatatcagaactctgaggtttgtttccttctcatcttgagggaaacagcaaatgtatgttaaaatgcttttccaagggaacaacacatccttacattatttaaaccaatctgcttcattttcagagctggttgatcagagtgagtcagaaggccccgtgatacaagaatcagctgaaccaagccagttggaagttccagccacagaagaaataaaagagactgatggaagctctcagatcaagcaagaaccagaccccacgtggtagacctcttccctcctagggtaaatcagcttctgtgtcagggatgctgtgtggtgtccatctgaaccccctgcatacgcgtagctaatgtgatctccccactttcacataagatggtggccctgccttcagggaatgtgggagccaggtgggagccttcccggatatttaagctagaagattctacagggagattctccttggatcaatatatgtctctcagtcaaagatgtaaaagcacttttgccttaaaaagaatgttctgtttctaaatagagtcaacgttgtcctcctcattggaattcactatgagtcagaatcattagactgacttttttttttccatagtaatagtattttgcagagtctcacagagctgcagatcttttgttcatcttgcagagttaacaagtctgatcctgttagtccagatttcttaaatttggccaagttataataggagcagtagcttgagacccgaagtcaggaaactttgacaatggatttttttttttaatccagagacttgtactggaatttgccttaccctgtcagctcatggacttaaggtttcatcccgctttatgagtgcttctgaatccaagtcattgttacctgaatttgcaaattaagttgtgatattcgtgactgttaaattcctgtaattagattaacctctttgcttgcttgtttgttttctctcctattttagcttaaagtatcagtggttgagaagagcttttcggacctgttactaccccaagctgtgtaatatacttgtataacagaaataccttctatacaaacctttttttctacttttagatagaaatgtctactttttcagcagttctgtgaattaaagagcagagtgactgtgggtctggaatggctggtgtacttgggaatgtactatcaggattttacagcaatgctgggaaatgacagggaaaatgacaggaatgaatctcaccagattttttatgtactcagcagagccttgagttacggtgtttattttccaatcaagtgaagatatctcctacttctcctactggaacatctcagcttctgcagtgaagaaaaattcctgtgatagttcagttctttagtttttctatttgaaaaaaaaaaatcatttaaatgatcctttgttcacggctctccttaatgactgagtgaacagttcctatctgtatatttgactaaaccttttcctaagctatctctcatggttcctatgtttttttatcataattaaaagcaaaaccatctggatcacctaacagtcagaggtcagtatctcagcgtgtgaattatagaggaaatacagagagaacctcttccacttttacttttcgtccaaataaaatgcatggtgtaccagaagttgaagatcgggttgaggattggggctagctcgatgacactaaggccccaacatcgcgggacctgctgtggcgcggattcttaggaacgctgttctagccggccccctctccaggggtcgccgtggccggcattatttcctagttcttcttgtaaccctgaggtgccagcgcggggagtgaggaggggtcagggggctaaggatgcaacctctgacgttctgcgccttcctaggagagtcttacatgtgttgagatttcacaagcaatgcgagttgtaaaataccagctctacaagaagctaggctctgtgacggcatagttttcagtagctttatcacaatattcacaatggagaattatatgacatggtagcagaaataggcccttttatgtgttgcttctattttacctcaaattgtagatatagggtaatcaataaaatccatccatgcctttcacacactaagt

SEQ ID NO: 4475 - protein, 876 aa, Homo sapiens
MVVTFLMSALESMCKELAKSKAEVACIAVYETDVFVVGTERGRAFVNTRKDFQKDFVKYCVEEEEKAAEMHKMKSTTQANRMSVDAVEIETLRKTVEDYFCFCYGKALGKSTVVPVPYEKMLRDQSAVVVQGLPEGVAFKHPENYDLATLKWILENKAGISFIIKRPFLEPKKHVGGRVMVTDADRSILSPGGSCGPIKVKTEPTEDSGSHHSSEGNEGTEMEVPAEDSTQHVPSETSEDPEVEVTIEDDDYSPPSKRPKANELPQPPVPEPANAGKRKVREFNFEKWNARITDLRKQVEELFERKYAQAIKAKGPVTIPYPLFQSHVEDLYVEGLPEGIPFRRPSTYGIPRLERILLAKERIRFVIKKHELLNSTREDLQLDKPASGVKEEWYARITKLRKMVDQLFCKKFAEALGSTEAKAVPYQKFEAHPNDLYVEGLPENIPFRSPSWYGIPRLEKIIQVGNRIKFVIKRPELLTHSTTEVTQPRTNTPVKEDWNVRITKLRKQVEEIFNLKFAQALGLTEAVKVPYPVFESNPEFLYVEGLPEGIPFRSPTWFGIPRLERIVRGSNKIKFVVKKPELVISYLPPGMASKINTKALQSPKRPRSPGSNSKVPEIEVTVEGPNNNNPQTSAVRTPTQTNGSNVPFKPRGREFSFEAWNAKITDLKQKVENLFNEKCGEALGLKQAVKVPFALFESFPEDFYVEGLPEGVPFRRPSTFGIPRLEKILRNKAKIKFIIKKPEMFETAIKESTSSKSPPRKINSSPNVNTTASGVEDLNIIQVTIPDDDNERLSKVEKARQLREQVNDLFSRKFGEAIGMGFPVKVPYRKITINPGCVVVDGMPPGVSFKAPSYLEISSMRRILDSAEFIKFTVIR

SEQ ID NO: 4476 - DNA, 5064 bp, Homo sapiens
aaaaaaaaaaaaaaaaaaaaaaaaaaaagaaaaaagaaaaaaaaaaggaggaggaggaggagggtgagagagaagctgggagagcagagaaaaggggccaccggtcgcccccccgcttccccgcacgcgctctccagccgcggccgcccgcctgccgcggtcaccccggcctctgcctctgtcccccagtgatcggatcaaggcgctgagcgaggccctgcctgcggggcggccatgcggcggtgacaggagcgcgaccgacacgcacgggcccctcgccccctctcgcctcccgtccgctcgccagctcccctcagccgaggctgctccgcggcggccgcagcccgcgcgcggcccacactcgcctcccctcggcacccccggccccggagctgcctggaggcggccgcactcggggatcatggcccaagttgcaatgtccaccctccccgttgaagatgaggagtcctcggagagcaggatggtggtgacattcctcatgtcagctctcgagtccatgtgtaaagaactggccaagtccaaagccgaagtggcctgcattgcagtgtatgaaacagacgtgtttgtcgtcggaactgaaagaggacgtgcttttgtcaataccagaaaggattttcaaaaagattttgtaaaatattgtgttgaagaagaagaaaaagctgcagagatgcataaaatgaaatctacaacccaggcaaatcggatgagtgtagatgctgtagaaattgaaacactcagaaaaacagttgaggactatttctgcttttgctatgggaaagctttaggcaaatccacagtggtacctgtaccatatgagaagatgctgcgagaccagtcggctgtggtagtgcaggggcttccggaaggtgttgcctttaaacaccccgagaactatgatcttgcaaccctgaaatggattttggagaacaaagcagggatttcattcatcattaagagaccttttttagagccaaagaagcatgtaggtggtcgtgtgatggtaacagatgctgacaggtcaatactatctccaggtggaagttgtggccccatcaaagtgaaaactgaacccacagaagattctggaagccaccattcttcagagggcaatgaaggcacagaaatggaagtaccagcagaagattctactcaacatgtcccttcagaaacaagtgaggaccctgaagttgaggtgactattgaagatgatgattattctccaccgtctaagagaccaaaggccaatgagctaccgcagccaccagtcccggaacccgccaatgctgggaagcggaaagtgagggagttcaacttcgagaaatggaatgctcgcatcactgatctacgtaaacaagttgaagaattgtttgaaaggaaatatgctcaagccataaaagccaaaggtccggtgacgatcccgtaccctcttttccagtctcatgttgaagatctttatgtagaaggacttcctgaaggaattccttttagaaggccatctacttacggaattcctcgcctggagaggatattacttgcaaaggaaaggattcgttttgtgattaagaaacatgagcttctgaattcaacacgtgaagatttacagcttgataagccagcttcaggagtaaaggaagaatggtatgccagaatcactaaattaagaaagatggtggatcagcttttctgcaaaaaatttgcggaagccttggggagcactgaagccaaggctgtaccgtaccaaaaatttgaggcacacccgaatgatctgtacgtggaaggactgccagaaaacattcctttccgaagtccctcatggtatggaatcccaaggctggaaaaaatcattcaagtgggcaatcgaattaaatttgttattaaaagaccagaacttctgactcacagtaccactgaagttactcagccaagaacgaatacaccagctcaagctcttggactcaccgaggcagtaaaagtaccatatcctgtgtttgaatcaaacccggagttcttgtatgtggaaggcttgccagaggggattcccttccgaagccctacctggtttggaattccacgacttgaaaggatcgtccgcgggagtaataaaatcaagttcgttgttaaaaaacctgaactagttatttcctacttgcctcctgggatggctagtaaaataaacactaaagctttgcagtcccccaaaagaccacgaagtcctgggagtaattcaaaggttcctgaaattgaggtcaccgtggaaggccctaataacaacaatcctcaaacctcagctgttcgaaccccgacccagactaacggttctaacgttcccttcaagccacgagggagagagttttcctttgaggcctggaatgccaaaatcacggacctaaaacagaaagttgaaaatctcttcaatgagaaatgtggggaagctcttggccttaaacaagctgtgaaggtgccgttcgcgttatttgagtctttcccggaagacttttatgtggaaggcttacctgagggtgtgccattccgaagaccatcgacttttggcattccgaggctggagaagatactcagaaacaaagccaaaattaagttcatcattaaaaagcccgaaatgtttgagacggcgattaaggagagcacctcctctaagagccctcccagaaaaataaattcatcacccaatgttaatactactgcatcaggtgttgaagaccttaacatcattcaggtgacaattccagatgatgataatgaaagactctcgaaagttgaaaaagctagacagctaagagaacaagtgaatgacctctttagtcggaaatttggtgaagctattggtatgggttttcctgtgaaagttccctacaggaaaatcacaattaaccctggctgtgtggtggttgatggcatgcccccgggggtgtccttcaaagcccccagctacctggaaatcagctccatgagaaggatcttagactctgccgagtttatcaaattcacggtcattagaccatttccaggacttgtgattaataaccagctggttgatcagagtgagtcagaaggccccgtgatacaagaatcagctgaaccaagccagttggaagttccagccacagaagaaataaaagagactgatggaagctctcagatcaagcaagaaccagaccccacgtggtagacctcttccctcctagggtaaatcagcttctgtgtcagggatgctgtgtggtgtccatctgaaccccctgcatacgcgtagctaatgtgatctccccactttcacataagatggtggccctgccttcagggaatgtgggagccaggtgggagccttcccggatatttaagctagaagattctacagggagattctccttggatcaatatatgtctctcagtcaaagatgtaaaagcacttttgccttaaaaagaatgttctgtttctaaatagagtcaacgttgtcctcctcattggaattcactatgagtcagaatcattagactgacttttttttttccatagtaatagtattttgcagagtctcacagagctgcagatcttttgttcatcttgcagagttaacaagtctgatcctgttagtccagatttcttaaatttggccaagttataataggagcagtagcttgagacccgaagtcaggaaactttgacaatggatttttttttttaatccagagacttgtactggaatttgccttaccctgtcagctcatggacttaaggtttcatcccgctttatgagtgcttctgaatccaagtcattgttacctgaatttgcaaattaagttgtgatattcgtgactgttaaattcctgtaattagattaacctctttgcttgcttgtttgttttctctcctattttagcttaaagtatcagtggttgagaagagcttttcggacctgttactaccccaagctgtgtaatatacttgtataacagaaataccttctatacaaacctttttttctacttttagatagaaatgtctactttttcagcagttctgtgaattaaagagcagagtgactgtgggtctggaatggctggtgtacttgggaatgtactatcaggattttacagcaatgctgggaaatgacagggaaaatgacaggaatgaatctcaccagattttttatgtactcagcagagccttgagttacggtgtttattttccaatcaagtgaagatatctcctacttctcctactggaacatctcagcttctgcagtgaagaaaaattcctgtgatagttcagttctttagtttttctatttgaaaaaaaaaaatcatttaaatgatcctttgttcacggctctccttaatgactgagtgaacagttcctatctgtatatttgactaaaccttttcctaagctatctctcatggttcctatgtttttttatcataattaaaagcaaaaccatctggatcacctaacagtcagaggtcagtatctcagcgtgtgaattatagaggaaatacagagagaacctcttccacttttacttttcgtccaaataaaatgcatggtgtaccagaagttgaagatcgggttgaggattggggctagctcgatgacactaaggccccaacatcgcgggacctgctgtggcgcggattcttaggaacgctgttctagccggccccctctccaggggtcgccgtggccggcattatttcctagttcttcttgtaaccctgaggtgccagcgcggggagtgaggaggggtcagggggctaaggatgcaacctctgacgttctgcgccttcctaggagagtcttacatgtgttgagatttcacaagcaatgcgagttgtaaaataccagctctacaagaagctaggctctgtgacggcatagttttcagtagctttatcacaatattcacaatggagaattatatgacatggtagcagaaataggcccttttatgtgttgcttctattttacctcaaattgtagatatagggtaatcaataaaatccatccatgcctttcacacactaagt

SEQ ID NO: 4477 - protein, 928 aa, Homo sapiens; identical to SEQ ID NO: 4237

SEQ ID NO: 4478 - DNA, 4008 bp, Homo sapiens
aaaaaaaaaaaaaaaaaaaaaaaaaaaagaaaaaagaaaaaaaaaaggaggaggaggaggagggtgagagagaagctgggagagcagagaaaaggggccaccggtcgcccccccgcttccccgcacgcgctctccagccgcggccgcccgcctgccgcggtcaccccggcctctgcctctgtcccccagtgatcggatcaaggcgctgagcgaggccctgcctgcggggcggccatgcggcggtgacaggagcgcgaccgacacgcacgggcccctcgccccctctcgcctcccgtccgctcgccagctcccctcagccgaggctgctccgcggcggccgcagcccgcgcgcggcccacactcgcctccccgttgaagatgaggagtcctcggagagcaggatggtggtgacattcctcatgtcagctctcgagtccatgtgtaaagaactggccaagtccaaagccgaagtggcctgcattgcagtgtatgaaacagacgtgtttgtcgtcggaactgaaagaggacgtgcttttgtcaataccagaaaggattttcaaaaagattttgtaaaatattgtgttgaagaagaagaaaaagctgcagagatgcataaaatgaaatctacaacccaggcaaatcggatgagtgtagatgctgtagaaattgaaacactcagaaaaacagttgaggactatttctgcttttgctatgggaaagctttaggcaaatccacagtggtacctgtaccatatgagaagatgctgcgagaccagtcggctgtggtagtgcaggggcttccggaaggtgttgcctttaaacaccccgagaactatgatcttgcaaccctgaaatggattttggagaacaaagcagggatttcattcatcattaagagaccttttttagagccaaagaagcatgtaggtggtcgtgtgatggtaacagatgctgacaggtcaatactatctccaggtggaagttgtggccccatcaaagtgaaaactgaacccacagaagattctggaagccaccattcttcagagggcaatgaaggcacagaaatggaagtaccagcagaagattctactcaacatgtcccttcagaaacaagtgaggaccctgaagttgaggtgactattgaagatgatgattattctccaccgtctaagagaccaaaggccaatgagctaccgcagccaccagtcccggaacccgccaatgctgggaagcggaaagtgagggagttcaacttcgagaaatggaatgctcgcatcactgatctacgtaaacaagttgaagaattgtttgaaaggaaatatgctcaagccataaaagccaaaggtccggtgacgatcccgtaccctcttttccagtctcatgttgaagatctttatgtagaaggacttcctgaaggaattccttttagaaggccatctacttacggaattcctcgcctggagaggatattacttgcaaaggaaaggattcgttttgtgattaagaaacatgagcttctgaattcaacacgtgaagatttacagcttgataagccagcttcaggagtaaaggaagaatggtatgccagaatcactaaattaagaaagatggtggatcagcttttctgcaaaaaatttgcggaagccttggggagcactgaagccaaggctgtaccgtaccaaaaatttgaggcacacccgaatgatctgtacgtggaaggactgccagaaaacattcctttccgaagtccctcatggtatggaatcccaaggctggaaaaaatcattcaagtgggcaatcgaattaaatttgttattaaaagaccagaacttctgactcacagtaccactgaagttactcagccaagaacgaatacaccagctcaagctcttggactcaccgaggcagtaaaagtaccatatcctgtgtttgaatcaaacccggagttcttgtatgtggaaggcttgccagaggggattcccttccgaagccctacctggtttggaattccacgacttgaaaggatcgtccgcgggagtaataaaatcaagttcgttgttaaaaaacctgaactagttatttcctacttgcctcctgggatggctagtaaaataaacactaaagctttgcagtcccccaaaagaccacgaagtcctgggagtaattcaaaggttcctgaaattgaggtcaccgtggaaggccctaataacaacaatcctcaaacctcagctgttcgaaccccgacccagactaacggttctaacgttcccttcaagccacgagggagagagttttcctttgaggcctggaatgccaaaatcacggacctaaaacagaaagttgaaaatctcttcaatgagaaatgtggggaagctcttggccttaaacaagctgtgaaggtgccgttcgcgttatttgagtctttcccggaagacttttatgtggaaggcttacctgagggtgtgccattccgaagaccatcgacttttggcattccgaggctggagaagatactcagaaacaaagccaaaattaagttcatcattaaaaagcccgaaatgtttgagacggcgattaaggagagcacctcctctaagagccctcccagaaaaataaattcatcacccaatgttaatactactgcatcaggtgttgaagaccttaacatcattcaggtgacaattccagatgatgataatgaaagactctcgaaagttgaaaaagctagacagctaagagaacaagtgaatgacctctttagtcggaaatttggtgaagctattggtatgggttttcctgtgaaagttccctacaggaaaatcacaattaaccctggctgtgtggtggttgatggcatgcccccgggggtgtccttcaaagcccccagctacctggaaatcagctccatgagaaggatcttagactctgccgagtttatcaaattcacggtcattagaccatttccaggacttgtgattaataaccagctggttgatcagagtgagtcagaaggccccgtgatacaagaatcagctgaaccaagccagttggaagttccagccacagaagaaataaaagagactgatggaagctctcagatcaagcaagaaccagaccccacgtggtagacctcttccctcctaggagccttgagttacggtgtttattttccaatcaagtgaagatatctcctacttctcctactggaacatctcagcttctgcagtgaagaaaaattcctgtgatagttcagttctttagtttttctatttgaaaaaaaaaaatcatttaaatgatcctttgttcacggctctccttaatgactgagtgaacagttcctatctgtatatttgactaaaccttttcctaagctatctctcatggttcctatgtttttttatcataattaaaagcaaaaccatctggatcacctaacagtcagaggtcagtatctcagcgtgtgaattatagaggaaatacagagagaacctcttccacttttacttttcgtccaaataaaatgcatggtgtaccagaagttgaagatcgggttgaggattggggctagctcgatgacactaaggccccaacatcgcgggacctgctgtggcgcggattcttaggaacgctgttctagccggccccctctccaggggtcgccgtggccggcattatttcctagttcttcttgtaaccctgaggtgccagcgcggggagtgaggaggggtcagggggctaaggatgcaacctctgacgttctgcgccttcctaggagagtcttacatgtgttgagatttcacaagcaatgcgagttgtaaaataccagctctacaagaagctaggctctgtgacggcatagttttcagtagctttatcacaatattcacaatggagaattatatgacatggtagcagaaataggcccttttatgtgttgcttctattttacctcaaattgtagatatagggtaatcaataaaatccatccatgcctttcacacactaagt

SEQ ID NO: 4479 - protein, 908 aa, Homo sapiens; identical to SEQ ID NO: 4227

SEQ ID NO: 4480 - DNA, 4975 bp, Homo sapiens
aaaaaaaaaaaaaaaaaaaaaaaaaaaagaaaaaagaaaaaaaaaaggaggaggaggaggagggtgagagagaagctgggagagcagagaaaaggggccaccggtcgcccccccgcttccccgcacgcgctctccagccgcggccgcccgcctgccgcggtcaccccggcctctgcctctgtcccccagtgatcggatcaaggcgctgagcgaggccctgcctgcggggcggccatgcggcggtgacaggagcgcgaccgacacgcacgggcccctcgccccctctcgcctcccgtccgctcgccagctcccctcagccgaggctgctccgcggcggccgcagcccgcgcgcggcccacactcgcctcccctcggcacccccggccccggagctgcctggaggcggccgcactcggtgtaaagaactggccaagtccaaagccgaagtggcctgcattgcagtgtatgaaacagacgtgtttgtcgtcggaactgaaagaggacgtgcttttgtcaataccagaaaggattttcaaaaagattttgtaaaatattgtgttgaagaagaagaaaaagctgcagagatgcataaaatgaaatctacaacccaggcaaatcggatgagtgtagatgctgtagaaattgaaacactcagaaaaacagttgaggactatttctgcttttgctatgggaaagctttaggcaaatccacagtggtacctgtaccatatgagaagatgctgcgagaccagtcggctgtggtagtgcaggggcttccggaaggtgttgcctttaaacaccccgagaactatgatcttgcaaccctgaaatggattttggagaacaaagcagggatttcattcatcattaagagaccttttttagagccaaagaagcatgtaggtggtcgtgtgatggtaacagatgctgacaggtcaatactatctccaggtggaagttgtggccccatcaaagtgaaaactgaacccacagaagattctggcatttccctggaaatggcagctgtgacagtaaaggaagaatcagaagatcctgattattatcaatataacattcaaggaagccaccattcttcagagggcaatgaaggcacagaaatggaagtaccagcagaagatgatgattattctccaccgtctaagagaccaaaggccaatgagctaccgcagccaccagtcccggaacccgccaatgctgggaagcggaaagtgagggagttcaacttcgagaaatggaatgctcgcatcactgatctacgtaaacaagttgaagaattgtttgaaaggaaatatgctcaagccataaaagccaaaggtccggtgacgatcccgtaccctcttttccagtctcatgttgaagatctttatgtagaaggacttcctgaaggaattccttttagaaggccatctacttacggaattcctcgcctggagaggatattacttgcaaaggaaaggattcgttttgtgattaagaaacatgagcttctgaattcaacacgtgaagatttacagcttgataagccagcttcaggagtaaaggaagaatggtatgccagaatcactaaattaagaaagatggtggatcagcttttctgcaaaaaatttgcggaagccttggggagcactgaagccaaggctgtaccgtaccaaaaatttgaggcacacccgaatgatctgtacgtggaaggactgccagaaaacattcctttccgaagtccctcatggtatggaatcccaaggctggaaaaaatcattcaagtgggcaatcgaattaaatttgttattaaaagaccagaacttctgactcacagtaccactgaagttactcagccaagaacgaatacaccagctcaagctcttggactcaccgaggcagtaaaagtaccatatcctgtgtttgaatcaaacccggagttcttgtatgtggaaggcttgccagaggggattcccttccgaagccctacctggtttggaattccacgacttgaaaggatcgtccgcgggagtaataaaatcaagttcgttgttaaaaaacctgaactagttatttcctacttgcctcctgggatggctagtaaaataaacactaaagctttgcagtcccccaaaagaccacgaagtcctgggagtaattcaaaggttcctgaaattgaggtcaccgtggaaggccctaataacaacaatcctcaaacctcagctgttcgaaccccgacccagactaacggttctaacgttcccttcaagccacgagggagagagttttcctttgaggcctggaatgccaaaatcacggacctaaaacagaaagttgaaaatctcttcaatgagaaatgtggggaagctcttggccttaaacaagctgtgaaggtgccgttcgcgttatttgagtctttcccggaagacttttatgtggaaggcttacctgagggtgtgccattccgaagaccatcgacttttggcattccgaggctggagaagatactcagaaacaaagccaaaattaagttcatcattaaaaagcccgaaatgtttgagacggcgattaaggagagcacctcctctaagagccctcccagaaaaataaattcatcacccaatgttaatactactgcatcaggtgttgaagaccttaacatcattcaggtgacaattccagatgatgataatgaaagactctcgaaagttgaaaaagctagacagctaagagaacaagtgaatgacctctttagtcggaaatttggtgaagctattggtatgggttttcctgtgaaagttccctacaggaaaatcacaattaaccctggctgtgtggtggttgatggcatgcccccgggggtgtccttcaaagcccccagctacctggaaatcagctccatgagaaggatcttagactctgccgagtttatcaaattcacggtcattagaccatttccaggacttgtgattaataaccagctggttgatcagagtgagtcagaaggccccgtgatacaagaatcagctgaaccaagccagttggaagttccagccacagaagaaataaaagagactgatggaagctctcagatcaagcaagaaccagaccccacgtggtagacctcttccctcctagggtaaatcagcttctgtgtcagggatgctgtgtggtgtccatctgaaccccctgcatacgcgtagctaatgtgatctccccactttcacataagatggtggccctgccttcagggaatgtgggagccaggtgggagccttcccggatatttaagctagaagattctacagggagattctccttggatcaatatatgtctctcagtcaaagatgtaaaagcacttttgccttaaaaagaatgttctgtttctaaatagagtcaacgttgtcctcctcattggaattcactatgagtcagaatcattagactgacttttttttttccatagtaatagtattttgcagagtctcacagagctgcagatcttttgttcatcttgcagagttaacaagtctgatcctgttagtccagatttcttaaatttggccaagttataataggagcagtagcttgagacccgaagtcaggaaactttgacaatggatttttttttttaatccagagacttgtactggaatttgccttaccctgtcagctcatggacttaaggtttcatcccgctttatgagtgcttctgaatccaagtcattgttacctgaatttgcaaattaagttgtgatattcgtgactgttaaattcctgtaattagattaacctctttgcttgcttgtttgttttctctcctattttagcttaaagtatcagtggttgagaagagcttttcggacctgttactaccccaagctgtgtaatatacttgtataacagaaataccttctatacaaacctttttttctacttttagatagaaatgtctactttttcagcagttctgtgaattaaagagcagagtgactgtgggtctggaatggctggtgtacttgggaatgtactatcaggattttacagcaatgctgggaaatgacagggaaaatgacaggaatgaatctcaccagattttttatgtactcagcagagccttgagttacggtgtttattttccaatcaagtgaagatatctcctacttctcctactggaacatctcagcttctgcagtgaagaaaaattcctgtgatagttcagttctttagtttttctatttgaaaaaaaaaaatcatttaaatgatcctttgttcacggctctccttaatgactgagtgaacagttcctatctgtatatttgactaaaccttttcctaagctatctctcatggttcctatgtttttttatcataattaaaagcaaaaccatctggatcacctaacagtcagaggtcagtatctcagcgtgtgaattatagaggaaatacagagagaacctcttccacttttacttttcgtccaaataaaatgcatggtgtaccagaagttgaagatcgggttgaggattggggctagctcgatgacactaaggccccaacatcgcgggacctgctgtggcgcggattcttaggaacgctgttctagccggccccctctccaggggtcgccgtggccggcattatttcctagttcttcttgtaaccctgaggtgccagcgcggggagtgaggaggggtcagggggctaaggatgcaacctctgacgttctgcgccttcctaggagagtcttacatgtgttgagatttcacaagcaatgcgagttgtaaaataccagctctacaagaagctaggctctgtgacggcatagttttcagtagctttatcacaatattcacaatggagaattatatgacatggtagcagaaataggcccttttatgtgttgcttctattttacctcaaattgtagatatagggtaatcaataaaatccatccatgcctttcacacactaagt

SEQ ID NO: 4481 - protein, 844 aa, Homo sapiens; identical to SEQ ID NO: 4247

SEQ ID NO: 4482 - DNA, 7892 bp, Homo sapiens
aaaaaaaaaaaaaaaaaaaaaaaaaaaagaaaaaagaaaaaaaaaaggaggaggaggaggagggtgagagagaagctgggagagcagagaaaaggggccaccggtcgcccccccgcttccccgcacgcgctctccagccgcggccgcccgcctgccgcggtcaccccggcctctgcctctgtcccccagtgatcggatcaaggcgctgagcgaggccctgcctgcggggcggccatgcggcggtgacaggagcgcgaccgacacgcacgggcccctcgccccctctcgcctcccgtccgctcgccagctcccctcagccgaggctgctccgcggcggccgcagcccgcgcgcggcccacactcgcctccccgttgaagatgaggagtcctcggagagcaggatggtggtgacattcctcatgtcagctctcgagtccatgtgtaaagaactggccaagtccaaagccgaagtggcctgcattgcagtgtatgaaacagacgtgtttgtcgtcggaactgaaagaggacgtgcttttgtcaataccagaaaggattttcaaaaagattttgtaaaatattgtgttgaagaagaagaaaaagctgcagagatgcataaaatgaaatctacaacccaggcaaatcggatgagtgtagatgctgtagaaattgaaacactcagaaaaacagttgaggactatttctgcttttgctatgggaaagctttaggcaaatccacagtggtacctgtaccatatgagaagatgctgcgagaccagtcggctgtggtagtgcaggggcttccggaaggtgttgcctttaaacaccccgagaactatgatcttgcaaccctgaaatggattttggagaacaaagcagggatttcattcatcattaagagaccttttttagagccaaagaagcatgtaggtggtcgtgtgatggtaacagatgctgacaggtcaatactatctccaggtggaagttgtggccccatcaaagtgaaaactgaacccacagaagattctggcatttccctggaaatggcagctgtgacagtaaaggaagaatcagaagatcctgattattatcaatataacattcaagcaggcccttctgaaactgatgatgttgatgaaaaacagcccctatcgaagcctttgcaaggaagccaccattcttcagagggcaatgaaggcacagaaatggaagtaccagcagaagatgatgattattctccaccgtctaagagaccaaaggccaatgagctaccgcagccaccagtcccggaacccgccaatgctgggaagcggaaagtgagggagttcaacttcgagaaatggaatgctcgcatcactgatctacgtaaacaagttgaagaattgtttgaaaggaaatatgctcaagccataaaagccaaaggtccggtgacgatcccgtaccctcttttccagtctcatgttgaagatctttatgtagaaggacttcctgaaggaattccttttagaaggccatctacttacggaattcctcgcctggagaggatattacttgcaaaggaaaggattcgttttgtgattaagaaacatgagcttctgaattcaacacgtgaagatttacagcttgataagccagcttcaggagtaaaggaagaatggtatgccagaatcactaaattaagaaagatggtggatcagcttttctgcaaaaaatttgcggaagccttggggagcactgaagccaaggctgtaccgtaccaaaaatttgaggcacacccgaatgatctgtacgtggaaggactgccagaaaacattcctttccgaagtccctcatggtatggaatcccaaggctggaaaaaatcattcaagtgggcaatcgaattaaatttgttattaaaagaccagaacttctgactcacagtaccactgaagttactcagccaagaacgaatacaccagtcaaagaagattggaatgtcagaattaccaagctacggaagcaagtggaagagatttttaatttgaaatttgctcaagctcttggactcaccgaggcagtaaaagtaccatatcctgtgtttgaatcaaacccggagttcttgtatgtggaaggcttgccagaggggattcccttccgaagccctacctggtttggaattccacgacttgaaaggatcgtccgcgggagtaataaaatcaagttcgttgttaaaaaacctgaactagttatttcctacttgcctcctgggatggctagtaaaataaacactaaagctttgcagtcccccaaaagaccacgaagtcctgggagtaattcaaaggttcctgaaattgaggtcaccgtggaaggccctaataacaacaatcctcaaacctcagctgttcgaaccccgacccagactaacggttctaacgttcccttcaagccacgagggagagagttttcctttgaggcctggaatgccaaaatcacggacctaaaacagaaagttgaaaatctcttcaatgagaaatgtggggaagctcttggccttaaacaagctgtgaaggtgccgttcgcgttatttgagtctttcccggaagacttttatgtggaaggcttacctgagggtgtgccattccgaagaccatcgacttttggcattccgaggctggagaagatactcagaaacaaagccaaaattaagttcatcattaaaaagcccgaaatgtttgagacggcgattaaggagagcacctcctctaagagccctcccagaaaaataaattcatcacccaatgttaatactactgcatcaggtgttgaagaccttaacatcattcaggtgacaattccagatgatgataatgaaagactctcgaaagttgaaaaagctagacagctaagagaacaagtgaatgacctctttagtcggaaatttggtgaagctattggtatgggttttcctgtgaaagttccctacaggaaaatcacaattaaccctggctgtgtggtggttgatggcatgcccccgggggtgtccttcaaagcccccagctacctggaaatcagctccatgagaaggatcttagactctgccgagtttatcaaattcacggtcattaggtaagtgagagtttcctgcttagtcacaggagcgaatctggagctcatgaggctgactcttctaaaatgcagccacaggtagtcatcgaatccggcttcctatgctgtgcaatcaacaaatcaaaataacttgtgtcatcattagaatgtcagatgtgcttctacgaactaagctgactcttttaattctttggcaaagggttggcaaactaggactgtttgccaaattcaggctgcctcctatttttagagtcttcctgaaacacagctacacccgtattatccatggctgctttcctgtcacagtgagtaagtagctgggactgagaaggcatggcctccaaagtctaaaatatttactctctagcactttgtagaaaaaccttagctaggcacagtggctaacgcctgtaatcccagcattttgggaggccaaggcaggcagatcacctgaggtcaggagttccagaccagcctggccaacatggtgaaatcccatctctacaaaaataaaacagttagctgggcatgatggcgggtgcctgtaatcccagctactcgggaggctgaggcaggatagtcgcttgaacccaggaggtggaggttgcaatgagccaagatcatgccactgcactccagcctggacgacagagtgagactccatcacaagaaaaaaagaactttgtcaacctctgtcttagggcgccttgtcacaggcttcgggtcagacggattcaaccttgcatcagccatttgttagccaggtcactctgttctttgtctgtaaatgagattgatcgttgttcccactgagagtgtcagctccttcccgtagagcaggcatgatgattgtactcacctctgacaccattgtgagtgccacattccttcccacgtccttgtcactgtaagagatgcccacctgagcaccaaccccaggttatcttcccctttgtcttccagccccccagaaacagctacgactcaacctacccaatcatttcatcatcagattgccactgtctctagttcaggtctcttgggactggcactcagaaatctcataataaatcctcttgaggcttctcatacactcgtcttcttccaatcttctttccctcaaaatctcatattttggttccacttcacccaccgtcattctccatatcactcccaggagttaggcaaaaagccccttccgttcttccgtatgttaaacttagaatcactctgttccctgctctgcgtttctattttttgtttttcctccatttactagtagcttaacactttctaacagtgttcttattattgatacgtatctatctcttccataagcttataaggtcacggataatacttctcattgtagtacgtaaatgacgtgggctagatatgagttgaataaacagttatacctgtaaattcttacagagtgaaaataaattgttatactttacaatttgtttctctctttagaccatttccaggacttgtgattaataaccgtgagtattttgtgaagtgttttgtttttgttttttcctggggtctgacgtgtgtgcgtgtgagtgtgtatacatgcttaacgtatatcacgttacttcacctatgtcagtaaccaggccaaatacttgttttagccctcagtaaaaacaccaggcacttcctagttgtaaaattattcaagcttcttaacttcctatcctcgatgcacttaatcataaaatggtaataatagcaccgattttgggggagtcgttccagtagatggaaagcatctggaacaggtgtcagcaagctcctgccgacgtgtatgcataaagttttattgaaaccaccatcgtgtccatttgtttatggcagaactgagagatggcagcagcaagtgtgtgcctgcaaaacctaaaatatttactaattggctctgcaagaaaagagtttgcatccccctaacctagaacagtgtctagcctctagtatgtgtttagcctacagtatgtgctcagcgaatacaatctatatttattactgcttttatgactgttataattactgtgcttggatttcgttacaaagtaagtcacaatgtgcctgcttctgttagtatttcagcacagtgcctggcacacatggggctctcaaatattgctgagcgagtgaacaaatgtcctttcaattccttaacgttgatgtcattttcaatagtattttgagccaaacttaattttgcgagtgtgttttgttttcttaactttattattaaaaatgtataaaagtgaggccaggcgtggtggctcacgcctgtaatcccagcagtttgggaggctgaggcaggcggatcagttgaggttgggagttggagaccagcccgtccaacatggtgaaagcctgtctctactaaaaatacaaaaatcagctgggtgtggtggcgcgtgcctgtaatcccagctactcaggaggctgaggcaggagagttgcttgaatcctagaggtggaggttgcagtgagctgagatcgtgccattgcactccagcctgggcaacaagagcaaaactctgtcccaataaataaataaataaaatgttctcttttgttcctgttcttgtgcggtagtgtggtatagagttttatggtaattactgtgaattagtgattctgagggacatatcagaactctgaggtttgtttccttctcatcttgagggaaacagcaaatgtatgttaaaatgcttttccaagggaacaacacatccttacattatttaaaccaatctgcttcattttcagagctggttgatcagagtgagtcagaaggccccgtgatacaagaatcagctgaaccaagccagttggaagttccagccacagaagaaataaaagagactgatggaagctctcagatcaagcaagaaccagaccccacgtggtagacctcttccctcctagggtaaatcagcttctgtgtcagggatgctgtgtggtgtccatctgaaccccctgcatacgcgtagctaatgtgatctccccactttcacataagatggtggccctgccttcagggaatgtgggagccaggtgggagccttcccggatatttaagctagaagattctacagggagattctccttggatcaatatatgtctctcagtcaaagatgtaaaagcacttttgccttaaaaagaatgttctgtttctaaatagagtcaacgttgtcctcctcattggaattcactatgagtcagaatcattagactgacttttttttttccatagtaatagtattttgcagagtctcacagagctgcagatcttttgttcatcttgcagagttaacaagtctgatcctgttagtccagatttcttaaatttggccaagttataataggagcagtagcttgagacccgaagtcaggaaactttgacaatggatttttttttttaatccagagacttgtactggaatttgccttaccctgtcagctcatggacttaaggtttcatcccgctttatgagtgcttctgaatccaagtcattgttacctgaatttgcaaattaagttgtgatattcgtgactgttaaattcctgtaattagattaacctctttgcttgcttgtttgttttctctcctattttagcttaaagtatcagtggttgagaagagcttttcggacctgttactaccccaagctgtgtaatatacttgtataacagaaataccttctatacaaacctttttttctacttttagatagaaatgtctactttttcagcagttctgtgaattaaagagcagagtgactgtgggtctggaatggctggtgtacttgggaatgtactatcaggattttacagcaatgctgggaaatgacagggaaaatgacaggaatgaatctcaccagattttttatgtactcagcagagccttgagttacggtgtttattttccaatcaagtgaagatatctcctacttctcctactggaacatctcagcttctgcagtgaagaaaaattcctgtgatagttcagttctttagtttttctatttgaaaaaaaaaaatcatttaaatgatcctttgttcacggctctccttaatgactgagtgaacagttcctatctgtatatttgactaaaccttttcctaagctatctctcatggttcctatgtttttttatcataattaaaagcaaaaccatctggatcacctaacagtcagaggtcagtatctcagcgtgtgaattatagaggaaatacagagagaacctcttccacttttacttttcgtccaaataaaatgcatggtgtaccagaagttgaagatcgggttgaggattggggctagctcgatgacactaaggccccaacatcgcgggacctgctgtggcgcggattcttaggaacgctgttctagccggccccctctccaggggtcgccgtggccggcattatttcctagttcttcttgtaaccctgaggtgccagcgcggggagtgaggaggggtcagggggctaaggatgcaacctctgacgttctgcgccttcctaggagagtcttacatgtgttgagatttcacaagcaatgcgagttgtaaaataccagctctacaagaagctaggctctgtgacggcatagttttcagtagctttatcacaatattcacaatggagaattatatgacatggtagcagaaataggcccttttatgtgttgcttctattttacctcaaattgtagatatagggtaatcaataaaatccatccatgcctttcacacactaagt

SEQ ID NO: 4483 - protein, 901 aa, Homo sapiens
MVVTFLMSALESMCKELAKSKAEVACIAVYETDVFVVGTERGRAFVNTRKDFQKDFVKYCVEEEEKAAEMHKMKSTTQANRMSVDAVEIETLRKTVEDYFCFCYGKALGKSTVVPVPYEKMLRDQSAVVVQGLPEGVAFKHPENYDLATLKWILENKAGISFIIKRPFLEPKKHVGGRVMVTDADRSILSPGGSCGPIKVKTEPTEDSGISLEMAAVTVKEESEDPDYYQYNIQAGPSETDDVDEKQPLSKPLQGSHHSSEGNEGTEMEVPAEDDDYSPPSKRPKANELPQPPVPEPANAGKRKVREFNFEKWNARITDLRKQVEELFERKYAQAIKAKGPVTIPYPLFQSHVEDLYVEGLPEGIPFRRPSTYGIPRLERILLAKERIRFVIKKHELLNSTREDLQLDKPASGVKEEWYARITKLRKMVDQLFCKKFAEALGSTEAKAVPYQKFEAHPNDLYVEGLPENIPFRSPSWYGIPRLEKIIQVGNRIKFVIKRPELLTHSTTEVTQPRTNTPVKEDWNVRITKLRKQVEEIFNLKFAQALGLTEAVKVPYPVFESNPEFLYVEGLPEGIPFRSPTWFGIPRLERIVRGSNKIKFVVKKPELVISYLPPGMASKINTKALQSPKRPRSPGSNSKVPEIEVTVEGPNNNNPQTSAVRTPTQTNGSNVPFKPRGREFSFEAWNAKITDLKQKVENLFNEKCGEALGLKQAVKVPFALFESFPEDFYVEGLPEGVPFRRPSTFGIPRLEKILRNKAKIKFIIKKPEMFETAIKESTSSKSPPRKINSSPNVNTTASGVEDLNIIQVTIPDDDNERLSKVEKARQLREQVNDLFSRKFGEAIGMGFPVKVPYRKITINPGCVVVDGMPPGVSFKAPSYLEISSMRRILDSAEFIKFTVIR

SEQ ID NO: 4484 - DNA, 4067 bp, Homo sapiens
aaaaaaaaaaaaaaaaaaaaaaaaaaaagaaaaaagaaaaaaaaaaggaggaggaggaggagggtgagagagaagctgggagagcagagaaaaggggccaccggtcgcccccccgcttccccgcacgcgctctccagccgcggccgcccgcctgccgcggtcaccccggcctctgcctctgtcccccagtgatcggatcaaggcgctgagcgaggccctgcctgcggggcggccatgcggcggtgacaggagcgcgaccgacacgcacgggcccctcgccccctctcgcctcccgtccgctcgccagctcccctcagccgaggctgctccgcggcggccgcagcccgcgcgcggcccacactcgcctcccctcggcacccccggccccggagctgcctggaggcggccgcactcggtgtaaagaactggccaagtccaaagccgaagtggcctgcattgcagtgtatgaaacagacgtgtttgtcgtcggaactgaaagaggacgtgcttttgtcaataccagaaaggattttcaaaaagattttgtaaaatattgtgttgaagaagaagaaaaagctgcagagatgcataaaatgaaatctacaacccaggcaaatcggatgagtgtagatgctgtagaaattgaaacactcagaaaaacagttgaggactatttctgcttttgctatgggaaagctttaggcaaatccacagtggtacctgtaccatatgagaagatgctgcgagaccagtcggctgtggtagtgcaggggcttccggaaggtgttgcctttaaacaccccgagaactatgatcttgcaaccctgaaatggattttggagaacaaagcagggatttcattcatcattaagagaccttttttagagccaaagaagcatgtaggtggtcgtgtgatggtaacagatgctgacaggtcaatactatctccaggtggaagttgtggccccatcaaagtgaaaactgaacccacagaagattctggcatttccctggaaatggcagctgtgacagtaaaggaagaatcagaagatcctgattattatcaatataacattcaaggaagccaccattcttcagagggcaatgaaggcacagaaatggaagtaccagcagaagattctactcaacatgtcccttcagaaacaagtgaggaccctgaagttgaggtgactattgaagatgatgattattctccaccgtctaagagaccaaaggccaatgagctaccgcagccaccagtcccggaacccgccaatgctgggaagcggaaagtgagggagttcaacttcgagaaatggaatgctcgcatcactgatctacgtaaacaagttgaagaattgtttgaaaggaaatatgctcaagccataaaagccaaaggtccggtgacgatcccgtaccctcttttccagtctcatgttgaagatctttatgtagaaggacttcctgaaggaattccttttagaaggccatctacttacggaattcctcgcctggagaggatattacttgcaaaggaaaggattcgttttgtgattaagaaacatgagcttctgaattcaacacgtgaagatttacagcttgataagccagcttcaggagtaaaggaagaatggtatgccagaatcactaaattaagaaagatggtggatcagcttttctgcaaaaaatttgcggaagccttggggagcactgaagccaaggctgtaccgtaccaaaaatttgaggcacacccgaatgatctgtacgtggaaggactgccagaaaacattcctttccgaagtccctcatggtatggaatcccaaggctggaaaaaatcattcaagtgggcaatcgaattaaatttgttattaaaagaccagaacttctgactcacagtaccactgaagttactcagccaagaacgaatacaccagtcaaagaagattggaatgtcagaattaccaagctacggaagcaagtggaagagatttttaatttgaaatttgctcaagctcttggactcaccgaggcagtaaaagtaccatatcctgtgtttgaatcaaacccggagttcttgaaaggatcgtccgcgggagtaataaaatcaagttcgttgttaaaaaacctgaactagttatttcctacttgcctcctgggatggctagtaaaataaacactaaagctttgcagtcccccaaaagaccacgaagtcctgggagtaattcaaaggttcctgaaattgaggtcaccgtggaaggccctaataacaacaatcctcaaacctcagctgttcgaaccccgacccagactaacggttctaacgttcccttcaagccacgagggagagagttttcctttgaggcctggaatgccaaaatcacggacctaaaacagaaagttgaaaatctcttcaatgagaaatgtggggaagctcttggccttaaacaagctgtgaaggtgccgttcgcgttatttgagtctttcccggaagacttttatgtggaaggcttacctgagggtgtgccattccgaagaccatcgacttttggcattccgaggctggagaagatactcagaaacaaagccaaaattaagttcatcattaaaaagcccgaaatgtttgagacggcgattaaggagagcacctcctctaagagccctcccagaaaaataaattcatcacccaatgttaatactactgcatcaggtgttgaagaccttaacatcattcaggtgacaattccagatgatgataatgaaagactctcgaaagttgaaaaagctagacagctaagagaacaagtgaatgacctctttagtcggaaatttggtgaagctattggtatgggttttcctgtgaaagttccctacaggaaaatcacaattaaccctggctgtgtggtggttgatggcatgcccccgggggtgtccttcaaagcccccagctacctggaaatcagctccatgagaaggatcttagactctgccgagtttatcaaattcacggtcattagaccatttccaggacttgtgattaataaccagctggttgatcagagtgagtcagaaggccccgtgatacaagaatcagctgaaccaagccagttggaagttccagccacagaagaaataaaagagactgatggaagctctcagatcaagcaagaaccagaccccacgtggtagacctcttccctcctaggagccttgagttacggtgtttattttccaatcaagtgaagatatctcctacttctcctactggaacatctcagcttctgcagtgaagaaaaattcctgtgatagttcagttctttagtttttctatttgaaaaaaaaaaatcatttaaatgatcctttgttcacggctctccttaatgactgagtgaacagttcctatctgtatatttgactaaaccttttcctaagctatctctcatggttcctatgtttttttatcataattaaaagcaaaaccatctggatcacctaacagtcagaggtcagtatctcagcgtgtgaattatagaggaaatacagagagaacctcttccacttttacttttcgtccaaataaaatgcatggtgtaccagaagttgaagatcgggttgaggattggggctagctcgatgacactaaggccccaacatcgcgggacctgctgtggcgcggattcttaggaacgctgttctagccggccccctctccaggggtcgccgtggccggcattatttcctagttcttcttgtaaccctgaggtgccagcgcggggagtgaggaggggtcagggggctaaggatgcaacctctgacgttctgcgccttcctaggagagtcttacatgtgttgagatttcacaagcaatgcgagttgtaaaataccagctctacaagaagctaggctctgtgacggcatagttttcagtagctttatcacaatattcacaatggagaattatatgacatggtagcagaaataggcccttttatgtgttgcttctattttacctcaaattgtagatatagggtaatcaataaaatccatccatgcctttcacacactaagt

SEQ ID NO: 4485 - protein, 516 aa, Homo sapiens; identical to SEQ ID NO: 4129

SEQ ID NO: 4486 - DNA, 7888 bp, Homo sapiens
aaaaaaaaaaaaaaaaaaaaaaaaaaaagaaaaaagaaaaaaaaaaggaggaggaggaggagggtgagagagaagctgggagagcagagaaaaggggccaccggtcgcccccccgcttccccgcacgcgctctccagccgcggccgcccgcctgccgcggtcaccccggcctctgcctctgtcccccagtgatcggatcaaggcgctgagcgaggccctgcctgcggggcggccatgcggcggtgacaggagcgcgaccgacacgcacgggcccctcgccccctctcgcctcccgtccgctcgccagctcccctcagccgaggctgctccgcggcggccgcagcccgcgcgcggcccacactcgcctccccgttgaagatgaggagtcctcggagagcaggatggtggtgacattcctcatgtcagctctcgagtccatgtgtaaagaactggccaagtccaaagccgaagtggcctgcattgcagtgtatgaaacagacgtgtttgtcgtcggaactgaaagaggacgtgcttttgtcaataccagaaaggattttcaaaaagattttgtaaaatattgtgttgaagaagaagaaaaagctgcagagatgcataaaatgaaatctacaacccaggcaaatcggatgagtgtagatgctgtagaaattgaaacactcagaaaaacagttgaggactatttctgcttttgctatgggaaagctttaggcaaatccacagtggtacctgtaccatatgagaagatgctgcgagaccagtcggctgtggtagtgcaggggcttccggaaggtgttgcctttaaacaccccgagaactatgatcttgcaaccctgaaatggattttggagaacaaagcagggatttcattcatcattaagagaccttttttagagccaaagaagcatgtaggtggtcgtgtgatggtaacagatgctgacaggtcaatactatctccaggtggaagttgtggccccatcaaagtgaaaactgaacccacagaagattctggcatttccctggaaatggcagctgtgacagtaaaggaagaatcagaagatcctgattattatcaatataacattcaagcaggcccttctgaaactgatgatgttgatgaaaaacagcccctatcgaagcctttgcaaggaagccaccattcttcagagggcaatgaaggcacagaaatggaagtaccagcagaagattctactcaacatgtcccttcagaaacaagtgaggaccctgaagttgaggtgactattgaagatgatgattattctccaccgtctaagagaccaaaggccaatgagctaccgcagccaccagtcccggaacccgccaatgctgggaagcggaaagtgagggagttcaacttcgagaaatggaatgctcgcatcactgatctacgtaaacaagttgaagaattgtttgaaaggaaatatgctcaagccataaaagccaaaggtccggtgacgatcccgtaccctcttttccagtctcatgttgaagatctttatgtagaaggacttcctgaaggaattccttttagaaggccatctacttacggaattcctcgcctggagaggatattacttgcaaaggaaaggattcgttttgtgattaagaaacatgagcttctgaattcaacacgtgaagatttacagcttgataagccagcttcaggagtaaaggaagaatggtatgccagaatcactaaattaagaaagatggtggatcagcttttctgcaaaaaatttgcggaagccttggggagcactgaagccaaggctgtaccgtaccaaaaatttgaggcacacccgaatgatctgtacgtggaaggactgccagaaaacattcctttccgaagtccctcatggtatggaatcccaaggctggaaaaaatcattcaagtgggcaatcgaattaaatttgttattaaaagaccagaacttctgactcacagtaccactgaagttactcagccaagaacgaatacaccagtcaaagaagattggaatgtcagaattaccaagctacggaagcaagtggaagagatttttaatttgaaatttgctcaagctcttggactcaccgaggcagtaaaagtaccatatcctgtgtttgaatcaaacccggagttcttgaaaggatcgtccgcgggagtaataaaatcaagttcgttgttaaaaaacctgaactagttatttcctacttgcctcctgggatggctagtaaaataaacactaaagctttgcagtcccccaaaagaccacgaagtcctgggagtaattcaaaggttcctgaaattgaggtcaccgtggaaggccctaataacaacaatcctcaaacctcagctgttcgaaccccgacccagactaacggttctaacgttcccttcaagccacgagggagagagttttcctttgaggcctggaatgccaaaatcacggacctaaaacagaaagttgaaaatctcttcaatgagaaatgtggggaagctcttggccttaaacaagctgtgaaggtgccgttcgcgttatttgagtctttcccggaagacttttatgtggaaggcttacctgagggtgtgccattccgaagaccatcgacttttggcattccgaggctggagaagatactcagaaacaaagccaaaattaagttcatcattaaaaagcccgaaatgtttgagacggcgattaaggagagcacctcctctaagagccctcccagaaaaataaattcatcacccaatgttaatactactgcatcaggtgttgaagaccttaacatcattcaggtgacaattccagatgatgataatgaaagactctcgaaagttgaaaaagctagacagctaagagaacaagtgaatgacctctttagtcggaaatttggtgaagctattggtatgggttttcctgtgaaagttccctacaggaaaatcacaattaaccctggctgtgtggtggttgatggcatgcccccgggggtgtccttcaaagcccccagctacctggaaatcagctccatgagaaggatcttagactctgccgagtttatcaaattcacggtcattaggtaagtgagagtttcctgcttagtcacaggagcgaatctggagctcatgaggctgactcttctaaaatgcagccacaggtagtcatcgaatccggcttcctatgctgtgcaatcaacaaatcaaaataacttgtgtcatcattagaatgtcagatgtgcttctacgaactaagctgactcttttaattctttggcaaagggttggcaaactaggactgtttgccaaattcaggctgcctcctatttttagagtcttcctgaaacacagctacacccgtattatccatggctgctttcctgtcacagtgagtaagtagctgggactgagaaggcatggcctccaaagtctaaaatatttactctctagcactttgtagaaaaaccttagctaggcacagtggctaacgcctgtaatcccagcattttgggaggccaaggcaggcagatcacctgaggtcaggagttccagaccagcctggccaacatggtgaaatcccatctctacaaaaataaaacagttagctgggcatgatggcgggtgcctgtaatcccagctactcgggaggctgaggcaggatagtcgcttgaacccaggaggtggaggttgcaatgagccaagatcatgccactgcactccagcctggacgacagagtgagactccatcacaagaaaaaaagaactttgtcaacctctgtcttagggcgccttgtcacaggcttcgggtcagacggattcaaccttgcatcagccatttgttagccaggtcactctgttctttgtctgtaaatgagattgatcgttgttcccactgagagtgtcagctccttcccgtagagcaggcatgatgattgtactcacctctgacaccattgtgagtgccacattccttcccacgtccttgtcactgtaagagatgcccacctgagcaccaaccccaggttatcttcccctttgtcttccagccccccagaaacagctacgactcaacctacccaatcatttcatcatcagattgccactgtctctagttcaggtctcttgggactggcactcagaaatctcataataaatcctcttgaggcttctcatacactcgtcttcttccaatcttctttccctcaaaatctcatattttggttccacttcacccaccgtcattctccatatcactcccaggagttaggcaaaaagccccttccgttcttccgtatgttaaacttagaatcactctgttccctgctctgcgtttctattttttgtttttcctccatttactagtagcttaacactttctaacagtgttcttattattgatacgtatctatctcttccataagcttataaggtcacggataatacttctcattgtagtacgtaaatgacgtgggctagatatgagttgaataaacagttatacctgtaaattcttacagagtgaaaataaattgttatactttacaatttgtttctctctttagaccatttccaggacttgtgattaataaccgtgagtattttgtgaagtgttttgtttttgttttttcctggggtctgacgtgtgtgcgtgtgagtgtgtatacatgcttaacgtatatcacgttacttcacctatgtcagtaaccaggccaaatacttgttttagccctcagtaaaaacaccaggcacttcctagttgtaaaattattcaagcttcttaacttcctatcctcgatgcacttaatcataaaatggtaataatagcaccgattttgggggagtcgttccagtagatggaaagcatctggaacaggtgtcagcaagctcctgccgacgtgtatgcataaagttttattgaaaccaccatcgtgtccatttgtttatggcagaactgagagatggcagcagcaagtgtgtgcctgcaaaacctaaaatatttactaattggctctgcaagaaaagagtttgcatccccctaacctagaacagtgtctagcctctagtatgtgtttagcctacagtatgtgctcagcgaatacaatctatatttattactgcttttatgactgttataattactgtgcttggatttcgttacaaagtaagtcacaatgtgcctgcttctgttagtatttcagcacagtgcctggcacacatggggctctcaaatattgctgagcgagtgaacaaatgtcctttcaattccttaacgttgatgtcattttcaatagtattttgagccaaacttaattttgcgagtgtgttttgttttcttaactttattattaaaaatgtataaaagtgaggccaggcgtggtggctcacgcctgtaatcccagcagtttgggaggctgaggcaggcggatcagttgaggttgggagttggagaccagcccgtccaacatggtgaaagcctgtctctactaaaaatacaaaaatcagctgggtgtggtggcgcgtgcctgtaatcccagctactcaggaggctgaggcaggagagttgcttgaatcctagaggtggaggttgcagtgagctgagatcgtgccattgcactccagcctgggcaacaagagcaaaactctgtcccaataaataaataaataaaatgttctcttttgttcctgttcttgtgcggtagtgtggtatagagttttatggtaattactgtgaattagtgattctgagggacatatcagaactctgaggtttgtttccttctcatcttgagggaaacagcaaatgtatgttaaaatgcttttccaagggaacaacacatccttacattatttaaaccaatctgcttcattttcagagctggttgatcagagtgagtcagaaggccccgtgatacaagaatcagctgaaccaagccagttggaagttccagccacagaagaaataaaagagactgatggaagctctcagatcaagcaagaaccagaccccacgtggtagacctcttccctcctagggtaaatcagcttctgtgtcagggatgctgtgtggtgtccatctgaaccccctgcatacgcgtagctaatgtgatctccccactttcacataagatggtggccctgccttcagggaatgtgggagccaggtgggagccttcccggatatttaagctagaagattctacagggagattctccttggatcaatatatgtctctcagtcaaagatgtaaaagcacttttgccttaaaaagaatgttctgtttctaaatagagtcaacgttgtcctcctcattggaattcactatgagtcagaatcattagactgacttttttttttccatagtaatagtattttgcagagtctcacagagctgcagatcttttgttcatcttgcagagttaacaagtctgatcctgttagtccagatttcttaaatttggccaagttataataggagcagtagcttgagacccgaagtcaggaaactttgacaatggatttttttttttaatccagagacttgtactggaatttgccttaccctgtcagctcatggacttaaggtttcatcccgctttatgagtgcttctgaatccaagtcattgttacctgaatttgcaaattaagttgtgatattcgtgactgttaaattcctgtaattagattaacctctttgcttgcttgtttgttttctctcctattttagcttaaagtatcagtggttgagaagagcttttcggacctgttactaccccaagctgtgtaatatacttgtataacagaaataccttctatacaaacctttttttctacttttagatagaaatgtctactttttcagcagttctgtgaattaaagagcagagtgactgtgggtctggaatggctggtgtacttgggaatgtactatcaggattttacagcaatgctgggaaatgacagggaaaatgacaggaatgaatctcaccagattttttatgtactcagcagagccttgagttacggtgtttattttccaatcaagtgaagatatctcctacttctcctactggaacatctcagcttctgcagtgaagaaaaattcctgtgatagttcagttctttagtttttctatttgaaaaaaaaaaatcatttaaatgatcctttgttcacggctctccttaatgactgagtgaacagttcctatctgtatatttgactaaaccttttcctaagctatctctcatggttcctatgtttttttatcataattaaaagcaaaaccatctggatcacctaacagtcagaggtcagtatctcagcgtgtgaattatagaggaaatacagagagaacctcttccacttttacttttcgtccaaataaaatgcatggtgtaccagaagttgaagatcgggttgaggattggggctagctcgatgacactaaggccccaacatcgcgggacctgctgtggcgcggattcttaggaacgctgttctagccggccccctctccaggggtcgccgtggccggcattatttcctagttcttcttgtaaccctgaggtgccagcgcggggagtgaggaggggtcagggggctaaggatgcaacctctgacgttctgcgccttcctaggagagtcttacatgtgttgagatttcacaagcaatgcgagttgtaaaataccagctctacaagaagctaggctctgtgacggcatagttttcagtagctttatcacaatattcacaatggagaattatatgacatggtagcagaaataggcccttttatgtgttgcttctattttacctcaaattgtagatatagggtaatcaataaaatccatccatgcctttcacacactaagt

SEQ ID NO: 4487 - protein, 605 aa, Homo sapiens; identical to SEQ ID NO: 4017

SEQ ID NO: 4488 - DNA, 7931 bp, Homo sapiens
aaaaaaaaaaaaaaaaaaaaaaaaaaaagaaaaaagaaaaaaaaaaggaggaggaggaggagggtgagagagaagctgggagagcagagaaaaggggccaccggtcgcccccccgcttccccgcacgcgctctccagccgcggccgcccgcctgccgcggtcaccccggcctctgcctctgtcccccagtgatcggatcaaggcgctgagcgaggccctgcctgcggggcggccatgcggcggtgacaggagcgcgaccgacacgcacgggcccctcgccccctctcgcctcccgtccgctcgccagctcccctcagccgaggctgctccgcggcggccgcagcccgcgcgcggcccacactcgcctcccctcggcacccccggccccggagctgcctggaggcggccgcactcggtgtaaagaactggccaagtccaaagccgaagtggcctgcattgcagtgtatgaaacagacgtgtttgtcgtcggaactgaaagaggacgtgcttttgtcaataccagaaaggattttcaaaaagattttgtaaaatattgtgttgaagaagaagaaaaagctgcagagatgcataaaatgaaatctacaacccaggcaaatcggatgagtgtagatgctgtagaaattgaaacactcagaaaaacagttgaggactatttctgcttttgctatgggaaagctttaggcaaatccacagtggtacctgtaccatatgagaagatgctgcgagaccagtcggctgtggtagtgcaggggcttccggaaggtgttgcctttaaacaccccgagaactatgatcttgcaaccctgaaatggattttggagaacaaagcagggatttcattcatcattaagagaccttttttagagccaaagaagcatgtaggtggtcgtgtgatggtaacagatgctgacaggtcaatactatctccaggtggaagttgtggccccatcaaagtgaaaactgaacccacagaagattctggcatttccctggaaatggcagctgtgacagtaaaggaagaatcagaagatcctgattattatcaatataacattcaagcaggcccttctgaaactgatgatgttgatgaaaaacagcccctatcgaagcctttgcaaggaagccaccattcttcagagggcaatgaaggcacagaaatggaagtaccagcagaagattctactcaacatgtcccttcagaaacaagtgaggaccctgaagttgaggtgactattgaagatgatgattattctccaccgtctaagagaccaaaggccaatgagctaccgcagccaccagtcccggaacccgccaatgctgggaagcggaaagtgagggagttcaacttcgagaaatggaatgctcgcatcactgatctacgtaaacaagttgaagaattgtttgaaaggaaatatgctcaagccataaaagccaaaggtccggtgacgatcccgtaccctcttttccagtctcatgttgaagatctttatgtagaaggacttcctgaaggaattccttttagaaggccatctacttacggaattcctcgcctggagaggatattacttgcaaaggaaaggattcgttttgtgattaagaaacatgagcttctgaattcaacacgtgaagatttacagcttgataagccagcttcaggagtaaaggaagaatggtatgccagaatcactaaattaagaaagatggtggatcagcttttctgcaaaaaatttgcggaagccttggggagcactgaagccaaggctgtaccgtaccaaaaatttgaggcacacccgaatgatctgtacgtggaaggactgccagaaaacattcctttccgaagtccctcatggtatggaatcccaaggctggaaaaaatcattcaagtgggcaatcgaattaaatttgttattaaaagaccagaacttctgactcacagtaccactgaagttactcagccaagaacgaatacaccagtcaaagaagattggaatgtcagaattaccaagctacggaagcaagtggaagagatttttaatttgaaatttgctcaagctcttggactcaccgaggcagtaaaagtaccatatcctgtgtttgaatcaaacccggagttcttgtatgtggaaggcttgccagaggggattcccttccgaagccctacctggtttggaattccacgacttgaaaggatcgtccgcgggagtaataaaatcaagttcgttgttaaaaaacctgaactagttatttcctacttgcctcctgggatggctagtaaaataaacactaaagctttgcagtcccccaaaagaccacgaagtcctgggagtaattcaaaggttcctgaaattgaggtcaccgtggaaggccctaataacaacaatcctcaaacctcagctgttcgaaccccgacccagactaacggttctaacgttcccttcaagccacgagggagagagttttcctttgaggcctggaatgccaaaatcacggacctaaaacagaaagttgaaaatctcttcaatgagaaatgtggggaagctcttggccttaaacaagctgtgaaggtgccgttcgcgttatttgagtctttcccggaagacttttatgtggaaggcttacctgagggtgtgccattccgaagaccatcgacttttggcattccgaggctggagaagatactcagaaacaaagccaaaattaagttcatcattaaaaagcccgaaatgtttgagacggcgattaaggagagcacctcctctaagagccctcccagaaaaataaattcatcacccaatgttaatactactgcatcaggtgttgaagaccttaacatcattcaggtgacaattccagatgatgataatgaaagactctcgaaagttgaaaaagctagacagctaagagaacaagtgaatgacctctttagtcggaaatttggtgaagctattggtatgggttttcctgtgaaagttccctacaggaaaatcacaattaaccctggctgtgtggtggttgatggcatgcccccgggggtgtccttcaaagcccccagctacctggaaatcagctccatgagaaggatcttagactctgccgagtttatcaaattcacggtcattaggtaagtgagagtttcctgcttagtcacaggagcgaatctggagctcatgaggctgactcttctaaaatgcagccacaggtagtcatcgaatccggcttcctatgctgtgcaatcaacaaatcaaaataacttgtgtcatcattagaatgtcagatgtgcttctacgaactaagctgactcttttaattctttggcaaagggttggcaaactaggactgtttgccaaattcaggctgcctcctatttttagagtcttcctgaaacacagctacacccgtattatccatggctgctttcctgtcacagtgagtaagtagctgggactgagaaggcatggcctccaaagtctaaaatatttactctctagcactttgtagaaaaaccttagctaggcacagtggctaacgcctgtaatcccagcattttgggaggccaaggcaggcagatcacctgaggtcaggagttccagaccagcctggccaacatggtgaaatcccatctctacaaaaataaaacagttagctgggcatgatggcgggtgcctgtaatcccagctactcgggaggctgaggcaggatagtcgcttgaacccaggaggtggaggttgcaatgagccaagatcatgccactgcactccagcctggacgacagagtgagactccatcacaagaaaaaaagaactttgtcaacctctgtcttagggcgccttgtcacaggcttcgggtcagacggattcaaccttgcatcagccatttgttagccaggtcactctgttctttgtctgtaaatgagattgatcgttgttcccactgagagtgtcagctccttcccgtagagcaggcatgatgattgtactcacctctgacaccattgtgagtgccacattccttcccacgtccttgtcactgtaagagatgcccacctgagcaccaaccccaggttatcttcccctttgtcttccagccccccagaaacagctacgactcaacctacccaatcatttcatcatcagattgccactgtctctagttcaggtctcttgggactggcactcagaaatctcataataaatcctcttgaggcttctcatacactcgtcttcttccaatcttctttccctcaaaatctcatattttggttccacttcacccaccgtcattctccatatcactcccaggagttaggcaaaaagccccttccgttcttccgtatgttaaacttagaatcactctgttccctgctctgcgtttctattttttgtttttcctccatttactagtagcttaacactttctaacagtgttcttattattgatacgtatctatctcttccataagcttataaggtcacggataatacttctcattgtagtacgtaaatgacgtgggctagatatgagttgaataaacagttatacctgtaaattcttacagagtgaaaataaattgttatactttacaatttgtttctctctttagaccatttccaggacttgtgattaataaccgtgagtattttgtgaagtgttttgtttttgttttttcctggggtctgacgtgtgtgcgtgtgagtgtgtatacatgcttaacgtatatcacgttacttcacctatgtcagtaaccaggccaaatacttgttttagccctcagtaaaaacaccaggcacttcctagttgtaaaattattcaagcttcttaacttcctatcctcgatgcacttaatcataaaatggtaataatagcaccgattttgggggagtcgttccagtagatggaaagcatctggaacaggtgtcagcaagctcctgccgacgtgtatgcataaagttttattgaaaccaccatcgtgtccatttgtttatggcagaactgagagatggcagcagcaagtgtgtgcctgcaaaacctaaaatatttactaattggctctgcaagaaaagagtttgcatccccctaacctagaacagtgtctagcctctagtatgtgtttagcctacagtatgtgctcagcgaatacaatctatatttattactgcttttatgactgttataattactgtgcttggatttcgttacaaagtaagtcacaatgtgcctgcttctgttagtatttcagcacagtgcctggcacacatggggctctcaaatattgctgagcgagtgaacaaatgtcctttcaattccttaacgttgatgtcattttcaatagtattttgagccaaacttaattttgcgagtgtgttttgttttcttaactttattattaaaaatgtataaaagtgaggccaggcgtggtggctcacgcctgtaatcccagcagtttgggaggctgaggcaggcggatcagttgaggttgggagttggagaccagcccgtccaacatggtgaaagcctgtctctactaaaaatacaaaaatcagctgggtgtggtggcgcgtgcctgtaatcccagctactcaggaggctgaggcaggagagttgcttgaatcctagaggtggaggttgcagtgagctgagatcgtgccattgcactccagcctgggcaacaagagcaaaactctgtcccaataaataaataaataaaatgttctcttttgttcctgttcttgtgcggtagtgtggtatagagttttatggtaattactgtgaattagtgattctgagggacatatcagaactctgaggtttgtttccttctcatcttgagggaaacagcaaatgtatgttaaaatgcttttccaagggaacaacacatccttacattatttaaaccaatctgcttcattttcagagctggttgatcagagtgagtcagaaggccccgtgatacaagaatcagctgaaccaagccagttggaagttccagccacagaagaaataaaagagactgatggaagctctcagatcaagcaagaaccagaccccacgtggtagacctcttccctcctagggtaaatcagcttctgtgtcagggatgctgtgtggtgtccatctgaaccccctgcatacgcgtagctaatgtgatctccccactttcacataagatggtggccctgccttcagggaatgtgggagccaggtgggagccttcccggatatttaagctagaagattctacagggagattctccttggatcaatatatgtctctcagtcaaagatgtaaaagcacttttgccttaaaaagaatgttctgtttctaaatagagtcaacgttgtcctcctcattggaattcactatgagtcagaatcattagactgacttttttttttccatagtaatagtattttgcagagtctcacagagctgcagatcttttgttcatcttgcagagttaacaagtctgatcctgttagtccagatttcttaaatttggccaagttataataggagcagtagcttgagacccgaagtcaggaaactttgacaatggatttttttttttaatccagagacttgtactggaatttgccttaccctgtcagctcatggacttaaggtttcatcccgctttatgagtgcttctgaatccaagtcattgttacctgaatttgcaaattaagttgtgatattcgtgactgttaaattcctgtaattagattaacctctttgcttgcttgtttgttttctctcctattttagcttaaagtatcagtggttgagaagagcttttcggacctgttactaccccaagctgtgtaatatacttgtataacagaaataccttctatacaaacctttttttctacttttagatagaaatgtctactttttcagcagttctgtgaattaaagagcagagtgactgtgggtctggaatggctggtgtacttgggaatgtactatcaggattttacagcaatgctgggaaatgacagggaaaatgacaggaatgaatctcaccagattttttatgtactcagcagagccttgagttacggtgtttattttccaatcaagtgaagatatctcctacttctcctactggaacatctcagcttctgcagtgaagaaaaattcctgtgatagttcagttctttagtttttctatttgaaaaaaaaaaatcatttaaatgatcctttgttcacggctctccttaatgactgagtgaacagttcctatctgtatatttgactaaaccttttcctaagctatctctcatggttcctatgtttttttatcataattaaaagcaaaaccatctggatcacctaacagtcagaggtcagtatctcagcgtgtgaattatagaggaaatacagagagaacctcttccacttttacttttcgtccaaataaaatgcatggtgtaccagaagttgaagatcgggttgaggattggggctagctcgatgacactaaggccccaacatcgcgggacctgctgtggcgcggattcttaggaacgctgttctagccggccccctctccaggggtcgccgtggccggcattatttcctagttcttcttgtaaccctgaggtgccagcgcggggagtgaggaggggtcagggggctaaggatgcaacctctgacgttctgcgccttcctaggagagtcttacatgtgttgagatttcacaagcaatgcgagttgtaaaataccagctctacaagaagctaggctctgtgacggcatagttttcagtagctttatcacaatattcacaatggagaattatatgacatggtagcagaaataggcccttttatgtgttgcttctattttacctcaaattgtagatatagggtaatcaataaaatccatccatgcctttcacacactaagt

SEQ ID NO: 4489 - protein, 853 aa, Homo sapiens; identical to SEQ ID NO: 4253

SEQ ID NO: 4490 - DNA, 7128 bp, Homo sapiens
aaaaaaaaaaaaaaaaaaaaaaaaaaaagaaaaaagaaaaaaaaaaggaggaggaggaggagggtgagagagaagctgggagagcagagaaaaggggccaccggtcgcccccccgcttccccgcacgcgctctccagccgcggccgcccgcctgccgcggtcaccccggcctctgcctctgtcccccagtgatcggatcaaggcgctgagcgaggccctgcctgcggggcggccatgcggcggtgacaggagcgcgaccgacacgcacgggcccctcgccccctctcgcctcccgtccgctcgccagctcccctcagccgaggctgctccgcggcggccgcagcccgcgcgcggcccacactcgcctccccgttgaagatgaggagtcctcggagagcaggatggtggtgacattcctcatgtcagctctcgagtccatgtgtaaagaactggccaagtccaaagccgaagtggcctgcattgcagtgtatgaaacagacgtgtttgtcgtcggaactgaaagaggacgtgcttttgtcaataccagaaaggattttcaaaaagattttgtaaaatattgtgttgaagaagaagaaaaagctgcagagatgcataaaatgaaatctacaacccaggcaaatcggatgagtgtagatgctgtagaaattgaaacactcagaaaaacagttgaggactatttctgcttttgctatgggaaagctttaggcaaatccacagtggtacctgtaccatatgagaagatgctgcgagaccagtcggctgtggtagtgcaggggcttccggaaggtgttgcctttaaacaccccgagaactatgatcttgcaaccctgaaatggattttggagaacaaagcagggatttcattcatcattaagagaccttttttagagccaaagaagcatgtaggtggtcgtgtgatggtaacagatgctgacaggtcaatactatctccaggtggaagttgtggccccatcaaagtgaaaactgaacccacagaagattctggcatttccctggaaatggcagctgtgacagtaaaggaagaatcagaagatcctgattattatcaatataacattcaagcaggcccttctgaaactgatgatgttgatgaaaaacagcccctatcgaagcctttgcaaggaagccaccattcttcagagggcaatgaaggcacagaaatggaagtaccagcagaagatgatgattattctccaccgtctaagagaccaaaggccaatgagctaccgcagccaccagtcccggaacccgccaatgctgggaagcggaaagtgagggagttcaacttcgagaaatggaatgctcgcatcactgatctacgtaaacaagttgaagaattgtttgaaaggaaatatgctcaagccataaaagccaaaggtccggtgacgatcccgtaccctcttttccagtctcatgttgaagatctttatgtagaaggacttcctgaaggaattccttttagaaggccatctacttacggaattcctcgcctggagaggatattacttgcaaaggaaaggattcgttttgtgattaagaaacatgagcttctgaattcaacacgtgaagatttacagcttgataagccagcttcaggagtaaaggaagaatggtatgccagaatcactaaattaagaaagatggtggatcagcttttctgcaaaaaatttgcggaagccttggggagcactgaagccaaggctgtaccgtaccaaaaatttgaggcacacccgaatgatctgtacgtggaaggactgccagaaaacattcctttccgaagtccctcatggtatggaatcccaaggctggaaaaaatcattcaagtgggcaatcgaattaaatttgttattaaaagaccagaacttctgactcacagtaccactgaagttactcagccaagaacgaatacaccagctcaagctcttggactcaccgaggcagtaaaagtaccatatcctgtgtttgaatcaaacccggagttcttgtatgtggaaggcttgccagaggggattcccttccgaagccctacctggtttggaattccacgacttgaaaggatcgtccgcgggagtaataaaatcaagttcgttgttaaaaaacctgaactagttatttcctacttgcctcctgggatggctagtaaaataaacactaaagctttgcagtcccccaaaagaccacgaagtcctgggagtaattcaaaggttcctgaaattgaggtcaccgtggaaggccctaataacaacaatcctcaaacctcagctgttcgaaccccgacccagactaacggttctaacgttcccttcaagccacgagggagagagttttcctttgaggcctggaatgccaaaatcacggacctaaaacagaaagttgaaaatctcttcaatgagaaatgtggggaagctcttggccttaaacaagctgtgaaggtgccgttcgcgttatttgagtctttcccggaagacttttatgtggaaggcttacctgagggtgtgccattccgaagaccatcgacttttggcattccgaggctggagaagatactcagaaacaaagccaaaattaagttcatcattaaaaagcccgaaatgtttgagacggcgattaaggagagcacctcctctaagagccctcccagaaaaataaattcatcacccaatgttaatactactgcatcaggtgttgaagaccttaacatcattcaggtgacaattccagatgatgataatgaaagactctcgaaagttgaaaaagctagacagctaagagaacaagtgaatgacctctttagtcggaaatttggtgaagctattggtatgggttttcctgtgaaagttccctacaggaaaatcacaattaaccctggctgtgtggtggttgatggcatgcccccgggggtgtccttcaaagcccccagctacctggaaatcagctccatgagaaggatcttagactctgccgagtttatcaaattcacggtcattaggtaagtgagagtttcctgcttagtcacaggagcgaatctggagctcatgaggctgactcttctaaaatgcagccacaggtagtcatcgaatccggcttcctatgctgtgcaatcaacaaatcaaaataacttgtgtcatcattagaatgtcagatgtgcttctacgaactaagctgactcttttaattctttggcaaagggttggcaaactaggactgtttgccaaattcaggctgcctcctatttttagagtcttcctgaaacacagctacacccgtattatccatggctgctttcctgtcacagtgagtaagtagctgggactgagaaggcatggcctccaaagtctaaaatatttactctctagcactttgtagaaaaaccttagctaggcacagtggctaacgcctgtaatcccagcattttgggaggccaaggcaggcagatcacctgaggtcaggagttccagaccagcctggccaacatggtgaaatcccatctctacaaaaataaaacagttagctgggcatgatggcgggtgcctgtaatcccagctactcgggaggctgaggcaggatagtcgcttgaacccaggaggtggaggttgcaatgagccaagatcatgccactgcactccagcctggacgacagagtgagactccatcacaagaaaaaaagaactttgtcaacctctgtcttagggcgccttgtcacaggcttcgggtcagacggattcaaccttgcatcagccatttgttagccaggtcactctgttctttgtctgtaaatgagattgatcgttgttcccactgagagtgtcagctccttcccgtagagcaggcatgatgattgtactcacctctgacaccattgtgagtgccacattccttcccacgtccttgtcactgtaagagatgcccacctgagcaccaaccccaggttatcttcccctttgtcttccagccccccagaaacagctacgactcaacctacccaatcatttcatcatcagattgccactgtctctagttcaggtctcttgggactggcactcagaaatctcataataaatcctcttgaggcttctcatacactcgtcttcttccaatcttctttccctcaaaatctcatattttggttccacttcacccaccgtcattctccatatcactcccaggagttaggcaaaaagccccttccgttcttccgtatgttaaacttagaatcactctgttccctgctctgcgtttctattttttgtttttcctccatttactagtagcttaacactttctaacagtgttcttattattgatacgtatctatctcttccataagcttataaggtcacggataatacttctcattgtagtacgtaaatgacgtgggctagatatgagttgaataaacagttatacctgtaaattcttacagagtgaaaataaattgttatactttacaatttgtttctctctttagaccatttccaggacttgtgattaataaccgtgagtattttgtgaagtgttttgtttttgttttttcctggggtctgacgtgtgtgcgtgtgagtgtgtatacatgcttaacgtatatcacgttacttcacctatgtcagtaaccaggccaaatacttgttttagccctcagtaaaaacaccaggcacttcctagttgtaaaattattcaagcttcttaacttcctatcctcgatgcacttaatcataaaatggtaataatagcaccgattttgggggagtcgttccagtagatggaaagcatctggaacaggtgtcagcaagctcctgccgacgtgtatgcataaagttttattgaaaccaccatcgtgtccatttgtttatggcagaactgagagatggcagcagcaagtgtgtgcctgcaaaacctaaaatatttactaattggctctgcaagaaaagagtttgcatccccctaacctagaacagtgtctagcctctagtatgtgtttagcctacagtatgtgctcagcgaatacaatctatatttattactgcttttatgactgttataattactgtgcttggatttcgttacaaagtaagtcacaatgtgcctgcttctgttagtatttcagcacagtgcctggcacacatggggctctcaaatattgctgagcgagtgaacaaatgtcctttcaattccttaacgttgatgtcattttcaatagtattttgagccaaacttaattttgcgagtgtgttttgttttcttaactttattattaaaaatgtataaaagtgaggccaggcgtggtggctcacgcctgtaatcccagcagtttgggaggctgaggcaggcggatcagttgaggttgggagttggagaccagcccgtccaacatggtgaaagcctgtctctactaaaaatacaaaaatcagctgggtgtggtggcgcgtgcctgtaatcccagctactcaggaggctgaggcaggagagttgcttgaatcctagaggtggaggttgcagtgagctgagatcgtgccattgcactccagcctgggcaacaagagcaaaactctgtcccaataaataaataaataaaatgttctcttttgttcctgttcttgtgcggtagtgtggtatagagttttatggtaattactgtgaattagtgattctgagggacatatcagaactctgaggtttgtttccttctcatcttgagggaaacagcaaatgtatgttaaaatgcttttccaagggaacaacacatccttacattatttaaaccaatctgcttcattttcagagctggttgatcagagtgagtcagaaggccccgtgatacaagaatcagctgaaccaagccagttggaagttccagccacagaagaaataaaagagactgatggaagctctcagatcaagcaagaaccagaccccacgtggtagacctcttccctcctaggcttaaagtatcagtggttgagaagagcttttcggacctgttactaccccaagctgtgtaatatacttgtataacagaaataccttctatacaaacctttttttctacttttagatagaaatgtctactttttcagcagttctgtgaattaaagagcagagtgactgtgggtctggaatggctggtgtacttgggaatgtactatcaggattttacagcaatgctgggaaatgacagggaaaatgacaggaatgaatctcaccagattttttatgtactcagcagagccttgagttacggtgtttattttccaatcaagtgaagatatctcctacttctcctactggaacatctcagcttctgcagtgaagaaaaattcctgtgatagttcagttctttagtttttctatttgaaaaaaaaaaatcatttaaatgatcctttgttcacggctctccttaatgactgagtgaacagttcctatctgtatatttgactaaaccttttcctaagctatctctcatggttcctatgtttttttatcataattaaaagcaaaaccatctggatcacctaacagtcagaggtcagtatctcagcgtgtgaattatagaggaaatacagagagaacctcttccacttttacttttcgtccaaataaaatgcatggtgtaccagaagttgaagatcgggttgaggattggggctagctcgatgacactaaggccccaacatcgcgggacctgctgtggcgcggattcttaggaacgctgttctagccggccccctctccaggggtcgccgtggccggcattatttcctagttcttcttgtaaccctgaggtgccagcgcggggagtgaggaggggtcagggggctaaggatgcaacctctgacgttctgcgccttcctaggagagtcttacatgtgttgagatttcacaagcaatgcgagttgtaaaataccagctctacaagaagctaggctctgtgacggcatagttttcagtagctttatcacaatattcacaatggagaattatatgacatggtagcagaaataggcccttttatgtgttgcttctattttacctcaaattgtagatatagggtaatcaataaaatccatccatgcctttcacacactaagt

SEQ ID NO: 4491 - protein, 877 aa, Homo sapiens
MVVTFLMSALESMCKELAKSKAEVACIAVYETDVFVVGTERGRAFVNTRKDFQKDFVKYCVEEEEKAAEMHKMKSTTQANRMSVDAVEIETLRKTVEDYFCFCYGKALGKSTVVPVPYEKMLRDQSAVVVQGLPEGVAFKHPENYDLATLKWILENKAGISFIIKRPFLEPKKHVGGRVMVTDADRSILSPGGSCGPIKVKTEPTEDSGISLEMAAVTVKEESEDPDYYQYNIQAGPSETDDVDEKQPLSKPLQGSHHSSEGNEGTEMEVPAEDDDYSPPSKRPKANELPQPPVPEPANAGKRKVREFNFEKWNARITDLRKQVEELFERKYAQAIKAKGPVTIPYPLFQSHVEDLYVEGLPEGIPFRRPSTYGIPRLERILLAKERIRFVIKKHELLNSTREDLQLDKPASGVKEEWYARITKLRKMVDQLFCKKFAEALGSTEAKAVPYQKFEAHPNDLYVEGLPENIPFRSPSWYGIPRLEKIIQVGNRIKFVIKRPELLTHSTTEVTQPRTNTPAQALGLTEAVKVPYPVFESNPEFLYVEGLPEGIPFRSPTWFGIPRLERIVRGSNKIKFVVKKPELVISYLPPGMASKINTKALQSPKRPRSPGSNSKVPEIEVTVEGPNNNNPQTSAVRTPTQTNGSNVPFKPRGREFSFEAWNAKITDLKQKVENLFNEKCGEALGLKQAVKVPFALFESFPEDFYVEGLPEGVPFRRPSTFGIPRLEKILRNKAKIKFIIKKPEMFETAIKESTSSKSPPRKINSSPNVNTTASGVEDLNIIQVTIPDDDNERLSKVEKARQLREQVNDLFSRKFGEAIGMGFPVKVPYRKITINPGCVVVDGMPPGVSFKAPSYLEISSMRRILDSAEFIKFTVIR

SEQ ID NO: 4492 - DNA, 7216 bp, Homo sapiens
aaaaaaaaaaaaaaaaaaaaaaaaaaaagaaaaaagaaaaaaaaaaggaggaggaggaggagggtgagagagaagctgggagagcagagaaaaggggccaccggtcgcccccccgcttccccgcacgcgctctccagccgcggccgcccgcctgccgcggtcaccccggcctctgcctctgtcccccagtgatcggatcaaggcgctgagcgaggccctgcctgcggggcggccatgcggcggtgacaggagcgcgaccgacacgcacgggcccctcgccccctctcgcctcccgtccgctcgccagctcccctcagccgaggctgctccgcggcggccgcagcccgcgcgcggcccacactcgcctcccctcggcacccccggccccggagctgcctggaggcggccgcactcggggatcatggcccaagttgcaatgtccaccctccccgttgaagatgaggagtcctcggagagcaggatggtggtgacattcctcatgtcagctctcgagtccatgtgtaaagaactggccaagtccaaagccgaagtggcctgcattgcagtgtatgaaacagacgtgtttgtcgtcggaactgaaagaggacgtgcttttgtcaataccagaaaggattttcaaaaagattttgtaaaatattgtgttgaagaagaagaaaaagctgcagagatgcataaaatgaaatctacaacccaggcaaatcggatgagtgtagatgctgtagaaattgaaacactcagaaaaacagttgaggactatttctgcttttgctatgggaaagctttaggcaaatccacagtggtacctgtaccatatgagaagatgctgcgagaccagtcggctgtggtagtgcaggggcttccggaaggtgttgcctttaaacaccccgagaactatgatcttgcaaccctgaaatggattttggagaacaaagcagggatttcattcatcattaagagaccttttttagagccaaagaagcatgtaggtggtcgtgtgatggtaacagatgctgacaggtcaatactatctccaggtggaagttgtggccccatcaaagtgaaaactgaacccacagaagattctggcatttccctggaaatggcagctgtgacagtaaaggaagaatcagaagatcctgattattatcaatataacattcaaggaagccaccattcttcagagggcaatgaaggcacagaaatggaagtaccagcagaagattctactcaacatgtcccttcagaaacaagtgaggaccctgaagttgaggtgactattgaagatgatgattattctccaccgtctaagagaccaaaggccaatgagctaccgcagccaccagtcccggaacccgccaatgctgggaagcggaaagtgagggagttcaacttcgagaaatggaatgctcgcatcactgatctacgtaaacaagttgaagaattgtttgaaaggaaatatgctcaagccataaaagccaaaggtccggtgacgatcccgtaccctcttttccagtctcatgttgaagatctttatgtagaaggacttcctgaaggaattccttttagaaggccatctacttacggaattcctcgcctggagaggatattacttgcaaaggaaaggattcgttttgtgattaagaaacatgagcttctgaattcaacacgtgaagatttacagcttgataagccagcttcaggagtaaaggaagaatggtatgccagaatcactaaattaagaaagatggtggatcagcttttctgcaaaaaatttgcggaagccttggggagcactgaagccaaggctgtaccgtaccaaaaatttgaggcacacccgaatgatctgtacgtggaaggactgccagaaaacattcctttccgaagtccctcatggtatggaatcccaaggctggaaaaaatcattcaagtgggcaatcgaattaaatttgttattaaaagaccagaacttctgactcacagtaccactgaagttactcagccaagaacgaatacaccagtcaaagaagattggaatgtcagaattaccaagctacggaagcaagtggaagagatttttaatttgaaatttgctcaagctcttggactcaccgaggcagtaaaagtaccatatcctgtgtttgaatcaaacccggagttcttgaaaggatcgtccgcgggagtaataaaatcaagttcgttgttaaaaaacctgaactagttatttcctacttgcctcctgggatggctagtaaaataaacactaaagctttgcagtcccccaaaagaccacgaagtcctgggagtaattcaaaggttcctgaaattgaggtcaccgtggaaggccctaataacaacaatcctcaaacctcagctgttcgaaccccgacccagactaacggttctaacgttcccttcaagccacgagggagagagttttcctttgaggcctggaatgccaaaatcacggacctaaaacagaaagttgaaaatctcttcaatgagaaatgtggggaagctcttggccttaaacaagctgtgaaggtgccgttcgcgttatttgagtctttcccggaagacttttatgtggaaggcttacctgagggtgtgccattccgaagaccatcgacttttggcattccgaggctggagaagatactcagaaacaaagccaaaattaagttcatcattaaaaagcccgaaatgtttgagacggcgattaaggagagcacctcctctaagagccctcccagaaaaataaattcatcacccaatgttaatactactgcatcaggtgttgaagaccttaacatcattcaggtgacaattccagatgatgataatgaaagactctcgaaagttgaaaaagctagacagctaagagaacaagtgaatgacctctttagtcggaaatttggtgaagctattggtatgggttttcctgtgaaagttccctacaggaaaatcacaattaaccctggctgtgtggtggttgatggcatgcccccgggggtgtccttcaaagcccccagctacctggaaatcagctccatgagaaggatcttagactctgccgagtttatcaaattcacggtcattaggtaagtgagagtttcctgcttagtcacaggagcgaatctggagctcatgaggctgactcttctaaaatgcagccacaggtagtcatcgaatccggcttcctatgctgtgcaatcaacaaatcaaaataacttgtgtcatcattagaatgtcagatgtgcttctacgaactaagctgactcttttaattctttggcaaagggttggcaaactaggactgtttgccaaattcaggctgcctcctatttttagagtcttcctgaaacacagctacacccgtattatccatggctgctttcctgtcacagtgagtaagtagctgggactgagaaggcatggcctccaaagtctaaaatatttactctctagcactttgtagaaaaaccttagctaggcacagtggctaacgcctgtaatcccagcattttgggaggccaaggcaggcagatcacctgaggtcaggagttccagaccagcctggccaacatggtgaaatcccatctctacaaaaataaaacagttagctgggcatgatggcgggtgcctgtaatcccagctactcgggaggctgaggcaggatagtcgcttgaacccaggaggtggaggttgcaatgagccaagatcatgccactgcactccagcctggacgacagagtgagactccatcacaagaaaaaaagaactttgtcaacctctgtcttagggcgccttgtcacaggcttcgggtcagacggattcaaccttgcatcagccatttgttagccaggtcactctgttctttgtctgtaaatgagattgatcgttgttcccactgagagtgtcagctccttcccgtagagcaggcatgatgattgtactcacctctgacaccattgtgagtgccacattccttcccacgtccttgtcactgtaagagatgcccacctgagcaccaaccccaggttatcttcccctttgtcttccagccccccagaaacagctacgactcaacctacccaatcatttcatcatcagattgccactgtctctagttcaggtctcttgggactggcactcagaaatctcataataaatcctcttgaggcttctcatacactcgtcttcttccaatcttctttccctcaaaatctcatattttggttccacttcacccaccgtcattctccatatcactcccaggagttaggcaaaaagccccttccgttcttccgtatgttaaacttagaatcactctgttccctgctctgcgtttctattttttgtttttcctccatttactagtagcttaacactttctaacagtgttcttattattgatacgtatctatctcttccataagcttataaggtcacggataatacttctcattgtagtacgtaaatgacgtgggctagatatgagttgaataaacagttatacctgtaaattcttacagagtgaaaataaattgttatactttacaatttgtttctctctttagaccatttccaggacttgtgattaataaccgtgagtattttgtgaagtgttttgtttttgttttttcctggggtctgacgtgtgtgcgtgtgagtgtgtatacatgcttaacgtatatcacgttacttcacctatgtcagtaaccaggccaaatacttgttttagccctcagtaaaaacaccaggcacttcctagttgtaaaattattcaagcttcttaacttcctatcctcgatgcacttaatcataaaatggtaataatagcaccgattttgggggagtcgttccagtagatggaaagcatctggaacaggtgtcagcaagctcctgccgacgtgtatgcataaagttttattgaaaccaccatcgtgtccatttgtttatggcagaactgagagatggcagcagcaagtgtgtgcctgcaaaacctaaaatatttactaattggctctgcaagaaaagagtttgcatccccctaacctagaacagtgtctagcctctagtatgtgtttagcctacagtatgtgctcagcgaatacaatctatatttattactgcttttatgactgttataattactgtgcttggatttcgttacaaagtaagtcacaatgtgcctgcttctgttagtatttcagcacagtgcctggcacacatggggctctcaaatattgctgagcgagtgaacaaatgtcctttcaattccttaacgttgatgtcattttcaatagtattttgagccaaacttaattttgcgagtgtgttttgttttcttaactttattattaaaaatgtataaaagtgaggccaggcgtggtggctcacgcctgtaatcccagcagtttgggaggctgaggcaggcggatcagttgaggttgggagttggagaccagcccgtccaacatggtgaaagcctgtctctactaaaaatacaaaaatcagctgggtgtggtggcgcgtgcctgtaatcccagctactcaggaggctgaggcaggagagttgcttgaatcctagaggtggaggttgcagtgagctgagatcgtgccattgcactccagcctgggcaacaagagcaaaactctgtcccaataaataaataaataaaatgttctcttttgttcctgttcttgtgcggtagtgtggtatagagttttatggtaattactgtgaattagtgattctgagggacatatcagaactctgaggtttgtttccttctcatcttgagggaaacagcaaatgtatgttaaaatgcttttccaagggaacaacacatccttacattatttaaaccaatctgcttcattttcagagctggttgatcagagtgagtcagaaggccccgtgatacaagaatcagctgaaccaagccagttggaagttccagccacagaagaaataaaagagactgatggaagctctcagatcaagcaagaaccagaccccacgtggtagacctcttccctcctaggcttaaagtatcagtggttgagaagagcttttcggacctgttactaccccaagctgtgtaatatacttgtataacagaaataccttctatacaaacctttttttctacttttagatagaaatgtctactttttcagcagttctgtgaattaaagagcagagtgactgtgggtctggaatggctggtgtacttgggaatgtactatcaggattttacagcaatgctgggaaatgacagggaaaatgacaggaatgaatctcaccagattttttatgtactcagcagagccttgagttacggtgtttattttccaatcaagtgaagatatctcctacttctcctactggaacatctcagcttctgcagtgaagaaaaattcctgtgatagttcagttctttagtttttctatttgaaaaaaaaaaatcatttaaatgatcctttgttcacggctctccttaatgactgagtgaacagttcctatctgtatatttgactaaaccttttcctaagctatctctcatggttcctatgtttttttatcataattaaaagcaaaaccatctggatcacctaacagtcagaggtcagtatctcagcgtgtgaattatagaggaaatacagagagaacctcttccacttttacttttcgtccaaataaaatgcatggtgtaccagaagttgaagatcgggttgaggattggggctagctcgatgacactaaggccccaacatcgcgggacctgctgtggcgcggattcttaggaacgctgttctagccggccccctctccaggggtcgccgtggccggcattatttcctagttcttcttgtaaccctgaggtgccagcgcggggagtgaggaggggtcagggggctaaggatgcaacctctgacgttctgcgccttcctaggagagtcttacatgtgttgagatttcacaagcaatgcgagttgtaaaataccagctctacaagaagctaggctctgtgacggcatagttttcagtagctttatcacaatattcacaatggagaattatatgacatggtagcagaaataggcccttttatgtgttgcttctattttacctcaaattgtagatatagggtaatcaataaaatccatccatgcctttcacacactaagt

SEQ ID NO: 4493 - protein, 605 aa, Homo sapiens; identical to SEQ ID NO: 4221

SEQ ID NO: 4494 - DNA, 4093 bp, Homo sapiens
aaaaaaaaaaaaaaaaaaaaaaaaaaaagaaaaaagaaaaaaaaaaggaggaggaggaggagggtgagagagaagctgggagagcagagaaaaggggccaccggtcgcccccccgcttccccgcacgcgctctccagccgcggccgcccgcctgccgcggtcaccccggcctctgcctctgtcccccagtgatcggatcaaggcgctgagcgaggccctgcctgcggggcggccatgcggcggtgacaggagcgcgaccgacacgcacgggcccctcgccccctctcgcctcccgtccgctcgccagctcccctcagccgaggctgctccgcggcggccgcagcccgcgcgcggcccacactcgcctcccctcggcacccccggccccggagctgcctggaggcggccgcactcggggatcatggcccaagttgcaatgtccaccctccccgttgaagatgaggagtcctcggagagcaggatggtggtgacattcctcatgtcagctctcgagtccatgtgtaaagaactggccaagtccaaagccgaagtggcctgcattgcagtgtatgaaacagacgtgtttgtcgtcggaactgaaagaggacgtgcttttgtcaataccagaaaggattttcaaaaagattttgtaaaatattgtgttgaagaagaagaaaaagctgcagagatgcataaaatgaaatctacaacccaggcaaatcggatgagtgtagatgctgtagaaattgaaacactcagaaaaacagttgaggactatttctgcttttgctatgggaaagctttaggcaaatccacagtggtacctgtaccatatgagaagatgctgcgagaccagtcggctgtggtagtgcaggggcttccggaaggtgttgcctttaaacaccccgagaactatgatcttgcaaccctgaaatggattttggagaacaaagcagggatttcattcatcattaagagaccttttttagagccaaagaagcatgtaggtggtcgtgtgatggtaacagatgctgacaggtcaatactatctccaggtggaagttgtggccccatcaaagtgaaaactgaacccacagaagattctggaagccaccattcttcagagggcaatgaaggcacagaaatggaagtaccagcagaagattctactcaacatgtcccttcagaaacaagtgaggaccctgaagttgaggtgactattgaagatgatgattattctccaccgtctaagagaccaaaggccaatgagctaccgcagccaccagtcccggaacccgccaatgctgggaagcggaaagtgagggagttcaacttcgagaaatggaatgctcgcatcactgatctacgtaaacaagttgaagaattgtttgaaaggaaatatgctcaagccataaaagccaaaggtccggtgacgatcccgtaccctcttttccagtctcatgttgaagatctttatgtagaaggacttcctgaaggaattccttttagaaggccatctacttacggaattcctcgcctggagaggatattacttgcaaaggaaaggattcgttttgtgattaagaaacatgagcttctgaattcaacacgtgaagatttacagcttgataagccagcttcaggagtaaaggaagaatggtatgccagaatcactaaattaagaaagatggtggatcagcttttctgcaaaaaatttgcggaagccttggggagcactgaagccaaggctgtaccgtaccaaaaatttgaggcacacccgaatgatctgtacgtggaaggactgccagaaaacattcctttccgaagtccctcatggtatggaatcccaaggctggaaaaaatcattcaagtgggcaatcgaattaaatttgttattaaaagaccagaacttctgactcacagtaccactgaagttactcagccaagaacgaatacaccagtcaaagaagattggaatgtcagaattaccaagctacggaagcaagtggaagagatttttaatttgaaatttgctcaagctcttggactcaccgaggcagtaaaagtaccatatcctgtgtttgaatcaaacccggagttcttgaaaggatcgtccgcgggagtaataaaatcaagttcgttgttaaaaaacctgaactagttatttcctacttgcctcctgggatggctagtaaaataaacactaaagctttgcagtcccccaaaagaccacgaagtcctgggagtaattcaaaggttcctgaaattgaggtcaccgtggaaggccctaataacaacaatcctcaaacctcagctgttcgaaccccgacccagactaacggttctaacgttcccttcaagccacgagggagagagttttcctttgaggcctggaatgccaaaatcacggacctaaaacagaaagttgaaaatctcttcaatgagaaatgtggggaagctcttggccttaaacaagctgtgaaggtgccgttcgcgttatttgagtctttcccggaagacttttatgtggaaggcttacctgagggtgtgccattccgaagaccatcgacttttggcattccgaggctggagaagatactcagaaacaaagccaaaattaagttcatcattaaaaagcccgaaatgtttgagacggcgattaaggagagcacctcctctaagagccctcccagaaaaataaattcatcacccaatgttaatactactgcatcaggtgttgaagaccttaacatcattcaggtgacaattccagatgatgataatgaaagactctcgaaagttgaaaaagctagacagctaagagaacaagtgaatgacctctttagtcggaaatttggtgaagctattggtatgggttttcctgtgaaagttccctacaggaaaatcacaattaaccctggctgtgtggtggttgatggcatgcccccgggggtgtccttcaaagcccccagctacctggaaatcagctccatgagaaggatcttagactctgccgagtttatcaaattcacggtcattagaccatttccaggacttgtgattaataaccagctggttgatcagagtgagtcagaaggccccgtgatacaagaatcagctgaaccaagccagttggaagttccagccacagaagaaataaaagagactgatggaagctctcagatcaagcaagaaccagaccccacgtggtagacctcttccctcctaggagccttgagttacggtgtttattttccaatcaagtgaagatatctcctacttctcctactggaacatctcagcttctgcagtgaagaaaaattcctgtgatagttcagttctttagtttttctatttgaaaaaaaaaaatcatttaaatgatcctttgttcacggctctccttaatgactgagtgaacagttcctatctgtatatttgactaaaccttttcctaagctatctctcatggttcctatgtttttttatcataattaaaagcaaaaccatctggatcacctaacagtcagaggtcagtatctcagcgtgtgaattatagaggaaatacagagagaacctcttccacttttacttttcgtccaaataaaatgcatggtgtaccagaagttgaagatcgggttgaggattggggctagctcgatgacactaaggccccaacatcgcgggacctgctgtggcgcggattcttaggaacgctgttctagccggccccctctccaggggtcgccgtggccggcattatttcctagttcttcttgtaaccctgaggtgccagcgcggggagtgaggaggggtcagggggctaaggatgcaacctctgacgttctgcgccttcctaggagagtcttacatgtgttgagatttcacaagcaatgcgagttgtaaaataccagctctacaagaagctaggctctgtgacggcatagttttcagtagctttatcacaatattcacaatggagaattatatgacatggtagcagaaataggcccttttatgtgttgcttctattttacctcaaattgtagatatagggtaatcaataaaatccatccatgcctttcacacactaagt

SEQ ID NO: 4495 - protein, 579 aa, Homo sapiens; identical to SEQ ID NO: 4111

SEQ ID NO: 4496 - DNA, 5306 bp, Homo sapiens
aaaaaaaaaaaaaaaaaaaaaaaaaaaagaaaaaagaaaaaaaaaaggaggaggaggaggagggtgagagagaagctgggagagcagagaaaaggggccaccggtcgcccccccgcttccccgcacgcgctctccagccgcggccgcccgcctgccgcggtcaccccggcctctgcctctgtcccccagtgatcggatcaaggcgctgagcgaggccctgcctgcggggcggccatgcggcggtgacaggagcgcgaccgacacgcacgggcccctcgccccctctcgcctcccgtccgctcgccagctcccctcagccgaggctgctccgcggcggccgcagcccgcgcgcggcccacactcgcctccccgttgaagatgaggagtcctcggagagcaggatggtggtgacattcctcatgtcagctctcgagtccatgtgtaaagaactggccaagtccaaagccgaagtggcctgcattgcagtgtatgaaacagacgtgtttgtcgtcggaactgaaagaggacgtgcttttgtcaataccagaaaggattttcaaaaagattttgtaaaatattgtgttgaagaagaagaaaaagctgcagagatgcataaaatgaaatctacaacccaggcaaatcggatgagtgtagatgctgtagaaattgaaacactcagaaaaacagttgaggactatttctgcttttgctatgggaaagctttaggcaaatccacagtggtacctgtaccatatgagaagatgctgcgagaccagtcggctgtggtagtgcaggggcttccggaaggtgttgcctttaaacaccccgagaactatgatcttgcaaccctgaaatggattttggagaacaaagcagggatttcattcatcattaagagaccttttttagagccaaagaagcatgtaggtggtcgtgtgatggtaacagatgctgacaggtcaatactatctccaggtggaagttgtggccccatcaaagtgaaaactgaacccacagaagattctggcatttccctggaaatggcagctgtgacagtaaaggaagaatcagaagatcctgattattatcaatataacattcaagcaggcccttctgaaactgatgatgttgatgaaaaacagcccctatcgaagcctttgcaaggaagccaccattcttcagagggcaatgaaggcacagaaatggaagtaccagcagaagattctactcaacatgtcccttcagaaacaagtgaggaccctgaagttgaggtgactattgaagatgatgattattctccaccgtctaagagaccaaaggccaatgagctaccgcagccaccagtcccggaacccgccaatgctgggaagcggaaagtgagggagttcaacttcgagaaatggaatgctcgcatcactgatctacgtaaacaagttgaagaattgtttgaaaggaaatatgctcaagccataaaagccaaaggtccggtgacgatcccgtaccctcttttccagtctcatgttgaagatctttatgtagaaggacttcctgaaggaattccttttagaaggccatctacttacggaattcctcgcctggagaggatattacttgcaaaggaaaggattcgttttgtgattaagaaacatgagcttctgaattcaacacgtgaagatttacagcttgataagccagcttcaggagtaaaggaagaatggtatgccagaatcactaaattaagaaagatggtggatcagcttttctgcaaaaaatttgcggaagccttggggagcactgaagccaaggctgtaccgtaccaaaaatttgaggcacacccgaatgatctgtacgtggaaggactgccagaaaacattcctttccgaagtccctcatggtatggaatcccaaggctggaaaaaatcattcaagtgggcaatcgaattaaatttgttattaaaagaccagaacttctgactcacagtaccactgaagttactcagccaagaacgaatacaccagtcaaagaagattggaatgtcagaattaccaagctacggaagcaagtggaagagatttttaatttgaaatttgcttagatttgttgacagcggtttcctggagtgctgtcttgagaacgattctgaggaggctcagcaagaaagagtgtttcagttgattgggtgtgtctgtcatggagaaggaactcaagctcttggactcaccgaggcagtaaaagtaccatatcctgtgtttgaatcaaacccggagttcttgtatgtggaaggcttgccagaggggattcccttccgaagccctacctggtttggaattccacgacttgaaaggatcgtccgcgggagtaataaaatcaagttcgttgttaaaaaacctgaactagttatttcctacttgcctcctgggatggctagtaaaataaacactaaagctttgcagtcccccaaaagaccacgaagtcctgggagtaattcaaaggttcctgaaattgaggtcaccgtggaaggccctaataacaacaatcctcaaacctcagctgttcgaaccccgacccagactaacggttctaacgttcccttcaagccacgagggagagagttttcctttgaggcctggaatgccaaaatcacggacctaaaacagaaagttgaaaatctcttcaatgagaaatgtggggaagctcttggccttaaacaagctgtgaaggtgccgttcgcgttatttgagtctttcccggaagacttttatgtggaaggcttacctgagggtgtgccattccgaagaccatcgacttttggcattccgaggctggagaagatactcagaaacaaagccaaaattaagttcatcattaaaaagcccgaaatgtttgagacggcgattaaggagagcacctcctctaagagccctcccagaaaaataaattcatcacccaatgttaatactactgcatcaggtgttgaagaccttaacatcattcaggtgacaattccagatgatgataatgaaagactctcgaaagttgaaaaagctagacagctaagagaacaagtgaatgacctctttagtcggaaatttggtgaagctattggtatgggttttcctgtgaaagttccctacaggaaaatcacaattaaccctggctgtgtggtggttgatggcatgcccccgggggtgtccttcaaagcccccagctacctggaaatcagctccatgagaaggatcttagactctgccgagtttatcaaattcacggtcattagaccatttccaggacttgtgattaataaccagctggttgatcagagtgagtcagaaggccccgtgatacaagaatcagctgaaccaagccagttggaagttccagccacagaagaaataaaagagactgatggaagctctcagatcaagcaagaaccagaccccacgtggtagacctcttccctcctagggtaaatcagcttctgtgtcagggatgctgtgtggtgtccatctgaaccccctgcatacgcgtagctaatgtgatctccccactttcacataagatggtggccctgccttcagggaatgtgggagccaggtgggagccttcccggatatttaagctagaagattctacagggagattctccttggatcaatatatgtctctcagtcaaagatgtaaaagcacttttgccttaaaaagaatgttctgtttctaaatagagtcaacgttgtcctcctcattggaattcactatgagtcagaatcattagactgacttttttttttccatagtaatagtattttgcagagtctcacagagctgcagatcttttgttcatcttgcagagttaacaagtctgatcctgttagtccagatttcttaaatttggccaagttataataggagcagtagcttgagacccgaagtcaggaaactttgacaatggatttttttttttaatccagagacttgtactggaatttgccttaccctgtcagctcatggacttaaggtttcatcccgctttatgagtgcttctgaatccaagtcattgttacctgaatttgcaaattaagttgtgatattcgtgactgttaaattcctgtaattagattaacctctttgcttgcttgtttgttttctctcctattttagcttaaagtatcagtggttgagaagagcttttcggacctgttactaccccaagctgtgtaatatacttgtataacagaaataccttctatacaaacctttttttctacttttagatagaaatgtctactttttcagcagttctgtgaattaaagagcagagtgactgtgggtctggaatggctggtgtacttgggaatgtactatcaggattttacagcaatgctgggaaatgacagggaaaatgacaggaatgaatctcaccagattttttatgtactcagcagagccttgagttacggtgtttattttccaatcaagtgaagatatctcctacttctcctactggaacatctcagcttctgcagtgaagaaaaattcctgtgatagttcagttctttagtttttctatttgaaaaaaaaaaatcatttaaatgatcctttgttcacggctctccttaatgactgagtgaacagttcctatctgtatatttgactaaaccttttcctaagctatctctcatggttcctatgtttttttatcataattaaaagcaaaaccatctggatcacctaacagtcagaggtcagtatctcagcgtgtgaattatagaggaaatacagagagaacctcttccacttttacttttcgtccaaataaaatgcatggtgtaccagaagttgaagatcgggttgaggattggggctagctcgatgacactaaggccccaacatcgcgggacctgctgtggcgcggattcttaggaacgctgttctagccggccccctctccaggggtcgccgtggccggcattatttcctagttcttcttgtaaccctgaggtgccagcgcggggagtgaggaggggtcagggggctaaggatgcaacctctgacgttctgcgccttcctaggagagtcttacatgtgttgagatttcacaagcaatgcgagttgtaaaataccagctctacaagaagctaggctctgtgacggcatagttttcagtagctttatcacaatattcacaatggagaattatatgacatggtagcagaaataggcccttttatgtgttgcttctattttacctcaaattgtagatatagggtaatcaataaaatccatccatgcctttcacacactaagt

SEQ ID NO: 4497 - protein, 564 aa, Homo sapiens; identical to SEQ ID NO: 4031

SEQ ID NO: 4498 - DNA, 7211 bp, Homo sapiens
aaaaaaaaaaaaaaaaaaaaaaaaaaaagaaaaaagaaaaaaaaaaggaggaggaggaggagggtgagagagaagctgggagagcagagaaaaggggccaccggtcgcccccccgcttccccgcacgcgctctccagccgcggccgcccgcctgccgcggtcaccccggcctctgcctctgtcccccagtgatcggatcaaggcgctgagcgaggccctgcctgcggggcggccatgcggcggtgacaggagcgcgaccgacacgcacgggcccctcgccccctctcgcctcccgtccgctcgccagctcccctcagccgaggctgctccgcggcggccgcagcccgcgcgcggcccacactcgcctcccctcggcacccccggccccggagctgcctggaggcggccgcactcggggatcatggcccaagttgcaatgtccaccctccccgttgaagatgaggagtcctcggagagcaggatggtggtgacattcctcatgtcagctctcgagtccatgtgtaaagaactggccaagtccaaagccgaagtggcctgcattgcagtgtatgaaacagacgtgtttgtcgtcggaactgaaagaggacgtgcttttgtcaataccagaaaggattttcaaaaagattttgtaaaatattgtgttgaagaagaagaaaaagctgcagagatgcataaaatgaaatctacaacccaggcaaatcggatgagtgtagatgctgtagaaattgaaacactcagaaaaacagttgaggactatttctgcttttgctatgggaaagctttaggcaaatccacagtggtacctgtaccatatgagaagatgctgcgagaccagtcggctgtggtagtgcaggggcttccggaaggtgttgcctttaaacaccccgagaactatgatcttgcaaccctgaaatggattttggagaacaaagcagggatttcattcatcattaagagaccttttttagagccaaagaagcatgtaggtggtcgtgtgatggtaacagatgctgacaggtcaatactatctccaggtggaagttgtggccccatcaaagtgaaaactgaacccacagaagattctggcatttccctggaaatggcagctgtgacagtaaaggaagaatcagaagatcctgattattatcaatataacattcaaggaagccaccattcttcagagggcaatgaaggcacagaaatggaagtaccagcagaagattctactcaacatgtcccttcagaaacaagtgaggaccctgaagttgaggtgactattgaagatgatgattattctccaccgtctaagagaccaaaggccaatgagctaccgcagccaccagtcccggaacccgccaatgctgggaagcggaaagtgagggagttcaacttcgagaaatggaatgctcgcatcactgatctacgtaaacaagttgaagaattgtttgaaaggaaatatgctcaagccataaaagccaaaggtccggtgacgatcccgtaccctcttttccagtctcatgttgaagatctttatgtagaaggacttcctgaaggaattccttttagaaggccatctacttacggaattcctcgcctggagaggatattacttgcaaaggaaaggattcgttttgtgattaagaaacatgagcttctgaattcaacacgtgaagatttacagcttgataagccagcttcaggagtaaaggaagaatggtatgccagaatcactaaattaagaaagatggtggatcagcttttctgcaaaaaatttgcggaagccttggggagcactgaagccaaggctgtaccgtaccaaaaatttgaggcacacccgaatgatctgtacgtggaaggactgccagaaaacattcctttccgaagtccctcatggtatggaatcccaaggctggaaaaaatcattcaagtgggcaatcgaattaaatttgttattaaaagaccagaacttctgactcacagtaccactgaagttactcagccaagaacgaatacaccagctcaagctcttggactcaccgaggcagtaaaagtaccatatcctgtgtttgaatcaaacccggagttcttgtatgtggaaggcttgccagaggggattcccttccgaagccctacctggtttggaattccacgacttgaaaggatcgtccgcgggagtaataaaatcaagttcgttgttaaaaaacctgaactagttatttcctacttgcctcctgggatggctagtaaaataaacactaaagctttgcagtcccccaaaagaccacgaagtcctgggagtaattcaaaggttcctgaaattgaggtcaccgtggaaggccctaataacaacaatcctcaaacctcagctgttcgaaccccgacccagactaacggttctaacgttcccttcaagccacgagggagagagttttcctttgaggcctggaatgccaaaatcacggacctaaaacagaaagttgaaaatctcttcaatgagaaatgtggggaagctcttggccttaaacaagctgtgaaggtgccgttcgcgttatttgagtctttcccggaagacttttatgtggaaggcttacctgagggtgtgccattccgaagaccatcgacttttggcattccgaggctggagaagatactcagaaacaaagccaaaattaagttcatcattaaaaagcccgaaatgtttgagacggcgattaaggagagcacctcctctaagagccctcccagaaaaataaattcatcacccaatgttaatactactgcatcaggtgttgaagaccttaacatcattcaggtgacaattccagatgatgataatgaaagactctcgaaagttgaaaaagctagacagctaagagaacaagtgaatgacctctttagtcggaaatttggtgaagctattggtatgggttttcctgtgaaagttccctacaggaaaatcacaattaaccctggctgtgtggtggttgatggcatgcccccgggggtgtccttcaaagcccccagctacctggaaatcagctccatgagaaggatcttagactctgccgagtttatcaaattcacggtcattaggtaagtgagagtttcctgcttagtcacaggagcgaatctggagctcatgaggctgactcttctaaaatgcagccacaggtagtcatcgaatccggcttcctatgctgtgcaatcaacaaatcaaaataacttgtgtcatcattagaatgtcagatgtgcttctacgaactaagctgactcttttaattctttggcaaagggttggcaaactaggactgtttgccaaattcaggctgcctcctatttttagagtcttcctgaaacacagctacacccgtattatccatggctgctttcctgtcacagtgagtaagtagctgggactgagaaggcatggcctccaaagtctaaaatatttactctctagcactttgtagaaaaaccttagctaggcacagtggctaacgcctgtaatcccagcattttgggaggccaaggcaggcagatcacctgaggtcaggagttccagaccagcctggccaacatggtgaaatcccatctctacaaaaataaaacagttagctgggcatgatggcgggtgcctgtaatcccagctactcgggaggctgaggcaggatagtcgcttgaacccaggaggtggaggttgcaatgagccaagatcatgccactgcactccagcctggacgacagagtgagactccatcacaagaaaaaaagaactttgtcaacctctgtcttagggcgccttgtcacaggcttcgggtcagacggattcaaccttgcatcagccatttgttagccaggtcactctgttctttgtctgtaaatgagattgatcgttgttcccactgagagtgtcagctccttcccgtagagcaggcatgatgattgtactcacctctgacaccattgtgagtgccacattccttcccacgtccttgtcactgtaagagatgcccacctgagcaccaaccccaggttatcttcccctttgtcttccagccccccagaaacagctacgactcaacctacccaatcatttcatcatcagattgccactgtctctagttcaggtctcttgggactggcactcagaaatctcataataaatcctcttgaggcttctcatacactcgtcttcttccaatcttctttccctcaaaatctcatattttggttccacttcacccaccgtcattctccatatcactcccaggagttaggcaaaaagccccttccgttcttccgtatgttaaacttagaatcactctgttccctgctctgcgtttctattttttgtttttcctccatttactagtagcttaacactttctaacagtgttcttattattgatacgtatctatctcttccataagcttataaggtcacggataatacttctcattgtagtacgtaaatgacgtgggctagatatgagttgaataaacagttatacctgtaaattcttacagagtgaaaataaattgttatactttacaatttgtttctctctttagaccatttccaggacttgtgattaataaccgtgagtattttgtgaagtgttttgtttttgttttttcctggggtctgacgtgtgtgcgtgtgagtgtgtatacatgcttaacgtatatcacgttacttcacctatgtcagtaaccaggccaaatacttgttttagccctcagtaaaaacaccaggcacttcctagttgtaaaattattcaagcttcttaacttcctatcctcgatgcacttaatcataaaatggtaataatagcaccgattttgggggagtcgttccagtagatggaaagcatctggaacaggtgtcagcaagctcctgccgacgtgtatgcataaagttttattgaaaccaccatcgtgtccatttgtttatggcagaactgagagatggcagcagcaagtgtgtgcctgcaaaacctaaaatatttactaattggctctgcaagaaaagagtttgcatccccctaacctagaacagtgtctagcctctagtatgtgtttagcctacagtatgtgctcagcgaatacaatctatatttattactgcttttatgactgttataattactgtgcttggatttcgttacaaagtaagtcacaatgtgcctgcttctgttagtatttcagcacagtgcctggcacacatggggctctcaaatattgctgagcgagtgaacaaatgtcctttcaattccttaacgttgatgtcattttcaatagtattttgagccaaacttaattttgcgagtgtgttttgttttcttaactttattattaaaaatgtataaaagtgaggccaggcgtggtggctcacgcctgtaatcccagcagtttgggaggctgaggcaggcggatcagttgaggttgggagttggagaccagcccgtccaacatggtgaaagcctgtctctactaaaaatacaaaaatcagctgggtgtggtggcgcgtgcctgtaatcccagctactcaggaggctgaggcaggagagttgcttgaatcctagaggtggaggttgcagtgagctgagatcgtgccattgcactccagcctgggcaacaagagcaaaactctgtcccaataaataaataaataaaatgttctcttttgttcctgttcttgtgcggtagtgtggtatagagttttatggtaattactgtgaattagtgattctgagggacatatcagaactctgaggtttgtttccttctcatcttgagggaaacagcaaatgtatgttaaaatgcttttccaagggaacaacacatccttacattatttaaaccaatctgcttcattttcagagctggttgatcagagtgagtcagaaggccccgtgatacaagaatcagctgaaccaagccagttggaagttccagccacagaagaaataaaagagactgatggaagctctcagatcaagcaagaaccagaccccacgtggtagacctcttccctcctaggcttaaagtatcagtggttgagaagagcttttcggacctgttactaccccaagctgtgtaatatacttgtataacagaaataccttctatacaaacctttttttctacttttagatagaaatgtctactttttcagcagttctgtgaattaaagagcagagtgactgtgggtctggaatggctggtgtacttgggaatgtactatcaggattttacagcaatgctgggaaatgacagggaaaatgacaggaatgaatctcaccagattttttatgtactcagcagagccttgagttacggtgtttattttccaatcaagtgaagatatctcctacttctcctactggaacatctcagcttctgcagtgaagaaaaattcctgtgatagttcagttctttagtttttctatttgaaaaaaaaaaatcatttaaatgatcctttgttcacggctctccttaatgactgagtgaacagttcctatctgtatatttgactaaaccttttcctaagctatctctcatggttcctatgtttttttatcataattaaaagcaaaaccatctggatcacctaacagtcagaggtcagtatctcagcgtgtgaattatagaggaaatacagagagaacctcttccacttttacttttcgtccaaataaaatgcatggtgtaccagaagttgaagatcgggttgaggattggggctagctcgatgacactaaggccccaacatcgcgggacctgctgtggcgcggattcttaggaacgctgttctagccggccccctctccaggggtcgccgtggccggcattatttcctagttcttcttgtaaccctgaggtgccagcgcggggagtgaggaggggtcagggggctaaggatgcaacctctgacgttctgcgccttcctaggagagtcttacatgtgttgagatttcacaagcaatgcgagttgtaaaataccagctctacaagaagctaggctctgtgacggcatagttttcagtagctttatcacaatattcacaatggagaattatatgacatggtagcagaaataggcccttttatgtgttgcttctattttacctcaaattgtagatatagggtaatcaataaaatccatccatgcctttcacacactaagt

SEQ ID NO: 4499 - protein, 898 aa, Homo sapiens; identical to SEQ ID NO: 4367

SEQ ID NO: 4500 - DNA, 4120 bp, Homo sapiens
aaaaaaaaaaaaaaaaaaaaaaaaaaaagaaaaaagaaaaaaaaaaggaggaggaggaggagggtgagagagaagctgggagagcagagaaaaggggccaccggtcgcccccccgcttccccgcacgcgctctccagccgcggccgcccgcctgccgcggtcaccccggcctctgcctctgtcccccagtgatcggatcaaggcgctgagcgaggccctgcctgcggggcggccatgcggcggtgacaggagcgcgaccgacacgcacgggcccctcgccccctctcgcctcccgtccgctcgccagctcccctcagccgaggctgctccgcggcggccgcagcccgcgcgcggcccacactcgcctcccctcggcacccccggccccggagctgcctggaggcggccgcactcggtgtaaagaactggccaagtccaaagccgaagtggcctgcattgcagtgtatgaaacagacgtgtttgtcgtcggaactgaaagaggacgtgcttttgtcaataccagaaaggattttcaaaaagattttgtaaaatattgtgttgaagaagaagaaaaagctgcagagatgcataaaatgaaatctacaacccaggcaaatcggatgagtgtagatgctgtagaaattgaaacactcagaaaaacagttgaggactatttctgcttttgctatgggaaagctttaggcaaatccacagtggtacctgtaccatatgagaagatgctgcgagaccagtcggctgtggtagtgcaggggcttccggaaggtgttgcctttaaacaccccgagaactatgatcttgcaaccctgaaatggattttggagaacaaagcagggatttcattcatcattaagagaccttttttagagccaaagaagcatgtaggtggtcgtgtgatggtaacagatgctgacaggtcaatactatctccaggtggaagttgtggccccatcaaagtgaaaactgaacccacagaagattctggcatttccctggaaatggcagctgtgacagtaaaggaagaatcagaagatcctgattattatcaatataacattcaagcaggcccttctgaaactgatgatgttgatgaaaaacagcccctatcgaagcctttgcaaggaagccaccattcttcagagggcaatgaaggcacagaaatggaagtaccagcagaagatgatgattattctccaccgtctaagagaccaaaggccaatgagctaccgcagccaccagtcccggaacccgccaatgctgggaagcggaaagtgagggagttcaacttcgagaaatggaatgctcgcatcactgatctacgtaaacaagttgaagaattgtttgaaaggaaatatgctcaagccataaaagccaaaggtccggtgacgatcccgtaccctcttttccagtctcatgttgaagatctttatgtagaaggacttcctgaaggaattccttttagaaggccatctacttacggaattcctcgcctggagaggatattacttgcaaaggaaaggattcgttttgtgattaagaaacatgagcttctgaattcaacacgtgaagatttacagcttgataagccagcttcaggagtaaaggaagaatggtatgccagaatcactaaattaagaaagatggtggatcagcttttctgcaaaaaatttgcggaagccttggggagcactgaagccaaggctgtaccgtaccaaaaatttgaggcacacccgaatgatctgtacgtggaaggactgccagaaaacattcctttccgaagtccctcatggtatggaatcccaaggctggaaaaaatcattcaagtgggcaatcgaattaaatttgttattaaaagaccagaacttctgactcacagtaccactgaagttactcagccaagaacgaatacaccagtcaaagaagattggaatgtcagaattaccaagctacggaagcaagtggaagagatttttaatttgaaatttgctcaagctcttggactcaccgaggcagtaaaagtaccatatcctgtgtttgaatcaaacccggagttcttgaaaggatcgtccgcgggagtaataaaatcaagttcgttgttaaaaaacctgaactagttatttcctacttgcctcctgggatggctagtaaaataaacactaaagctttgcagtcccccaaaagaccacgaagtcctgggagtaattcaaaggttcctgaaattgaggtcaccgtggaaggccctaataacaacaatcctcaaacctcagctgttcgaaccccgacccagactaacggttctaacgttcccttcaagccacgagggagagagttttcctttgaggcctggaatgccaaaatcacggacctaaaacagaaagttgaaaatctcttcaatgagaaatgtggggaagctcttggccttaaacaagctgtgaaggtgccgttcgcgttatttgagtctttcccggaagacttttatgtggaaggcttacctgagggtgtgccattccgaagaccatcgacttttggcattccgaggctggagaagatactcagaaacaaagccaaaattaagttcatcattaaaaagcccgaaatgtttgagacggcgattaaggagagcacctcctctaagagccctcccagaaaaataaattcatcacccaatgttaatactactgcatcaggtgttgaagaccttaacatcattcaggtgacaattccagatgatgataatgaaagactctcgaaagttgaaaaagctagacagctaagagaacaagtgaatgacctctttagtcggaaatttggtgaagctattggtatgggttttcctgtgaaagttccctacaggaaaatcacaattaaccctggctgtgtggtggttgatggcatgcccccgggggtgtccttcaaagcccccagctacctggaaatcagctccatgagaaggatcttagactctgccgagtttatcaaattcacggtcattagaccatttccaggacttgtgattaataaccagctggttgatcagagtgagtcagaaggccccgtgatacaagaatcagctgaaccaagccagttggaagttccagccacagaagaaataaaagagactgatggaagctctcagatcaagcaagaaccagaccccacgtggtagacctcttccctcctaggcttaaagtatcagtggttgagaagagcttttcggacctgttactaccccaagctgtagccttgagttacggtgtttattttccaatcaagtgaagatatctcctacttctcctactggaacatctcagcttctgcagtgaagaaaaattcctgtgatagttcagttctttagtttttctatttgaaaaaaaaaaatcatttaaatgatcctttgttcacggctctccttaatgactgagtgaacagttcctatctgtatatttgactaaaccttttcctaagctatctctcatggttcctatgtttttttatcataattaaaagcaaaaccatctggatcacctaacagtcagaggtcagtatctcagcgtgtgaattatagaggaaatacagagagaacctcttccacttttacttttcgtccaaataaaatgcatggtgtaccagaagttgaagatcgggttgaggattggggctagctcgatgacactaaggccccaacatcgcgggacctgctgtggcgcggattcttaggaacgctgttctagccggccccctctccaggggtcgccgtggccggcattatttcctagttcttcttgtaaccctgaggtgccagcgcggggagtgaggaggggtcagggggctaaggatgcaacctctgacgttctgcgccttcctaggagagtcttacatgtgttgagatttcacaagcaatgcgagttgtaaaataccagctctacaagaagctaggctctgtgacggcatagttttcagtagctttatcacaatattcacaatggagaattatatgacatggtagcagaaataggcccttttatgtgttgcttctattttacctcaaattgtagatatagggtaatcaataaaatccatccatgcctttcacacactaagt

SEQ ID NO: 4501 - protein, 515 aa, Homo sapiens
MHKMKSTTQANRMSVDAVEIETLRKTVEDYFCFCYGKALGKSTVVPVPYEKMLRDQSAVVVQGLPEGVAFKHPENYDLATLKWILENKAGISFIIKRPFLEPKKHVGGRVMVTDADRSILSPGGSCGPIKVKTEPTEDSGISLEMAAVTVKEESEDPDYYQYNIQAGPSETDDVDEKQPLSKPLQGSHHSSEGNEGTEMEVPAEDDDYSPPSKRPKANELPQPPVPEPANAGKRKVREFNFEKWNARITDLRKQVEELFERKYAQAIKAKGPVTIPYPLFQSHVEDLYVEGLPEGIPFRRPSTYGIPRLERILLAKERIRFVIKKHELLNSTREDLQLDKPASGVKEEWYARITKLRKMVDQLFCKKFAEALGSTEAKAVPYQKFEAHPNDLYVEGLPENIPFRSPSWYGIPRLEKIIQVGNRIKFVIKRPELLTHSTTEVTQPRTNTPVKEDWNVRITKLRKQVEEIFNLKFAQALGLTEAVKVPYPVFESNPEFLKGSSAGVIKSSSLLKNLN

SEQ ID NO: 4502 - DNA, 5183 bp, Homo sapiens
aaaaaaaaaaaaaaaaaaaaaaaaaaaagaaaaaagaaaaaaaaaaggaggaggaggaggagggtgagagagaagctgggagagcagagaaaaggggccaccggtcgcccccccgcttccccgcacgcgctctccagccgcggccgcccgcctgccgcggtcaccccggcctctgcctctgtcccccagtgatcggatcaaggcgctgagcgaggccctgcctgcggggcggccatgcggcggtgacaggagcgcgaccgacacgcacgggcccctcgccccctctcgcctcccgtccgctcgccagctcccctcagccgaggctgctccgcggcggccgcagcccgcgcgcggcccacactcgcctccccgttgaagatgaggagtcctcggagagcaggatggtggtgacattcctcatgtcagctctcgagtccatgtgtaaagaactggccaagtccaaagccgaagtggcctgcattgcagtgtatgaaacagacgtgtttgtcgtcggaactgaaagaggacgtgcttttgtcaataccagaaaggattttcaaaaagattttgtaaaatattgtgttgaagaagaagaaaaagctgcagagatgcataaaatgaaatctacaacccaggcaaatcggatgagtgtagatgctgtagaaattgaaacactcagaaaaacagttgaggactatttctgcttttgctatgggaaagctttaggcaaatccacagtggtacctgtaccatatgagaagatgctgcgagaccagtcggctgtggtagtgcaggggcttccggaaggtgttgcctttaaacaccccgagaactatgatcttgcaaccctgaaatggattttggagaacaaagcagggatttcattcatcattaagagaccttttttagagccaaagaagcatgtaggtggtcgtgtgatggtaacagatgctgacaggtcaatactatctccaggtggaagttgtggccccatcaaagtgaaaactgaacccacagaagattctggcatttccctggaaatggcagctgtgacagtaaaggaagaatcagaagatcctgattattatcaatataacattcaaggaagccaccattcttcagagggcaatgaaggcacagaaatggaagtaccagcagaagatgatgattattctccaccgtctaagagaccaaaggccaatgagctaccgcagccaccagtcccggaacccgccaatgctgggaagcggaaagtgagggagttcaacttcgagaaatggaatgctcgcatcactgatctacgtaaacaagttgaagaattgtttgaaaggaaatatgctcaagccataaaagccaaaggtccggtgacgatcccgtaccctcttttccagtctcatgttgaagatctttatgtagaaggacttcctgaaggaattccttttagaaggccatctacttacggaattcctcgcctggagaggatattacttgcaaaggaaaggattcgttttgtgattaagaaacatgagcttctgaattcaacacgtgaagatttacagcttgataagccagcttcaggagtaaaggaagaatggtatgccagaatcactaaattaagaaagatggtggatcagcttttctgcaaaaaatttgcggaagccttggggagcactgaagccaaggctgtaccgtaccaaaaatttgaggcacacccgaatgatctgtacgtggaaggactgccagaaaacattcctttccgaagtccctcatggtatggaatcccaaggctggaaaaaatcattcaagtgggcaatcgaattaaatttgttattaaaagaccagaacttctgactcacagtaccactgaagttactcagccaagaacgaatacaccagtcaaagaagattggaatgtcagaattaccaagctacggaagcaagtggaagagatttttaatttgaaatttgcttagatttgttgacagcggtttcctggagtgctgtcttgagaacgattctgaggaggctcagcaagaaagagtgtttcagttgattgggtgtgtctgtcatggagaaggaactcaagctcttggactcaccgaggcagtaaaagtaccatatcctgtgtttgaatcaaacccggagttcttgtatgtggaaggcttgccagaggggattcccttccgaagccctacctggtttggaattccacgacttgaaaggatcgtccgcgggagtaataaaatcaagttcgttgttaaaaaacctgaactagttatttcctacttgcctcctgggatggctagtaaaataaacactaaagctttgcagtcccccaaaagaccacgaagtcctgggagtaattcaaaggttcctgaaattgaggtcaccgtggaaggccctaataacaacaatcctcaaacctcagctgttcgaaccccgacccagactaacggttctaacgttcccttcaagccacgagggagagagttttcctttgaggcctggaatgccaaaatcacggacctaaaacagaaagttgaaaatctcttcaatgagaaatgtggggaagctcttggccttaaacaagctgtgaaggtgccgttcgcgttatttgagtctttcccggaagacttttatgtggaaggcttacctgagggtgtgccattccgaagaccatcgacttttggcattccgaggctggagaagatactcagaaacaaagccaaaattaagttcatcattaaaaagcccgaaatgtttgagacggcgattaaggagagcacctcctctaagagccctcccagaaaaataaattcatcacccaatgttaatactactgcatcaggtgttgaagaccttaacatcattcaggtgacaattccagatgatgataatgaaagactctcgaaagttgaaaaagctagacagctaagagaacaagtgaatgacctctttagtcggaaatttggtgaagctattggtatgggttttcctgtgaaagttccctacaggaaaatcacaattaaccctggctgtgtggtggttgatggcatgcccccgggggtgtccttcaaagcccccagctacctggaaatcagctccatgagaaggatcttagactctgccgagtttatcaaattcacggtcattagaccatttccaggacttgtgattaataaccagctggttgatcagagtgagtcagaaggccccgtgatacaagaatcagctgaaccaagccagttggaagttccagccacagaagaaataaaagagactgatggaagctctcagatcaagcaagaaccagaccccacgtggtagacctcttccctcctagggtaaatcagcttctgtgtcagggatgctgtgtggtgtccatctgaaccccctgcatacgcgtagctaatgtgatctccccactttcacataagatggtggccctgccttcagggaatgtgggagccaggtgggagccttcccggatatttaagctagaagattctacagggagattctccttggatcaatatatgtctctcagtcaaagatgtaaaagcacttttgccttaaaaagaatgttctgtttctaaatagagtcaacgttgtcctcctcattggaattcactatgagtcagaatcattagactgacttttttttttccatagtaatagtattttgcagagtctcacagagctgcagatcttttgttcatcttgcagagttaacaagtctgatcctgttagtccagatttcttaaatttggccaagttataataggagcagtagcttgagacccgaagtcaggaaactttgacaatggatttttttttttaatccagagacttgtactggaatttgccttaccctgtcagctcatggacttaaggtttcatcccgctttatgagtgcttctgaatccaagtcattgttacctgaatttgcaaattaagttgtgatattcgtgactgttaaattcctgtaattagattaacctctttgcttgcttgtttgttttctctcctattttagcttaaagtatcagtggttgagaagagcttttcggacctgttactaccccaagctgtgtaatatacttgtataacagaaataccttctatacaaacctttttttctacttttagatagaaatgtctactttttcagcagttctgtgaattaaagagcagagtgactgtgggtctggaatggctggtgtacttgggaatgtactatcaggattttacagcaatgctgggaaatgacagggaaaatgacaggaatgaatctcaccagattttttatgtactcagcagagccttgagttacggtgtttattttccaatcaagtgaagatatctcctacttctcctactggaacatctcagcttctgcagtgaagaaaaattcctgtgatagttcagttctttagtttttctatttgaaaaaaaaaaatcatttaaatgatcctttgttcacggctctccttaatgactgagtgaacagttcctatctgtatatttgactaaaccttttcctaagctatctctcatggttcctatgtttttttatcataattaaaagcaaaaccatctggatcacctaacagtcagaggtcagtatctcagcgtgtgaattatagaggaaatacagagagaacctcttccacttttacttttcgtccaaataaaatgcatggtgtaccagaagttgaagatcgggttgaggattggggctagctcgatgacactaaggccccaacatcgcgggacctgctgtggcgcggattcttaggaacgctgttctagccggccccctctccaggggtcgccgtggccggcattatttcctagttcttcttgtaaccctgaggtgccagcgcggggagtgaggaggggtcagggggctaaggatgcaacctctgacgttctgcgccttcctaggagagtcttacatgtgttgagatttcacaagcaatgcgagttgtaaaataccagctctacaagaagctaggctctgtgacggcatagttttcagtagctttatcacaatattcacaatggagaattatatgacatggtagcagaaataggcccttttatgtgttgcttctattttacctcaaattgtagatatagggtaatcaataaaatccatccatgcctttcacacactaagt

SEQ ID NO: 4503 - protein, 523 aa, Homo sapiens; identical to SEQ ID NO: 4201

SEQ ID NO: 4504 - DNA, 4392 bp, Homo sapiens
aaaaaaaaaaaaaaaaaaaaaaaaaaaagaaaaaagaaaaaaaaaaggaggaggaggaggagggtgagagagaagctgggagagcagagaaaaggggccaccggtcgcccccccgcttccccgcacgcgctctccagccgcggccgcccgcctgccgcggtcaccccggcctctgcctctgtcccccagtgatcggatcaaggcgctgagcgaggccctgcctgcggggcggccatgcggcggtgacaggagcgcgaccgacacgcacgggcccctcgccccctctcgcctcccgtccgctcgccagctcccctcagccgaggctgctccgcggcggccgcagcccgcgcgcggcccacactcgcctcccctcggcacccccggccccggagctgcctggaggcggccgcactcggggatcatggcccaagttgcaatgtccaccctccccgttgaagatgaggagtcctcggagagcaggatggtggtgacattcctcatgtcagctctcgagtccatgtgtaaagaactggccaagtccaaagccgaagtggcctgcattgcagtgtatgaaacagacgtgtttgtcgtcggaactgaaagaggacgtgcttttgtcaataccagaaaggattttcaaaaagattttgtaaaatattgtgttgaagaagaagaaaaagctgcagagatgcataaaatgaaatctacaacccaggcaaatcggatgagtgtagatgctgtagaaattgaaacactcagaaaaacagttgaggactatttctgcttttgctatgggaaagctttaggcaaatccacagtggtacctgtaccatatgagaagatgctgcgagaccagtcggctgtggtagtgcaggggcttccggaaggtgttgcctttaaacaccccgagaactatgatcttgcaaccctgaaatggattttggagaacaaagcagggatttcattcatcattaagagaccttttttagagccaaagaagcatgtaggtggtcgtgtgatggtaacagatgctgacaggtcaatactatctccaggtggaagttgtggccccatcaaagtgaaaactgaacccacagaagattctggcatttccctggaaatggcagctgtgacagtaaaggaagaatcagaagatcctgattattatcaatataacattcaaggaagccaccattcttcagagggcaatgaaggcacagaaatggaagtaccagcagaagatgatgattattctccaccgtctaagagaccaaaggccaatgagctaccgcagccaccagtcccggaacccgccaatgctgggaagcggaaagtgagggagttcaacttcgagaaatggaatgctcgcatcactgatctacgtaaacaagttgaagaattgtttgaaaggaaatatgctcaagccataaaagccaaaggtccggtgacgatcccgtaccctcttttccagtctcatgttgaagatctttatgtagaaggacttcctgaaggaattccttttagaaggccatctacttacggaattcctcgcctggagaggatattacttgcaaaggaaaggattcgttttgtgattaagaaacatgagcttctgaattcaacacgtgaagatttacagcttgataagccagcttcaggagtaaaggaagaatggtatgccagaatcactaaattaagaaagatggtggatcagcttttctgcaaaaaatttgcggaagccttggggagcactgaagccaaggctgtaccgtaccaaaaatttgaggcacacccgaatgatctgtacgtggaaggactgccagaaaacattcctttccgaagtccctcatggtatggaatcccaaggctggaaaaaatcattcaagtgggcaatcgaattaaatttgttattaaaagaccagaacttctgactcacagtaccactgaagttactcagccaagaacgaatacaccagtcaaagaagattggaatgtcagaattaccaagctacggaagcaagtggaagagatttttaatttgaaatttgctcaagctcttggactcaccgaggcagtaaaagtaccatatcctgtgtttgaatcaaacccggagttcttgaaaggatcgtccgcgggagtaataaaatcaagttcgttgttaaaaaacctgaactagttatttcctacttgcctcctgggatggctagtaaaataaacactaaagctttgcagtcccccaaaagaccacgaagtcctgggagtaattcaaaggttcctgaaattgaggtcaccgtggaaggccctaataacaacaatcctcaaacctcagctgttcgaaccccgacccagactaacggttctaacgttcccttcaagccacgagggagagagttttcctttgaggcctggaatgccaaaatcacggacctaaaacagaaagttgaaaatctcttcaatgagaaatgtggggaagctcttggccttaaacaagctgtgaaggtgccgttcgcgttatttgagtctttcccggaagacttttatgtggaaggcttacctgagggtgtgccattccgaagaccatcgacttttggcattccgaggctggagaagatactcagaaacaaagccaaaattaagttcatcattaaaaagcccgaaatgtttgagacggcgattaaggagagcacctcctctaagagccctcccagaaaaataaattcatcacccaatgttaatactactgcatcaggtgttgaagaccttaacatcattcaggtgacaattccagatgatgataatgaaagactctcgaaagttgaaaaagctagacagctaagagaacaagtgaatgacctctttagtcggaaatttggtgaagctattggtatgggttttcctgtgaaagttccctacaggaaaatcacaattaaccctggctgtgtggtggttgatggcatgcccccgggggtgtccttcaaagcccccagctacctggaaatcagctccatgagaaggatcttagactctgccgagtttatcaaattcacggtcattagaccatttccaggacttgtgattaataaccagctggttgatcagagtgagtcagaaggccccgtgatacaagaatcagctgaaccaagccagttggaagttccagccacagaagaaataaaagagactgatggaagctctcagatcaagcaagaaccagaccccacgtggtagacctcttccctcctaggcttaaagtatcagtggttgagaagagcttttcggacctgttactaccccaagctgtgtaatatacttgtataacagaaataccttctatacaaacctttttttctacttttagatagaaatgtctactttttcagcagttctgtgaattaaagagcagagtgactgtgggtctggaatggctggtgtacttgggaatgtactatcaggattttacagcaatgctgggaaatgacagggaaaatgacaggaatgaatctcaccagattttttatgtactcagcagagccttgagttacggtgtttattttccaatcaagtgaagatatctcctacttctcctactggaacatctcagcttctgcagtgaagaaaaattcctgtgatagttcagttctttagtttttctatttgaaaaaaaaaaatcatttaaatgatcctttgttcacggctctccttaatgactgagtgaacagttcctatctgtatatttgactaaaccttttcctaagctatctctcatggttcctatgtttttttatcataattaaaagcaaaaccatctggatcacctaacagtcagaggtcagtatctcagcgtgtgaattatagaggaaatacagagagaacctcttccacttttacttttcgtccaaataaaatgcatggtgtaccagaagttgaagatcgggttgaggattggggctagctcgatgacactaaggccccaacatcgcgggacctgctgtggcgcggattcttaggaacgctgttctagccggccccctctccaggggtcgccgtggccggcattatttcctagttcttcttgtaaccctgaggtgccagcgcggggagtgaggaggggtcagggggctaaggatgcaacctctgacgttctgcgccttcctaggagagtcttacatgtgttgagatttcacaagcaatgcgagttgtaaaataccagctctacaagaagctaggctctgtgacggcatagttttcagtagctttatcacaatattcacaatggagaattatatgacatggtagcagaaataggcccttttatgtgttgcttctattttacctcaaattgtagatatagggtaatcaataaaatccatccatgcctttcacacactaagt

SEQ ID NO: 4505 - protein, 584 aa, Homo sapiens; identical to SEQ ID NO: 4173

SEQ ID NO: 4506 - DNA, 5263 bp, Homo sapiens
aaaaaaaaaaaaaaaaaaaaaaaaaaaagaaaaaagaaaaaaaaaaggaggaggaggaggagggtgagagagaagctgggagagcagagaaaaggggccaccggtcgcccccccgcttccccgcacgcgctctccagccgcggccgcccgcctgccgcggtcaccccggcctctgcctctgtcccccagtgatcggatcaaggcgctgagcgaggccctgcctgcggggcggccatgcggcggtgacaggagcgcgaccgacacgcacgggcccctcgccccctctcgcctcccgtccgctcgccagctcccctcagccgaggctgctccgcggcggccgcagcccgcgcgcggcccacactcgcctcccctcggcacccccggccccggagctgcctggaggcggccgcactcggggatcatggcccaagttgcaatgtccaccctccccgttgaagatgaggagtcctcggagagcaggatggtggtgacattcctcatgtcagctctcgagtccatgtgtaaagaactggccaagtccaaagccgaagtggcctgcattgcagtgtatgaaacagacgtgtttgtcgtcggaactgaaagaggacgtgcttttgtcaataccagaaaggattttcaaaaagattttgtaaaatattgtgttgaagaagaagaaaaagctgcagagatgcataaaatgaaatctacaacccaggcaaatcggatgagtgtagatgctgtagaaattgaaacactcagaaaaacagttgaggactatttctgcttttgctatgggaaagctttaggcaaatccacagtggtacctgtaccatatgagaagatgctgcgagaccagtcggctgtggtagtgcaggggcttccggaaggtgttgcctttaaacaccccgagaactatgatcttgcaaccctgaaatggattttggagaacaaagcagggatttcattcatcattaagagaccttttttagagccaaagaagcatgtaggtggtcgtgtgatggtaacagatgctgacaggtcaatactatctccaggtggaagttgtggccccatcaaagtgaaaactgaacccacagaagattctggcatttccctggaaatggcagctgtgacagtaaaggaagaatcagaagatcctgattattatcaatataacattcaaggaagccaccattcttcagagggcaatgaaggcacagaaatggaagtaccagcagaagatgatgattattctccaccgtctaagagaccaaaggccaatgagctaccgcagccaccagtcccggaacccgccaatgctgggaagcggaaagtgagggagttcaacttcgagaaatggaatgctcgcatcactgatctacgtaaacaagttgaagaattgtttgaaaggaaatatgctcaagccataaaagccaaaggtccggtgacgatcccgtaccctcttttccagtctcatgttgaagatctttatgtagaaggacttcctgaaggaattccttttagaaggccatctacttacggaattcctcgcctggagaggatattacttgcaaaggaaaggattcgttttgtgattaagaaacatgagcttctgaattcaacacgtgaagatttacagcttgataagccagcttcaggagtaaaggaagaatggtatgccagaatcactaaattaagaaagatggtggatcagcttttctgcaaaaaatttgcggaagccttggggagcactgaagccaaggctgtaccgtaccaaaaatttgaggcacacccgaatgatctgtacgtggaaggactgccagaaaacattcctttccgaagtccctcatggtatggaatcccaaggctggaaaaaatcattcaagtgggcaatcgaattaaatttgttattaaaagaccagaacttctgactcacagtaccactgaagttactcagccaagaacgaatacaccagtcaaagaagattggaatgtcagaattaccaagctacggaagcaagtggaagagatttttaatttgaaatttgcttagatttgttgacagcggtttcctggagtgctgtcttgagaacgattctgaggaggctcagcaagaaagagtgtttcagttgattgggtgtgtctgtcatggagaaggaactcaagctcttggactcaccgaggcagtaaaagtaccatatcctgtgtttgaatcaaacccggagttcttgtatgtggaaggcttgccagaggggattcccttccgaagccctacctggtttggaattccacgacttgaaaggatcgtccgcgggagtaataaaatcaagttcgttgttaaaaaacctgaactagttatttcctacttgcctcctgggatggctagtaaaataaacactaaagctttgcagtcccccaaaagaccacgaagtcctgggagtaattcaaaggttcctgaaattgaggtcaccgtggaaggccctaataacaacaatcctcaaacctcagctgttcgaaccccgacccagactaacggttctaacgttcccttcaagccacgagggagagagttttcctttgaggcctggaatgccaaaatcacggacctaaaacagaaagttgaaaatctcttcaatgagaaatgtggggaagctcttggccttaaacaagctgtgaaggtgccgttcgcgttatttgagtctttcccggaagacttttatgtggaaggcttacctgagggtgtgccattccgaagaccatcgacttttggcattccgaggctggagaagatactcagaaacaaagccaaaattaagttcatcattaaaaagcccgaaatgtttgagacggcgattaaggagagcacctcctctaagagccctcccagaaaaataaattcatcacccaatgttaatactactgcatcaggtgttgaagaccttaacatcattcaggtgacaattccagatgatgataatgaaagactctcgaaagttgaaaaagctagacagctaagagaacaagtgaatgacctctttagtcggaaatttggtgaagctattggtatgggttttcctgtgaaagttccctacaggaaaatcacaattaaccctggctgtgtggtggttgatggcatgcccccgggggtgtccttcaaagcccccagctacctggaaatcagctccatgagaaggatcttagactctgccgagtttatcaaattcacggtcattagaccatttccaggacttgtgattaataaccagctggttgatcagagtgagtcagaaggccccgtgatacaagaatcagctgaaccaagccagttggaagttccagccacagaagaaataaaagagactgatggaagctctcagatcaagcaagaaccagaccccacgtggtagacctcttccctcctagggtaaatcagcttctgtgtcagggatgctgtgtggtgtccatctgaaccccctgcatacgcgtagctaatgtgatctccccactttcacataagatggtggccctgccttcagggaatgtgggagccaggtgggagccttcccggatatttaagctagaagattctacagggagattctccttggatcaatatatgtctctcagtcaaagatgtaaaagcacttttgccttaaaaagaatgttctgtttctaaatagagtcaacgttgtcctcctcattggaattcactatgagtcagaatcattagactgacttttttttttccatagtaatagtattttgcagagtctcacagagctgcagatcttttgttcatcttgcagagttaacaagtctgatcctgttagtccagatttcttaaatttggccaagttataataggagcagtagcttgagacccgaagtcaggaaactttgacaatggatttttttttttaatccagagacttgtactggaatttgccttaccctgtcagctcatggacttaaggtttcatcccgctttatgagtgcttctgaatccaagtcattgttacctgaatttgcaaattaagttgtgatattcgtgactgttaaattcctgtaattagattaacctctttgcttgcttgtttgttttctctcctattttagcttaaagtatcagtggttgagaagagcttttcggacctgttactaccccaagctgtgtaatatacttgtataacagaaataccttctatacaaacctttttttctacttttagatagaaatgtctactttttcagcagttctgtgaattaaagagcagagtgactgtgggtctggaatggctggtgtacttgggaatgtactatcaggattttacagcaatgctgggaaatgacagggaaaatgacaggaatgaatctcaccagattttttatgtactcagcagagccttgagttacggtgtttattttccaatcaagtgaagatatctcctacttctcctactggaacatctcagcttctgcagtgaagaaaaattcctgtgatagttcagttctttagtttttctatttgaaaaaaaaaaatcatttaaatgatcctttgttcacggctctccttaatgactgagtgaacagttcctatctgtatatttgactaaaccttttcctaagctatctctcatggttcctatgtttttttatcataattaaaagcaaaaccatctggatcacctaacagtcagaggtcagtatctcagcgtgtgaattatagaggaaatacagagagaacctcttccacttttacttttcgtccaaataaaatgcatggtgtaccagaagttgaagatcgggttgaggattggggctagctcgatgacactaaggccccaacatcgcgggacctgctgtggcgcggattcttaggaacgctgttctagccggccccctctccaggggtcgccgtggccggcattatttcctagttcttcttgtaaccctgaggtgccagcgcggggagtgaggaggggtcagggggctaaggatgcaacctctgacgttctgcgccttcctaggagagtcttacatgtgttgagatttcacaagcaatgcgagttgtaaaataccagctctacaagaagctaggctctgtgacggcatagttttcagtagctttatcacaatattcacaatggagaattatatgacatggtagcagaaataggcccttttatgtgttgcttctattttacctcaaattgtagatatagggtaatcaataaaatccatccatgcctttcacacactaagt

SEQ ID NO: 4507 - protein, 543 aa, Homo sapiens; identical to SEQ ID NO: 4195

SEQ ID NO: 4508 - DNA, 5168 bp, Homo sapiens
aaaaaaaaaaaaaaaaaaaaaaaaaaaagaaaaaagaaaaaaaaaaggaggaggaggaggagggtgagagagaagctgggagagcagagaaaaggggccaccggtcgcccccccgcttccccgcacgcgctctccagccgcggccgcccgcctgccgcggtcaccccggcctctgcctctgtcccccagtgatcggatcaaggcgctgagcgaggccctgcctgcggggcggccatgcggcggtgacaggagcgcgaccgacacgcacgggcccctcgccccctctcgcctcccgtccgctcgccagctcccctcagccgaggctgctccgcggcggccgcagcccgcgcgcggcccacactcgcctccccgttgaagatgaggagtcctcggagagcaggatggtggtgacattcctcatgtcagctctcgagtccatgtgtaaagaactggccaagtccaaagccgaagtggcctgcattgcagtgtatgaaacagacgtgtttgtcgtcggaactgaaagaggacgtgcttttgtcaataccagaaaggattttcaaaaagattttgtaaaatattgtgttgaagaagaagaaaaagctgcagagatgcataaaatgaaatctacaacccaggcaaatcggatgagtgtagatgctgtagaaattgaaacactcagaaaaacagttgaggactatttctgcttttgctatgggaaagctttaggcaaatccacagtggtacctgtaccatatgagaagatgctgcgagaccagtcggctgtggtagtgcaggggcttccggaaggtgttgcctttaaacaccccgagaactatgatcttgcaaccctgaaatggattttggagaacaaagcagggatttcattcatcattaagagaccttttttagagccaaagaagcatgtaggtggtcgtgtgatggtaacagatgctgacaggtcaatactatctccaggtggaagttgtggccccatcaaagtgaaaactgaacccacagaagattctggaagccaccattcttcagagggcaatgaaggcacagaaatggaagtaccagcagaagattctactcaacatgtcccttcagaaacaagtgaggaccctgaagttgaggtgactattgaagatgatgattattctccaccgtctaagagaccaaaggccaatgagctaccgcagccaccagtcccggaacccgccaatgctgggaagcggaaagtgagggagttcaacttcgagaaatggaatgctcgcatcactgatctacgtaaacaagttgaagaattgtttgaaaggaaatatgctcaagccataaaagccaaaggtccggtgacgatcccgtaccctcttttccagtctcatgttgaagatctttatgtagaaggacttcctgaaggaattccttttagaaggccatctacttacggaattcctcgcctggagaggatattacttgcaaaggaaaggattcgttttgtgattaagaaacatgagcttctgaattcaacacgtgaagatttacagcttgataagccagcttcaggagtaaaggaagaatggtatgccagaatcactaaattaagaaagatggtggatcagcttttctgcaaaaaatttgcggaagccttggggagcactgaagccaaggctgtaccgtaccaaaaatttgaggcacacccgaatgatctgtacgtggaaggactgccagaaaacattcctttccgaagtccctcatggtatggaatcccaaggctggaaaaaatcattcaagtgggcaatcgaattaaatttgttattaaaagaccagaacttctgactcacagtaccactgaagttactcagccaagaacgaatacaccagtcaaagaagattggaatgtcagaattaccaagctacggaagcaagtggaagagatttttaatttgaaatttgcttagatttgttgacagcggtttcctggagtgctgtcttgagaacgattctgaggaggctcagcaagaaagagtgtttcagttgattgggtgtgtctgtcatggagaaggaactcaagctcttggactcaccgaggcagtaaaagtaccatatcctgtgtttgaatcaaacccggagttcttgtatgtggaaggcttgccagaggggattcccttccgaagccctacctggtttggaattccacgacttgaaaggatcgtccgcgggagtaataaaatcaagttcgttgttaaaaaacctgaactagttatttcctacttgcctcctgggatggctagtaaaataaacactaaagctttgcagtcccccaaaagaccacgaagtcctgggagtaattcaaaggttcctgaaattgaggtcaccgtggaaggccctaataacaacaatcctcaaacctcagctgttcgaaccccgacccagactaacggttctaacgttcccttcaagccacgagggagagagttttcctttgaggcctggaatgccaaaatcacggacctaaaacagaaagttgaaaatctcttcaatgagaaatgtggggaagctcttggccttaaacaagctgtgaaggtgccgttcgcgttatttgagtctttcccggaagacttttatgtggaaggcttacctgagggtgtgccattccgaagaccatcgacttttggcattccgaggctggagaagatactcagaaacaaagccaaaattaagttcatcattaaaaagcccgaaatgtttgagacggcgattaaggagagcacctcctctaagagccctcccagaaaaataaattcatcacccaatgttaatactactgcatcaggtgttgaagaccttaacatcattcaggtgacaattccagatgatgataatgaaagactctcgaaagttgaaaaagctagacagctaagagaacaagtgaatgacctctttagtcggaaatttggtgaagctattggtatgggttttcctgtgaaagttccctacaggaaaatcacaattaaccctggctgtgtggtggttgatggcatgcccccgggggtgtccttcaaagcccccagctacctggaaatcagctccatgagaaggatcttagactctgccgagtttatcaaattcacggtcattagaccatttccaggacttgtgattaataaccagctggttgatcagagtgagtcagaaggccccgtgatacaagaatcagctgaaccaagccagttggaagttccagccacagaagaaataaaagagactgatggaagctctcagatcaagcaagaaccagaccccacgtggtagacctcttccctcctagggtaaatcagcttctgtgtcagggatgctgtgtggtgtccatctgaaccccctgcatacgcgtagctaatgtgatctccccactttcacataagatggtggccctgccttcagggaatgtgggagccaggtgggagccttcccggatatttaagctagaagattctacagggagattctccttggatcaatatatgtctctcagtcaaagatgtaaaagcacttttgccttaaaaagaatgttctgtttctaaatagagtcaacgttgtcctcctcattggaattcactatgagtcagaatcattagactgacttttttttttccatagtaatagtattttgcagagtctcacagagctgcagatcttttgttcatcttgcagagttaacaagtctgatcctgttagtccagatttcttaaatttggccaagttataataggagcagtagcttgagacccgaagtcaggaaactttgacaatggatttttttttttaatccagagacttgtactggaatttgccttaccctgtcagctcatggacttaaggtttcatcccgctttatgagtgcttctgaatccaagtcattgttacctgaatttgcaaattaagttgtgatattcgtgactgttaaattcctgtaattagattaacctctttgcttgcttgtttgttttctctcctattttagcttaaagtatcagtggttgagaagagcttttcggacctgttactaccccaagctgtgtaatatacttgtataacagaaataccttctatacaaacctttttttctacttttagatagaaatgtctactttttcagcagttctgtgaattaaagagcagagtgactgtgggtctggaatggctggtgtacttgggaatgtactatcaggattttacagcaatgctgggaaatgacagggaaaatgacaggaatgaatctcaccagattttttatgtactcagcagagccttgagttacggtgtttattttccaatcaagtgaagatatctcctacttctcctactggaacatctcagcttctgcagtgaagaaaaattcctgtgatagttcagttctttagtttttctatttgaaaaaaaaaaatcatttaaatgatcctttgttcacggctctccttaatgactgagtgaacagttcctatctgtatatttgactaaaccttttcctaagctatctctcatggttcctatgtttttttatcataattaaaagcaaaaccatctggatcacctaacagtcagaggtcagtatctcagcgtgtgaattatagaggaaatacagagagaacctcttccacttttacttttcgtccaaataaaatgcatggtgtaccagaagttgaagatcgggttgaggattggggctagctcgatgacactaaggccccaacatcgcgggacctgctgtggcgcggattcttaggaacgctgttctagccggccccctctccaggggtcgccgtggccggcattatttcctagttcttcttgtaaccctgaggtgccagcgcggggagtgaggaggggtcagggggctaaggatgcaacctctgacgttctgcgccttcctaggagagtcttacatgtgttgagatttcacaagcaatgcgagttgtaaaataccagctctacaagaagctaggctctgtgacggcatagttttcagtagctttatcacaatattcacaatggagaattatatgacatggtagcagaaataggcccttttatgtgttgcttctattttacctcaaattgtagatatagggtaatcaataaaatccatccatgcctttcacacactaagt

SEQ ID NO: 4509 - protein, 518 aa, Homo sapiens; identical to SEQ ID NO: 4051

SEQ ID NO: 4510 - DNA, 3890 bp, Homo sapiens
aaaaaaaaaaaaaaaaaaaaaaaaaaaagaaaaaagaaaaaaaaaaggaggaggaggaggagggtgagagagaagctgggagagcagagaaaaggggccaccggtcgcccccccgcttccccgcacgcgctctccagccgcggccgcccgcctgccgcggtcaccccggcctctgcctctgtcccccagtgatcggatcaaggcgctgagcgaggccctgcctgcggggcggccatgcggcggtgacaggagcgcgaccgacacgcacgggcccctcgccccctctcgcctcccgtccgctcgccagctcccctcagccgaggctgctccgcggcggccgcagcccgcgcgcggcccacactcgcctccccgttgaagatgaggagtcctcggagagcaggatggtggtgacattcctcatgtcagctctcgagtccatgtgtaaagaactggccaagtccaaagccgaagtggcctgcattgcagtgtatgaaacagacgtgtttgtcgtcggaactgaaagaggacgtgcttttgtcaataccagaaaggattttcaaaaagattttgtaaaatattgtgttgaagaagaagaaaaagctgcagagatgcataaaatgaaatctacaacccaggcaaatcggatgagtgtagatgctgtagaaattgaaacactcagaaaaacagttgaggactatttctgcttttgctatgggaaagctttaggcaaatccacagtggtacctgtaccatatgagaagatgctgcgagaccagtcggctgtggtagtgcaggggcttccggaaggtgttgcctttaaacaccccgagaactatgatcttgcaaccctgaaatggattttggagaacaaagcagggatttcattcatcattaagagaccttttttagagccaaagaagcatgtaggtggtcgtgtgatggtaacagatgctgacaggtcaatactatctccaggtggaagttgtggccccatcaaagtgaaaactgaacccacagaagattctggcatttccctggaaatggcagctgtgacagtaaaggaagaatcagaagatcctgattattatcaatataacattcaaggaagccaccattcttcagagggcaatgaaggcacagaaatggaagtaccagcagaagattctactcaacatgtcccttcagaaacaagtgaggaccctgaagttgaggtgactattgaagatgatgattattctccaccgtctaagagaccaaaggccaatgagctaccgcagccaccagtcccggaacccgccaatgctgggaagcggaaagtgagggagttcaacttcgagaaatggaatgctcgcatcactgatctacgtaaacaagttgaagaattgtttgaaaggaaatatgctcaagccataaaagccaaaggtccggtgacgatcccgtaccctcttttccagtctcatgttgaagatctttatgtagaaggacttcctgaaggaattccttttagaaggccatctacttacggaattcctcgcctggagaggatattacttgcaaaggaaaggattcgttttgtgattaagaaacatgagcttctgaattcaacacgtgaagatttacagcttgataagccagcttcaggagtaaaggaagaatggtatgccagaatcactaaattaagaaagatggtggatcagcttttctgcaaaaaatttgcggaagccttggggagcactgaagccaaggctgtaccgtaccaaaaatttgaggcacacccgaatgatctgtacgtggaaggactgccagaaaacattcctttccgaagtccctcatggtatggaatcccaaggctggaaaaaatcattcaagtgggcaatcgaattaaatttgttattaaaagaccagaacttctgactcacagtaccactgaagttactcagccaagaacgaatacaccagtcaaagaagattggaatgtcagaattaccaagctacggaagcaagtggaagagatttttaatttgaaatttgctcaagctcttggactcaccgaggcagtaaaagtaccatatcctgtgtttgaatcaaacccggagttcttgtatgtggaaggcttgccagaggggattcccttccgaagccctacctggtttggaattccacgacttgaaaggatcgtccgcgggagtaataaaatcaagttcgttgttaaaaaacctgaactagttatttcctacttgcctcctgggatggctagtaaaataaacactaaagctttgcagtcccccaaaagaccacgaagtcctgggagtaattcaaaggttcctgaaattgaggtcaccgtggaaggccctaataacaacaatcctcaaacctcagctgttcgaaccccgacccagactaacggttctaacgttcccttcaagccacgagggagagagttttcctttgaggcctggaatgccaaaatcacggacctaaaacagaaagttgaaaatctcttcaatgagaaatgtggggaagctcttggccttaaacaagctgtgaaggtgccgttcgcgttatttgagtctttcccggaagacttttatgtggaaggcttacctgagggtgtgccattccgaagaccatcgacttttggcattccgaggctggagaagatactcagaaacaaagccaaaattaagttcatcattaaaaagcccgaaatgtttgagacggcgattaaggagagcacctcctctaagagccctcccagaaaaataaattcatcacccaatgttaatactactgcatcaggtgttgaagaccttaacatcattcaggtgacaattccagatgatgataatgaaagactctcgaaagttgaaaaagctagacagctaagagaacaagtgaatgacctctttagtcggaaatttggtgaagctattggtatgggttttcctgtgaaagttccctacaggaaaatcacaattaaccctggctgtgtggtggttgatggcatgcccccgggggtgtccttcaaagcccccagctacctggaaatcagctccatgagaaggatcttagactctgccgagtttatcaaattcacggtcattagaccatttccaggacttgtgattaataaccagctggttgatcagagtgagtcagaaggccccgtgatacaagaatcagctgaaccaagccagttggaagttccagccacagaagaaataaaagagactgatggaagctctcagatcaagcaagaaccagaccccacgtggtagacctcttccctcctaggcaaaaccatctggatcacctaacagtcagaggtcagtatctcagcgtgtgaattatagaggaaatacagagagaacctcttccacttttacttttcgtccaaataaaatgcatggtgtaccagaagttgaagatcgggttgaggattggggctagctcgatgacactaaggccccaacatcgcgggacctgctgtggcgcggattcttaggaacgctgttctagccggccccctctccaggggtcgccgtggccggcattatttcctagttcttcttgtaaccctgaggtgccagcgcggggagtgaggaggggtcagggggctaaggatgcaacctctgacgttctgcgccttcctaggagagtcttacatgtgttgagatttcacaagcaatgcgagttgtaaaataccagctctacaagaagctaggctctgtgacggcatagttttcagtagctttatcacaatattcacaatggagaattatatgacatggtagcagaaataggcccttttatgtgttgcttctattttacctcaaattgtagatatagggtaatcaataaaatccatccatgcctttcacacactaagt

SEQ ID NO: 4511 - protein, 958 aa, Homo sapiens [sequence omitted]

SEQ ID NO: 4512 - DNA, 5093 bp, Homo sapiens
aaaaaaaaaaaaaaaaaaaaaaaaaaaagaaaaaagaaaaaaaaaaggaggaggaggaggagggtgagagagaagctgggagagcagagaaaaggggccaccggtcgcccccccgcttccccgcacgcgctctccagccgcggccgcccgcctgccgcggtcaccccggcctctgcctctgtcccccagtgatcggatcaaggcgctgagcgaggccctgcctgcggggcggccatgcggcggtgacaggagcgcgaccgacacgcacgggcccctcgccccctctcgcctcccgtccgctcgccagctcccctcagccgaggctgctccgcggcggccgcagcccgcgcgcggcccacactcgcctcccctcggcacccccggccccggagctgcctggaggcggccgcactcggtgtaaagaactggccaagtccaaagccgaagtggcctgcattgcagtgtatgaaacagacgtgtttgtcgtcggaactgaaagaggacgtgcttttgtcaataccagaaaggattttcaaaaagattttgtaaaatattgtgttgaagaagaagaaaaagctgcagagatgcataaaatgaaatctacaacccaggcaaatcggatgagtgtagatgctgtagaaattgaaacactcagaaaaacagttgaggactatttctgcttttgctatgggaaagctttaggcaaatccacagtggtacctgtaccatatgagaagatgctgcgagaccagtcggctgtggtagtgcaggggcttccggaaggtgttgcctttaaacaccccgagaactatgatcttgcaaccctgaaatggattttggagaacaaagcagggatttcattcatcattaagagaccttttttagagccaaagaagcatgtaggtggtcgtgtgatggtaacagatgctgacaggtcaatactatctccaggtggaagttgtggccccatcaaagtgaaaactgaacccacagaagattctggaagccaccattcttcagagggcaatgaaggcacagaaatggaagtaccagcagaagattctactcaacatgtcccttcagaaacaagtgaggaccctgaagttgaggtgactattgaagatgatgattattctccaccgtctaagagaccaaaggccaatgagctaccgcagccaccagtcccggaacccgccaatgctgggaagcggaaagtgagggagttcaacttcgagaaatggaatgctcgcatcactgatctacgtaaacaagttgaagaattgtttgaaaggaaatatgctcaagccataaaagccaaaggtccggtgacgatcccgtaccctcttttccagtctcatgttgaagatctttatgtagaaggacttcctgaaggaattccttttagaaggccatctacttacggaattcctcgcctggagaggatattacttgcaaaggaaaggattcgttttgtgattaagaaacatgagcttctgaattcaacacgtgaagatttacagcttgataagccagcttcaggagtaaaggaagaatggtatgccagaatcactaaattaagaaagatggtggatcagcttttctgcaaaaaatttgcggaagccttggggagcactgaagccaaggctgtaccgtaccaaaaatttgaggcacacccgaatgatctgtacgtggaaggactgccagaaaacattcctttccgaagtccctcatggtatggaatcccaaggctggaaaaaatcattcaagtgggcaatcgaattaaatttgttattaaaagaccagaacttctgactcacagtaccactgaagttactcagccaagaacgaatacaccagtcaaagaagattggaatgtcagaattaccaagctacggaagcaagtggaagagatttttaatttgaaatttgcttagatttgttgacagcggtttcctggagtgctgtcttgagaacgattctgaggaggctcagcaagaaagagtgtttcagttgattgggtgtgtctgtcatggagaaggaactcaagctcttggactcaccgaggcagtaaaagtaccatatcctgtgtttgaatcaaacccggagttcttgtatgtggaaggcttgccagaggggattcccttccgaagccctacctggtttggaattccacgacttgaaaggatcgtccgcgggagtaataaaatcaagttcgttgttaaaaaacctgaactagttatttcctacttgcctcctgggatggctagtaaaataaacactaaagctttgcagtcccccaaaagaccacgaagtcctgggagtaattcaaaggttcctgaaattgaggtcaccgtggaaggccctaataacaacaatcctcaaacctcagctgttcgaaccccgacccagactaacggttctaacgttcccttcaagccacgagggagagagttttcctttgaggcctggaatgccaaaatcacggacctaaaacagaaagttgaaaatctcttcaatgagaaatgtggggaagctcttggccttaaacaagctgtgaaggtgccgttcgcgttatttgagtctttcccggaagacttttatgtggaaggcttacctgagggtgtgccattccgaagaccatcgacttttggcattccgaggctggagaagatactcagaaacaaagccaaaattaagttcatcattaaaaagcccgaaatgtttgagacggcgattaaggagagcacctcctctaagagccctcccagaaaaataaattcatcacccaatgttaatactactgcatcaggtgttgaagaccttaacatcattcaggtgacaattccagatgatgataatgaaagactctcgaaagttgaaaaagctagacagctaagagaacaagtgaatgacctctttagtcggaaatttggtgaagctattggtatgggttttcctgtgaaagttccctacaggaaaatcacaattaaccctggctgtgtggtggttgatggcatgcccccgggggtgtccttcaaagcccccagctacctggaaatcagctccatgagaaggatcttagactctgccgagtttatcaaattcacggtcattagaccatttccaggacttgtgattaataaccagctggttgatcagagtgagtcagaaggccccgtgatacaagaatcagctgaaccaagccagttggaagttccagccacagaaggtaaaaggacctcttccctcctagggtaaatcagcttctgtgtcagggatgctgtgtggtgtccatctgaaccccctgcatacgcgtagctaatgtgatctccccactttcacataagatggtggccctgccttcagggaatgtgggagccaggtgggagccttcccggatatttaagctagaagattctacagggagattctccttggatcaatatatgtctctcagtcaaagatgtaaaagcacttttgccttaaaaagaatgttctgtttctaaatagagtcaacgttgtcctcctcattggaattcactatgagtcagaatcattagactgacttttttttttccatagtaatagtattttgcagagtctcacagagctgcagatcttttgttcatcttgcagagttaacaagtctgatcctgttagtccagatttcttaaatttggccaagttataataggagcagtagcttgagacccgaagtcaggaaactttgacaatggatttttttttttaatccagagacttgtactggaatttgccttaccctgtcagctcatggacttaaggtttcatcccgctttatgagtgcttctgaatccaagtcattgttacctgaatttgcaaattaagttgtgatattcgtgactgttaaattcctgtaattagattaacctctttgcttgcttgtttgttttctctcctattttagcttaaagtatcagtggttgagaagagcttttcggacctgttactaccccaagctgtgtaatatacttgtataacagaaataccttctatacaaacctttttttctacttttagatagaaatgtctactttttcagcagttctgtgaattaaagagcagagtgactgtgggtctggaatggctggtgtacttgggaatgtactatcaggattttacagcaatgctgggaaatgacagggaaaatgacaggaatgaatctcaccagattttttatgtactcagcagagccttgagttacggtgtttattttccaatcaagtgaagatatctcctacttctcctactggaacatctcagcttctgcagtgaagaaaaattcctgtgatagttcagttctttagtttttctatttgaaaaaaaaaaatcatttaaatgatcctttgttcacggctctccttaatgactgagtgaacagttcctatctgtatatttgactaaaccttttcctaagctatctctcatggttcctatgtttttttatcataattaaaagcaaaaccatctggatcacctaacagtcagaggtcagtatctcagcgtgtgaattatagaggaaatacagagagaacctcttccacttttacttttcgtccaaataaaatgcatggtgtaccagaagttgaagatcgggttgaggattggggctagctcgatgacactaaggccccaacatcgcgggacctgctgtggcgcggattcttaggaacgctgttctagccggccccctctccaggggtcgccgtggccggcattatttcctagttcttcttgtaaccctgaggtgccagcgcggggagtgaggaggggtcagggggctaaggatgcaacctctgacgttctgcgccttcctaggagagtcttacatgtgttgagatttcacaagcaatgcgagttgtaaaataccagctctacaagaagctaggctctgtgacggcatagttttcagtagctttatcacaatattcacaatggagaattatatgacatggtagcagaaataggcccttttatgtgttgcttctattttacctcaaattgtagatatagggtaatcaataaaatccatccatgcctttcacacactaagt

SEQ ID NO: 4513 - protein, 449 aa, Homo sapiens; identical to SEQ ID NO: 4147

SEQ ID NO: 4514 - DNA, 4164 bp, Homo sapiens
aaaaaaaaaaaaaaaaaaaaaaaaaaaagaaaaaagaaaaaaaaaaggaggaggaggaggagggtgagagagaagctgggagagcagagaaaaggggccaccggtcgcccccccgcttccccgcacgcgctctccagccgcggccgcccgcctgccgcggtcaccccggcctctgcctctgtcccccagtgatcggatcaaggcgctgagcgaggccctgcctgcggggcggccatgcggcggtgacaggagcgcgaccgacacgcacgggcccctcgccccctctcgcctcccgtccgctcgccagctcccctcagccgaggctgctccgcggcggccgcagcccgcgcgcggcccacactcgcctcccctcggcacccccggccccggagctgcctggaggcggccgcactcggggatcatggcccaagttgcaatgtccaccctccccgttgaagatgaggagtcctcggagagcaggatggtggtgacattcctcatgtcagctctcgagtccatgtgtaaagaactggccaagtccaaagccgaagtggcctgcattgcagtgtatgaaacagacgtgtttgtcgtcggaactgaaagaggacgtgcttttgtcaataccagaaaggattttcaaaaagattttgtaaaatattgtgttgaagaagaagaaaaagctgcagagatgcataaaatgaaatctacaacccaggcaaatcggatgagtgtagatgctgtagaaattgaaacactcagaaaaacagttgaggactatttctgcttttgctatgggaaagctttaggcaaatccacagtggtacctgtaccatatgagaagatgctgcgagaccagtcggctgtggtagtgcaggggcttccggaaggtgttgcctttaaacaccccgagaactatgatcttgcaaccctgaaatggattttggagaacaaagcagggatttcattcatcattaagagaccttttttagagccaaagaagcatgtaggtggtcgtgtgatggtaacagatgctgacaggtcaatactatctccaggtggaagttgtggccccatcaaagtgaaaactgaacccacagaagattctggcatttccctggaaatggcagctgtgacagtaaaggaagaatcagaagatcctgattattatcaatataacattcaaggaagccaccattcttcagagggcaatgaaggcacagaaatggaagtaccagcagaagatgatgattattctccaccgtctaagagaccaaaggccaatgagctaccgcagccaccagtcccggaacccgccaatgctgggaagcggaaagtgagggagttcaacttcgagaaatggaatgctcgcatcactgatctacgtaaacaagttgaagaattgtttgaaaggaaatatgctcaagccataaaagccaaaggtccggtgacgatcccgtaccctcttttccagtctcatgttgaagatctttatgtagaaggacttcctgaaggaattccttttagaaggccatctacttacggaattcctcgcctggagaggatattacttgcaaaggaaaggattcgttttgtgattaagaaacatgagcttctgaattcaacacgtgaagatttacagcttgataagccagcttcaggagtaaaggaagaatggtatgccagaatcactaaattaagaaagatggtggatcagcttttctgcaaaaaatttgcggaagccttggggagcactgaagccaaggctgtaccgtaccaaaaatttgaggcacacccgaatgatctgtacgtggaaggactgccagaaaacattcctttccgaagtccctcatggtatggaatcccaaggctggaaaaaatcattcaagtgggcaatcgaattaaatttgttattaaaagaccagaacttctgactcacagtaccactgaagttactcagccaagaacgaatacaccagtcaaagaagattggaatgtcagaattaccaagctacggaagcaagtggaagagatttttaatttgaaatttgctcaagctcttggactcaccgaggcagtaaaagtaccatatcctgtgtttgaatcaaacccggagttcttgaaaggatcgtccgcgggagtaataaaatcaagttcgttgttaaaaaacctgaactagttatttcctacttgcctcctgggatggctagtaaaataaacactaaagctttgcagtcccccaaaagaccacgaagtcctgggagtaattcaaaggttcctgaaattgaggtcaccgtggaaggccctaataacaacaatcctcaaacctcagctgttcgaaccccgacccagactaacggttctaacgttcccttcaagccacgagggagagagttttcctttgaggcctggaatgccaaaatcacggacctaaaacagaaagttgaaaatctcttcaatgagaaatgtggggaagctcttggccttaaacaagctgtgaaggtgccgttcgcgttatttgagtctttcccggaagacttttatgtggaaggcttacctgagggtgtgccattccgaagaccatcgacttttggcattccgaggctggagaagatactcagaaacaaagccaaaattaagttcatcattaaaaagcccgaaatgtttgagacggcgattaaggagagcacctcctctaagagccctcccagaaaaataaattcatcacccaatgttaatactactgcatcaggtgttgaagaccttaacatcattcaggtgacaattccagatgatgataatgaaagactctcgaaagttgaaaaagctagacagctaagagaacaagtgaatgacctctttagtcggaaatttggtgaagctattggtatgggttttcctgtgaaagttccctacaggaaaatcacaattaaccctggctgtgtggtggttgatggcatgcccccgggggtgtccttcaaagcccccagctacctggaaatcagctccatgagaaggatcttagactctgccgagtttatcaaattcacggtcattagaccatttccaggacttgtgattaataaccagctggttgatcagagtgagtcagaaggccccgtgatacaagaatcagctgaaccaagccagttggaagttccagccacagaagaaataaaagagactgatggaagctctcagatcaagcaagaaccagaccccacgtggtagacctcttccctcctaggcttaaagtatcagtggttgagaagagcttttcggacctgttactaccccaagctgtagccttgagttacggtgtttattttccaatcaagtgaagatatctcctacttctcctactggaacatctcagcttctgcagtgaagaaaaattcctgtgatagttcagttctttagtttttctatttgaaaaaaaaaaatcatttaaatgatcctttgttcacggctctccttaatgactgagtgaacagttcctatctgtatatttgactaaaccttttcctaagctatctctcatggttcctatgtttttttatcataattaaaagcaaaaccatctggatcacctaacagtcagaggtcagtatctcagcgtgtgaattatagaggaaatacagagagaacctcttccacttttacttttcgtccaaataaaatgcatggtgtaccagaagttgaagatcgggttgaggattggggctagctcgatgacactaaggccccaacatcgcgggacctgctgtggcgcggattcttaggaacgctgttctagccggccccctctccaggggtcgccgtggccggcattatttcctagttcttcttgtaaccctgaggtgccagcgcggggagtgaggaggggtcagggggctaaggatgcaacctctgacgttctgcgccttcctaggagagtcttacatgtgttgagatttcacaagcaatgcgagttgtaaaataccagctctacaagaagctaggctctgtgacggcatagttttcagtagctttatcacaatattcacaatggagaattatatgacatggtagcagaaataggcccttttatgtgttgcttctattttacctcaaattgtagatatagggtaatcaataaaatccatccatgcctttcacacactaagt

SEQ ID NO: 4515 - protein, 584 aa, Homo sapiens; identical to SEQ ID NO: 4173

SEQ ID NO: 4516 - DNA, 7895 bp, Homo sapiens
aaaaaaaaaaaaaaaaaaaaaaaaaaaagaaaaaagaaaaaaaaaaggaggaggaggaggagggtgagagagaagctgggagagcagagaaaaggggccaccggtcgcccccccgcttccccgcacgcgctctccagccgcggccgcccgcctgccgcggtcaccccggcctctgcctctgtcccccagtgatcggatcaaggcgctgagcgaggccctgcctgcggggcggccatgcggcggtgacaggagcgcgaccgacacgcacgggcccctcgccccctctcgcctcccgtccgctcgccagctcccctcagccgaggctgctccgcggcggccgcagcccgcgcgcggcccacactcgcctccccgttgaagatgaggagtcctcggagagcaggatggtggtgacattcctcatgtcagctctcgagtccatgtgtaaagaactggccaagtccaaagccgaagtggcctgcattgcagtgtatgaaacagacgtgtttgtcgtcggaactgaaagaggacgtgcttttgtcaataccagaaaggattttcaaaaagattttgtaaaatattgtgttgaagaagaagaaaaagctgcagagatgcataaaatgaaatctacaacccaggcaaatcggatgagtgtagatgctgtagaaattgaaacactcagaaaaacagttgaggactatttctgcttttgctatgggaaagctttaggcaaatccacagtggtacctgtaccatatgagaagatgctgcgagaccagtcggctgtggtagtgcaggggcttccggaaggtgttgcctttaaacaccccgagaactatgatcttgcaaccctgaaatggattttggagaacaaagcagggatttcattcatcattaagagaccttttttagagccaaagaagcatgtaggtggtcgtgtgatggtaacagatgctgacaggtcaatactatctccaggtggaagttgtggccccatcaaagtgaaaactgaacccacagaagattctggcatttccctggaaatggcagctgtgacagtaaaggaagaatcagaagatcctgattattatcaatataacattcaaggaagccaccattcttcagagggcaatgaaggcacagaaatggaagtaccagcagaagattctactcaacatgtcccttcagaaacaagtgaggaccctgaagttgaggtgactattgaagatgatgattattctccaccgtctaagagaccaaaggccaatgagctaccgcagccaccagtcccggaacccgccaatgctgggaagcggaaagtgagggagttcaacttcgagaaatggaatgctcgcatcactgatctacgtaaacaagttgaagaattgtttgaaaggaaatatgctcaagccataaaagccaaaggtccggtgacgatcccgtaccctcttttccagtctcatgttgaagatctttatgtagaaggacttcctgaaggaattccttttagaaggccatctacttacggaattcctcgcctggagaggatattacttgcaaaggaaaggattcgttttgtgattaagaaacatgagcttctgaattcaacacgtgaagatttacagcttgataagccagcttcaggagtaaaggaagaatggtatgccagaatcactaaattaagaaagatggtggatcagcttttctgcaaaaaatttgcggaagccttggggagcactgaagccaaggctgtaccgtaccaaaaatttgaggcacacccgaatgatctgtacgtggaaggactgccagaaaacattcctttccgaagtccctcatggtatggaatcccaaggctggaaaaaatcattcaagtgggcaatcgaattaaatttgttattaaaagaccagaacttctgactcacagtaccactgaagttactcagccaagaacgaatacaccagtcaaagaagattggaatgtcagaattaccaagctacggaagcaagtggaagagatttttaatttgaaatttgctcaagctcttggactcaccgaggcagtaaaagtaccatatcctgtgtttgaatcaaacccggagttcttgtatgtggaaggcttgccagaggggattcccttccgaagccctacctggtttggaattccacgacttgaaaggatcgtccgcgggagtaataaaatcaagttcgttgttaaaaaacctgaactagttatttcctacttgcctcctgggatggctagtaaaataaacactaaagctttgcagtcccccaaaagaccacgaagtcctgggagtaattcaaaggttcctgaaattgaggtcaccgtggaaggccctaataacaacaatcctcaaacctcagctgttcgaaccccgacccagactaacggttctaacgttcccttcaagccacgagggagagagttttcctttgaggcctggaatgccaaaatcacggacctaaaacagaaagttgaaaatctcttcaatgagaaatgtggggaagctcttggccttaaacaagctgtgaaggtgccgttcgcgttatttgagtctttcccggaagacttttatgtggaaggcttacctgagggtgtgccattccgaagaccatcgacttttggcattccgaggctggagaagatactcagaaacaaagccaaaattaagttcatcattaaaaagcccgaaatgtttgagacggcgattaaggagagcacctcctctaagagccctcccagaaaaataaattcatcacccaatgttaatactactgcatcaggtgttgaagaccttaacatcattcaggtgacaattccagatgatgataatgaaagactctcgaaagttgaaaaagctagacagctaagagaacaagtgaatgacctctttagtcggaaatttggtgaagctattggtatgggttttcctgtgaaagttccctacaggaaaatcacaattaaccctggctgtgtggtggttgatggcatgcccccgggggtgtccttcaaagcccccagctacctggaaatcagctccatgagaaggatcttagactctgccgagtttatcaaattcacggtcattaggtaagtgagagtttcctgcttagtcacaggagcgaatctggagctcatgaggctgactcttctaaaatgcagccacaggtagtcatcgaatccggcttcctatgctgtgcaatcaacaaatcaaaataacttgtgtcatcattagaatgtcagatgtgcttctacgaactaagctgactcttttaattctttggcaaagggttggcaaactaggactgtttgccaaattcaggctgcctcctatttttagagtcttcctgaaacacagctacacccgtattatccatggctgctttcctgtcacagtgagtaagtagctgggactgagaaggcatggcctccaaagtctaaaatatttactctctagcactttgtagaaaaaccttagctaggcacagtggctaacgcctgtaatcccagcattttgggaggccaaggcaggcagatcacctgaggtcaggagttccagaccagcctggccaacatggtgaaatcccatctctacaaaaataaaacagttagctgggcatgatggcgggtgcctgtaatcccagctactcgggaggctgaggcaggatagtcgcttgaacccaggaggtggaggttgcaatgagccaagatcatgccactgcactccagcctggacgacagagtgagactccatcacaagaaaaaaagaactttgtcaacctctgtcttagggcgccttgtcacaggcttcgggtcagacggattcaaccttgcatcagccatttgttagccaggtcactctgttctttgtctgtaaatgagattgatcgttgttcccactgagagtgtcagctccttcccgtagagcaggcatgatgattgtactcacctctgacaccattgtgagtgccacattccttcccacgtccttgtcactgtaagagatgcccacctgagcaccaaccccaggttatcttcccctttgtcttccagccccccagaaacagctacgactcaacctacccaatcatttcatcatcagattgccactgtctctagttcaggtctcttgggactggcactcagaaatctcataataaatcctcttgaggcttctcatacactcgtcttcttccaatcttctttccctcaaaatctcatattttggttccacttcacccaccgtcattctccatatcactcccaggagttaggcaaaaagccccttccgttcttccgtatgttaaacttagaatcactctgttccctgctctgcgtttctattttttgtttttcctccatttactagtagcttaacactttctaacagtgttcttattattgatacgtatctatctcttccataagcttataaggtcacggataatacttctcattgtagtacgtaaatgacgtgggctagatatgagttgaataaacagttatacctgtaaattcttacagagtgaaaataaattgttatactttacaatttgtttctctctttagaccatttccaggacttgtgattaataaccgtgagtattttgtgaagtgttttgtttttgttttttcctggggtctgacgtgtgtgcgtgtgagtgtgtatacatgcttaacgtatatcacgttacttcacctatgtcagtaaccaggccaaatacttgttttagccctcagtaaaaacaccaggcacttcctagttgtaaaattattcaagcttcttaacttcctatcctcgatgcacttaatcataaaatggtaataatagcaccgattttgggggagtcgttccagtagatggaaagcatctggaacaggtgtcagcaagctcctgccgacgtgtatgcataaagttttattgaaaccaccatcgtgtccatttgtttatggcagaactgagagatggcagcagcaagtgtgtgcctgcaaaacctaaaatatttactaattggctctgcaagaaaagagtttgcatccccctaacctagaacagtgtctagcctctagtatgtgtttagcctacagtatgtgctcagcgaatacaatctatatttattactgcttttatgactgttataattactgtgcttggatttcgttacaaagtaagtcacaatgtgcctgcttctgttagtatttcagcacagtgcctggcacacatggggctctcaaatattgctgagcgagtgaacaaatgtcctttcaattccttaacgttgatgtcattttcaatagtattttgagccaaacttaattttgcgagtgtgttttgttttcttaactttattattaaaaatgtataaaagtgaggccaggcgtggtggctcacgcctgtaatcccagcagtttgggaggctgaggcaggcggatcagttgaggttgggagttggagaccagcccgtccaacatggtgaaagcctgtctctactaaaaatacaaaaatcagctgggtgtggtggcgcgtgcctgtaatcccagctactcaggaggctgaggcaggagagttgcttgaatcctagaggtggaggttgcagtgagctgagatcgtgccattgcactccagcctgggcaacaagagcaaaactctgtcccaataaataaataaataaaatgttctcttttgttcctgttcttgtgcggtagtgtggtatagagttttatggtaattactgtgaattagtgattctgagggacatatcagaactctgaggtttgtttccttctcatcttgagggaaacagcaaatgtatgttaaaatgcttttccaagggaacaacacatccttacattatttaaaccaatctgcttcattttcagagctggttgatcagagtgagtcagaaggccccgtgatacaagaatcagctgaaccaagccagttggaagttccagccacagaagaaataaaagagactgatggaagctctcagatcaagcaagaaccagaccccacgtggtagacctcttccctcctagggtaaatcagcttctgtgtcagggatgctgtgtggtgtccatctgaaccccctgcatacgcgtagctaatgtgatctccccactttcacataagatggtggccctgccttcagggaatgtgggagccaggtgggagccttcccggatatttaagctagaagattctacagggagattctccttggatcaatatatgtctctcagtcaaagatgtaaaagcacttttgccttaaaaagaatgttctgtttctaaatagagtcaacgttgtcctcctcattggaattcactatgagtcagaatcattagactgacttttttttttccatagtaatagtattttgcagagtctcacagagctgcagatcttttgttcatcttgcagagttaacaagtctgatcctgttagtccagatttcttaaatttggccaagttataataggagcagtagcttgagacccgaagtcaggaaactttgacaatggatttttttttttaatccagagacttgtactggaatttgccttaccctgtcagctcatggacttaaggtttcatcccgctttatgagtgcttctgaatccaagtcattgttacctgaatttgcaaattaagttgtgatattcgtgactgttaaattcctgtaattagattaacctctttgcttgcttgtttgttttctctcctattttagcttaaagtatcagtggttgagaagagcttttcggacctgttactaccccaagctgtgtaatatacttgtataacagaaataccttctatacaaacctttttttctacttttagatagaaatgtctactttttcagcagttctgtgaattaaagagcagagtgactgtgggtctggaatggctggtgtacttgggaatgtactatcaggattttacagcaatgctgggaaatgacagggaaaatgacaggaatgaatctcaccagattttttatgtactcagcagagccttgagttacggtgtttattttccaatcaagtgaagatatctcctacttctcctactggaacatctcagcttctgcagtgaagaaaaattcctgtgatagttcagttctttagtttttctatttgaaaaaaaaaaatcatttaaatgatcctttgttcacggctctccttaatgactgagtgaacagttcctatctgtatatttgactaaaccttttcctaagctatctctcatggttcctatgtttttttatcataattaaaagcaaaaccatctggatcacctaacagtcagaggtcagtatctcagcgtgtgaattatagaggaaatacagagagaacctcttccacttttacttttcgtccaaataaaatgcatggtgtaccagaagttgaagatcgggttgaggattggggctagctcgatgacactaaggccccaacatcgcgggacctgctgtggcgcggattcttaggaacgctgttctagccggccccctctccaggggtcgccgtggccggcattatttcctagttcttcttgtaaccctgaggtgccagcgcggggagtgaggaggggtcagggggctaaggatgcaacctctgacgttctgcgccttcctaggagagtcttacatgtgttgagatttcacaagcaatgcgagttgtaaaataccagctctacaagaagctaggctctgtgacggcatagttttcagtagctttatcacaatattcacaatggagaattatatgacatggtagcagaaataggcccttttatgtgttgcttctattttacctcaaattgtagatatagggtaatcaataaaatccatccatgcctttcacacactaagt

SEQ ID NO: 4517 - protein, 902 aa, Homo sapiens
MVVTFLMSALESMCKELAKSKAEVACIAVYETDVFVVGTERGRAFVNTRKDFQKDFVKYCVEEEEKAAEMHKMKSTTQANRMSVDAVEIETLRKTVEDYFCFCYGKALGKSTVVPVPYEKMLRDQSAVVVQGLPEGVAFKHPENYDLATLKWILENKAGISFIIKRPFLEPKKHVGGRVMVTDADRSILSPGGSCGPIKVKTEPTEDSGISLEMAAVTVKEESEDPDYYQYNIQGSHHSSEGNEGTEMEVPAEDSTQHVPSETSEDPEVEVTIEDDDYSPPSKRPKANELPQPPVPEPANAGKRKVREFNFEKWNARITDLRKQVEELFERKYAQAIKAKGPVTIPYPLFQSHVEDLYVEGLPEGIPFRRPSTYGIPRLERILLAKERIRFVIKKHELLNSTREDLQLDKPASGVKEEWYARITKLRKMVDQLFCKKFAEALGSTEAKAVPYQKFEAHPNDLYVEGLPENIPFRSPSWYGIPRLEKIIQVGNRIKFVIKRPELLTHSTTEVTQPRTNTPVKEDWNVRITKLRKQVEEIFNLKFAQALGLTEAVKVPYPVFESNPEFLYVEGLPEGIPFRSPTWFGIPRLERIVRGSNKIKFVVKKPELVISYLPPGMASKINTKALQSPKRPRSPGSNSKVPEIEVTVEGPNNNNPQTSAVRTPTQTNGSNVPFKPRGREFSFEAWNAKITDLKQKVENLFNEKCGEALGLKQAVKVPFALFESFPEDFYVEGLPEGVPFRRPSTFGIPRLEKILRNKAKIKFIIKKPEMFETAIKESTSSKSPPRKINSSPNVNTTASGVEDLNIIQVTIPDDDNERLSKVEKARQLREQVNDLFSRKFGEAIGMGFPVKVPYRKITINPGCVVVDGMPPGVSFKAPSYLEISSMRRILDSAEFIKFTVIR

SEQ ID NO: 4518 - DNA, 5211 bp, Homo sapiens
aaaaaaaaaaaaaaaaaaaaaaaaaaaagaaaaaagaaaaaaaaaaggaggaggaggaggagggtgagagagaagctgggagagcagagaaaaggggccaccggtcgcccccccgcttccccgcacgcgctctccagccgcggccgcccgcctgccgcggtcaccccggcctctgcctctgtcccccagtgatcggatcaaggcgctgagcgaggccctgcctgcggggcggccatgcggcggtgacaggagcgcgaccgacacgcacgggcccctcgccccctctcgcctcccgtccgctcgccagctcccctcagccgaggctgctccgcggcggccgcagcccgcgcgcggcccacactcgcctcccctcggcacccccggccccggagctgcctggaggcggccgcactcggggatcatggcccaagttgcaatgtccaccctccccgttgaagatgaggagtcctcggagagcaggatggtggtgacattcctcatgtcagctctcgagtccatgtgtaaagaactggccaagtccaaagccgaagtggcctgcattgcagtgtatgaaacagacgtgtttgtcgtcggaactgaaagaggacgtgcttttgtcaataccagaaaggattttcaaaaagattttgtaaaatattgtgttgaagaagaagaaaaagctgcagagatgcataaaatgaaatctacaacccaggcaaatcggatgagtgtagatgctgtagaaattgaaacactcagaaaaacagttgaggactatttctgcttttgctatgggaaagctttaggcaaatccacagtggtacctgtaccatatgagaagatgctgcgagaccagtcggctgtggtagtgcaggggcttccggaaggtgttgcctttaaacaccccgagaactatgatcttgcaaccctgaaatggattttggagaacaaagcagggatttcattcatcattaagagaccttttttagagccaaagaagcatgtaggtggtcgtgtgatggtaacagatgctgacaggtcaatactatctccaggtggaagttgtggccccatcaaagtgaaaactgaacccacagaagattctggcatttccctggaaatggcagctgtgacagtaaaggaagaatcagaagatcctgattattatcaatataacattcaagcaggcccttctgaaactgatgatgttgatgaaaaacagcccctatcgaagcctttgcaaggaagccaccattcttcagagggcaatgaaggcacagaaatggaagtaccagcagaagatgatgattattctccaccgtctaagagaccaaaggccaatgagctaccgcagccaccagtcccggaacccgccaatgctgggaagcggaaagtgagggagttcaacttcgagaaatggaatgctcgcatcactgatctacgtaaacaagttgaagaattgtttgaaaggaaatatgctcaagccataaaagccaaaggtccggtgacgatcccgtaccctcttttccagtctcatgttgaagatctttatgtagaaggacttcctgaaggaattccttttagaaggccatctacttacggaattcctcgcctggagaggatattacttgcaaaggaaaggattcgttttgtgattaagaaacatgagcttctgaattcaacacgtgaagatttacagcttgataagccagcttcaggagtaaaggaagaatggtatgccagaatcactaaattaagaaagatggtggatcagcttttctgcaaaaaatttgcggaagccttggggagcactgaagccaaggctgtaccgtaccaaaaatttgaggcacacccgaatgatctgtacgtggaaggactgccagaaaacattcctttccgaagtccctcatggtatggaatcccaaggctggaaaaaatcattcaagtgggcaatcgaattaaatttgttattaaaagaccagaacttctgactcacagtaccactgaagttactcagccaagaacgaatacaccagtcaaagaagattggaatgtcagaattaccaagctacggaagcaagtggaagagatttttaatttgaaatttgctcaagctcttggactcaccgaggcagtaaaagtaccatatcctgtgtttgaatcaaacccggagttcttgtatgtggaaggcttgccagaggggattcccttccgaagccctacctggtttggaattccacgacttgaaaggatcgtccgcgggagtaataaaatcaagttcgttgttaaaaaacctgaactagttatttcctacttgcctcctgggatggctagtaaaataaacactaaagctttgcagtcccccaaaagaccacgaagtcctgggagtaattcaaaggttcctgaaattgaggtcaccgtggaaggccctaataacaacaatcctcaaacctcagctgttcgaaccccgacccagactaacggttctaacgttcccttcaagccacgagggagagagttttcctttgaggcctggaatgccaaaatcacggacctaaaacagaaagttgaaaatctcttcaatgagaaatgtggggaagctcttggccttaaacaagctgtgaaggtgccgttcgcgttatttgagtctttcccggaagacttttatgtggaaggcttacctgagggtgtgccattccgaagaccatcgacttttggcattccgaggctggagaagatactcagaaacaaagccaaaattaagttcatcattaaaaagcccgaaatgtttgagacggcgattaaggagagcacctcctctaagagccctcccagaaaaataaattcatcacccaatgttaatactactgcatcaggtgttgaagaccttaacatcattcaggtgacaattccagatgatgataatgaaagactctcgaaagttgaaaaagctagacagctaagagaacaagtgaatgacctctttagtcggaaatttggtgaagctattggtatgggttttcctgtgaaagttccctacaggaaaatcacaattaaccctggctgtgtggtggttgatggcatgcccccgggggtgtccttcaaagcccccagctacctggaaatcagctccatgagaaggatcttagactctgccgagtttatcaaattcacggtcattagaccatttccaggacttgtgattaataaccagctggttgatcagagtgagtcagaaggccccgtgatacaagaatcagctgaaccaagccagttggaagttccagccacagaagaaataaaagagactgatggaagctctcagatcaagcaagaaccagaccccacgtggtagacctcttccctcctagggtaaatcagcttctgtgtcagggatgctgtgtggtgtccatctgaaccccctgcatacgcgtagctaatgtgatctccccactttcacataagatggtggccctgccttcagggaatgtgggagccaggtgggagccttcccggatatttaagctagaagattctacagggagattctccttggatcaatatatgtctctcagtcaaagatgtaaaagcacttttgccttaaaaagaatgttctgtttctaaatagagtcaacgttgtcctcctcattggaattcactatgagtcagaatcattagactgacttttttttttccatagtaatagtattttgcagagtctcacagagctgcagatcttttgttcatcttgcagagttaacaagtctgatcctgttagtccagatttcttaaatttggccaagttataataggagcagtagcttgagacccgaagtcaggaaactttgacaatggatttttttttttaatccagagacttgtactggaatttgccttaccctgtcagctcatggacttaaggtttcatcccgctttatgagtgcttctgaatccaagtcattgttacctgaatttgcaaattaagttgtgatattcgtgactgttaaattcctgtaattagattaacctctttgcttgcttgtttgttttctctcctattttagcttaaagtatcagtggttgagaagagcttttcggacctgttactaccccaagctgtgtaatatacttgtataacagaaataccttctatacaaacctttttttctacttttagatagaaatgtctactttttcagcagttctgtgaattaaagagcagagtgactgtgggtctggaatggctggtgtacttgggaatgtactatcaggattttacagcaatgctgggaaatgacagggaaaatgacaggaatgaatctcaccagattttttatgtactcagcagagccttgagttacggtgtttattttccaatcaagtgaagatatctcctacttctcctactggaacatctcagcttctgcagtgaagaaaaattcctgtgatagttcagttctttagtttttctatttgaaaaaaaaaaatcatttaaatgatcctttgttcacggctctccttaatgactgagtgaacagttcctatctgtatatttgactaaaccttttcctaagctatctctcatggttcctatgtttttttatcataattaaaagcaaaaccatctggatcacctaacagtcagaggtcagtatctcagcgtgtgaattatagaggaaatacagagagaacctcttccacttttacttttcgtccaaataaaatgcatggtgtaccagaagttgaagatcgggttgaggattggggctagctcgatgacactaaggccccaacatcgcgggacctgctgtggcgcggattcttaggaacgctgttctagccggccccctctccaggggtcgccgtggccggcattatttcctagttcttcttgtaaccctgaggtgccagcgcggggagtgaggaggggtcagggggctaaggatgcaacctctgacgttctgcgccttcctaggagagtcttacatgtgttgagatttcacaagcaatgcgagttgtaaaataccagctctacaagaagctaggctctgtgacggcatagttttcagtagctttatcacaatattcacaatggagaattatatgacatggtagcagaaataggcccttttatgtgttgcttctattttacctcaaattgtagatatagggtaatcaataaaatccatccatgcctttcacacactaagt

SEQ ID NO: 4519 - protein, 977 aa, Homo sapiens; identical to SEQ ID NO: 472

SEQ ID NO: 4520 - DNA, 7203 bp, Homo sapiens
aaaaaaaaaaaaaaaaaaaaaaaaaaaagaaaaaagaaaaaaaaaaggaggaggaggaggagggtgagagagaagctgggagagcagagaaaaggggccaccggtcgcccccccgcttccccgcacgcgctctccagccgcggccgcccgcctgccgcggtcaccccggcctctgcctctgtcccccagtgatcggatcaaggcgctgagcgaggccctgcctgcggggcggccatgcggcggtgacaggagcgcgaccgacacgcacgggcccctcgccccctctcgcctcccgtccgctcgccagctcccctcagccgaggctgctccgcggcggccgcagcccgcgcgcggcccacactcgcctccccgttgaagatgaggagtcctcggagagcaggatggtggtgacattcctcatgtcagctctcgagtccatgtgtaaagaactggccaagtccaaagccgaagtggcctgcattgcagtgtatgaaacagacgtgtttgtcgtcggaactgaaagaggacgtgcttttgtcaataccagaaaggattttcaaaaagattttgtaaaatattgtgttgaagaagaagaaaaagctgcagagatgcataaaatgaaatctacaacccaggcaaatcggatgagtgtagatgctgtagaaattgaaacactcagaaaaacagttgaggactatttctgcttttgctatgggaaagctttaggcaaatccacagtggtacctgtaccatatgagaagatgctgcgagaccagtcggctgtggtagtgcaggggcttccggaaggtgttgcctttaaacaccccgagaactatgatcttgcaaccctgaaatggattttggagaacaaagcagggatttcattcatcattaagagaccttttttagagccaaagaagcatgtaggtggtcgtgtgatggtaacagatgctgacaggtcaatactatctccaggtggaagttgtggccccatcaaagtgaaaactgaacccacagaagattctggcatttccctggaaatggcagctgtgacagtaaaggaagaatcagaagatcctgattattatcaatataacattcaaggaagccaccattcttcagagggcaatgaaggcacagaaatggaagtaccagcagaagattctactcaacatgtcccttcagaaacaagtgaggaccctgaagttgaggtgactattgaagatgatgattattctccaccgtctaagagaccaaaggccaatgagctaccgcagccaccagtcccggaacccgccaatgctgggaagcggaaagtgagggagttcaacttcgagaaatggaatgctcgcatcactgatctacgtaaacaagttgaagaattgtttgaaaggaaatatgctcaagccataaaagccaaaggtccggtgacgatcccgtaccctcttttccagtctcatgttgaagatctttatgtagaaggacttcctgaaggaattccttttagaaggccatctacttacggaattcctcgcctggagaggatattacttgcaaaggaaaggattcgttttgtgattaagaaacatgagcttctgaattcaacacgtgaagatttacagcttgataagccagcttcaggagtaaaggaagaatggtatgccagaatcactaaattaagaaagatggtggatcagcttttctgcaaaaaatttgcggaagccttggggagcactgaagccaaggctgtaccgtaccaaaaatttgaggcacacccgaatgatctgtacgtggaaggactgccagaaaacattcctttccgaagtccctcatggtatggaatcccaaggctggaaaaaatcattcaagtgggcaatcgaattaaatttgttattaaaagaccagaacttctgactcacagtaccactgaagttactcagccaagaacgaatacaccagtcaaagaagattggaatgtcagaattaccaagctacggaagcaagtggaagagatttttaatttgaaatttgctcaagctcttggactcaccgaggcagtaaaagtaccatatcctgtgtttgaatcaaacccggagttcttgtatgtggaaggcttgccagaggggattcccttccgaagccctacctggtttggaattccacgacttgaaaggatcgtccgcgggagtaataaaatcaagttcgttgttaaaaaacctgaactagttatttcctacttgcctcctgggatggctagtaaaataaacactaaagctttgcagtcccccaaaagaccacgaagtcctgggagtaattcaaaggttcctgaaattgaggtcaccgtggaaggccctaataacaacaatcctcaaacctcagctgttcgaaccccgacccagactaacggttctaacgttcccttcaagccacgagggagagagttttcctttgaggcctggaatgccaaaatcacggacctaaaacagaaagttgaaaatctcttcaatgagaaatgtggggaagctcttggccttaaacaagctgtgaaggtgccgttcgcgttatttgagtctttcccggaagacttttatgtggaaggcttacctgagggtgtgccattccgaagaccatcgacttttggcattccgaggctggagaagatactcagaaacaaagccaaaattaagttcatcattaaaaagcccgaaatgtttgagacggcgattaaggagagcacctcctctaagagccctcccagaaaaataaattcatcacccaatgttaatactactgcatcaggtgttgaagaccttaacatcattcaggtgacaattccagatgatgataatgaaagactctcgaaagttgaaaaagctagacagctaagagaacaagtgaatgacctctttagtcggaaatttggtgaagctattggtatgggttttcctgtgaaagttccctacaggaaaatcacaattaaccctggctgtgtggtggttgatggcatgcccccgggggtgtccttcaaagcccccagctacctggaaatcagctccatgagaaggatcttagactctgccgagtttatcaaattcacggtcattaggtaagtgagagtttcctgcttagtcacaggagcgaatctggagctcatgaggctgactcttctaaaatgcagccacaggtagtcatcgaatccggcttcctatgctgtgcaatcaacaaatcaaaataacttgtgtcatcattagaatgtcagatgtgcttctacgaactaagctgactcttttaattctttggcaaagggttggcaaactaggactgtttgccaaattcaggctgcctcctatttttagagtcttcctgaaacacagctacacccgtattatccatggctgctttcctgtcacagtgagtaagtagctgggactgagaaggcatggcctccaaagtctaaaatatttactctctagcactttgtagaaaaaccttagctaggcacagtggctaacgcctgtaatcccagcattttgggaggccaaggcaggcagatcacctgaggtcaggagttccagaccagcctggccaacatggtgaaatcccatctctacaaaaataaaacagttagctgggcatgatggcgggtgcctgtaatcccagctactcgggaggctgaggcaggatagtcgcttgaacccaggaggtggaggttgcaatgagccaagatcatgccactgcactccagcctggacgacagagtgagactccatcacaagaaaaaaagaactttgtcaacctctgtcttagggcgccttgtcacaggcttcgggtcagacggattcaaccttgcatcagccatttgttagccaggtcactctgttctttgtctgtaaatgagattgatcgttgttcccactgagagtgtcagctccttcccgtagagcaggcatgatgattgtactcacctctgacaccattgtgagtgccacattccttcccacgtccttgtcactgtaagagatgcccacctgagcaccaaccccaggttatcttcccctttgtcttccagccccccagaaacagctacgactcaacctacccaatcatttcatcatcagattgccactgtctctagttcaggtctcttgggactggcactcagaaatctcataataaatcctcttgaggcttctcatacactcgtcttcttccaatcttctttccctcaaaatctcatattttggttccacttcacccaccgtcattctccatatcactcccaggagttaggcaaaaagccccttccgttcttccgtatgttaaacttagaatcactctgttccctgctctgcgtttctattttttgtttttcctccatttactagtagcttaacactttctaacagtgttcttattattgatacgtatctatctcttccataagcttataaggtcacggataatacttctcattgtagtacgtaaatgacgtgggctagatatgagttgaataaacagttatacctgtaaattcttacagagtgaaaataaattgttatactttacaatttgtttctctctttagaccatttccaggacttgtgattaataaccgtgagtattttgtgaagtgttttgtttttgttttttcctggggtctgacgtgtgtgcgtgtgagtgtgtatacatgcttaacgtatatcacgttacttcacctatgtcagtaaccaggccaaatacttgttttagccctcagtaaaaacaccaggcacttcctagttgtaaaattattcaagcttcttaacttcctatcctcgatgcacttaatcataaaatggtaataatagcaccgattttgggggagtcgttccagtagatggaaagcatctggaacaggtgtcagcaagctcctgccgacgtgtatgcataaagttttattgaaaccaccatcgtgtccatttgtttatggcagaactgagagatggcagcagcaagtgtgtgcctgcaaaacctaaaatatttactaattggctctgcaagaaaagagtttgcatccccctaacctagaacagtgtctagcctctagtatgtgtttagcctacagtatgtgctcagcgaatacaatctatatttattactgcttttatgactgttataattactgtgcttggatttcgttacaaagtaagtcacaatgtgcctgcttctgttagtatttcagcacagtgcctggcacacatggggctctcaaatattgctgagcgagtgaacaaatgtcctttcaattccttaacgttgatgtcattttcaatagtattttgagccaaacttaattttgcgagtgtgttttgttttcttaactttattattaaaaatgtataaaagtgaggccaggcgtggtggctcacgcctgtaatcccagcagtttgggaggctgaggcaggcggatcagttgaggttgggagttggagaccagcccgtccaacatggtgaaagcctgtctctactaaaaatacaaaaatcagctgggtgtggtggcgcgtgcctgtaatcccagctactcaggaggctgaggcaggagagttgcttgaatcctagaggtggaggttgcagtgagctgagatcgtgccattgcactccagcctgggcaacaagagcaaaactctgtcccaataaataaataaataaaatgttctcttttgttcctgttcttgtgcggtagtgtggtatagagttttatggtaattactgtgaattagtgattctgagggacatatcagaactctgaggtttgtttccttctcatcttgagggaaacagcaaatgtatgttaaaatgcttttccaagggaacaacacatccttacattatttaaaccaatctgcttcattttcagagctggttgatcagagtgagtcagaaggccccgtgatacaagaatcagctgaaccaagccagttggaagttccagccacagaagaaataaaagagactgatggaagctctcagatcaagcaagaaccagaccccacgtggtagacctcttccctcctaggcttaaagtatcagtggttgagaagagcttttcggacctgttactaccccaagctgtgtaatatacttgtataacagaaataccttctatacaaacctttttttctacttttagatagaaatgtctactttttcagcagttctgtgaattaaagagcagagtgactgtgggtctggaatggctggtgtacttgggaatgtactatcaggattttacagcaatgctgggaaatgacagggaaaatgacaggaatgaatctcaccagattttttatgtactcagcagagccttgagttacggtgtttattttccaatcaagtgaagatatctcctacttctcctactggaacatctcagcttctgcagtgaagaaaaattcctgtgatagttcagttctttagtttttctatttgaaaaaaaaaaatcatttaaatgatcctttgttcacggctctccttaatgactgagtgaacagttcctatctgtatatttgactaaaccttttcctaagctatctctcatggttcctatgtttttttatcataattaaaagcaaaaccatctggatcacctaacagtcagaggtcagtatctcagcgtgtgaattatagaggaaatacagagagaacctcttccacttttacttttcgtccaaataaaatgcatggtgtaccagaagttgaagatcgggttgaggattggggctagctcgatgacactaaggccccaacatcgcgggacctgctgtggcgcggattcttaggaacgctgttctagccggccccctctccaggggtcgccgtggccggcattatttcctagttcttcttgtaaccctgaggtgccagcgcggggagtgaggaggggtcagggggctaaggatgcaacctctgacgttctgcgccttcctaggagagtcttacatgtgttgagatttcacaagcaatgcgagttgtaaaataccagctctacaagaagctaggctctgtgacggcatagttttcagtagctttatcacaatattcacaatggagaattatatgacatggtagcagaaataggcccttttatgtgttgcttctattttacctcaaattgtagatatagggtaatcaataaaatccatccatgcctttcacacactaagt

SEQ ID NO: 4521 - protein, 902 aa, Homo sapiens; identical to SEQ ID NO: 4517

SEQ ID NO: 4522 - DNA, 3823 bp, Homo sapiens
aaaaaaaaaaaaaaaaaaaaaaaaaaaagaaaaaagaaaaaaaaaaggaggaggaggaggagggtgagagagaagctgggagagcagagaaaaggggccaccggtcgcccccccgcttccccgcacgcgctctccagccgcggccgcccgcctgccgcggtcaccccggcctctgcctctgtcccccagtgatcggatcaaggcgctgagcgaggccctgcctgcggggcggccatgcggcggtgacaggagcgcgaccgacacgcacgggcccctcgccccctctcgcctcccgtccgctcgccagctcccctcagccgaggctgctccgcggcggccgcagcccgcgcgcggcccacactcgcctccccgttgaagatgaggagtcctcggagagcaggatggtggtgacattcctcatgtcagctctcgagtccatgtgtaaagaactggccaagtccaaagccgaagtggcctgcattgcagtgtatgaaacagacgtgtttgtcgtcggaactgaaagaggacgtgcttttgtcaataccagaaaggattttcaaaaagattttgtaaaatattgtgttgaagaagaagaaaaagctgcagagatgcataaaatgaaatctacaacccaggcaaatcggatgagtgtagatgctgtagaaattgaaacactcagaaaaacagttgaggactatttctgcttttgctatgggaaagctttaggcaaatccacagtggtacctgtaccatatgagaagatgctgcgagaccagtcggctgtggtagtgcaggggcttccggaaggtgttgcctttaaacaccccgagaactatgatcttgcaaccctgaaatggattttggagaacaaagcagggatttcattcatcattaagagaccttttttagagccaaagaagcatgtaggtggtcgtgtgatggtaacagatgctgacaggtcaatactatctccaggtggaagttgtggccccatcaaagtgaaaactgaacccacagaagattctggcatttccctggaaatggcagctgtgacagtaaaggaagaatcagaagatcctgattattatcaatataacattcaaggaagccaccattcttcagagggcaatgaaggcacagaaatggaagtaccagcagaagattctactcaacatgtcccttcagaaacaagtgaggaccctgaagttgaggtgactattgaagatgatgattattctccaccgtctaagagaccaaaggccaatgagctaccgcagccaccagtcccggaacccgccaatgctgggaagcggaaagtgagggagttcaacttcgagaaatggaatgctcgcatcactgatctacgtaaacaagttgaagaattgtttgaaaggaaatatgctcaagccataaaagccaaaggtccggtgacgatcccgtaccctcttttccagtctcatgttgaagatctttatgtagaaggacttcctgaaggaattccttttagaaggccatctacttacggaattcctcgcctggagaggatattacttgcaaaggaaaggattcgttttgtgattaagaaacatgagcttctgaattcaacacgtgaagatttacagcttgataagccagcttcaggagtaaaggaagaatggtatgccagaatcactaaattaagaaagatggtggatcagcttttctgcaaaaaatttgcggaagccttggggagcactgaagccaaggctgtaccgtaccaaaaatttgaggcacacccgaatgatctgtacgtggaaggactgccagaaaacattcctttccgaagtccctcatggtatggaatcccaaggctggaaaaaatcattcaagtgggcaatcgaattaaatttgttattaaaagaccagaacttctgactcacagtaccactgaagttactcagccaagaacgaatacaccagtcaaagaagattggaatgtcagaattaccaagctacggaagcaagtggaagagatttttaatttgaaatttgctcaagctcttggactcaccgaggcagtaaaagtaccatatcctgtgtttgaatcaaacccggagttcttgaaaggatcgtccgcgggagtaataaaatcaagttcgttgttaaaaaacctgaactagttatttcctacttgcctcctgggatggctagtaaaataaacactaaagctttgcagtcccccaaaagaccacgaagtcctgggagtaattcaaaggttcctgaaattgaggtcaccgtggaaggccctaataacaacaatcctcaaacctcagctgttcgaaccccgacccagactaacggttctaacgttcccttcaagccacgagggagagagttttcctttgaggcctggaatgccaaaatcacggacctaaaacagaaagttgaaaatctcttcaatgagaaatgtggggaagctcttggccttaaacaagctgtgaaggtgccgttcgcgttatttgagtctttcccggaagacttttatgtggaaggcttacctgagggtgtgccattccgaagaccatcgacttttggcattccgaggctggagaagatactcagaaacaaagccaaaattaagttcatcattaaaaagcccgaaatgtttgagacggcgattaaggagagcacctcctctaagagccctcccagaaaaataaattcatcacccaatgttaatactactgcatcaggtgttgaagaccttaacatcattcaggtgacaattccagatgatgataatgaaagactctcgaaagttgaaaaagctagacagctaagagaacaagtgaatgacctctttagtcggaaatttggtgaagctattggtatgggttttcctgtgaaagttccctacaggaaaatcacaattaaccctggctgtgtggtggttgatggcatgcccccgggggtgtccttcaaagcccccagctacctggaaatcagctccatgagaaggatcttagactctgccgagtttatcaaattcacggtcattagaccatttccaggacttgtgattaataaccagctggttgatcagagtgagtcagaaggccccgtgatacaagaatcagctgaaccaagccagttggaagttccagccacagaagaaataaaagagactgatggaagctctcagatcaagcaagaaccagaccccacgtggtagacctcttccctcctaggcaaaaccatctggatcacctaacagtcagaggtcagtatctcagcgtgtgaattatagaggaaatacagagagaacctcttccacttttacttttcgtccaaataaaatgcatggtgtaccagaagttgaagatcgggttgaggattggggctagctcgatgacactaaggccccaacatcgcgggacctgctgtggcgcggattcttaggaacgctgttctagccggccccctctccaggggtcgccgtggccggcattatttcctagttcttcttgtaaccctgaggtgccagcgcggggagtgaggaggggtcagggggctaaggatgcaacctctgacgttctgcgccttcctaggagagtcttacatgtgttgagatttcacaagcaatgcgagttgtaaaataccagctctacaagaagctaggctctgtgacggcatagttttcagtagctttatcacaatattcacaatggagaattatatgacatggtagcagaaataggcccttttatgtgttgcttctattttacctcaaattgtagatatagggtaatcaataaaatccatccatgcctttcacacactaagt

SEQ ID NO: 4523 - protein, 585 aa, Homo sapiens; identical to SEQ ID NO: 4199

SEQ ID NO: 4524 - DNA, 7148 bp, Homo sapiens
aaaaaaaaaaaaaaaaaaaaaaaaaaaagaaaaaagaaaaaaaaaaggaggaggaggaggagggtgagagagaagctgggagagcagagaaaaggggccaccggtcgcccccccgcttccccgcacgcgctctccagccgcggccgcccgcctgccgcggtcaccccggcctctgcctctgtcccccagtgatcggatcaaggcgctgagcgaggccctgcctgcggggcggccatgcggcggtgacaggagcgcgaccgacacgcacgggcccctcgccccctctcgcctcccgtccgctcgccagctcccctcagccgaggctgctccgcggcggccgcagcccgcgcgcggcccacactcgcctcccctcggcacccccggccccggagctgcctggaggcggccgcactcggggatcatggcccaagttgcaatgtccaccctccccgttgaagatgaggagtcctcggagagcaggatggtggtgacattcctcatgtcagctctcgagtccatgtgtaaagaactggccaagtccaaagccgaagtggcctgcattgcagtgtatgaaacagacgtgtttgtcgtcggaactgaaagaggacgtgcttttgtcaataccagaaaggattttcaaaaagattttgtaaaatattgtgttgaagaagaagaaaaagctgcagagatgcataaaatgaaatctacaacccaggcaaatcggatgagtgtagatgctgtagaaattgaaacactcagaaaaacagttgaggactatttctgcttttgctatgggaaagctttaggcaaatccacagtggtacctgtaccatatgagaagatgctgcgagaccagtcggctgtggtagtgcaggggcttccggaaggtgttgcctttaaacaccccgagaactatgatcttgcaaccctgaaatggattttggagaacaaagcagggatttcattcatcattaagagaccttttttagagccaaagaagcatgtaggtggtcgtgtgatggtaacagatgctgacaggtcaatactatctccaggtggaagttgtggccccatcaaagtgaaaactgaacccacagaagattctggcatttccctggaaatggcagctgtgacagtaaaggaagaatcagaagatcctgattattatcaatataacattcaaggaagccaccattcttcagagggcaatgaaggcacagaaatggaagtaccagcagaagatgatgattattctccaccgtctaagagaccaaaggccaatgagctaccgcagccaccagtcccggaacccgccaatgctgggaagcggaaagtgagggagttcaacttcgagaaatggaatgctcgcatcactgatctacgtaaacaagttgaagaattgtttgaaaggaaatatgctcaagccataaaagccaaaggtccggtgacgatcccgtaccctcttttccagtctcatgttgaagatctttatgtagaaggacttcctgaaggaattccttttagaaggccatctacttacggaattcctcgcctggagaggatattacttgcaaaggaaaggattcgttttgtgattaagaaacatgagcttctgaattcaacacgtgaagatttacagcttgataagccagcttcaggagtaaaggaagaatggtatgccagaatcactaaattaagaaagatggtggatcagcttttctgcaaaaaatttgcggaagccttggggagcactgaagccaaggctgtaccgtaccaaaaatttgaggcacacccgaatgatctgtacgtggaaggactgccagaaaacattcctttccgaagtccctcatggtatggaatcccaaggctggaaaaaatcattcaagtgggcaatcgaattaaatttgttattaaaagaccagaacttctgactcacagtaccactgaagttactcagccaagaacgaatacaccagctcaagctcttggactcaccgaggcagtaaaagtaccatatcctgtgtttgaatcaaacccggagttcttgtatgtggaaggcttgccagaggggattcccttccgaagccctacctggtttggaattccacgacttgaaaggatcgtccgcgggagtaataaaatcaagttcgttgttaaaaaacctgaactagttatttcctacttgcctcctgggatggctagtaaaataaacactaaagctttgcagtcccccaaaagaccacgaagtcctgggagtaattcaaaggttcctgaaattgaggtcaccgtggaaggccctaataacaacaatcctcaaacctcagctgttcgaaccccgacccagactaacggttctaacgttcccttcaagccacgagggagagagttttcctttgaggcctggaatgccaaaatcacggacctaaaacagaaagttgaaaatctcttcaatgagaaatgtggggaagctcttggccttaaacaagctgtgaaggtgccgttcgcgttatttgagtctttcccggaagacttttatgtggaaggcttacctgagggtgtgccattccgaagaccatcgacttttggcattccgaggctggagaagatactcagaaacaaagccaaaattaagttcatcattaaaaagcccgaaatgtttgagacggcgattaaggagagcacctcctctaagagccctcccagaaaaataaattcatcacccaatgttaatactactgcatcaggtgttgaagaccttaacatcattcaggtgacaattccagatgatgataatgaaagactctcgaaagttgaaaaagctagacagctaagagaacaagtgaatgacctctttagtcggaaatttggtgaagctattggtatgggttttcctgtgaaagttccctacaggaaaatcacaattaaccctggctgtgtggtggttgatggcatgcccccgggggtgtccttcaaagcccccagctacctggaaatcagctccatgagaaggatcttagactctgccgagtttatcaaattcacggtcattaggtaagtgagagtttcctgcttagtcacaggagcgaatctggagctcatgaggctgactcttctaaaatgcagccacaggtagtcatcgaatccggcttcctatgctgtgcaatcaacaaatcaaaataacttgtgtcatcattagaatgtcagatgtgcttctacgaactaagctgactcttttaattctttggcaaagggttggcaaactaggactgtttgccaaattcaggctgcctcctatttttagagtcttcctgaaacacagctacacccgtattatccatggctgctttcctgtcacagtgagtaagtagctgggactgagaaggcatggcctccaaagtctaaaatatttactctctagcactttgtagaaaaaccttagctaggcacagtggctaacgcctgtaatcccagcattttgggaggccaaggcaggcagatcacctgaggtcaggagttccagaccagcctggccaacatggtgaaatcccatctctacaaaaataaaacagttagctgggcatgatggcgggtgcctgtaatcccagctactcgggaggctgaggcaggatagtcgcttgaacccaggaggtggaggttgcaatgagccaagatcatgccactgcactccagcctggacgacagagtgagactccatcacaagaaaaaaagaactttgtcaacctctgtcttagggcgccttgtcacaggcttcgggtcagacggattcaaccttgcatcagccatttgttagccaggtcactctgttctttgtctgtaaatgagattgatcgttgttcccactgagagtgtcagctccttcccgtagagcaggcatgatgattgtactcacctctgacaccattgtgagtgccacattccttcccacgtccttgtcactgtaagagatgcccacctgagcaccaaccccaggttatcttcccctttgtcttccagccccccagaaacagctacgactcaacctacccaatcatttcatcatcagattgccactgtctctagttcaggtctcttgggactggcactcagaaatctcataataaatcctcttgaggcttctcatacactcgtcttcttccaatcttctttccctcaaaatctcatattttggttccacttcacccaccgtcattctccatatcactcccaggagttaggcaaaaagccccttccgttcttccgtatgttaaacttagaatcactctgttccctgctctgcgtttctattttttgtttttcctccatttactagtagcttaacactttctaacagtgttcttattattgatacgtatctatctcttccataagcttataaggtcacggataatacttctcattgtagtacgtaaatgacgtgggctagatatgagttgaataaacagttatacctgtaaattcttacagagtgaaaataaattgttatactttacaatttgtttctctctttagaccatttccaggacttgtgattaataaccgtgagtattttgtgaagtgttttgtttttgttttttcctggggtctgacgtgtgtgcgtgtgagtgtgtatacatgcttaacgtatatcacgttacttcacctatgtcagtaaccaggccaaatacttgttttagccctcagtaaaaacaccaggcacttcctagttgtaaaattattcaagcttcttaacttcctatcctcgatgcacttaatcataaaatggtaataatagcaccgattttgggggagtcgttccagtagatggaaagcatctggaacaggtgtcagcaagctcctgccgacgtgtatgcataaagttttattgaaaccaccatcgtgtccatttgtttatggcagaactgagagatggcagcagcaagtgtgtgcctgcaaaacctaaaatatttactaattggctctgcaagaaaagagtttgcatccccctaacctagaacagtgtctagcctctagtatgtgtttagcctacagtatgtgctcagcgaatacaatctatatttattactgcttttatgactgttataattactgtgcttggatttcgttacaaagtaagtcacaatgtgcctgcttctgttagtatttcagcacagtgcctggcacacatggggctctcaaatattgctgagcgagtgaacaaatgtcctttcaattccttaacgttgatgtcattttcaatagtattttgagccaaacttaattttgcgagtgtgttttgttttcttaactttattattaaaaatgtataaaagtgaggccaggcgtggtggctcacgcctgtaatcccagcagtttgggaggctgaggcaggcggatcagttgaggttgggagttggagaccagcccgtccaacatggtgaaagcctgtctctactaaaaatacaaaaatcagctgggtgtggtggcgcgtgcctgtaatcccagctactcaggaggctgaggcaggagagttgcttgaatcctagaggtggaggttgcagtgagctgagatcgtgccattgcactccagcctgggcaacaagagcaaaactctgtcccaataaataaataaataaaatgttctcttttgttcctgttcttgtgcggtagtgtggtatagagttttatggtaattactgtgaattagtgattctgagggacatatcagaactctgaggtttgtttccttctcatcttgagggaaacagcaaatgtatgttaaaatgcttttccaagggaacaacacatccttacattatttaaaccaatctgcttcattttcagagctggttgatcagagtgagtcagaaggccccgtgatacaagaatcagctgaaccaagccagttggaagttccagccacagaagaaataaaagagactgatggaagctctcagatcaagcaagaaccagaccccacgtggtagacctcttccctcctaggcttaaagtatcagtggttgagaagagcttttcggacctgttactaccccaagctgtgtaatatacttgtataacagaaataccttctatacaaacctttttttctacttttagatagaaatgtctactttttcagcagttctgtgaattaaagagcagagtgactgtgggtctggaatggctggtgtacttgggaatgtactatcaggattttacagcaatgctgggaaatgacagggaaaatgacaggaatgaatctcaccagattttttatgtactcagcagagccttgagttacggtgtttattttccaatcaagtgaagatatctcctacttctcctactggaacatctcagcttctgcagtgaagaaaaattcctgtgatagttcagttctttagtttttctatttgaaaaaaaaaaatcatttaaatgatcctttgttcacggctctccttaatgactgagtgaacagttcctatctgtatatttgactaaaccttttcctaagctatctctcatggttcctatgtttttttatcataattaaaagcaaaaccatctggatcacctaacagtcagaggtcagtatctcagcgtgtgaattatagaggaaatacagagagaacctcttccacttttacttttcgtccaaataaaatgcatggtgtaccagaagttgaagatcgggttgaggattggggctagctcgatgacactaaggccccaacatcgcgggacctgctgtggcgcggattcttaggaacgctgttctagccggccccctctccaggggtcgccgtggccggcattatttcctagttcttcttgtaaccctgaggtgccagcgcggggagtgaggaggggtcagggggctaaggatgcaacctctgacgttctgcgccttcctaggagagtcttacatgtgttgagatttcacaagcaatgcgagttgtaaaataccagctctacaagaagctaggctctgtgacggcatagttttcagtagctttatcacaatattcacaatggagaattatatgacatggtagcagaaataggcccttttatgtgttgcttctattttacctcaaattgtagatatagggtaatcaataaaatccatccatgcctttcacacactaagt

SEQ ID NO: 4525 - protein, 877 aa, Homo sapiens
MAQVAMSTLPVEDEESSESRMVVTFLMSALESMCKELAKSKAEVACIAVYETDVFVVGTERGRAFVNTRKDFQKDFVKYCVEEEEKAAEMHKMKSTTQANRMSVDAVEIETLRKTVEDYFCFCYGKALGKSTVVPVPYEKMLRDQSAVVVQGLPEGVAFKHPENYDLATLKWILENKAGISFIIKRPFLEPKKHVGGRVMVTDADRSILSPGGSCGPIKVKTEPTEDSGISLEMAAVTVKEESEDPDYYQYNIQGSHHSSEGNEGTEMEVPAEDDDYSPPSKRPKANELPQPPVPEPANAGKRKVREFNFEKWNARITDLRKQVEELFERKYAQAIKAKGPVTIPYPLFQSHVEDLYVEGLPEGIPFRRPSTYGIPRLERILLAKERIRFVIKKHELLNSTREDLQLDKPASGVKEEWYARITKLRKMVDQLFCKKFAEALGSTEAKAVPYQKFEAHPNDLYVEGLPENIPFRSPSWYGIPRLEKIIQVGNRIKFVIKRPELLTHSTTEVTQPRTNTPAQALGLTEAVKVPYPVFESNPEFLYVEGLPEGIPFRSPTWFGIPRLERIVRGSNKIKFVVKKPELVISYLPPGMASKINTKALQSPKRPRSPGSNSKVPEIEVTVEGPNNNNPQTSAVRTPTQTNGSNVPFKPRGREFSFEAWNAKITDLKQKVENLFNEKCGEALGLKQAVKVPFALFESFPEDFYVEGLPEGVPFRRPSTFGIPRLEKILRNKAKIKFIIKKPEMFETAIKESTSSKSPPRKINSSPNVNTTASGVEDLNIIQVTIPDDDNERLSKVEKARQLREQVNDLFSRKFGEAIGMGFPVKVPYRKITINPGCVVVDGMPPGVSFKAPSYLEISSMRRILDSAEFIKFTVIR

SEQ ID NO: 4526 - DNA, 3984 bp, Homo sapiens
aaaaaaaaaaaaaaaaaaaaaaaaaaaagaaaaaagaaaaaaaaaaggaggaggaggaggagggtgagagagaagctgggagagcagagaaaaggggccaccggtcgcccccccgcttccccgcacgcgctctccagccgcggccgcccgcctgccgcggtcaccccggcctctgcctctgtcccccagtgatcggatcaaggcgctgagcgaggccctgcctgcggggcggccatgcggcggtgacaggagcgcgaccgacacgcacgggcccctcgccccctctcgcctcccgtccgctcgccagctcccctcagccgaggctgctccgcggcggccgcagcccgcgcgcggcccacactcgcctcccctcggcacccccggccccggagctgcctggaggcggccgcactcggtgtaaagaactggccaagtccaaagccgaagtggcctgcattgcagtgtatgaaacagacgtgtttgtcgtcggaactgaaagaggacgtgcttttgtcaataccagaaaggattttcaaaaagattttgtaaaatattgtgttgaagaagaagaaaaagctgcagagatgcataaaatgaaatctacaacccaggcaaatcggatgagtgtagatgctgtagaaattgaaacactcagaaaaacagttgaggactatttctgcttttgctatgggaaagctttaggcaaatccacagtggtacctgtaccatatgagaagatgctgcgagaccagtcggctgtggtagtgcaggggcttccggaaggtgttgcctttaaacaccccgagaactatgatcttgcaaccctgaaatggattttggagaacaaagcagggatttcattcatcattaagagaccttttttagagccaaagaagcatgtaggtggtcgtgtgatggtaacagatgctgacaggtcaatactatctccaggtggaagttgtggccccatcaaagtgaaaactgaacccacagaagattctggaagccaccattcttcagagggcaatgaaggcacagaaatggaagtaccagcagaagattctactcaacatgtcccttcagaaacaagtgaggaccctgaagttgaggtgactattgaagatgatgattattctccaccgtctaagagaccaaaggccaatgagctaccgcagccaccagtcccggaacccgccaatgctgggaagcggaaagtgagggagttcaacttcgagaaatggaatgctcgcatcactgatctacgtaaacaagttgaagaattgtttgaaaggaaatatgctcaagccataaaagccaaaggtccggtgacgatcccgtaccctcttttccagtctcatgttgaagatctttatgtagaaggacttcctgaaggaattccttttagaaggccatctacttacggaattcctcgcctggagaggatattacttgcaaaggaaaggattcgttttgtgattaagaaacatgagcttctgaattcaacacgtgaagatttacagcttgataagccagcttcaggagtaaaggaagaatggtatgccagaatcactaaattaagaaagatggtggatcagcttttctgcaaaaaatttgcggaagccttggggagcactgaagccaaggctgtaccgtaccaaaaatttgaggcacacccgaatgatctgtacgtggaaggactgccagaaaacattcctttccgaagtccctcatggtatggaatcccaaggctggaaaaaatcattcaagtgggcaatcgaattaaatttgttattaaaagaccagaacttctgactcacagtaccactgaagttactcagccaagaacgaatacaccagctcaagctcttggactcaccgaggcagtaaaagtaccatatcctgtgtttgaatcaaacccggagttcttgtatgtggaaggcttgccagaggggattcccttccgaagccctacctggtttggaattccacgacttgaaaggatcgtccgcgggagtaataaaatcaagttcgttgttaaaaaacctgaactagttatttcctacttgcctcctgggatggctagtaaaataaacactaaagctttgcagtcccccaaaagaccacgaagtcctgggagtaattcaaaggttcctgaaattgaggtcaccgtggaaggccctaataacaacaatcctcaaacctcagctgttcgaaccccgacccagactaacggttctaacgttcccttcaagccacgagggagagagttttcctttgaggcctggaatgccaaaatcacggacctaaaacagaaagttgaaaatctcttcaatgagaaatgtggggaagctcttggccttaaacaagctgtgaaggtgccgttcgcgttatttgagtctttcccggaagacttttatgtggaaggcttacctgagggtgtgccattccgaagaccatcgacttttggcattccgaggctggagaagatactcagaaacaaagccaaaattaagttcatcattaaaaagcccgaaatgtttgagacggcgattaaggagagcacctcctctaagagccctcccagaaaaataaattcatcacccaatgttaatactactgcatcaggtgttgaagaccttaacatcattcaggtgacaattccagatgatgataatgaaagactctcgaaagttgaaaaagctagacagctaagagaacaagtgaatgacctctttagtcggaaatttggtgaagctattggtatgggttttcctgtgaaagttccctacaggaaaatcacaattaaccctggctgtgtggtggttgatggcatgcccccgggggtgtccttcaaagcccccagctacctggaaatcagctccatgagaaggatcttagactctgccgagtttatcaaattcacggtcattagaccatttccaggacttgtgattaataaccagctggttgatcagagtgagtcagaaggccccgtgatacaagaatcagctgaaccaagccagttggaagttccagccacagaagaaataaaagagactgatggaagctctcagatcaagcaagaaccagaccccacgtggtagacctcttccctcctaggagccttgagttacggtgtttattttccaatcaagtgaagatatctcctacttctcctactggaacatctcagcttctgcagtgaagaaaaattcctgtgatagttcagttctttagtttttctatttgaaaaaaaaaaatcatttaaatgatcctttgttcacggctctccttaatgactgagtgaacagttcctatctgtatatttgactaaaccttttcctaagctatctctcatggttcctatgtttttttatcataattaaaagcaaaaccatctggatcacctaacagtcagaggtcagtatctcagcgtgtgaattatagaggaaatacagagagaacctcttccacttttacttttcgtccaaataaaatgcatggtgtaccagaagttgaagatcgggttgaggattggggctagctcgatgacactaaggccccaacatcgcgggacctgctgtggcgcggattcttaggaacgctgttctagccggccccctctccaggggtcgccgtggccggcattatttcctagttcttcttgtaaccctgaggtgccagcgcggggagtgaggaggggtcagggggctaaggatgcaacctctgacgttctgcgccttcctaggagagtcttacatgtgttgagatttcacaagcaatgcgagttgtaaaataccagctctacaagaagctaggctctgtgacggcatagttttcagtagctttatcacaatattcacaatggagaattatatgacatggtagcagaaataggcccttttatgtgttgcttctattttacctcaaattgtagatatagggtaatcaataaaatccatccatgcctttcacacactaagt

SEQ ID NO: 4527 - protein, 839 aa, Homo sapiens; identical to SEQ ID NO: 4213

SEQ ID NO: 4528 - DNA, 4631 bp, Homo sapiens
aaaaaaaaaaaaaaaaaaaaaaaaaaaagaaaaaagaaaaaaaaaaggaggaggaggaggagggtgagagagaagctgggagagcagagaaaaggggccaccggtcgcccccccgcttccccgcacgcgctctccagccgcggccgcccgcctgccgcggtcaccccggcctctgcctctgtcccccagtgatcggatcaaggcgctgagcgaggccctgcctgcggggcggccatgcggcggtgacaggagcgcgaccgacacgcacgggcccctcgccccctctcgcctcccgtccgctcgccagctcccctcagccgaggctgctccgcggcggccgcagcccgcgcgcggcccacactcgcctcccctcggcacccccggccccggagctgcctggaggcggccgcactcggggatcatggcccaagttgcaatgtccaccctccccgttgaagatgaggagtcctcggagagcaggatggtggtgacattcctcatgtcagctctcgagtccatgtgtaaagaactggccaagtccaaagccgaagtggcctgcattgcagtgtatgaaacagacgtgtttgtcgtcggaactgaaagaggacgtgcttttgtcaataccagaaaggattttcaaaaagattttgtaaaatattgtgttgaagaagaagaaaaagctgcagagatgcataaaatgaaatctacaacccaggcaaatcggatgagtgtagatgctgtagaaattgaaacactcagaaaaacagttgaggactatttctgcttttgctatgggaaagctttaggcaaatccacagtggtacctgtaccatatgagaagatgctgcgagaccagtcggctgtggtagtgcaggggcttccggaaggtgttgcctttaaacaccccgagaactatgatcttgcaaccctgaaatggattttggagaacaaagcagggatttcattcatcattaagagaccttttttagagccaaagaagcatgtaggtggtcgtgtgatggtaacagatgctgacaggtcaatactatctccaggtggaagttgtggccccatcaaagtgaaaactgaacccacagaagattctggcatttccctggaaatggcagctgtgacagtaaaggaagaatcagaagatcctgattattatcaatataacattcaagcaggcccttctgaaactgatgatgttgatgaaaaacagcccctatcgaagcctttgcaaggaagccaccattcttcagagggcaatgaaggcacagaaatggaagtaccagcagaagatgatgattattctccaccgtctaagagaccaaaggccaatgagctaccgcagccaccagtcccggaacccgccaatgctgggaagcggaaagtgagggagttcaacttcgagaaatggaatgctcgcatcactgatctacgtaaacaagttgaagaattgtttgaaaggaaatatgctcaagccataaaagccaaaggtccggtgacgatcccgtaccctcttttccagtctcatgttgaagatctttatgtagaaggacttcctgaaggaattccttttagaaggccatctacttacggaattcctcgcctggagaggatattacttgcaaaggaaaggattcgttttgtgattaagaaacatgagcttctgaattcaacacgtgaagatttacagcttgataagccagcttcaggagtaaaggaagaatggtatgccagaatcactaaattaagaaagatggtggatcagcttttctgcaaaaaatttgcggaagccttggggagcactgaagccaaggctgtaccgtaccaaaaatttgaggcacacccgaatgatctgtacgtggaaggactgccagaaaacattcctttccgaagtccctcatggtatggaatcccaaggctggaaaaaatcattcaagtgggcaatcgaattaaatttgttattaaaagaccagaacttctgactcacagtaccactgaagttactcagccaagaacgaatacaccagtcaaagaagattggaatgtcagaattaccaagctacggaagcaagtggaagagatttttaatttgaaatttgcttagatttgttgacagcggtttcctggagtgctgtcttgagaacgattctgaggaggctcagcaagaaagagtgtttcagttgattgggtgtgtctgtcatggagaaggaactcaagctcttggactcaccgaggcagtaaaagtaccatatcctgtgtttgaatcaaacccggagttcttgtatgtggaaggcttgccagaggggattcccttccgaagccctacctggtttggaattccacgacttgaaaggatcgtccgcgggagtaataaaatcaagttcgttgttaaaaaacctgaactagttatttcctacttgcctcctgggatggctagtaaaataaacactaaagctttgcagtcccccaaaagaccacgaagtcctgggagtaattcaaaggttcctgaaattgaggtcaccgtggaaggccctaataacaacaatcctcaaacctcagctgttcgaaccccgacccagactaacggttctaacgttcccttcaagccacgagggagagagttttcctttgaggcctggaatgccaaaatcacggacctaaaacagaaagttgaaaatctcttcaatgagaaatgtggggaagctcttggccttaaacaagctgtgaaggtgccgttcgcgttatttgagtctttcccggaagacttttatgtggaaggcttacctgagggtgtgccattccgaagaccatcgacttttggcattccgaggctggagaagatactcagaaacaaagccaaaattaagttcatcattaaaaagcccgaaatgtttgagacggcgattaaggagagcacctcctctaagagccctcccagaaaaataaattcatcacccaatgttaatactactgcatcaggtgttgaagaccttaacatcattcaggtgacaattccagatgatgataatgaaagactctcgaaagttgaaaaagctagacagctaagagaacaagtgaatgacctctttagtcggaaatttggtgaagctattggtatgggttttcctgtgaaagttccctacaggaaaatcacaattaaccctggctgtgtggtggttgatggcatgcccccgggggtgtccttcaaagcccccagctacctggaaatcagctccatgagaaggatcttagactctgccgagtttatcaaattcacggtcattagaccatttccaggacttgtgattaataaccagctggttgatcagagtgagtcagaaggccccgtgatacaagaatcagctgaaccaagccagttggaagttccagccacagaagaaataaaagagactgatggaagctctcagatcaagcaagaaccagaccccacgtggtagacctcttccctcctaggcttaaagtatcagtggttgagaagagcttttcggacctgttactaccccaagctgtgtaatatacttgtataacagaaataccttctatacaaacctttttttctacttttagatagaaatgtctactttttcagcagttctgtgaattaaagagcagagtgactgtgggtctggaatggctggtgtacttgggaatgtactatcaggattttacagcaatgctgggaaatgacagggaaaatgacaggaatgaatctcaccagattttttatgtactcagcagagccttgagttacggtgtttattttccaatcaagtgaagatatctcctacttctcctactggaacatctcagcttctgcagtgaagaaaaattcctgtgatagttcagttctttagtttttctatttgaaaaaaaaaaatcatttaaatgatcctttgttcacggctctccttaatgactgagtgaacagttcctatctgtatatttgactaaaccttttcctaagctatctctcatggttcctatgtttttttatcataattaaaagcaaaaccatctggatcacctaacagtcagaggtcagtatctcagcgtgtgaattatagaggaaatacagagagaacctcttccacttttacttttcgtccaaataaaatgcatggtgtaccagaagttgaagatcgggttgaggattggggctagctcgatgacactaaggccccaacatcgcgggacctgctgtggcgcggattcttaggaacgctgttctagccggccccctctccaggggtcgccgtggccggcattatttcctagttcttcttgtaaccctgaggtgccagcgcggggagtgaggaggggtcagggggctaaggatgcaacctctgacgttctgcgccttcctaggagagtcttacatgtgttgagatttcacaagcaatgcgagttgtaaaataccagctctacaagaagctaggctctgtgacggcatagttttcagtagctttatcacaatattcacaatggagaattatatgacatggtagcagaaataggcccttttatgtgttgcttctattttacctcaaattgtagatatagggtaatcaataaaatccatccatgcctttcacacactaagt

SEQ ID NO: 4529 - protein, 563 aa, Homo sapiens; identical to SEQ ID NO: 4097

SEQ ID NO: 4530 - DNA, 4004 bp, Homo sapiens
aaaaaaaaaaaaaaaaaaaaaaaaaaaagaaaaaagaaaaaaaaaaggaggaggaggaggagggtgagagagaagctgggagagcagagaaaaggggccaccggtcgcccccccgcttccccgcacgcgctctccagccgcggccgcccgcctgccgcggtcaccccggcctctgcctctgtcccccagtgatcggatcaaggcgctgagcgaggccctgcctgcggggcggccatgcggcggtgacaggagcgcgaccgacacgcacgggcccctcgccccctctcgcctcccgtccgctcgccagctcccctcagccgaggctgctccgcggcggccgcagcccgcgcgcggcccacactcgcctcccctcggcacccccggccccggagctgcctggaggcggccgcactcggtgtaaagaactggccaagtccaaagccgaagtggcctgcattgcagtgtatgaaacagacgtgtttgtcgtcggaactgaaagaggacgtgcttttgtcaataccagaaaggattttcaaaaagattttgtaaaatattgtgttgaagaagaagaaaaagctgcagagatgcataaaatgaaatctacaacccaggcaaatcggatgagtgtagatgctgtagaaattgaaacactcagaaaaacagttgaggactatttctgcttttgctatgggaaagctttaggcaaatccacagtggtacctgtaccatatgagaagatgctgcgagaccagtcggctgtggtagtgcaggggcttccggaaggtgttgcctttaaacaccccgagaactatgatcttgcaaccctgaaatggattttggagaacaaagcagggatttcattcatcattaagagaccttttttagagccaaagaagcatgtaggtggtcgtgtgatggtaacagatgctgacaggtcaatactatctccaggtggaagttgtggccccatcaaagtgaaaactgaacccacagaagattctggcatttccctggaaatggcagctgtgacagtaaaggaagaatcagaagatcctgattattatcaatataacattcaaggaagccaccattcttcagagggcaatgaaggcacagaaatggaagtaccagcagaagatgatgattattctccaccgtctaagagaccaaaggccaatgagctaccgcagccaccagtcccggaacccgccaatgctgggaagcggaaagtgagggagttcaacttcgagaaatggaatgctcgcatcactgatctacgtaaacaagttgaagaattgtttgaaaggaaatatgctcaagccataaaagccaaaggtccggtgacgatcccgtaccctcttttccagtctcatgttgaagatctttatgtagaaggacttcctgaaggaattccttttagaaggccatctacttacggaattcctcgcctggagaggatattacttgcaaaggaaaggattcgttttgtgattaagaaacatgagcttctgaattcaacacgtgaagatttacagcttgataagccagcttcaggagtaaaggaagaatggtatgccagaatcactaaattaagaaagatggtggatcagcttttctgcaaaaaatttgcggaagccttggggagcactgaagccaaggctgtaccgtaccaaaaatttgaggcacacccgaatgatctgtacgtggaaggactgccagaaaacattcctttccgaagtccctcatggtatggaatcccaaggctggaaaaaatcattcaagtgggcaatcgaattaaatttgttattaaaagaccagaacttctgactcacagtaccactgaagttactcagccaagaacgaatacaccagtcaaagaagattggaatgtcagaattaccaagctacggaagcaagtggaagagatttttaatttgaaatttgctcaagctcttggactcaccgaggcagtaaaagtaccatatcctgtgtttgaatcaaacccggagttcttgaaaggatcgtccgcgggagtaataaaatcaagttcgttgttaaaaaacctgaactagttatttcctacttgcctcctgggatggctagtaaaataaacactaaagctttgcagtcccccaaaagaccacgaagtcctgggagtaattcaaaggttcctgaaattgaggtcaccgtggaaggccctaataacaacaatcctcaaacctcagctgttcgaaccccgacccagactaacggttctaacgttcccttcaagccacgagggagagagttttcctttgaggcctggaatgccaaaatcacggacctaaaacagaaagttgaaaatctcttcaatgagaaatgtggggaagctcttggccttaaacaagctgtgaaggtgccgttcgcgttatttgagtctttcccggaagacttttatgtggaaggcttacctgagggtgtgccattccgaagaccatcgacttttggcattccgaggctggagaagatactcagaaacaaagccaaaattaagttcatcattaaaaagcccgaaatgtttgagacggcgattaaggagagcacctcctctaagagccctcccagaaaaataaattcatcacccaatgttaatactactgcatcaggtgttgaagaccttaacatcattcaggtgacaattccagatgatgataatgaaagactctcgaaagttgaaaaagctagacagctaagagaacaagtgaatgacctctttagtcggaaatttggtgaagctattggtatgggttttcctgtgaaagttccctacaggaaaatcacaattaaccctggctgtgtggtggttgatggcatgcccccgggggtgtccttcaaagcccccagctacctggaaatcagctccatgagaaggatcttagactctgccgagtttatcaaattcacggtcattagaccatttccaggacttgtgattaataaccagctggttgatcagagtgagtcagaaggccccgtgatacaagaatcagctgaaccaagccagttggaagttccagccacagaagaaataaaagagactgatggaagctctcagatcaagcaagaaccagaccccacgtggtagacctcttccctcctaggagccttgagttacggtgtttattttccaatcaagtgaagatatctcctacttctcctactggaacatctcagcttctgcagtgaagaaaaattcctgtgatagttcagttctttagtttttctatttgaaaaaaaaaaatcatttaaatgatcctttgttcacggctctccttaatgactgagtgaacagttcctatctgtatatttgactaaaccttttcctaagctatctctcatggttcctatgtttttttatcataattaaaagcaaaaccatctggatcacctaacagtcagaggtcagtatctcagcgtgtgaattatagaggaaatacagagagaacctcttccacttttacttttcgtccaaataaaatgcatggtgtaccagaagttgaagatcgggttgaggattggggctagctcgatgacactaaggccccaacatcgcgggacctgctgtggcgcggattcttaggaacgctgttctagccggccccctctccaggggtcgccgtggccggcattatttcctagttcttcttgtaaccctgaggtgccagcgcggggagtgaggaggggtcagggggctaaggatgcaacctctgacgttctgcgccttcctaggagagtcttacatgtgttgagatttcacaagcaatgcgagttgtaaaataccagctctacaagaagctaggctctgtgacggcatagttttcagtagctttatcacaatattcacaatggagaattatatgacatggtagcagaaataggcccttttatgtgttgcttctattttacctcaaattgtagatatagggtaatcaataaaatccatccatgcctttcacacactaagt

SEQ ID NO: 4531 - protein, 495 aa, Homo sapiens; identical to SEQ ID NO: 4181

SEQ ID NO: 4532 - DNA, 5071 bp, Homo sapiens
aaaaaaaaaaaaaaaaaaaaaaaaaaaagaaaaaagaaaaaaaaaaggaggaggaggaggagggtgagagagaagctgggagagcagagaaaaggggccaccggtcgcccccccgcttccccgcacgcgctctccagccgcggccgcccgcctgccgcggtcaccccggcctctgcctctgtcccccagtgatcggatcaaggcgctgagcgaggccctgcctgcggggcggccatgcggcggtgacaggagcgcgaccgacacgcacgggcccctcgccccctctcgcctcccgtccgctcgccagctcccctcagccgaggctgctccgcggcggccgcagcccgcgcgcggcccacactcgcctccccgttgaagatgaggagtcctcggagagcaggatggtggtgacattcctcatgtcagctctcgagtccatgtgtaaagaactggccaagtccaaagccgaagtggcctgcattgcagtgtatgaaacagacgtgtttgtcgtcggaactgaaagaggacgtgcttttgtcaataccagaaaggattttcaaaaagattttgtaaaatattgtgttgaagaagaagaaaaagctgcagagatgcataaaatgaaatctacaacccaggcaaatcggatgagtgtagatgctgtagaaattgaaacactcagaaaaacagttgaggactatttctgcttttgctatgggaaagctttaggcaaatccacagtggtacctgtaccatatgagaagatgctgcgagaccagtcggctgtggtagtgcaggggcttccggaaggtgttgcctttaaacaccccgagaactatgatcttgcaaccctgaaatggattttggagaacaaagcagggatttcattcatcattaagagaccttttttagagccaaagaagcatgtaggtggtcgtgtgatggtaacagatgctgacaggtcaatactatctccaggtggaagttgtggccccatcaaagtgaaaactgaacccacagaagattctggcatttccctggaaatggcagctgtgacagtaaaggaagaatcagaagatcctgattattatcaatataacattcaagcaggcccttctgaaactgatgatgttgatgaaaaacagcccctatcgaagcctttgcaaggaagccaccattcttcagagggcaatgaaggcacagaaatggaagtaccagcagaagattctactcaacatgtcccttcagaaacaagtgaggaccctgaagttgaggtgactattgaagatgatgattattctccaccgtctaagagaccaaaggccaatgagctaccgcagccaccagtcccggaacccgccaatgctgggaagcggaaagtgagggagttcaacttcgagaaatggaatgctcgcatcactgatctacgtaaacaagttgaagaattgtttgaaaggaaatatgctcaagccataaaagccaaaggtccggtgacgatcccgtaccctcttttccagtctcatgttgaagatctttatgtagaaggacttcctgaaggaattccttttagaaggccatctacttacggaattcctcgcctggagaggatattacttgcaaaggaaaggattcgttttgtgattaagaaacatgagcttctgaattcaacacgtgaagatttacagcttgataagccagcttcaggagtaaaggaagaatggtatgccagaatcactaaattaagaaagatggtggatcagcttttctgcaaaaaatttgcggaagccttggggagcactgaagccaaggctgtaccgtaccaaaaatttgaggcacacccgaatgatctgtacgtggaaggactgccagaaaacattcctttccgaagtccctcatggtatggaatcccaaggctggaaaaaatcattcaagtgggcaatcgaattaaatttgttattaaaagaccagaacttctgactcacagtaccactgaagttactcagccaagaacgaatacaccagctcaagctcttggactcaccgaggcagtaaaagtaccatatcctgtgtttgaatcaaacccggagttcttgtatgtggaaggcttgccagaggggattcccttccgaagccctacctggtttggaattccacgacttgaaaggatcgtccgcgggagtaataaaatcaagttcgttgttaaaaaacctgaactagttatttcctacttgcctcctgggatggctagtaaaataaacactaaagctttgcagtcccccaaaagaccacgaagtcctgggagtaattcaaaggttcctgaaattgaggtcaccgtggaaggccctaataacaacaatcctcaaacctcagctgttcgaaccccgacccagactaacggttctaacgttcccttcaagccacgagggagagagttttcctttgaggcctggaatgccaaaatcacggacctaaaacagaaagttgaaaatctcttcaatgagaaatgtggggaagctcttggccttaaacaagctgtgaaggtgccgttcgcgttatttgagtctttcccggaagacttttatgtggaaggcttacctgagggtgtgccattccgaagaccatcgacttttggcattccgaggctggagaagatactcagaaacaaagccaaaattaagttcatcattaaaaagcccgaaatgtttgagacggcgattaaggagagcacctcctctaagagccctcccagaaaaataaattcatcacccaatgttaatactactgcatcaggtgttgaagaccttaacatcattcaggtgacaattccagatgatgataatgaaagactctcgaaagttgaaaaagctagacagctaagagaacaagtgaatgacctctttagtcggaaatttggtgaagctattggtatgggttttcctgtgaaagttccctacaggaaaatcacaattaaccctggctgtgtggtggttgatggcatgcccccgggggtgtccttcaaagcccccagctacctggaaatcagctccatgagaaggatcttagactctgccgagtttatcaaattcacggtcattagaccatttccaggacttgtgattaataaccagctggttgatcagagtgagtcagaaggccccgtgatacaagaatcagctgaaccaagccagttggaagttccagccacagaaggtaaaaggacctcttccctcctagggtaaatcagcttctgtgtcagggatgctgtgtggtgtccatctgaaccccctgcatacgcgtagctaatgtgatctccccactttcacataagatggtggccctgccttcagggaatgtgggagccaggtgggagccttcccggatatttaagctagaagattctacagggagattctccttggatcaatatatgtctctcagtcaaagatgtaaaagcacttttgccttaaaaagaatgttctgtttctaaatagagtcaacgttgtcctcctcattggaattcactatgagtcagaatcattagactgacttttttttttccatagtaatagtattttgcagagtctcacagagctgcagatcttttgttcatcttgcagagttaacaagtctgatcctgttagtccagatttcttaaatttggccaagttataataggagcagtagcttgagacccgaagtcaggaaactttgacaatggatttttttttttaatccagagacttgtactggaatttgccttaccctgtcagctcatggacttaaggtttcatcccgctttatgagtgcttctgaatccaagtcattgttacctgaatttgcaaattaagttgtgatattcgtgactgttaaattcctgtaattagattaacctctttgcttgcttgtttgttttctctcctattttagcttaaagtatcagtggttgagaagagcttttcggacctgttactaccccaagctgtgtaatatacttgtataacagaaataccttctatacaaacctttttttctacttttagatagaaatgtctactttttcagcagttctgtgaattaaagagcagagtgactgtgggtctggaatggctggtgtacttgggaatgtactatcaggattttacagcaatgctgggaaatgacagggaaaatgacaggaatgaatctcaccagattttttatgtactcagcagagccttgagttacggtgtttattttccaatcaagtgaagatatctcctacttctcctactggaacatctcagcttctgcagtgaagaaaaattcctgtgatagttcagttctttagtttttctatttgaaaaaaaaaaatcatttaaatgatcctttgttcacggctctccttaatgactgagtgaacagttcctatctgtatatttgactaaaccttttcctaagctatctctcatggttcctatgtttttttatcataattaaaagcaaaaccatctggatcacctaacagtcagaggtcagtatctcagcgtgtgaattatagaggaaatacagagagaacctcttccacttttacttttcgtccaaataaaatgcatggtgtaccagaagttgaagatcgggttgaggattggggctagctcgatgacactaaggccccaacatcgcgggacctgctgtggcgcggattcttaggaacgctgttctagccggccccctctccaggggtcgccgtggccggcattatttcctagttcttcttgtaaccctgaggtgccagcgcggggagtgaggaggggtcagggggctaaggatgcaacctctgacgttctgcgccttcctaggagagtcttacatgtgttgagatttcacaagcaatgcgagttgtaaaataccagctctacaagaagctaggctctgtgacggcatagttttcagtagctttatcacaatattcacaatggagaattatatgacatggtagcagaaataggcccttttatgtgttgcttctattttacctcaaattgtagatatagggtaatcaataaaatccatccatgcctttcacacactaagt

SEQ ID NO: 4533 - protein, 944 aa, Homo sapiens
MVVTFLMSALESMCKELAKSKAEVACIAVYETDVFVVGTERGRAFVNTRKDFQKDFVKYCVEEEEKAAEMHKMKSTTQANRMSVDAVEIETLRKTVEDYFCFCYGKALGKSTVVPVPYEKMLRDQSAVVVQGLPEGVAFKHPENYDLATLKWILENKAGISFIIKRPFLEPKKHVGGRVMVTDADRSILSPGGSCGPIKVKTEPTEDSGISLEMAAVTVKEESEDPDYYQYNIQAGPSETDDVDEKQPLSKPLQGSHHSSEGNEGTEMEVPAEDSTQHVPSETSEDPEVEVTIEDDDYSPPSKRPKANELPQPPVPEPANAGKRKVREFNFEKWNARITDLRKQVEELFERKYAQAIKAKGPVTIPYPLFQSHVEDLYVEGLPEGIPFRRPSTYGIPRLERILLAKERIRFVIKKHELLNSTREDLQLDKPASGVKEEWYARITKLRKMVDQLFCKKFAEALGSTEAKAVPYQKFEAHPNDLYVEGLPENIPFRSPSWYGIPRLEKIIQVGNRIKFVIKRPELLTHSTTEVTQPRTNTPAQALGLTEAVKVPYPVFESNPEFLYVEGLPEGIPFRSPTWFGIPRLERIVRGSNKIKFVVKKPELVISYLPPGMASKINTKALQSPKRPRSPGSNSKVPEIEVTVEGPNNNNPQTSAVRTPTQTNGSNVPFKPRGREFSFEAWNAKITDLKQKVENLFNEKCGEALGLKQAVKVPFALFESFPEDFYVEGLPEGVPFRRPSTFGIPRLEKILRNKAKIKFIIKKPEMFETAIKESTSSKSPPRKINSSPNVNTTASGVEDLNIIQVTIPDDDNERLSKVEKARQLREQVNDLFSRKFGEAIGMGFPVKVPYRKITINPGCVVVDGMPPGVSFKAPSYLEISSMRRILDSAEFIKFTVIRPFPGLVINNQLVDQSESEGPVIQESAEPSQLEVPATEGKRTSSLLG

SEQ ID NO: 4534 - DNA, 4530 bp, Homo sapiens
aaaaaaaaaaaaaaaaaaaaaaaaaaaagaaaaaagaaaaaaaaaaggaggaggaggaggagggtgagagagaagctgggagagcagagaaaaggggccaccggtcgcccccccgcttccccgcacgcgctctccagccgcggccgcccgcctgccgcggtcaccccggcctctgcctctgtcccccagtgatcggatcaaggcgctgagcgaggccctgcctgcggggcggccatgcggcggtgacaggagcgcgaccgacacgcacgggcccctcgccccctctcgcctcccgtccgctcgccagctcccctcagccgaggctgctccgcggcggccgcagcccgcgcgcggcccacactcgcctcccctcggcacccccggccccggagctgcctggaggcggccgcactcggtgtaaagaactggccaagtccaaagccgaagtggcctgcattgcagtgtatgaaacagacgtgtttgtcgtcggaactgaaagaggacgtgcttttgtcaataccagaaaggattttcaaaaagattttgtaaaatattgtgttgaagaagaagaaaaagctgcagagatgcataaaatgaaatctacaacccaggcaaatcggatgagtgtagatgctgtagaaattgaaacactcagaaaaacagttgaggactatttctgcttttgctatgggaaagctttaggcaaatccacagtggtacctgtaccatatgagaagatgctgcgagaccagtcggctgtggtagtgcaggggcttccggaaggtgttgcctttaaacaccccgagaactatgatcttgcaaccctgaaatggattttggagaacaaagcagggatttcattcatcattaagagaccttttttagagccaaagaagcatgtaggtggtcgtgtgatggtaacagatgctgacaggtcaatactatctccaggtggaagttgtggccccatcaaagtgaaaactgaacccacagaagattctggcatttccctggaaatggcagctgtgacagtaaaggaagaatcagaagatcctgattattatcaatataacattcaaggaagccaccattcttcagagggcaatgaaggcacagaaatggaagtaccagcagaagattctactcaacatgtcccttcagaaacaagtgaggaccctgaagttgaggtgactattgaagatgatgattattctccaccgtctaagagaccaaaggccaatgagctaccgcagccaccagtcccggaacccgccaatgctgggaagcggaaagtgagggagttcaacttcgagaaatggaatgctcgcatcactgatctacgtaaacaagttgaagaattgtttgaaaggaaatatgctcaagccataaaagccaaaggtccggtgacgatcccgtaccctcttttccagtctcatgttgaagatctttatgtagaaggacttcctgaaggaattccttttagaaggccatctacttacggaattcctcgcctggagaggatattacttgcaaaggaaaggattcgttttgtgattaagaaacatgagcttctgaattcaacacgtgaagatttacagcttgataagccagcttcaggagtaaaggaagaatggtatgccagaatcactaaattaagaaagatggtggatcagcttttctgcaaaaaatttgcggaagccttggggagcactgaagccaaggctgtaccgtaccaaaaatttgaggcacacccgaatgatctgtacgtggaaggactgccagaaaacattcctttccgaagtccctcatggtatggaatcccaaggctggaaaaaatcattcaagtgggcaatcgaattaaatttgttattaaaagaccagaacttctgactcacagtaccactgaagttactcagccaagaacgaatacaccagtcaaagaagattggaatgtcagaattaccaagctacggaagcaagtggaagagatttttaatttgaaatttgcttagatttgttgacagcggtttcctggagtgctgtcttgagaacgattctgaggaggctcagcaagaaagagtgtttcagttgattgggtgtgtctgtcatggagaaggaactcaagctcttggactcaccgaggcagtaaaagtaccatatcctgtgtttgaatcaaacccggagttcttgtatgtggaaggcttgccagaggggattcccttccgaagccctacctggtttggaattccacgacttgaaaggatcgtccgcgggagtaataaaatcaagttcgttgttaaaaaacctgaactagttatttcctacttgcctcctgggatggctagtaaaataaacactaaagctttgcagtcccccaaaagaccacgaagtcctgggagtaattcaaaggttcctgaaattgaggtcaccgtggaaggccctaataacaacaatcctcaaacctcagctgttcgaaccccgacccagactaacggttctaacgttcccttcaagccacgagggagagagttttcctttgaggcctggaatgccaaaatcacggacctaaaacagaaagttgaaaatctcttcaatgagaaatgtggggaagctcttggccttaaacaagctgtgaaggtgccgttcgcgttatttgagtctttcccggaagacttttatgtggaaggcttacctgagggtgtgccattccgaagaccatcgacttttggcattccgaggctggagaagatactcagaaacaaagccaaaattaagttcatcattaaaaagcccgaaatgtttgagacggcgattaaggagagcacctcctctaagagccctcccagaaaaataaattcatcacccaatgttaatactactgcatcaggtgttgaagaccttaacatcattcaggtgacaattccagatgatgataatgaaagactctcgaaagttgaaaaagctagacagctaagagaacaagtgaatgacctctttagtcggaaatttggtgaagctattggtatgggttttcctgtgaaagttccctacaggaaaatcacaattaaccctggctgtgtggtggttgatggcatgcccccgggggtgtccttcaaagcccccagctacctggaaatcagctccatgagaaggatcttagactctgccgagtttatcaaattcacggtcattagaccatttccaggacttgtgattaataaccagctggttgatcagagtgagtcagaaggccccgtgatacaagaatcagctgaaccaagccagttggaagttccagccacagaagaaataaaagagactgatggaagctctcagatcaagcaagaaccagaccccacgtggtagacctcttccctcctaggcttaaagtatcagtggttgagaagagcttttcggacctgttactaccccaagctgtgtaatatacttgtataacagaaataccttctatacaaacctttttttctacttttagatagaaatgtctactttttcagcagttctgtgaattaaagagcagagtgactgtgggtctggaatggctggtgtacttgggaatgtactatcaggattttacagcaatgctgggaaatgacagggaaaatgacaggaatgaatctcaccagattttttatgtactcagcagagccttgagttacggtgtttattttccaatcaagtgaagatatctcctacttctcctactggaacatctcagcttctgcagtgaagaaaaattcctgtgatagttcagttctttagtttttctatttgaaaaaaaaaaatcatttaaatgatcctttgttcacggctctccttaatgactgagtgaacagttcctatctgtatatttgactaaaccttttcctaagctatctctcatggttcctatgtttttttatcataattaaaagcaaaaccatctggatcacctaacagtcagaggtcagtatctcagcgtgtgaattatagaggaaatacagagagaacctcttccacttttacttttcgtccaaataaaatgcatggtgtaccagaagttgaagatcgggttgaggattggggctagctcgatgacactaaggccccaacatcgcgggacctgctgtggcgcggattcttaggaacgctgttctagccggccccctctccaggggtcgccgtggccggcattatttcctagttcttcttgtaaccctgaggtgccagcgcggggagtgaggaggggtcagggggctaaggatgcaacctctgacgttctgcgccttcctaggagagtcttacatgtgttgagatttcacaagcaatgcgagttgtaaaataccagctctacaagaagctaggctctgtgacggcatagttttcagtagctttatcacaatattcacaatggagaattatatgacatggtagcagaaataggcccttttatgtgttgcttctattttacctcaaattgtagatatagggtaatcaataaaatccatccatgcctttcacacactaagt

SEQ ID NO: 4535 - protein, 475 aa, Homo sapiens; identical to SEQ ID NO: 4139

SEQ ID NO: 4536 - DNA, 3887 bp, Homo sapiens
aaaaaaaaaaaaaaaaaaaaaaaaaaaagaaaaaagaaaaaaaaaaggaggaggaggaggagggtgagagagaagctgggagagcagagaaaaggggccaccggtcgcccccccgcttccccgcacgcgctctccagccgcggccgcccgcctgccgcggtcaccccggcctctgcctctgtcccccagtgatcggatcaaggcgctgagcgaggccctgcctgcggggcggccatgcggcggtgacaggagcgcgaccgacacgcacgggcccctcgccccctctcgcctcccgtccgctcgccagctcccctcagccgaggctgctccgcggcggccgcagcccgcgcgcggcccacactcgcctccccgttgaagatgaggagtcctcggagagcaggatggtggtgacattcctcatgtcagctctcgagtccatgtgtaaagaactggccaagtccaaagccgaagtggcctgcattgcagtgtatgaaacagacgtgtttgtcgtcggaactgaaagaggacgtgcttttgtcaataccagaaaggattttcaaaaagattttgtaaaatattgtgttgaagaagaagaaaaagctgcagagatgcataaaatgaaatctacaacccaggcaaatcggatgagtgtagatgctgtagaaattgaaacactcagaaaaacagttgaggactatttctgcttttgctatgggaaagctttaggcaaatccacagtggtacctgtaccatatgagaagatgctgcgagaccagtcggctgtggtagtgcaggggcttccggaaggtgttgcctttaaacaccccgagaactatgatcttgcaaccctgaaatggattttggagaacaaagcagggatttcattcatcattaagagaccttttttagagccaaagaagcatgtaggtggtcgtgtgatggtaacagatgctgacaggtcaatactatctccaggtggaagttgtggccccatcaaagtgaaaactgaacccacagaagattctggcatttccctggaaatggcagctgtgacagtaaaggaagaatcagaagatcctgattattatcaatataacattcaagcaggcccttctgaaactgatgatgttgatgaaaaacagcccctatcgaagcctttgcaaggaagccaccattcttcagagggcaatgaaggcacagaaatggaagtaccagcagaagatgatgattattctccaccgtctaagagaccaaaggccaatgagctaccgcagccaccagtcccggaacccgccaatgctgggaagcggaaagtgagggagttcaacttcgagaaatggaatgctcgcatcactgatctacgtaaacaagttgaagaattgtttgaaaggaaatatgctcaagccataaaagccaaaggtccggtgacgatcccgtaccctcttttccagtctcatgttgaagatctttatgtagaaggacttcctgaaggaattccttttagaaggccatctacttacggaattcctcgcctggagaggatattacttgcaaaggaaaggattcgttttgtgattaagaaacatgagcttctgaattcaacacgtgaagatttacagcttgataagccagcttcaggagtaaaggaagaatggtatgccagaatcactaaattaagaaagatggtggatcagcttttctgcaaaaaatttgcggaagccttggggagcactgaagccaaggctgtaccgtaccaaaaatttgaggcacacccgaatgatctgtacgtggaaggactgccagaaaacattcctttccgaagtccctcatggtatggaatcccaaggctggaaaaaatcattcaagtgggcaatcgaattaaatttgttattaaaagaccagaacttctgactcacagtaccactgaagttactcagccaagaacgaatacaccagtcaaagaagattggaatgtcagaattaccaagctacggaagcaagtggaagagatttttaatttgaaatttgctcaagctcttggactcaccgaggcagtaaaagtaccatatcctgtgtttgaatcaaacccggagttcttgtatgtggaaggcttgccagaggggattcccttccgaagccctacctggtttggaattccacgacttgaaaggatcgtccgcgggagtaataaaatcaagttcgttgttaaaaaacctgaactagttatttcctacttgcctcctgggatggctagtaaaataaacactaaagctttgcagtcccccaaaagaccacgaagtcctgggagtaattcaaaggttcctgaaattgaggtcaccgtggaaggccctaataacaacaatcctcaaacctcagctgttcgaaccccgacccagactaacggttctaacgttcccttcaagccacgagggagagagttttcctttgaggcctggaatgccaaaatcacggacctaaaacagaaagttgaaaatctcttcaatgagaaatgtggggaagctcttggccttaaacaagctgtgaaggtgccgttcgcgttatttgagtctttcccggaagacttttatgtggaaggcttacctgagggtgtgccattccgaagaccatcgacttttggcattccgaggctggagaagatactcagaaacaaagccaaaattaagttcatcattaaaaagcccgaaatgtttgagacggcgattaaggagagcacctcctctaagagccctcccagaaaaataaattcatcacccaatgttaatactactgcatcaggtgttgaagaccttaacatcattcaggtgacaattccagatgatgataatgaaagactctcgaaagttgaaaaagctagacagctaagagaacaagtgaatgacctctttagtcggaaatttggtgaagctattggtatgggttttcctgtgaaagttccctacaggaaaatcacaattaaccctggctgtgtggtggttgatggcatgcccccgggggtgtccttcaaagcccccagctacctggaaatcagctccatgagaaggatcttagactctgccgagtttatcaaattcacggtcattagaccatttccaggacttgtgattaataaccagctggttgatcagagtgagtcagaaggccccgtgatacaagaatcagctgaaccaagccagttggaagttccagccacagaagaaataaaagagactgatggaagctctcagatcaagcaagaaccagaccccacgtggtagacctcttccctcctaggcaaaaccatctggatcacctaacagtcagaggtcagtatctcagcgtgtgaattatagaggaaatacagagagaacctcttccacttttacttttcgtccaaataaaatgcatggtgtaccagaagttgaagatcgggttgaggattggggctagctcgatgacactaaggccccaacatcgcgggacctgctgtggcgcggattcttaggaacgctgttctagccggccccctctccaggggtcgccgtggccggcattatttcctagttcttcttgtaaccctgaggtgccagcgcggggagtgaggaggggtcagggggctaaggatgcaacctctgacgttctgcgccttcctaggagagtcttacatgtgttgagatttcacaagcaatgcgagttgtaaaataccagctctacaagaagctaggctctgtgacggcatagttttcagtagctttatcacaatattcacaatggagaattatatgacatggtagcagaaataggcccttttatgtgttgcttctattttacctcaaattgtagatatagggtaatcaataaaatccatccatgcctttcacacactaagt

SEQ ID NO: 4537 - protein, 957 aa, Homo sapiens; identical to SEQ ID NO: 4041

SEQ ID NO: 4538 - DNA, 5080 bp, Homo sapiens
aaaaaaaaaaaaaaaaaaaaaaaaaaaagaaaaaagaaaaaaaaaaggaggaggaggaggagggtgagagagaagctgggagagcagagaaaaggggccaccggtcgcccccccgcttccccgcacgcgctctccagccgcggccgcccgcctgccgcggtcaccccggcctctgcctctgtcccccagtgatcggatcaaggcgctgagcgaggccctgcctgcggggcggccatgcggcggtgacaggagcgcgaccgacacgcacgggcccctcgccccctctcgcctcccgtccgctcgccagctcccctcagccgaggctgctccgcggcggccgcagcccgcgcgcggcccacactcgcctccccgttgaagatgaggagtcctcggagagcaggatggtggtgacattcctcatgtcagctctcgagtccatgtgtaaagaactggccaagtccaaagccgaagtggcctgcattgcagtgtatgaaacagacgtgtttgtcgtcggaactgaaagaggacgtgcttttgtcaataccagaaaggattttcaaaaagattttgtaaaatattgtgttgaagaagaagaaaaagctgcagagatgcataaaatgaaatctacaacccaggcaaatcggatgagtgtagatgctgtagaaattgaaacactcagaaaaacagttgaggactatttctgcttttgctatgggaaagctttaggcaaatccacagtggtacctgtaccatatgagaagatgctgcgagaccagtcggctgtggtagtgcaggggcttccggaaggtgttgcctttaaacaccccgagaactatgatcttgcaaccctgaaatggattttggagaacaaagcagggatttcattcatcattaagagaccttttttagagccaaagaagcatgtaggtggtcgtgtgatggtaacagatgctgacaggtcaatactatctccaggtggaagttgtggccccatcaaagtgaaaactgaacccacagaagattctggcatttccctggaaatggcagctgtgacagtaaaggaagaatcagaagatcctgattattatcaatataacattcaagcaggcccttctgaaactgatgatgttgatgaaaaacagcccctatcgaagcctttgcaaggaagccaccattcttcagagggcaatgaaggcacagaaatggaagtaccagcagaagatgatgattattctccaccgtctaagagaccaaaggccaatgagctaccgcagccaccagtcccggaacccgccaatgctgggaagcggaaagtgagggagttcaacttcgagaaatggaatgctcgcatcactgatctacgtaaacaagttgaagaattgtttgaaaggaaatatgctcaagccataaaagccaaaggtccggtgacgatcccgtaccctcttttccagtctcatgttgaagatctttatgtagaaggacttcctgaaggaattccttttagaaggccatctacttacggaattcctcgcctggagaggatattacttgcaaaggaaaggattcgttttgtgattaagaaacatgagcttctgaattcaacacgtgaagatttacagcttgataagccagcttcaggagtaaaggaagaatggtatgccagaatcactaaattaagaaagatggtggatcagcttttctgcaaaaaatttgcggaagccttggggagcactgaagccaaggctgtaccgtaccaaaaatttgaggcacacccgaatgatctgtacgtggaaggactgccagaaaacattcctttccgaagtccctcatggtatggaatcccaaggctggaaaaaatcattcaagtgggcaatcgaattaaatttgttattaaaagaccagaacttctgactcacagtaccactgaagttactcagccaagaacgaatacaccagtcaaagaagattggaatgtcagaattaccaagctacggaagcaagtggaagagatttttaatttgaaatttgctcaagctcttggactcaccgaggcagtaaaagtaccatatcctgtgtttgaatcaaacccggagttcttgtatgtggaaggcttgccagaggggattcccttccgaagccctacctggtttggaattccacgacttgaaaggatcgtccgcgggagtaataaaatcaagttcgttgttaaaaaacctgaactagttatttcctacttgcctcctgggatggctagtaaaataaacactaaagctttgcagtcccccaaaagaccacgaagtcctgggagtaattcaaaggttcctgaaattgaggtcaccgtggaaggccctaataacaacaatcctcaaacctcagctgttcgaaccccgacccagactaacggttctaacgttcccttcaagccacgagggagagagttttcctttgaggcctggaatgccaaaatcacggacctaaaacagaaagttgaaaatctcttcaatgagaaatgtggggaagctcttggccttaaacaagctgtgaaggtgccgttcgcgttatttgagtctttcccggaagacttttatgtggaaggcttacctgagggtgtgccattccgaagaccatcgacttttggcattccgaggctggagaagatactcagaaacaaagccaaaattaagttcatcattaaaaagcccgaaatgtttgagacggcgattaaggagagcacctcctctaagagccctcccagaaaaataaattcatcacccaatgttaatactactgcatcaggtgttgaagaccttaacatcattcaggtgacaattccagatgatgataatgaaagactctcgaaagttgaaaaagctagacagctaagagaacaagtgaatgacctctttagtcggaaatttggtgaagctattggtatgggttttcctgtgaaagttccctacaggaaaatcacaattaaccctggctgtgtggtggttgatggcatgcccccgggggtgtccttcaaagcccccagctacctggaaatcagctccatgagaaggatcttagactctgccgagtttatcaaattcacggtcattagaccatttccaggacttgtgattaataaccagctggttgatcagagtgagtcagaaggccccgtgatacaagaatcagctgaaccaagccagttggaagttccagccacagaaggtaaaaggacctcttccctcctagggtaaatcagcttctgtgtcagggatgctgtgtggtgtccatctgaaccccctgcatacgcgtagctaatgtgatctccccactttcacataagatggtggccctgccttcagggaatgtgggagccaggtgggagccttcccggatatttaagctagaagattctacagggagattctccttggatcaatatatgtctctcagtcaaagatgtaaaagcacttttgccttaaaaagaatgttctgtttctaaatagagtcaacgttgtcctcctcattggaattcactatgagtcagaatcattagactgacttttttttttccatagtaatagtattttgcagagtctcacagagctgcagatcttttgttcatcttgcagagttaacaagtctgatcctgttagtccagatttcttaaatttggccaagttataataggagcagtagcttgagacccgaagtcaggaaactttgacaatggatttttttttttaatccagagacttgtactggaatttgccttaccctgtcagctcatggacttaaggtttcatcccgctttatgagtgcttctgaatccaagtcattgttacctgaatttgcaaattaagttgtgatattcgtgactgttaaattcctgtaattagattaacctctttgcttgcttgtttgttttctctcctattttagcttaaagtatcagtggttgagaagagcttttcggacctgttactaccccaagctgtgtaatatacttgtataacagaaataccttctatacaaacctttttttctacttttagatagaaatgtctactttttcagcagttctgtgaattaaagagcagagtgactgtgggtctggaatggctggtgtacttgggaatgtactatcaggattttacagcaatgctgggaaatgacagggaaaatgacaggaatgaatctcaccagattttttatgtactcagcagagccttgagttacggtgtttattttccaatcaagtgaagatatctcctacttctcctactggaacatctcagcttctgcagtgaagaaaaattcctgtgatagttcagttctttagtttttctatttgaaaaaaaaaaatcatttaaatgatcctttgttcacggctctccttaatgactgagtgaacagttcctatctgtatatttgactaaaccttttcctaagctatctctcatggttcctatgtttttttatcataattaaaagcaaaaccatctggatcacctaacagtcagaggtcagtatctcagcgtgtgaattatagaggaaatacagagagaacctcttccacttttacttttcgtccaaataaaatgcatggtgtaccagaagttgaagatcgggttgaggattggggctagctcgatgacactaaggccccaacatcgcgggacctgctgtggcgcggattcttaggaacgctgttctagccggccccctctccaggggtcgccgtggccggcattatttcctagttcttcttgtaaccctgaggtgccagcgcggggagtgaggaggggtcagggggctaaggatgcaacctctgacgttctgcgccttcctaggagagtcttacatgtgttgagatttcacaagcaatgcgagttgtaaaataccagctctacaagaagctaggctctgtgacggcatagttttcagtagctttatcacaatattcacaatggagaattatatgacatggtagcagaaataggcccttttatgtgttgcttctattttacctcaaattgtagatatagggtaatcaataaaatccatccatgcctttcacacactaagt

SEQ ID NO: 4539 - protein, 947 aa, Homo sapiens
MVVTFLMSALESMCKELAKSKAEVACIAVYETDVFVVGTERGRAFVNTRKDFQKDFVKYCVEEEEKAAEMHKMKSTTQANRMSVDAVEIETLRKTVEDYFCFCYGKALGKSTVVPVPYEKMLRDQSAVVVQGLPEGVAFKHPENYDLATLKWILENKAGISFIIKRPFLEPKKHVGGRVMVTDADRSILSPGGSCGPIKVKTEPTEDSGISLEMAAVTVKEESEDPDYYQYNIQAGPSETDDVDEKQPLSKPLQGSHHSSEGNEGTEMEVPAEDDDYSPPSKRPKANELPQPPVPEPANAGKRKVREFNFEKWNARITDLRKQVEELFERKYAQAIKAKGPVTIPYPLFQSHVEDLYVEGLPEGIPFRRPSTYGIPRLERILLAKERIRFVIKKHELLNSTREDLQLDKPASGVKEEWYARITKLRKMVDQLFCKKFAEALGSTEAKAVPYQKFEAHPNDLYVEGLPENIPFRSPSWYGIPRLEKIIQVGNRIKFVIKRPELLTHSTTEVTQPRTNTPVKEDWNVRITKLRKQVEEIFNLKFAQALGLTEAVKVPYPVFESNPEFLYVEGLPEGIPFRSPTWFGIPRLERIVRGSNKIKFVVKKPELVISYLPPGMASKINTKALQSPKRPRSPGSNSKVPEIEVTVEGPNNNNPQTSAVRTPTQTNGSNVPFKPRGREFSFEAWNAKITDLKQKVENLFNEKCGEALGLKQAVKVPFALFESFPEDFYVEGLPEGVPFRRPSTFGIPRLEKILRNKAKIKFIIKKPEMFETAIKESTSSKSPPRKINSSPNVNTTASGVEDLNIIQVTIPDDDNERLSKVEKARQLREQVNDLFSRKFGEAIGMGFPVKVPYRKITINPGCVVVDGMPPGVSFKAPSYLEISSMRRILDSAEFIKFTVIRPFPGLVINNQLVDQSESEGPVIQESAEPSQLEVPATEGKRTSSLLG

SEQ ID NO: 4540 - DNA, 7825 bp, Homo sapiens
aaaaaaaaaaaaaaaaaaaaaaaaaaaagaaaaaagaaaaaaaaaaggaggaggaggaggagggtgagagagaagctgggagagcagagaaaaggggccaccggtcgcccccccgcttccccgcacgcgctctccagccgcggccgcccgcctgccgcggtcaccccggcctctgcctctgtcccccagtgatcggatcaaggcgctgagcgaggccctgcctgcggggcggccatgcggcggtgacaggagcgcgaccgacacgcacgggcccctcgccccctctcgcctcccgtccgctcgccagctcccctcagccgaggctgctccgcggcggccgcagcccgcgcgcggcccacactcgcctcccctcggcacccccggccccggagctgcctggaggcggccgcactcggggatcatggcccaagttgcaatgtccaccctccccgttgaagatgaggagtcctcggagagcaggatggtggtgacattcctcatgtcagctctcgagtccatgtgtaaagaactggccaagtccaaagccgaagtggcctgcattgcagtgtatgaaacagacgtgtttgtcgtcggaactgaaagaggacgtgcttttgtcaataccagaaaggattttcaaaaagattttgtaaaatattgtgttgaagaagaagaaaaagctgcagagatgcataaaatgaaatctacaacccaggcaaatcggatgagtgtagatgctgtagaaattgaaacactcagaaaaacagttgaggactatttctgcttttgctatgggaaagctttaggcaaatccacagtggtacctgtaccatatgagaagatgctgcgagaccagtcggctgtggtagtgcaggggcttccggaaggtgttgcctttaaacaccccgagaactatgatcttgcaaccctgaaatggattttggagaacaaagcagggatttcattcatcattaagagaccttttttagagccaaagaagcatgtaggtggtcgtgtgatggtaacagatgctgacaggtcaatactatctccaggtggaagttgtggccccatcaaagtgaaaactgaacccacagaagattctggaagccaccattcttcagagggcaatgaaggcacagaaatggaagtaccagcagaagattctactcaacatgtcccttcagaaacaagtgaggaccctgaagttgaggtgactattgaagatgatgattattctccaccgtctaagagaccaaaggccaatgagctaccgcagccaccagtcccggaacccgccaatgctgggaagcggaaagtgagggagttcaacttcgagaaatggaatgctcgcatcactgatctacgtaaacaagttgaagaattgtttgaaaggaaatatgctcaagccataaaagccaaaggtccggtgacgatcccgtaccctcttttccagtctcatgttgaagatctttatgtagaaggacttcctgaaggaattccttttagaaggccatctacttacggaattcctcgcctggagaggatattacttgcaaaggaaaggattcgttttgtgattaagaaacatgagcttctgaattcaacacgtgaagatttacagcttgataagccagcttcaggagtaaaggaagaatggtatgccagaatcactaaattaagaaagatggtggatcagcttttctgcaaaaaatttgcggaagccttggggagcactgaagccaaggctgtaccgtaccaaaaatttgaggcacacccgaatgatctgtacgtggaaggactgccagaaaacattcctttccgaagtccctcatggtatggaatcccaaggctggaaaaaatcattcaagtgggcaatcgaattaaatttgttattaaaagaccagaacttctgactcacagtaccactgaagttactcagccaagaacgaatacaccagctcaagctcttggactcaccgaggcagtaaaagtaccatatcctgtgtttgaatcaaacccggagttcttgtatgtggaaggcttgccagaggggattcccttccgaagccctacctggtttggaattccacgacttgaaaggatcgtccgcgggagtaataaaatcaagttcgttgttaaaaaacctgaactagttatttcctacttgcctcctgggatggctagtaaaataaacactaaagctttgcagtcccccaaaagaccacgaagtcctgggagtaattcaaaggttcctgaaattgaggtcaccgtggaaggccctaataacaacaatcctcaaacctcagctgttcgaaccccgacccagactaacggttctaacgttcccttcaagccacgagggagagagttttcctttgaggcctggaatgccaaaatcacggacctaaaacagaaagttgaaaatctcttcaatgagaaatgtggggaagctcttggccttaaacaagctgtgaaggtgccgttcgcgttatttgagtctttcccggaagacttttatgtggaaggcttacctgagggtgtgccattccgaagaccatcgacttttggcattccgaggctggagaagatactcagaaacaaagccaaaattaagttcatcattaaaaagcccgaaatgtttgagacggcgattaaggagagcacctcctctaagagccctcccagaaaaataaattcatcacccaatgttaatactactgcatcaggtgttgaagaccttaacatcattcaggtgacaattccagatgatgataatgaaagactctcgaaagttgaaaaagctagacagctaagagaacaagtgaatgacctctttagtcggaaatttggtgaagctattggtatgggttttcctgtgaaagttccctacaggaaaatcacaattaaccctggctgtgtggtggttgatggcatgcccccgggggtgtccttcaaagcccccagctacctggaaatcagctccatgagaaggatcttagactctgccgagtttatcaaattcacggtcattaggtaagtgagagtttcctgcttagtcacaggagcgaatctggagctcatgaggctgactcttctaaaatgcagccacaggtagtcatcgaatccggcttcctatgctgtgcaatcaacaaatcaaaataacttgtgtcatcattagaatgtcagatgtgcttctacgaactaagctgactcttttaattctttggcaaagggttggcaaactaggactgtttgccaaattcaggctgcctcctatttttagagtcttcctgaaacacagctacacccgtattatccatggctgctttcctgtcacagtgagtaagtagctgggactgagaaggcatggcctccaaagtctaaaatatttactctctagcactttgtagaaaaaccttagctaggcacagtggctaacgcctgtaatcccagcattttgggaggccaaggcaggcagatcacctgaggtcaggagttccagaccagcctggccaacatggtgaaatcccatctctacaaaaataaaacagttagctgggcatgatggcgggtgcctgtaatcccagctactcgggaggctgaggcaggatagtcgcttgaacccaggaggtggaggttgcaatgagccaagatcatgccactgcactccagcctggacgacagagtgagactccatcacaagaaaaaaagaactttgtcaacctctgtcttagggcgccttgtcacaggcttcgggtcagacggattcaaccttgcatcagccatttgttagccaggtcactctgttctttgtctgtaaatgagattgatcgttgttcccactgagagtgtcagctccttcccgtagagcaggcatgatgattgtactcacctctgacaccattgtgagtgccacattccttcccacgtccttgtcactgtaagagatgcccacctgagcaccaaccccaggttatcttcccctttgtcttccagccccccagaaacagctacgactcaacctacccaatcatttcatcatcagattgccactgtctctagttcaggtctcttgggactggcactcagaaatctcataataaatcctcttgaggcttctcatacactcgtcttcttccaatcttctttccctcaaaatctcatattttggttccacttcacccaccgtcattctccatatcactcccaggagttaggcaaaaagccccttccgttcttccgtatgttaaacttagaatcactctgttccctgctctgcgtttctattttttgtttttcctccatttactagtagcttaacactttctaacagtgttcttattattgatacgtatctatctcttccataagcttataaggtcacggataatacttctcattgtagtacgtaaatgacgtgggctagatatgagttgaataaacagttatacctgtaaattcttacagagtgaaaataaattgttatactttacaatttgtttctctctttagaccatttccaggacttgtgattaataaccgtgagtattttgtgaagtgttttgtttttgttttttcctggggtctgacgtgtgtgcgtgtgagtgtgtatacatgcttaacgtatatcacgttacttcacctatgtcagtaaccaggccaaatacttgttttagccctcagtaaaaacaccaggcacttcctagttgtaaaattattcaagcttcttaacttcctatcctcgatgcacttaatcataaaatggtaataatagcaccgattttgggggagtcgttccagtagatggaaagcatctggaacaggtgtcagcaagctcctgccgacgtgtatgcataaagttttattgaaaccaccatcgtgtccatttgtttatggcagaactgagagatggcagcagcaagtgtgtgcctgcaaaacctaaaatatttactaattggctctgcaagaaaagagtttgcatccccctaacctagaacagtgtctagcctctagtatgtgtttagcctacagtatgtgctcagcgaatacaatctatatttattactgcttttatgactgttataattactgtgcttggatttcgttacaaagtaagtcacaatgtgcctgcttctgttagtatttcagcacagtgcctggcacacatggggctctcaaatattgctgagcgagtgaacaaatgtcctttcaattccttaacgttgatgtcattttcaatagtattttgagccaaacttaattttgcgagtgtgttttgttttcttaactttattattaaaaatgtataaaagtgaggccaggcgtggtggctcacgcctgtaatcccagcagtttgggaggctgaggcaggcggatcagttgaggttgggagttggagaccagcccgtccaacatggtgaaagcctgtctctactaaaaatacaaaaatcagctgggtgtggtggcgcgtgcctgtaatcccagctactcaggaggctgaggcaggagagttgcttgaatcctagaggtggaggttgcagtgagctgagatcgtgccattgcactccagcctgggcaacaagagcaaaactctgtcccaataaataaataaataaaatgttctcttttgttcctgttcttgtgcggtagtgtggtatagagttttatggtaattactgtgaattagtgattctgagggacatatcagaactctgaggtttgtttccttctcatcttgagggaaacagcaaatgtatgttaaaatgcttttccaagggaacaacacatccttacattatttaaaccaatctgcttcattttcagagctggttgatcagagtgagtcagaaggccccgtgatacaagaatcagctgaaccaagccagttggaagttccagccacagaagaaataaaagagactgatggaagctctcagatcaagcaagaaccagaccccacgtggtagacctcttccctcctagggtaaatcagcttctgtgtcagggatgctgtgtggtgtccatctgaaccccctgcatacgcgtagctaatgtgatctccccactttcacataagatggtggccctgccttcagggaatgtgggagccaggtgggagccttcccggatatttaagctagaagattctacagggagattctccttggatcaatatatgtctctcagtcaaagatgtaaaagcacttttgccttaaaaagaatgttctgtttctaaatagagtcaacgttgtcctcctcattggaattcactatgagtcagaatcattagactgacttttttttttccatagtaatagtattttgcagagtctcacagagctgcagatcttttgttcatcttgcagagttaacaagtctgatcctgttagtccagatttcttaaatttggccaagttataataggagcagtagcttgagacccgaagtcaggaaactttgacaatggatttttttttttaatccagagacttgtactggaatttgccttaccctgtcagctcatggacttaaggtttcatcccgctttatgagtgcttctgaatccaagtcattgttacctgaatttgcaaattaagttgtgatattcgtgactgttaaattcctgtaattagattaacctctttgcttgcttgtttgttttctctcctattttagcttaaagtatcagtggttgagaagagcttttcggacctgttactaccccaagctgtgtaatatacttgtataacagaaataccttctatacaaacctttttttctacttttagatagaaatgtctactttttcagcagttctgtgaattaaagagcagagtgactgtgggtctggaatggctggtgtacttgggaatgtactatcaggattttacagcaatgctgggaaatgacagggaaaatgacaggaatgaatctcaccagattttttatgtactcagcagagccttgagttacggtgtttattttccaatcaagtgaagatatctcctacttctcctactggaacatctcagcttctgcagtgaagaaaaattcctgtgatagttcagttctttagtttttctatttgaaaaaaaaaaatcatttaaatgatcctttgttcacggctctccttaatgactgagtgaacagttcctatctgtatatttgactaaaccttttcctaagctatctctcatggttcctatgtttttttatcataattaaaagcaaaaccatctggatcacctaacagtcagaggtcagtatctcagcgtgtgaattatagaggaaatacagagagaacctcttccacttttacttttcgtccaaataaaatgcatggtgtaccagaagttgaagatcgggttgaggattggggctagctcgatgacactaaggccccaacatcgcgggacctgctgtggcgcggattcttaggaacgctgttctagccggccccctctccaggggtcgccgtggccggcattatttcctagttcttcttgtaaccctgaggtgccagcgcggggagtgaggaggggtcagggggctaaggatgcaacctctgacgttctgcgccttcctaggagagtcttacatgtgttgagatttcacaagcaatgcgagttgtaaaataccagctctacaagaagctaggctctgtgacggcatagttttcagtagctttatcacaatattcacaatggagaattatatgacatggtagcagaaataggcccttttatgtgttgcttctattttacctcaaattgtagatatagggtaatcaataaaatccatccatgcctttcacacactaagt

SEQ ID NO: 4541 - protein, 872 aa, Homo sapiens
MAQVAMSTLPVEDEESSESRMVVTFLMSALESMCKELAKSKAEVACIAVYETDVFVVGTERGRAFVNTRKDFQKDFVKYCVEEEEKAAEMHKMKSTTQANRMSVDAVEIETLRKTVEDYFCFCYGKALGKSTVVPVPYEKMLRDQSAVVVQGLPEGVAFKHPENYDLATLKWILENKAGISFIIKRPFLEPKKHVGGRVMVTDADRSILSPGGSCGPIKVKTEPTEDSGSHHSSEGNEGTEMEVPAEDSTQHVPSETSEDPEVEVTIEDDDYSPPSKRPKANELPQPPVPEPANAGKRKVREFNFEKWNARITDLRKQVEELFERKYAQAIKAKGPVTIPYPLFQSHVEDLYVEGLPEGIPFRRPSTYGIPRLERILLAKERIRFVIKKHELLNSTREDLQLDKPASGVKEEWYARITKLRKMVDQLFCKKFAEALGSTEAKAVPYQKFEAHPNDLYVEGLPENIPFRSPSWYGIPRLEKIIQVGNRIKFVIKRPELLTHSTTEVTQPRTNTPAQALGLTEAVKVPYPVFESNPEFLYVEGLPEGIPFRSPTWFGIPRLERIVRGSNKIKFVVKKPELVISYLPPGMASKINTKALQSPKRPRSPGSNSKVPEIEVTVEGPNNNNPQTSAVRTPTQTNGSNVPFKPRGREFSFEAWNAKITDLKQKVENLFNEKCGEALGLKQAVKVPFALFESFPEDFYVEGLPEGVPFRRPSTFGIPRLEKILRNKAKIKFIIKKPEMFETAIKESTSSKSPPRKINSSPNVNTTASGVEDLNIIQVTIPDDDNERLSKVEKARQLREQVNDLFSRKFGEAIGMGFPVKVPYRKITINPGCVVVDGMPPGVSFKAPSYLEISSMRRILDSAEFIKFTVIR

SEQ ID NO: 4542 - DNA, 7741 bp, Homo sapiens
aaaaaaaaaaaaaaaaaaaaaaaaaaaagaaaaaagaaaaaaaaaaggaggaggaggaggagggtgagagagaagctgggagagcagagaaaaggggccaccggtcgcccccccgcttccccgcacgcgctctccagccgcggccgcccgcctgccgcggtcaccccggcctctgcctctgtcccccagtgatcggatcaaggcgctgagcgaggccctgcctgcggggcggccatgcggcggtgacaggagcgcgaccgacacgcacgggcccctcgccccctctcgcctcccgtccgctcgccagctcccctcagccgaggctgctccgcggcggccgcagcccgcgcgcggcccacactcgcctcccctcggcacccccggccccggagctgcctggaggcggccgcactcggtgtaaagaactggccaagtccaaagccgaagtggcctgcattgcagtgtatgaaacagacgtgtttgtcgtcggaactgaaagaggacgtgcttttgtcaataccagaaaggattttcaaaaagattttgtaaaatattgtgttgaagaagaagaaaaagctgcagagatgcataaaatgaaatctacaacccaggcaaatcggatgagtgtagatgctgtagaaattgaaacactcagaaaaacagttgaggactatttctgcttttgctatgggaaagctttaggcaaatccacagtggtacctgtaccatatgagaagatgctgcgagaccagtcggctgtggtagtgcaggggcttccggaaggtgttgcctttaaacaccccgagaactatgatcttgcaaccctgaaatggattttggagaacaaagcagggatttcattcatcattaagagaccttttttagagccaaagaagcatgtaggtggtcgtgtgatggtaacagatgctgacaggtcaatactatctccaggtggaagttgtggccccatcaaagtgaaaactgaacccacagaagattctggcatttccctggaaatggcagctgtgacagtaaaggaagaatcagaagatcctgattattatcaatataacattcaaggaagccaccattcttcagagggcaatgaaggcacagaaatggaagtaccagcagaagatgatgattattctccaccgtctaagagaccaaaggccaatgagctaccgcagccaccagtcccggaacccgccaatgctgggaagcggaaagtgagggagttcaacttcgagaaatggaatgctcgcatcactgatctacgtaaacaagttgaagaattgtttgaaaggaaatatgctcaagccataaaagccaaaggtccggtgacgatcccgtaccctcttttccagtctcatgttgaagatctttatgtagaaggacttcctgaaggaattccttttagaaggccatctacttacggaattcctcgcctggagaggatattacttgcaaaggaaaggattcgttttgtgattaagaaacatgagcttctgaattcaacacgtgaagatttacagcttgataagccagcttcaggagtaaaggaagaatggtatgccagaatcactaaattaagaaagatggtggatcagcttttctgcaaaaaatttgcggaagccttggggagcactgaagccaaggctgtaccgtaccaaaaatttgaggcacacccgaatgatctgtacgtggaaggactgccagaaaacattcctttccgaagtccctcatggtatggaatcccaaggctggaaaaaatcattcaagtgggcaatcgaattaaatttgttattaaaagaccagaacttctgactcacagtaccactgaagttactcagccaagaacgaatacaccagtcaaagaagattggaatgtcagaattaccaagctacggaagcaagtggaagagatttttaatttgaaatttgctcaagctcttggactcaccgaggcagtaaaagtaccatatcctgtgtttgaatcaaacccggagttcttgaaaggatcgtccgcgggagtaataaaatcaagttcgttgttaaaaaacctgaactagttatttcctacttgcctcctgggatggctagtaaaataaacactaaagctttgcagtcccccaaaagaccacgaagtcctgggagtaattcaaaggttcctgaaattgaggtcaccgtggaaggccctaataacaacaatcctcaaacctcagctgttcgaaccccgacccagactaacggttctaacgttcccttcaagccacgagggagagagttttcctttgaggcctggaatgccaaaatcacggacctaaaacagaaagttgaaaatctcttcaatgagaaatgtggggaagctcttggccttaaacaagctgtgaaggtgccgttcgcgttatttgagtctttcccggaagacttttatgtggaaggcttacctgagggtgtgccattccgaagaccatcgacttttggcattccgaggctggagaagatactcagaaacaaagccaaaattaagttcatcattaaaaagcccgaaatgtttgagacggcgattaaggagagcacctcctctaagagccctcccagaaaaataaattcatcacccaatgttaatactactgcatcaggtgttgaagaccttaacatcattcaggtgacaattccagatgatgataatgaaagactctcgaaagttgaaaaagctagacagctaagagaacaagtgaatgacctctttagtcggaaatttggtgaagctattggtatgggttttcctgtgaaagttccctacaggaaaatcacaattaaccctggctgtgtggtggttgatggcatgcccccgggggtgtccttcaaagcccccagctacctggaaatcagctccatgagaaggatcttagactctgccgagtttatcaaattcacggtcattaggtaagtgagagtttcctgcttagtcacaggagcgaatctggagctcatgaggctgactcttctaaaatgcagccacaggtagtcatcgaatccggcttcctatgctgtgcaatcaacaaatcaaaataacttgtgtcatcattagaatgtcagatgtgcttctacgaactaagctgactcttttaattctttggcaaagggttggcaaactaggactgtttgccaaattcaggctgcctcctatttttagagtcttcctgaaacacagctacacccgtattatccatggctgctttcctgtcacagtgagtaagtagctgggactgagaaggcatggcctccaaagtctaaaatatttactctctagcactttgtagaaaaaccttagctaggcacagtggctaacgcctgtaatcccagcattttgggaggccaaggcaggcagatcacctgaggtcaggagttccagaccagcctggccaacatggtgaaatcccatctctacaaaaataaaacagttagctgggcatgatggcgggtgcctgtaatcccagctactcgggaggctgaggcaggatagtcgcttgaacccaggaggtggaggttgcaatgagccaagatcatgccactgcactccagcctggacgacagagtgagactccatcacaagaaaaaaagaactttgtcaacctctgtcttagggcgccttgtcacaggcttcgggtcagacggattcaaccttgcatcagccatttgttagccaggtcactctgttctttgtctgtaaatgagattgatcgttgttcccactgagagtgtcagctccttcccgtagagcaggcatgatgattgtactcacctctgacaccattgtgagtgccacattccttcccacgtccttgtcactgtaagagatgcccacctgagcaccaaccccaggttatcttcccctttgtcttccagccccccagaaacagctacgactcaacctacccaatcatttcatcatcagattgccactgtctctagttcaggtctcttgggactggcactcagaaatctcataataaatcctcttgaggcttctcatacactcgtcttcttccaatcttctttccctcaaaatctcatattttggttccacttcacccaccgtcattctccatatcactcccaggagttaggcaaaaagccccttccgttcttccgtatgttaaacttagaatcactctgttccctgctctgcgtttctattttttgtttttcctccatttactagtagcttaacactttctaacagtgttcttattattgatacgtatctatctcttccataagcttataaggtcacggataatacttctcattgtagtacgtaaatgacgtgggctagatatgagttgaataaacagttatacctgtaaattcttacagagtgaaaataaattgttatactttacaatttgtttctctctttagaccatttccaggacttgtgattaataaccgtgagtattttgtgaagtgttttgtttttgttttttcctggggtctgacgtgtgtgcgtgtgagtgtgtatacatgcttaacgtatatcacgttacttcacctatgtcagtaaccaggccaaatacttgttttagccctcagtaaaaacaccaggcacttcctagttgtaaaattattcaagcttcttaacttcctatcctcgatgcacttaatcataaaatggtaataatagcaccgattttgggggagtcgttccagtagatggaaagcatctggaacaggtgtcagcaagctcctgccgacgtgtatgcataaagttttattgaaaccaccatcgtgtccatttgtttatggcagaactgagagatggcagcagcaagtgtgtgcctgcaaaacctaaaatatttactaattggctctgcaagaaaagagtttgcatccccctaacctagaacagtgtctagcctctagtatgtgtttagcctacagtatgtgctcagcgaatacaatctatatttattactgcttttatgactgttataattactgtgcttggatttcgttacaaagtaagtcacaatgtgcctgcttctgttagtatttcagcacagtgcctggcacacatggggctctcaaatattgctgagcgagtgaacaaatgtcctttcaattccttaacgttgatgtcattttcaatagtattttgagccaaacttaattttgcgagtgtgttttgttttcttaactttattattaaaaatgtataaaagtgaggccaggcgtggtggctcacgcctgtaatcccagcagtttgggaggctgaggcaggcggatcagttgaggttgggagttggagaccagcccgtccaacatggtgaaagcctgtctctactaaaaatacaaaaatcagctgggtgtggtggcgcgtgcctgtaatcccagctactcaggaggctgaggcaggagagttgcttgaatcctagaggtggaggttgcagtgagctgagatcgtgccattgcactccagcctgggcaacaagagcaaaactctgtcccaataaataaataaataaaatgttctcttttgttcctgttcttgtgcggtagtgtggtatagagttttatggtaattactgtgaattagtgattctgagggacatatcagaactctgaggtttgtttccttctcatcttgagggaaacagcaaatgtatgttaaaatgcttttccaagggaacaacacatccttacattatttaaaccaatctgcttcattttcagagctggttgatcagagtgagtcagaaggccccgtgatacaagaatcagctgaaccaagccagttggaagttccagccacagaagaaataaaagagactgatggaagctctcagatcaagcaagaaccagaccccacgtggtagacctcttccctcctagggtaaatcagcttctgtgtcagggatgctgtgtggtgtccatctgaaccccctgcatacgcgtagctaatgtgatctccccactttcacataagatggtggccctgccttcagggaatgtgggagccaggtgggagccttcccggatatttaagctagaagattctacagggagattctccttggatcaatatatgtctctcagtcaaagatgtaaaagcacttttgccttaaaaagaatgttctgtttctaaatagagtcaacgttgtcctcctcattggaattcactatgagtcagaatcattagactgacttttttttttccatagtaatagtattttgcagagtctcacagagctgcagatcttttgttcatcttgcagagttaacaagtctgatcctgttagtccagatttcttaaatttggccaagttataataggagcagtagcttgagacccgaagtcaggaaactttgacaatggatttttttttttaatccagagacttgtactggaatttgccttaccctgtcagctcatggacttaaggtttcatcccgctttatgagtgcttctgaatccaagtcattgttacctgaatttgcaaattaagttgtgatattcgtgactgttaaattcctgtaattagattaacctctttgcttgcttgtttgttttctctcctattttagcttaaagtatcagtggttgagaagagcttttcggacctgttactaccccaagctgtgtaatatacttgtataacagaaataccttctatacaaacctttttttctacttttagatagaaatgtctactttttcagcagttctgtgaattaaagagcagagtgactgtgggtctggaatggctggtgtacttgggaatgtactatcaggattttacagcaatgctgggaaatgacagggaaaatgacaggaatgaatctcaccagattttttatgtactcagcagagccttgagttacggtgtttattttccaatcaagtgaagatatctcctacttctcctactggaacatctcagcttctgcagtgaagaaaaattcctgtgatagttcagttctttagtttttctatttgaaaaaaaaaaatcatttaaatgatcctttgttcacggctctccttaatgactgagtgaacagttcctatctgtatatttgactaaaccttttcctaagctatctctcatggttcctatgtttttttatcataattaaaagcaaaaccatctggatcacctaacagtcagaggtcagtatctcagcgtgtgaattatagaggaaatacagagagaacctcttccacttttacttttcgtccaaataaaatgcatggtgtaccagaagttgaagatcgggttgaggattggggctagctcgatgacactaaggccccaacatcgcgggacctgctgtggcgcggattcttaggaacgctgttctagccggccccctctccaggggtcgccgtggccggcattatttcctagttcttcttgtaaccctgaggtgccagcgcggggagtgaggaggggtcagggggctaaggatgcaacctctgacgttctgcgccttcctaggagagtcttacatgtgttgagatttcacaagcaatgcgagttgtaaaataccagctctacaagaagctaggctctgtgacggcatagttttcagtagctttatcacaatattcacaatggagaattatatgacatggtagcagaaataggcccttttatgtgttgcttctattttacctcaaattgtagatatagggtaatcaataaaatccatccatgcctttcacacactaagt

SEQ ID NO: 4543 - protein, 495 aa, Homo sapiens; identical to SEQ ID NO: 4181

SEQ ID NO: 4544 - DNA, 4328 bp, Homo sapiens
aaaaaaaaaaaaaaaaaaaaaaaaaaaagaaaaaagaaaaaaaaaaggaggaggaggaggagggtgagagagaagctgggagagcagagaaaaggggccaccggtcgcccccccgcttccccgcacgcgctctccagccgcggccgcccgcctgccgcggtcaccccggcctctgcctctgtcccccagtgatcggatcaaggcgctgagcgaggccctgcctgcggggcggccatgcggcggtgacaggagcgcgaccgacacgcacgggcccctcgccccctctcgcctcccgtccgctcgccagctcccctcagccgaggctgctccgcggcggccgcagcccgcgcgcggcccacactcgcctcccctcggcacccccggccccggagctgcctggaggcggccgcactcggggatcatggcccaagttgcaatgtccaccctccccgttgaagatgaggagtcctcggagagcaggatggtggtgacattcctcatgtcagctctcgagtccatgtgtaaagaactggccaagtccaaagccgaagtggcctgcattgcagtgtatgaaacagacgtgtttgtcgtcggaactgaaagaggacgtgcttttgtcaataccagaaaggattttcaaaaagattttgtaaaatattgtgttgaagaagaagaaaaagctgcagagatgcataaaatgaaatctacaacccaggcaaatcggatgagtgtagatgctgtagaaattgaaacactcagaaaaacagttgaggactatttctgcttttgctatgggaaagctttaggcaaatccacagtggtacctgtaccatatgagaagatgctgcgagaccagtcggctgtggtagtgcaggggcttccggaaggtgttgcctttaaacaccccgagaactatgatcttgcaaccctgaaatggattttggagaacaaagcagggatttcattcatcattaagagaccttttttagagccaaagaagcatgtaggtggtcgtgtgatggtaacagatgctgacaggtcaatactatctccaggtggaagttgtggccccatcaaagtgaaaactgaacccacagaagattctggaagccaccattcttcagagggcaatgaaggcacagaaatggaagtaccagcagaagattctactcaacatgtcccttcagaaacaagtgaggaccctgaagttgaggtgactattgaagatgatgattattctccaccgtctaagagaccaaaggccaatgagctaccgcagccaccagtcccggaacccgccaatgctgggaagcggaaagtgagggagttcaacttcgagaaatggaatgctcgcatcactgatctacgtaaacaagttgaagaattgtttgaaaggaaatatgctcaagccataaaagccaaaggtccggtgacgatcccgtaccctcttttccagtctcatgttgaagatctttatgtagaaggacttcctgaaggaattccttttagaaggccatctacttacggaattcctcgcctggagaggatattacttgcaaaggaaaggattcgttttgtgattaagaaacatgagcttctgaattcaacacgtgaagatttacagcttgataagccagcttcaggagtaaaggaagaatggtatgccagaatcactaaattaagaaagatggtggatcagcttttctgcaaaaaatttgcggaagccttggggagcactgaagccaaggctgtaccgtaccaaaaatttgaggcacacccgaatgatctgtacgtggaaggactgccagaaaacattcctttccgaagtccctcatggtatggaatcccaaggctggaaaaaatcattcaagtgggcaatcgaattaaatttgttattaaaagaccagaacttctgactcacagtaccactgaagttactcagccaagaacgaatacaccagtcaaagaagattggaatgtcagaattaccaagctacggaagcaagtggaagagatttttaatttgaaatttgcttagatttgttgacagcggtttcctggagtgctgtcttgagaacgattctgaggaggctcagcaagaaagagtgtttcagttgattgggtgtgtctgtcatggagaaggaactcaagctcttggactcaccgaggcagtaaaagtaccatatcctgtgtttgaatcaaacccggagttcttgtatgtggaaggcttgccagaggggattcccttccgaagccctacctggtttggaattccacgacttgaaaggatcgtccgcgggagtaataaaatcaagttcgttgttaaaaaacctgaactagttatttcctacttgcctcctgggatggctagtaaaataaacactaaagctttgcagtcccccaaaagaccacgaagtcctgggagtaattcaaaggttcctgaaattgaggtcaccgtggaaggccctaataacaacaatcctcaaacctcagctgttcgaaccccgacccagactaacggttctaacgttcccttcaagccacgagggagagagttttcctttgaggcctggaatgccaaaatcacggacctaaaacagaaagttgaaaatctcttcaatgagaaatgtggggaagctcttggccttaaacaagctgtgaaggtgccgttcgcgttatttgagtctttcccggaagacttttatgtggaaggcttacctgagggtgtgccattccgaagaccatcgacttttggcattccgaggctggagaagatactcagaaacaaagccaaaattaagttcatcattaaaaagcccgaaatgtttgagacggcgattaaggagagcacctcctctaagagccctcccagaaaaataaattcatcacccaatgttaatactactgcatcaggtgttgaagaccttaacatcattcaggtgacaattccagatgatgataatgaaagactctcgaaagttgaaaaagctagacagctaagagaacaagtgaatgacctctttagtcggaaatttggtgaagctattggtatgggttttcctgtgaaagttccctacaggaaaatcacaattaaccctggctgtgtggtggttgatggcatgcccccgggggtgtccttcaaagcccccagctacctggaaatcagctccatgagaaggatcttagactctgccgagtttatcaaattcacggtcattagaccatttccaggacttgtgattaataaccagctggttgatcagagtgagtcagaaggccccgtgatacaagaatcagctgaaccaagccagttggaagttccagccacagaagaaataaaagagactgatggaagctctcagatcaagcaagaaccagaccccacgtggtagacctcttccctcctaggcttaaagtatcagtggttgagaagagcttttcggacctgttactaccccaagctgtagccttgagttacggtgtttattttccaatcaagtgaagatatctcctacttctcctactggaacatctcagcttctgcagtgaagaaaaattcctgtgatagttcagttctttagtttttctatttgaaaaaaaaaaatcatttaaatgatcctttgttcacggctctccttaatgactgagtgaacagttcctatctgtatatttgactaaaccttttcctaagctatctctcatggttcctatgtttttttatcataattaaaagcaaaaccatctggatcacctaacagtcagaggtcagtatctcagcgtgtgaattatagaggaaatacagagagaacctcttccacttttacttttcgtccaaataaaatgcatggtgtaccagaagttgaagatcgggttgaggattggggctagctcgatgacactaaggccccaacatcgcgggacctgctgtggcgcggattcttaggaacgctgttctagccggccccctctccaggggtcgccgtggccggcattatttcctagttcttcttgtaaccctgaggtgccagcgcggggagtgaggaggggtcagggggctaaggatgcaacctctgacgttctgcgccttcctaggagagtcttacatgtgttgagatttcacaagcaatgcgagttgtaaaataccagctctacaagaagctaggctctgtgacggcatagttttcagtagctttatcacaatattcacaatggagaattatatgacatggtagcagaaataggcccttttatgtgttgcttctattttacctcaaattgtagatatagggtaatcaataaaatccatccatgcctttcacacactaagt

SEQ ID NO: 4545 - protein, 538 aa, Homo sapiens; identical to SEQ ID NO: 4183

SEQ ID NO: 4546 - DNA, 5013 bp, Homo sapiens
aaaaaaaaaaaaaaaaaaaaaaaaaaaagaaaaaagaaaaaaaaaaggaggaggaggaggagggtgagagagaagctgggagagcagagaaaaggggccaccggtcgcccccccgcttccccgcacgcgctctccagccgcggccgcccgcctgccgcggtcaccccggcctctgcctctgtcccccagtgatcggatcaaggcgctgagcgaggccctgcctgcggggcggccatgcggcggtgacaggagcgcgaccgacacgcacgggcccctcgccccctctcgcctcccgtccgctcgccagctcccctcagccgaggctgctccgcggcggccgcagcccgcgcgcggcccacactcgcctccccgttgaagatgaggagtcctcggagagcaggatggtggtgacattcctcatgtcagctctcgagtccatgtgtaaagaactggccaagtccaaagccgaagtggcctgcattgcagtgtatgaaacagacgtgtttgtcgtcggaactgaaagaggacgtgcttttgtcaataccagaaaggattttcaaaaagattttgtaaaatattgtgttgaagaagaagaaaaagctgcagagatgcataaaatgaaatctacaacccaggcaaatcggatgagtgtagatgctgtagaaattgaaacactcagaaaaacagttgaggactatttctgcttttgctatgggaaagctttaggcaaatccacagtggtacctgtaccatatgagaagatgctgcgagaccagtcggctgtggtagtgcaggggcttccggaaggtgttgcctttaaacaccccgagaactatgatcttgcaaccctgaaatggattttggagaacaaagcagggatttcattcatcattaagagaccttttttagagccaaagaagcatgtaggtggtcgtgtgatggtaacagatgctgacaggtcaatactatctccaggtggaagttgtggccccatcaaagtgaaaactgaacccacagaagattctggcatttccctggaaatggcagctgtgacagtaaaggaagaatcagaagatcctgattattatcaatataacattcaagcaggcccttctgaaactgatgatgttgatgaaaaacagcccctatcgaagcctttgcaaggaagccaccattcttcagagggcaatgaaggcacagaaatggaagtaccagcagaagatgatgattattctccaccgtctaagagaccaaaggccaatgagctaccgcagccaccagtcccggaacccgccaatgctgggaagcggaaagtgagggagttcaacttcgagaaatggaatgctcgcatcactgatctacgtaaacaagttgaagaattgtttgaaaggaaatatgctcaagccataaaagccaaaggtccggtgacgatcccgtaccctcttttccagtctcatgttgaagatctttatgtagaaggacttcctgaaggaattccttttagaaggccatctacttacggaattcctcgcctggagaggatattacttgcaaaggaaaggattcgttttgtgattaagaaacatgagcttctgaattcaacacgtgaagatttacagcttgataagccagcttcaggagtaaaggaagaatggtatgccagaatcactaaattaagaaagatggtggatcagcttttctgcaaaaaatttgcggaagccttggggagcactgaagccaaggctgtaccgtaccaaaaatttgaggcacacccgaatgatctgtacgtggaaggactgccagaaaacattcctttccgaagtccctcatggtatggaatcccaaggctggaaaaaatcattcaagtgggcaatcgaattaaatttgttattaaaagaccagaacttctgactcacagtaccactgaagttactcagccaagaacgaatacaccagtcaaagaagattggaatgtcagaattaccaagctacggaagcaagtggaagagatttttaatttgaaatttgctcaagctcttggactcaccgaggcagtaaaagtaccatatcctgtgtttgaatcaaacccggagttcttgaaaggatcgtccgcgggagtaataaaatcaagttcgttgttaaaaaacctgaactagttatttcctacttgcctcctgggatggctagtaaaataaacactaaagctttgcagtcccccaaaagaccacgaagtcctgggagtaattcaaaggttcctgaaattgaggtcaccgtggaaggccctaataacaacaatcctcaaacctcagctgttcgaaccccgacccagactaacggttctaacgttcccttcaagccacgagggagagagttttcctttgaggcctggaatgccaaaatcacggacctaaaacagaaagttgaaaatctcttcaatgagaaatgtggggaagctcttggccttaaacaagctgtgaaggtgccgttcgcgttatttgagtctttcccggaagacttttatgtggaaggcttacctgagggtgtgccattccgaagaccatcgacttttggcattccgaggctggagaagatactcagaaacaaagccaaaattaagttcatcattaaaaagcccgaaatgtttgagacggcgattaaggagagcacctcctctaagagccctcccagaaaaataaattcatcacccaatgttaatactactgcatcaggtgttgaagaccttaacatcattcaggtgacaattccagatgatgataatgaaagactctcgaaagttgaaaaagctagacagctaagagaacaagtgaatgacctctttagtcggaaatttggtgaagctattggtatgggttttcctgtgaaagttccctacaggaaaatcacaattaaccctggctgtgtggtggttgatggcatgcccccgggggtgtccttcaaagcccccagctacctggaaatcagctccatgagaaggatcttagactctgccgagtttatcaaattcacggtcattagaccatttccaggacttgtgattaataaccagctggttgatcagagtgagtcagaaggccccgtgatacaagaatcagctgaaccaagccagttggaagttccagccacagaaggtaaaaggacctcttccctcctagggtaaatcagcttctgtgtcagggatgctgtgtggtgtccatctgaaccccctgcatacgcgtagctaatgtgatctccccactttcacataagatggtggccctgccttcagggaatgtgggagccaggtgggagccttcccggatatttaagctagaagattctacagggagattctccttggatcaatatatgtctctcagtcaaagatgtaaaagcacttttgccttaaaaagaatgttctgtttctaaatagagtcaacgttgtcctcctcattggaattcactatgagtcagaatcattagactgacttttttttttccatagtaatagtattttgcagagtctcacagagctgcagatcttttgttcatcttgcagagttaacaagtctgatcctgttagtccagatttcttaaatttggccaagttataataggagcagtagcttgagacccgaagtcaggaaactttgacaatggatttttttttttaatccagagacttgtactggaatttgccttaccctgtcagctcatggacttaaggtttcatcccgctttatgagtgcttctgaatccaagtcattgttacctgaatttgcaaattaagttgtgatattcgtgactgttaaattcctgtaattagattaacctctttgcttgcttgtttgttttctctcctattttagcttaaagtatcagtggttgagaagagcttttcggacctgttactaccccaagctgtgtaatatacttgtataacagaaataccttctatacaaacctttttttctacttttagatagaaatgtctactttttcagcagttctgtgaattaaagagcagagtgactgtgggtctggaatggctggtgtacttgggaatgtactatcaggattttacagcaatgctgggaaatgacagggaaaatgacaggaatgaatctcaccagattttttatgtactcagcagagccttgagttacggtgtttattttccaatcaagtgaagatatctcctacttctcctactggaacatctcagcttctgcagtgaagaaaaattcctgtgatagttcagttctttagtttttctatttgaaaaaaaaaaatcatttaaatgatcctttgttcacggctctccttaatgactgagtgaacagttcctatctgtatatttgactaaaccttttcctaagctatctctcatggttcctatgtttttttatcataattaaaagcaaaaccatctggatcacctaacagtcagaggtcagtatctcagcgtgtgaattatagaggaaatacagagagaacctcttccacttttacttttcgtccaaataaaatgcatggtgtaccagaagttgaagatcgggttgaggattggggctagctcgatgacactaaggccccaacatcgcgggacctgctgtggcgcggattcttaggaacgctgttctagccggccccctctccaggggtcgccgtggccggcattatttcctagttcttcttgtaaccctgaggtgccagcgcggggagtgaggaggggtcagggggctaaggatgcaacctctgacgttctgcgccttcctaggagagtcttacatgtgttgagatttcacaagcaatgcgagttgtaaaataccagctctacaagaagctaggctctgtgacggcatagttttcagtagctttatcacaatattcacaatggagaattatatgacatggtagcagaaataggcccttttatgtgttgcttctattttacctcaaattgtagatatagggtaatcaataaaatccatccatgcctttcacacactaagt

SEQ ID NO: 4547 - protein, 584 aa, Homo sapiens; identical to SEQ ID NO: 4077

SEQ ID NO: 4548 - DNA, 5195 bp, Homo sapiens
aaaaaaaaaaaaaaaaaaaaaaaaaaaagaaaaaagaaaaaaaaaaggaggaggaggaggagggtgagagagaagctgggagagcagagaaaaggggccaccggtcgcccccccgcttccccgcacgcgctctccagccgcggccgcccgcctgccgcggtcaccccggcctctgcctctgtcccccagtgatcggatcaaggcgctgagcgaggccctgcctgcggggcggccatgcggcggtgacaggagcgcgaccgacacgcacgggcccctcgccccctctcgcctcccgtccgctcgccagctcccctcagccgaggctgctccgcggcggccgcagcccgcgcgcggcccacactcgcctccccgttgaagatgaggagtcctcggagagcaggatggtggtgacattcctcatgtcagctctcgagtccatgtgtaaagaactggccaagtccaaagccgaagtggcctgcattgcagtgtatgaaacagacgtgtttgtcgtcggaactgaaagaggacgtgcttttgtcaataccagaaaggattttcaaaaagattttgtaaaatattgtgttgaagaagaagaaaaagctgcagagatgcataaaatgaaatctacaacccaggcaaatcggatgagtgtagatgctgtagaaattgaaacactcagaaaaacagttgaggactatttctgcttttgctatgggaaagctttaggcaaatccacagtggtacctgtaccatatgagaagatgctgcgagaccagtcggctgtggtagtgcaggggcttccggaaggtgttgcctttaaacaccccgagaactatgatcttgcaaccctgaaatggattttggagaacaaagcagggatttcattcatcattaagagaccttttttagagccaaagaagcatgtaggtggtcgtgtgatggtaacagatgctgacaggtcaatactatctccaggtggaagttgtggccccatcaaagtgaaaactgaacccacagaagattctggcatttccctggaaatggcagctgtgacagtaaaggaagaatcagaagatcctgattattatcaatataacattcaaggaagccaccattcttcagagggcaatgaaggcacagaaatggaagtaccagcagaagattctactcaacatgtcccttcagaaacaagtgaggaccctgaagttgaggtgactattgaagatgatgattattctccaccgtctaagagaccaaaggccaatgagctaccgcagccaccagtcccggaacccgccaatgctgggaagcggaaagtgagggagttcaacttcgagaaatggaatgctcgcatcactgatctacgtaaacaagttgaagaattgtttgaaaggaaatatgctcaagccataaaagccaaaggtccggtgacgatcccgtaccctcttttccagtctcatgttgaagatctttatgtagaaggacttcctgaaggaattccttttagaaggccatctacttacggaattcctcgcctggagaggatattacttgcaaaggaaaggattcgttttgtgattaagaaacatgagcttctgaattcaacacgtgaagatttacagcttgataagccagcttcaggagtaaaggaagaatggtatgccagaatcactaaattaagaaagatggtggatcagcttttctgcaaaaaatttgcggaagccttggggagcactgaagccaaggctgtaccgtaccaaaaatttgaggcacacccgaatgatctgtacgtggaaggactgccagaaaacattcctttccgaagtccctcatggtatggaatcccaaggctggaaaaaatcattcaagtgggcaatcgaattaaatttgttattaaaagaccagaacttctgactcacagtaccactgaagttactcagccaagaacgaatacaccagtcaaagaagattggaatgtcagaattaccaagctacggaagcaagtggaagagatttttaatttgaaatttgcttagatttgttgacagcggtttcctggagtgctgtcttgagaacgattctgaggaggctcagcaagaaagagtgtttcagttgattgggtgtgtctgtcatggagaaggaactcaagctcttggactcaccgaggcagtaaaagtaccatatcctgtgtttgaatcaaacccggagttcttgtatgtggaaggcttgccagaggggattcccttccgaagccctacctggtttggaattccacgacttgaaaggatcgtccgcgggagtaataaaatcaagttcgttgttaaaaaacctgaactagttatttcctacttgcctcctgggatggctagtaaaataaacactaaagctttgcagtcccccaaaagaccacgaagtcctgggagtaattcaaaggttcctgaaattgaggtcaccgtggaaggccctaataacaacaatcctcaaacctcagctgttcgaaccccgacccagactaacggttctaacgttcccttcaagccacgagggagagagttttcctttgaggcctggaatgccaaaatcacggacctaaaacagaaagttgaaaatctcttcaatgagaaatgtggggaagctcttggccttaaacaagctgtgaaggtgccgttcgcgttatttgagtctttcccggaagacttttatgtggaaggcttacctgagggtgtgccattccgaagaccatcgacttttggcattccgaggctggagaagatactcagaaacaaagccaaaattaagttcatcattaaaaagcccgaaatgtttgagacggcgattaaggagagcacctcctctaagagccctcccagaaaaataaattcatcacccaatgttaatactactgcatcaggtgttgaagaccttaacatcattcaggtgacaattccagatgatgataatgaaagactctcgaaagttgaaaaagctagacagctaagagaacaagtgaatgacctctttagtcggaaatttggtgaagctattggtatgggttttcctgtgaaagttccctacaggaaaatcacaattaaccctggctgtgtggtggttgatggcatgcccccgggggtgtccttcaaagcccccagctacctggaaatcagctccatgagaaggatcttagactctgccgagtttatcaaattcacggtcattagaccatttccaggacttgtgattaataaccagctggttgatcagagtgagtcagaaggccccgtgatacaagaatcagctgaaccaagccagttggaagttccagccacagaaggtaaaaggacctcttccctcctagggtaaatcagcttctgtgtcagggatgctgtgtggtgtccatctgaaccccctgcatacgcgtagctaatgtgatctccccactttcacataagatggtggccctgccttcagggaatgtgggagccaggtgggagccttcccggatatttaagctagaagattctacagggagattctccttggatcaatatatgtctctcagtcaaagatgtaaaagcacttttgccttaaaaagaatgttctgtttctaaatagagtcaacgttgtcctcctcattggaattcactatgagtcagaatcattagactgacttttttttttccatagtaatagtattttgcagagtctcacagagctgcagatcttttgttcatcttgcagagttaacaagtctgatcctgttagtccagatttcttaaatttggccaagttataataggagcagtagcttgagacccgaagtcaggaaactttgacaatggatttttttttttaatccagagacttgtactggaatttgccttaccctgtcagctcatggacttaaggtttcatcccgctttatgagtgcttctgaatccaagtcattgttacctgaatttgcaaattaagttgtgatattcgtgactgttaaattcctgtaattagattaacctctttgcttgcttgtttgttttctctcctattttagcttaaagtatcagtggttgagaagagcttttcggacctgttactaccccaagctgtgtaatatacttgtataacagaaataccttctatacaaacctttttttctacttttagatagaaatgtctactttttcagcagttctgtgaattaaagagcagagtgactgtgggtctggaatggctggtgtacttgggaatgtactatcaggattttacagcaatgctgggaaatgacagggaaaatgacaggaatgaatctcaccagattttttatgtactcagcagagccttgagttacggtgtttattttccaatcaagtgaagatatctcctacttctcctactggaacatctcagcttctgcagtgaagaaaaattcctgtgatagttcagttctttagtttttctatttgaaaaaaaaaaatcatttaaatgatcctttgttcacggctctccttaatgactgagtgaacagttcctatctgtatatttgactaaaccttttcctaagctatctctcatggttcctatgtttttttatcataattaaaagcaaaaccatctggatcacctaacagtcagaggtcagtatctcagcgtgtgaattatagaggaaatacagagagaacctcttccacttttacttttcgtccaaataaaatgcatggtgtaccagaagttgaagatcgggttgaggattggggctagctcgatgacactaaggccccaacatcgcgggacctgctgtggcgcggattcttaggaacgctgttctagccggccccctctccaggggtcgccgtggccggcattatttcctagttcttcttgtaaccctgaggtgccagcgcggggagtgaggaggggtcagggggctaaggatgcaacctctgacgttctgcgccttcctaggagagtcttacatgtgttgagatttcacaagcaatgcgagttgtaaaataccagctctacaagaagctaggctctgtgacggcatagttttcagtagctttatcacaatattcacaatggagaattatatgacatggtagcagaaataggcccttttatgtgttgcttctattttacctcaaattgtagatatagggtaatcaataaaatccatccatgcctttcacacactaagt

SEQ ID NO: 4549 - protein, 544 aa, Homo sapiens; identical to SEQ ID NO: 4045

SEQ ID NO: 4550 - DNA, 4115 bp, Homo sapiens
aaaaaaaaaaaaaaaaaaaaaaaaaaaagaaaaaagaaaaaaaaaaggaggaggaggaggagggtgagagagaagctgggagagcagagaaaaggggccaccggtcgcccccccgcttccccgcacgcgctctccagccgcggccgcccgcctgccgcggtcaccccggcctctgcctctgtcccccagtgatcggatcaaggcgctgagcgaggccctgcctgcggggcggccatgcggcggtgacaggagcgcgaccgacacgcacgggcccctcgccccctctcgcctcccgtccgctcgccagctcccctcagccgaggctgctccgcggcggccgcagcccgcgcgcggcccacactcgcctcccctcggcacccccggccccggagctgcctggaggcggccgcactcggtgtaaagaactggccaagtccaaagccgaagtggcctgcattgcagtgtatgaaacagacgtgtttgtcgtcggaactgaaagaggacgtgcttttgtcaataccagaaaggattttcaaaaagattttgtaaaatattgtgttgaagaagaagaaaaagctgcagagatgcataaaatgaaatctacaacccaggcaaatcggatgagtgtagatgctgtagaaattgaaacactcagaaaaacagttgaggactatttctgcttttgctatgggaaagctttaggcaaatccacagtggtacctgtaccatatgagaagatgctgcgagaccagtcggctgtggtagtgcaggggcttccggaaggtgttgcctttaaacaccccgagaactatgatcttgcaaccctgaaatggattttggagaacaaagcagggatttcattcatcattaagagaccttttttagagccaaagaagcatgtaggtggtcgtgtgatggtaacagatgctgacaggtcaatactatctccaggtggaagttgtggccccatcaaagtgaaaactgaacccacagaagattctggcatttccctggaaatggcagctgtgacagtaaaggaagaatcagaagatcctgattattatcaatataacattcaagcaggcccttctgaaactgatgatgttgatgaaaaacagcccctatcgaagcctttgcaaggaagccaccattcttcagagggcaatgaaggcacagaaatggaagtaccagcagaagatgatgattattctccaccgtctaagagaccaaaggccaatgagctaccgcagccaccagtcccggaacccgccaatgctgggaagcggaaagtgagggagttcaacttcgagaaatggaatgctcgcatcactgatctacgtaaacaagttgaagaattgtttgaaaggaaatatgctcaagccataaaagccaaaggtccggtgacgatcccgtaccctcttttccagtctcatgttgaagatctttatgtagaaggacttcctgaaggaattccttttagaaggccatctacttacggaattcctcgcctggagaggatattacttgcaaaggaaaggattcgttttgtgattaagaaacatgagcttctgaattcaacacgtgaagatttacagcttgataagccagcttcaggagtaaaggaagaatggtatgccagaatcactaaattaagaaagatggtggatcagcttttctgcaaaaaatttgcggaagccttggggagcactgaagccaaggctgtaccgtaccaaaaatttgaggcacacccgaatgatctgtacgtggaaggactgccagaaaacattcctttccgaagtccctcatggtatggaatcccaaggctggaaaaaatcattcaagtgggcaatcgaattaaatttgttattaaaagaccagaacttctgactcacagtaccactgaagttactcagccaagaacgaatacaccagctcaagctcttggactcaccgaggcagtaaaagtaccatatcctgtgtttgaatcaaacccggagttcttgtatgtggaaggcttgccagaggggattcccttccgaagccctacctggtttggaattccacgacttgaaaggatcgtccgcgggagtaataaaatcaagttcgttgttaaaaaacctgaactagttatttcctacttgcctcctgggatggctagtaaaataaacactaaagctttgcagtcccccaaaagaccacgaagtcctgggagtaattcaaaggttcctgaaattgaggtcaccgtggaaggccctaataacaacaatcctcaaacctcagctgttcgaaccccgacccagactaacggttctaacgttcccttcaagccacgagggagagagttttcctttgaggcctggaatgccaaaatcacggacctaaaacagaaagttgaaaatctcttcaatgagaaatgtggggaagctcttggccttaaacaagctgtgaaggtgccgttcgcgttatttgagtctttcccggaagacttttatgtggaaggcttacctgagggtgtgccattccgaagaccatcgacttttggcattccgaggctggagaagatactcagaaacaaagccaaaattaagttcatcattaaaaagcccgaaatgtttgagacggcgattaaggagagcacctcctctaagagccctcccagaaaaataaattcatcacccaatgttaatactactgcatcaggtgttgaagaccttaacatcattcaggtgacaattccagatgatgataatgaaagactctcgaaagttgaaaaagctagacagctaagagaacaagtgaatgacctctttagtcggaaatttggtgaagctattggtatgggttttcctgtgaaagttccctacaggaaaatcacaattaaccctggctgtgtggtggttgatggcatgcccccgggggtgtccttcaaagcccccagctacctggaaatcagctccatgagaaggatcttagactctgccgagtttatcaaattcacggtcattagaccatttccaggacttgtgattaataaccagctggttgatcagagtgagtcagaaggccccgtgatacaagaatcagctgaaccaagccagttggaagttccagccacagaagaaataaaagagactgatggaagctctcagatcaagcaagaaccagaccccacgtggtagacctcttccctcctaggcttaaagtatcagtggttgagaagagcttttcggacctgttactaccccaagctgtagccttgagttacggtgtttattttccaatcaagtgaagatatctcctacttctcctactggaacatctcagcttctgcagtgaagaaaaattcctgtgatagttcagttctttagtttttctatttgaaaaaaaaaaatcatttaaatgatcctttgttcacggctctccttaatgactgagtgaacagttcctatctgtatatttgactaaaccttttcctaagctatctctcatggttcctatgtttttttatcataattaaaagcaaaaccatctggatcacctaacagtcagaggtcagtatctcagcgtgtgaattatagaggaaatacagagagaacctcttccacttttacttttcgtccaaataaaatgcatggtgtaccagaagttgaagatcgggttgaggattggggctagctcgatgacactaaggccccaacatcgcgggacctgctgtggcgcggattcttaggaacgctgttctagccggccccctctccaggggtcgccgtggccggcattatttcctagttcttcttgtaaccctgaggtgccagcgcggggagtgaggaggggtcagggggctaaggatgcaacctctgacgttctgcgccttcctaggagagtcttacatgtgttgagatttcacaagcaatgcgagttgtaaaataccagctctacaagaagctaggctctgtgacggcatagttttcagtagctttatcacaatattcacaatggagaattatatgacatggtagcagaaataggcccttttatgtgttgcttctattttacctcaaattgtagatatagggtaatcaataaaatccatccatgcctttcacacactaagt

SEQ ID NO: 4551 - protein, 864 aa, Homo sapiens; identical to SEQ ID NO: 4019

SEQ ID NO: 4552 - DNA, 4194 bp, Homo sapiens
aaaaaaaaaaaaaaaaaaaaaaaaaaaagaaaaaagaaaaaaaaaaggaggaggaggaggagggtgagagagaagctgggagagcagagaaaaggggccaccggtcgcccccccgcttccccgcacgcgctctccagccgcggccgcccgcctgccgcggtcaccccggcctctgcctctgtcccccagtgatcggatcaaggcgctgagcgaggccctgcctgcggggcggccatgcggcggtgacaggagcgcgaccgacacgcacgggcccctcgccccctctcgcctcccgtccgctcgccagctcccctcagccgaggctgctccgcggcggccgcagcccgcgcgcggcccacactcgcctcccctcggcacccccggccccggagctgcctggaggcggccgcactcggtgtaaagaactggccaagtccaaagccgaagtggcctgcattgcagtgtatgaaacagacgtgtttgtcgtcggaactgaaagaggacgtgcttttgtcaataccagaaaggattttcaaaaagattttgtaaaatattgtgttgaagaagaagaaaaagctgcagagatgcataaaatgaaatctacaacccaggcaaatcggatgagtgtagatgctgtagaaattgaaacactcagaaaaacagttgaggactatttctgcttttgctatgggaaagctttaggcaaatccacagtggtacctgtaccatatgagaagatgctgcgagaccagtcggctgtggtagtgcaggggcttccggaaggtgttgcctttaaacaccccgagaactatgatcttgcaaccctgaaatggattttggagaacaaagcagggatttcattcatcattaagagaccttttttagagccaaagaagcatgtaggtggtcgtgtgatggtaacagatgctgacaggtcaatactatctccaggtggaagttgtggccccatcaaagtgaaaactgaacccacagaagattctggcatttccctggaaatggcagctgtgacagtaaaggaagaatcagaagatcctgattattatcaatataacattcaagcaggcccttctgaaactgatgatgttgatgaaaaacagcccctatcgaagcctttgcaaggaagccaccattcttcagagggcaatgaaggcacagaaatggaagtaccagcagaagattctactcaacatgtcccttcagaaacaagtgaggaccctgaagttgaggtgactattgaagatgatgattattctccaccgtctaagagaccaaaggccaatgagctaccgcagccaccagtcccggaacccgccaatgctgggaagcggaaagtgagggagttcaacttcgagaaatggaatgctcgcatcactgatctacgtaaacaagttgaagaattgtttgaaaggaaatatgctcaagccataaaagccaaaggtccggtgacgatcccgtaccctcttttccagtctcatgttgaagatctttatgtagaaggacttcctgaaggaattccttttagaaggccatctacttacggaattcctcgcctggagaggatattacttgcaaaggaaaggattcgttttgtgattaagaaacatgagcttctgaattcaacacgtgaagatttacagcttgataagccagcttcaggagtaaaggaagaatggtatgccagaatcactaaattaagaaagatggtggatcagcttttctgcaaaaaatttgcggaagccttggggagcactgaagccaaggctgtaccgtaccaaaaatttgaggcacacccgaatgatctgtacgtggaaggactgccagaaaacattcctttccgaagtccctcatggtatggaatcccaaggctggaaaaaatcattcaagtgggcaatcgaattaaatttgttattaaaagaccagaacttctgactcacagtaccactgaagttactcagccaagaacgaatacaccagtcaaagaagattggaatgtcagaattaccaagctacggaagcaagtggaagagatttttaatttgaaatttgctcaagctcttggactcaccgaggcagtaaaagtaccatatcctgtgtttgaatcaaacccggagttcttgtatgtggaaggcttgccagaggggattcccttccgaagccctacctggtttggaattccacgacttgaaaggatcgtccgcgggagtaataaaatcaagttcgttgttaaaaaacctgaactagttatttcctacttgcctcctgggatggctagtaaaataaacactaaagctttgcagtcccccaaaagaccacgaagtcctgggagtaattcaaaggttcctgaaattgaggtcaccgtggaaggccctaataacaacaatcctcaaacctcagctgttcgaaccccgacccagactaacggttctaacgttcccttcaagccacgagggagagagttttcctttgaggcctggaatgccaaaatcacggacctaaaacagaaagttgaaaatctcttcaatgagaaatgtggggaagctcttggccttaaacaagctgtgaaggtgccgttcgcgttatttgagtctttcccggaagacttttatgtggaaggcttacctgagggtgtgccattccgaagaccatcgacttttggcattccgaggctggagaagatactcagaaacaaagccaaaattaagttcatcattaaaaagcccgaaatgtttgagacggcgattaaggagagcacctcctctaagagccctcccagaaaaataaattcatcacccaatgttaatactactgcatcaggtgttgaagaccttaacatcattcaggtgacaattccagatgatgataatgaaagactctcgaaagttgaaaaagctagacagctaagagaacaagtgaatgacctctttagtcggaaatttggtgaagctattggtatgggttttcctgtgaaagttccctacaggaaaatcacaattaaccctggctgtgtggtggttgatggcatgcccccgggggtgtccttcaaagcccccagctacctggaaatcagctccatgagaaggatcttagactctgccgagtttatcaaattcacggtcattagaccatttccaggacttgtgattaataaccagctggttgatcagagtgagtcagaaggccccgtgatacaagaatcagctgaaccaagccagttggaagttccagccacagaagaaataaaagagactgatggaagctctcagatcaagcaagaaccagaccccacgtggtagacctcttccctcctaggagccttgagttacggtgtttattttccaatcaagtgaagatatctcctacttctcctactggaacatctcagcttctgcagtgaagaaaaattcctgtgatagttcagttctttagtttttctatttgaaaaaaaaaaatcatttaaatgatcctttgttcacggctctccttaatgactgagtgaacagttcctatctgtatatttgactaaaccttttcctaagctatctctcatggttcctatgtttttttatcataattaaaagcaaaaccatctggatcacctaacagtcagaggtcagtatctcagcgtgtgaattatagaggaaatacagagagaacctcttccacttttacttttcgtccaaataaaatgcatggtgtaccagaagttgaagatcgggttgaggattggggctagctcgatgacactaaggccccaacatcgcgggacctgctgtggcgcggattcttaggaacgctgttctagccggccccctctccaggggtcgccgtggccggcattatttcctagttcttcttgtaaccctgaggtgccagcgcggggagtgaggaggggtcagggggctaaggatgcaacctctgacgttctgcgccttcctaggagagtcttacatgtgttgagatttcacaagcaatgcgagttgtaaaataccagctctacaagaagctaggctctgtgacggcatagttttcagtagctttatcacaatattcacaatggagaattatatgacatggtagcagaaataggcccttttatgtgttgcttctattttacctcaaattgtagatatagggtaatcaataaaatccatccatgcctttcacacactaagt

SEQ ID NO: 4553 - protein, 909 aa, Homo sapiens; identical to SEQ ID NO: 4047

SEQ ID NO: 4554 - DNA, 4079 bp, Homo sapiens
aaaaaaaaaaaaaaaaaaaaaaaaaaaagaaaaaagaaaaaaaaaaggaggaggaggaggagggtgagagagaagctgggagagcagagaaaaggggccaccggtcgcccccccgcttccccgcacgcgctctccagccgcggccgcccgcctgccgcggtcaccccggcctctgcctctgtcccccagtgatcggatcaaggcgctgagcgaggccctgcctgcggggcggccatgcggcggtgacaggagcgcgaccgacacgcacgggcccctcgccccctctcgcctcccgtccgctcgccagctcccctcagccgaggctgctccgcggcggccgcagcccgcgcgcggcccacactcgcctcccctcggcacccccggccccggagctgcctggaggcggccgcactcggggatcatggcccaagttgcaatgtccaccctccccgttgaagatgaggagtcctcggagagcaggatggtggtgacattcctcatgtcagctctcgagtccatgtgtaaagaactggccaagtccaaagccgaagtggcctgcattgcagtgtatgaaacagacgtgtttgtcgtcggaactgaaagaggacgtgcttttgtcaataccagaaaggattttcaaaaagattttgtaaaatattgtgttgaagaagaagaaaaagctgcagagatgcataaaatgaaatctacaacccaggcaaatcggatgagtgtagatgctgtagaaattgaaacactcagaaaaacagttgaggactatttctgcttttgctatgggaaagctttaggcaaatccacagtggtacctgtaccatatgagaagatgctgcgagaccagtcggctgtggtagtgcaggggcttccggaaggtgttgcctttaaacaccccgagaactatgatcttgcaaccctgaaatggattttggagaacaaagcagggatttcattcatcattaagagaccttttttagagccaaagaagcatgtaggtggtcgtgtgatggtaacagatgctgacaggtcaatactatctccaggtggaagttgtggccccatcaaagtgaaaactgaacccacagaagattctggcatttccctggaaatggcagctgtgacagtaaaggaagaatcagaagatcctgattattatcaatataacattcaagcaggcccttctgaaactgatgatgttgatgaaaaacagcccctatcgaagcctttgcaaggaagccaccattcttcagagggcaatgaaggcacagaaatggaagtaccagcagaagatgatgattattctccaccgtctaagagaccaaaggccaatgagctaccgcagccaccagtcccggaacccgccaatgctgggaagcggaaagtgagggagttcaacttcgagaaatggaatgctcgcatcactgatctacgtaaacaagttgaagaattgtttgaaaggaaatatgctcaagccataaaagccaaaggtccggtgacgatcccgtaccctcttttccagtctcatgttgaagatctttatgtagaaggacttcctgaaggaattccttttagaaggccatctacttacggaattcctcgcctggagaggatattacttgcaaaggaaaggattcgttttgtgattaagaaacatgagcttctgaattcaacacgtgaagatttacagcttgataagccagcttcaggagtaaaggaagaatggtatgccagaatcactaaattaagaaagatggtggatcagcttttctgcaaaaaatttgcggaagccttggggagcactgaagccaaggctgtaccgtaccaaaaatttgaggcacacccgaatgatctgtacgtggaaggactgccagaaaacattcctttccgaagtccctcatggtatggaatcccaaggctggaaaaaatcattcaagtgggcaatcgaattaaatttgttattaaaagaccagaacttctgactcacagtaccactgaagttactcagccaagaacgaatacaccagtcaaagaagattggaatgtcagaattaccaagctacggaagcaagtggaagagatttttaatttgaaatttgcttagatttgttgacagcggtttcctggagtgctgtcttgagaacgattctgaggaggctcagcaagaaagagtgtttcagttgattgggtgtgtctgtcatggagaaggaactcaagctcttggactcaccgaggcagtaaaagtaccatatcctgtgtttgaatcaaacccggagttcttgtatgtggaaggcttgccagaggggattcccttccgaagccctacctggtttggaattccacgacttgaaaggatcgtccgcgggagtaataaaatcaagttcgttgttaaaaaacctgaactagttatttcctacttgcctcctgggatggctagtaaaataaacactaaagctttgcagtcccccaaaagaccacgaagtcctgggagtaattcaaaggttcctgaaattgaggtcaccgtggaaggccctaataacaacaatcctcaaacctcagctgttcgaaccccgacccagactaacggttctaacgttcccttcaagccacgagggagagagttttcctttgaggcctggaatgccaaaatcacggacctaaaacagaaagttgaaaatctcttcaatgagaaatgtggggaagctcttggccttaaacaagctgtgaaggtgccgttcgcgttatttgagtctttcccggaagacttttatgtggaaggcttacctgagggtgtgccattccgaagaccatcgacttttggcattccgaggctggagaagatactcagaaacaaagccaaaattaagttcatcattaaaaagcccgaaatgtttgagacggcgattaaggagagcacctcctctaagagccctcccagaaaaataaattcatcacccaatgttaatactactgcatcaggtgttgaagaccttaacatcattcaggtgacaattccagatgatgataatgaaagactctcgaaagttgaaaaagctagacagctaagagaacaagtgaatgacctctttagtcggaaatttggtgaagctattggtatgggttttcctgtgaaagttccctacaggaaaatcacaattaaccctggctgtgtggtggttgatggcatgcccccgggggtgtccttcaaagcccccagctacctggaaatcagctccatgagaaggatcttagactctgccgagtttatcaaattcacggtcattagaccatttccaggacttgtgattaataaccagctggttgatcagagtgagtcagaaggccccgtgatacaagaatcagctgaaccaagccagttggaagttccagccacagaagaaataaaagagactgatggaagctctcagatcaagcaagaaccagaccccacgtggtagacctcttccctcctaggcaaaaccatctggatcacctaacagtcagaggtcagtatctcagcgtgtgaattatagaggaaatacagagagaacctcttccacttttacttttcgtccaaataaaatgcatggtgtaccagaagttgaagatcgggttgaggattggggctagctcgatgacactaaggccccaacatcgcgggacctgctgtggcgcggattcttaggaacgctgttctagccggccccctctccaggggtcgccgtggccggcattatttcctagttcttcttgtaaccctgaggtgccagcgcggggagtgaggaggggtcagggggctaaggatgcaacctctgacgttctgcgccttcctaggagagtcttacatgtgttgagatttcacaagcaatgcgagttgtaaaataccagctctacaagaagctaggctctgtgacggcatagttttcagtagctttatcacaatattcacaatggagaattatatgacatggtagcagaaataggcccttttatgtgttgcttctattttacctcaaattgtagatatagggtaatcaataaaatccatccatgcctttcacacactaagt

SEQ ID NO: 4555 - protein, 563 aa, Homo sapiens; identical to SEQ ID NO: 4097

SEQ ID NO: 4556 - DNA, 5004 bp, Homo sapiens
aaaaaaaaaaaaaaaaaaaaaaaaaaaagaaaaaagaaaaaaaaaaggaggaggaggaggagggtgagagagaagctgggagagcagagaaaaggggccaccggtcgcccccccgcttccccgcacgcgctctccagccgcggccgcccgcctgccgcggtcaccccggcctctgcctctgtcccccagtgatcggatcaaggcgctgagcgaggccctgcctgcggggcggccatgcggcggtgacaggagcgcgaccgacacgcacgggcccctcgccccctctcgcctcccgtccgctcgccagctcccctcagccgaggctgctccgcggcggccgcagcccgcgcgcggcccacactcgcctccccgttgaagatgaggagtcctcggagagcaggatggtggtgacattcctcatgtcagctctcgagtccatgtgtaaagaactggccaagtccaaagccgaagtggcctgcattgcagtgtatgaaacagacgtgtttgtcgtcggaactgaaagaggacgtgcttttgtcaataccagaaaggattttcaaaaagattttgtaaaatattgtgttgaagaagaagaaaaagctgcagagatgcataaaatgaaatctacaacccaggcaaatcggatgagtgtagatgctgtagaaattgaaacactcagaaaaacagttgaggactatttctgcttttgctatgggaaagctttaggcaaatccacagtggtacctgtaccatatgagaagatgctgcgagaccagtcggctgtggtagtgcaggggcttccggaaggtgttgcctttaaacaccccgagaactatgatcttgcaaccctgaaatggattttggagaacaaagcagggatttcattcatcattaagagaccttttttagagccaaagaagcatgtaggtggtcgtgtgatggtaacagatgctgacaggtcaatactatctccaggtggaagttgtggccccatcaaagtgaaaactgaacccacagaagattctggcatttccctggaaatggcagctgtgacagtaaaggaagaatcagaagatcctgattattatcaatataacattcaaggaagccaccattcttcagagggcaatgaaggcacagaaatggaagtaccagcagaagatgatgattattctccaccgtctaagagaccaaaggccaatgagctaccgcagccaccagtcccggaacccgccaatgctgggaagcggaaagtgagggagttcaacttcgagaaatggaatgctcgcatcactgatctacgtaaacaagttgaagaattgtttgaaaggaaatatgctcaagccataaaagccaaaggtccggtgacgatcccgtaccctcttttccagtctcatgttgaagatctttatgtagaaggacttcctgaaggaattccttttagaaggccatctacttacggaattcctcgcctggagaggatattacttgcaaaggaaaggattcgttttgtgattaagaaacatgagcttctgaattcaacacgtgaagatttacagcttgataagccagcttcaggagtaaaggaagaatggtatgccagaatcactaaattaagaaagatggtggatcagcttttctgcaaaaaatttgcggaagccttggggagcactgaagccaaggctgtaccgtaccaaaaatttgaggcacacccgaatgatctgtacgtggaaggactgccagaaaacattcctttccgaagtccctcatggtatggaatcccaaggctggaaaaaatcattcaagtgggcaatcgaattaaatttgttattaaaagaccagaacttctgactcacagtaccactgaagttactcagccaagaacgaatacaccagtcaaagaagattggaatgtcagaattaccaagctacggaagcaagtggaagagatttttaatttgaaatttgctcaagctcttggactcaccgaggcagtaaaagtaccatatcctgtgtttgaatcaaacccggagttcttgaaaggatcgtccgcgggagtaataaaatcaagttcgttgttaaaaaacctgaactagttatttcctacttgcctcctgggatggctagtaaaataaacactaaagctttgcagtcccccaaaagaccacgaagtcctgggagtaattcaaaggttcctgaaattgaggtcaccgtggaaggccctaataacaacaatcctcaaacctcagctgttcgaaccccgacccagactaacggttctaacgttcccttcaagccacgagggagagagttttcctttgaggcctggaatgccaaaatcacggacctaaaacagaaagttgaaaatctcttcaatgagaaatgtggggaagctcttggccttaaacaagctgtgaaggtgccgttcgcgttatttgagtctttcccggaagacttttatgtggaaggcttacctgagggtgtgccattccgaagaccatcgacttttggcattccgaggctggagaagatactcagaaacaaagccaaaattaagttcatcattaaaaagcccgaaatgtttgagacggcgattaaggagagcacctcctctaagagccctcccagaaaaataaattcatcacccaatgttaatactactgcatcaggtgttgaagaccttaacatcattcaggtgacaattccagatgatgataatgaaagactctcgaaagttgaaaaagctagacagctaagagaacaagtgaatgacctctttagtcggaaatttggtgaagctattggtatgggttttcctgtgaaagttccctacaggaaaatcacaattaaccctggctgtgtggtggttgatggcatgcccccgggggtgtccttcaaagcccccagctacctggaaatcagctccatgagaaggatcttagactctgccgagtttatcaaattcacggtcattagaccatttccaggacttgtgattaataaccagctggttgatcagagtgagtcagaaggccccgtgatacaagaatcagctgaaccaagccagttggaagttccagccacagaagaaataaaagagactgatggaagctctcagatcaagcaagaaccagaccccacgtggtagacctcttccctcctagggtaaatcagcttctgtgtcagggatgctgtgtggtgtccatctgaaccccctgcatacgcgtagctaatgtgatctccccactttcacataagatggtggccctgccttcagggaatgtgggagccaggtgggagccttcccggatatttaagctagaagattctacagggagattctccttggatcaatatatgtctctcagtcaaagatgtaaaagcacttttgccttaaaaagaatgttctgtttctaaatagagtcaacgttgtcctcctcattggaattcactatgagtcagaatcattagactgacttttttttttccatagtaatagtattttgcagagtctcacagagctgcagatcttttgttcatcttgcagagttaacaagtctgatcctgttagtccagatttcttaaatttggccaagttataataggagcagtagcttgagacccgaagtcaggaaactttgacaatggatttttttttttaatccagagacttgtactggaatttgccttaccctgtcagctcatggacttaaggtttcatcccgctttatgagtgcttctgaatccaagtcattgttacctgaatttgcaaattaagttgtgatattcgtgactgttaaattcctgtaattagattaacctctttgcttgcttgtttgttttctctcctattttagcttaaagtatcagtggttgagaagagcttttcggacctgttactaccccaagctgtgtaatatacttgtataacagaaataccttctatacaaacctttttttctacttttagatagaaatgtctactttttcagcagttctgtgaattaaagagcagagtgactgtgggtctggaatggctggtgtacttgggaatgtactatcaggattttacagcaatgctgggaaatgacagggaaaatgacaggaatgaatctcaccagattttttatgtactcagcagagccttgagttacggtgtttattttccaatcaagtgaagatatctcctacttctcctactggaacatctcagcttctgcagtgaagaaaaattcctgtgatagttcagttctttagtttttctatttgaaaaaaaaaaatcatttaaatgatcctttgttcacggctctccttaatgactgagtgaacagttcctatctgtatatttgactaaaccttttcctaagctatctctcatggttcctatgtttttttatcataattaaaagcaaaaccatctggatcacctaacagtcagaggtcagtatctcagcgtgtgaattatagaggaaatacagagagaacctcttccacttttacttttcgtccaaataaaatgcatggtgtaccagaagttgaagatcgggttgaggattggggctagctcgatgacactaaggccccaacatcgcgggacctgctgtggcgcggattcttaggaacgctgttctagccggccccctctccaggggtcgccgtggccggcattatttcctagttcttcttgtaaccctgaggtgccagcgcggggagtgaggaggggtcagggggctaaggatgcaacctctgacgttctgcgccttcctaggagagtcttacatgtgttgagatttcacaagcaatgcgagttgtaaaataccagctctacaagaagctaggctctgtgacggcatagttttcagtagctttatcacaatattcacaatggagaattatatgacatggtagcagaaataggcccttttatgtgttgcttctattttacctcaaattgtagatatagggtaatcaataaaatccatccatgcctttcacacactaagt

SEQ ID NO: 4557 - protein, 564 aa, Homo sapiens; identical to SEQ ID NO: 4023

SEQ ID NO: 4558 - DNA, 4924 bp, Homo sapiens
aaaaaaaaaaaaaaaaaaaaaaaaaaaagaaaaaagaaaaaaaaaaggaggaggaggaggagggtgagagagaagctgggagagcagagaaaaggggccaccggtcgcccccccgcttccccgcacgcgctctccagccgcggccgcccgcctgccgcggtcaccccggcctctgcctctgtcccccagtgatcggatcaaggcgctgagcgaggccctgcctgcggggcggccatgcggcggtgacaggagcgcgaccgacacgcacgggcccctcgccccctctcgcctcccgtccgctcgccagctcccctcagccgaggctgctccgcggcggccgcagcccgcgcgcggcccacactcgcctcccctcggcacccccggccccggagctgcctggaggcggccgcactcggtgtaaagaactggccaagtccaaagccgaagtggcctgcattgcagtgtatgaaacagacgtgtttgtcgtcggaactgaaagaggacgtgcttttgtcaataccagaaaggattttcaaaaagattttgtaaaatattgtgttgaagaagaagaaaaagctgcagagatgcataaaatgaaatctacaacccaggcaaatcggatgagtgtagatgctgtagaaattgaaacactcagaaaaacagttgaggactatttctgcttttgctatgggaaagctttaggcaaatccacagtggtacctgtaccatatgagaagatgctgcgagaccagtcggctgtggtagtgcaggggcttccggaaggtgttgcctttaaacaccccgagaactatgatcttgcaaccctgaaatggattttggagaacaaagcagggatttcattcatcattaagagaccttttttagagccaaagaagcatgtaggtggtcgtgtgatggtaacagatgctgacaggtcaatactatctccaggtggaagttgtggccccatcaaagtgaaaactgaacccacagaagattctggcatttccctggaaatggcagctgtgacagtaaaggaagaatcagaagatcctgattattatcaatataacattcaaggaagccaccattcttcagagggcaatgaaggcacagaaatggaagtaccagcagaagatgatgattattctccaccgtctaagagaccaaaggccaatgagctaccgcagccaccagtcccggaacccgccaatgctgggaagcggaaagtgagggagttcaacttcgagaaatggaatgctcgcatcactgatctacgtaaacaagttgaagaattgtttgaaaggaaatatgctcaagccataaaagccaaaggtccggtgacgatcccgtaccctcttttccagtctcatgttgaagatctttatgtagaaggacttcctgaaggaattccttttagaaggccatctacttacggaattcctcgcctggagaggatattacttgcaaaggaaaggattcgttttgtgattaagaaacatgagcttctgaattcaacacgtgaagatttacagcttgataagccagcttcaggagtaaaggaagaatggtatgccagaatcactaaattaagaaagatggtggatcagcttttctgcaaaaaatttgcggaagccttggggagcactgaagccaaggctgtaccgtaccaaaaatttgaggcacacccgaatgatctgtacgtggaaggactgccagaaaacattcctttccgaagtccctcatggtatggaatcccaaggctggaaaaaatcattcaagtgggcaatcgaattaaatttgttattaaaagaccagaacttctgactcacagtaccactgaagttactcagccaagaacgaatacaccagctcaagctcttggactcaccgaggcagtaaaagtaccatatcctgtgtttgaatcaaacccggagttcttgtatgtggaaggcttgccagaggggattcccttccgaagccctacctggtttggaattccacgacttgaaaggatcgtccgcgggagtaataaaatcaagttcgttgttaaaaaacctgaactagttatttcctacttgcctcctgggatggctagtaaaataaacactaaagctttgcagtcccccaaaagaccacgaagtcctgggagtaattcaaaggttcctgaaattgaggtcaccgtggaaggccctaataacaacaatcctcaaacctcagctgttcgaaccccgacccagactaacggttctaacgttcccttcaagccacgagggagagagttttcctttgaggcctggaatgccaaaatcacggacctaaaacagaaagttgaaaatctcttcaatgagaaatgtggggaagctcttggccttaaacaagctgtgaaggtgccgttcgcgttatttgagtctttcccggaagacttttatgtggaaggcttacctgagggtgtgccattccgaagaccatcgacttttggcattccgaggctggagaagatactcagaaacaaagccaaaattaagttcatcattaaaaagcccgaaatgtttgagacggcgattaaggagagcacctcctctaagagccctcccagaaaaataaattcatcacccaatgttaatactactgcatcaggtgttgaagaccttaacatcattcaggtgacaattccagatgatgataatgaaagactctcgaaagttgaaaaagctagacagctaagagaacaagtgaatgacctctttagtcggaaatttggtgaagctattggtatgggttttcctgtgaaagttccctacaggaaaatcacaattaaccctggctgtgtggtggttgatggcatgcccccgggggtgtccttcaaagcccccagctacctggaaatcagctccatgagaaggatcttagactctgccgagtttatcaaattcacggtcattagaccatttccaggacttgtgattaataaccagctggttgatcagagtgagtcagaaggccccgtgatacaagaatcagctgaaccaagccagttggaagttccagccacagaaggtaaaaggacctcttccctcctagggtaaatcagcttctgtgtcagggatgctgtgtggtgtccatctgaaccccctgcatacgcgtagctaatgtgatctccccactttcacataagatggtggccctgccttcagggaatgtgggagccaggtgggagccttcccggatatttaagctagaagattctacagggagattctccttggatcaatatatgtctctcagtcaaagatgtaaaagcacttttgccttaaaaagaatgttctgtttctaaatagagtcaacgttgtcctcctcattggaattcactatgagtcagaatcattagactgacttttttttttccatagtaatagtattttgcagagtctcacagagctgcagatcttttgttcatcttgcagagttaacaagtctgatcctgttagtccagatttcttaaatttggccaagttataataggagcagtagcttgagacccgaagtcaggaaactttgacaatggatttttttttttaatccagagacttgtactggaatttgccttaccctgtcagctcatggacttaaggtttcatcccgctttatgagtgcttctgaatccaagtcattgttacctgaatttgcaaattaagttgtgatattcgtgactgttaaattcctgtaattagattaacctctttgcttgcttgtttgttttctctcctattttagcttaaagtatcagtggttgagaagagcttttcggacctgttactaccccaagctgtgtaatatacttgtataacagaaataccttctatacaaacctttttttctacttttagatagaaatgtctactttttcagcagttctgtgaattaaagagcagagtgactgtgggtctggaatggctggtgtacttgggaatgtactatcaggattttacagcaatgctgggaaatgacagggaaaatgacaggaatgaatctcaccagattttttatgtactcagcagagccttgagttacggtgtttattttccaatcaagtgaagatatctcctacttctcctactggaacatctcagcttctgcagtgaagaaaaattcctgtgatagttcagttctttagtttttctatttgaaaaaaaaaaatcatttaaatgatcctttgttcacggctctccttaatgactgagtgaacagttcctatctgtatatttgactaaaccttttcctaagctatctctcatggttcctatgtttttttatcataattaaaagcaaaaccatctggatcacctaacagtcagaggtcagtatctcagcgtgtgaattatagaggaaatacagagagaacctcttccacttttacttttcgtccaaataaaatgcatggtgtaccagaagttgaagatcgggttgaggattggggctagctcgatgacactaaggccccaacatcgcgggacctgctgtggcgcggattcttaggaacgctgttctagccggccccctctccaggggtcgccgtggccggcattatttcctagttcttcttgtaaccctgaggtgccagcgcggggagtgaggaggggtcagggggctaaggatgcaacctctgacgttctgcgccttcctaggagagtcttacatgtgttgagatttcacaagcaatgcgagttgtaaaataccagctctacaagaagctaggctctgtgacggcatagttttcagtagctttatcacaatattcacaatggagaattatatgacatggtagcagaaataggcccttttatgtgttgcttctattttacctcaaattgtagatatagggtaatcaataaaatccatccatgcctttcacacactaagt

SEQ ID NO: 4559 - protein, 834 aa, Homo sapiens
MHKMKSTTQANRMSVDAVEIETLRKTVEDYFCFCYGKALGKSTVVPVPYEKMLRDQSAVVVQGLPEGVAFKHPENYDLATLKWILENKAGISFIIKRPFLEPKKHVGGRVMVTDADRSILSPGGSCGPIKVKTEPTEDSGISLEMAAVTVKEESEDPDYYQYNIQGSHHSSEGNEGTEMEVPAEDDDYSPPSKRPKANELPQPPVPEPANAGKRKVREFNFEKWNARITDLRKQVEELFERKYAQAIKAKGPVTIPYPLFQSHVEDLYVEGLPEGIPFRRPSTYGIPRLERILLAKERIRFVIKKHELLNSTREDLQLDKPASGVKEEWYARITKLRKMVDQLFCKKFAEALGSTEAKAVPYQKFEAHPNDLYVEGLPENIPFRSPSWYGIPRLEKIIQVGNRIKFVIKRPELLTHSTTEVTQPRTNTPAQALGLTEAVKVPYPVFESNPEFLYVEGLPEGIPFRSPTWFGIPRLERIVRGSNKIKFVVKKPELVISYLPPGMASKINTKALQSPKRPRSPGSNSKVPEIEVTVEGPNNNNPQTSAVRTPTQTNGSNVPFKPRGREFSFEAWNAKITDLKQKVENLFNEKCGEALGLKQAVKVPFALFESFPEDFYVEGLPEGVPFRRPSTFGIPRLEKILRNKAKIKFIIKKPEMFETAIKESTSSKSPPRKINSSPNVNTTASGVEDLNIIQVTIPDDDNERLSKVEKARQLREQVNDLFSRKFGEAIGMGFPVKVPYRKITINPGCVVVDGMPPGVSFKAPSYLEISSMRRILDSAEFIKFTVIRPFPGLVINNQLVDQSESEGPVIQESAEPSQLEVPATEGKRTSSLLG

SEQ ID NO: 4560 - DNA, 8147 bp, Homo sapiens
aaaaaaaaaaaaaaaaaaaaaaaaaaaagaaaaaagaaaaaaaaaaggaggaggaggaggagggtgagagagaagctgggagagcagagaaaaggggccaccggtcgcccccccgcttccccgcacgcgctctccagccgcggccgcccgcctgccgcggtcaccccggcctctgcctctgtcccccagtgatcggatcaaggcgctgagcgaggccctgcctgcggggcggccatgcggcggtgacaggagcgcgaccgacacgcacgggcccctcgccccctctcgcctcccgtccgctcgccagctcccctcagccgaggctgctccgcggcggccgcagcccgcgcgcggcccacactcgcctcccctcggcacccccggccccggagctgcctggaggcggccgcactcggggatcatggcccaagttgcaatgtccaccctccccgttgaagatgaggagtcctcggagagcaggatggtggtgacattcctcatgtcagctctcgagtccatgtgtaaagaactggccaagtccaaagccgaagtggcctgcattgcagtgtatgaaacagacgtgtttgtcgtcggaactgaaagaggacgtgcttttgtcaataccagaaaggattttcaaaaagattttgtaaaatattgtgttgaagaagaagaaaaagctgcagagatgcataaaatgaaatctacaacccaggcaaatcggatgagtgtagatgctgtagaaattgaaacactcagaaaaacagttgaggactatttctgcttttgctatgggaaagctttaggcaaatccacagtggtacctgtaccatatgagaagatgctgcgagaccagtcggctgtggtagtgcaggggcttccggaaggtgttgcctttaaacaccccgagaactatgatcttgcaaccctgaaatggattttggagaacaaagcagggatttcattcatcattaagagaccttttttagagccaaagaagcatgtaggtggtcgtgtgatggtaacagatgctgacaggtcaatactatctccaggtggaagttgtggccccatcaaagtgaaaactgaacccacagaagattctggcatttccctggaaatggcagctgtgacagtaaaggaagaatcagaagatcctgattattatcaatataacattcaagcaggcccttctgaaactgatgatgttgatgaaaaacagcccctatcgaagcctttgcaaggaagccaccattcttcagagggcaatgaaggcacagaaatggaagtaccagcagaagattctactcaacatgtcccttcagaaacaagtgaggaccctgaagttgaggtgactattgaagatgatgattattctccaccgtctaagagaccaaaggccaatgagctaccgcagccaccagtcccggaacccgccaatgctgggaagcggaaagtgagggagttcaacttcgagaaatggaatgctcgcatcactgatctacgtaaacaagttgaagaattgtttgaaaggaaatatgctcaagccataaaagccaaaggtccggtgacgatcccgtaccctcttttccagtctcatgttgaagatctttatgtagaaggacttcctgaaggaattccttttagaaggccatctacttacggaattcctcgcctggagaggatattacttgcaaaggaaaggattcgttttgtgattaagaaacatgagcttctgaattcaacacgtgaagatttacagcttgataagccagcttcaggagtaaaggaagaatggtatgccagaatcactaaattaagaaagatggtggatcagcttttctgcaaaaaatttgcggaagccttggggagcactgaagccaaggctgtaccgtaccaaaaatttgaggcacacccgaatgatctgtacgtggaaggactgccagaaaacattcctttccgaagtccctcatggtatggaatcccaaggctggaaaaaatcattcaagtgggcaatcgaattaaatttgttattaaaagaccagaacttctgactcacagtaccactgaagttactcagccaagaacgaatacaccagtcaaagaagattggaatgtcagaattaccaagctacggaagcaagtggaagagatttttaatttgaaatttgcttagatttgttgacagcggtttcctggagtgctgtcttgagaacgattctgaggaggctcagcaagaaagagtgtttcagttgattgggtgtgtctgtcatggagaaggaactcaagctcttggactcaccgaggcagtaaaagtaccatatcctgtgtttgaatcaaacccggagttcttgtatgtggaaggcttgccagaggggattcccttccgaagccctacctggtttggaattccacgacttgaaaggatcgtccgcgggagtaataaaatcaagttcgttgttaaaaaacctgaactagttatttcctacttgcctcctgggatggctagtaaaataaacactaaagctttgcagtcccccaaaagaccacgaagtcctgggagtaattcaaaggttcctgaaattgaggtcaccgtggaaggccctaataacaacaatcctcaaacctcagctgttcgaaccccgacccagactaacggttctaacgttcccttcaagccacgagggagagagttttcctttgaggcctggaatgccaaaatcacggacctaaaacagaaagttgaaaatctcttcaatgagaaatgtggggaagctcttggccttaaacaagctgtgaaggtgccgttcgcgttatttgagtctttcccggaagacttttatgtggaaggcttacctgagggtgtgccattccgaagaccatcgacttttggcattccgaggctggagaagatactcagaaacaaagccaaaattaagttcatcattaaaaagcccgaaatgtttgagacggcgattaaggagagcacctcctctaagagccctcccagaaaaataaattcatcacccaatgttaatactactgcatcaggtgttgaagaccttaacatcattcaggtgacaattccagatgatgataatgaaagactctcgaaagttgaaaaagctagacagctaagagaacaagtgaatgacctctttagtcggaaatttggtgaagctattggtatgggttttcctgtgaaagttccctacaggaaaatcacaattaaccctggctgtgtggtggttgatggcatgcccccgggggtgtccttcaaagcccccagctacctggaaatcagctccatgagaaggatcttagactctgccgagtttatcaaattcacggtcattaggtaagtgagagtttcctgcttagtcacaggagcgaatctggagctcatgaggctgactcttctaaaatgcagccacaggtagtcatcgaatccggcttcctatgctgtgcaatcaacaaatcaaaataacttgtgtcatcattagaatgtcagatgtgcttctacgaactaagctgactcttttaattctttggcaaagggttggcaaactaggactgtttgccaaattcaggctgcctcctatttttagagtcttcctgaaacacagctacacccgtattatccatggctgctttcctgtcacagtgagtaagtagctgggactgagaaggcatggcctccaaagtctaaaatatttactctctagcactttgtagaaaaaccttagctaggcacagtggctaacgcctgtaatcccagcattttgggaggccaaggcaggcagatcacctgaggtcaggagttccagaccagcctggccaacatggtgaaatcccatctctacaaaaataaaacagttagctgggcatgatggcgggtgcctgtaatcccagctactcgggaggctgaggcaggatagtcgcttgaacccaggaggtggaggttgcaatgagccaagatcatgccactgcactccagcctggacgacagagtgagactccatcacaagaaaaaaagaactttgtcaacctctgtcttagggcgccttgtcacaggcttcgggtcagacggattcaaccttgcatcagccatttgttagccaggtcactctgttctttgtctgtaaatgagattgatcgttgttcccactgagagtgtcagctccttcccgtagagcaggcatgatgattgtactcacctctgacaccattgtgagtgccacattccttcccacgtccttgtcactgtaagagatgcccacctgagcaccaaccccaggttatcttcccctttgtcttccagccccccagaaacagctacgactcaacctacccaatcatttcatcatcagattgccactgtctctagttcaggtctcttgggactggcactcagaaatctcataataaatcctcttgaggcttctcatacactcgtcttcttccaatcttctttccctcaaaatctcatattttggttccacttcacccaccgtcattctccatatcactcccaggagttaggcaaaaagccccttccgttcttccgtatgttaaacttagaatcactctgttccctgctctgcgtttctattttttgtttttcctccatttactagtagcttaacactttctaacagtgttcttattattgatacgtatctatctcttccataagcttataaggtcacggataatacttctcattgtagtacgtaaatgacgtgggctagatatgagttgaataaacagttatacctgtaaattcttacagagtgaaaataaattgttatactttacaatttgtttctctctttagaccatttccaggacttgtgattaataaccgtgagtattttgtgaagtgttttgtttttgttttttcctggggtctgacgtgtgtgcgtgtgagtgtgtatacatgcttaacgtatatcacgttacttcacctatgtcagtaaccaggccaaatacttgttttagccctcagtaaaaacaccaggcacttcctagttgtaaaattattcaagcttcttaacttcctatcctcgatgcacttaatcataaaatggtaataatagcaccgattttgggggagtcgttccagtagatggaaagcatctggaacaggtgtcagcaagctcctgccgacgtgtatgcataaagttttattgaaaccaccatcgtgtccatttgtttatggcagaactgagagatggcagcagcaagtgtgtgcctgcaaaacctaaaatatttactaattggctctgcaagaaaagagtttgcatccccctaacctagaacagtgtctagcctctagtatgtgtttagcctacagtatgtgctcagcgaatacaatctatatttattactgcttttatgactgttataattactgtgcttggatttcgttacaaagtaagtcacaatgtgcctgcttctgttagtatttcagcacagtgcctggcacacatggggctctcaaatattgctgagcgagtgaacaaatgtcctttcaattccttaacgttgatgtcattttcaatagtattttgagccaaacttaattttgcgagtgtgttttgttttcttaactttattattaaaaatgtataaaagtgaggccaggcgtggtggctcacgcctgtaatcccagcagtttgggaggctgaggcaggcggatcagttgaggttgggagttggagaccagcccgtccaacatggtgaaagcctgtctctactaaaaatacaaaaatcagctgggtgtggtggcgcgtgcctgtaatcccagctactcaggaggctgaggcaggagagttgcttgaatcctagaggtggaggttgcagtgagctgagatcgtgccattgcactccagcctgggcaacaagagcaaaactctgtcccaataaataaataaataaaatgttctcttttgttcctgttcttgtgcggtagtgtggtatagagttttatggtaattactgtgaattagtgattctgagggacatatcagaactctgaggtttgtttccttctcatcttgagggaaacagcaaatgtatgttaaaatgcttttccaagggaacaacacatccttacattatttaaaccaatctgcttcattttcagagctggttgatcagagtgagtcagaaggccccgtgatacaagaatcagctgaaccaagccagttggaagttccagccacagaagaaataaaagagactgatggaagctctcagatcaagcaagaaccagaccccacgtggtagacctcttccctcctagggtaaatcagcttctgtgtcagggatgctgtgtggtgtccatctgaaccccctgcatacgcgtagctaatgtgatctccccactttcacataagatggtggccctgccttcagggaatgtgggagccaggtgggagccttcccggatatttaagctagaagattctacagggagattctccttggatcaatatatgtctctcagtcaaagatgtaaaagcacttttgccttaaaaagaatgttctgtttctaaatagagtcaacgttgtcctcctcattggaattcactatgagtcagaatcattagactgacttttttttttccatagtaatagtattttgcagagtctcacagagctgcagatcttttgttcatcttgcagagttaacaagtctgatcctgttagtccagatttcttaaatttggccaagttataataggagcagtagcttgagacccgaagtcaggaaactttgacaatggatttttttttttaatccagagacttgtactggaatttgccttaccctgtcagctcatggacttaaggtttcatcccgctttatgagtgcttctgaatccaagtcattgttacctgaatttgcaaattaagttgtgatattcgtgactgttaaattcctgtaattagattaacctctttgcttgcttgtttgttttctctcctattttagcttaaagtatcagtggttgagaagagcttttcggacctgttactaccccaagctgtgtaatatacttgtataacagaaataccttctatacaaacctttttttctacttttagatagaaatgtctactttttcagcagttctgtgaattaaagagcagagtgactgtgggtctggaatggctggtgtacttgggaatgtactatcaggattttacagcaatgctgggaaatgacagggaaaatgacaggaatgaatctcaccagattttttatgtactcagcagagccttgagttacggtgtttattttccaatcaagtgaagatatctcctacttctcctactggaacatctcagcttctgcagtgaagaaaaattcctgtgatagttcagttctttagtttttctatttgaaaaaaaaaaatcatttaaatgatcctttgttcacggctctccttaatgactgagtgaacagttcctatctgtatatttgactaaaccttttcctaagctatctctcatggttcctatgtttttttatcataattaaaagcaaaaccatctggatcacctaacagtcagaggtcagtatctcagcgtgtgaattatagaggaaatacagagagaacctcttccacttttacttttcgtccaaataaaatgcatggtgtaccagaagttgaagatcgggttgaggattggggctagctcgatgacactaaggccccaacatcgcgggacctgctgtggcgcggattcttaggaacgctgttctagccggccccctctccaggggtcgccgtggccggcattatttcctagttcttcttgtaaccctgaggtgccagcgcggggagtgaggaggggtcagggggctaaggatgcaacctctgacgttctgcgccttcctaggagagtcttacatgtgttgagatttcacaagcaatgcgagttgtaaaataccagctctacaagaagctaggctctgtgacggcatagttttcagtagctttatcacaatattcacaatggagaattatatgacatggtagcagaaataggcccttttatgtgttgcttctattttacctcaaattgtagatatagggtaatcaataaaatccatccatgcctttcacacactaagt

SEQ ID NO: 4561 - protein, 584 aa, Homo sapiens; identical to SEQ ID NO: 4053

SEQ ID NO: 4562 - DNA, 4292 bp, Homo sapiens
aaaaaaaaaaaaaaaaaaaaaaaaaaaagaaaaaagaaaaaaaaaaggaggaggaggaggagggtgagagagaagctgggagagcagagaaaaggggccaccggtcgcccccccgcttccccgcacgcgctctccagccgcggccgcccgcctgccgcggtcaccccggcctctgcctctgtcccccagtgatcggatcaaggcgctgagcgaggccctgcctgcggggcggccatgcggcggtgacaggagcgcgaccgacacgcacgggcccctcgccccctctcgcctcccgtccgctcgccagctcccctcagccgaggctgctccgcggcggccgcagcccgcgcgcggcccacactcgcctccccgttgaagatgaggagtcctcggagagcaggatggtggtgacattcctcatgtcagctctcgagtccatgtgtaaagaactggccaagtccaaagccgaagtggcctgcattgcagtgtatgaaacagacgtgtttgtcgtcggaactgaaagaggacgtgcttttgtcaataccagaaaggattttcaaaaagattttgtaaaatattgtgttgaagaagaagaaaaagctgcagagatgcataaaatgaaatctacaacccaggcaaatcggatgagtgtagatgctgtagaaattgaaacactcagaaaaacagttgaggactatttctgcttttgctatgggaaagctttaggcaaatccacagtggtacctgtaccatatgagaagatgctgcgagaccagtcggctgtggtagtgcaggggcttccggaaggtgttgcctttaaacaccccgagaactatgatcttgcaaccctgaaatggattttggagaacaaagcagggatttcattcatcattaagagaccttttttagagccaaagaagcatgtaggtggtcgtgtgatggtaacagatgctgacaggtcaatactatctccaggtggaagttgtggccccatcaaagtgaaaactgaacccacagaagattctggaagccaccattcttcagagggcaatgaaggcacagaaatggaagtaccagcagaagattctactcaacatgtcccttcagaaacaagtgaggaccctgaagttgaggtgactattgaagatgatgattattctccaccgtctaagagaccaaaggccaatgagctaccgcagccaccagtcccggaacccgccaatgctgggaagcggaaagtgagggagttcaacttcgagaaatggaatgctcgcatcactgatctacgtaaacaagttgaagaattgtttgaaaggaaatatgctcaagccataaaagccaaaggtccggtgacgatcccgtaccctcttttccagtctcatgttgaagatctttatgtagaaggacttcctgaaggaattccttttagaaggccatctacttacggaattcctcgcctggagaggatattacttgcaaaggaaaggattcgttttgtgattaagaaacatgagcttctgaattcaacacgtgaagatttacagcttgataagccagcttcaggagtaaaggaagaatggtatgccagaatcactaaattaagaaagatggtggatcagcttttctgcaaaaaatttgcggaagccttggggagcactgaagccaaggctgtaccgtaccaaaaatttgaggcacacccgaatgatctgtacgtggaaggactgccagaaaacattcctttccgaagtccctcatggtatggaatcccaaggctggaaaaaatcattcaagtgggcaatcgaattaaatttgttattaaaagaccagaacttctgactcacagtaccactgaagttactcagccaagaacgaatacaccagctcaagctcttggactcaccgaggcagtaaaagtaccatatcctgtgtttgaatcaaacccggagttcttgtatgtggaaggcttgccagaggggattcccttccgaagccctacctggtttggaattccacgacttgaaaggatcgtccgcgggagtaataaaatcaagttcgttgttaaaaaacctgaactagttatttcctacttgcctcctgggatggctagtaaaataaacactaaagctttgcagtcccccaaaagaccacgaagtcctgggagtaattcaaaggttcctgaaattgaggtcaccgtggaaggccctaataacaacaatcctcaaacctcagctgttcgaaccccgacccagactaacggttctaacgttcccttcaagccacgagggagagagttttcctttgaggcctggaatgccaaaatcacggacctaaaacagaaagttgaaaatctcttcaatgagaaatgtggggaagctcttggccttaaacaagctgtgaaggtgccgttcgcgttatttgagtctttcccggaagacttttatgtggaaggcttacctgagggtgtgccattccgaagaccatcgacttttggcattccgaggctggagaagatactcagaaacaaagccaaaattaagttcatcattaaaaagcccgaaatgtttgagacggcgattaaggagagcacctcctctaagagccctcccagaaaaataaattcatcacccaatgttaatactactgcatcaggtgttgaagaccttaacatcattcaggtgacaattccagatgatgataatgaaagactctcgaaagttgaaaaagctagacagctaagagaacaagtgaatgacctctttagtcggaaatttggtgaagctattggtatgggttttcctgtgaaagttccctacaggaaaatcacaattaaccctggctgtgtggtggttgatggcatgcccccgggggtgtccttcaaagcccccagctacctggaaatcagctccatgagaaggatcttagactctgccgagtttatcaaattcacggtcattagaccatttccaggacttgtgattaataaccagctggttgatcagagtgagtcagaaggccccgtgatacaagaatcagctgaaccaagccagttggaagttccagccacagaagaaataaaagagactgatggaagctctcagatcaagcaagaaccagaccccacgtggtagacctcttccctcctaggcttaaagtatcagtggttgagaagagcttttcggacctgttactaccccaagctgtgtaatatacttgtataacagaaataccttctatacaaacctttttttctacttttagatagaaatgtctactttttcagcagttctgtgaattaaagagcagagtgactgtgggtctggaatggctggtgtacttgggaatgtactatcaggattttacagcaatgctgggaaatgacagggaaaatgacaggaatgaatctcaccagattttttatgtactcagcagagccttgagttacggtgtttattttccaatcaagtgaagatatctcctacttctcctactggaacatctcagcttctgcagtgaagaaaaattcctgtgatagttcagttctttagtttttctatttgaaaaaaaaaaatcatttaaatgatcctttgttcacggctctccttaatgactgagtgaacagttcctatctgtatatttgactaaaccttttcctaagctatctctcatggttcctatgtttttttatcataattaaaagcaaaaccatctggatcacctaacagtcagaggtcagtatctcagcgtgtgaattatagaggaaatacagagagaacctcttccacttttacttttcgtccaaataaaatgcatggtgtaccagaagttgaagatcgggttgaggattggggctagctcgatgacactaaggccccaacatcgcgggacctgctgtggcgcggattcttaggaacgctgttctagccggccccctctccaggggtcgccgtggccggcattatttcctagttcttcttgtaaccctgaggtgccagcgcggggagtgaggaggggtcagggggctaaggatgcaacctctgacgttctgcgccttcctaggagagtcttacatgtgttgagatttcacaagcaatgcgagttgtaaaataccagctctacaagaagctaggctctgtgacggcatagttttcagtagctttatcacaatattcacaatggagaattatatgacatggtagcagaaataggcccttttatgtgttgcttctattttacctcaaattgtagatatagggtaatcaataaaatccatccatgcctttcacacactaagt

SEQ ID NO: 4563 - protein, 908 aa, Homo sapiens; identical to SEQ ID NO: 4227

SEQ ID NO: 4564 - DNA, 7220 bp, Homo sapiens
aaaaaaaaaaaaaaaaaaaaaaaaaaaagaaaaaagaaaaaaaaaaggaggaggaggaggagggtgagagagaagctgggagagcagagaaaaggggccaccggtcgcccccccgcttccccgcacgcgctctccagccgcggccgcccgcctgccgcggtcaccccggcctctgcctctgtcccccagtgatcggatcaaggcgctgagcgaggccctgcctgcggggcggccatgcggcggtgacaggagcgcgaccgacacgcacgggcccctcgccccctctcgcctcccgtccgctcgccagctcccctcagccgaggctgctccgcggcggccgcagcccgcgcgcggcccacactcgcctcccctcggcacccccggccccggagctgcctggaggcggccgcactcggggatcatggcccaagttgcaatgtccaccctccccgttgaagatgaggagtcctcggagagcaggatggtggtgacattcctcatgtcagctctcgagtccatgtgtaaagaactggccaagtccaaagccgaagtggcctgcattgcagtgtatgaaacagacgtgtttgtcgtcggaactgaaagaggacgtgcttttgtcaataccagaaaggattttcaaaaagattttgtaaaatattgtgttgaagaagaagaaaaagctgcagagatgcataaaatgaaatctacaacccaggcaaatcggatgagtgtagatgctgtagaaattgaaacactcagaaaaacagttgaggactatttctgcttttgctatgggaaagctttaggcaaatccacagtggtacctgtaccatatgagaagatgctgcgagaccagtcggctgtggtagtgcaggggcttccggaaggtgttgcctttaaacaccccgagaactatgatcttgcaaccctgaaatggattttggagaacaaagcagggatttcattcatcattaagagaccttttttagagccaaagaagcatgtaggtggtcgtgtgatggtaacagatgctgacaggtcaatactatctccaggtggaagttgtggccccatcaaagtgaaaactgaacccacagaagattctggcatttccctggaaatggcagctgtgacagtaaaggaagaatcagaagatcctgattattatcaatataacattcaaggaagccaccattcttcagagggcaatgaaggcacagaaatggaagtaccagcagaagatgatgattattctccaccgtctaagagaccaaaggccaatgagctaccgcagccaccagtcccggaacccgccaatgctgggaagcggaaagtgagggagttcaacttcgagaaatggaatgctcgcatcactgatctacgtaaacaagttgaagaattgtttgaaaggaaatatgctcaagccataaaagccaaaggtccggtgacgatcccgtaccctcttttccagtctcatgttgaagatctttatgtagaaggacttcctgaaggaattccttttagaaggccatctacttacggaattcctcgcctggagaggatattacttgcaaaggaaaggattcgttttgtgattaagaaacatgagcttctgaattcaacacgtgaagatttacagcttgataagccagcttcaggagtaaaggaagaatggtatgccagaatcactaaattaagaaagatggtggatcagcttttctgcaaaaaatttgcggaagccttggggagcactgaagccaaggctgtaccgtaccaaaaatttgaggcacacccgaatgatctgtacgtggaaggactgccagaaaacattcctttccgaagtccctcatggtatggaatcccaaggctggaaaaaatcattcaagtgggcaatcgaattaaatttgttattaaaagaccagaacttctgactcacagtaccactgaagttactcagccaagaacgaatacaccagtcaaagaagattggaatgtcagaattaccaagctacggaagcaagtggaagagatttttaatttgaaatttgctcaagctcttggactcaccgaggcagtaaaagtaccatatcctgtgtttgaatcaaacccggagttcttgtatgtggaaggcttgccagaggggattcccttccgaagccctacctggtttggaattccacgacttgaaaggatcgtccgcgggagtaataaaatcaagttcgttgttaaaaaacctgaactagttatttcctacttgcctcctgggatggctagtaaaataaacactaaagctttgcagtcccccaaaagaccacgaagtcctgggagtaattcaaaggttcctgaaattgaggtcaccgtggaaggccctaataacaacaatcctcaaacctcagctgttcgaaccccgacccagactaacggttctaacgttcccttcaagccacgagggagagagttttcctttgaggcctggaatgccaaaatcacggacctaaaacagaaagttgaaaatctcttcaatgagaaatgtggggaagctcttggccttaaacaagctgtgaaggtgccgttcgcgttatttgagtctttcccggaagacttttatgtggaaggcttacctgagggtgtgccattccgaagaccatcgacttttggcattccgaggctggagaagatactcagaaacaaagccaaaattaagttcatcattaaaaagcccgaaatgtttgagacggcgattaaggagagcacctcctctaagagccctcccagaaaaataaattcatcacccaatgttaatactactgcatcaggtgttgaagaccttaacatcattcaggtgacaattccagatgatgataatgaaagactctcgaaagttgaaaaagctagacagctaagagaacaagtgaatgacctctttagtcggaaatttggtgaagctattggtatgggttttcctgtgaaagttccctacaggaaaatcacaattaaccctggctgtgtggtggttgatggcatgcccccgggggtgtccttcaaagcccccagctacctggaaatcagctccatgagaaggatcttagactctgccgagtttatcaaattcacggtcattaggtaagtgagagtttcctgcttagtcacaggagcgaatctggagctcatgaggctgactcttctaaaatgcagccacaggtagtcatcgaatccggcttcctatgctgtgcaatcaacaaatcaaaataacttgtgtcatcattagaatgtcagatgtgcttctacgaactaagctgactcttttaattctttggcaaagggttggcaaactaggactgtttgccaaattcaggctgcctcctatttttagagtcttcctgaaacacagctacacccgtattatccatggctgctttcctgtcacagtgagtaagtagctgggactgagaaggcatggcctccaaagtctaaaatatttactctctagcactttgtagaaaaaccttagctaggcacagtggctaacgcctgtaatcccagcattttgggaggccaaggcaggcagatcacctgaggtcaggagttccagaccagcctggccaacatggtgaaatcccatctctacaaaaataaaacagttagctgggcatgatggcgggtgcctgtaatcccagctactcgggaggctgaggcaggatagtcgcttgaacccaggaggtggaggttgcaatgagccaagatcatgccactgcactccagcctggacgacagagtgagactccatcacaagaaaaaaagaactttgtcaacctctgtcttagggcgccttgtcacaggcttcgggtcagacggattcaaccttgcatcagccatttgttagccaggtcactctgttctttgtctgtaaatgagattgatcgttgttcccactgagagtgtcagctccttcccgtagagcaggcatgatgattgtactcacctctgacaccattgtgagtgccacattccttcccacgtccttgtcactgtaagagatgcccacctgagcaccaaccccaggttatcttcccctttgtcttccagccccccagaaacagctacgactcaacctacccaatcatttcatcatcagattgccactgtctctagttcaggtctcttgggactggcactcagaaatctcataataaatcctcttgaggcttctcatacactcgtcttcttccaatcttctttccctcaaaatctcatattttggttccacttcacccaccgtcattctccatatcactcccaggagttaggcaaaaagccccttccgttcttccgtatgttaaacttagaatcactctgttccctgctctgcgtttctattttttgtttttcctccatttactagtagcttaacactttctaacagtgttcttattattgatacgtatctatctcttccataagcttataaggtcacggataatacttctcattgtagtacgtaaatgacgtgggctagatatgagttgaataaacagttatacctgtaaattcttacagagtgaaaataaattgttatactttacaatttgtttctctctttagaccatttccaggacttgtgattaataaccgtgagtattttgtgaagtgttttgtttttgttttttcctggggtctgacgtgtgtgcgtgtgagtgtgtatacatgcttaacgtatatcacgttacttcacctatgtcagtaaccaggccaaatacttgttttagccctcagtaaaaacaccaggcacttcctagttgtaaaattattcaagcttcttaacttcctatcctcgatgcacttaatcataaaatggtaataatagcaccgattttgggggagtcgttccagtagatggaaagcatctggaacaggtgtcagcaagctcctgccgacgtgtatgcataaagttttattgaaaccaccatcgtgtccatttgtttatggcagaactgagagatggcagcagcaagtgtgtgcctgcaaaacctaaaatatttactaattggctctgcaagaaaagagtttgcatccccctaacctagaacagtgtctagcctctagtatgtgtttagcctacagtatgtgctcagcgaatacaatctatatttattactgcttttatgactgttataattactgtgcttggatttcgttacaaagtaagtcacaatgtgcctgcttctgttagtatttcagcacagtgcctggcacacatggggctctcaaatattgctgagcgagtgaacaaatgtcctttcaattccttaacgttgatgtcattttcaatagtattttgagccaaacttaattttgcgagtgtgttttgttttcttaactttattattaaaaatgtataaaagtgaggccaggcgtggtggctcacgcctgtaatcccagcagtttgggaggctgaggcaggcggatcagttgaggttgggagttggagaccagcccgtccaacatggtgaaagcctgtctctactaaaaatacaaaaatcagctgggtgtggtggcgcgtgcctgtaatcccagctactcaggaggctgaggcaggagagttgcttgaatcctagaggtggaggttgcagtgagctgagatcgtgccattgcactccagcctgggcaacaagagcaaaactctgtcccaataaataaataaataaaatgttctcttttgttcctgttcttgtgcggtagtgtggtatagagttttatggtaattactgtgaattagtgattctgagggacatatcagaactctgaggtttgtttccttctcatcttgagggaaacagcaaatgtatgttaaaatgcttttccaagggaacaacacatccttacattatttaaaccaatctgcttcattttcagagctggttgatcagagtgagtcagaaggccccgtgatacaagaatcagctgaaccaagccagttggaagttccagccacagaagaaataaaagagactgatggaagctctcagatcaagcaagaaccagaccccacgtggtagacctcttccctcctaggcttaaagtatcagtggttgagaagagcttttcggacctgttactaccccaagctgtgtaatatacttgtataacagaaataccttctatacaaacctttttttctacttttagatagaaatgtctactttttcagcagttctgtgaattaaagagcagagtgactgtgggtctggaatggctggtgtacttgggaatgtactatcaggattttacagcaatgctgggaaatgacagggaaaatgacaggaatgaatctcaccagattttttatgtactcagcagagccttgagttacggtgtttattttccaatcaagtgaagatatctcctacttctcctactggaacatctcagcttctgcagtgaagaaaaattcctgtgatagttcagttctttagtttttctatttgaaaaaaaaaaatcatttaaatgatcctttgttcacggctctccttaatgactgagtgaacagttcctatctgtatatttgactaaaccttttcctaagctatctctcatggttcctatgtttttttatcataattaaaagcaaaaccatctggatcacctaacagtcagaggtcagtatctcagcgtgtgaattatagaggaaatacagagagaacctcttccacttttacttttcgtccaaataaaatgcatggtgtaccagaagttgaagatcgggttgaggattggggctagctcgatgacactaaggccccaacatcgcgggacctgctgtggcgcggattcttaggaacgctgttctagccggccccctctccaggggtcgccgtggccggcattatttcctagttcttcttgtaaccctgaggtgccagcgcggggagtgaggaggggtcagggggctaaggatgcaacctctgacgttctgcgccttcctaggagagtcttacatgtgttgagatttcacaagcaatgcgagttgtaaaataccagctctacaagaagctaggctctgtgacggcatagttttcagtagctttatcacaatattcacaatggagaattatatgacatggtagcagaaataggcccttttatgtgttgcttctattttacctcaaattgtagatatagggtaatcaataaaatccatccatgcctttcacacactaagt

SEQ ID NO: 4565 - protein, 901 aa, Homo sapiens [sequence omitted]

SEQ ID NO: 4566 - DNA, 4023 bp, Homo sapiens
aaaaaaaaaaaaaaaaaaaaaaaaaaaagaaaaaagaaaaaaaaaaggaggaggaggaggagggtgagagagaagctgggagagcagagaaaaggggccaccggtcgcccccccgcttccccgcacgcgctctccagccgcggccgcccgcctgccgcggtcaccccggcctctgcctctgtcccccagtgatcggatcaaggcgctgagcgaggccctgcctgcggggcggccatgcggcggtgacaggagcgcgaccgacacgcacgggcccctcgccccctctcgcctcccgtccgctcgccagctcccctcagccgaggctgctccgcggcggccgcagcccgcgcgcggcccacactcgcctccccgttgaagatgaggagtcctcggagagcaggatggtggtgacattcctcatgtcagctctcgagtccatgtgtaaagaactggccaagtccaaagccgaagtggcctgcattgcagtgtatgaaacagacgtgtttgtcgtcggaactgaaagaggacgtgcttttgtcaataccagaaaggattttcaaaaagattttgtaaaatattgtgttgaagaagaagaaaaagctgcagagatgcataaaatgaaatctacaacccaggcaaatcggatgagtgtagatgctgtagaaattgaaacactcagaaaaacagttgaggactatttctgcttttgctatgggaaagctttaggcaaatccacagtggtacctgtaccatatgagaagatgctgcgagaccagtcggctgtggtagtgcaggggcttccggaaggtgttgcctttaaacaccccgagaactatgatcttgcaaccctgaaatggattttggagaacaaagcagggatttcattcatcattaagagaccttttttagagccaaagaagcatgtaggtggtcgtgtgatggtaacagatgctgacaggtcaatactatctccaggtggaagttgtggccccatcaaagtgaaaactgaacccacagaagattctggcatttccctggaaatggcagctgtgacagtaaaggaagaatcagaagatcctgattattatcaatataacattcaaggaagccaccattcttcagagggcaatgaaggcacagaaatggaagtaccagcagaagatgatgattattctccaccgtctaagagaccaaaggccaatgagctaccgcagccaccagtcccggaacccgccaatgctgggaagcggaaagtgagggagttcaacttcgagaaatggaatgctcgcatcactgatctacgtaaacaagttgaagaattgtttgaaaggaaatatgctcaagccataaaagccaaaggtccggtgacgatcccgtaccctcttttccagtctcatgttgaagatctttatgtagaaggacttcctgaaggaattccttttagaaggccatctacttacggaattcctcgcctggagaggatattacttgcaaaggaaaggattcgttttgtgattaagaaacatgagcttctgaattcaacacgtgaagatttacagcttgataagccagcttcaggagtaaaggaagaatggtatgccagaatcactaaattaagaaagatggtggatcagcttttctgcaaaaaatttgcggaagccttggggagcactgaagccaaggctgtaccgtaccaaaaatttgaggcacacccgaatgatctgtacgtggaaggactgccagaaaacattcctttccgaagtccctcatggtatggaatcccaaggctggaaaaaatcattcaagtgggcaatcgaattaaatttgttattaaaagaccagaacttctgactcacagtaccactgaagttactcagccaagaacgaatacaccagctcaagctcttggactcaccgaggcagtaaaagtaccatatcctgtgtttgaatcaaacccggagttcttgtatgtggaaggcttgccagaggggattcccttccgaagccctacctggtttggaattccacgacttgaaaggatcgtccgcgggagtaataaaatcaagttcgttgttaaaaaacctgaactagttatttcctacttgcctcctgggatggctagtaaaataaacactaaagctttgcagtcccccaaaagaccacgaagtcctgggagtaattcaaaggttcctgaaattgaggtcaccgtggaaggccctaataacaacaatcctcaaacctcagctgttcgaaccccgacccagactaacggttctaacgttcccttcaagccacgagggagagagttttcctttgaggcctggaatgccaaaatcacggacctaaaacagaaagttgaaaatctcttcaatgagaaatgtggggaagctcttggccttaaacaagctgtgaaggtgccgttcgcgttatttgagtctttcccggaagacttttatgtggaaggcttacctgagggtgtgccattccgaagaccatcgacttttggcattccgaggctggagaagatactcagaaacaaagccaaaattaagttcatcattaaaaagcccgaaatgtttgagacggcgattaaggagagcacctcctctaagagccctcccagaaaaataaattcatcacccaatgttaatactactgcatcaggtgttgaagaccttaacatcattcaggtgacaattccagatgatgataatgaaagactctcgaaagttgaaaaagctagacagctaagagaacaagtgaatgacctctttagtcggaaatttggtgaagctattggtatgggttttcctgtgaaagttccctacaggaaaatcacaattaaccctggctgtgtggtggttgatggcatgcccccgggggtgtccttcaaagcccccagctacctggaaatcagctccatgagaaggatcttagactctgccgagtttatcaaattcacggtcattagaccatttccaggacttgtgattaataaccagctggttgatcagagtgagtcagaaggccccgtgatacaagaatcagctgaaccaagccagttggaagttccagccacagaagaaataaaagagactgatggaagctctcagatcaagcaagaaccagaccccacgtggtagacctcttccctcctaggagccttgagttacggtgtttattttccaatcaagtgaagatatctcctacttctcctactggaacatctcagcttctgcagtgaagaaaaattcctgtgatagttcagttctttagtttttctatttgaaaaaaaaaaatcatttaaatgatcctttgttcacggctctccttaatgactgagtgaacagttcctatctgtatatttgactaaaccttttcctaagctatctctcatggttcctatgtttttttatcataattaaaagcaaaaccatctggatcacctaacagtcagaggtcagtatctcagcgtgtgaattatagaggaaatacagagagaacctcttccacttttacttttcgtccaaataaaatgcatggtgtaccagaagttgaagatcgggttgaggattggggctagctcgatgacactaaggccccaacatcgcgggacctgctgtggcgcggattcttaggaacgctgttctagccggccccctctccaggggtcgccgtggccggcattatttcctagttcttcttgtaaccctgaggtgccagcgcggggagtgaggaggggtcagggggctaaggatgcaacctctgacgttctgcgccttcctaggagagtcttacatgtgttgagatttcacaagcaatgcgagttgtaaaataccagctctacaagaagctaggctctgtgacggcatagttttcagtagctttatcacaatattcacaatggagaattatatgacatggtagcagaaataggcccttttatgtgttgcttctattttacctcaaattgtagatatagggtaatcaataaaatccatccatgcctttcacacactaagt

SEQ ID NO: 4567 - protein, 913 aa, Homo sapiens; identical to SEQ ID NO: 4089

SEQ ID NO: 4568 - DNA, 3760 bp, Homo sapiens
aaaaaaaaaaaaaaaaaaaaaaaaaaaagaaaaaagaaaaaaaaaaggaggaggaggaggagggtgagagagaagctgggagagcagagaaaaggggccaccggtcgcccccccgcttccccgcacgcgctctccagccgcggccgcccgcctgccgcggtcaccccggcctctgcctctgtcccccagtgatcggatcaaggcgctgagcgaggccctgcctgcggggcggccatgcggcggtgacaggagcgcgaccgacacgcacgggcccctcgccccctctcgcctcccgtccgctcgccagctcccctcagccgaggctgctccgcggcggccgcagcccgcgcgcggcccacactcgcctccccgttgaagatgaggagtcctcggagagcaggatggtggtgacattcctcatgtcagctctcgagtccatgtgtaaagaactggccaagtccaaagccgaagtggcctgcattgcagtgtatgaaacagacgtgtttgtcgtcggaactgaaagaggacgtgcttttgtcaataccagaaaggattttcaaaaagattttgtaaaatattgtgttgaagaagaagaaaaagctgcagagatgcataaaatgaaatctacaacccaggcaaatcggatgagtgtagatgctgtagaaattgaaacactcagaaaaacagttgaggactatttctgcttttgctatgggaaagctttaggcaaatccacagtggtacctgtaccatatgagaagatgctgcgagaccagtcggctgtggtagtgcaggggcttccggaaggtgttgcctttaaacaccccgagaactatgatcttgcaaccctgaaatggattttggagaacaaagcagggatttcattcatcattaagagaccttttttagagccaaagaagcatgtaggtggtcgtgtgatggtaacagatgctgacaggtcaatactatctccaggtggaagttgtggccccatcaaagtgaaaactgaacccacagaagattctggcatttccctggaaatggcagctgtgacagtaaaggaagaatcagaagatcctgattattatcaatataacattcaaggaagccaccattcttcagagggcaatgaaggcacagaaatggaagtaccagcagaagatgatgattattctccaccgtctaagagaccaaaggccaatgagctaccgcagccaccagtcccggaacccgccaatgctgggaagcggaaagtgagggagttcaacttcgagaaatggaatgctcgcatcactgatctacgtaaacaagttgaagaattgtttgaaaggaaatatgctcaagccataaaagccaaaggtccggtgacgatcccgtaccctcttttccagtctcatgttgaagatctttatgtagaaggacttcctgaaggaattccttttagaaggccatctacttacggaattcctcgcctggagaggatattacttgcaaaggaaaggattcgttttgtgattaagaaacatgagcttctgaattcaacacgtgaagatttacagcttgataagccagcttcaggagtaaaggaagaatggtatgccagaatcactaaattaagaaagatggtggatcagcttttctgcaaaaaatttgcggaagccttggggagcactgaagccaaggctgtaccgtaccaaaaatttgaggcacacccgaatgatctgtacgtggaaggactgccagaaaacattcctttccgaagtccctcatggtatggaatcccaaggctggaaaaaatcattcaagtgggcaatcgaattaaatttgttattaaaagaccagaacttctgactcacagtaccactgaagttactcagccaagaacgaatacaccagtcaaagaagattggaatgtcagaattaccaagctacggaagcaagtggaagagatttttaatttgaaatttgctcaagctcttggactcaccgaggcagtaaaagtaccatatcctgtgtttgaatcaaacccggagttcttgaaaggatcgtccgcgggagtaataaaatcaagttcgttgttaaaaaacctgaactagttatttcctacttgcctcctgggatggctagtaaaataaacactaaagctttgcagtcccccaaaagaccacgaagtcctgggagtaattcaaaggttcctgaaattgaggtcaccgtggaaggccctaataacaacaatcctcaaacctcagctgttcgaaccccgacccagactaacggttctaacgttcccttcaagccacgagggagagagttttcctttgaggcctggaatgccaaaatcacggacctaaaacagaaagttgaaaatctcttcaatgagaaatgtggggaagctcttggccttaaacaagctgtgaaggtgccgttcgcgttatttgagtctttcccggaagacttttatgtggaaggcttacctgagggtgtgccattccgaagaccatcgacttttggcattccgaggctggagaagatactcagaaacaaagccaaaattaagttcatcattaaaaagcccgaaatgtttgagacggcgattaaggagagcacctcctctaagagccctcccagaaaaataaattcatcacccaatgttaatactactgcatcaggtgttgaagaccttaacatcattcaggtgacaattccagatgatgataatgaaagactctcgaaagttgaaaaagctagacagctaagagaacaagtgaatgacctctttagtcggaaatttggtgaagctattggtatgggttttcctgtgaaagttccctacaggaaaatcacaattaaccctggctgtgtggtggttgatggcatgcccccgggggtgtccttcaaagcccccagctacctggaaatcagctccatgagaaggatcttagactctgccgagtttatcaaattcacggtcattagaccatttccaggacttgtgattaataaccagctggttgatcagagtgagtcagaaggccccgtgatacaagaatcagctgaaccaagccagttggaagttccagccacagaagaaataaaagagactgatggaagctctcagatcaagcaagaaccagaccccacgtggtagacctcttccctcctaggcaaaaccatctggatcacctaacagtcagaggtcagtatctcagcgtgtgaattatagaggaaatacagagagaacctcttccacttttacttttcgtccaaataaaatgcatggtgtaccagaagttgaagatcgggttgaggattggggctagctcgatgacactaaggccccaacatcgcgggacctgctgtggcgcggattcttaggaacgctgttctagccggccccctctccaggggtcgccgtggccggcattatttcctagttcttcttgtaaccctgaggtgccagcgcggggagtgaggaggggtcagggggctaaggatgcaacctctgacgttctgcgccttcctaggagagtcttacatgtgttgagatttcacaagcaatgcgagttgtaaaataccagctctacaagaagctaggctctgtgacggcatagttttcagtagctttatcacaatattcacaatggagaattatatgacatggtagcagaaataggcccttttatgtgttgcttctattttacctcaaattgtagatatagggtaatcaataaaatccatccatgcctttcacacactaagt

SEQ ID NO: 4569 - protein, 564 aa, Homo sapiens; identical to SEQ ID NO: 4023

SEQ ID NO: 4570 - DNA, 4214 bp, Homo sapiens
aaaaaaaaaaaaaaaaaaaaaaaaaaaagaaaaaagaaaaaaaaaaggaggaggaggaggagggtgagagagaagctgggagagcagagaaaaggggccaccggtcgcccccccgcttccccgcacgcgctctccagccgcggccgcccgcctgccgcggtcaccccggcctctgcctctgtcccccagtgatcggatcaaggcgctgagcgaggccctgcctgcggggcggccatgcggcggtgacaggagcgcgaccgacacgcacgggcccctcgccccctctcgcctcccgtccgctcgccagctcccctcagccgaggctgctccgcggcggccgcagcccgcgcgcggcccacactcgcctccccgttgaagatgaggagtcctcggagagcaggatggtggtgacattcctcatgtcagctctcgagtccatgtgtaaagaactggccaagtccaaagccgaagtggcctgcattgcagtgtatgaaacagacgtgtttgtcgtcggaactgaaagaggacgtgcttttgtcaataccagaaaggattttcaaaaagattttgtaaaatattgtgttgaagaagaagaaaaagctgcagagatgcataaaatgaaatctacaacccaggcaaatcggatgagtgtagatgctgtagaaattgaaacactcagaaaaacagttgaggactatttctgcttttgctatgggaaagctttaggcaaatccacagtggtacctgtaccatatgagaagatgctgcgagaccagtcggctgtggtagtgcaggggcttccggaaggtgttgcctttaaacaccccgagaactatgatcttgcaaccctgaaatggattttggagaacaaagcagggatttcattcatcattaagagaccttttttagagccaaagaagcatgtaggtggtcgtgtgatggtaacagatgctgacaggtcaatactatctccaggtggaagttgtggccccatcaaagtgaaaactgaacccacagaagattctggcatttccctggaaatggcagctgtgacagtaaaggaagaatcagaagatcctgattattatcaatataacattcaaggaagccaccattcttcagagggcaatgaaggcacagaaatggaagtaccagcagaagattctactcaacatgtcccttcagaaacaagtgaggaccctgaagttgaggtgactattgaagatgatgattattctccaccgtctaagagaccaaaggccaatgagctaccgcagccaccagtcccggaacccgccaatgctgggaagcggaaagtgagggagttcaacttcgagaaatggaatgctcgcatcactgatctacgtaaacaagttgaagaattgtttgaaaggaaatatgctcaagccataaaagccaaaggtccggtgacgatcccgtaccctcttttccagtctcatgttgaagatctttatgtagaaggacttcctgaaggaattccttttagaaggccatctacttacggaattcctcgcctggagaggatattacttgcaaaggaaaggattcgttttgtgattaagaaacatgagcttctgaattcaacacgtgaagatttacagcttgataagccagcttcaggagtaaaggaagaatggtatgccagaatcactaaattaagaaagatggtggatcagcttttctgcaaaaaatttgcggaagccttggggagcactgaagccaaggctgtaccgtaccaaaaatttgaggcacacccgaatgatctgtacgtggaaggactgccagaaaacattcctttccgaagtccctcatggtatggaatcccaaggctggaaaaaatcattcaagtgggcaatcgaattaaatttgttattaaaagaccagaacttctgactcacagtaccactgaagttactcagccaagaacgaatacaccagtcaaagaagattggaatgtcagaattaccaagctacggaagcaagtggaagagatttttaatttgaaatttgctcaagctcttggactcaccgaggcagtaaaagtaccatatcctgtgtttgaatcaaacccggagttcttgtatgtggaaggcttgccagaggggattcccttccgaagccctacctggtttggaattccacgacttgaaaggatcgtccgcgggagtaataaaatcaagttcgttgttaaaaaacctgaactagttatttcctacttgcctcctgggatggctagtaaaataaacactaaagctttgcagtcccccaaaagaccacgaagtcctgggagtaattcaaaggttcctgaaattgaggtcaccgtggaaggccctaataacaacaatcctcaaacctcagctgttcgaaccccgacccagactaacggttctaacgttcccttcaagccacgagggagagagttttcctttgaggcctggaatgccaaaatcacggacctaaaacagaaagttgaaaatctcttcaatgagaaatgtggggaagctcttggccttaaacaagctgtgaaggtgccgttcgcgttatttgagtctttcccggaagacttttatgtggaaggcttacctgagggtgtgccattccgaagaccatcgacttttggcattccgaggctggagaagatactcagaaacaaagccaaaattaagttcatcattaaaaagcccgaaatgtttgagacggcgattaaggagagcacctcctctaagagccctcccagaaaaataaattcatcacccaatgttaatactactgcatcaggtgttgaagaccttaacatcattcaggtgacaattccagatgatgataatgaaagactctcgaaagttgaaaaagctagacagctaagagaacaagtgaatgacctctttagtcggaaatttggtgaagctattggtatgggttttcctgtgaaagttccctacaggaaaatcacaattaaccctggctgtgtggtggttgatggcatgcccccgggggtgtccttcaaagcccccagctacctggaaatcagctccatgagaaggatcttagactctgccgagtttatcaaattcacggtcattagaccatttccaggacttgtgattaataaccagctggttgatcagagtgagtcagaaggccccgtgatacaagaatcagctgaaccaagccagttggaagttccagccacagaagaaataaaagagactgatggaagctctcagatcaagcaagaaccagaccccacgtggtagacctcttccctcctaggcttaaagtatcagtggttgagaagagcttttcggacctgttactaccccaagctgtagccttgagttacggtgtttattttccaatcaagtgaagatatctcctacttctcctactggaacatctcagcttctgcagtgaagaaaaattcctgtgatagttcagttctttagtttttctatttgaaaaaaaaaaatcatttaaatgatcctttgttcacggctctccttaatgactgagtgaacagttcctatctgtatatttgactaaaccttttcctaagctatctctcatggttcctatgtttttttatcataattaaaagcaaaaccatctggatcacctaacagtcagaggtcagtatctcagcgtgtgaattatagaggaaatacagagagaacctcttccacttttacttttcgtccaaataaaatgcatggtgtaccagaagttgaagatcgggttgaggattggggctagctcgatgacactaaggccccaacatcgcgggacctgctgtggcgcggattcttaggaacgctgttctagccggccccctctccaggggtcgccgtggccggcattatttcctagttcttcttgtaaccctgaggtgccagcgcggggagtgaggaggggtcagggggctaaggatgcaacctctgacgttctgcgccttcctaggagagtcttacatgtgttgagatttcacaagcaatgcgagttgtaaaataccagctctacaagaagctaggctctgtgacggcatagttttcagtagctttatcacaatattcacaatggagaattatatgacatggtagcagaaataggcccttttatgtgttgcttctattttacctcaaattgtagatatagggtaatcaataaaatccatccatgcctttcacacactaagt

SEQ ID NO: 4571 - protein, 958 aa, Homo sapiens [sequence omitted]

SEQ ID NO: 4572 - DNA, 4452 bp, Homo sapiens
aaaaaaaaaaaaaaaaaaaaaaaaaaaagaaaaaagaaaaaaaaaaggaggaggaggaggagggtgagagagaagctgggagagcagagaaaaggggccaccggtcgcccccccgcttccccgcacgcgctctccagccgcggccgcccgcctgccgcggtcaccccggcctctgcctctgtcccccagtgatcggatcaaggcgctgagcgaggccctgcctgcggggcggccatgcggcggtgacaggagcgcgaccgacacgcacgggcccctcgccccctctcgcctcccgtccgctcgccagctcccctcagccgaggctgctccgcggcggccgcagcccgcgcgcggcccacactcgcctcccctcggcacccccggccccggagctgcctggaggcggccgcactcggggatcatggcccaagttgcaatgtccaccctccccgttgaagatgaggagtcctcggagagcaggatggtggtgacattcctcatgtcagctctcgagtccatgtgtaaagaactggccaagtccaaagccgaagtggcctgcattgcagtgtatgaaacagacgtgtttgtcgtcggaactgaaagaggacgtgcttttgtcaataccagaaaggattttcaaaaagattttgtaaaatattgtgttgaagaagaagaaaaagctgcagagatgcataaaatgaaatctacaacccaggcaaatcggatgagtgtagatgctgtagaaattgaaacactcagaaaaacagttgaggactatttctgcttttgctatgggaaagctttaggcaaatccacagtggtacctgtaccatatgagaagatgctgcgagaccagtcggctgtggtagtgcaggggcttccggaaggtgttgcctttaaacaccccgagaactatgatcttgcaaccctgaaatggattttggagaacaaagcagggatttcattcatcattaagagaccttttttagagccaaagaagcatgtaggtggtcgtgtgatggtaacagatgctgacaggtcaatactatctccaggtggaagttgtggccccatcaaagtgaaaactgaacccacagaagattctggcatttccctggaaatggcagctgtgacagtaaaggaagaatcagaagatcctgattattatcaatataacattcaagcaggcccttctgaaactgatgatgttgatgaaaaacagcccctatcgaagcctttgcaaggaagccaccattcttcagagggcaatgaaggcacagaaatggaagtaccagcagaagatgatgattattctccaccgtctaagagaccaaaggccaatgagctaccgcagccaccagtcccggaacccgccaatgctgggaagcggaaagtgagggagttcaacttcgagaaatggaatgctcgcatcactgatctacgtaaacaagttgaagaattgtttgaaaggaaatatgctcaagccataaaagccaaaggtccggtgacgatcccgtaccctcttttccagtctcatgttgaagatctttatgtagaaggacttcctgaaggaattccttttagaaggccatctacttacggaattcctcgcctggagaggatattacttgcaaaggaaaggattcgttttgtgattaagaaacatgagcttctgaattcaacacgtgaagatttacagcttgataagccagcttcaggagtaaaggaagaatggtatgccagaatcactaaattaagaaagatggtggatcagcttttctgcaaaaaatttgcggaagccttggggagcactgaagccaaggctgtaccgtaccaaaaatttgaggcacacccgaatgatctgtacgtggaaggactgccagaaaacattcctttccgaagtccctcatggtatggaatcccaaggctggaaaaaatcattcaagtgggcaatcgaattaaatttgttattaaaagaccagaacttctgactcacagtaccactgaagttactcagccaagaacgaatacaccagtcaaagaagattggaatgtcagaattaccaagctacggaagcaagtggaagagatttttaatttgaaatttgctcaagctcttggactcaccgaggcagtaaaagtaccatatcctgtgtttgaatcaaacccggagttcttgaaaggatcgtccgcgggagtaataaaatcaagttcgttgttaaaaaacctgaactagttatttcctacttgcctcctgggatggctagtaaaataaacactaaagctttgcagtcccccaaaagaccacgaagtcctgggagtaattcaaaggttcctgaaattgaggtcaccgtggaaggccctaataacaacaatcctcaaacctcagctgttcgaaccccgacccagactaacggttctaacgttcccttcaagccacgagggagagagttttcctttgaggcctggaatgccaaaatcacggacctaaaacagaaagttgaaaatctcttcaatgagaaatgtggggaagctcttggccttaaacaagctgtgaaggtgccgttcgcgttatttgagtctttcccggaagacttttatgtggaaggcttacctgagggtgtgccattccgaagaccatcgacttttggcattccgaggctggagaagatactcagaaacaaagccaaaattaagttcatcattaaaaagcccgaaatgtttgagacggcgattaaggagagcacctcctctaagagccctcccagaaaaataaattcatcacccaatgttaatactactgcatcaggtgttgaagaccttaacatcattcaggtgacaattccagatgatgataatgaaagactctcgaaagttgaaaaagctagacagctaagagaacaagtgaatgacctctttagtcggaaatttggtgaagctattggtatgggttttcctgtgaaagttccctacaggaaaatcacaattaaccctggctgtgtggtggttgatggcatgcccccgggggtgtccttcaaagcccccagctacctggaaatcagctccatgagaaggatcttagactctgccgagtttatcaaattcacggtcattagaccatttccaggacttgtgattaataaccagctggttgatcagagtgagtcagaaggccccgtgatacaagaatcagctgaaccaagccagttggaagttccagccacagaagaaataaaagagactgatggaagctctcagatcaagcaagaaccagaccccacgtggtagacctcttccctcctaggcttaaagtatcagtggttgagaagagcttttcggacctgttactaccccaagctgtgtaatatacttgtataacagaaataccttctatacaaacctttttttctacttttagatagaaatgtctactttttcagcagttctgtgaattaaagagcagagtgactgtgggtctggaatggctggtgtacttgggaatgtactatcaggattttacagcaatgctgggaaatgacagggaaaatgacaggaatgaatctcaccagattttttatgtactcagcagagccttgagttacggtgtttattttccaatcaagtgaagatatctcctacttctcctactggaacatctcagcttctgcagtgaagaaaaattcctgtgatagttcagttctttagtttttctatttgaaaaaaaaaaatcatttaaatgatcctttgttcacggctctccttaatgactgagtgaacagttcctatctgtatatttgactaaaccttttcctaagctatctctcatggttcctatgtttttttatcataattaaaagcaaaaccatctggatcacctaacagtcagaggtcagtatctcagcgtgtgaattatagaggaaatacagagagaacctcttccacttttacttttcgtccaaataaaatgcatggtgtaccagaagttgaagatcgggttgaggattggggctagctcgatgacactaaggccccaacatcgcgggacctgctgtggcgcggattcttaggaacgctgttctagccggccccctctccaggggtcgccgtggccggcattatttcctagttcttcttgtaaccctgaggtgccagcgcggggagtgaggaggggtcagggggctaaggatgcaacctctgacgttctgcgccttcctaggagagtcttacatgtgttgagatttcacaagcaatgcgagttgtaaaataccagctctacaagaagctaggctctgtgacggcatagttttcagtagctttatcacaatattcacaatggagaattatatgacatggtagcagaaataggcccttttatgtgttgcttctattttacctcaaattgtagatatagggtaatcaataaaatccatccatgcctttcacacactaagt

SEQ ID NO: 4573 - protein, 604 aa, Homo sapiens; identical to SEQ ID NO: 4117

SEQ ID NO: 4574 - DNA, 3967 bp, Homo sapiens
aaaaaaaaaaaaaaaaaaaaaaaaaaaagaaaaaagaaaaaaaaaaggaggaggaggaggagggtgagagagaagctgggagagcagagaaaaggggccaccggtcgcccccccgcttccccgcacgcgctctccagccgcggccgcccgcctgccgcggtcaccccggcctctgcctctgtcccccagtgatcggatcaaggcgctgagcgaggccctgcctgcggggcggccatgcggcggtgacaggagcgcgaccgacacgcacgggcccctcgccccctctcgcctcccgtccgctcgccagctcccctcagccgaggctgctccgcggcggccgcagcccgcgcgcggcccacactcgcctcccctcggcacccccggccccggagctgcctggaggcggccgcactcggggatcatggcccaagttgcaatgtccaccctccccgttgaagatgaggagtcctcggagagcaggatggtggtgacattcctcatgtcagctctcgagtccatgtgtaaagaactggccaagtccaaagccgaagtggcctgcattgcagtgtatgaaacagacgtgtttgtcgtcggaactgaaagaggacgtgcttttgtcaataccagaaaggattttcaaaaagattttgtaaaatattgtgttgaagaagaagaaaaagctgcagagatgcataaaatgaaatctacaacccaggcaaatcggatgagtgtagatgctgtagaaattgaaacactcagaaaaacagttgaggactatttctgcttttgctatgggaaagctttaggcaaatccacagtggtacctgtaccatatgagaagatgctgcgagaccagtcggctgtggtagtgcaggggcttccggaaggtgttgcctttaaacaccccgagaactatgatcttgcaaccctgaaatggattttggagaacaaagcagggatttcattcatcattaagagaccttttttagagccaaagaagcatgtaggtggtcgtgtgatggtaacagatgctgacaggtcaatactatctccaggtggaagttgtggccccatcaaagtgaaaactgaacccacagaagattctggcatttccctggaaatggcagctgtgacagtaaaggaagaatcagaagatcctgattattatcaatataacattcaagcaggcccttctgaaactgatgatgttgatgaaaaacagcccctatcgaagcctttgcaaggaagccaccattcttcagagggcaatgaaggcacagaaatggaagtaccagcagaagatgatgattattctccaccgtctaagagaccaaaggccaatgagctaccgcagccaccagtcccggaacccgccaatgctgggaagcggaaagtgagggagttcaacttcgagaaatggaatgctcgcatcactgatctacgtaaacaagttgaagaattgtttgaaaggaaatatgctcaagccataaaagccaaaggtccggtgacgatcccgtaccctcttttccagtctcatgttgaagatctttatgtagaaggacttcctgaaggaattccttttagaaggccatctacttacggaattcctcgcctggagaggatattacttgcaaaggaaaggattcgttttgtgattaagaaacatgagcttctgaattcaacacgtgaagatttacagcttgataagccagcttcaggagtaaaggaagaatggtatgccagaatcactaaattaagaaagatggtggatcagcttttctgcaaaaaatttgcggaagccttggggagcactgaagccaaggctgtaccgtaccaaaaatttgaggcacacccgaatgatctgtacgtggaaggactgccagaaaacattcctttccgaagtccctcatggtatggaatcccaaggctggaaaaaatcattcaagtgggcaatcgaattaaatttgttattaaaagaccagaacttctgactcacagtaccactgaagttactcagccaagaacgaatacaccagtcaaagaagattggaatgtcagaattaccaagctacggaagcaagtggaagagatttttaatttgaaatttgctcaagctcttggactcaccgaggcagtaaaagtaccatatcctgtgtttgaatcaaacccggagttcttgtatgtggaaggcttgccagaggggattcccttccgaagccctacctggtttggaattccacgacttgaaaggatcgtccgcgggagtaataaaatcaagttcgttgttaaaaaacctgaactagttatttcctacttgcctcctgggatggctagtaaaataaacactaaagctttgcagtcccccaaaagaccacgaagtcctgggagtaattcaaaggttcctgaaattgaggtcaccgtggaaggccctaataacaacaatcctcaaacctcagctgttcgaaccccgacccagactaacggttctaacgttcccttcaagccacgagggagagagttttcctttgaggcctggaatgccaaaatcacggacctaaaacagaaagttgaaaatctcttcaatgagaaatgtggggaagctcttggccttaaacaagctgtgaaggtgccgttcgcgttatttgagtctttcccggaagacttttatgtggaaggcttacctgagggtgtgccattccgaagaccatcgacttttggcattccgaggctggagaagatactcagaaacaaagccaaaattaagttcatcattaaaaagcccgaaatgtttgagacggcgattaaggagagcacctcctctaagagccctcccagaaaaataaattcatcacccaatgttaatactactgcatcaggtgttgaagaccttaacatcattcaggtgacaattccagatgatgataatgaaagactctcgaaagttgaaaaagctagacagctaagagaacaagtgaatgacctctttagtcggaaatttggtgaagctattggtatgggttttcctgtgaaagttccctacaggaaaatcacaattaaccctggctgtgtggtggttgatggcatgcccccgggggtgtccttcaaagcccccagctacctggaaatcagctccatgagaaggatcttagactctgccgagtttatcaaattcacggtcattagaccatttccaggacttgtgattaataaccagctggttgatcagagtgagtcagaaggccccgtgatacaagaatcagctgaaccaagccagttggaagttccagccacagaagaaataaaagagactgatggaagctctcagatcaagcaagaaccagaccccacgtggtagacctcttccctcctaggcaaaaccatctggatcacctaacagtcagaggtcagtatctcagcgtgtgaattatagaggaaatacagagagaacctcttccacttttacttttcgtccaaataaaatgcatggtgtaccagaagttgaagatcgggttgaggattggggctagctcgatgacactaaggccccaacatcgcgggacctgctgtggcgcggattcttaggaacgctgttctagccggccccctctccaggggtcgccgtggccggcattatttcctagttcttcttgtaaccctgaggtgccagcgcggggagtgaggaggggtcagggggctaaggatgcaacctctgacgttctgcgccttcctaggagagtcttacatgtgttgagatttcacaagcaatgcgagttgtaaaataccagctctacaagaagctaggctctgtgacggcatagttttcagtagctttatcacaatattcacaatggagaattatatgacatggtagcagaaataggcccttttatgtgttgcttctattttacctcaaattgtagatatagggtaatcaataaaatccatccatgcctttcacacactaagt

SEQ ID NO: 4575 - protein, 977 aa, Homo sapiens; identical to SEQ ID NO: 472

SEQ ID NO: 4576 - DNA, 4343 bp, Homo sapiens
aaaaaaaaaaaaaaaaaaaaaaaaaaaagaaaaaagaaaaaaaaaaggaggaggaggaggagggtgagagagaagctgggagagcagagaaaaggggccaccggtcgcccccccgcttccccgcacgcgctctccagccgcggccgcccgcctgccgcggtcaccccggcctctgcctctgtcccccagtgatcggatcaaggcgctgagcgaggccctgcctgcggggcggccatgcggcggtgacaggagcgcgaccgacacgcacgggcccctcgccccctctcgcctcccgtccgctcgccagctcccctcagccgaggctgctccgcggcggccgcagcccgcgcgcggcccacactcgcctcccctcggcacccccggccccggagctgcctggaggcggccgcactcggggatcatggcccaagttgcaatgtccaccctccccgttgaagatgaggagtcctcggagagcaggatggtggtgacattcctcatgtcagctctcgagtccatgtgtaaagaactggccaagtccaaagccgaagtggcctgcattgcagtgtatgaaacagacgtgtttgtcgtcggaactgaaagaggacgtgcttttgtcaataccagaaaggattttcaaaaagattttgtaaaatattgtgttgaagaagaagaaaaagctgcagagatgcataaaatgaaatctacaacccaggcaaatcggatgagtgtagatgctgtagaaattgaaacactcagaaaaacagttgaggactatttctgcttttgctatgggaaagctttaggcaaatccacagtggtacctgtaccatatgagaagatgctgcgagaccagtcggctgtggtagtgcaggggcttccggaaggtgttgcctttaaacaccccgagaactatgatcttgcaaccctgaaatggattttggagaacaaagcagggatttcattcatcattaagagaccttttttagagccaaagaagcatgtaggtggtcgtgtgatggtaacagatgctgacaggtcaatactatctccaggtggaagttgtggccccatcaaagtgaaaactgaacccacagaagattctggcatttccctggaaatggcagctgtgacagtaaaggaagaatcagaagatcctgattattatcaatataacattcaaggaagccaccattcttcagagggcaatgaaggcacagaaatggaagtaccagcagaagatgatgattattctccaccgtctaagagaccaaaggccaatgagctaccgcagccaccagtcccggaacccgccaatgctgggaagcggaaagtgagggagttcaacttcgagaaatggaatgctcgcatcactgatctacgtaaacaagttgaagaattgtttgaaaggaaatatgctcaagccataaaagccaaaggtccggtgacgatcccgtaccctcttttccagtctcatgttgaagatctttatgtagaaggacttcctgaaggaattccttttagaaggccatctacttacggaattcctcgcctggagaggatattacttgcaaaggaaaggattcgttttgtgattaagaaacatgagcttctgaattcaacacgtgaagatttacagcttgataagccagcttcaggagtaaaggaagaatggtatgccagaatcactaaattaagaaagatggtggatcagcttttctgcaaaaaatttgcggaagccttggggagcactgaagccaaggctgtaccgtaccaaaaatttgaggcacacccgaatgatctgtacgtggaaggactgccagaaaacattcctttccgaagtccctcatggtatggaatcccaaggctggaaaaaatcattcaagtgggcaatcgaattaaatttgttattaaaagaccagaacttctgactcacagtaccactgaagttactcagccaagaacgaatacaccagtcaaagaagattggaatgtcagaattaccaagctacggaagcaagtggaagagatttttaatttgaaatttgcttagatttgttgacagcggtttcctggagtgctgtcttgagaacgattctgaggaggctcagcaagaaagagtgtttcagttgattgggtgtgtctgtcatggagaaggaactcaagctcttggactcaccgaggcagtaaaagtaccatatcctgtgtttgaatcaaacccggagttcttgtatgtggaaggcttgccagaggggattcccttccgaagccctacctggtttggaattccacgacttgaaaggatcgtccgcgggagtaataaaatcaagttcgttgttaaaaaacctgaactagttatttcctacttgcctcctgggatggctagtaaaataaacactaaagctttgcagtcccccaaaagaccacgaagtcctgggagtaattcaaaggttcctgaaattgaggtcaccgtggaaggccctaataacaacaatcctcaaacctcagctgttcgaaccccgacccagactaacggttctaacgttcccttcaagccacgagggagagagttttcctttgaggcctggaatgccaaaatcacggacctaaaacagaaagttgaaaatctcttcaatgagaaatgtggggaagctcttggccttaaacaagctgtgaaggtgccgttcgcgttatttgagtctttcccggaagacttttatgtggaaggcttacctgagggtgtgccattccgaagaccatcgacttttggcattccgaggctggagaagatactcagaaacaaagccaaaattaagttcatcattaaaaagcccgaaatgtttgagacggcgattaaggagagcacctcctctaagagccctcccagaaaaataaattcatcacccaatgttaatactactgcatcaggtgttgaagaccttaacatcattcaggtgacaattccagatgatgataatgaaagactctcgaaagttgaaaaagctagacagctaagagaacaagtgaatgacctctttagtcggaaatttggtgaagctattggtatgggttttcctgtgaaagttccctacaggaaaatcacaattaaccctggctgtgtggtggttgatggcatgcccccgggggtgtccttcaaagcccccagctacctggaaatcagctccatgagaaggatcttagactctgccgagtttatcaaattcacggtcattagaccatttccaggacttgtgattaataaccagctggttgatcagagtgagtcagaaggccccgtgatacaagaatcagctgaaccaagccagttggaagttccagccacagaagaaataaaagagactgatggaagctctcagatcaagcaagaaccagaccccacgtggtagacctcttccctcctaggcttaaagtatcagtggttgagaagagcttttcggacctgttactaccccaagctgtagccttgagttacggtgtttattttccaatcaagtgaagatatctcctacttctcctactggaacatctcagcttctgcagtgaagaaaaattcctgtgatagttcagttctttagtttttctatttgaaaaaaaaaaatcatttaaatgatcctttgttcacggctctccttaatgactgagtgaacagttcctatctgtatatttgactaaaccttttcctaagctatctctcatggttcctatgtttttttatcataattaaaagcaaaaccatctggatcacctaacagtcagaggtcagtatctcagcgtgtgaattatagaggaaatacagagagaacctcttccacttttacttttcgtccaaataaaatgcatggtgtaccagaagttgaagatcgggttgaggattggggctagctcgatgacactaaggccccaacatcgcgggacctgctgtggcgcggattcttaggaacgctgttctagccggccccctctccaggggtcgccgtggccggcattatttcctagttcttcttgtaaccctgaggtgccagcgcggggagtgaggaggggtcagggggctaaggatgcaacctctgacgttctgcgccttcctaggagagtcttacatgtgttgagatttcacaagcaatgcgagttgtaaaataccagctctacaagaagctaggctctgtgacggcatagttttcagtagctttatcacaatattcacaatggagaattatatgacatggtagcagaaataggcccttttatgtgttgcttctattttacctcaaattgtagatatagggtaatcaataaaatccatccatgcctttcacacactaagt

SEQ ID NO: 4577 - protein, 543 aa, Homo sapiens; identical to SEQ ID NO: 4195

SEQ ID NO: 4578 - DNA, 3827 bp, Homo sapiens
aaaaaaaaaaaaaaaaaaaaaaaaaaaagaaaaaagaaaaaaaaaaggaggaggaggaggagggtgagagagaagctgggagagcagagaaaaggggccaccggtcgcccccccgcttccccgcacgcgctctccagccgcggccgcccgcctgccgcggtcaccccggcctctgcctctgtcccccagtgatcggatcaaggcgctgagcgaggccctgcctgcggggcggccatgcggcggtgacaggagcgcgaccgacacgcacgggcccctcgccccctctcgcctcccgtccgctcgccagctcccctcagccgaggctgctccgcggcggccgcagcccgcgcgcggcccacactcgcctccccgttgaagatgaggagtcctcggagagcaggatggtggtgacattcctcatgtcagctctcgagtccatgtgtaaagaactggccaagtccaaagccgaagtggcctgcattgcagtgtatgaaacagacgtgtttgtcgtcggaactgaaagaggacgtgcttttgtcaataccagaaaggattttcaaaaagattttgtaaaatattgtgttgaagaagaagaaaaagctgcagagatgcataaaatgaaatctacaacccaggcaaatcggatgagtgtagatgctgtagaaattgaaacactcagaaaaacagttgaggactatttctgcttttgctatgggaaagctttaggcaaatccacagtggtacctgtaccatatgagaagatgctgcgagaccagtcggctgtggtagtgcaggggcttccggaaggtgttgcctttaaacaccccgagaactatgatcttgcaaccctgaaatggattttggagaacaaagcagggatttcattcatcattaagagaccttttttagagccaaagaagcatgtaggtggtcgtgtgatggtaacagatgctgacaggtcaatactatctccaggtggaagttgtggccccatcaaagtgaaaactgaacccacagaagattctggcatttccctggaaatggcagctgtgacagtaaaggaagaatcagaagatcctgattattatcaatataacattcaaggaagccaccattcttcagagggcaatgaaggcacagaaatggaagtaccagcagaagatgatgattattctccaccgtctaagagaccaaaggccaatgagctaccgcagccaccagtcccggaacccgccaatgctgggaagcggaaagtgagggagttcaacttcgagaaatggaatgctcgcatcactgatctacgtaaacaagttgaagaattgtttgaaaggaaatatgctcaagccataaaagccaaaggtccggtgacgatcccgtaccctcttttccagtctcatgttgaagatctttatgtagaaggacttcctgaaggaattccttttagaaggccatctacttacggaattcctcgcctggagaggatattacttgcaaaggaaaggattcgttttgtgattaagaaacatgagcttctgaattcaacacgtgaagatttacagcttgataagccagcttcaggagtaaaggaagaatggtatgccagaatcactaaattaagaaagatggtggatcagcttttctgcaaaaaatttgcggaagccttggggagcactgaagccaaggctgtaccgtaccaaaaatttgaggcacacccgaatgatctgtacgtggaaggactgccagaaaacattcctttccgaagtccctcatggtatggaatcccaaggctggaaaaaatcattcaagtgggcaatcgaattaaatttgttattaaaagaccagaacttctgactcacagtaccactgaagttactcagccaagaacgaatacaccagtcaaagaagattggaatgtcagaattaccaagctacggaagcaagtggaagagatttttaatttgaaatttgctcaagctcttggactcaccgaggcagtaaaagtaccatatcctgtgtttgaatcaaacccggagttcttgtatgtggaaggcttgccagaggggattcccttccgaagccctacctggtttggaattccacgacttgaaaggatcgtccgcgggagtaataaaatcaagttcgttgttaaaaaacctgaactagttatttcctacttgcctcctgggatggctagtaaaataaacactaaagctttgcagtcccccaaaagaccacgaagtcctgggagtaattcaaaggttcctgaaattgaggtcaccgtggaaggccctaataacaacaatcctcaaacctcagctgttcgaaccccgacccagactaacggttctaacgttcccttcaagccacgagggagagagttttcctttgaggcctggaatgccaaaatcacggacctaaaacagaaagttgaaaatctcttcaatgagaaatgtggggaagctcttggccttaaacaagctgtgaaggtgccgttcgcgttatttgagtctttcccggaagacttttatgtggaaggcttacctgagggtgtgccattccgaagaccatcgacttttggcattccgaggctggagaagatactcagaaacaaagccaaaattaagttcatcattaaaaagcccgaaatgtttgagacggcgattaaggagagcacctcctctaagagccctcccagaaaaataaattcatcacccaatgttaatactactgcatcaggtgttgaagaccttaacatcattcaggtgacaattccagatgatgataatgaaagactctcgaaagttgaaaaagctagacagctaagagaacaagtgaatgacctctttagtcggaaatttggtgaagctattggtatgggttttcctgtgaaagttccctacaggaaaatcacaattaaccctggctgtgtggtggttgatggcatgcccccgggggtgtccttcaaagcccccagctacctggaaatcagctccatgagaaggatcttagactctgccgagtttatcaaattcacggtcattagaccatttccaggacttgtgattaataaccagctggttgatcagagtgagtcagaaggccccgtgatacaagaatcagctgaaccaagccagttggaagttccagccacagaagaaataaaagagactgatggaagctctcagatcaagcaagaaccagaccccacgtggtagacctcttccctcctaggcaaaaccatctggatcacctaacagtcagaggtcagtatctcagcgtgtgaattatagaggaaatacagagagaacctcttccacttttacttttcgtccaaataaaatgcatggtgtaccagaagttgaagatcgggttgaggattggggctagctcgatgacactaaggccccaacatcgcgggacctgctgtggcgcggattcttaggaacgctgttctagccggccccctctccaggggtcgccgtggccggcattatttcctagttcttcttgtaaccctgaggtgccagcgcggggagtgaggaggggtcagggggctaaggatgcaacctctgacgttctgcgccttcctaggagagtcttacatgtgttgagatttcacaagcaatgcgagttgtaaaataccagctctacaagaagctaggctctgtgacggcatagttttcagtagctttatcacaatattcacaatggagaattatatgacatggtagcagaaataggcccttttatgtgttgcttctattttacctcaaattgtagatatagggtaatcaataaaatccatccatgcctttcacacactaagt

SEQ ID NO: 4579 - protein, 937 aa, Homo sapiens [sequence omitted]

SEQ ID NO: 4580 - DNA, 5170 bp, Homo sapiens
aaaaaaaaaaaaaaaaaaaaaaaaaaaagaaaaaagaaaaaaaaaaggaggaggaggaggagggtgagagagaagctgggagagcagagaaaaggggccaccggtcgcccccccgcttccccgcacgcgctctccagccgcggccgcccgcctgccgcggtcaccccggcctctgcctctgtcccccagtgatcggatcaaggcgctgagcgaggccctgcctgcggggcggccatgcggcggtgacaggagcgcgaccgacacgcacgggcccctcgccccctctcgcctcccgtccgctcgccagctcccctcagccgaggctgctccgcggcggccgcagcccgcgcgcggcccacactcgcctcccctcggcacccccggccccggagctgcctggaggcggccgcactcggtgtaaagaactggccaagtccaaagccgaagtggcctgcattgcagtgtatgaaacagacgtgtttgtcgtcggaactgaaagaggacgtgcttttgtcaataccagaaaggattttcaaaaagattttgtaaaatattgtgttgaagaagaagaaaaagctgcagagatgcataaaatgaaatctacaacccaggcaaatcggatgagtgtagatgctgtagaaattgaaacactcagaaaaacagttgaggactatttctgcttttgctatgggaaagctttaggcaaatccacagtggtacctgtaccatatgagaagatgctgcgagaccagtcggctgtggtagtgcaggggcttccggaaggtgttgcctttaaacaccccgagaactatgatcttgcaaccctgaaatggattttggagaacaaagcagggatttcattcatcattaagagaccttttttagagccaaagaagcatgtaggtggtcgtgtgatggtaacagatgctgacaggtcaatactatctccaggtggaagttgtggccccatcaaagtgaaaactgaacccacagaagattctggcatttccctggaaatggcagctgtgacagtaaaggaagaatcagaagatcctgattattatcaatataacattcaagcaggcccttctgaaactgatgatgttgatgaaaaacagcccctatcgaagcctttgcaaggaagccaccattcttcagagggcaatgaaggcacagaaatggaagtaccagcagaagattctactcaacatgtcccttcagaaacaagtgaggaccctgaagttgaggtgactattgaagatgatgattattctccaccgtctaagagaccaaaggccaatgagctaccgcagccaccagtcccggaacccgccaatgctgggaagcggaaagtgagggagttcaacttcgagaaatggaatgctcgcatcactgatctacgtaaacaagttgaagaattgtttgaaaggaaatatgctcaagccataaaagccaaaggtccggtgacgatcccgtaccctcttttccagtctcatgttgaagatctttatgtagaaggacttcctgaaggaattccttttagaaggccatctacttacggaattcctcgcctggagaggatattacttgcaaaggaaaggattcgttttgtgattaagaaacatgagcttctgaattcaacacgtgaagatttacagcttgataagccagcttcaggagtaaaggaagaatggtatgccagaatcactaaattaagaaagatggtggatcagcttttctgcaaaaaatttgcggaagccttggggagcactgaagccaaggctgtaccgtaccaaaaatttgaggcacacccgaatgatctgtacgtggaaggactgccagaaaacattcctttccgaagtccctcatggtatggaatcccaaggctggaaaaaatcattcaagtgggcaatcgaattaaatttgttattaaaagaccagaacttctgactcacagtaccactgaagttactcagccaagaacgaatacaccagtcaaagaagattggaatgtcagaattaccaagctacggaagcaagtggaagagatttttaatttgaaatttgctcaagctcttggactcaccgaggcagtaaaagtaccatatcctgtgtttgaatcaaacccggagttcttgtatgtggaaggcttgccagaggggattcccttccgaagccctacctggtttggaattccacgacttgaaaggatcgtccgcgggagtaataaaatcaagttcgttgttaaaaaacctgaactagttatttcctacttgcctcctgggatggctagtaaaataaacactaaagctttgcagtcccccaaaagaccacgaagtcctgggagtaattcaaaggttcctgaaattgaggtcaccgtggaaggccctaataacaacaatcctcaaacctcagctgttcgaaccccgacccagactaacggttctaacgttcccttcaagccacgagggagagagttttcctttgaggcctggaatgccaaaatcacggacctaaaacagaaagttgaaaatctcttcaatgagaaatgtggggaagctcttggccttaaacaagctgtgaaggtgccgttcgcgttatttgagtctttcccggaagacttttatgtggaaggcttacctgagggtgtgccattccgaagaccatcgacttttggcattccgaggctggagaagatactcagaaacaaagccaaaattaagttcatcattaaaaagcccgaaatgtttgagacggcgattaaggagagcacctcctctaagagccctcccagaaaaataaattcatcacccaatgttaatactactgcatcaggtgttgaagaccttaacatcattcaggtgacaattccagatgatgataatgaaagactctcgaaagttgaaaaagctagacagctaagagaacaagtgaatgacctctttagtcggaaatttggtgaagctattggtatgggttttcctgtgaaagttccctacaggaaaatcacaattaaccctggctgtgtggtggttgatggcatgcccccgggggtgtccttcaaagcccccagctacctggaaatcagctccatgagaaggatcttagactctgccgagtttatcaaattcacggtcattagaccatttccaggacttgtgattaataaccagctggttgatcagagtgagtcagaaggccccgtgatacaagaatcagctgaaccaagccagttggaagttccagccacagaagaaataaaagagactgatggaagctctcagatcaagcaagaaccagaccccacgtggtagacctcttccctcctagggtaaatcagcttctgtgtcagggatgctgtgtggtgtccatctgaaccccctgcatacgcgtagctaatgtgatctccccactttcacataagatggtggccctgccttcagggaatgtgggagccaggtgggagccttcccggatatttaagctagaagattctacagggagattctccttggatcaatatatgtctctcagtcaaagatgtaaaagcacttttgccttaaaaagaatgttctgtttctaaatagagtcaacgttgtcctcctcattggaattcactatgagtcagaatcattagactgacttttttttttccatagtaatagtattttgcagagtctcacagagctgcagatcttttgttcatcttgcagagttaacaagtctgatcctgttagtccagatttcttaaatttggccaagttataataggagcagtagcttgagacccgaagtcaggaaactttgacaatggatttttttttttaatccagagacttgtactggaatttgccttaccctgtcagctcatggacttaaggtttcatcccgctttatgagtgcttctgaatccaagtcattgttacctgaatttgcaaattaagttgtgatattcgtgactgttaaattcctgtaattagattaacctctttgcttgcttgtttgttttctctcctattttagcttaaagtatcagtggttgagaagagcttttcggacctgttactaccccaagctgtgtaatatacttgtataacagaaataccttctatacaaacctttttttctacttttagatagaaatgtctactttttcagcagttctgtgaattaaagagcagagtgactgtgggtctggaatggctggtgtacttgggaatgtactatcaggattttacagcaatgctgggaaatgacagggaaaatgacaggaatgaatctcaccagattttttatgtactcagcagagccttgagttacggtgtttattttccaatcaagtgaagatatctcctacttctcctactggaacatctcagcttctgcagtgaagaaaaattcctgtgatagttcagttctttagtttttctatttgaaaaaaaaaaatcatttaaatgatcctttgttcacggctctccttaatgactgagtgaacagttcctatctgtatatttgactaaaccttttcctaagctatctctcatggttcctatgtttttttatcataattaaaagcaaaaccatctggatcacctaacagtcagaggtcagtatctcagcgtgtgaattatagaggaaatacagagagaacctcttccacttttacttttcgtccaaataaaatgcatggtgtaccagaagttgaagatcgggttgaggattggggctagctcgatgacactaaggccccaacatcgcgggacctgctgtggcgcggattcttaggaacgctgttctagccggccccctctccaggggtcgccgtggccggcattatttcctagttcttcttgtaaccctgaggtgccagcgcggggagtgaggaggggtcagggggctaaggatgcaacctctgacgttctgcgccttcctaggagagtcttacatgtgttgagatttcacaagcaatgcgagttgtaaaataccagctctacaagaagctaggctctgtgacggcatagttttcagtagctttatcacaatattcacaatggagaattatatgacatggtagcagaaataggcccttttatgtgttgcttctattttacctcaaattgtagatatagggtaatcaataaaatccatccatgcctttcacacactaagt

SEQ ID NO: 4581 - protein, 909 aa, Homo sapiens; identical to SEQ ID NO: 4047

SEQ ID NO: 4582 - DNA, 5246 bp, Homo sapiens
aaaaaaaaaaaaaaaaaaaaaaaaaaaagaaaaaagaaaaaaaaaaggaggaggaggaggagggtgagagagaagctgggagagcagagaaaaggggccaccggtcgcccccccgcttccccgcacgcgctctccagccgcggccgcccgcctgccgcggtcaccccggcctctgcctctgtcccccagtgatcggatcaaggcgctgagcgaggccctgcctgcggggcggccatgcggcggtgacaggagcgcgaccgacacgcacgggcccctcgccccctctcgcctcccgtccgctcgccagctcccctcagccgaggctgctccgcggcggccgcagcccgcgcgcggcccacactcgcctccccgttgaagatgaggagtcctcggagagcaggatggtggtgacattcctcatgtcagctctcgagtccatgtgtaaagaactggccaagtccaaagccgaagtggcctgcattgcagtgtatgaaacagacgtgtttgtcgtcggaactgaaagaggacgtgcttttgtcaataccagaaaggattttcaaaaagattttgtaaaatattgtgttgaagaagaagaaaaagctgcagagatgcataaaatgaaatctacaacccaggcaaatcggatgagtgtagatgctgtagaaattgaaacactcagaaaaacagttgaggactatttctgcttttgctatgggaaagctttaggcaaatccacagtggtacctgtaccatatgagaagatgctgcgagaccagtcggctgtggtagtgcaggggcttccggaaggtgttgcctttaaacaccccgagaactatgatcttgcaaccctgaaatggattttggagaacaaagcagggatttcattcatcattaagagaccttttttagagccaaagaagcatgtaggtggtcgtgtgatggtaacagatgctgacaggtcaatactatctccaggtggaagttgtggccccatcaaagtgaaaactgaacccacagaagattctggcatttccctggaaatggcagctgtgacagtaaaggaagaatcagaagatcctgattattatcaatataacattcaaggaagccaccattcttcagagggcaatgaaggcacagaaatggaagtaccagcagaagattctactcaacatgtcccttcagaaacaagtgaggaccctgaagttgaggtgactattgaagatgatgattattctccaccgtctaagagaccaaaggccaatgagctaccgcagccaccagtcccggaacccgccaatgctgggaagcggaaagtgagggagttcaacttcgagaaatggaatgctcgcatcactgatctacgtaaacaagttgaagaattgtttgaaaggaaatatgctcaagccataaaagccaaaggtccggtgacgatcccgtaccctcttttccagtctcatgttgaagatctttatgtagaaggacttcctgaaggaattccttttagaaggccatctacttacggaattcctcgcctggagaggatattacttgcaaaggaaaggattcgttttgtgattaagaaacatgagcttctgaattcaacacgtgaagatttacagcttgataagccagcttcaggagtaaaggaagaatggtatgccagaatcactaaattaagaaagatggtggatcagcttttctgcaaaaaatttgcggaagccttggggagcactgaagccaaggctgtaccgtaccaaaaatttgaggcacacccgaatgatctgtacgtggaaggactgccagaaaacattcctttccgaagtccctcatggtatggaatcccaaggctggaaaaaatcattcaagtgggcaatcgaattaaatttgttattaaaagaccagaacttctgactcacagtaccactgaagttactcagccaagaacgaatacaccagtcaaagaagattggaatgtcagaattaccaagctacggaagcaagtggaagagatttttaatttgaaatttgcttagatttgttgacagcggtttcctggagtgctgtcttgagaacgattctgaggaggctcagcaagaaagagtgtttcagttgattgggtgtgtctgtcatggagaaggaactcaagctcttggactcaccgaggcagtaaaagtaccatatcctgtgtttgaatcaaacccggagttcttgtatgtggaaggcttgccagaggggattcccttccgaagccctacctggtttggaattccacgacttgaaaggatcgtccgcgggagtaataaaatcaagttcgttgttaaaaaacctgaactagttatttcctacttgcctcctgggatggctagtaaaataaacactaaagctttgcagtcccccaaaagaccacgaagtcctgggagtaattcaaaggttcctgaaattgaggtcaccgtggaaggccctaataacaacaatcctcaaacctcagctgttcgaaccccgacccagactaacggttctaacgttcccttcaagccacgagggagagagttttcctttgaggcctggaatgccaaaatcacggacctaaaacagaaagttgaaaatctcttcaatgagaaatgtggggaagctcttggccttaaacaagctgtgaaggtgccgttcgcgttatttgagtctttcccggaagacttttatgtggaaggcttacctgagggtgtgccattccgaagaccatcgacttttggcattccgaggctggagaagatactcagaaacaaagccaaaattaagttcatcattaaaaagcccgaaatgtttgagacggcgattaaggagagcacctcctctaagagccctcccagaaaaataaattcatcacccaatgttaatactactgcatcaggtgttgaagaccttaacatcattcaggtgacaattccagatgatgataatgaaagactctcgaaagttgaaaaagctagacagctaagagaacaagtgaatgacctctttagtcggaaatttggtgaagctattggtatgggttttcctgtgaaagttccctacaggaaaatcacaattaaccctggctgtgtggtggttgatggcatgcccccgggggtgtccttcaaagcccccagctacctggaaatcagctccatgagaaggatcttagactctgccgagtttatcaaattcacggtcattagaccatttccaggacttgtgattaataaccagctggttgatcagagtgagtcagaaggccccgtgatacaagaatcagctgaaccaagccagttggaagttccagccacagaagaaataaaagagactgatggaagctctcagatcaagcaagaaccagaccccacgtggtagacctcttccctcctagggtaaatcagcttctgtgtcagggatgctgtgtggtgtccatctgaaccccctgcatacgcgtagctaatgtgatctccccactttcacataagatggtggccctgccttcagggaatgtgggagccaggtgggagccttcccggatatttaagctagaagattctacagggagattctccttggatcaatatatgtctctcagtcaaagatgtaaaagcacttttgccttaaaaagaatgttctgtttctaaatagagtcaacgttgtcctcctcattggaattcactatgagtcagaatcattagactgacttttttttttccatagtaatagtattttgcagagtctcacagagctgcagatcttttgttcatcttgcagagttaacaagtctgatcctgttagtccagatttcttaaatttggccaagttataataggagcagtagcttgagacccgaagtcaggaaactttgacaatggatttttttttttaatccagagacttgtactggaatttgccttaccctgtcagctcatggacttaaggtttcatcccgctttatgagtgcttctgaatccaagtcattgttacctgaatttgcaaattaagttgtgatattcgtgactgttaaattcctgtaattagattaacctctttgcttgcttgtttgttttctctcctattttagcttaaagtatcagtggttgagaagagcttttcggacctgttactaccccaagctgtgtaatatacttgtataacagaaataccttctatacaaacctttttttctacttttagatagaaatgtctactttttcagcagttctgtgaattaaagagcagagtgactgtgggtctggaatggctggtgtacttgggaatgtactatcaggattttacagcaatgctgggaaatgacagggaaaatgacaggaatgaatctcaccagattttttatgtactcagcagagccttgagttacggtgtttattttccaatcaagtgaagatatctcctacttctcctactggaacatctcagcttctgcagtgaagaaaaattcctgtgatagttcagttctttagtttttctatttgaaaaaaaaaaatcatttaaatgatcctttgttcacggctctccttaatgactgagtgaacagttcctatctgtatatttgactaaaccttttcctaagctatctctcatggttcctatgtttttttatcataattaaaagcaaaaccatctggatcacctaacagtcagaggtcagtatctcagcgtgtgaattatagaggaaatacagagagaacctcttccacttttacttttcgtccaaataaaatgcatggtgtaccagaagttgaagatcgggttgaggattggggctagctcgatgacactaaggccccaacatcgcgggacctgctgtggcgcggattcttaggaacgctgttctagccggccccctctccaggggtcgccgtggccggcattatttcctagttcttcttgtaaccctgaggtgccagcgcggggagtgaggaggggtcagggggctaaggatgcaacctctgacgttctgcgccttcctaggagagtcttacatgtgttgagatttcacaagcaatgcgagttgtaaaataccagctctacaagaagctaggctctgtgacggcatagttttcagtagctttatcacaatattcacaatggagaattatatgacatggtagcagaaataggcccttttatgtgttgcttctattttacctcaaattgtagatatagggtaatcaataaaatccatccatgcctttcacacactaagt

SEQ ID NO: 4583 - protein, 544 aa, Homo sapiens; identical to SEQ ID NO: 4045

SEQ ID NO: 4584 - DNA, 7191 bp, Homo sapiens
aaaaaaaaaaaaaaaaaaaaaaaaaaaagaaaaaagaaaaaaaaaaggaggaggaggaggagggtgagagagaagctgggagagcagagaaaaggggccaccggtcgcccccccgcttccccgcacgcgctctccagccgcggccgcccgcctgccgcggtcaccccggcctctgcctctgtcccccagtgatcggatcaaggcgctgagcgaggccctgcctgcggggcggccatgcggcggtgacaggagcgcgaccgacacgcacgggcccctcgccccctctcgcctcccgtccgctcgccagctcccctcagccgaggctgctccgcggcggccgcagcccgcgcgcggcccacactcgcctccccgttgaagatgaggagtcctcggagagcaggatggtggtgacattcctcatgtcagctctcgagtccatgtgtaaagaactggccaagtccaaagccgaagtggcctgcattgcagtgtatgaaacagacgtgtttgtcgtcggaactgaaagaggacgtgcttttgtcaataccagaaaggattttcaaaaagattttgtaaaatattgtgttgaagaagaagaaaaagctgcagagatgcataaaatgaaatctacaacccaggcaaatcggatgagtgtagatgctgtagaaattgaaacactcagaaaaacagttgaggactatttctgcttttgctatgggaaagctttaggcaaatccacagtggtacctgtaccatatgagaagatgctgcgagaccagtcggctgtggtagtgcaggggcttccggaaggtgttgcctttaaacaccccgagaactatgatcttgcaaccctgaaatggattttggagaacaaagcagggatttcattcatcattaagagaccttttttagagccaaagaagcatgtaggtggtcgtgtgatggtaacagatgctgacaggtcaatactatctccaggtggaagttgtggccccatcaaagtgaaaactgaacccacagaagattctggcatttccctggaaatggcagctgtgacagtaaaggaagaatcagaagatcctgattattatcaatataacattcaagcaggcccttctgaaactgatgatgttgatgaaaaacagcccctatcgaagcctttgcaaggaagccaccattcttcagagggcaatgaaggcacagaaatggaagtaccagcagaagattctactcaacatgtcccttcagaaacaagtgaggaccctgaagttgaggtgactattgaagatgatgattattctccaccgtctaagagaccaaaggccaatgagctaccgcagccaccagtcccggaacccgccaatgctgggaagcggaaagtgagggagttcaacttcgagaaatggaatgctcgcatcactgatctacgtaaacaagttgaagaattgtttgaaaggaaatatgctcaagccataaaagccaaaggtccggtgacgatcccgtaccctcttttccagtctcatgttgaagatctttatgtagaaggacttcctgaaggaattccttttagaaggccatctacttacggaattcctcgcctggagaggatattacttgcaaaggaaaggattcgttttgtgattaagaaacatgagcttctgaattcaacacgtgaagatttacagcttgataagccagcttcaggagtaaaggaagaatggtatgccagaatcactaaattaagaaagatggtggatcagcttttctgcaaaaaatttgcggaagccttggggagcactgaagccaaggctgtaccgtaccaaaaatttgaggcacacccgaatgatctgtacgtggaaggactgccagaaaacattcctttccgaagtccctcatggtatggaatcccaaggctggaaaaaatcattcaagtgggcaatcgaattaaatttgttattaaaagaccagaacttctgactcacagtaccactgaagttactcagccaagaacgaatacaccagctcaagctcttggactcaccgaggcagtaaaagtaccatatcctgtgtttgaatcaaacccggagttcttgtatgtggaaggcttgccagaggggattcccttccgaagccctacctggtttggaattccacgacttgaaaggatcgtccgcgggagtaataaaatcaagttcgttgttaaaaaacctgaactagttatttcctacttgcctcctgggatggctagtaaaataaacactaaagctttgcagtcccccaaaagaccacgaagtcctgggagtaattcaaaggttcctgaaattgaggtcaccgtggaaggccctaataacaacaatcctcaaacctcagctgttcgaaccccgacccagactaacggttctaacgttcccttcaagccacgagggagagagttttcctttgaggcctggaatgccaaaatcacggacctaaaacagaaagttgaaaatctcttcaatgagaaatgtggggaagctcttggccttaaacaagctgtgaaggtgccgttcgcgttatttgagtctttcccggaagacttttatgtggaaggcttacctgagggtgtgccattccgaagaccatcgacttttggcattccgaggctggagaagatactcagaaacaaagccaaaattaagttcatcattaaaaagcccgaaatgtttgagacggcgattaaggagagcacctcctctaagagccctcccagaaaaataaattcatcacccaatgttaatactactgcatcaggtgttgaagaccttaacatcattcaggtgacaattccagatgatgataatgaaagactctcgaaagttgaaaaagctagacagctaagagaacaagtgaatgacctctttagtcggaaatttggtgaagctattggtatgggttttcctgtgaaagttccctacaggaaaatcacaattaaccctggctgtgtggtggttgatggcatgcccccgggggtgtccttcaaagcccccagctacctggaaatcagctccatgagaaggatcttagactctgccgagtttatcaaattcacggtcattaggtaagtgagagtttcctgcttagtcacaggagcgaatctggagctcatgaggctgactcttctaaaatgcagccacaggtagtcatcgaatccggcttcctatgctgtgcaatcaacaaatcaaaataacttgtgtcatcattagaatgtcagatgtgcttctacgaactaagctgactcttttaattctttggcaaagggttggcaaactaggactgtttgccaaattcaggctgcctcctatttttagagtcttcctgaaacacagctacacccgtattatccatggctgctttcctgtcacagtgagtaagtagctgggactgagaaggcatggcctccaaagtctaaaatatttactctctagcactttgtagaaaaaccttagctaggcacagtggctaacgcctgtaatcccagcattttgggaggccaaggcaggcagatcacctgaggtcaggagttccagaccagcctggccaacatggtgaaatcccatctctacaaaaataaaacagttagctgggcatgatggcgggtgcctgtaatcccagctactcgggaggctgaggcaggatagtcgcttgaacccaggaggtggaggttgcaatgagccaagatcatgccactgcactccagcctggacgacagagtgagactccatcacaagaaaaaaagaactttgtcaacctctgtcttagggcgccttgtcacaggcttcgggtcagacggattcaaccttgcatcagccatttgttagccaggtcactctgttctttgtctgtaaatgagattgatcgttgttcccactgagagtgtcagctccttcccgtagagcaggcatgatgattgtactcacctctgacaccattgtgagtgccacattccttcccacgtccttgtcactgtaagagatgcccacctgagcaccaaccccaggttatcttcccctttgtcttccagccccccagaaacagctacgactcaacctacccaatcatttcatcatcagattgccactgtctctagttcaggtctcttgggactggcactcagaaatctcataataaatcctcttgaggcttctcatacactcgtcttcttccaatcttctttccctcaaaatctcatattttggttccacttcacccaccgtcattctccatatcactcccaggagttaggcaaaaagccccttccgttcttccgtatgttaaacttagaatcactctgttccctgctctgcgtttctattttttgtttttcctccatttactagtagcttaacactttctaacagtgttcttattattgatacgtatctatctcttccataagcttataaggtcacggataatacttctcattgtagtacgtaaatgacgtgggctagatatgagttgaataaacagttatacctgtaaattcttacagagtgaaaataaattgttatactttacaatttgtttctctctttagaccatttccaggacttgtgattaataaccgtgagtattttgtgaagtgttttgtttttgttttttcctggggtctgacgtgtgtgcgtgtgagtgtgtatacatgcttaacgtatatcacgttacttcacctatgtcagtaaccaggccaaatacttgttttagccctcagtaaaaacaccaggcacttcctagttgtaaaattattcaagcttcttaacttcctatcctcgatgcacttaatcataaaatggtaataatagcaccgattttgggggagtcgttccagtagatggaaagcatctggaacaggtgtcagcaagctcctgccgacgtgtatgcataaagttttattgaaaccaccatcgtgtccatttgtttatggcagaactgagagatggcagcagcaagtgtgtgcctgcaaaacctaaaatatttactaattggctctgcaagaaaagagtttgcatccccctaacctagaacagtgtctagcctctagtatgtgtttagcctacagtatgtgctcagcgaatacaatctatatttattactgcttttatgactgttataattactgtgcttggatttcgttacaaagtaagtcacaatgtgcctgcttctgttagtatttcagcacagtgcctggcacacatggggctctcaaatattgctgagcgagtgaacaaatgtcctttcaattccttaacgttgatgtcattttcaatagtattttgagccaaacttaattttgcgagtgtgttttgttttcttaactttattattaaaaatgtataaaagtgaggccaggcgtggtggctcacgcctgtaatcccagcagtttgggaggctgaggcaggcggatcagttgaggttgggagttggagaccagcccgtccaacatggtgaaagcctgtctctactaaaaatacaaaaatcagctgggtgtggtggcgcgtgcctgtaatcccagctactcaggaggctgaggcaggagagttgcttgaatcctagaggtggaggttgcagtgagctgagatcgtgccattgcactccagcctgggcaacaagagcaaaactctgtcccaataaataaataaataaaatgttctcttttgttcctgttcttgtgcggtagtgtggtatagagttttatggtaattactgtgaattagtgattctgagggacatatcagaactctgaggtttgtttccttctcatcttgagggaaacagcaaatgtatgttaaaatgcttttccaagggaacaacacatccttacattatttaaaccaatctgcttcattttcagagctggttgatcagagtgagtcagaaggccccgtgatacaagaatcagctgaaccaagccagttggaagttccagccacagaagaaataaaagagactgatggaagctctcagatcaagcaagaaccagaccccacgtggtagacctcttccctcctaggcttaaagtatcagtggttgagaagagcttttcggacctgttactaccccaagctgtgtaatatacttgtataacagaaataccttctatacaaacctttttttctacttttagatagaaatgtctactttttcagcagttctgtgaattaaagagcagagtgactgtgggtctggaatggctggtgtacttgggaatgtactatcaggattttacagcaatgctgggaaatgacagggaaaatgacaggaatgaatctcaccagattttttatgtactcagcagagccttgagttacggtgtttattttccaatcaagtgaagatatctcctacttctcctactggaacatctcagcttctgcagtgaagaaaaattcctgtgatagttcagttctttagtttttctatttgaaaaaaaaaaatcatttaaatgatcctttgttcacggctctccttaatgactgagtgaacagttcctatctgtatatttgactaaaccttttcctaagctatctctcatggttcctatgtttttttatcataattaaaagcaaaaccatctggatcacctaacagtcagaggtcagtatctcagcgtgtgaattatagaggaaatacagagagaacctcttccacttttacttttcgtccaaataaaatgcatggtgtaccagaagttgaagatcgggttgaggattggggctagctcgatgacactaaggccccaacatcgcgggacctgctgtggcgcggattcttaggaacgctgttctagccggccccctctccaggggtcgccgtggccggcattatttcctagttcttcttgtaaccctgaggtgccagcgcggggagtgaggaggggtcagggggctaaggatgcaacctctgacgttctgcgccttcctaggagagtcttacatgtgttgagatttcacaagcaatgcgagttgtaaaataccagctctacaagaagctaggctctgtgacggcatagttttcagtagctttatcacaatattcacaatggagaattatatgacatggtagcagaaataggcccttttatgtgttgcttctattttacctcaaattgtagatatagggtaatcaataaaatccatccatgcctttcacacactaagt

SEQ ID NO: 4585 - protein, 898 aa, Homo sapiens
MVVTFLMSALESMCKELAKSKAEVACIAVYETDVFVVGTERGRAFVNTRKDFQKDFVKYCVEEEEKAAEMHKMKSTTQANRMSVDAVEIETLRKTVEDYFCFCYGKALGKSTVVPVPYEKMLRDQSAVVVQGLPEGVAFKHPENYDLATLKWILENKAGISFIIKRPFLEPKKHVGGRVMVTDADRSILSPGGSCGPIKVKTEPTEDSGISLEMAAVTVKEESEDPDYYQYNIQAGPSETDDVDEKQPLSKPLQGSHHSSEGNEGTEMEVPAEDSTQHVPSETSEDPEVEVTIEDDDYSPPSKRPKANELPQPPVPEPANAGKRKVREFNFEKWNARITDLRKQVEELFERKYAQAIKAKGPVTIPYPLFQSHVEDLYVEGLPEGIPFRRPSTYGIPRLERILLAKERIRFVIKKHELLNSTREDLQLDKPASGVKEEWYARITKLRKMVDQLFCKKFAEALGSTEAKAVPYQKFEAHPNDLYVEGLPENIPFRSPSWYGIPRLEKIIQVGNRIKFVIKRPELLTHSTTEVTQPRTNTPAQALGLTEAVKVPYPVFESNPEFLYVEGLPEGIPFRSPTWFGIPRLERIVRGSNKIKFVVKKPELVISYLPPGMASKINTKALQSPKRPRSPGSNSKVPEIEVTVEGPNNNNPQTSAVRTPTQTNGSNVPFKPRGREFSFEAWNAKITDLKQKVENLFNEKCGEALGLKQAVKVPFALFESFPEDFYVEGLPEGVPFRRPSTFGIPRLEKILRNKAKIKFIIKKPEMFETAIKESTSSKSPPRKINSSPNVNTTASGVEDLNIIQVTIPDDDNERLSKVEKARQLREQVNDLFSRKFGEAIGMGFPVKVPYRKITINPGCVVVDGMPPGVSFKAPSYLEISSMRRILDSAEFIKFTVIR

SEQ ID NO: 4586 - DNA, 7883 bp, Homo sapiens
aaaaaaaaaaaaaaaaaaaaaaaaaaaagaaaaaagaaaaaaaaaaggaggaggaggaggagggtgagagagaagctgggagagcagagaaaaggggccaccggtcgcccccccgcttccccgcacgcgctctccagccgcggccgcccgcctgccgcggtcaccccggcctctgcctctgtcccccagtgatcggatcaaggcgctgagcgaggccctgcctgcggggcggccatgcggcggtgacaggagcgcgaccgacacgcacgggcccctcgccccctctcgcctcccgtccgctcgccagctcccctcagccgaggctgctccgcggcggccgcagcccgcgcgcggcccacactcgcctccccgttgaagatgaggagtcctcggagagcaggatggtggtgacattcctcatgtcagctctcgagtccatgtgtaaagaactggccaagtccaaagccgaagtggcctgcattgcagtgtatgaaacagacgtgtttgtcgtcggaactgaaagaggacgtgcttttgtcaataccagaaaggattttcaaaaagattttgtaaaatattgtgttgaagaagaagaaaaagctgcagagatgcataaaatgaaatctacaacccaggcaaatcggatgagtgtagatgctgtagaaattgaaacactcagaaaaacagttgaggactatttctgcttttgctatgggaaagctttaggcaaatccacagtggtacctgtaccatatgagaagatgctgcgagaccagtcggctgtggtagtgcaggggcttccggaaggtgttgcctttaaacaccccgagaactatgatcttgcaaccctgaaatggattttggagaacaaagcagggatttcattcatcattaagagaccttttttagagccaaagaagcatgtaggtggtcgtgtgatggtaacagatgctgacaggtcaatactatctccaggtggaagttgtggccccatcaaagtgaaaactgaacccacagaagattctggcatttccctggaaatggcagctgtgacagtaaaggaagaatcagaagatcctgattattatcaatataacattcaagcaggcccttctgaaactgatgatgttgatgaaaaacagcccctatcgaagcctttgcaaggaagccaccattcttcagagggcaatgaaggcacagaaatggaagtaccagcagaagattctactcaacatgtcccttcagaaacaagtgaggaccctgaagttgaggtgactattgaagatgatgattattctccaccgtctaagagaccaaaggccaatgagctaccgcagccaccagtcccggaacccgccaatgctgggaagcggaaagtgagggagttcaacttcgagaaatggaatgctcgcatcactgatctacgtaaacaagttgaagaattgtttgaaaggaaatatgctcaagccataaaagccaaaggtccggtgacgatcccgtaccctcttttccagtctcatgttgaagatctttatgtagaaggacttcctgaaggaattccttttagaaggccatctacttacggaattcctcgcctggagaggatattacttgcaaaggaaaggattcgttttgtgattaagaaacatgagcttctgaattcaacacgtgaagatttacagcttgataagccagcttcaggagtaaaggaagaatggtatgccagaatcactaaattaagaaagatggtggatcagcttttctgcaaaaaatttgcggaagccttggggagcactgaagccaaggctgtaccgtaccaaaaatttgaggcacacccgaatgatctgtacgtggaaggactgccagaaaacattcctttccgaagtccctcatggtatggaatcccaaggctggaaaaaatcattcaagtgggcaatcgaattaaatttgttattaaaagaccagaacttctgactcacagtaccactgaagttactcagccaagaacgaatacaccagctcaagctcttggactcaccgaggcagtaaaagtaccatatcctgtgtttgaatcaaacccggagttcttgtatgtggaaggcttgccagaggggattcccttccgaagccctacctggtttggaattccacgacttgaaaggatcgtccgcgggagtaataaaatcaagttcgttgttaaaaaacctgaactagttatttcctacttgcctcctgggatggctagtaaaataaacactaaagctttgcagtcccccaaaagaccacgaagtcctgggagtaattcaaaggttcctgaaattgaggtcaccgtggaaggccctaataacaacaatcctcaaacctcagctgttcgaaccccgacccagactaacggttctaacgttcccttcaagccacgagggagagagttttcctttgaggcctggaatgccaaaatcacggacctaaaacagaaagttgaaaatctcttcaatgagaaatgtggggaagctcttggccttaaacaagctgtgaaggtgccgttcgcgttatttgagtctttcccggaagacttttatgtggaaggcttacctgagggtgtgccattccgaagaccatcgacttttggcattccgaggctggagaagatactcagaaacaaagccaaaattaagttcatcattaaaaagcccgaaatgtttgagacggcgattaaggagagcacctcctctaagagccctcccagaaaaataaattcatcacccaatgttaatactactgcatcaggtgttgaagaccttaacatcattcaggtgacaattccagatgatgataatgaaagactctcgaaagttgaaaaagctagacagctaagagaacaagtgaatgacctctttagtcggaaatttggtgaagctattggtatgggttttcctgtgaaagttccctacaggaaaatcacaattaaccctggctgtgtggtggttgatggcatgcccccgggggtgtccttcaaagcccccagctacctggaaatcagctccatgagaaggatcttagactctgccgagtttatcaaattcacggtcattaggtaagtgagagtttcctgcttagtcacaggagcgaatctggagctcatgaggctgactcttctaaaatgcagccacaggtagtcatcgaatccggcttcctatgctgtgcaatcaacaaatcaaaataacttgtgtcatcattagaatgtcagatgtgcttctacgaactaagctgactcttttaattctttggcaaagggttggcaaactaggactgtttgccaaattcaggctgcctcctatttttagagtcttcctgaaacacagctacacccgtattatccatggctgctttcctgtcacagtgagtaagtagctgggactgagaaggcatggcctccaaagtctaaaatatttactctctagcactttgtagaaaaaccttagctaggcacagtggctaacgcctgtaatcccagcattttgggaggccaaggcaggcagatcacctgaggtcaggagttccagaccagcctggccaacatggtgaaatcccatctctacaaaaataaaacagttagctgggcatgatggcgggtgcctgtaatcccagctactcgggaggctgaggcaggatagtcgcttgaacccaggaggtggaggttgcaatgagccaagatcatgccactgcactccagcctggacgacagagtgagactccatcacaagaaaaaaagaactttgtcaacctctgtcttagggcgccttgtcacaggcttcgggtcagacggattcaaccttgcatcagccatttgttagccaggtcactctgttctttgtctgtaaatgagattgatcgttgttcccactgagagtgtcagctccttcccgtagagcaggcatgatgattgtactcacctctgacaccattgtgagtgccacattccttcccacgtccttgtcactgtaagagatgcccacctgagcaccaaccccaggttatcttcccctttgtcttccagccccccagaaacagctacgactcaacctacccaatcatttcatcatcagattgccactgtctctagttcaggtctcttgggactggcactcagaaatctcataataaatcctcttgaggcttctcatacactcgtcttcttccaatcttctttccctcaaaatctcatattttggttccacttcacccaccgtcattctccatatcactcccaggagttaggcaaaaagccccttccgttcttccgtatgttaaacttagaatcactctgttccctgctctgcgtttctattttttgtttttcctccatttactagtagcttaacactttctaacagtgttcttattattgatacgtatctatctcttccataagcttataaggtcacggataatacttctcattgtagtacgtaaatgacgtgggctagatatgagttgaataaacagttatacctgtaaattcttacagagtgaaaataaattgttatactttacaatttgtttctctctttagaccatttccaggacttgtgattaataaccgtgagtattttgtgaagtgttttgtttttgttttttcctggggtctgacgtgtgtgcgtgtgagtgtgtatacatgcttaacgtatatcacgttacttcacctatgtcagtaaccaggccaaatacttgttttagccctcagtaaaaacaccaggcacttcctagttgtaaaattattcaagcttcttaacttcctatcctcgatgcacttaatcataaaatggtaataatagcaccgattttgggggagtcgttccagtagatggaaagcatctggaacaggtgtcagcaagctcctgccgacgtgtatgcataaagttttattgaaaccaccatcgtgtccatttgtttatggcagaactgagagatggcagcagcaagtgtgtgcctgcaaaacctaaaatatttactaattggctctgcaagaaaagagtttgcatccccctaacctagaacagtgtctagcctctagtatgtgtttagcctacagtatgtgctcagcgaatacaatctatatttattactgcttttatgactgttataattactgtgcttggatttcgttacaaagtaagtcacaatgtgcctgcttctgttagtatttcagcacagtgcctggcacacatggggctctcaaatattgctgagcgagtgaacaaatgtcctttcaattccttaacgttgatgtcattttcaatagtattttgagccaaacttaattttgcgagtgtgttttgttttcttaactttattattaaaaatgtataaaagtgaggccaggcgtggtggctcacgcctgtaatcccagcagtttgggaggctgaggcaggcggatcagttgaggttgggagttggagaccagcccgtccaacatggtgaaagcctgtctctactaaaaatacaaaaatcagctgggtgtggtggcgcgtgcctgtaatcccagctactcaggaggctgaggcaggagagttgcttgaatcctagaggtggaggttgcagtgagctgagatcgtgccattgcactccagcctgggcaacaagagcaaaactctgtcccaataaataaataaataaaatgttctcttttgttcctgttcttgtgcggtagtgtggtatagagttttatggtaattactgtgaattagtgattctgagggacatatcagaactctgaggtttgtttccttctcatcttgagggaaacagcaaatgtatgttaaaatgcttttccaagggaacaacacatccttacattatttaaaccaatctgcttcattttcagagctggttgatcagagtgagtcagaaggccccgtgatacaagaatcagctgaaccaagccagttggaagttccagccacagaagaaataaaagagactgatggaagctctcagatcaagcaagaaccagaccccacgtggtagacctcttccctcctagggtaaatcagcttctgtgtcagggatgctgtgtggtgtccatctgaaccccctgcatacgcgtagctaatgtgatctccccactttcacataagatggtggccctgccttcagggaatgtgggagccaggtgggagccttcccggatatttaagctagaagattctacagggagattctccttggatcaatatatgtctctcagtcaaagatgtaaaagcacttttgccttaaaaagaatgttctgtttctaaatagagtcaacgttgtcctcctcattggaattcactatgagtcagaatcattagactgacttttttttttccatagtaatagtattttgcagagtctcacagagctgcagatcttttgttcatcttgcagagttaacaagtctgatcctgttagtccagatttcttaaatttggccaagttataataggagcagtagcttgagacccgaagtcaggaaactttgacaatggatttttttttttaatccagagacttgtactggaatttgccttaccctgtcagctcatggacttaaggtttcatcccgctttatgagtgcttctgaatccaagtcattgttacctgaatttgcaaattaagttgtgatattcgtgactgttaaattcctgtaattagattaacctctttgcttgcttgtttgttttctctcctattttagcttaaagtatcagtggttgagaagagcttttcggacctgttactaccccaagctgtgtaatatacttgtataacagaaataccttctatacaaacctttttttctacttttagatagaaatgtctactttttcagcagttctgtgaattaaagagcagagtgactgtgggtctggaatggctggtgtacttgggaatgtactatcaggattttacagcaatgctgggaaatgacagggaaaatgacaggaatgaatctcaccagattttttatgtactcagcagagccttgagttacggtgtttattttccaatcaagtgaagatatctcctacttctcctactggaacatctcagcttctgcagtgaagaaaaattcctgtgatagttcagttctttagtttttctatttgaaaaaaaaaaatcatttaaatgatcctttgttcacggctctccttaatgactgagtgaacagttcctatctgtatatttgactaaaccttttcctaagctatctctcatggttcctatgtttttttatcataattaaaagcaaaaccatctggatcacctaacagtcagaggtcagtatctcagcgtgtgaattatagaggaaatacagagagaacctcttccacttttacttttcgtccaaataaaatgcatggtgtaccagaagttgaagatcgggttgaggattggggctagctcgatgacactaaggccccaacatcgcgggacctgctgtggcgcggattcttaggaacgctgttctagccggccccctctccaggggtcgccgtggccggcattatttcctagttcttcttgtaaccctgaggtgccagcgcggggagtgaggaggggtcagggggctaaggatgcaacctctgacgttctgcgccttcctaggagagtcttacatgtgttgagatttcacaagcaatgcgagttgtaaaataccagctctacaagaagctaggctctgtgacggcatagttttcagtagctttatcacaatattcacaatggagaattatatgacatggtagcagaaataggcccttttatgtgttgcttctattttacctcaaattgtagatatagggtaatcaataaaatccatccatgcctttcacacactaagt

SEQ ID NO: 4587 - protein, 898 aa, Homo sapiens; identical to SEQ ID NO: 4585

SEQ ID NO: 4588 - DNA, 4211 bp, Homo sapiens
aaaaaaaaaaaaaaaaaaaaaaaaaaaagaaaaaagaaaaaaaaaaggaggaggaggaggagggtgagagagaagctgggagagcagagaaaaggggccaccggtcgcccccccgcttccccgcacgcgctctccagccgcggccgcccgcctgccgcggtcaccccggcctctgcctctgtcccccagtgatcggatcaaggcgctgagcgaggccctgcctgcggggcggccatgcggcggtgacaggagcgcgaccgacacgcacgggcccctcgccccctctcgcctcccgtccgctcgccagctcccctcagccgaggctgctccgcggcggccgcagcccgcgcgcggcccacactcgcctccccgttgaagatgaggagtcctcggagagcaggatggtggtgacattcctcatgtcagctctcgagtccatgtgtaaagaactggccaagtccaaagccgaagtggcctgcattgcagtgtatgaaacagacgtgtttgtcgtcggaactgaaagaggacgtgcttttgtcaataccagaaaggattttcaaaaagattttgtaaaatattgtgttgaagaagaagaaaaagctgcagagatgcataaaatgaaatctacaacccaggcaaatcggatgagtgtagatgctgtagaaattgaaacactcagaaaaacagttgaggactatttctgcttttgctatgggaaagctttaggcaaatccacagtggtacctgtaccatatgagaagatgctgcgagaccagtcggctgtggtagtgcaggggcttccggaaggtgttgcctttaaacaccccgagaactatgatcttgcaaccctgaaatggattttggagaacaaagcagggatttcattcatcattaagagaccttttttagagccaaagaagcatgtaggtggtcgtgtgatggtaacagatgctgacaggtcaatactatctccaggtggaagttgtggccccatcaaagtgaaaactgaacccacagaagattctggcatttccctggaaatggcagctgtgacagtaaaggaagaatcagaagatcctgattattatcaatataacattcaagcaggcccttctgaaactgatgatgttgatgaaaaacagcccctatcgaagcctttgcaaggaagccaccattcttcagagggcaatgaaggcacagaaatggaagtaccagcagaagatgatgattattctccaccgtctaagagaccaaaggccaatgagctaccgcagccaccagtcccggaacccgccaatgctgggaagcggaaagtgagggagttcaacttcgagaaatggaatgctcgcatcactgatctacgtaaacaagttgaagaattgtttgaaaggaaatatgctcaagccataaaagccaaaggtccggtgacgatcccgtaccctcttttccagtctcatgttgaagatctttatgtagaaggacttcctgaaggaattccttttagaaggccatctacttacggaattcctcgcctggagaggatattacttgcaaaggaaaggattcgttttgtgattaagaaacatgagcttctgaattcaacacgtgaagatttacagcttgataagccagcttcaggagtaaaggaagaatggtatgccagaatcactaaattaagaaagatggtggatcagcttttctgcaaaaaatttgcggaagccttggggagcactgaagccaaggctgtaccgtaccaaaaatttgaggcacacccgaatgatctgtacgtggaaggactgccagaaaacattcctttccgaagtccctcatggtatggaatcccaaggctggaaaaaatcattcaagtgggcaatcgaattaaatttgttattaaaagaccagaacttctgactcacagtaccactgaagttactcagccaagaacgaatacaccagtcaaagaagattggaatgtcagaattaccaagctacggaagcaagtggaagagatttttaatttgaaatttgctcaagctcttggactcaccgaggcagtaaaagtaccatatcctgtgtttgaatcaaacccggagttcttgtatgtggaaggcttgccagaggggattcccttccgaagccctacctggtttggaattccacgacttgaaaggatcgtccgcgggagtaataaaatcaagttcgttgttaaaaaacctgaactagttatttcctacttgcctcctgggatggctagtaaaataaacactaaagctttgcagtcccccaaaagaccacgaagtcctgggagtaattcaaaggttcctgaaattgaggtcaccgtggaaggccctaataacaacaatcctcaaacctcagctgttcgaaccccgacccagactaacggttctaacgttcccttcaagccacgagggagagagttttcctttgaggcctggaatgccaaaatcacggacctaaaacagaaagttgaaaatctcttcaatgagaaatgtggggaagctcttggccttaaacaagctgtgaaggtgccgttcgcgttatttgagtctttcccggaagacttttatgtggaaggcttacctgagggtgtgccattccgaagaccatcgacttttggcattccgaggctggagaagatactcagaaacaaagccaaaattaagttcatcattaaaaagcccgaaatgtttgagacggcgattaaggagagcacctcctctaagagccctcccagaaaaataaattcatcacccaatgttaatactactgcatcaggtgttgaagaccttaacatcattcaggtgacaattccagatgatgataatgaaagactctcgaaagttgaaaaagctagacagctaagagaacaagtgaatgacctctttagtcggaaatttggtgaagctattggtatgggttttcctgtgaaagttccctacaggaaaatcacaattaaccctggctgtgtggtggttgatggcatgcccccgggggtgtccttcaaagcccccagctacctggaaatcagctccatgagaaggatcttagactctgccgagtttatcaaattcacggtcattagaccatttccaggacttgtgattaataaccagctggttgatcagagtgagtcagaaggccccgtgatacaagaatcagctgaaccaagccagttggaagttccagccacagaagaaataaaagagactgatggaagctctcagatcaagcaagaaccagaccccacgtggtagacctcttccctcctaggcttaaagtatcagtggttgagaagagcttttcggacctgttactaccccaagctgtagccttgagttacggtgtttattttccaatcaagtgaagatatctcctacttctcctactggaacatctcagcttctgcagtgaagaaaaattcctgtgatagttcagttctttagtttttctatttgaaaaaaaaaaatcatttaaatgatcctttgttcacggctctccttaatgactgagtgaacagttcctatctgtatatttgactaaaccttttcctaagctatctctcatggttcctatgtttttttatcataattaaaagcaaaaccatctggatcacctaacagtcagaggtcagtatctcagcgtgtgaattatagaggaaatacagagagaacctcttccacttttacttttcgtccaaataaaatgcatggtgtaccagaagttgaagatcgggttgaggattggggctagctcgatgacactaaggccccaacatcgcgggacctgctgtggcgcggattcttaggaacgctgttctagccggccccctctccaggggtcgccgtggccggcattatttcctagttcttcttgtaaccctgaggtgccagcgcggggagtgaggaggggtcagggggctaaggatgcaacctctgacgttctgcgccttcctaggagagtcttacatgtgttgagatttcacaagcaatgcgagttgtaaaataccagctctacaagaagctaggctctgtgacggcatagttttcagtagctttatcacaatattcacaatggagaattatatgacatggtagcagaaataggcccttttatgtgttgcttctattttacctcaaattgtagatatagggtaatcaataaaatccatccatgcctttcacacactaagt

SEQ ID NO: 4589 - protein, 957 aa, Homo sapiens; identical to SEQ ID NO: 4041

SEQ ID NO: 4590 - DNA, 7140 bp, Homo sapiens
aaaaaaaaaaaaaaaaaaaaaaaaaaaagaaaaaagaaaaaaaaaaggaggaggaggaggagggtgagagagaagctgggagagcagagaaaaggggccaccggtcgcccccccgcttccccgcacgcgctctccagccgcggccgcccgcctgccgcggtcaccccggcctctgcctctgtcccccagtgatcggatcaaggcgctgagcgaggccctgcctgcggggcggccatgcggcggtgacaggagcgcgaccgacacgcacgggcccctcgccccctctcgcctcccgtccgctcgccagctcccctcagccgaggctgctccgcggcggccgcagcccgcgcgcggcccacactcgcctccccgttgaagatgaggagtcctcggagagcaggatggtggtgacattcctcatgtcagctctcgagtccatgtgtaaagaactggccaagtccaaagccgaagtggcctgcattgcagtgtatgaaacagacgtgtttgtcgtcggaactgaaagaggacgtgcttttgtcaataccagaaaggattttcaaaaagattttgtaaaatattgtgttgaagaagaagaaaaagctgcagagatgcataaaatgaaatctacaacccaggcaaatcggatgagtgtagatgctgtagaaattgaaacactcagaaaaacagttgaggactatttctgcttttgctatgggaaagctttaggcaaatccacagtggtacctgtaccatatgagaagatgctgcgagaccagtcggctgtggtagtgcaggggcttccggaaggtgttgcctttaaacaccccgagaactatgatcttgcaaccctgaaatggattttggagaacaaagcagggatttcattcatcattaagagaccttttttagagccaaagaagcatgtaggtggtcgtgtgatggtaacagatgctgacaggtcaatactatctccaggtggaagttgtggccccatcaaagtgaaaactgaacccacagaagattctggcatttccctggaaatggcagctgtgacagtaaaggaagaatcagaagatcctgattattatcaatataacattcaaggaagccaccattcttcagagggcaatgaaggcacagaaatggaagtaccagcagaagatgatgattattctccaccgtctaagagaccaaaggccaatgagctaccgcagccaccagtcccggaacccgccaatgctgggaagcggaaagtgagggagttcaacttcgagaaatggaatgctcgcatcactgatctacgtaaacaagttgaagaattgtttgaaaggaaatatgctcaagccataaaagccaaaggtccggtgacgatcccgtaccctcttttccagtctcatgttgaagatctttatgtagaaggacttcctgaaggaattccttttagaaggccatctacttacggaattcctcgcctggagaggatattacttgcaaaggaaaggattcgttttgtgattaagaaacatgagcttctgaattcaacacgtgaagatttacagcttgataagccagcttcaggagtaaaggaagaatggtatgccagaatcactaaattaagaaagatggtggatcagcttttctgcaaaaaatttgcggaagccttggggagcactgaagccaaggctgtaccgtaccaaaaatttgaggcacacccgaatgatctgtacgtggaaggactgccagaaaacattcctttccgaagtccctcatggtatggaatcccaaggctggaaaaaatcattcaagtgggcaatcgaattaaatttgttattaaaagaccagaacttctgactcacagtaccactgaagttactcagccaagaacgaatacaccagtcaaagaagattggaatgtcagaattaccaagctacggaagcaagtggaagagatttttaatttgaaatttgctcaagctcttggactcaccgaggcagtaaaagtaccatatcctgtgtttgaatcaaacccggagttcttgtatgtggaaggcttgccagaggggattcccttccgaagccctacctggtttggaattccacgacttgaaaggatcgtccgcgggagtaataaaatcaagttcgttgttaaaaaacctgaactagttatttcctacttgcctcctgggatggctagtaaaataaacactaaagctttgcagtcccccaaaagaccacgaagtcctgggagtaattcaaaggttcctgaaattgaggtcaccgtggaaggccctaataacaacaatcctcaaacctcagctgttcgaaccccgacccagactaacggttctaacgttcccttcaagccacgagggagagagttttcctttgaggcctggaatgccaaaatcacggacctaaaacagaaagttgaaaatctcttcaatgagaaatgtggggaagctcttggccttaaacaagctgtgaaggtgccgttcgcgttatttgagtctttcccggaagacttttatgtggaaggcttacctgagggtgtgccattccgaagaccatcgacttttggcattccgaggctggagaagatactcagaaacaaagccaaaattaagttcatcattaaaaagcccgaaatgtttgagacggcgattaaggagagcacctcctctaagagccctcccagaaaaataaattcatcacccaatgttaatactactgcatcaggtgttgaagaccttaacatcattcaggtgacaattccagatgatgataatgaaagactctcgaaagttgaaaaagctagacagctaagagaacaagtgaatgacctctttagtcggaaatttggtgaagctattggtatgggttttcctgtgaaagttccctacaggaaaatcacaattaaccctggctgtgtggtggttgatggcatgcccccgggggtgtccttcaaagcccccagctacctggaaatcagctccatgagaaggatcttagactctgccgagtttatcaaattcacggtcattaggtaagtgagagtttcctgcttagtcacaggagcgaatctggagctcatgaggctgactcttctaaaatgcagccacaggtagtcatcgaatccggcttcctatgctgtgcaatcaacaaatcaaaataacttgtgtcatcattagaatgtcagatgtgcttctacgaactaagctgactcttttaattctttggcaaagggttggcaaactaggactgtttgccaaattcaggctgcctcctatttttagagtcttcctgaaacacagctacacccgtattatccatggctgctttcctgtcacagtgagtaagtagctgggactgagaaggcatggcctccaaagtctaaaatatttactctctagcactttgtagaaaaaccttagctaggcacagtggctaacgcctgtaatcccagcattttgggaggccaaggcaggcagatcacctgaggtcaggagttccagaccagcctggccaacatggtgaaatcccatctctacaaaaataaaacagttagctgggcatgatggcgggtgcctgtaatcccagctactcgggaggctgaggcaggatagtcgcttgaacccaggaggtggaggttgcaatgagccaagatcatgccactgcactccagcctggacgacagagtgagactccatcacaagaaaaaaagaactttgtcaacctctgtcttagggcgccttgtcacaggcttcgggtcagacggattcaaccttgcatcagccatttgttagccaggtcactctgttctttgtctgtaaatgagattgatcgttgttcccactgagagtgtcagctccttcccgtagagcaggcatgatgattgtactcacctctgacaccattgtgagtgccacattccttcccacgtccttgtcactgtaagagatgcccacctgagcaccaaccccaggttatcttcccctttgtcttccagccccccagaaacagctacgactcaacctacccaatcatttcatcatcagattgccactgtctctagttcaggtctcttgggactggcactcagaaatctcataataaatcctcttgaggcttctcatacactcgtcttcttccaatcttctttccctcaaaatctcatattttggttccacttcacccaccgtcattctccatatcactcccaggagttaggcaaaaagccccttccgttcttccgtatgttaaacttagaatcactctgttccctgctctgcgtttctattttttgtttttcctccatttactagtagcttaacactttctaacagtgttcttattattgatacgtatctatctcttccataagcttataaggtcacggataatacttctcattgtagtacgtaaatgacgtgggctagatatgagttgaataaacagttatacctgtaaattcttacagagtgaaaataaattgttatactttacaatttgtttctctctttagaccatttccaggacttgtgattaataaccgtgagtattttgtgaagtgttttgtttttgttttttcctggggtctgacgtgtgtgcgtgtgagtgtgtatacatgcttaacgtatatcacgttacttcacctatgtcagtaaccaggccaaatacttgttttagccctcagtaaaaacaccaggcacttcctagttgtaaaattattcaagcttcttaacttcctatcctcgatgcacttaatcataaaatggtaataatagcaccgattttgggggagtcgttccagtagatggaaagcatctggaacaggtgtcagcaagctcctgccgacgtgtatgcataaagttttattgaaaccaccatcgtgtccatttgtttatggcagaactgagagatggcagcagcaagtgtgtgcctgcaaaacctaaaatatttactaattggctctgcaagaaaagagtttgcatccccctaacctagaacagtgtctagcctctagtatgtgtttagcctacagtatgtgctcagcgaatacaatctatatttattactgcttttatgactgttataattactgtgcttggatttcgttacaaagtaagtcacaatgtgcctgcttctgttagtatttcagcacagtgcctggcacacatggggctctcaaatattgctgagcgagtgaacaaatgtcctttcaattccttaacgttgatgtcattttcaatagtattttgagccaaacttaattttgcgagtgtgttttgttttcttaactttattattaaaaatgtataaaagtgaggccaggcgtggtggctcacgcctgtaatcccagcagtttgggaggctgaggcaggcggatcagttgaggttgggagttggagaccagcccgtccaacatggtgaaagcctgtctctactaaaaatacaaaaatcagctgggtgtggtggcgcgtgcctgtaatcccagctactcaggaggctgaggcaggagagttgcttgaatcctagaggtggaggttgcagtgagctgagatcgtgccattgcactccagcctgggcaacaagagcaaaactctgtcccaataaataaataaataaaatgttctcttttgttcctgttcttgtgcggtagtgtggtatagagttttatggtaattactgtgaattagtgattctgagggacatatcagaactctgaggtttgtttccttctcatcttgagggaaacagcaaatgtatgttaaaatgcttttccaagggaacaacacatccttacattatttaaaccaatctgcttcattttcagagctggttgatcagagtgagtcagaaggccccgtgatacaagaatcagctgaaccaagccagttggaagttccagccacagaagaaataaaagagactgatggaagctctcagatcaagcaagaaccagaccccacgtggtagacctcttccctcctaggcttaaagtatcagtggttgagaagagcttttcggacctgttactaccccaagctgtgtaatatacttgtataacagaaataccttctatacaaacctttttttctacttttagatagaaatgtctactttttcagcagttctgtgaattaaagagcagagtgactgtgggtctggaatggctggtgtacttgggaatgtactatcaggattttacagcaatgctgggaaatgacagggaaaatgacaggaatgaatctcaccagattttttatgtactcagcagagccttgagttacggtgtttattttccaatcaagtgaagatatctcctacttctcctactggaacatctcagcttctgcagtgaagaaaaattcctgtgatagttcagttctttagtttttctatttgaaaaaaaaaaatcatttaaatgatcctttgttcacggctctccttaatgactgagtgaacagttcctatctgtatatttgactaaaccttttcctaagctatctctcatggttcctatgtttttttatcataattaaaagcaaaaccatctggatcacctaacagtcagaggtcagtatctcagcgtgtgaattatagaggaaatacagagagaacctcttccacttttacttttcgtccaaataaaatgcatggtgtaccagaagttgaagatcgggttgaggattggggctagctcgatgacactaaggccccaacatcgcgggacctgctgtggcgcggattcttaggaacgctgttctagccggccccctctccaggggtcgccgtggccggcattatttcctagttcttcttgtaaccctgaggtgccagcgcggggagtgaggaggggtcagggggctaaggatgcaacctctgacgttctgcgccttcctaggagagtcttacatgtgttgagatttcacaagcaatgcgagttgtaaaataccagctctacaagaagctaggctctgtgacggcatagttttcagtagctttatcacaatattcacaatggagaattatatgacatggtagcagaaataggcccttttatgtgttgcttctattttacctcaaattgtagatatagggtaatcaataaaatccatccatgcctttcacacactaagt

SEQ ID NO: 4591 - protein, 881 aa, Homo sapiens
MVVTFLMSALESMCKELAKSKAEVACIAVYETDVFVVGTERGRAFVNTRKDFQKDFVKYCVEEEEKAAEMHKMKSTTQANRMSVDAVEIETLRKTVEDYFCFCYGKALGKSTVVPVPYEKMLRDQSAVVVQGLPEGVAFKHPENYDLATLKWILENKAGISFIIKRPFLEPKKHVGGRVMVTDADRSILSPGGSCGPIKVKTEPTEDSGISLEMAAVTVKEESEDPDYYQYNIQGSHHSSEGNEGTEMEVPAEDDDYSPPSKRPKANELPQPPVPEPANAGKRKVREFNFEKWNARITDLRKQVEELFERKYAQAIKAKGPVTIPYPLFQSHVEDLYVEGLPEGIPFRRPSTYGIPRLERILLAKERIRFVIKKHELLNSTREDLQLDKPASGVKEEWYARITKLRKMVDQLFCKKFAEALGSTEAKAVPYQKFEAHPNDLYVEGLPENIPFRSPSWYGIPRLEKIIQVGNRIKFVIKRPELLTHSTTEVTQPRTNTPVKEDWNVRITKLRKQVEEIFNLKFAQALGLTEAVKVPYPVFESNPEFLYVEGLPEGIPFRSPTWFGIPRLERIVRGSNKIKFVVKKPELVISYLPPGMASKINTKALQSPKRPRSPGSNSKVPEIEVTVEGPNNNNPQTSAVRTPTQTNGSNVPFKPRGREFSFEAWNAKITDLKQKVENLFNEKCGEALGLKQAVKVPFALFESFPEDFYVEGLPEGVPFRRPSTFGIPRLEKILRNKAKIKFIIKKPEMFETAIKESTSSKSPPRKINSSPNVNTTASGVEDLNIIQVTIPDDDNERLSKVEKARQLREQVNDLFSRKFGEAIGMGFPVKVPYRKITINPGCVVVDGMPPGVSFKAPSYLEISSMRRILDSAEFIKFTVIR

SEQ ID NO: 4592 - DNA, 7828 bp, Homo sapiens
aaaaaaaaaaaaaaaaaaaaaaaaaaaagaaaaaagaaaaaaaaaaggaggaggaggaggagggtgagagagaagctgggagagcagagaaaaggggccaccggtcgcccccccgcttccccgcacgcgctctccagccgcggccgcccgcctgccgcggtcaccccggcctctgcctctgtcccccagtgatcggatcaaggcgctgagcgaggccctgcctgcggggcggccatgcggcggtgacaggagcgcgaccgacacgcacgggcccctcgccccctctcgcctcccgtccgctcgccagctcccctcagccgaggctgctccgcggcggccgcagcccgcgcgcggcccacactcgcctccccgttgaagatgaggagtcctcggagagcaggatggtggtgacattcctcatgtcagctctcgagtccatgtgtaaagaactggccaagtccaaagccgaagtggcctgcattgcagtgtatgaaacagacgtgtttgtcgtcggaactgaaagaggacgtgcttttgtcaataccagaaaggattttcaaaaagattttgtaaaatattgtgttgaagaagaagaaaaagctgcagagatgcataaaatgaaatctacaacccaggcaaatcggatgagtgtagatgctgtagaaattgaaacactcagaaaaacagttgaggactatttctgcttttgctatgggaaagctttaggcaaatccacagtggtacctgtaccatatgagaagatgctgcgagaccagtcggctgtggtagtgcaggggcttccggaaggtgttgcctttaaacaccccgagaactatgatcttgcaaccctgaaatggattttggagaacaaagcagggatttcattcatcattaagagaccttttttagagccaaagaagcatgtaggtggtcgtgtgatggtaacagatgctgacaggtcaatactatctccaggtggaagttgtggccccatcaaagtgaaaactgaacccacagaagattctggcatttccctggaaatggcagctgtgacagtaaaggaagaatcagaagatcctgattattatcaatataacattcaaggaagccaccattcttcagagggcaatgaaggcacagaaatggaagtaccagcagaagattctactcaacatgtcccttcagaaacaagtgaggaccctgaagttgaggtgactattgaagatgatgattattctccaccgtctaagagaccaaaggccaatgagctaccgcagccaccagtcccggaacccgccaatgctgggaagcggaaagtgagggagttcaacttcgagaaatggaatgctcgcatcactgatctacgtaaacaagttgaagaattgtttgaaaggaaatatgctcaagccataaaagccaaaggtccggtgacgatcccgtaccctcttttccagtctcatgttgaagatctttatgtagaaggacttcctgaaggaattccttttagaaggccatctacttacggaattcctcgcctggagaggatattacttgcaaaggaaaggattcgttttgtgattaagaaacatgagcttctgaattcaacacgtgaagatttacagcttgataagccagcttcaggagtaaaggaagaatggtatgccagaatcactaaattaagaaagatggtggatcagcttttctgcaaaaaatttgcggaagccttggggagcactgaagccaaggctgtaccgtaccaaaaatttgaggcacacccgaatgatctgtacgtggaaggactgccagaaaacattcctttccgaagtccctcatggtatggaatcccaaggctggaaaaaatcattcaagtgggcaatcgaattaaatttgttattaaaagaccagaacttctgactcacagtaccactgaagttactcagccaagaacgaatacaccagtcaaagaagattggaatgtcagaattaccaagctacggaagcaagtggaagagatttttaatttgaaatttgctcaagctcttggactcaccgaggcagtaaaagtaccatatcctgtgtttgaatcaaacccggagttcttgaaaggatcgtccgcgggagtaataaaatcaagttcgttgttaaaaaacctgaactagttatttcctacttgcctcctgggatggctagtaaaataaacactaaagctttgcagtcccccaaaagaccacgaagtcctgggagtaattcaaaggttcctgaaattgaggtcaccgtggaaggccctaataacaacaatcctcaaacctcagctgttcgaaccccgacccagactaacggttctaacgttcccttcaagccacgagggagagagttttcctttgaggcctggaatgccaaaatcacggacctaaaacagaaagttgaaaatctcttcaatgagaaatgtggggaagctcttggccttaaacaagctgtgaaggtgccgttcgcgttatttgagtctttcccggaagacttttatgtggaaggcttacctgagggtgtgccattccgaagaccatcgacttttggcattccgaggctggagaagatactcagaaacaaagccaaaattaagttcatcattaaaaagcccgaaatgtttgagacggcgattaaggagagcacctcctctaagagccctcccagaaaaataaattcatcacccaatgttaatactactgcatcaggtgttgaagaccttaacatcattcaggtgacaattccagatgatgataatgaaagactctcgaaagttgaaaaagctagacagctaagagaacaagtgaatgacctctttagtcggaaatttggtgaagctattggtatgggttttcctgtgaaagttccctacaggaaaatcacaattaaccctggctgtgtggtggttgatggcatgcccccgggggtgtccttcaaagcccccagctacctggaaatcagctccatgagaaggatcttagactctgccgagtttatcaaattcacggtcattaggtaagtgagagtttcctgcttagtcacaggagcgaatctggagctcatgaggctgactcttctaaaatgcagccacaggtagtcatcgaatccggcttcctatgctgtgcaatcaacaaatcaaaataacttgtgtcatcattagaatgtcagatgtgcttctacgaactaagctgactcttttaattctttggcaaagggttggcaaactaggactgtttgccaaattcaggctgcctcctatttttagagtcttcctgaaacacagctacacccgtattatccatggctgctttcctgtcacagtgagtaagtagctgggactgagaaggcatggcctccaaagtctaaaatatttactctctagcactttgtagaaaaaccttagctaggcacagtggctaacgcctgtaatcccagcattttgggaggccaaggcaggcagatcacctgaggtcaggagttccagaccagcctggccaacatggtgaaatcccatctctacaaaaataaaacagttagctgggcatgatggcgggtgcctgtaatcccagctactcgggaggctgaggcaggatagtcgcttgaacccaggaggtggaggttgcaatgagccaagatcatgccactgcactccagcctggacgacagagtgagactccatcacaagaaaaaaagaactttgtcaacctctgtcttagggcgccttgtcacaggcttcgggtcagacggattcaaccttgcatcagccatttgttagccaggtcactctgttctttgtctgtaaatgagattgatcgttgttcccactgagagtgtcagctccttcccgtagagcaggcatgatgattgtactcacctctgacaccattgtgagtgccacattccttcccacgtccttgtcactgtaagagatgcccacctgagcaccaaccccaggttatcttcccctttgtcttccagccccccagaaacagctacgactcaacctacccaatcatttcatcatcagattgccactgtctctagttcaggtctcttgggactggcactcagaaatctcataataaatcctcttgaggcttctcatacactcgtcttcttccaatcttctttccctcaaaatctcatattttggttccacttcacccaccgtcattctccatatcactcccaggagttaggcaaaaagccccttccgttcttccgtatgttaaacttagaatcactctgttccctgctctgcgtttctattttttgtttttcctccatttactagtagcttaacactttctaacagtgttcttattattgatacgtatctatctcttccataagcttataaggtcacggataatacttctcattgtagtacgtaaatgacgtgggctagatatgagttgaataaacagttatacctgtaaattcttacagagtgaaaataaattgttatactttacaatttgtttctctctttagaccatttccaggacttgtgattaataaccgtgagtattttgtgaagtgttttgtttttgttttttcctggggtctgacgtgtgtgcgtgtgagtgtgtatacatgcttaacgtatatcacgttacttcacctatgtcagtaaccaggccaaatacttgttttagccctcagtaaaaacaccaggcacttcctagttgtaaaattattcaagcttcttaacttcctatcctcgatgcacttaatcataaaatggtaataatagcaccgattttgggggagtcgttccagtagatggaaagcatctggaacaggtgtcagcaagctcctgccgacgtgtatgcataaagttttattgaaaccaccatcgtgtccatttgtttatggcagaactgagagatggcagcagcaagtgtgtgcctgcaaaacctaaaatatttactaattggctctgcaagaaaagagtttgcatccccctaacctagaacagtgtctagcctctagtatgtgtttagcctacagtatgtgctcagcgaatacaatctatatttattactgcttttatgactgttataattactgtgcttggatttcgttacaaagtaagtcacaatgtgcctgcttctgttagtatttcagcacagtgcctggcacacatggggctctcaaatattgctgagcgagtgaacaaatgtcctttcaattccttaacgttgatgtcattttcaatagtattttgagccaaacttaattttgcgagtgtgttttgttttcttaactttattattaaaaatgtataaaagtgaggccaggcgtggtggctcacgcctgtaatcccagcagtttgggaggctgaggcaggcggatcagttgaggttgggagttggagaccagcccgtccaacatggtgaaagcctgtctctactaaaaatacaaaaatcagctgggtgtggtggcgcgtgcctgtaatcccagctactcaggaggctgaggcaggagagttgcttgaatcctagaggtggaggttgcagtgagctgagatcgtgccattgcactccagcctgggcaacaagagcaaaactctgtcccaataaataaataaataaaatgttctcttttgttcctgttcttgtgcggtagtgtggtatagagttttatggtaattactgtgaattagtgattctgagggacatatcagaactctgaggtttgtttccttctcatcttgagggaaacagcaaatgtatgttaaaatgcttttccaagggaacaacacatccttacattatttaaaccaatctgcttcattttcagagctggttgatcagagtgagtcagaaggccccgtgatacaagaatcagctgaaccaagccagttggaagttccagccacagaagaaataaaagagactgatggaagctctcagatcaagcaagaaccagaccccacgtggtagacctcttccctcctagggtaaatcagcttctgtgtcagggatgctgtgtggtgtccatctgaaccccctgcatacgcgtagctaatgtgatctccccactttcacataagatggtggccctgccttcagggaatgtgggagccaggtgggagccttcccggatatttaagctagaagattctacagggagattctccttggatcaatatatgtctctcagtcaaagatgtaaaagcacttttgccttaaaaagaatgttctgtttctaaatagagtcaacgttgtcctcctcattggaattcactatgagtcagaatcattagactgacttttttttttccatagtaatagtattttgcagagtctcacagagctgcagatcttttgttcatcttgcagagttaacaagtctgatcctgttagtccagatttcttaaatttggccaagttataataggagcagtagcttgagacccgaagtcaggaaactttgacaatggatttttttttttaatccagagacttgtactggaatttgccttaccctgtcagctcatggacttaaggtttcatcccgctttatgagtgcttctgaatccaagtcattgttacctgaatttgcaaattaagttgtgatattcgtgactgttaaattcctgtaattagattaacctctttgcttgcttgtttgttttctctcctattttagcttaaagtatcagtggttgagaagagcttttcggacctgttactaccccaagctgtgtaatatacttgtataacagaaataccttctatacaaacctttttttctacttttagatagaaatgtctactttttcagcagttctgtgaattaaagagcagagtgactgtgggtctggaatggctggtgtacttgggaatgtactatcaggattttacagcaatgctgggaaatgacagggaaaatgacaggaatgaatctcaccagattttttatgtactcagcagagccttgagttacggtgtttattttccaatcaagtgaagatatctcctacttctcctactggaacatctcagcttctgcagtgaagaaaaattcctgtgatagttcagttctttagtttttctatttgaaaaaaaaaaatcatttaaatgatcctttgttcacggctctccttaatgactgagtgaacagttcctatctgtatatttgactaaaccttttcctaagctatctctcatggttcctatgtttttttatcataattaaaagcaaaaccatctggatcacctaacagtcagaggtcagtatctcagcgtgtgaattatagaggaaatacagagagaacctcttccacttttacttttcgtccaaataaaatgcatggtgtaccagaagttgaagatcgggttgaggattggggctagctcgatgacactaaggccccaacatcgcgggacctgctgtggcgcggattcttaggaacgctgttctagccggccccctctccaggggtcgccgtggccggcattatttcctagttcttcttgtaaccctgaggtgccagcgcggggagtgaggaggggtcagggggctaaggatgcaacctctgacgttctgcgccttcctaggagagtcttacatgtgttgagatttcacaagcaatgcgagttgtaaaataccagctctacaagaagctaggctctgtgacggcatagttttcagtagctttatcacaatattcacaatggagaattatatgacatggtagcagaaataggcccttttatgtgttgcttctattttacctcaaattgtagatatagggtaatcaataaaatccatccatgcctttcacacactaagt

SEQ ID NO: 4593 - protein, 585 aa, Homo sapiens; identical to SEQ ID NO: 4199

SEQ ID NO: 4594 - DNA, 4263 bp, Homo sapiens
aaaaaaaaaaaaaaaaaaaaaaaaaaaagaaaaaagaaaaaaaaaaggaggaggaggaggagggtgagagagaagctgggagagcagagaaaaggggccaccggtcgcccccccgcttccccgcacgcgctctccagccgcggccgcccgcctgccgcggtcaccccggcctctgcctctgtcccccagtgatcggatcaaggcgctgagcgaggccctgcctgcggggcggccatgcggcggtgacaggagcgcgaccgacacgcacgggcccctcgccccctctcgcctcccgtccgctcgccagctcccctcagccgaggctgctccgcggcggccgcagcccgcgcgcggcccacactcgcctccccgttgaagatgaggagtcctcggagagcaggatggtggtgacattcctcatgtcagctctcgagtccatgtgtaaagaactggccaagtccaaagccgaagtggcctgcattgcagtgtatgaaacagacgtgtttgtcgtcggaactgaaagaggacgtgcttttgtcaataccagaaaggattttcaaaaagattttgtaaaatattgtgttgaagaagaagaaaaagctgcagagatgcataaaatgaaatctacaacccaggcaaatcggatgagtgtagatgctgtagaaattgaaacactcagaaaaacagttgaggactatttctgcttttgctatgggaaagctttaggcaaatccacagtggtacctgtaccatatgagaagatgctgcgagaccagtcggctgtggtagtgcaggggcttccggaaggtgttgcctttaaacaccccgagaactatgatcttgcaaccctgaaatggattttggagaacaaagcagggatttcattcatcattaagagaccttttttagagccaaagaagcatgtaggtggtcgtgtgatggtaacagatgctgacaggtcaatactatctccaggtggaagttgtggccccatcaaagtgaaaactgaacccacagaagattctggcatttccctggaaatggcagctgtgacagtaaaggaagaatcagaagatcctgattattatcaatataacattcaaggaagccaccattcttcagagggcaatgaaggcacagaaatggaagtaccagcagaagatgatgattattctccaccgtctaagagaccaaaggccaatgagctaccgcagccaccagtcccggaacccgccaatgctgggaagcggaaagtgagggagttcaacttcgagaaatggaatgctcgcatcactgatctacgtaaacaagttgaagaattgtttgaaaggaaatatgctcaagccataaaagccaaaggtccggtgacgatcccgtaccctcttttccagtctcatgttgaagatctttatgtagaaggacttcctgaaggaattccttttagaaggccatctacttacggaattcctcgcctggagaggatattacttgcaaaggaaaggattcgttttgtgattaagaaacatgagcttctgaattcaacacgtgaagatttacagcttgataagccagcttcaggagtaaaggaagaatggtatgccagaatcactaaattaagaaagatggtggatcagcttttctgcaaaaaatttgcggaagccttggggagcactgaagccaaggctgtaccgtaccaaaaatttgaggcacacccgaatgatctgtacgtggaaggactgccagaaaacattcctttccgaagtccctcatggtatggaatcccaaggctggaaaaaatcattcaagtgggcaatcgaattaaatttgttattaaaagaccagaacttctgactcacagtaccactgaagttactcagccaagaacgaatacaccagtcaaagaagattggaatgtcagaattaccaagctacggaagcaagtggaagagatttttaatttgaaatttgcttagatttgttgacagcggtttcctggagtgctgtcttgagaacgattctgaggaggctcagcaagaaagagtgtttcagttgattgggtgtgtctgtcatggagaaggaactcaagctcttggactcaccgaggcagtaaaagtaccatatcctgtgtttgaatcaaacccggagttcttgtatgtggaaggcttgccagaggggattcccttccgaagccctacctggtttggaattccacgacttgaaaggatcgtccgcgggagtaataaaatcaagttcgttgttaaaaaacctgaactagttatttcctacttgcctcctgggatggctagtaaaataaacactaaagctttgcagtcccccaaaagaccacgaagtcctgggagtaattcaaaggttcctgaaattgaggtcaccgtggaaggccctaataacaacaatcctcaaacctcagctgttcgaaccccgacccagactaacggttctaacgttcccttcaagccacgagggagagagttttcctttgaggcctggaatgccaaaatcacggacctaaaacagaaagttgaaaatctcttcaatgagaaatgtggggaagctcttggccttaaacaagctgtgaaggtgccgttcgcgttatttgagtctttcccggaagacttttatgtggaaggcttacctgagggtgtgccattccgaagaccatcgacttttggcattccgaggctggagaagatactcagaaacaaagccaaaattaagttcatcattaaaaagcccgaaatgtttgagacggcgattaaggagagcacctcctctaagagccctcccagaaaaataaattcatcacccaatgttaatactactgcatcaggtgttgaagaccttaacatcattcaggtgacaattccagatgatgataatgaaagactctcgaaagttgaaaaagctagacagctaagagaacaagtgaatgacctctttagtcggaaatttggtgaagctattggtatgggttttcctgtgaaagttccctacaggaaaatcacaattaaccctggctgtgtggtggttgatggcatgcccccgggggtgtccttcaaagcccccagctacctggaaatcagctccatgagaaggatcttagactctgccgagtttatcaaattcacggtcattagaccatttccaggacttgtgattaataaccagctggttgatcagagtgagtcagaaggccccgtgatacaagaatcagctgaaccaagccagttggaagttccagccacagaagaaataaaagagactgatggaagctctcagatcaagcaagaaccagaccccacgtggtagacctcttccctcctaggcttaaagtatcagtggttgagaagagcttttcggacctgttactaccccaagctgtagccttgagttacggtgtttattttccaatcaagtgaagatatctcctacttctcctactggaacatctcagcttctgcagtgaagaaaaattcctgtgatagttcagttctttagtttttctatttgaaaaaaaaaaatcatttaaatgatcctttgttcacggctctccttaatgactgagtgaacagttcctatctgtatatttgactaaaccttttcctaagctatctctcatggttcctatgtttttttatcataattaaaagcaaaaccatctggatcacctaacagtcagaggtcagtatctcagcgtgtgaattatagaggaaatacagagagaacctcttccacttttacttttcgtccaaataaaatgcatggtgtaccagaagttgaagatcgggttgaggattggggctagctcgatgacactaaggccccaacatcgcgggacctgctgtggcgcggattcttaggaacgctgttctagccggccccctctccaggggtcgccgtggccggcattatttcctagttcttcttgtaaccctgaggtgccagcgcggggagtgaggaggggtcagggggctaaggatgcaacctctgacgttctgcgccttcctaggagagtcttacatgtgttgagatttcacaagcaatgcgagttgtaaaataccagctctacaagaagctaggctctgtgacggcatagttttcagtagctttatcacaatattcacaatggagaattatatgacatggtagcagaaataggcccttttatgtgttgcttctattttacctcaaattgtagatatagggtaatcaataaaatccatccatgcctttcacacactaagt

SEQ ID NO: 4595 - protein, 523 aa, Homo sapiens; identical to SEQ ID NO: 4201

SEQ ID NO: 4596 - DNA, 7944 bp, Homo sapiens
aaaaaaaaaaaaaaaaaaaaaaaaaaaagaaaaaagaaaaaaaaaaggaggaggaggaggagggtgagagagaagctgggagagcagagaaaaggggccaccggtcgcccccccgcttccccgcacgcgctctccagccgcggccgcccgcctgccgcggtcaccccggcctctgcctctgtcccccagtgatcggatcaaggcgctgagcgaggccctgcctgcggggcggccatgcggcggtgacaggagcgcgaccgacacgcacgggcccctcgccccctctcgcctcccgtccgctcgccagctcccctcagccgaggctgctccgcggcggccgcagcccgcgcgcggcccacactcgcctccccgttgaagatgaggagtcctcggagagcaggatggtggtgacattcctcatgtcagctctcgagtccatgtgtaaagaactggccaagtccaaagccgaagtggcctgcattgcagtgtatgaaacagacgtgtttgtcgtcggaactgaaagaggacgtgcttttgtcaataccagaaaggattttcaaaaagattttgtaaaatattgtgttgaagaagaagaaaaagctgcagagatgcataaaatgaaatctacaacccaggcaaatcggatgagtgtagatgctgtagaaattgaaacactcagaaaaacagttgaggactatttctgcttttgctatgggaaagctttaggcaaatccacagtggtacctgtaccatatgagaagatgctgcgagaccagtcggctgtggtagtgcaggggcttccggaaggtgttgcctttaaacaccccgagaactatgatcttgcaaccctgaaatggattttggagaacaaagcagggatttcattcatcattaagagaccttttttagagccaaagaagcatgtaggtggtcgtgtgatggtaacagatgctgacaggtcaatactatctccaggtggaagttgtggccccatcaaagtgaaaactgaacccacagaagattctggcatttccctggaaatggcagctgtgacagtaaaggaagaatcagaagatcctgattattatcaatataacattcaaggaagccaccattcttcagagggcaatgaaggcacagaaatggaagtaccagcagaagatgatgattattctccaccgtctaagagaccaaaggccaatgagctaccgcagccaccagtcccggaacccgccaatgctgggaagcggaaagtgagggagttcaacttcgagaaatggaatgctcgcatcactgatctacgtaaacaagttgaagaattgtttgaaaggaaatatgctcaagccataaaagccaaaggtccggtgacgatcccgtaccctcttttccagtctcatgttgaagatctttatgtagaaggacttcctgaaggaattccttttagaaggccatctacttacggaattcctcgcctggagaggatattacttgcaaaggaaaggattcgttttgtgattaagaaacatgagcttctgaattcaacacgtgaagatttacagcttgataagccagcttcaggagtaaaggaagaatggtatgccagaatcactaaattaagaaagatggtggatcagcttttctgcaaaaaatttgcggaagccttggggagcactgaagccaaggctgtaccgtaccaaaaatttgaggcacacccgaatgatctgtacgtggaaggactgccagaaaacattcctttccgaagtccctcatggtatggaatcccaaggctggaaaaaatcattcaagtgggcaatcgaattaaatttgttattaaaagaccagaacttctgactcacagtaccactgaagttactcagccaagaacgaatacaccagtcaaagaagattggaatgtcagaattaccaagctacggaagcaagtggaagagatttttaatttgaaatttgcttagatttgttgacagcggtttcctggagtgctgtcttgagaacgattctgaggaggctcagcaagaaagagtgtttcagttgattgggtgtgtctgtcatggagaaggaactcaagctcttggactcaccgaggcagtaaaagtaccatatcctgtgtttgaatcaaacccggagttcttgtatgtggaaggcttgccagaggggattcccttccgaagccctacctggtttggaattccacgacttgaaaggatcgtccgcgggagtaataaaatcaagttcgttgttaaaaaacctgaactagttatttcctacttgcctcctgggatggctagtaaaataaacactaaagctttgcagtcccccaaaagaccacgaagtcctgggagtaattcaaaggttcctgaaattgaggtcaccgtggaaggccctaataacaacaatcctcaaacctcagctgttcgaaccccgacccagactaacggttctaacgttcccttcaagccacgagggagagagttttcctttgaggcctggaatgccaaaatcacggacctaaaacagaaagttgaaaatctcttcaatgagaaatgtggggaagctcttggccttaaacaagctgtgaaggtgccgttcgcgttatttgagtctttcccggaagacttttatgtggaaggcttacctgagggtgtgccattccgaagaccatcgacttttggcattccgaggctggagaagatactcagaaacaaagccaaaattaagttcatcattaaaaagcccgaaatgtttgagacggcgattaaggagagcacctcctctaagagccctcccagaaaaataaattcatcacccaatgttaatactactgcatcaggtgttgaagaccttaacatcattcaggtgacaattccagatgatgataatgaaagactctcgaaagttgaaaaagctagacagctaagagaacaagtgaatgacctctttagtcggaaatttggtgaagctattggtatgggttttcctgtgaaagttccctacaggaaaatcacaattaaccctggctgtgtggtggttgatggcatgcccccgggggtgtccttcaaagcccccagctacctggaaatcagctccatgagaaggatcttagactctgccgagtttatcaaattcacggtcattaggtaagtgagagtttcctgcttagtcacaggagcgaatctggagctcatgaggctgactcttctaaaatgcagccacaggtagtcatcgaatccggcttcctatgctgtgcaatcaacaaatcaaaataacttgtgtcatcattagaatgtcagatgtgcttctacgaactaagctgactcttttaattctttggcaaagggttggcaaactaggactgtttgccaaattcaggctgcctcctatttttagagtcttcctgaaacacagctacacccgtattatccatggctgctttcctgtcacagtgagtaagtagctgggactgagaaggcatggcctccaaagtctaaaatatttactctctagcactttgtagaaaaaccttagctaggcacagtggctaacgcctgtaatcccagcattttgggaggccaaggcaggcagatcacctgaggtcaggagttccagaccagcctggccaacatggtgaaatcccatctctacaaaaataaaacagttagctgggcatgatggcgggtgcctgtaatcccagctactcgggaggctgaggcaggatagtcgcttgaacccaggaggtggaggttgcaatgagccaagatcatgccactgcactccagcctggacgacagagtgagactccatcacaagaaaaaaagaactttgtcaacctctgtcttagggcgccttgtcacaggcttcgggtcagacggattcaaccttgcatcagccatttgttagccaggtcactctgttctttgtctgtaaatgagattgatcgttgttcccactgagagtgtcagctccttcccgtagagcaggcatgatgattgtactcacctctgacaccattgtgagtgccacattccttcccacgtccttgtcactgtaagagatgcccacctgagcaccaaccccaggttatcttcccctttgtcttccagccccccagaaacagctacgactcaacctacccaatcatttcatcatcagattgccactgtctctagttcaggtctcttgggactggcactcagaaatctcataataaatcctcttgaggcttctcatacactcgtcttcttccaatcttctttccctcaaaatctcatattttggttccacttcacccaccgtcattctccatatcactcccaggagttaggcaaaaagccccttccgttcttccgtatgttaaacttagaatcactctgttccctgctctgcgtttctattttttgtttttcctccatttactagtagcttaacactttctaacagtgttcttattattgatacgtatctatctcttccataagcttataaggtcacggataatacttctcattgtagtacgtaaatgacgtgggctagatatgagttgaataaacagttatacctgtaaattcttacagagtgaaaataaattgttatactttacaatttgtttctctctttagaccatttccaggacttgtgattaataaccgtgagtattttgtgaagtgttttgtttttgttttttcctggggtctgacgtgtgtgcgtgtgagtgtgtatacatgcttaacgtatatcacgttacttcacctatgtcagtaaccaggccaaatacttgttttagccctcagtaaaaacaccaggcacttcctagttgtaaaattattcaagcttcttaacttcctatcctcgatgcacttaatcataaaatggtaataatagcaccgattttgggggagtcgttccagtagatggaaagcatctggaacaggtgtcagcaagctcctgccgacgtgtatgcataaagttttattgaaaccaccatcgtgtccatttgtttatggcagaactgagagatggcagcagcaagtgtgtgcctgcaaaacctaaaatatttactaattggctctgcaagaaaagagtttgcatccccctaacctagaacagtgtctagcctctagtatgtgtttagcctacagtatgtgctcagcgaatacaatctatatttattactgcttttatgactgttataattactgtgcttggatttcgttacaaagtaagtcacaatgtgcctgcttctgttagtatttcagcacagtgcctggcacacatggggctctcaaatattgctgagcgagtgaacaaatgtcctttcaattccttaacgttgatgtcattttcaatagtattttgagccaaacttaattttgcgagtgtgttttgttttcttaactttattattaaaaatgtataaaagtgaggccaggcgtggtggctcacgcctgtaatcccagcagtttgggaggctgaggcaggcggatcagttgaggttgggagttggagaccagcccgtccaacatggtgaaagcctgtctctactaaaaatacaaaaatcagctgggtgtggtggcgcgtgcctgtaatcccagctactcaggaggctgaggcaggagagttgcttgaatcctagaggtggaggttgcagtgagctgagatcgtgccattgcactccagcctgggcaacaagagcaaaactctgtcccaataaataaataaataaaatgttctcttttgttcctgttcttgtgcggtagtgtggtatagagttttatggtaattactgtgaattagtgattctgagggacatatcagaactctgaggtttgtttccttctcatcttgagggaaacagcaaatgtatgttaaaatgcttttccaagggaacaacacatccttacattatttaaaccaatctgcttcattttcagagctggttgatcagagtgagtcagaaggccccgtgatacaagaatcagctgaaccaagccagttggaagttccagccacagaagaaataaaagagactgatggaagctctcagatcaagcaagaaccagaccccacgtggtagacctcttccctcctagggtaaatcagcttctgtgtcagggatgctgtgtggtgtccatctgaaccccctgcatacgcgtagctaatgtgatctccccactttcacataagatggtggccctgccttcagggaatgtgggagccaggtgggagccttcccggatatttaagctagaagattctacagggagattctccttggatcaatatatgtctctcagtcaaagatgtaaaagcacttttgccttaaaaagaatgttctgtttctaaatagagtcaacgttgtcctcctcattggaattcactatgagtcagaatcattagactgacttttttttttccatagtaatagtattttgcagagtctcacagagctgcagatcttttgttcatcttgcagagttaacaagtctgatcctgttagtccagatttcttaaatttggccaagttataataggagcagtagcttgagacccgaagtcaggaaactttgacaatggatttttttttttaatccagagacttgtactggaatttgccttaccctgtcagctcatggacttaaggtttcatcccgctttatgagtgcttctgaatccaagtcattgttacctgaatttgcaaattaagttgtgatattcgtgactgttaaattcctgtaattagattaacctctttgcttgcttgtttgttttctctcctattttagcttaaagtatcagtggttgagaagagcttttcggacctgttactaccccaagctgtgtaatatacttgtataacagaaataccttctatacaaacctttttttctacttttagatagaaatgtctactttttcagcagttctgtgaattaaagagcagagtgactgtgggtctggaatggctggtgtacttgggaatgtactatcaggattttacagcaatgctgggaaatgacagggaaaatgacaggaatgaatctcaccagattttttatgtactcagcagagccttgagttacggtgtttattttccaatcaagtgaagatatctcctacttctcctactggaacatctcagcttctgcagtgaagaaaaattcctgtgatagttcagttctttagtttttctatttgaaaaaaaaaaatcatttaaatgatcctttgttcacggctctccttaatgactgagtgaacagttcctatctgtatatttgactaaaccttttcctaagctatctctcatggttcctatgtttttttatcataattaaaagcaaaaccatctggatcacctaacagtcagaggtcagtatctcagcgtgtgaattatagaggaaatacagagagaacctcttccacttttacttttcgtccaaataaaatgcatggtgtaccagaagttgaagatcgggttgaggattggggctagctcgatgacactaaggccccaacatcgcgggacctgctgtggcgcggattcttaggaacgctgttctagccggccccctctccaggggtcgccgtggccggcattatttcctagttcttcttgtaaccctgaggtgccagcgcggggagtgaggaggggtcagggggctaaggatgcaacctctgacgttctgcgccttcctaggagagtcttacatgtgttgagatttcacaagcaatgcgagttgtaaaataccagctctacaagaagctaggctctgtgacggcatagttttcagtagctttatcacaatattcacaatggagaattatatgacatggtagcagaaataggcccttttatgtgttgcttctattttacctcaaattgtagatatagggtaatcaataaaatccatccatgcctttcacacactaagt

SEQ ID NO: 4597 - protein, 523 aa, Homo sapiens; identical to SEQ ID NO: 4201

SEQ ID NO: 4598 - DNA, 4929 bp, Homo sapiens
aaaaaaaaaaaaaaaaaaaaaaaaaaaagaaaaaagaaaaaaaaaaggaggaggaggaggagggtgagagagaagctgggagagcagagaaaaggggccaccggtcgcccccccgcttccccgcacgcgctctccagccgcggccgcccgcctgccgcggtcaccccggcctctgcctctgtcccccagtgatcggatcaaggcgctgagcgaggccctgcctgcggggcggccatgcggcggtgacaggagcgcgaccgacacgcacgggcccctcgccccctctcgcctcccgtccgctcgccagctcccctcagccgaggctgctccgcggcggccgcagcccgcgcgcggcccacactcgcctcccctcggcacccccggccccggagctgcctggaggcggccgcactcggtgtaaagaactggccaagtccaaagccgaagtggcctgcattgcagtgtatgaaacagacgtgtttgtcgtcggaactgaaagaggacgtgcttttgtcaataccagaaaggattttcaaaaagattttgtaaaatattgtgttgaagaagaagaaaaagctgcagagatgcataaaatgaaatctacaacccaggcaaatcggatgagtgtagatgctgtagaaattgaaacactcagaaaaacagttgaggactatttctgcttttgctatgggaaagctttaggcaaatccacagtggtacctgtaccatatgagaagatgctgcgagaccagtcggctgtggtagtgcaggggcttccggaaggtgttgcctttaaacaccccgagaactatgatcttgcaaccctgaaatggattttggagaacaaagcagggatttcattcatcattaagagaccttttttagagccaaagaagcatgtaggtggtcgtgtgatggtaacagatgctgacaggtcaatactatctccaggtggaagttgtggccccatcaaagtgaaaactgaacccacagaagattctggcatttccctggaaatggcagctgtgacagtaaaggaagaatcagaagatcctgattattatcaatataacattcaaggaagccaccattcttcagagggcaatgaaggcacagaaatggaagtaccagcagaagatgatgattattctccaccgtctaagagaccaaaggccaatgagctaccgcagccaccagtcccggaacccgccaatgctgggaagcggaaagtgagggagttcaacttcgagaaatggaatgctcgcatcactgatctacgtaaacaagttgaagaattgtttgaaaggaaatatgctcaagccataaaagccaaaggtccggtgacgatcccgtaccctcttttccagtctcatgttgaagatctttatgtagaaggacttcctgaaggaattccttttagaaggccatctacttacggaattcctcgcctggagaggatattacttgcaaaggaaaggattcgttttgtgattaagaaacatgagcttctgaattcaacacgtgaagatttacagcttgataagccagcttcaggagtaaaggaagaatggtatgccagaatcactaaattaagaaagatggtggatcagcttttctgcaaaaaatttgcggaagccttggggagcactgaagccaaggctgtaccgtaccaaaaatttgaggcacacccgaatgatctgtacgtggaaggactgccagaaaacattcctttccgaagtccctcatggtatggaatcccaaggctggaaaaaatcattcaagtgggcaatcgaattaaatttgttattaaaagaccagaacttctgactcacagtaccactgaagttactcagccaagaacgaatacaccagtcaaagaagattggaatgtcagaattaccaagctacggaagcaagtggaagagatttttaatttgaaatttgctcaagctcttggactcaccgaggcagtaaaagtaccatatcctgtgtttgaatcaaacccggagttcttgaaaggatcgtccgcgggagtaataaaatcaagttcgttgttaaaaaacctgaactagttatttcctacttgcctcctgggatggctagtaaaataaacactaaagctttgcagtcccccaaaagaccacgaagtcctgggagtaattcaaaggttcctgaaattgaggtcaccgtggaaggccctaataacaacaatcctcaaacctcagctgttcgaaccccgacccagactaacggttctaacgttcccttcaagccacgagggagagagttttcctttgaggcctggaatgccaaaatcacggacctaaaacagaaagttgaaaatctcttcaatgagaaatgtggggaagctcttggccttaaacaagctgtgaaggtgccgttcgcgttatttgagtctttcccggaagacttttatgtggaaggcttacctgagggtgtgccattccgaagaccatcgacttttggcattccgaggctggagaagatactcagaaacaaagccaaaattaagttcatcattaaaaagcccgaaatgtttgagacggcgattaaggagagcacctcctctaagagccctcccagaaaaataaattcatcacccaatgttaatactactgcatcaggtgttgaagaccttaacatcattcaggtgacaattccagatgatgataatgaaagactctcgaaagttgaaaaagctagacagctaagagaacaagtgaatgacctctttagtcggaaatttggtgaagctattggtatgggttttcctgtgaaagttccctacaggaaaatcacaattaaccctggctgtgtggtggttgatggcatgcccccgggggtgtccttcaaagcccccagctacctggaaatcagctccatgagaaggatcttagactctgccgagtttatcaaattcacggtcattagaccatttccaggacttgtgattaataaccagctggttgatcagagtgagtcagaaggccccgtgatacaagaatcagctgaaccaagccagttggaagttccagccacagaaggtaaaaggacctcttccctcctagggtaaatcagcttctgtgtcagggatgctgtgtggtgtccatctgaaccccctgcatacgcgtagctaatgtgatctccccactttcacataagatggtggccctgccttcagggaatgtgggagccaggtgggagccttcccggatatttaagctagaagattctacagggagattctccttggatcaatatatgtctctcagtcaaagatgtaaaagcacttttgccttaaaaagaatgttctgtttctaaatagagtcaacgttgtcctcctcattggaattcactatgagtcagaatcattagactgacttttttttttccatagtaatagtattttgcagagtctcacagagctgcagatcttttgttcatcttgcagagttaacaagtctgatcctgttagtccagatttcttaaatttggccaagttataataggagcagtagcttgagacccgaagtcaggaaactttgacaatggatttttttttttaatccagagacttgtactggaatttgccttaccctgtcagctcatggacttaaggtttcatcccgctttatgagtgcttctgaatccaagtcattgttacctgaatttgcaaattaagttgtgatattcgtgactgttaaattcctgtaattagattaacctctttgcttgcttgtttgttttctctcctattttagcttaaagtatcagtggttgagaagagcttttcggacctgttactaccccaagctgtgtaatatacttgtataacagaaataccttctatacaaacctttttttctacttttagatagaaatgtctactttttcagcagttctgtgaattaaagagcagagtgactgtgggtctggaatggctggtgtacttgggaatgtactatcaggattttacagcaatgctgggaaatgacagggaaaatgacaggaatgaatctcaccagattttttatgtactcagcagagccttgagttacggtgtttattttccaatcaagtgaagatatctcctacttctcctactggaacatctcagcttctgcagtgaagaaaaattcctgtgatagttcagttctttagtttttctatttgaaaaaaaaaaatcatttaaatgatcctttgttcacggctctccttaatgactgagtgaacagttcctatctgtatatttgactaaaccttttcctaagctatctctcatggttcctatgtttttttatcataattaaaagcaaaaccatctggatcacctaacagtcagaggtcagtatctcagcgtgtgaattatagaggaaatacagagagaacctcttccacttttacttttcgtccaaataaaatgcatggtgtaccagaagttgaagatcgggttgaggattggggctagctcgatgacactaaggccccaacatcgcgggacctgctgtggcgcggattcttaggaacgctgttctagccggccccctctccaggggtcgccgtggccggcattatttcctagttcttcttgtaaccctgaggtgccagcgcggggagtgaggaggggtcagggggctaaggatgcaacctctgacgttctgcgccttcctaggagagtcttacatgtgttgagatttcacaagcaatgcgagttgtaaaataccagctctacaagaagctaggctctgtgacggcatagttttcagtagctttatcacaatattcacaatggagaattatatgacatggtagcagaaataggcccttttatgtgttgcttctattttacctcaaattgtagatatagggtaatcaataaaatccatccatgcctttcacacactaagt

SEQ ID NO: 4599 - protein, 495 aa, Homo sapiens; identical to SEQ ID NO: 4181

SEQ ID NO: 4600 - DNA, 5076 bp, Homo sapiens
aaaaaaaaaaaaaaaaaaaaaaaaaaaagaaaaaagaaaaaaaaaaggaggaggaggaggagggtgagagagaagctgggagagcagagaaaaggggccaccggtcgcccccccgcttccccgcacgcgctctccagccgcggccgcccgcctgccgcggtcaccccggcctctgcctctgtcccccagtgatcggatcaaggcgctgagcgaggccctgcctgcggggcggccatgcggcggtgacaggagcgcgaccgacacgcacgggcccctcgccccctctcgcctcccgtccgctcgccagctcccctcagccgaggctgctccgcggcggccgcagcccgcgcgcggcccacactcgcctccccgttgaagatgaggagtcctcggagagcaggatggtggtgacattcctcatgtcagctctcgagtccatgtgtaaagaactggccaagtccaaagccgaagtggcctgcattgcagtgtatgaaacagacgtgtttgtcgtcggaactgaaagaggacgtgcttttgtcaataccagaaaggattttcaaaaagattttgtaaaatattgtgttgaagaagaagaaaaagctgcagagatgcataaaatgaaatctacaacccaggcaaatcggatgagtgtagatgctgtagaaattgaaacactcagaaaaacagttgaggactatttctgcttttgctatgggaaagctttaggcaaatccacagtggtacctgtaccatatgagaagatgctgcgagaccagtcggctgtggtagtgcaggggcttccggaaggtgttgcctttaaacaccccgagaactatgatcttgcaaccctgaaatggattttggagaacaaagcagggatttcattcatcattaagagaccttttttagagccaaagaagcatgtaggtggtcgtgtgatggtaacagatgctgacaggtcaatactatctccaggtggaagttgtggccccatcaaagtgaaaactgaacccacagaagattctggcatttccctggaaatggcagctgtgacagtaaaggaagaatcagaagatcctgattattatcaatataacattcaagcaggcccttctgaaactgatgatgttgatgaaaaacagcccctatcgaagcctttgcaaggaagccaccattcttcagagggcaatgaaggcacagaaatggaagtaccagcagaagattctactcaacatgtcccttcagaaacaagtgaggaccctgaagttgaggtgactattgaagatgatgattattctccaccgtctaagagaccaaaggccaatgagctaccgcagccaccagtcccggaacccgccaatgctgggaagcggaaagtgagggagttcaacttcgagaaatggaatgctcgcatcactgatctacgtaaacaagttgaagaattgtttgaaaggaaatatgctcaagccataaaagccaaaggtccggtgacgatcccgtaccctcttttccagtctcatgttgaagatctttatgtagaaggacttcctgaaggaattccttttagaaggccatctacttacggaattcctcgcctggagaggatattacttgcaaaggaaaggattcgttttgtgattaagaaacatgagcttctgaattcaacacgtgaagatttacagcttgataagccagcttcaggagtaaaggaagaatggtatgccagaatcactaaattaagaaagatggtggatcagcttttctgcaaaaaatttgcggaagccttggggagcactgaagccaaggctgtaccgtaccaaaaatttgaggcacacccgaatgatctgtacgtggaaggactgccagaaaacattcctttccgaagtccctcatggtatggaatcccaaggctggaaaaaatcattcaagtgggcaatcgaattaaatttgttattaaaagaccagaacttctgactcacagtaccactgaagttactcagccaagaacgaatacaccagtcaaagaagattggaatgtcagaattaccaagctacggaagcaagtggaagagatttttaatttgaaatttgctcaagctcttggactcaccgaggcagtaaaagtaccatatcctgtgtttgaatcaaacccggagttcttgaaaggatcgtccgcgggagtaataaaatcaagttcgttgttaaaaaacctgaactagttatttcctacttgcctcctgggatggctagtaaaataaacactaaagctttgcagtcccccaaaagaccacgaagtcctgggagtaattcaaaggttcctgaaattgaggtcaccgtggaaggccctaataacaacaatcctcaaacctcagctgttcgaaccccgacccagactaacggttctaacgttcccttcaagccacgagggagagagttttcctttgaggcctggaatgccaaaatcacggacctaaaacagaaagttgaaaatctcttcaatgagaaatgtggggaagctcttggccttaaacaagctgtgaaggtgccgttcgcgttatttgagtctttcccggaagacttttatgtggaaggcttacctgagggtgtgccattccgaagaccatcgacttttggcattccgaggctggagaagatactcagaaacaaagccaaaattaagttcatcattaaaaagcccgaaatgtttgagacggcgattaaggagagcacctcctctaagagccctcccagaaaaataaattcatcacccaatgttaatactactgcatcaggtgttgaagaccttaacatcattcaggtgacaattccagatgatgataatgaaagactctcgaaagttgaaaaagctagacagctaagagaacaagtgaatgacctctttagtcggaaatttggtgaagctattggtatgggttttcctgtgaaagttccctacaggaaaatcacaattaaccctggctgtgtggtggttgatggcatgcccccgggggtgtccttcaaagcccccagctacctggaaatcagctccatgagaaggatcttagactctgccgagtttatcaaattcacggtcattagaccatttccaggacttgtgattaataaccagctggttgatcagagtgagtcagaaggccccgtgatacaagaatcagctgaaccaagccagttggaagttccagccacagaaggtaaaaggacctcttccctcctagggtaaatcagcttctgtgtcagggatgctgtgtggtgtccatctgaaccccctgcatacgcgtagctaatgtgatctccccactttcacataagatggtggccctgccttcagggaatgtgggagccaggtgggagccttcccggatatttaagctagaagattctacagggagattctccttggatcaatatatgtctctcagtcaaagatgtaaaagcacttttgccttaaaaagaatgttctgtttctaaatagagtcaacgttgtcctcctcattggaattcactatgagtcagaatcattagactgacttttttttttccatagtaatagtattttgcagagtctcacagagctgcagatcttttgttcatcttgcagagttaacaagtctgatcctgttagtccagatttcttaaatttggccaagttataataggagcagtagcttgagacccgaagtcaggaaactttgacaatggatttttttttttaatccagagacttgtactggaatttgccttaccctgtcagctcatggacttaaggtttcatcccgctttatgagtgcttctgaatccaagtcattgttacctgaatttgcaaattaagttgtgatattcgtgactgttaaattcctgtaattagattaacctctttgcttgcttgtttgttttctctcctattttagcttaaagtatcagtggttgagaagagcttttcggacctgttactaccccaagctgtgtaatatacttgtataacagaaataccttctatacaaacctttttttctacttttagatagaaatgtctactttttcagcagttctgtgaattaaagagcagagtgactgtgggtctggaatggctggtgtacttgggaatgtactatcaggattttacagcaatgctgggaaatgacagggaaaatgacaggaatgaatctcaccagattttttatgtactcagcagagccttgagttacggtgtttattttccaatcaagtgaagatatctcctacttctcctactggaacatctcagcttctgcagtgaagaaaaattcctgtgatagttcagttctttagtttttctatttgaaaaaaaaaaatcatttaaatgatcctttgttcacggctctccttaatgactgagtgaacagttcctatctgtatatttgactaaaccttttcctaagctatctctcatggttcctatgtttttttatcataattaaaagcaaaaccatctggatcacctaacagtcagaggtcagtatctcagcgtgtgaattatagaggaaatacagagagaacctcttccacttttacttttcgtccaaataaaatgcatggtgtaccagaagttgaagatcgggttgaggattggggctagctcgatgacactaaggccccaacatcgcgggacctgctgtggcgcggattcttaggaacgctgttctagccggccccctctccaggggtcgccgtggccggcattatttcctagttcttcttgtaaccctgaggtgccagcgcggggagtgaggaggggtcagggggctaaggatgcaacctctgacgttctgcgccttcctaggagagtcttacatgtgttgagatttcacaagcaatgcgagttgtaaaataccagctctacaagaagctaggctctgtgacggcatagttttcagtagctttatcacaatattcacaatggagaattatatgacatggtagcagaaataggcccttttatgtgttgcttctattttacctcaaattgtagatatagggtaatcaataaaatccatccatgcctttcacacactaagt

SEQ ID NO: 4601 - protein, 605 aa, Homo sapiens; identical to SEQ ID NO: 4017

SEQ ID NO: 4602 - DNA, 7908 bp, Homo sapiens
aaaaaaaaaaaaaaaaaaaaaaaaaaaagaaaaaagaaaaaaaaaaggaggaggaggaggagggtgagagagaagctgggagagcagagaaaaggggccaccggtcgcccccccgcttccccgcacgcgctctccagccgcggccgcccgcctgccgcggtcaccccggcctctgcctctgtcccccagtgatcggatcaaggcgctgagcgaggccctgcctgcggggcggccatgcggcggtgacaggagcgcgaccgacacgcacgggcccctcgccccctctcgcctcccgtccgctcgccagctcccctcagccgaggctgctccgcggcggccgcagcccgcgcgcggcccacactcgcctcccctcggcacccccggccccggagctgcctggaggcggccgcactcggggatcatggcccaagttgcaatgtccaccctccccgttgaagatgaggagtcctcggagagcaggatggtggtgacattcctcatgtcagctctcgagtccatgtgtaaagaactggccaagtccaaagccgaagtggcctgcattgcagtgtatgaaacagacgtgtttgtcgtcggaactgaaagaggacgtgcttttgtcaataccagaaaggattttcaaaaagattttgtaaaatattgtgttgaagaagaagaaaaagctgcagagatgcataaaatgaaatctacaacccaggcaaatcggatgagtgtagatgctgtagaaattgaaacactcagaaaaacagttgaggactatttctgcttttgctatgggaaagctttaggcaaatccacagtggtacctgtaccatatgagaagatgctgcgagaccagtcggctgtggtagtgcaggggcttccggaaggtgttgcctttaaacaccccgagaactatgatcttgcaaccctgaaatggattttggagaacaaagcagggatttcattcatcattaagagaccttttttagagccaaagaagcatgtaggtggtcgtgtgatggtaacagatgctgacaggtcaatactatctccaggtggaagttgtggccccatcaaagtgaaaactgaacccacagaagattctggcatttccctggaaatggcagctgtgacagtaaaggaagaatcagaagatcctgattattatcaatataacattcaaggaagccaccattcttcagagggcaatgaaggcacagaaatggaagtaccagcagaagattctactcaacatgtcccttcagaaacaagtgaggaccctgaagttgaggtgactattgaagatgatgattattctccaccgtctaagagaccaaaggccaatgagctaccgcagccaccagtcccggaacccgccaatgctgggaagcggaaagtgagggagttcaacttcgagaaatggaatgctcgcatcactgatctacgtaaacaagttgaagaattgtttgaaaggaaatatgctcaagccataaaagccaaaggtccggtgacgatcccgtaccctcttttccagtctcatgttgaagatctttatgtagaaggacttcctgaaggaattccttttagaaggccatctacttacggaattcctcgcctggagaggatattacttgcaaaggaaaggattcgttttgtgattaagaaacatgagcttctgaattcaacacgtgaagatttacagcttgataagccagcttcaggagtaaaggaagaatggtatgccagaatcactaaattaagaaagatggtggatcagcttttctgcaaaaaatttgcggaagccttggggagcactgaagccaaggctgtaccgtaccaaaaatttgaggcacacccgaatgatctgtacgtggaaggactgccagaaaacattcctttccgaagtccctcatggtatggaatcccaaggctggaaaaaatcattcaagtgggcaatcgaattaaatttgttattaaaagaccagaacttctgactcacagtaccactgaagttactcagccaagaacgaatacaccagtcaaagaagattggaatgtcagaattaccaagctacggaagcaagtggaagagatttttaatttgaaatttgctcaagctcttggactcaccgaggcagtaaaagtaccatatcctgtgtttgaatcaaacccggagttcttgaaaggatcgtccgcgggagtaataaaatcaagttcgttgttaaaaaacctgaactagttatttcctacttgcctcctgggatggctagtaaaataaacactaaagctttgcagtcccccaaaagaccacgaagtcctgggagtaattcaaaggttcctgaaattgaggtcaccgtggaaggccctaataacaacaatcctcaaacctcagctgttcgaaccccgacccagactaacggttctaacgttcccttcaagccacgagggagagagttttcctttgaggcctggaatgccaaaatcacggacctaaaacagaaagttgaaaatctcttcaatgagaaatgtggggaagctcttggccttaaacaagctgtgaaggtgccgttcgcgttatttgagtctttcccggaagacttttatgtggaaggcttacctgagggtgtgccattccgaagaccatcgacttttggcattccgaggctggagaagatactcagaaacaaagccaaaattaagttcatcattaaaaagcccgaaatgtttgagacggcgattaaggagagcacctcctctaagagccctcccagaaaaataaattcatcacccaatgttaatactactgcatcaggtgttgaagaccttaacatcattcaggtgacaattccagatgatgataatgaaagactctcgaaagttgaaaaagctagacagctaagagaacaagtgaatgacctctttagtcggaaatttggtgaagctattggtatgggttttcctgtgaaagttccctacaggaaaatcacaattaaccctggctgtgtggtggttgatggcatgcccccgggggtgtccttcaaagcccccagctacctggaaatcagctccatgagaaggatcttagactctgccgagtttatcaaattcacggtcattaggtaagtgagagtttcctgcttagtcacaggagcgaatctggagctcatgaggctgactcttctaaaatgcagccacaggtagtcatcgaatccggcttcctatgctgtgcaatcaacaaatcaaaataacttgtgtcatcattagaatgtcagatgtgcttctacgaactaagctgactcttttaattctttggcaaagggttggcaaactaggactgtttgccaaattcaggctgcctcctatttttagagtcttcctgaaacacagctacacccgtattatccatggctgctttcctgtcacagtgagtaagtagctgggactgagaaggcatggcctccaaagtctaaaatatttactctctagcactttgtagaaaaaccttagctaggcacagtggctaacgcctgtaatcccagcattttgggaggccaaggcaggcagatcacctgaggtcaggagttccagaccagcctggccaacatggtgaaatcccatctctacaaaaataaaacagttagctgggcatgatggcgggtgcctgtaatcccagctactcgggaggctgaggcaggatagtcgcttgaacccaggaggtggaggttgcaatgagccaagatcatgccactgcactccagcctggacgacagagtgagactccatcacaagaaaaaaagaactttgtcaacctctgtcttagggcgccttgtcacaggcttcgggtcagacggattcaaccttgcatcagccatttgttagccaggtcactctgttctttgtctgtaaatgagattgatcgttgttcccactgagagtgtcagctccttcccgtagagcaggcatgatgattgtactcacctctgacaccattgtgagtgccacattccttcccacgtccttgtcactgtaagagatgcccacctgagcaccaaccccaggttatcttcccctttgtcttccagccccccagaaacagctacgactcaacctacccaatcatttcatcatcagattgccactgtctctagttcaggtctcttgggactggcactcagaaatctcataataaatcctcttgaggcttctcatacactcgtcttcttccaatcttctttccctcaaaatctcatattttggttccacttcacccaccgtcattctccatatcactcccaggagttaggcaaaaagccccttccgttcttccgtatgttaaacttagaatcactctgttccctgctctgcgtttctattttttgtttttcctccatttactagtagcttaacactttctaacagtgttcttattattgatacgtatctatctcttccataagcttataaggtcacggataatacttctcattgtagtacgtaaatgacgtgggctagatatgagttgaataaacagttatacctgtaaattcttacagagtgaaaataaattgttatactttacaatttgtttctctctttagaccatttccaggacttgtgattaataaccgtgagtattttgtgaagtgttttgtttttgttttttcctggggtctgacgtgtgtgcgtgtgagtgtgtatacatgcttaacgtatatcacgttacttcacctatgtcagtaaccaggccaaatacttgttttagccctcagtaaaaacaccaggcacttcctagttgtaaaattattcaagcttcttaacttcctatcctcgatgcacttaatcataaaatggtaataatagcaccgattttgggggagtcgttccagtagatggaaagcatctggaacaggtgtcagcaagctcctgccgacgtgtatgcataaagttttattgaaaccaccatcgtgtccatttgtttatggcagaactgagagatggcagcagcaagtgtgtgcctgcaaaacctaaaatatttactaattggctctgcaagaaaagagtttgcatccccctaacctagaacagtgtctagcctctagtatgtgtttagcctacagtatgtgctcagcgaatacaatctatatttattactgcttttatgactgttataattactgtgcttggatttcgttacaaagtaagtcacaatgtgcctgcttctgttagtatttcagcacagtgcctggcacacatggggctctcaaatattgctgagcgagtgaacaaatgtcctttcaattccttaacgttgatgtcattttcaatagtattttgagccaaacttaattttgcgagtgtgttttgttttcttaactttattattaaaaatgtataaaagtgaggccaggcgtggtggctcacgcctgtaatcccagcagtttgggaggctgaggcaggcggatcagttgaggttgggagttggagaccagcccgtccaacatggtgaaagcctgtctctactaaaaatacaaaaatcagctgggtgtggtggcgcgtgcctgtaatcccagctactcaggaggctgaggcaggagagttgcttgaatcctagaggtggaggttgcagtgagctgagatcgtgccattgcactccagcctgggcaacaagagcaaaactctgtcccaataaataaataaataaaatgttctcttttgttcctgttcttgtgcggtagtgtggtatagagttttatggtaattactgtgaattagtgattctgagggacatatcagaactctgaggtttgtttccttctcatcttgagggaaacagcaaatgtatgttaaaatgcttttccaagggaacaacacatccttacattatttaaaccaatctgcttcattttcagagctggttgatcagagtgagtcagaaggccccgtgatacaagaatcagctgaaccaagccagttggaagttccagccacagaagaaataaaagagactgatggaagctctcagatcaagcaagaaccagaccccacgtggtagacctcttccctcctagggtaaatcagcttctgtgtcagggatgctgtgtggtgtccatctgaaccccctgcatacgcgtagctaatgtgatctccccactttcacataagatggtggccctgccttcagggaatgtgggagccaggtgggagccttcccggatatttaagctagaagattctacagggagattctccttggatcaatatatgtctctcagtcaaagatgtaaaagcacttttgccttaaaaagaatgttctgtttctaaatagagtcaacgttgtcctcctcattggaattcactatgagtcagaatcattagactgacttttttttttccatagtaatagtattttgcagagtctcacagagctgcagatcttttgttcatcttgcagagttaacaagtctgatcctgttagtccagatttcttaaatttggccaagttataataggagcagtagcttgagacccgaagtcaggaaactttgacaatggatttttttttttaatccagagacttgtactggaatttgccttaccctgtcagctcatggacttaaggtttcatcccgctttatgagtgcttctgaatccaagtcattgttacctgaatttgcaaattaagttgtgatattcgtgactgttaaattcctgtaattagattaacctctttgcttgcttgtttgttttctctcctattttagcttaaagtatcagtggttgagaagagcttttcggacctgttactaccccaagctgtgtaatatacttgtataacagaaataccttctatacaaacctttttttctacttttagatagaaatgtctactttttcagcagttctgtgaattaaagagcagagtgactgtgggtctggaatggctggtgtacttgggaatgtactatcaggattttacagcaatgctgggaaatgacagggaaaatgacaggaatgaatctcaccagattttttatgtactcagcagagccttgagttacggtgtttattttccaatcaagtgaagatatctcctacttctcctactggaacatctcagcttctgcagtgaagaaaaattcctgtgatagttcagttctttagtttttctatttgaaaaaaaaaaatcatttaaatgatcctttgttcacggctctccttaatgactgagtgaacagttcctatctgtatatttgactaaaccttttcctaagctatctctcatggttcctatgtttttttatcataattaaaagcaaaaccatctggatcacctaacagtcagaggtcagtatctcagcgtgtgaattatagaggaaatacagagagaacctcttccacttttacttttcgtccaaataaaatgcatggtgtaccagaagttgaagatcgggttgaggattggggctagctcgatgacactaaggccccaacatcgcgggacctgctgtggcgcggattcttaggaacgctgttctagccggccccctctccaggggtcgccgtggccggcattatttcctagttcttcttgtaaccctgaggtgccagcgcggggagtgaggaggggtcagggggctaaggatgcaacctctgacgttctgcgccttcctaggagagtcttacatgtgttgagatttcacaagcaatgcgagttgtaaaataccagctctacaagaagctaggctctgtgacggcatagttttcagtagctttatcacaatattcacaatggagaattatatgacatggtagcagaaataggcccttttatgtgttgcttctattttacctcaaattgtagatatagggtaatcaataaaatccatccatgcctttcacacactaagt

SEQ ID NO: 4603 - protein, 605 aa, Homo sapiens; identical to SEQ ID NO: 4221

SEQ ID NO: 4604 - DNA, 4989 bp, Homo sapiens
aaaaaaaaaaaaaaaaaaaaaaaaaaaagaaaaaagaaaaaaaaaaggaggaggaggaggagggtgagagagaagctgggagagcagagaaaaggggccaccggtcgcccccccgcttccccgcacgcgctctccagccgcggccgcccgcctgccgcggtcaccccggcctctgcctctgtcccccagtgatcggatcaaggcgctgagcgaggccctgcctgcggggcggccatgcggcggtgacaggagcgcgaccgacacgcacgggcccctcgccccctctcgcctcccgtccgctcgccagctcccctcagccgaggctgctccgcggcggccgcagcccgcgcgcggcccacactcgcctcccctcggcacccccggccccggagctgcctggaggcggccgcactcggtgtaaagaactggccaagtccaaagccgaagtggcctgcattgcagtgtatgaaacagacgtgtttgtcgtcggaactgaaagaggacgtgcttttgtcaataccagaaaggattttcaaaaagattttgtaaaatattgtgttgaagaagaagaaaaagctgcagagatgcataaaatgaaatctacaacccaggcaaatcggatgagtgtagatgctgtagaaattgaaacactcagaaaaacagttgaggactatttctgcttttgctatgggaaagctttaggcaaatccacagtggtacctgtaccatatgagaagatgctgcgagaccagtcggctgtggtagtgcaggggcttccggaaggtgttgcctttaaacaccccgagaactatgatcttgcaaccctgaaatggattttggagaacaaagcagggatttcattcatcattaagagaccttttttagagccaaagaagcatgtaggtggtcgtgtgatggtaacagatgctgacaggtcaatactatctccaggtggaagttgtggccccatcaaagtgaaaactgaacccacagaagattctggcatttccctggaaatggcagctgtgacagtaaaggaagaatcagaagatcctgattattatcaatataacattcaagcaggcccttctgaaactgatgatgttgatgaaaaacagcccctatcgaagcctttgcaaggaagccaccattcttcagagggcaatgaaggcacagaaatggaagtaccagcagaagatgatgattattctccaccgtctaagagaccaaaggccaatgagctaccgcagccaccagtcccggaacccgccaatgctgggaagcggaaagtgagggagttcaacttcgagaaatggaatgctcgcatcactgatctacgtaaacaagttgaagaattgtttgaaaggaaatatgctcaagccataaaagccaaaggtccggtgacgatcccgtaccctcttttccagtctcatgttgaagatctttatgtagaaggacttcctgaaggaattccttttagaaggccatctacttacggaattcctcgcctggagaggatattacttgcaaaggaaaggattcgttttgtgattaagaaacatgagcttctgaattcaacacgtgaagatttacagcttgataagccagcttcaggagtaaaggaagaatggtatgccagaatcactaaattaagaaagatggtggatcagcttttctgcaaaaaatttgcggaagccttggggagcactgaagccaaggctgtaccgtaccaaaaatttgaggcacacccgaatgatctgtacgtggaaggactgccagaaaacattcctttccgaagtccctcatggtatggaatcccaaggctggaaaaaatcattcaagtgggcaatcgaattaaatttgttattaaaagaccagaacttctgactcacagtaccactgaagttactcagccaagaacgaatacaccagtcaaagaagattggaatgtcagaattaccaagctacggaagcaagtggaagagatttttaatttgaaatttgctcaagctcttggactcaccgaggcagtaaaagtaccatatcctgtgtttgaatcaaacccggagttcttgaaaggatcgtccgcgggagtaataaaatcaagttcgttgttaaaaaacctgaactagttatttcctacttgcctcctgggatggctagtaaaataaacactaaagctttgcagtcccccaaaagaccacgaagtcctgggagtaattcaaaggttcctgaaattgaggtcaccgtggaaggccctaataacaacaatcctcaaacctcagctgttcgaaccccgacccagactaacggttctaacgttcccttcaagccacgagggagagagttttcctttgaggcctggaatgccaaaatcacggacctaaaacagaaagttgaaaatctcttcaatgagaaatgtggggaagctcttggccttaaacaagctgtgaaggtgccgttcgcgttatttgagtctttcccggaagacttttatgtggaaggcttacctgagggtgtgccattccgaagaccatcgacttttggcattccgaggctggagaagatactcagaaacaaagccaaaattaagttcatcattaaaaagcccgaaatgtttgagacggcgattaaggagagcacctcctctaagagccctcccagaaaaataaattcatcacccaatgttaatactactgcatcaggtgttgaagaccttaacatcattcaggtgacaattccagatgatgataatgaaagactctcgaaagttgaaaaagctagacagctaagagaacaagtgaatgacctctttagtcggaaatttggtgaagctattggtatgggttttcctgtgaaagttccctacaggaaaatcacaattaaccctggctgtgtggtggttgatggcatgcccccgggggtgtccttcaaagcccccagctacctggaaatcagctccatgagaaggatcttagactctgccgagtttatcaaattcacggtcattagaccatttccaggacttgtgattaataaccagctggttgatcagagtgagtcagaaggccccgtgatacaagaatcagctgaaccaagccagttggaagttccagccacagaaggtaaaaggacctcttccctcctagggtaaatcagcttctgtgtcagggatgctgtgtggtgtccatctgaaccccctgcatacgcgtagctaatgtgatctccccactttcacataagatggtggccctgccttcagggaatgtgggagccaggtgggagccttcccggatatttaagctagaagattctacagggagattctccttggatcaatatatgtctctcagtcaaagatgtaaaagcacttttgccttaaaaagaatgttctgtttctaaatagagtcaacgttgtcctcctcattggaattcactatgagtcagaatcattagactgacttttttttttccatagtaatagtattttgcagagtctcacagagctgcagatcttttgttcatcttgcagagttaacaagtctgatcctgttagtccagatttcttaaatttggccaagttataataggagcagtagcttgagacccgaagtcaggaaactttgacaatggatttttttttttaatccagagacttgtactggaatttgccttaccctgtcagctcatggacttaaggtttcatcccgctttatgagtgcttctgaatccaagtcattgttacctgaatttgcaaattaagttgtgatattcgtgactgttaaattcctgtaattagattaacctctttgcttgcttgtttgttttctctcctattttagcttaaagtatcagtggttgagaagagcttttcggacctgttactaccccaagctgtgtaatatacttgtataacagaaataccttctatacaaacctttttttctacttttagatagaaatgtctactttttcagcagttctgtgaattaaagagcagagtgactgtgggtctggaatggctggtgtacttgggaatgtactatcaggattttacagcaatgctgggaaatgacagggaaaatgacaggaatgaatctcaccagattttttatgtactcagcagagccttgagttacggtgtttattttccaatcaagtgaagatatctcctacttctcctactggaacatctcagcttctgcagtgaagaaaaattcctgtgatagttcagttctttagtttttctatttgaaaaaaaaaaatcatttaaatgatcctttgttcacggctctccttaatgactgagtgaacagttcctatctgtatatttgactaaaccttttcctaagctatctctcatggttcctatgtttttttatcataattaaaagcaaaaccatctggatcacctaacagtcagaggtcagtatctcagcgtgtgaattatagaggaaatacagagagaacctcttccacttttacttttcgtccaaataaaatgcatggtgtaccagaagttgaagatcgggttgaggattggggctagctcgatgacactaaggccccaacatcgcgggacctgctgtggcgcggattcttaggaacgctgttctagccggccccctctccaggggtcgccgtggccggcattatttcctagttcttcttgtaaccctgaggtgccagcgcggggagtgaggaggggtcagggggctaaggatgcaacctctgacgttctgcgccttcctaggagagtcttacatgtgttgagatttcacaagcaatgcgagttgtaaaataccagctctacaagaagctaggctctgtgacggcatagttttcagtagctttatcacaatattcacaatggagaattatatgacatggtagcagaaataggcccttttatgtgttgcttctattttacctcaaattgtagatatagggtaatcaataaaatccatccatgcctttcacacactaagt

SEQ ID NO: 4605 - protein, 515 aa, Homo sapiens; identical to SEQ ID NO: 4501

SEQ ID NO: 4606 - DNA, 3820 bp, Homo sapiens
aaaaaaaaaaaaaaaaaaaaaaaaaaaagaaaaaagaaaaaaaaaaggaggaggaggaggagggtgagagagaagctgggagagcagagaaaaggggccaccggtcgcccccccgcttccccgcacgcgctctccagccgcggccgcccgcctgccgcggtcaccccggcctctgcctctgtcccccagtgatcggatcaaggcgctgagcgaggccctgcctgcggggcggccatgcggcggtgacaggagcgcgaccgacacgcacgggcccctcgccccctctcgcctcccgtccgctcgccagctcccctcagccgaggctgctccgcggcggccgcagcccgcgcgcggcccacactcgcctccccgttgaagatgaggagtcctcggagagcaggatggtggtgacattcctcatgtcagctctcgagtccatgtgtaaagaactggccaagtccaaagccgaagtggcctgcattgcagtgtatgaaacagacgtgtttgtcgtcggaactgaaagaggacgtgcttttgtcaataccagaaaggattttcaaaaagattttgtaaaatattgtgttgaagaagaagaaaaagctgcagagatgcataaaatgaaatctacaacccaggcaaatcggatgagtgtagatgctgtagaaattgaaacactcagaaaaacagttgaggactatttctgcttttgctatgggaaagctttaggcaaatccacagtggtacctgtaccatatgagaagatgctgcgagaccagtcggctgtggtagtgcaggggcttccggaaggtgttgcctttaaacaccccgagaactatgatcttgcaaccctgaaatggattttggagaacaaagcagggatttcattcatcattaagagaccttttttagagccaaagaagcatgtaggtggtcgtgtgatggtaacagatgctgacaggtcaatactatctccaggtggaagttgtggccccatcaaagtgaaaactgaacccacagaagattctggcatttccctggaaatggcagctgtgacagtaaaggaagaatcagaagatcctgattattatcaatataacattcaagcaggcccttctgaaactgatgatgttgatgaaaaacagcccctatcgaagcctttgcaaggaagccaccattcttcagagggcaatgaaggcacagaaatggaagtaccagcagaagatgatgattattctccaccgtctaagagaccaaaggccaatgagctaccgcagccaccagtcccggaacccgccaatgctgggaagcggaaagtgagggagttcaacttcgagaaatggaatgctcgcatcactgatctacgtaaacaagttgaagaattgtttgaaaggaaatatgctcaagccataaaagccaaaggtccggtgacgatcccgtaccctcttttccagtctcatgttgaagatctttatgtagaaggacttcctgaaggaattccttttagaaggccatctacttacggaattcctcgcctggagaggatattacttgcaaaggaaaggattcgttttgtgattaagaaacatgagcttctgaattcaacacgtgaagatttacagcttgataagccagcttcaggagtaaaggaagaatggtatgccagaatcactaaattaagaaagatggtggatcagcttttctgcaaaaaatttgcggaagccttggggagcactgaagccaaggctgtaccgtaccaaaaatttgaggcacacccgaatgatctgtacgtggaaggactgccagaaaacattcctttccgaagtccctcatggtatggaatcccaaggctggaaaaaatcattcaagtgggcaatcgaattaaatttgttattaaaagaccagaacttctgactcacagtaccactgaagttactcagccaagaacgaatacaccagtcaaagaagattggaatgtcagaattaccaagctacggaagcaagtggaagagatttttaatttgaaatttgctcaagctcttggactcaccgaggcagtaaaagtaccatatcctgtgtttgaatcaaacccggagttcttgaaaggatcgtccgcgggagtaataaaatcaagttcgttgttaaaaaacctgaactagttatttcctacttgcctcctgggatggctagtaaaataaacactaaagctttgcagtcccccaaaagaccacgaagtcctgggagtaattcaaaggttcctgaaattgaggtcaccgtggaaggccctaataacaacaatcctcaaacctcagctgttcgaaccccgacccagactaacggttctaacgttcccttcaagccacgagggagagagttttcctttgaggcctggaatgccaaaatcacggacctaaaacagaaagttgaaaatctcttcaatgagaaatgtggggaagctcttggccttaaacaagctgtgaaggtgccgttcgcgttatttgagtctttcccggaagacttttatgtggaaggcttacctgagggtgtgccattccgaagaccatcgacttttggcattccgaggctggagaagatactcagaaacaaagccaaaattaagttcatcattaaaaagcccgaaatgtttgagacggcgattaaggagagcacctcctctaagagccctcccagaaaaataaattcatcacccaatgttaatactactgcatcaggtgttgaagaccttaacatcattcaggtgacaattccagatgatgataatgaaagactctcgaaagttgaaaaagctagacagctaagagaacaagtgaatgacctctttagtcggaaatttggtgaagctattggtatgggttttcctgtgaaagttccctacaggaaaatcacaattaaccctggctgtgtggtggttgatggcatgcccccgggggtgtccttcaaagcccccagctacctggaaatcagctccatgagaaggatcttagactctgccgagtttatcaaattcacggtcattagaccatttccaggacttgtgattaataaccagctggttgatcagagtgagtcagaaggccccgtgatacaagaatcagctgaaccaagccagttggaagttccagccacagaagaaataaaagagactgatggaagctctcagatcaagcaagaaccagaccccacgtggtagacctcttccctcctaggcaaaaccatctggatcacctaacagtcagaggtcagtatctcagcgtgtgaattatagaggaaatacagagagaacctcttccacttttacttttcgtccaaataaaatgcatggtgtaccagaagttgaagatcgggttgaggattggggctagctcgatgacactaaggccccaacatcgcgggacctgctgtggcgcggattcttaggaacgctgttctagccggccccctctccaggggtcgccgtggccggcattatttcctagttcttcttgtaaccctgaggtgccagcgcggggagtgaggaggggtcagggggctaaggatgcaacctctgacgttctgcgccttcctaggagagtcttacatgtgttgagatttcacaagcaatgcgagttgtaaaataccagctctacaagaagctaggctctgtgacggcatagttttcagtagctttatcacaatattcacaatggagaattatatgacatggtagcagaaataggcccttttatgtgttgcttctattttacctcaaattgtagatatagggtaatcaataaaatccatccatgcctttcacacactaagt

SEQ ID NO: 4607 - protein, 584 aa, Homo sapiens; identical to SEQ ID NO: 4077

SEQ ID NO: 4608 - DNA, 3939 bp, Homo sapiens
aaaaaaaaaaaaaaaaaaaaaaaaaaaagaaaaaagaaaaaaaaaaggaggaggaggaggagggtgagagagaagctgggagagcagagaaaaggggccaccggtcgcccccccgcttccccgcacgcgctctccagccgcggccgcccgcctgccgcggtcaccccggcctctgcctctgtcccccagtgatcggatcaaggcgctgagcgaggccctgcctgcggggcggccatgcggcggtgacaggagcgcgaccgacacgcacgggcccctcgccccctctcgcctcccgtccgctcgccagctcccctcagccgaggctgctccgcggcggccgcagcccgcgcgcggcccacactcgcctccccgttgaagatgaggagtcctcggagagcaggatggtggtgacattcctcatgtcagctctcgagtccatgtgtaaagaactggccaagtccaaagccgaagtggcctgcattgcagtgtatgaaacagacgtgtttgtcgtcggaactgaaagaggacgtgcttttgtcaataccagaaaggattttcaaaaagattttgtaaaatattgtgttgaagaagaagaaaaagctgcagagatgcataaaatgaaatctacaacccaggcaaatcggatgagtgtagatgctgtagaaattgaaacactcagaaaaacagttgaggactatttctgcttttgctatgggaaagctttaggcaaatccacagtggtacctgtaccatatgagaagatgctgcgagaccagtcggctgtggtagtgcaggggcttccggaaggtgttgcctttaaacaccccgagaactatgatcttgcaaccctgaaatggattttggagaacaaagcagggatttcattcatcattaagagaccttttttagagccaaagaagcatgtaggtggtcgtgtgatggtaacagatgctgacaggtcaatactatctccaggtggaagttgtggccccatcaaagtgaaaactgaacccacagaagattctggcatttccctggaaatggcagctgtgacagtaaaggaagaatcagaagatcctgattattatcaatataacattcaaggaagccaccattcttcagagggcaatgaaggcacagaaatggaagtaccagcagaagatgatgattattctccaccgtctaagagaccaaaggccaatgagctaccgcagccaccagtcccggaacccgccaatgctgggaagcggaaagtgagggagttcaacttcgagaaatggaatgctcgcatcactgatctacgtaaacaagttgaagaattgtttgaaaggaaatatgctcaagccataaaagccaaaggtccggtgacgatcccgtaccctcttttccagtctcatgttgaagatctttatgtagaaggacttcctgaaggaattccttttagaaggccatctacttacggaattcctcgcctggagaggatattacttgcaaaggaaaggattcgttttgtgattaagaaacatgagcttctgaattcaacacgtgaagatttacagcttgataagccagcttcaggagtaaaggaagaatggtatgccagaatcactaaattaagaaagatggtggatcagcttttctgcaaaaaatttgcggaagccttggggagcactgaagccaaggctgtaccgtaccaaaaatttgaggcacacccgaatgatctgtacgtggaaggactgccagaaaacattcctttccgaagtccctcatggtatggaatcccaaggctggaaaaaatcattcaagtgggcaatcgaattaaatttgttattaaaagaccagaacttctgactcacagtaccactgaagttactcagccaagaacgaatacaccagtcaaagaagattggaatgtcagaattaccaagctacggaagcaagtggaagagatttttaatttgaaatttgcttagatttgttgacagcggtttcctggagtgctgtcttgagaacgattctgaggaggctcagcaagaaagagtgtttcagttgattgggtgtgtctgtcatggagaaggaactcaagctcttggactcaccgaggcagtaaaagtaccatatcctgtgtttgaatcaaacccggagttcttgtatgtggaaggcttgccagaggggattcccttccgaagccctacctggtttggaattccacgacttgaaaggatcgtccgcgggagtaataaaatcaagttcgttgttaaaaaacctgaactagttatttcctacttgcctcctgggatggctagtaaaataaacactaaagctttgcagtcccccaaaagaccacgaagtcctgggagtaattcaaaggttcctgaaattgaggtcaccgtggaaggccctaataacaacaatcctcaaacctcagctgttcgaaccccgacccagactaacggttctaacgttcccttcaagccacgagggagagagttttcctttgaggcctggaatgccaaaatcacggacctaaaacagaaagttgaaaatctcttcaatgagaaatgtggggaagctcttggccttaaacaagctgtgaaggtgccgttcgcgttatttgagtctttcccggaagacttttatgtggaaggcttacctgagggtgtgccattccgaagaccatcgacttttggcattccgaggctggagaagatactcagaaacaaagccaaaattaagttcatcattaaaaagcccgaaatgtttgagacggcgattaaggagagcacctcctctaagagccctcccagaaaaataaattcatcacccaatgttaatactactgcatcaggtgttgaagaccttaacatcattcaggtgacaattccagatgatgataatgaaagactctcgaaagttgaaaaagctagacagctaagagaacaagtgaatgacctctttagtcggaaatttggtgaagctattggtatgggttttcctgtgaaagttccctacaggaaaatcacaattaaccctggctgtgtggtggttgatggcatgcccccgggggtgtccttcaaagcccccagctacctggaaatcagctccatgagaaggatcttagactctgccgagtttatcaaattcacggtcattagaccatttccaggacttgtgattaataaccagctggttgatcagagtgagtcagaaggccccgtgatacaagaatcagctgaaccaagccagttggaagttccagccacagaagaaataaaagagactgatggaagctctcagatcaagcaagaaccagaccccacgtggtagacctcttccctcctaggcaaaaccatctggatcacctaacagtcagaggtcagtatctcagcgtgtgaattatagaggaaatacagagagaacctcttccacttttacttttcgtccaaataaaatgcatggtgtaccagaagttgaagatcgggttgaggattggggctagctcgatgacactaaggccccaacatcgcgggacctgctgtggcgcggattcttaggaacgctgttctagccggccccctctccaggggtcgccgtggccggcattatttcctagttcttcttgtaaccctgaggtgccagcgcggggagtgaggaggggtcagggggctaaggatgcaacctctgacgttctgcgccttcctaggagagtcttacatgtgttgagatttcacaagcaatgcgagttgtaaaataccagctctacaagaagctaggctctgtgacggcatagttttcagtagctttatcacaatattcacaatggagaattatatgacatggtagcagaaataggcccttttatgtgttgcttctattttacctcaaattgtagatatagggtaatcaataaaatccatccatgcctttcacacactaagt

SEQ ID NO: 4609 - protein, 523 aa, Homo sapiens; identical to SEQ ID NO: 4201

SEQ ID NO: 4610 - DNA, 3907 bp, Homo sapiens
aaaaaaaaaaaaaaaaaaaaaaaaaaaagaaaaaagaaaaaaaaaaggaggaggaggaggagggtgagagagaagctgggagagcagagaaaaggggccaccggtcgcccccccgcttccccgcacgcgctctccagccgcggccgcccgcctgccgcggtcaccccggcctctgcctctgtcccccagtgatcggatcaaggcgctgagcgaggccctgcctgcggggcggccatgcggcggtgacaggagcgcgaccgacacgcacgggcccctcgccccctctcgcctcccgtccgctcgccagctcccctcagccgaggctgctccgcggcggccgcagcccgcgcgcggcccacactcgcctcccctcggcacccccggccccggagctgcctggaggcggccgcactcggggatcatggcccaagttgcaatgtccaccctccccgttgaagatgaggagtcctcggagagcaggatggtggtgacattcctcatgtcagctctcgagtccatgtgtaaagaactggccaagtccaaagccgaagtggcctgcattgcagtgtatgaaacagacgtgtttgtcgtcggaactgaaagaggacgtgcttttgtcaataccagaaaggattttcaaaaagattttgtaaaatattgtgttgaagaagaagaaaaagctgcagagatgcataaaatgaaatctacaacccaggcaaatcggatgagtgtagatgctgtagaaattgaaacactcagaaaaacagttgaggactatttctgcttttgctatgggaaagctttaggcaaatccacagtggtacctgtaccatatgagaagatgctgcgagaccagtcggctgtggtagtgcaggggcttccggaaggtgttgcctttaaacaccccgagaactatgatcttgcaaccctgaaatggattttggagaacaaagcagggatttcattcatcattaagagaccttttttagagccaaagaagcatgtaggtggtcgtgtgatggtaacagatgctgacaggtcaatactatctccaggtggaagttgtggccccatcaaagtgaaaactgaacccacagaagattctggcatttccctggaaatggcagctgtgacagtaaaggaagaatcagaagatcctgattattatcaatataacattcaaggaagccaccattcttcagagggcaatgaaggcacagaaatggaagtaccagcagaagatgatgattattctccaccgtctaagagaccaaaggccaatgagctaccgcagccaccagtcccggaacccgccaatgctgggaagcggaaagtgagggagttcaacttcgagaaatggaatgctcgcatcactgatctacgtaaacaagttgaagaattgtttgaaaggaaatatgctcaagccataaaagccaaaggtccggtgacgatcccgtaccctcttttccagtctcatgttgaagatctttatgtagaaggacttcctgaaggaattccttttagaaggccatctacttacggaattcctcgcctggagaggatattacttgcaaaggaaaggattcgttttgtgattaagaaacatgagcttctgaattcaacacgtgaagatttacagcttgataagccagcttcaggagtaaaggaagaatggtatgccagaatcactaaattaagaaagatggtggatcagcttttctgcaaaaaatttgcggaagccttggggagcactgaagccaaggctgtaccgtaccaaaaatttgaggcacacccgaatgatctgtacgtggaaggactgccagaaaacattcctttccgaagtccctcatggtatggaatcccaaggctggaaaaaatcattcaagtgggcaatcgaattaaatttgttattaaaagaccagaacttctgactcacagtaccactgaagttactcagccaagaacgaatacaccagtcaaagaagattggaatgtcagaattaccaagctacggaagcaagtggaagagatttttaatttgaaatttgctcaagctcttggactcaccgaggcagtaaaagtaccatatcctgtgtttgaatcaaacccggagttcttgtatgtggaaggcttgccagaggggattcccttccgaagccctacctggtttggaattccacgacttgaaaggatcgtccgcgggagtaataaaatcaagttcgttgttaaaaaacctgaactagttatttcctacttgcctcctgggatggctagtaaaataaacactaaagctttgcagtcccccaaaagaccacgaagtcctgggagtaattcaaaggttcctgaaattgaggtcaccgtggaaggccctaataacaacaatcctcaaacctcagctgttcgaaccccgacccagactaacggttctaacgttcccttcaagccacgagggagagagttttcctttgaggcctggaatgccaaaatcacggacctaaaacagaaagttgaaaatctcttcaatgagaaatgtggggaagctcttggccttaaacaagctgtgaaggtgccgttcgcgttatttgagtctttcccggaagacttttatgtggaaggcttacctgagggtgtgccattccgaagaccatcgacttttggcattccgaggctggagaagatactcagaaacaaagccaaaattaagttcatcattaaaaagcccgaaatgtttgagacggcgattaaggagagcacctcctctaagagccctcccagaaaaataaattcatcacccaatgttaatactactgcatcaggtgttgaagaccttaacatcattcaggtgacaattccagatgatgataatgaaagactctcgaaagttgaaaaagctagacagctaagagaacaagtgaatgacctctttagtcggaaatttggtgaagctattggtatgggttttcctgtgaaagttccctacaggaaaatcacaattaaccctggctgtgtggtggttgatggcatgcccccgggggtgtccttcaaagcccccagctacctggaaatcagctccatgagaaggatcttagactctgccgagtttatcaaattcacggtcattagaccatttccaggacttgtgattaataaccagctggttgatcagagtgagtcagaaggccccgtgatacaagaatcagctgaaccaagccagttggaagttccagccacagaagaaataaaagagactgatggaagctctcagatcaagcaagaaccagaccccacgtggtagacctcttccctcctaggcaaaaccatctggatcacctaacagtcagaggtcagtatctcagcgtgtgaattatagaggaaatacagagagaacctcttccacttttacttttcgtccaaataaaatgcatggtgtaccagaagttgaagatcgggttgaggattggggctagctcgatgacactaaggccccaacatcgcgggacctgctgtggcgcggattcttaggaacgctgttctagccggccccctctccaggggtcgccgtggccggcattatttcctagttcttcttgtaaccctgaggtgccagcgcggggagtgaggaggggtcagggggctaaggatgcaacctctgacgttctgcgccttcctaggagagtcttacatgtgttgagatttcacaagcaatgcgagttgtaaaataccagctctacaagaagctaggctctgtgacggcatagttttcagtagctttatcacaatattcacaatggagaattatatgacatggtagcagaaataggcccttttatgtgttgcttctattttacctcaaattgtagatatagggtaatcaataaaatccatccatgcctttcacacactaagt

SEQ ID NO: 4611 - protein, 957 aa, Homo sapiens; identical to SEQ ID NO: 4303

SEQ ID NO: 4612 - DNA, 4091 bp, Homo sapiens
aaaaaaaaaaaaaaaaaaaaaaaaaaaagaaaaaagaaaaaaaaaaggaggaggaggaggagggtgagagagaagctgggagagcagagaaaaggggccaccggtcgcccccccgcttccccgcacgcgctctccagccgcggccgcccgcctgccgcggtcaccccggcctctgcctctgtcccccagtgatcggatcaaggcgctgagcgaggccctgcctgcggggcggccatgcggcggtgacaggagcgcgaccgacacgcacgggcccctcgccccctctcgcctcccgtccgctcgccagctcccctcagccgaggctgctccgcggcggccgcagcccgcgcgcggcccacactcgcctccccgttgaagatgaggagtcctcggagagcaggatggtggtgacattcctcatgtcagctctcgagtccatgtgtaaagaactggccaagtccaaagccgaagtggcctgcattgcagtgtatgaaacagacgtgtttgtcgtcggaactgaaagaggacgtgcttttgtcaataccagaaaggattttcaaaaagattttgtaaaatattgtgttgaagaagaagaaaaagctgcagagatgcataaaatgaaatctacaacccaggcaaatcggatgagtgtagatgctgtagaaattgaaacactcagaaaaacagttgaggactatttctgcttttgctatgggaaagctttaggcaaatccacagtggtacctgtaccatatgagaagatgctgcgagaccagtcggctgtggtagtgcaggggcttccggaaggtgttgcctttaaacaccccgagaactatgatcttgcaaccctgaaatggattttggagaacaaagcagggatttcattcatcattaagagaccttttttagagccaaagaagcatgtaggtggtcgtgtgatggtaacagatgctgacaggtcaatactatctccaggtggaagttgtggccccatcaaagtgaaaactgaacccacagaagattctggcatttccctggaaatggcagctgtgacagtaaaggaagaatcagaagatcctgattattatcaatataacattcaaggaagccaccattcttcagagggcaatgaaggcacagaaatggaagtaccagcagaagattctactcaacatgtcccttcagaaacaagtgaggaccctgaagttgaggtgactattgaagatgatgattattctccaccgtctaagagaccaaaggccaatgagctaccgcagccaccagtcccggaacccgccaatgctgggaagcggaaagtgagggagttcaacttcgagaaatggaatgctcgcatcactgatctacgtaaacaagttgaagaattgtttgaaaggaaatatgctcaagccataaaagccaaaggtccggtgacgatcccgtaccctcttttccagtctcatgttgaagatctttatgtagaaggacttcctgaaggaattccttttagaaggccatctacttacggaattcctcgcctggagaggatattacttgcaaaggaaaggattcgttttgtgattaagaaacatgagcttctgaattcaacacgtgaagatttacagcttgataagccagcttcaggagtaaaggaagaatggtatgccagaatcactaaattaagaaagatggtggatcagcttttctgcaaaaaatttgcggaagccttggggagcactgaagccaaggctgtaccgtaccaaaaatttgaggcacacccgaatgatctgtacgtggaaggactgccagaaaacattcctttccgaagtccctcatggtatggaatcccaaggctggaaaaaatcattcaagtgggcaatcgaattaaatttgttattaaaagaccagaacttctgactcacagtaccactgaagttactcagccaagaacgaatacaccagtcaaagaagattggaatgtcagaattaccaagctacggaagcaagtggaagagatttttaatttgaaatttgctcaagctcttggactcaccgaggcagtaaaagtaccatatcctgtgtttgaatcaaacccggagttcttgaaaggatcgtccgcgggagtaataaaatcaagttcgttgttaaaaaacctgaactagttatttcctacttgcctcctgggatggctagtaaaataaacactaaagctttgcagtcccccaaaagaccacgaagtcctgggagtaattcaaaggttcctgaaattgaggtcaccgtggaaggccctaataacaacaatcctcaaacctcagctgttcgaaccccgacccagactaacggttctaacgttcccttcaagccacgagggagagagttttcctttgaggcctggaatgccaaaatcacggacctaaaacagaaagttgaaaatctcttcaatgagaaatgtggggaagctcttggccttaaacaagctgtgaaggtgccgttcgcgttatttgagtctttcccggaagacttttatgtggaaggcttacctgagggtgtgccattccgaagaccatcgacttttggcattccgaggctggagaagatactcagaaacaaagccaaaattaagttcatcattaaaaagcccgaaatgtttgagacggcgattaaggagagcacctcctctaagagccctcccagaaaaataaattcatcacccaatgttaatactactgcatcaggtgttgaagaccttaacatcattcaggtgacaattccagatgatgataatgaaagactctcgaaagttgaaaaagctagacagctaagagaacaagtgaatgacctctttagtcggaaatttggtgaagctattggtatgggttttcctgtgaaagttccctacaggaaaatcacaattaaccctggctgtgtggtggttgatggcatgcccccgggggtgtccttcaaagcccccagctacctggaaatcagctccatgagaaggatcttagactctgccgagtttatcaaattcacggtcattagaccatttccaggacttgtgattaataaccagctggttgatcagagtgagtcagaaggccccgtgatacaagaatcagctgaaccaagccagttggaagttccagccacagaagaaataaaagagactgatggaagctctcagatcaagcaagaaccagaccccacgtggtagacctcttccctcctaggagccttgagttacggtgtttattttccaatcaagtgaagatatctcctacttctcctactggaacatctcagcttctgcagtgaagaaaaattcctgtgatagttcagttctttagtttttctatttgaaaaaaaaaaatcatttaaatgatcctttgttcacggctctccttaatgactgagtgaacagttcctatctgtatatttgactaaaccttttcctaagctatctctcatggttcctatgtttttttatcataattaaaagcaaaaccatctggatcacctaacagtcagaggtcagtatctcagcgtgtgaattatagaggaaatacagagagaacctcttccacttttacttttcgtccaaataaaatgcatggtgtaccagaagttgaagatcgggttgaggattggggctagctcgatgacactaaggccccaacatcgcgggacctgctgtggcgcggattcttaggaacgctgttctagccggccccctctccaggggtcgccgtggccggcattatttcctagttcttcttgtaaccctgaggtgccagcgcggggagtgaggaggggtcagggggctaaggatgcaacctctgacgttctgcgccttcctaggagagtcttacatgtgttgagatttcacaagcaatgcgagttgtaaaataccagctctacaagaagctaggctctgtgacggcatagttttcagtagctttatcacaatattcacaatggagaattatatgacatggtagcagaaataggcccttttatgtgttgcttctattttacctcaaattgtagatatagggtaatcaataaaatccatccatgcctttcacacactaagt

SEQ ID NO: 4613 - protein, 585 aa, Homo sapiens; identical to SEQ ID NO: 4199

SEQ ID NO: 4614 - DNA, 4183 bp, Homo sapiens
aaaaaaaaaaaaaaaaaaaaaaaaaaaagaaaaaagaaaaaaaaaaggaggaggaggaggagggtgagagagaagctgggagagcagagaaaaggggccaccggtcgcccccccgcttccccgcacgcgctctccagccgcggccgcccgcctgccgcggtcaccccggcctctgcctctgtcccccagtgatcggatcaaggcgctgagcgaggccctgcctgcggggcggccatgcggcggtgacaggagcgcgaccgacacgcacgggcccctcgccccctctcgcctcccgtccgctcgccagctcccctcagccgaggctgctccgcggcggccgcagcccgcgcgcggcccacactcgcctcccctcggcacccccggccccggagctgcctggaggcggccgcactcggtgtaaagaactggccaagtccaaagccgaagtggcctgcattgcagtgtatgaaacagacgtgtttgtcgtcggaactgaaagaggacgtgcttttgtcaataccagaaaggattttcaaaaagattttgtaaaatattgtgttgaagaagaagaaaaagctgcagagatgcataaaatgaaatctacaacccaggcaaatcggatgagtgtagatgctgtagaaattgaaacactcagaaaaacagttgaggactatttctgcttttgctatgggaaagctttaggcaaatccacagtggtacctgtaccatatgagaagatgctgcgagaccagtcggctgtggtagtgcaggggcttccggaaggtgttgcctttaaacaccccgagaactatgatcttgcaaccctgaaatggattttggagaacaaagcagggatttcattcatcattaagagaccttttttagagccaaagaagcatgtaggtggtcgtgtgatggtaacagatgctgacaggtcaatactatctccaggtggaagttgtggccccatcaaagtgaaaactgaacccacagaagattctggcatttccctggaaatggcagctgtgacagtaaaggaagaatcagaagatcctgattattatcaatataacattcaaggaagccaccattcttcagagggcaatgaaggcacagaaatggaagtaccagcagaagatgatgattattctccaccgtctaagagaccaaaggccaatgagctaccgcagccaccagtcccggaacccgccaatgctgggaagcggaaagtgagggagttcaacttcgagaaatggaatgctcgcatcactgatctacgtaaacaagttgaagaattgtttgaaaggaaatatgctcaagccataaaagccaaaggtccggtgacgatcccgtaccctcttttccagtctcatgttgaagatctttatgtagaaggacttcctgaaggaattccttttagaaggccatctacttacggaattcctcgcctggagaggatattacttgcaaaggaaaggattcgttttgtgattaagaaacatgagcttctgaattcaacacgtgaagatttacagcttgataagccagcttcaggagtaaaggaagaatggtatgccagaatcactaaattaagaaagatggtggatcagcttttctgcaaaaaatttgcggaagccttggggagcactgaagccaaggctgtaccgtaccaaaaatttgaggcacacccgaatgatctgtacgtggaaggactgccagaaaacattcctttccgaagtccctcatggtatggaatcccaaggctggaaaaaatcattcaagtgggcaatcgaattaaatttgttattaaaagaccagaacttctgactcacagtaccactgaagttactcagccaagaacgaatacaccagtcaaagaagattggaatgtcagaattaccaagctacggaagcaagtggaagagatttttaatttgaaatttgcttagatttgttgacagcggtttcctggagtgctgtcttgagaacgattctgaggaggctcagcaagaaagagtgtttcagttgattgggtgtgtctgtcatggagaaggaactcaagctcttggactcaccgaggcagtaaaagtaccatatcctgtgtttgaatcaaacccggagttcttgtatgtggaaggcttgccagaggggattcccttccgaagccctacctggtttggaattccacgacttgaaaggatcgtccgcgggagtaataaaatcaagttcgttgttaaaaaacctgaactagttatttcctacttgcctcctgggatggctagtaaaataaacactaaagctttgcagtcccccaaaagaccacgaagtcctgggagtaattcaaaggttcctgaaattgaggtcaccgtggaaggccctaataacaacaatcctcaaacctcagctgttcgaaccccgacccagactaacggttctaacgttcccttcaagccacgagggagagagttttcctttgaggcctggaatgccaaaatcacggacctaaaacagaaagttgaaaatctcttcaatgagaaatgtggggaagctcttggccttaaacaagctgtgaaggtgccgttcgcgttatttgagtctttcccggaagacttttatgtggaaggcttacctgagggtgtgccattccgaagaccatcgacttttggcattccgaggctggagaagatactcagaaacaaagccaaaattaagttcatcattaaaaagcccgaaatgtttgagacggcgattaaggagagcacctcctctaagagccctcccagaaaaataaattcatcacccaatgttaatactactgcatcaggtgttgaagaccttaacatcattcaggtgacaattccagatgatgataatgaaagactctcgaaagttgaaaaagctagacagctaagagaacaagtgaatgacctctttagtcggaaatttggtgaagctattggtatgggttttcctgtgaaagttccctacaggaaaatcacaattaaccctggctgtgtggtggttgatggcatgcccccgggggtgtccttcaaagcccccagctacctggaaatcagctccatgagaaggatcttagactctgccgagtttatcaaattcacggtcattagaccatttccaggacttgtgattaataaccagctggttgatcagagtgagtcagaaggccccgtgatacaagaatcagctgaaccaagccagttggaagttccagccacagaagaaataaaagagactgatggaagctctcagatcaagcaagaaccagaccccacgtggtagacctcttccctcctaggagccttgagttacggtgtttattttccaatcaagtgaagatatctcctacttctcctactggaacatctcagcttctgcagtgaagaaaaattcctgtgatagttcagttctttagtttttctatttgaaaaaaaaaaatcatttaaatgatcctttgttcacggctctccttaatgactgagtgaacagttcctatctgtatatttgactaaaccttttcctaagctatctctcatggttcctatgtttttttatcataattaaaagcaaaaccatctggatcacctaacagtcagaggtcagtatctcagcgtgtgaattatagaggaaatacagagagaacctcttccacttttacttttcgtccaaataaaatgcatggtgtaccagaagttgaagatcgggttgaggattggggctagctcgatgacactaaggccccaacatcgcgggacctgctgtggcgcggattcttaggaacgctgttctagccggccccctctccaggggtcgccgtggccggcattatttcctagttcttcttgtaaccctgaggtgccagcgcggggagtgaggaggggtcagggggctaaggatgcaacctctgacgttctgcgccttcctaggagagtcttacatgtgttgagatttcacaagcaatgcgagttgtaaaataccagctctacaagaagctaggctctgtgacggcatagttttcagtagctttatcacaatattcacaatggagaattatatgacatggtagcagaaataggcccttttatgtgttgcttctattttacctcaaattgtagatatagggtaatcaataaaatccatccatgcctttcacacactaagt

SEQ ID NO: 4615 - protein, 454 aa, Homo sapiens; identical to SEQ ID NO: 4239

SEQ ID NO: 4616 - DNA, 8043 bp, Homo sapiens
aaaaaaaaaaaaaaaaaaaaaaaaaaaagaaaaaagaaaaaaaaaaggaggaggaggaggagggtgagagagaagctgggagagcagagaaaaggggccaccggtcgcccccccgcttccccgcacgcgctctccagccgcggccgcccgcctgccgcggtcaccccggcctctgcctctgtcccccagtgatcggatcaaggcgctgagcgaggccctgcctgcggggcggccatgcggcggtgacaggagcgcgaccgacacgcacgggcccctcgccccctctcgcctcccgtccgctcgccagctcccctcagccgaggctgctccgcggcggccgcagcccgcgcgcggcccacactcgcctcccctcggcacccccggccccggagctgcctggaggcggccgcactcggtgtaaagaactggccaagtccaaagccgaagtggcctgcattgcagtgtatgaaacagacgtgtttgtcgtcggaactgaaagaggacgtgcttttgtcaataccagaaaggattttcaaaaagattttgtaaaatattgtgttgaagaagaagaaaaagctgcagagatgcataaaatgaaatctacaacccaggcaaatcggatgagtgtagatgctgtagaaattgaaacactcagaaaaacagttgaggactatttctgcttttgctatgggaaagctttaggcaaatccacagtggtacctgtaccatatgagaagatgctgcgagaccagtcggctgtggtagtgcaggggcttccggaaggtgttgcctttaaacaccccgagaactatgatcttgcaaccctgaaatggattttggagaacaaagcagggatttcattcatcattaagagaccttttttagagccaaagaagcatgtaggtggtcgtgtgatggtaacagatgctgacaggtcaatactatctccaggtggaagttgtggccccatcaaagtgaaaactgaacccacagaagattctggcatttccctggaaatggcagctgtgacagtaaaggaagaatcagaagatcctgattattatcaatataacattcaagcaggcccttctgaaactgatgatgttgatgaaaaacagcccctatcgaagcctttgcaaggaagccaccattcttcagagggcaatgaaggcacagaaatggaagtaccagcagaagattctactcaacatgtcccttcagaaacaagtgaggaccctgaagttgaggtgactattgaagatgatgattattctccaccgtctaagagaccaaaggccaatgagctaccgcagccaccagtcccggaacccgccaatgctgggaagcggaaagtgagggagttcaacttcgagaaatggaatgctcgcatcactgatctacgtaaacaagttgaagaattgtttgaaaggaaatatgctcaagccataaaagccaaaggtccggtgacgatcccgtaccctcttttccagtctcatgttgaagatctttatgtagaaggacttcctgaaggaattccttttagaaggccatctacttacggaattcctcgcctggagaggatattacttgcaaaggaaaggattcgttttgtgattaagaaacatgagcttctgaattcaacacgtgaagatttacagcttgataagccagcttcaggagtaaaggaagaatggtatgccagaatcactaaattaagaaagatggtggatcagcttttctgcaaaaaatttgcggaagccttggggagcactgaagccaaggctgtaccgtaccaaaaatttgaggcacacccgaatgatctgtacgtggaaggactgccagaaaacattcctttccgaagtccctcatggtatggaatcccaaggctggaaaaaatcattcaagtgggcaatcgaattaaatttgttattaaaagaccagaacttctgactcacagtaccactgaagttactcagccaagaacgaatacaccagtcaaagaagattggaatgtcagaattaccaagctacggaagcaagtggaagagatttttaatttgaaatttgcttagatttgttgacagcggtttcctggagtgctgtcttgagaacgattctgaggaggctcagcaagaaagagtgtttcagttgattgggtgtgtctgtcatggagaaggaactcaagctcttggactcaccgaggcagtaaaagtaccatatcctgtgtttgaatcaaacccggagttcttgtatgtggaaggcttgccagaggggattcccttccgaagccctacctggtttggaattccacgacttgaaaggatcgtccgcgggagtaataaaatcaagttcgttgttaaaaaacctgaactagttatttcctacttgcctcctgggatggctagtaaaataaacactaaagctttgcagtcccccaaaagaccacgaagtcctgggagtaattcaaaggttcctgaaattgaggtcaccgtggaaggccctaataacaacaatcctcaaacctcagctgttcgaaccccgacccagactaacggttctaacgttcccttcaagccacgagggagagagttttcctttgaggcctggaatgccaaaatcacggacctaaaacagaaagttgaaaatctcttcaatgagaaatgtggggaagctcttggccttaaacaagctgtgaaggtgccgttcgcgttatttgagtctttcccggaagacttttatgtggaaggcttacctgagggtgtgccattccgaagaccatcgacttttggcattccgaggctggagaagatactcagaaacaaagccaaaattaagttcatcattaaaaagcccgaaatgtttgagacggcgattaaggagagcacctcctctaagagccctcccagaaaaataaattcatcacccaatgttaatactactgcatcaggtgttgaagaccttaacatcattcaggtgacaattccagatgatgataatgaaagactctcgaaagttgaaaaagctagacagctaagagaacaagtgaatgacctctttagtcggaaatttggtgaagctattggtatgggttttcctgtgaaagttccctacaggaaaatcacaattaaccctggctgtgtggtggttgatggcatgcccccgggggtgtccttcaaagcccccagctacctggaaatcagctccatgagaaggatcttagactctgccgagtttatcaaattcacggtcattaggtaagtgagagtttcctgcttagtcacaggagcgaatctggagctcatgaggctgactcttctaaaatgcagccacaggtagtcatcgaatccggcttcctatgctgtgcaatcaacaaatcaaaataacttgtgtcatcattagaatgtcagatgtgcttctacgaactaagctgactcttttaattctttggcaaagggttggcaaactaggactgtttgccaaattcaggctgcctcctatttttagagtcttcctgaaacacagctacacccgtattatccatggctgctttcctgtcacagtgagtaagtagctgggactgagaaggcatggcctccaaagtctaaaatatttactctctagcactttgtagaaaaaccttagctaggcacagtggctaacgcctgtaatcccagcattttgggaggccaaggcaggcagatcacctgaggtcaggagttccagaccagcctggccaacatggtgaaatcccatctctacaaaaataaaacagttagctgggcatgatggcgggtgcctgtaatcccagctactcgggaggctgaggcaggatagtcgcttgaacccaggaggtggaggttgcaatgagccaagatcatgccactgcactccagcctggacgacagagtgagactccatcacaagaaaaaaagaactttgtcaacctctgtcttagggcgccttgtcacaggcttcgggtcagacggattcaaccttgcatcagccatttgttagccaggtcactctgttctttgtctgtaaatgagattgatcgttgttcccactgagagtgtcagctccttcccgtagagcaggcatgatgattgtactcacctctgacaccattgtgagtgccacattccttcccacgtccttgtcactgtaagagatgcccacctgagcaccaaccccaggttatcttcccctttgtcttccagccccccagaaacagctacgactcaacctacccaatcatttcatcatcagattgccactgtctctagttcaggtctcttgggactggcactcagaaatctcataataaatcctcttgaggcttctcatacactcgtcttcttccaatcttctttccctcaaaatctcatattttggttccacttcacccaccgtcattctccatatcactcccaggagttaggcaaaaagccccttccgttcttccgtatgttaaacttagaatcactctgttccctgctctgcgtttctattttttgtttttcctccatttactagtagcttaacactttctaacagtgttcttattattgatacgtatctatctcttccataagcttataaggtcacggataatacttctcattgtagtacgtaaatgacgtgggctagatatgagttgaataaacagttatacctgtaaattcttacagagtgaaaataaattgttatactttacaatttgtttctctctttagaccatttccaggacttgtgattaataaccgtgagtattttgtgaagtgttttgtttttgttttttcctggggtctgacgtgtgtgcgtgtgagtgtgtatacatgcttaacgtatatcacgttacttcacctatgtcagtaaccaggccaaatacttgttttagccctcagtaaaaacaccaggcacttcctagttgtaaaattattcaagcttcttaacttcctatcctcgatgcacttaatcataaaatggtaataatagcaccgattttgggggagtcgttccagtagatggaaagcatctggaacaggtgtcagcaagctcctgccgacgtgtatgcataaagttttattgaaaccaccatcgtgtccatttgtttatggcagaactgagagatggcagcagcaagtgtgtgcctgcaaaacctaaaatatttactaattggctctgcaagaaaagagtttgcatccccctaacctagaacagtgtctagcctctagtatgtgtttagcctacagtatgtgctcagcgaatacaatctatatttattactgcttttatgactgttataattactgtgcttggatttcgttacaaagtaagtcacaatgtgcctgcttctgttagtatttcagcacagtgcctggcacacatggggctctcaaatattgctgagcgagtgaacaaatgtcctttcaattccttaacgttgatgtcattttcaatagtattttgagccaaacttaattttgcgagtgtgttttgttttcttaactttattattaaaaatgtataaaagtgaggccaggcgtggtggctcacgcctgtaatcccagcagtttgggaggctgaggcaggcggatcagttgaggttgggagttggagaccagcccgtccaacatggtgaaagcctgtctctactaaaaatacaaaaatcagctgggtgtggtggcgcgtgcctgtaatcccagctactcaggaggctgaggcaggagagttgcttgaatcctagaggtggaggttgcagtgagctgagatcgtgccattgcactccagcctgggcaacaagagcaaaactctgtcccaataaataaataaataaaatgttctcttttgttcctgttcttgtgcggtagtgtggtatagagttttatggtaattactgtgaattagtgattctgagggacatatcagaactctgaggtttgtttccttctcatcttgagggaaacagcaaatgtatgttaaaatgcttttccaagggaacaacacatccttacattatttaaaccaatctgcttcattttcagagctggttgatcagagtgagtcagaaggccccgtgatacaagaatcagctgaaccaagccagttggaagttccagccacagaagaaataaaagagactgatggaagctctcagatcaagcaagaaccagaccccacgtggtagacctcttccctcctagggtaaatcagcttctgtgtcagggatgctgtgtggtgtccatctgaaccccctgcatacgcgtagctaatgtgatctccccactttcacataagatggtggccctgccttcagggaatgtgggagccaggtgggagccttcccggatatttaagctagaagattctacagggagattctccttggatcaatatatgtctctcagtcaaagatgtaaaagcacttttgccttaaaaagaatgttctgtttctaaatagagtcaacgttgtcctcctcattggaattcactatgagtcagaatcattagactgacttttttttttccatagtaatagtattttgcagagtctcacagagctgcagatcttttgttcatcttgcagagttaacaagtctgatcctgttagtccagatttcttaaatttggccaagttataataggagcagtagcttgagacccgaagtcaggaaactttgacaatggatttttttttttaatccagagacttgtactggaatttgccttaccctgtcagctcatggacttaaggtttcatcccgctttatgagtgcttctgaatccaagtcattgttacctgaatttgcaaattaagttgtgatattcgtgactgttaaattcctgtaattagattaacctctttgcttgcttgtttgttttctctcctattttagcttaaagtatcagtggttgagaagagcttttcggacctgttactaccccaagctgtgtaatatacttgtataacagaaataccttctatacaaacctttttttctacttttagatagaaatgtctactttttcagcagttctgtgaattaaagagcagagtgactgtgggtctggaatggctggtgtacttgggaatgtactatcaggattttacagcaatgctgggaaatgacagggaaaatgacaggaatgaatctcaccagattttttatgtactcagcagagccttgagttacggtgtttattttccaatcaagtgaagatatctcctacttctcctactggaacatctcagcttctgcagtgaagaaaaattcctgtgatagttcagttctttagtttttctatttgaaaaaaaaaaatcatttaaatgatcctttgttcacggctctccttaatgactgagtgaacagttcctatctgtatatttgactaaaccttttcctaagctatctctcatggttcctatgtttttttatcataattaaaagcaaaaccatctggatcacctaacagtcagaggtcagtatctcagcgtgtgaattatagaggaaatacagagagaacctcttccacttttacttttcgtccaaataaaatgcatggtgtaccagaagttgaagatcgggttgaggattggggctagctcgatgacactaaggccccaacatcgcgggacctgctgtggcgcggattcttaggaacgctgttctagccggccccctctccaggggtcgccgtggccggcattatttcctagttcttcttgtaaccctgaggtgccagcgcggggagtgaggaggggtcagggggctaaggatgcaacctctgacgttctgcgccttcctaggagagtcttacatgtgttgagatttcacaagcaatgcgagttgtaaaataccagctctacaagaagctaggctctgtgacggcatagttttcagtagctttatcacaatattcacaatggagaattatatgacatggtagcagaaataggcccttttatgtgttgcttctattttacctcaaattgtagatatagggtaatcaataaaatccatccatgcctttcacacactaagt

SEQ ID NO: 4617 - protein, 495 aa, Homo sapiens; identical to SEQ ID NO: 4057

SEQ ID NO: 4618 - DNA, 7343 bp, Homo sapiens
aaaaaaaaaaaaaaaaaaaaaaaaaaaagaaaaaagaaaaaaaaaaggaggaggaggaggagggtgagagagaagctgggagagcagagaaaaggggccaccggtcgcccccccgcttccccgcacgcgctctccagccgcggccgcccgcctgccgcggtcaccccggcctctgcctctgtcccccagtgatcggatcaaggcgctgagcgaggccctgcctgcggggcggccatgcggcggtgacaggagcgcgaccgacacgcacgggcccctcgccccctctcgcctcccgtccgctcgccagctcccctcagccgaggctgctccgcggcggccgcagcccgcgcgcggcccacactcgcctcccctcggcacccccggccccggagctgcctggaggcggccgcactcggggatcatggcccaagttgcaatgtccaccctccccgttgaagatgaggagtcctcggagagcaggatggtggtgacattcctcatgtcagctctcgagtccatgtgtaaagaactggccaagtccaaagccgaagtggcctgcattgcagtgtatgaaacagacgtgtttgtcgtcggaactgaaagaggacgtgcttttgtcaataccagaaaggattttcaaaaagattttgtaaaatattgtgttgaagaagaagaaaaagctgcagagatgcataaaatgaaatctacaacccaggcaaatcggatgagtgtagatgctgtagaaattgaaacactcagaaaaacagttgaggactatttctgcttttgctatgggaaagctttaggcaaatccacagtggtacctgtaccatatgagaagatgctgcgagaccagtcggctgtggtagtgcaggggcttccggaaggtgttgcctttaaacaccccgagaactatgatcttgcaaccctgaaatggattttggagaacaaagcagggatttcattcatcattaagagaccttttttagagccaaagaagcatgtaggtggtcgtgtgatggtaacagatgctgacaggtcaatactatctccaggtggaagttgtggccccatcaaagtgaaaactgaacccacagaagattctggcatttccctggaaatggcagctgtgacagtaaaggaagaatcagaagatcctgattattatcaatataacattcaagcaggcccttctgaaactgatgatgttgatgaaaaacagcccctatcgaagcctttgcaaggaagccaccattcttcagagggcaatgaaggcacagaaatggaagtaccagcagaagattctactcaacatgtcccttcagaaacaagtgaggaccctgaagttgaggtgactattgaagatgatgattattctccaccgtctaagagaccaaaggccaatgagctaccgcagccaccagtcccggaacccgccaatgctgggaagcggaaagtgagggagttcaacttcgagaaatggaatgctcgcatcactgatctacgtaaacaagttgaagaattgtttgaaaggaaatatgctcaagccataaaagccaaaggtccggtgacgatcccgtaccctcttttccagtctcatgttgaagatctttatgtagaaggacttcctgaaggaattccttttagaaggccatctacttacggaattcctcgcctggagaggatattacttgcaaaggaaaggattcgttttgtgattaagaaacatgagcttctgaattcaacacgtgaagatttacagcttgataagccagcttcaggagtaaaggaagaatggtatgccagaatcactaaattaagaaagatggtggatcagcttttctgcaaaaaatttgcggaagccttggggagcactgaagccaaggctgtaccgtaccaaaaatttgaggcacacccgaatgatctgtacgtggaaggactgccagaaaacattcctttccgaagtccctcatggtatggaatcccaaggctggaaaaaatcattcaagtgggcaatcgaattaaatttgttattaaaagaccagaacttctgactcacagtaccactgaagttactcagccaagaacgaatacaccagtcaaagaagattggaatgtcagaattaccaagctacggaagcaagtggaagagatttttaatttgaaatttgctcaagctcttggactcaccgaggcagtaaaagtaccatatcctgtgtttgaatcaaacccggagttcttgtatgtggaaggcttgccagaggggattcccttccgaagccctacctggtttggaattccacgacttgaaaggatcgtccgcgggagtaataaaatcaagttcgttgttaaaaaacctgaactagttatttcctacttgcctcctgggatggctagtaaaataaacactaaagctttgcagtcccccaaaagaccacgaagtcctgggagtaattcaaaggttcctgaaattgaggtcaccgtggaaggccctaataacaacaatcctcaaacctcagctgttcgaaccccgacccagactaacggttctaacgttcccttcaagccacgagggagagagttttcctttgaggcctggaatgccaaaatcacggacctaaaacagaaagttgaaaatctcttcaatgagaaatgtggggaagctcttggccttaaacaagctgtgaaggtgccgttcgcgttatttgagtctttcccggaagacttttatgtggaaggcttacctgagggtgtgccattccgaagaccatcgacttttggcattccgaggctggagaagatactcagaaacaaagccaaaattaagttcatcattaaaaagcccgaaatgtttgagacggcgattaaggagagcacctcctctaagagccctcccagaaaaataaattcatcacccaatgttaatactactgcatcaggtgttgaagaccttaacatcattcaggtgacaattccagatgatgataatgaaagactctcgaaagttgaaaaagctagacagctaagagaacaagtgaatgacctctttagtcggaaatttggtgaagctattggtatgggttttcctgtgaaagttccctacaggaaaatcacaattaaccctggctgtgtggtggttgatggcatgcccccgggggtgtccttcaaagcccccagctacctggaaatcagctccatgagaaggatcttagactctgccgagtttatcaaattcacggtcattaggtaagtgagagtttcctgcttagtcacaggagcgaatctggagctcatgaggctgactcttctaaaatgcagccacaggtagtcatcgaatccggcttcctatgctgtgcaatcaacaaatcaaaataacttgtgtcatcattagaatgtcagatgtgcttctacgaactaagctgactcttttaattctttggcaaagggttggcaaactaggactgtttgccaaattcaggctgcctcctatttttagagtcttcctgaaacacagctacacccgtattatccatggctgctttcctgtcacagtgagtaagtagctgggactgagaaggcatggcctccaaagtctaaaatatttactctctagcactttgtagaaaaaccttagctaggcacagtggctaacgcctgtaatcccagcattttgggaggccaaggcaggcagatcacctgaggtcaggagttccagaccagcctggccaacatggtgaaatcccatctctacaaaaataaaacagttagctgggcatgatggcgggtgcctgtaatcccagctactcgggaggctgaggcaggatagtcgcttgaacccaggaggtggaggttgcaatgagccaagatcatgccactgcactccagcctggacgacagagtgagactccatcacaagaaaaaaagaactttgtcaacctctgtcttagggcgccttgtcacaggcttcgggtcagacggattcaaccttgcatcagccatttgttagccaggtcactctgttctttgtctgtaaatgagattgatcgttgttcccactgagagtgtcagctccttcccgtagagcaggcatgatgattgtactcacctctgacaccattgtgagtgccacattccttcccacgtccttgtcactgtaagagatgcccacctgagcaccaaccccaggttatcttcccctttgtcttccagccccccagaaacagctacgactcaacctacccaatcatttcatcatcagattgccactgtctctagttcaggtctcttgggactggcactcagaaatctcataataaatcctcttgaggcttctcatacactcgtcttcttccaatcttctttccctcaaaatctcatattttggttccacttcacccaccgtcattctccatatcactcccaggagttaggcaaaaagccccttccgttcttccgtatgttaaacttagaatcactctgttccctgctctgcgtttctattttttgtttttcctccatttactagtagcttaacactttctaacagtgttcttattattgatacgtatctatctcttccataagcttataaggtcacggataatacttctcattgtagtacgtaaatgacgtgggctagatatgagttgaataaacagttatacctgtaaattcttacagagtgaaaataaattgttatactttacaatttgtttctctctttagaccatttccaggacttgtgattaataaccgtgagtattttgtgaagtgttttgtttttgttttttcctggggtctgacgtgtgtgcgtgtgagtgtgtatacatgcttaacgtatatcacgttacttcacctatgtcagtaaccaggccaaatacttgttttagccctcagtaaaaacaccaggcacttcctagttgtaaaattattcaagcttcttaacttcctatcctcgatgcacttaatcataaaatggtaataatagcaccgattttgggggagtcgttccagtagatggaaagcatctggaacaggtgtcagcaagctcctgccgacgtgtatgcataaagttttattgaaaccaccatcgtgtccatttgtttatggcagaactgagagatggcagcagcaagtgtgtgcctgcaaaacctaaaatatttactaattggctctgcaagaaaagagtttgcatccccctaacctagaacagtgtctagcctctagtatgtgtttagcctacagtatgtgctcagcgaatacaatctatatttattactgcttttatgactgttataattactgtgcttggatttcgttacaaagtaagtcacaatgtgcctgcttctgttagtatttcagcacagtgcctggcacacatggggctctcaaatattgctgagcgagtgaacaaatgtcctttcaattccttaacgttgatgtcattttcaatagtattttgagccaaacttaattttgcgagtgtgttttgttttcttaactttattattaaaaatgtataaaagtgaggccaggcgtggtggctcacgcctgtaatcccagcagtttgggaggctgaggcaggcggatcagttgaggttgggagttggagaccagcccgtccaacatggtgaaagcctgtctctactaaaaatacaaaaatcagctgggtgtggtggcgcgtgcctgtaatcccagctactcaggaggctgaggcaggagagttgcttgaatcctagaggtggaggttgcagtgagctgagatcgtgccattgcactccagcctgggcaacaagagcaaaactctgtcccaataaataaataaataaaatgttctcttttgttcctgttcttgtgcggtagtgtggtatagagttttatggtaattactgtgaattagtgattctgagggacatatcagaactctgaggtttgtttccttctcatcttgagggaaacagcaaatgtatgttaaaatgcttttccaagggaacaacacatccttacattatttaaaccaatctgcttcattttcagagctggttgatcagagtgagtcagaaggccccgtgatacaagaatcagctgaaccaagccagttggaagttccagccacagaagaaataaaagagactgatggaagctctcagatcaagcaagaaccagaccccacgtggtagacctcttccctcctaggcttaaagtatcagtggttgagaagagcttttcggacctgttactaccccaagctgtgtaatatacttgtataacagaaataccttctatacaaacctttttttctacttttagatagaaatgtctactttttcagcagttctgtgaattaaagagcagagtgactgtgggtctggaatggctggtgtacttgggaatgtactatcaggattttacagcaatgctgggaaatgacagggaaaatgacaggaatgaatctcaccagattttttatgtactcagcagagccttgagttacggtgtttattttccaatcaagtgaagatatctcctacttctcctactggaacatctcagcttctgcagtgaagaaaaattcctgtgatagttcagttctttagtttttctatttgaaaaaaaaaaatcatttaaatgatcctttgttcacggctctccttaatgactgagtgaacagttcctatctgtatatttgactaaaccttttcctaagctatctctcatggttcctatgtttttttatcataattaaaagcaaaaccatctggatcacctaacagtcagaggtcagtatctcagcgtgtgaattatagaggaaatacagagagaacctcttccacttttacttttcgtccaaataaaatgcatggtgtaccagaagttgaagatcgggttgaggattggggctagctcgatgacactaaggccccaacatcgcgggacctgctgtggcgcggattcttaggaacgctgttctagccggccccctctccaggggtcgccgtggccggcattatttcctagttcttcttgtaaccctgaggtgccagcgcggggagtgaggaggggtcagggggctaaggatgcaacctctgacgttctgcgccttcctaggagagtcttacatgtgttgagatttcacaagcaatgcgagttgtaaaataccagctctacaagaagctaggctctgtgacggcatagttttcagtagctttatcacaatattcacaatggagaattatatgacatggtagcagaaataggcccttttatgtgttgcttctattttacctcaaattgtagatatagggtaatcaataaaatccatccatgcctttcacacactaagt

SEQ ID NO: 4619 - protein, 942 aa, Homo sapiens
MAQVAMSTLPVEDEESSESRMVVTFLMSALESMCKELAKSKAEVACIAVYETDVFVVGTERGRAFVNTRKDFQKDFVKYCVEEEEKAAEMHKMKSTTQANRMSVDAVEIETLRKTVEDYFCFCYGKALGKSTVVPVPYEKMLRDQSAVVVQGLPEGVAFKHPENYDLATLKWILENKAGISFIIKRPFLEPKKHVGGRVMVTDADRSILSPGGSCGPIKVKTEPTEDSGISLEMAAVTVKEESEDPDYYQYNIQAGPSETDDVDEKQPLSKPLQGSHHSSEGNEGTEMEVPAEDSTQHVPSETSEDPEVEVTIEDDDYSPPSKRPKANELPQPPVPEPANAGKRKVREFNFEKWNARITDLRKQVEELFERKYAQAIKAKGPVTIPYPLFQSHVEDLYVEGLPEGIPFRRPSTYGIPRLERILLAKERIRFVIKKHELLNSTREDLQLDKPASGVKEEWYARITKLRKMVDQLFCKKFAEALGSTEAKAVPYQKFEAHPNDLYVEGLPENIPFRSPSWYGIPRLEKIIQVGNRIKFVIKRPELLTHSTTEVTQPRTNTPVKEDWNVRITKLRKQVEEIFNLKFAQALGLTEAVKVPYPVFESNPEFLYVEGLPEGIPFRSPTWFGIPRLERIVRGSNKIKFVVKKPELVISYLPPGMASKINTKALQSPKRPRSPGSNSKVPEIEVTVEGPNNNNPQTSAVRTPTQTNGSNVPFKPRGREFSFEAWNAKITDLKQKVENLFNEKCGEALGLKQAVKVPFALFESFPEDFYVEGLPEGVPFRRPSTFGIPRLEKILRNKAKIKFIIKKPEMFETAIKESTSSKSPPRKINSSPNVNTTASGVEDLNIIQVTIPDDDNERLSKVEKARQLREQVNDLFSRKFGEAIGMGFPVKVPYRKITINPGCVVVDGMPPGVSFKAPSYLEISSMRRILDSAEFIKFTVIR

SEQ ID NO: 4620 - DNA, 7760 bp, Homo sapiens
aaaaaaaaaaaaaaaaaaaaaaaaaaaagaaaaaagaaaaaaaaaaggaggaggaggaggagggtgagagagaagctgggagagcagagaaaaggggccaccggtcgcccccccgcttccccgcacgcgctctccagccgcggccgcccgcctgccgcggtcaccccggcctctgcctctgtcccccagtgatcggatcaaggcgctgagcgaggccctgcctgcggggcggccatgcggcggtgacaggagcgcgaccgacacgcacgggcccctcgccccctctcgcctcccgtccgctcgccagctcccctcagccgaggctgctccgcggcggccgcagcccgcgcgcggcccacactcgcctccccgttgaagatgaggagtcctcggagagcaggatggtggtgacattcctcatgtcagctctcgagtccatgtgtaaagaactggccaagtccaaagccgaagtggcctgcattgcagtgtatgaaacagacgtgtttgtcgtcggaactgaaagaggacgtgcttttgtcaataccagaaaggattttcaaaaagattttgtaaaatattgtgttgaagaagaagaaaaagctgcagagatgcataaaatgaaatctacaacccaggcaaatcggatgagtgtagatgctgtagaaattgaaacactcagaaaaacagttgaggactatttctgcttttgctatgggaaagctttaggcaaatccacagtggtacctgtaccatatgagaagatgctgcgagaccagtcggctgtggtagtgcaggggcttccggaaggtgttgcctttaaacaccccgagaactatgatcttgcaaccctgaaatggattttggagaacaaagcagggatttcattcatcattaagagaccttttttagagccaaagaagcatgtaggtggtcgtgtgatggtaacagatgctgacaggtcaatactatctccaggtggaagttgtggccccatcaaagtgaaaactgaacccacagaagattctggcatttccctggaaatggcagctgtgacagtaaaggaagaatcagaagatcctgattattatcaatataacattcaaggaagccaccattcttcagagggcaatgaaggcacagaaatggaagtaccagcagaagatgatgattattctccaccgtctaagagaccaaaggccaatgagctaccgcagccaccagtcccggaacccgccaatgctgggaagcggaaagtgagggagttcaacttcgagaaatggaatgctcgcatcactgatctacgtaaacaagttgaagaattgtttgaaaggaaatatgctcaagccataaaagccaaaggtccggtgacgatcccgtaccctcttttccagtctcatgttgaagatctttatgtagaaggacttcctgaaggaattccttttagaaggccatctacttacggaattcctcgcctggagaggatattacttgcaaaggaaaggattcgttttgtgattaagaaacatgagcttctgaattcaacacgtgaagatttacagcttgataagccagcttcaggagtaaaggaagaatggtatgccagaatcactaaattaagaaagatggtggatcagcttttctgcaaaaaatttgcggaagccttggggagcactgaagccaaggctgtaccgtaccaaaaatttgaggcacacccgaatgatctgtacgtggaaggactgccagaaaacattcctttccgaagtccctcatggtatggaatcccaaggctggaaaaaatcattcaagtgggcaatcgaattaaatttgttattaaaagaccagaacttctgactcacagtaccactgaagttactcagccaagaacgaatacaccagctcaagctcttggactcaccgaggcagtaaaagtaccatatcctgtgtttgaatcaaacccggagttcttgtatgtggaaggcttgccagaggggattcccttccgaagccctacctggtttggaattccacgacttgaaaggatcgtccgcgggagtaataaaatcaagttcgttgttaaaaaacctgaactagttatttcctacttgcctcctgggatggctagtaaaataaacactaaagctttgcagtcccccaaaagaccacgaagtcctgggagtaattcaaaggttcctgaaattgaggtcaccgtggaaggccctaataacaacaatcctcaaacctcagctgttcgaaccccgacccagactaacggttctaacgttcccttcaagccacgagggagagagttttcctttgaggcctggaatgccaaaatcacggacctaaaacagaaagttgaaaatctcttcaatgagaaatgtggggaagctcttggccttaaacaagctgtgaaggtgccgttcgcgttatttgagtctttcccggaagacttttatgtggaaggcttacctgagggtgtgccattccgaagaccatcgacttttggcattccgaggctggagaagatactcagaaacaaagccaaaattaagttcatcattaaaaagcccgaaatgtttgagacggcgattaaggagagcacctcctctaagagccctcccagaaaaataaattcatcacccaatgttaatactactgcatcaggtgttgaagaccttaacatcattcaggtgacaattccagatgatgataatgaaagactctcgaaagttgaaaaagctagacagctaagagaacaagtgaatgacctctttagtcggaaatttggtgaagctattggtatgggttttcctgtgaaagttccctacaggaaaatcacaattaaccctggctgtgtggtggttgatggcatgcccccgggggtgtccttcaaagcccccagctacctggaaatcagctccatgagaaggatcttagactctgccgagtttatcaaattcacggtcattaggtaagtgagagtttcctgcttagtcacaggagcgaatctggagctcatgaggctgactcttctaaaatgcagccacaggtagtcatcgaatccggcttcctatgctgtgcaatcaacaaatcaaaataacttgtgtcatcattagaatgtcagatgtgcttctacgaactaagctgactcttttaattctttggcaaagggttggcaaactaggactgtttgccaaattcaggctgcctcctatttttagagtcttcctgaaacacagctacacccgtattatccatggctgctttcctgtcacagtgagtaagtagctgggactgagaaggcatggcctccaaagtctaaaatatttactctctagcactttgtagaaaaaccttagctaggcacagtggctaacgcctgtaatcccagcattttgggaggccaaggcaggcagatcacctgaggtcaggagttccagaccagcctggccaacatggtgaaatcccatctctacaaaaataaaacagttagctgggcatgatggcgggtgcctgtaatcccagctactcgggaggctgaggcaggatagtcgcttgaacccaggaggtggaggttgcaatgagccaagatcatgccactgcactccagcctggacgacagagtgagactccatcacaagaaaaaaagaactttgtcaacctctgtcttagggcgccttgtcacaggcttcgggtcagacggattcaaccttgcatcagccatttgttagccaggtcactctgttctttgtctgtaaatgagattgatcgttgttcccactgagagtgtcagctccttcccgtagagcaggcatgatgattgtactcacctctgacaccattgtgagtgccacattccttcccacgtccttgtcactgtaagagatgcccacctgagcaccaaccccaggttatcttcccctttgtcttccagccccccagaaacagctacgactcaacctacccaatcatttcatcatcagattgccactgtctctagttcaggtctcttgggactggcactcagaaatctcataataaatcctcttgaggcttctcatacactcgtcttcttccaatcttctttccctcaaaatctcatattttggttccacttcacccaccgtcattctccatatcactcccaggagttaggcaaaaagccccttccgttcttccgtatgttaaacttagaatcactctgttccctgctctgcgtttctattttttgtttttcctccatttactagtagcttaacactttctaacagtgttcttattattgatacgtatctatctcttccataagcttataaggtcacggataatacttctcattgtagtacgtaaatgacgtgggctagatatgagttgaataaacagttatacctgtaaattcttacagagtgaaaataaattgttatactttacaatttgtttctctctttagaccatttccaggacttgtgattaataaccgtgagtattttgtgaagtgttttgtttttgttttttcctggggtctgacgtgtgtgcgtgtgagtgtgtatacatgcttaacgtatatcacgttacttcacctatgtcagtaaccaggccaaatacttgttttagccctcagtaaaaacaccaggcacttcctagttgtaaaattattcaagcttcttaacttcctatcctcgatgcacttaatcataaaatggtaataatagcaccgattttgggggagtcgttccagtagatggaaagcatctggaacaggtgtcagcaagctcctgccgacgtgtatgcataaagttttattgaaaccaccatcgtgtccatttgtttatggcagaactgagagatggcagcagcaagtgtgtgcctgcaaaacctaaaatatttactaattggctctgcaagaaaagagtttgcatccccctaacctagaacagtgtctagcctctagtatgtgtttagcctacagtatgtgctcagcgaatacaatctatatttattactgcttttatgactgttataattactgtgcttggatttcgttacaaagtaagtcacaatgtgcctgcttctgttagtatttcagcacagtgcctggcacacatggggctctcaaatattgctgagcgagtgaacaaatgtcctttcaattccttaacgttgatgtcattttcaatagtattttgagccaaacttaattttgcgagtgtgttttgttttcttaactttattattaaaaatgtataaaagtgaggccaggcgtggtggctcacgcctgtaatcccagcagtttgggaggctgaggcaggcggatcagttgaggttgggagttggagaccagcccgtccaacatggtgaaagcctgtctctactaaaaatacaaaaatcagctgggtgtggtggcgcgtgcctgtaatcccagctactcaggaggctgaggcaggagagttgcttgaatcctagaggtggaggttgcagtgagctgagatcgtgccattgcactccagcctgggcaacaagagcaaaactctgtcccaataaataaataaataaaatgttctcttttgttcctgttcttgtgcggtagtgtggtatagagttttatggtaattactgtgaattagtgattctgagggacatatcagaactctgaggtttgtttccttctcatcttgagggaaacagcaaatgtatgttaaaatgcttttccaagggaacaacacatccttacattatttaaaccaatctgcttcattttcagagctggttgatcagagtgagtcagaaggccccgtgatacaagaatcagctgaaccaagccagttggaagttccagccacagaagaaataaaagagactgatggaagctctcagatcaagcaagaaccagaccccacgtggtagacctcttccctcctagggtaaatcagcttctgtgtcagggatgctgtgtggtgtccatctgaaccccctgcatacgcgtagctaatgtgatctccccactttcacataagatggtggccctgccttcagggaatgtgggagccaggtgggagccttcccggatatttaagctagaagattctacagggagattctccttggatcaatatatgtctctcagtcaaagatgtaaaagcacttttgccttaaaaagaatgttctgtttctaaatagagtcaacgttgtcctcctcattggaattcactatgagtcagaatcattagactgacttttttttttccatagtaatagtattttgcagagtctcacagagctgcagatcttttgttcatcttgcagagttaacaagtctgatcctgttagtccagatttcttaaatttggccaagttataataggagcagtagcttgagacccgaagtcaggaaactttgacaatggatttttttttttaatccagagacttgtactggaatttgccttaccctgtcagctcatggacttaaggtttcatcccgctttatgagtgcttctgaatccaagtcattgttacctgaatttgcaaattaagttgtgatattcgtgactgttaaattcctgtaattagattaacctctttgcttgcttgtttgttttctctcctattttagcttaaagtatcagtggttgagaagagcttttcggacctgttactaccccaagctgtgtaatatacttgtataacagaaataccttctatacaaacctttttttctacttttagatagaaatgtctactttttcagcagttctgtgaattaaagagcagagtgactgtgggtctggaatggctggtgtacttgggaatgtactatcaggattttacagcaatgctgggaaatgacagggaaaatgacaggaatgaatctcaccagattttttatgtactcagcagagccttgagttacggtgtttattttccaatcaagtgaagatatctcctacttctcctactggaacatctcagcttctgcagtgaagaaaaattcctgtgatagttcagttctttagtttttctatttgaaaaaaaaaaatcatttaaatgatcctttgttcacggctctccttaatgactgagtgaacagttcctatctgtatatttgactaaaccttttcctaagctatctctcatggttcctatgtttttttatcataattaaaagcaaaaccatctggatcacctaacagtcagaggtcagtatctcagcgtgtgaattatagaggaaatacagagagaacctcttccacttttacttttcgtccaaataaaatgcatggtgtaccagaagttgaagatcgggttgaggattggggctagctcgatgacactaaggccccaacatcgcgggacctgctgtggcgcggattcttaggaacgctgttctagccggccccctctccaggggtcgccgtggccggcattatttcctagttcttcttgtaaccctgaggtgccagcgcggggagtgaggaggggtcagggggctaaggatgcaacctctgacgttctgcgccttcctaggagagtcttacatgtgttgagatttcacaagcaatgcgagttgtaaaataccagctctacaagaagctaggctctgtgacggcatagttttcagtagctttatcacaatattcacaatggagaattatatgacatggtagcagaaataggcccttttatgtgttgcttctattttacctcaaattgtagatatagggtaatcaataaaatccatccatgcctttcacacactaagt

SEQ ID NO: 4621 - protein, 857 aa, Homo sapiens; identical to SEQ ID NO: 4049

SEQ ID NO: 4622 - DNA, 5142 bp, Homo sapiens
aaaaaaaaaaaaaaaaaaaaaaaaaaaagaaaaaagaaaaaaaaaaggaggaggaggaggagggtgagagagaagctgggagagcagagaaaaggggccaccggtcgcccccccgcttccccgcacgcgctctccagccgcggccgcccgcctgccgcggtcaccccggcctctgcctctgtcccccagtgatcggatcaaggcgctgagcgaggccctgcctgcggggcggccatgcggcggtgacaggagcgcgaccgacacgcacgggcccctcgccccctctcgcctcccgtccgctcgccagctcccctcagccgaggctgctccgcggcggccgcagcccgcgcgcggcccacactcgcctcccctcggcacccccggccccggagctgcctggaggcggccgcactcggggatcatggcccaagttgcaatgtccaccctccccgttgaagatgaggagtcctcggagagcaggatggtggtgacattcctcatgtcagctctcgagtccatgtgtaaagaactggccaagtccaaagccgaagtggcctgcattgcagtgtatgaaacagacgtgtttgtcgtcggaactgaaagaggacgtgcttttgtcaataccagaaaggattttcaaaaagattttgtaaaatattgtgttgaagaagaagaaaaagctgcagagatgcataaaatgaaatctacaacccaggcaaatcggatgagtgtagatgctgtagaaattgaaacactcagaaaaacagttgaggactatttctgcttttgctatgggaaagctttaggcaaatccacagtggtacctgtaccatatgagaagatgctgcgagaccagtcggctgtggtagtgcaggggcttccggaaggtgttgcctttaaacaccccgagaactatgatcttgcaaccctgaaatggattttggagaacaaagcagggatttcattcatcattaagagaccttttttagagccaaagaagcatgtaggtggtcgtgtgatggtaacagatgctgacaggtcaatactatctccaggtggaagttgtggccccatcaaagtgaaaactgaacccacagaagattctggcatttccctggaaatggcagctgtgacagtaaaggaagaatcagaagatcctgattattatcaatataacattcaaggaagccaccattcttcagagggcaatgaaggcacagaaatggaagtaccagcagaagattctactcaacatgtcccttcagaaacaagtgaggaccctgaagttgaggtgactattgaagatgatgattattctccaccgtctaagagaccaaaggccaatgagctaccgcagccaccagtcccggaacccgccaatgctgggaagcggaaagtgagggagttcaacttcgagaaatggaatgctcgcatcactgatctacgtaaacaagttgaagaattgtttgaaaggaaatatgctcaagccataaaagccaaaggtccggtgacgatcccgtaccctcttttccagtctcatgttgaagatctttatgtagaaggacttcctgaaggaattccttttagaaggccatctacttacggaattcctcgcctggagaggatattacttgcaaaggaaaggattcgttttgtgattaagaaacatgagcttctgaattcaacacgtgaagatttacagcttgataagccagcttcaggagtaaaggaagaatggtatgccagaatcactaaattaagaaagatggtggatcagcttttctgcaaaaaatttgcggaagccttggggagcactgaagccaaggctgtaccgtaccaaaaatttgaggcacacccgaatgatctgtacgtggaaggactgccagaaaacattcctttccgaagtccctcatggtatggaatcccaaggctggaaaaaatcattcaagtgggcaatcgaattaaatttgttattaaaagaccagaacttctgactcacagtaccactgaagttactcagccaagaacgaatacaccagctcaagctcttggactcaccgaggcagtaaaagtaccatatcctgtgtttgaatcaaacccggagttcttgtatgtggaaggcttgccagaggggattcccttccgaagccctacctggtttggaattccacgacttgaaaggatcgtccgcgggagtaataaaatcaagttcgttgttaaaaaacctgaactagttatttcctacttgcctcctgggatggctagtaaaataaacactaaagctttgcagtcccccaaaagaccacgaagtcctgggagtaattcaaaggttcctgaaattgaggtcaccgtggaaggccctaataacaacaatcctcaaacctcagctgttcgaaccccgacccagactaacggttctaacgttcccttcaagccacgagggagagagttttcctttgaggcctggaatgccaaaatcacggacctaaaacagaaagttgaaaatctcttcaatgagaaatgtggggaagctcttggccttaaacaagctgtgaaggtgccgttcgcgttatttgagtctttcccggaagacttttatgtggaaggcttacctgagggtgtgccattccgaagaccatcgacttttggcattccgaggctggagaagatactcagaaacaaagccaaaattaagttcatcattaaaaagcccgaaatgtttgagacggcgattaaggagagcacctcctctaagagccctcccagaaaaataaattcatcacccaatgttaatactactgcatcaggtgttgaagaccttaacatcattcaggtgacaattccagatgatgataatgaaagactctcgaaagttgaaaaagctagacagctaagagaacaagtgaatgacctctttagtcggaaatttggtgaagctattggtatgggttttcctgtgaaagttccctacaggaaaatcacaattaaccctggctgtgtggtggttgatggcatgcccccgggggtgtccttcaaagcccccagctacctggaaatcagctccatgagaaggatcttagactctgccgagtttatcaaattcacggtcattagaccatttccaggacttgtgattaataaccagctggttgatcagagtgagtcagaaggccccgtgatacaagaatcagctgaaccaagccagttggaagttccagccacagaagaaataaaagagactgatggaagctctcagatcaagcaagaaccagaccccacgtggtagacctcttccctcctagggtaaatcagcttctgtgtcagggatgctgtgtggtgtccatctgaaccccctgcatacgcgtagctaatgtgatctccccactttcacataagatggtggccctgccttcagggaatgtgggagccaggtgggagccttcccggatatttaagctagaagattctacagggagattctccttggatcaatatatgtctctcagtcaaagatgtaaaagcacttttgccttaaaaagaatgttctgtttctaaatagagtcaacgttgtcctcctcattggaattcactatgagtcagaatcattagactgacttttttttttccatagtaatagtattttgcagagtctcacagagctgcagatcttttgttcatcttgcagagttaacaagtctgatcctgttagtccagatttcttaaatttggccaagttataataggagcagtagcttgagacccgaagtcaggaaactttgacaatggatttttttttttaatccagagacttgtactggaatttgccttaccctgtcagctcatggacttaaggtttcatcccgctttatgagtgcttctgaatccaagtcattgttacctgaatttgcaaattaagttgtgatattcgtgactgttaaattcctgtaattagattaacctctttgcttgcttgtttgttttctctcctattttagcttaaagtatcagtggttgagaagagcttttcggacctgttactaccccaagctgtgtaatatacttgtataacagaaataccttctatacaaacctttttttctacttttagatagaaatgtctactttttcagcagttctgtgaattaaagagcagagtgactgtgggtctggaatggctggtgtacttgggaatgtactatcaggattttacagcaatgctgggaaatgacagggaaaatgacaggaatgaatctcaccagattttttatgtactcagcagagccttgagttacggtgtttattttccaatcaagtgaagatatctcctacttctcctactggaacatctcagcttctgcagtgaagaaaaattcctgtgatagttcagttctttagtttttctatttgaaaaaaaaaaatcatttaaatgatcctttgttcacggctctccttaatgactgagtgaacagttcctatctgtatatttgactaaaccttttcctaagctatctctcatggttcctatgtttttttatcataattaaaagcaaaaccatctggatcacctaacagtcagaggtcagtatctcagcgtgtgaattatagaggaaatacagagagaacctcttccacttttacttttcgtccaaataaaatgcatggtgtaccagaagttgaagatcgggttgaggattggggctagctcgatgacactaaggccccaacatcgcgggacctgctgtggcgcggattcttaggaacgctgttctagccggccccctctccaggggtcgccgtggccggcattatttcctagttcttcttgtaaccctgaggtgccagcgcggggagtgaggaggggtcagggggctaaggatgcaacctctgacgttctgcgccttcctaggagagtcttacatgtgttgagatttcacaagcaatgcgagttgtaaaataccagctctacaagaagctaggctctgtgacggcatagttttcagtagctttatcacaatattcacaatggagaattatatgacatggtagcagaaataggcccttttatgtgttgcttctattttacctcaaattgtagatatagggtaatcaataaaatccatccatgcctttcacacactaagt

SEQ ID NO: 4623 - protein, 954 aa, Homo sapiens; identical to SEQ ID NO: 4155

SEQ ID NO: 4624 - DNA, 7200 bp, Homo sapiens
aaaaaaaaaaaaaaaaaaaaaaaaaaaagaaaaaagaaaaaaaaaaggaggaggaggaggagggtgagagagaagctgggagagcagagaaaaggggccaccggtcgcccccccgcttccccgcacgcgctctccagccgcggccgcccgcctgccgcggtcaccccggcctctgcctctgtcccccagtgatcggatcaaggcgctgagcgaggccctgcctgcggggcggccatgcggcggtgacaggagcgcgaccgacacgcacgggcccctcgccccctctcgcctcccgtccgctcgccagctcccctcagccgaggctgctccgcggcggccgcagcccgcgcgcggcccacactcgcctccccgttgaagatgaggagtcctcggagagcaggatggtggtgacattcctcatgtcagctctcgagtccatgtgtaaagaactggccaagtccaaagccgaagtggcctgcattgcagtgtatgaaacagacgtgtttgtcgtcggaactgaaagaggacgtgcttttgtcaataccagaaaggattttcaaaaagattttgtaaaatattgtgttgaagaagaagaaaaagctgcagagatgcataaaatgaaatctacaacccaggcaaatcggatgagtgtagatgctgtagaaattgaaacactcagaaaaacagttgaggactatttctgcttttgctatgggaaagctttaggcaaatccacagtggtacctgtaccatatgagaagatgctgcgagaccagtcggctgtggtagtgcaggggcttccggaaggtgttgcctttaaacaccccgagaactatgatcttgcaaccctgaaatggattttggagaacaaagcagggatttcattcatcattaagagaccttttttagagccaaagaagcatgtaggtggtcgtgtgatggtaacagatgctgacaggtcaatactatctccaggtggaagttgtggccccatcaaagtgaaaactgaacccacagaagattctggcatttccctggaaatggcagctgtgacagtaaaggaagaatcagaagatcctgattattatcaatataacattcaagcaggcccttctgaaactgatgatgttgatgaaaaacagcccctatcgaagcctttgcaaggaagccaccattcttcagagggcaatgaaggcacagaaatggaagtaccagcagaagatgatgattattctccaccgtctaagagaccaaaggccaatgagctaccgcagccaccagtcccggaacccgccaatgctgggaagcggaaagtgagggagttcaacttcgagaaatggaatgctcgcatcactgatctacgtaaacaagttgaagaattgtttgaaaggaaatatgctcaagccataaaagccaaaggtccggtgacgatcccgtaccctcttttccagtctcatgttgaagatctttatgtagaaggacttcctgaaggaattccttttagaaggccatctacttacggaattcctcgcctggagaggatattacttgcaaaggaaaggattcgttttgtgattaagaaacatgagcttctgaattcaacacgtgaagatttacagcttgataagccagcttcaggagtaaaggaagaatggtatgccagaatcactaaattaagaaagatggtggatcagcttttctgcaaaaaatttgcggaagccttggggagcactgaagccaaggctgtaccgtaccaaaaatttgaggcacacccgaatgatctgtacgtggaaggactgccagaaaacattcctttccgaagtccctcatggtatggaatcccaaggctggaaaaaatcattcaagtgggcaatcgaattaaatttgttattaaaagaccagaacttctgactcacagtaccactgaagttactcagccaagaacgaatacaccagtcaaagaagattggaatgtcagaattaccaagctacggaagcaagtggaagagatttttaatttgaaatttgctcaagctcttggactcaccgaggcagtaaaagtaccatatcctgtgtttgaatcaaacccggagttcttgtatgtggaaggcttgccagaggggattcccttccgaagccctacctggtttggaattccacgacttgaaaggatcgtccgcgggagtaataaaatcaagttcgttgttaaaaaacctgaactagttatttcctacttgcctcctgggatggctagtaaaataaacactaaagctttgcagtcccccaaaagaccacgaagtcctgggagtaattcaaaggttcctgaaattgaggtcaccgtggaaggccctaataacaacaatcctcaaacctcagctgttcgaaccccgacccagactaacggttctaacgttcccttcaagccacgagggagagagttttcctttgaggcctggaatgccaaaatcacggacctaaaacagaaagttgaaaatctcttcaatgagaaatgtggggaagctcttggccttaaacaagctgtgaaggtgccgttcgcgttatttgagtctttcccggaagacttttatgtggaaggcttacctgagggtgtgccattccgaagaccatcgacttttggcattccgaggctggagaagatactcagaaacaaagccaaaattaagttcatcattaaaaagcccgaaatgtttgagacggcgattaaggagagcacctcctctaagagccctcccagaaaaataaattcatcacccaatgttaatactactgcatcaggtgttgaagaccttaacatcattcaggtgacaattccagatgatgataatgaaagactctcgaaagttgaaaaagctagacagctaagagaacaagtgaatgacctctttagtcggaaatttggtgaagctattggtatgggttttcctgtgaaagttccctacaggaaaatcacaattaaccctggctgtgtggtggttgatggcatgcccccgggggtgtccttcaaagcccccagctacctggaaatcagctccatgagaaggatcttagactctgccgagtttatcaaattcacggtcattaggtaagtgagagtttcctgcttagtcacaggagcgaatctggagctcatgaggctgactcttctaaaatgcagccacaggtagtcatcgaatccggcttcctatgctgtgcaatcaacaaatcaaaataacttgtgtcatcattagaatgtcagatgtgcttctacgaactaagctgactcttttaattctttggcaaagggttggcaaactaggactgtttgccaaattcaggctgcctcctatttttagagtcttcctgaaacacagctacacccgtattatccatggctgctttcctgtcacagtgagtaagtagctgggactgagaaggcatggcctccaaagtctaaaatatttactctctagcactttgtagaaaaaccttagctaggcacagtggctaacgcctgtaatcccagcattttgggaggccaaggcaggcagatcacctgaggtcaggagttccagaccagcctggccaacatggtgaaatcccatctctacaaaaataaaacagttagctgggcatgatggcgggtgcctgtaatcccagctactcgggaggctgaggcaggatagtcgcttgaacccaggaggtggaggttgcaatgagccaagatcatgccactgcactccagcctggacgacagagtgagactccatcacaagaaaaaaagaactttgtcaacctctgtcttagggcgccttgtcacaggcttcgggtcagacggattcaaccttgcatcagccatttgttagccaggtcactctgttctttgtctgtaaatgagattgatcgttgttcccactgagagtgtcagctccttcccgtagagcaggcatgatgattgtactcacctctgacaccattgtgagtgccacattccttcccacgtccttgtcactgtaagagatgcccacctgagcaccaaccccaggttatcttcccctttgtcttccagccccccagaaacagctacgactcaacctacccaatcatttcatcatcagattgccactgtctctagttcaggtctcttgggactggcactcagaaatctcataataaatcctcttgaggcttctcatacactcgtcttcttccaatcttctttccctcaaaatctcatattttggttccacttcacccaccgtcattctccatatcactcccaggagttaggcaaaaagccccttccgttcttccgtatgttaaacttagaatcactctgttccctgctctgcgtttctattttttgtttttcctccatttactagtagcttaacactttctaacagtgttcttattattgatacgtatctatctcttccataagcttataaggtcacggataatacttctcattgtagtacgtaaatgacgtgggctagatatgagttgaataaacagttatacctgtaaattcttacagagtgaaaataaattgttatactttacaatttgtttctctctttagaccatttccaggacttgtgattaataaccgtgagtattttgtgaagtgttttgtttttgttttttcctggggtctgacgtgtgtgcgtgtgagtgtgtatacatgcttaacgtatatcacgttacttcacctatgtcagtaaccaggccaaatacttgttttagccctcagtaaaaacaccaggcacttcctagttgtaaaattattcaagcttcttaacttcctatcctcgatgcacttaatcataaaatggtaataatagcaccgattttgggggagtcgttccagtagatggaaagcatctggaacaggtgtcagcaagctcctgccgacgtgtatgcataaagttttattgaaaccaccatcgtgtccatttgtttatggcagaactgagagatggcagcagcaagtgtgtgcctgcaaaacctaaaatatttactaattggctctgcaagaaaagagtttgcatccccctaacctagaacagtgtctagcctctagtatgtgtttagcctacagtatgtgctcagcgaatacaatctatatttattactgcttttatgactgttataattactgtgcttggatttcgttacaaagtaagtcacaatgtgcctgcttctgttagtatttcagcacagtgcctggcacacatggggctctcaaatattgctgagcgagtgaacaaatgtcctttcaattccttaacgttgatgtcattttcaatagtattttgagccaaacttaattttgcgagtgtgttttgttttcttaactttattattaaaaatgtataaaagtgaggccaggcgtggtggctcacgcctgtaatcccagcagtttgggaggctgaggcaggcggatcagttgaggttgggagttggagaccagcccgtccaacatggtgaaagcctgtctctactaaaaatacaaaaatcagctgggtgtggtggcgcgtgcctgtaatcccagctactcaggaggctgaggcaggagagttgcttgaatcctagaggtggaggttgcagtgagctgagatcgtgccattgcactccagcctgggcaacaagagcaaaactctgtcccaataaataaataaataaaatgttctcttttgttcctgttcttgtgcggtagtgtggtatagagttttatggtaattactgtgaattagtgattctgagggacatatcagaactctgaggtttgtttccttctcatcttgagggaaacagcaaatgtatgttaaaatgcttttccaagggaacaacacatccttacattatttaaaccaatctgcttcattttcagagctggttgatcagagtgagtcagaaggccccgtgatacaagaatcagctgaaccaagccagttggaagttccagccacagaagaaataaaagagactgatggaagctctcagatcaagcaagaaccagaccccacgtggtagacctcttccctcctaggcttaaagtatcagtggttgagaagagcttttcggacctgttactaccccaagctgtgtaatatacttgtataacagaaataccttctatacaaacctttttttctacttttagatagaaatgtctactttttcagcagttctgtgaattaaagagcagagtgactgtgggtctggaatggctggtgtacttgggaatgtactatcaggattttacagcaatgctgggaaatgacagggaaaatgacaggaatgaatctcaccagattttttatgtactcagcagagccttgagttacggtgtttattttccaatcaagtgaagatatctcctacttctcctactggaacatctcagcttctgcagtgaagaaaaattcctgtgatagttcagttctttagtttttctatttgaaaaaaaaaaatcatttaaatgatcctttgttcacggctctccttaatgactgagtgaacagttcctatctgtatatttgactaaaccttttcctaagctatctctcatggttcctatgtttttttatcataattaaaagcaaaaccatctggatcacctaacagtcagaggtcagtatctcagcgtgtgaattatagaggaaatacagagagaacctcttccacttttacttttcgtccaaataaaatgcatggtgtaccagaagttgaagatcgggttgaggattggggctagctcgatgacactaaggccccaacatcgcgggacctgctgtggcgcggattcttaggaacgctgttctagccggccccctctccaggggtcgccgtggccggcattatttcctagttcttcttgtaaccctgaggtgccagcgcggggagtgaggaggggtcagggggctaaggatgcaacctctgacgttctgcgccttcctaggagagtcttacatgtgttgagatttcacaagcaatgcgagttgtaaaataccagctctacaagaagctaggctctgtgacggcatagttttcagtagctttatcacaatattcacaatggagaattatatgacatggtagcagaaataggcccttttatgtgttgcttctattttacctcaaattgtagatatagggtaatcaataaaatccatccatgcctttcacacactaagt

SEQ ID NO: 4625 - protein, 901 aa, Homo sapiens; identical to SEQ ID NO: 4483

SEQ ID NO: 4626 - DNA, 5168 bp, Homo sapiens
aaaaaaaaaaaaaaaaaaaaaaaaaaaagaaaaaagaaaaaaaaaaggaggaggaggaggagggtgagagagaagctgggagagcagagaaaaggggccaccggtcgcccccccgcttccccgcacgcgctctccagccgcggccgcccgcctgccgcggtcaccccggcctctgcctctgtcccccagtgatcggatcaaggcgctgagcgaggccctgcctgcggggcggccatgcggcggtgacaggagcgcgaccgacacgcacgggcccctcgccccctctcgcctcccgtccgctcgccagctcccctcagccgaggctgctccgcggcggccgcagcccgcgcgcggcccacactcgcctcccctcggcacccccggccccggagctgcctggaggcggccgcactcggtgtaaagaactggccaagtccaaagccgaagtggcctgcattgcagtgtatgaaacagacgtgtttgtcgtcggaactgaaagaggacgtgcttttgtcaataccagaaaggattttcaaaaagattttgtaaaatattgtgttgaagaagaagaaaaagctgcagagatgcataaaatgaaatctacaacccaggcaaatcggatgagtgtagatgctgtagaaattgaaacactcagaaaaacagttgaggactatttctgcttttgctatgggaaagctttaggcaaatccacagtggtacctgtaccatatgagaagatgctgcgagaccagtcggctgtggtagtgcaggggcttccggaaggtgttgcctttaaacaccccgagaactatgatcttgcaaccctgaaatggattttggagaacaaagcagggatttcattcatcattaagagaccttttttagagccaaagaagcatgtaggtggtcgtgtgatggtaacagatgctgacaggtcaatactatctccaggtggaagttgtggccccatcaaagtgaaaactgaacccacagaagattctggcatttccctggaaatggcagctgtgacagtaaaggaagaatcagaagatcctgattattatcaatataacattcaagcaggcccttctgaaactgatgatgttgatgaaaaacagcccctatcgaagcctttgcaaggaagccaccattcttcagagggcaatgaaggcacagaaatggaagtaccagcagaagatgatgattattctccaccgtctaagagaccaaaggccaatgagctaccgcagccaccagtcccggaacccgccaatgctgggaagcggaaagtgagggagttcaacttcgagaaatggaatgctcgcatcactgatctacgtaaacaagttgaagaattgtttgaaaggaaatatgctcaagccataaaagccaaaggtccggtgacgatcccgtaccctcttttccagtctcatgttgaagatctttatgtagaaggacttcctgaaggaattccttttagaaggccatctacttacggaattcctcgcctggagaggatattacttgcaaaggaaaggattcgttttgtgattaagaaacatgagcttctgaattcaacacgtgaagatttacagcttgataagccagcttcaggagtaaaggaagaatggtatgccagaatcactaaattaagaaagatggtggatcagcttttctgcaaaaaatttgcggaagccttggggagcactgaagccaaggctgtaccgtaccaaaaatttgaggcacacccgaatgatctgtacgtggaaggactgccagaaaacattcctttccgaagtccctcatggtatggaatcccaaggctggaaaaaatcattcaagtgggcaatcgaattaaatttgttattaaaagaccagaacttctgactcacagtaccactgaagttactcagccaagaacgaatacaccagtcaaagaagattggaatgtcagaattaccaagctacggaagcaagtggaagagatttttaatttgaaatttgcttagatttgttgacagcggtttcctggagtgctgtcttgagaacgattctgaggaggctcagcaagaaagagtgtttcagttgattgggtgtgtctgtcatggagaaggaactcaagctcttggactcaccgaggcagtaaaagtaccatatcctgtgtttgaatcaaacccggagttcttgtatgtggaaggcttgccagaggggattcccttccgaagccctacctggtttggaattccacgacttgaaaggatcgtccgcgggagtaataaaatcaagttcgttgttaaaaaacctgaactagttatttcctacttgcctcctgggatggctagtaaaataaacactaaagctttgcagtcccccaaaagaccacgaagtcctgggagtaattcaaaggttcctgaaattgaggtcaccgtggaaggccctaataacaacaatcctcaaacctcagctgttcgaaccccgacccagactaacggttctaacgttcccttcaagccacgagggagagagttttcctttgaggcctggaatgccaaaatcacggacctaaaacagaaagttgaaaatctcttcaatgagaaatgtggggaagctcttggccttaaacaagctgtgaaggtgccgttcgcgttatttgagtctttcccggaagacttttatgtggaaggcttacctgagggtgtgccattccgaagaccatcgacttttggcattccgaggctggagaagatactcagaaacaaagccaaaattaagttcatcattaaaaagcccgaaatgtttgagacggcgattaaggagagcacctcctctaagagccctcccagaaaaataaattcatcacccaatgttaatactactgcatcaggtgttgaagaccttaacatcattcaggtgacaattccagatgatgataatgaaagactctcgaaagttgaaaaagctagacagctaagagaacaagtgaatgacctctttagtcggaaatttggtgaagctattggtatgggttttcctgtgaaagttccctacaggaaaatcacaattaaccctggctgtgtggtggttgatggcatgcccccgggggtgtccttcaaagcccccagctacctggaaatcagctccatgagaaggatcttagactctgccgagtttatcaaattcacggtcattagaccatttccaggacttgtgattaataaccagctggttgatcagagtgagtcagaaggccccgtgatacaagaatcagctgaaccaagccagttggaagttccagccacagaaggtaaaaggacctcttccctcctagggtaaatcagcttctgtgtcagggatgctgtgtggtgtccatctgaaccccctgcatacgcgtagctaatgtgatctccccactttcacataagatggtggccctgccttcagggaatgtgggagccaggtgggagccttcccggatatttaagctagaagattctacagggagattctccttggatcaatatatgtctctcagtcaaagatgtaaaagcacttttgccttaaaaagaatgttctgtttctaaatagagtcaacgttgtcctcctcattggaattcactatgagtcagaatcattagactgacttttttttttccatagtaatagtattttgcagagtctcacagagctgcagatcttttgttcatcttgcagagttaacaagtctgatcctgttagtccagatttcttaaatttggccaagttataataggagcagtagcttgagacccgaagtcaggaaactttgacaatggatttttttttttaatccagagacttgtactggaatttgccttaccctgtcagctcatggacttaaggtttcatcccgctttatgagtgcttctgaatccaagtcattgttacctgaatttgcaaattaagttgtgatattcgtgactgttaaattcctgtaattagattaacctctttgcttgcttgtttgttttctctcctattttagcttaaagtatcagtggttgagaagagcttttcggacctgttactaccccaagctgtgtaatatacttgtataacagaaataccttctatacaaacctttttttctacttttagatagaaatgtctactttttcagcagttctgtgaattaaagagcagagtgactgtgggtctggaatggctggtgtacttgggaatgtactatcaggattttacagcaatgctgggaaatgacagggaaaatgacaggaatgaatctcaccagattttttatgtactcagcagagccttgagttacggtgtttattttccaatcaagtgaagatatctcctacttctcctactggaacatctcagcttctgcagtgaagaaaaattcctgtgatagttcagttctttagtttttctatttgaaaaaaaaaaatcatttaaatgatcctttgttcacggctctccttaatgactgagtgaacagttcctatctgtatatttgactaaaccttttcctaagctatctctcatggttcctatgtttttttatcataattaaaagcaaaaccatctggatcacctaacagtcagaggtcagtatctcagcgtgtgaattatagaggaaatacagagagaacctcttccacttttacttttcgtccaaataaaatgcatggtgtaccagaagttgaagatcgggttgaggattggggctagctcgatgacactaaggccccaacatcgcgggacctgctgtggcgcggattcttaggaacgctgttctagccggccccctctccaggggtcgccgtggccggcattatttcctagttcttcttgtaaccctgaggtgccagcgcggggagtgaggaggggtcagggggctaaggatgcaacctctgacgttctgcgccttcctaggagagtcttacatgtgttgagatttcacaagcaatgcgagttgtaaaataccagctctacaagaagctaggctctgtgacggcatagttttcagtagctttatcacaatattcacaatggagaattatatgacatggtagcagaaataggcccttttatgtgttgcttctattttacctcaaattgtagatatagggtaatcaataaaatccatccatgcctttcacacactaagt

SEQ ID NO: 4627 - protein, 474 aa, Homo sapiens; identical to SEQ ID NO: 4025

SEQ ID NO: 4628 - DNA, 7375 bp, Homo sapiens
aaaaaaaaaaaaaaaaaaaaaaaaaaaagaaaaaagaaaaaaaaaaggaggaggaggaggagggtgagagagaagctgggagagcagagaaaaggggccaccggtcgcccccccgcttccccgcacgcgctctccagccgcggccgcccgcctgccgcggtcaccccggcctctgcctctgtcccccagtgatcggatcaaggcgctgagcgaggccctgcctgcggggcggccatgcggcggtgacaggagcgcgaccgacacgcacgggcccctcgccccctctcgcctcccgtccgctcgccagctcccctcagccgaggctgctccgcggcggccgcagcccgcgcgcggcccacactcgcctccccgttgaagatgaggagtcctcggagagcaggatggtggtgacattcctcatgtcagctctcgagtccatgtgtaaagaactggccaagtccaaagccgaagtggcctgcattgcagtgtatgaaacagacgtgtttgtcgtcggaactgaaagaggacgtgcttttgtcaataccagaaaggattttcaaaaagattttgtaaaatattgtgttgaagaagaagaaaaagctgcagagatgcataaaatgaaatctacaacccaggcaaatcggatgagtgtagatgctgtagaaattgaaacactcagaaaaacagttgaggactatttctgcttttgctatgggaaagctttaggcaaatccacagtggtacctgtaccatatgagaagatgctgcgagaccagtcggctgtggtagtgcaggggcttccggaaggtgttgcctttaaacaccccgagaactatgatcttgcaaccctgaaatggattttggagaacaaagcagggatttcattcatcattaagagaccttttttagagccaaagaagcatgtaggtggtcgtgtgatggtaacagatgctgacaggtcaatactatctccaggtggaagttgtggccccatcaaagtgaaaactgaacccacagaagattctggcatttccctggaaatggcagctgtgacagtaaaggaagaatcagaagatcctgattattatcaatataacattcaagcaggcccttctgaaactgatgatgttgatgaaaaacagcccctatcgaagcctttgcaaggaagccaccattcttcagagggcaatgaaggcacagaaatggaagtaccagcagaagattctactcaacatgtcccttcagaaacaagtgaggaccctgaagttgaggtgactattgaagatgatgattattctccaccgtctaagagaccaaaggccaatgagctaccgcagccaccagtcccggaacccgccaatgctgggaagcggaaagtgagggagttcaacttcgagaaatggaatgctcgcatcactgatctacgtaaacaagttgaagaattgtttgaaaggaaatatgctcaagccataaaagccaaaggtccggtgacgatcccgtaccctcttttccagtctcatgttgaagatctttatgtagaaggacttcctgaaggaattccttttagaaggccatctacttacggaattcctcgcctggagaggatattacttgcaaaggaaaggattcgttttgtgattaagaaacatgagcttctgaattcaacacgtgaagatttacagcttgataagccagcttcaggagtaaaggaagaatggtatgccagaatcactaaattaagaaagatggtggatcagcttttctgcaaaaaatttgcggaagccttggggagcactgaagccaaggctgtaccgtaccaaaaatttgaggcacacccgaatgatctgtacgtggaaggactgccagaaaacattcctttccgaagtccctcatggtatggaatcccaaggctggaaaaaatcattcaagtgggcaatcgaattaaatttgttattaaaagaccagaacttctgactcacagtaccactgaagttactcagccaagaacgaatacaccagtcaaagaagattggaatgtcagaattaccaagctacggaagcaagtggaagagatttttaatttgaaatttgcttagatttgttgacagcggtttcctggagtgctgtcttgagaacgattctgaggaggctcagcaagaaagagtgtttcagttgattgggtgtgtctgtcatggagaaggaactcaagctcttggactcaccgaggcagtaaaagtaccatatcctgtgtttgaatcaaacccggagttcttgtatgtggaaggcttgccagaggggattcccttccgaagccctacctggtttggaattccacgacttgaaaggatcgtccgcgggagtaataaaatcaagttcgttgttaaaaaacctgaactagttatttcctacttgcctcctgggatggctagtaaaataaacactaaagctttgcagtcccccaaaagaccacgaagtcctgggagtaattcaaaggttcctgaaattgaggtcaccgtggaaggccctaataacaacaatcctcaaacctcagctgttcgaaccccgacccagactaacggttctaacgttcccttcaagccacgagggagagagttttcctttgaggcctggaatgccaaaatcacggacctaaaacagaaagttgaaaatctcttcaatgagaaatgtggggaagctcttggccttaaacaagctgtgaaggtgccgttcgcgttatttgagtctttcccggaagacttttatgtggaaggcttacctgagggtgtgccattccgaagaccatcgacttttggcattccgaggctggagaagatactcagaaacaaagccaaaattaagttcatcattaaaaagcccgaaatgtttgagacggcgattaaggagagcacctcctctaagagccctcccagaaaaataaattcatcacccaatgttaatactactgcatcaggtgttgaagaccttaacatcattcaggtgacaattccagatgatgataatgaaagactctcgaaagttgaaaaagctagacagctaagagaacaagtgaatgacctctttagtcggaaatttggtgaagctattggtatgggttttcctgtgaaagttccctacaggaaaatcacaattaaccctggctgtgtggtggttgatggcatgcccccgggggtgtccttcaaagcccccagctacctggaaatcagctccatgagaaggatcttagactctgccgagtttatcaaattcacggtcattaggtaagtgagagtttcctgcttagtcacaggagcgaatctggagctcatgaggctgactcttctaaaatgcagccacaggtagtcatcgaatccggcttcctatgctgtgcaatcaacaaatcaaaataacttgtgtcatcattagaatgtcagatgtgcttctacgaactaagctgactcttttaattctttggcaaagggttggcaaactaggactgtttgccaaattcaggctgcctcctatttttagagtcttcctgaaacacagctacacccgtattatccatggctgctttcctgtcacagtgagtaagtagctgggactgagaaggcatggcctccaaagtctaaaatatttactctctagcactttgtagaaaaaccttagctaggcacagtggctaacgcctgtaatcccagcattttgggaggccaaggcaggcagatcacctgaggtcaggagttccagaccagcctggccaacatggtgaaatcccatctctacaaaaataaaacagttagctgggcatgatggcgggtgcctgtaatcccagctactcgggaggctgaggcaggatagtcgcttgaacccaggaggtggaggttgcaatgagccaagatcatgccactgcactccagcctggacgacagagtgagactccatcacaagaaaaaaagaactttgtcaacctctgtcttagggcgccttgtcacaggcttcgggtcagacggattcaaccttgcatcagccatttgttagccaggtcactctgttctttgtctgtaaatgagattgatcgttgttcccactgagagtgtcagctccttcccgtagagcaggcatgatgattgtactcacctctgacaccattgtgagtgccacattccttcccacgtccttgtcactgtaagagatgcccacctgagcaccaaccccaggttatcttcccctttgtcttccagccccccagaaacagctacgactcaacctacccaatcatttcatcatcagattgccactgtctctagttcaggtctcttgggactggcactcagaaatctcataataaatcctcttgaggcttctcatacactcgtcttcttccaatcttctttccctcaaaatctcatattttggttccacttcacccaccgtcattctccatatcactcccaggagttaggcaaaaagccccttccgttcttccgtatgttaaacttagaatcactctgttccctgctctgcgtttctattttttgtttttcctccatttactagtagcttaacactttctaacagtgttcttattattgatacgtatctatctcttccataagcttataaggtcacggataatacttctcattgtagtacgtaaatgacgtgggctagatatgagttgaataaacagttatacctgtaaattcttacagagtgaaaataaattgttatactttacaatttgtttctctctttagaccatttccaggacttgtgattaataaccgtgagtattttgtgaagtgttttgtttttgttttttcctggggtctgacgtgtgtgcgtgtgagtgtgtatacatgcttaacgtatatcacgttacttcacctatgtcagtaaccaggccaaatacttgttttagccctcagtaaaaacaccaggcacttcctagttgtaaaattattcaagcttcttaacttcctatcctcgatgcacttaatcataaaatggtaataatagcaccgattttgggggagtcgttccagtagatggaaagcatctggaacaggtgtcagcaagctcctgccgacgtgtatgcataaagttttattgaaaccaccatcgtgtccatttgtttatggcagaactgagagatggcagcagcaagtgtgtgcctgcaaaacctaaaatatttactaattggctctgcaagaaaagagtttgcatccccctaacctagaacagtgtctagcctctagtatgtgtttagcctacagtatgtgctcagcgaatacaatctatatttattactgcttttatgactgttataattactgtgcttggatttcgttacaaagtaagtcacaatgtgcctgcttctgttagtatttcagcacagtgcctggcacacatggggctctcaaatattgctgagcgagtgaacaaatgtcctttcaattccttaacgttgatgtcattttcaatagtattttgagccaaacttaattttgcgagtgtgttttgttttcttaactttattattaaaaatgtataaaagtgaggccaggcgtggtggctcacgcctgtaatcccagcagtttgggaggctgaggcaggcggatcagttgaggttgggagttggagaccagcccgtccaacatggtgaaagcctgtctctactaaaaatacaaaaatcagctgggtgtggtggcgcgtgcctgtaatcccagctactcaggaggctgaggcaggagagttgcttgaatcctagaggtggaggttgcagtgagctgagatcgtgccattgcactccagcctgggcaacaagagcaaaactctgtcccaataaataaataaataaaatgttctcttttgttcctgttcttgtgcggtagtgtggtatagagttttatggtaattactgtgaattagtgattctgagggacatatcagaactctgaggtttgtttccttctcatcttgagggaaacagcaaatgtatgttaaaatgcttttccaagggaacaacacatccttacattatttaaaccaatctgcttcattttcagagctggttgatcagagtgagtcagaaggccccgtgatacaagaatcagctgaaccaagccagttggaagttccagccacagaagaaataaaagagactgatggaagctctcagatcaagcaagaaccagaccccacgtggtagacctcttccctcctaggcttaaagtatcagtggttgagaagagcttttcggacctgttactaccccaagctgtgtaatatacttgtataacagaaataccttctatacaaacctttttttctacttttagatagaaatgtctactttttcagcagttctgtgaattaaagagcagagtgactgtgggtctggaatggctggtgtacttgggaatgtactatcaggattttacagcaatgctgggaaatgacagggaaaatgacaggaatgaatctcaccagattttttatgtactcagcagagccttgagttacggtgtttattttccaatcaagtgaagatatctcctacttctcctactggaacatctcagcttctgcagtgaagaaaaattcctgtgatagttcagttctttagtttttctatttgaaaaaaaaaaatcatttaaatgatcctttgttcacggctctccttaatgactgagtgaacagttcctatctgtatatttgactaaaccttttcctaagctatctctcatggttcctatgtttttttatcataattaaaagcaaaaccatctggatcacctaacagtcagaggtcagtatctcagcgtgtgaattatagaggaaatacagagagaacctcttccacttttacttttcgtccaaataaaatgcatggtgtaccagaagttgaagatcgggttgaggattggggctagctcgatgacactaaggccccaacatcgcgggacctgctgtggcgcggattcttaggaacgctgttctagccggccccctctccaggggtcgccgtggccggcattatttcctagttcttcttgtaaccctgaggtgccagcgcggggagtgaggaggggtcagggggctaaggatgcaacctctgacgttctgcgccttcctaggagagtcttacatgtgttgagatttcacaagcaatgcgagttgtaaaataccagctctacaagaagctaggctctgtgacggcatagttttcagtagctttatcacaatattcacaatggagaattatatgacatggtagcagaaataggcccttttatgtgttgcttctattttacctcaaattgtagatatagggtaatcaataaaatccatccatgcctttcacacactaagt

SEQ ID NO: 4629 - protein, 564 aa, Homo sapiens; identical to SEQ ID NO: 4031

SEQ ID NO: 4630 - DNA, 7820 bp, Homo sapiens
aaaaaaaaaaaaaaaaaaaaaaaaaaaagaaaaaagaaaaaaaaaaggaggaggaggaggagggtgagagagaagctgggagagcagagaaaaggggccaccggtcgcccccccgcttccccgcacgcgctctccagccgcggccgcccgcctgccgcggtcaccccggcctctgcctctgtcccccagtgatcggatcaaggcgctgagcgaggccctgcctgcggggcggccatgcggcggtgacaggagcgcgaccgacacgcacgggcccctcgccccctctcgcctcccgtccgctcgccagctcccctcagccgaggctgctccgcggcggccgcagcccgcgcgcggcccacactcgcctccccgttgaagatgaggagtcctcggagagcaggatggtggtgacattcctcatgtcagctctcgagtccatgtgtaaagaactggccaagtccaaagccgaagtggcctgcattgcagtgtatgaaacagacgtgtttgtcgtcggaactgaaagaggacgtgcttttgtcaataccagaaaggattttcaaaaagattttgtaaaatattgtgttgaagaagaagaaaaagctgcagagatgcataaaatgaaatctacaacccaggcaaatcggatgagtgtagatgctgtagaaattgaaacactcagaaaaacagttgaggactatttctgcttttgctatgggaaagctttaggcaaatccacagtggtacctgtaccatatgagaagatgctgcgagaccagtcggctgtggtagtgcaggggcttccggaaggtgttgcctttaaacaccccgagaactatgatcttgcaaccctgaaatggattttggagaacaaagcagggatttcattcatcattaagagaccttttttagagccaaagaagcatgtaggtggtcgtgtgatggtaacagatgctgacaggtcaatactatctccaggtggaagttgtggccccatcaaagtgaaaactgaacccacagaagattctggcatttccctggaaatggcagctgtgacagtaaaggaagaatcagaagatcctgattattatcaatataacattcaagcaggcccttctgaaactgatgatgttgatgaaaaacagcccctatcgaagcctttgcaaggaagccaccattcttcagagggcaatgaaggcacagaaatggaagtaccagcagaagatgatgattattctccaccgtctaagagaccaaaggccaatgagctaccgcagccaccagtcccggaacccgccaatgctgggaagcggaaagtgagggagttcaacttcgagaaatggaatgctcgcatcactgatctacgtaaacaagttgaagaattgtttgaaaggaaatatgctcaagccataaaagccaaaggtccggtgacgatcccgtaccctcttttccagtctcatgttgaagatctttatgtagaaggacttcctgaaggaattccttttagaaggccatctacttacggaattcctcgcctggagaggatattacttgcaaaggaaaggattcgttttgtgattaagaaacatgagcttctgaattcaacacgtgaagatttacagcttgataagccagcttcaggagtaaaggaagaatggtatgccagaatcactaaattaagaaagatggtggatcagcttttctgcaaaaaatttgcggaagccttggggagcactgaagccaaggctgtaccgtaccaaaaatttgaggcacacccgaatgatctgtacgtggaaggactgccagaaaacattcctttccgaagtccctcatggtatggaatcccaaggctggaaaaaatcattcaagtgggcaatcgaattaaatttgttattaaaagaccagaacttctgactcacagtaccactgaagttactcagccaagaacgaatacaccagctcaagctcttggactcaccgaggcagtaaaagtaccatatcctgtgtttgaatcaaacccggagttcttgtatgtggaaggcttgccagaggggattcccttccgaagccctacctggtttggaattccacgacttgaaaggatcgtccgcgggagtaataaaatcaagttcgttgttaaaaaacctgaactagttatttcctacttgcctcctgggatggctagtaaaataaacactaaagctttgcagtcccccaaaagaccacgaagtcctgggagtaattcaaaggttcctgaaattgaggtcaccgtggaaggccctaataacaacaatcctcaaacctcagctgttcgaaccccgacccagactaacggttctaacgttcccttcaagccacgagggagagagttttcctttgaggcctggaatgccaaaatcacggacctaaaacagaaagttgaaaatctcttcaatgagaaatgtggggaagctcttggccttaaacaagctgtgaaggtgccgttcgcgttatttgagtctttcccggaagacttttatgtggaaggcttacctgagggtgtgccattccgaagaccatcgacttttggcattccgaggctggagaagatactcagaaacaaagccaaaattaagttcatcattaaaaagcccgaaatgtttgagacggcgattaaggagagcacctcctctaagagccctcccagaaaaataaattcatcacccaatgttaatactactgcatcaggtgttgaagaccttaacatcattcaggtgacaattccagatgatgataatgaaagactctcgaaagttgaaaaagctagacagctaagagaacaagtgaatgacctctttagtcggaaatttggtgaagctattggtatgggttttcctgtgaaagttccctacaggaaaatcacaattaaccctggctgtgtggtggttgatggcatgcccccgggggtgtccttcaaagcccccagctacctggaaatcagctccatgagaaggatcttagactctgccgagtttatcaaattcacggtcattaggtaagtgagagtttcctgcttagtcacaggagcgaatctggagctcatgaggctgactcttctaaaatgcagccacaggtagtcatcgaatccggcttcctatgctgtgcaatcaacaaatcaaaataacttgtgtcatcattagaatgtcagatgtgcttctacgaactaagctgactcttttaattctttggcaaagggttggcaaactaggactgtttgccaaattcaggctgcctcctatttttagagtcttcctgaaacacagctacacccgtattatccatggctgctttcctgtcacagtgagtaagtagctgggactgagaaggcatggcctccaaagtctaaaatatttactctctagcactttgtagaaaaaccttagctaggcacagtggctaacgcctgtaatcccagcattttgggaggccaaggcaggcagatcacctgaggtcaggagttccagaccagcctggccaacatggtgaaatcccatctctacaaaaataaaacagttagctgggcatgatggcgggtgcctgtaatcccagctactcgggaggctgaggcaggatagtcgcttgaacccaggaggtggaggttgcaatgagccaagatcatgccactgcactccagcctggacgacagagtgagactccatcacaagaaaaaaagaactttgtcaacctctgtcttagggcgccttgtcacaggcttcgggtcagacggattcaaccttgcatcagccatttgttagccaggtcactctgttctttgtctgtaaatgagattgatcgttgttcccactgagagtgtcagctccttcccgtagagcaggcatgatgattgtactcacctctgacaccattgtgagtgccacattccttcccacgtccttgtcactgtaagagatgcccacctgagcaccaaccccaggttatcttcccctttgtcttccagccccccagaaacagctacgactcaacctacccaatcatttcatcatcagattgccactgtctctagttcaggtctcttgggactggcactcagaaatctcataataaatcctcttgaggcttctcatacactcgtcttcttccaatcttctttccctcaaaatctcatattttggttccacttcacccaccgtcattctccatatcactcccaggagttaggcaaaaagccccttccgttcttccgtatgttaaacttagaatcactctgttccctgctctgcgtttctattttttgtttttcctccatttactagtagcttaacactttctaacagtgttcttattattgatacgtatctatctcttccataagcttataaggtcacggataatacttctcattgtagtacgtaaatgacgtgggctagatatgagttgaataaacagttatacctgtaaattcttacagagtgaaaataaattgttatactttacaatttgtttctctctttagaccatttccaggacttgtgattaataaccgtgagtattttgtgaagtgttttgtttttgttttttcctggggtctgacgtgtgtgcgtgtgagtgtgtatacatgcttaacgtatatcacgttacttcacctatgtcagtaaccaggccaaatacttgttttagccctcagtaaaaacaccaggcacttcctagttgtaaaattattcaagcttcttaacttcctatcctcgatgcacttaatcataaaatggtaataatagcaccgattttgggggagtcgttccagtagatggaaagcatctggaacaggtgtcagcaagctcctgccgacgtgtatgcataaagttttattgaaaccaccatcgtgtccatttgtttatggcagaactgagagatggcagcagcaagtgtgtgcctgcaaaacctaaaatatttactaattggctctgcaagaaaagagtttgcatccccctaacctagaacagtgtctagcctctagtatgtgtttagcctacagtatgtgctcagcgaatacaatctatatttattactgcttttatgactgttataattactgtgcttggatttcgttacaaagtaagtcacaatgtgcctgcttctgttagtatttcagcacagtgcctggcacacatggggctctcaaatattgctgagcgagtgaacaaatgtcctttcaattccttaacgttgatgtcattttcaatagtattttgagccaaacttaattttgcgagtgtgttttgttttcttaactttattattaaaaatgtataaaagtgaggccaggcgtggtggctcacgcctgtaatcccagcagtttgggaggctgaggcaggcggatcagttgaggttgggagttggagaccagcccgtccaacatggtgaaagcctgtctctactaaaaatacaaaaatcagctgggtgtggtggcgcgtgcctgtaatcccagctactcaggaggctgaggcaggagagttgcttgaatcctagaggtggaggttgcagtgagctgagatcgtgccattgcactccagcctgggcaacaagagcaaaactctgtcccaataaataaataaataaaatgttctcttttgttcctgttcttgtgcggtagtgtggtatagagttttatggtaattactgtgaattagtgattctgagggacatatcagaactctgaggtttgtttccttctcatcttgagggaaacagcaaatgtatgttaaaatgcttttccaagggaacaacacatccttacattatttaaaccaatctgcttcattttcagagctggttgatcagagtgagtcagaaggccccgtgatacaagaatcagctgaaccaagccagttggaagttccagccacagaagaaataaaagagactgatggaagctctcagatcaagcaagaaccagaccccacgtggtagacctcttccctcctagggtaaatcagcttctgtgtcagggatgctgtgtggtgtccatctgaaccccctgcatacgcgtagctaatgtgatctccccactttcacataagatggtggccctgccttcagggaatgtgggagccaggtgggagccttcccggatatttaagctagaagattctacagggagattctccttggatcaatatatgtctctcagtcaaagatgtaaaagcacttttgccttaaaaagaatgttctgtttctaaatagagtcaacgttgtcctcctcattggaattcactatgagtcagaatcattagactgacttttttttttccatagtaatagtattttgcagagtctcacagagctgcagatcttttgttcatcttgcagagttaacaagtctgatcctgttagtccagatttcttaaatttggccaagttataataggagcagtagcttgagacccgaagtcaggaaactttgacaatggatttttttttttaatccagagacttgtactggaatttgccttaccctgtcagctcatggacttaaggtttcatcccgctttatgagtgcttctgaatccaagtcattgttacctgaatttgcaaattaagttgtgatattcgtgactgttaaattcctgtaattagattaacctctttgcttgcttgtttgttttctctcctattttagcttaaagtatcagtggttgagaagagcttttcggacctgttactaccccaagctgtgtaatatacttgtataacagaaataccttctatacaaacctttttttctacttttagatagaaatgtctactttttcagcagttctgtgaattaaagagcagagtgactgtgggtctggaatggctggtgtacttgggaatgtactatcaggattttacagcaatgctgggaaatgacagggaaaatgacaggaatgaatctcaccagattttttatgtactcagcagagccttgagttacggtgtttattttccaatcaagtgaagatatctcctacttctcctactggaacatctcagcttctgcagtgaagaaaaattcctgtgatagttcagttctttagtttttctatttgaaaaaaaaaaatcatttaaatgatcctttgttcacggctctccttaatgactgagtgaacagttcctatctgtatatttgactaaaccttttcctaagctatctctcatggttcctatgtttttttatcataattaaaagcaaaaccatctggatcacctaacagtcagaggtcagtatctcagcgtgtgaattatagaggaaatacagagagaacctcttccacttttacttttcgtccaaataaaatgcatggtgtaccagaagttgaagatcgggttgaggattggggctagctcgatgacactaaggccccaacatcgcgggacctgctgtggcgcggattcttaggaacgctgttctagccggccccctctccaggggtcgccgtggccggcattatttcctagttcttcttgtaaccctgaggtgccagcgcggggagtgaggaggggtcagggggctaaggatgcaacctctgacgttctgcgccttcctaggagagtcttacatgtgttgagatttcacaagcaatgcgagttgtaaaataccagctctacaagaagctaggctctgtgacggcatagttttcagtagctttatcacaatattcacaatggagaattatatgacatggtagcagaaataggcccttttatgtgttgcttctattttacctcaaattgtagatatagggtaatcaataaaatccatccatgcctttcacacactaagt

SEQ ID NO: 4631 - protein, 877 aa, Homo sapiens; identical to SEQ ID NO: 4491

SEQ ID NO: 4632 - DNA, 4372 bp, Homo sapiens
aaaaaaaaaaaaaaaaaaaaaaaaaaaagaaaaaagaaaaaaaaaaggaggaggaggaggagggtgagagagaagctgggagagcagagaaaaggggccaccggtcgcccccccgcttccccgcacgcgctctccagccgcggccgcccgcctgccgcggtcaccccggcctctgcctctgtcccccagtgatcggatcaaggcgctgagcgaggccctgcctgcggggcggccatgcggcggtgacaggagcgcgaccgacacgcacgggcccctcgccccctctcgcctcccgtccgctcgccagctcccctcagccgaggctgctccgcggcggccgcagcccgcgcgcggcccacactcgcctcccctcggcacccccggccccggagctgcctggaggcggccgcactcggggatcatggcccaagttgcaatgtccaccctccccgttgaagatgaggagtcctcggagagcaggatggtggtgacattcctcatgtcagctctcgagtccatgtgtaaagaactggccaagtccaaagccgaagtggcctgcattgcagtgtatgaaacagacgtgtttgtcgtcggaactgaaagaggacgtgcttttgtcaataccagaaaggattttcaaaaagattttgtaaaatattgtgttgaagaagaagaaaaagctgcagagatgcataaaatgaaatctacaacccaggcaaatcggatgagtgtagatgctgtagaaattgaaacactcagaaaaacagttgaggactatttctgcttttgctatgggaaagctttaggcaaatccacagtggtacctgtaccatatgagaagatgctgcgagaccagtcggctgtggtagtgcaggggcttccggaaggtgttgcctttaaacaccccgagaactatgatcttgcaaccctgaaatggattttggagaacaaagcagggatttcattcatcattaagagaccttttttagagccaaagaagcatgtaggtggtcgtgtgatggtaacagatgctgacaggtcaatactatctccaggtggaagttgtggccccatcaaagtgaaaactgaacccacagaagattctggaagccaccattcttcagagggcaatgaaggcacagaaatggaagtaccagcagaagattctactcaacatgtcccttcagaaacaagtgaggaccctgaagttgaggtgactattgaagatgatgattattctccaccgtctaagagaccaaaggccaatgagctaccgcagccaccagtcccggaacccgccaatgctgggaagcggaaagtgagggagttcaacttcgagaaatggaatgctcgcatcactgatctacgtaaacaagttgaagaattgtttgaaaggaaatatgctcaagccataaaagccaaaggtccggtgacgatcccgtaccctcttttccagtctcatgttgaagatctttatgtagaaggacttcctgaaggaattccttttagaaggccatctacttacggaattcctcgcctggagaggatattacttgcaaaggaaaggattcgttttgtgattaagaaacatgagcttctgaattcaacacgtgaagatttacagcttgataagccagcttcaggagtaaaggaagaatggtatgccagaatcactaaattaagaaagatggtggatcagcttttctgcaaaaaatttgcggaagccttggggagcactgaagccaaggctgtaccgtaccaaaaatttgaggcacacccgaatgatctgtacgtggaaggactgccagaaaacattcctttccgaagtccctcatggtatggaatcccaaggctggaaaaaatcattcaagtgggcaatcgaattaaatttgttattaaaagaccagaacttctgactcacagtaccactgaagttactcagccaagaacgaatacaccagctcaagctcttggactcaccgaggcagtaaaagtaccatatcctgtgtttgaatcaaacccggagttcttgtatgtggaaggcttgccagaggggattcccttccgaagccctacctggtttggaattccacgacttgaaaggatcgtccgcgggagtaataaaatcaagttcgttgttaaaaaacctgaactagttatttcctacttgcctcctgggatggctagtaaaataaacactaaagctttgcagtcccccaaaagaccacgaagtcctgggagtaattcaaaggttcctgaaattgaggtcaccgtggaaggccctaataacaacaatcctcaaacctcagctgttcgaaccccgacccagactaacggttctaacgttcccttcaagccacgagggagagagttttcctttgaggcctggaatgccaaaatcacggacctaaaacagaaagttgaaaatctcttcaatgagaaatgtggggaagctcttggccttaaacaagctgtgaaggtgccgttcgcgttatttgagtctttcccggaagacttttatgtggaaggcttacctgagggtgtgccattccgaagaccatcgacttttggcattccgaggctggagaagatactcagaaacaaagccaaaattaagttcatcattaaaaagcccgaaatgtttgagacggcgattaaggagagcacctcctctaagagccctcccagaaaaataaattcatcacccaatgttaatactactgcatcaggtgttgaagaccttaacatcattcaggtgacaattccagatgatgataatgaaagactctcgaaagttgaaaaagctagacagctaagagaacaagtgaatgacctctttagtcggaaatttggtgaagctattggtatgggttttcctgtgaaagttccctacaggaaaatcacaattaaccctggctgtgtggtggttgatggcatgcccccgggggtgtccttcaaagcccccagctacctggaaatcagctccatgagaaggatcttagactctgccgagtttatcaaattcacggtcattagaccatttccaggacttgtgattaataaccagctggttgatcagagtgagtcagaaggccccgtgatacaagaatcagctgaaccaagccagttggaagttccagccacagaagaaataaaagagactgatggaagctctcagatcaagcaagaaccagaccccacgtggtagacctcttccctcctaggcttaaagtatcagtggttgagaagagcttttcggacctgttactaccccaagctgtgtaatatacttgtataacagaaataccttctatacaaacctttttttctacttttagatagaaatgtctactttttcagcagttctgtgaattaaagagcagagtgactgtgggtctggaatggctggtgtacttgggaatgtactatcaggattttacagcaatgctgggaaatgacagggaaaatgacaggaatgaatctcaccagattttttatgtactcagcagagccttgagttacggtgtttattttccaatcaagtgaagatatctcctacttctcctactggaacatctcagcttctgcagtgaagaaaaattcctgtgatagttcagttctttagtttttctatttgaaaaaaaaaaatcatttaaatgatcctttgttcacggctctccttaatgactgagtgaacagttcctatctgtatatttgactaaaccttttcctaagctatctctcatggttcctatgtttttttatcataattaaaagcaaaaccatctggatcacctaacagtcagaggtcagtatctcagcgtgtgaattatagaggaaatacagagagaacctcttccacttttacttttcgtccaaataaaatgcatggtgtaccagaagttgaagatcgggttgaggattggggctagctcgatgacactaaggccccaacatcgcgggacctgctgtggcgcggattcttaggaacgctgttctagccggccccctctccaggggtcgccgtggccggcattatttcctagttcttcttgtaaccctgaggtgccagcgcggggagtgaggaggggtcagggggctaaggatgcaacctctgacgttctgcgccttcctaggagagtcttacatgtgttgagatttcacaagcaatgcgagttgtaaaataccagctctacaagaagctaggctctgtgacggcatagttttcagtagctttatcacaatattcacaatggagaattatatgacatggtagcagaaataggcccttttatgtgttgcttctattttacctcaaattgtagatatagggtaatcaataaaatccatccatgcctttcacacactaagt

SEQ ID NO: 4633 - protein, 928 aa, Homo sapiens; identical to SEQ ID NO: 4237

SEQ ID NO: 4634 - DNA, 7116 bp, Homo sapiens
aaaaaaaaaaaaaaaaaaaaaaaaaaaagaaaaaagaaaaaaaaaaggaggaggaggaggagggtgagagagaagctgggagagcagagaaaaggggccaccggtcgcccccccgcttccccgcacgcgctctccagccgcggccgcccgcctgccgcggtcaccccggcctctgcctctgtcccccagtgatcggatcaaggcgctgagcgaggccctgcctgcggggcggccatgcggcggtgacaggagcgcgaccgacacgcacgggcccctcgccccctctcgcctcccgtccgctcgccagctcccctcagccgaggctgctccgcggcggccgcagcccgcgcgcggcccacactcgcctcccctcggcacccccggccccggagctgcctggaggcggccgcactcggtgtaaagaactggccaagtccaaagccgaagtggcctgcattgcagtgtatgaaacagacgtgtttgtcgtcggaactgaaagaggacgtgcttttgtcaataccagaaaggattttcaaaaagattttgtaaaatattgtgttgaagaagaagaaaaagctgcagagatgcataaaatgaaatctacaacccaggcaaatcggatgagtgtagatgctgtagaaattgaaacactcagaaaaacagttgaggactatttctgcttttgctatgggaaagctttaggcaaatccacagtggtacctgtaccatatgagaagatgctgcgagaccagtcggctgtggtagtgcaggggcttccggaaggtgttgcctttaaacaccccgagaactatgatcttgcaaccctgaaatggattttggagaacaaagcagggatttcattcatcattaagagaccttttttagagccaaagaagcatgtaggtggtcgtgtgatggtaacagatgctgacaggtcaatactatctccaggtggaagttgtggccccatcaaagtgaaaactgaacccacagaagattctggcatttccctggaaatggcagctgtgacagtaaaggaagaatcagaagatcctgattattatcaatataacattcaaggaagccaccattcttcagagggcaatgaaggcacagaaatggaagtaccagcagaagatgatgattattctccaccgtctaagagaccaaaggccaatgagctaccgcagccaccagtcccggaacccgccaatgctgggaagcggaaagtgagggagttcaacttcgagaaatggaatgctcgcatcactgatctacgtaaacaagttgaagaattgtttgaaaggaaatatgctcaagccataaaagccaaaggtccggtgacgatcccgtaccctcttttccagtctcatgttgaagatctttatgtagaaggacttcctgaaggaattccttttagaaggccatctacttacggaattcctcgcctggagaggatattacttgcaaaggaaaggattcgttttgtgattaagaaacatgagcttctgaattcaacacgtgaagatttacagcttgataagccagcttcaggagtaaaggaagaatggtatgccagaatcactaaattaagaaagatggtggatcagcttttctgcaaaaaatttgcggaagccttggggagcactgaagccaaggctgtaccgtaccaaaaatttgaggcacacccgaatgatctgtacgtggaaggactgccagaaaacattcctttccgaagtccctcatggtatggaatcccaaggctggaaaaaatcattcaagtgggcaatcgaattaaatttgttattaaaagaccagaacttctgactcacagtaccactgaagttactcagccaagaacgaatacaccagtcaaagaagattggaatgtcagaattaccaagctacggaagcaagtggaagagatttttaatttgaaatttgctcaagctcttggactcaccgaggcagtaaaagtaccatatcctgtgtttgaatcaaacccggagttcttgtatgtggaaggcttgccagaggggattcccttccgaagccctacctggtttggaattccacgacttgaaaggatcgtccgcgggagtaataaaatcaagttcgttgttaaaaaacctgaactagttatttcctacttgcctcctgggatggctagtaaaataaacactaaagctttgcagtcccccaaaagaccacgaagtcctgggagtaattcaaaggttcctgaaattgaggtcaccgtggaaggccctaataacaacaatcctcaaacctcagctgttcgaaccccgacccagactaacggttctaacgttcccttcaagccacgagggagagagttttcctttgaggcctggaatgccaaaatcacggacctaaaacagaaagttgaaaatctcttcaatgagaaatgtggggaagctcttggccttaaacaagctgtgaaggtgccgttcgcgttatttgagtctttcccggaagacttttatgtggaaggcttacctgagggtgtgccattccgaagaccatcgacttttggcattccgaggctggagaagatactcagaaacaaagccaaaattaagttcatcattaaaaagcccgaaatgtttgagacggcgattaaggagagcacctcctctaagagccctcccagaaaaataaattcatcacccaatgttaatactactgcatcaggtgttgaagaccttaacatcattcaggtgacaattccagatgatgataatgaaagactctcgaaagttgaaaaagctagacagctaagagaacaagtgaatgacctctttagtcggaaatttggtgaagctattggtatgggttttcctgtgaaagttccctacaggaaaatcacaattaaccctggctgtgtggtggttgatggcatgcccccgggggtgtccttcaaagcccccagctacctggaaatcagctccatgagaaggatcttagactctgccgagtttatcaaattcacggtcattaggtaagtgagagtttcctgcttagtcacaggagcgaatctggagctcatgaggctgactcttctaaaatgcagccacaggtagtcatcgaatccggcttcctatgctgtgcaatcaacaaatcaaaataacttgtgtcatcattagaatgtcagatgtgcttctacgaactaagctgactcttttaattctttggcaaagggttggcaaactaggactgtttgccaaattcaggctgcctcctatttttagagtcttcctgaaacacagctacacccgtattatccatggctgctttcctgtcacagtgagtaagtagctgggactgagaaggcatggcctccaaagtctaaaatatttactctctagcactttgtagaaaaaccttagctaggcacagtggctaacgcctgtaatcccagcattttgggaggccaaggcaggcagatcacctgaggtcaggagttccagaccagcctggccaacatggtgaaatcccatctctacaaaaataaaacagttagctgggcatgatggcgggtgcctgtaatcccagctactcgggaggctgaggcaggatagtcgcttgaacccaggaggtggaggttgcaatgagccaagatcatgccactgcactccagcctggacgacagagtgagactccatcacaagaaaaaaagaactttgtcaacctctgtcttagggcgccttgtcacaggcttcgggtcagacggattcaaccttgcatcagccatttgttagccaggtcactctgttctttgtctgtaaatgagattgatcgttgttcccactgagagtgtcagctccttcccgtagagcaggcatgatgattgtactcacctctgacaccattgtgagtgccacattccttcccacgtccttgtcactgtaagagatgcccacctgagcaccaaccccaggttatcttcccctttgtcttccagccccccagaaacagctacgactcaacctacccaatcatttcatcatcagattgccactgtctctagttcaggtctcttgggactggcactcagaaatctcataataaatcctcttgaggcttctcatacactcgtcttcttccaatcttctttccctcaaaatctcatattttggttccacttcacccaccgtcattctccatatcactcccaggagttaggcaaaaagccccttccgttcttccgtatgttaaacttagaatcactctgttccctgctctgcgtttctattttttgtttttcctccatttactagtagcttaacactttctaacagtgttcttattattgatacgtatctatctcttccataagcttataaggtcacggataatacttctcattgtagtacgtaaatgacgtgggctagatatgagttgaataaacagttatacctgtaaattcttacagagtgaaaataaattgttatactttacaatttgtttctctctttagaccatttccaggacttgtgattaataaccgtgagtattttgtgaagtgttttgtttttgttttttcctggggtctgacgtgtgtgcgtgtgagtgtgtatacatgcttaacgtatatcacgttacttcacctatgtcagtaaccaggccaaatacttgttttagccctcagtaaaaacaccaggcacttcctagttgtaaaattattcaagcttcttaacttcctatcctcgatgcacttaatcataaaatggtaataatagcaccgattttgggggagtcgttccagtagatggaaagcatctggaacaggtgtcagcaagctcctgccgacgtgtatgcataaagttttattgaaaccaccatcgtgtccatttgtttatggcagaactgagagatggcagcagcaagtgtgtgcctgcaaaacctaaaatatttactaattggctctgcaagaaaagagtttgcatccccctaacctagaacagtgtctagcctctagtatgtgtttagcctacagtatgtgctcagcgaatacaatctatatttattactgcttttatgactgttataattactgtgcttggatttcgttacaaagtaagtcacaatgtgcctgcttctgttagtatttcagcacagtgcctggcacacatggggctctcaaatattgctgagcgagtgaacaaatgtcctttcaattccttaacgttgatgtcattttcaatagtattttgagccaaacttaattttgcgagtgtgttttgttttcttaactttattattaaaaatgtataaaagtgaggccaggcgtggtggctcacgcctgtaatcccagcagtttgggaggctgaggcaggcggatcagttgaggttgggagttggagaccagcccgtccaacatggtgaaagcctgtctctactaaaaatacaaaaatcagctgggtgtggtggcgcgtgcctgtaatcccagctactcaggaggctgaggcaggagagttgcttgaatcctagaggtggaggttgcagtgagctgagatcgtgccattgcactccagcctgggcaacaagagcaaaactctgtcccaataaataaataaataaaatgttctcttttgttcctgttcttgtgcggtagtgtggtatagagttttatggtaattactgtgaattagtgattctgagggacatatcagaactctgaggtttgtttccttctcatcttgagggaaacagcaaatgtatgttaaaatgcttttccaagggaacaacacatccttacattatttaaaccaatctgcttcattttcagagctggttgatcagagtgagtcagaaggccccgtgatacaagaatcagctgaaccaagccagttggaagttccagccacagaagaaataaaagagactgatggaagctctcagatcaagcaagaaccagaccccacgtggtagacctcttccctcctaggcttaaagtatcagtggttgagaagagcttttcggacctgttactaccccaagctgtgtaatatacttgtataacagaaataccttctatacaaacctttttttctacttttagatagaaatgtctactttttcagcagttctgtgaattaaagagcagagtgactgtgggtctggaatggctggtgtacttgggaatgtactatcaggattttacagcaatgctgggaaatgacagggaaaatgacaggaatgaatctcaccagattttttatgtactcagcagagccttgagttacggtgtttattttccaatcaagtgaagatatctcctacttctcctactggaacatctcagcttctgcagtgaagaaaaattcctgtgatagttcagttctttagtttttctatttgaaaaaaaaaaatcatttaaatgatcctttgttcacggctctccttaatgactgagtgaacagttcctatctgtatatttgactaaaccttttcctaagctatctctcatggttcctatgtttttttatcataattaaaagcaaaaccatctggatcacctaacagtcagaggtcagtatctcagcgtgtgaattatagaggaaatacagagagaacctcttccacttttacttttcgtccaaataaaatgcatggtgtaccagaagttgaagatcgggttgaggattggggctagctcgatgacactaaggccccaacatcgcgggacctgctgtggcgcggattcttaggaacgctgttctagccggccccctctccaggggtcgccgtggccggcattatttcctagttcttcttgtaaccctgaggtgccagcgcggggagtgaggaggggtcagggggctaaggatgcaacctctgacgttctgcgccttcctaggagagtcttacatgtgttgagatttcacaagcaatgcgagttgtaaaataccagctctacaagaagctaggctctgtgacggcatagttttcagtagctttatcacaatattcacaatggagaattatatgacatggtagcagaaataggcccttttatgtgttgcttctattttacctcaaattgtagatatagggtaatcaataaaatccatccatgcctttcacacactaagt

SEQ ID NO: 4635 - protein, 812 aa, Homo sapiens
MHKMKSTTQANRMSVDAVEIETLRKTVEDYFCFCYGKALGKSTVVPVPYEKMLRDQSAVVVQGLPEGVAFKHPENYDLATLKWILENKAGISFIIKRPFLEPKKHVGGRVMVTDADRSILSPGGSCGPIKVKTEPTEDSGISLEMAAVTVKEESEDPDYYQYNIQGSHHSSEGNEGTEMEVPAEDDDYSPPSKRPKANELPQPPVPEPANAGKRKVREFNFEKWNARITDLRKQVEELFERKYAQAIKAKGPVTIPYPLFQSHVEDLYVEGLPEGIPFRRPSTYGIPRLERILLAKERIRFVIKKHELLNSTREDLQLDKPASGVKEEWYARITKLRKMVDQLFCKKFAEALGSTEAKAVPYQKFEAHPNDLYVEGLPENIPFRSPSWYGIPRLEKIIQVGNRIKFVIKRPELLTHSTTEVTQPRTNTPVKEDWNVRITKLRKQVEEIFNLKFAQALGLTEAVKVPYPVFESNPEFLYVEGLPEGIPFRSPTWFGIPRLERIVRGSNKIKFVVKKPELVISYLPPGMASKINTKALQSPKRPRSPGSNSKVPEIEVTVEGPNNNNPQTSAVRTPTQTNGSNVPFKPRGREFSFEAWNAKITDLKQKVENLFNEKCGEALGLKQAVKVPFALFESFPEDFYVEGLPEGVPFRRPSTFGIPRLEKILRNKAKIKFIIKKPEMFETAIKESTSSKSPPRKINSSPNVNTTASGVEDLNIIQVTIPDDDNERLSKVEKARQLREQVNDLFSRKFGEAIGMGFPVKVPYRKITINPGCVVVDGMPPGVSFKAPSYLEISSMRRILDSAEFIKFTVIR

SEQ ID NO: 4636 - DNA, 7832 bp, Homo sapiens
aaaaaaaaaaaaaaaaaaaaaaaaaaaagaaaaaagaaaaaaaaaaggaggaggaggaggagggtgagagagaagctgggagagcagagaaaaggggccaccggtcgcccccccgcttccccgcacgcgctctccagccgcggccgcccgcctgccgcggtcaccccggcctctgcctctgtcccccagtgatcggatcaaggcgctgagcgaggccctgcctgcggggcggccatgcggcggtgacaggagcgcgaccgacacgcacgggcccctcgccccctctcgcctcccgtccgctcgccagctcccctcagccgaggctgctccgcggcggccgcagcccgcgcgcggcccacactcgcctccccgttgaagatgaggagtcctcggagagcaggatggtggtgacattcctcatgtcagctctcgagtccatgtgtaaagaactggccaagtccaaagccgaagtggcctgcattgcagtgtatgaaacagacgtgtttgtcgtcggaactgaaagaggacgtgcttttgtcaataccagaaaggattttcaaaaagattttgtaaaatattgtgttgaagaagaagaaaaagctgcagagatgcataaaatgaaatctacaacccaggcaaatcggatgagtgtagatgctgtagaaattgaaacactcagaaaaacagttgaggactatttctgcttttgctatgggaaagctttaggcaaatccacagtggtacctgtaccatatgagaagatgctgcgagaccagtcggctgtggtagtgcaggggcttccggaaggtgttgcctttaaacaccccgagaactatgatcttgcaaccctgaaatggattttggagaacaaagcagggatttcattcatcattaagagaccttttttagagccaaagaagcatgtaggtggtcgtgtgatggtaacagatgctgacaggtcaatactatctccaggtggaagttgtggccccatcaaagtgaaaactgaacccacagaagattctggcatttccctggaaatggcagctgtgacagtaaaggaagaatcagaagatcctgattattatcaatataacattcaaggaagccaccattcttcagagggcaatgaaggcacagaaatggaagtaccagcagaagatgatgattattctccaccgtctaagagaccaaaggccaatgagctaccgcagccaccagtcccggaacccgccaatgctgggaagcggaaagtgagggagttcaacttcgagaaatggaatgctcgcatcactgatctacgtaaacaagttgaagaattgtttgaaaggaaatatgctcaagccataaaagccaaaggtccggtgacgatcccgtaccctcttttccagtctcatgttgaagatctttatgtagaaggacttcctgaaggaattccttttagaaggccatctacttacggaattcctcgcctggagaggatattacttgcaaaggaaaggattcgttttgtgattaagaaacatgagcttctgaattcaacacgtgaagatttacagcttgataagccagcttcaggagtaaaggaagaatggtatgccagaatcactaaattaagaaagatggtggatcagcttttctgcaaaaaatttgcggaagccttggggagcactgaagccaaggctgtaccgtaccaaaaatttgaggcacacccgaatgatctgtacgtggaaggactgccagaaaacattcctttccgaagtccctcatggtatggaatcccaaggctggaaaaaatcattcaagtgggcaatcgaattaaatttgttattaaaagaccagaacttctgactcacagtaccactgaagttactcagccaagaacgaatacaccagtcaaagaagattggaatgtcagaattaccaagctacggaagcaagtggaagagatttttaatttgaaatttgctcaagctcttggactcaccgaggcagtaaaagtaccatatcctgtgtttgaatcaaacccggagttcttgtatgtggaaggcttgccagaggggattcccttccgaagccctacctggtttggaattccacgacttgaaaggatcgtccgcgggagtaataaaatcaagttcgttgttaaaaaacctgaactagttatttcctacttgcctcctgggatggctagtaaaataaacactaaagctttgcagtcccccaaaagaccacgaagtcctgggagtaattcaaaggttcctgaaattgaggtcaccgtggaaggccctaataacaacaatcctcaaacctcagctgttcgaaccccgacccagactaacggttctaacgttcccttcaagccacgagggagagagttttcctttgaggcctggaatgccaaaatcacggacctaaaacagaaagttgaaaatctcttcaatgagaaatgtggggaagctcttggccttaaacaagctgtgaaggtgccgttcgcgttatttgagtctttcccggaagacttttatgtggaaggcttacctgagggtgtgccattccgaagaccatcgacttttggcattccgaggctggagaagatactcagaaacaaagccaaaattaagttcatcattaaaaagcccgaaatgtttgagacggcgattaaggagagcacctcctctaagagccctcccagaaaaataaattcatcacccaatgttaatactactgcatcaggtgttgaagaccttaacatcattcaggtgacaattccagatgatgataatgaaagactctcgaaagttgaaaaagctagacagctaagagaacaagtgaatgacctctttagtcggaaatttggtgaagctattggtatgggttttcctgtgaaagttccctacaggaaaatcacaattaaccctggctgtgtggtggttgatggcatgcccccgggggtgtccttcaaagcccccagctacctggaaatcagctccatgagaaggatcttagactctgccgagtttatcaaattcacggtcattaggtaagtgagagtttcctgcttagtcacaggagcgaatctggagctcatgaggctgactcttctaaaatgcagccacaggtagtcatcgaatccggcttcctatgctgtgcaatcaacaaatcaaaataacttgtgtcatcattagaatgtcagatgtgcttctacgaactaagctgactcttttaattctttggcaaagggttggcaaactaggactgtttgccaaattcaggctgcctcctatttttagagtcttcctgaaacacagctacacccgtattatccatggctgctttcctgtcacagtgagtaagtagctgggactgagaaggcatggcctccaaagtctaaaatatttactctctagcactttgtagaaaaaccttagctaggcacagtggctaacgcctgtaatcccagcattttgggaggccaaggcaggcagatcacctgaggtcaggagttccagaccagcctggccaacatggtgaaatcccatctctacaaaaataaaacagttagctgggcatgatggcgggtgcctgtaatcccagctactcgggaggctgaggcaggatagtcgcttgaacccaggaggtggaggttgcaatgagccaagatcatgccactgcactccagcctggacgacagagtgagactccatcacaagaaaaaaagaactttgtcaacctctgtcttagggcgccttgtcacaggcttcgggtcagacggattcaaccttgcatcagccatttgttagccaggtcactctgttctttgtctgtaaatgagattgatcgttgttcccactgagagtgtcagctccttcccgtagagcaggcatgatgattgtactcacctctgacaccattgtgagtgccacattccttcccacgtccttgtcactgtaagagatgcccacctgagcaccaaccccaggttatcttcccctttgtcttccagccccccagaaacagctacgactcaacctacccaatcatttcatcatcagattgccactgtctctagttcaggtctcttgggactggcactcagaaatctcataataaatcctcttgaggcttctcatacactcgtcttcttccaatcttctttccctcaaaatctcatattttggttccacttcacccaccgtcattctccatatcactcccaggagttaggcaaaaagccccttccgttcttccgtatgttaaacttagaatcactctgttccctgctctgcgtttctattttttgtttttcctccatttactagtagcttaacactttctaacagtgttcttattattgatacgtatctatctcttccataagcttataaggtcacggataatacttctcattgtagtacgtaaatgacgtgggctagatatgagttgaataaacagttatacctgtaaattcttacagagtgaaaataaattgttatactttacaatttgtttctctctttagaccatttccaggacttgtgattaataaccgtgagtattttgtgaagtgttttgtttttgttttttcctggggtctgacgtgtgtgcgtgtgagtgtgtatacatgcttaacgtatatcacgttacttcacctatgtcagtaaccaggccaaatacttgttttagccctcagtaaaaacaccaggcacttcctagttgtaaaattattcaagcttcttaacttcctatcctcgatgcacttaatcataaaatggtaataatagcaccgattttgggggagtcgttccagtagatggaaagcatctggaacaggtgtcagcaagctcctgccgacgtgtatgcataaagttttattgaaaccaccatcgtgtccatttgtttatggcagaactgagagatggcagcagcaagtgtgtgcctgcaaaacctaaaatatttactaattggctctgcaagaaaagagtttgcatccccctaacctagaacagtgtctagcctctagtatgtgtttagcctacagtatgtgctcagcgaatacaatctatatttattactgcttttatgactgttataattactgtgcttggatttcgttacaaagtaagtcacaatgtgcctgcttctgttagtatttcagcacagtgcctggcacacatggggctctcaaatattgctgagcgagtgaacaaatgtcctttcaattccttaacgttgatgtcattttcaatagtattttgagccaaacttaattttgcgagtgtgttttgttttcttaactttattattaaaaatgtataaaagtgaggccaggcgtggtggctcacgcctgtaatcccagcagtttgggaggctgaggcaggcggatcagttgaggttgggagttggagaccagcccgtccaacatggtgaaagcctgtctctactaaaaatacaaaaatcagctgggtgtggtggcgcgtgcctgtaatcccagctactcaggaggctgaggcaggagagttgcttgaatcctagaggtggaggttgcagtgagctgagatcgtgccattgcactccagcctgggcaacaagagcaaaactctgtcccaataaataaataaataaaatgttctcttttgttcctgttcttgtgcggtagtgtggtatagagttttatggtaattactgtgaattagtgattctgagggacatatcagaactctgaggtttgtttccttctcatcttgagggaaacagcaaatgtatgttaaaatgcttttccaagggaacaacacatccttacattatttaaaccaatctgcttcattttcagagctggttgatcagagtgagtcagaaggccccgtgatacaagaatcagctgaaccaagccagttggaagttccagccacagaagaaataaaagagactgatggaagctctcagatcaagcaagaaccagaccccacgtggtagacctcttccctcctagggtaaatcagcttctgtgtcagggatgctgtgtggtgtccatctgaaccccctgcatacgcgtagctaatgtgatctccccactttcacataagatggtggccctgccttcagggaatgtgggagccaggtgggagccttcccggatatttaagctagaagattctacagggagattctccttggatcaatatatgtctctcagtcaaagatgtaaaagcacttttgccttaaaaagaatgttctgtttctaaatagagtcaacgttgtcctcctcattggaattcactatgagtcagaatcattagactgacttttttttttccatagtaatagtattttgcagagtctcacagagctgcagatcttttgttcatcttgcagagttaacaagtctgatcctgttagtccagatttcttaaatttggccaagttataataggagcagtagcttgagacccgaagtcaggaaactttgacaatggatttttttttttaatccagagacttgtactggaatttgccttaccctgtcagctcatggacttaaggtttcatcccgctttatgagtgcttctgaatccaagtcattgttacctgaatttgcaaattaagttgtgatattcgtgactgttaaattcctgtaattagattaacctctttgcttgcttgtttgttttctctcctattttagcttaaagtatcagtggttgagaagagcttttcggacctgttactaccccaagctgtgtaatatacttgtataacagaaataccttctatacaaacctttttttctacttttagatagaaatgtctactttttcagcagttctgtgaattaaagagcagagtgactgtgggtctggaatggctggtgtacttgggaatgtactatcaggattttacagcaatgctgggaaatgacagggaaaatgacaggaatgaatctcaccagattttttatgtactcagcagagccttgagttacggtgtttattttccaatcaagtgaagatatctcctacttctcctactggaacatctcagcttctgcagtgaagaaaaattcctgtgatagttcagttctttagtttttctatttgaaaaaaaaaaatcatttaaatgatcctttgttcacggctctccttaatgactgagtgaacagttcctatctgtatatttgactaaaccttttcctaagctatctctcatggttcctatgtttttttatcataattaaaagcaaaaccatctggatcacctaacagtcagaggtcagtatctcagcgtgtgaattatagaggaaatacagagagaacctcttccacttttacttttcgtccaaataaaatgcatggtgtaccagaagttgaagatcgggttgaggattggggctagctcgatgacactaaggccccaacatcgcgggacctgctgtggcgcggattcttaggaacgctgttctagccggccccctctccaggggtcgccgtggccggcattatttcctagttcttcttgtaaccctgaggtgccagcgcggggagtgaggaggggtcagggggctaaggatgcaacctctgacgttctgcgccttcctaggagagtcttacatgtgttgagatttcacaagcaatgcgagttgtaaaataccagctctacaagaagctaggctctgtgacggcatagttttcagtagctttatcacaatattcacaatggagaattatatgacatggtagcagaaataggcccttttatgtgttgcttctattttacctcaaattgtagatatagggtaatcaataaaatccatccatgcctttcacacactaagt

SEQ ID NO: 4637 - protein, 881 aa, Homo sapiens; identical to SEQ ID NO: 4591

SEQ ID NO: 4638 - DNA, 7213 bp, Homo sapiens
aaaaaaaaaaaaaaaaaaaaaaaaaaaagaaaaaagaaaaaaaaaaggaggaggaggaggagggtgagagagaagctgggagagcagagaaaaggggccaccggtcgcccccccgcttccccgcacgcgctctccagccgcggccgcccgcctgccgcggtcaccccggcctctgcctctgtcccccagtgatcggatcaaggcgctgagcgaggccctgcctgcggggcggccatgcggcggtgacaggagcgcgaccgacacgcacgggcccctcgccccctctcgcctcccgtccgctcgccagctcccctcagccgaggctgctccgcggcggccgcagcccgcgcgcggcccacactcgcctcccctcggcacccccggccccggagctgcctggaggcggccgcactcggtgtaaagaactggccaagtccaaagccgaagtggcctgcattgcagtgtatgaaacagacgtgtttgtcgtcggaactgaaagaggacgtgcttttgtcaataccagaaaggattttcaaaaagattttgtaaaatattgtgttgaagaagaagaaaaagctgcagagatgcataaaatgaaatctacaacccaggcaaatcggatgagtgtagatgctgtagaaattgaaacactcagaaaaacagttgaggactatttctgcttttgctatgggaaagctttaggcaaatccacagtggtacctgtaccatatgagaagatgctgcgagaccagtcggctgtggtagtgcaggggcttccggaaggtgttgcctttaaacaccccgagaactatgatcttgcaaccctgaaatggattttggagaacaaagcagggatttcattcatcattaagagaccttttttagagccaaagaagcatgtaggtggtcgtgtgatggtaacagatgctgacaggtcaatactatctccaggtggaagttgtggccccatcaaagtgaaaactgaacccacagaagattctggaagccaccattcttcagagggcaatgaaggcacagaaatggaagtaccagcagaagattctactcaacatgtcccttcagaaacaagtgaggaccctgaagttgaggtgactattgaagatgatgattattctccaccgtctaagagaccaaaggccaatgagctaccgcagccaccagtcccggaacccgccaatgctgggaagcggaaagtgagggagttcaacttcgagaaatggaatgctcgcatcactgatctacgtaaacaagttgaagaattgtttgaaaggaaatatgctcaagccataaaagccaaaggtccggtgacgatcccgtaccctcttttccagtctcatgttgaagatctttatgtagaaggacttcctgaaggaattccttttagaaggccatctacttacggaattcctcgcctggagaggatattacttgcaaaggaaaggattcgttttgtgattaagaaacatgagcttctgaattcaacacgtgaagatttacagcttgataagccagcttcaggagtaaaggaagaatggtatgccagaatcactaaattaagaaagatggtggatcagcttttctgcaaaaaatttgcggaagccttggggagcactgaagccaaggctgtaccgtaccaaaaatttgaggcacacccgaatgatctgtacgtggaaggactgccagaaaacattcctttccgaagtccctcatggtatggaatcccaaggctggaaaaaatcattcaagtgggcaatcgaattaaatttgttattaaaagaccagaacttctgactcacagtaccactgaagttactcagccaagaacgaatacaccagtcaaagaagattggaatgtcagaattaccaagctacggaagcaagtggaagagatttttaatttgaaatttgcttagatttgttgacagcggtttcctggagtgctgtcttgagaacgattctgaggaggctcagcaagaaagagtgtttcagttgattgggtgtgtctgtcatggagaaggaactcaagctcttggactcaccgaggcagtaaaagtaccatatcctgtgtttgaatcaaacccggagttcttgtatgtggaaggcttgccagaggggattcccttccgaagccctacctggtttggaattccacgacttgaaaggatcgtccgcgggagtaataaaatcaagttcgttgttaaaaaacctgaactagttatttcctacttgcctcctgggatggctagtaaaataaacactaaagctttgcagtcccccaaaagaccacgaagtcctgggagtaattcaaaggttcctgaaattgaggtcaccgtggaaggccctaataacaacaatcctcaaacctcagctgttcgaaccccgacccagactaacggttctaacgttcccttcaagccacgagggagagagttttcctttgaggcctggaatgccaaaatcacggacctaaaacagaaagttgaaaatctcttcaatgagaaatgtggggaagctcttggccttaaacaagctgtgaaggtgccgttcgcgttatttgagtctttcccggaagacttttatgtggaaggcttacctgagggtgtgccattccgaagaccatcgacttttggcattccgaggctggagaagatactcagaaacaaagccaaaattaagttcatcattaaaaagcccgaaatgtttgagacggcgattaaggagagcacctcctctaagagccctcccagaaaaataaattcatcacccaatgttaatactactgcatcaggtgttgaagaccttaacatcattcaggtgacaattccagatgatgataatgaaagactctcgaaagttgaaaaagctagacagctaagagaacaagtgaatgacctctttagtcggaaatttggtgaagctattggtatgggttttcctgtgaaagttccctacaggaaaatcacaattaaccctggctgtgtggtggttgatggcatgcccccgggggtgtccttcaaagcccccagctacctggaaatcagctccatgagaaggatcttagactctgccgagtttatcaaattcacggtcattaggtaagtgagagtttcctgcttagtcacaggagcgaatctggagctcatgaggctgactcttctaaaatgcagccacaggtagtcatcgaatccggcttcctatgctgtgcaatcaacaaatcaaaataacttgtgtcatcattagaatgtcagatgtgcttctacgaactaagctgactcttttaattctttggcaaagggttggcaaactaggactgtttgccaaattcaggctgcctcctatttttagagtcttcctgaaacacagctacacccgtattatccatggctgctttcctgtcacagtgagtaagtagctgggactgagaaggcatggcctccaaagtctaaaatatttactctctagcactttgtagaaaaaccttagctaggcacagtggctaacgcctgtaatcccagcattttgggaggccaaggcaggcagatcacctgaggtcaggagttccagaccagcctggccaacatggtgaaatcccatctctacaaaaataaaacagttagctgggcatgatggcgggtgcctgtaatcccagctactcgggaggctgaggcaggatagtcgcttgaacccaggaggtggaggttgcaatgagccaagatcatgccactgcactccagcctggacgacagagtgagactccatcacaagaaaaaaagaactttgtcaacctctgtcttagggcgccttgtcacaggcttcgggtcagacggattcaaccttgcatcagccatttgttagccaggtcactctgttctttgtctgtaaatgagattgatcgttgttcccactgagagtgtcagctccttcccgtagagcaggcatgatgattgtactcacctctgacaccattgtgagtgccacattccttcccacgtccttgtcactgtaagagatgcccacctgagcaccaaccccaggttatcttcccctttgtcttccagccccccagaaacagctacgactcaacctacccaatcatttcatcatcagattgccactgtctctagttcaggtctcttgggactggcactcagaaatctcataataaatcctcttgaggcttctcatacactcgtcttcttccaatcttctttccctcaaaatctcatattttggttccacttcacccaccgtcattctccatatcactcccaggagttaggcaaaaagccccttccgttcttccgtatgttaaacttagaatcactctgttccctgctctgcgtttctattttttgtttttcctccatttactagtagcttaacactttctaacagtgttcttattattgatacgtatctatctcttccataagcttataaggtcacggataatacttctcattgtagtacgtaaatgacgtgggctagatatgagttgaataaacagttatacctgtaaattcttacagagtgaaaataaattgttatactttacaatttgtttctctctttagaccatttccaggacttgtgattaataaccgtgagtattttgtgaagtgttttgtttttgttttttcctggggtctgacgtgtgtgcgtgtgagtgtgtatacatgcttaacgtatatcacgttacttcacctatgtcagtaaccaggccaaatacttgttttagccctcagtaaaaacaccaggcacttcctagttgtaaaattattcaagcttcttaacttcctatcctcgatgcacttaatcataaaatggtaataatagcaccgattttgggggagtcgttccagtagatggaaagcatctggaacaggtgtcagcaagctcctgccgacgtgtatgcataaagttttattgaaaccaccatcgtgtccatttgtttatggcagaactgagagatggcagcagcaagtgtgtgcctgcaaaacctaaaatatttactaattggctctgcaagaaaagagtttgcatccccctaacctagaacagtgtctagcctctagtatgtgtttagcctacagtatgtgctcagcgaatacaatctatatttattactgcttttatgactgttataattactgtgcttggatttcgttacaaagtaagtcacaatgtgcctgcttctgttagtatttcagcacagtgcctggcacacatggggctctcaaatattgctgagcgagtgaacaaatgtcctttcaattccttaacgttgatgtcattttcaatagtattttgagccaaacttaattttgcgagtgtgttttgttttcttaactttattattaaaaatgtataaaagtgaggccaggcgtggtggctcacgcctgtaatcccagcagtttgggaggctgaggcaggcggatcagttgaggttgggagttggagaccagcccgtccaacatggtgaaagcctgtctctactaaaaatacaaaaatcagctgggtgtggtggcgcgtgcctgtaatcccagctactcaggaggctgaggcaggagagttgcttgaatcctagaggtggaggttgcagtgagctgagatcgtgccattgcactccagcctgggcaacaagagcaaaactctgtcccaataaataaataaataaaatgttctcttttgttcctgttcttgtgcggtagtgtggtatagagttttatggtaattactgtgaattagtgattctgagggacatatcagaactctgaggtttgtttccttctcatcttgagggaaacagcaaatgtatgttaaaatgcttttccaagggaacaacacatccttacattatttaaaccaatctgcttcattttcagagctggttgatcagagtgagtcagaaggccccgtgatacaagaatcagctgaaccaagccagttggaagttccagccacagaagaaataaaagagactgatggaagctctcagatcaagcaagaaccagaccccacgtggtagacctcttccctcctaggcttaaagtatcagtggttgagaagagcttttcggacctgttactaccccaagctgtgtaatatacttgtataacagaaataccttctatacaaacctttttttctacttttagatagaaatgtctactttttcagcagttctgtgaattaaagagcagagtgactgtgggtctggaatggctggtgtacttgggaatgtactatcaggattttacagcaatgctgggaaatgacagggaaaatgacaggaatgaatctcaccagattttttatgtactcagcagagccttgagttacggtgtttattttccaatcaagtgaagatatctcctacttctcctactggaacatctcagcttctgcagtgaagaaaaattcctgtgatagttcagttctttagtttttctatttgaaaaaaaaaaatcatttaaatgatcctttgttcacggctctccttaatgactgagtgaacagttcctatctgtatatttgactaaaccttttcctaagctatctctcatggttcctatgtttttttatcataattaaaagcaaaaccatctggatcacctaacagtcagaggtcagtatctcagcgtgtgaattatagaggaaatacagagagaacctcttccacttttacttttcgtccaaataaaatgcatggtgtaccagaagttgaagatcgggttgaggattggggctagctcgatgacactaaggccccaacatcgcgggacctgctgtggcgcggattcttaggaacgctgttctagccggccccctctccaggggtcgccgtggccggcattatttcctagttcttcttgtaaccctgaggtgccagcgcggggagtgaggaggggtcagggggctaaggatgcaacctctgacgttctgcgccttcctaggagagtcttacatgtgttgagatttcacaagcaatgcgagttgtaaaataccagctctacaagaagctaggctctgtgacggcatagttttcagtagctttatcacaatattcacaatggagaattatatgacatggtagcagaaataggcccttttatgtgttgcttctattttacctcaaattgtagatatagggtaatcaataaaatccatccatgcctttcacacactaagt

SEQ ID NO: 4639 - protein, 449 aa, Homo sapiens; identical to SEQ ID NO: 4147

SEQ ID NO: 4640 - DNA, 4909 bp, Homo sapiens
aaaaaaaaaaaaaaaaaaaaaaaaaaaagaaaaaagaaaaaaaaaaggaggaggaggaggagggtgagagagaagctgggagagcagagaaaaggggccaccggtcgcccccccgcttccccgcacgcgctctccagccgcggccgcccgcctgccgcggtcaccccggcctctgcctctgtcccccagtgatcggatcaaggcgctgagcgaggccctgcctgcggggcggccatgcggcggtgacaggagcgcgaccgacacgcacgggcccctcgccccctctcgcctcccgtccgctcgccagctcccctcagccgaggctgctccgcggcggccgcagcccgcgcgcggcccacactcgcctcccctcggcacccccggccccggagctgcctggaggcggccgcactcggtgtaaagaactggccaagtccaaagccgaagtggcctgcattgcagtgtatgaaacagacgtgtttgtcgtcggaactgaaagaggacgtgcttttgtcaataccagaaaggattttcaaaaagattttgtaaaatattgtgttgaagaagaagaaaaagctgcagagatgcataaaatgaaatctacaacccaggcaaatcggatgagtgtagatgctgtagaaattgaaacactcagaaaaacagttgaggactatttctgcttttgctatgggaaagctttaggcaaatccacagtggtacctgtaccatatgagaagatgctgcgagaccagtcggctgtggtagtgcaggggcttccggaaggtgttgcctttaaacaccccgagaactatgatcttgcaaccctgaaatggattttggagaacaaagcagggatttcattcatcattaagagaccttttttagagccaaagaagcatgtaggtggtcgtgtgatggtaacagatgctgacaggtcaatactatctccaggtggaagttgtggccccatcaaagtgaaaactgaacccacagaagattctggaagccaccattcttcagagggcaatgaaggcacagaaatggaagtaccagcagaagattctactcaacatgtcccttcagaaacaagtgaggaccctgaagttgaggtgactattgaagatgatgattattctccaccgtctaagagaccaaaggccaatgagctaccgcagccaccagtcccggaacccgccaatgctgggaagcggaaagtgagggagttcaacttcgagaaatggaatgctcgcatcactgatctacgtaaacaagttgaagaattgtttgaaaggaaatatgctcaagccataaaagccaaaggtccggtgacgatcccgtaccctcttttccagtctcatgttgaagatctttatgtagaaggacttcctgaaggaattccttttagaaggccatctacttacggaattcctcgcctggagaggatattacttgcaaaggaaaggattcgttttgtgattaagaaacatgagcttctgaattcaacacgtgaagatttacagcttgataagccagcttcaggagtaaaggaagaatggtatgccagaatcactaaattaagaaagatggtggatcagcttttctgcaaaaaatttgcggaagccttggggagcactgaagccaaggctgtaccgtaccaaaaatttgaggcacacccgaatgatctgtacgtggaaggactgccagaaaacattcctttccgaagtccctcatggtatggaatcccaaggctggaaaaaatcattcaagtgggcaatcgaattaaatttgttattaaaagaccagaacttctgactcacagtaccactgaagttactcagccaagaacgaatacaccagctcaagctcttggactcaccgaggcagtaaaagtaccatatcctgtgtttgaatcaaacccggagttcttgtatgtggaaggcttgccagaggggattcccttccgaagccctacctggtttggaattccacgacttgaaaggatcgtccgcgggagtaataaaatcaagttcgttgttaaaaaacctgaactagttatttcctacttgcctcctgggatggctagtaaaataaacactaaagctttgcagtcccccaaaagaccacgaagtcctgggagtaattcaaaggttcctgaaattgaggtcaccgtggaaggccctaataacaacaatcctcaaacctcagctgttcgaaccccgacccagactaacggttctaacgttcccttcaagccacgagggagagagttttcctttgaggcctggaatgccaaaatcacggacctaaaacagaaagttgaaaatctcttcaatgagaaatgtggggaagctcttggccttaaacaagctgtgaaggtgccgttcgcgttatttgagtctttcccggaagacttttatgtggaaggcttacctgagggtgtgccattccgaagaccatcgacttttggcattccgaggctggagaagatactcagaaacaaagccaaaattaagttcatcattaaaaagcccgaaatgtttgagacggcgattaaggagagcacctcctctaagagccctcccagaaaaataaattcatcacccaatgttaatactactgcatcaggtgttgaagaccttaacatcattcaggtgacaattccagatgatgataatgaaagactctcgaaagttgaaaaagctagacagctaagagaacaagtgaatgacctctttagtcggaaatttggtgaagctattggtatgggttttcctgtgaaagttccctacaggaaaatcacaattaaccctggctgtgtggtggttgatggcatgcccccgggggtgtccttcaaagcccccagctacctggaaatcagctccatgagaaggatcttagactctgccgagtttatcaaattcacggtcattagaccatttccaggacttgtgattaataaccagctggttgatcagagtgagtcagaaggccccgtgatacaagaatcagctgaaccaagccagttggaagttccagccacagaaggtaaaaggacctcttccctcctagggtaaatcagcttctgtgtcagggatgctgtgtggtgtccatctgaaccccctgcatacgcgtagctaatgtgatctccccactttcacataagatggtggccctgccttcagggaatgtgggagccaggtgggagccttcccggatatttaagctagaagattctacagggagattctccttggatcaatatatgtctctcagtcaaagatgtaaaagcacttttgccttaaaaagaatgttctgtttctaaatagagtcaacgttgtcctcctcattggaattcactatgagtcagaatcattagactgacttttttttttccatagtaatagtattttgcagagtctcacagagctgcagatcttttgttcatcttgcagagttaacaagtctgatcctgttagtccagatttcttaaatttggccaagttataataggagcagtagcttgagacccgaagtcaggaaactttgacaatggatttttttttttaatccagagacttgtactggaatttgccttaccctgtcagctcatggacttaaggtttcatcccgctttatgagtgcttctgaatccaagtcattgttacctgaatttgcaaattaagttgtgatattcgtgactgttaaattcctgtaattagattaacctctttgcttgcttgtttgttttctctcctattttagcttaaagtatcagtggttgagaagagcttttcggacctgttactaccccaagctgtgtaatatacttgtataacagaaataccttctatacaaacctttttttctacttttagatagaaatgtctactttttcagcagttctgtgaattaaagagcagagtgactgtgggtctggaatggctggtgtacttgggaatgtactatcaggattttacagcaatgctgggaaatgacagggaaaatgacaggaatgaatctcaccagattttttatgtactcagcagagccttgagttacggtgtttattttccaatcaagtgaagatatctcctacttctcctactggaacatctcagcttctgcagtgaagaaaaattcctgtgatagttcagttctttagtttttctatttgaaaaaaaaaaatcatttaaatgatcctttgttcacggctctccttaatgactgagtgaacagttcctatctgtatatttgactaaaccttttcctaagctatctctcatggttcctatgtttttttatcataattaaaagcaaaaccatctggatcacctaacagtcagaggtcagtatctcagcgtgtgaattatagaggaaatacagagagaacctcttccacttttacttttcgtccaaataaaatgcatggtgtaccagaagttgaagatcgggttgaggattggggctagctcgatgacactaaggccccaacatcgcgggacctgctgtggcgcggattcttaggaacgctgttctagccggccccctctccaggggtcgccgtggccggcattatttcctagttcttcttgtaaccctgaggtgccagcgcggggagtgaggaggggtcagggggctaaggatgcaacctctgacgttctgcgccttcctaggagagtcttacatgtgttgagatttcacaagcaatgcgagttgtaaaataccagctctacaagaagctaggctctgtgacggcatagttttcagtagctttatcacaatattcacaatggagaattatatgacatggtagcagaaataggcccttttatgtgttgcttctattttacctcaaattgtagatatagggtaatcaataaaatccatccatgcctttcacacactaagt

SEQ ID NO: 4641 - protein, 829 aa, Homo sapiens
MHKMKSTTQANRMSVDAVEIETLRKTVEDYFCFCYGKALGKSTVVPVPYEKMLRDQSAVVVQGLPEGVAFKHPENYDLATLKWILENKAGISFIIKRPFLEPKKHVGGRVMVTDADRSILSPGGSCGPIKVKTEPTEDSGSHHSSEGNEGTEMEVPAEDSTQHVPSETSEDPEVEVTIEDDDYSPPSKRPKANELPQPPVPEPANAGKRKVREFNFEKWNARITDLRKQVEELFERKYAQAIKAKGPVTIPYPLFQSHVEDLYVEGLPEGIPFRRPSTYGIPRLERILLAKERIRFVIKKHELLNSTREDLQLDKPASGVKEEWYARITKLRKMVDQLFCKKFAEALGSTEAKAVPYQKFEAHPNDLYVEGLPENIPFRSPSWYGIPRLEKIIQVGNRIKFVIKRPELLTHSTTEVTQPRTNTPAQALGLTEAVKVPYPVFESNPEFLYVEGLPEGIPFRSPTWFGIPRLERIVRGSNKIKFVVKKPELVISYLPPGMASKINTKALQSPKRPRSPGSNSKVPEIEVTVEGPNNNNPQTSAVRTPTQTNGSNVPFKPRGREFSFEAWNAKITDLKQKVENLFNEKCGEALGLKQAVKVPFALFESFPEDFYVEGLPEGVPFRRPSTFGIPRLEKILRNKAKIKFIIKKPEMFETAIKESTSSKSPPRKINSSPNVNTTASGVEDLNIIQVTIPDDDNERLSKVEKARQLREQVNDLFSRKFGEAIGMGFPVKVPYRKITINPGCVVVDGMPPGVSFKAPSYLEISSMRRILDSAEFIKFTVIRPFPGLVINNQLVDQSESEGPVIQESAEPSQLEVPATEGKRTSSLLG

SEQ ID NO: 4642 - DNA, 5096 bp, Homo sapiens
aaaaaaaaaaaaaaaaaaaaaaaaaaaagaaaaaagaaaaaaaaaaggaggaggaggaggagggtgagagagaagctgggagagcagagaaaaggggccaccggtcgcccccccgcttccccgcacgcgctctccagccgcggccgcccgcctgccgcggtcaccccggcctctgcctctgtcccccagtgatcggatcaaggcgctgagcgaggccctgcctgcggggcggccatgcggcggtgacaggagcgcgaccgacacgcacgggcccctcgccccctctcgcctcccgtccgctcgccagctcccctcagccgaggctgctccgcggcggccgcagcccgcgcgcggcccacactcgcctcccctcggcacccccggccccggagctgcctggaggcggccgcactcggggatcatggcccaagttgcaatgtccaccctccccgttgaagatgaggagtcctcggagagcaggatggtggtgacattcctcatgtcagctctcgagtccatgtgtaaagaactggccaagtccaaagccgaagtggcctgcattgcagtgtatgaaacagacgtgtttgtcgtcggaactgaaagaggacgtgcttttgtcaataccagaaaggattttcaaaaagattttgtaaaatattgtgttgaagaagaagaaaaagctgcagagatgcataaaatgaaatctacaacccaggcaaatcggatgagtgtagatgctgtagaaattgaaacactcagaaaaacagttgaggactatttctgcttttgctatgggaaagctttaggcaaatccacagtggtacctgtaccatatgagaagatgctgcgagaccagtcggctgtggtagtgcaggggcttccggaaggtgttgcctttaaacaccccgagaactatgatcttgcaaccctgaaatggattttggagaacaaagcagggatttcattcatcattaagagaccttttttagagccaaagaagcatgtaggtggtcgtgtgatggtaacagatgctgacaggtcaatactatctccaggtggaagttgtggccccatcaaagtgaaaactgaacccacagaagattctggcatttccctggaaatggcagctgtgacagtaaaggaagaatcagaagatcctgattattatcaatataacattcaaggaagccaccattcttcagagggcaatgaaggcacagaaatggaagtaccagcagaagattctactcaacatgtcccttcagaaacaagtgaggaccctgaagttgaggtgactattgaagatgatgattattctccaccgtctaagagaccaaaggccaatgagctaccgcagccaccagtcccggaacccgccaatgctgggaagcggaaagtgagggagttcaacttcgagaaatggaatgctcgcatcactgatctacgtaaacaagttgaagaattgtttgaaaggaaatatgctcaagccataaaagccaaaggtccggtgacgatcccgtaccctcttttccagtctcatgttgaagatctttatgtagaaggacttcctgaaggaattccttttagaaggccatctacttacggaattcctcgcctggagaggatattacttgcaaaggaaaggattcgttttgtgattaagaaacatgagcttctgaattcaacacgtgaagatttacagcttgataagccagcttcaggagtaaaggaagaatggtatgccagaatcactaaattaagaaagatggtggatcagcttttctgcaaaaaatttgcggaagccttggggagcactgaagccaaggctgtaccgtaccaaaaatttgaggcacacccgaatgatctgtacgtggaaggactgccagaaaacattcctttccgaagtccctcatggtatggaatcccaaggctggaaaaaatcattcaagtgggcaatcgaattaaatttgttattaaaagaccagaacttctgactcacagtaccactgaagttactcagccaagaacgaatacaccagtcaaagaagattggaatgtcagaattaccaagctacggaagcaagtggaagagatttttaatttgaaatttgctcaagctcttggactcaccgaggcagtaaaagtaccatatcctgtgtttgaatcaaacccggagttcttgaaaggatcgtccgcgggagtaataaaatcaagttcgttgttaaaaaacctgaactagttatttcctacttgcctcctgggatggctagtaaaataaacactaaagctttgcagtcccccaaaagaccacgaagtcctgggagtaattcaaaggttcctgaaattgaggtcaccgtggaaggccctaataacaacaatcctcaaacctcagctgttcgaaccccgacccagactaacggttctaacgttcccttcaagccacgagggagagagttttcctttgaggcctggaatgccaaaatcacggacctaaaacagaaagttgaaaatctcttcaatgagaaatgtggggaagctcttggccttaaacaagctgtgaaggtgccgttcgcgttatttgagtctttcccggaagacttttatgtggaaggcttacctgagggtgtgccattccgaagaccatcgacttttggcattccgaggctggagaagatactcagaaacaaagccaaaattaagttcatcattaaaaagcccgaaatgtttgagacggcgattaaggagagcacctcctctaagagccctcccagaaaaataaattcatcacccaatgttaatactactgcatcaggtgttgaagaccttaacatcattcaggtgacaattccagatgatgataatgaaagactctcgaaagttgaaaaagctagacagctaagagaacaagtgaatgacctctttagtcggaaatttggtgaagctattggtatgggttttcctgtgaaagttccctacaggaaaatcacaattaaccctggctgtgtggtggttgatggcatgcccccgggggtgtccttcaaagcccccagctacctggaaatcagctccatgagaaggatcttagactctgccgagtttatcaaattcacggtcattagaccatttccaggacttgtgattaataaccagctggttgatcagagtgagtcagaaggccccgtgatacaagaatcagctgaaccaagccagttggaagttccagccacagaaggtaaaaggacctcttccctcctagggtaaatcagcttctgtgtcagggatgctgtgtggtgtccatctgaaccccctgcatacgcgtagctaatgtgatctccccactttcacataagatggtggccctgccttcagggaatgtgggagccaggtgggagccttcccggatatttaagctagaagattctacagggagattctccttggatcaatatatgtctctcagtcaaagatgtaaaagcacttttgccttaaaaagaatgttctgtttctaaatagagtcaacgttgtcctcctcattggaattcactatgagtcagaatcattagactgacttttttttttccatagtaatagtattttgcagagtctcacagagctgcagatcttttgttcatcttgcagagttaacaagtctgatcctgttagtccagatttcttaaatttggccaagttataataggagcagtagcttgagacccgaagtcaggaaactttgacaatggatttttttttttaatccagagacttgtactggaatttgccttaccctgtcagctcatggacttaaggtttcatcccgctttatgagtgcttctgaatccaagtcattgttacctgaatttgcaaattaagttgtgatattcgtgactgttaaattcctgtaattagattaacctctttgcttgcttgtttgttttctctcctattttagcttaaagtatcagtggttgagaagagcttttcggacctgttactaccccaagctgtgtaatatacttgtataacagaaataccttctatacaaacctttttttctacttttagatagaaatgtctactttttcagcagttctgtgaattaaagagcagagtgactgtgggtctggaatggctggtgtacttgggaatgtactatcaggattttacagcaatgctgggaaatgacagggaaaatgacaggaatgaatctcaccagattttttatgtactcagcagagccttgagttacggtgtttattttccaatcaagtgaagatatctcctacttctcctactggaacatctcagcttctgcagtgaagaaaaattcctgtgatagttcagttctttagtttttctatttgaaaaaaaaaaatcatttaaatgatcctttgttcacggctctccttaatgactgagtgaacagttcctatctgtatatttgactaaaccttttcctaagctatctctcatggttcctatgtttttttatcataattaaaagcaaaaccatctggatcacctaacagtcagaggtcagtatctcagcgtgtgaattatagaggaaatacagagagaacctcttccacttttacttttcgtccaaataaaatgcatggtgtaccagaagttgaagatcgggttgaggattggggctagctcgatgacactaaggccccaacatcgcgggacctgctgtggcgcggattcttaggaacgctgttctagccggccccctctccaggggtcgccgtggccggcattatttcctagttcttcttgtaaccctgaggtgccagcgcggggagtgaggaggggtcagggggctaaggatgcaacctctgacgttctgcgccttcctaggagagtcttacatgtgttgagatttcacaagcaatgcgagttgtaaaataccagctctacaagaagctaggctctgtgacggcatagttttcagtagctttatcacaatattcacaatggagaattatatgacatggtagcagaaataggcccttttatgtgttgcttctattttacctcaaattgtagatatagggtaatcaataaaatccatccatgcctttcacacactaagt

SEQ ID NO: 4643 - protein, 605 aa, Homo sapiens; identical to SEQ ID NO: 4221

SEQ ID NO: 4644 - DNA, 4372 bp, Homo sapiens
aaaaaaaaaaaaaaaaaaaaaaaaaaaagaaaaaagaaaaaaaaaaggaggaggaggaggagggtgagagagaagctgggagagcagagaaaaggggccaccggtcgcccccccgcttccccgcacgcgctctccagccgcggccgcccgcctgccgcggtcaccccggcctctgcctctgtcccccagtgatcggatcaaggcgctgagcgaggccctgcctgcggggcggccatgcggcggtgacaggagcgcgaccgacacgcacgggcccctcgccccctctcgcctcccgtccgctcgccagctcccctcagccgaggctgctccgcggcggccgcagcccgcgcgcggcccacactcgcctccccgttgaagatgaggagtcctcggagagcaggatggtggtgacattcctcatgtcagctctcgagtccatgtgtaaagaactggccaagtccaaagccgaagtggcctgcattgcagtgtatgaaacagacgtgtttgtcgtcggaactgaaagaggacgtgcttttgtcaataccagaaaggattttcaaaaagattttgtaaaatattgtgttgaagaagaagaaaaagctgcagagatgcataaaatgaaatctacaacccaggcaaatcggatgagtgtagatgctgtagaaattgaaacactcagaaaaacagttgaggactatttctgcttttgctatgggaaagctttaggcaaatccacagtggtacctgtaccatatgagaagatgctgcgagaccagtcggctgtggtagtgcaggggcttccggaaggtgttgcctttaaacaccccgagaactatgatcttgcaaccctgaaatggattttggagaacaaagcagggatttcattcatcattaagagaccttttttagagccaaagaagcatgtaggtggtcgtgtgatggtaacagatgctgacaggtcaatactatctccaggtggaagttgtggccccatcaaagtgaaaactgaacccacagaagattctggcatttccctggaaatggcagctgtgacagtaaaggaagaatcagaagatcctgattattatcaatataacattcaagcaggcccttctgaaactgatgatgttgatgaaaaacagcccctatcgaagcctttgcaaggaagccaccattcttcagagggcaatgaaggcacagaaatggaagtaccagcagaagatgatgattattctccaccgtctaagagaccaaaggccaatgagctaccgcagccaccagtcccggaacccgccaatgctgggaagcggaaagtgagggagttcaacttcgagaaatggaatgctcgcatcactgatctacgtaaacaagttgaagaattgtttgaaaggaaatatgctcaagccataaaagccaaaggtccggtgacgatcccgtaccctcttttccagtctcatgttgaagatctttatgtagaaggacttcctgaaggaattccttttagaaggccatctacttacggaattcctcgcctggagaggatattacttgcaaaggaaaggattcgttttgtgattaagaaacatgagcttctgaattcaacacgtgaagatttacagcttgataagccagcttcaggagtaaaggaagaatggtatgccagaatcactaaattaagaaagatggtggatcagcttttctgcaaaaaatttgcggaagccttggggagcactgaagccaaggctgtaccgtaccaaaaatttgaggcacacccgaatgatctgtacgtggaaggactgccagaaaacattcctttccgaagtccctcatggtatggaatcccaaggctggaaaaaatcattcaagtgggcaatcgaattaaatttgttattaaaagaccagaacttctgactcacagtaccactgaagttactcagccaagaacgaatacaccagtcaaagaagattggaatgtcagaattaccaagctacggaagcaagtggaagagatttttaatttgaaatttgctcaagctcttggactcaccgaggcagtaaaagtaccatatcctgtgtttgaatcaaacccggagttcttgaaaggatcgtccgcgggagtaataaaatcaagttcgttgttaaaaaacctgaactagttatttcctacttgcctcctgggatggctagtaaaataaacactaaagctttgcagtcccccaaaagaccacgaagtcctgggagtaattcaaaggttcctgaaattgaggtcaccgtggaaggccctaataacaacaatcctcaaacctcagctgttcgaaccccgacccagactaacggttctaacgttcccttcaagccacgagggagagagttttcctttgaggcctggaatgccaaaatcacggacctaaaacagaaagttgaaaatctcttcaatgagaaatgtggggaagctcttggccttaaacaagctgtgaaggtgccgttcgcgttatttgagtctttcccggaagacttttatgtggaaggcttacctgagggtgtgccattccgaagaccatcgacttttggcattccgaggctggagaagatactcagaaacaaagccaaaattaagttcatcattaaaaagcccgaaatgtttgagacggcgattaaggagagcacctcctctaagagccctcccagaaaaataaattcatcacccaatgttaatactactgcatcaggtgttgaagaccttaacatcattcaggtgacaattccagatgatgataatgaaagactctcgaaagttgaaaaagctagacagctaagagaacaagtgaatgacctctttagtcggaaatttggtgaagctattggtatgggttttcctgtgaaagttccctacaggaaaatcacaattaaccctggctgtgtggtggttgatggcatgcccccgggggtgtccttcaaagcccccagctacctggaaatcagctccatgagaaggatcttagactctgccgagtttatcaaattcacggtcattagaccatttccaggacttgtgattaataaccagctggttgatcagagtgagtcagaaggccccgtgatacaagaatcagctgaaccaagccagttggaagttccagccacagaagaaataaaagagactgatggaagctctcagatcaagcaagaaccagaccccacgtggtagacctcttccctcctaggcttaaagtatcagtggttgagaagagcttttcggacctgttactaccccaagctgtgtaatatacttgtataacagaaataccttctatacaaacctttttttctacttttagatagaaatgtctactttttcagcagttctgtgaattaaagagcagagtgactgtgggtctggaatggctggtgtacttgggaatgtactatcaggattttacagcaatgctgggaaatgacagggaaaatgacaggaatgaatctcaccagattttttatgtactcagcagagccttgagttacggtgtttattttccaatcaagtgaagatatctcctacttctcctactggaacatctcagcttctgcagtgaagaaaaattcctgtgatagttcagttctttagtttttctatttgaaaaaaaaaaatcatttaaatgatcctttgttcacggctctccttaatgactgagtgaacagttcctatctgtatatttgactaaaccttttcctaagctatctctcatggttcctatgtttttttatcataattaaaagcaaaaccatctggatcacctaacagtcagaggtcagtatctcagcgtgtgaattatagaggaaatacagagagaacctcttccacttttacttttcgtccaaataaaatgcatggtgtaccagaagttgaagatcgggttgaggattggggctagctcgatgacactaaggccccaacatcgcgggacctgctgtggcgcggattcttaggaacgctgttctagccggccccctctccaggggtcgccgtggccggcattatttcctagttcttcttgtaaccctgaggtgccagcgcggggagtgaggaggggtcagggggctaaggatgcaacctctgacgttctgcgccttcctaggagagtcttacatgtgttgagatttcacaagcaatgcgagttgtaaaataccagctctacaagaagctaggctctgtgacggcatagttttcagtagctttatcacaatattcacaatggagaattatatgacatggtagcagaaataggcccttttatgtgttgcttctattttacctcaaattgtagatatagggtaatcaataaaatccatccatgcctttcacacactaagt

SEQ ID NO: 4645 - protein, 584 aa, Homo sapiens; identical to SEQ ID NO: 4077

SEQ ID NO: 4646 - DNA, 4984 bp, Homo sapiens
aaaaaaaaaaaaaaaaaaaaaaaaaaaagaaaaaagaaaaaaaaaaggaggaggaggaggagggtgagagagaagctgggagagcagagaaaaggggccaccggtcgcccccccgcttccccgcacgcgctctccagccgcggccgcccgcctgccgcggtcaccccggcctctgcctctgtcccccagtgatcggatcaaggcgctgagcgaggccctgcctgcggggcggccatgcggcggtgacaggagcgcgaccgacacgcacgggcccctcgccccctctcgcctcccgtccgctcgccagctcccctcagccgaggctgctccgcggcggccgcagcccgcgcgcggcccacactcgcctcccctcggcacccccggccccggagctgcctggaggcggccgcactcggtgtaaagaactggccaagtccaaagccgaagtggcctgcattgcagtgtatgaaacagacgtgtttgtcgtcggaactgaaagaggacgtgcttttgtcaataccagaaaggattttcaaaaagattttgtaaaatattgtgttgaagaagaagaaaaagctgcagagatgcataaaatgaaatctacaacccaggcaaatcggatgagtgtagatgctgtagaaattgaaacactcagaaaaacagttgaggactatttctgcttttgctatgggaaagctttaggcaaatccacagtggtacctgtaccatatgagaagatgctgcgagaccagtcggctgtggtagtgcaggggcttccggaaggtgttgcctttaaacaccccgagaactatgatcttgcaaccctgaaatggattttggagaacaaagcagggatttcattcatcattaagagaccttttttagagccaaagaagcatgtaggtggtcgtgtgatggtaacagatgctgacaggtcaatactatctccaggtggaagttgtggccccatcaaagtgaaaactgaacccacagaagattctggcatttccctggaaatggcagctgtgacagtaaaggaagaatcagaagatcctgattattatcaatataacattcaagcaggcccttctgaaactgatgatgttgatgaaaaacagcccctatcgaagcctttgcaaggaagccaccattcttcagagggcaatgaaggcacagaaatggaagtaccagcagaagatgatgattattctccaccgtctaagagaccaaaggccaatgagctaccgcagccaccagtcccggaacccgccaatgctgggaagcggaaagtgagggagttcaacttcgagaaatggaatgctcgcatcactgatctacgtaaacaagttgaagaattgtttgaaaggaaatatgctcaagccataaaagccaaaggtccggtgacgatcccgtaccctcttttccagtctcatgttgaagatctttatgtagaaggacttcctgaaggaattccttttagaaggccatctacttacggaattcctcgcctggagaggatattacttgcaaaggaaaggattcgttttgtgattaagaaacatgagcttctgaattcaacacgtgaagatttacagcttgataagccagcttcaggagtaaaggaagaatggtatgccagaatcactaaattaagaaagatggtggatcagcttttctgcaaaaaatttgcggaagccttggggagcactgaagccaaggctgtaccgtaccaaaaatttgaggcacacccgaatgatctgtacgtggaaggactgccagaaaacattcctttccgaagtccctcatggtatggaatcccaaggctggaaaaaatcattcaagtgggcaatcgaattaaatttgttattaaaagaccagaacttctgactcacagtaccactgaagttactcagccaagaacgaatacaccagctcaagctcttggactcaccgaggcagtaaaagtaccatatcctgtgtttgaatcaaacccggagttcttgtatgtggaaggcttgccagaggggattcccttccgaagccctacctggtttggaattccacgacttgaaaggatcgtccgcgggagtaataaaatcaagttcgttgttaaaaaacctgaactagttatttcctacttgcctcctgggatggctagtaaaataaacactaaagctttgcagtcccccaaaagaccacgaagtcctgggagtaattcaaaggttcctgaaattgaggtcaccgtggaaggccctaataacaacaatcctcaaacctcagctgttcgaaccccgacccagactaacggttctaacgttcccttcaagccacgagggagagagttttcctttgaggcctggaatgccaaaatcacggacctaaaacagaaagttgaaaatctcttcaatgagaaatgtggggaagctcttggccttaaacaagctgtgaaggtgccgttcgcgttatttgagtctttcccggaagacttttatgtggaaggcttacctgagggtgtgccattccgaagaccatcgacttttggcattccgaggctggagaagatactcagaaacaaagccaaaattaagttcatcattaaaaagcccgaaatgtttgagacggcgattaaggagagcacctcctctaagagccctcccagaaaaataaattcatcacccaatgttaatactactgcatcaggtgttgaagaccttaacatcattcaggtgacaattccagatgatgataatgaaagactctcgaaagttgaaaaagctagacagctaagagaacaagtgaatgacctctttagtcggaaatttggtgaagctattggtatgggttttcctgtgaaagttccctacaggaaaatcacaattaaccctggctgtgtggtggttgatggcatgcccccgggggtgtccttcaaagcccccagctacctggaaatcagctccatgagaaggatcttagactctgccgagtttatcaaattcacggtcattagaccatttccaggacttgtgattaataaccagctggttgatcagagtgagtcagaaggccccgtgatacaagaatcagctgaaccaagccagttggaagttccagccacagaaggtaaaaggacctcttccctcctagggtaaatcagcttctgtgtcagggatgctgtgtggtgtccatctgaaccccctgcatacgcgtagctaatgtgatctccccactttcacataagatggtggccctgccttcagggaatgtgggagccaggtgggagccttcccggatatttaagctagaagattctacagggagattctccttggatcaatatatgtctctcagtcaaagatgtaaaagcacttttgccttaaaaagaatgttctgtttctaaatagagtcaacgttgtcctcctcattggaattcactatgagtcagaatcattagactgacttttttttttccatagtaatagtattttgcagagtctcacagagctgcagatcttttgttcatcttgcagagttaacaagtctgatcctgttagtccagatttcttaaatttggccaagttataataggagcagtagcttgagacccgaagtcaggaaactttgacaatggatttttttttttaatccagagacttgtactggaatttgccttaccctgtcagctcatggacttaaggtttcatcccgctttatgagtgcttctgaatccaagtcattgttacctgaatttgcaaattaagttgtgatattcgtgactgttaaattcctgtaattagattaacctctttgcttgcttgtttgttttctctcctattttagcttaaagtatcagtggttgagaagagcttttcggacctgttactaccccaagctgtgtaatatacttgtataacagaaataccttctatacaaacctttttttctacttttagatagaaatgtctactttttcagcagttctgtgaattaaagagcagagtgactgtgggtctggaatggctggtgtacttgggaatgtactatcaggattttacagcaatgctgggaaatgacagggaaaatgacaggaatgaatctcaccagattttttatgtactcagcagagccttgagttacggtgtttattttccaatcaagtgaagatatctcctacttctcctactggaacatctcagcttctgcagtgaagaaaaattcctgtgatagttcagttctttagtttttctatttgaaaaaaaaaaatcatttaaatgatcctttgttcacggctctccttaatgactgagtgaacagttcctatctgtatatttgactaaaccttttcctaagctatctctcatggttcctatgtttttttatcataattaaaagcaaaaccatctggatcacctaacagtcagaggtcagtatctcagcgtgtgaattatagaggaaatacagagagaacctcttccacttttacttttcgtccaaataaaatgcatggtgtaccagaagttgaagatcgggttgaggattggggctagctcgatgacactaaggccccaacatcgcgggacctgctgtggcgcggattcttaggaacgctgttctagccggccccctctccaggggtcgccgtggccggcattatttcctagttcttcttgtaaccctgaggtgccagcgcggggagtgaggaggggtcagggggctaaggatgcaacctctgacgttctgcgccttcctaggagagtcttacatgtgttgagatttcacaagcaatgcgagttgtaaaataccagctctacaagaagctaggctctgtgacggcatagttttcagtagctttatcacaatattcacaatggagaattatatgacatggtagcagaaataggcccttttatgtgttgcttctattttacctcaaattgtagatatagggtaatcaataaaatccatccatgcctttcacacactaagt

SEQ ID NO: 4647 - protein, 854 aa, Homo sapiens
MHKMKSTTQANRMSVDAVEIETLRKTVEDYFCFCYGKALGKSTVVPVPYEKMLRDQSAVVVQGLPEGVAFKHPENYDLATLKWILENKAGISFIIKRPFLEPKKHVGGRVMVTDADRSILSPGGSCGPIKVKTEPTEDSGISLEMAAVTVKEESEDPDYYQYNIQAGPSETDDVDEKQPLSKPLQGSHHSSEGNEGTEMEVPAEDDDYSPPSKRPKANELPQPPVPEPANAGKRKVREFNFEKWNARITDLRKQVEELFERKYAQAIKAKGPVTIPYPLFQSHVEDLYVEGLPEGIPFRRPSTYGIPRLERILLAKERIRFVIKKHELLNSTREDLQLDKPASGVKEEWYARITKLRKMVDQLFCKKFAEALGSTEAKAVPYQKFEAHPNDLYVEGLPENIPFRSPSWYGIPRLEKIIQVGNRIKFVIKRPELLTHSTTEVTQPRTNTPAQALGLTEAVKVPYPVFESNPEFLYVEGLPEGIPFRSPTWFGIPRLERIVRGSNKIKFVVKKPELVISYLPPGMASKINTKALQSPKRPRSPGSNSKVPEIEVTVEGPNNNNPQTSAVRTPTQTNGSNVPFKPRGREFSFEAWNAKITDLKQKVENLFNEKCGEALGLKQAVKVPFALFESFPEDFYVEGLPEGVPFRRPSTFGIPRLEKILRNKAKIKFIIKKPEMFETAIKESTSSKSPPRKINSSPNVNTTASGVEDLNIIQVTIPDDDNERLSKVEKARQLREQVNDLFSRKFGEAIGMGFPVKVPYRKITINPGCVVVDGMPPGVSFKAPSYLEISSMRRILDSAEFIKFTVIRPFPGLVINNQLVDQSESEGPVIQESAEPSQLEVPATEGKRTSSLLG

SEQ ID NO: 4648 - DNA, 5323 bp, Homo sapiens
aaaaaaaaaaaaaaaaaaaaaaaaaaaagaaaaaagaaaaaaaaaaggaggaggaggaggagggtgagagagaagctgggagagcagagaaaaggggccaccggtcgcccccccgcttccccgcacgcgctctccagccgcggccgcccgcctgccgcggtcaccccggcctctgcctctgtcccccagtgatcggatcaaggcgctgagcgaggccctgcctgcggggcggccatgcggcggtgacaggagcgcgaccgacacgcacgggcccctcgccccctctcgcctcccgtccgctcgccagctcccctcagccgaggctgctccgcggcggccgcagcccgcgcgcggcccacactcgcctcccctcggcacccccggccccggagctgcctggaggcggccgcactcggggatcatggcccaagttgcaatgtccaccctccccgttgaagatgaggagtcctcggagagcaggatggtggtgacattcctcatgtcagctctcgagtccatgtgtaaagaactggccaagtccaaagccgaagtggcctgcattgcagtgtatgaaacagacgtgtttgtcgtcggaactgaaagaggacgtgcttttgtcaataccagaaaggattttcaaaaagattttgtaaaatattgtgttgaagaagaagaaaaagctgcagagatgcataaaatgaaatctacaacccaggcaaatcggatgagtgtagatgctgtagaaattgaaacactcagaaaaacagttgaggactatttctgcttttgctatgggaaagctttaggcaaatccacagtggtacctgtaccatatgagaagatgctgcgagaccagtcggctgtggtagtgcaggggcttccggaaggtgttgcctttaaacaccccgagaactatgatcttgcaaccctgaaatggattttggagaacaaagcagggatttcattcatcattaagagaccttttttagagccaaagaagcatgtaggtggtcgtgtgatggtaacagatgctgacaggtcaatactatctccaggtggaagttgtggccccatcaaagtgaaaactgaacccacagaagattctggcatttccctggaaatggcagctgtgacagtaaaggaagaatcagaagatcctgattattatcaatataacattcaagcaggcccttctgaaactgatgatgttgatgaaaaacagcccctatcgaagcctttgcaaggaagccaccattcttcagagggcaatgaaggcacagaaatggaagtaccagcagaagatgatgattattctccaccgtctaagagaccaaaggccaatgagctaccgcagccaccagtcccggaacccgccaatgctgggaagcggaaagtgagggagttcaacttcgagaaatggaatgctcgcatcactgatctacgtaaacaagttgaagaattgtttgaaaggaaatatgctcaagccataaaagccaaaggtccggtgacgatcccgtaccctcttttccagtctcatgttgaagatctttatgtagaaggacttcctgaaggaattccttttagaaggccatctacttacggaattcctcgcctggagaggatattacttgcaaaggaaaggattcgttttgtgattaagaaacatgagcttctgaattcaacacgtgaagatttacagcttgataagccagcttcaggagtaaaggaagaatggtatgccagaatcactaaattaagaaagatggtggatcagcttttctgcaaaaaatttgcggaagccttggggagcactgaagccaaggctgtaccgtaccaaaaatttgaggcacacccgaatgatctgtacgtggaaggactgccagaaaacattcctttccgaagtccctcatggtatggaatcccaaggctggaaaaaatcattcaagtgggcaatcgaattaaatttgttattaaaagaccagaacttctgactcacagtaccactgaagttactcagccaagaacgaatacaccagtcaaagaagattggaatgtcagaattaccaagctacggaagcaagtggaagagatttttaatttgaaatttgcttagatttgttgacagcggtttcctggagtgctgtcttgagaacgattctgaggaggctcagcaagaaagagtgtttcagttgattgggtgtgtctgtcatggagaaggaactcaagctcttggactcaccgaggcagtaaaagtaccatatcctgtgtttgaatcaaacccggagttcttgtatgtggaaggcttgccagaggggattcccttccgaagccctacctggtttggaattccacgacttgaaaggatcgtccgcgggagtaataaaatcaagttcgttgttaaaaaacctgaactagttatttcctacttgcctcctgggatggctagtaaaataaacactaaagctttgcagtcccccaaaagaccacgaagtcctgggagtaattcaaaggttcctgaaattgaggtcaccgtggaaggccctaataacaacaatcctcaaacctcagctgttcgaaccccgacccagactaacggttctaacgttcccttcaagccacgagggagagagttttcctttgaggcctggaatgccaaaatcacggacctaaaacagaaagttgaaaatctcttcaatgagaaatgtggggaagctcttggccttaaacaagctgtgaaggtgccgttcgcgttatttgagtctttcccggaagacttttatgtggaaggcttacctgagggtgtgccattccgaagaccatcgacttttggcattccgaggctggagaagatactcagaaacaaagccaaaattaagttcatcattaaaaagcccgaaatgtttgagacggcgattaaggagagcacctcctctaagagccctcccagaaaaataaattcatcacccaatgttaatactactgcatcaggtgttgaagaccttaacatcattcaggtgacaattccagatgatgataatgaaagactctcgaaagttgaaaaagctagacagctaagagaacaagtgaatgacctctttagtcggaaatttggtgaagctattggtatgggttttcctgtgaaagttccctacaggaaaatcacaattaaccctggctgtgtggtggttgatggcatgcccccgggggtgtccttcaaagcccccagctacctggaaatcagctccatgagaaggatcttagactctgccgagtttatcaaattcacggtcattagaccatttccaggacttgtgattaataaccagctggttgatcagagtgagtcagaaggccccgtgatacaagaatcagctgaaccaagccagttggaagttccagccacagaagaaataaaagagactgatggaagctctcagatcaagcaagaaccagaccccacgtggtagacctcttccctcctagggtaaatcagcttctgtgtcagggatgctgtgtggtgtccatctgaaccccctgcatacgcgtagctaatgtgatctccccactttcacataagatggtggccctgccttcagggaatgtgggagccaggtgggagccttcccggatatttaagctagaagattctacagggagattctccttggatcaatatatgtctctcagtcaaagatgtaaaagcacttttgccttaaaaagaatgttctgtttctaaatagagtcaacgttgtcctcctcattggaattcactatgagtcagaatcattagactgacttttttttttccatagtaatagtattttgcagagtctcacagagctgcagatcttttgttcatcttgcagagttaacaagtctgatcctgttagtccagatttcttaaatttggccaagttataataggagcagtagcttgagacccgaagtcaggaaactttgacaatggatttttttttttaatccagagacttgtactggaatttgccttaccctgtcagctcatggacttaaggtttcatcccgctttatgagtgcttctgaatccaagtcattgttacctgaatttgcaaattaagttgtgatattcgtgactgttaaattcctgtaattagattaacctctttgcttgcttgtttgttttctctcctattttagcttaaagtatcagtggttgagaagagcttttcggacctgttactaccccaagctgtgtaatatacttgtataacagaaataccttctatacaaacctttttttctacttttagatagaaatgtctactttttcagcagttctgtgaattaaagagcagagtgactgtgggtctggaatggctggtgtacttgggaatgtactatcaggattttacagcaatgctgggaaatgacagggaaaatgacaggaatgaatctcaccagattttttatgtactcagcagagccttgagttacggtgtttattttccaatcaagtgaagatatctcctacttctcctactggaacatctcagcttctgcagtgaagaaaaattcctgtgatagttcagttctttagtttttctatttgaaaaaaaaaaatcatttaaatgatcctttgttcacggctctccttaatgactgagtgaacagttcctatctgtatatttgactaaaccttttcctaagctatctctcatggttcctatgtttttttatcataattaaaagcaaaaccatctggatcacctaacagtcagaggtcagtatctcagcgtgtgaattatagaggaaatacagagagaacctcttccacttttacttttcgtccaaataaaatgcatggtgtaccagaagttgaagatcgggttgaggattggggctagctcgatgacactaaggccccaacatcgcgggacctgctgtggcgcggattcttaggaacgctgttctagccggccccctctccaggggtcgccgtggccggcattatttcctagttcttcttgtaaccctgaggtgccagcgcggggagtgaggaggggtcagggggctaaggatgcaacctctgacgttctgcgccttcctaggagagtcttacatgtgttgagatttcacaagcaatgcgagttgtaaaataccagctctacaagaagctaggctctgtgacggcatagttttcagtagctttatcacaatattcacaatggagaattatatgacatggtagcagaaataggcccttttatgtgttgcttctattttacctcaaattgtagatatagggtaatcaataaaatccatccatgcctttcacacactaagt

SEQ ID NO: 4649 - protein, 563 aa, Homo sapiens; identical to SEQ ID NO: 4097

SEQ ID NO: 4650 - DNA, 4362 bp, Homo sapiens
aaaaaaaaaaaaaaaaaaaaaaaaaaaagaaaaaagaaaaaaaaaaggaggaggaggaggagggtgagagagaagctgggagagcagagaaaaggggccaccggtcgcccccccgcttccccgcacgcgctctccagccgcggccgcccgcctgccgcggtcaccccggcctctgcctctgtcccccagtgatcggatcaaggcgctgagcgaggccctgcctgcggggcggccatgcggcggtgacaggagcgcgaccgacacgcacgggcccctcgccccctctcgcctcccgtccgctcgccagctcccctcagccgaggctgctccgcggcggccgcagcccgcgcgcggcccacactcgcctcccctcggcacccccggccccggagctgcctggaggcggccgcactcggtgtaaagaactggccaagtccaaagccgaagtggcctgcattgcagtgtatgaaacagacgtgtttgtcgtcggaactgaaagaggacgtgcttttgtcaataccagaaaggattttcaaaaagattttgtaaaatattgtgttgaagaagaagaaaaagctgcagagatgcataaaatgaaatctacaacccaggcaaatcggatgagtgtagatgctgtagaaattgaaacactcagaaaaacagttgaggactatttctgcttttgctatgggaaagctttaggcaaatccacagtggtacctgtaccatatgagaagatgctgcgagaccagtcggctgtggtagtgcaggggcttccggaaggtgttgcctttaaacaccccgagaactatgatcttgcaaccctgaaatggattttggagaacaaagcagggatttcattcatcattaagagaccttttttagagccaaagaagcatgtaggtggtcgtgtgatggtaacagatgctgacaggtcaatactatctccaggtggaagttgtggccccatcaaagtgaaaactgaacccacagaagattctggcatttccctggaaatggcagctgtgacagtaaaggaagaatcagaagatcctgattattatcaatataacattcaagcaggcccttctgaaactgatgatgttgatgaaaaacagcccctatcgaagcctttgcaaggaagccaccattcttcagagggcaatgaaggcacagaaatggaagtaccagcagaagattctactcaacatgtcccttcagaaacaagtgaggaccctgaagttgaggtgactattgaagatgatgattattctccaccgtctaagagaccaaaggccaatgagctaccgcagccaccagtcccggaacccgccaatgctgggaagcggaaagtgagggagttcaacttcgagaaatggaatgctcgcatcactgatctacgtaaacaagttgaagaattgtttgaaaggaaatatgctcaagccataaaagccaaaggtccggtgacgatcccgtaccctcttttccagtctcatgttgaagatctttatgtagaaggacttcctgaaggaattccttttagaaggccatctacttacggaattcctcgcctggagaggatattacttgcaaaggaaaggattcgttttgtgattaagaaacatgagcttctgaattcaacacgtgaagatttacagcttgataagccagcttcaggagtaaaggaagaatggtatgccagaatcactaaattaagaaagatggtggatcagcttttctgcaaaaaatttgcggaagccttggggagcactgaagccaaggctgtaccgtaccaaaaatttgaggcacacccgaatgatctgtacgtggaaggactgccagaaaacattcctttccgaagtccctcatggtatggaatcccaaggctggaaaaaatcattcaagtgggcaatcgaattaaatttgttattaaaagaccagaacttctgactcacagtaccactgaagttactcagccaagaacgaatacaccagtcaaagaagattggaatgtcagaattaccaagctacggaagcaagtggaagagatttttaatttgaaatttgcttagatttgttgacagcggtttcctggagtgctgtcttgagaacgattctgaggaggctcagcaagaaagagtgtttcagttgattgggtgtgtctgtcatggagaaggaactcaagctcttggactcaccgaggcagtaaaagtaccatatcctgtgtttgaatcaaacccggagttcttgtatgtggaaggcttgccagaggggattcccttccgaagccctacctggtttggaattccacgacttgaaaggatcgtccgcgggagtaataaaatcaagttcgttgttaaaaaacctgaactagttatttcctacttgcctcctgggatggctagtaaaataaacactaaagctttgcagtcccccaaaagaccacgaagtcctgggagtaattcaaaggttcctgaaattgaggtcaccgtggaaggccctaataacaacaatcctcaaacctcagctgttcgaaccccgacccagactaacggttctaacgttcccttcaagccacgagggagagagttttcctttgaggcctggaatgccaaaatcacggacctaaaacagaaagttgaaaatctcttcaatgagaaatgtggggaagctcttggccttaaacaagctgtgaaggtgccgttcgcgttatttgagtctttcccggaagacttttatgtggaaggcttacctgagggtgtgccattccgaagaccatcgacttttggcattccgaggctggagaagatactcagaaacaaagccaaaattaagttcatcattaaaaagcccgaaatgtttgagacggcgattaaggagagcacctcctctaagagccctcccagaaaaataaattcatcacccaatgttaatactactgcatcaggtgttgaagaccttaacatcattcaggtgacaattccagatgatgataatgaaagactctcgaaagttgaaaaagctagacagctaagagaacaagtgaatgacctctttagtcggaaatttggtgaagctattggtatgggttttcctgtgaaagttccctacaggaaaatcacaattaaccctggctgtgtggtggttgatggcatgcccccgggggtgtccttcaaagcccccagctacctggaaatcagctccatgagaaggatcttagactctgccgagtttatcaaattcacggtcattagaccatttccaggacttgtgattaataaccagctggttgatcagagtgagtcagaaggccccgtgatacaagaatcagctgaaccaagccagttggaagttccagccacagaagaaataaaagagactgatggaagctctcagatcaagcaagaaccagaccccacgtggtagacctcttccctcctaggcttaaagtatcagtggttgagaagagcttttcggacctgttactaccccaagctgtagccttgagttacggtgtttattttccaatcaagtgaagatatctcctacttctcctactggaacatctcagcttctgcagtgaagaaaaattcctgtgatagttcagttctttagtttttctatttgaaaaaaaaaaatcatttaaatgatcctttgttcacggctctccttaatgactgagtgaacagttcctatctgtatatttgactaaaccttttcctaagctatctctcatggttcctatgtttttttatcataattaaaagcaaaaccatctggatcacctaacagtcagaggtcagtatctcagcgtgtgaattatagaggaaatacagagagaacctcttccacttttacttttcgtccaaataaaatgcatggtgtaccagaagttgaagatcgggttgaggattggggctagctcgatgacactaaggccccaacatcgcgggacctgctgtggcgcggattcttaggaacgctgttctagccggccccctctccaggggtcgccgtggccggcattatttcctagttcttcttgtaaccctgaggtgccagcgcggggagtgaggaggggtcagggggctaaggatgcaacctctgacgttctgcgccttcctaggagagtcttacatgtgttgagatttcacaagcaatgcgagttgtaaaataccagctctacaagaagctaggctctgtgacggcatagttttcagtagctttatcacaatattcacaatggagaattatatgacatggtagcagaaataggcccttttatgtgttgcttctattttacctcaaattgtagatatagggtaatcaataaaatccatccatgcctttcacacactaagt

SEQ ID NO: 4651 - protein, 495 aa, Homo sapiens; identical to SEQ ID NO: 4057

SEQ ID NO: 4652 - DNA, 3716 bp, Homo sapiens
aaaaaaaaaaaaaaaaaaaaaaaaaaaagaaaaaagaaaaaaaaaaggaggaggaggaggagggtgagagagaagctgggagagcagagaaaaggggccaccggtcgcccccccgcttccccgcacgcgctctccagccgcggccgcccgcctgccgcggtcaccccggcctctgcctctgtcccccagtgatcggatcaaggcgctgagcgaggccctgcctgcggggcggccatgcggcggtgacaggagcgcgaccgacacgcacgggcccctcgccccctctcgcctcccgtccgctcgccagctcccctcagccgaggctgctccgcggcggccgcagcccgcgcgcggcccacactcgcctcccctcggcacccccggccccggagctgcctggaggcggccgcactcggtgtaaagaactggccaagtccaaagccgaagtggcctgcattgcagtgtatgaaacagacgtgtttgtcgtcggaactgaaagaggacgtgcttttgtcaataccagaaaggattttcaaaaagattttgtaaaatattgtgttgaagaagaagaaaaagctgcagagatgcataaaatgaaatctacaacccaggcaaatcggatgagtgtagatgctgtagaaattgaaacactcagaaaaacagttgaggactatttctgcttttgctatgggaaagctttaggcaaatccacagtggtacctgtaccatatgagaagatgctgcgagaccagtcggctgtggtagtgcaggggcttccggaaggtgttgcctttaaacaccccgagaactatgatcttgcaaccctgaaatggattttggagaacaaagcagggatttcattcatcattaagagaccttttttagagccaaagaagcatgtaggtggtcgtgtgatggtaacagatgctgacaggtcaatactatctccaggtggaagttgtggccccatcaaagtgaaaactgaacccacagaagattctggaagccaccattcttcagagggcaatgaaggcacagaaatggaagtaccagcagaagattctactcaacatgtcccttcagaaacaagtgaggaccctgaagttgaggtgactattgaagatgatgattattctccaccgtctaagagaccaaaggccaatgagctaccgcagccaccagtcccggaacccgccaatgctgggaagcggaaagtgagggagttcaacttcgagaaatggaatgctcgcatcactgatctacgtaaacaagttgaagaattgtttgaaaggaaatatgctcaagccataaaagccaaaggtccggtgacgatcccgtaccctcttttccagtctcatgttgaagatctttatgtagaaggacttcctgaaggaattccttttagaaggccatctacttacggaattcctcgcctggagaggatattacttgcaaaggaaaggattcgttttgtgattaagaaacatgagcttctgaattcaacacgtgaagatttacagcttgataagccagcttcaggagtaaaggaagaatggtatgccagaatcactaaattaagaaagatggtggatcagcttttctgcaaaaaatttgcggaagccttggggagcactgaagccaaggctgtaccgtaccaaaaatttgaggcacacccgaatgatctgtacgtggaaggactgccagaaaacattcctttccgaagtccctcatggtatggaatcccaaggctggaaaaaatcattcaagtgggcaatcgaattaaatttgttattaaaagaccagaacttctgactcacagtaccactgaagttactcagccaagaacgaatacaccagctcaagctcttggactcaccgaggcagtaaaagtaccatatcctgtgtttgaatcaaacccggagttcttgtatgtggaaggcttgccagaggggattcccttccgaagccctacctggtttggaattccacgacttgaaaggatcgtccgcgggagtaataaaatcaagttcgttgttaaaaaacctgaactagttatttcctacttgcctcctgggatggctagtaaaataaacactaaagctttgcagtcccccaaaagaccacgaagtcctgggagtaattcaaaggttcctgaaattgaggtcaccgtggaaggccctaataacaacaatcctcaaacctcagctgttcgaaccccgacccagactaacggttctaacgttcccttcaagccacgagggagagagttttcctttgaggcctggaatgccaaaatcacggacctaaaacagaaagttgaaaatctcttcaatgagaaatgtggggaagctcttggccttaaacaagctgtgaaggtgccgttcgcgttatttgagtctttcccggaagacttttatgtggaaggcttacctgagggtgtgccattccgaagaccatcgacttttggcattccgaggctggagaagatactcagaaacaaagccaaaattaagttcatcattaaaaagcccgaaatgtttgagacggcgattaaggagagcacctcctctaagagccctcccagaaaaataaattcatcacccaatgttaatactactgcatcaggtgttgaagaccttaacatcattcaggtgacaattccagatgatgataatgaaagactctcgaaagttgaaaaagctagacagctaagagaacaagtgaatgacctctttagtcggaaatttggtgaagctattggtatgggttttcctgtgaaagttccctacaggaaaatcacaattaaccctggctgtgtggtggttgatggcatgcccccgggggtgtccttcaaagcccccagctacctggaaatcagctccatgagaaggatcttagactctgccgagtttatcaaattcacggtcattagaccatttccaggacttgtgattaataaccagctggttgatcagagtgagtcagaaggccccgtgatacaagaatcagctgaaccaagccagttggaagttccagccacagaagaaataaaagagactgatggaagctctcagatcaagcaagaaccagaccccacgtggtagacctcttccctcctaggcaaaaccatctggatcacctaacagtcagaggtcagtatctcagcgtgtgaattatagaggaaatacagagagaacctcttccacttttacttttcgtccaaataaaatgcatggtgtaccagaagttgaagatcgggttgaggattggggctagctcgatgacactaaggccccaacatcgcgggacctgctgtggcgcggattcttaggaacgctgttctagccggccccctctccaggggtcgccgtggccggcattatttcctagttcttcttgtaaccctgaggtgccagcgcggggagtgaggaggggtcagggggctaaggatgcaacctctgacgttctgcgccttcctaggagagtcttacatgtgttgagatttcacaagcaatgcgagttgtaaaataccagctctacaagaagctaggctctgtgacggcatagttttcagtagctttatcacaatattcacaatggagaattatatgacatggtagcagaaataggcccttttatgtgttgcttctattttacctcaaattgtagatatagggtaatcaataaaatccatccatgcctttcacacactaagt

SEQ ID NO: 4653 - protein, 839 aa, Homo sapiens; identical to SEQ ID NO: 4213

SEQ ID NO: 4654 - DNA, 5040 bp, Homo sapiens
aaaaaaaaaaaaaaaaaaaaaaaaaaaagaaaaaagaaaaaaaaaaggaggaggaggaggagggtgagagagaagctgggagagcagagaaaaggggccaccggtcgcccccccgcttccccgcacgcgctctccagccgcggccgcccgcctgccgcggtcaccccggcctctgcctctgtcccccagtgatcggatcaaggcgctgagcgaggccctgcctgcggggcggccatgcggcggtgacaggagcgcgaccgacacgcacgggcccctcgccccctctcgcctcccgtccgctcgccagctcccctcagccgaggctgctccgcggcggccgcagcccgcgcgcggcccacactcgcctcccctcggcacccccggccccggagctgcctggaggcggccgcactcggtgtaaagaactggccaagtccaaagccgaagtggcctgcattgcagtgtatgaaacagacgtgtttgtcgtcggaactgaaagaggacgtgcttttgtcaataccagaaaggattttcaaaaagattttgtaaaatattgtgttgaagaagaagaaaaagctgcagagatgcataaaatgaaatctacaacccaggcaaatcggatgagtgtagatgctgtagaaattgaaacactcagaaaaacagttgaggactatttctgcttttgctatgggaaagctttaggcaaatccacagtggtacctgtaccatatgagaagatgctgcgagaccagtcggctgtggtagtgcaggggcttccggaaggtgttgcctttaaacaccccgagaactatgatcttgcaaccctgaaatggattttggagaacaaagcagggatttcattcatcattaagagaccttttttagagccaaagaagcatgtaggtggtcgtgtgatggtaacagatgctgacaggtcaatactatctccaggtggaagttgtggccccatcaaagtgaaaactgaacccacagaagattctggcatttccctggaaatggcagctgtgacagtaaaggaagaatcagaagatcctgattattatcaatataacattcaagcaggcccttctgaaactgatgatgttgatgaaaaacagcccctatcgaagcctttgcaaggaagccaccattcttcagagggcaatgaaggcacagaaatggaagtaccagcagaagatgatgattattctccaccgtctaagagaccaaaggccaatgagctaccgcagccaccagtcccggaacccgccaatgctgggaagcggaaagtgagggagttcaacttcgagaaatggaatgctcgcatcactgatctacgtaaacaagttgaagaattgtttgaaaggaaatatgctcaagccataaaagccaaaggtccggtgacgatcccgtaccctcttttccagtctcatgttgaagatctttatgtagaaggacttcctgaaggaattccttttagaaggccatctacttacggaattcctcgcctggagaggatattacttgcaaaggaaaggattcgttttgtgattaagaaacatgagcttctgaattcaacacgtgaagatttacagcttgataagccagcttcaggagtaaaggaagaatggtatgccagaatcactaaattaagaaagatggtggatcagcttttctgcaaaaaatttgcggaagccttggggagcactgaagccaaggctgtaccgtaccaaaaatttgaggcacacccgaatgatctgtacgtggaaggactgccagaaaacattcctttccgaagtccctcatggtatggaatcccaaggctggaaaaaatcattcaagtgggcaatcgaattaaatttgttattaaaagaccagaacttctgactcacagtaccactgaagttactcagccaagaacgaatacaccagtcaaagaagattggaatgtcagaattaccaagctacggaagcaagtggaagagatttttaatttgaaatttgctcaagctcttggactcaccgaggcagtaaaagtaccatatcctgtgtttgaatcaaacccggagttcttgaaaggatcgtccgcgggagtaataaaatcaagttcgttgttaaaaaacctgaactagttatttcctacttgcctcctgggatggctagtaaaataaacactaaagctttgcagtcccccaaaagaccacgaagtcctgggagtaattcaaaggttcctgaaattgaggtcaccgtggaaggccctaataacaacaatcctcaaacctcagctgttcgaaccccgacccagactaacggttctaacgttcccttcaagccacgagggagagagttttcctttgaggcctggaatgccaaaatcacggacctaaaacagaaagttgaaaatctcttcaatgagaaatgtggggaagctcttggccttaaacaagctgtgaaggtgccgttcgcgttatttgagtctttcccggaagacttttatgtggaaggcttacctgagggtgtgccattccgaagaccatcgacttttggcattccgaggctggagaagatactcagaaacaaagccaaaattaagttcatcattaaaaagcccgaaatgtttgagacggcgattaaggagagcacctcctctaagagccctcccagaaaaataaattcatcacccaatgttaatactactgcatcaggtgttgaagaccttaacatcattcaggtgacaattccagatgatgataatgaaagactctcgaaagttgaaaaagctagacagctaagagaacaagtgaatgacctctttagtcggaaatttggtgaagctattggtatgggttttcctgtgaaagttccctacaggaaaatcacaattaaccctggctgtgtggtggttgatggcatgcccccgggggtgtccttcaaagcccccagctacctggaaatcagctccatgagaaggatcttagactctgccgagtttatcaaattcacggtcattagaccatttccaggacttgtgattaataaccagctggttgatcagagtgagtcagaaggccccgtgatacaagaatcagctgaaccaagccagttggaagttccagccacagaagaaataaaagagactgatggaagctctcagatcaagcaagaaccagaccccacgtggtagacctcttccctcctagggtaaatcagcttctgtgtcagggatgctgtgtggtgtccatctgaaccccctgcatacgcgtagctaatgtgatctccccactttcacataagatggtggccctgccttcagggaatgtgggagccaggtgggagccttcccggatatttaagctagaagattctacagggagattctccttggatcaatatatgtctctcagtcaaagatgtaaaagcacttttgccttaaaaagaatgttctgtttctaaatagagtcaacgttgtcctcctcattggaattcactatgagtcagaatcattagactgacttttttttttccatagtaatagtattttgcagagtctcacagagctgcagatcttttgttcatcttgcagagttaacaagtctgatcctgttagtccagatttcttaaatttggccaagttataataggagcagtagcttgagacccgaagtcaggaaactttgacaatggatttttttttttaatccagagacttgtactggaatttgccttaccctgtcagctcatggacttaaggtttcatcccgctttatgagtgcttctgaatccaagtcattgttacctgaatttgcaaattaagttgtgatattcgtgactgttaaattcctgtaattagattaacctctttgcttgcttgtttgttttctctcctattttagcttaaagtatcagtggttgagaagagcttttcggacctgttactaccccaagctgtgtaatatacttgtataacagaaataccttctatacaaacctttttttctacttttagatagaaatgtctactttttcagcagttctgtgaattaaagagcagagtgactgtgggtctggaatggctggtgtacttgggaatgtactatcaggattttacagcaatgctgggaaatgacagggaaaatgacaggaatgaatctcaccagattttttatgtactcagcagagccttgagttacggtgtttattttccaatcaagtgaagatatctcctacttctcctactggaacatctcagcttctgcagtgaagaaaaattcctgtgatagttcagttctttagtttttctatttgaaaaaaaaaaatcatttaaatgatcctttgttcacggctctccttaatgactgagtgaacagttcctatctgtatatttgactaaaccttttcctaagctatctctcatggttcctatgtttttttatcataattaaaagcaaaaccatctggatcacctaacagtcagaggtcagtatctcagcgtgtgaattatagaggaaatacagagagaacctcttccacttttacttttcgtccaaataaaatgcatggtgtaccagaagttgaagatcgggttgaggattggggctagctcgatgacactaaggccccaacatcgcgggacctgctgtggcgcggattcttaggaacgctgttctagccggccccctctccaggggtcgccgtggccggcattatttcctagttcttcttgtaaccctgaggtgccagcgcggggagtgaggaggggtcagggggctaaggatgcaacctctgacgttctgcgccttcctaggagagtcttacatgtgttgagatttcacaagcaatgcgagttgtaaaataccagctctacaagaagctaggctctgtgacggcatagttttcagtagctttatcacaatattcacaatggagaattatatgacatggtagcagaaataggcccttttatgtgttgcttctattttacctcaaattgtagatatagggtaatcaataaaatccatccatgcctttcacacactaagt

SEQ ID NO: 4655 - protein, 515 aa, Homo sapiens; identical to SEQ ID NO: 4501

SEQ ID NO: 4656 - DNA, 4127 bp, Homo sapiens
aaaaaaaaaaaaaaaaaaaaaaaaaaaagaaaaaagaaaaaaaaaaggaggaggaggaggagggtgagagagaagctgggagagcagagaaaaggggccaccggtcgcccccccgcttccccgcacgcgctctccagccgcggccgcccgcctgccgcggtcaccccggcctctgcctctgtcccccagtgatcggatcaaggcgctgagcgaggccctgcctgcggggcggccatgcggcggtgacaggagcgcgaccgacacgcacgggcccctcgccccctctcgcctcccgtccgctcgccagctcccctcagccgaggctgctccgcggcggccgcagcccgcgcgcggcccacactcgcctcccctcggcacccccggccccggagctgcctggaggcggccgcactcggtgtaaagaactggccaagtccaaagccgaagtggcctgcattgcagtgtatgaaacagacgtgtttgtcgtcggaactgaaagaggacgtgcttttgtcaataccagaaaggattttcaaaaagattttgtaaaatattgtgttgaagaagaagaaaaagctgcagagatgcataaaatgaaatctacaacccaggcaaatcggatgagtgtagatgctgtagaaattgaaacactcagaaaaacagttgaggactatttctgcttttgctatgggaaagctttaggcaaatccacagtggtacctgtaccatatgagaagatgctgcgagaccagtcggctgtggtagtgcaggggcttccggaaggtgttgcctttaaacaccccgagaactatgatcttgcaaccctgaaatggattttggagaacaaagcagggatttcattcatcattaagagaccttttttagagccaaagaagcatgtaggtggtcgtgtgatggtaacagatgctgacaggtcaatactatctccaggtggaagttgtggccccatcaaagtgaaaactgaacccacagaagattctggcatttccctggaaatggcagctgtgacagtaaaggaagaatcagaagatcctgattattatcaatataacattcaagcaggcccttctgaaactgatgatgttgatgaaaaacagcccctatcgaagcctttgcaaggaagccaccattcttcagagggcaatgaaggcacagaaatggaagtaccagcagaagattctactcaacatgtcccttcagaaacaagtgaggaccctgaagttgaggtgactattgaagatgatgattattctccaccgtctaagagaccaaaggccaatgagctaccgcagccaccagtcccggaacccgccaatgctgggaagcggaaagtgagggagttcaacttcgagaaatggaatgctcgcatcactgatctacgtaaacaagttgaagaattgtttgaaaggaaatatgctcaagccataaaagccaaaggtccggtgacgatcccgtaccctcttttccagtctcatgttgaagatctttatgtagaaggacttcctgaaggaattccttttagaaggccatctacttacggaattcctcgcctggagaggatattacttgcaaaggaaaggattcgttttgtgattaagaaacatgagcttctgaattcaacacgtgaagatttacagcttgataagccagcttcaggagtaaaggaagaatggtatgccagaatcactaaattaagaaagatggtggatcagcttttctgcaaaaaatttgcggaagccttggggagcactgaagccaaggctgtaccgtaccaaaaatttgaggcacacccgaatgatctgtacgtggaaggactgccagaaaacattcctttccgaagtccctcatggtatggaatcccaaggctggaaaaaatcattcaagtgggcaatcgaattaaatttgttattaaaagaccagaacttctgactcacagtaccactgaagttactcagccaagaacgaatacaccagtcaaagaagattggaatgtcagaattaccaagctacggaagcaagtggaagagatttttaatttgaaatttgctcaagctcttggactcaccgaggcagtaaaagtaccatatcctgtgtttgaatcaaacccggagttcttgaaaggatcgtccgcgggagtaataaaatcaagttcgttgttaaaaaacctgaactagttatttcctacttgcctcctgggatggctagtaaaataaacactaaagctttgcagtcccccaaaagaccacgaagtcctgggagtaattcaaaggttcctgaaattgaggtcaccgtggaaggccctaataacaacaatcctcaaacctcagctgttcgaaccccgacccagactaacggttctaacgttcccttcaagccacgagggagagagttttcctttgaggcctggaatgccaaaatcacggacctaaaacagaaagttgaaaatctcttcaatgagaaatgtggggaagctcttggccttaaacaagctgtgaaggtgccgttcgcgttatttgagtctttcccggaagacttttatgtggaaggcttacctgagggtgtgccattccgaagaccatcgacttttggcattccgaggctggagaagatactcagaaacaaagccaaaattaagttcatcattaaaaagcccgaaatgtttgagacggcgattaaggagagcacctcctctaagagccctcccagaaaaataaattcatcacccaatgttaatactactgcatcaggtgttgaagaccttaacatcattcaggtgacaattccagatgatgataatgaaagactctcgaaagttgaaaaagctagacagctaagagaacaagtgaatgacctctttagtcggaaatttggtgaagctattggtatgggttttcctgtgaaagttccctacaggaaaatcacaattaaccctggctgtgtggtggttgatggcatgcccccgggggtgtccttcaaagcccccagctacctggaaatcagctccatgagaaggatcttagactctgccgagtttatcaaattcacggtcattagaccatttccaggacttgtgattaataaccagctggttgatcagagtgagtcagaaggccccgtgatacaagaatcagctgaaccaagccagttggaagttccagccacagaagaaataaaagagactgatggaagctctcagatcaagcaagaaccagaccccacgtggtagacctcttccctcctaggagccttgagttacggtgtttattttccaatcaagtgaagatatctcctacttctcctactggaacatctcagcttctgcagtgaagaaaaattcctgtgatagttcagttctttagtttttctatttgaaaaaaaaaaatcatttaaatgatcctttgttcacggctctccttaatgactgagtgaacagttcctatctgtatatttgactaaaccttttcctaagctatctctcatggttcctatgtttttttatcataattaaaagcaaaaccatctggatcacctaacagtcagaggtcagtatctcagcgtgtgaattatagaggaaatacagagagaacctcttccacttttacttttcgtccaaataaaatgcatggtgtaccagaagttgaagatcgggttgaggattggggctagctcgatgacactaaggccccaacatcgcgggacctgctgtggcgcggattcttaggaacgctgttctagccggccccctctccaggggtcgccgtggccggcattatttcctagttcttcttgtaaccctgaggtgccagcgcggggagtgaggaggggtcagggggctaaggatgcaacctctgacgttctgcgccttcctaggagagtcttacatgtgttgagatttcacaagcaatgcgagttgtaaaataccagctctacaagaagctaggctctgtgacggcatagttttcagtagctttatcacaatattcacaatggagaattatatgacatggtagcagaaataggcccttttatgtgttgcttctattttacctcaaattgtagatatagggtaatcaataaaatccatccatgcctttcacacactaagt

SEQ ID NO: 4657 - protein, 536 aa, Homo sapiens; identical to SEQ ID NO: 4021

SEQ ID NO: 4658 - DNA, 4980 bp, Homo sapiens
aaaaaaaaaaaaaaaaaaaaaaaaaaaagaaaaaagaaaaaaaaaaggaggaggaggaggagggtgagagagaagctgggagagcagagaaaaggggccaccggtcgcccccccgcttccccgcacgcgctctccagccgcggccgcccgcctgccgcggtcaccccggcctctgcctctgtcccccagtgatcggatcaaggcgctgagcgaggccctgcctgcggggcggccatgcggcggtgacaggagcgcgaccgacacgcacgggcccctcgccccctctcgcctcccgtccgctcgccagctcccctcagccgaggctgctccgcggcggccgcagcccgcgcgcggcccacactcgcctcccctcggcacccccggccccggagctgcctggaggcggccgcactcggtgtaaagaactggccaagtccaaagccgaagtggcctgcattgcagtgtatgaaacagacgtgtttgtcgtcggaactgaaagaggacgtgcttttgtcaataccagaaaggattttcaaaaagattttgtaaaatattgtgttgaagaagaagaaaaagctgcagagatgcataaaatgaaatctacaacccaggcaaatcggatgagtgtagatgctgtagaaattgaaacactcagaaaaacagttgaggactatttctgcttttgctatgggaaagctttaggcaaatccacagtggtacctgtaccatatgagaagatgctgcgagaccagtcggctgtggtagtgcaggggcttccggaaggtgttgcctttaaacaccccgagaactatgatcttgcaaccctgaaatggattttggagaacaaagcagggatttcattcatcattaagagaccttttttagagccaaagaagcatgtaggtggtcgtgtgatggtaacagatgctgacaggtcaatactatctccaggtggaagttgtggccccatcaaagtgaaaactgaacccacagaagattctggcatttccctggaaatggcagctgtgacagtaaaggaagaatcagaagatcctgattattatcaatataacattcaaggaagccaccattcttcagagggcaatgaaggcacagaaatggaagtaccagcagaagatgatgattattctccaccgtctaagagaccaaaggccaatgagctaccgcagccaccagtcccggaacccgccaatgctgggaagcggaaagtgagggagttcaacttcgagaaatggaatgctcgcatcactgatctacgtaaacaagttgaagaattgtttgaaaggaaatatgctcaagccataaaagccaaaggtccggtgacgatcccgtaccctcttttccagtctcatgttgaagatctttatgtagaaggacttcctgaaggaattccttttagaaggccatctacttacggaattcctcgcctggagaggatattacttgcaaaggaaaggattcgttttgtgattaagaaacatgagcttctgaattcaacacgtgaagatttacagcttgataagccagcttcaggagtaaaggaagaatggtatgccagaatcactaaattaagaaagatggtggatcagcttttctgcaaaaaatttgcggaagccttggggagcactgaagccaaggctgtaccgtaccaaaaatttgaggcacacccgaatgatctgtacgtggaaggactgccagaaaacattcctttccgaagtccctcatggtatggaatcccaaggctggaaaaaatcattcaagtgggcaatcgaattaaatttgttattaaaagaccagaacttctgactcacagtaccactgaagttactcagccaagaacgaatacaccagtcaaagaagattggaatgtcagaattaccaagctacggaagcaagtggaagagatttttaatttgaaatttgctcaagctcttggactcaccgaggcagtaaaagtaccatatcctgtgtttgaatcaaacccggagttcttgaaaggatcgtccgcgggagtaataaaatcaagttcgttgttaaaaaacctgaactagttatttcctacttgcctcctgggatggctagtaaaataaacactaaagctttgcagtcccccaaaagaccacgaagtcctgggagtaattcaaaggttcctgaaattgaggtcaccgtggaaggccctaataacaacaatcctcaaacctcagctgttcgaaccccgacccagactaacggttctaacgttcccttcaagccacgagggagagagttttcctttgaggcctggaatgccaaaatcacggacctaaaacagaaagttgaaaatctcttcaatgagaaatgtggggaagctcttggccttaaacaagctgtgaaggtgccgttcgcgttatttgagtctttcccggaagacttttatgtggaaggcttacctgagggtgtgccattccgaagaccatcgacttttggcattccgaggctggagaagatactcagaaacaaagccaaaattaagttcatcattaaaaagcccgaaatgtttgagacggcgattaaggagagcacctcctctaagagccctcccagaaaaataaattcatcacccaatgttaatactactgcatcaggtgttgaagaccttaacatcattcaggtgacaattccagatgatgataatgaaagactctcgaaagttgaaaaagctagacagctaagagaacaagtgaatgacctctttagtcggaaatttggtgaagctattggtatgggttttcctgtgaaagttccctacaggaaaatcacaattaaccctggctgtgtggtggttgatggcatgcccccgggggtgtccttcaaagcccccagctacctggaaatcagctccatgagaaggatcttagactctgccgagtttatcaaattcacggtcattagaccatttccaggacttgtgattaataaccagctggttgatcagagtgagtcagaaggccccgtgatacaagaatcagctgaaccaagccagttggaagttccagccacagaagaaataaaagagactgatggaagctctcagatcaagcaagaaccagaccccacgtggtagacctcttccctcctagggtaaatcagcttctgtgtcagggatgctgtgtggtgtccatctgaaccccctgcatacgcgtagctaatgtgatctccccactttcacataagatggtggccctgccttcagggaatgtgggagccaggtgggagccttcccggatatttaagctagaagattctacagggagattctccttggatcaatatatgtctctcagtcaaagatgtaaaagcacttttgccttaaaaagaatgttctgtttctaaatagagtcaacgttgtcctcctcattggaattcactatgagtcagaatcattagactgacttttttttttccatagtaatagtattttgcagagtctcacagagctgcagatcttttgttcatcttgcagagttaacaagtctgatcctgttagtccagatttcttaaatttggccaagttataataggagcagtagcttgagacccgaagtcaggaaactttgacaatggatttttttttttaatccagagacttgtactggaatttgccttaccctgtcagctcatggacttaaggtttcatcccgctttatgagtgcttctgaatccaagtcattgttacctgaatttgcaaattaagttgtgatattcgtgactgttaaattcctgtaattagattaacctctttgcttgcttgtttgttttctctcctattttagcttaaagtatcagtggttgagaagagcttttcggacctgttactaccccaagctgtgtaatatacttgtataacagaaataccttctatacaaacctttttttctacttttagatagaaatgtctactttttcagcagttctgtgaattaaagagcagagtgactgtgggtctggaatggctggtgtacttgggaatgtactatcaggattttacagcaatgctgggaaatgacagggaaaatgacaggaatgaatctcaccagattttttatgtactcagcagagccttgagttacggtgtttattttccaatcaagtgaagatatctcctacttctcctactggaacatctcagcttctgcagtgaagaaaaattcctgtgatagttcagttctttagtttttctatttgaaaaaaaaaaatcatttaaatgatcctttgttcacggctctccttaatgactgagtgaacagttcctatctgtatatttgactaaaccttttcctaagctatctctcatggttcctatgtttttttatcataattaaaagcaaaaccatctggatcacctaacagtcagaggtcagtatctcagcgtgtgaattatagaggaaatacagagagaacctcttccacttttacttttcgtccaaataaaatgcatggtgtaccagaagttgaagatcgggttgaggattggggctagctcgatgacactaaggccccaacatcgcgggacctgctgtggcgcggattcttaggaacgctgttctagccggccccctctccaggggtcgccgtggccggcattatttcctagttcttcttgtaaccctgaggtgccagcgcggggagtgaggaggggtcagggggctaaggatgcaacctctgacgttctgcgccttcctaggagagtcttacatgtgttgagatttcacaagcaatgcgagttgtaaaataccagctctacaagaagctaggctctgtgacggcatagttttcagtagctttatcacaatattcacaatggagaattatatgacatggtagcagaaataggcccttttatgtgttgcttctattttacctcaaattgtagatatagggtaatcaataaaatccatccatgcctttcacacactaagt

SEQ ID NO: 4659 - protein, 495 aa, Homo sapiens; identical to SEQ ID NO: 4181

SEQ ID NO: 4660 - DNA, 4459 bp, Homo sapiens
aaaaaaaaaaaaaaaaaaaaaaaaaaaagaaaaaagaaaaaaaaaaggaggaggaggaggagggtgagagagaagctgggagagcagagaaaaggggccaccggtcgcccccccgcttccccgcacgcgctctccagccgcggccgcccgcctgccgcggtcaccccggcctctgcctctgtcccccagtgatcggatcaaggcgctgagcgaggccctgcctgcggggcggccatgcggcggtgacaggagcgcgaccgacacgcacgggcccctcgccccctctcgcctcccgtccgctcgccagctcccctcagccgaggctgctccgcggcggccgcagcccgcgcgcggcccacactcgcctcccctcggcacccccggccccggagctgcctggaggcggccgcactcggggatcatggcccaagttgcaatgtccaccctccccgttgaagatgaggagtcctcggagagcaggatggtggtgacattcctcatgtcagctctcgagtccatgtgtaaagaactggccaagtccaaagccgaagtggcctgcattgcagtgtatgaaacagacgtgtttgtcgtcggaactgaaagaggacgtgcttttgtcaataccagaaaggattttcaaaaagattttgtaaaatattgtgttgaagaagaagaaaaagctgcagagatgcataaaatgaaatctacaacccaggcaaatcggatgagtgtagatgctgtagaaattgaaacactcagaaaaacagttgaggactatttctgcttttgctatgggaaagctttaggcaaatccacagtggtacctgtaccatatgagaagatgctgcgagaccagtcggctgtggtagtgcaggggcttccggaaggtgttgcctttaaacaccccgagaactatgatcttgcaaccctgaaatggattttggagaacaaagcagggatttcattcatcattaagagaccttttttagagccaaagaagcatgtaggtggtcgtgtgatggtaacagatgctgacaggtcaatactatctccaggtggaagttgtggccccatcaaagtgaaaactgaacccacagaagattctggcatttccctggaaatggcagctgtgacagtaaaggaagaatcagaagatcctgattattatcaatataacattcaaggaagccaccattcttcagagggcaatgaaggcacagaaatggaagtaccagcagaagatgatgattattctccaccgtctaagagaccaaaggccaatgagctaccgcagccaccagtcccggaacccgccaatgctgggaagcggaaagtgagggagttcaacttcgagaaatggaatgctcgcatcactgatctacgtaaacaagttgaagaattgtttgaaaggaaatatgctcaagccataaaagccaaaggtccggtgacgatcccgtaccctcttttccagtctcatgttgaagatctttatgtagaaggacttcctgaaggaattccttttagaaggccatctacttacggaattcctcgcctggagaggatattacttgcaaaggaaaggattcgttttgtgattaagaaacatgagcttctgaattcaacacgtgaagatttacagcttgataagccagcttcaggagtaaaggaagaatggtatgccagaatcactaaattaagaaagatggtggatcagcttttctgcaaaaaatttgcggaagccttggggagcactgaagccaaggctgtaccgtaccaaaaatttgaggcacacccgaatgatctgtacgtggaaggactgccagaaaacattcctttccgaagtccctcatggtatggaatcccaaggctggaaaaaatcattcaagtgggcaatcgaattaaatttgttattaaaagaccagaacttctgactcacagtaccactgaagttactcagccaagaacgaatacaccagtcaaagaagattggaatgtcagaattaccaagctacggaagcaagtggaagagatttttaatttgaaatttgctcaagctcttggactcaccgaggcagtaaaagtaccatatcctgtgtttgaatcaaacccggagttcttgtatgtggaaggcttgccagaggggattcccttccgaagccctacctggtttggaattccacgacttgaaaggatcgtccgcgggagtaataaaatcaagttcgttgttaaaaaacctgaactagttatttcctacttgcctcctgggatggctagtaaaataaacactaaagctttgcagtcccccaaaagaccacgaagtcctgggagtaattcaaaggttcctgaaattgaggtcaccgtggaaggccctaataacaacaatcctcaaacctcagctgttcgaaccccgacccagactaacggttctaacgttcccttcaagccacgagggagagagttttcctttgaggcctggaatgccaaaatcacggacctaaaacagaaagttgaaaatctcttcaatgagaaatgtggggaagctcttggccttaaacaagctgtgaaggtgccgttcgcgttatttgagtctttcccggaagacttttatgtggaaggcttacctgagggtgtgccattccgaagaccatcgacttttggcattccgaggctggagaagatactcagaaacaaagccaaaattaagttcatcattaaaaagcccgaaatgtttgagacggcgattaaggagagcacctcctctaagagccctcccagaaaaataaattcatcacccaatgttaatactactgcatcaggtgttgaagaccttaacatcattcaggtgacaattccagatgatgataatgaaagactctcgaaagttgaaaaagctagacagctaagagaacaagtgaatgacctctttagtcggaaatttggtgaagctattggtatgggttttcctgtgaaagttccctacaggaaaatcacaattaaccctggctgtgtggtggttgatggcatgcccccgggggtgtccttcaaagcccccagctacctggaaatcagctccatgagaaggatcttagactctgccgagtttatcaaattcacggtcattagaccatttccaggacttgtgattaataaccagctggttgatcagagtgagtcagaaggccccgtgatacaagaatcagctgaaccaagccagttggaagttccagccacagaagaaataaaagagactgatggaagctctcagatcaagcaagaaccagaccccacgtggtagacctcttccctcctaggcttaaagtatcagtggttgagaagagcttttcggacctgttactaccccaagctgtgtaatatacttgtataacagaaataccttctatacaaacctttttttctacttttagatagaaatgtctactttttcagcagttctgtgaattaaagagcagagtgactgtgggtctggaatggctggtgtacttgggaatgtactatcaggattttacagcaatgctgggaaatgacagggaaaatgacaggaatgaatctcaccagattttttatgtactcagcagagccttgagttacggtgtttattttccaatcaagtgaagatatctcctacttctcctactggaacatctcagcttctgcagtgaagaaaaattcctgtgatagttcagttctttagtttttctatttgaaaaaaaaaaatcatttaaatgatcctttgttcacggctctccttaatgactgagtgaacagttcctatctgtatatttgactaaaccttttcctaagctatctctcatggttcctatgtttttttatcataattaaaagcaaaaccatctggatcacctaacagtcagaggtcagtatctcagcgtgtgaattatagaggaaatacagagagaacctcttccacttttacttttcgtccaaataaaatgcatggtgtaccagaagttgaagatcgggttgaggattggggctagctcgatgacactaaggccccaacatcgcgggacctgctgtggcgcggattcttaggaacgctgttctagccggccccctctccaggggtcgccgtggccggcattatttcctagttcttcttgtaaccctgaggtgccagcgcggggagtgaggaggggtcagggggctaaggatgcaacctctgacgttctgcgccttcctaggagagtcttacatgtgttgagatttcacaagcaatgcgagttgtaaaataccagctctacaagaagctaggctctgtgacggcatagttttcagtagctttatcacaatattcacaatggagaattatatgacatggtagcagaaataggcccttttatgtgttgcttctattttacctcaaattgtagatatagggtaatcaataaaatccatccatgcctttcacacactaagt

SEQ ID NO: 4661 - protein, 957 aa, Homo sapiens; identical to SEQ ID NO: 4303

SEQ ID NO: 4662 - DNA, 3926 bp, Homo sapiens
aaaaaaaaaaaaaaaaaaaaaaaaaaaagaaaaaagaaaaaaaaaaggaggaggaggaggagggtgagagagaagctgggagagcagagaaaaggggccaccggtcgcccccccgcttccccgcacgcgctctccagccgcggccgcccgcctgccgcggtcaccccggcctctgcctctgtcccccagtgatcggatcaaggcgctgagcgaggccctgcctgcggggcggccatgcggcggtgacaggagcgcgaccgacacgcacgggcccctcgccccctctcgcctcccgtccgctcgccagctcccctcagccgaggctgctccgcggcggccgcagcccgcgcgcggcccacactcgcctcccctcggcacccccggccccggagctgcctggaggcggccgcactcggtgtaaagaactggccaagtccaaagccgaagtggcctgcattgcagtgtatgaaacagacgtgtttgtcgtcggaactgaaagaggacgtgcttttgtcaataccagaaaggattttcaaaaagattttgtaaaatattgtgttgaagaagaagaaaaagctgcagagatgcataaaatgaaatctacaacccaggcaaatcggatgagtgtagatgctgtagaaattgaaacactcagaaaaacagttgaggactatttctgcttttgctatgggaaagctttaggcaaatccacagtggtacctgtaccatatgagaagatgctgcgagaccagtcggctgtggtagtgcaggggcttccggaaggtgttgcctttaaacaccccgagaactatgatcttgcaaccctgaaatggattttggagaacaaagcagggatttcattcatcattaagagaccttttttagagccaaagaagcatgtaggtggtcgtgtgatggtaacagatgctgacaggtcaatactatctccaggtggaagttgtggccccatcaaagtgaaaactgaacccacagaagattctggcatttccctggaaatggcagctgtgacagtaaaggaagaatcagaagatcctgattattatcaatataacattcaagcaggcccttctgaaactgatgatgttgatgaaaaacagcccctatcgaagcctttgcaaggaagccaccattcttcagagggcaatgaaggcacagaaatggaagtaccagcagaagattctactcaacatgtcccttcagaaacaagtgaggaccctgaagttgaggtgactattgaagatgatgattattctccaccgtctaagagaccaaaggccaatgagctaccgcagccaccagtcccggaacccgccaatgctgggaagcggaaagtgagggagttcaacttcgagaaatggaatgctcgcatcactgatctacgtaaacaagttgaagaattgtttgaaaggaaatatgctcaagccataaaagccaaaggtccggtgacgatcccgtaccctcttttccagtctcatgttgaagatctttatgtagaaggacttcctgaaggaattccttttagaaggccatctacttacggaattcctcgcctggagaggatattacttgcaaaggaaaggattcgttttgtgattaagaaacatgagcttctgaattcaacacgtgaagatttacagcttgataagccagcttcaggagtaaaggaagaatggtatgccagaatcactaaattaagaaagatggtggatcagcttttctgcaaaaaatttgcggaagccttggggagcactgaagccaaggctgtaccgtaccaaaaatttgaggcacacccgaatgatctgtacgtggaaggactgccagaaaacattcctttccgaagtccctcatggtatggaatcccaaggctggaaaaaatcattcaagtgggcaatcgaattaaatttgttattaaaagaccagaacttctgactcacagtaccactgaagttactcagccaagaacgaatacaccagtcaaagaagattggaatgtcagaattaccaagctacggaagcaagtggaagagatttttaatttgaaatttgctcaagctcttggactcaccgaggcagtaaaagtaccatatcctgtgtttgaatcaaacccggagttcttgtatgtggaaggcttgccagaggggattcccttccgaagccctacctggtttggaattccacgacttgaaaggatcgtccgcgggagtaataaaatcaagttcgttgttaaaaaacctgaactagttatttcctacttgcctcctgggatggctagtaaaataaacactaaagctttgcagtcccccaaaagaccacgaagtcctgggagtaattcaaaggttcctgaaattgaggtcaccgtggaaggccctaataacaacaatcctcaaacctcagctgttcgaaccccgacccagactaacggttctaacgttcccttcaagccacgagggagagagttttcctttgaggcctggaatgccaaaatcacggacctaaaacagaaagttgaaaatctcttcaatgagaaatgtggggaagctcttggccttaaacaagctgtgaaggtgccgttcgcgttatttgagtctttcccggaagacttttatgtggaaggcttacctgagggtgtgccattccgaagaccatcgacttttggcattccgaggctggagaagatactcagaaacaaagccaaaattaagttcatcattaaaaagcccgaaatgtttgagacggcgattaaggagagcacctcctctaagagccctcccagaaaaataaattcatcacccaatgttaatactactgcatcaggtgttgaagaccttaacatcattcaggtgacaattccagatgatgataatgaaagactctcgaaagttgaaaaagctagacagctaagagaacaagtgaatgacctctttagtcggaaatttggtgaagctattggtatgggttttcctgtgaaagttccctacaggaaaatcacaattaaccctggctgtgtggtggttgatggcatgcccccgggggtgtccttcaaagcccccagctacctggaaatcagctccatgagaaggatcttagactctgccgagtttatcaaattcacggtcattagaccatttccaggacttgtgattaataaccagctggttgatcagagtgagtcagaaggccccgtgatacaagaatcagctgaaccaagccagttggaagttccagccacagaagaaataaaagagactgatggaagctctcagatcaagcaagaaccagaccccacgtggtagacctcttccctcctaggcaaaaccatctggatcacctaacagtcagaggtcagtatctcagcgtgtgaattatagaggaaatacagagagaacctcttccacttttacttttcgtccaaataaaatgcatggtgtaccagaagttgaagatcgggttgaggattggggctagctcgatgacactaaggccccaacatcgcgggacctgctgtggcgcggattcttaggaacgctgttctagccggccccctctccaggggtcgccgtggccggcattatttcctagttcttcttgtaaccctgaggtgccagcgcggggagtgaggaggggtcagggggctaaggatgcaacctctgacgttctgcgccttcctaggagagtcttacatgtgttgagatttcacaagcaatgcgagttgtaaaataccagctctacaagaagctaggctctgtgacggcatagttttcagtagctttatcacaatattcacaatggagaattatatgacatggtagcagaaataggcccttttatgtgttgcttctattttacctcaaattgtagatatagggtaatcaataaaatccatccatgcctttcacacactaagt

SEQ ID NO: 4663 - protein, 909 aa, Homo sapiens; identical to SEQ ID NO: 4047

SEQ ID NO: 4664 - DNA, 5032 bp, Homo sapiens
aaaaaaaaaaaaaaaaaaaaaaaaaaaagaaaaaagaaaaaaaaaaggaggaggaggaggagggtgagagagaagctgggagagcagagaaaaggggccaccggtcgcccccccgcttccccgcacgcgctctccagccgcggccgcccgcctgccgcggtcaccccggcctctgcctctgtcccccagtgatcggatcaaggcgctgagcgaggccctgcctgcggggcggccatgcggcggtgacaggagcgcgaccgacacgcacgggcccctcgccccctctcgcctcccgtccgctcgccagctcccctcagccgaggctgctccgcggcggccgcagcccgcgcgcggcccacactcgcctcccctcggcacccccggccccggagctgcctggaggcggccgcactcggtgtaaagaactggccaagtccaaagccgaagtggcctgcattgcagtgtatgaaacagacgtgtttgtcgtcggaactgaaagaggacgtgcttttgtcaataccagaaaggattttcaaaaagattttgtaaaatattgtgttgaagaagaagaaaaagctgcagagatgcataaaatgaaatctacaacccaggcaaatcggatgagtgtagatgctgtagaaattgaaacactcagaaaaacagttgaggactatttctgcttttgctatgggaaagctttaggcaaatccacagtggtacctgtaccatatgagaagatgctgcgagaccagtcggctgtggtagtgcaggggcttccggaaggtgttgcctttaaacaccccgagaactatgatcttgcaaccctgaaatggattttggagaacaaagcagggatttcattcatcattaagagaccttttttagagccaaagaagcatgtaggtggtcgtgtgatggtaacagatgctgacaggtcaatactatctccaggtggaagttgtggccccatcaaagtgaaaactgaacccacagaagattctggaagccaccattcttcagagggcaatgaaggcacagaaatggaagtaccagcagaagattctactcaacatgtcccttcagaaacaagtgaggaccctgaagttgaggtgactattgaagatgatgattattctccaccgtctaagagaccaaaggccaatgagctaccgcagccaccagtcccggaacccgccaatgctgggaagcggaaagtgagggagttcaacttcgagaaatggaatgctcgcatcactgatctacgtaaacaagttgaagaattgtttgaaaggaaatatgctcaagccataaaagccaaaggtccggtgacgatcccgtaccctcttttccagtctcatgttgaagatctttatgtagaaggacttcctgaaggaattccttttagaaggccatctacttacggaattcctcgcctggagaggatattacttgcaaaggaaaggattcgttttgtgattaagaaacatgagcttctgaattcaacacgtgaagatttacagcttgataagccagcttcaggagtaaaggaagaatggtatgccagaatcactaaattaagaaagatggtggatcagcttttctgcaaaaaatttgcggaagccttggggagcactgaagccaaggctgtaccgtaccaaaaatttgaggcacacccgaatgatctgtacgtggaaggactgccagaaaacattcctttccgaagtccctcatggtatggaatcccaaggctggaaaaaatcattcaagtgggcaatcgaattaaatttgttattaaaagaccagaacttctgactcacagtaccactgaagttactcagccaagaacgaatacaccagtcaaagaagattggaatgtcagaattaccaagctacggaagcaagtggaagagatttttaatttgaaatttgctcaagctcttggactcaccgaggcagtaaaagtaccatatcctgtgtttgaatcaaacccggagttcttgtatgtggaaggcttgccagaggggattcccttccgaagccctacctggtttggaattccacgacttgaaaggatcgtccgcgggagtaataaaatcaagttcgttgttaaaaaacctgaactagttatttcctacttgcctcctgggatggctagtaaaataaacactaaagctttgcagtcccccaaaagaccacgaagtcctgggagtaattcaaaggttcctgaaattgaggtcaccgtggaaggccctaataacaacaatcctcaaacctcagctgttcgaaccccgacccagactaacggttctaacgttcccttcaagccacgagggagagagttttcctttgaggcctggaatgccaaaatcacggacctaaaacagaaagttgaaaatctcttcaatgagaaatgtggggaagctcttggccttaaacaagctgtgaaggtgccgttcgcgttatttgagtctttcccggaagacttttatgtggaaggcttacctgagggtgtgccattccgaagaccatcgacttttggcattccgaggctggagaagatactcagaaacaaagccaaaattaagttcatcattaaaaagcccgaaatgtttgagacggcgattaaggagagcacctcctctaagagccctcccagaaaaataaattcatcacccaatgttaatactactgcatcaggtgttgaagaccttaacatcattcaggtgacaattccagatgatgataatgaaagactctcgaaagttgaaaaagctagacagctaagagaacaagtgaatgacctctttagtcggaaatttggtgaagctattggtatgggttttcctgtgaaagttccctacaggaaaatcacaattaaccctggctgtgtggtggttgatggcatgcccccgggggtgtccttcaaagcccccagctacctggaaatcagctccatgagaaggatcttagactctgccgagtttatcaaattcacggtcattagaccatttccaggacttgtgattaataaccagctggttgatcagagtgagtcagaaggccccgtgatacaagaatcagctgaaccaagccagttggaagttccagccacagaagaaataaaagagactgatggaagctctcagatcaagcaagaaccagaccccacgtggtagacctcttccctcctagggtaaatcagcttctgtgtcagggatgctgtgtggtgtccatctgaaccccctgcatacgcgtagctaatgtgatctccccactttcacataagatggtggccctgccttcagggaatgtgggagccaggtgggagccttcccggatatttaagctagaagattctacagggagattctccttggatcaatatatgtctctcagtcaaagatgtaaaagcacttttgccttaaaaagaatgttctgtttctaaatagagtcaacgttgtcctcctcattggaattcactatgagtcagaatcattagactgacttttttttttccatagtaatagtattttgcagagtctcacagagctgcagatcttttgttcatcttgcagagttaacaagtctgatcctgttagtccagatttcttaaatttggccaagttataataggagcagtagcttgagacccgaagtcaggaaactttgacaatggatttttttttttaatccagagacttgtactggaatttgccttaccctgtcagctcatggacttaaggtttcatcccgctttatgagtgcttctgaatccaagtcattgttacctgaatttgcaaattaagttgtgatattcgtgactgttaaattcctgtaattagattaacctctttgcttgcttgtttgttttctctcctattttagcttaaagtatcagtggttgagaagagcttttcggacctgttactaccccaagctgtgtaatatacttgtataacagaaataccttctatacaaacctttttttctacttttagatagaaatgtctactttttcagcagttctgtgaattaaagagcagagtgactgtgggtctggaatggctggtgtacttgggaatgtactatcaggattttacagcaatgctgggaaatgacagggaaaatgacaggaatgaatctcaccagattttttatgtactcagcagagccttgagttacggtgtttattttccaatcaagtgaagatatctcctacttctcctactggaacatctcagcttctgcagtgaagaaaaattcctgtgatagttcagttctttagtttttctatttgaaaaaaaaaaatcatttaaatgatcctttgttcacggctctccttaatgactgagtgaacagttcctatctgtatatttgactaaaccttttcctaagctatctctcatggttcctatgtttttttatcataattaaaagcaaaaccatctggatcacctaacagtcagaggtcagtatctcagcgtgtgaattatagaggaaatacagagagaacctcttccacttttacttttcgtccaaataaaatgcatggtgtaccagaagttgaagatcgggttgaggattggggctagctcgatgacactaaggccccaacatcgcgggacctgctgtggcgcggattcttaggaacgctgttctagccggccccctctccaggggtcgccgtggccggcattatttcctagttcttcttgtaaccctgaggtgccagcgcggggagtgaggaggggtcagggggctaaggatgcaacctctgacgttctgcgccttcctaggagagtcttacatgtgttgagatttcacaagcaatgcgagttgtaaaataccagctctacaagaagctaggctctgtgacggcatagttttcagtagctttatcacaatattcacaatggagaattatatgacatggtagcagaaataggcccttttatgtgttgcttctattttacctcaaattgtagatatagggtaatcaataaaatccatccatgcctttcacacactaagt

SEQ ID NO: 4665 - protein, 863 aa, Homo sapiens; identical to SEQ ID NO: 4039

SEQ ID NO: 4666 - DNA, 3989 bp, Homo sapiens
aaaaaaaaaaaaaaaaaaaaaaaaaaaagaaaaaagaaaaaaaaaaggaggaggaggaggagggtgagagagaagctgggagagcagagaaaaggggccaccggtcgcccccccgcttccccgcacgcgctctccagccgcggccgcccgcctgccgcggtcaccccggcctctgcctctgtcccccagtgatcggatcaaggcgctgagcgaggccctgcctgcggggcggccatgcggcggtgacaggagcgcgaccgacacgcacgggcccctcgccccctctcgcctcccgtccgctcgccagctcccctcagccgaggctgctccgcggcggccgcagcccgcgcgcggcccacactcgcctcccctcggcacccccggccccggagctgcctggaggcggccgcactcggtgtaaagaactggccaagtccaaagccgaagtggcctgcattgcagtgtatgaaacagacgtgtttgtcgtcggaactgaaagaggacgtgcttttgtcaataccagaaaggattttcaaaaagattttgtaaaatattgtgttgaagaagaagaaaaagctgcagagatgcataaaatgaaatctacaacccaggcaaatcggatgagtgtagatgctgtagaaattgaaacactcagaaaaacagttgaggactatttctgcttttgctatgggaaagctttaggcaaatccacagtggtacctgtaccatatgagaagatgctgcgagaccagtcggctgtggtagtgcaggggcttccggaaggtgttgcctttaaacaccccgagaactatgatcttgcaaccctgaaatggattttggagaacaaagcagggatttcattcatcattaagagaccttttttagagccaaagaagcatgtaggtggtcgtgtgatggtaacagatgctgacaggtcaatactatctccaggtggaagttgtggccccatcaaagtgaaaactgaacccacagaagattctggaagccaccattcttcagagggcaatgaaggcacagaaatggaagtaccagcagaagattctactcaacatgtcccttcagaaacaagtgaggaccctgaagttgaggtgactattgaagatgatgattattctccaccgtctaagagaccaaaggccaatgagctaccgcagccaccagtcccggaacccgccaatgctgggaagcggaaagtgagggagttcaacttcgagaaatggaatgctcgcatcactgatctacgtaaacaagttgaagaattgtttgaaaggaaatatgctcaagccataaaagccaaaggtccggtgacgatcccgtaccctcttttccagtctcatgttgaagatctttatgtagaaggacttcctgaaggaattccttttagaaggccatctacttacggaattcctcgcctggagaggatattacttgcaaaggaaaggattcgttttgtgattaagaaacatgagcttctgaattcaacacgtgaagatttacagcttgataagccagcttcaggagtaaaggaagaatggtatgccagaatcactaaattaagaaagatggtggatcagcttttctgcaaaaaatttgcggaagccttggggagcactgaagccaaggctgtaccgtaccaaaaatttgaggcacacccgaatgatctgtacgtggaaggactgccagaaaacattcctttccgaagtccctcatggtatggaatcccaaggctggaaaaaatcattcaagtgggcaatcgaattaaatttgttattaaaagaccagaacttctgactcacagtaccactgaagttactcagccaagaacgaatacaccagtcaaagaagattggaatgtcagaattaccaagctacggaagcaagtggaagagatttttaatttgaaatttgctcaagctcttggactcaccgaggcagtaaaagtaccatatcctgtgtttgaatcaaacccggagttcttgaaaggatcgtccgcgggagtaataaaatcaagttcgttgttaaaaaacctgaactagttatttcctacttgcctcctgggatggctagtaaaataaacactaaagctttgcagtcccccaaaagaccacgaagtcctgggagtaattcaaaggttcctgaaattgaggtcaccgtggaaggccctaataacaacaatcctcaaacctcagctgttcgaaccccgacccagactaacggttctaacgttcccttcaagccacgagggagagagttttcctttgaggcctggaatgccaaaatcacggacctaaaacagaaagttgaaaatctcttcaatgagaaatgtggggaagctcttggccttaaacaagctgtgaaggtgccgttcgcgttatttgagtctttcccggaagacttttatgtggaaggcttacctgagggtgtgccattccgaagaccatcgacttttggcattccgaggctggagaagatactcagaaacaaagccaaaattaagttcatcattaaaaagcccgaaatgtttgagacggcgattaaggagagcacctcctctaagagccctcccagaaaaataaattcatcacccaatgttaatactactgcatcaggtgttgaagaccttaacatcattcaggtgacaattccagatgatgataatgaaagactctcgaaagttgaaaaagctagacagctaagagaacaagtgaatgacctctttagtcggaaatttggtgaagctattggtatgggttttcctgtgaaagttccctacaggaaaatcacaattaaccctggctgtgtggtggttgatggcatgcccccgggggtgtccttcaaagcccccagctacctggaaatcagctccatgagaaggatcttagactctgccgagtttatcaaattcacggtcattagaccatttccaggacttgtgattaataaccagctggttgatcagagtgagtcagaaggccccgtgatacaagaatcagctgaaccaagccagttggaagttccagccacagaagaaataaaagagactgatggaagctctcagatcaagcaagaaccagaccccacgtggtagacctcttccctcctaggagccttgagttacggtgtttattttccaatcaagtgaagatatctcctacttctcctactggaacatctcagcttctgcagtgaagaaaaattcctgtgatagttcagttctttagtttttctatttgaaaaaaaaaaatcatttaaatgatcctttgttcacggctctccttaatgactgagtgaacagttcctatctgtatatttgactaaaccttttcctaagctatctctcatggttcctatgtttttttatcataattaaaagcaaaaccatctggatcacctaacagtcagaggtcagtatctcagcgtgtgaattatagaggaaatacagagagaacctcttccacttttacttttcgtccaaataaaatgcatggtgtaccagaagttgaagatcgggttgaggattggggctagctcgatgacactaaggccccaacatcgcgggacctgctgtggcgcggattcttaggaacgctgttctagccggccccctctccaggggtcgccgtggccggcattatttcctagttcttcttgtaaccctgaggtgccagcgcggggagtgaggaggggtcagggggctaaggatgcaacctctgacgttctgcgccttcctaggagagtcttacatgtgttgagatttcacaagcaatgcgagttgtaaaataccagctctacaagaagctaggctctgtgacggcatagttttcagtagctttatcacaatattcacaatggagaattatatgacatggtagcagaaataggcccttttatgtgttgcttctattttacctcaaattgtagatatagggtaatcaataaaatccatccatgcctttcacacactaagt

SEQ ID NO: 4667 - protein, 490 aa, Homo sapiens; identical to SEQ ID NO: 4105

SEQ ID NO: 4668 - DNA, 4519 bp, Homo sapiens
aaaaaaaaaaaaaaaaaaaaaaaaaaaagaaaaaagaaaaaaaaaaggaggaggaggaggagggtgagagagaagctgggagagcagagaaaaggggccaccggtcgcccccccgcttccccgcacgcgctctccagccgcggccgcccgcctgccgcggtcaccccggcctctgcctctgtcccccagtgatcggatcaaggcgctgagcgaggccctgcctgcggggcggccatgcggcggtgacaggagcgcgaccgacacgcacgggcccctcgccccctctcgcctcccgtccgctcgccagctcccctcagccgaggctgctccgcggcggccgcagcccgcgcgcggcccacactcgcctcccctcggcacccccggccccggagctgcctggaggcggccgcactcggggatcatggcccaagttgcaatgtccaccctccccgttgaagatgaggagtcctcggagagcaggatggtggtgacattcctcatgtcagctctcgagtccatgtgtaaagaactggccaagtccaaagccgaagtggcctgcattgcagtgtatgaaacagacgtgtttgtcgtcggaactgaaagaggacgtgcttttgtcaataccagaaaggattttcaaaaagattttgtaaaatattgtgttgaagaagaagaaaaagctgcagagatgcataaaatgaaatctacaacccaggcaaatcggatgagtgtagatgctgtagaaattgaaacactcagaaaaacagttgaggactatttctgcttttgctatgggaaagctttaggcaaatccacagtggtacctgtaccatatgagaagatgctgcgagaccagtcggctgtggtagtgcaggggcttccggaaggtgttgcctttaaacaccccgagaactatgatcttgcaaccctgaaatggattttggagaacaaagcagggatttcattcatcattaagagaccttttttagagccaaagaagcatgtaggtggtcgtgtgatggtaacagatgctgacaggtcaatactatctccaggtggaagttgtggccccatcaaagtgaaaactgaacccacagaagattctggcatttccctggaaatggcagctgtgacagtaaaggaagaatcagaagatcctgattattatcaatataacattcaagcaggcccttctgaaactgatgatgttgatgaaaaacagcccctatcgaagcctttgcaaggaagccaccattcttcagagggcaatgaaggcacagaaatggaagtaccagcagaagatgatgattattctccaccgtctaagagaccaaaggccaatgagctaccgcagccaccagtcccggaacccgccaatgctgggaagcggaaagtgagggagttcaacttcgagaaatggaatgctcgcatcactgatctacgtaaacaagttgaagaattgtttgaaaggaaatatgctcaagccataaaagccaaaggtccggtgacgatcccgtaccctcttttccagtctcatgttgaagatctttatgtagaaggacttcctgaaggaattccttttagaaggccatctacttacggaattcctcgcctggagaggatattacttgcaaaggaaaggattcgttttgtgattaagaaacatgagcttctgaattcaacacgtgaagatttacagcttgataagccagcttcaggagtaaaggaagaatggtatgccagaatcactaaattaagaaagatggtggatcagcttttctgcaaaaaatttgcggaagccttggggagcactgaagccaaggctgtaccgtaccaaaaatttgaggcacacccgaatgatctgtacgtggaaggactgccagaaaacattcctttccgaagtccctcatggtatggaatcccaaggctggaaaaaatcattcaagtgggcaatcgaattaaatttgttattaaaagaccagaacttctgactcacagtaccactgaagttactcagccaagaacgaatacaccagtcaaagaagattggaatgtcagaattaccaagctacggaagcaagtggaagagatttttaatttgaaatttgctcaagctcttggactcaccgaggcagtaaaagtaccatatcctgtgtttgaatcaaacccggagttcttgtatgtggaaggcttgccagaggggattcccttccgaagccctacctggtttggaattccacgacttgaaaggatcgtccgcgggagtaataaaatcaagttcgttgttaaaaaacctgaactagttatttcctacttgcctcctgggatggctagtaaaataaacactaaagctttgcagtcccccaaaagaccacgaagtcctgggagtaattcaaaggttcctgaaattgaggtcaccgtggaaggccctaataacaacaatcctcaaacctcagctgttcgaaccccgacccagactaacggttctaacgttcccttcaagccacgagggagagagttttcctttgaggcctggaatgccaaaatcacggacctaaaacagaaagttgaaaatctcttcaatgagaaatgtggggaagctcttggccttaaacaagctgtgaaggtgccgttcgcgttatttgagtctttcccggaagacttttatgtggaaggcttacctgagggtgtgccattccgaagaccatcgacttttggcattccgaggctggagaagatactcagaaacaaagccaaaattaagttcatcattaaaaagcccgaaatgtttgagacggcgattaaggagagcacctcctctaagagccctcccagaaaaataaattcatcacccaatgttaatactactgcatcaggtgttgaagaccttaacatcattcaggtgacaattccagatgatgataatgaaagactctcgaaagttgaaaaagctagacagctaagagaacaagtgaatgacctctttagtcggaaatttggtgaagctattggtatgggttttcctgtgaaagttccctacaggaaaatcacaattaaccctggctgtgtggtggttgatggcatgcccccgggggtgtccttcaaagcccccagctacctggaaatcagctccatgagaaggatcttagactctgccgagtttatcaaattcacggtcattagaccatttccaggacttgtgattaataaccagctggttgatcagagtgagtcagaaggccccgtgatacaagaatcagctgaaccaagccagttggaagttccagccacagaagaaataaaagagactgatggaagctctcagatcaagcaagaaccagaccccacgtggtagacctcttccctcctaggcttaaagtatcagtggttgagaagagcttttcggacctgttactaccccaagctgtgtaatatacttgtataacagaaataccttctatacaaacctttttttctacttttagatagaaatgtctactttttcagcagttctgtgaattaaagagcagagtgactgtgggtctggaatggctggtgtacttgggaatgtactatcaggattttacagcaatgctgggaaatgacagggaaaatgacaggaatgaatctcaccagattttttatgtactcagcagagccttgagttacggtgtttattttccaatcaagtgaagatatctcctacttctcctactggaacatctcagcttctgcagtgaagaaaaattcctgtgatagttcagttctttagtttttctatttgaaaaaaaaaaatcatttaaatgatcctttgttcacggctctccttaatgactgagtgaacagttcctatctgtatatttgactaaaccttttcctaagctatctctcatggttcctatgtttttttatcataattaaaagcaaaaccatctggatcacctaacagtcagaggtcagtatctcagcgtgtgaattatagaggaaatacagagagaacctcttccacttttacttttcgtccaaataaaatgcatggtgtaccagaagttgaagatcgggttgaggattggggctagctcgatgacactaaggccccaacatcgcgggacctgctgtggcgcggattcttaggaacgctgttctagccggccccctctccaggggtcgccgtggccggcattatttcctagttcttcttgtaaccctgaggtgccagcgcggggagtgaggaggggtcagggggctaaggatgcaacctctgacgttctgcgccttcctaggagagtcttacatgtgttgagatttcacaagcaatgcgagttgtaaaataccagctctacaagaagctaggctctgtgacggcatagttttcagtagctttatcacaatattcacaatggagaattatatgacatggtagcagaaataggcccttttatgtgttgcttctattttacctcaaattgtagatatagggtaatcaataaaatccatccatgcctttcacacactaagt

SEQ ID NO: 4669 - protein, 977 aa, Homo sapiens; identical to SEQ ID NO: 472

SEQ ID NO: 4670 - DNA, 5272 bp, Homo sapiens
aaaaaaaaaaaaaaaaaaaaaaaaaaaagaaaaaagaaaaaaaaaaggaggaggaggaggagggtgagagagaagctgggagagcagagaaaaggggccaccggtcgcccccccgcttccccgcacgcgctctccagccgcggccgcccgcctgccgcggtcaccccggcctctgcctctgtcccccagtgatcggatcaaggcgctgagcgaggccctgcctgcggggcggccatgcggcggtgacaggagcgcgaccgacacgcacgggcccctcgccccctctcgcctcccgtccgctcgccagctcccctcagccgaggctgctccgcggcggccgcagcccgcgcgcggcccacactcgcctcccctcggcacccccggccccggagctgcctggaggcggccgcactcggggatcatggcccaagttgcaatgtccaccctccccgttgaagatgaggagtcctcggagagcaggatggtggtgacattcctcatgtcagctctcgagtccatgtgtaaagaactggccaagtccaaagccgaagtggcctgcattgcagtgtatgaaacagacgtgtttgtcgtcggaactgaaagaggacgtgcttttgtcaataccagaaaggattttcaaaaagattttgtaaaatattgtgttgaagaagaagaaaaagctgcagagatgcataaaatgaaatctacaacccaggcaaatcggatgagtgtagatgctgtagaaattgaaacactcagaaaaacagttgaggactatttctgcttttgctatgggaaagctttaggcaaatccacagtggtacctgtaccatatgagaagatgctgcgagaccagtcggctgtggtagtgcaggggcttccggaaggtgttgcctttaaacaccccgagaactatgatcttgcaaccctgaaatggattttggagaacaaagcagggatttcattcatcattaagagaccttttttagagccaaagaagcatgtaggtggtcgtgtgatggtaacagatgctgacaggtcaatactatctccaggtggaagttgtggccccatcaaagtgaaaactgaacccacagaagattctggcatttccctggaaatggcagctgtgacagtaaaggaagaatcagaagatcctgattattatcaatataacattcaagcaggcccttctgaaactgatgatgttgatgaaaaacagcccctatcgaagcctttgcaaggaagccaccattcttcagagggcaatgaaggcacagaaatggaagtaccagcagaagatgatgattattctccaccgtctaagagaccaaaggccaatgagctaccgcagccaccagtcccggaacccgccaatgctgggaagcggaaagtgagggagttcaacttcgagaaatggaatgctcgcatcactgatctacgtaaacaagttgaagaattgtttgaaaggaaatatgctcaagccataaaagccaaaggtccggtgacgatcccgtaccctcttttccagtctcatgttgaagatctttatgtagaaggacttcctgaaggaattccttttagaaggccatctacttacggaattcctcgcctggagaggatattacttgcaaaggaaaggattcgttttgtgattaagaaacatgagcttctgaattcaacacgtgaagatttacagcttgataagccagcttcaggagtaaaggaagaatggtatgccagaatcactaaattaagaaagatggtggatcagcttttctgcaaaaaatttgcggaagccttggggagcactgaagccaaggctgtaccgtaccaaaaatttgaggcacacccgaatgatctgtacgtggaaggactgccagaaaacattcctttccgaagtccctcatggtatggaatcccaaggctggaaaaaatcattcaagtgggcaatcgaattaaatttgttattaaaagaccagaacttctgactcacagtaccactgaagttactcagccaagaacgaatacaccagtcaaagaagattggaatgtcagaattaccaagctacggaagcaagtggaagagatttttaatttgaaatttgcttagatttgttgacagcggtttcctggagtgctgtcttgagaacgattctgaggaggctcagcaagaaagagtgtttcagttgattgggtgtgtctgtcatggagaaggaactcaagctcttggactcaccgaggcagtaaaagtaccatatcctgtgtttgaatcaaacccggagttcttgtatgtggaaggcttgccagaggggattcccttccgaagccctacctggtttggaattccacgacttgaaaggatcgtccgcgggagtaataaaatcaagttcgttgttaaaaaacctgaactagttatttcctacttgcctcctgggatggctagtaaaataaacactaaagctttgcagtcccccaaaagaccacgaagtcctgggagtaattcaaaggttcctgaaattgaggtcaccgtggaaggccctaataacaacaatcctcaaacctcagctgttcgaaccccgacccagactaacggttctaacgttcccttcaagccacgagggagagagttttcctttgaggcctggaatgccaaaatcacggacctaaaacagaaagttgaaaatctcttcaatgagaaatgtggggaagctcttggccttaaacaagctgtgaaggtgccgttcgcgttatttgagtctttcccggaagacttttatgtggaaggcttacctgagggtgtgccattccgaagaccatcgacttttggcattccgaggctggagaagatactcagaaacaaagccaaaattaagttcatcattaaaaagcccgaaatgtttgagacggcgattaaggagagcacctcctctaagagccctcccagaaaaataaattcatcacccaatgttaatactactgcatcaggtgttgaagaccttaacatcattcaggtgacaattccagatgatgataatgaaagactctcgaaagttgaaaaagctagacagctaagagaacaagtgaatgacctctttagtcggaaatttggtgaagctattggtatgggttttcctgtgaaagttccctacaggaaaatcacaattaaccctggctgtgtggtggttgatggcatgcccccgggggtgtccttcaaagcccccagctacctggaaatcagctccatgagaaggatcttagactctgccgagtttatcaaattcacggtcattagaccatttccaggacttgtgattaataaccagctggttgatcagagtgagtcagaaggccccgtgatacaagaatcagctgaaccaagccagttggaagttccagccacagaaggtaaaaggacctcttccctcctagggtaaatcagcttctgtgtcagggatgctgtgtggtgtccatctgaaccccctgcatacgcgtagctaatgtgatctccccactttcacataagatggtggccctgccttcagggaatgtgggagccaggtgggagccttcccggatatttaagctagaagattctacagggagattctccttggatcaatatatgtctctcagtcaaagatgtaaaagcacttttgccttaaaaagaatgttctgtttctaaatagagtcaacgttgtcctcctcattggaattcactatgagtcagaatcattagactgacttttttttttccatagtaatagtattttgcagagtctcacagagctgcagatcttttgttcatcttgcagagttaacaagtctgatcctgttagtccagatttcttaaatttggccaagttataataggagcagtagcttgagacccgaagtcaggaaactttgacaatggatttttttttttaatccagagacttgtactggaatttgccttaccctgtcagctcatggacttaaggtttcatcccgctttatgagtgcttctgaatccaagtcattgttacctgaatttgcaaattaagttgtgatattcgtgactgttaaattcctgtaattagattaacctctttgcttgcttgtttgttttctctcctattttagcttaaagtatcagtggttgagaagagcttttcggacctgttactaccccaagctgtgtaatatacttgtataacagaaataccttctatacaaacctttttttctacttttagatagaaatgtctactttttcagcagttctgtgaattaaagagcagagtgactgtgggtctggaatggctggtgtacttgggaatgtactatcaggattttacagcaatgctgggaaatgacagggaaaatgacaggaatgaatctcaccagattttttatgtactcagcagagccttgagttacggtgtttattttccaatcaagtgaagatatctcctacttctcctactggaacatctcagcttctgcagtgaagaaaaattcctgtgatagttcagttctttagtttttctatttgaaaaaaaaaaatcatttaaatgatcctttgttcacggctctccttaatgactgagtgaacagttcctatctgtatatttgactaaaccttttcctaagctatctctcatggttcctatgtttttttatcataattaaaagcaaaaccatctggatcacctaacagtcagaggtcagtatctcagcgtgtgaattatagaggaaatacagagagaacctcttccacttttacttttcgtccaaataaaatgcatggtgtaccagaagttgaagatcgggttgaggattggggctagctcgatgacactaaggccccaacatcgcgggacctgctgtggcgcggattcttaggaacgctgttctagccggccccctctccaggggtcgccgtggccggcattatttcctagttcttcttgtaaccctgaggtgccagcgcggggagtgaggaggggtcagggggctaaggatgcaacctctgacgttctgcgccttcctaggagagtcttacatgtgttgagatttcacaagcaatgcgagttgtaaaataccagctctacaagaagctaggctctgtgacggcatagttttcagtagctttatcacaatattcacaatggagaattatatgacatggtagcagaaataggcccttttatgtgttgcttctattttacctcaaattgtagatatagggtaatcaataaaatccatccatgcctttcacacactaagt

SEQ ID NO: 4671 - protein, 563 aa, Homo sapiens; identical to SEQ ID NO: 4097

SEQ ID NO: 4672 - DNA, 4406 bp, Homo sapiens
aaaaaaaaaaaaaaaaaaaaaaaaaaaagaaaaaagaaaaaaaaaaggaggaggaggaggagggtgagagagaagctgggagagcagagaaaaggggccaccggtcgcccccccgcttccccgcacgcgctctccagccgcggccgcccgcctgccgcggtcaccccggcctctgcctctgtcccccagtgatcggatcaaggcgctgagcgaggccctgcctgcggggcggccatgcggcggtgacaggagcgcgaccgacacgcacgggcccctcgccccctctcgcctcccgtccgctcgccagctcccctcagccgaggctgctccgcggcggccgcagcccgcgcgcggcccacactcgcctcccctcggcacccccggccccggagctgcctggaggcggccgcactcggtgtaaagaactggccaagtccaaagccgaagtggcctgcattgcagtgtatgaaacagacgtgtttgtcgtcggaactgaaagaggacgtgcttttgtcaataccagaaaggattttcaaaaagattttgtaaaatattgtgttgaagaagaagaaaaagctgcagagatgcataaaatgaaatctacaacccaggcaaatcggatgagtgtagatgctgtagaaattgaaacactcagaaaaacagttgaggactatttctgcttttgctatgggaaagctttaggcaaatccacagtggtacctgtaccatatgagaagatgctgcgagaccagtcggctgtggtagtgcaggggcttccggaaggtgttgcctttaaacaccccgagaactatgatcttgcaaccctgaaatggattttggagaacaaagcagggatttcattcatcattaagagaccttttttagagccaaagaagcatgtaggtggtcgtgtgatggtaacagatgctgacaggtcaatactatctccaggtggaagttgtggccccatcaaagtgaaaactgaacccacagaagattctggcatttccctggaaatggcagctgtgacagtaaaggaagaatcagaagatcctgattattatcaatataacattcaagcaggcccttctgaaactgatgatgttgatgaaaaacagcccctatcgaagcctttgcaaggaagccaccattcttcagagggcaatgaaggcacagaaatggaagtaccagcagaagattctactcaacatgtcccttcagaaacaagtgaggaccctgaagttgaggtgactattgaagatgatgattattctccaccgtctaagagaccaaaggccaatgagctaccgcagccaccagtcccggaacccgccaatgctgggaagcggaaagtgagggagttcaacttcgagaaatggaatgctcgcatcactgatctacgtaaacaagttgaagaattgtttgaaaggaaatatgctcaagccataaaagccaaaggtccggtgacgatcccgtaccctcttttccagtctcatgttgaagatctttatgtagaaggacttcctgaaggaattccttttagaaggccatctacttacggaattcctcgcctggagaggatattacttgcaaaggaaaggattcgttttgtgattaagaaacatgagcttctgaattcaacacgtgaagatttacagcttgataagccagcttcaggagtaaaggaagaatggtatgccagaatcactaaattaagaaagatggtggatcagcttttctgcaaaaaatttgcggaagccttggggagcactgaagccaaggctgtaccgtaccaaaaatttgaggcacacccgaatgatctgtacgtggaaggactgccagaaaacattcctttccgaagtccctcatggtatggaatcccaaggctggaaaaaatcattcaagtgggcaatcgaattaaatttgttattaaaagaccagaacttctgactcacagtaccactgaagttactcagccaagaacgaatacaccagctcaagctcttggactcaccgaggcagtaaaagtaccatatcctgtgtttgaatcaaacccggagttcttgtatgtggaaggcttgccagaggggattcccttccgaagccctacctggtttggaattccacgacttgaaaggatcgtccgcgggagtaataaaatcaagttcgttgttaaaaaacctgaactagttatttcctacttgcctcctgggatggctagtaaaataaacactaaagctttgcagtcccccaaaagaccacgaagtcctgggagtaattcaaaggttcctgaaattgaggtcaccgtggaaggccctaataacaacaatcctcaaacctcagctgttcgaaccccgacccagactaacggttctaacgttcccttcaagccacgagggagagagttttcctttgaggcctggaatgccaaaatcacggacctaaaacagaaagttgaaaatctcttcaatgagaaatgtggggaagctcttggccttaaacaagctgtgaaggtgccgttcgcgttatttgagtctttcccggaagacttttatgtggaaggcttacctgagggtgtgccattccgaagaccatcgacttttggcattccgaggctggagaagatactcagaaacaaagccaaaattaagttcatcattaaaaagcccgaaatgtttgagacggcgattaaggagagcacctcctctaagagccctcccagaaaaataaattcatcacccaatgttaatactactgcatcaggtgttgaagaccttaacatcattcaggtgacaattccagatgatgataatgaaagactctcgaaagttgaaaaagctagacagctaagagaacaagtgaatgacctctttagtcggaaatttggtgaagctattggtatgggttttcctgtgaaagttccctacaggaaaatcacaattaaccctggctgtgtggtggttgatggcatgcccccgggggtgtccttcaaagcccccagctacctggaaatcagctccatgagaaggatcttagactctgccgagtttatcaaattcacggtcattagaccatttccaggacttgtgattaataaccagctggttgatcagagtgagtcagaaggccccgtgatacaagaatcagctgaaccaagccagttggaagttccagccacagaagaaataaaagagactgatggaagctctcagatcaagcaagaaccagaccccacgtggtagacctcttccctcctaggcttaaagtatcagtggttgagaagagcttttcggacctgttactaccccaagctgtgtaatatacttgtataacagaaataccttctatacaaacctttttttctacttttagatagaaatgtctactttttcagcagttctgtgaattaaagagcagagtgactgtgggtctggaatggctggtgtacttgggaatgtactatcaggattttacagcaatgctgggaaatgacagggaaaatgacaggaatgaatctcaccagattttttatgtactcagcagagccttgagttacggtgtttattttccaatcaagtgaagatatctcctacttctcctactggaacatctcagcttctgcagtgaagaaaaattcctgtgatagttcagttctttagtttttctatttgaaaaaaaaaaatcatttaaatgatcctttgttcacggctctccttaatgactgagtgaacagttcctatctgtatatttgactaaaccttttcctaagctatctctcatggttcctatgtttttttatcataattaaaagcaaaaccatctggatcacctaacagtcagaggtcagtatctcagcgtgtgaattatagaggaaatacagagagaacctcttccacttttacttttcgtccaaataaaatgcatggtgtaccagaagttgaagatcgggttgaggattggggctagctcgatgacactaaggccccaacatcgcgggacctgctgtggcgcggattcttaggaacgctgttctagccggccccctctccaggggtcgccgtggccggcattatttcctagttcttcttgtaaccctgaggtgccagcgcggggagtgaggaggggtcagggggctaaggatgcaacctctgacgttctgcgccttcctaggagagtcttacatgtgttgagatttcacaagcaatgcgagttgtaaaataccagctctacaagaagctaggctctgtgacggcatagttttcagtagctttatcacaatattcacaatggagaattatatgacatggtagcagaaataggcccttttatgtgttgcttctattttacctcaaattgtagatatagggtaatcaataaaatccatccatgcctttcacacactaagt

SEQ ID NO: 4673 - protein, 885 aa, Homo sapiens; identical to SEQ ID NO: 4109

SEQ ID NO: 4674 - DNA, 5005 bp, Homo sapiens
aaaaaaaaaaaaaaaaaaaaaaaaaaaagaaaaaagaaaaaaaaaaggaggaggaggaggagggtgagagagaagctgggagagcagagaaaaggggccaccggtcgcccccccgcttccccgcacgcgctctccagccgcggccgcccgcctgccgcggtcaccccggcctctgcctctgtcccccagtgatcggatcaaggcgctgagcgaggccctgcctgcggggcggccatgcggcggtgacaggagcgcgaccgacacgcacgggcccctcgccccctctcgcctcccgtccgctcgccagctcccctcagccgaggctgctccgcggcggccgcagcccgcgcgcggcccacactcgcctccccgttgaagatgaggagtcctcggagagcaggatggtggtgacattcctcatgtcagctctcgagtccatgtgtaaagaactggccaagtccaaagccgaagtggcctgcattgcagtgtatgaaacagacgtgtttgtcgtcggaactgaaagaggacgtgcttttgtcaataccagaaaggattttcaaaaagattttgtaaaatattgtgttgaagaagaagaaaaagctgcagagatgcataaaatgaaatctacaacccaggcaaatcggatgagtgtagatgctgtagaaattgaaacactcagaaaaacagttgaggactatttctgcttttgctatgggaaagctttaggcaaatccacagtggtacctgtaccatatgagaagatgctgcgagaccagtcggctgtggtagtgcaggggcttccggaaggtgttgcctttaaacaccccgagaactatgatcttgcaaccctgaaatggattttggagaacaaagcagggatttcattcatcattaagagaccttttttagagccaaagaagcatgtaggtggtcgtgtgatggtaacagatgctgacaggtcaatactatctccaggtggaagttgtggccccatcaaagtgaaaactgaacccacagaagattctggaagccaccattcttcagagggcaatgaaggcacagaaatggaagtaccagcagaagattctactcaacatgtcccttcagaaacaagtgaggaccctgaagttgaggtgactattgaagatgatgattattctccaccgtctaagagaccaaaggccaatgagctaccgcagccaccagtcccggaacccgccaatgctgggaagcggaaagtgagggagttcaacttcgagaaatggaatgctcgcatcactgatctacgtaaacaagttgaagaattgtttgaaaggaaatatgctcaagccataaaagccaaaggtccggtgacgatcccgtaccctcttttccagtctcatgttgaagatctttatgtagaaggacttcctgaaggaattccttttagaaggccatctacttacggaattcctcgcctggagaggatattacttgcaaaggaaaggattcgttttgtgattaagaaacatgagcttctgaattcaacacgtgaagatttacagcttgataagccagcttcaggagtaaaggaagaatggtatgccagaatcactaaattaagaaagatggtggatcagcttttctgcaaaaaatttgcggaagccttggggagcactgaagccaaggctgtaccgtaccaaaaatttgaggcacacccgaatgatctgtacgtggaaggactgccagaaaacattcctttccgaagtccctcatggtatggaatcccaaggctggaaaaaatcattcaagtgggcaatcgaattaaatttgttattaaaagaccagaacttctgactcacagtaccactgaagttactcagccaagaacgaatacaccagtcaaagaagattggaatgtcagaattaccaagctacggaagcaagtggaagagatttttaatttgaaatttgctcaagctcttggactcaccgaggcagtaaaagtaccatatcctgtgtttgaatcaaacccggagttcttgtatgtggaaggcttgccagaggggattcccttccgaagccctacctggtttggaattccacgacttgaaaggatcgtccgcgggagtaataaaatcaagttcgttgttaaaaaacctgaactagttatttcctacttgcctcctgggatggctagtaaaataaacactaaagctttgcagtcccccaaaagaccacgaagtcctgggagtaattcaaaggttcctgaaattgaggtcaccgtggaaggccctaataacaacaatcctcaaacctcagctgttcgaaccccgacccagactaacggttctaacgttcccttcaagccacgagggagagagttttcctttgaggcctggaatgccaaaatcacggacctaaaacagaaagttgaaaatctcttcaatgagaaatgtggggaagctcttggccttaaacaagctgtgaaggtgccgttcgcgttatttgagtctttcccggaagacttttatgtggaaggcttacctgagggtgtgccattccgaagaccatcgacttttggcattccgaggctggagaagatactcagaaacaaagccaaaattaagttcatcattaaaaagcccgaaatgtttgagacggcgattaaggagagcacctcctctaagagccctcccagaaaaataaattcatcacccaatgttaatactactgcatcaggtgttgaagaccttaacatcattcaggtgacaattccagatgatgataatgaaagactctcgaaagttgaaaaagctagacagctaagagaacaagtgaatgacctctttagtcggaaatttggtgaagctattggtatgggttttcctgtgaaagttccctacaggaaaatcacaattaaccctggctgtgtggtggttgatggcatgcccccgggggtgtccttcaaagcccccagctacctggaaatcagctccatgagaaggatcttagactctgccgagtttatcaaattcacggtcattagaccatttccaggacttgtgattaataaccagctggttgatcagagtgagtcagaaggccccgtgatacaagaatcagctgaaccaagccagttggaagttccagccacagaaggtaaaaggacctcttccctcctagggtaaatcagcttctgtgtcagggatgctgtgtggtgtccatctgaaccccctgcatacgcgtagctaatgtgatctccccactttcacataagatggtggccctgccttcagggaatgtgggagccaggtgggagccttcccggatatttaagctagaagattctacagggagattctccttggatcaatatatgtctctcagtcaaagatgtaaaagcacttttgccttaaaaagaatgttctgtttctaaatagagtcaacgttgtcctcctcattggaattcactatgagtcagaatcattagactgacttttttttttccatagtaatagtattttgcagagtctcacagagctgcagatcttttgttcatcttgcagagttaacaagtctgatcctgttagtccagatttcttaaatttggccaagttataataggagcagtagcttgagacccgaagtcaggaaactttgacaatggatttttttttttaatccagagacttgtactggaatttgccttaccctgtcagctcatggacttaaggtttcatcccgctttatgagtgcttctgaatccaagtcattgttacctgaatttgcaaattaagttgtgatattcgtgactgttaaattcctgtaattagattaacctctttgcttgcttgtttgttttctctcctattttagcttaaagtatcagtggttgagaagagcttttcggacctgttactaccccaagctgtgtaatatacttgtataacagaaataccttctatacaaacctttttttctacttttagatagaaatgtctactttttcagcagttctgtgaattaaagagcagagtgactgtgggtctggaatggctggtgtacttgggaatgtactatcaggattttacagcaatgctgggaaatgacagggaaaatgacaggaatgaatctcaccagattttttatgtactcagcagagccttgagttacggtgtttattttccaatcaagtgaagatatctcctacttctcctactggaacatctcagcttctgcagtgaagaaaaattcctgtgatagttcagttctttagtttttctatttgaaaaaaaaaaatcatttaaatgatcctttgttcacggctctccttaatgactgagtgaacagttcctatctgtatatttgactaaaccttttcctaagctatctctcatggttcctatgtttttttatcataattaaaagcaaaaccatctggatcacctaacagtcagaggtcagtatctcagcgtgtgaattatagaggaaatacagagagaacctcttccacttttacttttcgtccaaataaaatgcatggtgtaccagaagttgaagatcgggttgaggattggggctagctcgatgacactaaggccccaacatcgcgggacctgctgtggcgcggattcttaggaacgctgttctagccggccccctctccaggggtcgccgtggccggcattatttcctagttcttcttgtaaccctgaggtgccagcgcggggagtgaggaggggtcagggggctaaggatgcaacctctgacgttctgcgccttcctaggagagtcttacatgtgttgagatttcacaagcaatgcgagttgtaaaataccagctctacaagaagctaggctctgtgacggcatagttttcagtagctttatcacaatattcacaatggagaattatatgacatggtagcagaaataggcccttttatgtgttgcttctattttacctcaaattgtagatatagggtaatcaataaaatccatccatgcctttcacacactaagt

SEQ ID NO: 4675 - protein, 922 aa, Homo sapiens
MVVTFLMSALESMCKELAKSKAEVACIAVYETDVFVVGTERGRAFVNTRKDFQKDFVKYCVEEEEKAAEMHKMKSTTQANRMSVDAVEIETLRKTVEDYFCFCYGKALGKSTVVPVPYEKMLRDQSAVVVQGLPEGVAFKHPENYDLATLKWILENKAGISFIIKRPFLEPKKHVGGRVMVTDADRSILSPGGSCGPIKVKTEPTEDSGSHHSSEGNEGTEMEVPAEDSTQHVPSETSEDPEVEVTIEDDDYSPPSKRPKANELPQPPVPEPANAGKRKVREFNFEKWNARITDLRKQVEELFERKYAQAIKAKGPVTIPYPLFQSHVEDLYVEGLPEGIPFRRPSTYGIPRLERILLAKERIRFVIKKHELLNSTREDLQLDKPASGVKEEWYARITKLRKMVDQLFCKKFAEALGSTEAKAVPYQKFEAHPNDLYVEGLPENIPFRSPSWYGIPRLEKIIQVGNRIKFVIKRPELLTHSTTEVTQPRTNTPVKEDWNVRITKLRKQVEEIFNLKFAQALGLTEAVKVPYPVFESNPEFLYVEGLPEGIPFRSPTWFGIPRLERIVRGSNKIKFVVKKPELVISYLPPGMASKINTKALQSPKRPRSPGSNSKVPEIEVTVEGPNNNNPQTSAVRTPTQTNGSNVPFKPRGREFSFEAWNAKITDLKQKVENLFNEKCGEALGLKQAVKVPFALFESFPEDFYVEGLPEGVPFRRPSTFGIPRLEKILRNKAKIKFIIKKPEMFETAIKESTSSKSPPRKINSSPNVNTTASGVEDLNIIQVTIPDDDNERLSKVEKARQLREQVNDLFSRKFGEAIGMGFPVKVPYRKITINPGCVVVDGMPPGVSFKAPSYLEISSMRRILDSAEFIKFTVIRPFPGLVINNQLVDQSESEGPVIQESAEPSQLEVPATEGKRTSSLLG

SEQ ID NO: 4676 - DNA, 5107 bp, Homo sapiens
aaaaaaaaaaaaaaaaaaaaaaaaaaaagaaaaaagaaaaaaaaaaggaggaggaggaggagggtgagagagaagctgggagagcagagaaaaggggccaccggtcgcccccccgcttccccgcacgcgctctccagccgcggccgcccgcctgccgcggtcaccccggcctctgcctctgtcccccagtgatcggatcaaggcgctgagcgaggccctgcctgcggggcggccatgcggcggtgacaggagcgcgaccgacacgcacgggcccctcgccccctctcgcctcccgtccgctcgccagctcccctcagccgaggctgctccgcggcggccgcagcccgcgcgcggcccacactcgcctcccctcggcacccccggccccggagctgcctggaggcggccgcactcggtgtaaagaactggccaagtccaaagccgaagtggcctgcattgcagtgtatgaaacagacgtgtttgtcgtcggaactgaaagaggacgtgcttttgtcaataccagaaaggattttcaaaaagattttgtaaaatattgtgttgaagaagaagaaaaagctgcagagatgcataaaatgaaatctacaacccaggcaaatcggatgagtgtagatgctgtagaaattgaaacactcagaaaaacagttgaggactatttctgcttttgctatgggaaagctttaggcaaatccacagtggtacctgtaccatatgagaagatgctgcgagaccagtcggctgtggtagtgcaggggcttccggaaggtgttgcctttaaacaccccgagaactatgatcttgcaaccctgaaatggattttggagaacaaagcagggatttcattcatcattaagagaccttttttagagccaaagaagcatgtaggtggtcgtgtgatggtaacagatgctgacaggtcaatactatctccaggtggaagttgtggccccatcaaagtgaaaactgaacccacagaagattctggcatttccctggaaatggcagctgtgacagtaaaggaagaatcagaagatcctgattattatcaatataacattcaagcaggcccttctgaaactgatgatgttgatgaaaaacagcccctatcgaagcctttgcaaggaagccaccattcttcagagggcaatgaaggcacagaaatggaagtaccagcagaagatgatgattattctccaccgtctaagagaccaaaggccaatgagctaccgcagccaccagtcccggaacccgccaatgctgggaagcggaaagtgagggagttcaacttcgagaaatggaatgctcgcatcactgatctacgtaaacaagttgaagaattgtttgaaaggaaatatgctcaagccataaaagccaaaggtccggtgacgatcccgtaccctcttttccagtctcatgttgaagatctttatgtagaaggacttcctgaaggaattccttttagaaggccatctacttacggaattcctcgcctggagaggatattacttgcaaaggaaaggattcgttttgtgattaagaaacatgagcttctgaattcaacacgtgaagatttacagcttgataagccagcttcaggagtaaaggaagaatggtatgccagaatcactaaattaagaaagatggtggatcagcttttctgcaaaaaatttgcggaagccttggggagcactgaagccaaggctgtaccgtaccaaaaatttgaggcacacccgaatgatctgtacgtggaaggactgccagaaaacattcctttccgaagtccctcatggtatggaatcccaaggctggaaaaaatcattcaagtgggcaatcgaattaaatttgttattaaaagaccagaacttctgactcacagtaccactgaagttactcagccaagaacgaatacaccagtcaaagaagattggaatgtcagaattaccaagctacggaagcaagtggaagagatttttaatttgaaatttgctcaagctcttggactcaccgaggcagtaaaagtaccatatcctgtgtttgaatcaaacccggagttcttgtatgtggaaggcttgccagaggggattcccttccgaagccctacctggtttggaattccacgacttgaaaggatcgtccgcgggagtaataaaatcaagttcgttgttaaaaaacctgaactagttatttcctacttgcctcctgggatggctagtaaaataaacactaaagctttgcagtcccccaaaagaccacgaagtcctgggagtaattcaaaggttcctgaaattgaggtcaccgtggaaggccctaataacaacaatcctcaaacctcagctgttcgaaccccgacccagactaacggttctaacgttcccttcaagccacgagggagagagttttcctttgaggcctggaatgccaaaatcacggacctaaaacagaaagttgaaaatctcttcaatgagaaatgtggggaagctcttggccttaaacaagctgtgaaggtgccgttcgcgttatttgagtctttcccggaagacttttatgtggaaggcttacctgagggtgtgccattccgaagaccatcgacttttggcattccgaggctggagaagatactcagaaacaaagccaaaattaagttcatcattaaaaagcccgaaatgtttgagacggcgattaaggagagcacctcctctaagagccctcccagaaaaataaattcatcacccaatgttaatactactgcatcaggtgttgaagaccttaacatcattcaggtgacaattccagatgatgataatgaaagactctcgaaagttgaaaaagctagacagctaagagaacaagtgaatgacctctttagtcggaaatttggtgaagctattggtatgggttttcctgtgaaagttccctacaggaaaatcacaattaaccctggctgtgtggtggttgatggcatgcccccgggggtgtccttcaaagcccccagctacctggaaatcagctccatgagaaggatcttagactctgccgagtttatcaaattcacggtcattagaccatttccaggacttgtgattaataaccagctggttgatcagagtgagtcagaaggccccgtgatacaagaatcagctgaaccaagccagttggaagttccagccacagaagaaataaaagagactgatggaagctctcagatcaagcaagaaccagaccccacgtggtagacctcttccctcctagggtaaatcagcttctgtgtcagggatgctgtgtggtgtccatctgaaccccctgcatacgcgtagctaatgtgatctccccactttcacataagatggtggccctgccttcagggaatgtgggagccaggtgggagccttcccggatatttaagctagaagattctacagggagattctccttggatcaatatatgtctctcagtcaaagatgtaaaagcacttttgccttaaaaagaatgttctgtttctaaatagagtcaacgttgtcctcctcattggaattcactatgagtcagaatcattagactgacttttttttttccatagtaatagtattttgcagagtctcacagagctgcagatcttttgttcatcttgcagagttaacaagtctgatcctgttagtccagatttcttaaatttggccaagttataataggagcagtagcttgagacccgaagtcaggaaactttgacaatggatttttttttttaatccagagacttgtactggaatttgccttaccctgtcagctcatggacttaaggtttcatcccgctttatgagtgcttctgaatccaagtcattgttacctgaatttgcaaattaagttgtgatattcgtgactgttaaattcctgtaattagattaacctctttgcttgcttgtttgttttctctcctattttagcttaaagtatcagtggttgagaagagcttttcggacctgttactaccccaagctgtgtaatatacttgtataacagaaataccttctatacaaacctttttttctacttttagatagaaatgtctactttttcagcagttctgtgaattaaagagcagagtgactgtgggtctggaatggctggtgtacttgggaatgtactatcaggattttacagcaatgctgggaaatgacagggaaaatgacaggaatgaatctcaccagattttttatgtactcagcagagccttgagttacggtgtttattttccaatcaagtgaagatatctcctacttctcctactggaacatctcagcttctgcagtgaagaaaaattcctgtgatagttcagttctttagtttttctatttgaaaaaaaaaaatcatttaaatgatcctttgttcacggctctccttaatgactgagtgaacagttcctatctgtatatttgactaaaccttttcctaagctatctctcatggttcctatgtttttttatcataattaaaagcaaaaccatctggatcacctaacagtcagaggtcagtatctcagcgtgtgaattatagaggaaatacagagagaacctcttccacttttacttttcgtccaaataaaatgcatggtgtaccagaagttgaagatcgggttgaggattggggctagctcgatgacactaaggccccaacatcgcgggacctgctgtggcgcggattcttaggaacgctgttctagccggccccctctccaggggtcgccgtggccggcattatttcctagttcttcttgtaaccctgaggtgccagcgcggggagtgaggaggggtcagggggctaaggatgcaacctctgacgttctgcgccttcctaggagagtcttacatgtgttgagatttcacaagcaatgcgagttgtaaaataccagctctacaagaagctaggctctgtgacggcatagttttcagtagctttatcacaatattcacaatggagaattatatgacatggtagcagaaataggcccttttatgtgttgcttctattttacctcaaattgtagatatagggtaatcaataaaatccatccatgcctttcacacactaagt

SEQ ID NO: 4677 - protein, 888 aa, Homo sapiens; identical to SEQ ID NO: 4027

SEQ ID NO: 4678 - DNA, 3892 bp, Homo sapiens
aaaaaaaaaaaaaaaaaaaaaaaaaaaagaaaaaagaaaaaaaaaaggaggaggaggaggagggtgagagagaagctgggagagcagagaaaaggggccaccggtcgcccccccgcttccccgcacgcgctctccagccgcggccgcccgcctgccgcggtcaccccggcctctgcctctgtcccccagtgatcggatcaaggcgctgagcgaggccctgcctgcggggcggccatgcggcggtgacaggagcgcgaccgacacgcacgggcccctcgccccctctcgcctcccgtccgctcgccagctcccctcagccgaggctgctccgcggcggccgcagcccgcgcgcggcccacactcgcctcccctcggcacccccggccccggagctgcctggaggcggccgcactcggggatcatggcccaagttgcaatgtccaccctccccgttgaagatgaggagtcctcggagagcaggatggtggtgacattcctcatgtcagctctcgagtccatgtgtaaagaactggccaagtccaaagccgaagtggcctgcattgcagtgtatgaaacagacgtgtttgtcgtcggaactgaaagaggacgtgcttttgtcaataccagaaaggattttcaaaaagattttgtaaaatattgtgttgaagaagaagaaaaagctgcagagatgcataaaatgaaatctacaacccaggcaaatcggatgagtgtagatgctgtagaaattgaaacactcagaaaaacagttgaggactatttctgcttttgctatgggaaagctttaggcaaatccacagtggtacctgtaccatatgagaagatgctgcgagaccagtcggctgtggtagtgcaggggcttccggaaggtgttgcctttaaacaccccgagaactatgatcttgcaaccctgaaatggattttggagaacaaagcagggatttcattcatcattaagagaccttttttagagccaaagaagcatgtaggtggtcgtgtgatggtaacagatgctgacaggtcaatactatctccaggtggaagttgtggccccatcaaagtgaaaactgaacccacagaagattctggaagccaccattcttcagagggcaatgaaggcacagaaatggaagtaccagcagaagattctactcaacatgtcccttcagaaacaagtgaggaccctgaagttgaggtgactattgaagatgatgattattctccaccgtctaagagaccaaaggccaatgagctaccgcagccaccagtcccggaacccgccaatgctgggaagcggaaagtgagggagttcaacttcgagaaatggaatgctcgcatcactgatctacgtaaacaagttgaagaattgtttgaaaggaaatatgctcaagccataaaagccaaaggtccggtgacgatcccgtaccctcttttccagtctcatgttgaagatctttatgtagaaggacttcctgaaggaattccttttagaaggccatctacttacggaattcctcgcctggagaggatattacttgcaaaggaaaggattcgttttgtgattaagaaacatgagcttctgaattcaacacgtgaagatttacagcttgataagccagcttcaggagtaaaggaagaatggtatgccagaatcactaaattaagaaagatggtggatcagcttttctgcaaaaaatttgcggaagccttggggagcactgaagccaaggctgtaccgtaccaaaaatttgaggcacacccgaatgatctgtacgtggaaggactgccagaaaacattcctttccgaagtccctcatggtatggaatcccaaggctggaaaaaatcattcaagtgggcaatcgaattaaatttgttattaaaagaccagaacttctgactcacagtaccactgaagttactcagccaagaacgaatacaccagtcaaagaagattggaatgtcagaattaccaagctacggaagcaagtggaagagatttttaatttgaaatttgctcaagctcttggactcaccgaggcagtaaaagtaccatatcctgtgtttgaatcaaacccggagttcttgtatgtggaaggcttgccagaggggattcccttccgaagccctacctggtttggaattccacgacttgaaaggatcgtccgcgggagtaataaaatcaagttcgttgttaaaaaacctgaactagttatttcctacttgcctcctgggatggctagtaaaataaacactaaagctttgcagtcccccaaaagaccacgaagtcctgggagtaattcaaaggttcctgaaattgaggtcaccgtggaaggccctaataacaacaatcctcaaacctcagctgttcgaaccccgacccagactaacggttctaacgttcccttcaagccacgagggagagagttttcctttgaggcctggaatgccaaaatcacggacctaaaacagaaagttgaaaatctcttcaatgagaaatgtggggaagctcttggccttaaacaagctgtgaaggtgccgttcgcgttatttgagtctttcccggaagacttttatgtggaaggcttacctgagggtgtgccattccgaagaccatcgacttttggcattccgaggctggagaagatactcagaaacaaagccaaaattaagttcatcattaaaaagcccgaaatgtttgagacggcgattaaggagagcacctcctctaagagccctcccagaaaaataaattcatcacccaatgttaatactactgcatcaggtgttgaagaccttaacatcattcaggtgacaattccagatgatgataatgaaagactctcgaaagttgaaaaagctagacagctaagagaacaagtgaatgacctctttagtcggaaatttggtgaagctattggtatgggttttcctgtgaaagttccctacaggaaaatcacaattaaccctggctgtgtggtggttgatggcatgcccccgggggtgtccttcaaagcccccagctacctggaaatcagctccatgagaaggatcttagactctgccgagtttatcaaattcacggtcattagaccatttccaggacttgtgattaataaccagctggttgatcagagtgagtcagaaggccccgtgatacaagaatcagctgaaccaagccagttggaagttccagccacagaagaaataaaagagactgatggaagctctcagatcaagcaagaaccagaccccacgtggtagacctcttccctcctaggcaaaaccatctggatcacctaacagtcagaggtcagtatctcagcgtgtgaattatagaggaaatacagagagaacctcttccacttttacttttcgtccaaataaaatgcatggtgtaccagaagttgaagatcgggttgaggattggggctagctcgatgacactaaggccccaacatcgcgggacctgctgtggcgcggattcttaggaacgctgttctagccggccccctctccaggggtcgccgtggccggcattatttcctagttcttcttgtaaccctgaggtgccagcgcggggagtgaggaggggtcagggggctaaggatgcaacctctgacgttctgcgccttcctaggagagtcttacatgtgttgagatttcacaagcaatgcgagttgtaaaataccagctctacaagaagctaggctctgtgacggcatagttttcagtagctttatcacaatattcacaatggagaattatatgacatggtagcagaaataggcccttttatgtgttgcttctattttacctcaaattgtagatatagggtaatcaataaaatccatccatgcctttcacacactaagt

SEQ ID NO: 4679 - protein, 952 aa, Homo sapiens; identical to SEQ ID NO: 4069

SEQ ID NO: 4680 - DNA, 8067 bp, Homo sapiens
aaaaaaaaaaaaaaaaaaaaaaaaaaaagaaaaaagaaaaaaaaaaggaggaggaggaggagggtgagagagaagctgggagagcagagaaaaggggccaccggtcgcccccccgcttccccgcacgcgctctccagccgcggccgcccgcctgccgcggtcaccccggcctctgcctctgtcccccagtgatcggatcaaggcgctgagcgaggccctgcctgcggggcggccatgcggcggtgacaggagcgcgaccgacacgcacgggcccctcgccccctctcgcctcccgtccgctcgccagctcccctcagccgaggctgctccgcggcggccgcagcccgcgcgcggcccacactcgcctccccgttgaagatgaggagtcctcggagagcaggatggtggtgacattcctcatgtcagctctcgagtccatgtgtaaagaactggccaagtccaaagccgaagtggcctgcattgcagtgtatgaaacagacgtgtttgtcgtcggaactgaaagaggacgtgcttttgtcaataccagaaaggattttcaaaaagattttgtaaaatattgtgttgaagaagaagaaaaagctgcagagatgcataaaatgaaatctacaacccaggcaaatcggatgagtgtagatgctgtagaaattgaaacactcagaaaaacagttgaggactatttctgcttttgctatgggaaagctttaggcaaatccacagtggtacctgtaccatatgagaagatgctgcgagaccagtcggctgtggtagtgcaggggcttccggaaggtgttgcctttaaacaccccgagaactatgatcttgcaaccctgaaatggattttggagaacaaagcagggatttcattcatcattaagagaccttttttagagccaaagaagcatgtaggtggtcgtgtgatggtaacagatgctgacaggtcaatactatctccaggtggaagttgtggccccatcaaagtgaaaactgaacccacagaagattctggcatttccctggaaatggcagctgtgacagtaaaggaagaatcagaagatcctgattattatcaatataacattcaagcaggcccttctgaaactgatgatgttgatgaaaaacagcccctatcgaagcctttgcaaggaagccaccattcttcagagggcaatgaaggcacagaaatggaagtaccagcagaagattctactcaacatgtcccttcagaaacaagtgaggaccctgaagttgaggtgactattgaagatgatgattattctccaccgtctaagagaccaaaggccaatgagctaccgcagccaccagtcccggaacccgccaatgctgggaagcggaaagtgagggagttcaacttcgagaaatggaatgctcgcatcactgatctacgtaaacaagttgaagaattgtttgaaaggaaatatgctcaagccataaaagccaaaggtccggtgacgatcccgtaccctcttttccagtctcatgttgaagatctttatgtagaaggacttcctgaaggaattccttttagaaggccatctacttacggaattcctcgcctggagaggatattacttgcaaaggaaaggattcgttttgtgattaagaaacatgagcttctgaattcaacacgtgaagatttacagcttgataagccagcttcaggagtaaaggaagaatggtatgccagaatcactaaattaagaaagatggtggatcagcttttctgcaaaaaatttgcggaagccttggggagcactgaagccaaggctgtaccgtaccaaaaatttgaggcacacccgaatgatctgtacgtggaaggactgccagaaaacattcctttccgaagtccctcatggtatggaatcccaaggctggaaaaaatcattcaagtgggcaatcgaattaaatttgttattaaaagaccagaacttctgactcacagtaccactgaagttactcagccaagaacgaatacaccagtcaaagaagattggaatgtcagaattaccaagctacggaagcaagtggaagagatttttaatttgaaatttgcttagatttgttgacagcggtttcctggagtgctgtcttgagaacgattctgaggaggctcagcaagaaagagtgtttcagttgattgggtgtgtctgtcatggagaaggaactcaagctcttggactcaccgaggcagtaaaagtaccatatcctgtgtttgaatcaaacccggagttcttgtatgtggaaggcttgccagaggggattcccttccgaagccctacctggtttggaattccacgacttgaaaggatcgtccgcgggagtaataaaatcaagttcgttgttaaaaaacctgaactagttatttcctacttgcctcctgggatggctagtaaaataaacactaaagctttgcagtcccccaaaagaccacgaagtcctgggagtaattcaaaggttcctgaaattgaggtcaccgtggaaggccctaataacaacaatcctcaaacctcagctgttcgaaccccgacccagactaacggttctaacgttcccttcaagccacgagggagagagttttcctttgaggcctggaatgccaaaatcacggacctaaaacagaaagttgaaaatctcttcaatgagaaatgtggggaagctcttggccttaaacaagctgtgaaggtgccgttcgcgttatttgagtctttcccggaagacttttatgtggaaggcttacctgagggtgtgccattccgaagaccatcgacttttggcattccgaggctggagaagatactcagaaacaaagccaaaattaagttcatcattaaaaagcccgaaatgtttgagacggcgattaaggagagcacctcctctaagagccctcccagaaaaataaattcatcacccaatgttaatactactgcatcaggtgttgaagaccttaacatcattcaggtgacaattccagatgatgataatgaaagactctcgaaagttgaaaaagctagacagctaagagaacaagtgaatgacctctttagtcggaaatttggtgaagctattggtatgggttttcctgtgaaagttccctacaggaaaatcacaattaaccctggctgtgtggtggttgatggcatgcccccgggggtgtccttcaaagcccccagctacctggaaatcagctccatgagaaggatcttagactctgccgagtttatcaaattcacggtcattaggtaagtgagagtttcctgcttagtcacaggagcgaatctggagctcatgaggctgactcttctaaaatgcagccacaggtagtcatcgaatccggcttcctatgctgtgcaatcaacaaatcaaaataacttgtgtcatcattagaatgtcagatgtgcttctacgaactaagctgactcttttaattctttggcaaagggttggcaaactaggactgtttgccaaattcaggctgcctcctatttttagagtcttcctgaaacacagctacacccgtattatccatggctgctttcctgtcacagtgagtaagtagctgggactgagaaggcatggcctccaaagtctaaaatatttactctctagcactttgtagaaaaaccttagctaggcacagtggctaacgcctgtaatcccagcattttgggaggccaaggcaggcagatcacctgaggtcaggagttccagaccagcctggccaacatggtgaaatcccatctctacaaaaataaaacagttagctgggcatgatggcgggtgcctgtaatcccagctactcgggaggctgaggcaggatagtcgcttgaacccaggaggtggaggttgcaatgagccaagatcatgccactgcactccagcctggacgacagagtgagactccatcacaagaaaaaaagaactttgtcaacctctgtcttagggcgccttgtcacaggcttcgggtcagacggattcaaccttgcatcagccatttgttagccaggtcactctgttctttgtctgtaaatgagattgatcgttgttcccactgagagtgtcagctccttcccgtagagcaggcatgatgattgtactcacctctgacaccattgtgagtgccacattccttcccacgtccttgtcactgtaagagatgcccacctgagcaccaaccccaggttatcttcccctttgtcttccagccccccagaaacagctacgactcaacctacccaatcatttcatcatcagattgccactgtctctagttcaggtctcttgggactggcactcagaaatctcataataaatcctcttgaggcttctcatacactcgtcttcttccaatcttctttccctcaaaatctcatattttggttccacttcacccaccgtcattctccatatcactcccaggagttaggcaaaaagccccttccgttcttccgtatgttaaacttagaatcactctgttccctgctctgcgtttctattttttgtttttcctccatttactagtagcttaacactttctaacagtgttcttattattgatacgtatctatctcttccataagcttataaggtcacggataatacttctcattgtagtacgtaaatgacgtgggctagatatgagttgaataaacagttatacctgtaaattcttacagagtgaaaataaattgttatactttacaatttgtttctctctttagaccatttccaggacttgtgattaataaccgtgagtattttgtgaagtgttttgtttttgttttttcctggggtctgacgtgtgtgcgtgtgagtgtgtatacatgcttaacgtatatcacgttacttcacctatgtcagtaaccaggccaaatacttgttttagccctcagtaaaaacaccaggcacttcctagttgtaaaattattcaagcttcttaacttcctatcctcgatgcacttaatcataaaatggtaataatagcaccgattttgggggagtcgttccagtagatggaaagcatctggaacaggtgtcagcaagctcctgccgacgtgtatgcataaagttttattgaaaccaccatcgtgtccatttgtttatggcagaactgagagatggcagcagcaagtgtgtgcctgcaaaacctaaaatatttactaattggctctgcaagaaaagagtttgcatccccctaacctagaacagtgtctagcctctagtatgtgtttagcctacagtatgtgctcagcgaatacaatctatatttattactgcttttatgactgttataattactgtgcttggatttcgttacaaagtaagtcacaatgtgcctgcttctgttagtatttcagcacagtgcctggcacacatggggctctcaaatattgctgagcgagtgaacaaatgtcctttcaattccttaacgttgatgtcattttcaatagtattttgagccaaacttaattttgcgagtgtgttttgttttcttaactttattattaaaaatgtataaaagtgaggccaggcgtggtggctcacgcctgtaatcccagcagtttgggaggctgaggcaggcggatcagttgaggttgggagttggagaccagcccgtccaacatggtgaaagcctgtctctactaaaaatacaaaaatcagctgggtgtggtggcgcgtgcctgtaatcccagctactcaggaggctgaggcaggagagttgcttgaatcctagaggtggaggttgcagtgagctgagatcgtgccattgcactccagcctgggcaacaagagcaaaactctgtcccaataaataaataaataaaatgttctcttttgttcctgttcttgtgcggtagtgtggtatagagttttatggtaattactgtgaattagtgattctgagggacatatcagaactctgaggtttgtttccttctcatcttgagggaaacagcaaatgtatgttaaaatgcttttccaagggaacaacacatccttacattatttaaaccaatctgcttcattttcagagctggttgatcagagtgagtcagaaggccccgtgatacaagaatcagctgaaccaagccagttggaagttccagccacagaagaaataaaagagactgatggaagctctcagatcaagcaagaaccagaccccacgtggtagacctcttccctcctagggtaaatcagcttctgtgtcagggatgctgtgtggtgtccatctgaaccccctgcatacgcgtagctaatgtgatctccccactttcacataagatggtggccctgccttcagggaatgtgggagccaggtgggagccttcccggatatttaagctagaagattctacagggagattctccttggatcaatatatgtctctcagtcaaagatgtaaaagcacttttgccttaaaaagaatgttctgtttctaaatagagtcaacgttgtcctcctcattggaattcactatgagtcagaatcattagactgacttttttttttccatagtaatagtattttgcagagtctcacagagctgcagatcttttgttcatcttgcagagttaacaagtctgatcctgttagtccagatttcttaaatttggccaagttataataggagcagtagcttgagacccgaagtcaggaaactttgacaatggatttttttttttaatccagagacttgtactggaatttgccttaccctgtcagctcatggacttaaggtttcatcccgctttatgagtgcttctgaatccaagtcattgttacctgaatttgcaaattaagttgtgatattcgtgactgttaaattcctgtaattagattaacctctttgcttgcttgtttgttttctctcctattttagcttaaagtatcagtggttgagaagagcttttcggacctgttactaccccaagctgtgtaatatacttgtataacagaaataccttctatacaaacctttttttctacttttagatagaaatgtctactttttcagcagttctgtgaattaaagagcagagtgactgtgggtctggaatggctggtgtacttgggaatgtactatcaggattttacagcaatgctgggaaatgacagggaaaatgacaggaatgaatctcaccagattttttatgtactcagcagagccttgagttacggtgtttattttccaatcaagtgaagatatctcctacttctcctactggaacatctcagcttctgcagtgaagaaaaattcctgtgatagttcagttctttagtttttctatttgaaaaaaaaaaatcatttaaatgatcctttgttcacggctctccttaatgactgagtgaacagttcctatctgtatatttgactaaaccttttcctaagctatctctcatggttcctatgtttttttatcataattaaaagcaaaaccatctggatcacctaacagtcagaggtcagtatctcagcgtgtgaattatagaggaaatacagagagaacctcttccacttttacttttcgtccaaataaaatgcatggtgtaccagaagttgaagatcgggttgaggattggggctagctcgatgacactaaggccccaacatcgcgggacctgctgtggcgcggattcttaggaacgctgttctagccggccccctctccaggggtcgccgtggccggcattatttcctagttcttcttgtaaccctgaggtgccagcgcggggagtgaggaggggtcagggggctaaggatgcaacctctgacgttctgcgccttcctaggagagtcttacatgtgttgagatttcacaagcaatgcgagttgtaaaataccagctctacaagaagctaggctctgtgacggcatagttttcagtagctttatcacaatattcacaatggagaattatatgacatggtagcagaaataggcccttttatgtgttgcttctattttacctcaaattgtagatatagggtaatcaataaaatccatccatgcctttcacacactaagt

SEQ ID NO: 4681 - protein, 564 aa, Homo sapiens; identical to SEQ ID NO: 4031

SEQ ID NO: 4682 - DNA, 7136 bp, Homo sapiens
aaaaaaaaaaaaaaaaaaaaaaaaaaaagaaaaaagaaaaaaaaaaggaggaggaggaggagggtgagagagaagctgggagagcagagaaaaggggccaccggtcgcccccccgcttccccgcacgcgctctccagccgcggccgcccgcctgccgcggtcaccccggcctctgcctctgtcccccagtgatcggatcaaggcgctgagcgaggccctgcctgcggggcggccatgcggcggtgacaggagcgcgaccgacacgcacgggcccctcgccccctctcgcctcccgtccgctcgccagctcccctcagccgaggctgctccgcggcggccgcagcccgcgcgcggcccacactcgcctccccgttgaagatgaggagtcctcggagagcaggatggtggtgacattcctcatgtcagctctcgagtccatgtgtaaagaactggccaagtccaaagccgaagtggcctgcattgcagtgtatgaaacagacgtgtttgtcgtcggaactgaaagaggacgtgcttttgtcaataccagaaaggattttcaaaaagattttgtaaaatattgtgttgaagaagaagaaaaagctgcagagatgcataaaatgaaatctacaacccaggcaaatcggatgagtgtagatgctgtagaaattgaaacactcagaaaaacagttgaggactatttctgcttttgctatgggaaagctttaggcaaatccacagtggtacctgtaccatatgagaagatgctgcgagaccagtcggctgtggtagtgcaggggcttccggaaggtgttgcctttaaacaccccgagaactatgatcttgcaaccctgaaatggattttggagaacaaagcagggatttcattcatcattaagagaccttttttagagccaaagaagcatgtaggtggtcgtgtgatggtaacagatgctgacaggtcaatactatctccaggtggaagttgtggccccatcaaagtgaaaactgaacccacagaagattctggcatttccctggaaatggcagctgtgacagtaaaggaagaatcagaagatcctgattattatcaatataacattcaaggaagccaccattcttcagagggcaatgaaggcacagaaatggaagtaccagcagaagattctactcaacatgtcccttcagaaacaagtgaggaccctgaagttgaggtgactattgaagatgatgattattctccaccgtctaagagaccaaaggccaatgagctaccgcagccaccagtcccggaacccgccaatgctgggaagcggaaagtgagggagttcaacttcgagaaatggaatgctcgcatcactgatctacgtaaacaagttgaagaattgtttgaaaggaaatatgctcaagccataaaagccaaaggtccggtgacgatcccgtaccctcttttccagtctcatgttgaagatctttatgtagaaggacttcctgaaggaattccttttagaaggccatctacttacggaattcctcgcctggagaggatattacttgcaaaggaaaggattcgttttgtgattaagaaacatgagcttctgaattcaacacgtgaagatttacagcttgataagccagcttcaggagtaaaggaagaatggtatgccagaatcactaaattaagaaagatggtggatcagcttttctgcaaaaaatttgcggaagccttggggagcactgaagccaaggctgtaccgtaccaaaaatttgaggcacacccgaatgatctgtacgtggaaggactgccagaaaacattcctttccgaagtccctcatggtatggaatcccaaggctggaaaaaatcattcaagtgggcaatcgaattaaatttgttattaaaagaccagaacttctgactcacagtaccactgaagttactcagccaagaacgaatacaccagtcaaagaagattggaatgtcagaattaccaagctacggaagcaagtggaagagatttttaatttgaaatttgctcaagctcttggactcaccgaggcagtaaaagtaccatatcctgtgtttgaatcaaacccggagttcttgaaaggatcgtccgcgggagtaataaaatcaagttcgttgttaaaaaacctgaactagttatttcctacttgcctcctgggatggctagtaaaataaacactaaagctttgcagtcccccaaaagaccacgaagtcctgggagtaattcaaaggttcctgaaattgaggtcaccgtggaaggccctaataacaacaatcctcaaacctcagctgttcgaaccccgacccagactaacggttctaacgttcccttcaagccacgagggagagagttttcctttgaggcctggaatgccaaaatcacggacctaaaacagaaagttgaaaatctcttcaatgagaaatgtggggaagctcttggccttaaacaagctgtgaaggtgccgttcgcgttatttgagtctttcccggaagacttttatgtggaaggcttacctgagggtgtgccattccgaagaccatcgacttttggcattccgaggctggagaagatactcagaaacaaagccaaaattaagttcatcattaaaaagcccgaaatgtttgagacggcgattaaggagagcacctcctctaagagccctcccagaaaaataaattcatcacccaatgttaatactactgcatcaggtgttgaagaccttaacatcattcaggtgacaattccagatgatgataatgaaagactctcgaaagttgaaaaagctagacagctaagagaacaagtgaatgacctctttagtcggaaatttggtgaagctattggtatgggttttcctgtgaaagttccctacaggaaaatcacaattaaccctggctgtgtggtggttgatggcatgcccccgggggtgtccttcaaagcccccagctacctggaaatcagctccatgagaaggatcttagactctgccgagtttatcaaattcacggtcattaggtaagtgagagtttcctgcttagtcacaggagcgaatctggagctcatgaggctgactcttctaaaatgcagccacaggtagtcatcgaatccggcttcctatgctgtgcaatcaacaaatcaaaataacttgtgtcatcattagaatgtcagatgtgcttctacgaactaagctgactcttttaattctttggcaaagggttggcaaactaggactgtttgccaaattcaggctgcctcctatttttagagtcttcctgaaacacagctacacccgtattatccatggctgctttcctgtcacagtgagtaagtagctgggactgagaaggcatggcctccaaagtctaaaatatttactctctagcactttgtagaaaaaccttagctaggcacagtggctaacgcctgtaatcccagcattttgggaggccaaggcaggcagatcacctgaggtcaggagttccagaccagcctggccaacatggtgaaatcccatctctacaaaaataaaacagttagctgggcatgatggcgggtgcctgtaatcccagctactcgggaggctgaggcaggatagtcgcttgaacccaggaggtggaggttgcaatgagccaagatcatgccactgcactccagcctggacgacagagtgagactccatcacaagaaaaaaagaactttgtcaacctctgtcttagggcgccttgtcacaggcttcgggtcagacggattcaaccttgcatcagccatttgttagccaggtcactctgttctttgtctgtaaatgagattgatcgttgttcccactgagagtgtcagctccttcccgtagagcaggcatgatgattgtactcacctctgacaccattgtgagtgccacattccttcccacgtccttgtcactgtaagagatgcccacctgagcaccaaccccaggttatcttcccctttgtcttccagccccccagaaacagctacgactcaacctacccaatcatttcatcatcagattgccactgtctctagttcaggtctcttgggactggcactcagaaatctcataataaatcctcttgaggcttctcatacactcgtcttcttccaatcttctttccctcaaaatctcatattttggttccacttcacccaccgtcattctccatatcactcccaggagttaggcaaaaagccccttccgttcttccgtatgttaaacttagaatcactctgttccctgctctgcgtttctattttttgtttttcctccatttactagtagcttaacactttctaacagtgttcttattattgatacgtatctatctcttccataagcttataaggtcacggataatacttctcattgtagtacgtaaatgacgtgggctagatatgagttgaataaacagttatacctgtaaattcttacagagtgaaaataaattgttatactttacaatttgtttctctctttagaccatttccaggacttgtgattaataaccgtgagtattttgtgaagtgttttgtttttgttttttcctggggtctgacgtgtgtgcgtgtgagtgtgtatacatgcttaacgtatatcacgttacttcacctatgtcagtaaccaggccaaatacttgttttagccctcagtaaaaacaccaggcacttcctagttgtaaaattattcaagcttcttaacttcctatcctcgatgcacttaatcataaaatggtaataatagcaccgattttgggggagtcgttccagtagatggaaagcatctggaacaggtgtcagcaagctcctgccgacgtgtatgcataaagttttattgaaaccaccatcgtgtccatttgtttatggcagaactgagagatggcagcagcaagtgtgtgcctgcaaaacctaaaatatttactaattggctctgcaagaaaagagtttgcatccccctaacctagaacagtgtctagcctctagtatgtgtttagcctacagtatgtgctcagcgaatacaatctatatttattactgcttttatgactgttataattactgtgcttggatttcgttacaaagtaagtcacaatgtgcctgcttctgttagtatttcagcacagtgcctggcacacatggggctctcaaatattgctgagcgagtgaacaaatgtcctttcaattccttaacgttgatgtcattttcaatagtattttgagccaaacttaattttgcgagtgtgttttgttttcttaactttattattaaaaatgtataaaagtgaggccaggcgtggtggctcacgcctgtaatcccagcagtttgggaggctgaggcaggcggatcagttgaggttgggagttggagaccagcccgtccaacatggtgaaagcctgtctctactaaaaatacaaaaatcagctgggtgtggtggcgcgtgcctgtaatcccagctactcaggaggctgaggcaggagagttgcttgaatcctagaggtggaggttgcagtgagctgagatcgtgccattgcactccagcctgggcaacaagagcaaaactctgtcccaataaataaataaataaaatgttctcttttgttcctgttcttgtgcggtagtgtggtatagagttttatggtaattactgtgaattagtgattctgagggacatatcagaactctgaggtttgtttccttctcatcttgagggaaacagcaaatgtatgttaaaatgcttttccaagggaacaacacatccttacattatttaaaccaatctgcttcattttcagagctggttgatcagagtgagtcagaaggccccgtgatacaagaatcagctgaaccaagccagttggaagttccagccacagaagaaataaaagagactgatggaagctctcagatcaagcaagaaccagaccccacgtggtagacctcttccctcctaggcttaaagtatcagtggttgagaagagcttttcggacctgttactaccccaagctgtgtaatatacttgtataacagaaataccttctatacaaacctttttttctacttttagatagaaatgtctactttttcagcagttctgtgaattaaagagcagagtgactgtgggtctggaatggctggtgtacttgggaatgtactatcaggattttacagcaatgctgggaaatgacagggaaaatgacaggaatgaatctcaccagattttttatgtactcagcagagccttgagttacggtgtttattttccaatcaagtgaagatatctcctacttctcctactggaacatctcagcttctgcagtgaagaaaaattcctgtgatagttcagttctttagtttttctatttgaaaaaaaaaaatcatttaaatgatcctttgttcacggctctccttaatgactgagtgaacagttcctatctgtatatttgactaaaccttttcctaagctatctctcatggttcctatgtttttttatcataattaaaagcaaaaccatctggatcacctaacagtcagaggtcagtatctcagcgtgtgaattatagaggaaatacagagagaacctcttccacttttacttttcgtccaaataaaatgcatggtgtaccagaagttgaagatcgggttgaggattggggctagctcgatgacactaaggccccaacatcgcgggacctgctgtggcgcggattcttaggaacgctgttctagccggccccctctccaggggtcgccgtggccggcattatttcctagttcttcttgtaaccctgaggtgccagcgcggggagtgaggaggggtcagggggctaaggatgcaacctctgacgttctgcgccttcctaggagagtcttacatgtgttgagatttcacaagcaatgcgagttgtaaaataccagctctacaagaagctaggctctgtgacggcatagttttcagtagctttatcacaatattcacaatggagaattatatgacatggtagcagaaataggcccttttatgtgttgcttctattttacctcaaattgtagatatagggtaatcaataaaatccatccatgcctttcacacactaagt

SEQ ID NO: 4683 - protein, 585 aa, Homo sapiens; identical to SEQ ID NO: 4199

SEQ ID NO: 4684 - DNA, 3915 bp, Homo sapiens
aaaaaaaaaaaaaaaaaaaaaaaaaaaagaaaaaagaaaaaaaaaaggaggaggaggaggagggtgagagagaagctgggagagcagagaaaaggggccaccggtcgcccccccgcttccccgcacgcgctctccagccgcggccgcccgcctgccgcggtcaccccggcctctgcctctgtcccccagtgatcggatcaaggcgctgagcgaggccctgcctgcggggcggccatgcggcggtgacaggagcgcgaccgacacgcacgggcccctcgccccctctcgcctcccgtccgctcgccagctcccctcagccgaggctgctccgcggcggccgcagcccgcgcgcggcccacactcgcctcccctcggcacccccggccccggagctgcctggaggcggccgcactcggtgtaaagaactggccaagtccaaagccgaagtggcctgcattgcagtgtatgaaacagacgtgtttgtcgtcggaactgaaagaggacgtgcttttgtcaataccagaaaggattttcaaaaagattttgtaaaatattgtgttgaagaagaagaaaaagctgcagagatgcataaaatgaaatctacaacccaggcaaatcggatgagtgtagatgctgtagaaattgaaacactcagaaaaacagttgaggactatttctgcttttgctatgggaaagctttaggcaaatccacagtggtacctgtaccatatgagaagatgctgcgagaccagtcggctgtggtagtgcaggggcttccggaaggtgttgcctttaaacaccccgagaactatgatcttgcaaccctgaaatggattttggagaacaaagcagggatttcattcatcattaagagaccttttttagagccaaagaagcatgtaggtggtcgtgtgatggtaacagatgctgacaggtcaatactatctccaggtggaagttgtggccccatcaaagtgaaaactgaacccacagaagattctggcatttccctggaaatggcagctgtgacagtaaaggaagaatcagaagatcctgattattatcaatataacattcaaggaagccaccattcttcagagggcaatgaaggcacagaaatggaagtaccagcagaagatgatgattattctccaccgtctaagagaccaaaggccaatgagctaccgcagccaccagtcccggaacccgccaatgctgggaagcggaaagtgagggagttcaacttcgagaaatggaatgctcgcatcactgatctacgtaaacaagttgaagaattgtttgaaaggaaatatgctcaagccataaaagccaaaggtccggtgacgatcccgtaccctcttttccagtctcatgttgaagatctttatgtagaaggacttcctgaaggaattccttttagaaggccatctacttacggaattcctcgcctggagaggatattacttgcaaaggaaaggattcgttttgtgattaagaaacatgagcttctgaattcaacacgtgaagatttacagcttgataagccagcttcaggagtaaaggaagaatggtatgccagaatcactaaattaagaaagatggtggatcagcttttctgcaaaaaatttgcggaagccttggggagcactgaagccaaggctgtaccgtaccaaaaatttgaggcacacccgaatgatctgtacgtggaaggactgccagaaaacattcctttccgaagtccctcatggtatggaatcccaaggctggaaaaaatcattcaagtgggcaatcgaattaaatttgttattaaaagaccagaacttctgactcacagtaccactgaagttactcagccaagaacgaatacaccagtcaaagaagattggaatgtcagaattaccaagctacggaagcaagtggaagagatttttaatttgaaatttgcttagatttgttgacagcggtttcctggagtgctgtcttgagaacgattctgaggaggctcagcaagaaagagtgtttcagttgattgggtgtgtctgtcatggagaaggaactcaagctcttggactcaccgaggcagtaaaagtaccatatcctgtgtttgaatcaaacccggagttcttgtatgtggaaggcttgccagaggggattcccttccgaagccctacctggtttggaattccacgacttgaaaggatcgtccgcgggagtaataaaatcaagttcgttgttaaaaaacctgaactagttatttcctacttgcctcctgggatggctagtaaaataaacactaaagctttgcagtcccccaaaagaccacgaagtcctgggagtaattcaaaggttcctgaaattgaggtcaccgtggaaggccctaataacaacaatcctcaaacctcagctgttcgaaccccgacccagactaacggttctaacgttcccttcaagccacgagggagagagttttcctttgaggcctggaatgccaaaatcacggacctaaaacagaaagttgaaaatctcttcaatgagaaatgtggggaagctcttggccttaaacaagctgtgaaggtgccgttcgcgttatttgagtctttcccggaagacttttatgtggaaggcttacctgagggtgtgccattccgaagaccatcgacttttggcattccgaggctggagaagatactcagaaacaaagccaaaattaagttcatcattaaaaagcccgaaatgtttgagacggcgattaaggagagcacctcctctaagagccctcccagaaaaataaattcatcacccaatgttaatactactgcatcaggtgttgaagaccttaacatcattcaggtgacaattccagatgatgataatgaaagactctcgaaagttgaaaaagctagacagctaagagaacaagtgaatgacctctttagtcggaaatttggtgaagctattggtatgggttttcctgtgaaagttccctacaggaaaatcacaattaaccctggctgtgtggtggttgatggcatgcccccgggggtgtccttcaaagcccccagctacctggaaatcagctccatgagaaggatcttagactctgccgagtttatcaaattcacggtcattagaccatttccaggacttgtgattaataaccagctggttgatcagagtgagtcagaaggccccgtgatacaagaatcagctgaaccaagccagttggaagttccagccacagaagaaataaaagagactgatggaagctctcagatcaagcaagaaccagaccccacgtggtagacctcttccctcctaggcaaaaccatctggatcacctaacagtcagaggtcagtatctcagcgtgtgaattatagaggaaatacagagagaacctcttccacttttacttttcgtccaaataaaatgcatggtgtaccagaagttgaagatcgggttgaggattggggctagctcgatgacactaaggccccaacatcgcgggacctgctgtggcgcggattcttaggaacgctgttctagccggccccctctccaggggtcgccgtggccggcattatttcctagttcttcttgtaaccctgaggtgccagcgcggggagtgaggaggggtcagggggctaaggatgcaacctctgacgttctgcgccttcctaggagagtcttacatgtgttgagatttcacaagcaatgcgagttgtaaaataccagctctacaagaagctaggctctgtgacggcatagttttcagtagctttatcacaatattcacaatggagaattatatgacatggtagcagaaataggcccttttatgtgttgcttctattttacctcaaattgtagatatagggtaatcaataaaatccatccatgcctttcacacactaagt

SEQ ID NO: 4685 - protein, 454 aa, Homo sapiens; identical to SEQ ID NO: 4239

SEQ ID NO: 4686 - DNA, 4306 bp, Homo sapiens
aaaaaaaaaaaaaaaaaaaaaaaaaaaagaaaaaagaaaaaaaaaaggaggaggaggaggagggtgagagagaagctgggagagcagagaaaaggggccaccggtcgcccccccgcttccccgcacgcgctctccagccgcggccgcccgcctgccgcggtcaccccggcctctgcctctgtcccccagtgatcggatcaaggcgctgagcgaggccctgcctgcggggcggccatgcggcggtgacaggagcgcgaccgacacgcacgggcccctcgccccctctcgcctcccgtccgctcgccagctcccctcagccgaggctgctccgcggcggccgcagcccgcgcgcggcccacactcgcctcccctcggcacccccggccccggagctgcctggaggcggccgcactcggtgtaaagaactggccaagtccaaagccgaagtggcctgcattgcagtgtatgaaacagacgtgtttgtcgtcggaactgaaagaggacgtgcttttgtcaataccagaaaggattttcaaaaagattttgtaaaatattgtgttgaagaagaagaaaaagctgcagagatgcataaaatgaaatctacaacccaggcaaatcggatgagtgtagatgctgtagaaattgaaacactcagaaaaacagttgaggactatttctgcttttgctatgggaaagctttaggcaaatccacagtggtacctgtaccatatgagaagatgctgcgagaccagtcggctgtggtagtgcaggggcttccggaaggtgttgcctttaaacaccccgagaactatgatcttgcaaccctgaaatggattttggagaacaaagcagggatttcattcatcattaagagaccttttttagagccaaagaagcatgtaggtggtcgtgtgatggtaacagatgctgacaggtcaatactatctccaggtggaagttgtggccccatcaaagtgaaaactgaacccacagaagattctggcatttccctggaaatggcagctgtgacagtaaaggaagaatcagaagatcctgattattatcaatataacattcaagcaggcccttctgaaactgatgatgttgatgaaaaacagcccctatcgaagcctttgcaaggaagccaccattcttcagagggcaatgaaggcacagaaatggaagtaccagcagaagattctactcaacatgtcccttcagaaacaagtgaggaccctgaagttgaggtgactattgaagatgatgattattctccaccgtctaagagaccaaaggccaatgagctaccgcagccaccagtcccggaacccgccaatgctgggaagcggaaagtgagggagttcaacttcgagaaatggaatgctcgcatcactgatctacgtaaacaagttgaagaattgtttgaaaggaaatatgctcaagccataaaagccaaaggtccggtgacgatcccgtaccctcttttccagtctcatgttgaagatctttatgtagaaggacttcctgaaggaattccttttagaaggccatctacttacggaattcctcgcctggagaggatattacttgcaaaggaaaggattcgttttgtgattaagaaacatgagcttctgaattcaacacgtgaagatttacagcttgataagccagcttcaggagtaaaggaagaatggtatgccagaatcactaaattaagaaagatggtggatcagcttttctgcaaaaaatttgcggaagccttggggagcactgaagccaaggctgtaccgtaccaaaaatttgaggcacacccgaatgatctgtacgtggaaggactgccagaaaacattcctttccgaagtccctcatggtatggaatcccaaggctggaaaaaatcattcaagtgggcaatcgaattaaatttgttattaaaagaccagaacttctgactcacagtaccactgaagttactcagccaagaacgaatacaccagtcaaagaagattggaatgtcagaattaccaagctacggaagcaagtggaagagatttttaatttgaaatttgcttagatttgttgacagcggtttcctggagtgctgtcttgagaacgattctgaggaggctcagcaagaaagagtgtttcagttgattgggtgtgtctgtcatggagaaggaactcaagctcttggactcaccgaggcagtaaaagtaccatatcctgtgtttgaatcaaacccggagttcttgtatgtggaaggcttgccagaggggattcccttccgaagccctacctggtttggaattccacgacttgaaaggatcgtccgcgggagtaataaaatcaagttcgttgttaaaaaacctgaactagttatttcctacttgcctcctgggatggctagtaaaataaacactaaagctttgcagtcccccaaaagaccacgaagtcctgggagtaattcaaaggttcctgaaattgaggtcaccgtggaaggccctaataacaacaatcctcaaacctcagctgttcgaaccccgacccagactaacggttctaacgttcccttcaagccacgagggagagagttttcctttgaggcctggaatgccaaaatcacggacctaaaacagaaagttgaaaatctcttcaatgagaaatgtggggaagctcttggccttaaacaagctgtgaaggtgccgttcgcgttatttgagtctttcccggaagacttttatgtggaaggcttacctgagggtgtgccattccgaagaccatcgacttttggcattccgaggctggagaagatactcagaaacaaagccaaaattaagttcatcattaaaaagcccgaaatgtttgagacggcgattaaggagagcacctcctctaagagccctcccagaaaaataaattcatcacccaatgttaatactactgcatcaggtgttgaagaccttaacatcattcaggtgacaattccagatgatgataatgaaagactctcgaaagttgaaaaagctagacagctaagagaacaagtgaatgacctctttagtcggaaatttggtgaagctattggtatgggttttcctgtgaaagttccctacaggaaaatcacaattaaccctggctgtgtggtggttgatggcatgcccccgggggtgtccttcaaagcccccagctacctggaaatcagctccatgagaaggatcttagactctgccgagtttatcaaattcacggtcattagaccatttccaggacttgtgattaataaccagctggttgatcagagtgagtcagaaggccccgtgatacaagaatcagctgaaccaagccagttggaagttccagccacagaagaaataaaagagactgatggaagctctcagatcaagcaagaaccagaccccacgtggtagacctcttccctcctaggagccttgagttacggtgtttattttccaatcaagtgaagatatctcctacttctcctactggaacatctcagcttctgcagtgaagaaaaattcctgtgatagttcagttctttagtttttctatttgaaaaaaaaaaatcatttaaatgatcctttgttcacggctctccttaatgactgagtgaacagttcctatctgtatatttgactaaaccttttcctaagctatctctcatggttcctatgtttttttatcataattaaaagcaaaaccatctggatcacctaacagtcagaggtcagtatctcagcgtgtgaattatagaggaaatacagagagaacctcttccacttttacttttcgtccaaataaaatgcatggtgtaccagaagttgaagatcgggttgaggattggggctagctcgatgacactaaggccccaacatcgcgggacctgctgtggcgcggattcttaggaacgctgttctagccggccccctctccaggggtcgccgtggccggcattatttcctagttcttcttgtaaccctgaggtgccagcgcggggagtgaggaggggtcagggggctaaggatgcaacctctgacgttctgcgccttcctaggagagtcttacatgtgttgagatttcacaagcaatgcgagttgtaaaataccagctctacaagaagctaggctctgtgacggcatagttttcagtagctttatcacaatattcacaatggagaattatatgacatggtagcagaaataggcccttttatgtgttgcttctattttacctcaaattgtagatatagggtaatcaataaaatccatccatgcctttcacacactaagt

SEQ ID NO: 4687 - protein, 495 aa, Homo sapiens; identical to SEQ ID NO: 4057

SEQ ID NO: 4688 - DNA, 4238 bp, Homo sapiens
aaaaaaaaaaaaaaaaaaaaaaaaaaaagaaaaaagaaaaaaaaaaggaggaggaggaggagggtgagagagaagctgggagagcagagaaaaggggccaccggtcgcccccccgcttccccgcacgcgctctccagccgcggccgcccgcctgccgcggtcaccccggcctctgcctctgtcccccagtgatcggatcaaggcgctgagcgaggccctgcctgcggggcggccatgcggcggtgacaggagcgcgaccgacacgcacgggcccctcgccccctctcgcctcccgtccgctcgccagctcccctcagccgaggctgctccgcggcggccgcagcccgcgcgcggcccacactcgcctcccctcggcacccccggccccggagctgcctggaggcggccgcactcggggatcatggcccaagttgcaatgtccaccctccccgttgaagatgaggagtcctcggagagcaggatggtggtgacattcctcatgtcagctctcgagtccatgtgtaaagaactggccaagtccaaagccgaagtggcctgcattgcagtgtatgaaacagacgtgtttgtcgtcggaactgaaagaggacgtgcttttgtcaataccagaaaggattttcaaaaagattttgtaaaatattgtgttgaagaagaagaaaaagctgcagagatgcataaaatgaaatctacaacccaggcaaatcggatgagtgtagatgctgtagaaattgaaacactcagaaaaacagttgaggactatttctgcttttgctatgggaaagctttaggcaaatccacagtggtacctgtaccatatgagaagatgctgcgagaccagtcggctgtggtagtgcaggggcttccggaaggtgttgcctttaaacaccccgagaactatgatcttgcaaccctgaaatggattttggagaacaaagcagggatttcattcatcattaagagaccttttttagagccaaagaagcatgtaggtggtcgtgtgatggtaacagatgctgacaggtcaatactatctccaggtggaagttgtggccccatcaaagtgaaaactgaacccacagaagattctggcatttccctggaaatggcagctgtgacagtaaaggaagaatcagaagatcctgattattatcaatataacattcaaggaagccaccattcttcagagggcaatgaaggcacagaaatggaagtaccagcagaagattctactcaacatgtcccttcagaaacaagtgaggaccctgaagttgaggtgactattgaagatgatgattattctccaccgtctaagagaccaaaggccaatgagctaccgcagccaccagtcccggaacccgccaatgctgggaagcggaaagtgagggagttcaacttcgagaaatggaatgctcgcatcactgatctacgtaaacaagttgaagaattgtttgaaaggaaatatgctcaagccataaaagccaaaggtccggtgacgatcccgtaccctcttttccagtctcatgttgaagatctttatgtagaaggacttcctgaaggaattccttttagaaggccatctacttacggaattcctcgcctggagaggatattacttgcaaaggaaaggattcgttttgtgattaagaaacatgagcttctgaattcaacacgtgaagatttacagcttgataagccagcttcaggagtaaaggaagaatggtatgccagaatcactaaattaagaaagatggtggatcagcttttctgcaaaaaatttgcggaagccttggggagcactgaagccaaggctgtaccgtaccaaaaatttgaggcacacccgaatgatctgtacgtggaaggactgccagaaaacattcctttccgaagtccctcatggtatggaatcccaaggctggaaaaaatcattcaagtgggcaatcgaattaaatttgttattaaaagaccagaacttctgactcacagtaccactgaagttactcagccaagaacgaatacaccagtcaaagaagattggaatgtcagaattaccaagctacggaagcaagtggaagagatttttaatttgaaatttgctcaagctcttggactcaccgaggcagtaaaagtaccatatcctgtgtttgaatcaaacccggagttcttgtatgtggaaggcttgccagaggggattcccttccgaagccctacctggtttggaattccacgacttgaaaggatcgtccgcgggagtaataaaatcaagttcgttgttaaaaaacctgaactagttatttcctacttgcctcctgggatggctagtaaaataaacactaaagctttgcagtcccccaaaagaccacgaagtcctgggagtaattcaaaggttcctgaaattgaggtcaccgtggaaggccctaataacaacaatcctcaaacctcagctgttcgaaccccgacccagactaacggttctaacgttcccttcaagccacgagggagagagttttcctttgaggcctggaatgccaaaatcacggacctaaaacagaaagttgaaaatctcttcaatgagaaatgtggggaagctcttggccttaaacaagctgtgaaggtgccgttcgcgttatttgagtctttcccggaagacttttatgtggaaggcttacctgagggtgtgccattccgaagaccatcgacttttggcattccgaggctggagaagatactcagaaacaaagccaaaattaagttcatcattaaaaagcccgaaatgtttgagacggcgattaaggagagcacctcctctaagagccctcccagaaaaataaattcatcacccaatgttaatactactgcatcaggtgttgaagaccttaacatcattcaggtgacaattccagatgatgataatgaaagactctcgaaagttgaaaaagctagacagctaagagaacaagtgaatgacctctttagtcggaaatttggtgaagctattggtatgggttttcctgtgaaagttccctacaggaaaatcacaattaaccctggctgtgtggtggttgatggcatgcccccgggggtgtccttcaaagcccccagctacctggaaatcagctccatgagaaggatcttagactctgccgagtttatcaaattcacggtcattagaccatttccaggacttgtgattaataaccagctggttgatcagagtgagtcagaaggccccgtgatacaagaatcagctgaaccaagccagttggaagttccagccacagaagaaataaaagagactgatggaagctctcagatcaagcaagaaccagaccccacgtggtagacctcttccctcctaggagccttgagttacggtgtttattttccaatcaagtgaagatatctcctacttctcctactggaacatctcagcttctgcagtgaagaaaaattcctgtgatagttcagttctttagtttttctatttgaaaaaaaaaaatcatttaaatgatcctttgttcacggctctccttaatgactgagtgaacagttcctatctgtatatttgactaaaccttttcctaagctatctctcatggttcctatgtttttttatcataattaaaagcaaaaccatctggatcacctaacagtcagaggtcagtatctcagcgtgtgaattatagaggaaatacagagagaacctcttccacttttacttttcgtccaaataaaatgcatggtgtaccagaagttgaagatcgggttgaggattggggctagctcgatgacactaaggccccaacatcgcgggacctgctgtggcgcggattcttaggaacgctgttctagccggccccctctccaggggtcgccgtggccggcattatttcctagttcttcttgtaaccctgaggtgccagcgcggggagtgaggaggggtcagggggctaaggatgcaacctctgacgttctgcgccttcctaggagagtcttacatgtgttgagatttcacaagcaatgcgagttgtaaaataccagctctacaagaagctaggctctgtgacggcatagttttcagtagctttatcacaatattcacaatggagaattatatgacatggtagcagaaataggcccttttatgtgttgcttctattttacctcaaattgtagatatagggtaatcaataaaatccatccatgcctttcacacactaagt

SEQ ID NO: 4689 - protein, 978 aa, Homo sapiens; identical to SEQ ID NO: 470

SEQ ID NO: 4690 - DNA, 5093 bp, Homo sapiens
aaaaaaaaaaaaaaaaaaaaaaaaaaaagaaaaaagaaaaaaaaaaggaggaggaggaggagggtgagagagaagctgggagagcagagaaaaggggccaccggtcgcccccccgcttccccgcacgcgctctccagccgcggccgcccgcctgccgcggtcaccccggcctctgcctctgtcccccagtgatcggatcaaggcgctgagcgaggccctgcctgcggggcggccatgcggcggtgacaggagcgcgaccgacacgcacgggcccctcgccccctctcgcctcccgtccgctcgccagctcccctcagccgaggctgctccgcggcggccgcagcccgcgcgcggcccacactcgcctcccctcggcacccccggccccggagctgcctggaggcggccgcactcggggatcatggcccaagttgcaatgtccaccctccccgttgaagatgaggagtcctcggagagcaggatggtggtgacattcctcatgtcagctctcgagtccatgtgtaaagaactggccaagtccaaagccgaagtggcctgcattgcagtgtatgaaacagacgtgtttgtcgtcggaactgaaagaggacgtgcttttgtcaataccagaaaggattttcaaaaagattttgtaaaatattgtgttgaagaagaagaaaaagctgcagagatgcataaaatgaaatctacaacccaggcaaatcggatgagtgtagatgctgtagaaattgaaacactcagaaaaacagttgaggactatttctgcttttgctatgggaaagctttaggcaaatccacagtggtacctgtaccatatgagaagatgctgcgagaccagtcggctgtggtagtgcaggggcttccggaaggtgttgcctttaaacaccccgagaactatgatcttgcaaccctgaaatggattttggagaacaaagcagggatttcattcatcattaagagaccttttttagagccaaagaagcatgtaggtggtcgtgtgatggtaacagatgctgacaggtcaatactatctccaggtggaagttgtggccccatcaaagtgaaaactgaacccacagaagattctggcatttccctggaaatggcagctgtgacagtaaaggaagaatcagaagatcctgattattatcaatataacattcaagcaggcccttctgaaactgatgatgttgatgaaaaacagcccctatcgaagcctttgcaaggaagccaccattcttcagagggcaatgaaggcacagaaatggaagtaccagcagaagatgatgattattctccaccgtctaagagaccaaaggccaatgagctaccgcagccaccagtcccggaacccgccaatgctgggaagcggaaagtgagggagttcaacttcgagaaatggaatgctcgcatcactgatctacgtaaacaagttgaagaattgtttgaaaggaaatatgctcaagccataaaagccaaaggtccggtgacgatcccgtaccctcttttccagtctcatgttgaagatctttatgtagaaggacttcctgaaggaattccttttagaaggccatctacttacggaattcctcgcctggagaggatattacttgcaaaggaaaggattcgttttgtgattaagaaacatgagcttctgaattcaacacgtgaagatttacagcttgataagccagcttcaggagtaaaggaagaatggtatgccagaatcactaaattaagaaagatggtggatcagcttttctgcaaaaaatttgcggaagccttggggagcactgaagccaaggctgtaccgtaccaaaaatttgaggcacacccgaatgatctgtacgtggaaggactgccagaaaacattcctttccgaagtccctcatggtatggaatcccaaggctggaaaaaatcattcaagtgggcaatcgaattaaatttgttattaaaagaccagaacttctgactcacagtaccactgaagttactcagccaagaacgaatacaccagtcaaagaagattggaatgtcagaattaccaagctacggaagcaagtggaagagatttttaatttgaaatttgctcaagctcttggactcaccgaggcagtaaaagtaccatatcctgtgtttgaatcaaacccggagttcttgaaaggatcgtccgcgggagtaataaaatcaagttcgttgttaaaaaacctgaactagttatttcctacttgcctcctgggatggctagtaaaataaacactaaagctttgcagtcccccaaaagaccacgaagtcctgggagtaattcaaaggttcctgaaattgaggtcaccgtggaaggccctaataacaacaatcctcaaacctcagctgttcgaaccccgacccagactaacggttctaacgttcccttcaagccacgagggagagagttttcctttgaggcctggaatgccaaaatcacggacctaaaacagaaagttgaaaatctcttcaatgagaaatgtggggaagctcttggccttaaacaagctgtgaaggtgccgttcgcgttatttgagtctttcccggaagacttttatgtggaaggcttacctgagggtgtgccattccgaagaccatcgacttttggcattccgaggctggagaagatactcagaaacaaagccaaaattaagttcatcattaaaaagcccgaaatgtttgagacggcgattaaggagagcacctcctctaagagccctcccagaaaaataaattcatcacccaatgttaatactactgcatcaggtgttgaagaccttaacatcattcaggtgacaattccagatgatgataatgaaagactctcgaaagttgaaaaagctagacagctaagagaacaagtgaatgacctctttagtcggaaatttggtgaagctattggtatgggttttcctgtgaaagttccctacaggaaaatcacaattaaccctggctgtgtggtggttgatggcatgcccccgggggtgtccttcaaagcccccagctacctggaaatcagctccatgagaaggatcttagactctgccgagtttatcaaattcacggtcattagaccatttccaggacttgtgattaataaccagctggttgatcagagtgagtcagaaggccccgtgatacaagaatcagctgaaccaagccagttggaagttccagccacagaaggtaaaaggacctcttccctcctagggtaaatcagcttctgtgtcagggatgctgtgtggtgtccatctgaaccccctgcatacgcgtagctaatgtgatctccccactttcacataagatggtggccctgccttcagggaatgtgggagccaggtgggagccttcccggatatttaagctagaagattctacagggagattctccttggatcaatatatgtctctcagtcaaagatgtaaaagcacttttgccttaaaaagaatgttctgtttctaaatagagtcaacgttgtcctcctcattggaattcactatgagtcagaatcattagactgacttttttttttccatagtaatagtattttgcagagtctcacagagctgcagatcttttgttcatcttgcagagttaacaagtctgatcctgttagtccagatttcttaaatttggccaagttataataggagcagtagcttgagacccgaagtcaggaaactttgacaatggatttttttttttaatccagagacttgtactggaatttgccttaccctgtcagctcatggacttaaggtttcatcccgctttatgagtgcttctgaatccaagtcattgttacctgaatttgcaaattaagttgtgatattcgtgactgttaaattcctgtaattagattaacctctttgcttgcttgtttgttttctctcctattttagcttaaagtatcagtggttgagaagagcttttcggacctgttactaccccaagctgtgtaatatacttgtataacagaaataccttctatacaaacctttttttctacttttagatagaaatgtctactttttcagcagttctgtgaattaaagagcagagtgactgtgggtctggaatggctggtgtacttgggaatgtactatcaggattttacagcaatgctgggaaatgacagggaaaatgacaggaatgaatctcaccagattttttatgtactcagcagagccttgagttacggtgtttattttccaatcaagtgaagatatctcctacttctcctactggaacatctcagcttctgcagtgaagaaaaattcctgtgatagttcagttctttagtttttctatttgaaaaaaaaaaatcatttaaatgatcctttgttcacggctctccttaatgactgagtgaacagttcctatctgtatatttgactaaaccttttcctaagctatctctcatggttcctatgtttttttatcataattaaaagcaaaaccatctggatcacctaacagtcagaggtcagtatctcagcgtgtgaattatagaggaaatacagagagaacctcttccacttttacttttcgtccaaataaaatgcatggtgtaccagaagttgaagatcgggttgaggattggggctagctcgatgacactaaggccccaacatcgcgggacctgctgtggcgcggattcttaggaacgctgttctagccggccccctctccaggggtcgccgtggccggcattatttcctagttcttcttgtaaccctgaggtgccagcgcggggagtgaggaggggtcagggggctaaggatgcaacctctgacgttctgcgccttcctaggagagtcttacatgtgttgagatttcacaagcaatgcgagttgtaaaataccagctctacaagaagctaggctctgtgacggcatagttttcagtagctttatcacaatattcacaatggagaattatatgacatggtagcagaaataggcccttttatgtgttgcttctattttacctcaaattgtagatatagggtaatcaataaaatccatccatgcctttcacacactaagt

SEQ ID NO: 4691 - protein, 604 aa, Homo sapiens; identical to SEQ ID NO: 4117

SEQ ID NO: 4692 - DNA, 4147 bp, Homo sapiens
aaaaaaaaaaaaaaaaaaaaaaaaaaaagaaaaaagaaaaaaaaaaggaggaggaggaggagggtgagagagaagctgggagagcagagaaaaggggccaccggtcgcccccccgcttccccgcacgcgctctccagccgcggccgcccgcctgccgcggtcaccccggcctctgcctctgtcccccagtgatcggatcaaggcgctgagcgaggccctgcctgcggggcggccatgcggcggtgacaggagcgcgaccgacacgcacgggcccctcgccccctctcgcctcccgtccgctcgccagctcccctcagccgaggctgctccgcggcggccgcagcccgcgcgcggcccacactcgcctccccgttgaagatgaggagtcctcggagagcaggatggtggtgacattcctcatgtcagctctcgagtccatgtgtaaagaactggccaagtccaaagccgaagtggcctgcattgcagtgtatgaaacagacgtgtttgtcgtcggaactgaaagaggacgtgcttttgtcaataccagaaaggattttcaaaaagattttgtaaaatattgtgttgaagaagaagaaaaagctgcagagatgcataaaatgaaatctacaacccaggcaaatcggatgagtgtagatgctgtagaaattgaaacactcagaaaaacagttgaggactatttctgcttttgctatgggaaagctttaggcaaatccacagtggtacctgtaccatatgagaagatgctgcgagaccagtcggctgtggtagtgcaggggcttccggaaggtgttgcctttaaacaccccgagaactatgatcttgcaaccctgaaatggattttggagaacaaagcagggatttcattcatcattaagagaccttttttagagccaaagaagcatgtaggtggtcgtgtgatggtaacagatgctgacaggtcaatactatctccaggtggaagttgtggccccatcaaagtgaaaactgaacccacagaagattctggcatttccctggaaatggcagctgtgacagtaaaggaagaatcagaagatcctgattattatcaatataacattcaaggaagccaccattcttcagagggcaatgaaggcacagaaatggaagtaccagcagaagattctactcaacatgtcccttcagaaacaagtgaggaccctgaagttgaggtgactattgaagatgatgattattctccaccgtctaagagaccaaaggccaatgagctaccgcagccaccagtcccggaacccgccaatgctgggaagcggaaagtgagggagttcaacttcgagaaatggaatgctcgcatcactgatctacgtaaacaagttgaagaattgtttgaaaggaaatatgctcaagccataaaagccaaaggtccggtgacgatcccgtaccctcttttccagtctcatgttgaagatctttatgtagaaggacttcctgaaggaattccttttagaaggccatctacttacggaattcctcgcctggagaggatattacttgcaaaggaaaggattcgttttgtgattaagaaacatgagcttctgaattcaacacgtgaagatttacagcttgataagccagcttcaggagtaaaggaagaatggtatgccagaatcactaaattaagaaagatggtggatcagcttttctgcaaaaaatttgcggaagccttggggagcactgaagccaaggctgtaccgtaccaaaaatttgaggcacacccgaatgatctgtacgtggaaggactgccagaaaacattcctttccgaagtccctcatggtatggaatcccaaggctggaaaaaatcattcaagtgggcaatcgaattaaatttgttattaaaagaccagaacttctgactcacagtaccactgaagttactcagccaagaacgaatacaccagtcaaagaagattggaatgtcagaattaccaagctacggaagcaagtggaagagatttttaatttgaaatttgctcaagctcttggactcaccgaggcagtaaaagtaccatatcctgtgtttgaatcaaacccggagttcttgaaaggatcgtccgcgggagtaataaaatcaagttcgttgttaaaaaacctgaactagttatttcctacttgcctcctgggatggctagtaaaataaacactaaagctttgcagtcccccaaaagaccacgaagtcctgggagtaattcaaaggttcctgaaattgaggtcaccgtggaaggccctaataacaacaatcctcaaacctcagctgttcgaaccccgacccagactaacggttctaacgttcccttcaagccacgagggagagagttttcctttgaggcctggaatgccaaaatcacggacctaaaacagaaagttgaaaatctcttcaatgagaaatgtggggaagctcttggccttaaacaagctgtgaaggtgccgttcgcgttatttgagtctttcccggaagacttttatgtggaaggcttacctgagggtgtgccattccgaagaccatcgacttttggcattccgaggctggagaagatactcagaaacaaagccaaaattaagttcatcattaaaaagcccgaaatgtttgagacggcgattaaggagagcacctcctctaagagccctcccagaaaaataaattcatcacccaatgttaatactactgcatcaggtgttgaagaccttaacatcattcaggtgacaattccagatgatgataatgaaagactctcgaaagttgaaaaagctagacagctaagagaacaagtgaatgacctctttagtcggaaatttggtgaagctattggtatgggttttcctgtgaaagttccctacaggaaaatcacaattaaccctggctgtgtggtggttgatggcatgcccccgggggtgtccttcaaagcccccagctacctggaaatcagctccatgagaaggatcttagactctgccgagtttatcaaattcacggtcattagaccatttccaggacttgtgattaataaccagctggttgatcagagtgagtcagaaggccccgtgatacaagaatcagctgaaccaagccagttggaagttccagccacagaagaaataaaagagactgatggaagctctcagatcaagcaagaaccagaccccacgtggtagacctcttccctcctaggcttaaagtatcagtggttgagaagagcttttcggacctgttactaccccaagctgtagccttgagttacggtgtttattttccaatcaagtgaagatatctcctacttctcctactggaacatctcagcttctgcagtgaagaaaaattcctgtgatagttcagttctttagtttttctatttgaaaaaaaaaaatcatttaaatgatcctttgttcacggctctccttaatgactgagtgaacagttcctatctgtatatttgactaaaccttttcctaagctatctctcatggttcctatgtttttttatcataattaaaagcaaaaccatctggatcacctaacagtcagaggtcagtatctcagcgtgtgaattatagaggaaatacagagagaacctcttccacttttacttttcgtccaaataaaatgcatggtgtaccagaagttgaagatcgggttgaggattggggctagctcgatgacactaaggccccaacatcgcgggacctgctgtggcgcggattcttaggaacgctgttctagccggccccctctccaggggtcgccgtggccggcattatttcctagttcttcttgtaaccctgaggtgccagcgcggggagtgaggaggggtcagggggctaaggatgcaacctctgacgttctgcgccttcctaggagagtcttacatgtgttgagatttcacaagcaatgcgagttgtaaaataccagctctacaagaagctaggctctgtgacggcatagttttcagtagctttatcacaatattcacaatggagaattatatgacatggtagcagaaataggcccttttatgtgttgcttctattttacctcaaattgtagatatagggtaatcaataaaatccatccatgcctttcacacactaagt

SEQ ID NO: 4693 - protein, 585 aa, Homo sapiens; identical to SEQ ID NO: 4199

SEQ ID NO: 4694 - DNA, 4274 bp, Homo sapiens
aaaaaaaaaaaaaaaaaaaaaaaaaaaagaaaaaagaaaaaaaaaaggaggaggaggaggagggtgagagagaagctgggagagcagagaaaaggggccaccggtcgcccccccgcttccccgcacgcgctctccagccgcggccgcccgcctgccgcggtcaccccggcctctgcctctgtcccccagtgatcggatcaaggcgctgagcgaggccctgcctgcggggcggccatgcggcggtgacaggagcgcgaccgacacgcacgggcccctcgccccctctcgcctcccgtccgctcgccagctcccctcagccgaggctgctccgcggcggccgcagcccgcgcgcggcccacactcgcctccccgttgaagatgaggagtcctcggagagcaggatggtggtgacattcctcatgtcagctctcgagtccatgtgtaaagaactggccaagtccaaagccgaagtggcctgcattgcagtgtatgaaacagacgtgtttgtcgtcggaactgaaagaggacgtgcttttgtcaataccagaaaggattttcaaaaagattttgtaaaatattgtgttgaagaagaagaaaaagctgcagagatgcataaaatgaaatctacaacccaggcaaatcggatgagtgtagatgctgtagaaattgaaacactcagaaaaacagttgaggactatttctgcttttgctatgggaaagctttaggcaaatccacagtggtacctgtaccatatgagaagatgctgcgagaccagtcggctgtggtagtgcaggggcttccggaaggtgttgcctttaaacaccccgagaactatgatcttgcaaccctgaaatggattttggagaacaaagcagggatttcattcatcattaagagaccttttttagagccaaagaagcatgtaggtggtcgtgtgatggtaacagatgctgacaggtcaatactatctccaggtggaagttgtggccccatcaaagtgaaaactgaacccacagaagattctggcatttccctggaaatggcagctgtgacagtaaaggaagaatcagaagatcctgattattatcaatataacattcaagcaggcccttctgaaactgatgatgttgatgaaaaacagcccctatcgaagcctttgcaaggaagccaccattcttcagagggcaatgaaggcacagaaatggaagtaccagcagaagattctactcaacatgtcccttcagaaacaagtgaggaccctgaagttgaggtgactattgaagatgatgattattctccaccgtctaagagaccaaaggccaatgagctaccgcagccaccagtcccggaacccgccaatgctgggaagcggaaagtgagggagttcaacttcgagaaatggaatgctcgcatcactgatctacgtaaacaagttgaagaattgtttgaaaggaaatatgctcaagccataaaagccaaaggtccggtgacgatcccgtaccctcttttccagtctcatgttgaagatctttatgtagaaggacttcctgaaggaattccttttagaaggccatctacttacggaattcctcgcctggagaggatattacttgcaaaggaaaggattcgttttgtgattaagaaacatgagcttctgaattcaacacgtgaagatttacagcttgataagccagcttcaggagtaaaggaagaatggtatgccagaatcactaaattaagaaagatggtggatcagcttttctgcaaaaaatttgcggaagccttggggagcactgaagccaaggctgtaccgtaccaaaaatttgaggcacacccgaatgatctgtacgtggaaggactgccagaaaacattcctttccgaagtccctcatggtatggaatcccaaggctggaaaaaatcattcaagtgggcaatcgaattaaatttgttattaaaagaccagaacttctgactcacagtaccactgaagttactcagccaagaacgaatacaccagtcaaagaagattggaatgtcagaattaccaagctacggaagcaagtggaagagatttttaatttgaaatttgctcaagctcttggactcaccgaggcagtaaaagtaccatatcctgtgtttgaatcaaacccggagttcttgtatgtggaaggcttgccagaggggattcccttccgaagccctacctggtttggaattccacgacttgaaaggatcgtccgcgggagtaataaaatcaagttcgttgttaaaaaacctgaactagttatttcctacttgcctcctgggatggctagtaaaataaacactaaagctttgcagtcccccaaaagaccacgaagtcctgggagtaattcaaaggttcctgaaattgaggtcaccgtggaaggccctaataacaacaatcctcaaacctcagctgttcgaaccccgacccagactaacggttctaacgttcccttcaagccacgagggagagagttttcctttgaggcctggaatgccaaaatcacggacctaaaacagaaagttgaaaatctcttcaatgagaaatgtggggaagctcttggccttaaacaagctgtgaaggtgccgttcgcgttatttgagtctttcccggaagacttttatgtggaaggcttacctgagggtgtgccattccgaagaccatcgacttttggcattccgaggctggagaagatactcagaaacaaagccaaaattaagttcatcattaaaaagcccgaaatgtttgagacggcgattaaggagagcacctcctctaagagccctcccagaaaaataaattcatcacccaatgttaatactactgcatcaggtgttgaagaccttaacatcattcaggtgacaattccagatgatgataatgaaagactctcgaaagttgaaaaagctagacagctaagagaacaagtgaatgacctctttagtcggaaatttggtgaagctattggtatgggttttcctgtgaaagttccctacaggaaaatcacaattaaccctggctgtgtggtggttgatggcatgcccccgggggtgtccttcaaagcccccagctacctggaaatcagctccatgagaaggatcttagactctgccgagtttatcaaattcacggtcattagaccatttccaggacttgtgattaataaccagctggttgatcagagtgagtcagaaggccccgtgatacaagaatcagctgaaccaagccagttggaagttccagccacagaagaaataaaagagactgatggaagctctcagatcaagcaagaaccagaccccacgtggtagacctcttccctcctaggcttaaagtatcagtggttgagaagagcttttcggacctgttactaccccaagctgtagccttgagttacggtgtttattttccaatcaagtgaagatatctcctacttctcctactggaacatctcagcttctgcagtgaagaaaaattcctgtgatagttcagttctttagtttttctatttgaaaaaaaaaaatcatttaaatgatcctttgttcacggctctccttaatgactgagtgaacagttcctatctgtatatttgactaaaccttttcctaagctatctctcatggttcctatgtttttttatcataattaaaagcaaaaccatctggatcacctaacagtcagaggtcagtatctcagcgtgtgaattatagaggaaatacagagagaacctcttccacttttacttttcgtccaaataaaatgcatggtgtaccagaagttgaagatcgggttgaggattggggctagctcgatgacactaaggccccaacatcgcgggacctgctgtggcgcggattcttaggaacgctgttctagccggccccctctccaggggtcgccgtggccggcattatttcctagttcttcttgtaaccctgaggtgccagcgcggggagtgaggaggggtcagggggctaaggatgcaacctctgacgttctgcgccttcctaggagagtcttacatgtgttgagatttcacaagcaatgcgagttgtaaaataccagctctacaagaagctaggctctgtgacggcatagttttcagtagctttatcacaatattcacaatggagaattatatgacatggtagcagaaataggcccttttatgtgttgcttctattttacctcaaattgtagatatagggtaatcaataaaatccatccatgcctttcacacactaagt

SEQ ID NO: 4695 - protein, 978 aa, Homo sapiens; identical to SEQ ID NO: 4157

SEQ ID NO: 4696 - DNA, 5255 bp, Homo sapiens
aaaaaaaaaaaaaaaaaaaaaaaaaaaagaaaaaagaaaaaaaaaaggaggaggaggaggagggtgagagagaagctgggagagcagagaaaaggggccaccggtcgcccccccgcttccccgcacgcgctctccagccgcggccgcccgcctgccgcggtcaccccggcctctgcctctgtcccccagtgatcggatcaaggcgctgagcgaggccctgcctgcggggcggccatgcggcggtgacaggagcgcgaccgacacgcacgggcccctcgccccctctcgcctcccgtccgctcgccagctcccctcagccgaggctgctccgcggcggccgcagcccgcgcgcggcccacactcgcctccccgttgaagatgaggagtcctcggagagcaggatggtggtgacattcctcatgtcagctctcgagtccatgtgtaaagaactggccaagtccaaagccgaagtggcctgcattgcagtgtatgaaacagacgtgtttgtcgtcggaactgaaagaggacgtgcttttgtcaataccagaaaggattttcaaaaagattttgtaaaatattgtgttgaagaagaagaaaaagctgcagagatgcataaaatgaaatctacaacccaggcaaatcggatgagtgtagatgctgtagaaattgaaacactcagaaaaacagttgaggactatttctgcttttgctatgggaaagctttaggcaaatccacagtggtacctgtaccatatgagaagatgctgcgagaccagtcggctgtggtagtgcaggggcttccggaaggtgttgcctttaaacaccccgagaactatgatcttgcaaccctgaaatggattttggagaacaaagcagggatttcattcatcattaagagaccttttttagagccaaagaagcatgtaggtggtcgtgtgatggtaacagatgctgacaggtcaatactatctccaggtggaagttgtggccccatcaaagtgaaaactgaacccacagaagattctggcatttccctggaaatggcagctgtgacagtaaaggaagaatcagaagatcctgattattatcaatataacattcaagcaggcccttctgaaactgatgatgttgatgaaaaacagcccctatcgaagcctttgcaaggaagccaccattcttcagagggcaatgaaggcacagaaatggaagtaccagcagaagattctactcaacatgtcccttcagaaacaagtgaggaccctgaagttgaggtgactattgaagatgatgattattctccaccgtctaagagaccaaaggccaatgagctaccgcagccaccagtcccggaacccgccaatgctgggaagcggaaagtgagggagttcaacttcgagaaatggaatgctcgcatcactgatctacgtaaacaagttgaagaattgtttgaaaggaaatatgctcaagccataaaagccaaaggtccggtgacgatcccgtaccctcttttccagtctcatgttgaagatctttatgtagaaggacttcctgaaggaattccttttagaaggccatctacttacggaattcctcgcctggagaggatattacttgcaaaggaaaggattcgttttgtgattaagaaacatgagcttctgaattcaacacgtgaagatttacagcttgataagccagcttcaggagtaaaggaagaatggtatgccagaatcactaaattaagaaagatggtggatcagcttttctgcaaaaaatttgcggaagccttggggagcactgaagccaaggctgtaccgtaccaaaaatttgaggcacacccgaatgatctgtacgtggaaggactgccagaaaacattcctttccgaagtccctcatggtatggaatcccaaggctggaaaaaatcattcaagtgggcaatcgaattaaatttgttattaaaagaccagaacttctgactcacagtaccactgaagttactcagccaagaacgaatacaccagtcaaagaagattggaatgtcagaattaccaagctacggaagcaagtggaagagatttttaatttgaaatttgcttagatttgttgacagcggtttcctggagtgctgtcttgagaacgattctgaggaggctcagcaagaaagagtgtttcagttgattgggtgtgtctgtcatggagaaggaactcaagctcttggactcaccgaggcagtaaaagtaccatatcctgtgtttgaatcaaacccggagttcttgtatgtggaaggcttgccagaggggattcccttccgaagccctacctggtttggaattccacgacttgaaaggatcgtccgcgggagtaataaaatcaagttcgttgttaaaaaacctgaactagttatttcctacttgcctcctgggatggctagtaaaataaacactaaagctttgcagtcccccaaaagaccacgaagtcctgggagtaattcaaaggttcctgaaattgaggtcaccgtggaaggccctaataacaacaatcctcaaacctcagctgttcgaaccccgacccagactaacggttctaacgttcccttcaagccacgagggagagagttttcctttgaggcctggaatgccaaaatcacggacctaaaacagaaagttgaaaatctcttcaatgagaaatgtggggaagctcttggccttaaacaagctgtgaaggtgccgttcgcgttatttgagtctttcccggaagacttttatgtggaaggcttacctgagggtgtgccattccgaagaccatcgacttttggcattccgaggctggagaagatactcagaaacaaagccaaaattaagttcatcattaaaaagcccgaaatgtttgagacggcgattaaggagagcacctcctctaagagccctcccagaaaaataaattcatcacccaatgttaatactactgcatcaggtgttgaagaccttaacatcattcaggtgacaattccagatgatgataatgaaagactctcgaaagttgaaaaagctagacagctaagagaacaagtgaatgacctctttagtcggaaatttggtgaagctattggtatgggttttcctgtgaaagttccctacaggaaaatcacaattaaccctggctgtgtggtggttgatggcatgcccccgggggtgtccttcaaagcccccagctacctggaaatcagctccatgagaaggatcttagactctgccgagtttatcaaattcacggtcattagaccatttccaggacttgtgattaataaccagctggttgatcagagtgagtcagaaggccccgtgatacaagaatcagctgaaccaagccagttggaagttccagccacagaaggtaaaaggacctcttccctcctagggtaaatcagcttctgtgtcagggatgctgtgtggtgtccatctgaaccccctgcatacgcgtagctaatgtgatctccccactttcacataagatggtggccctgccttcagggaatgtgggagccaggtgggagccttcccggatatttaagctagaagattctacagggagattctccttggatcaatatatgtctctcagtcaaagatgtaaaagcacttttgccttaaaaagaatgttctgtttctaaatagagtcaacgttgtcctcctcattggaattcactatgagtcagaatcattagactgacttttttttttccatagtaatagtattttgcagagtctcacagagctgcagatcttttgttcatcttgcagagttaacaagtctgatcctgttagtccagatttcttaaatttggccaagttataataggagcagtagcttgagacccgaagtcaggaaactttgacaatggatttttttttttaatccagagacttgtactggaatttgccttaccctgtcagctcatggacttaaggtttcatcccgctttatgagtgcttctgaatccaagtcattgttacctgaatttgcaaattaagttgtgatattcgtgactgttaaattcctgtaattagattaacctctttgcttgcttgtttgttttctctcctattttagcttaaagtatcagtggttgagaagagcttttcggacctgttactaccccaagctgtgtaatatacttgtataacagaaataccttctatacaaacctttttttctacttttagatagaaatgtctactttttcagcagttctgtgaattaaagagcagagtgactgtgggtctggaatggctggtgtacttgggaatgtactatcaggattttacagcaatgctgggaaatgacagggaaaatgacaggaatgaatctcaccagattttttatgtactcagcagagccttgagttacggtgtttattttccaatcaagtgaagatatctcctacttctcctactggaacatctcagcttctgcagtgaagaaaaattcctgtgatagttcagttctttagtttttctatttgaaaaaaaaaaatcatttaaatgatcctttgttcacggctctccttaatgactgagtgaacagttcctatctgtatatttgactaaaccttttcctaagctatctctcatggttcctatgtttttttatcataattaaaagcaaaaccatctggatcacctaacagtcagaggtcagtatctcagcgtgtgaattatagaggaaatacagagagaacctcttccacttttacttttcgtccaaataaaatgcatggtgtaccagaagttgaagatcgggttgaggattggggctagctcgatgacactaaggccccaacatcgcgggacctgctgtggcgcggattcttaggaacgctgttctagccggccccctctccaggggtcgccgtggccggcattatttcctagttcttcttgtaaccctgaggtgccagcgcggggagtgaggaggggtcagggggctaaggatgcaacctctgacgttctgcgccttcctaggagagtcttacatgtgttgagatttcacaagcaatgcgagttgtaaaataccagctctacaagaagctaggctctgtgacggcatagttttcagtagctttatcacaatattcacaatggagaattatatgacatggtagcagaaataggcccttttatgtgttgcttctattttacctcaaattgtagatatagggtaatcaataaaatccatccatgcctttcacacactaagt

SEQ ID NO: 4697 - protein, 564 aa, Homo sapiens; identical to SEQ ID NO: 4031

SEQ ID NO: 4698 - DNA, 3999 bp, Homo sapiens
aaaaaaaaaaaaaaaaaaaaaaaaaaaagaaaaaagaaaaaaaaaaggaggaggaggaggagggtgagagagaagctgggagagcagagaaaaggggccaccggtcgcccccccgcttccccgcacgcgctctccagccgcggccgcccgcctgccgcggtcaccccggcctctgcctctgtcccccagtgatcggatcaaggcgctgagcgaggccctgcctgcggggcggccatgcggcggtgacaggagcgcgaccgacacgcacgggcccctcgccccctctcgcctcccgtccgctcgccagctcccctcagccgaggctgctccgcggcggccgcagcccgcgcgcggcccacactcgcctccccgttgaagatgaggagtcctcggagagcaggatggtggtgacattcctcatgtcagctctcgagtccatgtgtaaagaactggccaagtccaaagccgaagtggcctgcattgcagtgtatgaaacagacgtgtttgtcgtcggaactgaaagaggacgtgcttttgtcaataccagaaaggattttcaaaaagattttgtaaaatattgtgttgaagaagaagaaaaagctgcagagatgcataaaatgaaatctacaacccaggcaaatcggatgagtgtagatgctgtagaaattgaaacactcagaaaaacagttgaggactatttctgcttttgctatgggaaagctttaggcaaatccacagtggtacctgtaccatatgagaagatgctgcgagaccagtcggctgtggtagtgcaggggcttccggaaggtgttgcctttaaacaccccgagaactatgatcttgcaaccctgaaatggattttggagaacaaagcagggatttcattcatcattaagagaccttttttagagccaaagaagcatgtaggtggtcgtgtgatggtaacagatgctgacaggtcaatactatctccaggtggaagttgtggccccatcaaagtgaaaactgaacccacagaagattctggcatttccctggaaatggcagctgtgacagtaaaggaagaatcagaagatcctgattattatcaatataacattcaagcaggcccttctgaaactgatgatgttgatgaaaaacagcccctatcgaagcctttgcaaggaagccaccattcttcagagggcaatgaaggcacagaaatggaagtaccagcagaagatgatgattattctccaccgtctaagagaccaaaggccaatgagctaccgcagccaccagtcccggaacccgccaatgctgggaagcggaaagtgagggagttcaacttcgagaaatggaatgctcgcatcactgatctacgtaaacaagttgaagaattgtttgaaaggaaatatgctcaagccataaaagccaaaggtccggtgacgatcccgtaccctcttttccagtctcatgttgaagatctttatgtagaaggacttcctgaaggaattccttttagaaggccatctacttacggaattcctcgcctggagaggatattacttgcaaaggaaaggattcgttttgtgattaagaaacatgagcttctgaattcaacacgtgaagatttacagcttgataagccagcttcaggagtaaaggaagaatggtatgccagaatcactaaattaagaaagatggtggatcagcttttctgcaaaaaatttgcggaagccttggggagcactgaagccaaggctgtaccgtaccaaaaatttgaggcacacccgaatgatctgtacgtggaaggactgccagaaaacattcctttccgaagtccctcatggtatggaatcccaaggctggaaaaaatcattcaagtgggcaatcgaattaaatttgttattaaaagaccagaacttctgactcacagtaccactgaagttactcagccaagaacgaatacaccagtcaaagaagattggaatgtcagaattaccaagctacggaagcaagtggaagagatttttaatttgaaatttgcttagatttgttgacagcggtttcctggagtgctgtcttgagaacgattctgaggaggctcagcaagaaagagtgtttcagttgattgggtgtgtctgtcatggagaaggaactcaagctcttggactcaccgaggcagtaaaagtaccatatcctgtgtttgaatcaaacccggagttcttgtatgtggaaggcttgccagaggggattcccttccgaagccctacctggtttggaattccacgacttgaaaggatcgtccgcgggagtaataaaatcaagttcgttgttaaaaaacctgaactagttatttcctacttgcctcctgggatggctagtaaaataaacactaaagctttgcagtcccccaaaagaccacgaagtcctgggagtaattcaaaggttcctgaaattgaggtcaccgtggaaggccctaataacaacaatcctcaaacctcagctgttcgaaccccgacccagactaacggttctaacgttcccttcaagccacgagggagagagttttcctttgaggcctggaatgccaaaatcacggacctaaaacagaaagttgaaaatctcttcaatgagaaatgtggggaagctcttggccttaaacaagctgtgaaggtgccgttcgcgttatttgagtctttcccggaagacttttatgtggaaggcttacctgagggtgtgccattccgaagaccatcgacttttggcattccgaggctggagaagatactcagaaacaaagccaaaattaagttcatcattaaaaagcccgaaatgtttgagacggcgattaaggagagcacctcctctaagagccctcccagaaaaataaattcatcacccaatgttaatactactgcatcaggtgttgaagaccttaacatcattcaggtgacaattccagatgatgataatgaaagactctcgaaagttgaaaaagctagacagctaagagaacaagtgaatgacctctttagtcggaaatttggtgaagctattggtatgggttttcctgtgaaagttccctacaggaaaatcacaattaaccctggctgtgtggtggttgatggcatgcccccgggggtgtccttcaaagcccccagctacctggaaatcagctccatgagaaggatcttagactctgccgagtttatcaaattcacggtcattagaccatttccaggacttgtgattaataaccagctggttgatcagagtgagtcagaaggccccgtgatacaagaatcagctgaaccaagccagttggaagttccagccacagaagaaataaaagagactgatggaagctctcagatcaagcaagaaccagaccccacgtggtagacctcttccctcctaggcaaaaccatctggatcacctaacagtcagaggtcagtatctcagcgtgtgaattatagaggaaatacagagagaacctcttccacttttacttttcgtccaaataaaatgcatggtgtaccagaagttgaagatcgggttgaggattggggctagctcgatgacactaaggccccaacatcgcgggacctgctgtggcgcggattcttaggaacgctgttctagccggccccctctccaggggtcgccgtggccggcattatttcctagttcttcttgtaaccctgaggtgccagcgcggggagtgaggaggggtcagggggctaaggatgcaacctctgacgttctgcgccttcctaggagagtcttacatgtgttgagatttcacaagcaatgcgagttgtaaaataccagctctacaagaagctaggctctgtgacggcatagttttcagtagctttatcacaatattcacaatggagaattatatgacatggtagcagaaataggcccttttatgtgttgcttctattttacctcaaattgtagatatagggtaatcaataaaatccatccatgcctttcacacactaagt

SEQ ID NO: 4699 - protein, 543 aa, Homo sapiens; identical to SEQ ID NO: 4205

SEQ ID NO: 4700 - DNA, 3898 bp, Homo sapiens
aaaaaaaaaaaaaaaaaaaaaaaaaaaagaaaaaagaaaaaaaaaaggaggaggaggaggagggtgagagagaagctgggagagcagagaaaaggggccaccggtcgcccccccgcttccccgcacgcgctctccagccgcggccgcccgcctgccgcggtcaccccggcctctgcctctgtcccccagtgatcggatcaaggcgctgagcgaggccctgcctgcggggcggccatgcggcggtgacaggagcgcgaccgacacgcacgggcccctcgccccctctcgcctcccgtccgctcgccagctcccctcagccgaggctgctccgcggcggccgcagcccgcgcgcggcccacactcgcctcccctcggcacccccggccccggagctgcctggaggcggccgcactcggggatcatggcccaagttgcaatgtccaccctccccgttgaagatgaggagtcctcggagagcaggatggtggtgacattcctcatgtcagctctcgagtccatgtgtaaagaactggccaagtccaaagccgaagtggcctgcattgcagtgtatgaaacagacgtgtttgtcgtcggaactgaaagaggacgtgcttttgtcaataccagaaaggattttcaaaaagattttgtaaaatattgtgttgaagaagaagaaaaagctgcagagatgcataaaatgaaatctacaacccaggcaaatcggatgagtgtagatgctgtagaaattgaaacactcagaaaaacagttgaggactatttctgcttttgctatgggaaagctttaggcaaatccacagtggtacctgtaccatatgagaagatgctgcgagaccagtcggctgtggtagtgcaggggcttccggaaggtgttgcctttaaacaccccgagaactatgatcttgcaaccctgaaatggattttggagaacaaagcagggatttcattcatcattaagagaccttttttagagccaaagaagcatgtaggtggtcgtgtgatggtaacagatgctgacaggtcaatactatctccaggtggaagttgtggccccatcaaagtgaaaactgaacccacagaagattctggcatttccctggaaatggcagctgtgacagtaaaggaagaatcagaagatcctgattattatcaatataacattcaaggaagccaccattcttcagagggcaatgaaggcacagaaatggaagtaccagcagaagattctactcaacatgtcccttcagaaacaagtgaggaccctgaagttgaggtgactattgaagatgatgattattctccaccgtctaagagaccaaaggccaatgagctaccgcagccaccagtcccggaacccgccaatgctgggaagcggaaagtgagggagttcaacttcgagaaatggaatgctcgcatcactgatctacgtaaacaagttgaagaattgtttgaaaggaaatatgctcaagccataaaagccaaaggtccggtgacgatcccgtaccctcttttccagtctcatgttgaagatctttatgtagaaggacttcctgaaggaattccttttagaaggccatctacttacggaattcctcgcctggagaggatattacttgcaaaggaaaggattcgttttgtgattaagaaacatgagcttctgaattcaacacgtgaagatttacagcttgataagccagcttcaggagtaaaggaagaatggtatgccagaatcactaaattaagaaagatggtggatcagcttttctgcaaaaaatttgcggaagccttggggagcactgaagccaaggctgtaccgtaccaaaaatttgaggcacacccgaatgatctgtacgtggaaggactgccagaaaacattcctttccgaagtccctcatggtatggaatcccaaggctggaaaaaatcattcaagtgggcaatcgaattaaatttgttattaaaagaccagaacttctgactcacagtaccactgaagttactcagccaagaacgaatacaccagctcaagctcttggactcaccgaggcagtaaaagtaccatatcctgtgtttgaatcaaacccggagttcttgtatgtggaaggcttgccagaggggattcccttccgaagccctacctggtttggaattccacgacttgaaaggatcgtccgcgggagtaataaaatcaagttcgttgttaaaaaacctgaactagttatttcctacttgcctcctgggatggctagtaaaataaacactaaagctttgcagtcccccaaaagaccacgaagtcctgggagtaattcaaaggttcctgaaattgaggtcaccgtggaaggccctaataacaacaatcctcaaacctcagctgttcgaaccccgacccagactaacggttctaacgttcccttcaagccacgagggagagagttttcctttgaggcctggaatgccaaaatcacggacctaaaacagaaagttgaaaatctcttcaatgagaaatgtggggaagctcttggccttaaacaagctgtgaaggtgccgttcgcgttatttgagtctttcccggaagacttttatgtggaaggcttacctgagggtgtgccattccgaagaccatcgacttttggcattccgaggctggagaagatactcagaaacaaagccaaaattaagttcatcattaaaaagcccgaaatgtttgagacggcgattaaggagagcacctcctctaagagccctcccagaaaaataaattcatcacccaatgttaatactactgcatcaggtgttgaagaccttaacatcattcaggtgacaattccagatgatgataatgaaagactctcgaaagttgaaaaagctagacagctaagagaacaagtgaatgacctctttagtcggaaatttggtgaagctattggtatgggttttcctgtgaaagttccctacaggaaaatcacaattaaccctggctgtgtggtggttgatggcatgcccccgggggtgtccttcaaagcccccagctacctggaaatcagctccatgagaaggatcttagactctgccgagtttatcaaattcacggtcattagaccatttccaggacttgtgattaataaccagctggttgatcagagtgagtcagaaggccccgtgatacaagaatcagctgaaccaagccagttggaagttccagccacagaagaaataaaagagactgatggaagctctcagatcaagcaagaaccagaccccacgtggtagacctcttccctcctaggcaaaaccatctggatcacctaacagtcagaggtcagtatctcagcgtgtgaattatagaggaaatacagagagaacctcttccacttttacttttcgtccaaataaaatgcatggtgtaccagaagttgaagatcgggttgaggattggggctagctcgatgacactaaggccccaacatcgcgggacctgctgtggcgcggattcttaggaacgctgttctagccggccccctctccaggggtcgccgtggccggcattatttcctagttcttcttgtaaccctgaggtgccagcgcggggagtgaggaggggtcagggggctaaggatgcaacctctgacgttctgcgccttcctaggagagtcttacatgtgttgagatttcacaagcaatgcgagttgtaaaataccagctctacaagaagctaggctctgtgacggcatagttttcagtagctttatcacaatattcacaatggagaattatatgacatggtagcagaaataggcccttttatgtgttgcttctattttacctcaaattgtagatatagggtaatcaataaaatccatccatgcctttcacacactaagt

SEQ ID NO: 4701 - protein, 954 aa, Homo sapiens; identical to SEQ ID NO: 4155

SEQ ID NO: 4702 - DNA, 3796 bp, Homo sapiens
aaaaaaaaaaaaaaaaaaaaaaaaaaaagaaaaaagaaaaaaaaaaggaggaggaggaggagggtgagagagaagctgggagagcagagaaaaggggccaccggtcgcccccccgcttccccgcacgcgctctccagccgcggccgcccgcctgccgcggtcaccccggcctctgcctctgtcccccagtgatcggatcaaggcgctgagcgaggccctgcctgcggggcggccatgcggcggtgacaggagcgcgaccgacacgcacgggcccctcgccccctctcgcctcccgtccgctcgccagctcccctcagccgaggctgctccgcggcggccgcagcccgcgcgcggcccacactcgcctcccctcggcacccccggccccggagctgcctggaggcggccgcactcggtgtaaagaactggccaagtccaaagccgaagtggcctgcattgcagtgtatgaaacagacgtgtttgtcgtcggaactgaaagaggacgtgcttttgtcaataccagaaaggattttcaaaaagattttgtaaaatattgtgttgaagaagaagaaaaagctgcagagatgcataaaatgaaatctacaacccaggcaaatcggatgagtgtagatgctgtagaaattgaaacactcagaaaaacagttgaggactatttctgcttttgctatgggaaagctttaggcaaatccacagtggtacctgtaccatatgagaagatgctgcgagaccagtcggctgtggtagtgcaggggcttccggaaggtgttgcctttaaacaccccgagaactatgatcttgcaaccctgaaatggattttggagaacaaagcagggatttcattcatcattaagagaccttttttagagccaaagaagcatgtaggtggtcgtgtgatggtaacagatgctgacaggtcaatactatctccaggtggaagttgtggccccatcaaagtgaaaactgaacccacagaagattctggcatttccctggaaatggcagctgtgacagtaaaggaagaatcagaagatcctgattattatcaatataacattcaagcaggcccttctgaaactgatgatgttgatgaaaaacagcccctatcgaagcctttgcaaggaagccaccattcttcagagggcaatgaaggcacagaaatggaagtaccagcagaagatgatgattattctccaccgtctaagagaccaaaggccaatgagctaccgcagccaccagtcccggaacccgccaatgctgggaagcggaaagtgagggagttcaacttcgagaaatggaatgctcgcatcactgatctacgtaaacaagttgaagaattgtttgaaaggaaatatgctcaagccataaaagccaaaggtccggtgacgatcccgtaccctcttttccagtctcatgttgaagatctttatgtagaaggacttcctgaaggaattccttttagaaggccatctacttacggaattcctcgcctggagaggatattacttgcaaaggaaaggattcgttttgtgattaagaaacatgagcttctgaattcaacacgtgaagatttacagcttgataagccagcttcaggagtaaaggaagaatggtatgccagaatcactaaattaagaaagatggtggatcagcttttctgcaaaaaatttgcggaagccttggggagcactgaagccaaggctgtaccgtaccaaaaatttgaggcacacccgaatgatctgtacgtggaaggactgccagaaaacattcctttccgaagtccctcatggtatggaatcccaaggctggaaaaaatcattcaagtgggcaatcgaattaaatttgttattaaaagaccagaacttctgactcacagtaccactgaagttactcagccaagaacgaatacaccagtcaaagaagattggaatgtcagaattaccaagctacggaagcaagtggaagagatttttaatttgaaatttgctcaagctcttggactcaccgaggcagtaaaagtaccatatcctgtgtttgaatcaaacccggagttcttgaaaggatcgtccgcgggagtaataaaatcaagttcgttgttaaaaaacctgaactagttatttcctacttgcctcctgggatggctagtaaaataaacactaaagctttgcagtcccccaaaagaccacgaagtcctgggagtaattcaaaggttcctgaaattgaggtcaccgtggaaggccctaataacaacaatcctcaaacctcagctgttcgaaccccgacccagactaacggttctaacgttcccttcaagccacgagggagagagttttcctttgaggcctggaatgccaaaatcacggacctaaaacagaaagttgaaaatctcttcaatgagaaatgtggggaagctcttggccttaaacaagctgtgaaggtgccgttcgcgttatttgagtctttcccggaagacttttatgtggaaggcttacctgagggtgtgccattccgaagaccatcgacttttggcattccgaggctggagaagatactcagaaacaaagccaaaattaagttcatcattaaaaagcccgaaatgtttgagacggcgattaaggagagcacctcctctaagagccctcccagaaaaataaattcatcacccaatgttaatactactgcatcaggtgttgaagaccttaacatcattcaggtgacaattccagatgatgataatgaaagactctcgaaagttgaaaaagctagacagctaagagaacaagtgaatgacctctttagtcggaaatttggtgaagctattggtatgggttttcctgtgaaagttccctacaggaaaatcacaattaaccctggctgtgtggtggttgatggcatgcccccgggggtgtccttcaaagcccccagctacctggaaatcagctccatgagaaggatcttagactctgccgagtttatcaaattcacggtcattagaccatttccaggacttgtgattaataaccagctggttgatcagagtgagtcagaaggccccgtgatacaagaatcagctgaaccaagccagttggaagttccagccacagaagaaataaaagagactgatggaagctctcagatcaagcaagaaccagaccccacgtggtagacctcttccctcctaggcaaaaccatctggatcacctaacagtcagaggtcagtatctcagcgtgtgaattatagaggaaatacagagagaacctcttccacttttacttttcgtccaaataaaatgcatggtgtaccagaagttgaagatcgggttgaggattggggctagctcgatgacactaaggccccaacatcgcgggacctgctgtggcgcggattcttaggaacgctgttctagccggccccctctccaggggtcgccgtggccggcattatttcctagttcttcttgtaaccctgaggtgccagcgcggggagtgaggaggggtcagggggctaaggatgcaacctctgacgttctgcgccttcctaggagagtcttacatgtgttgagatttcacaagcaatgcgagttgtaaaataccagctctacaagaagctaggctctgtgacggcatagttttcagtagctttatcacaatattcacaatggagaattatatgacatggtagcagaaataggcccttttatgtgttgcttctattttacctcaaattgtagatatagggtaatcaataaaatccatccatgcctttcacacactaagt

SEQ ID NO: 4703 - protein, 515 aa, Homo sapiens; identical to SEQ ID NO: 4501

SEQ ID NO: 4704 - DNA, 4435 bp, Homo sapiens
aaaaaaaaaaaaaaaaaaaaaaaaaaaagaaaaaagaaaaaaaaaaggaggaggaggaggagggtgagagagaagctgggagagcagagaaaaggggccaccggtcgcccccccgcttccccgcacgcgctctccagccgcggccgcccgcctgccgcggtcaccccggcctctgcctctgtcccccagtgatcggatcaaggcgctgagcgaggccctgcctgcggggcggccatgcggcggtgacaggagcgcgaccgacacgcacgggcccctcgccccctctcgcctcccgtccgctcgccagctcccctcagccgaggctgctccgcggcggccgcagcccgcgcgcggcccacactcgcctccccgttgaagatgaggagtcctcggagagcaggatggtggtgacattcctcatgtcagctctcgagtccatgtgtaaagaactggccaagtccaaagccgaagtggcctgcattgcagtgtatgaaacagacgtgtttgtcgtcggaactgaaagaggacgtgcttttgtcaataccagaaaggattttcaaaaagattttgtaaaatattgtgttgaagaagaagaaaaagctgcagagatgcataaaatgaaatctacaacccaggcaaatcggatgagtgtagatgctgtagaaattgaaacactcagaaaaacagttgaggactatttctgcttttgctatgggaaagctttaggcaaatccacagtggtacctgtaccatatgagaagatgctgcgagaccagtcggctgtggtagtgcaggggcttccggaaggtgttgcctttaaacaccccgagaactatgatcttgcaaccctgaaatggattttggagaacaaagcagggatttcattcatcattaagagaccttttttagagccaaagaagcatgtaggtggtcgtgtgatggtaacagatgctgacaggtcaatactatctccaggtggaagttgtggccccatcaaagtgaaaactgaacccacagaagattctggcatttccctggaaatggcagctgtgacagtaaaggaagaatcagaagatcctgattattatcaatataacattcaagcaggcccttctgaaactgatgatgttgatgaaaaacagcccctatcgaagcctttgcaaggaagccaccattcttcagagggcaatgaaggcacagaaatggaagtaccagcagaagattctactcaacatgtcccttcagaaacaagtgaggaccctgaagttgaggtgactattgaagatgatgattattctccaccgtctaagagaccaaaggccaatgagctaccgcagccaccagtcccggaacccgccaatgctgggaagcggaaagtgagggagttcaacttcgagaaatggaatgctcgcatcactgatctacgtaaacaagttgaagaattgtttgaaaggaaatatgctcaagccataaaagccaaaggtccggtgacgatcccgtaccctcttttccagtctcatgttgaagatctttatgtagaaggacttcctgaaggaattccttttagaaggccatctacttacggaattcctcgcctggagaggatattacttgcaaaggaaaggattcgttttgtgattaagaaacatgagcttctgaattcaacacgtgaagatttacagcttgataagccagcttcaggagtaaaggaagaatggtatgccagaatcactaaattaagaaagatggtggatcagcttttctgcaaaaaatttgcggaagccttggggagcactgaagccaaggctgtaccgtaccaaaaatttgaggcacacccgaatgatctgtacgtggaaggactgccagaaaacattcctttccgaagtccctcatggtatggaatcccaaggctggaaaaaatcattcaagtgggcaatcgaattaaatttgttattaaaagaccagaacttctgactcacagtaccactgaagttactcagccaagaacgaatacaccagtcaaagaagattggaatgtcagaattaccaagctacggaagcaagtggaagagatttttaatttgaaatttgctcaagctcttggactcaccgaggcagtaaaagtaccatatcctgtgtttgaatcaaacccggagttcttgaaaggatcgtccgcgggagtaataaaatcaagttcgttgttaaaaaacctgaactagttatttcctacttgcctcctgggatggctagtaaaataaacactaaagctttgcagtcccccaaaagaccacgaagtcctgggagtaattcaaaggttcctgaaattgaggtcaccgtggaaggccctaataacaacaatcctcaaacctcagctgttcgaaccccgacccagactaacggttctaacgttcccttcaagccacgagggagagagttttcctttgaggcctggaatgccaaaatcacggacctaaaacagaaagttgaaaatctcttcaatgagaaatgtggggaagctcttggccttaaacaagctgtgaaggtgccgttcgcgttatttgagtctttcccggaagacttttatgtggaaggcttacctgagggtgtgccattccgaagaccatcgacttttggcattccgaggctggagaagatactcagaaacaaagccaaaattaagttcatcattaaaaagcccgaaatgtttgagacggcgattaaggagagcacctcctctaagagccctcccagaaaaataaattcatcacccaatgttaatactactgcatcaggtgttgaagaccttaacatcattcaggtgacaattccagatgatgataatgaaagactctcgaaagttgaaaaagctagacagctaagagaacaagtgaatgacctctttagtcggaaatttggtgaagctattggtatgggttttcctgtgaaagttccctacaggaaaatcacaattaaccctggctgtgtggtggttgatggcatgcccccgggggtgtccttcaaagcccccagctacctggaaatcagctccatgagaaggatcttagactctgccgagtttatcaaattcacggtcattagaccatttccaggacttgtgattaataaccagctggttgatcagagtgagtcagaaggccccgtgatacaagaatcagctgaaccaagccagttggaagttccagccacagaagaaataaaagagactgatggaagctctcagatcaagcaagaaccagaccccacgtggtagacctcttccctcctaggcttaaagtatcagtggttgagaagagcttttcggacctgttactaccccaagctgtgtaatatacttgtataacagaaataccttctatacaaacctttttttctacttttagatagaaatgtctactttttcagcagttctgtgaattaaagagcagagtgactgtgggtctggaatggctggtgtacttgggaatgtactatcaggattttacagcaatgctgggaaatgacagggaaaatgacaggaatgaatctcaccagattttttatgtactcagcagagccttgagttacggtgtttattttccaatcaagtgaagatatctcctacttctcctactggaacatctcagcttctgcagtgaagaaaaattcctgtgatagttcagttctttagtttttctatttgaaaaaaaaaaatcatttaaatgatcctttgttcacggctctccttaatgactgagtgaacagttcctatctgtatatttgactaaaccttttcctaagctatctctcatggttcctatgtttttttatcataattaaaagcaaaaccatctggatcacctaacagtcagaggtcagtatctcagcgtgtgaattatagaggaaatacagagagaacctcttccacttttacttttcgtccaaataaaatgcatggtgtaccagaagttgaagatcgggttgaggattggggctagctcgatgacactaaggccccaacatcgcgggacctgctgtggcgcggattcttaggaacgctgttctagccggccccctctccaggggtcgccgtggccggcattatttcctagttcttcttgtaaccctgaggtgccagcgcggggagtgaggaggggtcagggggctaaggatgcaacctctgacgttctgcgccttcctaggagagtcttacatgtgttgagatttcacaagcaatgcgagttgtaaaataccagctctacaagaagctaggctctgtgacggcatagttttcagtagctttatcacaatattcacaatggagaattatatgacatggtagcagaaataggcccttttatgtgttgcttctattttacctcaaattgtagatatagggtaatcaataaaatccatccatgcctttcacacactaagt

SEQ ID NO: 4705 - protein, 605 aa, Homo sapiens; identical to SEQ ID NO: 4017

SEQ ID NO: 4706 - DNA, 4347 bp, Homo sapiens
aaaaaaaaaaaaaaaaaaaaaaaaaaaagaaaaaagaaaaaaaaaaggaggaggaggaggagggtgagagagaagctgggagagcagagaaaaggggccaccggtcgcccccccgcttccccgcacgcgctctccagccgcggccgcccgcctgccgcggtcaccccggcctctgcctctgtcccccagtgatcggatcaaggcgctgagcgaggccctgcctgcggggcggccatgcggcggtgacaggagcgcgaccgacacgcacgggcccctcgccccctctcgcctcccgtccgctcgccagctcccctcagccgaggctgctccgcggcggccgcagcccgcgcgcggcccacactcgcctcccctcggcacccccggccccggagctgcctggaggcggccgcactcggggatcatggcccaagttgcaatgtccaccctccccgttgaagatgaggagtcctcggagagcaggatggtggtgacattcctcatgtcagctctcgagtccatgtgtaaagaactggccaagtccaaagccgaagtggcctgcattgcagtgtatgaaacagacgtgtttgtcgtcggaactgaaagaggacgtgcttttgtcaataccagaaaggattttcaaaaagattttgtaaaatattgtgttgaagaagaagaaaaagctgcagagatgcataaaatgaaatctacaacccaggcaaatcggatgagtgtagatgctgtagaaattgaaacactcagaaaaacagttgaggactatttctgcttttgctatgggaaagctttaggcaaatccacagtggtacctgtaccatatgagaagatgctgcgagaccagtcggctgtggtagtgcaggggcttccggaaggtgttgcctttaaacaccccgagaactatgatcttgcaaccctgaaatggattttggagaacaaagcagggatttcattcatcattaagagaccttttttagagccaaagaagcatgtaggtggtcgtgtgatggtaacagatgctgacaggtcaatactatctccaggtggaagttgtggccccatcaaagtgaaaactgaacccacagaagattctggcatttccctggaaatggcagctgtgacagtaaaggaagaatcagaagatcctgattattatcaatataacattcaagcaggcccttctgaaactgatgatgttgatgaaaaacagcccctatcgaagcctttgcaaggaagccaccattcttcagagggcaatgaaggcacagaaatggaagtaccagcagaagatgatgattattctccaccgtctaagagaccaaaggccaatgagctaccgcagccaccagtcccggaacccgccaatgctgggaagcggaaagtgagggagttcaacttcgagaaatggaatgctcgcatcactgatctacgtaaacaagttgaagaattgtttgaaaggaaatatgctcaagccataaaagccaaaggtccggtgacgatcccgtaccctcttttccagtctcatgttgaagatctttatgtagaaggacttcctgaaggaattccttttagaaggccatctacttacggaattcctcgcctggagaggatattacttgcaaaggaaaggattcgttttgtgattaagaaacatgagcttctgaattcaacacgtgaagatttacagcttgataagccagcttcaggagtaaaggaagaatggtatgccagaatcactaaattaagaaagatggtggatcagcttttctgcaaaaaatttgcggaagccttggggagcactgaagccaaggctgtaccgtaccaaaaatttgaggcacacccgaatgatctgtacgtggaaggactgccagaaaacattcctttccgaagtccctcatggtatggaatcccaaggctggaaaaaatcattcaagtgggcaatcgaattaaatttgttattaaaagaccagaacttctgactcacagtaccactgaagttactcagccaagaacgaatacaccagtcaaagaagattggaatgtcagaattaccaagctacggaagcaagtggaagagatttttaatttgaaatttgcttagatttgttgacagcggtttcctggagtgctgtcttgagaacgattctgaggaggctcagcaagaaagagtgtttcagttgattgggtgtgtctgtcatggagaaggaactcaagctcttggactcaccgaggcagtaaaagtaccatatcctgtgtttgaatcaaacccggagttcttgtatgtggaaggcttgccagaggggattcccttccgaagccctacctggtttggaattccacgacttgaaaggatcgtccgcgggagtaataaaatcaagttcgttgttaaaaaacctgaactagttatttcctacttgcctcctgggatggctagtaaaataaacactaaagctttgcagtcccccaaaagaccacgaagtcctgggagtaattcaaaggttcctgaaattgaggtcaccgtggaaggccctaataacaacaatcctcaaacctcagctgttcgaaccccgacccagactaacggttctaacgttcccttcaagccacgagggagagagttttcctttgaggcctggaatgccaaaatcacggacctaaaacagaaagttgaaaatctcttcaatgagaaatgtggggaagctcttggccttaaacaagctgtgaaggtgccgttcgcgttatttgagtctttcccggaagacttttatgtggaaggcttacctgagggtgtgccattccgaagaccatcgacttttggcattccgaggctggagaagatactcagaaacaaagccaaaattaagttcatcattaaaaagcccgaaatgtttgagacggcgattaaggagagcacctcctctaagagccctcccagaaaaataaattcatcacccaatgttaatactactgcatcaggtgttgaagaccttaacatcattcaggtgacaattccagatgatgataatgaaagactctcgaaagttgaaaaagctagacagctaagagaacaagtgaatgacctctttagtcggaaatttggtgaagctattggtatgggttttcctgtgaaagttccctacaggaaaatcacaattaaccctggctgtgtggtggttgatggcatgcccccgggggtgtccttcaaagcccccagctacctggaaatcagctccatgagaaggatcttagactctgccgagtttatcaaattcacggtcattagaccatttccaggacttgtgattaataaccagctggttgatcagagtgagtcagaaggccccgtgatacaagaatcagctgaaccaagccagttggaagttccagccacagaagaaataaaagagactgatggaagctctcagatcaagcaagaaccagaccccacgtggtagacctcttccctcctaggagccttgagttacggtgtttattttccaatcaagtgaagatatctcctacttctcctactggaacatctcagcttctgcagtgaagaaaaattcctgtgatagttcagttctttagtttttctatttgaaaaaaaaaaatcatttaaatgatcctttgttcacggctctccttaatgactgagtgaacagttcctatctgtatatttgactaaaccttttcctaagctatctctcatggttcctatgtttttttatcataattaaaagcaaaaccatctggatcacctaacagtcagaggtcagtatctcagcgtgtgaattatagaggaaatacagagagaacctcttccacttttacttttcgtccaaataaaatgcatggtgtaccagaagttgaagatcgggttgaggattggggctagctcgatgacactaaggccccaacatcgcgggacctgctgtggcgcggattcttaggaacgctgttctagccggccccctctccaggggtcgccgtggccggcattatttcctagttcttcttgtaaccctgaggtgccagcgcggggagtgaggaggggtcagggggctaaggatgcaacctctgacgttctgcgccttcctaggagagtcttacatgtgttgagatttcacaagcaatgcgagttgtaaaataccagctctacaagaagctaggctctgtgacggcatagttttcagtagctttatcacaatattcacaatggagaattatatgacatggtagcagaaataggcccttttatgtgttgcttctattttacctcaaattgtagatatagggtaatcaataaaatccatccatgcctttcacacactaagt

SEQ ID NO: 4707 - protein, 563 aa, Homo sapiens; identical to SEQ ID NO: 4097

SEQ ID NO: 4708 - DNA, 7905 bp, Homo sapiens
aaaaaaaaaaaaaaaaaaaaaaaaaaaagaaaaaagaaaaaaaaaaggaggaggaggaggagggtgagagagaagctgggagagcagagaaaaggggccaccggtcgcccccccgcttccccgcacgcgctctccagccgcggccgcccgcctgccgcggtcaccccggcctctgcctctgtcccccagtgatcggatcaaggcgctgagcgaggccctgcctgcggggcggccatgcggcggtgacaggagcgcgaccgacacgcacgggcccctcgccccctctcgcctcccgtccgctcgccagctcccctcagccgaggctgctccgcggcggccgcagcccgcgcgcggcccacactcgcctcccctcggcacccccggccccggagctgcctggaggcggccgcactcggggatcatggcccaagttgcaatgtccaccctccccgttgaagatgaggagtcctcggagagcaggatggtggtgacattcctcatgtcagctctcgagtccatgtgtaaagaactggccaagtccaaagccgaagtggcctgcattgcagtgtatgaaacagacgtgtttgtcgtcggaactgaaagaggacgtgcttttgtcaataccagaaaggattttcaaaaagattttgtaaaatattgtgttgaagaagaagaaaaagctgcagagatgcataaaatgaaatctacaacccaggcaaatcggatgagtgtagatgctgtagaaattgaaacactcagaaaaacagttgaggactatttctgcttttgctatgggaaagctttaggcaaatccacagtggtacctgtaccatatgagaagatgctgcgagaccagtcggctgtggtagtgcaggggcttccggaaggtgttgcctttaaacaccccgagaactatgatcttgcaaccctgaaatggattttggagaacaaagcagggatttcattcatcattaagagaccttttttagagccaaagaagcatgtaggtggtcgtgtgatggtaacagatgctgacaggtcaatactatctccaggtggaagttgtggccccatcaaagtgaaaactgaacccacagaagattctggcatttccctggaaatggcagctgtgacagtaaaggaagaatcagaagatcctgattattatcaatataacattcaagcaggcccttctgaaactgatgatgttgatgaaaaacagcccctatcgaagcctttgcaaggaagccaccattcttcagagggcaatgaaggcacagaaatggaagtaccagcagaagatgatgattattctccaccgtctaagagaccaaaggccaatgagctaccgcagccaccagtcccggaacccgccaatgctgggaagcggaaagtgagggagttcaacttcgagaaatggaatgctcgcatcactgatctacgtaaacaagttgaagaattgtttgaaaggaaatatgctcaagccataaaagccaaaggtccggtgacgatcccgtaccctcttttccagtctcatgttgaagatctttatgtagaaggacttcctgaaggaattccttttagaaggccatctacttacggaattcctcgcctggagaggatattacttgcaaaggaaaggattcgttttgtgattaagaaacatgagcttctgaattcaacacgtgaagatttacagcttgataagccagcttcaggagtaaaggaagaatggtatgccagaatcactaaattaagaaagatggtggatcagcttttctgcaaaaaatttgcggaagccttggggagcactgaagccaaggctgtaccgtaccaaaaatttgaggcacacccgaatgatctgtacgtggaaggactgccagaaaacattcctttccgaagtccctcatggtatggaatcccaaggctggaaaaaatcattcaagtgggcaatcgaattaaatttgttattaaaagaccagaacttctgactcacagtaccactgaagttactcagccaagaacgaatacaccagtcaaagaagattggaatgtcagaattaccaagctacggaagcaagtggaagagatttttaatttgaaatttgctcaagctcttggactcaccgaggcagtaaaagtaccatatcctgtgtttgaatcaaacccggagttcttgaaaggatcgtccgcgggagtaataaaatcaagttcgttgttaaaaaacctgaactagttatttcctacttgcctcctgggatggctagtaaaataaacactaaagctttgcagtcccccaaaagaccacgaagtcctgggagtaattcaaaggttcctgaaattgaggtcaccgtggaaggccctaataacaacaatcctcaaacctcagctgttcgaaccccgacccagactaacggttctaacgttcccttcaagccacgagggagagagttttcctttgaggcctggaatgccaaaatcacggacctaaaacagaaagttgaaaatctcttcaatgagaaatgtggggaagctcttggccttaaacaagctgtgaaggtgccgttcgcgttatttgagtctttcccggaagacttttatgtggaaggcttacctgagggtgtgccattccgaagaccatcgacttttggcattccgaggctggagaagatactcagaaacaaagccaaaattaagttcatcattaaaaagcccgaaatgtttgagacggcgattaaggagagcacctcctctaagagccctcccagaaaaataaattcatcacccaatgttaatactactgcatcaggtgttgaagaccttaacatcattcaggtgacaattccagatgatgataatgaaagactctcgaaagttgaaaaagctagacagctaagagaacaagtgaatgacctctttagtcggaaatttggtgaagctattggtatgggttttcctgtgaaagttccctacaggaaaatcacaattaaccctggctgtgtggtggttgatggcatgcccccgggggtgtccttcaaagcccccagctacctggaaatcagctccatgagaaggatcttagactctgccgagtttatcaaattcacggtcattaggtaagtgagagtttcctgcttagtcacaggagcgaatctggagctcatgaggctgactcttctaaaatgcagccacaggtagtcatcgaatccggcttcctatgctgtgcaatcaacaaatcaaaataacttgtgtcatcattagaatgtcagatgtgcttctacgaactaagctgactcttttaattctttggcaaagggttggcaaactaggactgtttgccaaattcaggctgcctcctatttttagagtcttcctgaaacacagctacacccgtattatccatggctgctttcctgtcacagtgagtaagtagctgggactgagaaggcatggcctccaaagtctaaaatatttactctctagcactttgtagaaaaaccttagctaggcacagtggctaacgcctgtaatcccagcattttgggaggccaaggcaggcagatcacctgaggtcaggagttccagaccagcctggccaacatggtgaaatcccatctctacaaaaataaaacagttagctgggcatgatggcgggtgcctgtaatcccagctactcgggaggctgaggcaggatagtcgcttgaacccaggaggtggaggttgcaatgagccaagatcatgccactgcactccagcctggacgacagagtgagactccatcacaagaaaaaaagaactttgtcaacctctgtcttagggcgccttgtcacaggcttcgggtcagacggattcaaccttgcatcagccatttgttagccaggtcactctgttctttgtctgtaaatgagattgatcgttgttcccactgagagtgtcagctccttcccgtagagcaggcatgatgattgtactcacctctgacaccattgtgagtgccacattccttcccacgtccttgtcactgtaagagatgcccacctgagcaccaaccccaggttatcttcccctttgtcttccagccccccagaaacagctacgactcaacctacccaatcatttcatcatcagattgccactgtctctagttcaggtctcttgggactggcactcagaaatctcataataaatcctcttgaggcttctcatacactcgtcttcttccaatcttctttccctcaaaatctcatattttggttccacttcacccaccgtcattctccatatcactcccaggagttaggcaaaaagccccttccgttcttccgtatgttaaacttagaatcactctgttccctgctctgcgtttctattttttgtttttcctccatttactagtagcttaacactttctaacagtgttcttattattgatacgtatctatctcttccataagcttataaggtcacggataatacttctcattgtagtacgtaaatgacgtgggctagatatgagttgaataaacagttatacctgtaaattcttacagagtgaaaataaattgttatactttacaatttgtttctctctttagaccatttccaggacttgtgattaataaccgtgagtattttgtgaagtgttttgtttttgttttttcctggggtctgacgtgtgtgcgtgtgagtgtgtatacatgcttaacgtatatcacgttacttcacctatgtcagtaaccaggccaaatacttgttttagccctcagtaaaaacaccaggcacttcctagttgtaaaattattcaagcttcttaacttcctatcctcgatgcacttaatcataaaatggtaataatagcaccgattttgggggagtcgttccagtagatggaaagcatctggaacaggtgtcagcaagctcctgccgacgtgtatgcataaagttttattgaaaccaccatcgtgtccatttgtttatggcagaactgagagatggcagcagcaagtgtgtgcctgcaaaacctaaaatatttactaattggctctgcaagaaaagagtttgcatccccctaacctagaacagtgtctagcctctagtatgtgtttagcctacagtatgtgctcagcgaatacaatctatatttattactgcttttatgactgttataattactgtgcttggatttcgttacaaagtaagtcacaatgtgcctgcttctgttagtatttcagcacagtgcctggcacacatggggctctcaaatattgctgagcgagtgaacaaatgtcctttcaattccttaacgttgatgtcattttcaatagtattttgagccaaacttaattttgcgagtgtgttttgttttcttaactttattattaaaaatgtataaaagtgaggccaggcgtggtggctcacgcctgtaatcccagcagtttgggaggctgaggcaggcggatcagttgaggttgggagttggagaccagcccgtccaacatggtgaaagcctgtctctactaaaaatacaaaaatcagctgggtgtggtggcgcgtgcctgtaatcccagctactcaggaggctgaggcaggagagttgcttgaatcctagaggtggaggttgcagtgagctgagatcgtgccattgcactccagcctgggcaacaagagcaaaactctgtcccaataaataaataaataaaatgttctcttttgttcctgttcttgtgcggtagtgtggtatagagttttatggtaattactgtgaattagtgattctgagggacatatcagaactctgaggtttgtttccttctcatcttgagggaaacagcaaatgtatgttaaaatgcttttccaagggaacaacacatccttacattatttaaaccaatctgcttcattttcagagctggttgatcagagtgagtcagaaggccccgtgatacaagaatcagctgaaccaagccagttggaagttccagccacagaagaaataaaagagactgatggaagctctcagatcaagcaagaaccagaccccacgtggtagacctcttccctcctagggtaaatcagcttctgtgtcagggatgctgtgtggtgtccatctgaaccccctgcatacgcgtagctaatgtgatctccccactttcacataagatggtggccctgccttcagggaatgtgggagccaggtgggagccttcccggatatttaagctagaagattctacagggagattctccttggatcaatatatgtctctcagtcaaagatgtaaaagcacttttgccttaaaaagaatgttctgtttctaaatagagtcaacgttgtcctcctcattggaattcactatgagtcagaatcattagactgacttttttttttccatagtaatagtattttgcagagtctcacagagctgcagatcttttgttcatcttgcagagttaacaagtctgatcctgttagtccagatttcttaaatttggccaagttataataggagcagtagcttgagacccgaagtcaggaaactttgacaatggatttttttttttaatccagagacttgtactggaatttgccttaccctgtcagctcatggacttaaggtttcatcccgctttatgagtgcttctgaatccaagtcattgttacctgaatttgcaaattaagttgtgatattcgtgactgttaaattcctgtaattagattaacctctttgcttgcttgtttgttttctctcctattttagcttaaagtatcagtggttgagaagagcttttcggacctgttactaccccaagctgtgtaatatacttgtataacagaaataccttctatacaaacctttttttctacttttagatagaaatgtctactttttcagcagttctgtgaattaaagagcagagtgactgtgggtctggaatggctggtgtacttgggaatgtactatcaggattttacagcaatgctgggaaatgacagggaaaatgacaggaatgaatctcaccagattttttatgtactcagcagagccttgagttacggtgtttattttccaatcaagtgaagatatctcctacttctcctactggaacatctcagcttctgcagtgaagaaaaattcctgtgatagttcagttctttagtttttctatttgaaaaaaaaaaatcatttaaatgatcctttgttcacggctctccttaatgactgagtgaacagttcctatctgtatatttgactaaaccttttcctaagctatctctcatggttcctatgtttttttatcataattaaaagcaaaaccatctggatcacctaacagtcagaggtcagtatctcagcgtgtgaattatagaggaaatacagagagaacctcttccacttttacttttcgtccaaataaaatgcatggtgtaccagaagttgaagatcgggttgaggattggggctagctcgatgacactaaggccccaacatcgcgggacctgctgtggcgcggattcttaggaacgctgttctagccggccccctctccaggggtcgccgtggccggcattatttcctagttcttcttgtaaccctgaggtgccagcgcggggagtgaggaggggtcagggggctaaggatgcaacctctgacgttctgcgccttcctaggagagtcttacatgtgttgagatttcacaagcaatgcgagttgtaaaataccagctctacaagaagctaggctctgtgacggcatagttttcagtagctttatcacaatattcacaatggagaattatatgacatggtagcagaaataggcccttttatgtgttgcttctattttacctcaaattgtagatatagggtaatcaataaaatccatccatgcctttcacacactaagt

SEQ ID NO: 4709 - protein, 604 aa, Homo sapiens; identical to SEQ ID NO: 4117

SEQ ID NO: 4710 - DNA, 4287 bp, Homo sapiens
aaaaaaaaaaaaaaaaaaaaaaaaaaaagaaaaaagaaaaaaaaaaggaggaggaggaggagggtgagagagaagctgggagagcagagaaaaggggccaccggtcgcccccccgcttccccgcacgcgctctccagccgcggccgcccgcctgccgcggtcaccccggcctctgcctctgtcccccagtgatcggatcaaggcgctgagcgaggccctgcctgcggggcggccatgcggcggtgacaggagcgcgaccgacacgcacgggcccctcgccccctctcgcctcccgtccgctcgccagctcccctcagccgaggctgctccgcggcggccgcagcccgcgcgcggcccacactcgcctcccctcggcacccccggccccggagctgcctggaggcggccgcactcggggatcatggcccaagttgcaatgtccaccctccccgttgaagatgaggagtcctcggagagcaggatggtggtgacattcctcatgtcagctctcgagtccatgtgtaaagaactggccaagtccaaagccgaagtggcctgcattgcagtgtatgaaacagacgtgtttgtcgtcggaactgaaagaggacgtgcttttgtcaataccagaaaggattttcaaaaagattttgtaaaatattgtgttgaagaagaagaaaaagctgcagagatgcataaaatgaaatctacaacccaggcaaatcggatgagtgtagatgctgtagaaattgaaacactcagaaaaacagttgaggactatttctgcttttgctatgggaaagctttaggcaaatccacagtggtacctgtaccatatgagaagatgctgcgagaccagtcggctgtggtagtgcaggggcttccggaaggtgttgcctttaaacaccccgagaactatgatcttgcaaccctgaaatggattttggagaacaaagcagggatttcattcatcattaagagaccttttttagagccaaagaagcatgtaggtggtcgtgtgatggtaacagatgctgacaggtcaatactatctccaggtggaagttgtggccccatcaaagtgaaaactgaacccacagaagattctggcatttccctggaaatggcagctgtgacagtaaaggaagaatcagaagatcctgattattatcaatataacattcaagcaggcccttctgaaactgatgatgttgatgaaaaacagcccctatcgaagcctttgcaaggaagccaccattcttcagagggcaatgaaggcacagaaatggaagtaccagcagaagattctactcaacatgtcccttcagaaacaagtgaggaccctgaagttgaggtgactattgaagatgatgattattctccaccgtctaagagaccaaaggccaatgagctaccgcagccaccagtcccggaacccgccaatgctgggaagcggaaagtgagggagttcaacttcgagaaatggaatgctcgcatcactgatctacgtaaacaagttgaagaattgtttgaaaggaaatatgctcaagccataaaagccaaaggtccggtgacgatcccgtaccctcttttccagtctcatgttgaagatctttatgtagaaggacttcctgaaggaattccttttagaaggccatctacttacggaattcctcgcctggagaggatattacttgcaaaggaaaggattcgttttgtgattaagaaacatgagcttctgaattcaacacgtgaagatttacagcttgataagccagcttcaggagtaaaggaagaatggtatgccagaatcactaaattaagaaagatggtggatcagcttttctgcaaaaaatttgcggaagccttggggagcactgaagccaaggctgtaccgtaccaaaaatttgaggcacacccgaatgatctgtacgtggaaggactgccagaaaacattcctttccgaagtccctcatggtatggaatcccaaggctggaaaaaatcattcaagtgggcaatcgaattaaatttgttattaaaagaccagaacttctgactcacagtaccactgaagttactcagccaagaacgaatacaccagtcaaagaagattggaatgtcagaattaccaagctacggaagcaagtggaagagatttttaatttgaaatttgctcaagctcttggactcaccgaggcagtaaaagtaccatatcctgtgtttgaatcaaacccggagttcttgaaaggatcgtccgcgggagtaataaaatcaagttcgttgttaaaaaacctgaactagttatttcctacttgcctcctgggatggctagtaaaataaacactaaagctttgcagtcccccaaaagaccacgaagtcctgggagtaattcaaaggttcctgaaattgaggtcaccgtggaaggccctaataacaacaatcctcaaacctcagctgttcgaaccccgacccagactaacggttctaacgttcccttcaagccacgagggagagagttttcctttgaggcctggaatgccaaaatcacggacctaaaacagaaagttgaaaatctcttcaatgagaaatgtggggaagctcttggccttaaacaagctgtgaaggtgccgttcgcgttatttgagtctttcccggaagacttttatgtggaaggcttacctgagggtgtgccattccgaagaccatcgacttttggcattccgaggctggagaagatactcagaaacaaagccaaaattaagttcatcattaaaaagcccgaaatgtttgagacggcgattaaggagagcacctcctctaagagccctcccagaaaaataaattcatcacccaatgttaatactactgcatcaggtgttgaagaccttaacatcattcaggtgacaattccagatgatgataatgaaagactctcgaaagttgaaaaagctagacagctaagagaacaagtgaatgacctctttagtcggaaatttggtgaagctattggtatgggttttcctgtgaaagttccctacaggaaaatcacaattaaccctggctgtgtggtggttgatggcatgcccccgggggtgtccttcaaagcccccagctacctggaaatcagctccatgagaaggatcttagactctgccgagtttatcaaattcacggtcattagaccatttccaggacttgtgattaataaccagctggttgatcagagtgagtcagaaggccccgtgatacaagaatcagctgaaccaagccagttggaagttccagccacagaagaaataaaagagactgatggaagctctcagatcaagcaagaaccagaccccacgtggtagacctcttccctcctaggcttaaagtatcagtggttgagaagagcttttcggacctgttactaccccaagctgtagccttgagttacggtgtttattttccaatcaagtgaagatatctcctacttctcctactggaacatctcagcttctgcagtgaagaaaaattcctgtgatagttcagttctttagtttttctatttgaaaaaaaaaaatcatttaaatgatcctttgttcacggctctccttaatgactgagtgaacagttcctatctgtatatttgactaaaccttttcctaagctatctctcatggttcctatgtttttttatcataattaaaagcaaaaccatctggatcacctaacagtcagaggtcagtatctcagcgtgtgaattatagaggaaatacagagagaacctcttccacttttacttttcgtccaaataaaatgcatggtgtaccagaagttgaagatcgggttgaggattggggctagctcgatgacactaaggccccaacatcgcgggacctgctgtggcgcggattcttaggaacgctgttctagccggccccctctccaggggtcgccgtggccggcattatttcctagttcttcttgtaaccctgaggtgccagcgcggggagtgaggaggggtcagggggctaaggatgcaacctctgacgttctgcgccttcctaggagagtcttacatgtgttgagatttcacaagcaatgcgagttgtaaaataccagctctacaagaagctaggctctgtgacggcatagttttcagtagctttatcacaatattcacaatggagaattatatgacatggtagcagaaataggcccttttatgtgttgcttctattttacctcaaattgtagatatagggtaatcaataaaatccatccatgcctttcacacactaagt

SEQ ID NO: 4711 - protein, 625 aa, Homo sapiens; identical to SEQ ID NO: 4033

SEQ ID NO: 4712 - DNA, 4491 bp, Homo sapiens
aaaaaaaaaaaaaaaaaaaaaaaaaaaagaaaaaagaaaaaaaaaaggaggaggaggaggagggtgagagagaagctgggagagcagagaaaaggggccaccggtcgcccccccgcttccccgcacgcgctctccagccgcggccgcccgcctgccgcggtcaccccggcctctgcctctgtcccccagtgatcggatcaaggcgctgagcgaggccctgcctgcggggcggccatgcggcggtgacaggagcgcgaccgacacgcacgggcccctcgccccctctcgcctcccgtccgctcgccagctcccctcagccgaggctgctccgcggcggccgcagcccgcgcgcggcccacactcgcctccccgttgaagatgaggagtcctcggagagcaggatggtggtgacattcctcatgtcagctctcgagtccatgtgtaaagaactggccaagtccaaagccgaagtggcctgcattgcagtgtatgaaacagacgtgtttgtcgtcggaactgaaagaggacgtgcttttgtcaataccagaaaggattttcaaaaagattttgtaaaatattgtgttgaagaagaagaaaaagctgcagagatgcataaaatgaaatctacaacccaggcaaatcggatgagtgtagatgctgtagaaattgaaacactcagaaaaacagttgaggactatttctgcttttgctatgggaaagctttaggcaaatccacagtggtacctgtaccatatgagaagatgctgcgagaccagtcggctgtggtagtgcaggggcttccggaaggtgttgcctttaaacaccccgagaactatgatcttgcaaccctgaaatggattttggagaacaaagcagggatttcattcatcattaagagaccttttttagagccaaagaagcatgtaggtggtcgtgtgatggtaacagatgctgacaggtcaatactatctccaggtggaagttgtggccccatcaaagtgaaaactgaacccacagaagattctggcatttccctggaaatggcagctgtgacagtaaaggaagaatcagaagatcctgattattatcaatataacattcaaggaagccaccattcttcagagggcaatgaaggcacagaaatggaagtaccagcagaagatgatgattattctccaccgtctaagagaccaaaggccaatgagctaccgcagccaccagtcccggaacccgccaatgctgggaagcggaaagtgagggagttcaacttcgagaaatggaatgctcgcatcactgatctacgtaaacaagttgaagaattgtttgaaaggaaatatgctcaagccataaaagccaaaggtccggtgacgatcccgtaccctcttttccagtctcatgttgaagatctttatgtagaaggacttcctgaaggaattccttttagaaggccatctacttacggaattcctcgcctggagaggatattacttgcaaaggaaaggattcgttttgtgattaagaaacatgagcttctgaattcaacacgtgaagatttacagcttgataagccagcttcaggagtaaaggaagaatggtatgccagaatcactaaattaagaaagatggtggatcagcttttctgcaaaaaatttgcggaagccttggggagcactgaagccaaggctgtaccgtaccaaaaatttgaggcacacccgaatgatctgtacgtggaaggactgccagaaaacattcctttccgaagtccctcatggtatggaatcccaaggctggaaaaaatcattcaagtgggcaatcgaattaaatttgttattaaaagaccagaacttctgactcacagtaccactgaagttactcagccaagaacgaatacaccagtcaaagaagattggaatgtcagaattaccaagctacggaagcaagtggaagagatttttaatttgaaatttgcttagatttgttgacagcggtttcctggagtgctgtcttgagaacgattctgaggaggctcagcaagaaagagtgtttcagttgattgggtgtgtctgtcatggagaaggaactcaagctcttggactcaccgaggcagtaaaagtaccatatcctgtgtttgaatcaaacccggagttcttgtatgtggaaggcttgccagaggggattcccttccgaagccctacctggtttggaattccacgacttgaaaggatcgtccgcgggagtaataaaatcaagttcgttgttaaaaaacctgaactagttatttcctacttgcctcctgggatggctagtaaaataaacactaaagctttgcagtcccccaaaagaccacgaagtcctgggagtaattcaaaggttcctgaaattgaggtcaccgtggaaggccctaataacaacaatcctcaaacctcagctgttcgaaccccgacccagactaacggttctaacgttcccttcaagccacgagggagagagttttcctttgaggcctggaatgccaaaatcacggacctaaaacagaaagttgaaaatctcttcaatgagaaatgtggggaagctcttggccttaaacaagctgtgaaggtgccgttcgcgttatttgagtctttcccggaagacttttatgtggaaggcttacctgagggtgtgccattccgaagaccatcgacttttggcattccgaggctggagaagatactcagaaacaaagccaaaattaagttcatcattaaaaagcccgaaatgtttgagacggcgattaaggagagcacctcctctaagagccctcccagaaaaataaattcatcacccaatgttaatactactgcatcaggtgttgaagaccttaacatcattcaggtgacaattccagatgatgataatgaaagactctcgaaagttgaaaaagctagacagctaagagaacaagtgaatgacctctttagtcggaaatttggtgaagctattggtatgggttttcctgtgaaagttccctacaggaaaatcacaattaaccctggctgtgtggtggttgatggcatgcccccgggggtgtccttcaaagcccccagctacctggaaatcagctccatgagaaggatcttagactctgccgagtttatcaaattcacggtcattagaccatttccaggacttgtgattaataaccagctggttgatcagagtgagtcagaaggccccgtgatacaagaatcagctgaaccaagccagttggaagttccagccacagaagaaataaaagagactgatggaagctctcagatcaagcaagaaccagaccccacgtggtagacctcttccctcctaggcttaaagtatcagtggttgagaagagcttttcggacctgttactaccccaagctgtgtaatatacttgtataacagaaataccttctatacaaacctttttttctacttttagatagaaatgtctactttttcagcagttctgtgaattaaagagcagagtgactgtgggtctggaatggctggtgtacttgggaatgtactatcaggattttacagcaatgctgggaaatgacagggaaaatgacaggaatgaatctcaccagattttttatgtactcagcagagccttgagttacggtgtttattttccaatcaagtgaagatatctcctacttctcctactggaacatctcagcttctgcagtgaagaaaaattcctgtgatagttcagttctttagtttttctatttgaaaaaaaaaaatcatttaaatgatcctttgttcacggctctccttaatgactgagtgaacagttcctatctgtatatttgactaaaccttttcctaagctatctctcatggttcctatgtttttttatcataattaaaagcaaaaccatctggatcacctaacagtcagaggtcagtatctcagcgtgtgaattatagaggaaatacagagagaacctcttccacttttacttttcgtccaaataaaatgcatggtgtaccagaagttgaagatcgggttgaggattggggctagctcgatgacactaaggccccaacatcgcgggacctgctgtggcgcggattcttaggaacgctgttctagccggccccctctccaggggtcgccgtggccggcattatttcctagttcttcttgtaaccctgaggtgccagcgcggggagtgaggaggggtcagggggctaaggatgcaacctctgacgttctgcgccttcctaggagagtcttacatgtgttgagatttcacaagcaatgcgagttgtaaaataccagctctacaagaagctaggctctgtgacggcatagttttcagtagctttatcacaatattcacaatggagaattatatgacatggtagcagaaataggcccttttatgtgttgcttctattttacctcaaattgtagatatagggtaatcaataaaatccatccatgcctttcacacactaagt

SEQ ID NO: 4713 - protein, 523 aa, Homo sapiens; identical to SEQ ID NO: 4201

SEQ ID NO: 4714 - DNA, 3950 bp, Homo sapiens
aaaaaaaaaaaaaaaaaaaaaaaaaaaagaaaaaagaaaaaaaaaaggaggaggaggaggagggtgagagagaagctgggagagcagagaaaaggggccaccggtcgcccccccgcttccccgcacgcgctctccagccgcggccgcccgcctgccgcggtcaccccggcctctgcctctgtcccccagtgatcggatcaaggcgctgagcgaggccctgcctgcggggcggccatgcggcggtgacaggagcgcgaccgacacgcacgggcccctcgccccctctcgcctcccgtccgctcgccagctcccctcagccgaggctgctccgcggcggccgcagcccgcgcgcggcccacactcgcctccccgttgaagatgaggagtcctcggagagcaggatggtggtgacattcctcatgtcagctctcgagtccatgtgtaaagaactggccaagtccaaagccgaagtggcctgcattgcagtgtatgaaacagacgtgtttgtcgtcggaactgaaagaggacgtgcttttgtcaataccagaaaggattttcaaaaagattttgtaaaatattgtgttgaagaagaagaaaaagctgcagagatgcataaaatgaaatctacaacccaggcaaatcggatgagtgtagatgctgtagaaattgaaacactcagaaaaacagttgaggactatttctgcttttgctatgggaaagctttaggcaaatccacagtggtacctgtaccatatgagaagatgctgcgagaccagtcggctgtggtagtgcaggggcttccggaaggtgttgcctttaaacaccccgagaactatgatcttgcaaccctgaaatggattttggagaacaaagcagggatttcattcatcattaagagaccttttttagagccaaagaagcatgtaggtggtcgtgtgatggtaacagatgctgacaggtcaatactatctccaggtggaagttgtggccccatcaaagtgaaaactgaacccacagaagattctggcatttccctggaaatggcagctgtgacagtaaaggaagaatcagaagatcctgattattatcaatataacattcaagcaggcccttctgaaactgatgatgttgatgaaaaacagcccctatcgaagcctttgcaaggaagccaccattcttcagagggcaatgaaggcacagaaatggaagtaccagcagaagattctactcaacatgtcccttcagaaacaagtgaggaccctgaagttgaggtgactattgaagatgatgattattctccaccgtctaagagaccaaaggccaatgagctaccgcagccaccagtcccggaacccgccaatgctgggaagcggaaagtgagggagttcaacttcgagaaatggaatgctcgcatcactgatctacgtaaacaagttgaagaattgtttgaaaggaaatatgctcaagccataaaagccaaaggtccggtgacgatcccgtaccctcttttccagtctcatgttgaagatctttatgtagaaggacttcctgaaggaattccttttagaaggccatctacttacggaattcctcgcctggagaggatattacttgcaaaggaaaggattcgttttgtgattaagaaacatgagcttctgaattcaacacgtgaagatttacagcttgataagccagcttcaggagtaaaggaagaatggtatgccagaatcactaaattaagaaagatggtggatcagcttttctgcaaaaaatttgcggaagccttggggagcactgaagccaaggctgtaccgtaccaaaaatttgaggcacacccgaatgatctgtacgtggaaggactgccagaaaacattcctttccgaagtccctcatggtatggaatcccaaggctggaaaaaatcattcaagtgggcaatcgaattaaatttgttattaaaagaccagaacttctgactcacagtaccactgaagttactcagccaagaacgaatacaccagtcaaagaagattggaatgtcagaattaccaagctacggaagcaagtggaagagatttttaatttgaaatttgctcaagctcttggactcaccgaggcagtaaaagtaccatatcctgtgtttgaatcaaacccggagttcttgtatgtggaaggcttgccagaggggattcccttccgaagccctacctggtttggaattccacgacttgaaaggatcgtccgcgggagtaataaaatcaagttcgttgttaaaaaacctgaactagttatttcctacttgcctcctgggatggctagtaaaataaacactaaagctttgcagtcccccaaaagaccacgaagtcctgggagtaattcaaaggttcctgaaattgaggtcaccgtggaaggccctaataacaacaatcctcaaacctcagctgttcgaaccccgacccagactaacggttctaacgttcccttcaagccacgagggagagagttttcctttgaggcctggaatgccaaaatcacggacctaaaacagaaagttgaaaatctcttcaatgagaaatgtggggaagctcttggccttaaacaagctgtgaaggtgccgttcgcgttatttgagtctttcccggaagacttttatgtggaaggcttacctgagggtgtgccattccgaagaccatcgacttttggcattccgaggctggagaagatactcagaaacaaagccaaaattaagttcatcattaaaaagcccgaaatgtttgagacggcgattaaggagagcacctcctctaagagccctcccagaaaaataaattcatcacccaatgttaatactactgcatcaggtgttgaagaccttaacatcattcaggtgacaattccagatgatgataatgaaagactctcgaaagttgaaaaagctagacagctaagagaacaagtgaatgacctctttagtcggaaatttggtgaagctattggtatgggttttcctgtgaaagttccctacaggaaaatcacaattaaccctggctgtgtggtggttgatggcatgcccccgggggtgtccttcaaagcccccagctacctggaaatcagctccatgagaaggatcttagactctgccgagtttatcaaattcacggtcattagaccatttccaggacttgtgattaataaccagctggttgatcagagtgagtcagaaggccccgtgatacaagaatcagctgaaccaagccagttggaagttccagccacagaagaaataaaagagactgatggaagctctcagatcaagcaagaaccagaccccacgtggtagacctcttccctcctaggcaaaaccatctggatcacctaacagtcagaggtcagtatctcagcgtgtgaattatagaggaaatacagagagaacctcttccacttttacttttcgtccaaataaaatgcatggtgtaccagaagttgaagatcgggttgaggattggggctagctcgatgacactaaggccccaacatcgcgggacctgctgtggcgcggattcttaggaacgctgttctagccggccccctctccaggggtcgccgtggccggcattatttcctagttcttcttgtaaccctgaggtgccagcgcggggagtgaggaggggtcagggggctaaggatgcaacctctgacgttctgcgccttcctaggagagtcttacatgtgttgagatttcacaagcaatgcgagttgtaaaataccagctctacaagaagctaggctctgtgacggcatagttttcagtagctttatcacaatattcacaatggagaattatatgacatggtagcagaaataggcccttttatgtgttgcttctattttacctcaaattgtagatatagggtaatcaataaaatccatccatgcctttcacacactaagt

SEQ ID NO: 4715 - protein, 978 aa, Homo sapiens; identical to SEQ ID NO: 4157

SEQ ID NO: 4716 - DNA, 8035 bp, Homo sapiens
aaaaaaaaaaaaaaaaaaaaaaaaaaaagaaaaaagaaaaaaaaaaggaggaggaggaggagggtgagagagaagctgggagagcagagaaaaggggccaccggtcgcccccccgcttccccgcacgcgctctccagccgcggccgcccgcctgccgcggtcaccccggcctctgcctctgtcccccagtgatcggatcaaggcgctgagcgaggccctgcctgcggggcggccatgcggcggtgacaggagcgcgaccgacacgcacgggcccctcgccccctctcgcctcccgtccgctcgccagctcccctcagccgaggctgctccgcggcggccgcagcccgcgcgcggcccacactcgcctcccctcggcacccccggccccggagctgcctggaggcggccgcactcggggatcatggcccaagttgcaatgtccaccctccccgttgaagatgaggagtcctcggagagcaggatggtggtgacattcctcatgtcagctctcgagtccatgtgtaaagaactggccaagtccaaagccgaagtggcctgcattgcagtgtatgaaacagacgtgtttgtcgtcggaactgaaagaggacgtgcttttgtcaataccagaaaggattttcaaaaagattttgtaaaatattgtgttgaagaagaagaaaaagctgcagagatgcataaaatgaaatctacaacccaggcaaatcggatgagtgtagatgctgtagaaattgaaacactcagaaaaacagttgaggactatttctgcttttgctatgggaaagctttaggcaaatccacagtggtacctgtaccatatgagaagatgctgcgagaccagtcggctgtggtagtgcaggggcttccggaaggtgttgcctttaaacaccccgagaactatgatcttgcaaccctgaaatggattttggagaacaaagcagggatttcattcatcattaagagaccttttttagagccaaagaagcatgtaggtggtcgtgtgatggtaacagatgctgacaggtcaatactatctccaggtggaagttgtggccccatcaaagtgaaaactgaacccacagaagattctggcatttccctggaaatggcagctgtgacagtaaaggaagaatcagaagatcctgattattatcaatataacattcaagcaggcccttctgaaactgatgatgttgatgaaaaacagcccctatcgaagcctttgcaaggaagccaccattcttcagagggcaatgaaggcacagaaatggaagtaccagcagaagattctactcaacatgtcccttcagaaacaagtgaggaccctgaagttgaggtgactattgaagatgatgattattctccaccgtctaagagaccaaaggccaatgagctaccgcagccaccagtcccggaacccgccaatgctgggaagcggaaagtgagggagttcaacttcgagaaatggaatgctcgcatcactgatctacgtaaacaagttgaagaattgtttgaaaggaaatatgctcaagccataaaagccaaaggtccggtgacgatcccgtaccctcttttccagtctcatgttgaagatctttatgtagaaggacttcctgaaggaattccttttagaaggccatctacttacggaattcctcgcctggagaggatattacttgcaaaggaaaggattcgttttgtgattaagaaacatgagcttctgaattcaacacgtgaagatttacagcttgataagccagcttcaggagtaaaggaagaatggtatgccagaatcactaaattaagaaagatggtggatcagcttttctgcaaaaaatttgcggaagccttggggagcactgaagccaaggctgtaccgtaccaaaaatttgaggcacacccgaatgatctgtacgtggaaggactgccagaaaacattcctttccgaagtccctcatggtatggaatcccaaggctggaaaaaatcattcaagtgggcaatcgaattaaatttgttattaaaagaccagaacttctgactcacagtaccactgaagttactcagccaagaacgaatacaccagtcaaagaagattggaatgtcagaattaccaagctacggaagcaagtggaagagatttttaatttgaaatttgctcaagctcttggactcaccgaggcagtaaaagtaccatatcctgtgtttgaatcaaacccggagttcttgtatgtggaaggcttgccagaggggattcccttccgaagccctacctggtttggaattccacgacttgaaaggatcgtccgcgggagtaataaaatcaagttcgttgttaaaaaacctgaactagttatttcctacttgcctcctgggatggctagtaaaataaacactaaagctttgcagtcccccaaaagaccacgaagtcctgggagtaattcaaaggttcctgaaattgaggtcaccgtggaaggccctaataacaacaatcctcaaacctcagctgttcgaaccccgacccagactaacggttctaacgttcccttcaagccacgagggagagagttttcctttgaggcctggaatgccaaaatcacggacctaaaacagaaagttgaaaatctcttcaatgagaaatgtggggaagctcttggccttaaacaagctgtgaaggtgccgttcgcgttatttgagtctttcccggaagacttttatgtggaaggcttacctgagggtgtgccattccgaagaccatcgacttttggcattccgaggctggagaagatactcagaaacaaagccaaaattaagttcatcattaaaaagcccgaaatgtttgagacggcgattaaggagagcacctcctctaagagccctcccagaaaaataaattcatcacccaatgttaatactactgcatcaggtgttgaagaccttaacatcattcaggtgacaattccagatgatgataatgaaagactctcgaaagttgaaaaagctagacagctaagagaacaagtgaatgacctctttagtcggaaatttggtgaagctattggtatgggttttcctgtgaaagttccctacaggaaaatcacaattaaccctggctgtgtggtggttgatggcatgcccccgggggtgtccttcaaagcccccagctacctggaaatcagctccatgagaaggatcttagactctgccgagtttatcaaattcacggtcattaggtaagtgagagtttcctgcttagtcacaggagcgaatctggagctcatgaggctgactcttctaaaatgcagccacaggtagtcatcgaatccggcttcctatgctgtgcaatcaacaaatcaaaataacttgtgtcatcattagaatgtcagatgtgcttctacgaactaagctgactcttttaattctttggcaaagggttggcaaactaggactgtttgccaaattcaggctgcctcctatttttagagtcttcctgaaacacagctacacccgtattatccatggctgctttcctgtcacagtgagtaagtagctgggactgagaaggcatggcctccaaagtctaaaatatttactctctagcactttgtagaaaaaccttagctaggcacagtggctaacgcctgtaatcccagcattttgggaggccaaggcaggcagatcacctgaggtcaggagttccagaccagcctggccaacatggtgaaatcccatctctacaaaaataaaacagttagctgggcatgatggcgggtgcctgtaatcccagctactcgggaggctgaggcaggatagtcgcttgaacccaggaggtggaggttgcaatgagccaagatcatgccactgcactccagcctggacgacagagtgagactccatcacaagaaaaaaagaactttgtcaacctctgtcttagggcgccttgtcacaggcttcgggtcagacggattcaaccttgcatcagccatttgttagccaggtcactctgttctttgtctgtaaatgagattgatcgttgttcccactgagagtgtcagctccttcccgtagagcaggcatgatgattgtactcacctctgacaccattgtgagtgccacattccttcccacgtccttgtcactgtaagagatgcccacctgagcaccaaccccaggttatcttcccctttgtcttccagccccccagaaacagctacgactcaacctacccaatcatttcatcatcagattgccactgtctctagttcaggtctcttgggactggcactcagaaatctcataataaatcctcttgaggcttctcatacactcgtcttcttccaatcttctttccctcaaaatctcatattttggttccacttcacccaccgtcattctccatatcactcccaggagttaggcaaaaagccccttccgttcttccgtatgttaaacttagaatcactctgttccctgctctgcgtttctattttttgtttttcctccatttactagtagcttaacactttctaacagtgttcttattattgatacgtatctatctcttccataagcttataaggtcacggataatacttctcattgtagtacgtaaatgacgtgggctagatatgagttgaataaacagttatacctgtaaattcttacagagtgaaaataaattgttatactttacaatttgtttctctctttagaccatttccaggacttgtgattaataaccgtgagtattttgtgaagtgttttgtttttgttttttcctggggtctgacgtgtgtgcgtgtgagtgtgtatacatgcttaacgtatatcacgttacttcacctatgtcagtaaccaggccaaatacttgttttagccctcagtaaaaacaccaggcacttcctagttgtaaaattattcaagcttcttaacttcctatcctcgatgcacttaatcataaaatggtaataatagcaccgattttgggggagtcgttccagtagatggaaagcatctggaacaggtgtcagcaagctcctgccgacgtgtatgcataaagttttattgaaaccaccatcgtgtccatttgtttatggcagaactgagagatggcagcagcaagtgtgtgcctgcaaaacctaaaatatttactaattggctctgcaagaaaagagtttgcatccccctaacctagaacagtgtctagcctctagtatgtgtttagcctacagtatgtgctcagcgaatacaatctatatttattactgcttttatgactgttataattactgtgcttggatttcgttacaaagtaagtcacaatgtgcctgcttctgttagtatttcagcacagtgcctggcacacatggggctctcaaatattgctgagcgagtgaacaaatgtcctttcaattccttaacgttgatgtcattttcaatagtattttgagccaaacttaattttgcgagtgtgttttgttttcttaactttattattaaaaatgtataaaagtgaggccaggcgtggtggctcacgcctgtaatcccagcagtttgggaggctgaggcaggcggatcagttgaggttgggagttggagaccagcccgtccaacatggtgaaagcctgtctctactaaaaatacaaaaatcagctgggtgtggtggcgcgtgcctgtaatcccagctactcaggaggctgaggcaggagagttgcttgaatcctagaggtggaggttgcagtgagctgagatcgtgccattgcactccagcctgggcaacaagagcaaaactctgtcccaataaataaataaataaaatgttctcttttgttcctgttcttgtgcggtagtgtggtatagagttttatggtaattactgtgaattagtgattctgagggacatatcagaactctgaggtttgtttccttctcatcttgagggaaacagcaaatgtatgttaaaatgcttttccaagggaacaacacatccttacattatttaaaccaatctgcttcattttcagagctggttgatcagagtgagtcagaaggccccgtgatacaagaatcagctgaaccaagccagttggaagttccagccacagaagaaataaaagagactgatggaagctctcagatcaagcaagaaccagaccccacgtggtagacctcttccctcctagggtaaatcagcttctgtgtcagggatgctgtgtggtgtccatctgaaccccctgcatacgcgtagctaatgtgatctccccactttcacataagatggtggccctgccttcagggaatgtgggagccaggtgggagccttcccggatatttaagctagaagattctacagggagattctccttggatcaatatatgtctctcagtcaaagatgtaaaagcacttttgccttaaaaagaatgttctgtttctaaatagagtcaacgttgtcctcctcattggaattcactatgagtcagaatcattagactgacttttttttttccatagtaatagtattttgcagagtctcacagagctgcagatcttttgttcatcttgcagagttaacaagtctgatcctgttagtccagatttcttaaatttggccaagttataataggagcagtagcttgagacccgaagtcaggaaactttgacaatggatttttttttttaatccagagacttgtactggaatttgccttaccctgtcagctcatggacttaaggtttcatcccgctttatgagtgcttctgaatccaagtcattgttacctgaatttgcaaattaagttgtgatattcgtgactgttaaattcctgtaattagattaacctctttgcttgcttgtttgttttctctcctattttagcttaaagtatcagtggttgagaagagcttttcggacctgttactaccccaagctgtgtaatatacttgtataacagaaataccttctatacaaacctttttttctacttttagatagaaatgtctactttttcagcagttctgtgaattaaagagcagagtgactgtgggtctggaatggctggtgtacttgggaatgtactatcaggattttacagcaatgctgggaaatgacagggaaaatgacaggaatgaatctcaccagattttttatgtactcagcagagccttgagttacggtgtttattttccaatcaagtgaagatatctcctacttctcctactggaacatctcagcttctgcagtgaagaaaaattcctgtgatagttcagttctttagtttttctatttgaaaaaaaaaaatcatttaaatgatcctttgttcacggctctccttaatgactgagtgaacagttcctatctgtatatttgactaaaccttttcctaagctatctctcatggttcctatgtttttttatcataattaaaagcaaaaccatctggatcacctaacagtcagaggtcagtatctcagcgtgtgaattatagaggaaatacagagagaacctcttccacttttacttttcgtccaaataaaatgcatggtgtaccagaagttgaagatcgggttgaggattggggctagctcgatgacactaaggccccaacatcgcgggacctgctgtggcgcggattcttaggaacgctgttctagccggccccctctccaggggtcgccgtggccggcattatttcctagttcttcttgtaaccctgaggtgccagcgcggggagtgaggaggggtcagggggctaaggatgcaacctctgacgttctgcgccttcctaggagagtcttacatgtgttgagatttcacaagcaatgcgagttgtaaaataccagctctacaagaagctaggctctgtgacggcatagttttcagtagctttatcacaatattcacaatggagaattatatgacatggtagcagaaataggcccttttatgtgttgcttctattttacctcaaattgtagatatagggtaatcaataaaatccatccatgcctttcacacactaagt

SEQ ID NO: 4717 - protein, 942 aa, Homo sapiens; identical to SEQ ID NO: 4619

SEQ ID NO: 4718 - DNA, 4142 bp, Homo sapiens
aaaaaaaaaaaaaaaaaaaaaaaaaaaagaaaaaagaaaaaaaaaaggaggaggaggaggagggtgagagagaagctgggagagcagagaaaaggggccaccggtcgcccccccgcttccccgcacgcgctctccagccgcggccgcccgcctgccgcggtcaccccggcctctgcctctgtcccccagtgatcggatcaaggcgctgagcgaggccctgcctgcggggcggccatgcggcggtgacaggagcgcgaccgacacgcacgggcccctcgccccctctcgcctcccgtccgctcgccagctcccctcagccgaggctgctccgcggcggccgcagcccgcgcgcggcccacactcgcctcccctcggcacccccggccccggagctgcctggaggcggccgcactcggggatcatggcccaagttgcaatgtccaccctccccgttgaagatgaggagtcctcggagagcaggatggtggtgacattcctcatgtcagctctcgagtccatgtgtaaagaactggccaagtccaaagccgaagtggcctgcattgcagtgtatgaaacagacgtgtttgtcgtcggaactgaaagaggacgtgcttttgtcaataccagaaaggattttcaaaaagattttgtaaaatattgtgttgaagaagaagaaaaagctgcagagatgcataaaatgaaatctacaacccaggcaaatcggatgagtgtagatgctgtagaaattgaaacactcagaaaaacagttgaggactatttctgcttttgctatgggaaagctttaggcaaatccacagtggtacctgtaccatatgagaagatgctgcgagaccagtcggctgtggtagtgcaggggcttccggaaggtgttgcctttaaacaccccgagaactatgatcttgcaaccctgaaatggattttggagaacaaagcagggatttcattcatcattaagagaccttttttagagccaaagaagcatgtaggtggtcgtgtgatggtaacagatgctgacaggtcaatactatctccaggtggaagttgtggccccatcaaagtgaaaactgaacccacagaagattctggcatttccctggaaatggcagctgtgacagtaaaggaagaatcagaagatcctgattattatcaatataacattcaagcaggcccttctgaaactgatgatgttgatgaaaaacagcccctatcgaagcctttgcaaggaagccaccattcttcagagggcaatgaaggcacagaaatggaagtaccagcagaagattctactcaacatgtcccttcagaaacaagtgaggaccctgaagttgaggtgactattgaagatgatgattattctccaccgtctaagagaccaaaggccaatgagctaccgcagccaccagtcccggaacccgccaatgctgggaagcggaaagtgagggagttcaacttcgagaaatggaatgctcgcatcactgatctacgtaaacaagttgaagaattgtttgaaaggaaatatgctcaagccataaaagccaaaggtccggtgacgatcccgtaccctcttttccagtctcatgttgaagatctttatgtagaaggacttcctgaaggaattccttttagaaggccatctacttacggaattcctcgcctggagaggatattacttgcaaaggaaaggattcgttttgtgattaagaaacatgagcttctgaattcaacacgtgaagatttacagcttgataagccagcttcaggagtaaaggaagaatggtatgccagaatcactaaattaagaaagatggtggatcagcttttctgcaaaaaatttgcggaagccttggggagcactgaagccaaggctgtaccgtaccaaaaatttgaggcacacccgaatgatctgtacgtggaaggactgccagaaaacattcctttccgaagtccctcatggtatggaatcccaaggctggaaaaaatcattcaagtgggcaatcgaattaaatttgttattaaaagaccagaacttctgactcacagtaccactgaagttactcagccaagaacgaatacaccagtcaaagaagattggaatgtcagaattaccaagctacggaagcaagtggaagagatttttaatttgaaatttgcttagatttgttgacagcggtttcctggagtgctgtcttgagaacgattctgaggaggctcagcaagaaagagtgtttcagttgattgggtgtgtctgtcatggagaaggaactcaagctcttggactcaccgaggcagtaaaagtaccatatcctgtgtttgaatcaaacccggagttcttgtatgtggaaggcttgccagaggggattcccttccgaagccctacctggtttggaattccacgacttgaaaggatcgtccgcgggagtaataaaatcaagttcgttgttaaaaaacctgaactagttatttcctacttgcctcctgggatggctagtaaaataaacactaaagctttgcagtcccccaaaagaccacgaagtcctgggagtaattcaaaggttcctgaaattgaggtcaccgtggaaggccctaataacaacaatcctcaaacctcagctgttcgaaccccgacccagactaacggttctaacgttcccttcaagccacgagggagagagttttcctttgaggcctggaatgccaaaatcacggacctaaaacagaaagttgaaaatctcttcaatgagaaatgtggggaagctcttggccttaaacaagctgtgaaggtgccgttcgcgttatttgagtctttcccggaagacttttatgtggaaggcttacctgagggtgtgccattccgaagaccatcgacttttggcattccgaggctggagaagatactcagaaacaaagccaaaattaagttcatcattaaaaagcccgaaatgtttgagacggcgattaaggagagcacctcctctaagagccctcccagaaaaataaattcatcacccaatgttaatactactgcatcaggtgttgaagaccttaacatcattcaggtgacaattccagatgatgataatgaaagactctcgaaagttgaaaaagctagacagctaagagaacaagtgaatgacctctttagtcggaaatttggtgaagctattggtatgggttttcctgtgaaagttccctacaggaaaatcacaattaaccctggctgtgtggtggttgatggcatgcccccgggggtgtccttcaaagcccccagctacctggaaatcagctccatgagaaggatcttagactctgccgagtttatcaaattcacggtcattagaccatttccaggacttgtgattaataaccagctggttgatcagagtgagtcagaaggccccgtgatacaagaatcagctgaaccaagccagttggaagttccagccacagaagaaataaaagagactgatggaagctctcagatcaagcaagaaccagaccccacgtggtagacctcttccctcctaggcaaaaccatctggatcacctaacagtcagaggtcagtatctcagcgtgtgaattatagaggaaatacagagagaacctcttccacttttacttttcgtccaaataaaatgcatggtgtaccagaagttgaagatcgggttgaggattggggctagctcgatgacactaaggccccaacatcgcgggacctgctgtggcgcggattcttaggaacgctgttctagccggccccctctccaggggtcgccgtggccggcattatttcctagttcttcttgtaaccctgaggtgccagcgcggggagtgaggaggggtcagggggctaaggatgcaacctctgacgttctgcgccttcctaggagagtcttacatgtgttgagatttcacaagcaatgcgagttgtaaaataccagctctacaagaagctaggctctgtgacggcatagttttcagtagctttatcacaatattcacaatggagaattatatgacatggtagcagaaataggcccttttatgtgttgcttctattttacctcaaattgtagatatagggtaatcaataaaatccatccatgcctttcacacactaagt

SEQ ID NO: 4719 - protein, 584 aa, Homo sapiens; identical to SEQ ID NO: 4053

SEQ ID NO: 4720 - DNA, 4088 bp, Homo sapiens
aaaaaaaaaaaaaaaaaaaaaaaaaaaagaaaaaagaaaaaaaaaaggaggaggaggaggagggtgagagagaagctgggagagcagagaaaaggggccaccggtcgcccccccgcttccccgcacgcgctctccagccgcggccgcccgcctgccgcggtcaccccggcctctgcctctgtcccccagtgatcggatcaaggcgctgagcgaggccctgcctgcggggcggccatgcggcggtgacaggagcgcgaccgacacgcacgggcccctcgccccctctcgcctcccgtccgctcgccagctcccctcagccgaggctgctccgcggcggccgcagcccgcgcgcggcccacactcgcctccccgttgaagatgaggagtcctcggagagcaggatggtggtgacattcctcatgtcagctctcgagtccatgtgtaaagaactggccaagtccaaagccgaagtggcctgcattgcagtgtatgaaacagacgtgtttgtcgtcggaactgaaagaggacgtgcttttgtcaataccagaaaggattttcaaaaagattttgtaaaatattgtgttgaagaagaagaaaaagctgcagagatgcataaaatgaaatctacaacccaggcaaatcggatgagtgtagatgctgtagaaattgaaacactcagaaaaacagttgaggactatttctgcttttgctatgggaaagctttaggcaaatccacagtggtacctgtaccatatgagaagatgctgcgagaccagtcggctgtggtagtgcaggggcttccggaaggtgttgcctttaaacaccccgagaactatgatcttgcaaccctgaaatggattttggagaacaaagcagggatttcattcatcattaagagaccttttttagagccaaagaagcatgtaggtggtcgtgtgatggtaacagatgctgacaggtcaatactatctccaggtggaagttgtggccccatcaaagtgaaaactgaacccacagaagattctggcatttccctggaaatggcagctgtgacagtaaaggaagaatcagaagatcctgattattatcaatataacattcaagcaggcccttctgaaactgatgatgttgatgaaaaacagcccctatcgaagcctttgcaaggaagccaccattcttcagagggcaatgaaggcacagaaatggaagtaccagcagaagatgatgattattctccaccgtctaagagaccaaaggccaatgagctaccgcagccaccagtcccggaacccgccaatgctgggaagcggaaagtgagggagttcaacttcgagaaatggaatgctcgcatcactgatctacgtaaacaagttgaagaattgtttgaaaggaaatatgctcaagccataaaagccaaaggtccggtgacgatcccgtaccctcttttccagtctcatgttgaagatctttatgtagaaggacttcctgaaggaattccttttagaaggccatctacttacggaattcctcgcctggagaggatattacttgcaaaggaaaggattcgttttgtgattaagaaacatgagcttctgaattcaacacgtgaagatttacagcttgataagccagcttcaggagtaaaggaagaatggtatgccagaatcactaaattaagaaagatggtggatcagcttttctgcaaaaaatttgcggaagccttggggagcactgaagccaaggctgtaccgtaccaaaaatttgaggcacacccgaatgatctgtacgtggaaggactgccagaaaacattcctttccgaagtccctcatggtatggaatcccaaggctggaaaaaatcattcaagtgggcaatcgaattaaatttgttattaaaagaccagaacttctgactcacagtaccactgaagttactcagccaagaacgaatacaccagtcaaagaagattggaatgtcagaattaccaagctacggaagcaagtggaagagatttttaatttgaaatttgctcaagctcttggactcaccgaggcagtaaaagtaccatatcctgtgtttgaatcaaacccggagttcttgaaaggatcgtccgcgggagtaataaaatcaagttcgttgttaaaaaacctgaactagttatttcctacttgcctcctgggatggctagtaaaataaacactaaagctttgcagtcccccaaaagaccacgaagtcctgggagtaattcaaaggttcctgaaattgaggtcaccgtggaaggccctaataacaacaatcctcaaacctcagctgttcgaaccccgacccagactaacggttctaacgttcccttcaagccacgagggagagagttttcctttgaggcctggaatgccaaaatcacggacctaaaacagaaagttgaaaatctcttcaatgagaaatgtggggaagctcttggccttaaacaagctgtgaaggtgccgttcgcgttatttgagtctttcccggaagacttttatgtggaaggcttacctgagggtgtgccattccgaagaccatcgacttttggcattccgaggctggagaagatactcagaaacaaagccaaaattaagttcatcattaaaaagcccgaaatgtttgagacggcgattaaggagagcacctcctctaagagccctcccagaaaaataaattcatcacccaatgttaatactactgcatcaggtgttgaagaccttaacatcattcaggtgacaattccagatgatgataatgaaagactctcgaaagttgaaaaagctagacagctaagagaacaagtgaatgacctctttagtcggaaatttggtgaagctattggtatgggttttcctgtgaaagttccctacaggaaaatcacaattaaccctggctgtgtggtggttgatggcatgcccccgggggtgtccttcaaagcccccagctacctggaaatcagctccatgagaaggatcttagactctgccgagtttatcaaattcacggtcattagaccatttccaggacttgtgattaataaccagctggttgatcagagtgagtcagaaggccccgtgatacaagaatcagctgaaccaagccagttggaagttccagccacagaagaaataaaagagactgatggaagctctcagatcaagcaagaaccagaccccacgtggtagacctcttccctcctaggagccttgagttacggtgtttattttccaatcaagtgaagatatctcctacttctcctactggaacatctcagcttctgcagtgaagaaaaattcctgtgatagttcagttctttagtttttctatttgaaaaaaaaaaatcatttaaatgatcctttgttcacggctctccttaatgactgagtgaacagttcctatctgtatatttgactaaaccttttcctaagctatctctcatggttcctatgtttttttatcataattaaaagcaaaaccatctggatcacctaacagtcagaggtcagtatctcagcgtgtgaattatagaggaaatacagagagaacctcttccacttttacttttcgtccaaataaaatgcatggtgtaccagaagttgaagatcgggttgaggattggggctagctcgatgacactaaggccccaacatcgcgggacctgctgtggcgcggattcttaggaacgctgttctagccggccccctctccaggggtcgccgtggccggcattatttcctagttcttcttgtaaccctgaggtgccagcgcggggagtgaggaggggtcagggggctaaggatgcaacctctgacgttctgcgccttcctaggagagtcttacatgtgttgagatttcacaagcaatgcgagttgtaaaataccagctctacaagaagctaggctctgtgacggcatagttttcagtagctttatcacaatattcacaatggagaattatatgacatggtagcagaaataggcccttttatgtgttgcttctattttacctcaaattgtagatatagggtaatcaataaaatccatccatgcctttcacacactaagt

SEQ ID NO: 4721 - protein, 584 aa, Homo sapiens; identical to SEQ ID NO: 4077

SEQ ID NO: 4722 - DNA, 7972 bp, Homo sapiens
aaaaaaaaaaaaaaaaaaaaaaaaaaaagaaaaaagaaaaaaaaaaggaggaggaggaggagggtgagagagaagctgggagagcagagaaaaggggccaccggtcgcccccccgcttccccgcacgcgctctccagccgcggccgcccgcctgccgcggtcaccccggcctctgcctctgtcccccagtgatcggatcaaggcgctgagcgaggccctgcctgcggggcggccatgcggcggtgacaggagcgcgaccgacacgcacgggcccctcgccccctctcgcctcccgtccgctcgccagctcccctcagccgaggctgctccgcggcggccgcagcccgcgcgcggcccacactcgcctcccctcggcacccccggccccggagctgcctggaggcggccgcactcggggatcatggcccaagttgcaatgtccaccctccccgttgaagatgaggagtcctcggagagcaggatggtggtgacattcctcatgtcagctctcgagtccatgtgtaaagaactggccaagtccaaagccgaagtggcctgcattgcagtgtatgaaacagacgtgtttgtcgtcggaactgaaagaggacgtgcttttgtcaataccagaaaggattttcaaaaagattttgtaaaatattgtgttgaagaagaagaaaaagctgcagagatgcataaaatgaaatctacaacccaggcaaatcggatgagtgtagatgctgtagaaattgaaacactcagaaaaacagttgaggactatttctgcttttgctatgggaaagctttaggcaaatccacagtggtacctgtaccatatgagaagatgctgcgagaccagtcggctgtggtagtgcaggggcttccggaaggtgttgcctttaaacaccccgagaactatgatcttgcaaccctgaaatggattttggagaacaaagcagggatttcattcatcattaagagaccttttttagagccaaagaagcatgtaggtggtcgtgtgatggtaacagatgctgacaggtcaatactatctccaggtggaagttgtggccccatcaaagtgaaaactgaacccacagaagattctggcatttccctggaaatggcagctgtgacagtaaaggaagaatcagaagatcctgattattatcaatataacattcaagcaggcccttctgaaactgatgatgttgatgaaaaacagcccctatcgaagcctttgcaaggaagccaccattcttcagagggcaatgaaggcacagaaatggaagtaccagcagaagatgatgattattctccaccgtctaagagaccaaaggccaatgagctaccgcagccaccagtcccggaacccgccaatgctgggaagcggaaagtgagggagttcaacttcgagaaatggaatgctcgcatcactgatctacgtaaacaagttgaagaattgtttgaaaggaaatatgctcaagccataaaagccaaaggtccggtgacgatcccgtaccctcttttccagtctcatgttgaagatctttatgtagaaggacttcctgaaggaattccttttagaaggccatctacttacggaattcctcgcctggagaggatattacttgcaaaggaaaggattcgttttgtgattaagaaacatgagcttctgaattcaacacgtgaagatttacagcttgataagccagcttcaggagtaaaggaagaatggtatgccagaatcactaaattaagaaagatggtggatcagcttttctgcaaaaaatttgcggaagccttggggagcactgaagccaaggctgtaccgtaccaaaaatttgaggcacacccgaatgatctgtacgtggaaggactgccagaaaacattcctttccgaagtccctcatggtatggaatcccaaggctggaaaaaatcattcaagtgggcaatcgaattaaatttgttattaaaagaccagaacttctgactcacagtaccactgaagttactcagccaagaacgaatacaccagtcaaagaagattggaatgtcagaattaccaagctacggaagcaagtggaagagatttttaatttgaaatttgctcaagctcttggactcaccgaggcagtaaaagtaccatatcctgtgtttgaatcaaacccggagttcttgtatgtggaaggcttgccagaggggattcccttccgaagccctacctggtttggaattccacgacttgaaaggatcgtccgcgggagtaataaaatcaagttcgttgttaaaaaacctgaactagttatttcctacttgcctcctgggatggctagtaaaataaacactaaagctttgcagtcccccaaaagaccacgaagtcctgggagtaattcaaaggttcctgaaattgaggtcaccgtggaaggccctaataacaacaatcctcaaacctcagctgttcgaaccccgacccagactaacggttctaacgttcccttcaagccacgagggagagagttttcctttgaggcctggaatgccaaaatcacggacctaaaacagaaagttgaaaatctcttcaatgagaaatgtggggaagctcttggccttaaacaagctgtgaaggtgccgttcgcgttatttgagtctttcccggaagacttttatgtggaaggcttacctgagggtgtgccattccgaagaccatcgacttttggcattccgaggctggagaagatactcagaaacaaagccaaaattaagttcatcattaaaaagcccgaaatgtttgagacggcgattaaggagagcacctcctctaagagccctcccagaaaaataaattcatcacccaatgttaatactactgcatcaggtgttgaagaccttaacatcattcaggtgacaattccagatgatgataatgaaagactctcgaaagttgaaaaagctagacagctaagagaacaagtgaatgacctctttagtcggaaatttggtgaagctattggtatgggttttcctgtgaaagttccctacaggaaaatcacaattaaccctggctgtgtggtggttgatggcatgcccccgggggtgtccttcaaagcccccagctacctggaaatcagctccatgagaaggatcttagactctgccgagtttatcaaattcacggtcattaggtaagtgagagtttcctgcttagtcacaggagcgaatctggagctcatgaggctgactcttctaaaatgcagccacaggtagtcatcgaatccggcttcctatgctgtgcaatcaacaaatcaaaataacttgtgtcatcattagaatgtcagatgtgcttctacgaactaagctgactcttttaattctttggcaaagggttggcaaactaggactgtttgccaaattcaggctgcctcctatttttagagtcttcctgaaacacagctacacccgtattatccatggctgctttcctgtcacagtgagtaagtagctgggactgagaaggcatggcctccaaagtctaaaatatttactctctagcactttgtagaaaaaccttagctaggcacagtggctaacgcctgtaatcccagcattttgggaggccaaggcaggcagatcacctgaggtcaggagttccagaccagcctggccaacatggtgaaatcccatctctacaaaaataaaacagttagctgggcatgatggcgggtgcctgtaatcccagctactcgggaggctgaggcaggatagtcgcttgaacccaggaggtggaggttgcaatgagccaagatcatgccactgcactccagcctggacgacagagtgagactccatcacaagaaaaaaagaactttgtcaacctctgtcttagggcgccttgtcacaggcttcgggtcagacggattcaaccttgcatcagccatttgttagccaggtcactctgttctttgtctgtaaatgagattgatcgttgttcccactgagagtgtcagctccttcccgtagagcaggcatgatgattgtactcacctctgacaccattgtgagtgccacattccttcccacgtccttgtcactgtaagagatgcccacctgagcaccaaccccaggttatcttcccctttgtcttccagccccccagaaacagctacgactcaacctacccaatcatttcatcatcagattgccactgtctctagttcaggtctcttgggactggcactcagaaatctcataataaatcctcttgaggcttctcatacactcgtcttcttccaatcttctttccctcaaaatctcatattttggttccacttcacccaccgtcattctccatatcactcccaggagttaggcaaaaagccccttccgttcttccgtatgttaaacttagaatcactctgttccctgctctgcgtttctattttttgtttttcctccatttactagtagcttaacactttctaacagtgttcttattattgatacgtatctatctcttccataagcttataaggtcacggataatacttctcattgtagtacgtaaatgacgtgggctagatatgagttgaataaacagttatacctgtaaattcttacagagtgaaaataaattgttatactttacaatttgtttctctctttagaccatttccaggacttgtgattaataaccgtgagtattttgtgaagtgttttgtttttgttttttcctggggtctgacgtgtgtgcgtgtgagtgtgtatacatgcttaacgtatatcacgttacttcacctatgtcagtaaccaggccaaatacttgttttagccctcagtaaaaacaccaggcacttcctagttgtaaaattattcaagcttcttaacttcctatcctcgatgcacttaatcataaaatggtaataatagcaccgattttgggggagtcgttccagtagatggaaagcatctggaacaggtgtcagcaagctcctgccgacgtgtatgcataaagttttattgaaaccaccatcgtgtccatttgtttatggcagaactgagagatggcagcagcaagtgtgtgcctgcaaaacctaaaatatttactaattggctctgcaagaaaagagtttgcatccccctaacctagaacagtgtctagcctctagtatgtgtttagcctacagtatgtgctcagcgaatacaatctatatttattactgcttttatgactgttataattactgtgcttggatttcgttacaaagtaagtcacaatgtgcctgcttctgttagtatttcagcacagtgcctggcacacatggggctctcaaatattgctgagcgagtgaacaaatgtcctttcaattccttaacgttgatgtcattttcaatagtattttgagccaaacttaattttgcgagtgtgttttgttttcttaactttattattaaaaatgtataaaagtgaggccaggcgtggtggctcacgcctgtaatcccagcagtttgggaggctgaggcaggcggatcagttgaggttgggagttggagaccagcccgtccaacatggtgaaagcctgtctctactaaaaatacaaaaatcagctgggtgtggtggcgcgtgcctgtaatcccagctactcaggaggctgaggcaggagagttgcttgaatcctagaggtggaggttgcagtgagctgagatcgtgccattgcactccagcctgggcaacaagagcaaaactctgtcccaataaataaataaataaaatgttctcttttgttcctgttcttgtgcggtagtgtggtatagagttttatggtaattactgtgaattagtgattctgagggacatatcagaactctgaggtttgtttccttctcatcttgagggaaacagcaaatgtatgttaaaatgcttttccaagggaacaacacatccttacattatttaaaccaatctgcttcattttcagagctggttgatcagagtgagtcagaaggccccgtgatacaagaatcagctgaaccaagccagttggaagttccagccacagaagaaataaaagagactgatggaagctctcagatcaagcaagaaccagaccccacgtggtagacctcttccctcctagggtaaatcagcttctgtgtcagggatgctgtgtggtgtccatctgaaccccctgcatacgcgtagctaatgtgatctccccactttcacataagatggtggccctgccttcagggaatgtgggagccaggtgggagccttcccggatatttaagctagaagattctacagggagattctccttggatcaatatatgtctctcagtcaaagatgtaaaagcacttttgccttaaaaagaatgttctgtttctaaatagagtcaacgttgtcctcctcattggaattcactatgagtcagaatcattagactgacttttttttttccatagtaatagtattttgcagagtctcacagagctgcagatcttttgttcatcttgcagagttaacaagtctgatcctgttagtccagatttcttaaatttggccaagttataataggagcagtagcttgagacccgaagtcaggaaactttgacaatggatttttttttttaatccagagacttgtactggaatttgccttaccctgtcagctcatggacttaaggtttcatcccgctttatgagtgcttctgaatccaagtcattgttacctgaatttgcaaattaagttgtgatattcgtgactgttaaattcctgtaattagattaacctctttgcttgcttgtttgttttctctcctattttagcttaaagtatcagtggttgagaagagcttttcggacctgttactaccccaagctgtgtaatatacttgtataacagaaataccttctatacaaacctttttttctacttttagatagaaatgtctactttttcagcagttctgtgaattaaagagcagagtgactgtgggtctggaatggctggtgtacttgggaatgtactatcaggattttacagcaatgctgggaaatgacagggaaaatgacaggaatgaatctcaccagattttttatgtactcagcagagccttgagttacggtgtttattttccaatcaagtgaagatatctcctacttctcctactggaacatctcagcttctgcagtgaagaaaaattcctgtgatagttcagttctttagtttttctatttgaaaaaaaaaaatcatttaaatgatcctttgttcacggctctccttaatgactgagtgaacagttcctatctgtatatttgactaaaccttttcctaagctatctctcatggttcctatgtttttttatcataattaaaagcaaaaccatctggatcacctaacagtcagaggtcagtatctcagcgtgtgaattatagaggaaatacagagagaacctcttccacttttacttttcgtccaaataaaatgcatggtgtaccagaagttgaagatcgggttgaggattggggctagctcgatgacactaaggccccaacatcgcgggacctgctgtggcgcggattcttaggaacgctgttctagccggccccctctccaggggtcgccgtggccggcattatttcctagttcttcttgtaaccctgaggtgccagcgcggggagtgaggaggggtcagggggctaaggatgcaacctctgacgttctgcgccttcctaggagagtcttacatgtgttgagatttcacaagcaatgcgagttgtaaaataccagctctacaagaagctaggctctgtgacggcatagttttcagtagctttatcacaatattcacaatggagaattatatgacatggtagcagaaataggcccttttatgtgttgcttctattttacctcaaattgtagatatagggtaatcaataaaatccatccatgcctttcacacactaagt

SEQ ID NO: 4723 - protein, 921 aa, Homo sapiens
MAQVAMSTLPVEDEESSESRMVVTFLMSALESMCKELAKSKAEVACIAVYETDVFVVGTERGRAFVNTRKDFQKDFVKYCVEEEEKAAEMHKMKSTTQANRMSVDAVEIETLRKTVEDYFCFCYGKALGKSTVVPVPYEKMLRDQSAVVVQGLPEGVAFKHPENYDLATLKWILENKAGISFIIKRPFLEPKKHVGGRVMVTDADRSILSPGGSCGPIKVKTEPTEDSGISLEMAAVTVKEESEDPDYYQYNIQAGPSETDDVDEKQPLSKPLQGSHHSSEGNEGTEMEVPAEDDDYSPPSKRPKANELPQPPVPEPANAGKRKVREFNFEKWNARITDLRKQVEELFERKYAQAIKAKGPVTIPYPLFQSHVEDLYVEGLPEGIPFRRPSTYGIPRLERILLAKERIRFVIKKHELLNSTREDLQLDKPASGVKEEWYARITKLRKMVDQLFCKKFAEALGSTEAKAVPYQKFEAHPNDLYVEGLPENIPFRSPSWYGIPRLEKIIQVGNRIKFVIKRPELLTHSTTEVTQPRTNTPVKEDWNVRITKLRKQVEEIFNLKFAQALGLTEAVKVPYPVFESNPEFLYVEGLPEGIPFRSPTWFGIPRLERIVRGSNKIKFVVKKPELVISYLPPGMASKINTKALQSPKRPRSPGSNSKVPEIEVTVEGPNNNNPQTSAVRTPTQTNGSNVPFKPRGREFSFEAWNAKITDLKQKVENLFNEKCGEALGLKQAVKVPFALFESFPEDFYVEGLPEGVPFRRPSTFGIPRLEKILRNKAKIKFIIKKPEMFETAIKESTSSKSPPRKINSSPNVNTTASGVEDLNIIQVTIPDDDNERLSKVEKARQLREQVNDLFSRKFGEAIGMGFPVKVPYRKITINPGCVVVDGMPPGVSFKAPSYLEISSMRRILDSAEFIKFTVIR

SEQ ID NO: 4724 - DNA, 5083 bp, Homo sapiens
aaaaaaaaaaaaaaaaaaaaaaaaaaaagaaaaaagaaaaaaaaaaggaggaggaggaggagggtgagagagaagctgggagagcagagaaaaggggccaccggtcgcccccccgcttccccgcacgcgctctccagccgcggccgcccgcctgccgcggtcaccccggcctctgcctctgtcccccagtgatcggatcaaggcgctgagcgaggccctgcctgcggggcggccatgcggcggtgacaggagcgcgaccgacacgcacgggcccctcgccccctctcgcctcccgtccgctcgccagctcccctcagccgaggctgctccgcggcggccgcagcccgcgcgcggcccacactcgcctccccgttgaagatgaggagtcctcggagagcaggatggtggtgacattcctcatgtcagctctcgagtccatgtgtaaagaactggccaagtccaaagccgaagtggcctgcattgcagtgtatgaaacagacgtgtttgtcgtcggaactgaaagaggacgtgcttttgtcaataccagaaaggattttcaaaaagattttgtaaaatattgtgttgaagaagaagaaaaagctgcagagatgcataaaatgaaatctacaacccaggcaaatcggatgagtgtagatgctgtagaaattgaaacactcagaaaaacagttgaggactatttctgcttttgctatgggaaagctttaggcaaatccacagtggtacctgtaccatatgagaagatgctgcgagaccagtcggctgtggtagtgcaggggcttccggaaggtgttgcctttaaacaccccgagaactatgatcttgcaaccctgaaatggattttggagaacaaagcagggatttcattcatcattaagagaccttttttagagccaaagaagcatgtaggtggtcgtgtgatggtaacagatgctgacaggtcaatactatctccaggtggaagttgtggccccatcaaagtgaaaactgaacccacagaagattctggcatttccctggaaatggcagctgtgacagtaaaggaagaatcagaagatcctgattattatcaatataacattcaaggaagccaccattcttcagagggcaatgaaggcacagaaatggaagtaccagcagaagattctactcaacatgtcccttcagaaacaagtgaggaccctgaagttgaggtgactattgaagatgatgattattctccaccgtctaagagaccaaaggccaatgagctaccgcagccaccagtcccggaacccgccaatgctgggaagcggaaagtgagggagttcaacttcgagaaatggaatgctcgcatcactgatctacgtaaacaagttgaagaattgtttgaaaggaaatatgctcaagccataaaagccaaaggtccggtgacgatcccgtaccctcttttccagtctcatgttgaagatctttatgtagaaggacttcctgaaggaattccttttagaaggccatctacttacggaattcctcgcctggagaggatattacttgcaaaggaaaggattcgttttgtgattaagaaacatgagcttctgaattcaacacgtgaagatttacagcttgataagccagcttcaggagtaaaggaagaatggtatgccagaatcactaaattaagaaagatggtggatcagcttttctgcaaaaaatttgcggaagccttggggagcactgaagccaaggctgtaccgtaccaaaaatttgaggcacacccgaatgatctgtacgtggaaggactgccagaaaacattcctttccgaagtccctcatggtatggaatcccaaggctggaaaaaatcattcaagtgggcaatcgaattaaatttgttattaaaagaccagaacttctgactcacagtaccactgaagttactcagccaagaacgaatacaccagtcaaagaagattggaatgtcagaattaccaagctacggaagcaagtggaagagatttttaatttgaaatttgctcaagctcttggactcaccgaggcagtaaaagtaccatatcctgtgtttgaatcaaacccggagttcttgtatgtggaaggcttgccagaggggattcccttccgaagccctacctggtttggaattccacgacttgaaaggatcgtccgcgggagtaataaaatcaagttcgttgttaaaaaacctgaactagttatttcctacttgcctcctgggatggctagtaaaataaacactaaagctttgcagtcccccaaaagaccacgaagtcctgggagtaattcaaaggttcctgaaattgaggtcaccgtggaaggccctaataacaacaatcctcaaacctcagctgttcgaaccccgacccagactaacggttctaacgttcccttcaagccacgagggagagagttttcctttgaggcctggaatgccaaaatcacggacctaaaacagaaagttgaaaatctcttcaatgagaaatgtggggaagctcttggccttaaacaagctgtgaaggtgccgttcgcgttatttgagtctttcccggaagacttttatgtggaaggcttacctgagggtgtgccattccgaagaccatcgacttttggcattccgaggctggagaagatactcagaaacaaagccaaaattaagttcatcattaaaaagcccgaaatgtttgagacggcgattaaggagagcacctcctctaagagccctcccagaaaaataaattcatcacccaatgttaatactactgcatcaggtgttgaagaccttaacatcattcaggtgacaattccagatgatgataatgaaagactctcgaaagttgaaaaagctagacagctaagagaacaagtgaatgacctctttagtcggaaatttggtgaagctattggtatgggttttcctgtgaaagttccctacaggaaaatcacaattaaccctggctgtgtggtggttgatggcatgcccccgggggtgtccttcaaagcccccagctacctggaaatcagctccatgagaaggatcttagactctgccgagtttatcaaattcacggtcattagaccatttccaggacttgtgattaataaccagctggttgatcagagtgagtcagaaggccccgtgatacaagaatcagctgaaccaagccagttggaagttccagccacagaaggtaaaaggacctcttccctcctagggtaaatcagcttctgtgtcagggatgctgtgtggtgtccatctgaaccccctgcatacgcgtagctaatgtgatctccccactttcacataagatggtggccctgccttcagggaatgtgggagccaggtgggagccttcccggatatttaagctagaagattctacagggagattctccttggatcaatatatgtctctcagtcaaagatgtaaaagcacttttgccttaaaaagaatgttctgtttctaaatagagtcaacgttgtcctcctcattggaattcactatgagtcagaatcattagactgacttttttttttccatagtaatagtattttgcagagtctcacagagctgcagatcttttgttcatcttgcagagttaacaagtctgatcctgttagtccagatttcttaaatttggccaagttataataggagcagtagcttgagacccgaagtcaggaaactttgacaatggatttttttttttaatccagagacttgtactggaatttgccttaccctgtcagctcatggacttaaggtttcatcccgctttatgagtgcttctgaatccaagtcattgttacctgaatttgcaaattaagttgtgatattcgtgactgttaaattcctgtaattagattaacctctttgcttgcttgtttgttttctctcctattttagcttaaagtatcagtggttgagaagagcttttcggacctgttactaccccaagctgtgtaatatacttgtataacagaaataccttctatacaaacctttttttctacttttagatagaaatgtctactttttcagcagttctgtgaattaaagagcagagtgactgtgggtctggaatggctggtgtacttgggaatgtactatcaggattttacagcaatgctgggaaatgacagggaaaatgacaggaatgaatctcaccagattttttatgtactcagcagagccttgagttacggtgtttattttccaatcaagtgaagatatctcctacttctcctactggaacatctcagcttctgcagtgaagaaaaattcctgtgatagttcagttctttagtttttctatttgaaaaaaaaaaatcatttaaatgatcctttgttcacggctctccttaatgactgagtgaacagttcctatctgtatatttgactaaaccttttcctaagctatctctcatggttcctatgtttttttatcataattaaaagcaaaaccatctggatcacctaacagtcagaggtcagtatctcagcgtgtgaattatagaggaaatacagagagaacctcttccacttttacttttcgtccaaataaaatgcatggtgtaccagaagttgaagatcgggttgaggattggggctagctcgatgacactaaggccccaacatcgcgggacctgctgtggcgcggattcttaggaacgctgttctagccggccccctctccaggggtcgccgtggccggcattatttcctagttcttcttgtaaccctgaggtgccagcgcggggagtgaggaggggtcagggggctaaggatgcaacctctgacgttctgcgccttcctaggagagtcttacatgtgttgagatttcacaagcaatgcgagttgtaaaataccagctctacaagaagctaggctctgtgacggcatagttttcagtagctttatcacaatattcacaatggagaattatatgacatggtagcagaaataggcccttttatgtgttgcttctattttacctcaaattgtagatatagggtaatcaataaaatccatccatgcctttcacacactaagt

SEQ ID NO: 4725 - protein, 948 aa, Homo sapiens
MVVTFLMSALESMCKELAKSKAEVACIAVYETDVFVVGTERGRAFVNTRKDFQKDFVKYCVEEEEKAAEMHKMKSTTQANRMSVDAVEIETLRKTVEDYFCFCYGKALGKSTVVPVPYEKMLRDQSAVVVQGLPEGVAFKHPENYDLATLKWILENKAGISFIIKRPFLEPKKHVGGRVMVTDADRSILSPGGSCGPIKVKTEPTEDSGISLEMAAVTVKEESEDPDYYQYNIQGSHHSSEGNEGTEMEVPAEDSTQHVPSETSEDPEVEVTIEDDDYSPPSKRPKANELPQPPVPEPANAGKRKVREFNFEKWNARITDLRKQVEELFERKYAQAIKAKGPVTIPYPLFQSHVEDLYVEGLPEGIPFRRPSTYGIPRLERILLAKERIRFVIKKHELLNSTREDLQLDKPASGVKEEWYARITKLRKMVDQLFCKKFAEALGSTEAKAVPYQKFEAHPNDLYVEGLPENIPFRSPSWYGIPRLEKIIQVGNRIKFVIKRPELLTHSTTEVTQPRTNTPVKEDWNVRITKLRKQVEEIFNLKFAQALGLTEAVKVPYPVFESNPEFLYVEGLPEGIPFRSPTWFGIPRLERIVRGSNKIKFVVKKPELVISYLPPGMASKINTKALQSPKRPRSPGSNSKVPEIEVTVEGPNNNNPQTSAVRTPTQTNGSNVPFKPRGREFSFEAWNAKITDLKQKVENLFNEKCGEALGLKQAVKVPFALFESFPEDFYVEGLPEGVPFRRPSTFGIPRLEKILRNKAKIKFIIKKPEMFETAIKESTSSKSPPRKINSSPNVNTTASGVEDLNIIQVTIPDDDNERLSKVEKARQLREQVNDLFSRKFGEAIGMGFPVKVPYRKITINPGCVVVDGMPPGVSFKAPSYLEISSMRRILDSAEFIKFTVIRPFPGLVINNQLVDQSESEGPVIQESAEPSQLEVPATEGKRTSSLLG

SEQ ID NO: 4726 - DNA, 4062 bp, Homo sapiens
aaaaaaaaaaaaaaaaaaaaaaaaaaaagaaaaaagaaaaaaaaaaggaggaggaggaggagggtgagagagaagctgggagagcagagaaaaggggccaccggtcgcccccccgcttccccgcacgcgctctccagccgcggccgcccgcctgccgcggtcaccccggcctctgcctctgtcccccagtgatcggatcaaggcgctgagcgaggccctgcctgcggggcggccatgcggcggtgacaggagcgcgaccgacacgcacgggcccctcgccccctctcgcctcccgtccgctcgccagctcccctcagccgaggctgctccgcggcggccgcagcccgcgcgcggcccacactcgcctccccgttgaagatgaggagtcctcggagagcaggatggtggtgacattcctcatgtcagctctcgagtccatgtgtaaagaactggccaagtccaaagccgaagtggcctgcattgcagtgtatgaaacagacgtgtttgtcgtcggaactgaaagaggacgtgcttttgtcaataccagaaaggattttcaaaaagattttgtaaaatattgtgttgaagaagaagaaaaagctgcagagatgcataaaatgaaatctacaacccaggcaaatcggatgagtgtagatgctgtagaaattgaaacactcagaaaaacagttgaggactatttctgcttttgctatgggaaagctttaggcaaatccacagtggtacctgtaccatatgagaagatgctgcgagaccagtcggctgtggtagtgcaggggcttccggaaggtgttgcctttaaacaccccgagaactatgatcttgcaaccctgaaatggattttggagaacaaagcagggatttcattcatcattaagagaccttttttagagccaaagaagcatgtaggtggtcgtgtgatggtaacagatgctgacaggtcaatactatctccaggtggaagttgtggccccatcaaagtgaaaactgaacccacagaagattctggcatttccctggaaatggcagctgtgacagtaaaggaagaatcagaagatcctgattattatcaatataacattcaagcaggcccttctgaaactgatgatgttgatgaaaaacagcccctatcgaagcctttgcaaggaagccaccattcttcagagggcaatgaaggcacagaaatggaagtaccagcagaagattctactcaacatgtcccttcagaaacaagtgaggaccctgaagttgaggtgactattgaagatgatgattattctccaccgtctaagagaccaaaggccaatgagctaccgcagccaccagtcccggaacccgccaatgctgggaagcggaaagtgagggagttcaacttcgagaaatggaatgctcgcatcactgatctacgtaaacaagttgaagaattgtttgaaaggaaatatgctcaagccataaaagccaaaggtccggtgacgatcccgtaccctcttttccagtctcatgttgaagatctttatgtagaaggacttcctgaaggaattccttttagaaggccatctacttacggaattcctcgcctggagaggatattacttgcaaaggaaaggattcgttttgtgattaagaaacatgagcttctgaattcaacacgtgaagatttacagcttgataagccagcttcaggagtaaaggaagaatggtatgccagaatcactaaattaagaaagatggtggatcagcttttctgcaaaaaatttgcggaagccttggggagcactgaagccaaggctgtaccgtaccaaaaatttgaggcacacccgaatgatctgtacgtggaaggactgccagaaaacattcctttccgaagtccctcatggtatggaatcccaaggctggaaaaaatcattcaagtgggcaatcgaattaaatttgttattaaaagaccagaacttctgactcacagtaccactgaagttactcagccaagaacgaatacaccagtcaaagaagattggaatgtcagaattaccaagctacggaagcaagtggaagagatttttaatttgaaatttgcttagatttgttgacagcggtttcctggagtgctgtcttgagaacgattctgaggaggctcagcaagaaagagtgtttcagttgattgggtgtgtctgtcatggagaaggaactcaagctcttggactcaccgaggcagtaaaagtaccatatcctgtgtttgaatcaaacccggagttcttgtatgtggaaggcttgccagaggggattcccttccgaagccctacctggtttggaattccacgacttgaaaggatcgtccgcgggagtaataaaatcaagttcgttgttaaaaaacctgaactagttatttcctacttgcctcctgggatggctagtaaaataaacactaaagctttgcagtcccccaaaagaccacgaagtcctgggagtaattcaaaggttcctgaaattgaggtcaccgtggaaggccctaataacaacaatcctcaaacctcagctgttcgaaccccgacccagactaacggttctaacgttcccttcaagccacgagggagagagttttcctttgaggcctggaatgccaaaatcacggacctaaaacagaaagttgaaaatctcttcaatgagaaatgtggggaagctcttggccttaaacaagctgtgaaggtgccgttcgcgttatttgagtctttcccggaagacttttatgtggaaggcttacctgagggtgtgccattccgaagaccatcgacttttggcattccgaggctggagaagatactcagaaacaaagccaaaattaagttcatcattaaaaagcccgaaatgtttgagacggcgattaaggagagcacctcctctaagagccctcccagaaaaataaattcatcacccaatgttaatactactgcatcaggtgttgaagaccttaacatcattcaggtgacaattccagatgatgataatgaaagactctcgaaagttgaaaaagctagacagctaagagaacaagtgaatgacctctttagtcggaaatttggtgaagctattggtatgggttttcctgtgaaagttccctacaggaaaatcacaattaaccctggctgtgtggtggttgatggcatgcccccgggggtgtccttcaaagcccccagctacctggaaatcagctccatgagaaggatcttagactctgccgagtttatcaaattcacggtcattagaccatttccaggacttgtgattaataaccagctggttgatcagagtgagtcagaaggccccgtgatacaagaatcagctgaaccaagccagttggaagttccagccacagaagaaataaaagagactgatggaagctctcagatcaagcaagaaccagaccccacgtggtagacctcttccctcctaggcaaaaccatctggatcacctaacagtcagaggtcagtatctcagcgtgtgaattatagaggaaatacagagagaacctcttccacttttacttttcgtccaaataaaatgcatggtgtaccagaagttgaagatcgggttgaggattggggctagctcgatgacactaaggccccaacatcgcgggacctgctgtggcgcggattcttaggaacgctgttctagccggccccctctccaggggtcgccgtggccggcattatttcctagttcttcttgtaaccctgaggtgccagcgcggggagtgaggaggggtcagggggctaaggatgcaacctctgacgttctgcgccttcctaggagagtcttacatgtgttgagatttcacaagcaatgcgagttgtaaaataccagctctacaagaagctaggctctgtgacggcatagttttcagtagctttatcacaatattcacaatggagaattatatgacatggtagcagaaataggcccttttatgtgttgcttctattttacctcaaattgtagatatagggtaatcaataaaatccatccatgcctttcacacactaagt

SEQ ID NO: 4727 - protein, 564 aa, Homo sapiens; identical to SEQ ID NO: 4031

SEQ ID NO: 4728 - DNA, 4355 bp, Homo sapiens
aaaaaaaaaaaaaaaaaaaaaaaaaaaagaaaaaagaaaaaaaaaaggaggaggaggaggagggtgagagagaagctgggagagcagagaaaaggggccaccggtcgcccccccgcttccccgcacgcgctctccagccgcggccgcccgcctgccgcggtcaccccggcctctgcctctgtcccccagtgatcggatcaaggcgctgagcgaggccctgcctgcggggcggccatgcggcggtgacaggagcgcgaccgacacgcacgggcccctcgccccctctcgcctcccgtccgctcgccagctcccctcagccgaggctgctccgcggcggccgcagcccgcgcgcggcccacactcgcctcccctcggcacccccggccccggagctgcctggaggcggccgcactcggtgtaaagaactggccaagtccaaagccgaagtggcctgcattgcagtgtatgaaacagacgtgtttgtcgtcggaactgaaagaggacgtgcttttgtcaataccagaaaggattttcaaaaagattttgtaaaatattgtgttgaagaagaagaaaaagctgcagagatgcataaaatgaaatctacaacccaggcaaatcggatgagtgtagatgctgtagaaattgaaacactcagaaaaacagttgaggactatttctgcttttgctatgggaaagctttaggcaaatccacagtggtacctgtaccatatgagaagatgctgcgagaccagtcggctgtggtagtgcaggggcttccggaaggtgttgcctttaaacaccccgagaactatgatcttgcaaccctgaaatggattttggagaacaaagcagggatttcattcatcattaagagaccttttttagagccaaagaagcatgtaggtggtcgtgtgatggtaacagatgctgacaggtcaatactatctccaggtggaagttgtggccccatcaaagtgaaaactgaacccacagaagattctggcatttccctggaaatggcagctgtgacagtaaaggaagaatcagaagatcctgattattatcaatataacattcaaggaagccaccattcttcagagggcaatgaaggcacagaaatggaagtaccagcagaagatgatgattattctccaccgtctaagagaccaaaggccaatgagctaccgcagccaccagtcccggaacccgccaatgctgggaagcggaaagtgagggagttcaacttcgagaaatggaatgctcgcatcactgatctacgtaaacaagttgaagaattgtttgaaaggaaatatgctcaagccataaaagccaaaggtccggtgacgatcccgtaccctcttttccagtctcatgttgaagatctttatgtagaaggacttcctgaaggaattccttttagaaggccatctacttacggaattcctcgcctggagaggatattacttgcaaaggaaaggattcgttttgtgattaagaaacatgagcttctgaattcaacacgtgaagatttacagcttgataagccagcttcaggagtaaaggaagaatggtatgccagaatcactaaattaagaaagatggtggatcagcttttctgcaaaaaatttgcggaagccttggggagcactgaagccaaggctgtaccgtaccaaaaatttgaggcacacccgaatgatctgtacgtggaaggactgccagaaaacattcctttccgaagtccctcatggtatggaatcccaaggctggaaaaaatcattcaagtgggcaatcgaattaaatttgttattaaaagaccagaacttctgactcacagtaccactgaagttactcagccaagaacgaatacaccagtcaaagaagattggaatgtcagaattaccaagctacggaagcaagtggaagagatttttaatttgaaatttgctcaagctcttggactcaccgaggcagtaaaagtaccatatcctgtgtttgaatcaaacccggagttcttgtatgtggaaggcttgccagaggggattcccttccgaagccctacctggtttggaattccacgacttgaaaggatcgtccgcgggagtaataaaatcaagttcgttgttaaaaaacctgaactagttatttcctacttgcctcctgggatggctagtaaaataaacactaaagctttgcagtcccccaaaagaccacgaagtcctgggagtaattcaaaggttcctgaaattgaggtcaccgtggaaggccctaataacaacaatcctcaaacctcagctgttcgaaccccgacccagactaacggttctaacgttcccttcaagccacgagggagagagttttcctttgaggcctggaatgccaaaatcacggacctaaaacagaaagttgaaaatctcttcaatgagaaatgtggggaagctcttggccttaaacaagctgtgaaggtgccgttcgcgttatttgagtctttcccggaagacttttatgtggaaggcttacctgagggtgtgccattccgaagaccatcgacttttggcattccgaggctggagaagatactcagaaacaaagccaaaattaagttcatcattaaaaagcccgaaatgtttgagacggcgattaaggagagcacctcctctaagagccctcccagaaaaataaattcatcacccaatgttaatactactgcatcaggtgttgaagaccttaacatcattcaggtgacaattccagatgatgataatgaaagactctcgaaagttgaaaaagctagacagctaagagaacaagtgaatgacctctttagtcggaaatttggtgaagctattggtatgggttttcctgtgaaagttccctacaggaaaatcacaattaaccctggctgtgtggtggttgatggcatgcccccgggggtgtccttcaaagcccccagctacctggaaatcagctccatgagaaggatcttagactctgccgagtttatcaaattcacggtcattagaccatttccaggacttgtgattaataaccagctggttgatcagagtgagtcagaaggccccgtgatacaagaatcagctgaaccaagccagttggaagttccagccacagaagaaataaaagagactgatggaagctctcagatcaagcaagaaccagaccccacgtggtagacctcttccctcctaggcttaaagtatcagtggttgagaagagcttttcggacctgttactaccccaagctgtgtaatatacttgtataacagaaataccttctatacaaacctttttttctacttttagatagaaatgtctactttttcagcagttctgtgaattaaagagcagagtgactgtgggtctggaatggctggtgtacttgggaatgtactatcaggattttacagcaatgctgggaaatgacagggaaaatgacaggaatgaatctcaccagattttttatgtactcagcagagccttgagttacggtgtttattttccaatcaagtgaagatatctcctacttctcctactggaacatctcagcttctgcagtgaagaaaaattcctgtgatagttcagttctttagtttttctatttgaaaaaaaaaaatcatttaaatgatcctttgttcacggctctccttaatgactgagtgaacagttcctatctgtatatttgactaaaccttttcctaagctatctctcatggttcctatgtttttttatcataattaaaagcaaaaccatctggatcacctaacagtcagaggtcagtatctcagcgtgtgaattatagaggaaatacagagagaacctcttccacttttacttttcgtccaaataaaatgcatggtgtaccagaagttgaagatcgggttgaggattggggctagctcgatgacactaaggccccaacatcgcgggacctgctgtggcgcggattcttaggaacgctgttctagccggccccctctccaggggtcgccgtggccggcattatttcctagttcttcttgtaaccctgaggtgccagcgcggggagtgaggaggggtcagggggctaaggatgcaacctctgacgttctgcgccttcctaggagagtcttacatgtgttgagatttcacaagcaatgcgagttgtaaaataccagctctacaagaagctaggctctgtgacggcatagttttcagtagctttatcacaatattcacaatggagaattatatgacatggtagcagaaataggcccttttatgtgttgcttctattttacctcaaattgtagatatagggtaatcaataaaatccatccatgcctttcacacactaagt

SEQ ID NO: 4729 - protein, 868 aa, Homo sapiens
MHKMKSTTQANRMSVDAVEIETLRKTVEDYFCFCYGKALGKSTVVPVPYEKMLRDQSAVVVQGLPEGVAFKHPENYDLATLKWILENKAGISFIIKRPFLEPKKHVGGRVMVTDADRSILSPGGSCGPIKVKTEPTEDSGISLEMAAVTVKEESEDPDYYQYNIQGSHHSSEGNEGTEMEVPAEDDDYSPPSKRPKANELPQPPVPEPANAGKRKVREFNFEKWNARITDLRKQVEELFERKYAQAIKAKGPVTIPYPLFQSHVEDLYVEGLPEGIPFRRPSTYGIPRLERILLAKERIRFVIKKHELLNSTREDLQLDKPASGVKEEWYARITKLRKMVDQLFCKKFAEALGSTEAKAVPYQKFEAHPNDLYVEGLPENIPFRSPSWYGIPRLEKIIQVGNRIKFVIKRPELLTHSTTEVTQPRTNTPVKEDWNVRITKLRKQVEEIFNLKFAQALGLTEAVKVPYPVFESNPEFLYVEGLPEGIPFRSPTWFGIPRLERIVRGSNKIKFVVKKPELVISYLPPGMASKINTKALQSPKRPRSPGSNSKVPEIEVTVEGPNNNNPQTSAVRTPTQTNGSNVPFKPRGREFSFEAWNAKITDLKQKVENLFNEKCGEALGLKQAVKVPFALFESFPEDFYVEGLPEGVPFRRPSTFGIPRLEKILRNKAKIKFIIKKPEMFETAIKESTSSKSPPRKINSSPNVNTTASGVEDLNIIQVTIPDDDNERLSKVEKARQLREQVNDLFSRKFGEAIGMGFPVKVPYRKITINPGCVVVDGMPPGVSFKAPSYLEISSMRRILDSAEFIKFTVIRPFPGLVINNQLVDQSESEGPVIQESAEPSQLEVPATEEIKETDGSSQIKQEPDPTW

SEQ ID NO: 4730 - DNA, 4059 bp, Homo sapiens
aaaaaaaaaaaaaaaaaaaaaaaaaaaagaaaaaagaaaaaaaaaaggaggaggaggaggagggtgagagagaagctgggagagcagagaaaaggggccaccggtcgcccccccgcttccccgcacgcgctctccagccgcggccgcccgcctgccgcggtcaccccggcctctgcctctgtcccccagtgatcggatcaaggcgctgagcgaggccctgcctgcggggcggccatgcggcggtgacaggagcgcgaccgacacgcacgggcccctcgccccctctcgcctcccgtccgctcgccagctcccctcagccgaggctgctccgcggcggccgcagcccgcgcgcggcccacactcgcctcccctcggcacccccggccccggagctgcctggaggcggccgcactcggtgtaaagaactggccaagtccaaagccgaagtggcctgcattgcagtgtatgaaacagacgtgtttgtcgtcggaactgaaagaggacgtgcttttgtcaataccagaaaggattttcaaaaagattttgtaaaatattgtgttgaagaagaagaaaaagctgcagagatgcataaaatgaaatctacaacccaggcaaatcggatgagtgtagatgctgtagaaattgaaacactcagaaaaacagttgaggactatttctgcttttgctatgggaaagctttaggcaaatccacagtggtacctgtaccatatgagaagatgctgcgagaccagtcggctgtggtagtgcaggggcttccggaaggtgttgcctttaaacaccccgagaactatgatcttgcaaccctgaaatggattttggagaacaaagcagggatttcattcatcattaagagaccttttttagagccaaagaagcatgtaggtggtcgtgtgatggtaacagatgctgacaggtcaatactatctccaggtggaagttgtggccccatcaaagtgaaaactgaacccacagaagattctggcatttccctggaaatggcagctgtgacagtaaaggaagaatcagaagatcctgattattatcaatataacattcaagcaggcccttctgaaactgatgatgttgatgaaaaacagcccctatcgaagcctttgcaaggaagccaccattcttcagagggcaatgaaggcacagaaatggaagtaccagcagaagatgatgattattctccaccgtctaagagaccaaaggccaatgagctaccgcagccaccagtcccggaacccgccaatgctgggaagcggaaagtgagggagttcaacttcgagaaatggaatgctcgcatcactgatctacgtaaacaagttgaagaattgtttgaaaggaaatatgctcaagccataaaagccaaaggtccggtgacgatcccgtaccctcttttccagtctcatgttgaagatctttatgtagaaggacttcctgaaggaattccttttagaaggccatctacttacggaattcctcgcctggagaggatattacttgcaaaggaaaggattcgttttgtgattaagaaacatgagcttctgaattcaacacgtgaagatttacagcttgataagccagcttcaggagtaaaggaagaatggtatgccagaatcactaaattaagaaagatggtggatcagcttttctgcaaaaaatttgcggaagccttggggagcactgaagccaaggctgtaccgtaccaaaaatttgaggcacacccgaatgatctgtacgtggaaggactgccagaaaacattcctttccgaagtccctcatggtatggaatcccaaggctggaaaaaatcattcaagtgggcaatcgaattaaatttgttattaaaagaccagaacttctgactcacagtaccactgaagttactcagccaagaacgaatacaccagctcaagctcttggactcaccgaggcagtaaaagtaccatatcctgtgtttgaatcaaacccggagttcttgtatgtggaaggcttgccagaggggattcccttccgaagccctacctggtttggaattccacgacttgaaaggatcgtccgcgggagtaataaaatcaagttcgttgttaaaaaacctgaactagttatttcctacttgcctcctgggatggctagtaaaataaacactaaagctttgcagtcccccaaaagaccacgaagtcctgggagtaattcaaaggttcctgaaattgaggtcaccgtggaaggccctaataacaacaatcctcaaacctcagctgttcgaaccccgacccagactaacggttctaacgttcccttcaagccacgagggagagagttttcctttgaggcctggaatgccaaaatcacggacctaaaacagaaagttgaaaatctcttcaatgagaaatgtggggaagctcttggccttaaacaagctgtgaaggtgccgttcgcgttatttgagtctttcccggaagacttttatgtggaaggcttacctgagggtgtgccattccgaagaccatcgacttttggcattccgaggctggagaagatactcagaaacaaagccaaaattaagttcatcattaaaaagcccgaaatgtttgagacggcgattaaggagagcacctcctctaagagccctcccagaaaaataaattcatcacccaatgttaatactactgcatcaggtgttgaagaccttaacatcattcaggtgacaattccagatgatgataatgaaagactctcgaaagttgaaaaagctagacagctaagagaacaagtgaatgacctctttagtcggaaatttggtgaagctattggtatgggttttcctgtgaaagttccctacaggaaaatcacaattaaccctggctgtgtggtggttgatggcatgcccccgggggtgtccttcaaagcccccagctacctggaaatcagctccatgagaaggatcttagactctgccgagtttatcaaattcacggtcattagaccatttccaggacttgtgattaataaccagctggttgatcagagtgagtcagaaggccccgtgatacaagaatcagctgaaccaagccagttggaagttccagccacagaagaaataaaagagactgatggaagctctcagatcaagcaagaaccagaccccacgtggtagacctcttccctcctaggagccttgagttacggtgtttattttccaatcaagtgaagatatctcctacttctcctactggaacatctcagcttctgcagtgaagaaaaattcctgtgatagttcagttctttagtttttctatttgaaaaaaaaaaatcatttaaatgatcctttgttcacggctctccttaatgactgagtgaacagttcctatctgtatatttgactaaaccttttcctaagctatctctcatggttcctatgtttttttatcataattaaaagcaaaaccatctggatcacctaacagtcagaggtcagtatctcagcgtgtgaattatagaggaaatacagagagaacctcttccacttttacttttcgtccaaataaaatgcatggtgtaccagaagttgaagatcgggttgaggattggggctagctcgatgacactaaggccccaacatcgcgggacctgctgtggcgcggattcttaggaacgctgttctagccggccccctctccaggggtcgccgtggccggcattatttcctagttcttcttgtaaccctgaggtgccagcgcggggagtgaggaggggtcagggggctaaggatgcaacctctgacgttctgcgccttcctaggagagtcttacatgtgttgagatttcacaagcaatgcgagttgtaaaataccagctctacaagaagctaggctctgtgacggcatagttttcagtagctttatcacaatattcacaatggagaattatatgacatggtagcagaaataggcccttttatgtgttgcttctattttacctcaaattgtagatatagggtaatcaataaaatccatccatgcctttcacacactaagt

SEQ ID NO: 4731 - protein, 864 aa, Homo sapiens; identical to SEQ ID NO: 4019

SEQ ID NO: 4732 - DNA, 3803 bp, Homo sapiens
aaaaaaaaaaaaaaaaaaaaaaaaaaaagaaaaaagaaaaaaaaaaggaggaggaggaggagggtgagagagaagctgggagagcagagaaaaggggccaccggtcgcccccccgcttccccgcacgcgctctccagccgcggccgcccgcctgccgcggtcaccccggcctctgcctctgtcccccagtgatcggatcaaggcgctgagcgaggccctgcctgcggggcggccatgcggcggtgacaggagcgcgaccgacacgcacgggcccctcgccccctctcgcctcccgtccgctcgccagctcccctcagccgaggctgctccgcggcggccgcagcccgcgcgcggcccacactcgcctcccctcggcacccccggccccggagctgcctggaggcggccgcactcggtgtaaagaactggccaagtccaaagccgaagtggcctgcattgcagtgtatgaaacagacgtgtttgtcgtcggaactgaaagaggacgtgcttttgtcaataccagaaaggattttcaaaaagattttgtaaaatattgtgttgaagaagaagaaaaagctgcagagatgcataaaatgaaatctacaacccaggcaaatcggatgagtgtagatgctgtagaaattgaaacactcagaaaaacagttgaggactatttctgcttttgctatgggaaagctttaggcaaatccacagtggtacctgtaccatatgagaagatgctgcgagaccagtcggctgtggtagtgcaggggcttccggaaggtgttgcctttaaacaccccgagaactatgatcttgcaaccctgaaatggattttggagaacaaagcagggatttcattcatcattaagagaccttttttagagccaaagaagcatgtaggtggtcgtgtgatggtaacagatgctgacaggtcaatactatctccaggtggaagttgtggccccatcaaagtgaaaactgaacccacagaagattctggcatttccctggaaatggcagctgtgacagtaaaggaagaatcagaagatcctgattattatcaatataacattcaaggaagccaccattcttcagagggcaatgaaggcacagaaatggaagtaccagcagaagatgatgattattctccaccgtctaagagaccaaaggccaatgagctaccgcagccaccagtcccggaacccgccaatgctgggaagcggaaagtgagggagttcaacttcgagaaatggaatgctcgcatcactgatctacgtaaacaagttgaagaattgtttgaaaggaaatatgctcaagccataaaagccaaaggtccggtgacgatcccgtaccctcttttccagtctcatgttgaagatctttatgtagaaggacttcctgaaggaattccttttagaaggccatctacttacggaattcctcgcctggagaggatattacttgcaaaggaaaggattcgttttgtgattaagaaacatgagcttctgaattcaacacgtgaagatttacagcttgataagccagcttcaggagtaaaggaagaatggtatgccagaatcactaaattaagaaagatggtggatcagcttttctgcaaaaaatttgcggaagccttggggagcactgaagccaaggctgtaccgtaccaaaaatttgaggcacacccgaatgatctgtacgtggaaggactgccagaaaacattcctttccgaagtccctcatggtatggaatcccaaggctggaaaaaatcattcaagtgggcaatcgaattaaatttgttattaaaagaccagaacttctgactcacagtaccactgaagttactcagccaagaacgaatacaccagtcaaagaagattggaatgtcagaattaccaagctacggaagcaagtggaagagatttttaatttgaaatttgctcaagctcttggactcaccgaggcagtaaaagtaccatatcctgtgtttgaatcaaacccggagttcttgtatgtggaaggcttgccagaggggattcccttccgaagccctacctggtttggaattccacgacttgaaaggatcgtccgcgggagtaataaaatcaagttcgttgttaaaaaacctgaactagttatttcctacttgcctcctgggatggctagtaaaataaacactaaagctttgcagtcccccaaaagaccacgaagtcctgggagtaattcaaaggttcctgaaattgaggtcaccgtggaaggccctaataacaacaatcctcaaacctcagctgttcgaaccccgacccagactaacggttctaacgttcccttcaagccacgagggagagagttttcctttgaggcctggaatgccaaaatcacggacctaaaacagaaagttgaaaatctcttcaatgagaaatgtggggaagctcttggccttaaacaagctgtgaaggtgccgttcgcgttatttgagtctttcccggaagacttttatgtggaaggcttacctgagggtgtgccattccgaagaccatcgacttttggcattccgaggctggagaagatactcagaaacaaagccaaaattaagttcatcattaaaaagcccgaaatgtttgagacggcgattaaggagagcacctcctctaagagccctcccagaaaaataaattcatcacccaatgttaatactactgcatcaggtgttgaagaccttaacatcattcaggtgacaattccagatgatgataatgaaagactctcgaaagttgaaaaagctagacagctaagagaacaagtgaatgacctctttagtcggaaatttggtgaagctattggtatgggttttcctgtgaaagttccctacaggaaaatcacaattaaccctggctgtgtggtggttgatggcatgcccccgggggtgtccttcaaagcccccagctacctggaaatcagctccatgagaaggatcttagactctgccgagtttatcaaattcacggtcattagaccatttccaggacttgtgattaataaccagctggttgatcagagtgagtcagaaggccccgtgatacaagaatcagctgaaccaagccagttggaagttccagccacagaagaaataaaagagactgatggaagctctcagatcaagcaagaaccagaccccacgtggtagacctcttccctcctaggcaaaaccatctggatcacctaacagtcagaggtcagtatctcagcgtgtgaattatagaggaaatacagagagaacctcttccacttttacttttcgtccaaataaaatgcatggtgtaccagaagttgaagatcgggttgaggattggggctagctcgatgacactaaggccccaacatcgcgggacctgctgtggcgcggattcttaggaacgctgttctagccggccccctctccaggggtcgccgtggccggcattatttcctagttcttcttgtaaccctgaggtgccagcgcggggagtgaggaggggtcagggggctaaggatgcaacctctgacgttctgcgccttcctaggagagtcttacatgtgttgagatttcacaagcaatgcgagttgtaaaataccagctctacaagaagctaggctctgtgacggcatagttttcagtagctttatcacaatattcacaatggagaattatatgacatggtagcagaaataggcccttttatgtgttgcttctattttacctcaaattgtagatatagggtaatcaataaaatccatccatgcctttcacacactaagt

SEQ ID NO: 4733 - protein, 868 aa, Homo sapiens; identical to SEQ ID NO: 4729

SEQ ID NO: 4734 - DNA, 5151 bp, Homo sapiens
aaaaaaaaaaaaaaaaaaaaaaaaaaaagaaaaaagaaaaaaaaaaggaggaggaggaggagggtgagagagaagctgggagagcagagaaaaggggccaccggtcgcccccccgcttccccgcacgcgctctccagccgcggccgcccgcctgccgcggtcaccccggcctctgcctctgtcccccagtgatcggatcaaggcgctgagcgaggccctgcctgcggggcggccatgcggcggtgacaggagcgcgaccgacacgcacgggcccctcgccccctctcgcctcccgtccgctcgccagctcccctcagccgaggctgctccgcggcggccgcagcccgcgcgcggcccacactcgcctcccctcggcacccccggccccggagctgcctggaggcggccgcactcggggatcatggcccaagttgcaatgtccaccctccccgttgaagatgaggagtcctcggagagcaggatggtggtgacattcctcatgtcagctctcgagtccatgtgtaaagaactggccaagtccaaagccgaagtggcctgcattgcagtgtatgaaacagacgtgtttgtcgtcggaactgaaagaggacgtgcttttgtcaataccagaaaggattttcaaaaagattttgtaaaatattgtgttgaagaagaagaaaaagctgcagagatgcataaaatgaaatctacaacccaggcaaatcggatgagtgtagatgctgtagaaattgaaacactcagaaaaacagttgaggactatttctgcttttgctatgggaaagctttaggcaaatccacagtggtacctgtaccatatgagaagatgctgcgagaccagtcggctgtggtagtgcaggggcttccggaaggtgttgcctttaaacaccccgagaactatgatcttgcaaccctgaaatggattttggagaacaaagcagggatttcattcatcattaagagaccttttttagagccaaagaagcatgtaggtggtcgtgtgatggtaacagatgctgacaggtcaatactatctccaggtggaagttgtggccccatcaaagtgaaaactgaacccacagaagattctggcatttccctggaaatggcagctgtgacagtaaaggaagaatcagaagatcctgattattatcaatataacattcaaggaagccaccattcttcagagggcaatgaaggcacagaaatggaagtaccagcagaagatgatgattattctccaccgtctaagagaccaaaggccaatgagctaccgcagccaccagtcccggaacccgccaatgctgggaagcggaaagtgagggagttcaacttcgagaaatggaatgctcgcatcactgatctacgtaaacaagttgaagaattgtttgaaaggaaatatgctcaagccataaaagccaaaggtccggtgacgatcccgtaccctcttttccagtctcatgttgaagatctttatgtagaaggacttcctgaaggaattccttttagaaggccatctacttacggaattcctcgcctggagaggatattacttgcaaaggaaaggattcgttttgtgattaagaaacatgagcttctgaattcaacacgtgaagatttacagcttgataagccagcttcaggagtaaaggaagaatggtatgccagaatcactaaattaagaaagatggtggatcagcttttctgcaaaaaatttgcggaagccttggggagcactgaagccaaggctgtaccgtaccaaaaatttgaggcacacccgaatgatctgtacgtggaaggactgccagaaaacattcctttccgaagtccctcatggtatggaatcccaaggctggaaaaaatcattcaagtgggcaatcgaattaaatttgttattaaaagaccagaacttctgactcacagtaccactgaagttactcagccaagaacgaatacaccagtcaaagaagattggaatgtcagaattaccaagctacggaagcaagtggaagagatttttaatttgaaatttgctcaagctcttggactcaccgaggcagtaaaagtaccatatcctgtgtttgaatcaaacccggagttcttgtatgtggaaggcttgccagaggggattcccttccgaagccctacctggtttggaattccacgacttgaaaggatcgtccgcgggagtaataaaatcaagttcgttgttaaaaaacctgaactagttatttcctacttgcctcctgggatggctagtaaaataaacactaaagctttgcagtcccccaaaagaccacgaagtcctgggagtaattcaaaggttcctgaaattgaggtcaccgtggaaggccctaataacaacaatcctcaaacctcagctgttcgaaccccgacccagactaacggttctaacgttcccttcaagccacgagggagagagttttcctttgaggcctggaatgccaaaatcacggacctaaaacagaaagttgaaaatctcttcaatgagaaatgtggggaagctcttggccttaaacaagctgtgaaggtgccgttcgcgttatttgagtctttcccggaagacttttatgtggaaggcttacctgagggtgtgccattccgaagaccatcgacttttggcattccgaggctggagaagatactcagaaacaaagccaaaattaagttcatcattaaaaagcccgaaatgtttgagacggcgattaaggagagcacctcctctaagagccctcccagaaaaataaattcatcacccaatgttaatactactgcatcaggtgttgaagaccttaacatcattcaggtgacaattccagatgatgataatgaaagactctcgaaagttgaaaaagctagacagctaagagaacaagtgaatgacctctttagtcggaaatttggtgaagctattggtatgggttttcctgtgaaagttccctacaggaaaatcacaattaaccctggctgtgtggtggttgatggcatgcccccgggggtgtccttcaaagcccccagctacctggaaatcagctccatgagaaggatcttagactctgccgagtttatcaaattcacggtcattagaccatttccaggacttgtgattaataaccagctggttgatcagagtgagtcagaaggccccgtgatacaagaatcagctgaaccaagccagttggaagttccagccacagaagaaataaaagagactgatggaagctctcagatcaagcaagaaccagaccccacgtggtagacctcttccctcctagggtaaatcagcttctgtgtcagggatgctgtgtggtgtccatctgaaccccctgcatacgcgtagctaatgtgatctccccactttcacataagatggtggccctgccttcagggaatgtgggagccaggtgggagccttcccggatatttaagctagaagattctacagggagattctccttggatcaatatatgtctctcagtcaaagatgtaaaagcacttttgccttaaaaagaatgttctgtttctaaatagagtcaacgttgtcctcctcattggaattcactatgagtcagaatcattagactgacttttttttttccatagtaatagtattttgcagagtctcacagagctgcagatcttttgttcatcttgcagagttaacaagtctgatcctgttagtccagatttcttaaatttggccaagttataataggagcagtagcttgagacccgaagtcaggaaactttgacaatggatttttttttttaatccagagacttgtactggaatttgccttaccctgtcagctcatggacttaaggtttcatcccgctttatgagtgcttctgaatccaagtcattgttacctgaatttgcaaattaagttgtgatattcgtgactgttaaattcctgtaattagattaacctctttgcttgcttgtttgttttctctcctattttagcttaaagtatcagtggttgagaagagcttttcggacctgttactaccccaagctgtgtaatatacttgtataacagaaataccttctatacaaacctttttttctacttttagatagaaatgtctactttttcagcagttctgtgaattaaagagcagagtgactgtgggtctggaatggctggtgtacttgggaatgtactatcaggattttacagcaatgctgggaaatgacagggaaaatgacaggaatgaatctcaccagattttttatgtactcagcagagccttgagttacggtgtttattttccaatcaagtgaagatatctcctacttctcctactggaacatctcagcttctgcagtgaagaaaaattcctgtgatagttcagttctttagtttttctatttgaaaaaaaaaaatcatttaaatgatcctttgttcacggctctccttaatgactgagtgaacagttcctatctgtatatttgactaaaccttttcctaagctatctctcatggttcctatgtttttttatcataattaaaagcaaaaccatctggatcacctaacagtcagaggtcagtatctcagcgtgtgaattatagaggaaatacagagagaacctcttccacttttacttttcgtccaaataaaatgcatggtgtaccagaagttgaagatcgggttgaggattggggctagctcgatgacactaaggccccaacatcgcgggacctgctgtggcgcggattcttaggaacgctgttctagccggccccctctccaggggtcgccgtggccggcattatttcctagttcttcttgtaaccctgaggtgccagcgcggggagtgaggaggggtcagggggctaaggatgcaacctctgacgttctgcgccttcctaggagagtcttacatgtgttgagatttcacaagcaatgcgagttgtaaaataccagctctacaagaagctaggctctgtgacggcatagttttcagtagctttatcacaatattcacaatggagaattatatgacatggtagcagaaataggcccttttatgtgttgcttctattttacctcaaattgtagatatagggtaatcaataaaatccatccatgcctttcacacactaagt

SEQ ID NO: 4735 - protein, 957 aa, Homo sapiens; identical to SEQ ID NO: 4303

SEQ ID NO: 4736 - DNA, 4323 bp, Homo sapiens
aaaaaaaaaaaaaaaaaaaaaaaaaaaagaaaaaagaaaaaaaaaaggaggaggaggaggagggtgagagagaagctgggagagcagagaaaaggggccaccggtcgcccccccgcttccccgcacgcgctctccagccgcggccgcccgcctgccgcggtcaccccggcctctgcctctgtcccccagtgatcggatcaaggcgctgagcgaggccctgcctgcggggcggccatgcggcggtgacaggagcgcgaccgacacgcacgggcccctcgccccctctcgcctcccgtccgctcgccagctcccctcagccgaggctgctccgcggcggccgcagcccgcgcgcggcccacactcgcctccccgttgaagatgaggagtcctcggagagcaggatggtggtgacattcctcatgtcagctctcgagtccatgtgtaaagaactggccaagtccaaagccgaagtggcctgcattgcagtgtatgaaacagacgtgtttgtcgtcggaactgaaagaggacgtgcttttgtcaataccagaaaggattttcaaaaagattttgtaaaatattgtgttgaagaagaagaaaaagctgcagagatgcataaaatgaaatctacaacccaggcaaatcggatgagtgtagatgctgtagaaattgaaacactcagaaaaacagttgaggactatttctgcttttgctatgggaaagctttaggcaaatccacagtggtacctgtaccatatgagaagatgctgcgagaccagtcggctgtggtagtgcaggggcttccggaaggtgttgcctttaaacaccccgagaactatgatcttgcaaccctgaaatggattttggagaacaaagcagggatttcattcatcattaagagaccttttttagagccaaagaagcatgtaggtggtcgtgtgatggtaacagatgctgacaggtcaatactatctccaggtggaagttgtggccccatcaaagtgaaaactgaacccacagaagattctggcatttccctggaaatggcagctgtgacagtaaaggaagaatcagaagatcctgattattatcaatataacattcaagcaggcccttctgaaactgatgatgttgatgaaaaacagcccctatcgaagcctttgcaaggaagccaccattcttcagagggcaatgaaggcacagaaatggaagtaccagcagaagatgatgattattctccaccgtctaagagaccaaaggccaatgagctaccgcagccaccagtcccggaacccgccaatgctgggaagcggaaagtgagggagttcaacttcgagaaatggaatgctcgcatcactgatctacgtaaacaagttgaagaattgtttgaaaggaaatatgctcaagccataaaagccaaaggtccggtgacgatcccgtaccctcttttccagtctcatgttgaagatctttatgtagaaggacttcctgaaggaattccttttagaaggccatctacttacggaattcctcgcctggagaggatattacttgcaaaggaaaggattcgttttgtgattaagaaacatgagcttctgaattcaacacgtgaagatttacagcttgataagccagcttcaggagtaaaggaagaatggtatgccagaatcactaaattaagaaagatggtggatcagcttttctgcaaaaaatttgcggaagccttggggagcactgaagccaaggctgtaccgtaccaaaaatttgaggcacacccgaatgatctgtacgtggaaggactgccagaaaacattcctttccgaagtccctcatggtatggaatcccaaggctggaaaaaatcattcaagtgggcaatcgaattaaatttgttattaaaagaccagaacttctgactcacagtaccactgaagttactcagccaagaacgaatacaccagtcaaagaagattggaatgtcagaattaccaagctacggaagcaagtggaagagatttttaatttgaaatttgcttagatttgttgacagcggtttcctggagtgctgtcttgagaacgattctgaggaggctcagcaagaaagagtgtttcagttgattgggtgtgtctgtcatggagaaggaactcaagctcttggactcaccgaggcagtaaaagtaccatatcctgtgtttgaatcaaacccggagttcttgtatgtggaaggcttgccagaggggattcccttccgaagccctacctggtttggaattccacgacttgaaaggatcgtccgcgggagtaataaaatcaagttcgttgttaaaaaacctgaactagttatttcctacttgcctcctgggatggctagtaaaataaacactaaagctttgcagtcccccaaaagaccacgaagtcctgggagtaattcaaaggttcctgaaattgaggtcaccgtggaaggccctaataacaacaatcctcaaacctcagctgttcgaaccccgacccagactaacggttctaacgttcccttcaagccacgagggagagagttttcctttgaggcctggaatgccaaaatcacggacctaaaacagaaagttgaaaatctcttcaatgagaaatgtggggaagctcttggccttaaacaagctgtgaaggtgccgttcgcgttatttgagtctttcccggaagacttttatgtggaaggcttacctgagggtgtgccattccgaagaccatcgacttttggcattccgaggctggagaagatactcagaaacaaagccaaaattaagttcatcattaaaaagcccgaaatgtttgagacggcgattaaggagagcacctcctctaagagccctcccagaaaaataaattcatcacccaatgttaatactactgcatcaggtgttgaagaccttaacatcattcaggtgacaattccagatgatgataatgaaagactctcgaaagttgaaaaagctagacagctaagagaacaagtgaatgacctctttagtcggaaatttggtgaagctattggtatgggttttcctgtgaaagttccctacaggaaaatcacaattaaccctggctgtgtggtggttgatggcatgcccccgggggtgtccttcaaagcccccagctacctggaaatcagctccatgagaaggatcttagactctgccgagtttatcaaattcacggtcattagaccatttccaggacttgtgattaataaccagctggttgatcagagtgagtcagaaggccccgtgatacaagaatcagctgaaccaagccagttggaagttccagccacagaagaaataaaagagactgatggaagctctcagatcaagcaagaaccagaccccacgtggtagacctcttccctcctaggcttaaagtatcagtggttgagaagagcttttcggacctgttactaccccaagctgtagccttgagttacggtgtttattttccaatcaagtgaagatatctcctacttctcctactggaacatctcagcttctgcagtgaagaaaaattcctgtgatagttcagttctttagtttttctatttgaaaaaaaaaaatcatttaaatgatcctttgttcacggctctccttaatgactgagtgaacagttcctatctgtatatttgactaaaccttttcctaagctatctctcatggttcctatgtttttttatcataattaaaagcaaaaccatctggatcacctaacagtcagaggtcagtatctcagcgtgtgaattatagaggaaatacagagagaacctcttccacttttacttttcgtccaaataaaatgcatggtgtaccagaagttgaagatcgggttgaggattggggctagctcgatgacactaaggccccaacatcgcgggacctgctgtggcgcggattcttaggaacgctgttctagccggccccctctccaggggtcgccgtggccggcattatttcctagttcttcttgtaaccctgaggtgccagcgcggggagtgaggaggggtcagggggctaaggatgcaacctctgacgttctgcgccttcctaggagagtcttacatgtgttgagatttcacaagcaatgcgagttgtaaaataccagctctacaagaagctaggctctgtgacggcatagttttcagtagctttatcacaatattcacaatggagaattatatgacatggtagcagaaataggcccttttatgtgttgcttctattttacctcaaattgtagatatagggtaatcaataaaatccatccatgcctttcacacactaagt

SEQ ID NO: 4737 - protein, 543 aa, Homo sapiens; identical to SEQ ID NO: 4205

SEQ ID NO: 4738 - DNA, 4551 bp, Homo sapiens
aaaaaaaaaaaaaaaaaaaaaaaaaaaagaaaaaagaaaaaaaaaaggaggaggaggaggagggtgagagagaagctgggagagcagagaaaaggggccaccggtcgcccccccgcttccccgcacgcgctctccagccgcggccgcccgcctgccgcggtcaccccggcctctgcctctgtcccccagtgatcggatcaaggcgctgagcgaggccctgcctgcggggcggccatgcggcggtgacaggagcgcgaccgacacgcacgggcccctcgccccctctcgcctcccgtccgctcgccagctcccctcagccgaggctgctccgcggcggccgcagcccgcgcgcggcccacactcgcctccccgttgaagatgaggagtcctcggagagcaggatggtggtgacattcctcatgtcagctctcgagtccatgtgtaaagaactggccaagtccaaagccgaagtggcctgcattgcagtgtatgaaacagacgtgtttgtcgtcggaactgaaagaggacgtgcttttgtcaataccagaaaggattttcaaaaagattttgtaaaatattgtgttgaagaagaagaaaaagctgcagagatgcataaaatgaaatctacaacccaggcaaatcggatgagtgtagatgctgtagaaattgaaacactcagaaaaacagttgaggactatttctgcttttgctatgggaaagctttaggcaaatccacagtggtacctgtaccatatgagaagatgctgcgagaccagtcggctgtggtagtgcaggggcttccggaaggtgttgcctttaaacaccccgagaactatgatcttgcaaccctgaaatggattttggagaacaaagcagggatttcattcatcattaagagaccttttttagagccaaagaagcatgtaggtggtcgtgtgatggtaacagatgctgacaggtcaatactatctccaggtggaagttgtggccccatcaaagtgaaaactgaacccacagaagattctggcatttccctggaaatggcagctgtgacagtaaaggaagaatcagaagatcctgattattatcaatataacattcaagcaggcccttctgaaactgatgatgttgatgaaaaacagcccctatcgaagcctttgcaaggaagccaccattcttcagagggcaatgaaggcacagaaatggaagtaccagcagaagatgatgattattctccaccgtctaagagaccaaaggccaatgagctaccgcagccaccagtcccggaacccgccaatgctgggaagcggaaagtgagggagttcaacttcgagaaatggaatgctcgcatcactgatctacgtaaacaagttgaagaattgtttgaaaggaaatatgctcaagccataaaagccaaaggtccggtgacgatcccgtaccctcttttccagtctcatgttgaagatctttatgtagaaggacttcctgaaggaattccttttagaaggccatctacttacggaattcctcgcctggagaggatattacttgcaaaggaaaggattcgttttgtgattaagaaacatgagcttctgaattcaacacgtgaagatttacagcttgataagccagcttcaggagtaaaggaagaatggtatgccagaatcactaaattaagaaagatggtggatcagcttttctgcaaaaaatttgcggaagccttggggagcactgaagccaaggctgtaccgtaccaaaaatttgaggcacacccgaatgatctgtacgtggaaggactgccagaaaacattcctttccgaagtccctcatggtatggaatcccaaggctggaaaaaatcattcaagtgggcaatcgaattaaatttgttattaaaagaccagaacttctgactcacagtaccactgaagttactcagccaagaacgaatacaccagtcaaagaagattggaatgtcagaattaccaagctacggaagcaagtggaagagatttttaatttgaaatttgcttagatttgttgacagcggtttcctggagtgctgtcttgagaacgattctgaggaggctcagcaagaaagagtgtttcagttgattgggtgtgtctgtcatggagaaggaactcaagctcttggactcaccgaggcagtaaaagtaccatatcctgtgtttgaatcaaacccggagttcttgtatgtggaaggcttgccagaggggattcccttccgaagccctacctggtttggaattccacgacttgaaaggatcgtccgcgggagtaataaaatcaagttcgttgttaaaaaacctgaactagttatttcctacttgcctcctgggatggctagtaaaataaacactaaagctttgcagtcccccaaaagaccacgaagtcctgggagtaattcaaaggttcctgaaattgaggtcaccgtggaaggccctaataacaacaatcctcaaacctcagctgttcgaaccccgacccagactaacggttctaacgttcccttcaagccacgagggagagagttttcctttgaggcctggaatgccaaaatcacggacctaaaacagaaagttgaaaatctcttcaatgagaaatgtggggaagctcttggccttaaacaagctgtgaaggtgccgttcgcgttatttgagtctttcccggaagacttttatgtggaaggcttacctgagggtgtgccattccgaagaccatcgacttttggcattccgaggctggagaagatactcagaaacaaagccaaaattaagttcatcattaaaaagcccgaaatgtttgagacggcgattaaggagagcacctcctctaagagccctcccagaaaaataaattcatcacccaatgttaatactactgcatcaggtgttgaagaccttaacatcattcaggtgacaattccagatgatgataatgaaagactctcgaaagttgaaaaagctagacagctaagagaacaagtgaatgacctctttagtcggaaatttggtgaagctattggtatgggttttcctgtgaaagttccctacaggaaaatcacaattaaccctggctgtgtggtggttgatggcatgcccccgggggtgtccttcaaagcccccagctacctggaaatcagctccatgagaaggatcttagactctgccgagtttatcaaattcacggtcattagaccatttccaggacttgtgattaataaccagctggttgatcagagtgagtcagaaggccccgtgatacaagaatcagctgaaccaagccagttggaagttccagccacagaagaaataaaagagactgatggaagctctcagatcaagcaagaaccagaccccacgtggtagacctcttccctcctaggcttaaagtatcagtggttgagaagagcttttcggacctgttactaccccaagctgtgtaatatacttgtataacagaaataccttctatacaaacctttttttctacttttagatagaaatgtctactttttcagcagttctgtgaattaaagagcagagtgactgtgggtctggaatggctggtgtacttgggaatgtactatcaggattttacagcaatgctgggaaatgacagggaaaatgacaggaatgaatctcaccagattttttatgtactcagcagagccttgagttacggtgtttattttccaatcaagtgaagatatctcctacttctcctactggaacatctcagcttctgcagtgaagaaaaattcctgtgatagttcagttctttagtttttctatttgaaaaaaaaaaatcatttaaatgatcctttgttcacggctctccttaatgactgagtgaacagttcctatctgtatatttgactaaaccttttcctaagctatctctcatggttcctatgtttttttatcataattaaaagcaaaaccatctggatcacctaacagtcagaggtcagtatctcagcgtgtgaattatagaggaaatacagagagaacctcttccacttttacttttcgtccaaataaaatgcatggtgtaccagaagttgaagatcgggttgaggattggggctagctcgatgacactaaggccccaacatcgcgggacctgctgtggcgcggattcttaggaacgctgttctagccggccccctctccaggggtcgccgtggccggcattatttcctagttcttcttgtaaccctgaggtgccagcgcggggagtgaggaggggtcagggggctaaggatgcaacctctgacgttctgcgccttcctaggagagtcttacatgtgttgagatttcacaagcaatgcgagttgtaaaataccagctctacaagaagctaggctctgtgacggcatagttttcagtagctttatcacaatattcacaatggagaattatatgacatggtagcagaaataggcccttttatgtgttgcttctattttacctcaaattgtagatatagggtaatcaataaaatccatccatgcctttcacacactaagt

SEQ ID NO: 4739 - protein, 543 aa, Homo sapiens; identical to SEQ ID NO: 4205

SEQ ID NO: 4740 - DNA, 5144 bp, Homo sapiens
aaaaaaaaaaaaaaaaaaaaaaaaaaaagaaaaaagaaaaaaaaaaggaggaggaggaggagggtgagagagaagctgggagagcagagaaaaggggccaccggtcgcccccccgcttccccgcacgcgctctccagccgcggccgcccgcctgccgcggtcaccccggcctctgcctctgtcccccagtgatcggatcaaggcgctgagcgaggccctgcctgcggggcggccatgcggcggtgacaggagcgcgaccgacacgcacgggcccctcgccccctctcgcctcccgtccgctcgccagctcccctcagccgaggctgctccgcggcggccgcagcccgcgcgcggcccacactcgcctcccctcggcacccccggccccggagctgcctggaggcggccgcactcggtgtaaagaactggccaagtccaaagccgaagtggcctgcattgcagtgtatgaaacagacgtgtttgtcgtcggaactgaaagaggacgtgcttttgtcaataccagaaaggattttcaaaaagattttgtaaaatattgtgttgaagaagaagaaaaagctgcagagatgcataaaatgaaatctacaacccaggcaaatcggatgagtgtagatgctgtagaaattgaaacactcagaaaaacagttgaggactatttctgcttttgctatgggaaagctttaggcaaatccacagtggtacctgtaccatatgagaagatgctgcgagaccagtcggctgtggtagtgcaggggcttccggaaggtgttgcctttaaacaccccgagaactatgatcttgcaaccctgaaatggattttggagaacaaagcagggatttcattcatcattaagagaccttttttagagccaaagaagcatgtaggtggtcgtgtgatggtaacagatgctgacaggtcaatactatctccaggtggaagttgtggccccatcaaagtgaaaactgaacccacagaagattctggaagccaccattcttcagagggcaatgaaggcacagaaatggaagtaccagcagaagattctactcaacatgtcccttcagaaacaagtgaggaccctgaagttgaggtgactattgaagatgatgattattctccaccgtctaagagaccaaaggccaatgagctaccgcagccaccagtcccggaacccgccaatgctgggaagcggaaagtgagggagttcaacttcgagaaatggaatgctcgcatcactgatctacgtaaacaagttgaagaattgtttgaaaggaaatatgctcaagccataaaagccaaaggtccggtgacgatcccgtaccctcttttccagtctcatgttgaagatctttatgtagaaggacttcctgaaggaattccttttagaaggccatctacttacggaattcctcgcctggagaggatattacttgcaaaggaaaggattcgttttgtgattaagaaacatgagcttctgaattcaacacgtgaagatttacagcttgataagccagcttcaggagtaaaggaagaatggtatgccagaatcactaaattaagaaagatggtggatcagcttttctgcaaaaaatttgcggaagccttggggagcactgaagccaaggctgtaccgtaccaaaaatttgaggcacacccgaatgatctgtacgtggaaggactgccagaaaacattcctttccgaagtccctcatggtatggaatcccaaggctggaaaaaatcattcaagtgggcaatcgaattaaatttgttattaaaagaccagaacttctgactcacagtaccactgaagttactcagccaagaacgaatacaccagtcaaagaagattggaatgtcagaattaccaagctacggaagcaagtggaagagatttttaatttgaaatttgcttagatttgttgacagcggtttcctggagtgctgtcttgagaacgattctgaggaggctcagcaagaaagagtgtttcagttgattgggtgtgtctgtcatggagaaggaactcaagctcttggactcaccgaggcagtaaaagtaccatatcctgtgtttgaatcaaacccggagttcttgtatgtggaaggcttgccagaggggattcccttccgaagccctacctggtttggaattccacgacttgaaaggatcgtccgcgggagtaataaaatcaagttcgttgttaaaaaacctgaactagttatttcctacttgcctcctgggatggctagtaaaataaacactaaagctttgcagtcccccaaaagaccacgaagtcctgggagtaattcaaaggttcctgaaattgaggtcaccgtggaaggccctaataacaacaatcctcaaacctcagctgttcgaaccccgacccagactaacggttctaacgttcccttcaagccacgagggagagagttttcctttgaggcctggaatgccaaaatcacggacctaaaacagaaagttgaaaatctcttcaatgagaaatgtggggaagctcttggccttaaacaagctgtgaaggtgccgttcgcgttatttgagtctttcccggaagacttttatgtggaaggcttacctgagggtgtgccattccgaagaccatcgacttttggcattccgaggctggagaagatactcagaaacaaagccaaaattaagttcatcattaaaaagcccgaaatgtttgagacggcgattaaggagagcacctcctctaagagccctcccagaaaaataaattcatcacccaatgttaatactactgcatcaggtgttgaagaccttaacatcattcaggtgacaattccagatgatgataatgaaagactctcgaaagttgaaaaagctagacagctaagagaacaagtgaatgacctctttagtcggaaatttggtgaagctattggtatgggttttcctgtgaaagttccctacaggaaaatcacaattaaccctggctgtgtggtggttgatggcatgcccccgggggtgtccttcaaagcccccagctacctggaaatcagctccatgagaaggatcttagactctgccgagtttatcaaattcacggtcattagaccatttccaggacttgtgattaataaccagctggttgatcagagtgagtcagaaggccccgtgatacaagaatcagctgaaccaagccagttggaagttccagccacagaagaaataaaagagactgatggaagctctcagatcaagcaagaaccagaccccacgtggtagacctcttccctcctagggtaaatcagcttctgtgtcagggatgctgtgtggtgtccatctgaaccccctgcatacgcgtagctaatgtgatctccccactttcacataagatggtggccctgccttcagggaatgtgggagccaggtgggagccttcccggatatttaagctagaagattctacagggagattctccttggatcaatatatgtctctcagtcaaagatgtaaaagcacttttgccttaaaaagaatgttctgtttctaaatagagtcaacgttgtcctcctcattggaattcactatgagtcagaatcattagactgacttttttttttccatagtaatagtattttgcagagtctcacagagctgcagatcttttgttcatcttgcagagttaacaagtctgatcctgttagtccagatttcttaaatttggccaagttataataggagcagtagcttgagacccgaagtcaggaaactttgacaatggatttttttttttaatccagagacttgtactggaatttgccttaccctgtcagctcatggacttaaggtttcatcccgctttatgagtgcttctgaatccaagtcattgttacctgaatttgcaaattaagttgtgatattcgtgactgttaaattcctgtaattagattaacctctttgcttgcttgtttgttttctctcctattttagcttaaagtatcagtggttgagaagagcttttcggacctgttactaccccaagctgtgtaatatacttgtataacagaaataccttctatacaaacctttttttctacttttagatagaaatgtctactttttcagcagttctgtgaattaaagagcagagtgactgtgggtctggaatggctggtgtacttgggaatgtactatcaggattttacagcaatgctgggaaatgacagggaaaatgacaggaatgaatctcaccagattttttatgtactcagcagagccttgagttacggtgtttattttccaatcaagtgaagatatctcctacttctcctactggaacatctcagcttctgcagtgaagaaaaattcctgtgatagttcagttctttagtttttctatttgaaaaaaaaaaatcatttaaatgatcctttgttcacggctctccttaatgactgagtgaacagttcctatctgtatatttgactaaaccttttcctaagctatctctcatggttcctatgtttttttatcataattaaaagcaaaaccatctggatcacctaacagtcagaggtcagtatctcagcgtgtgaattatagaggaaatacagagagaacctcttccacttttacttttcgtccaaataaaatgcatggtgtaccagaagttgaagatcgggttgaggattggggctagctcgatgacactaaggccccaacatcgcgggacctgctgtggcgcggattcttaggaacgctgttctagccggccccctctccaggggtcgccgtggccggcattatttcctagttcttcttgtaaccctgaggtgccagcgcggggagtgaggaggggtcagggggctaaggatgcaacctctgacgttctgcgccttcctaggagagtcttacatgtgttgagatttcacaagcaatgcgagttgtaaaataccagctctacaagaagctaggctctgtgacggcatagttttcagtagctttatcacaatattcacaatggagaattatatgacatggtagcagaaataggcccttttatgtgttgcttctattttacctcaaattgtagatatagggtaatcaataaaatccatccatgcctttcacacactaagt

SEQ ID NO: 4741 - protein, 449 aa, Homo sapiens; identical to SEQ ID NO: 4147

SEQ ID NO: 4742 - DNA, 5151 bp, Homo sapiens
aaaaaaaaaaaaaaaaaaaaaaaaaaaagaaaaaagaaaaaaaaaaggaggaggaggaggagggtgagagagaagctgggagagcagagaaaaggggccaccggtcgcccccccgcttccccgcacgcgctctccagccgcggccgcccgcctgccgcggtcaccccggcctctgcctctgtcccccagtgatcggatcaaggcgctgagcgaggccctgcctgcggggcggccatgcggcggtgacaggagcgcgaccgacacgcacgggcccctcgccccctctcgcctcccgtccgctcgccagctcccctcagccgaggctgctccgcggcggccgcagcccgcgcgcggcccacactcgcctcccctcggcacccccggccccggagctgcctggaggcggccgcactcggggatcatggcccaagttgcaatgtccaccctccccgttgaagatgaggagtcctcggagagcaggatggtggtgacattcctcatgtcagctctcgagtccatgtgtaaagaactggccaagtccaaagccgaagtggcctgcattgcagtgtatgaaacagacgtgtttgtcgtcggaactgaaagaggacgtgcttttgtcaataccagaaaggattttcaaaaagattttgtaaaatattgtgttgaagaagaagaaaaagctgcagagatgcataaaatgaaatctacaacccaggcaaatcggatgagtgtagatgctgtagaaattgaaacactcagaaaaacagttgaggactatttctgcttttgctatgggaaagctttaggcaaatccacagtggtacctgtaccatatgagaagatgctgcgagaccagtcggctgtggtagtgcaggggcttccggaaggtgttgcctttaaacaccccgagaactatgatcttgcaaccctgaaatggattttggagaacaaagcagggatttcattcatcattaagagaccttttttagagccaaagaagcatgtaggtggtcgtgtgatggtaacagatgctgacaggtcaatactatctccaggtggaagttgtggccccatcaaagtgaaaactgaacccacagaagattctggcatttccctggaaatggcagctgtgacagtaaaggaagaatcagaagatcctgattattatcaatataacattcaagcaggcccttctgaaactgatgatgttgatgaaaaacagcccctatcgaagcctttgcaaggaagccaccattcttcagagggcaatgaaggcacagaaatggaagtaccagcagaagattctactcaacatgtcccttcagaaacaagtgaggaccctgaagttgaggtgactattgaagatgatgattattctccaccgtctaagagaccaaaggccaatgagctaccgcagccaccagtcccggaacccgccaatgctgggaagcggaaagtgagggagttcaacttcgagaaatggaatgctcgcatcactgatctacgtaaacaagttgaagaattgtttgaaaggaaatatgctcaagccataaaagccaaaggtccggtgacgatcccgtaccctcttttccagtctcatgttgaagatctttatgtagaaggacttcctgaaggaattccttttagaaggccatctacttacggaattcctcgcctggagaggatattacttgcaaaggaaaggattcgttttgtgattaagaaacatgagcttctgaattcaacacgtgaagatttacagcttgataagccagcttcaggagtaaaggaagaatggtatgccagaatcactaaattaagaaagatggtggatcagcttttctgcaaaaaatttgcggaagccttggggagcactgaagccaaggctgtaccgtaccaaaaatttgaggcacacccgaatgatctgtacgtggaaggactgccagaaaacattcctttccgaagtccctcatggtatggaatcccaaggctggaaaaaatcattcaagtgggcaatcgaattaaatttgttattaaaagaccagaacttctgactcacagtaccactgaagttactcagccaagaacgaatacaccagctcaagctcttggactcaccgaggcagtaaaagtaccatatcctgtgtttgaatcaaacccggagttcttgtatgtggaaggcttgccagaggggattcccttccgaagccctacctggtttggaattccacgacttgaaaggatcgtccgcgggagtaataaaatcaagttcgttgttaaaaaacctgaactagttatttcctacttgcctcctgggatggctagtaaaataaacactaaagctttgcagtcccccaaaagaccacgaagtcctgggagtaattcaaaggttcctgaaattgaggtcaccgtggaaggccctaataacaacaatcctcaaacctcagctgttcgaaccccgacccagactaacggttctaacgttcccttcaagccacgagggagagagttttcctttgaggcctggaatgccaaaatcacggacctaaaacagaaagttgaaaatctcttcaatgagaaatgtggggaagctcttggccttaaacaagctgtgaaggtgccgttcgcgttatttgagtctttcccggaagacttttatgtggaaggcttacctgagggtgtgccattccgaagaccatcgacttttggcattccgaggctggagaagatactcagaaacaaagccaaaattaagttcatcattaaaaagcccgaaatgtttgagacggcgattaaggagagcacctcctctaagagccctcccagaaaaataaattcatcacccaatgttaatactactgcatcaggtgttgaagaccttaacatcattcaggtgacaattccagatgatgataatgaaagactctcgaaagttgaaaaagctagacagctaagagaacaagtgaatgacctctttagtcggaaatttggtgaagctattggtatgggttttcctgtgaaagttccctacaggaaaatcacaattaaccctggctgtgtggtggttgatggcatgcccccgggggtgtccttcaaagcccccagctacctggaaatcagctccatgagaaggatcttagactctgccgagtttatcaaattcacggtcattagaccatttccaggacttgtgattaataaccagctggttgatcagagtgagtcagaaggccccgtgatacaagaatcagctgaaccaagccagttggaagttccagccacagaaggtaaaaggacctcttccctcctagggtaaatcagcttctgtgtcagggatgctgtgtggtgtccatctgaaccccctgcatacgcgtagctaatgtgatctccccactttcacataagatggtggccctgccttcagggaatgtgggagccaggtgggagccttcccggatatttaagctagaagattctacagggagattctccttggatcaatatatgtctctcagtcaaagatgtaaaagcacttttgccttaaaaagaatgttctgtttctaaatagagtcaacgttgtcctcctcattggaattcactatgagtcagaatcattagactgacttttttttttccatagtaatagtattttgcagagtctcacagagctgcagatcttttgttcatcttgcagagttaacaagtctgatcctgttagtccagatttcttaaatttggccaagttataataggagcagtagcttgagacccgaagtcaggaaactttgacaatggatttttttttttaatccagagacttgtactggaatttgccttaccctgtcagctcatggacttaaggtttcatcccgctttatgagtgcttctgaatccaagtcattgttacctgaatttgcaaattaagttgtgatattcgtgactgttaaattcctgtaattagattaacctctttgcttgcttgtttgttttctctcctattttagcttaaagtatcagtggttgagaagagcttttcggacctgttactaccccaagctgtgtaatatacttgtataacagaaataccttctatacaaacctttttttctacttttagatagaaatgtctactttttcagcagttctgtgaattaaagagcagagtgactgtgggtctggaatggctggtgtacttgggaatgtactatcaggattttacagcaatgctgggaaatgacagggaaaatgacaggaatgaatctcaccagattttttatgtactcagcagagccttgagttacggtgtttattttccaatcaagtgaagatatctcctacttctcctactggaacatctcagcttctgcagtgaagaaaaattcctgtgatagttcagttctttagtttttctatttgaaaaaaaaaaatcatttaaatgatcctttgttcacggctctccttaatgactgagtgaacagttcctatctgtatatttgactaaaccttttcctaagctatctctcatggttcctatgtttttttatcataattaaaagcaaaaccatctggatcacctaacagtcagaggtcagtatctcagcgtgtgaattatagaggaaatacagagagaacctcttccacttttacttttcgtccaaataaaatgcatggtgtaccagaagttgaagatcgggttgaggattggggctagctcgatgacactaaggccccaacatcgcgggacctgctgtggcgcggattcttaggaacgctgttctagccggccccctctccaggggtcgccgtggccggcattatttcctagttcttcttgtaaccctgaggtgccagcgcggggagtgaggaggggtcagggggctaaggatgcaacctctgacgttctgcgccttcctaggagagtcttacatgtgttgagatttcacaagcaatgcgagttgtaaaataccagctctacaagaagctaggctctgtgacggcatagttttcagtagctttatcacaatattcacaatggagaattatatgacatggtagcagaaataggcccttttatgtgttgcttctattttacctcaaattgtagatatagggtaatcaataaaatccatccatgcctttcacacactaagt

SEQ ID NO: 4743 - protein, 964 aa, Homo sapiens
MAQVAMSTLPVEDEESSESRMVVTFLMSALESMCKELAKSKAEVACIAVYETDVFVVGTERGRAFVNTRKDFQKDFVKYCVEEEEKAAEMHKMKSTTQANRMSVDAVEIETLRKTVEDYFCFCYGKALGKSTVVPVPYEKMLRDQSAVVVQGLPEGVAFKHPENYDLATLKWILENKAGISFIIKRPFLEPKKHVGGRVMVTDADRSILSPGGSCGPIKVKTEPTEDSGISLEMAAVTVKEESEDPDYYQYNIQAGPSETDDVDEKQPLSKPLQGSHHSSEGNEGTEMEVPAEDSTQHVPSETSEDPEVEVTIEDDDYSPPSKRPKANELPQPPVPEPANAGKRKVREFNFEKWNARITDLRKQVEELFERKYAQAIKAKGPVTIPYPLFQSHVEDLYVEGLPEGIPFRRPSTYGIPRLERILLAKERIRFVIKKHELLNSTREDLQLDKPASGVKEEWYARITKLRKMVDQLFCKKFAEALGSTEAKAVPYQKFEAHPNDLYVEGLPENIPFRSPSWYGIPRLEKIIQVGNRIKFVIKRPELLTHSTTEVTQPRTNTPAQALGLTEAVKVPYPVFESNPEFLYVEGLPEGIPFRSPTWFGIPRLERIVRGSNKIKFVVKKPELVISYLPPGMASKINTKALQSPKRPRSPGSNSKVPEIEVTVEGPNNNNPQTSAVRTPTQTNGSNVPFKPRGREFSFEAWNAKITDLKQKVENLFNEKCGEALGLKQAVKVPFALFESFPEDFYVEGLPEGVPFRRPSTFGIPRLEKILRNKAKIKFIIKKPEMFETAIKESTSSKSPPRKINSSPNVNTTASGVEDLNIIQVTIPDDDNERLSKVEKARQLREQVNDLFSRKFGEAIGMGFPVKVPYRKITINPGCVVVDGMPPGVSFKAPSYLEISSMRRILDSAEFIKFTVIRPFPGLVINNQLVDQSESEGPVIQESAEPSQLEVPATEGKRTSSLLG

SEQ ID NO: 4744 - DNA, 4127 bp, Homo sapiens
aaaaaaaaaaaaaaaaaaaaaaaaaaaagaaaaaagaaaaaaaaaaggaggaggaggaggagggtgagagagaagctgggagagcagagaaaaggggccaccggtcgcccccccgcttccccgcacgcgctctccagccgcggccgcccgcctgccgcggtcaccccggcctctgcctctgtcccccagtgatcggatcaaggcgctgagcgaggccctgcctgcggggcggccatgcggcggtgacaggagcgcgaccgacacgcacgggcccctcgccccctctcgcctcccgtccgctcgccagctcccctcagccgaggctgctccgcggcggccgcagcccgcgcgcggcccacactcgcctcccctcggcacccccggccccggagctgcctggaggcggccgcactcggtgtaaagaactggccaagtccaaagccgaagtggcctgcattgcagtgtatgaaacagacgtgtttgtcgtcggaactgaaagaggacgtgcttttgtcaataccagaaaggattttcaaaaagattttgtaaaatattgtgttgaagaagaagaaaaagctgcagagatgcataaaatgaaatctacaacccaggcaaatcggatgagtgtagatgctgtagaaattgaaacactcagaaaaacagttgaggactatttctgcttttgctatgggaaagctttaggcaaatccacagtggtacctgtaccatatgagaagatgctgcgagaccagtcggctgtggtagtgcaggggcttccggaaggtgttgcctttaaacaccccgagaactatgatcttgcaaccctgaaatggattttggagaacaaagcagggatttcattcatcattaagagaccttttttagagccaaagaagcatgtaggtggtcgtgtgatggtaacagatgctgacaggtcaatactatctccaggtggaagttgtggccccatcaaagtgaaaactgaacccacagaagattctggcatttccctggaaatggcagctgtgacagtaaaggaagaatcagaagatcctgattattatcaatataacattcaaggaagccaccattcttcagagggcaatgaaggcacagaaatggaagtaccagcagaagatgatgattattctccaccgtctaagagaccaaaggccaatgagctaccgcagccaccagtcccggaacccgccaatgctgggaagcggaaagtgagggagttcaacttcgagaaatggaatgctcgcatcactgatctacgtaaacaagttgaagaattgtttgaaaggaaatatgctcaagccataaaagccaaaggtccggtgacgatcccgtaccctcttttccagtctcatgttgaagatctttatgtagaaggacttcctgaaggaattccttttagaaggccatctacttacggaattcctcgcctggagaggatattacttgcaaaggaaaggattcgttttgtgattaagaaacatgagcttctgaattcaacacgtgaagatttacagcttgataagccagcttcaggagtaaaggaagaatggtatgccagaatcactaaattaagaaagatggtggatcagcttttctgcaaaaaatttgcggaagccttggggagcactgaagccaaggctgtaccgtaccaaaaatttgaggcacacccgaatgatctgtacgtggaaggactgccagaaaacattcctttccgaagtccctcatggtatggaatcccaaggctggaaaaaatcattcaagtgggcaatcgaattaaatttgttattaaaagaccagaacttctgactcacagtaccactgaagttactcagccaagaacgaatacaccagtcaaagaagattggaatgtcagaattaccaagctacggaagcaagtggaagagatttttaatttgaaatttgctcaagctcttggactcaccgaggcagtaaaagtaccatatcctgtgtttgaatcaaacccggagttcttgtatgtggaaggcttgccagaggggattcccttccgaagccctacctggtttggaattccacgacttgaaaggatcgtccgcgggagtaataaaatcaagttcgttgttaaaaaacctgaactagttatttcctacttgcctcctgggatggctagtaaaataaacactaaagctttgcagtcccccaaaagaccacgaagtcctgggagtaattcaaaggttcctgaaattgaggtcaccgtggaaggccctaataacaacaatcctcaaacctcagctgttcgaaccccgacccagactaacggttctaacgttcccttcaagccacgagggagagagttttcctttgaggcctggaatgccaaaatcacggacctaaaacagaaagttgaaaatctcttcaatgagaaatgtggggaagctcttggccttaaacaagctgtgaaggtgccgttcgcgttatttgagtctttcccggaagacttttatgtggaaggcttacctgagggtgtgccattccgaagaccatcgacttttggcattccgaggctggagaagatactcagaaacaaagccaaaattaagttcatcattaaaaagcccgaaatgtttgagacggcgattaaggagagcacctcctctaagagccctcccagaaaaataaattcatcacccaatgttaatactactgcatcaggtgttgaagaccttaacatcattcaggtgacaattccagatgatgataatgaaagactctcgaaagttgaaaaagctagacagctaagagaacaagtgaatgacctctttagtcggaaatttggtgaagctattggtatgggttttcctgtgaaagttccctacaggaaaatcacaattaaccctggctgtgtggtggttgatggcatgcccccgggggtgtccttcaaagcccccagctacctggaaatcagctccatgagaaggatcttagactctgccgagtttatcaaattcacggtcattagaccatttccaggacttgtgattaataaccagctggttgatcagagtgagtcagaaggccccgtgatacaagaatcagctgaaccaagccagttggaagttccagccacagaagaaataaaagagactgatggaagctctcagatcaagcaagaaccagaccccacgtggtagacctcttccctcctaggcttaaagtatcagtggttgagaagagcttttcggacctgttactaccccaagctgtagccttgagttacggtgtttattttccaatcaagtgaagatatctcctacttctcctactggaacatctcagcttctgcagtgaagaaaaattcctgtgatagttcagttctttagtttttctatttgaaaaaaaaaaatcatttaaatgatcctttgttcacggctctccttaatgactgagtgaacagttcctatctgtatatttgactaaaccttttcctaagctatctctcatggttcctatgtttttttatcataattaaaagcaaaaccatctggatcacctaacagtcagaggtcagtatctcagcgtgtgaattatagaggaaatacagagagaacctcttccacttttacttttcgtccaaataaaatgcatggtgtaccagaagttgaagatcgggttgaggattggggctagctcgatgacactaaggccccaacatcgcgggacctgctgtggcgcggattcttaggaacgctgttctagccggccccctctccaggggtcgccgtggccggcattatttcctagttcttcttgtaaccctgaggtgccagcgcggggagtgaggaggggtcagggggctaaggatgcaacctctgacgttctgcgccttcctaggagagtcttacatgtgttgagatttcacaagcaatgcgagttgtaaaataccagctctacaagaagctaggctctgtgacggcatagttttcagtagctttatcacaatattcacaatggagaattatatgacatggtagcagaaataggcccttttatgtgttgcttctattttacctcaaattgtagatatagggtaatcaataaaatccatccatgcctttcacacactaagt

SEQ ID NO: 4745 - protein, 868 aa, Homo sapiens; identical to SEQ ID NO: 4729

SEQ ID NO: 4746 - DNA, 5047 bp, Homo sapiens
aaaaaaaaaaaaaaaaaaaaaaaaaaaagaaaaaagaaaaaaaaaaggaggaggaggaggagggtgagagagaagctgggagagcagagaaaaggggccaccggtcgcccccccgcttccccgcacgcgctctccagccgcggccgcccgcctgccgcggtcaccccggcctctgcctctgtcccccagtgatcggatcaaggcgctgagcgaggccctgcctgcggggcggccatgcggcggtgacaggagcgcgaccgacacgcacgggcccctcgccccctctcgcctcccgtccgctcgccagctcccctcagccgaggctgctccgcggcggccgcagcccgcgcgcggcccacactcgcctcccctcggcacccccggccccggagctgcctggaggcggccgcactcggtgtaaagaactggccaagtccaaagccgaagtggcctgcattgcagtgtatgaaacagacgtgtttgtcgtcggaactgaaagaggacgtgcttttgtcaataccagaaaggattttcaaaaagattttgtaaaatattgtgttgaagaagaagaaaaagctgcagagatgcataaaatgaaatctacaacccaggcaaatcggatgagtgtagatgctgtagaaattgaaacactcagaaaaacagttgaggactatttctgcttttgctatgggaaagctttaggcaaatccacagtggtacctgtaccatatgagaagatgctgcgagaccagtcggctgtggtagtgcaggggcttccggaaggtgttgcctttaaacaccccgagaactatgatcttgcaaccctgaaatggattttggagaacaaagcagggatttcattcatcattaagagaccttttttagagccaaagaagcatgtaggtggtcgtgtgatggtaacagatgctgacaggtcaatactatctccaggtggaagttgtggccccatcaaagtgaaaactgaacccacagaagattctggcatttccctggaaatggcagctgtgacagtaaaggaagaatcagaagatcctgattattatcaatataacattcaaggaagccaccattcttcagagggcaatgaaggcacagaaatggaagtaccagcagaagatgatgattattctccaccgtctaagagaccaaaggccaatgagctaccgcagccaccagtcccggaacccgccaatgctgggaagcggaaagtgagggagttcaacttcgagaaatggaatgctcgcatcactgatctacgtaaacaagttgaagaattgtttgaaaggaaatatgctcaagccataaaagccaaaggtccggtgacgatcccgtaccctcttttccagtctcatgttgaagatctttatgtagaaggacttcctgaaggaattccttttagaaggccatctacttacggaattcctcgcctggagaggatattacttgcaaaggaaaggattcgttttgtgattaagaaacatgagcttctgaattcaacacgtgaagatttacagcttgataagccagcttcaggagtaaaggaagaatggtatgccagaatcactaaattaagaaagatggtggatcagcttttctgcaaaaaatttgcggaagccttggggagcactgaagccaaggctgtaccgtaccaaaaatttgaggcacacccgaatgatctgtacgtggaaggactgccagaaaacattcctttccgaagtccctcatggtatggaatcccaaggctggaaaaaatcattcaagtgggcaatcgaattaaatttgttattaaaagaccagaacttctgactcacagtaccactgaagttactcagccaagaacgaatacaccagtcaaagaagattggaatgtcagaattaccaagctacggaagcaagtggaagagatttttaatttgaaatttgctcaagctcttggactcaccgaggcagtaaaagtaccatatcctgtgtttgaatcaaacccggagttcttgtatgtggaaggcttgccagaggggattcccttccgaagccctacctggtttggaattccacgacttgaaaggatcgtccgcgggagtaataaaatcaagttcgttgttaaaaaacctgaactagttatttcctacttgcctcctgggatggctagtaaaataaacactaaagctttgcagtcccccaaaagaccacgaagtcctgggagtaattcaaaggttcctgaaattgaggtcaccgtggaaggccctaataacaacaatcctcaaacctcagctgttcgaaccccgacccagactaacggttctaacgttcccttcaagccacgagggagagagttttcctttgaggcctggaatgccaaaatcacggacctaaaacagaaagttgaaaatctcttcaatgagaaatgtggggaagctcttggccttaaacaagctgtgaaggtgccgttcgcgttatttgagtctttcccggaagacttttatgtggaaggcttacctgagggtgtgccattccgaagaccatcgacttttggcattccgaggctggagaagatactcagaaacaaagccaaaattaagttcatcattaaaaagcccgaaatgtttgagacggcgattaaggagagcacctcctctaagagccctcccagaaaaataaattcatcacccaatgttaatactactgcatcaggtgttgaagaccttaacatcattcaggtgacaattccagatgatgataatgaaagactctcgaaagttgaaaaagctagacagctaagagaacaagtgaatgacctctttagtcggaaatttggtgaagctattggtatgggttttcctgtgaaagttccctacaggaaaatcacaattaaccctggctgtgtggtggttgatggcatgcccccgggggtgtccttcaaagcccccagctacctggaaatcagctccatgagaaggatcttagactctgccgagtttatcaaattcacggtcattagaccatttccaggacttgtgattaataaccagctggttgatcagagtgagtcagaaggccccgtgatacaagaatcagctgaaccaagccagttggaagttccagccacagaagaaataaaagagactgatggaagctctcagatcaagcaagaaccagaccccacgtggtagacctcttccctcctagggtaaatcagcttctgtgtcagggatgctgtgtggtgtccatctgaaccccctgcatacgcgtagctaatgtgatctccccactttcacataagatggtggccctgccttcagggaatgtgggagccaggtgggagccttcccggatatttaagctagaagattctacagggagattctccttggatcaatatatgtctctcagtcaaagatgtaaaagcacttttgccttaaaaagaatgttctgtttctaaatagagtcaacgttgtcctcctcattggaattcactatgagtcagaatcattagactgacttttttttttccatagtaatagtattttgcagagtctcacagagctgcagatcttttgttcatcttgcagagttaacaagtctgatcctgttagtccagatttcttaaatttggccaagttataataggagcagtagcttgagacccgaagtcaggaaactttgacaatggatttttttttttaatccagagacttgtactggaatttgccttaccctgtcagctcatggacttaaggtttcatcccgctttatgagtgcttctgaatccaagtcattgttacctgaatttgcaaattaagttgtgatattcgtgactgttaaattcctgtaattagattaacctctttgcttgcttgtttgttttctctcctattttagcttaaagtatcagtggttgagaagagcttttcggacctgttactaccccaagctgtgtaatatacttgtataacagaaataccttctatacaaacctttttttctacttttagatagaaatgtctactttttcagcagttctgtgaattaaagagcagagtgactgtgggtctggaatggctggtgtacttgggaatgtactatcaggattttacagcaatgctgggaaatgacagggaaaatgacaggaatgaatctcaccagattttttatgtactcagcagagccttgagttacggtgtttattttccaatcaagtgaagatatctcctacttctcctactggaacatctcagcttctgcagtgaagaaaaattcctgtgatagttcagttctttagtttttctatttgaaaaaaaaaaatcatttaaatgatcctttgttcacggctctccttaatgactgagtgaacagttcctatctgtatatttgactaaaccttttcctaagctatctctcatggttcctatgtttttttatcataattaaaagcaaaaccatctggatcacctaacagtcagaggtcagtatctcagcgtgtgaattatagaggaaatacagagagaacctcttccacttttacttttcgtccaaataaaatgcatggtgtaccagaagttgaagatcgggttgaggattggggctagctcgatgacactaaggccccaacatcgcgggacctgctgtggcgcggattcttaggaacgctgttctagccggccccctctccaggggtcgccgtggccggcattatttcctagttcttcttgtaaccctgaggtgccagcgcggggagtgaggaggggtcagggggctaaggatgcaacctctgacgttctgcgccttcctaggagagtcttacatgtgttgagatttcacaagcaatgcgagttgtaaaataccagctctacaagaagctaggctctgtgacggcatagttttcagtagctttatcacaatattcacaatggagaattatatgacatggtagcagaaataggcccttttatgtgttgcttctattttacctcaaattgtagatatagggtaatcaataaaatccatccatgcctttcacacactaagt

SEQ ID NO: 4747 - protein, 868 aa, Homo sapiens; identical to SEQ ID NO: 4729

SEQ ID NO: 4748 - DNA, 7179 bp, Homo sapiens
aaaaaaaaaaaaaaaaaaaaaaaaaaaagaaaaaagaaaaaaaaaaggaggaggaggaggagggtgagagagaagctgggagagcagagaaaaggggccaccggtcgcccccccgcttccccgcacgcgctctccagccgcggccgcccgcctgccgcggtcaccccggcctctgcctctgtcccccagtgatcggatcaaggcgctgagcgaggccctgcctgcggggcggccatgcggcggtgacaggagcgcgaccgacacgcacgggcccctcgccccctctcgcctcccgtccgctcgccagctcccctcagccgaggctgctccgcggcggccgcagcccgcgcgcggcccacactcgcctcccctcggcacccccggccccggagctgcctggaggcggccgcactcggtgtaaagaactggccaagtccaaagccgaagtggcctgcattgcagtgtatgaaacagacgtgtttgtcgtcggaactgaaagaggacgtgcttttgtcaataccagaaaggattttcaaaaagattttgtaaaatattgtgttgaagaagaagaaaaagctgcagagatgcataaaatgaaatctacaacccaggcaaatcggatgagtgtagatgctgtagaaattgaaacactcagaaaaacagttgaggactatttctgcttttgctatgggaaagctttaggcaaatccacagtggtacctgtaccatatgagaagatgctgcgagaccagtcggctgtggtagtgcaggggcttccggaaggtgttgcctttaaacaccccgagaactatgatcttgcaaccctgaaatggattttggagaacaaagcagggatttcattcatcattaagagaccttttttagagccaaagaagcatgtaggtggtcgtgtgatggtaacagatgctgacaggtcaatactatctccaggtggaagttgtggccccatcaaagtgaaaactgaacccacagaagattctggcatttccctggaaatggcagctgtgacagtaaaggaagaatcagaagatcctgattattatcaatataacattcaaggaagccaccattcttcagagggcaatgaaggcacagaaatggaagtaccagcagaagattctactcaacatgtcccttcagaaacaagtgaggaccctgaagttgaggtgactattgaagatgatgattattctccaccgtctaagagaccaaaggccaatgagctaccgcagccaccagtcccggaacccgccaatgctgggaagcggaaagtgagggagttcaacttcgagaaatggaatgctcgcatcactgatctacgtaaacaagttgaagaattgtttgaaaggaaatatgctcaagccataaaagccaaaggtccggtgacgatcccgtaccctcttttccagtctcatgttgaagatctttatgtagaaggacttcctgaaggaattccttttagaaggccatctacttacggaattcctcgcctggagaggatattacttgcaaaggaaaggattcgttttgtgattaagaaacatgagcttctgaattcaacacgtgaagatttacagcttgataagccagcttcaggagtaaaggaagaatggtatgccagaatcactaaattaagaaagatggtggatcagcttttctgcaaaaaatttgcggaagccttggggagcactgaagccaaggctgtaccgtaccaaaaatttgaggcacacccgaatgatctgtacgtggaaggactgccagaaaacattcctttccgaagtccctcatggtatggaatcccaaggctggaaaaaatcattcaagtgggcaatcgaattaaatttgttattaaaagaccagaacttctgactcacagtaccactgaagttactcagccaagaacgaatacaccagtcaaagaagattggaatgtcagaattaccaagctacggaagcaagtggaagagatttttaatttgaaatttgctcaagctcttggactcaccgaggcagtaaaagtaccatatcctgtgtttgaatcaaacccggagttcttgtatgtggaaggcttgccagaggggattcccttccgaagccctacctggtttggaattccacgacttgaaaggatcgtccgcgggagtaataaaatcaagttcgttgttaaaaaacctgaactagttatttcctacttgcctcctgggatggctagtaaaataaacactaaagctttgcagtcccccaaaagaccacgaagtcctgggagtaattcaaaggttcctgaaattgaggtcaccgtggaaggccctaataacaacaatcctcaaacctcagctgttcgaaccccgacccagactaacggttctaacgttcccttcaagccacgagggagagagttttcctttgaggcctggaatgccaaaatcacggacctaaaacagaaagttgaaaatctcttcaatgagaaatgtggggaagctcttggccttaaacaagctgtgaaggtgccgttcgcgttatttgagtctttcccggaagacttttatgtggaaggcttacctgagggtgtgccattccgaagaccatcgacttttggcattccgaggctggagaagatactcagaaacaaagccaaaattaagttcatcattaaaaagcccgaaatgtttgagacggcgattaaggagagcacctcctctaagagccctcccagaaaaataaattcatcacccaatgttaatactactgcatcaggtgttgaagaccttaacatcattcaggtgacaattccagatgatgataatgaaagactctcgaaagttgaaaaagctagacagctaagagaacaagtgaatgacctctttagtcggaaatttggtgaagctattggtatgggttttcctgtgaaagttccctacaggaaaatcacaattaaccctggctgtgtggtggttgatggcatgcccccgggggtgtccttcaaagcccccagctacctggaaatcagctccatgagaaggatcttagactctgccgagtttatcaaattcacggtcattaggtaagtgagagtttcctgcttagtcacaggagcgaatctggagctcatgaggctgactcttctaaaatgcagccacaggtagtcatcgaatccggcttcctatgctgtgcaatcaacaaatcaaaataacttgtgtcatcattagaatgtcagatgtgcttctacgaactaagctgactcttttaattctttggcaaagggttggcaaactaggactgtttgccaaattcaggctgcctcctatttttagagtcttcctgaaacacagctacacccgtattatccatggctgctttcctgtcacagtgagtaagtagctgggactgagaaggcatggcctccaaagtctaaaatatttactctctagcactttgtagaaaaaccttagctaggcacagtggctaacgcctgtaatcccagcattttgggaggccaaggcaggcagatcacctgaggtcaggagttccagaccagcctggccaacatggtgaaatcccatctctacaaaaataaaacagttagctgggcatgatggcgggtgcctgtaatcccagctactcgggaggctgaggcaggatagtcgcttgaacccaggaggtggaggttgcaatgagccaagatcatgccactgcactccagcctggacgacagagtgagactccatcacaagaaaaaaagaactttgtcaacctctgtcttagggcgccttgtcacaggcttcgggtcagacggattcaaccttgcatcagccatttgttagccaggtcactctgttctttgtctgtaaatgagattgatcgttgttcccactgagagtgtcagctccttcccgtagagcaggcatgatgattgtactcacctctgacaccattgtgagtgccacattccttcccacgtccttgtcactgtaagagatgcccacctgagcaccaaccccaggttatcttcccctttgtcttccagccccccagaaacagctacgactcaacctacccaatcatttcatcatcagattgccactgtctctagttcaggtctcttgggactggcactcagaaatctcataataaatcctcttgaggcttctcatacactcgtcttcttccaatcttctttccctcaaaatctcatattttggttccacttcacccaccgtcattctccatatcactcccaggagttaggcaaaaagccccttccgttcttccgtatgttaaacttagaatcactctgttccctgctctgcgtttctattttttgtttttcctccatttactagtagcttaacactttctaacagtgttcttattattgatacgtatctatctcttccataagcttataaggtcacggataatacttctcattgtagtacgtaaatgacgtgggctagatatgagttgaataaacagttatacctgtaaattcttacagagtgaaaataaattgttatactttacaatttgtttctctctttagaccatttccaggacttgtgattaataaccgtgagtattttgtgaagtgttttgtttttgttttttcctggggtctgacgtgtgtgcgtgtgagtgtgtatacatgcttaacgtatatcacgttacttcacctatgtcagtaaccaggccaaatacttgttttagccctcagtaaaaacaccaggcacttcctagttgtaaaattattcaagcttcttaacttcctatcctcgatgcacttaatcataaaatggtaataatagcaccgattttgggggagtcgttccagtagatggaaagcatctggaacaggtgtcagcaagctcctgccgacgtgtatgcataaagttttattgaaaccaccatcgtgtccatttgtttatggcagaactgagagatggcagcagcaagtgtgtgcctgcaaaacctaaaatatttactaattggctctgcaagaaaagagtttgcatccccctaacctagaacagtgtctagcctctagtatgtgtttagcctacagtatgtgctcagcgaatacaatctatatttattactgcttttatgactgttataattactgtgcttggatttcgttacaaagtaagtcacaatgtgcctgcttctgttagtatttcagcacagtgcctggcacacatggggctctcaaatattgctgagcgagtgaacaaatgtcctttcaattccttaacgttgatgtcattttcaatagtattttgagccaaacttaattttgcgagtgtgttttgttttcttaactttattattaaaaatgtataaaagtgaggccaggcgtggtggctcacgcctgtaatcccagcagtttgggaggctgaggcaggcggatcagttgaggttgggagttggagaccagcccgtccaacatggtgaaagcctgtctctactaaaaatacaaaaatcagctgggtgtggtggcgcgtgcctgtaatcccagctactcaggaggctgaggcaggagagttgcttgaatcctagaggtggaggttgcagtgagctgagatcgtgccattgcactccagcctgggcaacaagagcaaaactctgtcccaataaataaataaataaaatgttctcttttgttcctgttcttgtgcggtagtgtggtatagagttttatggtaattactgtgaattagtgattctgagggacatatcagaactctgaggtttgtttccttctcatcttgagggaaacagcaaatgtatgttaaaatgcttttccaagggaacaacacatccttacattatttaaaccaatctgcttcattttcagagctggttgatcagagtgagtcagaaggccccgtgatacaagaatcagctgaaccaagccagttggaagttccagccacagaagaaataaaagagactgatggaagctctcagatcaagcaagaaccagaccccacgtggtagacctcttccctcctaggcttaaagtatcagtggttgagaagagcttttcggacctgttactaccccaagctgtgtaatatacttgtataacagaaataccttctatacaaacctttttttctacttttagatagaaatgtctactttttcagcagttctgtgaattaaagagcagagtgactgtgggtctggaatggctggtgtacttgggaatgtactatcaggattttacagcaatgctgggaaatgacagggaaaatgacaggaatgaatctcaccagattttttatgtactcagcagagccttgagttacggtgtttattttccaatcaagtgaagatatctcctacttctcctactggaacatctcagcttctgcagtgaagaaaaattcctgtgatagttcagttctttagtttttctatttgaaaaaaaaaaatcatttaaatgatcctttgttcacggctctccttaatgactgagtgaacagttcctatctgtatatttgactaaaccttttcctaagctatctctcatggttcctatgtttttttatcataattaaaagcaaaaccatctggatcacctaacagtcagaggtcagtatctcagcgtgtgaattatagaggaaatacagagagaacctcttccacttttacttttcgtccaaataaaatgcatggtgtaccagaagttgaagatcgggttgaggattggggctagctcgatgacactaaggccccaacatcgcgggacctgctgtggcgcggattcttaggaacgctgttctagccggccccctctccaggggtcgccgtggccggcattatttcctagttcttcttgtaaccctgaggtgccagcgcggggagtgaggaggggtcagggggctaaggatgcaacctctgacgttctgcgccttcctaggagagtcttacatgtgttgagatttcacaagcaatgcgagttgtaaaataccagctctacaagaagctaggctctgtgacggcatagttttcagtagctttatcacaatattcacaatggagaattatatgacatggtagcagaaataggcccttttatgtgttgcttctattttacctcaaattgtagatatagggtaatcaataaaatccatccatgcctttcacacactaagt

SEQ ID NO: 4749 - protein, 833 aa, Homo sapiens; identical to SEQ ID NO: 4187

SEQ ID NO: 4750 - DNA, 4386 bp, Homo sapiens
aaaaaaaaaaaaaaaaaaaaaaaaaaaagaaaaaagaaaaaaaaaaggaggaggaggaggagggtgagagagaagctgggagagcagagaaaaggggccaccggtcgcccccccgcttccccgcacgcgctctccagccgcggccgcccgcctgccgcggtcaccccggcctctgcctctgtcccccagtgatcggatcaaggcgctgagcgaggccctgcctgcggggcggccatgcggcggtgacaggagcgcgaccgacacgcacgggcccctcgccccctctcgcctcccgtccgctcgccagctcccctcagccgaggctgctccgcggcggccgcagcccgcgcgcggcccacactcgcctccccgttgaagatgaggagtcctcggagagcaggatggtggtgacattcctcatgtcagctctcgagtccatgtgtaaagaactggccaagtccaaagccgaagtggcctgcattgcagtgtatgaaacagacgtgtttgtcgtcggaactgaaagaggacgtgcttttgtcaataccagaaaggattttcaaaaagattttgtaaaatattgtgttgaagaagaagaaaaagctgcagagatgcataaaatgaaatctacaacccaggcaaatcggatgagtgtagatgctgtagaaattgaaacactcagaaaaacagttgaggactatttctgcttttgctatgggaaagctttaggcaaatccacagtggtacctgtaccatatgagaagatgctgcgagaccagtcggctgtggtagtgcaggggcttccggaaggtgttgcctttaaacaccccgagaactatgatcttgcaaccctgaaatggattttggagaacaaagcagggatttcattcatcattaagagaccttttttagagccaaagaagcatgtaggtggtcgtgtgatggtaacagatgctgacaggtcaatactatctccaggtggaagttgtggccccatcaaagtgaaaactgaacccacagaagattctggcatttccctggaaatggcagctgtgacagtaaaggaagaatcagaagatcctgattattatcaatataacattcaagcaggcccttctgaaactgatgatgttgatgaaaaacagcccctatcgaagcctttgcaaggaagccaccattcttcagagggcaatgaaggcacagaaatggaagtaccagcagaagattctactcaacatgtcccttcagaaacaagtgaggaccctgaagttgaggtgactattgaagatgatgattattctccaccgtctaagagaccaaaggccaatgagctaccgcagccaccagtcccggaacccgccaatgctgggaagcggaaagtgagggagttcaacttcgagaaatggaatgctcgcatcactgatctacgtaaacaagttgaagaattgtttgaaaggaaatatgctcaagccataaaagccaaaggtccggtgacgatcccgtaccctcttttccagtctcatgttgaagatctttatgtagaaggacttcctgaaggaattccttttagaaggccatctacttacggaattcctcgcctggagaggatattacttgcaaaggaaaggattcgttttgtgattaagaaacatgagcttctgaattcaacacgtgaagatttacagcttgataagccagcttcaggagtaaaggaagaatggtatgccagaatcactaaattaagaaagatggtggatcagcttttctgcaaaaaatttgcggaagccttggggagcactgaagccaaggctgtaccgtaccaaaaatttgaggcacacccgaatgatctgtacgtggaaggactgccagaaaacattcctttccgaagtccctcatggtatggaatcccaaggctggaaaaaatcattcaagtgggcaatcgaattaaatttgttattaaaagaccagaacttctgactcacagtaccactgaagttactcagccaagaacgaatacaccagtcaaagaagattggaatgtcagaattaccaagctacggaagcaagtggaagagatttttaatttgaaatttgcttagatttgttgacagcggtttcctggagtgctgtcttgagaacgattctgaggaggctcagcaagaaagagtgtttcagttgattgggtgtgtctgtcatggagaaggaactcaagctcttggactcaccgaggcagtaaaagtaccatatcctgtgtttgaatcaaacccggagttcttgtatgtggaaggcttgccagaggggattcccttccgaagccctacctggtttggaattccacgacttgaaaggatcgtccgcgggagtaataaaatcaagttcgttgttaaaaaacctgaactagttatttcctacttgcctcctgggatggctagtaaaataaacactaaagctttgcagtcccccaaaagaccacgaagtcctgggagtaattcaaaggttcctgaaattgaggtcaccgtggaaggccctaataacaacaatcctcaaacctcagctgttcgaaccccgacccagactaacggttctaacgttcccttcaagccacgagggagagagttttcctttgaggcctggaatgccaaaatcacggacctaaaacagaaagttgaaaatctcttcaatgagaaatgtggggaagctcttggccttaaacaagctgtgaaggtgccgttcgcgttatttgagtctttcccggaagacttttatgtggaaggcttacctgagggtgtgccattccgaagaccatcgacttttggcattccgaggctggagaagatactcagaaacaaagccaaaattaagttcatcattaaaaagcccgaaatgtttgagacggcgattaaggagagcacctcctctaagagccctcccagaaaaataaattcatcacccaatgttaatactactgcatcaggtgttgaagaccttaacatcattcaggtgacaattccagatgatgataatgaaagactctcgaaagttgaaaaagctagacagctaagagaacaagtgaatgacctctttagtcggaaatttggtgaagctattggtatgggttttcctgtgaaagttccctacaggaaaatcacaattaaccctggctgtgtggtggttgatggcatgcccccgggggtgtccttcaaagcccccagctacctggaaatcagctccatgagaaggatcttagactctgccgagtttatcaaattcacggtcattagaccatttccaggacttgtgattaataaccagctggttgatcagagtgagtcagaaggccccgtgatacaagaatcagctgaaccaagccagttggaagttccagccacagaagaaataaaagagactgatggaagctctcagatcaagcaagaaccagaccccacgtggtagacctcttccctcctaggcttaaagtatcagtggttgagaagagcttttcggacctgttactaccccaagctgtagccttgagttacggtgtttattttccaatcaagtgaagatatctcctacttctcctactggaacatctcagcttctgcagtgaagaaaaattcctgtgatagttcagttctttagtttttctatttgaaaaaaaaaaatcatttaaatgatcctttgttcacggctctccttaatgactgagtgaacagttcctatctgtatatttgactaaaccttttcctaagctatctctcatggttcctatgtttttttatcataattaaaagcaaaaccatctggatcacctaacagtcagaggtcagtatctcagcgtgtgaattatagaggaaatacagagagaacctcttccacttttacttttcgtccaaataaaatgcatggtgtaccagaagttgaagatcgggttgaggattggggctagctcgatgacactaaggccccaacatcgcgggacctgctgtggcgcggattcttaggaacgctgttctagccggccccctctccaggggtcgccgtggccggcattatttcctagttcttcttgtaaccctgaggtgccagcgcggggagtgaggaggggtcagggggctaaggatgcaacctctgacgttctgcgccttcctaggagagtcttacatgtgttgagatttcacaagcaatgcgagttgtaaaataccagctctacaagaagctaggctctgtgacggcatagttttcagtagctttatcacaatattcacaatggagaattatatgacatggtagcagaaataggcccttttatgtgttgcttctattttacctcaaattgtagatatagggtaatcaataaaatccatccatgcctttcacacactaagt

SEQ ID NO: 4751 - protein, 564 aa, Homo sapiens; identical to SEQ ID NO: 4031

SEQ ID NO: 4752 - DNA, 3924 bp, Homo sapiens
aaaaaaaaaaaaaaaaaaaaaaaaaaaagaaaaaagaaaaaaaaaaggaggaggaggaggagggtgagagagaagctgggagagcagagaaaaggggccaccggtcgcccccccgcttccccgcacgcgctctccagccgcggccgcccgcctgccgcggtcaccccggcctctgcctctgtcccccagtgatcggatcaaggcgctgagcgaggccctgcctgcggggcggccatgcggcggtgacaggagcgcgaccgacacgcacgggcccctcgccccctctcgcctcccgtccgctcgccagctcccctcagccgaggctgctccgcggcggccgcagcccgcgcgcggcccacactcgcctccccgttgaagatgaggagtcctcggagagcaggatggtggtgacattcctcatgtcagctctcgagtccatgtgtaaagaactggccaagtccaaagccgaagtggcctgcattgcagtgtatgaaacagacgtgtttgtcgtcggaactgaaagaggacgtgcttttgtcaataccagaaaggattttcaaaaagattttgtaaaatattgtgttgaagaagaagaaaaagctgcagagatgcataaaatgaaatctacaacccaggcaaatcggatgagtgtagatgctgtagaaattgaaacactcagaaaaacagttgaggactatttctgcttttgctatgggaaagctttaggcaaatccacagtggtacctgtaccatatgagaagatgctgcgagaccagtcggctgtggtagtgcaggggcttccggaaggtgttgcctttaaacaccccgagaactatgatcttgcaaccctgaaatggattttggagaacaaagcagggatttcattcatcattaagagaccttttttagagccaaagaagcatgtaggtggtcgtgtgatggtaacagatgctgacaggtcaatactatctccaggtggaagttgtggccccatcaaagtgaaaactgaacccacagaagattctggaagccaccattcttcagagggcaatgaaggcacagaaatggaagtaccagcagaagattctactcaacatgtcccttcagaaacaagtgaggaccctgaagttgaggtgactattgaagatgatgattattctccaccgtctaagagaccaaaggccaatgagctaccgcagccaccagtcccggaacccgccaatgctgggaagcggaaagtgagggagttcaacttcgagaaatggaatgctcgcatcactgatctacgtaaacaagttgaagaattgtttgaaaggaaatatgctcaagccataaaagccaaaggtccggtgacgatcccgtaccctcttttccagtctcatgttgaagatctttatgtagaaggacttcctgaaggaattccttttagaaggccatctacttacggaattcctcgcctggagaggatattacttgcaaaggaaaggattcgttttgtgattaagaaacatgagcttctgaattcaacacgtgaagatttacagcttgataagccagcttcaggagtaaaggaagaatggtatgccagaatcactaaattaagaaagatggtggatcagcttttctgcaaaaaatttgcggaagccttggggagcactgaagccaaggctgtaccgtaccaaaaatttgaggcacacccgaatgatctgtacgtggaaggactgccagaaaacattcctttccgaagtccctcatggtatggaatcccaaggctggaaaaaatcattcaagtgggcaatcgaattaaatttgttattaaaagaccagaacttctgactcacagtaccactgaagttactcagccaagaacgaatacaccagtcaaagaagattggaatgtcagaattaccaagctacggaagcaagtggaagagatttttaatttgaaatttgcttagatttgttgacagcggtttcctggagtgctgtcttgagaacgattctgaggaggctcagcaagaaagagtgtttcagttgattgggtgtgtctgtcatggagaaggaactcaagctcttggactcaccgaggcagtaaaagtaccatatcctgtgtttgaatcaaacccggagttcttgtatgtggaaggcttgccagaggggattcccttccgaagccctacctggtttggaattccacgacttgaaaggatcgtccgcgggagtaataaaatcaagttcgttgttaaaaaacctgaactagttatttcctacttgcctcctgggatggctagtaaaataaacactaaagctttgcagtcccccaaaagaccacgaagtcctgggagtaattcaaaggttcctgaaattgaggtcaccgtggaaggccctaataacaacaatcctcaaacctcagctgttcgaaccccgacccagactaacggttctaacgttcccttcaagccacgagggagagagttttcctttgaggcctggaatgccaaaatcacggacctaaaacagaaagttgaaaatctcttcaatgagaaatgtggggaagctcttggccttaaacaagctgtgaaggtgccgttcgcgttatttgagtctttcccggaagacttttatgtggaaggcttacctgagggtgtgccattccgaagaccatcgacttttggcattccgaggctggagaagatactcagaaacaaagccaaaattaagttcatcattaaaaagcccgaaatgtttgagacggcgattaaggagagcacctcctctaagagccctcccagaaaaataaattcatcacccaatgttaatactactgcatcaggtgttgaagaccttaacatcattcaggtgacaattccagatgatgataatgaaagactctcgaaagttgaaaaagctagacagctaagagaacaagtgaatgacctctttagtcggaaatttggtgaagctattggtatgggttttcctgtgaaagttccctacaggaaaatcacaattaaccctggctgtgtggtggttgatggcatgcccccgggggtgtccttcaaagcccccagctacctggaaatcagctccatgagaaggatcttagactctgccgagtttatcaaattcacggtcattagaccatttccaggacttgtgattaataaccagctggttgatcagagtgagtcagaaggccccgtgatacaagaatcagctgaaccaagccagttggaagttccagccacagaagaaataaaagagactgatggaagctctcagatcaagcaagaaccagaccccacgtggtagacctcttccctcctaggcaaaaccatctggatcacctaacagtcagaggtcagtatctcagcgtgtgaattatagaggaaatacagagagaacctcttccacttttacttttcgtccaaataaaatgcatggtgtaccagaagttgaagatcgggttgaggattggggctagctcgatgacactaaggccccaacatcgcgggacctgctgtggcgcggattcttaggaacgctgttctagccggccccctctccaggggtcgccgtggccggcattatttcctagttcttcttgtaaccctgaggtgccagcgcggggagtgaggaggggtcagggggctaaggatgcaacctctgacgttctgcgccttcctaggagagtcttacatgtgttgagatttcacaagcaatgcgagttgtaaaataccagctctacaagaagctaggctctgtgacggcatagttttcagtagctttatcacaatattcacaatggagaattatatgacatggtagcagaaataggcccttttatgtgttgcttctattttacctcaaattgtagatatagggtaatcaataaaatccatccatgcctttcacacactaagt

SEQ ID NO: 4753 - protein, 518 aa, Homo sapiens; identical to SEQ ID NO: 4051

SEQ ID NO: 4754 - DNA, 7825 bp, Homo sapiens
aaaaaaaaaaaaaaaaaaaaaaaaaaaagaaaaaagaaaaaaaaaaggaggaggaggaggagggtgagagagaagctgggagagcagagaaaaggggccaccggtcgcccccccgcttccccgcacgcgctctccagccgcggccgcccgcctgccgcggtcaccccggcctctgcctctgtcccccagtgatcggatcaaggcgctgagcgaggccctgcctgcggggcggccatgcggcggtgacaggagcgcgaccgacacgcacgggcccctcgccccctctcgcctcccgtccgctcgccagctcccctcagccgaggctgctccgcggcggccgcagcccgcgcgcggcccacactcgcctccccgttgaagatgaggagtcctcggagagcaggatggtggtgacattcctcatgtcagctctcgagtccatgtgtaaagaactggccaagtccaaagccgaagtggcctgcattgcagtgtatgaaacagacgtgtttgtcgtcggaactgaaagaggacgtgcttttgtcaataccagaaaggattttcaaaaagattttgtaaaatattgtgttgaagaagaagaaaaagctgcagagatgcataaaatgaaatctacaacccaggcaaatcggatgagtgtagatgctgtagaaattgaaacactcagaaaaacagttgaggactatttctgcttttgctatgggaaagctttaggcaaatccacagtggtacctgtaccatatgagaagatgctgcgagaccagtcggctgtggtagtgcaggggcttccggaaggtgttgcctttaaacaccccgagaactatgatcttgcaaccctgaaatggattttggagaacaaagcagggatttcattcatcattaagagaccttttttagagccaaagaagcatgtaggtggtcgtgtgatggtaacagatgctgacaggtcaatactatctccaggtggaagttgtggccccatcaaagtgaaaactgaacccacagaagattctggcatttccctggaaatggcagctgtgacagtaaaggaagaatcagaagatcctgattattatcaatataacattcaagcaggcccttctgaaactgatgatgttgatgaaaaacagcccctatcgaagcctttgcaaggaagccaccattcttcagagggcaatgaaggcacagaaatggaagtaccagcagaagatgatgattattctccaccgtctaagagaccaaaggccaatgagctaccgcagccaccagtcccggaacccgccaatgctgggaagcggaaagtgagggagttcaacttcgagaaatggaatgctcgcatcactgatctacgtaaacaagttgaagaattgtttgaaaggaaatatgctcaagccataaaagccaaaggtccggtgacgatcccgtaccctcttttccagtctcatgttgaagatctttatgtagaaggacttcctgaaggaattccttttagaaggccatctacttacggaattcctcgcctggagaggatattacttgcaaaggaaaggattcgttttgtgattaagaaacatgagcttctgaattcaacacgtgaagatttacagcttgataagccagcttcaggagtaaaggaagaatggtatgccagaatcactaaattaagaaagatggtggatcagcttttctgcaaaaaatttgcggaagccttggggagcactgaagccaaggctgtaccgtaccaaaaatttgaggcacacccgaatgatctgtacgtggaaggactgccagaaaacattcctttccgaagtccctcatggtatggaatcccaaggctggaaaaaatcattcaagtgggcaatcgaattaaatttgttattaaaagaccagaacttctgactcacagtaccactgaagttactcagccaagaacgaatacaccagtcaaagaagattggaatgtcagaattaccaagctacggaagcaagtggaagagatttttaatttgaaatttgctcaagctcttggactcaccgaggcagtaaaagtaccatatcctgtgtttgaatcaaacccggagttcttgaaaggatcgtccgcgggagtaataaaatcaagttcgttgttaaaaaacctgaactagttatttcctacttgcctcctgggatggctagtaaaataaacactaaagctttgcagtcccccaaaagaccacgaagtcctgggagtaattcaaaggttcctgaaattgaggtcaccgtggaaggccctaataacaacaatcctcaaacctcagctgttcgaaccccgacccagactaacggttctaacgttcccttcaagccacgagggagagagttttcctttgaggcctggaatgccaaaatcacggacctaaaacagaaagttgaaaatctcttcaatgagaaatgtggggaagctcttggccttaaacaagctgtgaaggtgccgttcgcgttatttgagtctttcccggaagacttttatgtggaaggcttacctgagggtgtgccattccgaagaccatcgacttttggcattccgaggctggagaagatactcagaaacaaagccaaaattaagttcatcattaaaaagcccgaaatgtttgagacggcgattaaggagagcacctcctctaagagccctcccagaaaaataaattcatcacccaatgttaatactactgcatcaggtgttgaagaccttaacatcattcaggtgacaattccagatgatgataatgaaagactctcgaaagttgaaaaagctagacagctaagagaacaagtgaatgacctctttagtcggaaatttggtgaagctattggtatgggttttcctgtgaaagttccctacaggaaaatcacaattaaccctggctgtgtggtggttgatggcatgcccccgggggtgtccttcaaagcccccagctacctggaaatcagctccatgagaaggatcttagactctgccgagtttatcaaattcacggtcattaggtaagtgagagtttcctgcttagtcacaggagcgaatctggagctcatgaggctgactcttctaaaatgcagccacaggtagtcatcgaatccggcttcctatgctgtgcaatcaacaaatcaaaataacttgtgtcatcattagaatgtcagatgtgcttctacgaactaagctgactcttttaattctttggcaaagggttggcaaactaggactgtttgccaaattcaggctgcctcctatttttagagtcttcctgaaacacagctacacccgtattatccatggctgctttcctgtcacagtgagtaagtagctgggactgagaaggcatggcctccaaagtctaaaatatttactctctagcactttgtagaaaaaccttagctaggcacagtggctaacgcctgtaatcccagcattttgggaggccaaggcaggcagatcacctgaggtcaggagttccagaccagcctggccaacatggtgaaatcccatctctacaaaaataaaacagttagctgggcatgatggcgggtgcctgtaatcccagctactcgggaggctgaggcaggatagtcgcttgaacccaggaggtggaggttgcaatgagccaagatcatgccactgcactccagcctggacgacagagtgagactccatcacaagaaaaaaagaactttgtcaacctctgtcttagggcgccttgtcacaggcttcgggtcagacggattcaaccttgcatcagccatttgttagccaggtcactctgttctttgtctgtaaatgagattgatcgttgttcccactgagagtgtcagctccttcccgtagagcaggcatgatgattgtactcacctctgacaccattgtgagtgccacattccttcccacgtccttgtcactgtaagagatgcccacctgagcaccaaccccaggttatcttcccctttgtcttccagccccccagaaacagctacgactcaacctacccaatcatttcatcatcagattgccactgtctctagttcaggtctcttgggactggcactcagaaatctcataataaatcctcttgaggcttctcatacactcgtcttcttccaatcttctttccctcaaaatctcatattttggttccacttcacccaccgtcattctccatatcactcccaggagttaggcaaaaagccccttccgttcttccgtatgttaaacttagaatcactctgttccctgctctgcgtttctattttttgtttttcctccatttactagtagcttaacactttctaacagtgttcttattattgatacgtatctatctcttccataagcttataaggtcacggataatacttctcattgtagtacgtaaatgacgtgggctagatatgagttgaataaacagttatacctgtaaattcttacagagtgaaaataaattgttatactttacaatttgtttctctctttagaccatttccaggacttgtgattaataaccgtgagtattttgtgaagtgttttgtttttgttttttcctggggtctgacgtgtgtgcgtgtgagtgtgtatacatgcttaacgtatatcacgttacttcacctatgtcagtaaccaggccaaatacttgttttagccctcagtaaaaacaccaggcacttcctagttgtaaaattattcaagcttcttaacttcctatcctcgatgcacttaatcataaaatggtaataatagcaccgattttgggggagtcgttccagtagatggaaagcatctggaacaggtgtcagcaagctcctgccgacgtgtatgcataaagttttattgaaaccaccatcgtgtccatttgtttatggcagaactgagagatggcagcagcaagtgtgtgcctgcaaaacctaaaatatttactaattggctctgcaagaaaagagtttgcatccccctaacctagaacagtgtctagcctctagtatgtgtttagcctacagtatgtgctcagcgaatacaatctatatttattactgcttttatgactgttataattactgtgcttggatttcgttacaaagtaagtcacaatgtgcctgcttctgttagtatttcagcacagtgcctggcacacatggggctctcaaatattgctgagcgagtgaacaaatgtcctttcaattccttaacgttgatgtcattttcaatagtattttgagccaaacttaattttgcgagtgtgttttgttttcttaactttattattaaaaatgtataaaagtgaggccaggcgtggtggctcacgcctgtaatcccagcagtttgggaggctgaggcaggcggatcagttgaggttgggagttggagaccagcccgtccaacatggtgaaagcctgtctctactaaaaatacaaaaatcagctgggtgtggtggcgcgtgcctgtaatcccagctactcaggaggctgaggcaggagagttgcttgaatcctagaggtggaggttgcagtgagctgagatcgtgccattgcactccagcctgggcaacaagagcaaaactctgtcccaataaataaataaataaaatgttctcttttgttcctgttcttgtgcggtagtgtggtatagagttttatggtaattactgtgaattagtgattctgagggacatatcagaactctgaggtttgtttccttctcatcttgagggaaacagcaaatgtatgttaaaatgcttttccaagggaacaacacatccttacattatttaaaccaatctgcttcattttcagagctggttgatcagagtgagtcagaaggccccgtgatacaagaatcagctgaaccaagccagttggaagttccagccacagaagaaataaaagagactgatggaagctctcagatcaagcaagaaccagaccccacgtggtagacctcttccctcctagggtaaatcagcttctgtgtcagggatgctgtgtggtgtccatctgaaccccctgcatacgcgtagctaatgtgatctccccactttcacataagatggtggccctgccttcagggaatgtgggagccaggtgggagccttcccggatatttaagctagaagattctacagggagattctccttggatcaatatatgtctctcagtcaaagatgtaaaagcacttttgccttaaaaagaatgttctgtttctaaatagagtcaacgttgtcctcctcattggaattcactatgagtcagaatcattagactgacttttttttttccatagtaatagtattttgcagagtctcacagagctgcagatcttttgttcatcttgcagagttaacaagtctgatcctgttagtccagatttcttaaatttggccaagttataataggagcagtagcttgagacccgaagtcaggaaactttgacaatggatttttttttttaatccagagacttgtactggaatttgccttaccctgtcagctcatggacttaaggtttcatcccgctttatgagtgcttctgaatccaagtcattgttacctgaatttgcaaattaagttgtgatattcgtgactgttaaattcctgtaattagattaacctctttgcttgcttgtttgttttctctcctattttagcttaaagtatcagtggttgagaagagcttttcggacctgttactaccccaagctgtgtaatatacttgtataacagaaataccttctatacaaacctttttttctacttttagatagaaatgtctactttttcagcagttctgtgaattaaagagcagagtgactgtgggtctggaatggctggtgtacttgggaatgtactatcaggattttacagcaatgctgggaaatgacagggaaaatgacaggaatgaatctcaccagattttttatgtactcagcagagccttgagttacggtgtttattttccaatcaagtgaagatatctcctacttctcctactggaacatctcagcttctgcagtgaagaaaaattcctgtgatagttcagttctttagtttttctatttgaaaaaaaaaaatcatttaaatgatcctttgttcacggctctccttaatgactgagtgaacagttcctatctgtatatttgactaaaccttttcctaagctatctctcatggttcctatgtttttttatcataattaaaagcaaaaccatctggatcacctaacagtcagaggtcagtatctcagcgtgtgaattatagaggaaatacagagagaacctcttccacttttacttttcgtccaaataaaatgcatggtgtaccagaagttgaagatcgggttgaggattggggctagctcgatgacactaaggccccaacatcgcgggacctgctgtggcgcggattcttaggaacgctgttctagccggccccctctccaggggtcgccgtggccggcattatttcctagttcttcttgtaaccctgaggtgccagcgcggggagtgaggaggggtcagggggctaaggatgcaacctctgacgttctgcgccttcctaggagagtcttacatgtgttgagatttcacaagcaatgcgagttgtaaaataccagctctacaagaagctaggctctgtgacggcatagttttcagtagctttatcacaatattcacaatggagaattatatgacatggtagcagaaataggcccttttatgtgttgcttctattttacctcaaattgtagatatagggtaatcaataaaatccatccatgcctttcacacactaagt

SEQ ID NO: 4755 - protein, 584 aa, Homo sapiens; identical to SEQ ID NO: 4077

SEQ ID NO: 4756 - DNA, 5047 bp, Homo sapiens
aaaaaaaaaaaaaaaaaaaaaaaaaaaagaaaaaagaaaaaaaaaaggaggaggaggaggagggtgagagagaagctgggagagcagagaaaaggggccaccggtcgcccccccgcttccccgcacgcgctctccagccgcggccgcccgcctgccgcggtcaccccggcctctgcctctgtcccccagtgatcggatcaaggcgctgagcgaggccctgcctgcggggcggccatgcggcggtgacaggagcgcgaccgacacgcacgggcccctcgccccctctcgcctcccgtccgctcgccagctcccctcagccgaggctgctccgcggcggccgcagcccgcgcgcggcccacactcgcctcccctcggcacccccggccccggagctgcctggaggcggccgcactcggtgtaaagaactggccaagtccaaagccgaagtggcctgcattgcagtgtatgaaacagacgtgtttgtcgtcggaactgaaagaggacgtgcttttgtcaataccagaaaggattttcaaaaagattttgtaaaatattgtgttgaagaagaagaaaaagctgcagagatgcataaaatgaaatctacaacccaggcaaatcggatgagtgtagatgctgtagaaattgaaacactcagaaaaacagttgaggactatttctgcttttgctatgggaaagctttaggcaaatccacagtggtacctgtaccatatgagaagatgctgcgagaccagtcggctgtggtagtgcaggggcttccggaaggtgttgcctttaaacaccccgagaactatgatcttgcaaccctgaaatggattttggagaacaaagcagggatttcattcatcattaagagaccttttttagagccaaagaagcatgtaggtggtcgtgtgatggtaacagatgctgacaggtcaatactatctccaggtggaagttgtggccccatcaaagtgaaaactgaacccacagaagattctggcatttccctggaaatggcagctgtgacagtaaaggaagaatcagaagatcctgattattatcaatataacattcaagcaggcccttctgaaactgatgatgttgatgaaaaacagcccctatcgaagcctttgcaaggaagccaccattcttcagagggcaatgaaggcacagaaatggaagtaccagcagaagattctactcaacatgtcccttcagaaacaagtgaggaccctgaagttgaggtgactattgaagatgatgattattctccaccgtctaagagaccaaaggccaatgagctaccgcagccaccagtcccggaacccgccaatgctgggaagcggaaagtgagggagttcaacttcgagaaatggaatgctcgcatcactgatctacgtaaacaagttgaagaattgtttgaaaggaaatatgctcaagccataaaagccaaaggtccggtgacgatcccgtaccctcttttccagtctcatgttgaagatctttatgtagaaggacttcctgaaggaattccttttagaaggccatctacttacggaattcctcgcctggagaggatattacttgcaaaggaaaggattcgttttgtgattaagaaacatgagcttctgaattcaacacgtgaagatttacagcttgataagccagcttcaggagtaaaggaagaatggtatgccagaatcactaaattaagaaagatggtggatcagcttttctgcaaaaaatttgcggaagccttggggagcactgaagccaaggctgtaccgtaccaaaaatttgaggcacacccgaatgatctgtacgtggaaggactgccagaaaacattcctttccgaagtccctcatggtatggaatcccaaggctggaaaaaatcattcaagtgggcaatcgaattaaatttgttattaaaagaccagaacttctgactcacagtaccactgaagttactcagccaagaacgaatacaccagctcaagctcttggactcaccgaggcagtaaaagtaccatatcctgtgtttgaatcaaacccggagttcttgtatgtggaaggcttgccagaggggattcccttccgaagccctacctggtttggaattccacgacttgaaaggatcgtccgcgggagtaataaaatcaagttcgttgttaaaaaacctgaactagttatttcctacttgcctcctgggatggctagtaaaataaacactaaagctttgcagtcccccaaaagaccacgaagtcctgggagtaattcaaaggttcctgaaattgaggtcaccgtggaaggccctaataacaacaatcctcaaacctcagctgttcgaaccccgacccagactaacggttctaacgttcccttcaagccacgagggagagagttttcctttgaggcctggaatgccaaaatcacggacctaaaacagaaagttgaaaatctcttcaatgagaaatgtggggaagctcttggccttaaacaagctgtgaaggtgccgttcgcgttatttgagtctttcccggaagacttttatgtggaaggcttacctgagggtgtgccattccgaagaccatcgacttttggcattccgaggctggagaagatactcagaaacaaagccaaaattaagttcatcattaaaaagcccgaaatgtttgagacggcgattaaggagagcacctcctctaagagccctcccagaaaaataaattcatcacccaatgttaatactactgcatcaggtgttgaagaccttaacatcattcaggtgacaattccagatgatgataatgaaagactctcgaaagttgaaaaagctagacagctaagagaacaagtgaatgacctctttagtcggaaatttggtgaagctattggtatgggttttcctgtgaaagttccctacaggaaaatcacaattaaccctggctgtgtggtggttgatggcatgcccccgggggtgtccttcaaagcccccagctacctggaaatcagctccatgagaaggatcttagactctgccgagtttatcaaattcacggtcattagaccatttccaggacttgtgattaataaccagctggttgatcagagtgagtcagaaggccccgtgatacaagaatcagctgaaccaagccagttggaagttccagccacagaaggtaaaaggacctcttccctcctagggtaaatcagcttctgtgtcagggatgctgtgtggtgtccatctgaaccccctgcatacgcgtagctaatgtgatctccccactttcacataagatggtggccctgccttcagggaatgtgggagccaggtgggagccttcccggatatttaagctagaagattctacagggagattctccttggatcaatatatgtctctcagtcaaagatgtaaaagcacttttgccttaaaaagaatgttctgtttctaaatagagtcaacgttgtcctcctcattggaattcactatgagtcagaatcattagactgacttttttttttccatagtaatagtattttgcagagtctcacagagctgcagatcttttgttcatcttgcagagttaacaagtctgatcctgttagtccagatttcttaaatttggccaagttataataggagcagtagcttgagacccgaagtcaggaaactttgacaatggatttttttttttaatccagagacttgtactggaatttgccttaccctgtcagctcatggacttaaggtttcatcccgctttatgagtgcttctgaatccaagtcattgttacctgaatttgcaaattaagttgtgatattcgtgactgttaaattcctgtaattagattaacctctttgcttgcttgtttgttttctctcctattttagcttaaagtatcagtggttgagaagagcttttcggacctgttactaccccaagctgtgtaatatacttgtataacagaaataccttctatacaaacctttttttctacttttagatagaaatgtctactttttcagcagttctgtgaattaaagagcagagtgactgtgggtctggaatggctggtgtacttgggaatgtactatcaggattttacagcaatgctgggaaatgacagggaaaatgacaggaatgaatctcaccagattttttatgtactcagcagagccttgagttacggtgtttattttccaatcaagtgaagatatctcctacttctcctactggaacatctcagcttctgcagtgaagaaaaattcctgtgatagttcagttctttagtttttctatttgaaaaaaaaaaatcatttaaatgatcctttgttcacggctctccttaatgactgagtgaacagttcctatctgtatatttgactaaaccttttcctaagctatctctcatggttcctatgtttttttatcataattaaaagcaaaaccatctggatcacctaacagtcagaggtcagtatctcagcgtgtgaattatagaggaaatacagagagaacctcttccacttttacttttcgtccaaataaaatgcatggtgtaccagaagttgaagatcgggttgaggattggggctagctcgatgacactaaggccccaacatcgcgggacctgctgtggcgcggattcttaggaacgctgttctagccggccccctctccaggggtcgccgtggccggcattatttcctagttcttcttgtaaccctgaggtgccagcgcggggagtgaggaggggtcagggggctaaggatgcaacctctgacgttctgcgccttcctaggagagtcttacatgtgttgagatttcacaagcaatgcgagttgtaaaataccagctctacaagaagctaggctctgtgacggcatagttttcagtagctttatcacaatattcacaatggagaattatatgacatggtagcagaaataggcccttttatgtgttgcttctattttacctcaaattgtagatatagggtaatcaataaaatccatccatgcctttcacacactaagt

SEQ ID NO: 4757 - protein, 875 aa, Homo sapiens
MHKMKSTTQANRMSVDAVEIETLRKTVEDYFCFCYGKALGKSTVVPVPYEKMLRDQSAVVVQGLPEGVAFKHPENYDLATLKWILENKAGISFIIKRPFLEPKKHVGGRVMVTDADRSILSPGGSCGPIKVKTEPTEDSGISLEMAAVTVKEESEDPDYYQYNIQAGPSETDDVDEKQPLSKPLQGSHHSSEGNEGTEMEVPAEDSTQHVPSETSEDPEVEVTIEDDDYSPPSKRPKANELPQPPVPEPANAGKRKVREFNFEKWNARITDLRKQVEELFERKYAQAIKAKGPVTIPYPLFQSHVEDLYVEGLPEGIPFRRPSTYGIPRLERILLAKERIRFVIKKHELLNSTREDLQLDKPASGVKEEWYARITKLRKMVDQLFCKKFAEALGSTEAKAVPYQKFEAHPNDLYVEGLPENIPFRSPSWYGIPRLEKIIQVGNRIKFVIKRPELLTHSTTEVTQPRTNTPAQALGLTEAVKVPYPVFESNPEFLYVEGLPEGIPFRSPTWFGIPRLERIVRGSNKIKFVVKKPELVISYLPPGMASKINTKALQSPKRPRSPGSNSKVPEIEVTVEGPNNNNPQTSAVRTPTQTNGSNVPFKPRGREFSFEAWNAKITDLKQKVENLFNEKCGEALGLKQAVKVPFALFESFPEDFYVEGLPEGVPFRRPSTFGIPRLEKILRNKAKIKFIIKKPEMFETAIKESTSSKSPPRKINSSPNVNTTASGVEDLNIIQVTIPDDDNERLSKVEKARQLREQVNDLFSRKFGEAIGMGFPVKVPYRKITINPGCVVVDGMPPGVSFKAPSYLEISSMRRILDSAEFIKFTVIRPFPGLVINNQLVDQSESEGPVIQESAEPSQLEVPATEGKRTSSLLG

SEQ ID NO: 4758 - DNA, 5163 bp, Homo sapiens
aaaaaaaaaaaaaaaaaaaaaaaaaaaagaaaaaagaaaaaaaaaaggaggaggaggaggagggtgagagagaagctgggagagcagagaaaaggggccaccggtcgcccccccgcttccccgcacgcgctctccagccgcggccgcccgcctgccgcggtcaccccggcctctgcctctgtcccccagtgatcggatcaaggcgctgagcgaggccctgcctgcggggcggccatgcggcggtgacaggagcgcgaccgacacgcacgggcccctcgccccctctcgcctcccgtccgctcgccagctcccctcagccgaggctgctccgcggcggccgcagcccgcgcgcggcccacactcgcctcccctcggcacccccggccccggagctgcctggaggcggccgcactcggggatcatggcccaagttgcaatgtccaccctccccgttgaagatgaggagtcctcggagagcaggatggtggtgacattcctcatgtcagctctcgagtccatgtgtaaagaactggccaagtccaaagccgaagtggcctgcattgcagtgtatgaaacagacgtgtttgtcgtcggaactgaaagaggacgtgcttttgtcaataccagaaaggattttcaaaaagattttgtaaaatattgtgttgaagaagaagaaaaagctgcagagatgcataaaatgaaatctacaacccaggcaaatcggatgagtgtagatgctgtagaaattgaaacactcagaaaaacagttgaggactatttctgcttttgctatgggaaagctttaggcaaatccacagtggtacctgtaccatatgagaagatgctgcgagaccagtcggctgtggtagtgcaggggcttccggaaggtgttgcctttaaacaccccgagaactatgatcttgcaaccctgaaatggattttggagaacaaagcagggatttcattcatcattaagagaccttttttagagccaaagaagcatgtaggtggtcgtgtgatggtaacagatgctgacaggtcaatactatctccaggtggaagttgtggccccatcaaagtgaaaactgaacccacagaagattctggcatttccctggaaatggcagctgtgacagtaaaggaagaatcagaagatcctgattattatcaatataacattcaaggaagccaccattcttcagagggcaatgaaggcacagaaatggaagtaccagcagaagattctactcaacatgtcccttcagaaacaagtgaggaccctgaagttgaggtgactattgaagatgatgattattctccaccgtctaagagaccaaaggccaatgagctaccgcagccaccagtcccggaacccgccaatgctgggaagcggaaagtgagggagttcaacttcgagaaatggaatgctcgcatcactgatctacgtaaacaagttgaagaattgtttgaaaggaaatatgctcaagccataaaagccaaaggtccggtgacgatcccgtaccctcttttccagtctcatgttgaagatctttatgtagaaggacttcctgaaggaattccttttagaaggccatctacttacggaattcctcgcctggagaggatattacttgcaaaggaaaggattcgttttgtgattaagaaacatgagcttctgaattcaacacgtgaagatttacagcttgataagccagcttcaggagtaaaggaagaatggtatgccagaatcactaaattaagaaagatggtggatcagcttttctgcaaaaaatttgcggaagccttggggagcactgaagccaaggctgtaccgtaccaaaaatttgaggcacacccgaatgatctgtacgtggaaggactgccagaaaacattcctttccgaagtccctcatggtatggaatcccaaggctggaaaaaatcattcaagtgggcaatcgaattaaatttgttattaaaagaccagaacttctgactcacagtaccactgaagttactcagccaagaacgaatacaccagtcaaagaagattggaatgtcagaattaccaagctacggaagcaagtggaagagatttttaatttgaaatttgctcaagctcttggactcaccgaggcagtaaaagtaccatatcctgtgtttgaatcaaacccggagttcttgtatgtggaaggcttgccagaggggattcccttccgaagccctacctggtttggaattccacgacttgaaaggatcgtccgcgggagtaataaaatcaagttcgttgttaaaaaacctgaactagttatttcctacttgcctcctgggatggctagtaaaataaacactaaagctttgcagtcccccaaaagaccacgaagtcctgggagtaattcaaaggttcctgaaattgaggtcaccgtggaaggccctaataacaacaatcctcaaacctcagctgttcgaaccccgacccagactaacggttctaacgttcccttcaagccacgagggagagagttttcctttgaggcctggaatgccaaaatcacggacctaaaacagaaagttgaaaatctcttcaatgagaaatgtggggaagctcttggccttaaacaagctgtgaaggtgccgttcgcgttatttgagtctttcccggaagacttttatgtggaaggcttacctgagggtgtgccattccgaagaccatcgacttttggcattccgaggctggagaagatactcagaaacaaagccaaaattaagttcatcattaaaaagcccgaaatgtttgagacggcgattaaggagagcacctcctctaagagccctcccagaaaaataaattcatcacccaatgttaatactactgcatcaggtgttgaagaccttaacatcattcaggtgacaattccagatgatgataatgaaagactctcgaaagttgaaaaagctagacagctaagagaacaagtgaatgacctctttagtcggaaatttggtgaagctattggtatgggttttcctgtgaaagttccctacaggaaaatcacaattaaccctggctgtgtggtggttgatggcatgcccccgggggtgtccttcaaagcccccagctacctggaaatcagctccatgagaaggatcttagactctgccgagtttatcaaattcacggtcattagaccatttccaggacttgtgattaataaccagctggttgatcagagtgagtcagaaggccccgtgatacaagaatcagctgaaccaagccagttggaagttccagccacagaaggtaaaaggacctcttccctcctagggtaaatcagcttctgtgtcagggatgctgtgtggtgtccatctgaaccccctgcatacgcgtagctaatgtgatctccccactttcacataagatggtggccctgccttcagggaatgtgggagccaggtgggagccttcccggatatttaagctagaagattctacagggagattctccttggatcaatatatgtctctcagtcaaagatgtaaaagcacttttgccttaaaaagaatgttctgtttctaaatagagtcaacgttgtcctcctcattggaattcactatgagtcagaatcattagactgacttttttttttccatagtaatagtattttgcagagtctcacagagctgcagatcttttgttcatcttgcagagttaacaagtctgatcctgttagtccagatttcttaaatttggccaagttataataggagcagtagcttgagacccgaagtcaggaaactttgacaatggatttttttttttaatccagagacttgtactggaatttgccttaccctgtcagctcatggacttaaggtttcatcccgctttatgagtgcttctgaatccaagtcattgttacctgaatttgcaaattaagttgtgatattcgtgactgttaaattcctgtaattagattaacctctttgcttgcttgtttgttttctctcctattttagcttaaagtatcagtggttgagaagagcttttcggacctgttactaccccaagctgtgtaatatacttgtataacagaaataccttctatacaaacctttttttctacttttagatagaaatgtctactttttcagcagttctgtgaattaaagagcagagtgactgtgggtctggaatggctggtgtacttgggaatgtactatcaggattttacagcaatgctgggaaatgacagggaaaatgacaggaatgaatctcaccagattttttatgtactcagcagagccttgagttacggtgtttattttccaatcaagtgaagatatctcctacttctcctactggaacatctcagcttctgcagtgaagaaaaattcctgtgatagttcagttctttagtttttctatttgaaaaaaaaaaatcatttaaatgatcctttgttcacggctctccttaatgactgagtgaacagttcctatctgtatatttgactaaaccttttcctaagctatctctcatggttcctatgtttttttatcataattaaaagcaaaaccatctggatcacctaacagtcagaggtcagtatctcagcgtgtgaattatagaggaaatacagagagaacctcttccacttttacttttcgtccaaataaaatgcatggtgtaccagaagttgaagatcgggttgaggattggggctagctcgatgacactaaggccccaacatcgcgggacctgctgtggcgcggattcttaggaacgctgttctagccggccccctctccaggggtcgccgtggccggcattatttcctagttcttcttgtaaccctgaggtgccagcgcggggagtgaggaggggtcagggggctaaggatgcaacctctgacgttctgcgccttcctaggagagtcttacatgtgttgagatttcacaagcaatgcgagttgtaaaataccagctctacaagaagctaggctctgtgacggcatagttttcagtagctttatcacaatattcacaatggagaattatatgacatggtagcagaaataggcccttttatgtgttgcttctattttacctcaaattgtagatatagggtaatcaataaaatccatccatgcctttcacacactaagt

SEQ ID NO: 4759 - protein, 968 aa, Homo sapiens
MAQVAMSTLPVEDEESSESRMVVTFLMSALESMCKELAKSKAEVACIAVYETDVFVVGTERGRAFVNTRKDFQKDFVKYCVEEEEKAAEMHKMKSTTQANRMSVDAVEIETLRKTVEDYFCFCYGKALGKSTVVPVPYEKMLRDQSAVVVQGLPEGVAFKHPENYDLATLKWILENKAGISFIIKRPFLEPKKHVGGRVMVTDADRSILSPGGSCGPIKVKTEPTEDSGISLEMAAVTVKEESEDPDYYQYNIQGSHHSSEGNEGTEMEVPAEDSTQHVPSETSEDPEVEVTIEDDDYSPPSKRPKANELPQPPVPEPANAGKRKVREFNFEKWNARITDLRKQVEELFERKYAQAIKAKGPVTIPYPLFQSHVEDLYVEGLPEGIPFRRPSTYGIPRLERILLAKERIRFVIKKHELLNSTREDLQLDKPASGVKEEWYARITKLRKMVDQLFCKKFAEALGSTEAKAVPYQKFEAHPNDLYVEGLPENIPFRSPSWYGIPRLEKIIQVGNRIKFVIKRPELLTHSTTEVTQPRTNTPVKEDWNVRITKLRKQVEEIFNLKFAQALGLTEAVKVPYPVFESNPEFLYVEGLPEGIPFRSPTWFGIPRLERIVRGSNKIKFVVKKPELVISYLPPGMASKINTKALQSPKRPRSPGSNSKVPEIEVTVEGPNNNNPQTSAVRTPTQTNGSNVPFKPRGREFSFEAWNAKITDLKQKVENLFNEKCGEALGLKQAVKVPFALFESFPEDFYVEGLPEGVPFRRPSTFGIPRLEKILRNKAKIKFIIKKPEMFETAIKESTSSKSPPRKINSSPNVNTTASGVEDLNIIQVTIPDDDNERLSKVEKARQLREQVNDLFSRKFGEAIGMGFPVKVPYRKITINPGCVVVDGMPPGVSFKAPSYLEISSMRRILDSAEFIKFTVIRPFPGLVINNQLVDQSESEGPVIQESAEPSQLEVPATEGKRTSSLLG

SEQ ID NO: 4760 - DNA, 4370 bp, Homo sapiens
aaaaaaaaaaaaaaaaaaaaaaaaaaaagaaaaaagaaaaaaaaaaggaggaggaggaggagggtgagagagaagctgggagagcagagaaaaggggccaccggtcgcccccccgcttccccgcacgcgctctccagccgcggccgcccgcctgccgcggtcaccccggcctctgcctctgtcccccagtgatcggatcaaggcgctgagcgaggccctgcctgcggggcggccatgcggcggtgacaggagcgcgaccgacacgcacgggcccctcgccccctctcgcctcccgtccgctcgccagctcccctcagccgaggctgctccgcggcggccgcagcccgcgcgcggcccacactcgcctccccgttgaagatgaggagtcctcggagagcaggatggtggtgacattcctcatgtcagctctcgagtccatgtgtaaagaactggccaagtccaaagccgaagtggcctgcattgcagtgtatgaaacagacgtgtttgtcgtcggaactgaaagaggacgtgcttttgtcaataccagaaaggattttcaaaaagattttgtaaaatattgtgttgaagaagaagaaaaagctgcagagatgcataaaatgaaatctacaacccaggcaaatcggatgagtgtagatgctgtagaaattgaaacactcagaaaaacagttgaggactatttctgcttttgctatgggaaagctttaggcaaatccacagtggtacctgtaccatatgagaagatgctgcgagaccagtcggctgtggtagtgcaggggcttccggaaggtgttgcctttaaacaccccgagaactatgatcttgcaaccctgaaatggattttggagaacaaagcagggatttcattcatcattaagagaccttttttagagccaaagaagcatgtaggtggtcgtgtgatggtaacagatgctgacaggtcaatactatctccaggtggaagttgtggccccatcaaagtgaaaactgaacccacagaagattctggcatttccctggaaatggcagctgtgacagtaaaggaagaatcagaagatcctgattattatcaatataacattcaaggaagccaccattcttcagagggcaatgaaggcacagaaatggaagtaccagcagaagattctactcaacatgtcccttcagaaacaagtgaggaccctgaagttgaggtgactattgaagatgatgattattctccaccgtctaagagaccaaaggccaatgagctaccgcagccaccagtcccggaacccgccaatgctgggaagcggaaagtgagggagttcaacttcgagaaatggaatgctcgcatcactgatctacgtaaacaagttgaagaattgtttgaaaggaaatatgctcaagccataaaagccaaaggtccggtgacgatcccgtaccctcttttccagtctcatgttgaagatctttatgtagaaggacttcctgaaggaattccttttagaaggccatctacttacggaattcctcgcctggagaggatattacttgcaaaggaaaggattcgttttgtgattaagaaacatgagcttctgaattcaacacgtgaagatttacagcttgataagccagcttcaggagtaaaggaagaatggtatgccagaatcactaaattaagaaagatggtggatcagcttttctgcaaaaaatttgcggaagccttggggagcactgaagccaaggctgtaccgtaccaaaaatttgaggcacacccgaatgatctgtacgtggaaggactgccagaaaacattcctttccgaagtccctcatggtatggaatcccaaggctggaaaaaatcattcaagtgggcaatcgaattaaatttgttattaaaagaccagaacttctgactcacagtaccactgaagttactcagccaagaacgaatacaccagctcaagctcttggactcaccgaggcagtaaaagtaccatatcctgtgtttgaatcaaacccggagttcttgtatgtggaaggcttgccagaggggattcccttccgaagccctacctggtttggaattccacgacttgaaaggatcgtccgcgggagtaataaaatcaagttcgttgttaaaaaacctgaactagttatttcctacttgcctcctgggatggctagtaaaataaacactaaagctttgcagtcccccaaaagaccacgaagtcctgggagtaattcaaaggttcctgaaattgaggtcaccgtggaaggccctaataacaacaatcctcaaacctcagctgttcgaaccccgacccagactaacggttctaacgttcccttcaagccacgagggagagagttttcctttgaggcctggaatgccaaaatcacggacctaaaacagaaagttgaaaatctcttcaatgagaaatgtggggaagctcttggccttaaacaagctgtgaaggtgccgttcgcgttatttgagtctttcccggaagacttttatgtggaaggcttacctgagggtgtgccattccgaagaccatcgacttttggcattccgaggctggagaagatactcagaaacaaagccaaaattaagttcatcattaaaaagcccgaaatgtttgagacggcgattaaggagagcacctcctctaagagccctcccagaaaaataaattcatcacccaatgttaatactactgcatcaggtgttgaagaccttaacatcattcaggtgacaattccagatgatgataatgaaagactctcgaaagttgaaaaagctagacagctaagagaacaagtgaatgacctctttagtcggaaatttggtgaagctattggtatgggttttcctgtgaaagttccctacaggaaaatcacaattaaccctggctgtgtggtggttgatggcatgcccccgggggtgtccttcaaagcccccagctacctggaaatcagctccatgagaaggatcttagactctgccgagtttatcaaattcacggtcattagaccatttccaggacttgtgattaataaccagctggttgatcagagtgagtcagaaggccccgtgatacaagaatcagctgaaccaagccagttggaagttccagccacagaagaaataaaagagactgatggaagctctcagatcaagcaagaaccagaccccacgtggtagacctcttccctcctaggcttaaagtatcagtggttgagaagagcttttcggacctgttactaccccaagctgtgtaatatacttgtataacagaaataccttctatacaaacctttttttctacttttagatagaaatgtctactttttcagcagttctgtgaattaaagagcagagtgactgtgggtctggaatggctggtgtacttgggaatgtactatcaggattttacagcaatgctgggaaatgacagggaaaatgacaggaatgaatctcaccagattttttatgtactcagcagagccttgagttacggtgtttattttccaatcaagtgaagatatctcctacttctcctactggaacatctcagcttctgcagtgaagaaaaattcctgtgatagttcagttctttagtttttctatttgaaaaaaaaaaatcatttaaatgatcctttgttcacggctctccttaatgactgagtgaacagttcctatctgtatatttgactaaaccttttcctaagctatctctcatggttcctatgtttttttatcataattaaaagcaaaaccatctggatcacctaacagtcagaggtcagtatctcagcgtgtgaattatagaggaaatacagagagaacctcttccacttttacttttcgtccaaataaaatgcatggtgtaccagaagttgaagatcgggttgaggattggggctagctcgatgacactaaggccccaacatcgcgggacctgctgtggcgcggattcttaggaacgctgttctagccggccccctctccaggggtcgccgtggccggcattatttcctagttcttcttgtaaccctgaggtgccagcgcggggagtgaggaggggtcagggggctaaggatgcaacctctgacgttctgcgccttcctaggagagtcttacatgtgttgagatttcacaagcaatgcgagttgtaaaataccagctctacaagaagctaggctctgtgacggcatagttttcagtagctttatcacaatattcacaatggagaattatatgacatggtagcagaaataggcccttttatgtgttgcttctattttacctcaaattgtagatatagggtaatcaataaaatccatccatgcctttcacacactaagt

SEQ ID NO: 4761 - protein, 934 aa, Homo sapiens; identical to SEQ ID NO: 4085

SEQ ID NO: 4762 - DNA, 7205 bp, Homo sapiens
aaaaaaaaaaaaaaaaaaaaaaaaaaaagaaaaaagaaaaaaaaaaggaggaggaggaggagggtgagagagaagctgggagagcagagaaaaggggccaccggtcgcccccccgcttccccgcacgcgctctccagccgcggccgcccgcctgccgcggtcaccccggcctctgcctctgtcccccagtgatcggatcaaggcgctgagcgaggccctgcctgcggggcggccatgcggcggtgacaggagcgcgaccgacacgcacgggcccctcgccccctctcgcctcccgtccgctcgccagctcccctcagccgaggctgctccgcggcggccgcagcccgcgcgcggcccacactcgcctcccctcggcacccccggccccggagctgcctggaggcggccgcactcggggatcatggcccaagttgcaatgtccaccctccccgttgaagatgaggagtcctcggagagcaggatggtggtgacattcctcatgtcagctctcgagtccatgtgtaaagaactggccaagtccaaagccgaagtggcctgcattgcagtgtatgaaacagacgtgtttgtcgtcggaactgaaagaggacgtgcttttgtcaataccagaaaggattttcaaaaagattttgtaaaatattgtgttgaagaagaagaaaaagctgcagagatgcataaaatgaaatctacaacccaggcaaatcggatgagtgtagatgctgtagaaattgaaacactcagaaaaacagttgaggactatttctgcttttgctatgggaaagctttaggcaaatccacagtggtacctgtaccatatgagaagatgctgcgagaccagtcggctgtggtagtgcaggggcttccggaaggtgttgcctttaaacaccccgagaactatgatcttgcaaccctgaaatggattttggagaacaaagcagggatttcattcatcattaagagaccttttttagagccaaagaagcatgtaggtggtcgtgtgatggtaacagatgctgacaggtcaatactatctccaggtggaagttgtggccccatcaaagtgaaaactgaacccacagaagattctggaagccaccattcttcagagggcaatgaaggcacagaaatggaagtaccagcagaagattctactcaacatgtcccttcagaaacaagtgaggaccctgaagttgaggtgactattgaagatgatgattattctccaccgtctaagagaccaaaggccaatgagctaccgcagccaccagtcccggaacccgccaatgctgggaagcggaaagtgagggagttcaacttcgagaaatggaatgctcgcatcactgatctacgtaaacaagttgaagaattgtttgaaaggaaatatgctcaagccataaaagccaaaggtccggtgacgatcccgtaccctcttttccagtctcatgttgaagatctttatgtagaaggacttcctgaaggaattccttttagaaggccatctacttacggaattcctcgcctggagaggatattacttgcaaaggaaaggattcgttttgtgattaagaaacatgagcttctgaattcaacacgtgaagatttacagcttgataagccagcttcaggagtaaaggaagaatggtatgccagaatcactaaattaagaaagatggtggatcagcttttctgcaaaaaatttgcggaagccttggggagcactgaagccaaggctgtaccgtaccaaaaatttgaggcacacccgaatgatctgtacgtggaaggactgccagaaaacattcctttccgaagtccctcatggtatggaatcccaaggctggaaaaaatcattcaagtgggcaatcgaattaaatttgttattaaaagaccagaacttctgactcacagtaccactgaagttactcagccaagaacgaatacaccagtcaaagaagattggaatgtcagaattaccaagctacggaagcaagtggaagagatttttaatttgaaatttgctcaagctcttggactcaccgaggcagtaaaagtaccatatcctgtgtttgaatcaaacccggagttcttgtatgtggaaggcttgccagaggggattcccttccgaagccctacctggtttggaattccacgacttgaaaggatcgtccgcgggagtaataaaatcaagttcgttgttaaaaaacctgaactagttatttcctacttgcctcctgggatggctagtaaaataaacactaaagctttgcagtcccccaaaagaccacgaagtcctgggagtaattcaaaggttcctgaaattgaggtcaccgtggaaggccctaataacaacaatcctcaaacctcagctgttcgaaccccgacccagactaacggttctaacgttcccttcaagccacgagggagagagttttcctttgaggcctggaatgccaaaatcacggacctaaaacagaaagttgaaaatctcttcaatgagaaatgtggggaagctcttggccttaaacaagctgtgaaggtgccgttcgcgttatttgagtctttcccggaagacttttatgtggaaggcttacctgagggtgtgccattccgaagaccatcgacttttggcattccgaggctggagaagatactcagaaacaaagccaaaattaagttcatcattaaaaagcccgaaatgtttgagacggcgattaaggagagcacctcctctaagagccctcccagaaaaataaattcatcacccaatgttaatactactgcatcaggtgttgaagaccttaacatcattcaggtgacaattccagatgatgataatgaaagactctcgaaagttgaaaaagctagacagctaagagaacaagtgaatgacctctttagtcggaaatttggtgaagctattggtatgggttttcctgtgaaagttccctacaggaaaatcacaattaaccctggctgtgtggtggttgatggcatgcccccgggggtgtccttcaaagcccccagctacctggaaatcagctccatgagaaggatcttagactctgccgagtttatcaaattcacggtcattaggtaagtgagagtttcctgcttagtcacaggagcgaatctggagctcatgaggctgactcttctaaaatgcagccacaggtagtcatcgaatccggcttcctatgctgtgcaatcaacaaatcaaaataacttgtgtcatcattagaatgtcagatgtgcttctacgaactaagctgactcttttaattctttggcaaagggttggcaaactaggactgtttgccaaattcaggctgcctcctatttttagagtcttcctgaaacacagctacacccgtattatccatggctgctttcctgtcacagtgagtaagtagctgggactgagaaggcatggcctccaaagtctaaaatatttactctctagcactttgtagaaaaaccttagctaggcacagtggctaacgcctgtaatcccagcattttgggaggccaaggcaggcagatcacctgaggtcaggagttccagaccagcctggccaacatggtgaaatcccatctctacaaaaataaaacagttagctgggcatgatggcgggtgcctgtaatcccagctactcgggaggctgaggcaggatagtcgcttgaacccaggaggtggaggttgcaatgagccaagatcatgccactgcactccagcctggacgacagagtgagactccatcacaagaaaaaaagaactttgtcaacctctgtcttagggcgccttgtcacaggcttcgggtcagacggattcaaccttgcatcagccatttgttagccaggtcactctgttctttgtctgtaaatgagattgatcgttgttcccactgagagtgtcagctccttcccgtagagcaggcatgatgattgtactcacctctgacaccattgtgagtgccacattccttcccacgtccttgtcactgtaagagatgcccacctgagcaccaaccccaggttatcttcccctttgtcttccagccccccagaaacagctacgactcaacctacccaatcatttcatcatcagattgccactgtctctagttcaggtctcttgggactggcactcagaaatctcataataaatcctcttgaggcttctcatacactcgtcttcttccaatcttctttccctcaaaatctcatattttggttccacttcacccaccgtcattctccatatcactcccaggagttaggcaaaaagccccttccgttcttccgtatgttaaacttagaatcactctgttccctgctctgcgtttctattttttgtttttcctccatttactagtagcttaacactttctaacagtgttcttattattgatacgtatctatctcttccataagcttataaggtcacggataatacttctcattgtagtacgtaaatgacgtgggctagatatgagttgaataaacagttatacctgtaaattcttacagagtgaaaataaattgttatactttacaatttgtttctctctttagaccatttccaggacttgtgattaataaccgtgagtattttgtgaagtgttttgtttttgttttttcctggggtctgacgtgtgtgcgtgtgagtgtgtatacatgcttaacgtatatcacgttacttcacctatgtcagtaaccaggccaaatacttgttttagccctcagtaaaaacaccaggcacttcctagttgtaaaattattcaagcttcttaacttcctatcctcgatgcacttaatcataaaatggtaataatagcaccgattttgggggagtcgttccagtagatggaaagcatctggaacaggtgtcagcaagctcctgccgacgtgtatgcataaagttttattgaaaccaccatcgtgtccatttgtttatggcagaactgagagatggcagcagcaagtgtgtgcctgcaaaacctaaaatatttactaattggctctgcaagaaaagagtttgcatccccctaacctagaacagtgtctagcctctagtatgtgtttagcctacagtatgtgctcagcgaatacaatctatatttattactgcttttatgactgttataattactgtgcttggatttcgttacaaagtaagtcacaatgtgcctgcttctgttagtatttcagcacagtgcctggcacacatggggctctcaaatattgctgagcgagtgaacaaatgtcctttcaattccttaacgttgatgtcattttcaatagtattttgagccaaacttaattttgcgagtgtgttttgttttcttaactttattattaaaaatgtataaaagtgaggccaggcgtggtggctcacgcctgtaatcccagcagtttgggaggctgaggcaggcggatcagttgaggttgggagttggagaccagcccgtccaacatggtgaaagcctgtctctactaaaaatacaaaaatcagctgggtgtggtggcgcgtgcctgtaatcccagctactcaggaggctgaggcaggagagttgcttgaatcctagaggtggaggttgcagtgagctgagatcgtgccattgcactccagcctgggcaacaagagcaaaactctgtcccaataaataaataaataaaatgttctcttttgttcctgttcttgtgcggtagtgtggtatagagttttatggtaattactgtgaattagtgattctgagggacatatcagaactctgaggtttgtttccttctcatcttgagggaaacagcaaatgtatgttaaaatgcttttccaagggaacaacacatccttacattatttaaaccaatctgcttcattttcagagctggttgatcagagtgagtcagaaggccccgtgatacaagaatcagctgaaccaagccagttggaagttccagccacagaagaaataaaagagactgatggaagctctcagatcaagcaagaaccagaccccacgtggtagacctcttccctcctaggcttaaagtatcagtggttgagaagagcttttcggacctgttactaccccaagctgtgtaatatacttgtataacagaaataccttctatacaaacctttttttctacttttagatagaaatgtctactttttcagcagttctgtgaattaaagagcagagtgactgtgggtctggaatggctggtgtacttgggaatgtactatcaggattttacagcaatgctgggaaatgacagggaaaatgacaggaatgaatctcaccagattttttatgtactcagcagagccttgagttacggtgtttattttccaatcaagtgaagatatctcctacttctcctactggaacatctcagcttctgcagtgaagaaaaattcctgtgatagttcagttctttagtttttctatttgaaaaaaaaaaatcatttaaatgatcctttgttcacggctctccttaatgactgagtgaacagttcctatctgtatatttgactaaaccttttcctaagctatctctcatggttcctatgtttttttatcataattaaaagcaaaaccatctggatcacctaacagtcagaggtcagtatctcagcgtgtgaattatagaggaaatacagagagaacctcttccacttttacttttcgtccaaataaaatgcatggtgtaccagaagttgaagatcgggttgaggattggggctagctcgatgacactaaggccccaacatcgcgggacctgctgtggcgcggattcttaggaacgctgttctagccggccccctctccaggggtcgccgtggccggcattatttcctagttcttcttgtaaccctgaggtgccagcgcggggagtgaggaggggtcagggggctaaggatgcaacctctgacgttctgcgccttcctaggagagtcttacatgtgttgagatttcacaagcaatgcgagttgtaaaataccagctctacaagaagctaggctctgtgacggcatagttttcagtagctttatcacaatattcacaatggagaattatatgacatggtagcagaaataggcccttttatgtgttgcttctattttacctcaaattgtagatatagggtaatcaataaaatccatccatgcctttcacacactaagt

SEQ ID NO: 4763 - protein, 896 aa, Homo sapiens; identical to SEQ ID NO: 4433

SEQ ID NO: 4764 - DNA, 5223 bp, Homo sapiens
aaaaaaaaaaaaaaaaaaaaaaaaaaaagaaaaaagaaaaaaaaaaggaggaggaggaggagggtgagagagaagctgggagagcagagaaaaggggccaccggtcgcccccccgcttccccgcacgcgctctccagccgcggccgcccgcctgccgcggtcaccccggcctctgcctctgtcccccagtgatcggatcaaggcgctgagcgaggccctgcctgcggggcggccatgcggcggtgacaggagcgcgaccgacacgcacgggcccctcgccccctctcgcctcccgtccgctcgccagctcccctcagccgaggctgctccgcggcggccgcagcccgcgcgcggcccacactcgcctcccctcggcacccccggccccggagctgcctggaggcggccgcactcggggatcatggcccaagttgcaatgtccaccctccccgttgaagatgaggagtcctcggagagcaggatggtggtgacattcctcatgtcagctctcgagtccatgtgtaaagaactggccaagtccaaagccgaagtggcctgcattgcagtgtatgaaacagacgtgtttgtcgtcggaactgaaagaggacgtgcttttgtcaataccagaaaggattttcaaaaagattttgtaaaatattgtgttgaagaagaagaaaaagctgcagagatgcataaaatgaaatctacaacccaggcaaatcggatgagtgtagatgctgtagaaattgaaacactcagaaaaacagttgaggactatttctgcttttgctatgggaaagctttaggcaaatccacagtggtacctgtaccatatgagaagatgctgcgagaccagtcggctgtggtagtgcaggggcttccggaaggtgttgcctttaaacaccccgagaactatgatcttgcaaccctgaaatggattttggagaacaaagcagggatttcattcatcattaagagaccttttttagagccaaagaagcatgtaggtggtcgtgtgatggtaacagatgctgacaggtcaatactatctccaggtggaagttgtggccccatcaaagtgaaaactgaacccacagaagattctggcatttccctggaaatggcagctgtgacagtaaaggaagaatcagaagatcctgattattatcaatataacattcaagcaggcccttctgaaactgatgatgttgatgaaaaacagcccctatcgaagcctttgcaaggaagccaccattcttcagagggcaatgaaggcacagaaatggaagtaccagcagaagattctactcaacatgtcccttcagaaacaagtgaggaccctgaagttgaggtgactattgaagatgatgattattctccaccgtctaagagaccaaaggccaatgagctaccgcagccaccagtcccggaacccgccaatgctgggaagcggaaagtgagggagttcaacttcgagaaatggaatgctcgcatcactgatctacgtaaacaagttgaagaattgtttgaaaggaaatatgctcaagccataaaagccaaaggtccggtgacgatcccgtaccctcttttccagtctcatgttgaagatctttatgtagaaggacttcctgaaggaattccttttagaaggccatctacttacggaattcctcgcctggagaggatattacttgcaaaggaaaggattcgttttgtgattaagaaacatgagcttctgaattcaacacgtgaagatttacagcttgataagccagcttcaggagtaaaggaagaatggtatgccagaatcactaaattaagaaagatggtggatcagcttttctgcaaaaaatttgcggaagccttggggagcactgaagccaaggctgtaccgtaccaaaaatttgaggcacacccgaatgatctgtacgtggaaggactgccagaaaacattcctttccgaagtccctcatggtatggaatcccaaggctggaaaaaatcattcaagtgggcaatcgaattaaatttgttattaaaagaccagaacttctgactcacagtaccactgaagttactcagccaagaacgaatacaccagtcaaagaagattggaatgtcagaattaccaagctacggaagcaagtggaagagatttttaatttgaaatttgctcaagctcttggactcaccgaggcagtaaaagtaccatatcctgtgtttgaatcaaacccggagttcttgtatgtggaaggcttgccagaggggattcccttccgaagccctacctggtttggaattccacgacttgaaaggatcgtccgcgggagtaataaaatcaagttcgttgttaaaaaacctgaactagttatttcctacttgcctcctgggatggctagtaaaataaacactaaagctttgcagtcccccaaaagaccacgaagtcctgggagtaattcaaaggttcctgaaattgaggtcaccgtggaaggccctaataacaacaatcctcaaacctcagctgttcgaaccccgacccagactaacggttctaacgttcccttcaagccacgagggagagagttttcctttgaggcctggaatgccaaaatcacggacctaaaacagaaagttgaaaatctcttcaatgagaaatgtggggaagctcttggccttaaacaagctgtgaaggtgccgttcgcgttatttgagtctttcccggaagacttttatgtggaaggcttacctgagggtgtgccattccgaagaccatcgacttttggcattccgaggctggagaagatactcagaaacaaagccaaaattaagttcatcattaaaaagcccgaaatgtttgagacggcgattaaggagagcacctcctctaagagccctcccagaaaaataaattcatcacccaatgttaatactactgcatcaggtgttgaagaccttaacatcattcaggtgacaattccagatgatgataatgaaagactctcgaaagttgaaaaagctagacagctaagagaacaagtgaatgacctctttagtcggaaatttggtgaagctattggtatgggttttcctgtgaaagttccctacaggaaaatcacaattaaccctggctgtgtggtggttgatggcatgcccccgggggtgtccttcaaagcccccagctacctggaaatcagctccatgagaaggatcttagactctgccgagtttatcaaattcacggtcattagaccatttccaggacttgtgattaataaccagctggttgatcagagtgagtcagaaggccccgtgatacaagaatcagctgaaccaagccagttggaagttccagccacagaaggtaaaaggacctcttccctcctagggtaaatcagcttctgtgtcagggatgctgtgtggtgtccatctgaaccccctgcatacgcgtagctaatgtgatctccccactttcacataagatggtggccctgccttcagggaatgtgggagccaggtgggagccttcccggatatttaagctagaagattctacagggagattctccttggatcaatatatgtctctcagtcaaagatgtaaaagcacttttgccttaaaaagaatgttctgtttctaaatagagtcaacgttgtcctcctcattggaattcactatgagtcagaatcattagactgacttttttttttccatagtaatagtattttgcagagtctcacagagctgcagatcttttgttcatcttgcagagttaacaagtctgatcctgttagtccagatttcttaaatttggccaagttataataggagcagtagcttgagacccgaagtcaggaaactttgacaatggatttttttttttaatccagagacttgtactggaatttgccttaccctgtcagctcatggacttaaggtttcatcccgctttatgagtgcttctgaatccaagtcattgttacctgaatttgcaaattaagttgtgatattcgtgactgttaaattcctgtaattagattaacctctttgcttgcttgtttgttttctctcctattttagcttaaagtatcagtggttgagaagagcttttcggacctgttactaccccaagctgtgtaatatacttgtataacagaaataccttctatacaaacctttttttctacttttagatagaaatgtctactttttcagcagttctgtgaattaaagagcagagtgactgtgggtctggaatggctggtgtacttgggaatgtactatcaggattttacagcaatgctgggaaatgacagggaaaatgacaggaatgaatctcaccagattttttatgtactcagcagagccttgagttacggtgtttattttccaatcaagtgaagatatctcctacttctcctactggaacatctcagcttctgcagtgaagaaaaattcctgtgatagttcagttctttagtttttctatttgaaaaaaaaaaatcatttaaatgatcctttgttcacggctctccttaatgactgagtgaacagttcctatctgtatatttgactaaaccttttcctaagctatctctcatggttcctatgtttttttatcataattaaaagcaaaaccatctggatcacctaacagtcagaggtcagtatctcagcgtgtgaattatagaggaaatacagagagaacctcttccacttttacttttcgtccaaataaaatgcatggtgtaccagaagttgaagatcgggttgaggattggggctagctcgatgacactaaggccccaacatcgcgggacctgctgtggcgcggattcttaggaacgctgttctagccggccccctctccaggggtcgccgtggccggcattatttcctagttcttcttgtaaccctgaggtgccagcgcggggagtgaggaggggtcagggggctaaggatgcaacctctgacgttctgcgccttcctaggagagtcttacatgtgttgagatttcacaagcaatgcgagttgtaaaataccagctctacaagaagctaggctctgtgacggcatagttttcagtagctttatcacaatattcacaatggagaattatatgacatggtagcagaaataggcccttttatgtgttgcttctattttacctcaaattgtagatatagggtaatcaataaaatccatccatgcctttcacacactaagt

SEQ ID NO: 4765 - protein, 988 aa, Homo sapiens
MAQVAMSTLPVEDEESSESRMVVTFLMSALESMCKELAKSKAEVACIAVYETDVFVVGTERGRAFVNTRKDFQKDFVKYCVEEEEKAAEMHKMKSTTQANRMSVDAVEIETLRKTVEDYFCFCYGKALGKSTVVPVPYEKMLRDQSAVVVQGLPEGVAFKHPENYDLATLKWILENKAGISFIIKRPFLEPKKHVGGRVMVTDADRSILSPGGSCGPIKVKTEPTEDSGISLEMAAVTVKEESEDPDYYQYNIQAGPSETDDVDEKQPLSKPLQGSHHSSEGNEGTEMEVPAEDSTQHVPSETSEDPEVEVTIEDDDYSPPSKRPKANELPQPPVPEPANAGKRKVREFNFEKWNARITDLRKQVEELFERKYAQAIKAKGPVTIPYPLFQSHVEDLYVEGLPEGIPFRRPSTYGIPRLERILLAKERIRFVIKKHELLNSTREDLQLDKPASGVKEEWYARITKLRKMVDQLFCKKFAEALGSTEAKAVPYQKFEAHPNDLYVEGLPENIPFRSPSWYGIPRLEKIIQVGNRIKFVIKRPELLTHSTTEVTQPRTNTPVKEDWNVRITKLRKQVEEIFNLKFAQALGLTEAVKVPYPVFESNPEFLYVEGLPEGIPFRSPTWFGIPRLERIVRGSNKIKFVVKKPELVISYLPPGMASKINTKALQSPKRPRSPGSNSKVPEIEVTVEGPNNNNPQTSAVRTPTQTNGSNVPFKPRGREFSFEAWNAKITDLKQKVENLFNEKCGEALGLKQAVKVPFALFESFPEDFYVEGLPEGVPFRRPSTFGIPRLEKILRNKAKIKFIIKKPEMFETAIKESTSSKSPPRKINSSPNVNTTASGVEDLNIIQVTIPDDDNERLSKVEKARQLREQVNDLFSRKFGEAIGMGFPVKVPYRKITINPGCVVVDGMPPGVSFKAPSYLEISSMRRILDSAEFIKFTVIRPFPGLVINNQLVDQSESEGPVIQESAEPSQLEVPATEGKRTSSLLG

SEQ ID NO: 4766 - DNA, 4080 bp, Homo sapiens
aaaaaaaaaaaaaaaaaaaaaaaaaaaagaaaaaagaaaaaaaaaaggaggaggaggaggagggtgagagagaagctgggagagcagagaaaaggggccaccggtcgcccccccgcttccccgcacgcgctctccagccgcggccgcccgcctgccgcggtcaccccggcctctgcctctgtcccccagtgatcggatcaaggcgctgagcgaggccctgcctgcggggcggccatgcggcggtgacaggagcgcgaccgacacgcacgggcccctcgccccctctcgcctcccgtccgctcgccagctcccctcagccgaggctgctccgcggcggccgcagcccgcgcgcggcccacactcgcctccccgttgaagatgaggagtcctcggagagcaggatggtggtgacattcctcatgtcagctctcgagtccatgtgtaaagaactggccaagtccaaagccgaagtggcctgcattgcagtgtatgaaacagacgtgtttgtcgtcggaactgaaagaggacgtgcttttgtcaataccagaaaggattttcaaaaagattttgtaaaatattgtgttgaagaagaagaaaaagctgcagagatgcataaaatgaaatctacaacccaggcaaatcggatgagtgtagatgctgtagaaattgaaacactcagaaaaacagttgaggactatttctgcttttgctatgggaaagctttaggcaaatccacagtggtacctgtaccatatgagaagatgctgcgagaccagtcggctgtggtagtgcaggggcttccggaaggtgttgcctttaaacaccccgagaactatgatcttgcaaccctgaaatggattttggagaacaaagcagggatttcattcatcattaagagaccttttttagagccaaagaagcatgtaggtggtcgtgtgatggtaacagatgctgacaggtcaatactatctccaggtggaagttgtggccccatcaaagtgaaaactgaacccacagaagattctggaagccaccattcttcagagggcaatgaaggcacagaaatggaagtaccagcagaagattctactcaacatgtcccttcagaaacaagtgaggaccctgaagttgaggtgactattgaagatgatgattattctccaccgtctaagagaccaaaggccaatgagctaccgcagccaccagtcccggaacccgccaatgctgggaagcggaaagtgagggagttcaacttcgagaaatggaatgctcgcatcactgatctacgtaaacaagttgaagaattgtttgaaaggaaatatgctcaagccataaaagccaaaggtccggtgacgatcccgtaccctcttttccagtctcatgttgaagatctttatgtagaaggacttcctgaaggaattccttttagaaggccatctacttacggaattcctcgcctggagaggatattacttgcaaaggaaaggattcgttttgtgattaagaaacatgagcttctgaattcaacacgtgaagatttacagcttgataagccagcttcaggagtaaaggaagaatggtatgccagaatcactaaattaagaaagatggtggatcagcttttctgcaaaaaatttgcggaagccttggggagcactgaagccaaggctgtaccgtaccaaaaatttgaggcacacccgaatgatctgtacgtggaaggactgccagaaaacattcctttccgaagtccctcatggtatggaatcccaaggctggaaaaaatcattcaagtgggcaatcgaattaaatttgttattaaaagaccagaacttctgactcacagtaccactgaagttactcagccaagaacgaatacaccagtcaaagaagattggaatgtcagaattaccaagctacggaagcaagtggaagagatttttaatttgaaatttgctcaagctcttggactcaccgaggcagtaaaagtaccatatcctgtgtttgaatcaaacccggagttcttgtatgtggaaggcttgccagaggggattcccttccgaagccctacctggtttggaattccacgacttgaaaggatcgtccgcgggagtaataaaatcaagttcgttgttaaaaaacctgaactagttatttcctacttgcctcctgggatggctagtaaaataaacactaaagctttgcagtcccccaaaagaccacgaagtcctgggagtaattcaaaggttcctgaaattgaggtcaccgtggaaggccctaataacaacaatcctcaaacctcagctgttcgaaccccgacccagactaacggttctaacgttcccttcaagccacgagggagagagttttcctttgaggcctggaatgccaaaatcacggacctaaaacagaaagttgaaaatctcttcaatgagaaatgtggggaagctcttggccttaaacaagctgtgaaggtgccgttcgcgttatttgagtctttcccggaagacttttatgtggaaggcttacctgagggtgtgccattccgaagaccatcgacttttggcattccgaggctggagaagatactcagaaacaaagccaaaattaagttcatcattaaaaagcccgaaatgtttgagacggcgattaaggagagcacctcctctaagagccctcccagaaaaataaattcatcacccaatgttaatactactgcatcaggtgttgaagaccttaacatcattcaggtgacaattccagatgatgataatgaaagactctcgaaagttgaaaaagctagacagctaagagaacaagtgaatgacctctttagtcggaaatttggtgaagctattggtatgggttttcctgtgaaagttccctacaggaaaatcacaattaaccctggctgtgtggtggttgatggcatgcccccgggggtgtccttcaaagcccccagctacctggaaatcagctccatgagaaggatcttagactctgccgagtttatcaaattcacggtcattagaccatttccaggacttgtgattaataaccagctggttgatcagagtgagtcagaaggccccgtgatacaagaatcagctgaaccaagccagttggaagttccagccacagaagaaataaaagagactgatggaagctctcagatcaagcaagaaccagaccccacgtggtagacctcttccctcctaggagccttgagttacggtgtttattttccaatcaagtgaagatatctcctacttctcctactggaacatctcagcttctgcagtgaagaaaaattcctgtgatagttcagttctttagtttttctatttgaaaaaaaaaaatcatttaaatgatcctttgttcacggctctccttaatgactgagtgaacagttcctatctgtatatttgactaaaccttttcctaagctatctctcatggttcctatgtttttttatcataattaaaagcaaaaccatctggatcacctaacagtcagaggtcagtatctcagcgtgtgaattatagaggaaatacagagagaacctcttccacttttacttttcgtccaaataaaatgcatggtgtaccagaagttgaagatcgggttgaggattggggctagctcgatgacactaaggccccaacatcgcgggacctgctgtggcgcggattcttaggaacgctgttctagccggccccctctccaggggtcgccgtggccggcattatttcctagttcttcttgtaaccctgaggtgccagcgcggggagtgaggaggggtcagggggctaaggatgcaacctctgacgttctgcgccttcctaggagagtcttacatgtgttgagatttcacaagcaatgcgagttgtaaaataccagctctacaagaagctaggctctgtgacggcatagttttcagtagctttatcacaatattcacaatggagaattatatgacatggtagcagaaataggcccttttatgtgttgcttctattttacctcaaattgtagatatagggtaatcaataaaatccatccatgcctttcacacactaagt

SEQ ID NO: 4767 - protein, 932 aa, Homo sapiens; identical to SEQ ID NO: 4065

SEQ ID NO: 4768 - DNA, 4224 bp, Homo sapiens
aaaaaaaaaaaaaaaaaaaaaaaaaaaagaaaaaagaaaaaaaaaaggaggaggaggaggagggtgagagagaagctgggagagcagagaaaaggggccaccggtcgcccccccgcttccccgcacgcgctctccagccgcggccgcccgcctgccgcggtcaccccggcctctgcctctgtcccccagtgatcggatcaaggcgctgagcgaggccctgcctgcggggcggccatgcggcggtgacaggagcgcgaccgacacgcacgggcccctcgccccctctcgcctcccgtccgctcgccagctcccctcagccgaggctgctccgcggcggccgcagcccgcgcgcggcccacactcgcctcccctcggcacccccggccccggagctgcctggaggcggccgcactcggtgtaaagaactggccaagtccaaagccgaagtggcctgcattgcagtgtatgaaacagacgtgtttgtcgtcggaactgaaagaggacgtgcttttgtcaataccagaaaggattttcaaaaagattttgtaaaatattgtgttgaagaagaagaaaaagctgcagagatgcataaaatgaaatctacaacccaggcaaatcggatgagtgtagatgctgtagaaattgaaacactcagaaaaacagttgaggactatttctgcttttgctatgggaaagctttaggcaaatccacagtggtacctgtaccatatgagaagatgctgcgagaccagtcggctgtggtagtgcaggggcttccggaaggtgttgcctttaaacaccccgagaactatgatcttgcaaccctgaaatggattttggagaacaaagcagggatttcattcatcattaagagaccttttttagagccaaagaagcatgtaggtggtcgtgtgatggtaacagatgctgacaggtcaatactatctccaggtggaagttgtggccccatcaaagtgaaaactgaacccacagaagattctggaagccaccattcttcagagggcaatgaaggcacagaaatggaagtaccagcagaagattctactcaacatgtcccttcagaaacaagtgaggaccctgaagttgaggtgactattgaagatgatgattattctccaccgtctaagagaccaaaggccaatgagctaccgcagccaccagtcccggaacccgccaatgctgggaagcggaaagtgagggagttcaacttcgagaaatggaatgctcgcatcactgatctacgtaaacaagttgaagaattgtttgaaaggaaatatgctcaagccataaaagccaaaggtccggtgacgatcccgtaccctcttttccagtctcatgttgaagatctttatgtagaaggacttcctgaaggaattccttttagaaggccatctacttacggaattcctcgcctggagaggatattacttgcaaaggaaaggattcgttttgtgattaagaaacatgagcttctgaattcaacacgtgaagatttacagcttgataagccagcttcaggagtaaaggaagaatggtatgccagaatcactaaattaagaaagatggtggatcagcttttctgcaaaaaatttgcggaagccttggggagcactgaagccaaggctgtaccgtaccaaaaatttgaggcacacccgaatgatctgtacgtggaaggactgccagaaaacattcctttccgaagtccctcatggtatggaatcccaaggctggaaaaaatcattcaagtgggcaatcgaattaaatttgttattaaaagaccagaacttctgactcacagtaccactgaagttactcagccaagaacgaatacaccagtcaaagaagattggaatgtcagaattaccaagctacggaagcaagtggaagagatttttaatttgaaatttgcttagatttgttgacagcggtttcctggagtgctgtcttgagaacgattctgaggaggctcagcaagaaagagtgtttcagttgattgggtgtgtctgtcatggagaaggaactcaagctcttggactcaccgaggcagtaaaagtaccatatcctgtgtttgaatcaaacccggagttcttgtatgtggaaggcttgccagaggggattcccttccgaagccctacctggtttggaattccacgacttgaaaggatcgtccgcgggagtaataaaatcaagttcgttgttaaaaaacctgaactagttatttcctacttgcctcctgggatggctagtaaaataaacactaaagctttgcagtcccccaaaagaccacgaagtcctgggagtaattcaaaggttcctgaaattgaggtcaccgtggaaggccctaataacaacaatcctcaaacctcagctgttcgaaccccgacccagactaacggttctaacgttcccttcaagccacgagggagagagttttcctttgaggcctggaatgccaaaatcacggacctaaaacagaaagttgaaaatctcttcaatgagaaatgtggggaagctcttggccttaaacaagctgtgaaggtgccgttcgcgttatttgagtctttcccggaagacttttatgtggaaggcttacctgagggtgtgccattccgaagaccatcgacttttggcattccgaggctggagaagatactcagaaacaaagccaaaattaagttcatcattaaaaagcccgaaatgtttgagacggcgattaaggagagcacctcctctaagagccctcccagaaaaataaattcatcacccaatgttaatactactgcatcaggtgttgaagaccttaacatcattcaggtgacaattccagatgatgataatgaaagactctcgaaagttgaaaaagctagacagctaagagaacaagtgaatgacctctttagtcggaaatttggtgaagctattggtatgggttttcctgtgaaagttccctacaggaaaatcacaattaaccctggctgtgtggtggttgatggcatgcccccgggggtgtccttcaaagcccccagctacctggaaatcagctccatgagaaggatcttagactctgccgagtttatcaaattcacggtcattagaccatttccaggacttgtgattaataaccagctggttgatcagagtgagtcagaaggccccgtgatacaagaatcagctgaaccaagccagttggaagttccagccacagaagaaataaaagagactgatggaagctctcagatcaagcaagaaccagaccccacgtggtagacctcttccctcctaggcttaaagtatcagtggttgagaagagcttttcggacctgttactaccccaagctgtagccttgagttacggtgtttattttccaatcaagtgaagatatctcctacttctcctactggaacatctcagcttctgcagtgaagaaaaattcctgtgatagttcagttctttagtttttctatttgaaaaaaaaaaatcatttaaatgatcctttgttcacggctctccttaatgactgagtgaacagttcctatctgtatatttgactaaaccttttcctaagctatctctcatggttcctatgtttttttatcataattaaaagcaaaaccatctggatcacctaacagtcagaggtcagtatctcagcgtgtgaattatagaggaaatacagagagaacctcttccacttttacttttcgtccaaataaaatgcatggtgtaccagaagttgaagatcgggttgaggattggggctagctcgatgacactaaggccccaacatcgcgggacctgctgtggcgcggattcttaggaacgctgttctagccggccccctctccaggggtcgccgtggccggcattatttcctagttcttcttgtaaccctgaggtgccagcgcggggagtgaggaggggtcagggggctaaggatgcaacctctgacgttctgcgccttcctaggagagtcttacatgtgttgagatttcacaagcaatgcgagttgtaaaataccagctctacaagaagctaggctctgtgacggcatagttttcagtagctttatcacaatattcacaatggagaattatatgacatggtagcagaaataggcccttttatgtgttgcttctattttacctcaaattgtagatatagggtaatcaataaaatccatccatgcctttcacacactaagt

SEQ ID NO: 4769 - protein, 449 aa, Homo sapiens; identical to SEQ ID NO: 4147

SEQ ID NO: 4770 - DNA, 5326 bp, Homo sapiens
aaaaaaaaaaaaaaaaaaaaaaaaaaaagaaaaaagaaaaaaaaaaggaggaggaggaggagggtgagagagaagctgggagagcagagaaaaggggccaccggtcgcccccccgcttccccgcacgcgctctccagccgcggccgcccgcctgccgcggtcaccccggcctctgcctctgtcccccagtgatcggatcaaggcgctgagcgaggccctgcctgcggggcggccatgcggcggtgacaggagcgcgaccgacacgcacgggcccctcgccccctctcgcctcccgtccgctcgccagctcccctcagccgaggctgctccgcggcggccgcagcccgcgcgcggcccacactcgcctcccctcggcacccccggccccggagctgcctggaggcggccgcactcggggatcatggcccaagttgcaatgtccaccctccccgttgaagatgaggagtcctcggagagcaggatggtggtgacattcctcatgtcagctctcgagtccatgtgtaaagaactggccaagtccaaagccgaagtggcctgcattgcagtgtatgaaacagacgtgtttgtcgtcggaactgaaagaggacgtgcttttgtcaataccagaaaggattttcaaaaagattttgtaaaatattgtgttgaagaagaagaaaaagctgcagagatgcataaaatgaaatctacaacccaggcaaatcggatgagtgtagatgctgtagaaattgaaacactcagaaaaacagttgaggactatttctgcttttgctatgggaaagctttaggcaaatccacagtggtacctgtaccatatgagaagatgctgcgagaccagtcggctgtggtagtgcaggggcttccggaaggtgttgcctttaaacaccccgagaactatgatcttgcaaccctgaaatggattttggagaacaaagcagggatttcattcatcattaagagaccttttttagagccaaagaagcatgtaggtggtcgtgtgatggtaacagatgctgacaggtcaatactatctccaggtggaagttgtggccccatcaaagtgaaaactgaacccacagaagattctggcatttccctggaaatggcagctgtgacagtaaaggaagaatcagaagatcctgattattatcaatataacattcaaggaagccaccattcttcagagggcaatgaaggcacagaaatggaagtaccagcagaagattctactcaacatgtcccttcagaaacaagtgaggaccctgaagttgaggtgactattgaagatgatgattattctccaccgtctaagagaccaaaggccaatgagctaccgcagccaccagtcccggaacccgccaatgctgggaagcggaaagtgagggagttcaacttcgagaaatggaatgctcgcatcactgatctacgtaaacaagttgaagaattgtttgaaaggaaatatgctcaagccataaaagccaaaggtccggtgacgatcccgtaccctcttttccagtctcatgttgaagatctttatgtagaaggacttcctgaaggaattccttttagaaggccatctacttacggaattcctcgcctggagaggatattacttgcaaaggaaaggattcgttttgtgattaagaaacatgagcttctgaattcaacacgtgaagatttacagcttgataagccagcttcaggagtaaaggaagaatggtatgccagaatcactaaattaagaaagatggtggatcagcttttctgcaaaaaatttgcggaagccttggggagcactgaagccaaggctgtaccgtaccaaaaatttgaggcacacccgaatgatctgtacgtggaaggactgccagaaaacattcctttccgaagtccctcatggtatggaatcccaaggctggaaaaaatcattcaagtgggcaatcgaattaaatttgttattaaaagaccagaacttctgactcacagtaccactgaagttactcagccaagaacgaatacaccagtcaaagaagattggaatgtcagaattaccaagctacggaagcaagtggaagagatttttaatttgaaatttgcttagatttgttgacagcggtttcctggagtgctgtcttgagaacgattctgaggaggctcagcaagaaagagtgtttcagttgattgggtgtgtctgtcatggagaaggaactcaagctcttggactcaccgaggcagtaaaagtaccatatcctgtgtttgaatcaaacccggagttcttgtatgtggaaggcttgccagaggggattcccttccgaagccctacctggtttggaattccacgacttgaaaggatcgtccgcgggagtaataaaatcaagttcgttgttaaaaaacctgaactagttatttcctacttgcctcctgggatggctagtaaaataaacactaaagctttgcagtcccccaaaagaccacgaagtcctgggagtaattcaaaggttcctgaaattgaggtcaccgtggaaggccctaataacaacaatcctcaaacctcagctgttcgaaccccgacccagactaacggttctaacgttcccttcaagccacgagggagagagttttcctttgaggcctggaatgccaaaatcacggacctaaaacagaaagttgaaaatctcttcaatgagaaatgtggggaagctcttggccttaaacaagctgtgaaggtgccgttcgcgttatttgagtctttcccggaagacttttatgtggaaggcttacctgagggtgtgccattccgaagaccatcgacttttggcattccgaggctggagaagatactcagaaacaaagccaaaattaagttcatcattaaaaagcccgaaatgtttgagacggcgattaaggagagcacctcctctaagagccctcccagaaaaataaattcatcacccaatgttaatactactgcatcaggtgttgaagaccttaacatcattcaggtgacaattccagatgatgataatgaaagactctcgaaagttgaaaaagctagacagctaagagaacaagtgaatgacctctttagtcggaaatttggtgaagctattggtatgggttttcctgtgaaagttccctacaggaaaatcacaattaaccctggctgtgtggtggttgatggcatgcccccgggggtgtccttcaaagcccccagctacctggaaatcagctccatgagaaggatcttagactctgccgagtttatcaaattcacggtcattagaccatttccaggacttgtgattaataaccagctggttgatcagagtgagtcagaaggccccgtgatacaagaatcagctgaaccaagccagttggaagttccagccacagaagaaataaaagagactgatggaagctctcagatcaagcaagaaccagaccccacgtggtagacctcttccctcctagggtaaatcagcttctgtgtcagggatgctgtgtggtgtccatctgaaccccctgcatacgcgtagctaatgtgatctccccactttcacataagatggtggccctgccttcagggaatgtgggagccaggtgggagccttcccggatatttaagctagaagattctacagggagattctccttggatcaatatatgtctctcagtcaaagatgtaaaagcacttttgccttaaaaagaatgttctgtttctaaatagagtcaacgttgtcctcctcattggaattcactatgagtcagaatcattagactgacttttttttttccatagtaatagtattttgcagagtctcacagagctgcagatcttttgttcatcttgcagagttaacaagtctgatcctgttagtccagatttcttaaatttggccaagttataataggagcagtagcttgagacccgaagtcaggaaactttgacaatggatttttttttttaatccagagacttgtactggaatttgccttaccctgtcagctcatggacttaaggtttcatcccgctttatgagtgcttctgaatccaagtcattgttacctgaatttgcaaattaagttgtgatattcgtgactgttaaattcctgtaattagattaacctctttgcttgcttgtttgttttctctcctattttagcttaaagtatcagtggttgagaagagcttttcggacctgttactaccccaagctgtgtaatatacttgtataacagaaataccttctatacaaacctttttttctacttttagatagaaatgtctactttttcagcagttctgtgaattaaagagcagagtgactgtgggtctggaatggctggtgtacttgggaatgtactatcaggattttacagcaatgctgggaaatgacagggaaaatgacaggaatgaatctcaccagattttttatgtactcagcagagccttgagttacggtgtttattttccaatcaagtgaagatatctcctacttctcctactggaacatctcagcttctgcagtgaagaaaaattcctgtgatagttcagttctttagtttttctatttgaaaaaaaaaaatcatttaaatgatcctttgttcacggctctccttaatgactgagtgaacagttcctatctgtatatttgactaaaccttttcctaagctatctctcatggttcctatgtttttttatcataattaaaagcaaaaccatctggatcacctaacagtcagaggtcagtatctcagcgtgtgaattatagaggaaatacagagagaacctcttccacttttacttttcgtccaaataaaatgcatggtgtaccagaagttgaagatcgggttgaggattggggctagctcgatgacactaaggccccaacatcgcgggacctgctgtggcgcggattcttaggaacgctgttctagccggccccctctccaggggtcgccgtggccggcattatttcctagttcttcttgtaaccctgaggtgccagcgcggggagtgaggaggggtcagggggctaaggatgcaacctctgacgttctgcgccttcctaggagagtcttacatgtgttgagatttcacaagcaatgcgagttgtaaaataccagctctacaagaagctaggctctgtgacggcatagttttcagtagctttatcacaatattcacaatggagaattatatgacatggtagcagaaataggcccttttatgtgttgcttctattttacctcaaattgtagatatagggtaatcaataaaatccatccatgcctttcacacactaagt

SEQ ID NO: 4771 - protein, 564 aa, Homo sapiens; identical to SEQ ID NO: 4061

SEQ ID NO: 4772 - DNA, 5117 bp, Homo sapiens
aaaaaaaaaaaaaaaaaaaaaaaaaaaagaaaaaagaaaaaaaaaaggaggaggaggaggagggtgagagagaagctgggagagcagagaaaaggggccaccggtcgcccccccgcttccccgcacgcgctctccagccgcggccgcccgcctgccgcggtcaccccggcctctgcctctgtcccccagtgatcggatcaaggcgctgagcgaggccctgcctgcggggcggccatgcggcggtgacaggagcgcgaccgacacgcacgggcccctcgccccctctcgcctcccgtccgctcgccagctcccctcagccgaggctgctccgcggcggccgcagcccgcgcgcggcccacactcgcctccccgttgaagatgaggagtcctcggagagcaggatggtggtgacattcctcatgtcagctctcgagtccatgtgtaaagaactggccaagtccaaagccgaagtggcctgcattgcagtgtatgaaacagacgtgtttgtcgtcggaactgaaagaggacgtgcttttgtcaataccagaaaggattttcaaaaagattttgtaaaatattgtgttgaagaagaagaaaaagctgcagagatgcataaaatgaaatctacaacccaggcaaatcggatgagtgtagatgctgtagaaattgaaacactcagaaaaacagttgaggactatttctgcttttgctatgggaaagctttaggcaaatccacagtggtacctgtaccatatgagaagatgctgcgagaccagtcggctgtggtagtgcaggggcttccggaaggtgttgcctttaaacaccccgagaactatgatcttgcaaccctgaaatggattttggagaacaaagcagggatttcattcatcattaagagaccttttttagagccaaagaagcatgtaggtggtcgtgtgatggtaacagatgctgacaggtcaatactatctccaggtggaagttgtggccccatcaaagtgaaaactgaacccacagaagattctggaagccaccattcttcagagggcaatgaaggcacagaaatggaagtaccagcagaagattctactcaacatgtcccttcagaaacaagtgaggaccctgaagttgaggtgactattgaagatgatgattattctccaccgtctaagagaccaaaggccaatgagctaccgcagccaccagtcccggaacccgccaatgctgggaagcggaaagtgagggagttcaacttcgagaaatggaatgctcgcatcactgatctacgtaaacaagttgaagaattgtttgaaaggaaatatgctcaagccataaaagccaaaggtccggtgacgatcccgtaccctcttttccagtctcatgttgaagatctttatgtagaaggacttcctgaaggaattccttttagaaggccatctacttacggaattcctcgcctggagaggatattacttgcaaaggaaaggattcgttttgtgattaagaaacatgagcttctgaattcaacacgtgaagatttacagcttgataagccagcttcaggagtaaaggaagaatggtatgccagaatcactaaattaagaaagatggtggatcagcttttctgcaaaaaatttgcggaagccttggggagcactgaagccaaggctgtaccgtaccaaaaatttgaggcacacccgaatgatctgtacgtggaaggactgccagaaaacattcctttccgaagtccctcatggtatggaatcccaaggctggaaaaaatcattcaagtgggcaatcgaattaaatttgttattaaaagaccagaacttctgactcacagtaccactgaagttactcagccaagaacgaatacaccagtcaaagaagattggaatgtcagaattaccaagctacggaagcaagtggaagagatttttaatttgaaatttgcttagatttgttgacagcggtttcctggagtgctgtcttgagaacgattctgaggaggctcagcaagaaagagtgtttcagttgattgggtgtgtctgtcatggagaaggaactcaagctcttggactcaccgaggcagtaaaagtaccatatcctgtgtttgaatcaaacccggagttcttgtatgtggaaggcttgccagaggggattcccttccgaagccctacctggtttggaattccacgacttgaaaggatcgtccgcgggagtaataaaatcaagttcgttgttaaaaaacctgaactagttatttcctacttgcctcctgggatggctagtaaaataaacactaaagctttgcagtcccccaaaagaccacgaagtcctgggagtaattcaaaggttcctgaaattgaggtcaccgtggaaggccctaataacaacaatcctcaaacctcagctgttcgaaccccgacccagactaacggttctaacgttcccttcaagccacgagggagagagttttcctttgaggcctggaatgccaaaatcacggacctaaaacagaaagttgaaaatctcttcaatgagaaatgtggggaagctcttggccttaaacaagctgtgaaggtgccgttcgcgttatttgagtctttcccggaagacttttatgtggaaggcttacctgagggtgtgccattccgaagaccatcgacttttggcattccgaggctggagaagatactcagaaacaaagccaaaattaagttcatcattaaaaagcccgaaatgtttgagacggcgattaaggagagcacctcctctaagagccctcccagaaaaataaattcatcacccaatgttaatactactgcatcaggtgttgaagaccttaacatcattcaggtgacaattccagatgatgataatgaaagactctcgaaagttgaaaaagctagacagctaagagaacaagtgaatgacctctttagtcggaaatttggtgaagctattggtatgggttttcctgtgaaagttccctacaggaaaatcacaattaaccctggctgtgtggtggttgatggcatgcccccgggggtgtccttcaaagcccccagctacctggaaatcagctccatgagaaggatcttagactctgccgagtttatcaaattcacggtcattagaccatttccaggacttgtgattaataaccagctggttgatcagagtgagtcagaaggccccgtgatacaagaatcagctgaaccaagccagttggaagttccagccacagaaggtaaaaggacctcttccctcctagggtaaatcagcttctgtgtcagggatgctgtgtggtgtccatctgaaccccctgcatacgcgtagctaatgtgatctccccactttcacataagatggtggccctgccttcagggaatgtgggagccaggtgggagccttcccggatatttaagctagaagattctacagggagattctccttggatcaatatatgtctctcagtcaaagatgtaaaagcacttttgccttaaaaagaatgttctgtttctaaatagagtcaacgttgtcctcctcattggaattcactatgagtcagaatcattagactgacttttttttttccatagtaatagtattttgcagagtctcacagagctgcagatcttttgttcatcttgcagagttaacaagtctgatcctgttagtccagatttcttaaatttggccaagttataataggagcagtagcttgagacccgaagtcaggaaactttgacaatggatttttttttttaatccagagacttgtactggaatttgccttaccctgtcagctcatggacttaaggtttcatcccgctttatgagtgcttctgaatccaagtcattgttacctgaatttgcaaattaagttgtgatattcgtgactgttaaattcctgtaattagattaacctctttgcttgcttgtttgttttctctcctattttagcttaaagtatcagtggttgagaagagcttttcggacctgttactaccccaagctgtgtaatatacttgtataacagaaataccttctatacaaacctttttttctacttttagatagaaatgtctactttttcagcagttctgtgaattaaagagcagagtgactgtgggtctggaatggctggtgtacttgggaatgtactatcaggattttacagcaatgctgggaaatgacagggaaaatgacaggaatgaatctcaccagattttttatgtactcagcagagccttgagttacggtgtttattttccaatcaagtgaagatatctcctacttctcctactggaacatctcagcttctgcagtgaagaaaaattcctgtgatagttcagttctttagtttttctatttgaaaaaaaaaaatcatttaaatgatcctttgttcacggctctccttaatgactgagtgaacagttcctatctgtatatttgactaaaccttttcctaagctatctctcatggttcctatgtttttttatcataattaaaagcaaaaccatctggatcacctaacagtcagaggtcagtatctcagcgtgtgaattatagaggaaatacagagagaacctcttccacttttacttttcgtccaaataaaatgcatggtgtaccagaagttgaagatcgggttgaggattggggctagctcgatgacactaaggccccaacatcgcgggacctgctgtggcgcggattcttaggaacgctgttctagccggccccctctccaggggtcgccgtggccggcattatttcctagttcttcttgtaaccctgaggtgccagcgcggggagtgaggaggggtcagggggctaaggatgcaacctctgacgttctgcgccttcctaggagagtcttacatgtgttgagatttcacaagcaatgcgagttgtaaaataccagctctacaagaagctaggctctgtgacggcatagttttcagtagctttatcacaatattcacaatggagaattatatgacatggtagcagaaataggcccttttatgtgttgcttctattttacctcaaattgtagatatagggtaatcaataaaatccatccatgcctttcacacactaagt

SEQ ID NO: 4773 - protein, 518 aa, Homo sapiens; identical to SEQ ID NO: 4051

SEQ ID NO: 4774 - DNA, 4246 bp, Homo sapiens
aaaaaaaaaaaaaaaaaaaaaaaaaaaagaaaaaagaaaaaaaaaaggaggaggaggaggagggtgagagagaagctgggagagcagagaaaaggggccaccggtcgcccccccgcttccccgcacgcgctctccagccgcggccgcccgcctgccgcggtcaccccggcctctgcctctgtcccccagtgatcggatcaaggcgctgagcgaggccctgcctgcggggcggccatgcggcggtgacaggagcgcgaccgacacgcacgggcccctcgccccctctcgcctcccgtccgctcgccagctcccctcagccgaggctgctccgcggcggccgcagcccgcgcgcggcccacactcgcctcccctcggcacccccggccccggagctgcctggaggcggccgcactcggtgtaaagaactggccaagtccaaagccgaagtggcctgcattgcagtgtatgaaacagacgtgtttgtcgtcggaactgaaagaggacgtgcttttgtcaataccagaaaggattttcaaaaagattttgtaaaatattgtgttgaagaagaagaaaaagctgcagagatgcataaaatgaaatctacaacccaggcaaatcggatgagtgtagatgctgtagaaattgaaacactcagaaaaacagttgaggactatttctgcttttgctatgggaaagctttaggcaaatccacagtggtacctgtaccatatgagaagatgctgcgagaccagtcggctgtggtagtgcaggggcttccggaaggtgttgcctttaaacaccccgagaactatgatcttgcaaccctgaaatggattttggagaacaaagcagggatttcattcatcattaagagaccttttttagagccaaagaagcatgtaggtggtcgtgtgatggtaacagatgctgacaggtcaatactatctccaggtggaagttgtggccccatcaaagtgaaaactgaacccacagaagattctggcatttccctggaaatggcagctgtgacagtaaaggaagaatcagaagatcctgattattatcaatataacattcaaggaagccaccattcttcagagggcaatgaaggcacagaaatggaagtaccagcagaagattctactcaacatgtcccttcagaaacaagtgaggaccctgaagttgaggtgactattgaagatgatgattattctccaccgtctaagagaccaaaggccaatgagctaccgcagccaccagtcccggaacccgccaatgctgggaagcggaaagtgagggagttcaacttcgagaaatggaatgctcgcatcactgatctacgtaaacaagttgaagaattgtttgaaaggaaatatgctcaagccataaaagccaaaggtccggtgacgatcccgtaccctcttttccagtctcatgttgaagatctttatgtagaaggacttcctgaaggaattccttttagaaggccatctacttacggaattcctcgcctggagaggatattacttgcaaaggaaaggattcgttttgtgattaagaaacatgagcttctgaattcaacacgtgaagatttacagcttgataagccagcttcaggagtaaaggaagaatggtatgccagaatcactaaattaagaaagatggtggatcagcttttctgcaaaaaatttgcggaagccttggggagcactgaagccaaggctgtaccgtaccaaaaatttgaggcacacccgaatgatctgtacgtggaaggactgccagaaaacattcctttccgaagtccctcatggtatggaatcccaaggctggaaaaaatcattcaagtgggcaatcgaattaaatttgttattaaaagaccagaacttctgactcacagtaccactgaagttactcagccaagaacgaatacaccagtcaaagaagattggaatgtcagaattaccaagctacggaagcaagtggaagagatttttaatttgaaatttgcttagatttgttgacagcggtttcctggagtgctgtcttgagaacgattctgaggaggctcagcaagaaagagtgtttcagttgattgggtgtgtctgtcatggagaaggaactcaagctcttggactcaccgaggcagtaaaagtaccatatcctgtgtttgaatcaaacccggagttcttgtatgtggaaggcttgccagaggggattcccttccgaagccctacctggtttggaattccacgacttgaaaggatcgtccgcgggagtaataaaatcaagttcgttgttaaaaaacctgaactagttatttcctacttgcctcctgggatggctagtaaaataaacactaaagctttgcagtcccccaaaagaccacgaagtcctgggagtaattcaaaggttcctgaaattgaggtcaccgtggaaggccctaataacaacaatcctcaaacctcagctgttcgaaccccgacccagactaacggttctaacgttcccttcaagccacgagggagagagttttcctttgaggcctggaatgccaaaatcacggacctaaaacagaaagttgaaaatctcttcaatgagaaatgtggggaagctcttggccttaaacaagctgtgaaggtgccgttcgcgttatttgagtctttcccggaagacttttatgtggaaggcttacctgagggtgtgccattccgaagaccatcgacttttggcattccgaggctggagaagatactcagaaacaaagccaaaattaagttcatcattaaaaagcccgaaatgtttgagacggcgattaaggagagcacctcctctaagagccctcccagaaaaataaattcatcacccaatgttaatactactgcatcaggtgttgaagaccttaacatcattcaggtgacaattccagatgatgataatgaaagactctcgaaagttgaaaaagctagacagctaagagaacaagtgaatgacctctttagtcggaaatttggtgaagctattggtatgggttttcctgtgaaagttccctacaggaaaatcacaattaaccctggctgtgtggtggttgatggcatgcccccgggggtgtccttcaaagcccccagctacctggaaatcagctccatgagaaggatcttagactctgccgagtttatcaaattcacggtcattagaccatttccaggacttgtgattaataaccagctggttgatcagagtgagtcagaaggccccgtgatacaagaatcagctgaaccaagccagttggaagttccagccacagaagaaataaaagagactgatggaagctctcagatcaagcaagaaccagaccccacgtggtagacctcttccctcctaggagccttgagttacggtgtttattttccaatcaagtgaagatatctcctacttctcctactggaacatctcagcttctgcagtgaagaaaaattcctgtgatagttcagttctttagtttttctatttgaaaaaaaaaaatcatttaaatgatcctttgttcacggctctccttaatgactgagtgaacagttcctatctgtatatttgactaaaccttttcctaagctatctctcatggttcctatgtttttttatcataattaaaagcaaaaccatctggatcacctaacagtcagaggtcagtatctcagcgtgtgaattatagaggaaatacagagagaacctcttccacttttacttttcgtccaaataaaatgcatggtgtaccagaagttgaagatcgggttgaggattggggctagctcgatgacactaaggccccaacatcgcgggacctgctgtggcgcggattcttaggaacgctgttctagccggccccctctccaggggtcgccgtggccggcattatttcctagttcttcttgtaaccctgaggtgccagcgcggggagtgaggaggggtcagggggctaaggatgcaacctctgacgttctgcgccttcctaggagagtcttacatgtgttgagatttcacaagcaatgcgagttgtaaaataccagctctacaagaagctaggctctgtgacggcatagttttcagtagctttatcacaatattcacaatggagaattatatgacatggtagcagaaataggcccttttatgtgttgcttctattttacctcaaattgtagatatagggtaatcaataaaatccatccatgcctttcacacactaagt

SEQ ID NO: 4775 - protein, 475 aa, Homo sapiens; identical to SEQ ID NO: 4139

SEQ ID NO: 4776 - DNA, 4430 bp, Homo sapiens
aaaaaaaaaaaaaaaaaaaaaaaaaaaagaaaaaagaaaaaaaaaaggaggaggaggaggagggtgagagagaagctgggagagcagagaaaaggggccaccggtcgcccccccgcttccccgcacgcgctctccagccgcggccgcccgcctgccgcggtcaccccggcctctgcctctgtcccccagtgatcggatcaaggcgctgagcgaggccctgcctgcggggcggccatgcggcggtgacaggagcgcgaccgacacgcacgggcccctcgccccctctcgcctcccgtccgctcgccagctcccctcagccgaggctgctccgcggcggccgcagcccgcgcgcggcccacactcgcctccccgttgaagatgaggagtcctcggagagcaggatggtggtgacattcctcatgtcagctctcgagtccatgtgtaaagaactggccaagtccaaagccgaagtggcctgcattgcagtgtatgaaacagacgtgtttgtcgtcggaactgaaagaggacgtgcttttgtcaataccagaaaggattttcaaaaagattttgtaaaatattgtgttgaagaagaagaaaaagctgcagagatgcataaaatgaaatctacaacccaggcaaatcggatgagtgtagatgctgtagaaattgaaacactcagaaaaacagttgaggactatttctgcttttgctatgggaaagctttaggcaaatccacagtggtacctgtaccatatgagaagatgctgcgagaccagtcggctgtggtagtgcaggggcttccggaaggtgttgcctttaaacaccccgagaactatgatcttgcaaccctgaaatggattttggagaacaaagcagggatttcattcatcattaagagaccttttttagagccaaagaagcatgtaggtggtcgtgtgatggtaacagatgctgacaggtcaatactatctccaggtggaagttgtggccccatcaaagtgaaaactgaacccacagaagattctggcatttccctggaaatggcagctgtgacagtaaaggaagaatcagaagatcctgattattatcaatataacattcaagcaggcccttctgaaactgatgatgttgatgaaaaacagcccctatcgaagcctttgcaaggaagccaccattcttcagagggcaatgaaggcacagaaatggaagtaccagcagaagattctactcaacatgtcccttcagaaacaagtgaggaccctgaagttgaggtgactattgaagatgatgattattctccaccgtctaagagaccaaaggccaatgagctaccgcagccaccagtcccggaacccgccaatgctgggaagcggaaagtgagggagttcaacttcgagaaatggaatgctcgcatcactgatctacgtaaacaagttgaagaattgtttgaaaggaaatatgctcaagccataaaagccaaaggtccggtgacgatcccgtaccctcttttccagtctcatgttgaagatctttatgtagaaggacttcctgaaggaattccttttagaaggccatctacttacggaattcctcgcctggagaggatattacttgcaaaggaaaggattcgttttgtgattaagaaacatgagcttctgaattcaacacgtgaagatttacagcttgataagccagcttcaggagtaaaggaagaatggtatgccagaatcactaaattaagaaagatggtggatcagcttttctgcaaaaaatttgcggaagccttggggagcactgaagccaaggctgtaccgtaccaaaaatttgaggcacacccgaatgatctgtacgtggaaggactgccagaaaacattcctttccgaagtccctcatggtatggaatcccaaggctggaaaaaatcattcaagtgggcaatcgaattaaatttgttattaaaagaccagaacttctgactcacagtaccactgaagttactcagccaagaacgaatacaccagctcaagctcttggactcaccgaggcagtaaaagtaccatatcctgtgtttgaatcaaacccggagttcttgtatgtggaaggcttgccagaggggattcccttccgaagccctacctggtttggaattccacgacttgaaaggatcgtccgcgggagtaataaaatcaagttcgttgttaaaaaacctgaactagttatttcctacttgcctcctgggatggctagtaaaataaacactaaagctttgcagtcccccaaaagaccacgaagtcctgggagtaattcaaaggttcctgaaattgaggtcaccgtggaaggccctaataacaacaatcctcaaacctcagctgttcgaaccccgacccagactaacggttctaacgttcccttcaagccacgagggagagagttttcctttgaggcctggaatgccaaaatcacggacctaaaacagaaagttgaaaatctcttcaatgagaaatgtggggaagctcttggccttaaacaagctgtgaaggtgccgttcgcgttatttgagtctttcccggaagacttttatgtggaaggcttacctgagggtgtgccattccgaagaccatcgacttttggcattccgaggctggagaagatactcagaaacaaagccaaaattaagttcatcattaaaaagcccgaaatgtttgagacggcgattaaggagagcacctcctctaagagccctcccagaaaaataaattcatcacccaatgttaatactactgcatcaggtgttgaagaccttaacatcattcaggtgacaattccagatgatgataatgaaagactctcgaaagttgaaaaagctagacagctaagagaacaagtgaatgacctctttagtcggaaatttggtgaagctattggtatgggttttcctgtgaaagttccctacaggaaaatcacaattaaccctggctgtgtggtggttgatggcatgcccccgggggtgtccttcaaagcccccagctacctggaaatcagctccatgagaaggatcttagactctgccgagtttatcaaattcacggtcattagaccatttccaggacttgtgattaataaccagctggttgatcagagtgagtcagaaggccccgtgatacaagaatcagctgaaccaagccagttggaagttccagccacagaagaaataaaagagactgatggaagctctcagatcaagcaagaaccagaccccacgtggtagacctcttccctcctaggcttaaagtatcagtggttgagaagagcttttcggacctgttactaccccaagctgtgtaatatacttgtataacagaaataccttctatacaaacctttttttctacttttagatagaaatgtctactttttcagcagttctgtgaattaaagagcagagtgactgtgggtctggaatggctggtgtacttgggaatgtactatcaggattttacagcaatgctgggaaatgacagggaaaatgacaggaatgaatctcaccagattttttatgtactcagcagagccttgagttacggtgtttattttccaatcaagtgaagatatctcctacttctcctactggaacatctcagcttctgcagtgaagaaaaattcctgtgatagttcagttctttagtttttctatttgaaaaaaaaaaatcatttaaatgatcctttgttcacggctctccttaatgactgagtgaacagttcctatctgtatatttgactaaaccttttcctaagctatctctcatggttcctatgtttttttatcataattaaaagcaaaaccatctggatcacctaacagtcagaggtcagtatctcagcgtgtgaattatagaggaaatacagagagaacctcttccacttttacttttcgtccaaataaaatgcatggtgtaccagaagttgaagatcgggttgaggattggggctagctcgatgacactaaggccccaacatcgcgggacctgctgtggcgcggattcttaggaacgctgttctagccggccccctctccaggggtcgccgtggccggcattatttcctagttcttcttgtaaccctgaggtgccagcgcggggagtgaggaggggtcagggggctaaggatgcaacctctgacgttctgcgccttcctaggagagtcttacatgtgttgagatttcacaagcaatgcgagttgtaaaataccagctctacaagaagctaggctctgtgacggcatagttttcagtagctttatcacaatattcacaatggagaattatatgacatggtagcagaaataggcccttttatgtgttgcttctattttacctcaaattgtagatatagggtaatcaataaaatccatccatgcctttcacacactaagt

SEQ ID NO: 4777 - protein, 954 aa, Homo sapiens; identical to SEQ ID NO: 4249

SEQ ID NO: 4778 - DNA, 3812 bp, Homo sapiens
aaaaaaaaaaaaaaaaaaaaaaaaaaaagaaaaaagaaaaaaaaaaggaggaggaggaggagggtgagagagaagctgggagagcagagaaaaggggccaccggtcgcccccccgcttccccgcacgcgctctccagccgcggccgcccgcctgccgcggtcaccccggcctctgcctctgtcccccagtgatcggatcaaggcgctgagcgaggccctgcctgcggggcggccatgcggcggtgacaggagcgcgaccgacacgcacgggcccctcgccccctctcgcctcccgtccgctcgccagctcccctcagccgaggctgctccgcggcggccgcagcccgcgcgcggcccacactcgcctccccgttgaagatgaggagtcctcggagagcaggatggtggtgacattcctcatgtcagctctcgagtccatgtgtaaagaactggccaagtccaaagccgaagtggcctgcattgcagtgtatgaaacagacgtgtttgtcgtcggaactgaaagaggacgtgcttttgtcaataccagaaaggattttcaaaaagattttgtaaaatattgtgttgaagaagaagaaaaagctgcagagatgcataaaatgaaatctacaacccaggcaaatcggatgagtgtagatgctgtagaaattgaaacactcagaaaaacagttgaggactatttctgcttttgctatgggaaagctttaggcaaatccacagtggtacctgtaccatatgagaagatgctgcgagaccagtcggctgtggtagtgcaggggcttccggaaggtgttgcctttaaacaccccgagaactatgatcttgcaaccctgaaatggattttggagaacaaagcagggatttcattcatcattaagagaccttttttagagccaaagaagcatgtaggtggtcgtgtgatggtaacagatgctgacaggtcaatactatctccaggtggaagttgtggccccatcaaagtgaaaactgaacccacagaagattctggaagccaccattcttcagagggcaatgaaggcacagaaatggaagtaccagcagaagattctactcaacatgtcccttcagaaacaagtgaggaccctgaagttgaggtgactattgaagatgatgattattctccaccgtctaagagaccaaaggccaatgagctaccgcagccaccagtcccggaacccgccaatgctgggaagcggaaagtgagggagttcaacttcgagaaatggaatgctcgcatcactgatctacgtaaacaagttgaagaattgtttgaaaggaaatatgctcaagccataaaagccaaaggtccggtgacgatcccgtaccctcttttccagtctcatgttgaagatctttatgtagaaggacttcctgaaggaattccttttagaaggccatctacttacggaattcctcgcctggagaggatattacttgcaaaggaaaggattcgttttgtgattaagaaacatgagcttctgaattcaacacgtgaagatttacagcttgataagccagcttcaggagtaaaggaagaatggtatgccagaatcactaaattaagaaagatggtggatcagcttttctgcaaaaaatttgcggaagccttggggagcactgaagccaaggctgtaccgtaccaaaaatttgaggcacacccgaatgatctgtacgtggaaggactgccagaaaacattcctttccgaagtccctcatggtatggaatcccaaggctggaaaaaatcattcaagtgggcaatcgaattaaatttgttattaaaagaccagaacttctgactcacagtaccactgaagttactcagccaagaacgaatacaccagtcaaagaagattggaatgtcagaattaccaagctacggaagcaagtggaagagatttttaatttgaaatttgctcaagctcttggactcaccgaggcagtaaaagtaccatatcctgtgtttgaatcaaacccggagttcttgtatgtggaaggcttgccagaggggattcccttccgaagccctacctggtttggaattccacgacttgaaaggatcgtccgcgggagtaataaaatcaagttcgttgttaaaaaacctgaactagttatttcctacttgcctcctgggatggctagtaaaataaacactaaagctttgcagtcccccaaaagaccacgaagtcctgggagtaattcaaaggttcctgaaattgaggtcaccgtggaaggccctaataacaacaatcctcaaacctcagctgttcgaaccccgacccagactaacggttctaacgttcccttcaagccacgagggagagagttttcctttgaggcctggaatgccaaaatcacggacctaaaacagaaagttgaaaatctcttcaatgagaaatgtggggaagctcttggccttaaacaagctgtgaaggtgccgttcgcgttatttgagtctttcccggaagacttttatgtggaaggcttacctgagggtgtgccattccgaagaccatcgacttttggcattccgaggctggagaagatactcagaaacaaagccaaaattaagttcatcattaaaaagcccgaaatgtttgagacggcgattaaggagagcacctcctctaagagccctcccagaaaaataaattcatcacccaatgttaatactactgcatcaggtgttgaagaccttaacatcattcaggtgacaattccagatgatgataatgaaagactctcgaaagttgaaaaagctagacagctaagagaacaagtgaatgacctctttagtcggaaatttggtgaagctattggtatgggttttcctgtgaaagttccctacaggaaaatcacaattaaccctggctgtgtggtggttgatggcatgcccccgggggtgtccttcaaagcccccagctacctggaaatcagctccatgagaaggatcttagactctgccgagtttatcaaattcacggtcattagaccatttccaggacttgtgattaataaccagctggttgatcagagtgagtcagaaggccccgtgatacaagaatcagctgaaccaagccagttggaagttccagccacagaagaaataaaagagactgatggaagctctcagatcaagcaagaaccagaccccacgtggtagacctcttccctcctaggcaaaaccatctggatcacctaacagtcagaggtcagtatctcagcgtgtgaattatagaggaaatacagagagaacctcttccacttttacttttcgtccaaataaaatgcatggtgtaccagaagttgaagatcgggttgaggattggggctagctcgatgacactaaggccccaacatcgcgggacctgctgtggcgcggattcttaggaacgctgttctagccggccccctctccaggggtcgccgtggccggcattatttcctagttcttcttgtaaccctgaggtgccagcgcggggagtgaggaggggtcagggggctaaggatgcaacctctgacgttctgcgccttcctaggagagtcttacatgtgttgagatttcacaagcaatgcgagttgtaaaataccagctctacaagaagctaggctctgtgacggcatagttttcagtagctttatcacaatattcacaatggagaattatatgacatggtagcagaaataggcccttttatgtgttgcttctattttacctcaaattgtagatatagggtaatcaataaaatccatccatgcctttcacacactaagt

SEQ ID NO: 4779 - protein, 932 aa, Homo sapiens; identical to SEQ ID NO: 4065

SEQ ID NO: 4780 - DNA, 5127 bp, Homo sapiens
aaaaaaaaaaaaaaaaaaaaaaaaaaaagaaaaaagaaaaaaaaaaggaggaggaggaggagggtgagagagaagctgggagagcagagaaaaggggccaccggtcgcccccccgcttccccgcacgcgctctccagccgcggccgcccgcctgccgcggtcaccccggcctctgcctctgtcccccagtgatcggatcaaggcgctgagcgaggccctgcctgcggggcggccatgcggcggtgacaggagcgcgaccgacacgcacgggcccctcgccccctctcgcctcccgtccgctcgccagctcccctcagccgaggctgctccgcggcggccgcagcccgcgcgcggcccacactcgcctccccgttgaagatgaggagtcctcggagagcaggatggtggtgacattcctcatgtcagctctcgagtccatgtgtaaagaactggccaagtccaaagccgaagtggcctgcattgcagtgtatgaaacagacgtgtttgtcgtcggaactgaaagaggacgtgcttttgtcaataccagaaaggattttcaaaaagattttgtaaaatattgtgttgaagaagaagaaaaagctgcagagatgcataaaatgaaatctacaacccaggcaaatcggatgagtgtagatgctgtagaaattgaaacactcagaaaaacagttgaggactatttctgcttttgctatgggaaagctttaggcaaatccacagtggtacctgtaccatatgagaagatgctgcgagaccagtcggctgtggtagtgcaggggcttccggaaggtgttgcctttaaacaccccgagaactatgatcttgcaaccctgaaatggattttggagaacaaagcagggatttcattcatcattaagagaccttttttagagccaaagaagcatgtaggtggtcgtgtgatggtaacagatgctgacaggtcaatactatctccaggtggaagttgtggccccatcaaagtgaaaactgaacccacagaagattctggcatttccctggaaatggcagctgtgacagtaaaggaagaatcagaagatcctgattattatcaatataacattcaagcaggcccttctgaaactgatgatgttgatgaaaaacagcccctatcgaagcctttgcaaggaagccaccattcttcagagggcaatgaaggcacagaaatggaagtaccagcagaagattctactcaacatgtcccttcagaaacaagtgaggaccctgaagttgaggtgactattgaagatgatgattattctccaccgtctaagagaccaaaggccaatgagctaccgcagccaccagtcccggaacccgccaatgctgggaagcggaaagtgagggagttcaacttcgagaaatggaatgctcgcatcactgatctacgtaaacaagttgaagaattgtttgaaaggaaatatgctcaagccataaaagccaaaggtccggtgacgatcccgtaccctcttttccagtctcatgttgaagatctttatgtagaaggacttcctgaaggaattccttttagaaggccatctacttacggaattcctcgcctggagaggatattacttgcaaaggaaaggattcgttttgtgattaagaaacatgagcttctgaattcaacacgtgaagatttacagcttgataagccagcttcaggagtaaaggaagaatggtatgccagaatcactaaattaagaaagatggtggatcagcttttctgcaaaaaatttgcggaagccttggggagcactgaagccaaggctgtaccgtaccaaaaatttgaggcacacccgaatgatctgtacgtggaaggactgccagaaaacattcctttccgaagtccctcatggtatggaatcccaaggctggaaaaaatcattcaagtgggcaatcgaattaaatttgttattaaaagaccagaacttctgactcacagtaccactgaagttactcagccaagaacgaatacaccagtcaaagaagattggaatgtcagaattaccaagctacggaagcaagtggaagagatttttaatttgaaatttgctcaagctcttggactcaccgaggcagtaaaagtaccatatcctgtgtttgaatcaaacccggagttcttgaaaggatcgtccgcgggagtaataaaatcaagttcgttgttaaaaaacctgaactagttatttcctacttgcctcctgggatggctagtaaaataaacactaaagctttgcagtcccccaaaagaccacgaagtcctgggagtaattcaaaggttcctgaaattgaggtcaccgtggaaggccctaataacaacaatcctcaaacctcagctgttcgaaccccgacccagactaacggttctaacgttcccttcaagccacgagggagagagttttcctttgaggcctggaatgccaaaatcacggacctaaaacagaaagttgaaaatctcttcaatgagaaatgtggggaagctcttggccttaaacaagctgtgaaggtgccgttcgcgttatttgagtctttcccggaagacttttatgtggaaggcttacctgagggtgtgccattccgaagaccatcgacttttggcattccgaggctggagaagatactcagaaacaaagccaaaattaagttcatcattaaaaagcccgaaatgtttgagacggcgattaaggagagcacctcctctaagagccctcccagaaaaataaattcatcacccaatgttaatactactgcatcaggtgttgaagaccttaacatcattcaggtgacaattccagatgatgataatgaaagactctcgaaagttgaaaaagctagacagctaagagaacaagtgaatgacctctttagtcggaaatttggtgaagctattggtatgggttttcctgtgaaagttccctacaggaaaatcacaattaaccctggctgtgtggtggttgatggcatgcccccgggggtgtccttcaaagcccccagctacctggaaatcagctccatgagaaggatcttagactctgccgagtttatcaaattcacggtcattagaccatttccaggacttgtgattaataaccagctggttgatcagagtgagtcagaaggccccgtgatacaagaatcagctgaaccaagccagttggaagttccagccacagaagaaataaaagagactgatggaagctctcagatcaagcaagaaccagaccccacgtggtagacctcttccctcctagggtaaatcagcttctgtgtcagggatgctgtgtggtgtccatctgaaccccctgcatacgcgtagctaatgtgatctccccactttcacataagatggtggccctgccttcagggaatgtgggagccaggtgggagccttcccggatatttaagctagaagattctacagggagattctccttggatcaatatatgtctctcagtcaaagatgtaaaagcacttttgccttaaaaagaatgttctgtttctaaatagagtcaacgttgtcctcctcattggaattcactatgagtcagaatcattagactgacttttttttttccatagtaatagtattttgcagagtctcacagagctgcagatcttttgttcatcttgcagagttaacaagtctgatcctgttagtccagatttcttaaatttggccaagttataataggagcagtagcttgagacccgaagtcaggaaactttgacaatggatttttttttttaatccagagacttgtactggaatttgccttaccctgtcagctcatggacttaaggtttcatcccgctttatgagtgcttctgaatccaagtcattgttacctgaatttgcaaattaagttgtgatattcgtgactgttaaattcctgtaattagattaacctctttgcttgcttgtttgttttctctcctattttagcttaaagtatcagtggttgagaagagcttttcggacctgttactaccccaagctgtgtaatatacttgtataacagaaataccttctatacaaacctttttttctacttttagatagaaatgtctactttttcagcagttctgtgaattaaagagcagagtgactgtgggtctggaatggctggtgtacttgggaatgtactatcaggattttacagcaatgctgggaaatgacagggaaaatgacaggaatgaatctcaccagattttttatgtactcagcagagccttgagttacggtgtttattttccaatcaagtgaagatatctcctacttctcctactggaacatctcagcttctgcagtgaagaaaaattcctgtgatagttcagttctttagtttttctatttgaaaaaaaaaaatcatttaaatgatcctttgttcacggctctccttaatgactgagtgaacagttcctatctgtatatttgactaaaccttttcctaagctatctctcatggttcctatgtttttttatcataattaaaagcaaaaccatctggatcacctaacagtcagaggtcagtatctcagcgtgtgaattatagaggaaatacagagagaacctcttccacttttacttttcgtccaaataaaatgcatggtgtaccagaagttgaagatcgggttgaggattggggctagctcgatgacactaaggccccaacatcgcgggacctgctgtggcgcggattcttaggaacgctgttctagccggccccctctccaggggtcgccgtggccggcattatttcctagttcttcttgtaaccctgaggtgccagcgcggggagtgaggaggggtcagggggctaaggatgcaacctctgacgttctgcgccttcctaggagagtcttacatgtgttgagatttcacaagcaatgcgagttgtaaaataccagctctacaagaagctaggctctgtgacggcatagttttcagtagctttatcacaatattcacaatggagaattatatgacatggtagcagaaataggcccttttatgtgttgcttctattttacctcaaattgtagatatagggtaatcaataaaatccatccatgcctttcacacactaagt

SEQ ID NO: 4781 - protein, 605 aa, Homo sapiens; identical to SEQ ID NO: 4017

SEQ ID NO: 4782 - DNA, 7280 bp, Homo sapiens
aaaaaaaaaaaaaaaaaaaaaaaaaaaagaaaaaagaaaaaaaaaaggaggaggaggaggagggtgagagagaagctgggagagcagagaaaaggggccaccggtcgcccccccgcttccccgcacgcgctctccagccgcggccgcccgcctgccgcggtcaccccggcctctgcctctgtcccccagtgatcggatcaaggcgctgagcgaggccctgcctgcggggcggccatgcggcggtgacaggagcgcgaccgacacgcacgggcccctcgccccctctcgcctcccgtccgctcgccagctcccctcagccgaggctgctccgcggcggccgcagcccgcgcgcggcccacactcgcctcccctcggcacccccggccccggagctgcctggaggcggccgcactcggggatcatggcccaagttgcaatgtccaccctccccgttgaagatgaggagtcctcggagagcaggatggtggtgacattcctcatgtcagctctcgagtccatgtgtaaagaactggccaagtccaaagccgaagtggcctgcattgcagtgtatgaaacagacgtgtttgtcgtcggaactgaaagaggacgtgcttttgtcaataccagaaaggattttcaaaaagattttgtaaaatattgtgttgaagaagaagaaaaagctgcagagatgcataaaatgaaatctacaacccaggcaaatcggatgagtgtagatgctgtagaaattgaaacactcagaaaaacagttgaggactatttctgcttttgctatgggaaagctttaggcaaatccacagtggtacctgtaccatatgagaagatgctgcgagaccagtcggctgtggtagtgcaggggcttccggaaggtgttgcctttaaacaccccgagaactatgatcttgcaaccctgaaatggattttggagaacaaagcagggatttcattcatcattaagagaccttttttagagccaaagaagcatgtaggtggtcgtgtgatggtaacagatgctgacaggtcaatactatctccaggtggaagttgtggccccatcaaagtgaaaactgaacccacagaagattctggcatttccctggaaatggcagctgtgacagtaaaggaagaatcagaagatcctgattattatcaatataacattcaagcaggcccttctgaaactgatgatgttgatgaaaaacagcccctatcgaagcctttgcaaggaagccaccattcttcagagggcaatgaaggcacagaaatggaagtaccagcagaagatgatgattattctccaccgtctaagagaccaaaggccaatgagctaccgcagccaccagtcccggaacccgccaatgctgggaagcggaaagtgagggagttcaacttcgagaaatggaatgctcgcatcactgatctacgtaaacaagttgaagaattgtttgaaaggaaatatgctcaagccataaaagccaaaggtccggtgacgatcccgtaccctcttttccagtctcatgttgaagatctttatgtagaaggacttcctgaaggaattccttttagaaggccatctacttacggaattcctcgcctggagaggatattacttgcaaaggaaaggattcgttttgtgattaagaaacatgagcttctgaattcaacacgtgaagatttacagcttgataagccagcttcaggagtaaaggaagaatggtatgccagaatcactaaattaagaaagatggtggatcagcttttctgcaaaaaatttgcggaagccttggggagcactgaagccaaggctgtaccgtaccaaaaatttgaggcacacccgaatgatctgtacgtggaaggactgccagaaaacattcctttccgaagtccctcatggtatggaatcccaaggctggaaaaaatcattcaagtgggcaatcgaattaaatttgttattaaaagaccagaacttctgactcacagtaccactgaagttactcagccaagaacgaatacaccagtcaaagaagattggaatgtcagaattaccaagctacggaagcaagtggaagagatttttaatttgaaatttgctcaagctcttggactcaccgaggcagtaaaagtaccatatcctgtgtttgaatcaaacccggagttcttgtatgtggaaggcttgccagaggggattcccttccgaagccctacctggtttggaattccacgacttgaaaggatcgtccgcgggagtaataaaatcaagttcgttgttaaaaaacctgaactagttatttcctacttgcctcctgggatggctagtaaaataaacactaaagctttgcagtcccccaaaagaccacgaagtcctgggagtaattcaaaggttcctgaaattgaggtcaccgtggaaggccctaataacaacaatcctcaaacctcagctgttcgaaccccgacccagactaacggttctaacgttcccttcaagccacgagggagagagttttcctttgaggcctggaatgccaaaatcacggacctaaaacagaaagttgaaaatctcttcaatgagaaatgtggggaagctcttggccttaaacaagctgtgaaggtgccgttcgcgttatttgagtctttcccggaagacttttatgtggaaggcttacctgagggtgtgccattccgaagaccatcgacttttggcattccgaggctggagaagatactcagaaacaaagccaaaattaagttcatcattaaaaagcccgaaatgtttgagacggcgattaaggagagcacctcctctaagagccctcccagaaaaataaattcatcacccaatgttaatactactgcatcaggtgttgaagaccttaacatcattcaggtgacaattccagatgatgataatgaaagactctcgaaagttgaaaaagctagacagctaagagaacaagtgaatgacctctttagtcggaaatttggtgaagctattggtatgggttttcctgtgaaagttccctacaggaaaatcacaattaaccctggctgtgtggtggttgatggcatgcccccgggggtgtccttcaaagcccccagctacctggaaatcagctccatgagaaggatcttagactctgccgagtttatcaaattcacggtcattaggtaagtgagagtttcctgcttagtcacaggagcgaatctggagctcatgaggctgactcttctaaaatgcagccacaggtagtcatcgaatccggcttcctatgctgtgcaatcaacaaatcaaaataacttgtgtcatcattagaatgtcagatgtgcttctacgaactaagctgactcttttaattctttggcaaagggttggcaaactaggactgtttgccaaattcaggctgcctcctatttttagagtcttcctgaaacacagctacacccgtattatccatggctgctttcctgtcacagtgagtaagtagctgggactgagaaggcatggcctccaaagtctaaaatatttactctctagcactttgtagaaaaaccttagctaggcacagtggctaacgcctgtaatcccagcattttgggaggccaaggcaggcagatcacctgaggtcaggagttccagaccagcctggccaacatggtgaaatcccatctctacaaaaataaaacagttagctgggcatgatggcgggtgcctgtaatcccagctactcgggaggctgaggcaggatagtcgcttgaacccaggaggtggaggttgcaatgagccaagatcatgccactgcactccagcctggacgacagagtgagactccatcacaagaaaaaaagaactttgtcaacctctgtcttagggcgccttgtcacaggcttcgggtcagacggattcaaccttgcatcagccatttgttagccaggtcactctgttctttgtctgtaaatgagattgatcgttgttcccactgagagtgtcagctccttcccgtagagcaggcatgatgattgtactcacctctgacaccattgtgagtgccacattccttcccacgtccttgtcactgtaagagatgcccacctgagcaccaaccccaggttatcttcccctttgtcttccagccccccagaaacagctacgactcaacctacccaatcatttcatcatcagattgccactgtctctagttcaggtctcttgggactggcactcagaaatctcataataaatcctcttgaggcttctcatacactcgtcttcttccaatcttctttccctcaaaatctcatattttggttccacttcacccaccgtcattctccatatcactcccaggagttaggcaaaaagccccttccgttcttccgtatgttaaacttagaatcactctgttccctgctctgcgtttctattttttgtttttcctccatttactagtagcttaacactttctaacagtgttcttattattgatacgtatctatctcttccataagcttataaggtcacggataatacttctcattgtagtacgtaaatgacgtgggctagatatgagttgaataaacagttatacctgtaaattcttacagagtgaaaataaattgttatactttacaatttgtttctctctttagaccatttccaggacttgtgattaataaccgtgagtattttgtgaagtgttttgtttttgttttttcctggggtctgacgtgtgtgcgtgtgagtgtgtatacatgcttaacgtatatcacgttacttcacctatgtcagtaaccaggccaaatacttgttttagccctcagtaaaaacaccaggcacttcctagttgtaaaattattcaagcttcttaacttcctatcctcgatgcacttaatcataaaatggtaataatagcaccgattttgggggagtcgttccagtagatggaaagcatctggaacaggtgtcagcaagctcctgccgacgtgtatgcataaagttttattgaaaccaccatcgtgtccatttgtttatggcagaactgagagatggcagcagcaagtgtgtgcctgcaaaacctaaaatatttactaattggctctgcaagaaaagagtttgcatccccctaacctagaacagtgtctagcctctagtatgtgtttagcctacagtatgtgctcagcgaatacaatctatatttattactgcttttatgactgttataattactgtgcttggatttcgttacaaagtaagtcacaatgtgcctgcttctgttagtatttcagcacagtgcctggcacacatggggctctcaaatattgctgagcgagtgaacaaatgtcctttcaattccttaacgttgatgtcattttcaatagtattttgagccaaacttaattttgcgagtgtgttttgttttcttaactttattattaaaaatgtataaaagtgaggccaggcgtggtggctcacgcctgtaatcccagcagtttgggaggctgaggcaggcggatcagttgaggttgggagttggagaccagcccgtccaacatggtgaaagcctgtctctactaaaaatacaaaaatcagctgggtgtggtggcgcgtgcctgtaatcccagctactcaggaggctgaggcaggagagttgcttgaatcctagaggtggaggttgcagtgagctgagatcgtgccattgcactccagcctgggcaacaagagcaaaactctgtcccaataaataaataaataaaatgttctcttttgttcctgttcttgtgcggtagtgtggtatagagttttatggtaattactgtgaattagtgattctgagggacatatcagaactctgaggtttgtttccttctcatcttgagggaaacagcaaatgtatgttaaaatgcttttccaagggaacaacacatccttacattatttaaaccaatctgcttcattttcagagctggttgatcagagtgagtcagaaggccccgtgatacaagaatcagctgaaccaagccagttggaagttccagccacagaagaaataaaagagactgatggaagctctcagatcaagcaagaaccagaccccacgtggtagacctcttccctcctaggcttaaagtatcagtggttgagaagagcttttcggacctgttactaccccaagctgtgtaatatacttgtataacagaaataccttctatacaaacctttttttctacttttagatagaaatgtctactttttcagcagttctgtgaattaaagagcagagtgactgtgggtctggaatggctggtgtacttgggaatgtactatcaggattttacagcaatgctgggaaatgacagggaaaatgacaggaatgaatctcaccagattttttatgtactcagcagagccttgagttacggtgtttattttccaatcaagtgaagatatctcctacttctcctactggaacatctcagcttctgcagtgaagaaaaattcctgtgatagttcagttctttagtttttctatttgaaaaaaaaaaatcatttaaatgatcctttgttcacggctctccttaatgactgagtgaacagttcctatctgtatatttgactaaaccttttcctaagctatctctcatggttcctatgtttttttatcataattaaaagcaaaaccatctggatcacctaacagtcagaggtcagtatctcagcgtgtgaattatagaggaaatacagagagaacctcttccacttttacttttcgtccaaataaaatgcatggtgtaccagaagttgaagatcgggttgaggattggggctagctcgatgacactaaggccccaacatcgcgggacctgctgtggcgcggattcttaggaacgctgttctagccggccccctctccaggggtcgccgtggccggcattatttcctagttcttcttgtaaccctgaggtgccagcgcggggagtgaggaggggtcagggggctaaggatgcaacctctgacgttctgcgccttcctaggagagtcttacatgtgttgagatttcacaagcaatgcgagttgtaaaataccagctctacaagaagctaggctctgtgacggcatagttttcagtagctttatcacaatattcacaatggagaattatatgacatggtagcagaaataggcccttttatgtgttgcttctattttacctcaaattgtagatatagggtaatcaataaaatccatccatgcctttcacacactaagt

SEQ ID NO: 4783 - protein, 921 aa, Homo sapiens; identical to SEQ ID NO: 4723

SEQ ID NO: 4784 - DNA, 5103 bp, Homo sapiens
aaaaaaaaaaaaaaaaaaaaaaaaaaaagaaaaaagaaaaaaaaaaggaggaggaggaggagggtgagagagaagctgggagagcagagaaaaggggccaccggtcgcccccccgcttccccgcacgcgctctccagccgcggccgcccgcctgccgcggtcaccccggcctctgcctctgtcccccagtgatcggatcaaggcgctgagcgaggccctgcctgcggggcggccatgcggcggtgacaggagcgcgaccgacacgcacgggcccctcgccccctctcgcctcccgtccgctcgccagctcccctcagccgaggctgctccgcggcggccgcagcccgcgcgcggcccacactcgcctcccctcggcacccccggccccggagctgcctggaggcggccgcactcggtgtaaagaactggccaagtccaaagccgaagtggcctgcattgcagtgtatgaaacagacgtgtttgtcgtcggaactgaaagaggacgtgcttttgtcaataccagaaaggattttcaaaaagattttgtaaaatattgtgttgaagaagaagaaaaagctgcagagatgcataaaatgaaatctacaacccaggcaaatcggatgagtgtagatgctgtagaaattgaaacactcagaaaaacagttgaggactatttctgcttttgctatgggaaagctttaggcaaatccacagtggtacctgtaccatatgagaagatgctgcgagaccagtcggctgtggtagtgcaggggcttccggaaggtgttgcctttaaacaccccgagaactatgatcttgcaaccctgaaatggattttggagaacaaagcagggatttcattcatcattaagagaccttttttagagccaaagaagcatgtaggtggtcgtgtgatggtaacagatgctgacaggtcaatactatctccaggtggaagttgtggccccatcaaagtgaaaactgaacccacagaagattctggcatttccctggaaatggcagctgtgacagtaaaggaagaatcagaagatcctgattattatcaatataacattcaagcaggcccttctgaaactgatgatgttgatgaaaaacagcccctatcgaagcctttgcaaggaagccaccattcttcagagggcaatgaaggcacagaaatggaagtaccagcagaagattctactcaacatgtcccttcagaaacaagtgaggaccctgaagttgaggtgactattgaagatgatgattattctccaccgtctaagagaccaaaggccaatgagctaccgcagccaccagtcccggaacccgccaatgctgggaagcggaaagtgagggagttcaacttcgagaaatggaatgctcgcatcactgatctacgtaaacaagttgaagaattgtttgaaaggaaatatgctcaagccataaaagccaaaggtccggtgacgatcccgtaccctcttttccagtctcatgttgaagatctttatgtagaaggacttcctgaaggaattccttttagaaggccatctacttacggaattcctcgcctggagaggatattacttgcaaaggaaaggattcgttttgtgattaagaaacatgagcttctgaattcaacacgtgaagatttacagcttgataagccagcttcaggagtaaaggaagaatggtatgccagaatcactaaattaagaaagatggtggatcagcttttctgcaaaaaatttgcggaagccttggggagcactgaagccaaggctgtaccgtaccaaaaatttgaggcacacccgaatgatctgtacgtggaaggactgccagaaaacattcctttccgaagtccctcatggtatggaatcccaaggctggaaaaaatcattcaagtgggcaatcgaattaaatttgttattaaaagaccagaacttctgactcacagtaccactgaagttactcagccaagaacgaatacaccagtcaaagaagattggaatgtcagaattaccaagctacggaagcaagtggaagagatttttaatttgaaatttgctcaagctcttggactcaccgaggcagtaaaagtaccatatcctgtgtttgaatcaaacccggagttcttgaaaggatcgtccgcgggagtaataaaatcaagttcgttgttaaaaaacctgaactagttatttcctacttgcctcctgggatggctagtaaaataaacactaaagctttgcagtcccccaaaagaccacgaagtcctgggagtaattcaaaggttcctgaaattgaggtcaccgtggaaggccctaataacaacaatcctcaaacctcagctgttcgaaccccgacccagactaacggttctaacgttcccttcaagccacgagggagagagttttcctttgaggcctggaatgccaaaatcacggacctaaaacagaaagttgaaaatctcttcaatgagaaatgtggggaagctcttggccttaaacaagctgtgaaggtgccgttcgcgttatttgagtctttcccggaagacttttatgtggaaggcttacctgagggtgtgccattccgaagaccatcgacttttggcattccgaggctggagaagatactcagaaacaaagccaaaattaagttcatcattaaaaagcccgaaatgtttgagacggcgattaaggagagcacctcctctaagagccctcccagaaaaataaattcatcacccaatgttaatactactgcatcaggtgttgaagaccttaacatcattcaggtgacaattccagatgatgataatgaaagactctcgaaagttgaaaaagctagacagctaagagaacaagtgaatgacctctttagtcggaaatttggtgaagctattggtatgggttttcctgtgaaagttccctacaggaaaatcacaattaaccctggctgtgtggtggttgatggcatgcccccgggggtgtccttcaaagcccccagctacctggaaatcagctccatgagaaggatcttagactctgccgagtttatcaaattcacggtcattagaccatttccaggacttgtgattaataaccagctggttgatcagagtgagtcagaaggccccgtgatacaagaatcagctgaaccaagccagttggaagttccagccacagaagaaataaaagagactgatggaagctctcagatcaagcaagaaccagaccccacgtggtagacctcttccctcctagggtaaatcagcttctgtgtcagggatgctgtgtggtgtccatctgaaccccctgcatacgcgtagctaatgtgatctccccactttcacataagatggtggccctgccttcagggaatgtgggagccaggtgggagccttcccggatatttaagctagaagattctacagggagattctccttggatcaatatatgtctctcagtcaaagatgtaaaagcacttttgccttaaaaagaatgttctgtttctaaatagagtcaacgttgtcctcctcattggaattcactatgagtcagaatcattagactgacttttttttttccatagtaatagtattttgcagagtctcacagagctgcagatcttttgttcatcttgcagagttaacaagtctgatcctgttagtccagatttcttaaatttggccaagttataataggagcagtagcttgagacccgaagtcaggaaactttgacaatggatttttttttttaatccagagacttgtactggaatttgccttaccctgtcagctcatggacttaaggtttcatcccgctttatgagtgcttctgaatccaagtcattgttacctgaatttgcaaattaagttgtgatattcgtgactgttaaattcctgtaattagattaacctctttgcttgcttgtttgttttctctcctattttagcttaaagtatcagtggttgagaagagcttttcggacctgttactaccccaagctgtgtaatatacttgtataacagaaataccttctatacaaacctttttttctacttttagatagaaatgtctactttttcagcagttctgtgaattaaagagcagagtgactgtgggtctggaatggctggtgtacttgggaatgtactatcaggattttacagcaatgctgggaaatgacagggaaaatgacaggaatgaatctcaccagattttttatgtactcagcagagccttgagttacggtgtttattttccaatcaagtgaagatatctcctacttctcctactggaacatctcagcttctgcagtgaagaaaaattcctgtgatagttcagttctttagtttttctatttgaaaaaaaaaaatcatttaaatgatcctttgttcacggctctccttaatgactgagtgaacagttcctatctgtatatttgactaaaccttttcctaagctatctctcatggttcctatgtttttttatcataattaaaagcaaaaccatctggatcacctaacagtcagaggtcagtatctcagcgtgtgaattatagaggaaatacagagagaacctcttccacttttacttttcgtccaaataaaatgcatggtgtaccagaagttgaagatcgggttgaggattggggctagctcgatgacactaaggccccaacatcgcgggacctgctgtggcgcggattcttaggaacgctgttctagccggccccctctccaggggtcgccgtggccggcattatttcctagttcttcttgtaaccctgaggtgccagcgcggggagtgaggaggggtcagggggctaaggatgcaacctctgacgttctgcgccttcctaggagagtcttacatgtgttgagatttcacaagcaatgcgagttgtaaaataccagctctacaagaagctaggctctgtgacggcatagttttcagtagctttatcacaatattcacaatggagaattatatgacatggtagcagaaataggcccttttatgtgttgcttctattttacctcaaattgtagatatagggtaatcaataaaatccatccatgcctttcacacactaagt

SEQ ID NO: 4785 - protein, 536 aa, Homo sapiens; identical to SEQ ID NO: 4021

SEQ ID NO: 4786 - DNA, 4948 bp, Homo sapiens
aaaaaaaaaaaaaaaaaaaaaaaaaaaagaaaaaagaaaaaaaaaaggaggaggaggaggagggtgagagagaagctgggagagcagagaaaaggggccaccggtcgcccccccgcttccccgcacgcgctctccagccgcggccgcccgcctgccgcggtcaccccggcctctgcctctgtcccccagtgatcggatcaaggcgctgagcgaggccctgcctgcggggcggccatgcggcggtgacaggagcgcgaccgacacgcacgggcccctcgccccctctcgcctcccgtccgctcgccagctcccctcagccgaggctgctccgcggcggccgcagcccgcgcgcggcccacactcgcctccccgttgaagatgaggagtcctcggagagcaggatggtggtgacattcctcatgtcagctctcgagtccatgtgtaaagaactggccaagtccaaagccgaagtggcctgcattgcagtgtatgaaacagacgtgtttgtcgtcggaactgaaagaggacgtgcttttgtcaataccagaaaggattttcaaaaagattttgtaaaatattgtgttgaagaagaagaaaaagctgcagagatgcataaaatgaaatctacaacccaggcaaatcggatgagtgtagatgctgtagaaattgaaacactcagaaaaacagttgaggactatttctgcttttgctatgggaaagctttaggcaaatccacagtggtacctgtaccatatgagaagatgctgcgagaccagtcggctgtggtagtgcaggggcttccggaaggtgttgcctttaaacaccccgagaactatgatcttgcaaccctgaaatggattttggagaacaaagcagggatttcattcatcattaagagaccttttttagagccaaagaagcatgtaggtggtcgtgtgatggtaacagatgctgacaggtcaatactatctccaggtggaagttgtggccccatcaaagtgaaaactgaacccacagaagattctggcatttccctggaaatggcagctgtgacagtaaaggaagaatcagaagatcctgattattatcaatataacattcaaggaagccaccattcttcagagggcaatgaaggcacagaaatggaagtaccagcagaagatgatgattattctccaccgtctaagagaccaaaggccaatgagctaccgcagccaccagtcccggaacccgccaatgctgggaagcggaaagtgagggagttcaacttcgagaaatggaatgctcgcatcactgatctacgtaaacaagttgaagaattgtttgaaaggaaatatgctcaagccataaaagccaaaggtccggtgacgatcccgtaccctcttttccagtctcatgttgaagatctttatgtagaaggacttcctgaaggaattccttttagaaggccatctacttacggaattcctcgcctggagaggatattacttgcaaaggaaaggattcgttttgtgattaagaaacatgagcttctgaattcaacacgtgaagatttacagcttgataagccagcttcaggagtaaaggaagaatggtatgccagaatcactaaattaagaaagatggtggatcagcttttctgcaaaaaatttgcggaagccttggggagcactgaagccaaggctgtaccgtaccaaaaatttgaggcacacccgaatgatctgtacgtggaaggactgccagaaaacattcctttccgaagtccctcatggtatggaatcccaaggctggaaaaaatcattcaagtgggcaatcgaattaaatttgttattaaaagaccagaacttctgactcacagtaccactgaagttactcagccaagaacgaatacaccagctcaagctcttggactcaccgaggcagtaaaagtaccatatcctgtgtttgaatcaaacccggagttcttgtatgtggaaggcttgccagaggggattcccttccgaagccctacctggtttggaattccacgacttgaaaggatcgtccgcgggagtaataaaatcaagttcgttgttaaaaaacctgaactagttatttcctacttgcctcctgggatggctagtaaaataaacactaaagctttgcagtcccccaaaagaccacgaagtcctgggagtaattcaaaggttcctgaaattgaggtcaccgtggaaggccctaataacaacaatcctcaaacctcagctgttcgaaccccgacccagactaacggttctaacgttcccttcaagccacgagggagagagttttcctttgaggcctggaatgccaaaatcacggacctaaaacagaaagttgaaaatctcttcaatgagaaatgtggggaagctcttggccttaaacaagctgtgaaggtgccgttcgcgttatttgagtctttcccggaagacttttatgtggaaggcttacctgagggtgtgccattccgaagaccatcgacttttggcattccgaggctggagaagatactcagaaacaaagccaaaattaagttcatcattaaaaagcccgaaatgtttgagacggcgattaaggagagcacctcctctaagagccctcccagaaaaataaattcatcacccaatgttaatactactgcatcaggtgttgaagaccttaacatcattcaggtgacaattccagatgatgataatgaaagactctcgaaagttgaaaaagctagacagctaagagaacaagtgaatgacctctttagtcggaaatttggtgaagctattggtatgggttttcctgtgaaagttccctacaggaaaatcacaattaaccctggctgtgtggtggttgatggcatgcccccgggggtgtccttcaaagcccccagctacctggaaatcagctccatgagaaggatcttagactctgccgagtttatcaaattcacggtcattagaccatttccaggacttgtgattaataaccagctggttgatcagagtgagtcagaaggccccgtgatacaagaatcagctgaaccaagccagttggaagttccagccacagaaggtaaaaggacctcttccctcctagggtaaatcagcttctgtgtcagggatgctgtgtggtgtccatctgaaccccctgcatacgcgtagctaatgtgatctccccactttcacataagatggtggccctgccttcagggaatgtgggagccaggtgggagccttcccggatatttaagctagaagattctacagggagattctccttggatcaatatatgtctctcagtcaaagatgtaaaagcacttttgccttaaaaagaatgttctgtttctaaatagagtcaacgttgtcctcctcattggaattcactatgagtcagaatcattagactgacttttttttttccatagtaatagtattttgcagagtctcacagagctgcagatcttttgttcatcttgcagagttaacaagtctgatcctgttagtccagatttcttaaatttggccaagttataataggagcagtagcttgagacccgaagtcaggaaactttgacaatggatttttttttttaatccagagacttgtactggaatttgccttaccctgtcagctcatggacttaaggtttcatcccgctttatgagtgcttctgaatccaagtcattgttacctgaatttgcaaattaagttgtgatattcgtgactgttaaattcctgtaattagattaacctctttgcttgcttgtttgttttctctcctattttagcttaaagtatcagtggttgagaagagcttttcggacctgttactaccccaagctgtgtaatatacttgtataacagaaataccttctatacaaacctttttttctacttttagatagaaatgtctactttttcagcagttctgtgaattaaagagcagagtgactgtgggtctggaatggctggtgtacttgggaatgtactatcaggattttacagcaatgctgggaaatgacagggaaaatgacaggaatgaatctcaccagattttttatgtactcagcagagccttgagttacggtgtttattttccaatcaagtgaagatatctcctacttctcctactggaacatctcagcttctgcagtgaagaaaaattcctgtgatagttcagttctttagtttttctatttgaaaaaaaaaaatcatttaaatgatcctttgttcacggctctccttaatgactgagtgaacagttcctatctgtatatttgactaaaccttttcctaagctatctctcatggttcctatgtttttttatcataattaaaagcaaaaccatctggatcacctaacagtcagaggtcagtatctcagcgtgtgaattatagaggaaatacagagagaacctcttccacttttacttttcgtccaaataaaatgcatggtgtaccagaagttgaagatcgggttgaggattggggctagctcgatgacactaaggccccaacatcgcgggacctgctgtggcgcggattcttaggaacgctgttctagccggccccctctccaggggtcgccgtggccggcattatttcctagttcttcttgtaaccctgaggtgccagcgcggggagtgaggaggggtcagggggctaaggatgcaacctctgacgttctgcgccttcctaggagagtcttacatgtgttgagatttcacaagcaatgcgagttgtaaaataccagctctacaagaagctaggctctgtgacggcatagttttcagtagctttatcacaatattcacaatggagaattatatgacatggtagcagaaataggcccttttatgtgttgcttctattttacctcaaattgtagatatagggtaatcaataaaatccatccatgcctttcacacactaagt

SEQ ID NO: 4787 - protein, 903 aa, Homo sapiens
MVVTFLMSALESMCKELAKSKAEVACIAVYETDVFVVGTERGRAFVNTRKDFQKDFVKYCVEEEEKAAEMHKMKSTTQANRMSVDAVEIETLRKTVEDYFCFCYGKALGKSTVVPVPYEKMLRDQSAVVVQGLPEGVAFKHPENYDLATLKWILENKAGISFIIKRPFLEPKKHVGGRVMVTDADRSILSPGGSCGPIKVKTEPTEDSGISLEMAAVTVKEESEDPDYYQYNIQGSHHSSEGNEGTEMEVPAEDDDYSPPSKRPKANELPQPPVPEPANAGKRKVREFNFEKWNARITDLRKQVEELFERKYAQAIKAKGPVTIPYPLFQSHVEDLYVEGLPEGIPFRRPSTYGIPRLERILLAKERIRFVIKKHELLNSTREDLQLDKPASGVKEEWYARITKLRKMVDQLFCKKFAEALGSTEAKAVPYQKFEAHPNDLYVEGLPENIPFRSPSWYGIPRLEKIIQVGNRIKFVIKRPELLTHSTTEVTQPRTNTPAQALGLTEAVKVPYPVFESNPEFLYVEGLPEGIPFRSPTWFGIPRLERIVRGSNKIKFVVKKPELVISYLPPGMASKINTKALQSPKRPRSPGSNSKVPEIEVTVEGPNNNNPQTSAVRTPTQTNGSNVPFKPRGREFSFEAWNAKITDLKQKVENLFNEKCGEALGLKQAVKVPFALFESFPEDFYVEGLPEGVPFRRPSTFGIPRLEKILRNKAKIKFIIKKPEMFETAIKESTSSKSPPRKINSSPNVNTTASGVEDLNIIQVTIPDDDNERLSKVEKARQLREQVNDLFSRKFGEAIGMGFPVKVPYRKITINPGCVVVDGMPPGVSFKAPSYLEISSMRRILDSAEFIKFTVIRPFPGLVINNQLVDQSESEGPVIQESAEPSQLEVPATEGKRTSSLLG

SEQ ID NO: 4788 - DNA, 3820 bp, Homo sapiens
aaaaaaaaaaaaaaaaaaaaaaaaaaaagaaaaaagaaaaaaaaaaggaggaggaggaggagggtgagagagaagctgggagagcagagaaaaggggccaccggtcgcccccccgcttccccgcacgcgctctccagccgcggccgcccgcctgccgcggtcaccccggcctctgcctctgtcccccagtgatcggatcaaggcgctgagcgaggccctgcctgcggggcggccatgcggcggtgacaggagcgcgaccgacacgcacgggcccctcgccccctctcgcctcccgtccgctcgccagctcccctcagccgaggctgctccgcggcggccgcagcccgcgcgcggcccacactcgcctcccctcggcacccccggccccggagctgcctggaggcggccgcactcggggatcatggcccaagttgcaatgtccaccctccccgttgaagatgaggagtcctcggagagcaggatggtggtgacattcctcatgtcagctctcgagtccatgtgtaaagaactggccaagtccaaagccgaagtggcctgcattgcagtgtatgaaacagacgtgtttgtcgtcggaactgaaagaggacgtgcttttgtcaataccagaaaggattttcaaaaagattttgtaaaatattgtgttgaagaagaagaaaaagctgcagagatgcataaaatgaaatctacaacccaggcaaatcggatgagtgtagatgctgtagaaattgaaacactcagaaaaacagttgaggactatttctgcttttgctatgggaaagctttaggcaaatccacagtggtacctgtaccatatgagaagatgctgcgagaccagtcggctgtggtagtgcaggggcttccggaaggtgttgcctttaaacaccccgagaactatgatcttgcaaccctgaaatggattttggagaacaaagcagggatttcattcatcattaagagaccttttttagagccaaagaagcatgtaggtggtcgtgtgatggtaacagatgctgacaggtcaatactatctccaggtggaagttgtggccccatcaaagtgaaaactgaacccacagaagattctggaagccaccattcttcagagggcaatgaaggcacagaaatggaagtaccagcagaagattctactcaacatgtcccttcagaaacaagtgaggaccctgaagttgaggtgactattgaagatgatgattattctccaccgtctaagagaccaaaggccaatgagctaccgcagccaccagtcccggaacccgccaatgctgggaagcggaaagtgagggagttcaacttcgagaaatggaatgctcgcatcactgatctacgtaaacaagttgaagaattgtttgaaaggaaatatgctcaagccataaaagccaaaggtccggtgacgatcccgtaccctcttttccagtctcatgttgaagatctttatgtagaaggacttcctgaaggaattccttttagaaggccatctacttacggaattcctcgcctggagaggatattacttgcaaaggaaaggattcgttttgtgattaagaaacatgagcttctgaattcaacacgtgaagatttacagcttgataagccagcttcaggagtaaaggaagaatggtatgccagaatcactaaattaagaaagatggtggatcagcttttctgcaaaaaatttgcggaagccttggggagcactgaagccaaggctgtaccgtaccaaaaatttgaggcacacccgaatgatctgtacgtggaaggactgccagaaaacattcctttccgaagtccctcatggtatggaatcccaaggctggaaaaaatcattcaagtgggcaatcgaattaaatttgttattaaaagaccagaacttctgactcacagtaccactgaagttactcagccaagaacgaatacaccagctcaagctcttggactcaccgaggcagtaaaagtaccatatcctgtgtttgaatcaaacccggagttcttgtatgtggaaggcttgccagaggggattcccttccgaagccctacctggtttggaattccacgacttgaaaggatcgtccgcgggagtaataaaatcaagttcgttgttaaaaaacctgaactagttatttcctacttgcctcctgggatggctagtaaaataaacactaaagctttgcagtcccccaaaagaccacgaagtcctgggagtaattcaaaggttcctgaaattgaggtcaccgtggaaggccctaataacaacaatcctcaaacctcagctgttcgaaccccgacccagactaacggttctaacgttcccttcaagccacgagggagagagttttcctttgaggcctggaatgccaaaatcacggacctaaaacagaaagttgaaaatctcttcaatgagaaatgtggggaagctcttggccttaaacaagctgtgaaggtgccgttcgcgttatttgagtctttcccggaagacttttatgtggaaggcttacctgagggtgtgccattccgaagaccatcgacttttggcattccgaggctggagaagatactcagaaacaaagccaaaattaagttcatcattaaaaagcccgaaatgtttgagacggcgattaaggagagcacctcctctaagagccctcccagaaaaataaattcatcacccaatgttaatactactgcatcaggtgttgaagaccttaacatcattcaggtgacaattccagatgatgataatgaaagactctcgaaagttgaaaaagctagacagctaagagaacaagtgaatgacctctttagtcggaaatttggtgaagctattggtatgggttttcctgtgaaagttccctacaggaaaatcacaattaaccctggctgtgtggtggttgatggcatgcccccgggggtgtccttcaaagcccccagctacctggaaatcagctccatgagaaggatcttagactctgccgagtttatcaaattcacggtcattagaccatttccaggacttgtgattaataaccagctggttgatcagagtgagtcagaaggccccgtgatacaagaatcagctgaaccaagccagttggaagttccagccacagaagaaataaaagagactgatggaagctctcagatcaagcaagaaccagaccccacgtggtagacctcttccctcctaggcaaaaccatctggatcacctaacagtcagaggtcagtatctcagcgtgtgaattatagaggaaatacagagagaacctcttccacttttacttttcgtccaaataaaatgcatggtgtaccagaagttgaagatcgggttgaggattggggctagctcgatgacactaaggccccaacatcgcgggacctgctgtggcgcggattcttaggaacgctgttctagccggccccctctccaggggtcgccgtggccggcattatttcctagttcttcttgtaaccctgaggtgccagcgcggggagtgaggaggggtcagggggctaaggatgcaacctctgacgttctgcgccttcctaggagagtcttacatgtgttgagatttcacaagcaatgcgagttgtaaaataccagctctacaagaagctaggctctgtgacggcatagttttcagtagctttatcacaatattcacaatggagaattatatgacatggtagcagaaataggcccttttatgtgttgcttctattttacctcaaattgtagatatagggtaatcaataaaatccatccatgcctttcacacactaagt

SEQ ID NO: 4789 - protein, 928 aa, Homo sapiens; identical to SEQ ID NO: 4237

SEQ ID NO: 4790 - DNA, 4307 bp, Homo sapiens
aaaaaaaaaaaaaaaaaaaaaaaaaaaagaaaaaagaaaaaaaaaaggaggaggaggaggagggtgagagagaagctgggagagcagagaaaaggggccaccggtcgcccccccgcttccccgcacgcgctctccagccgcggccgcccgcctgccgcggtcaccccggcctctgcctctgtcccccagtgatcggatcaaggcgctgagcgaggccctgcctgcggggcggccatgcggcggtgacaggagcgcgaccgacacgcacgggcccctcgccccctctcgcctcccgtccgctcgccagctcccctcagccgaggctgctccgcggcggccgcagcccgcgcgcggcccacactcgcctccccgttgaagatgaggagtcctcggagagcaggatggtggtgacattcctcatgtcagctctcgagtccatgtgtaaagaactggccaagtccaaagccgaagtggcctgcattgcagtgtatgaaacagacgtgtttgtcgtcggaactgaaagaggacgtgcttttgtcaataccagaaaggattttcaaaaagattttgtaaaatattgtgttgaagaagaagaaaaagctgcagagatgcataaaatgaaatctacaacccaggcaaatcggatgagtgtagatgctgtagaaattgaaacactcagaaaaacagttgaggactatttctgcttttgctatgggaaagctttaggcaaatccacagtggtacctgtaccatatgagaagatgctgcgagaccagtcggctgtggtagtgcaggggcttccggaaggtgttgcctttaaacaccccgagaactatgatcttgcaaccctgaaatggattttggagaacaaagcagggatttcattcatcattaagagaccttttttagagccaaagaagcatgtaggtggtcgtgtgatggtaacagatgctgacaggtcaatactatctccaggtggaagttgtggccccatcaaagtgaaaactgaacccacagaagattctggcatttccctggaaatggcagctgtgacagtaaaggaagaatcagaagatcctgattattatcaatataacattcaaggaagccaccattcttcagagggcaatgaaggcacagaaatggaagtaccagcagaagatgatgattattctccaccgtctaagagaccaaaggccaatgagctaccgcagccaccagtcccggaacccgccaatgctgggaagcggaaagtgagggagttcaacttcgagaaatggaatgctcgcatcactgatctacgtaaacaagttgaagaattgtttgaaaggaaatatgctcaagccataaaagccaaaggtccggtgacgatcccgtaccctcttttccagtctcatgttgaagatctttatgtagaaggacttcctgaaggaattccttttagaaggccatctacttacggaattcctcgcctggagaggatattacttgcaaaggaaaggattcgttttgtgattaagaaacatgagcttctgaattcaacacgtgaagatttacagcttgataagccagcttcaggagtaaaggaagaatggtatgccagaatcactaaattaagaaagatggtggatcagcttttctgcaaaaaatttgcggaagccttggggagcactgaagccaaggctgtaccgtaccaaaaatttgaggcacacccgaatgatctgtacgtggaaggactgccagaaaacattcctttccgaagtccctcatggtatggaatcccaaggctggaaaaaatcattcaagtgggcaatcgaattaaatttgttattaaaagaccagaacttctgactcacagtaccactgaagttactcagccaagaacgaatacaccagctcaagctcttggactcaccgaggcagtaaaagtaccatatcctgtgtttgaatcaaacccggagttcttgtatgtggaaggcttgccagaggggattcccttccgaagccctacctggtttggaattccacgacttgaaaggatcgtccgcgggagtaataaaatcaagttcgttgttaaaaaacctgaactagttatttcctacttgcctcctgggatggctagtaaaataaacactaaagctttgcagtcccccaaaagaccacgaagtcctgggagtaattcaaaggttcctgaaattgaggtcaccgtggaaggccctaataacaacaatcctcaaacctcagctgttcgaaccccgacccagactaacggttctaacgttcccttcaagccacgagggagagagttttcctttgaggcctggaatgccaaaatcacggacctaaaacagaaagttgaaaatctcttcaatgagaaatgtggggaagctcttggccttaaacaagctgtgaaggtgccgttcgcgttatttgagtctttcccggaagacttttatgtggaaggcttacctgagggtgtgccattccgaagaccatcgacttttggcattccgaggctggagaagatactcagaaacaaagccaaaattaagttcatcattaaaaagcccgaaatgtttgagacggcgattaaggagagcacctcctctaagagccctcccagaaaaataaattcatcacccaatgttaatactactgcatcaggtgttgaagaccttaacatcattcaggtgacaattccagatgatgataatgaaagactctcgaaagttgaaaaagctagacagctaagagaacaagtgaatgacctctttagtcggaaatttggtgaagctattggtatgggttttcctgtgaaagttccctacaggaaaatcacaattaaccctggctgtgtggtggttgatggcatgcccccgggggtgtccttcaaagcccccagctacctggaaatcagctccatgagaaggatcttagactctgccgagtttatcaaattcacggtcattagaccatttccaggacttgtgattaataaccagctggttgatcagagtgagtcagaaggccccgtgatacaagaatcagctgaaccaagccagttggaagttccagccacagaagaaataaaagagactgatggaagctctcagatcaagcaagaaccagaccccacgtggtagacctcttccctcctaggcttaaagtatcagtggttgagaagagcttttcggacctgttactaccccaagctgtgtaatatacttgtataacagaaataccttctatacaaacctttttttctacttttagatagaaatgtctactttttcagcagttctgtgaattaaagagcagagtgactgtgggtctggaatggctggtgtacttgggaatgtactatcaggattttacagcaatgctgggaaatgacagggaaaatgacaggaatgaatctcaccagattttttatgtactcagcagagccttgagttacggtgtttattttccaatcaagtgaagatatctcctacttctcctactggaacatctcagcttctgcagtgaagaaaaattcctgtgatagttcagttctttagtttttctatttgaaaaaaaaaaatcatttaaatgatcctttgttcacggctctccttaatgactgagtgaacagttcctatctgtatatttgactaaaccttttcctaagctatctctcatggttcctatgtttttttatcataattaaaagcaaaaccatctggatcacctaacagtcagaggtcagtatctcagcgtgtgaattatagaggaaatacagagagaacctcttccacttttacttttcgtccaaataaaatgcatggtgtaccagaagttgaagatcgggttgaggattggggctagctcgatgacactaaggccccaacatcgcgggacctgctgtggcgcggattcttaggaacgctgttctagccggccccctctccaggggtcgccgtggccggcattatttcctagttcttcttgtaaccctgaggtgccagcgcggggagtgaggaggggtcagggggctaaggatgcaacctctgacgttctgcgccttcctaggagagtcttacatgtgttgagatttcacaagcaatgcgagttgtaaaataccagctctacaagaagctaggctctgtgacggcatagttttcagtagctttatcacaatattcacaatggagaattatatgacatggtagcagaaataggcccttttatgtgttgcttctattttacctcaaattgtagatatagggtaatcaataaaatccatccatgcctttcacacactaagt

SEQ ID NO: 4791 - protein, 913 aa, Homo sapiens; identical to SEQ ID NO: 4089

SEQ ID NO: 4792 - DNA, 4086 bp, Homo sapiens
aaaaaaaaaaaaaaaaaaaaaaaaaaaagaaaaaagaaaaaaaaaaggaggaggaggaggagggtgagagagaagctgggagagcagagaaaaggggccaccggtcgcccccccgcttccccgcacgcgctctccagccgcggccgcccgcctgccgcggtcaccccggcctctgcctctgtcccccagtgatcggatcaaggcgctgagcgaggccctgcctgcggggcggccatgcggcggtgacaggagcgcgaccgacacgcacgggcccctcgccccctctcgcctcccgtccgctcgccagctcccctcagccgaggctgctccgcggcggccgcagcccgcgcgcggcccacactcgcctccccgttgaagatgaggagtcctcggagagcaggatggtggtgacattcctcatgtcagctctcgagtccatgtgtaaagaactggccaagtccaaagccgaagtggcctgcattgcagtgtatgaaacagacgtgtttgtcgtcggaactgaaagaggacgtgcttttgtcaataccagaaaggattttcaaaaagattttgtaaaatattgtgttgaagaagaagaaaaagctgcagagatgcataaaatgaaatctacaacccaggcaaatcggatgagtgtagatgctgtagaaattgaaacactcagaaaaacagttgaggactatttctgcttttgctatgggaaagctttaggcaaatccacagtggtacctgtaccatatgagaagatgctgcgagaccagtcggctgtggtagtgcaggggcttccggaaggtgttgcctttaaacaccccgagaactatgatcttgcaaccctgaaatggattttggagaacaaagcagggatttcattcatcattaagagaccttttttagagccaaagaagcatgtaggtggtcgtgtgatggtaacagatgctgacaggtcaatactatctccaggtggaagttgtggccccatcaaagtgaaaactgaacccacagaagattctggcatttccctggaaatggcagctgtgacagtaaaggaagaatcagaagatcctgattattatcaatataacattcaaggaagccaccattcttcagagggcaatgaaggcacagaaatggaagtaccagcagaagattctactcaacatgtcccttcagaaacaagtgaggaccctgaagttgaggtgactattgaagatgatgattattctccaccgtctaagagaccaaaggccaatgagctaccgcagccaccagtcccggaacccgccaatgctgggaagcggaaagtgagggagttcaacttcgagaaatggaatgctcgcatcactgatctacgtaaacaagttgaagaattgtttgaaaggaaatatgctcaagccataaaagccaaaggtccggtgacgatcccgtaccctcttttccagtctcatgttgaagatctttatgtagaaggacttcctgaaggaattccttttagaaggccatctacttacggaattcctcgcctggagaggatattacttgcaaaggaaaggattcgttttgtgattaagaaacatgagcttctgaattcaacacgtgaagatttacagcttgataagccagcttcaggagtaaaggaagaatggtatgccagaatcactaaattaagaaagatggtggatcagcttttctgcaaaaaatttgcggaagccttggggagcactgaagccaaggctgtaccgtaccaaaaatttgaggcacacccgaatgatctgtacgtggaaggactgccagaaaacattcctttccgaagtccctcatggtatggaatcccaaggctggaaaaaatcattcaagtgggcaatcgaattaaatttgttattaaaagaccagaacttctgactcacagtaccactgaagttactcagccaagaacgaatacaccagctcaagctcttggactcaccgaggcagtaaaagtaccatatcctgtgtttgaatcaaacccggagttcttgtatgtggaaggcttgccagaggggattcccttccgaagccctacctggtttggaattccacgacttgaaaggatcgtccgcgggagtaataaaatcaagttcgttgttaaaaaacctgaactagttatttcctacttgcctcctgggatggctagtaaaataaacactaaagctttgcagtcccccaaaagaccacgaagtcctgggagtaattcaaaggttcctgaaattgaggtcaccgtggaaggccctaataacaacaatcctcaaacctcagctgttcgaaccccgacccagactaacggttctaacgttcccttcaagccacgagggagagagttttcctttgaggcctggaatgccaaaatcacggacctaaaacagaaagttgaaaatctcttcaatgagaaatgtggggaagctcttggccttaaacaagctgtgaaggtgccgttcgcgttatttgagtctttcccggaagacttttatgtggaaggcttacctgagggtgtgccattccgaagaccatcgacttttggcattccgaggctggagaagatactcagaaacaaagccaaaattaagttcatcattaaaaagcccgaaatgtttgagacggcgattaaggagagcacctcctctaagagccctcccagaaaaataaattcatcacccaatgttaatactactgcatcaggtgttgaagaccttaacatcattcaggtgacaattccagatgatgataatgaaagactctcgaaagttgaaaaagctagacagctaagagaacaagtgaatgacctctttagtcggaaatttggtgaagctattggtatgggttttcctgtgaaagttccctacaggaaaatcacaattaaccctggctgtgtggtggttgatggcatgcccccgggggtgtccttcaaagcccccagctacctggaaatcagctccatgagaaggatcttagactctgccgagtttatcaaattcacggtcattagaccatttccaggacttgtgattaataaccagctggttgatcagagtgagtcagaaggccccgtgatacaagaatcagctgaaccaagccagttggaagttccagccacagaagaaataaaagagactgatggaagctctcagatcaagcaagaaccagaccccacgtggtagacctcttccctcctaggagccttgagttacggtgtttattttccaatcaagtgaagatatctcctacttctcctactggaacatctcagcttctgcagtgaagaaaaattcctgtgatagttcagttctttagtttttctatttgaaaaaaaaaaatcatttaaatgatcctttgttcacggctctccttaatgactgagtgaacagttcctatctgtatatttgactaaaccttttcctaagctatctctcatggttcctatgtttttttatcataattaaaagcaaaaccatctggatcacctaacagtcagaggtcagtatctcagcgtgtgaattatagaggaaatacagagagaacctcttccacttttacttttcgtccaaataaaatgcatggtgtaccagaagttgaagatcgggttgaggattggggctagctcgatgacactaaggccccaacatcgcgggacctgctgtggcgcggattcttaggaacgctgttctagccggccccctctccaggggtcgccgtggccggcattatttcctagttcttcttgtaaccctgaggtgccagcgcggggagtgaggaggggtcagggggctaaggatgcaacctctgacgttctgcgccttcctaggagagtcttacatgtgttgagatttcacaagcaatgcgagttgtaaaataccagctctacaagaagctaggctctgtgacggcatagttttcagtagctttatcacaatattcacaatggagaattatatgacatggtagcagaaataggcccttttatgtgttgcttctattttacctcaaattgtagatatagggtaatcaataaaatccatccatgcctttcacacactaagt

SEQ ID NO: 4793 - protein, 934 aa, Homo sapiens; identical to SEQ ID NO: 4085

SEQ ID NO: 4794 - DNA, 4250 bp, Homo sapiens
aaaaaaaaaaaaaaaaaaaaaaaaaaaagaaaaaagaaaaaaaaaaggaggaggaggaggagggtgagagagaagctgggagagcagagaaaaggggccaccggtcgcccccccgcttccccgcacgcgctctccagccgcggccgcccgcctgccgcggtcaccccggcctctgcctctgtcccccagtgatcggatcaaggcgctgagcgaggccctgcctgcggggcggccatgcggcggtgacaggagcgcgaccgacacgcacgggcccctcgccccctctcgcctcccgtccgctcgccagctcccctcagccgaggctgctccgcggcggccgcagcccgcgcgcggcccacactcgcctcccctcggcacccccggccccggagctgcctggaggcggccgcactcggtgtaaagaactggccaagtccaaagccgaagtggcctgcattgcagtgtatgaaacagacgtgtttgtcgtcggaactgaaagaggacgtgcttttgtcaataccagaaaggattttcaaaaagattttgtaaaatattgtgttgaagaagaagaaaaagctgcagagatgcataaaatgaaatctacaacccaggcaaatcggatgagtgtagatgctgtagaaattgaaacactcagaaaaacagttgaggactatttctgcttttgctatgggaaagctttaggcaaatccacagtggtacctgtaccatatgagaagatgctgcgagaccagtcggctgtggtagtgcaggggcttccggaaggtgttgcctttaaacaccccgagaactatgatcttgcaaccctgaaatggattttggagaacaaagcagggatttcattcatcattaagagaccttttttagagccaaagaagcatgtaggtggtcgtgtgatggtaacagatgctgacaggtcaatactatctccaggtggaagttgtggccccatcaaagtgaaaactgaacccacagaagattctggcatttccctggaaatggcagctgtgacagtaaaggaagaatcagaagatcctgattattatcaatataacattcaagcaggcccttctgaaactgatgatgttgatgaaaaacagcccctatcgaagcctttgcaaggaagccaccattcttcagagggcaatgaaggcacagaaatggaagtaccagcagaagattctactcaacatgtcccttcagaaacaagtgaggaccctgaagttgaggtgactattgaagatgatgattattctccaccgtctaagagaccaaaggccaatgagctaccgcagccaccagtcccggaacccgccaatgctgggaagcggaaagtgagggagttcaacttcgagaaatggaatgctcgcatcactgatctacgtaaacaagttgaagaattgtttgaaaggaaatatgctcaagccataaaagccaaaggtccggtgacgatcccgtaccctcttttccagtctcatgttgaagatctttatgtagaaggacttcctgaaggaattccttttagaaggccatctacttacggaattcctcgcctggagaggatattacttgcaaaggaaaggattcgttttgtgattaagaaacatgagcttctgaattcaacacgtgaagatttacagcttgataagccagcttcaggagtaaaggaagaatggtatgccagaatcactaaattaagaaagatggtggatcagcttttctgcaaaaaatttgcggaagccttggggagcactgaagccaaggctgtaccgtaccaaaaatttgaggcacacccgaatgatctgtacgtggaaggactgccagaaaacattcctttccgaagtccctcatggtatggaatcccaaggctggaaaaaatcattcaagtgggcaatcgaattaaatttgttattaaaagaccagaacttctgactcacagtaccactgaagttactcagccaagaacgaatacaccagtcaaagaagattggaatgtcagaattaccaagctacggaagcaagtggaagagatttttaatttgaaatttgctcaagctcttggactcaccgaggcagtaaaagtaccatatcctgtgtttgaatcaaacccggagttcttgtatgtggaaggcttgccagaggggattcccttccgaagccctacctggtttggaattccacgacttgaaaggatcgtccgcgggagtaataaaatcaagttcgttgttaaaaaacctgaactagttatttcctacttgcctcctgggatggctagtaaaataaacactaaagctttgcagtcccccaaaagaccacgaagtcctgggagtaattcaaaggttcctgaaattgaggtcaccgtggaaggccctaataacaacaatcctcaaacctcagctgttcgaaccccgacccagactaacggttctaacgttcccttcaagccacgagggagagagttttcctttgaggcctggaatgccaaaatcacggacctaaaacagaaagttgaaaatctcttcaatgagaaatgtggggaagctcttggccttaaacaagctgtgaaggtgccgttcgcgttatttgagtctttcccggaagacttttatgtggaaggcttacctgagggtgtgccattccgaagaccatcgacttttggcattccgaggctggagaagatactcagaaacaaagccaaaattaagttcatcattaaaaagcccgaaatgtttgagacggcgattaaggagagcacctcctctaagagccctcccagaaaaataaattcatcacccaatgttaatactactgcatcaggtgttgaagaccttaacatcattcaggtgacaattccagatgatgataatgaaagactctcgaaagttgaaaaagctagacagctaagagaacaagtgaatgacctctttagtcggaaatttggtgaagctattggtatgggttttcctgtgaaagttccctacaggaaaatcacaattaaccctggctgtgtggtggttgatggcatgcccccgggggtgtccttcaaagcccccagctacctggaaatcagctccatgagaaggatcttagactctgccgagtttatcaaattcacggtcattagaccatttccaggacttgtgattaataaccagctggttgatcagagtgagtcagaaggccccgtgatacaagaatcagctgaaccaagccagttggaagttccagccacagaagaaataaaagagactgatggaagctctcagatcaagcaagaaccagaccccacgtggtagacctcttccctcctaggcttaaagtatcagtggttgagaagagcttttcggacctgttactaccccaagctgtagccttgagttacggtgtttattttccaatcaagtgaagatatctcctacttctcctactggaacatctcagcttctgcagtgaagaaaaattcctgtgatagttcagttctttagtttttctatttgaaaaaaaaaaatcatttaaatgatcctttgttcacggctctccttaatgactgagtgaacagttcctatctgtatatttgactaaaccttttcctaagctatctctcatggttcctatgtttttttatcataattaaaagcaaaaccatctggatcacctaacagtcagaggtcagtatctcagcgtgtgaattatagaggaaatacagagagaacctcttccacttttacttttcgtccaaataaaatgcatggtgtaccagaagttgaagatcgggttgaggattggggctagctcgatgacactaaggccccaacatcgcgggacctgctgtggcgcggattcttaggaacgctgttctagccggccccctctccaggggtcgccgtggccggcattatttcctagttcttcttgtaaccctgaggtgccagcgcggggagtgaggaggggtcagggggctaaggatgcaacctctgacgttctgcgccttcctaggagagtcttacatgtgttgagatttcacaagcaatgcgagttgtaaaataccagctctacaagaagctaggctctgtgacggcatagttttcagtagctttatcacaatattcacaatggagaattatatgacatggtagcagaaataggcccttttatgtgttgcttctattttacctcaaattgtagatatagggtaatcaataaaatccatccatgcctttcacacactaagt

SEQ ID NO: 4795 - protein, 909 aa, Homo sapiens; identical to SEQ ID NO: 4047

SEQ ID NO: 4796 - DNA, 4914 bp, Homo sapiens
aaaaaaaaaaaaaaaaaaaaaaaaaaaagaaaaaagaaaaaaaaaaggaggaggaggaggagggtgagagagaagctgggagagcagagaaaaggggccaccggtcgcccccccgcttccccgcacgcgctctccagccgcggccgcccgcctgccgcggtcaccccggcctctgcctctgtcccccagtgatcggatcaaggcgctgagcgaggccctgcctgcggggcggccatgcggcggtgacaggagcgcgaccgacacgcacgggcccctcgccccctctcgcctcccgtccgctcgccagctcccctcagccgaggctgctccgcggcggccgcagcccgcgcgcggcccacactcgcctcccctcggcacccccggccccggagctgcctggaggcggccgcactcggtgtaaagaactggccaagtccaaagccgaagtggcctgcattgcagtgtatgaaacagacgtgtttgtcgtcggaactgaaagaggacgtgcttttgtcaataccagaaaggattttcaaaaagattttgtaaaatattgtgttgaagaagaagaaaaagctgcagagatgcataaaatgaaatctacaacccaggcaaatcggatgagtgtagatgctgtagaaattgaaacactcagaaaaacagttgaggactatttctgcttttgctatgggaaagctttaggcaaatccacagtggtacctgtaccatatgagaagatgctgcgagaccagtcggctgtggtagtgcaggggcttccggaaggtgttgcctttaaacaccccgagaactatgatcttgcaaccctgaaatggattttggagaacaaagcagggatttcattcatcattaagagaccttttttagagccaaagaagcatgtaggtggtcgtgtgatggtaacagatgctgacaggtcaatactatctccaggtggaagttgtggccccatcaaagtgaaaactgaacccacagaagattctggaagccaccattcttcagagggcaatgaaggcacagaaatggaagtaccagcagaagattctactcaacatgtcccttcagaaacaagtgaggaccctgaagttgaggtgactattgaagatgatgattattctccaccgtctaagagaccaaaggccaatgagctaccgcagccaccagtcccggaacccgccaatgctgggaagcggaaagtgagggagttcaacttcgagaaatggaatgctcgcatcactgatctacgtaaacaagttgaagaattgtttgaaaggaaatatgctcaagccataaaagccaaaggtccggtgacgatcccgtaccctcttttccagtctcatgttgaagatctttatgtagaaggacttcctgaaggaattccttttagaaggccatctacttacggaattcctcgcctggagaggatattacttgcaaaggaaaggattcgttttgtgattaagaaacatgagcttctgaattcaacacgtgaagatttacagcttgataagccagcttcaggagtaaaggaagaatggtatgccagaatcactaaattaagaaagatggtggatcagcttttctgcaaaaaatttgcggaagccttggggagcactgaagccaaggctgtaccgtaccaaaaatttgaggcacacccgaatgatctgtacgtggaaggactgccagaaaacattcctttccgaagtccctcatggtatggaatcccaaggctggaaaaaatcattcaagtgggcaatcgaattaaatttgttattaaaagaccagaacttctgactcacagtaccactgaagttactcagccaagaacgaatacaccagtcaaagaagattggaatgtcagaattaccaagctacggaagcaagtggaagagatttttaatttgaaatttgctcaagctcttggactcaccgaggcagtaaaagtaccatatcctgtgtttgaatcaaacccggagttcttgaaaggatcgtccgcgggagtaataaaatcaagttcgttgttaaaaaacctgaactagttatttcctacttgcctcctgggatggctagtaaaataaacactaaagctttgcagtcccccaaaagaccacgaagtcctgggagtaattcaaaggttcctgaaattgaggtcaccgtggaaggccctaataacaacaatcctcaaacctcagctgttcgaaccccgacccagactaacggttctaacgttcccttcaagccacgagggagagagttttcctttgaggcctggaatgccaaaatcacggacctaaaacagaaagttgaaaatctcttcaatgagaaatgtggggaagctcttggccttaaacaagctgtgaaggtgccgttcgcgttatttgagtctttcccggaagacttttatgtggaaggcttacctgagggtgtgccattccgaagaccatcgacttttggcattccgaggctggagaagatactcagaaacaaagccaaaattaagttcatcattaaaaagcccgaaatgtttgagacggcgattaaggagagcacctcctctaagagccctcccagaaaaataaattcatcacccaatgttaatactactgcatcaggtgttgaagaccttaacatcattcaggtgacaattccagatgatgataatgaaagactctcgaaagttgaaaaagctagacagctaagagaacaagtgaatgacctctttagtcggaaatttggtgaagctattggtatgggttttcctgtgaaagttccctacaggaaaatcacaattaaccctggctgtgtggtggttgatggcatgcccccgggggtgtccttcaaagcccccagctacctggaaatcagctccatgagaaggatcttagactctgccgagtttatcaaattcacggtcattagaccatttccaggacttgtgattaataaccagctggttgatcagagtgagtcagaaggccccgtgatacaagaatcagctgaaccaagccagttggaagttccagccacagaaggtaaaaggacctcttccctcctagggtaaatcagcttctgtgtcagggatgctgtgtggtgtccatctgaaccccctgcatacgcgtagctaatgtgatctccccactttcacataagatggtggccctgccttcagggaatgtgggagccaggtgggagccttcccggatatttaagctagaagattctacagggagattctccttggatcaatatatgtctctcagtcaaagatgtaaaagcacttttgccttaaaaagaatgttctgtttctaaatagagtcaacgttgtcctcctcattggaattcactatgagtcagaatcattagactgacttttttttttccatagtaatagtattttgcagagtctcacagagctgcagatcttttgttcatcttgcagagttaacaagtctgatcctgttagtccagatttcttaaatttggccaagttataataggagcagtagcttgagacccgaagtcaggaaactttgacaatggatttttttttttaatccagagacttgtactggaatttgccttaccctgtcagctcatggacttaaggtttcatcccgctttatgagtgcttctgaatccaagtcattgttacctgaatttgcaaattaagttgtgatattcgtgactgttaaattcctgtaattagattaacctctttgcttgcttgtttgttttctctcctattttagcttaaagtatcagtggttgagaagagcttttcggacctgttactaccccaagctgtgtaatatacttgtataacagaaataccttctatacaaacctttttttctacttttagatagaaatgtctactttttcagcagttctgtgaattaaagagcagagtgactgtgggtctggaatggctggtgtacttgggaatgtactatcaggattttacagcaatgctgggaaatgacagggaaaatgacaggaatgaatctcaccagattttttatgtactcagcagagccttgagttacggtgtttattttccaatcaagtgaagatatctcctacttctcctactggaacatctcagcttctgcagtgaagaaaaattcctgtgatagttcagttctttagtttttctatttgaaaaaaaaaaatcatttaaatgatcctttgttcacggctctccttaatgactgagtgaacagttcctatctgtatatttgactaaaccttttcctaagctatctctcatggttcctatgtttttttatcataattaaaagcaaaaccatctggatcacctaacagtcagaggtcagtatctcagcgtgtgaattatagaggaaatacagagagaacctcttccacttttacttttcgtccaaataaaatgcatggtgtaccagaagttgaagatcgggttgaggattggggctagctcgatgacactaaggccccaacatcgcgggacctgctgtggcgcggattcttaggaacgctgttctagccggccccctctccaggggtcgccgtggccggcattatttcctagttcttcttgtaaccctgaggtgccagcgcggggagtgaggaggggtcagggggctaaggatgcaacctctgacgttctgcgccttcctaggagagtcttacatgtgttgagatttcacaagcaatgcgagttgtaaaataccagctctacaagaagctaggctctgtgacggcatagttttcagtagctttatcacaatattcacaatggagaattatatgacatggtagcagaaataggcccttttatgtgttgcttctattttacctcaaattgtagatatagggtaatcaataaaatccatccatgcctttcacacactaagt

SEQ ID NO: 4797 - protein, 490 aa, Homo sapiens; identical to SEQ ID NO: 4105

SEQ ID NO: 4798 - DNA, 8007 bp, Homo sapiens
aaaaaaaaaaaaaaaaaaaaaaaaaaaagaaaaaagaaaaaaaaaaggaggaggaggaggagggtgagagagaagctgggagagcagagaaaaggggccaccggtcgcccccccgcttccccgcacgcgctctccagccgcggccgcccgcctgccgcggtcaccccggcctctgcctctgtcccccagtgatcggatcaaggcgctgagcgaggccctgcctgcggggcggccatgcggcggtgacaggagcgcgaccgacacgcacgggcccctcgccccctctcgcctcccgtccgctcgccagctcccctcagccgaggctgctccgcggcggccgcagcccgcgcgcggcccacactcgcctccccgttgaagatgaggagtcctcggagagcaggatggtggtgacattcctcatgtcagctctcgagtccatgtgtaaagaactggccaagtccaaagccgaagtggcctgcattgcagtgtatgaaacagacgtgtttgtcgtcggaactgaaagaggacgtgcttttgtcaataccagaaaggattttcaaaaagattttgtaaaatattgtgttgaagaagaagaaaaagctgcagagatgcataaaatgaaatctacaacccaggcaaatcggatgagtgtagatgctgtagaaattgaaacactcagaaaaacagttgaggactatttctgcttttgctatgggaaagctttaggcaaatccacagtggtacctgtaccatatgagaagatgctgcgagaccagtcggctgtggtagtgcaggggcttccggaaggtgttgcctttaaacaccccgagaactatgatcttgcaaccctgaaatggattttggagaacaaagcagggatttcattcatcattaagagaccttttttagagccaaagaagcatgtaggtggtcgtgtgatggtaacagatgctgacaggtcaatactatctccaggtggaagttgtggccccatcaaagtgaaaactgaacccacagaagattctggcatttccctggaaatggcagctgtgacagtaaaggaagaatcagaagatcctgattattatcaatataacattcaaggaagccaccattcttcagagggcaatgaaggcacagaaatggaagtaccagcagaagattctactcaacatgtcccttcagaaacaagtgaggaccctgaagttgaggtgactattgaagatgatgattattctccaccgtctaagagaccaaaggccaatgagctaccgcagccaccagtcccggaacccgccaatgctgggaagcggaaagtgagggagttcaacttcgagaaatggaatgctcgcatcactgatctacgtaaacaagttgaagaattgtttgaaaggaaatatgctcaagccataaaagccaaaggtccggtgacgatcccgtaccctcttttccagtctcatgttgaagatctttatgtagaaggacttcctgaaggaattccttttagaaggccatctacttacggaattcctcgcctggagaggatattacttgcaaaggaaaggattcgttttgtgattaagaaacatgagcttctgaattcaacacgtgaagatttacagcttgataagccagcttcaggagtaaaggaagaatggtatgccagaatcactaaattaagaaagatggtggatcagcttttctgcaaaaaatttgcggaagccttggggagcactgaagccaaggctgtaccgtaccaaaaatttgaggcacacccgaatgatctgtacgtggaaggactgccagaaaacattcctttccgaagtccctcatggtatggaatcccaaggctggaaaaaatcattcaagtgggcaatcgaattaaatttgttattaaaagaccagaacttctgactcacagtaccactgaagttactcagccaagaacgaatacaccagtcaaagaagattggaatgtcagaattaccaagctacggaagcaagtggaagagatttttaatttgaaatttgcttagatttgttgacagcggtttcctggagtgctgtcttgagaacgattctgaggaggctcagcaagaaagagtgtttcagttgattgggtgtgtctgtcatggagaaggaactcaagctcttggactcaccgaggcagtaaaagtaccatatcctgtgtttgaatcaaacccggagttcttgtatgtggaaggcttgccagaggggattcccttccgaagccctacctggtttggaattccacgacttgaaaggatcgtccgcgggagtaataaaatcaagttcgttgttaaaaaacctgaactagttatttcctacttgcctcctgggatggctagtaaaataaacactaaagctttgcagtcccccaaaagaccacgaagtcctgggagtaattcaaaggttcctgaaattgaggtcaccgtggaaggccctaataacaacaatcctcaaacctcagctgttcgaaccccgacccagactaacggttctaacgttcccttcaagccacgagggagagagttttcctttgaggcctggaatgccaaaatcacggacctaaaacagaaagttgaaaatctcttcaatgagaaatgtggggaagctcttggccttaaacaagctgtgaaggtgccgttcgcgttatttgagtctttcccggaagacttttatgtggaaggcttacctgagggtgtgccattccgaagaccatcgacttttggcattccgaggctggagaagatactcagaaacaaagccaaaattaagttcatcattaaaaagcccgaaatgtttgagacggcgattaaggagagcacctcctctaagagccctcccagaaaaataaattcatcacccaatgttaatactactgcatcaggtgttgaagaccttaacatcattcaggtgacaattccagatgatgataatgaaagactctcgaaagttgaaaaagctagacagctaagagaacaagtgaatgacctctttagtcggaaatttggtgaagctattggtatgggttttcctgtgaaagttccctacaggaaaatcacaattaaccctggctgtgtggtggttgatggcatgcccccgggggtgtccttcaaagcccccagctacctggaaatcagctccatgagaaggatcttagactctgccgagtttatcaaattcacggtcattaggtaagtgagagtttcctgcttagtcacaggagcgaatctggagctcatgaggctgactcttctaaaatgcagccacaggtagtcatcgaatccggcttcctatgctgtgcaatcaacaaatcaaaataacttgtgtcatcattagaatgtcagatgtgcttctacgaactaagctgactcttttaattctttggcaaagggttggcaaactaggactgtttgccaaattcaggctgcctcctatttttagagtcttcctgaaacacagctacacccgtattatccatggctgctttcctgtcacagtgagtaagtagctgggactgagaaggcatggcctccaaagtctaaaatatttactctctagcactttgtagaaaaaccttagctaggcacagtggctaacgcctgtaatcccagcattttgggaggccaaggcaggcagatcacctgaggtcaggagttccagaccagcctggccaacatggtgaaatcccatctctacaaaaataaaacagttagctgggcatgatggcgggtgcctgtaatcccagctactcgggaggctgaggcaggatagtcgcttgaacccaggaggtggaggttgcaatgagccaagatcatgccactgcactccagcctggacgacagagtgagactccatcacaagaaaaaaagaactttgtcaacctctgtcttagggcgccttgtcacaggcttcgggtcagacggattcaaccttgcatcagccatttgttagccaggtcactctgttctttgtctgtaaatgagattgatcgttgttcccactgagagtgtcagctccttcccgtagagcaggcatgatgattgtactcacctctgacaccattgtgagtgccacattccttcccacgtccttgtcactgtaagagatgcccacctgagcaccaaccccaggttatcttcccctttgtcttccagccccccagaaacagctacgactcaacctacccaatcatttcatcatcagattgccactgtctctagttcaggtctcttgggactggcactcagaaatctcataataaatcctcttgaggcttctcatacactcgtcttcttccaatcttctttccctcaaaatctcatattttggttccacttcacccaccgtcattctccatatcactcccaggagttaggcaaaaagccccttccgttcttccgtatgttaaacttagaatcactctgttccctgctctgcgtttctattttttgtttttcctccatttactagtagcttaacactttctaacagtgttcttattattgatacgtatctatctcttccataagcttataaggtcacggataatacttctcattgtagtacgtaaatgacgtgggctagatatgagttgaataaacagttatacctgtaaattcttacagagtgaaaataaattgttatactttacaatttgtttctctctttagaccatttccaggacttgtgattaataaccgtgagtattttgtgaagtgttttgtttttgttttttcctggggtctgacgtgtgtgcgtgtgagtgtgtatacatgcttaacgtatatcacgttacttcacctatgtcagtaaccaggccaaatacttgttttagccctcagtaaaaacaccaggcacttcctagttgtaaaattattcaagcttcttaacttcctatcctcgatgcacttaatcataaaatggtaataatagcaccgattttgggggagtcgttccagtagatggaaagcatctggaacaggtgtcagcaagctcctgccgacgtgtatgcataaagttttattgaaaccaccatcgtgtccatttgtttatggcagaactgagagatggcagcagcaagtgtgtgcctgcaaaacctaaaatatttactaattggctctgcaagaaaagagtttgcatccccctaacctagaacagtgtctagcctctagtatgtgtttagcctacagtatgtgctcagcgaatacaatctatatttattactgcttttatgactgttataattactgtgcttggatttcgttacaaagtaagtcacaatgtgcctgcttctgttagtatttcagcacagtgcctggcacacatggggctctcaaatattgctgagcgagtgaacaaatgtcctttcaattccttaacgttgatgtcattttcaatagtattttgagccaaacttaattttgcgagtgtgttttgttttcttaactttattattaaaaatgtataaaagtgaggccaggcgtggtggctcacgcctgtaatcccagcagtttgggaggctgaggcaggcggatcagttgaggttgggagttggagaccagcccgtccaacatggtgaaagcctgtctctactaaaaatacaaaaatcagctgggtgtggtggcgcgtgcctgtaatcccagctactcaggaggctgaggcaggagagttgcttgaatcctagaggtggaggttgcagtgagctgagatcgtgccattgcactccagcctgggcaacaagagcaaaactctgtcccaataaataaataaataaaatgttctcttttgttcctgttcttgtgcggtagtgtggtatagagttttatggtaattactgtgaattagtgattctgagggacatatcagaactctgaggtttgtttccttctcatcttgagggaaacagcaaatgtatgttaaaatgcttttccaagggaacaacacatccttacattatttaaaccaatctgcttcattttcagagctggttgatcagagtgagtcagaaggccccgtgatacaagaatcagctgaaccaagccagttggaagttccagccacagaagaaataaaagagactgatggaagctctcagatcaagcaagaaccagaccccacgtggtagacctcttccctcctagggtaaatcagcttctgtgtcagggatgctgtgtggtgtccatctgaaccccctgcatacgcgtagctaatgtgatctccccactttcacataagatggtggccctgccttcagggaatgtgggagccaggtgggagccttcccggatatttaagctagaagattctacagggagattctccttggatcaatatatgtctctcagtcaaagatgtaaaagcacttttgccttaaaaagaatgttctgtttctaaatagagtcaacgttgtcctcctcattggaattcactatgagtcagaatcattagactgacttttttttttccatagtaatagtattttgcagagtctcacagagctgcagatcttttgttcatcttgcagagttaacaagtctgatcctgttagtccagatttcttaaatttggccaagttataataggagcagtagcttgagacccgaagtcaggaaactttgacaatggatttttttttttaatccagagacttgtactggaatttgccttaccctgtcagctcatggacttaaggtttcatcccgctttatgagtgcttctgaatccaagtcattgttacctgaatttgcaaattaagttgtgatattcgtgactgttaaattcctgtaattagattaacctctttgcttgcttgtttgttttctctcctattttagcttaaagtatcagtggttgagaagagcttttcggacctgttactaccccaagctgtgtaatatacttgtataacagaaataccttctatacaaacctttttttctacttttagatagaaatgtctactttttcagcagttctgtgaattaaagagcagagtgactgtgggtctggaatggctggtgtacttgggaatgtactatcaggattttacagcaatgctgggaaatgacagggaaaatgacaggaatgaatctcaccagattttttatgtactcagcagagccttgagttacggtgtttattttccaatcaagtgaagatatctcctacttctcctactggaacatctcagcttctgcagtgaagaaaaattcctgtgatagttcagttctttagtttttctatttgaaaaaaaaaaatcatttaaatgatcctttgttcacggctctccttaatgactgagtgaacagttcctatctgtatatttgactaaaccttttcctaagctatctctcatggttcctatgtttttttatcataattaaaagcaaaaccatctggatcacctaacagtcagaggtcagtatctcagcgtgtgaattatagaggaaatacagagagaacctcttccacttttacttttcgtccaaataaaatgcatggtgtaccagaagttgaagatcgggttgaggattggggctagctcgatgacactaaggccccaacatcgcgggacctgctgtggcgcggattcttaggaacgctgttctagccggccccctctccaggggtcgccgtggccggcattatttcctagttcttcttgtaaccctgaggtgccagcgcggggagtgaggaggggtcagggggctaaggatgcaacctctgacgttctgcgccttcctaggagagtcttacatgtgttgagatttcacaagcaatgcgagttgtaaaataccagctctacaagaagctaggctctgtgacggcatagttttcagtagctttatcacaatattcacaatggagaattatatgacatggtagcagaaataggcccttttatgtgttgcttctattttacctcaaattgtagatatagggtaatcaataaaatccatccatgcctttcacacactaagt

SEQ ID NO: 4799 - protein, 544 aa, Homo sapiens; identical to SEQ ID NO: 4045

SEQ ID NO: 4800 - DNA, 5069 bp, Homo sapiens
aaaaaaaaaaaaaaaaaaaaaaaaaaaagaaaaaagaaaaaaaaaaggaggaggaggaggagggtgagagagaagctgggagagcagagaaaaggggccaccggtcgcccccccgcttccccgcacgcgctctccagccgcggccgcccgcctgccgcggtcaccccggcctctgcctctgtcccccagtgatcggatcaaggcgctgagcgaggccctgcctgcggggcggccatgcggcggtgacaggagcgcgaccgacacgcacgggcccctcgccccctctcgcctcccgtccgctcgccagctcccctcagccgaggctgctccgcggcggccgcagcccgcgcgcggcccacactcgcctcccctcggcacccccggccccggagctgcctggaggcggccgcactcggggatcatggcccaagttgcaatgtccaccctccccgttgaagatgaggagtcctcggagagcaggatggtggtgacattcctcatgtcagctctcgagtccatgtgtaaagaactggccaagtccaaagccgaagtggcctgcattgcagtgtatgaaacagacgtgtttgtcgtcggaactgaaagaggacgtgcttttgtcaataccagaaaggattttcaaaaagattttgtaaaatattgtgttgaagaagaagaaaaagctgcagagatgcataaaatgaaatctacaacccaggcaaatcggatgagtgtagatgctgtagaaattgaaacactcagaaaaacagttgaggactatttctgcttttgctatgggaaagctttaggcaaatccacagtggtacctgtaccatatgagaagatgctgcgagaccagtcggctgtggtagtgcaggggcttccggaaggtgttgcctttaaacaccccgagaactatgatcttgcaaccctgaaatggattttggagaacaaagcagggatttcattcatcattaagagaccttttttagagccaaagaagcatgtaggtggtcgtgtgatggtaacagatgctgacaggtcaatactatctccaggtggaagttgtggccccatcaaagtgaaaactgaacccacagaagattctggaagccaccattcttcagagggcaatgaaggcacagaaatggaagtaccagcagaagattctactcaacatgtcccttcagaaacaagtgaggaccctgaagttgaggtgactattgaagatgatgattattctccaccgtctaagagaccaaaggccaatgagctaccgcagccaccagtcccggaacccgccaatgctgggaagcggaaagtgagggagttcaacttcgagaaatggaatgctcgcatcactgatctacgtaaacaagttgaagaattgtttgaaaggaaatatgctcaagccataaaagccaaaggtccggtgacgatcccgtaccctcttttccagtctcatgttgaagatctttatgtagaaggacttcctgaaggaattccttttagaaggccatctacttacggaattcctcgcctggagaggatattacttgcaaaggaaaggattcgttttgtgattaagaaacatgagcttctgaattcaacacgtgaagatttacagcttgataagccagcttcaggagtaaaggaagaatggtatgccagaatcactaaattaagaaagatggtggatcagcttttctgcaaaaaatttgcggaagccttggggagcactgaagccaaggctgtaccgtaccaaaaatttgaggcacacccgaatgatctgtacgtggaaggactgccagaaaacattcctttccgaagtccctcatggtatggaatcccaaggctggaaaaaatcattcaagtgggcaatcgaattaaatttgttattaaaagaccagaacttctgactcacagtaccactgaagttactcagccaagaacgaatacaccagtcaaagaagattggaatgtcagaattaccaagctacggaagcaagtggaagagatttttaatttgaaatttgctcaagctcttggactcaccgaggcagtaaaagtaccatatcctgtgtttgaatcaaacccggagttcttgaaaggatcgtccgcgggagtaataaaatcaagttcgttgttaaaaaacctgaactagttatttcctacttgcctcctgggatggctagtaaaataaacactaaagctttgcagtcccccaaaagaccacgaagtcctgggagtaattcaaaggttcctgaaattgaggtcaccgtggaaggccctaataacaacaatcctcaaacctcagctgttcgaaccccgacccagactaacggttctaacgttcccttcaagccacgagggagagagttttcctttgaggcctggaatgccaaaatcacggacctaaaacagaaagttgaaaatctcttcaatgagaaatgtggggaagctcttggccttaaacaagctgtgaaggtgccgttcgcgttatttgagtctttcccggaagacttttatgtggaaggcttacctgagggtgtgccattccgaagaccatcgacttttggcattccgaggctggagaagatactcagaaacaaagccaaaattaagttcatcattaaaaagcccgaaatgtttgagacggcgattaaggagagcacctcctctaagagccctcccagaaaaataaattcatcacccaatgttaatactactgcatcaggtgttgaagaccttaacatcattcaggtgacaattccagatgatgataatgaaagactctcgaaagttgaaaaagctagacagctaagagaacaagtgaatgacctctttagtcggaaatttggtgaagctattggtatgggttttcctgtgaaagttccctacaggaaaatcacaattaaccctggctgtgtggtggttgatggcatgcccccgggggtgtccttcaaagcccccagctacctggaaatcagctccatgagaaggatcttagactctgccgagtttatcaaattcacggtcattagaccatttccaggacttgtgattaataaccagctggttgatcagagtgagtcagaaggccccgtgatacaagaatcagctgaaccaagccagttggaagttccagccacagaagaaataaaagagactgatggaagctctcagatcaagcaagaaccagaccccacgtggtagacctcttccctcctagggtaaatcagcttctgtgtcagggatgctgtgtggtgtccatctgaaccccctgcatacgcgtagctaatgtgatctccccactttcacataagatggtggccctgccttcagggaatgtgggagccaggtgggagccttcccggatatttaagctagaagattctacagggagattctccttggatcaatatatgtctctcagtcaaagatgtaaaagcacttttgccttaaaaagaatgttctgtttctaaatagagtcaacgttgtcctcctcattggaattcactatgagtcagaatcattagactgacttttttttttccatagtaatagtattttgcagagtctcacagagctgcagatcttttgttcatcttgcagagttaacaagtctgatcctgttagtccagatttcttaaatttggccaagttataataggagcagtagcttgagacccgaagtcaggaaactttgacaatggatttttttttttaatccagagacttgtactggaatttgccttaccctgtcagctcatggacttaaggtttcatcccgctttatgagtgcttctgaatccaagtcattgttacctgaatttgcaaattaagttgtgatattcgtgactgttaaattcctgtaattagattaacctctttgcttgcttgtttgttttctctcctattttagcttaaagtatcagtggttgagaagagcttttcggacctgttactaccccaagctgtgtaatatacttgtataacagaaataccttctatacaaacctttttttctacttttagatagaaatgtctactttttcagcagttctgtgaattaaagagcagagtgactgtgggtctggaatggctggtgtacttgggaatgtactatcaggattttacagcaatgctgggaaatgacagggaaaatgacaggaatgaatctcaccagattttttatgtactcagcagagccttgagttacggtgtttattttccaatcaagtgaagatatctcctacttctcctactggaacatctcagcttctgcagtgaagaaaaattcctgtgatagttcagttctttagtttttctatttgaaaaaaaaaaatcatttaaatgatcctttgttcacggctctccttaatgactgagtgaacagttcctatctgtatatttgactaaaccttttcctaagctatctctcatggttcctatgtttttttatcataattaaaagcaaaaccatctggatcacctaacagtcagaggtcagtatctcagcgtgtgaattatagaggaaatacagagagaacctcttccacttttacttttcgtccaaataaaatgcatggtgtaccagaagttgaagatcgggttgaggattggggctagctcgatgacactaaggccccaacatcgcgggacctgctgtggcgcggattcttaggaacgctgttctagccggccccctctccaggggtcgccgtggccggcattatttcctagttcttcttgtaaccctgaggtgccagcgcggggagtgaggaggggtcagggggctaaggatgcaacctctgacgttctgcgccttcctaggagagtcttacatgtgttgagatttcacaagcaatgcgagttgtaaaataccagctctacaagaagctaggctctgtgacggcatagttttcagtagctttatcacaatattcacaatggagaattatatgacatggtagcagaaataggcccttttatgtgttgcttctattttacctcaaattgtagatatagggtaatcaataaaatccatccatgcctttcacacactaagt

SEQ ID NO: 4801 - protein, 579 aa, Homo sapiens; identical to SEQ ID NO: 4111

SEQ ID NO: 4802 - DNA, 4287 bp, Homo sapiens
aaaaaaaaaaaaaaaaaaaaaaaaaaaagaaaaaagaaaaaaaaaaggaggaggaggaggagggtgagagagaagctgggagagcagagaaaaggggccaccggtcgcccccccgcttccccgcacgcgctctccagccgcggccgcccgcctgccgcggtcaccccggcctctgcctctgtcccccagtgatcggatcaaggcgctgagcgaggccctgcctgcggggcggccatgcggcggtgacaggagcgcgaccgacacgcacgggcccctcgccccctctcgcctcccgtccgctcgccagctcccctcagccgaggctgctccgcggcggccgcagcccgcgcgcggcccacactcgcctcccctcggcacccccggccccggagctgcctggaggcggccgcactcggggatcatggcccaagttgcaatgtccaccctccccgttgaagatgaggagtcctcggagagcaggatggtggtgacattcctcatgtcagctctcgagtccatgtgtaaagaactggccaagtccaaagccgaagtggcctgcattgcagtgtatgaaacagacgtgtttgtcgtcggaactgaaagaggacgtgcttttgtcaataccagaaaggattttcaaaaagattttgtaaaatattgtgttgaagaagaagaaaaagctgcagagatgcataaaatgaaatctacaacccaggcaaatcggatgagtgtagatgctgtagaaattgaaacactcagaaaaacagttgaggactatttctgcttttgctatgggaaagctttaggcaaatccacagtggtacctgtaccatatgagaagatgctgcgagaccagtcggctgtggtagtgcaggggcttccggaaggtgttgcctttaaacaccccgagaactatgatcttgcaaccctgaaatggattttggagaacaaagcagggatttcattcatcattaagagaccttttttagagccaaagaagcatgtaggtggtcgtgtgatggtaacagatgctgacaggtcaatactatctccaggtggaagttgtggccccatcaaagtgaaaactgaacccacagaagattctggcatttccctggaaatggcagctgtgacagtaaaggaagaatcagaagatcctgattattatcaatataacattcaaggaagccaccattcttcagagggcaatgaaggcacagaaatggaagtaccagcagaagatgatgattattctccaccgtctaagagaccaaaggccaatgagctaccgcagccaccagtcccggaacccgccaatgctgggaagcggaaagtgagggagttcaacttcgagaaatggaatgctcgcatcactgatctacgtaaacaagttgaagaattgtttgaaaggaaatatgctcaagccataaaagccaaaggtccggtgacgatcccgtaccctcttttccagtctcatgttgaagatctttatgtagaaggacttcctgaaggaattccttttagaaggccatctacttacggaattcctcgcctggagaggatattacttgcaaaggaaaggattcgttttgtgattaagaaacatgagcttctgaattcaacacgtgaagatttacagcttgataagccagcttcaggagtaaaggaagaatggtatgccagaatcactaaattaagaaagatggtggatcagcttttctgcaaaaaatttgcggaagccttggggagcactgaagccaaggctgtaccgtaccaaaaatttgaggcacacccgaatgatctgtacgtggaaggactgccagaaaacattcctttccgaagtccctcatggtatggaatcccaaggctggaaaaaatcattcaagtgggcaatcgaattaaatttgttattaaaagaccagaacttctgactcacagtaccactgaagttactcagccaagaacgaatacaccagtcaaagaagattggaatgtcagaattaccaagctacggaagcaagtggaagagatttttaatttgaaatttgcttagatttgttgacagcggtttcctggagtgctgtcttgagaacgattctgaggaggctcagcaagaaagagtgtttcagttgattgggtgtgtctgtcatggagaaggaactcaagctcttggactcaccgaggcagtaaaagtaccatatcctgtgtttgaatcaaacccggagttcttgtatgtggaaggcttgccagaggggattcccttccgaagccctacctggtttggaattccacgacttgaaaggatcgtccgcgggagtaataaaatcaagttcgttgttaaaaaacctgaactagttatttcctacttgcctcctgggatggctagtaaaataaacactaaagctttgcagtcccccaaaagaccacgaagtcctgggagtaattcaaaggttcctgaaattgaggtcaccgtggaaggccctaataacaacaatcctcaaacctcagctgttcgaaccccgacccagactaacggttctaacgttcccttcaagccacgagggagagagttttcctttgaggcctggaatgccaaaatcacggacctaaaacagaaagttgaaaatctcttcaatgagaaatgtggggaagctcttggccttaaacaagctgtgaaggtgccgttcgcgttatttgagtctttcccggaagacttttatgtggaaggcttacctgagggtgtgccattccgaagaccatcgacttttggcattccgaggctggagaagatactcagaaacaaagccaaaattaagttcatcattaaaaagcccgaaatgtttgagacggcgattaaggagagcacctcctctaagagccctcccagaaaaataaattcatcacccaatgttaatactactgcatcaggtgttgaagaccttaacatcattcaggtgacaattccagatgatgataatgaaagactctcgaaagttgaaaaagctagacagctaagagaacaagtgaatgacctctttagtcggaaatttggtgaagctattggtatgggttttcctgtgaaagttccctacaggaaaatcacaattaaccctggctgtgtggtggttgatggcatgcccccgggggtgtccttcaaagcccccagctacctggaaatcagctccatgagaaggatcttagactctgccgagtttatcaaattcacggtcattagaccatttccaggacttgtgattaataaccagctggttgatcagagtgagtcagaaggccccgtgatacaagaatcagctgaaccaagccagttggaagttccagccacagaagaaataaaagagactgatggaagctctcagatcaagcaagaaccagaccccacgtggtagacctcttccctcctaggagccttgagttacggtgtttattttccaatcaagtgaagatatctcctacttctcctactggaacatctcagcttctgcagtgaagaaaaattcctgtgatagttcagttctttagtttttctatttgaaaaaaaaaaatcatttaaatgatcctttgttcacggctctccttaatgactgagtgaacagttcctatctgtatatttgactaaaccttttcctaagctatctctcatggttcctatgtttttttatcataattaaaagcaaaaccatctggatcacctaacagtcagaggtcagtatctcagcgtgtgaattatagaggaaatacagagagaacctcttccacttttacttttcgtccaaataaaatgcatggtgtaccagaagttgaagatcgggttgaggattggggctagctcgatgacactaaggccccaacatcgcgggacctgctgtggcgcggattcttaggaacgctgttctagccggccccctctccaggggtcgccgtggccggcattatttcctagttcttcttgtaaccctgaggtgccagcgcggggagtgaggaggggtcagggggctaaggatgcaacctctgacgttctgcgccttcctaggagagtcttacatgtgttgagatttcacaagcaatgcgagttgtaaaataccagctctacaagaagctaggctctgtgacggcatagttttcagtagctttatcacaatattcacaatggagaattatatgacatggtagcagaaataggcccttttatgtgttgcttctattttacctcaaattgtagatatagggtaatcaataaaatccatccatgcctttcacacactaagt

SEQ ID NO: 4803 - protein, 543 aa, Homo sapiens; identical to SEQ ID NO: 4195

SEQ ID NO: 4804 - DNA, 4064 bp, Homo sapiens
aaaaaaaaaaaaaaaaaaaaaaaaaaaagaaaaaagaaaaaaaaaaggaggaggaggaggagggtgagagagaagctgggagagcagagaaaaggggccaccggtcgcccccccgcttccccgcacgcgctctccagccgcggccgcccgcctgccgcggtcaccccggcctctgcctctgtcccccagtgatcggatcaaggcgctgagcgaggccctgcctgcggggcggccatgcggcggtgacaggagcgcgaccgacacgcacgggcccctcgccccctctcgcctcccgtccgctcgccagctcccctcagccgaggctgctccgcggcggccgcagcccgcgcgcggcccacactcgcctccccgttgaagatgaggagtcctcggagagcaggatggtggtgacattcctcatgtcagctctcgagtccatgtgtaaagaactggccaagtccaaagccgaagtggcctgcattgcagtgtatgaaacagacgtgtttgtcgtcggaactgaaagaggacgtgcttttgtcaataccagaaaggattttcaaaaagattttgtaaaatattgtgttgaagaagaagaaaaagctgcagagatgcataaaatgaaatctacaacccaggcaaatcggatgagtgtagatgctgtagaaattgaaacactcagaaaaacagttgaggactatttctgcttttgctatgggaaagctttaggcaaatccacagtggtacctgtaccatatgagaagatgctgcgagaccagtcggctgtggtagtgcaggggcttccggaaggtgttgcctttaaacaccccgagaactatgatcttgcaaccctgaaatggattttggagaacaaagcagggatttcattcatcattaagagaccttttttagagccaaagaagcatgtaggtggtcgtgtgatggtaacagatgctgacaggtcaatactatctccaggtggaagttgtggccccatcaaagtgaaaactgaacccacagaagattctggaagccaccattcttcagagggcaatgaaggcacagaaatggaagtaccagcagaagattctactcaacatgtcccttcagaaacaagtgaggaccctgaagttgaggtgactattgaagatgatgattattctccaccgtctaagagaccaaaggccaatgagctaccgcagccaccagtcccggaacccgccaatgctgggaagcggaaagtgagggagttcaacttcgagaaatggaatgctcgcatcactgatctacgtaaacaagttgaagaattgtttgaaaggaaatatgctcaagccataaaagccaaaggtccggtgacgatcccgtaccctcttttccagtctcatgttgaagatctttatgtagaaggacttcctgaaggaattccttttagaaggccatctacttacggaattcctcgcctggagaggatattacttgcaaaggaaaggattcgttttgtgattaagaaacatgagcttctgaattcaacacgtgaagatttacagcttgataagccagcttcaggagtaaaggaagaatggtatgccagaatcactaaattaagaaagatggtggatcagcttttctgcaaaaaatttgcggaagccttggggagcactgaagccaaggctgtaccgtaccaaaaatttgaggcacacccgaatgatctgtacgtggaaggactgccagaaaacattcctttccgaagtccctcatggtatggaatcccaaggctggaaaaaatcattcaagtgggcaatcgaattaaatttgttattaaaagaccagaacttctgactcacagtaccactgaagttactcagccaagaacgaatacaccagctcaagctcttggactcaccgaggcagtaaaagtaccatatcctgtgtttgaatcaaacccggagttcttgtatgtggaaggcttgccagaggggattcccttccgaagccctacctggtttggaattccacgacttgaaaggatcgtccgcgggagtaataaaatcaagttcgttgttaaaaaacctgaactagttatttcctacttgcctcctgggatggctagtaaaataaacactaaagctttgcagtcccccaaaagaccacgaagtcctgggagtaattcaaaggttcctgaaattgaggtcaccgtggaaggccctaataacaacaatcctcaaacctcagctgttcgaaccccgacccagactaacggttctaacgttcccttcaagccacgagggagagagttttcctttgaggcctggaatgccaaaatcacggacctaaaacagaaagttgaaaatctcttcaatgagaaatgtggggaagctcttggccttaaacaagctgtgaaggtgccgttcgcgttatttgagtctttcccggaagacttttatgtggaaggcttacctgagggtgtgccattccgaagaccatcgacttttggcattccgaggctggagaagatactcagaaacaaagccaaaattaagttcatcattaaaaagcccgaaatgtttgagacggcgattaaggagagcacctcctctaagagccctcccagaaaaataaattcatcacccaatgttaatactactgcatcaggtgttgaagaccttaacatcattcaggtgacaattccagatgatgataatgaaagactctcgaaagttgaaaaagctagacagctaagagaacaagtgaatgacctctttagtcggaaatttggtgaagctattggtatgggttttcctgtgaaagttccctacaggaaaatcacaattaaccctggctgtgtggtggttgatggcatgcccccgggggtgtccttcaaagcccccagctacctggaaatcagctccatgagaaggatcttagactctgccgagtttatcaaattcacggtcattagaccatttccaggacttgtgattaataaccagctggttgatcagagtgagtcagaaggccccgtgatacaagaatcagctgaaccaagccagttggaagttccagccacagaagaaataaaagagactgatggaagctctcagatcaagcaagaaccagaccccacgtggtagacctcttccctcctaggcttaaagtatcagtggttgagaagagcttttcggacctgttactaccccaagctgtagccttgagttacggtgtttattttccaatcaagtgaagatatctcctacttctcctactggaacatctcagcttctgcagtgaagaaaaattcctgtgatagttcagttctttagtttttctatttgaaaaaaaaaaatcatttaaatgatcctttgttcacggctctccttaatgactgagtgaacagttcctatctgtatatttgactaaaccttttcctaagctatctctcatggttcctatgtttttttatcataattaaaagcaaaaccatctggatcacctaacagtcagaggtcagtatctcagcgtgtgaattatagaggaaatacagagagaacctcttccacttttacttttcgtccaaataaaatgcatggtgtaccagaagttgaagatcgggttgaggattggggctagctcgatgacactaaggccccaacatcgcgggacctgctgtggcgcggattcttaggaacgctgttctagccggccccctctccaggggtcgccgtggccggcattatttcctagttcttcttgtaaccctgaggtgccagcgcggggagtgaggaggggtcagggggctaaggatgcaacctctgacgttctgcgccttcctaggagagtcttacatgtgttgagatttcacaagcaatgcgagttgtaaaataccagctctacaagaagctaggctctgtgacggcatagttttcagtagctttatcacaatattcacaatggagaattatatgacatggtagcagaaataggcccttttatgtgttgcttctattttacctcaaattgtagatatagggtaatcaataaaatccatccatgcctttcacacactaagt

SEQ ID NO: 4805 - protein, 908 aa, Homo sapiens; identical to SEQ ID NO: 4227

SEQ ID NO: 4806 - DNA, 7133 bp, Homo sapiens
aaaaaaaaaaaaaaaaaaaaaaaaaaaagaaaaaagaaaaaaaaaaggaggaggaggaggagggtgagagagaagctgggagagcagagaaaaggggccaccggtcgcccccccgcttccccgcacgcgctctccagccgcggccgcccgcctgccgcggtcaccccggcctctgcctctgtcccccagtgatcggatcaaggcgctgagcgaggccctgcctgcggggcggccatgcggcggtgacaggagcgcgaccgacacgcacgggcccctcgccccctctcgcctcccgtccgctcgccagctcccctcagccgaggctgctccgcggcggccgcagcccgcgcgcggcccacactcgcctcccctcggcacccccggccccggagctgcctggaggcggccgcactcggggatcatggcccaagttgcaatgtccaccctccccgttgaagatgaggagtcctcggagagcaggatggtggtgacattcctcatgtcagctctcgagtccatgtgtaaagaactggccaagtccaaagccgaagtggcctgcattgcagtgtatgaaacagacgtgtttgtcgtcggaactgaaagaggacgtgcttttgtcaataccagaaaggattttcaaaaagattttgtaaaatattgtgttgaagaagaagaaaaagctgcagagatgcataaaatgaaatctacaacccaggcaaatcggatgagtgtagatgctgtagaaattgaaacactcagaaaaacagttgaggactatttctgcttttgctatgggaaagctttaggcaaatccacagtggtacctgtaccatatgagaagatgctgcgagaccagtcggctgtggtagtgcaggggcttccggaaggtgttgcctttaaacaccccgagaactatgatcttgcaaccctgaaatggattttggagaacaaagcagggatttcattcatcattaagagaccttttttagagccaaagaagcatgtaggtggtcgtgtgatggtaacagatgctgacaggtcaatactatctccaggtggaagttgtggccccatcaaagtgaaaactgaacccacagaagattctggaagccaccattcttcagagggcaatgaaggcacagaaatggaagtaccagcagaagattctactcaacatgtcccttcagaaacaagtgaggaccctgaagttgaggtgactattgaagatgatgattattctccaccgtctaagagaccaaaggccaatgagctaccgcagccaccagtcccggaacccgccaatgctgggaagcggaaagtgagggagttcaacttcgagaaatggaatgctcgcatcactgatctacgtaaacaagttgaagaattgtttgaaaggaaatatgctcaagccataaaagccaaaggtccggtgacgatcccgtaccctcttttccagtctcatgttgaagatctttatgtagaaggacttcctgaaggaattccttttagaaggccatctacttacggaattcctcgcctggagaggatattacttgcaaaggaaaggattcgttttgtgattaagaaacatgagcttctgaattcaacacgtgaagatttacagcttgataagccagcttcaggagtaaaggaagaatggtatgccagaatcactaaattaagaaagatggtggatcagcttttctgcaaaaaatttgcggaagccttggggagcactgaagccaaggctgtaccgtaccaaaaatttgaggcacacccgaatgatctgtacgtggaaggactgccagaaaacattcctttccgaagtccctcatggtatggaatcccaaggctggaaaaaatcattcaagtgggcaatcgaattaaatttgttattaaaagaccagaacttctgactcacagtaccactgaagttactcagccaagaacgaatacaccagctcaagctcttggactcaccgaggcagtaaaagtaccatatcctgtgtttgaatcaaacccggagttcttgtatgtggaaggcttgccagaggggattcccttccgaagccctacctggtttggaattccacgacttgaaaggatcgtccgcgggagtaataaaatcaagttcgttgttaaaaaacctgaactagttatttcctacttgcctcctgggatggctagtaaaataaacactaaagctttgcagtcccccaaaagaccacgaagtcctgggagtaattcaaaggttcctgaaattgaggtcaccgtggaaggccctaataacaacaatcctcaaacctcagctgttcgaaccccgacccagactaacggttctaacgttcccttcaagccacgagggagagagttttcctttgaggcctggaatgccaaaatcacggacctaaaacagaaagttgaaaatctcttcaatgagaaatgtggggaagctcttggccttaaacaagctgtgaaggtgccgttcgcgttatttgagtctttcccggaagacttttatgtggaaggcttacctgagggtgtgccattccgaagaccatcgacttttggcattccgaggctggagaagatactcagaaacaaagccaaaattaagttcatcattaaaaagcccgaaatgtttgagacggcgattaaggagagcacctcctctaagagccctcccagaaaaataaattcatcacccaatgttaatactactgcatcaggtgttgaagaccttaacatcattcaggtgacaattccagatgatgataatgaaagactctcgaaagttgaaaaagctagacagctaagagaacaagtgaatgacctctttagtcggaaatttggtgaagctattggtatgggttttcctgtgaaagttccctacaggaaaatcacaattaaccctggctgtgtggtggttgatggcatgcccccgggggtgtccttcaaagcccccagctacctggaaatcagctccatgagaaggatcttagactctgccgagtttatcaaattcacggtcattaggtaagtgagagtttcctgcttagtcacaggagcgaatctggagctcatgaggctgactcttctaaaatgcagccacaggtagtcatcgaatccggcttcctatgctgtgcaatcaacaaatcaaaataacttgtgtcatcattagaatgtcagatgtgcttctacgaactaagctgactcttttaattctttggcaaagggttggcaaactaggactgtttgccaaattcaggctgcctcctatttttagagtcttcctgaaacacagctacacccgtattatccatggctgctttcctgtcacagtgagtaagtagctgggactgagaaggcatggcctccaaagtctaaaatatttactctctagcactttgtagaaaaaccttagctaggcacagtggctaacgcctgtaatcccagcattttgggaggccaaggcaggcagatcacctgaggtcaggagttccagaccagcctggccaacatggtgaaatcccatctctacaaaaataaaacagttagctgggcatgatggcgggtgcctgtaatcccagctactcgggaggctgaggcaggatagtcgcttgaacccaggaggtggaggttgcaatgagccaagatcatgccactgcactccagcctggacgacagagtgagactccatcacaagaaaaaaagaactttgtcaacctctgtcttagggcgccttgtcacaggcttcgggtcagacggattcaaccttgcatcagccatttgttagccaggtcactctgttctttgtctgtaaatgagattgatcgttgttcccactgagagtgtcagctccttcccgtagagcaggcatgatgattgtactcacctctgacaccattgtgagtgccacattccttcccacgtccttgtcactgtaagagatgcccacctgagcaccaaccccaggttatcttcccctttgtcttccagccccccagaaacagctacgactcaacctacccaatcatttcatcatcagattgccactgtctctagttcaggtctcttgggactggcactcagaaatctcataataaatcctcttgaggcttctcatacactcgtcttcttccaatcttctttccctcaaaatctcatattttggttccacttcacccaccgtcattctccatatcactcccaggagttaggcaaaaagccccttccgttcttccgtatgttaaacttagaatcactctgttccctgctctgcgtttctattttttgtttttcctccatttactagtagcttaacactttctaacagtgttcttattattgatacgtatctatctcttccataagcttataaggtcacggataatacttctcattgtagtacgtaaatgacgtgggctagatatgagttgaataaacagttatacctgtaaattcttacagagtgaaaataaattgttatactttacaatttgtttctctctttagaccatttccaggacttgtgattaataaccgtgagtattttgtgaagtgttttgtttttgttttttcctggggtctgacgtgtgtgcgtgtgagtgtgtatacatgcttaacgtatatcacgttacttcacctatgtcagtaaccaggccaaatacttgttttagccctcagtaaaaacaccaggcacttcctagttgtaaaattattcaagcttcttaacttcctatcctcgatgcacttaatcataaaatggtaataatagcaccgattttgggggagtcgttccagtagatggaaagcatctggaacaggtgtcagcaagctcctgccgacgtgtatgcataaagttttattgaaaccaccatcgtgtccatttgtttatggcagaactgagagatggcagcagcaagtgtgtgcctgcaaaacctaaaatatttactaattggctctgcaagaaaagagtttgcatccccctaacctagaacagtgtctagcctctagtatgtgtttagcctacagtatgtgctcagcgaatacaatctatatttattactgcttttatgactgttataattactgtgcttggatttcgttacaaagtaagtcacaatgtgcctgcttctgttagtatttcagcacagtgcctggcacacatggggctctcaaatattgctgagcgagtgaacaaatgtcctttcaattccttaacgttgatgtcattttcaatagtattttgagccaaacttaattttgcgagtgtgttttgttttcttaactttattattaaaaatgtataaaagtgaggccaggcgtggtggctcacgcctgtaatcccagcagtttgggaggctgaggcaggcggatcagttgaggttgggagttggagaccagcccgtccaacatggtgaaagcctgtctctactaaaaatacaaaaatcagctgggtgtggtggcgcgtgcctgtaatcccagctactcaggaggctgaggcaggagagttgcttgaatcctagaggtggaggttgcagtgagctgagatcgtgccattgcactccagcctgggcaacaagagcaaaactctgtcccaataaataaataaataaaatgttctcttttgttcctgttcttgtgcggtagtgtggtatagagttttatggtaattactgtgaattagtgattctgagggacatatcagaactctgaggtttgtttccttctcatcttgagggaaacagcaaatgtatgttaaaatgcttttccaagggaacaacacatccttacattatttaaaccaatctgcttcattttcagagctggttgatcagagtgagtcagaaggccccgtgatacaagaatcagctgaaccaagccagttggaagttccagccacagaagaaataaaagagactgatggaagctctcagatcaagcaagaaccagaccccacgtggtagacctcttccctcctaggcttaaagtatcagtggttgagaagagcttttcggacctgttactaccccaagctgtgtaatatacttgtataacagaaataccttctatacaaacctttttttctacttttagatagaaatgtctactttttcagcagttctgtgaattaaagagcagagtgactgtgggtctggaatggctggtgtacttgggaatgtactatcaggattttacagcaatgctgggaaatgacagggaaaatgacaggaatgaatctcaccagattttttatgtactcagcagagccttgagttacggtgtttattttccaatcaagtgaagatatctcctacttctcctactggaacatctcagcttctgcagtgaagaaaaattcctgtgatagttcagttctttagtttttctatttgaaaaaaaaaaatcatttaaatgatcctttgttcacggctctccttaatgactgagtgaacagttcctatctgtatatttgactaaaccttttcctaagctatctctcatggttcctatgtttttttatcataattaaaagcaaaaccatctggatcacctaacagtcagaggtcagtatctcagcgtgtgaattatagaggaaatacagagagaacctcttccacttttacttttcgtccaaataaaatgcatggtgtaccagaagttgaagatcgggttgaggattggggctagctcgatgacactaaggccccaacatcgcgggacctgctgtggcgcggattcttaggaacgctgttctagccggccccctctccaggggtcgccgtggccggcattatttcctagttcttcttgtaaccctgaggtgccagcgcggggagtgaggaggggtcagggggctaaggatgcaacctctgacgttctgcgccttcctaggagagtcttacatgtgttgagatttcacaagcaatgcgagttgtaaaataccagctctacaagaagctaggctctgtgacggcatagttttcagtagctttatcacaatattcacaatggagaattatatgacatggtagcagaaataggcccttttatgtgttgcttctattttacctcaaattgtagatatagggtaatcaataaaatccatccatgcctttcacacactaagt

SEQ ID NO: 4807 - protein, 872 aa, Homo sapiens; identical to SEQ ID NO: 4541

SEQ ID NO: 4808 - DNA, 4202 bp, Homo sapiens
aaaaaaaaaaaaaaaaaaaaaaaaaaaagaaaaaagaaaaaaaaaaggaggaggaggaggagggtgagagagaagctgggagagcagagaaaaggggccaccggtcgcccccccgcttccccgcacgcgctctccagccgcggccgcccgcctgccgcggtcaccccggcctctgcctctgtcccccagtgatcggatcaaggcgctgagcgaggccctgcctgcggggcggccatgcggcggtgacaggagcgcgaccgacacgcacgggcccctcgccccctctcgcctcccgtccgctcgccagctcccctcagccgaggctgctccgcggcggccgcagcccgcgcgcggcccacactcgcctccccgttgaagatgaggagtcctcggagagcaggatggtggtgacattcctcatgtcagctctcgagtccatgtgtaaagaactggccaagtccaaagccgaagtggcctgcattgcagtgtatgaaacagacgtgtttgtcgtcggaactgaaagaggacgtgcttttgtcaataccagaaaggattttcaaaaagattttgtaaaatattgtgttgaagaagaagaaaaagctgcagagatgcataaaatgaaatctacaacccaggcaaatcggatgagtgtagatgctgtagaaattgaaacactcagaaaaacagttgaggactatttctgcttttgctatgggaaagctttaggcaaatccacagtggtacctgtaccatatgagaagatgctgcgagaccagtcggctgtggtagtgcaggggcttccggaaggtgttgcctttaaacaccccgagaactatgatcttgcaaccctgaaatggattttggagaacaaagcagggatttcattcatcattaagagaccttttttagagccaaagaagcatgtaggtggtcgtgtgatggtaacagatgctgacaggtcaatactatctccaggtggaagttgtggccccatcaaagtgaaaactgaacccacagaagattctggcatttccctggaaatggcagctgtgacagtaaaggaagaatcagaagatcctgattattatcaatataacattcaagcaggcccttctgaaactgatgatgttgatgaaaaacagcccctatcgaagcctttgcaaggaagccaccattcttcagagggcaatgaaggcacagaaatggaagtaccagcagaagattctactcaacatgtcccttcagaaacaagtgaggaccctgaagttgaggtgactattgaagatgatgattattctccaccgtctaagagaccaaaggccaatgagctaccgcagccaccagtcccggaacccgccaatgctgggaagcggaaagtgagggagttcaacttcgagaaatggaatgctcgcatcactgatctacgtaaacaagttgaagaattgtttgaaaggaaatatgctcaagccataaaagccaaaggtccggtgacgatcccgtaccctcttttccagtctcatgttgaagatctttatgtagaaggacttcctgaaggaattccttttagaaggccatctacttacggaattcctcgcctggagaggatattacttgcaaaggaaaggattcgttttgtgattaagaaacatgagcttctgaattcaacacgtgaagatttacagcttgataagccagcttcaggagtaaaggaagaatggtatgccagaatcactaaattaagaaagatggtggatcagcttttctgcaaaaaatttgcggaagccttggggagcactgaagccaaggctgtaccgtaccaaaaatttgaggcacacccgaatgatctgtacgtggaaggactgccagaaaacattcctttccgaagtccctcatggtatggaatcccaaggctggaaaaaatcattcaagtgggcaatcgaattaaatttgttattaaaagaccagaacttctgactcacagtaccactgaagttactcagccaagaacgaatacaccagctcaagctcttggactcaccgaggcagtaaaagtaccatatcctgtgtttgaatcaaacccggagttcttgtatgtggaaggcttgccagaggggattcccttccgaagccctacctggtttggaattccacgacttgaaaggatcgtccgcgggagtaataaaatcaagttcgttgttaaaaaacctgaactagttatttcctacttgcctcctgggatggctagtaaaataaacactaaagctttgcagtcccccaaaagaccacgaagtcctgggagtaattcaaaggttcctgaaattgaggtcaccgtggaaggccctaataacaacaatcctcaaacctcagctgttcgaaccccgacccagactaacggttctaacgttcccttcaagccacgagggagagagttttcctttgaggcctggaatgccaaaatcacggacctaaaacagaaagttgaaaatctcttcaatgagaaatgtggggaagctcttggccttaaacaagctgtgaaggtgccgttcgcgttatttgagtctttcccggaagacttttatgtggaaggcttacctgagggtgtgccattccgaagaccatcgacttttggcattccgaggctggagaagatactcagaaacaaagccaaaattaagttcatcattaaaaagcccgaaatgtttgagacggcgattaaggagagcacctcctctaagagccctcccagaaaaataaattcatcacccaatgttaatactactgcatcaggtgttgaagaccttaacatcattcaggtgacaattccagatgatgataatgaaagactctcgaaagttgaaaaagctagacagctaagagaacaagtgaatgacctctttagtcggaaatttggtgaagctattggtatgggttttcctgtgaaagttccctacaggaaaatcacaattaaccctggctgtgtggtggttgatggcatgcccccgggggtgtccttcaaagcccccagctacctggaaatcagctccatgagaaggatcttagactctgccgagtttatcaaattcacggtcattagaccatttccaggacttgtgattaataaccagctggttgatcagagtgagtcagaaggccccgtgatacaagaatcagctgaaccaagccagttggaagttccagccacagaagaaataaaagagactgatggaagctctcagatcaagcaagaaccagaccccacgtggtagacctcttccctcctaggcttaaagtatcagtggttgagaagagcttttcggacctgttactaccccaagctgtagccttgagttacggtgtttattttccaatcaagtgaagatatctcctacttctcctactggaacatctcagcttctgcagtgaagaaaaattcctgtgatagttcagttctttagtttttctatttgaaaaaaaaaaatcatttaaatgatcctttgttcacggctctccttaatgactgagtgaacagttcctatctgtatatttgactaaaccttttcctaagctatctctcatggttcctatgtttttttatcataattaaaagcaaaaccatctggatcacctaacagtcagaggtcagtatctcagcgtgtgaattatagaggaaatacagagagaacctcttccacttttacttttcgtccaaataaaatgcatggtgtaccagaagttgaagatcgggttgaggattggggctagctcgatgacactaaggccccaacatcgcgggacctgctgtggcgcggattcttaggaacgctgttctagccggccccctctccaggggtcgccgtggccggcattatttcctagttcttcttgtaaccctgaggtgccagcgcggggagtgaggaggggtcagggggctaaggatgcaacctctgacgttctgcgccttcctaggagagtcttacatgtgttgagatttcacaagcaatgcgagttgtaaaataccagctctacaagaagctaggctctgtgacggcatagttttcagtagctttatcacaatattcacaatggagaattatatgacatggtagcagaaataggcccttttatgtgttgcttctattttacctcaaattgtagatatagggtaatcaataaaatccatccatgcctttcacacactaagt

SEQ ID NO: 4809 - protein, 954 aa, Homo sapiens; identical to SEQ ID NO: 4249

SEQ ID NO: 4810 - DNA, 7053 bp, Homo sapiens
aaaaaaaaaaaaaaaaaaaaaaaaaaaagaaaaaagaaaaaaaaaaggaggaggaggaggagggtgagagagaagctgggagagcagagaaaaggggccaccggtcgcccccccgcttccccgcacgcgctctccagccgcggccgcccgcctgccgcggtcaccccggcctctgcctctgtcccccagtgatcggatcaaggcgctgagcgaggccctgcctgcggggcggccatgcggcggtgacaggagcgcgaccgacacgcacgggcccctcgccccctctcgcctcccgtccgctcgccagctcccctcagccgaggctgctccgcggcggccgcagcccgcgcgcggcccacactcgcctccccgttgaagatgaggagtcctcggagagcaggatggtggtgacattcctcatgtcagctctcgagtccatgtgtaaagaactggccaagtccaaagccgaagtggcctgcattgcagtgtatgaaacagacgtgtttgtcgtcggaactgaaagaggacgtgcttttgtcaataccagaaaggattttcaaaaagattttgtaaaatattgtgttgaagaagaagaaaaagctgcagagatgcataaaatgaaatctacaacccaggcaaatcggatgagtgtagatgctgtagaaattgaaacactcagaaaaacagttgaggactatttctgcttttgctatgggaaagctttaggcaaatccacagtggtacctgtaccatatgagaagatgctgcgagaccagtcggctgtggtagtgcaggggcttccggaaggtgttgcctttaaacaccccgagaactatgatcttgcaaccctgaaatggattttggagaacaaagcagggatttcattcatcattaagagaccttttttagagccaaagaagcatgtaggtggtcgtgtgatggtaacagatgctgacaggtcaatactatctccaggtggaagttgtggccccatcaaagtgaaaactgaacccacagaagattctggaagccaccattcttcagagggcaatgaaggcacagaaatggaagtaccagcagaagattctactcaacatgtcccttcagaaacaagtgaggaccctgaagttgaggtgactattgaagatgatgattattctccaccgtctaagagaccaaaggccaatgagctaccgcagccaccagtcccggaacccgccaatgctgggaagcggaaagtgagggagttcaacttcgagaaatggaatgctcgcatcactgatctacgtaaacaagttgaagaattgtttgaaaggaaatatgctcaagccataaaagccaaaggtccggtgacgatcccgtaccctcttttccagtctcatgttgaagatctttatgtagaaggacttcctgaaggaattccttttagaaggccatctacttacggaattcctcgcctggagaggatattacttgcaaaggaaaggattcgttttgtgattaagaaacatgagcttctgaattcaacacgtgaagatttacagcttgataagccagcttcaggagtaaaggaagaatggtatgccagaatcactaaattaagaaagatggtggatcagcttttctgcaaaaaatttgcggaagccttggggagcactgaagccaaggctgtaccgtaccaaaaatttgaggcacacccgaatgatctgtacgtggaaggactgccagaaaacattcctttccgaagtccctcatggtatggaatcccaaggctggaaaaaatcattcaagtgggcaatcgaattaaatttgttattaaaagaccagaacttctgactcacagtaccactgaagttactcagccaagaacgaatacaccagctcaagctcttggactcaccgaggcagtaaaagtaccatatcctgtgtttgaatcaaacccggagttcttgtatgtggaaggcttgccagaggggattcccttccgaagccctacctggtttggaattccacgacttgaaaggatcgtccgcgggagtaataaaatcaagttcgttgttaaaaaacctgaactagttatttcctacttgcctcctgggatggctagtaaaataaacactaaagctttgcagtcccccaaaagaccacgaagtcctgggagtaattcaaaggttcctgaaattgaggtcaccgtggaaggccctaataacaacaatcctcaaacctcagctgttcgaaccccgacccagactaacggttctaacgttcccttcaagccacgagggagagagttttcctttgaggcctggaatgccaaaatcacggacctaaaacagaaagttgaaaatctcttcaatgagaaatgtggggaagctcttggccttaaacaagctgtgaaggtgccgttcgcgttatttgagtctttcccggaagacttttatgtggaaggcttacctgagggtgtgccattccgaagaccatcgacttttggcattccgaggctggagaagatactcagaaacaaagccaaaattaagttcatcattaaaaagcccgaaatgtttgagacggcgattaaggagagcacctcctctaagagccctcccagaaaaataaattcatcacccaatgttaatactactgcatcaggtgttgaagaccttaacatcattcaggtgacaattccagatgatgataatgaaagactctcgaaagttgaaaaagctagacagctaagagaacaagtgaatgacctctttagtcggaaatttggtgaagctattggtatgggttttcctgtgaaagttccctacaggaaaatcacaattaaccctggctgtgtggtggttgatggcatgcccccgggggtgtccttcaaagcccccagctacctggaaatcagctccatgagaaggatcttagactctgccgagtttatcaaattcacggtcattaggtaagtgagagtttcctgcttagtcacaggagcgaatctggagctcatgaggctgactcttctaaaatgcagccacaggtagtcatcgaatccggcttcctatgctgtgcaatcaacaaatcaaaataacttgtgtcatcattagaatgtcagatgtgcttctacgaactaagctgactcttttaattctttggcaaagggttggcaaactaggactgtttgccaaattcaggctgcctcctatttttagagtcttcctgaaacacagctacacccgtattatccatggctgctttcctgtcacagtgagtaagtagctgggactgagaaggcatggcctccaaagtctaaaatatttactctctagcactttgtagaaaaaccttagctaggcacagtggctaacgcctgtaatcccagcattttgggaggccaaggcaggcagatcacctgaggtcaggagttccagaccagcctggccaacatggtgaaatcccatctctacaaaaataaaacagttagctgggcatgatggcgggtgcctgtaatcccagctactcgggaggctgaggcaggatagtcgcttgaacccaggaggtggaggttgcaatgagccaagatcatgccactgcactccagcctggacgacagagtgagactccatcacaagaaaaaaagaactttgtcaacctctgtcttagggcgccttgtcacaggcttcgggtcagacggattcaaccttgcatcagccatttgttagccaggtcactctgttctttgtctgtaaatgagattgatcgttgttcccactgagagtgtcagctccttcccgtagagcaggcatgatgattgtactcacctctgacaccattgtgagtgccacattccttcccacgtccttgtcactgtaagagatgcccacctgagcaccaaccccaggttatcttcccctttgtcttccagccccccagaaacagctacgactcaacctacccaatcatttcatcatcagattgccactgtctctagttcaggtctcttgggactggcactcagaaatctcataataaatcctcttgaggcttctcatacactcgtcttcttccaatcttctttccctcaaaatctcatattttggttccacttcacccaccgtcattctccatatcactcccaggagttaggcaaaaagccccttccgttcttccgtatgttaaacttagaatcactctgttccctgctctgcgtttctattttttgtttttcctccatttactagtagcttaacactttctaacagtgttcttattattgatacgtatctatctcttccataagcttataaggtcacggataatacttctcattgtagtacgtaaatgacgtgggctagatatgagttgaataaacagttatacctgtaaattcttacagagtgaaaataaattgttatactttacaatttgtttctctctttagaccatttccaggacttgtgattaataaccgtgagtattttgtgaagtgttttgtttttgttttttcctggggtctgacgtgtgtgcgtgtgagtgtgtatacatgcttaacgtatatcacgttacttcacctatgtcagtaaccaggccaaatacttgttttagccctcagtaaaaacaccaggcacttcctagttgtaaaattattcaagcttcttaacttcctatcctcgatgcacttaatcataaaatggtaataatagcaccgattttgggggagtcgttccagtagatggaaagcatctggaacaggtgtcagcaagctcctgccgacgtgtatgcataaagttttattgaaaccaccatcgtgtccatttgtttatggcagaactgagagatggcagcagcaagtgtgtgcctgcaaaacctaaaatatttactaattggctctgcaagaaaagagtttgcatccccctaacctagaacagtgtctagcctctagtatgtgtttagcctacagtatgtgctcagcgaatacaatctatatttattactgcttttatgactgttataattactgtgcttggatttcgttacaaagtaagtcacaatgtgcctgcttctgttagtatttcagcacagtgcctggcacacatggggctctcaaatattgctgagcgagtgaacaaatgtcctttcaattccttaacgttgatgtcattttcaatagtattttgagccaaacttaattttgcgagtgtgttttgttttcttaactttattattaaaaatgtataaaagtgaggccaggcgtggtggctcacgcctgtaatcccagcagtttgggaggctgaggcaggcggatcagttgaggttgggagttggagaccagcccgtccaacatggtgaaagcctgtctctactaaaaatacaaaaatcagctgggtgtggtggcgcgtgcctgtaatcccagctactcaggaggctgaggcaggagagttgcttgaatcctagaggtggaggttgcagtgagctgagatcgtgccattgcactccagcctgggcaacaagagcaaaactctgtcccaataaataaataaataaaatgttctcttttgttcctgttcttgtgcggtagtgtggtatagagttttatggtaattactgtgaattagtgattctgagggacatatcagaactctgaggtttgtttccttctcatcttgagggaaacagcaaatgtatgttaaaatgcttttccaagggaacaacacatccttacattatttaaaccaatctgcttcattttcagagctggttgatcagagtgagtcagaaggccccgtgatacaagaatcagctgaaccaagccagttggaagttccagccacagaagaaataaaagagactgatggaagctctcagatcaagcaagaaccagaccccacgtggtagacctcttccctcctaggcttaaagtatcagtggttgagaagagcttttcggacctgttactaccccaagctgtgtaatatacttgtataacagaaataccttctatacaaacctttttttctacttttagatagaaatgtctactttttcagcagttctgtgaattaaagagcagagtgactgtgggtctggaatggctggtgtacttgggaatgtactatcaggattttacagcaatgctgggaaatgacagggaaaatgacaggaatgaatctcaccagattttttatgtactcagcagagccttgagttacggtgtttattttccaatcaagtgaagatatctcctacttctcctactggaacatctcagcttctgcagtgaagaaaaattcctgtgatagttcagttctttagtttttctatttgaaaaaaaaaaatcatttaaatgatcctttgttcacggctctccttaatgactgagtgaacagttcctatctgtatatttgactaaaccttttcctaagctatctctcatggttcctatgtttttttatcataattaaaagcaaaaccatctggatcacctaacagtcagaggtcagtatctcagcgtgtgaattatagaggaaatacagagagaacctcttccacttttacttttcgtccaaataaaatgcatggtgtaccagaagttgaagatcgggttgaggattggggctagctcgatgacactaaggccccaacatcgcgggacctgctgtggcgcggattcttaggaacgctgttctagccggccccctctccaggggtcgccgtggccggcattatttcctagttcttcttgtaaccctgaggtgccagcgcggggagtgaggaggggtcagggggctaaggatgcaacctctgacgttctgcgccttcctaggagagtcttacatgtgttgagatttcacaagcaatgcgagttgtaaaataccagctctacaagaagctaggctctgtgacggcatagttttcagtagctttatcacaatattcacaatggagaattatatgacatggtagcagaaataggcccttttatgtgttgcttctattttacctcaaattgtagatatagggtaatcaataaaatccatccatgcctttcacacactaagt

SEQ ID NO: 4811 - protein, 852 aa, Homo sapiens; identical to SEQ ID NO: 4285

SEQ ID NO: 4812 - DNA, 5108 bp, Homo sapiens
aaaaaaaaaaaaaaaaaaaaaaaaaaaagaaaaaagaaaaaaaaaaggaggaggaggaggagggtgagagagaagctgggagagcagagaaaaggggccaccggtcgcccccccgcttccccgcacgcgctctccagccgcggccgcccgcctgccgcggtcaccccggcctctgcctctgtcccccagtgatcggatcaaggcgctgagcgaggccctgcctgcggggcggccatgcggcggtgacaggagcgcgaccgacacgcacgggcccctcgccccctctcgcctcccgtccgctcgccagctcccctcagccgaggctgctccgcggcggccgcagcccgcgcgcggcccacactcgcctcccctcggcacccccggccccggagctgcctggaggcggccgcactcggtgtaaagaactggccaagtccaaagccgaagtggcctgcattgcagtgtatgaaacagacgtgtttgtcgtcggaactgaaagaggacgtgcttttgtcaataccagaaaggattttcaaaaagattttgtaaaatattgtgttgaagaagaagaaaaagctgcagagatgcataaaatgaaatctacaacccaggcaaatcggatgagtgtagatgctgtagaaattgaaacactcagaaaaacagttgaggactatttctgcttttgctatgggaaagctttaggcaaatccacagtggtacctgtaccatatgagaagatgctgcgagaccagtcggctgtggtagtgcaggggcttccggaaggtgttgcctttaaacaccccgagaactatgatcttgcaaccctgaaatggattttggagaacaaagcagggatttcattcatcattaagagaccttttttagagccaaagaagcatgtaggtggtcgtgtgatggtaacagatgctgacaggtcaatactatctccaggtggaagttgtggccccatcaaagtgaaaactgaacccacagaagattctggcatttccctggaaatggcagctgtgacagtaaaggaagaatcagaagatcctgattattatcaatataacattcaaggaagccaccattcttcagagggcaatgaaggcacagaaatggaagtaccagcagaagatgatgattattctccaccgtctaagagaccaaaggccaatgagctaccgcagccaccagtcccggaacccgccaatgctgggaagcggaaagtgagggagttcaacttcgagaaatggaatgctcgcatcactgatctacgtaaacaagttgaagaattgtttgaaaggaaatatgctcaagccataaaagccaaaggtccggtgacgatcccgtaccctcttttccagtctcatgttgaagatctttatgtagaaggacttcctgaaggaattccttttagaaggccatctacttacggaattcctcgcctggagaggatattacttgcaaaggaaaggattcgttttgtgattaagaaacatgagcttctgaattcaacacgtgaagatttacagcttgataagccagcttcaggagtaaaggaagaatggtatgccagaatcactaaattaagaaagatggtggatcagcttttctgcaaaaaatttgcggaagccttggggagcactgaagccaaggctgtaccgtaccaaaaatttgaggcacacccgaatgatctgtacgtggaaggactgccagaaaacattcctttccgaagtccctcatggtatggaatcccaaggctggaaaaaatcattcaagtgggcaatcgaattaaatttgttattaaaagaccagaacttctgactcacagtaccactgaagttactcagccaagaacgaatacaccagtcaaagaagattggaatgtcagaattaccaagctacggaagcaagtggaagagatttttaatttgaaatttgcttagatttgttgacagcggtttcctggagtgctgtcttgagaacgattctgaggaggctcagcaagaaagagtgtttcagttgattgggtgtgtctgtcatggagaaggaactcaagctcttggactcaccgaggcagtaaaagtaccatatcctgtgtttgaatcaaacccggagttcttgtatgtggaaggcttgccagaggggattcccttccgaagccctacctggtttggaattccacgacttgaaaggatcgtccgcgggagtaataaaatcaagttcgttgttaaaaaacctgaactagttatttcctacttgcctcctgggatggctagtaaaataaacactaaagctttgcagtcccccaaaagaccacgaagtcctgggagtaattcaaaggttcctgaaattgaggtcaccgtggaaggccctaataacaacaatcctcaaacctcagctgttcgaaccccgacccagactaacggttctaacgttcccttcaagccacgagggagagagttttcctttgaggcctggaatgccaaaatcacggacctaaaacagaaagttgaaaatctcttcaatgagaaatgtggggaagctcttggccttaaacaagctgtgaaggtgccgttcgcgttatttgagtctttcccggaagacttttatgtggaaggcttacctgagggtgtgccattccgaagaccatcgacttttggcattccgaggctggagaagatactcagaaacaaagccaaaattaagttcatcattaaaaagcccgaaatgtttgagacggcgattaaggagagcacctcctctaagagccctcccagaaaaataaattcatcacccaatgttaatactactgcatcaggtgttgaagaccttaacatcattcaggtgacaattccagatgatgataatgaaagactctcgaaagttgaaaaagctagacagctaagagaacaagtgaatgacctctttagtcggaaatttggtgaagctattggtatgggttttcctgtgaaagttccctacaggaaaatcacaattaaccctggctgtgtggtggttgatggcatgcccccgggggtgtccttcaaagcccccagctacctggaaatcagctccatgagaaggatcttagactctgccgagtttatcaaattcacggtcattagaccatttccaggacttgtgattaataaccagctggttgatcagagtgagtcagaaggccccgtgatacaagaatcagctgaaccaagccagttggaagttccagccacagaaggtaaaaggacctcttccctcctagggtaaatcagcttctgtgtcagggatgctgtgtggtgtccatctgaaccccctgcatacgcgtagctaatgtgatctccccactttcacataagatggtggccctgccttcagggaatgtgggagccaggtgggagccttcccggatatttaagctagaagattctacagggagattctccttggatcaatatatgtctctcagtcaaagatgtaaaagcacttttgccttaaaaagaatgttctgtttctaaatagagtcaacgttgtcctcctcattggaattcactatgagtcagaatcattagactgacttttttttttccatagtaatagtattttgcagagtctcacagagctgcagatcttttgttcatcttgcagagttaacaagtctgatcctgttagtccagatttcttaaatttggccaagttataataggagcagtagcttgagacccgaagtcaggaaactttgacaatggatttttttttttaatccagagacttgtactggaatttgccttaccctgtcagctcatggacttaaggtttcatcccgctttatgagtgcttctgaatccaagtcattgttacctgaatttgcaaattaagttgtgatattcgtgactgttaaattcctgtaattagattaacctctttgcttgcttgtttgttttctctcctattttagcttaaagtatcagtggttgagaagagcttttcggacctgttactaccccaagctgtgtaatatacttgtataacagaaataccttctatacaaacctttttttctacttttagatagaaatgtctactttttcagcagttctgtgaattaaagagcagagtgactgtgggtctggaatggctggtgtacttgggaatgtactatcaggattttacagcaatgctgggaaatgacagggaaaatgacaggaatgaatctcaccagattttttatgtactcagcagagccttgagttacggtgtttattttccaatcaagtgaagatatctcctacttctcctactggaacatctcagcttctgcagtgaagaaaaattcctgtgatagttcagttctttagtttttctatttgaaaaaaaaaaatcatttaaatgatcctttgttcacggctctccttaatgactgagtgaacagttcctatctgtatatttgactaaaccttttcctaagctatctctcatggttcctatgtttttttatcataattaaaagcaaaaccatctggatcacctaacagtcagaggtcagtatctcagcgtgtgaattatagaggaaatacagagagaacctcttccacttttacttttcgtccaaataaaatgcatggtgtaccagaagttgaagatcgggttgaggattggggctagctcgatgacactaaggccccaacatcgcgggacctgctgtggcgcggattcttaggaacgctgttctagccggccccctctccaggggtcgccgtggccggcattatttcctagttcttcttgtaaccctgaggtgccagcgcggggagtgaggaggggtcagggggctaaggatgcaacctctgacgttctgcgccttcctaggagagtcttacatgtgttgagatttcacaagcaatgcgagttgtaaaataccagctctacaagaagctaggctctgtgacggcatagttttcagtagctttatcacaatattcacaatggagaattatatgacatggtagcagaaataggcccttttatgtgttgcttctattttacctcaaattgtagatatagggtaatcaataaaatccatccatgcctttcacacactaagt

SEQ ID NO: 4813 - protein, 454 aa, Homo sapiens; identical to SEQ ID NO: 4239

SEQ ID NO: 4814 - DNA, 4377 bp, Homo sapiens
aaaaaaaaaaaaaaaaaaaaaaaaaaaagaaaaaagaaaaaaaaaaggaggaggaggaggagggtgagagagaagctgggagagcagagaaaaggggccaccggtcgcccccccgcttccccgcacgcgctctccagccgcggccgcccgcctgccgcggtcaccccggcctctgcctctgtcccccagtgatcggatcaaggcgctgagcgaggccctgcctgcggggcggccatgcggcggtgacaggagcgcgaccgacacgcacgggcccctcgccccctctcgcctcccgtccgctcgccagctcccctcagccgaggctgctccgcggcggccgcagcccgcgcgcggcccacactcgcctcccctcggcacccccggccccggagctgcctggaggcggccgcactcggggatcatggcccaagttgcaatgtccaccctccccgttgaagatgaggagtcctcggagagcaggatggtggtgacattcctcatgtcagctctcgagtccatgtgtaaagaactggccaagtccaaagccgaagtggcctgcattgcagtgtatgaaacagacgtgtttgtcgtcggaactgaaagaggacgtgcttttgtcaataccagaaaggattttcaaaaagattttgtaaaatattgtgttgaagaagaagaaaaagctgcagagatgcataaaatgaaatctacaacccaggcaaatcggatgagtgtagatgctgtagaaattgaaacactcagaaaaacagttgaggactatttctgcttttgctatgggaaagctttaggcaaatccacagtggtacctgtaccatatgagaagatgctgcgagaccagtcggctgtggtagtgcaggggcttccggaaggtgttgcctttaaacaccccgagaactatgatcttgcaaccctgaaatggattttggagaacaaagcagggatttcattcatcattaagagaccttttttagagccaaagaagcatgtaggtggtcgtgtgatggtaacagatgctgacaggtcaatactatctccaggtggaagttgtggccccatcaaagtgaaaactgaacccacagaagattctggaagccaccattcttcagagggcaatgaaggcacagaaatggaagtaccagcagaagattctactcaacatgtcccttcagaaacaagtgaggaccctgaagttgaggtgactattgaagatgatgattattctccaccgtctaagagaccaaaggccaatgagctaccgcagccaccagtcccggaacccgccaatgctgggaagcggaaagtgagggagttcaacttcgagaaatggaatgctcgcatcactgatctacgtaaacaagttgaagaattgtttgaaaggaaatatgctcaagccataaaagccaaaggtccggtgacgatcccgtaccctcttttccagtctcatgttgaagatctttatgtagaaggacttcctgaaggaattccttttagaaggccatctacttacggaattcctcgcctggagaggatattacttgcaaaggaaaggattcgttttgtgattaagaaacatgagcttctgaattcaacacgtgaagatttacagcttgataagccagcttcaggagtaaaggaagaatggtatgccagaatcactaaattaagaaagatggtggatcagcttttctgcaaaaaatttgcggaagccttggggagcactgaagccaaggctgtaccgtaccaaaaatttgaggcacacccgaatgatctgtacgtggaaggactgccagaaaacattcctttccgaagtccctcatggtatggaatcccaaggctggaaaaaatcattcaagtgggcaatcgaattaaatttgttattaaaagaccagaacttctgactcacagtaccactgaagttactcagccaagaacgaatacaccagtcaaagaagattggaatgtcagaattaccaagctacggaagcaagtggaagagatttttaatttgaaatttgctcaagctcttggactcaccgaggcagtaaaagtaccatatcctgtgtttgaatcaaacccggagttcttgaaaggatcgtccgcgggagtaataaaatcaagttcgttgttaaaaaacctgaactagttatttcctacttgcctcctgggatggctagtaaaataaacactaaagctttgcagtcccccaaaagaccacgaagtcctgggagtaattcaaaggttcctgaaattgaggtcaccgtggaaggccctaataacaacaatcctcaaacctcagctgttcgaaccccgacccagactaacggttctaacgttcccttcaagccacgagggagagagttttcctttgaggcctggaatgccaaaatcacggacctaaaacagaaagttgaaaatctcttcaatgagaaatgtggggaagctcttggccttaaacaagctgtgaaggtgccgttcgcgttatttgagtctttcccggaagacttttatgtggaaggcttacctgagggtgtgccattccgaagaccatcgacttttggcattccgaggctggagaagatactcagaaacaaagccaaaattaagttcatcattaaaaagcccgaaatgtttgagacggcgattaaggagagcacctcctctaagagccctcccagaaaaataaattcatcacccaatgttaatactactgcatcaggtgttgaagaccttaacatcattcaggtgacaattccagatgatgataatgaaagactctcgaaagttgaaaaagctagacagctaagagaacaagtgaatgacctctttagtcggaaatttggtgaagctattggtatgggttttcctgtgaaagttccctacaggaaaatcacaattaaccctggctgtgtggtggttgatggcatgcccccgggggtgtccttcaaagcccccagctacctggaaatcagctccatgagaaggatcttagactctgccgagtttatcaaattcacggtcattagaccatttccaggacttgtgattaataaccagctggttgatcagagtgagtcagaaggccccgtgatacaagaatcagctgaaccaagccagttggaagttccagccacagaagaaataaaagagactgatggaagctctcagatcaagcaagaaccagaccccacgtggtagacctcttccctcctaggcttaaagtatcagtggttgagaagagcttttcggacctgttactaccccaagctgtgtaatatacttgtataacagaaataccttctatacaaacctttttttctacttttagatagaaatgtctactttttcagcagttctgtgaattaaagagcagagtgactgtgggtctggaatggctggtgtacttgggaatgtactatcaggattttacagcaatgctgggaaatgacagggaaaatgacaggaatgaatctcaccagattttttatgtactcagcagagccttgagttacggtgtttattttccaatcaagtgaagatatctcctacttctcctactggaacatctcagcttctgcagtgaagaaaaattcctgtgatagttcagttctttagtttttctatttgaaaaaaaaaaatcatttaaatgatcctttgttcacggctctccttaatgactgagtgaacagttcctatctgtatatttgactaaaccttttcctaagctatctctcatggttcctatgtttttttatcataattaaaagcaaaaccatctggatcacctaacagtcagaggtcagtatctcagcgtgtgaattatagaggaaatacagagagaacctcttccacttttacttttcgtccaaataaaatgcatggtgtaccagaagttgaagatcgggttgaggattggggctagctcgatgacactaaggccccaacatcgcgggacctgctgtggcgcggattcttaggaacgctgttctagccggccccctctccaggggtcgccgtggccggcattatttcctagttcttcttgtaaccctgaggtgccagcgcggggagtgaggaggggtcagggggctaaggatgcaacctctgacgttctgcgccttcctaggagagtcttacatgtgttgagatttcacaagcaatgcgagttgtaaaataccagctctacaagaagctaggctctgtgacggcatagttttcagtagctttatcacaatattcacaatggagaattatatgacatggtagcagaaataggcccttttatgtgttgcttctattttacctcaaattgtagatatagggtaatcaataaaatccatccatgcctttcacacactaagt

SEQ ID NO: 4815 - protein, 579 aa, Homo sapiens; identical to SEQ ID NO: 4111

SEQ ID NO: 4816 - DNA, 4439 bp, Homo sapiens
aaaaaaaaaaaaaaaaaaaaaaaaaaaagaaaaaagaaaaaaaaaaggaggaggaggaggagggtgagagagaagctgggagagcagagaaaaggggccaccggtcgcccccccgcttccccgcacgcgctctccagccgcggccgcccgcctgccgcggtcaccccggcctctgcctctgtcccccagtgatcggatcaaggcgctgagcgaggccctgcctgcggggcggccatgcggcggtgacaggagcgcgaccgacacgcacgggcccctcgccccctctcgcctcccgtccgctcgccagctcccctcagccgaggctgctccgcggcggccgcagcccgcgcgcggcccacactcgcctccccgttgaagatgaggagtcctcggagagcaggatggtggtgacattcctcatgtcagctctcgagtccatgtgtaaagaactggccaagtccaaagccgaagtggcctgcattgcagtgtatgaaacagacgtgtttgtcgtcggaactgaaagaggacgtgcttttgtcaataccagaaaggattttcaaaaagattttgtaaaatattgtgttgaagaagaagaaaaagctgcagagatgcataaaatgaaatctacaacccaggcaaatcggatgagtgtagatgctgtagaaattgaaacactcagaaaaacagttgaggactatttctgcttttgctatgggaaagctttaggcaaatccacagtggtacctgtaccatatgagaagatgctgcgagaccagtcggctgtggtagtgcaggggcttccggaaggtgttgcctttaaacaccccgagaactatgatcttgcaaccctgaaatggattttggagaacaaagcagggatttcattcatcattaagagaccttttttagagccaaagaagcatgtaggtggtcgtgtgatggtaacagatgctgacaggtcaatactatctccaggtggaagttgtggccccatcaaagtgaaaactgaacccacagaagattctggcatttccctggaaatggcagctgtgacagtaaaggaagaatcagaagatcctgattattatcaatataacattcaagcaggcccttctgaaactgatgatgttgatgaaaaacagcccctatcgaagcctttgcaaggaagccaccattcttcagagggcaatgaaggcacagaaatggaagtaccagcagaagatgatgattattctccaccgtctaagagaccaaaggccaatgagctaccgcagccaccagtcccggaacccgccaatgctgggaagcggaaagtgagggagttcaacttcgagaaatggaatgctcgcatcactgatctacgtaaacaagttgaagaattgtttgaaaggaaatatgctcaagccataaaagccaaaggtccggtgacgatcccgtaccctcttttccagtctcatgttgaagatctttatgtagaaggacttcctgaaggaattccttttagaaggccatctacttacggaattcctcgcctggagaggatattacttgcaaaggaaaggattcgttttgtgattaagaaacatgagcttctgaattcaacacgtgaagatttacagcttgataagccagcttcaggagtaaaggaagaatggtatgccagaatcactaaattaagaaagatggtggatcagcttttctgcaaaaaatttgcggaagccttggggagcactgaagccaaggctgtaccgtaccaaaaatttgaggcacacccgaatgatctgtacgtggaaggactgccagaaaacattcctttccgaagtccctcatggtatggaatcccaaggctggaaaaaatcattcaagtgggcaatcgaattaaatttgttattaaaagaccagaacttctgactcacagtaccactgaagttactcagccaagaacgaatacaccagtcaaagaagattggaatgtcagaattaccaagctacggaagcaagtggaagagatttttaatttgaaatttgctcaagctcttggactcaccgaggcagtaaaagtaccatatcctgtgtttgaatcaaacccggagttcttgtatgtggaaggcttgccagaggggattcccttccgaagccctacctggtttggaattccacgacttgaaaggatcgtccgcgggagtaataaaatcaagttcgttgttaaaaaacctgaactagttatttcctacttgcctcctgggatggctagtaaaataaacactaaagctttgcagtcccccaaaagaccacgaagtcctgggagtaattcaaaggttcctgaaattgaggtcaccgtggaaggccctaataacaacaatcctcaaacctcagctgttcgaaccccgacccagactaacggttctaacgttcccttcaagccacgagggagagagttttcctttgaggcctggaatgccaaaatcacggacctaaaacagaaagttgaaaatctcttcaatgagaaatgtggggaagctcttggccttaaacaagctgtgaaggtgccgttcgcgttatttgagtctttcccggaagacttttatgtggaaggcttacctgagggtgtgccattccgaagaccatcgacttttggcattccgaggctggagaagatactcagaaacaaagccaaaattaagttcatcattaaaaagcccgaaatgtttgagacggcgattaaggagagcacctcctctaagagccctcccagaaaaataaattcatcacccaatgttaatactactgcatcaggtgttgaagaccttaacatcattcaggtgacaattccagatgatgataatgaaagactctcgaaagttgaaaaagctagacagctaagagaacaagtgaatgacctctttagtcggaaatttggtgaagctattggtatgggttttcctgtgaaagttccctacaggaaaatcacaattaaccctggctgtgtggtggttgatggcatgcccccgggggtgtccttcaaagcccccagctacctggaaatcagctccatgagaaggatcttagactctgccgagtttatcaaattcacggtcattagaccatttccaggacttgtgattaataaccagctggttgatcagagtgagtcagaaggccccgtgatacaagaatcagctgaaccaagccagttggaagttccagccacagaagaaataaaagagactgatggaagctctcagatcaagcaagaaccagaccccacgtggtagacctcttccctcctaggcttaaagtatcagtggttgagaagagcttttcggacctgttactaccccaagctgtgtaatatacttgtataacagaaataccttctatacaaacctttttttctacttttagatagaaatgtctactttttcagcagttctgtgaattaaagagcagagtgactgtgggtctggaatggctggtgtacttgggaatgtactatcaggattttacagcaatgctgggaaatgacagggaaaatgacaggaatgaatctcaccagattttttatgtactcagcagagccttgagttacggtgtttattttccaatcaagtgaagatatctcctacttctcctactggaacatctcagcttctgcagtgaagaaaaattcctgtgatagttcagttctttagtttttctatttgaaaaaaaaaaatcatttaaatgatcctttgttcacggctctccttaatgactgagtgaacagttcctatctgtatatttgactaaaccttttcctaagctatctctcatggttcctatgtttttttatcataattaaaagcaaaaccatctggatcacctaacagtcagaggtcagtatctcagcgtgtgaattatagaggaaatacagagagaacctcttccacttttacttttcgtccaaataaaatgcatggtgtaccagaagttgaagatcgggttgaggattggggctagctcgatgacactaaggccccaacatcgcgggacctgctgtggcgcggattcttaggaacgctgttctagccggccccctctccaggggtcgccgtggccggcattatttcctagttcttcttgtaaccctgaggtgccagcgcggggagtgaggaggggtcagggggctaaggatgcaacctctgacgttctgcgccttcctaggagagtcttacatgtgttgagatttcacaagcaatgcgagttgtaaaataccagctctacaagaagctaggctctgtgacggcatagttttcagtagctttatcacaatattcacaatggagaattatatgacatggtagcagaaataggcccttttatgtgttgcttctattttacctcaaattgtagatatagggtaatcaataaaatccatccatgcctttcacacactaagt

SEQ ID NO: 4817 - protein, 957 aa, Homo sapiens; identical to SEQ ID NO: 4041

SEQ ID NO: 4818 - DNA, 4227 bp, Homo sapiens
aaaaaaaaaaaaaaaaaaaaaaaaaaaagaaaaaagaaaaaaaaaaggaggaggaggaggagggtgagagagaagctgggagagcagagaaaaggggccaccggtcgcccccccgcttccccgcacgcgctctccagccgcggccgcccgcctgccgcggtcaccccggcctctgcctctgtcccccagtgatcggatcaaggcgctgagcgaggccctgcctgcggggcggccatgcggcggtgacaggagcgcgaccgacacgcacgggcccctcgccccctctcgcctcccgtccgctcgccagctcccctcagccgaggctgctccgcggcggccgcagcccgcgcgcggcccacactcgcctcccctcggcacccccggccccggagctgcctggaggcggccgcactcggggatcatggcccaagttgcaatgtccaccctccccgttgaagatgaggagtcctcggagagcaggatggtggtgacattcctcatgtcagctctcgagtccatgtgtaaagaactggccaagtccaaagccgaagtggcctgcattgcagtgtatgaaacagacgtgtttgtcgtcggaactgaaagaggacgtgcttttgtcaataccagaaaggattttcaaaaagattttgtaaaatattgtgttgaagaagaagaaaaagctgcagagatgcataaaatgaaatctacaacccaggcaaatcggatgagtgtagatgctgtagaaattgaaacactcagaaaaacagttgaggactatttctgcttttgctatgggaaagctttaggcaaatccacagtggtacctgtaccatatgagaagatgctgcgagaccagtcggctgtggtagtgcaggggcttccggaaggtgttgcctttaaacaccccgagaactatgatcttgcaaccctgaaatggattttggagaacaaagcagggatttcattcatcattaagagaccttttttagagccaaagaagcatgtaggtggtcgtgtgatggtaacagatgctgacaggtcaatactatctccaggtggaagttgtggccccatcaaagtgaaaactgaacccacagaagattctggcatttccctggaaatggcagctgtgacagtaaaggaagaatcagaagatcctgattattatcaatataacattcaaggaagccaccattcttcagagggcaatgaaggcacagaaatggaagtaccagcagaagattctactcaacatgtcccttcagaaacaagtgaggaccctgaagttgaggtgactattgaagatgatgattattctccaccgtctaagagaccaaaggccaatgagctaccgcagccaccagtcccggaacccgccaatgctgggaagcggaaagtgagggagttcaacttcgagaaatggaatgctcgcatcactgatctacgtaaacaagttgaagaattgtttgaaaggaaatatgctcaagccataaaagccaaaggtccggtgacgatcccgtaccctcttttccagtctcatgttgaagatctttatgtagaaggacttcctgaaggaattccttttagaaggccatctacttacggaattcctcgcctggagaggatattacttgcaaaggaaaggattcgttttgtgattaagaaacatgagcttctgaattcaacacgtgaagatttacagcttgataagccagcttcaggagtaaaggaagaatggtatgccagaatcactaaattaagaaagatggtggatcagcttttctgcaaaaaatttgcggaagccttggggagcactgaagccaaggctgtaccgtaccaaaaatttgaggcacacccgaatgatctgtacgtggaaggactgccagaaaacattcctttccgaagtccctcatggtatggaatcccaaggctggaaaaaatcattcaagtgggcaatcgaattaaatttgttattaaaagaccagaacttctgactcacagtaccactgaagttactcagccaagaacgaatacaccagtcaaagaagattggaatgtcagaattaccaagctacggaagcaagtggaagagatttttaatttgaaatttgctcaagctcttggactcaccgaggcagtaaaagtaccatatcctgtgtttgaatcaaacccggagttcttgaaaggatcgtccgcgggagtaataaaatcaagttcgttgttaaaaaacctgaactagttatttcctacttgcctcctgggatggctagtaaaataaacactaaagctttgcagtcccccaaaagaccacgaagtcctgggagtaattcaaaggttcctgaaattgaggtcaccgtggaaggccctaataacaacaatcctcaaacctcagctgttcgaaccccgacccagactaacggttctaacgttcccttcaagccacgagggagagagttttcctttgaggcctggaatgccaaaatcacggacctaaaacagaaagttgaaaatctcttcaatgagaaatgtggggaagctcttggccttaaacaagctgtgaaggtgccgttcgcgttatttgagtctttcccggaagacttttatgtggaaggcttacctgagggtgtgccattccgaagaccatcgacttttggcattccgaggctggagaagatactcagaaacaaagccaaaattaagttcatcattaaaaagcccgaaatgtttgagacggcgattaaggagagcacctcctctaagagccctcccagaaaaataaattcatcacccaatgttaatactactgcatcaggtgttgaagaccttaacatcattcaggtgacaattccagatgatgataatgaaagactctcgaaagttgaaaaagctagacagctaagagaacaagtgaatgacctctttagtcggaaatttggtgaagctattggtatgggttttcctgtgaaagttccctacaggaaaatcacaattaaccctggctgtgtggtggttgatggcatgcccccgggggtgtccttcaaagcccccagctacctggaaatcagctccatgagaaggatcttagactctgccgagtttatcaaattcacggtcattagaccatttccaggacttgtgattaataaccagctggttgatcagagtgagtcagaaggccccgtgatacaagaatcagctgaaccaagccagttggaagttccagccacagaagaaataaaagagactgatggaagctctcagatcaagcaagaaccagaccccacgtggtagacctcttccctcctaggcttaaagtatcagtggttgagaagagcttttcggacctgttactaccccaagctgtagccttgagttacggtgtttattttccaatcaagtgaagatatctcctacttctcctactggaacatctcagcttctgcagtgaagaaaaattcctgtgatagttcagttctttagtttttctatttgaaaaaaaaaaatcatttaaatgatcctttgttcacggctctccttaatgactgagtgaacagttcctatctgtatatttgactaaaccttttcctaagctatctctcatggttcctatgtttttttatcataattaaaagcaaaaccatctggatcacctaacagtcagaggtcagtatctcagcgtgtgaattatagaggaaatacagagagaacctcttccacttttacttttcgtccaaataaaatgcatggtgtaccagaagttgaagatcgggttgaggattggggctagctcgatgacactaaggccccaacatcgcgggacctgctgtggcgcggattcttaggaacgctgttctagccggccccctctccaggggtcgccgtggccggcattatttcctagttcttcttgtaaccctgaggtgccagcgcggggagtgaggaggggtcagggggctaaggatgcaacctctgacgttctgcgccttcctaggagagtcttacatgtgttgagatttcacaagcaatgcgagttgtaaaataccagctctacaagaagctaggctctgtgacggcatagttttcagtagctttatcacaatattcacaatggagaattatatgacatggtagcagaaataggcccttttatgtgttgcttctattttacctcaaattgtagatatagggtaatcaataaaatccatccatgcctttcacacactaagt

SEQ ID NO: 4819 - protein, 605 aa, Homo sapiens; identical to SEQ ID NO: 4221

SEQ ID NO: 4820 - DNA, 3736 bp, Homo sapiens
aaaaaaaaaaaaaaaaaaaaaaaaaaaagaaaaaagaaaaaaaaaaggaggaggaggaggagggtgagagagaagctgggagagcagagaaaaggggccaccggtcgcccccccgcttccccgcacgcgctctccagccgcggccgcccgcctgccgcggtcaccccggcctctgcctctgtcccccagtgatcggatcaaggcgctgagcgaggccctgcctgcggggcggccatgcggcggtgacaggagcgcgaccgacacgcacgggcccctcgccccctctcgcctcccgtccgctcgccagctcccctcagccgaggctgctccgcggcggccgcagcccgcgcgcggcccacactcgcctcccctcggcacccccggccccggagctgcctggaggcggccgcactcggtgtaaagaactggccaagtccaaagccgaagtggcctgcattgcagtgtatgaaacagacgtgtttgtcgtcggaactgaaagaggacgtgcttttgtcaataccagaaaggattttcaaaaagattttgtaaaatattgtgttgaagaagaagaaaaagctgcagagatgcataaaatgaaatctacaacccaggcaaatcggatgagtgtagatgctgtagaaattgaaacactcagaaaaacagttgaggactatttctgcttttgctatgggaaagctttaggcaaatccacagtggtacctgtaccatatgagaagatgctgcgagaccagtcggctgtggtagtgcaggggcttccggaaggtgttgcctttaaacaccccgagaactatgatcttgcaaccctgaaatggattttggagaacaaagcagggatttcattcatcattaagagaccttttttagagccaaagaagcatgtaggtggtcgtgtgatggtaacagatgctgacaggtcaatactatctccaggtggaagttgtggccccatcaaagtgaaaactgaacccacagaagattctggcatttccctggaaatggcagctgtgacagtaaaggaagaatcagaagatcctgattattatcaatataacattcaaggaagccaccattcttcagagggcaatgaaggcacagaaatggaagtaccagcagaagatgatgattattctccaccgtctaagagaccaaaggccaatgagctaccgcagccaccagtcccggaacccgccaatgctgggaagcggaaagtgagggagttcaacttcgagaaatggaatgctcgcatcactgatctacgtaaacaagttgaagaattgtttgaaaggaaatatgctcaagccataaaagccaaaggtccggtgacgatcccgtaccctcttttccagtctcatgttgaagatctttatgtagaaggacttcctgaaggaattccttttagaaggccatctacttacggaattcctcgcctggagaggatattacttgcaaaggaaaggattcgttttgtgattaagaaacatgagcttctgaattcaacacgtgaagatttacagcttgataagccagcttcaggagtaaaggaagaatggtatgccagaatcactaaattaagaaagatggtggatcagcttttctgcaaaaaatttgcggaagccttggggagcactgaagccaaggctgtaccgtaccaaaaatttgaggcacacccgaatgatctgtacgtggaaggactgccagaaaacattcctttccgaagtccctcatggtatggaatcccaaggctggaaaaaatcattcaagtgggcaatcgaattaaatttgttattaaaagaccagaacttctgactcacagtaccactgaagttactcagccaagaacgaatacaccagtcaaagaagattggaatgtcagaattaccaagctacggaagcaagtggaagagatttttaatttgaaatttgctcaagctcttggactcaccgaggcagtaaaagtaccatatcctgtgtttgaatcaaacccggagttcttgaaaggatcgtccgcgggagtaataaaatcaagttcgttgttaaaaaacctgaactagttatttcctacttgcctcctgggatggctagtaaaataaacactaaagctttgcagtcccccaaaagaccacgaagtcctgggagtaattcaaaggttcctgaaattgaggtcaccgtggaaggccctaataacaacaatcctcaaacctcagctgttcgaaccccgacccagactaacggttctaacgttcccttcaagccacgagggagagagttttcctttgaggcctggaatgccaaaatcacggacctaaaacagaaagttgaaaatctcttcaatgagaaatgtggggaagctcttggccttaaacaagctgtgaaggtgccgttcgcgttatttgagtctttcccggaagacttttatgtggaaggcttacctgagggtgtgccattccgaagaccatcgacttttggcattccgaggctggagaagatactcagaaacaaagccaaaattaagttcatcattaaaaagcccgaaatgtttgagacggcgattaaggagagcacctcctctaagagccctcccagaaaaataaattcatcacccaatgttaatactactgcatcaggtgttgaagaccttaacatcattcaggtgacaattccagatgatgataatgaaagactctcgaaagttgaaaaagctagacagctaagagaacaagtgaatgacctctttagtcggaaatttggtgaagctattggtatgggttttcctgtgaaagttccctacaggaaaatcacaattaaccctggctgtgtggtggttgatggcatgcccccgggggtgtccttcaaagcccccagctacctggaaatcagctccatgagaaggatcttagactctgccgagtttatcaaattcacggtcattagaccatttccaggacttgtgattaataaccagctggttgatcagagtgagtcagaaggccccgtgatacaagaatcagctgaaccaagccagttggaagttccagccacagaagaaataaaagagactgatggaagctctcagatcaagcaagaaccagaccccacgtggtagacctcttccctcctaggcaaaaccatctggatcacctaacagtcagaggtcagtatctcagcgtgtgaattatagaggaaatacagagagaacctcttccacttttacttttcgtccaaataaaatgcatggtgtaccagaagttgaagatcgggttgaggattggggctagctcgatgacactaaggccccaacatcgcgggacctgctgtggcgcggattcttaggaacgctgttctagccggccccctctccaggggtcgccgtggccggcattatttcctagttcttcttgtaaccctgaggtgccagcgcggggagtgaggaggggtcagggggctaaggatgcaacctctgacgttctgcgccttcctaggagagtcttacatgtgttgagatttcacaagcaatgcgagttgtaaaataccagctctacaagaagctaggctctgtgacggcatagttttcagtagctttatcacaatattcacaatggagaattatatgacatggtagcagaaataggcccttttatgtgttgcttctattttacctcaaattgtagatatagggtaatcaataaaatccatccatgcctttcacacactaagt

SEQ ID NO: 4821 - protein, 495 aa, Homo sapiens; identical to SEQ ID NO: 4181

SEQ ID NO: 4822 - DNA, 7750 bp, Homo sapiens
aaaaaaaaaaaaaaaaaaaaaaaaaaaagaaaaaagaaaaaaaaaaggaggaggaggaggagggtgagagagaagctgggagagcagagaaaaggggccaccggtcgcccccccgcttccccgcacgcgctctccagccgcggccgcccgcctgccgcggtcaccccggcctctgcctctgtcccccagtgatcggatcaaggcgctgagcgaggccctgcctgcggggcggccatgcggcggtgacaggagcgcgaccgacacgcacgggcccctcgccccctctcgcctcccgtccgctcgccagctcccctcagccgaggctgctccgcggcggccgcagcccgcgcgcggcccacactcgcctccccgttgaagatgaggagtcctcggagagcaggatggtggtgacattcctcatgtcagctctcgagtccatgtgtaaagaactggccaagtccaaagccgaagtggcctgcattgcagtgtatgaaacagacgtgtttgtcgtcggaactgaaagaggacgtgcttttgtcaataccagaaaggattttcaaaaagattttgtaaaatattgtgttgaagaagaagaaaaagctgcagagatgcataaaatgaaatctacaacccaggcaaatcggatgagtgtagatgctgtagaaattgaaacactcagaaaaacagttgaggactatttctgcttttgctatgggaaagctttaggcaaatccacagtggtacctgtaccatatgagaagatgctgcgagaccagtcggctgtggtagtgcaggggcttccggaaggtgttgcctttaaacaccccgagaactatgatcttgcaaccctgaaatggattttggagaacaaagcagggatttcattcatcattaagagaccttttttagagccaaagaagcatgtaggtggtcgtgtgatggtaacagatgctgacaggtcaatactatctccaggtggaagttgtggccccatcaaagtgaaaactgaacccacagaagattctggaagccaccattcttcagagggcaatgaaggcacagaaatggaagtaccagcagaagattctactcaacatgtcccttcagaaacaagtgaggaccctgaagttgaggtgactattgaagatgatgattattctccaccgtctaagagaccaaaggccaatgagctaccgcagccaccagtcccggaacccgccaatgctgggaagcggaaagtgagggagttcaacttcgagaaatggaatgctcgcatcactgatctacgtaaacaagttgaagaattgtttgaaaggaaatatgctcaagccataaaagccaaaggtccggtgacgatcccgtaccctcttttccagtctcatgttgaagatctttatgtagaaggacttcctgaaggaattccttttagaaggccatctacttacggaattcctcgcctggagaggatattacttgcaaaggaaaggattcgttttgtgattaagaaacatgagcttctgaattcaacacgtgaagatttacagcttgataagccagcttcaggagtaaaggaagaatggtatgccagaatcactaaattaagaaagatggtggatcagcttttctgcaaaaaatttgcggaagccttggggagcactgaagccaaggctgtaccgtaccaaaaatttgaggcacacccgaatgatctgtacgtggaaggactgccagaaaacattcctttccgaagtccctcatggtatggaatcccaaggctggaaaaaatcattcaagtgggcaatcgaattaaatttgttattaaaagaccagaacttctgactcacagtaccactgaagttactcagccaagaacgaatacaccagtcaaagaagattggaatgtcagaattaccaagctacggaagcaagtggaagagatttttaatttgaaatttgctcaagctcttggactcaccgaggcagtaaaagtaccatatcctgtgtttgaatcaaacccggagttcttgaaaggatcgtccgcgggagtaataaaatcaagttcgttgttaaaaaacctgaactagttatttcctacttgcctcctgggatggctagtaaaataaacactaaagctttgcagtcccccaaaagaccacgaagtcctgggagtaattcaaaggttcctgaaattgaggtcaccgtggaaggccctaataacaacaatcctcaaacctcagctgttcgaaccccgacccagactaacggttctaacgttcccttcaagccacgagggagagagttttcctttgaggcctggaatgccaaaatcacggacctaaaacagaaagttgaaaatctcttcaatgagaaatgtggggaagctcttggccttaaacaagctgtgaaggtgccgttcgcgttatttgagtctttcccggaagacttttatgtggaaggcttacctgagggtgtgccattccgaagaccatcgacttttggcattccgaggctggagaagatactcagaaacaaagccaaaattaagttcatcattaaaaagcccgaaatgtttgagacggcgattaaggagagcacctcctctaagagccctcccagaaaaataaattcatcacccaatgttaatactactgcatcaggtgttgaagaccttaacatcattcaggtgacaattccagatgatgataatgaaagactctcgaaagttgaaaaagctagacagctaagagaacaagtgaatgacctctttagtcggaaatttggtgaagctattggtatgggttttcctgtgaaagttccctacaggaaaatcacaattaaccctggctgtgtggtggttgatggcatgcccccgggggtgtccttcaaagcccccagctacctggaaatcagctccatgagaaggatcttagactctgccgagtttatcaaattcacggtcattaggtaagtgagagtttcctgcttagtcacaggagcgaatctggagctcatgaggctgactcttctaaaatgcagccacaggtagtcatcgaatccggcttcctatgctgtgcaatcaacaaatcaaaataacttgtgtcatcattagaatgtcagatgtgcttctacgaactaagctgactcttttaattctttggcaaagggttggcaaactaggactgtttgccaaattcaggctgcctcctatttttagagtcttcctgaaacacagctacacccgtattatccatggctgctttcctgtcacagtgagtaagtagctgggactgagaaggcatggcctccaaagtctaaaatatttactctctagcactttgtagaaaaaccttagctaggcacagtggctaacgcctgtaatcccagcattttgggaggccaaggcaggcagatcacctgaggtcaggagttccagaccagcctggccaacatggtgaaatcccatctctacaaaaataaaacagttagctgggcatgatggcgggtgcctgtaatcccagctactcgggaggctgaggcaggatagtcgcttgaacccaggaggtggaggttgcaatgagccaagatcatgccactgcactccagcctggacgacagagtgagactccatcacaagaaaaaaagaactttgtcaacctctgtcttagggcgccttgtcacaggcttcgggtcagacggattcaaccttgcatcagccatttgttagccaggtcactctgttctttgtctgtaaatgagattgatcgttgttcccactgagagtgtcagctccttcccgtagagcaggcatgatgattgtactcacctctgacaccattgtgagtgccacattccttcccacgtccttgtcactgtaagagatgcccacctgagcaccaaccccaggttatcttcccctttgtcttccagccccccagaaacagctacgactcaacctacccaatcatttcatcatcagattgccactgtctctagttcaggtctcttgggactggcactcagaaatctcataataaatcctcttgaggcttctcatacactcgtcttcttccaatcttctttccctcaaaatctcatattttggttccacttcacccaccgtcattctccatatcactcccaggagttaggcaaaaagccccttccgttcttccgtatgttaaacttagaatcactctgttccctgctctgcgtttctattttttgtttttcctccatttactagtagcttaacactttctaacagtgttcttattattgatacgtatctatctcttccataagcttataaggtcacggataatacttctcattgtagtacgtaaatgacgtgggctagatatgagttgaataaacagttatacctgtaaattcttacagagtgaaaataaattgttatactttacaatttgtttctctctttagaccatttccaggacttgtgattaataaccgtgagtattttgtgaagtgttttgtttttgttttttcctggggtctgacgtgtgtgcgtgtgagtgtgtatacatgcttaacgtatatcacgttacttcacctatgtcagtaaccaggccaaatacttgttttagccctcagtaaaaacaccaggcacttcctagttgtaaaattattcaagcttcttaacttcctatcctcgatgcacttaatcataaaatggtaataatagcaccgattttgggggagtcgttccagtagatggaaagcatctggaacaggtgtcagcaagctcctgccgacgtgtatgcataaagttttattgaaaccaccatcgtgtccatttgtttatggcagaactgagagatggcagcagcaagtgtgtgcctgcaaaacctaaaatatttactaattggctctgcaagaaaagagtttgcatccccctaacctagaacagtgtctagcctctagtatgtgtttagcctacagtatgtgctcagcgaatacaatctatatttattactgcttttatgactgttataattactgtgcttggatttcgttacaaagtaagtcacaatgtgcctgcttctgttagtatttcagcacagtgcctggcacacatggggctctcaaatattgctgagcgagtgaacaaatgtcctttcaattccttaacgttgatgtcattttcaatagtattttgagccaaacttaattttgcgagtgtgttttgttttcttaactttattattaaaaatgtataaaagtgaggccaggcgtggtggctcacgcctgtaatcccagcagtttgggaggctgaggcaggcggatcagttgaggttgggagttggagaccagcccgtccaacatggtgaaagcctgtctctactaaaaatacaaaaatcagctgggtgtggtggcgcgtgcctgtaatcccagctactcaggaggctgaggcaggagagttgcttgaatcctagaggtggaggttgcagtgagctgagatcgtgccattgcactccagcctgggcaacaagagcaaaactctgtcccaataaataaataaataaaatgttctcttttgttcctgttcttgtgcggtagtgtggtatagagttttatggtaattactgtgaattagtgattctgagggacatatcagaactctgaggtttgtttccttctcatcttgagggaaacagcaaatgtatgttaaaatgcttttccaagggaacaacacatccttacattatttaaaccaatctgcttcattttcagagctggttgatcagagtgagtcagaaggccccgtgatacaagaatcagctgaaccaagccagttggaagttccagccacagaagaaataaaagagactgatggaagctctcagatcaagcaagaaccagaccccacgtggtagacctcttccctcctagggtaaatcagcttctgtgtcagggatgctgtgtggtgtccatctgaaccccctgcatacgcgtagctaatgtgatctccccactttcacataagatggtggccctgccttcagggaatgtgggagccaggtgggagccttcccggatatttaagctagaagattctacagggagattctccttggatcaatatatgtctctcagtcaaagatgtaaaagcacttttgccttaaaaagaatgttctgtttctaaatagagtcaacgttgtcctcctcattggaattcactatgagtcagaatcattagactgacttttttttttccatagtaatagtattttgcagagtctcacagagctgcagatcttttgttcatcttgcagagttaacaagtctgatcctgttagtccagatttcttaaatttggccaagttataataggagcagtagcttgagacccgaagtcaggaaactttgacaatggatttttttttttaatccagagacttgtactggaatttgccttaccctgtcagctcatggacttaaggtttcatcccgctttatgagtgcttctgaatccaagtcattgttacctgaatttgcaaattaagttgtgatattcgtgactgttaaattcctgtaattagattaacctctttgcttgcttgtttgttttctctcctattttagcttaaagtatcagtggttgagaagagcttttcggacctgttactaccccaagctgtgtaatatacttgtataacagaaataccttctatacaaacctttttttctacttttagatagaaatgtctactttttcagcagttctgtgaattaaagagcagagtgactgtgggtctggaatggctggtgtacttgggaatgtactatcaggattttacagcaatgctgggaaatgacagggaaaatgacaggaatgaatctcaccagattttttatgtactcagcagagccttgagttacggtgtttattttccaatcaagtgaagatatctcctacttctcctactggaacatctcagcttctgcagtgaagaaaaattcctgtgatagttcagttctttagtttttctatttgaaaaaaaaaaatcatttaaatgatcctttgttcacggctctccttaatgactgagtgaacagttcctatctgtatatttgactaaaccttttcctaagctatctctcatggttcctatgtttttttatcataattaaaagcaaaaccatctggatcacctaacagtcagaggtcagtatctcagcgtgtgaattatagaggaaatacagagagaacctcttccacttttacttttcgtccaaataaaatgcatggtgtaccagaagttgaagatcgggttgaggattggggctagctcgatgacactaaggccccaacatcgcgggacctgctgtggcgcggattcttaggaacgctgttctagccggccccctctccaggggtcgccgtggccggcattatttcctagttcttcttgtaaccctgaggtgccagcgcggggagtgaggaggggtcagggggctaaggatgcaacctctgacgttctgcgccttcctaggagagtcttacatgtgttgagatttcacaagcaatgcgagttgtaaaataccagctctacaagaagctaggctctgtgacggcatagttttcagtagctttatcacaatattcacaatggagaattatatgacatggtagcagaaataggcccttttatgtgttgcttctattttacctcaaattgtagatatagggtaatcaataaaatccatccatgcctttcacacactaagt

SEQ ID NO: 4823 - protein, 559 aa, Homo sapiens; identical to SEQ ID NO: 4121

SEQ ID NO: 4824 - DNA, 5143 bp, Homo sapiens
aaaaaaaaaaaaaaaaaaaaaaaaaaaagaaaaaagaaaaaaaaaaggaggaggaggaggagggtgagagagaagctgggagagcagagaaaaggggccaccggtcgcccccccgcttccccgcacgcgctctccagccgcggccgcccgcctgccgcggtcaccccggcctctgcctctgtcccccagtgatcggatcaaggcgctgagcgaggccctgcctgcggggcggccatgcggcggtgacaggagcgcgaccgacacgcacgggcccctcgccccctctcgcctcccgtccgctcgccagctcccctcagccgaggctgctccgcggcggccgcagcccgcgcgcggcccacactcgcctccccgttgaagatgaggagtcctcggagagcaggatggtggtgacattcctcatgtcagctctcgagtccatgtgtaaagaactggccaagtccaaagccgaagtggcctgcattgcagtgtatgaaacagacgtgtttgtcgtcggaactgaaagaggacgtgcttttgtcaataccagaaaggattttcaaaaagattttgtaaaatattgtgttgaagaagaagaaaaagctgcagagatgcataaaatgaaatctacaacccaggcaaatcggatgagtgtagatgctgtagaaattgaaacactcagaaaaacagttgaggactatttctgcttttgctatgggaaagctttaggcaaatccacagtggtacctgtaccatatgagaagatgctgcgagaccagtcggctgtggtagtgcaggggcttccggaaggtgttgcctttaaacaccccgagaactatgatcttgcaaccctgaaatggattttggagaacaaagcagggatttcattcatcattaagagaccttttttagagccaaagaagcatgtaggtggtcgtgtgatggtaacagatgctgacaggtcaatactatctccaggtggaagttgtggccccatcaaagtgaaaactgaacccacagaagattctggcatttccctggaaatggcagctgtgacagtaaaggaagaatcagaagatcctgattattatcaatataacattcaagcaggcccttctgaaactgatgatgttgatgaaaaacagcccctatcgaagcctttgcaaggaagccaccattcttcagagggcaatgaaggcacagaaatggaagtaccagcagaagattctactcaacatgtcccttcagaaacaagtgaggaccctgaagttgaggtgactattgaagatgatgattattctccaccgtctaagagaccaaaggccaatgagctaccgcagccaccagtcccggaacccgccaatgctgggaagcggaaagtgagggagttcaacttcgagaaatggaatgctcgcatcactgatctacgtaaacaagttgaagaattgtttgaaaggaaatatgctcaagccataaaagccaaaggtccggtgacgatcccgtaccctcttttccagtctcatgttgaagatctttatgtagaaggacttcctgaaggaattccttttagaaggccatctacttacggaattcctcgcctggagaggatattacttgcaaaggaaaggattcgttttgtgattaagaaacatgagcttctgaattcaacacgtgaagatttacagcttgataagccagcttcaggagtaaaggaagaatggtatgccagaatcactaaattaagaaagatggtggatcagcttttctgcaaaaaatttgcggaagccttggggagcactgaagccaaggctgtaccgtaccaaaaatttgaggcacacccgaatgatctgtacgtggaaggactgccagaaaacattcctttccgaagtccctcatggtatggaatcccaaggctggaaaaaatcattcaagtgggcaatcgaattaaatttgttattaaaagaccagaacttctgactcacagtaccactgaagttactcagccaagaacgaatacaccagtcaaagaagattggaatgtcagaattaccaagctacggaagcaagtggaagagatttttaatttgaaatttgctcaagctcttggactcaccgaggcagtaaaagtaccatatcctgtgtttgaatcaaacccggagttcttgtatgtggaaggcttgccagaggggattcccttccgaagccctacctggtttggaattccacgacttgaaaggatcgtccgcgggagtaataaaatcaagttcgttgttaaaaaacctgaactagttatttcctacttgcctcctgggatggctagtaaaataaacactaaagctttgcagtcccccaaaagaccacgaagtcctgggagtaattcaaaggttcctgaaattgaggtcaccgtggaaggccctaataacaacaatcctcaaacctcagctgttcgaaccccgacccagactaacggttctaacgttcccttcaagccacgagggagagagttttcctttgaggcctggaatgccaaaatcacggacctaaaacagaaagttgaaaatctcttcaatgagaaatgtggggaagctcttggccttaaacaagctgtgaaggtgccgttcgcgttatttgagtctttcccggaagacttttatgtggaaggcttacctgagggtgtgccattccgaagaccatcgacttttggcattccgaggctggagaagatactcagaaacaaagccaaaattaagttcatcattaaaaagcccgaaatgtttgagacggcgattaaggagagcacctcctctaagagccctcccagaaaaataaattcatcacccaatgttaatactactgcatcaggtgttgaagaccttaacatcattcaggtgacaattccagatgatgataatgaaagactctcgaaagttgaaaaagctagacagctaagagaacaagtgaatgacctctttagtcggaaatttggtgaagctattggtatgggttttcctgtgaaagttccctacaggaaaatcacaattaaccctggctgtgtggtggttgatggcatgcccccgggggtgtccttcaaagcccccagctacctggaaatcagctccatgagaaggatcttagactctgccgagtttatcaaattcacggtcattagaccatttccaggacttgtgattaataaccagctggttgatcagagtgagtcagaaggccccgtgatacaagaatcagctgaaccaagccagttggaagttccagccacagaaggtaaaaggacctcttccctcctagggtaaatcagcttctgtgtcagggatgctgtgtggtgtccatctgaaccccctgcatacgcgtagctaatgtgatctccccactttcacataagatggtggccctgccttcagggaatgtgggagccaggtgggagccttcccggatatttaagctagaagattctacagggagattctccttggatcaatatatgtctctcagtcaaagatgtaaaagcacttttgccttaaaaagaatgttctgtttctaaatagagtcaacgttgtcctcctcattggaattcactatgagtcagaatcattagactgacttttttttttccatagtaatagtattttgcagagtctcacagagctgcagatcttttgttcatcttgcagagttaacaagtctgatcctgttagtccagatttcttaaatttggccaagttataataggagcagtagcttgagacccgaagtcaggaaactttgacaatggatttttttttttaatccagagacttgtactggaatttgccttaccctgtcagctcatggacttaaggtttcatcccgctttatgagtgcttctgaatccaagtcattgttacctgaatttgcaaattaagttgtgatattcgtgactgttaaattcctgtaattagattaacctctttgcttgcttgtttgttttctctcctattttagcttaaagtatcagtggttgagaagagcttttcggacctgttactaccccaagctgtgtaatatacttgtataacagaaataccttctatacaaacctttttttctacttttagatagaaatgtctactttttcagcagttctgtgaattaaagagcagagtgactgtgggtctggaatggctggtgtacttgggaatgtactatcaggattttacagcaatgctgggaaatgacagggaaaatgacaggaatgaatctcaccagattttttatgtactcagcagagccttgagttacggtgtttattttccaatcaagtgaagatatctcctacttctcctactggaacatctcagcttctgcagtgaagaaaaattcctgtgatagttcagttctttagtttttctatttgaaaaaaaaaaatcatttaaatgatcctttgttcacggctctccttaatgactgagtgaacagttcctatctgtatatttgactaaaccttttcctaagctatctctcatggttcctatgtttttttatcataattaaaagcaaaaccatctggatcacctaacagtcagaggtcagtatctcagcgtgtgaattatagaggaaatacagagagaacctcttccacttttacttttcgtccaaataaaatgcatggtgtaccagaagttgaagatcgggttgaggattggggctagctcgatgacactaaggccccaacatcgcgggacctgctgtggcgcggattcttaggaacgctgttctagccggccccctctccaggggtcgccgtggccggcattatttcctagttcttcttgtaaccctgaggtgccagcgcggggagtgaggaggggtcagggggctaaggatgcaacctctgacgttctgcgccttcctaggagagtcttacatgtgttgagatttcacaagcaatgcgagttgtaaaataccagctctacaagaagctaggctctgtgacggcatagttttcagtagctttatcacaatattcacaatggagaattatatgacatggtagcagaaataggcccttttatgtgttgcttctattttacctcaaattgtagatatagggtaatcaataaaatccatccatgcctttcacacactaagt

SEQ ID NO: 4825 - protein, 968 aa, Homo sapiens
MVVTFLMSALESMCKELAKSKAEVACIAVYETDVFVVGTERGRAFVNTRKDFQKDFVKYCVEEEEKAAEMHKMKSTTQANRMSVDAVEIETLRKTVEDYFCFCYGKALGKSTVVPVPYEKMLRDQSAVVVQGLPEGVAFKHPENYDLATLKWILENKAGISFIIKRPFLEPKKHVGGRVMVTDADRSILSPGGSCGPIKVKTEPTEDSGISLEMAAVTVKEESEDPDYYQYNIQAGPSETDDVDEKQPLSKPLQGSHHSSEGNEGTEMEVPAEDSTQHVPSETSEDPEVEVTIEDDDYSPPSKRPKANELPQPPVPEPANAGKRKVREFNFEKWNARITDLRKQVEELFERKYAQAIKAKGPVTIPYPLFQSHVEDLYVEGLPEGIPFRRPSTYGIPRLERILLAKERIRFVIKKHELLNSTREDLQLDKPASGVKEEWYARITKLRKMVDQLFCKKFAEALGSTEAKAVPYQKFEAHPNDLYVEGLPENIPFRSPSWYGIPRLEKIIQVGNRIKFVIKRPELLTHSTTEVTQPRTNTPVKEDWNVRITKLRKQVEEIFNLKFAQALGLTEAVKVPYPVFESNPEFLYVEGLPEGIPFRSPTWFGIPRLERIVRGSNKIKFVVKKPELVISYLPPGMASKINTKALQSPKRPRSPGSNSKVPEIEVTVEGPNNNNPQTSAVRTPTQTNGSNVPFKPRGREFSFEAWNAKITDLKQKVENLFNEKCGEALGLKQAVKVPFALFESFPEDFYVEGLPEGVPFRRPSTFGIPRLEKILRNKAKIKFIIKKPEMFETAIKESTSSKSPPRKINSSPNVNTTASGVEDLNIIQVTIPDDDNERLSKVEKARQLREQVNDLFSRKFGEAIGMGFPVKVPYRKITINPGCVVVDGMPPGVSFKAPSYLEISSMRRILDSAEFIKFTVIRPFPGLVINNQLVDQSESEGPVIQESAEPSQLEVPATEGKRTSSLLG

SEQ ID NO: 4826 - DNA, 7804 bp, Homo sapiens
aaaaaaaaaaaaaaaaaaaaaaaaaaaagaaaaaagaaaaaaaaaaggaggaggaggaggagggtgagagagaagctgggagagcagagaaaaggggccaccggtcgcccccccgcttccccgcacgcgctctccagccgcggccgcccgcctgccgcggtcaccccggcctctgcctctgtcccccagtgatcggatcaaggcgctgagcgaggccctgcctgcggggcggccatgcggcggtgacaggagcgcgaccgacacgcacgggcccctcgccccctctcgcctcccgtccgctcgccagctcccctcagccgaggctgctccgcggcggccgcagcccgcgcgcggcccacactcgcctcccctcggcacccccggccccggagctgcctggaggcggccgcactcggtgtaaagaactggccaagtccaaagccgaagtggcctgcattgcagtgtatgaaacagacgtgtttgtcgtcggaactgaaagaggacgtgcttttgtcaataccagaaaggattttcaaaaagattttgtaaaatattgtgttgaagaagaagaaaaagctgcagagatgcataaaatgaaatctacaacccaggcaaatcggatgagtgtagatgctgtagaaattgaaacactcagaaaaacagttgaggactatttctgcttttgctatgggaaagctttaggcaaatccacagtggtacctgtaccatatgagaagatgctgcgagaccagtcggctgtggtagtgcaggggcttccggaaggtgttgcctttaaacaccccgagaactatgatcttgcaaccctgaaatggattttggagaacaaagcagggatttcattcatcattaagagaccttttttagagccaaagaagcatgtaggtggtcgtgtgatggtaacagatgctgacaggtcaatactatctccaggtggaagttgtggccccatcaaagtgaaaactgaacccacagaagattctggcatttccctggaaatggcagctgtgacagtaaaggaagaatcagaagatcctgattattatcaatataacattcaaggaagccaccattcttcagagggcaatgaaggcacagaaatggaagtaccagcagaagattctactcaacatgtcccttcagaaacaagtgaggaccctgaagttgaggtgactattgaagatgatgattattctccaccgtctaagagaccaaaggccaatgagctaccgcagccaccagtcccggaacccgccaatgctgggaagcggaaagtgagggagttcaacttcgagaaatggaatgctcgcatcactgatctacgtaaacaagttgaagaattgtttgaaaggaaatatgctcaagccataaaagccaaaggtccggtgacgatcccgtaccctcttttccagtctcatgttgaagatctttatgtagaaggacttcctgaaggaattccttttagaaggccatctacttacggaattcctcgcctggagaggatattacttgcaaaggaaaggattcgttttgtgattaagaaacatgagcttctgaattcaacacgtgaagatttacagcttgataagccagcttcaggagtaaaggaagaatggtatgccagaatcactaaattaagaaagatggtggatcagcttttctgcaaaaaatttgcggaagccttggggagcactgaagccaaggctgtaccgtaccaaaaatttgaggcacacccgaatgatctgtacgtggaaggactgccagaaaacattcctttccgaagtccctcatggtatggaatcccaaggctggaaaaaatcattcaagtgggcaatcgaattaaatttgttattaaaagaccagaacttctgactcacagtaccactgaagttactcagccaagaacgaatacaccagtcaaagaagattggaatgtcagaattaccaagctacggaagcaagtggaagagatttttaatttgaaatttgctcaagctcttggactcaccgaggcagtaaaagtaccatatcctgtgtttgaatcaaacccggagttcttgaaaggatcgtccgcgggagtaataaaatcaagttcgttgttaaaaaacctgaactagttatttcctacttgcctcctgggatggctagtaaaataaacactaaagctttgcagtcccccaaaagaccacgaagtcctgggagtaattcaaaggttcctgaaattgaggtcaccgtggaaggccctaataacaacaatcctcaaacctcagctgttcgaaccccgacccagactaacggttctaacgttcccttcaagccacgagggagagagttttcctttgaggcctggaatgccaaaatcacggacctaaaacagaaagttgaaaatctcttcaatgagaaatgtggggaagctcttggccttaaacaagctgtgaaggtgccgttcgcgttatttgagtctttcccggaagacttttatgtggaaggcttacctgagggtgtgccattccgaagaccatcgacttttggcattccgaggctggagaagatactcagaaacaaagccaaaattaagttcatcattaaaaagcccgaaatgtttgagacggcgattaaggagagcacctcctctaagagccctcccagaaaaataaattcatcacccaatgttaatactactgcatcaggtgttgaagaccttaacatcattcaggtgacaattccagatgatgataatgaaagactctcgaaagttgaaaaagctagacagctaagagaacaagtgaatgacctctttagtcggaaatttggtgaagctattggtatgggttttcctgtgaaagttccctacaggaaaatcacaattaaccctggctgtgtggtggttgatggcatgcccccgggggtgtccttcaaagcccccagctacctggaaatcagctccatgagaaggatcttagactctgccgagtttatcaaattcacggtcattaggtaagtgagagtttcctgcttagtcacaggagcgaatctggagctcatgaggctgactcttctaaaatgcagccacaggtagtcatcgaatccggcttcctatgctgtgcaatcaacaaatcaaaataacttgtgtcatcattagaatgtcagatgtgcttctacgaactaagctgactcttttaattctttggcaaagggttggcaaactaggactgtttgccaaattcaggctgcctcctatttttagagtcttcctgaaacacagctacacccgtattatccatggctgctttcctgtcacagtgagtaagtagctgggactgagaaggcatggcctccaaagtctaaaatatttactctctagcactttgtagaaaaaccttagctaggcacagtggctaacgcctgtaatcccagcattttgggaggccaaggcaggcagatcacctgaggtcaggagttccagaccagcctggccaacatggtgaaatcccatctctacaaaaataaaacagttagctgggcatgatggcgggtgcctgtaatcccagctactcgggaggctgaggcaggatagtcgcttgaacccaggaggtggaggttgcaatgagccaagatcatgccactgcactccagcctggacgacagagtgagactccatcacaagaaaaaaagaactttgtcaacctctgtcttagggcgccttgtcacaggcttcgggtcagacggattcaaccttgcatcagccatttgttagccaggtcactctgttctttgtctgtaaatgagattgatcgttgttcccactgagagtgtcagctccttcccgtagagcaggcatgatgattgtactcacctctgacaccattgtgagtgccacattccttcccacgtccttgtcactgtaagagatgcccacctgagcaccaaccccaggttatcttcccctttgtcttccagccccccagaaacagctacgactcaacctacccaatcatttcatcatcagattgccactgtctctagttcaggtctcttgggactggcactcagaaatctcataataaatcctcttgaggcttctcatacactcgtcttcttccaatcttctttccctcaaaatctcatattttggttccacttcacccaccgtcattctccatatcactcccaggagttaggcaaaaagccccttccgttcttccgtatgttaaacttagaatcactctgttccctgctctgcgtttctattttttgtttttcctccatttactagtagcttaacactttctaacagtgttcttattattgatacgtatctatctcttccataagcttataaggtcacggataatacttctcattgtagtacgtaaatgacgtgggctagatatgagttgaataaacagttatacctgtaaattcttacagagtgaaaataaattgttatactttacaatttgtttctctctttagaccatttccaggacttgtgattaataaccgtgagtattttgtgaagtgttttgtttttgttttttcctggggtctgacgtgtgtgcgtgtgagtgtgtatacatgcttaacgtatatcacgttacttcacctatgtcagtaaccaggccaaatacttgttttagccctcagtaaaaacaccaggcacttcctagttgtaaaattattcaagcttcttaacttcctatcctcgatgcacttaatcataaaatggtaataatagcaccgattttgggggagtcgttccagtagatggaaagcatctggaacaggtgtcagcaagctcctgccgacgtgtatgcataaagttttattgaaaccaccatcgtgtccatttgtttatggcagaactgagagatggcagcagcaagtgtgtgcctgcaaaacctaaaatatttactaattggctctgcaagaaaagagtttgcatccccctaacctagaacagtgtctagcctctagtatgtgtttagcctacagtatgtgctcagcgaatacaatctatatttattactgcttttatgactgttataattactgtgcttggatttcgttacaaagtaagtcacaatgtgcctgcttctgttagtatttcagcacagtgcctggcacacatggggctctcaaatattgctgagcgagtgaacaaatgtcctttcaattccttaacgttgatgtcattttcaatagtattttgagccaaacttaattttgcgagtgtgttttgttttcttaactttattattaaaaatgtataaaagtgaggccaggcgtggtggctcacgcctgtaatcccagcagtttgggaggctgaggcaggcggatcagttgaggttgggagttggagaccagcccgtccaacatggtgaaagcctgtctctactaaaaatacaaaaatcagctgggtgtggtggcgcgtgcctgtaatcccagctactcaggaggctgaggcaggagagttgcttgaatcctagaggtggaggttgcagtgagctgagatcgtgccattgcactccagcctgggcaacaagagcaaaactctgtcccaataaataaataaataaaatgttctcttttgttcctgttcttgtgcggtagtgtggtatagagttttatggtaattactgtgaattagtgattctgagggacatatcagaactctgaggtttgtttccttctcatcttgagggaaacagcaaatgtatgttaaaatgcttttccaagggaacaacacatccttacattatttaaaccaatctgcttcattttcagagctggttgatcagagtgagtcagaaggccccgtgatacaagaatcagctgaaccaagccagttggaagttccagccacagaagaaataaaagagactgatggaagctctcagatcaagcaagaaccagaccccacgtggtagacctcttccctcctagggtaaatcagcttctgtgtcagggatgctgtgtggtgtccatctgaaccccctgcatacgcgtagctaatgtgatctccccactttcacataagatggtggccctgccttcagggaatgtgggagccaggtgggagccttcccggatatttaagctagaagattctacagggagattctccttggatcaatatatgtctctcagtcaaagatgtaaaagcacttttgccttaaaaagaatgttctgtttctaaatagagtcaacgttgtcctcctcattggaattcactatgagtcagaatcattagactgacttttttttttccatagtaatagtattttgcagagtctcacagagctgcagatcttttgttcatcttgcagagttaacaagtctgatcctgttagtccagatttcttaaatttggccaagttataataggagcagtagcttgagacccgaagtcaggaaactttgacaatggatttttttttttaatccagagacttgtactggaatttgccttaccctgtcagctcatggacttaaggtttcatcccgctttatgagtgcttctgaatccaagtcattgttacctgaatttgcaaattaagttgtgatattcgtgactgttaaattcctgtaattagattaacctctttgcttgcttgtttgttttctctcctattttagcttaaagtatcagtggttgagaagagcttttcggacctgttactaccccaagctgtgtaatatacttgtataacagaaataccttctatacaaacctttttttctacttttagatagaaatgtctactttttcagcagttctgtgaattaaagagcagagtgactgtgggtctggaatggctggtgtacttgggaatgtactatcaggattttacagcaatgctgggaaatgacagggaaaatgacaggaatgaatctcaccagattttttatgtactcagcagagccttgagttacggtgtttattttccaatcaagtgaagatatctcctacttctcctactggaacatctcagcttctgcagtgaagaaaaattcctgtgatagttcagttctttagtttttctatttgaaaaaaaaaaatcatttaaatgatcctttgttcacggctctccttaatgactgagtgaacagttcctatctgtatatttgactaaaccttttcctaagctatctctcatggttcctatgtttttttatcataattaaaagcaaaaccatctggatcacctaacagtcagaggtcagtatctcagcgtgtgaattatagaggaaatacagagagaacctcttccacttttacttttcgtccaaataaaatgcatggtgtaccagaagttgaagatcgggttgaggattggggctagctcgatgacactaaggccccaacatcgcgggacctgctgtggcgcggattcttaggaacgctgttctagccggccccctctccaggggtcgccgtggccggcattatttcctagttcttcttgtaaccctgaggtgccagcgcggggagtgaggaggggtcagggggctaaggatgcaacctctgacgttctgcgccttcctaggagagtcttacatgtgttgagatttcacaagcaatgcgagttgtaaaataccagctctacaagaagctaggctctgtgacggcatagttttcagtagctttatcacaatattcacaatggagaattatatgacatggtagcagaaataggcccttttatgtgttgcttctattttacctcaaattgtagatatagggtaatcaataaaatccatccatgcctttcacacactaagt

SEQ ID NO: 4827 - protein, 516 aa, Homo sapiens; identical to SEQ ID NO: 4129

SEQ ID NO: 4828 - DNA, 4476 bp, Homo sapiens
aaaaaaaaaaaaaaaaaaaaaaaaaaaagaaaaaagaaaaaaaaaaggaggaggaggaggagggtgagagagaagctgggagagcagagaaaaggggccaccggtcgcccccccgcttccccgcacgcgctctccagccgcggccgcccgcctgccgcggtcaccccggcctctgcctctgtcccccagtgatcggatcaaggcgctgagcgaggccctgcctgcggggcggccatgcggcggtgacaggagcgcgaccgacacgcacgggcccctcgccccctctcgcctcccgtccgctcgccagctcccctcagccgaggctgctccgcggcggccgcagcccgcgcgcggcccacactcgcctccccgttgaagatgaggagtcctcggagagcaggatggtggtgacattcctcatgtcagctctcgagtccatgtgtaaagaactggccaagtccaaagccgaagtggcctgcattgcagtgtatgaaacagacgtgtttgtcgtcggaactgaaagaggacgtgcttttgtcaataccagaaaggattttcaaaaagattttgtaaaatattgtgttgaagaagaagaaaaagctgcagagatgcataaaatgaaatctacaacccaggcaaatcggatgagtgtagatgctgtagaaattgaaacactcagaaaaacagttgaggactatttctgcttttgctatgggaaagctttaggcaaatccacagtggtacctgtaccatatgagaagatgctgcgagaccagtcggctgtggtagtgcaggggcttccggaaggtgttgcctttaaacaccccgagaactatgatcttgcaaccctgaaatggattttggagaacaaagcagggatttcattcatcattaagagaccttttttagagccaaagaagcatgtaggtggtcgtgtgatggtaacagatgctgacaggtcaatactatctccaggtggaagttgtggccccatcaaagtgaaaactgaacccacagaagattctggaagccaccattcttcagagggcaatgaaggcacagaaatggaagtaccagcagaagattctactcaacatgtcccttcagaaacaagtgaggaccctgaagttgaggtgactattgaagatgatgattattctccaccgtctaagagaccaaaggccaatgagctaccgcagccaccagtcccggaacccgccaatgctgggaagcggaaagtgagggagttcaacttcgagaaatggaatgctcgcatcactgatctacgtaaacaagttgaagaattgtttgaaaggaaatatgctcaagccataaaagccaaaggtccggtgacgatcccgtaccctcttttccagtctcatgttgaagatctttatgtagaaggacttcctgaaggaattccttttagaaggccatctacttacggaattcctcgcctggagaggatattacttgcaaaggaaaggattcgttttgtgattaagaaacatgagcttctgaattcaacacgtgaagatttacagcttgataagccagcttcaggagtaaaggaagaatggtatgccagaatcactaaattaagaaagatggtggatcagcttttctgcaaaaaatttgcggaagccttggggagcactgaagccaaggctgtaccgtaccaaaaatttgaggcacacccgaatgatctgtacgtggaaggactgccagaaaacattcctttccgaagtccctcatggtatggaatcccaaggctggaaaaaatcattcaagtgggcaatcgaattaaatttgttattaaaagaccagaacttctgactcacagtaccactgaagttactcagccaagaacgaatacaccagtcaaagaagattggaatgtcagaattaccaagctacggaagcaagtggaagagatttttaatttgaaatttgcttagatttgttgacagcggtttcctggagtgctgtcttgagaacgattctgaggaggctcagcaagaaagagtgtttcagttgattgggtgtgtctgtcatggagaaggaactcaagctcttggactcaccgaggcagtaaaagtaccatatcctgtgtttgaatcaaacccggagttcttgtatgtggaaggcttgccagaggggattcccttccgaagccctacctggtttggaattccacgacttgaaaggatcgtccgcgggagtaataaaatcaagttcgttgttaaaaaacctgaactagttatttcctacttgcctcctgggatggctagtaaaataaacactaaagctttgcagtcccccaaaagaccacgaagtcctgggagtaattcaaaggttcctgaaattgaggtcaccgtggaaggccctaataacaacaatcctcaaacctcagctgttcgaaccccgacccagactaacggttctaacgttcccttcaagccacgagggagagagttttcctttgaggcctggaatgccaaaatcacggacctaaaacagaaagttgaaaatctcttcaatgagaaatgtggggaagctcttggccttaaacaagctgtgaaggtgccgttcgcgttatttgagtctttcccggaagacttttatgtggaaggcttacctgagggtgtgccattccgaagaccatcgacttttggcattccgaggctggagaagatactcagaaacaaagccaaaattaagttcatcattaaaaagcccgaaatgtttgagacggcgattaaggagagcacctcctctaagagccctcccagaaaaataaattcatcacccaatgttaatactactgcatcaggtgttgaagaccttaacatcattcaggtgacaattccagatgatgataatgaaagactctcgaaagttgaaaaagctagacagctaagagaacaagtgaatgacctctttagtcggaaatttggtgaagctattggtatgggttttcctgtgaaagttccctacaggaaaatcacaattaaccctggctgtgtggtggttgatggcatgcccccgggggtgtccttcaaagcccccagctacctggaaatcagctccatgagaaggatcttagactctgccgagtttatcaaattcacggtcattagaccatttccaggacttgtgattaataaccagctggttgatcagagtgagtcagaaggccccgtgatacaagaatcagctgaaccaagccagttggaagttccagccacagaagaaataaaagagactgatggaagctctcagatcaagcaagaaccagaccccacgtggtagacctcttccctcctaggcttaaagtatcagtggttgagaagagcttttcggacctgttactaccccaagctgtgtaatatacttgtataacagaaataccttctatacaaacctttttttctacttttagatagaaatgtctactttttcagcagttctgtgaattaaagagcagagtgactgtgggtctggaatggctggtgtacttgggaatgtactatcaggattttacagcaatgctgggaaatgacagggaaaatgacaggaatgaatctcaccagattttttatgtactcagcagagccttgagttacggtgtttattttccaatcaagtgaagatatctcctacttctcctactggaacatctcagcttctgcagtgaagaaaaattcctgtgatagttcagttctttagtttttctatttgaaaaaaaaaaatcatttaaatgatcctttgttcacggctctccttaatgactgagtgaacagttcctatctgtatatttgactaaaccttttcctaagctatctctcatggttcctatgtttttttatcataattaaaagcaaaaccatctggatcacctaacagtcagaggtcagtatctcagcgtgtgaattatagaggaaatacagagagaacctcttccacttttacttttcgtccaaataaaatgcatggtgtaccagaagttgaagatcgggttgaggattggggctagctcgatgacactaaggccccaacatcgcgggacctgctgtggcgcggattcttaggaacgctgttctagccggccccctctccaggggtcgccgtggccggcattatttcctagttcttcttgtaaccctgaggtgccagcgcggggagtgaggaggggtcagggggctaaggatgcaacctctgacgttctgcgccttcctaggagagtcttacatgtgttgagatttcacaagcaatgcgagttgtaaaataccagctctacaagaagctaggctctgtgacggcatagttttcagtagctttatcacaatattcacaatggagaattatatgacatggtagcagaaataggcccttttatgtgttgcttctattttacctcaaattgtagatatagggtaatcaataaaatccatccatgcctttcacacactaagt

SEQ ID NO: 4829 - protein, 518 aa, Homo sapiens; identical to SEQ ID NO: 4051

SEQ ID NO: 4830 - DNA, 7317 bp, Homo sapiens
aaaaaaaaaaaaaaaaaaaaaaaaaaaagaaaaaagaaaaaaaaaaggaggaggaggaggagggtgagagagaagctgggagagcagagaaaaggggccaccggtcgcccccccgcttccccgcacgcgctctccagccgcggccgcccgcctgccgcggtcaccccggcctctgcctctgtcccccagtgatcggatcaaggcgctgagcgaggccctgcctgcggggcggccatgcggcggtgacaggagcgcgaccgacacgcacgggcccctcgccccctctcgcctcccgtccgctcgccagctcccctcagccgaggctgctccgcggcggccgcagcccgcgcgcggcccacactcgcctcccctcggcacccccggccccggagctgcctggaggcggccgcactcggggatcatggcccaagttgcaatgtccaccctccccgttgaagatgaggagtcctcggagagcaggatggtggtgacattcctcatgtcagctctcgagtccatgtgtaaagaactggccaagtccaaagccgaagtggcctgcattgcagtgtatgaaacagacgtgtttgtcgtcggaactgaaagaggacgtgcttttgtcaataccagaaaggattttcaaaaagattttgtaaaatattgtgttgaagaagaagaaaaagctgcagagatgcataaaatgaaatctacaacccaggcaaatcggatgagtgtagatgctgtagaaattgaaacactcagaaaaacagttgaggactatttctgcttttgctatgggaaagctttaggcaaatccacagtggtacctgtaccatatgagaagatgctgcgagaccagtcggctgtggtagtgcaggggcttccggaaggtgttgcctttaaacaccccgagaactatgatcttgcaaccctgaaatggattttggagaacaaagcagggatttcattcatcattaagagaccttttttagagccaaagaagcatgtaggtggtcgtgtgatggtaacagatgctgacaggtcaatactatctccaggtggaagttgtggccccatcaaagtgaaaactgaacccacagaagattctggaagccaccattcttcagagggcaatgaaggcacagaaatggaagtaccagcagaagattctactcaacatgtcccttcagaaacaagtgaggaccctgaagttgaggtgactattgaagatgatgattattctccaccgtctaagagaccaaaggccaatgagctaccgcagccaccagtcccggaacccgccaatgctgggaagcggaaagtgagggagttcaacttcgagaaatggaatgctcgcatcactgatctacgtaaacaagttgaagaattgtttgaaaggaaatatgctcaagccataaaagccaaaggtccggtgacgatcccgtaccctcttttccagtctcatgttgaagatctttatgtagaaggacttcctgaaggaattccttttagaaggccatctacttacggaattcctcgcctggagaggatattacttgcaaaggaaaggattcgttttgtgattaagaaacatgagcttctgaattcaacacgtgaagatttacagcttgataagccagcttcaggagtaaaggaagaatggtatgccagaatcactaaattaagaaagatggtggatcagcttttctgcaaaaaatttgcggaagccttggggagcactgaagccaaggctgtaccgtaccaaaaatttgaggcacacccgaatgatctgtacgtggaaggactgccagaaaacattcctttccgaagtccctcatggtatggaatcccaaggctggaaaaaatcattcaagtgggcaatcgaattaaatttgttattaaaagaccagaacttctgactcacagtaccactgaagttactcagccaagaacgaatacaccagtcaaagaagattggaatgtcagaattaccaagctacggaagcaagtggaagagatttttaatttgaaatttgcttagatttgttgacagcggtttcctggagtgctgtcttgagaacgattctgaggaggctcagcaagaaagagtgtttcagttgattgggtgtgtctgtcatggagaaggaactcaagctcttggactcaccgaggcagtaaaagtaccatatcctgtgtttgaatcaaacccggagttcttgtatgtggaaggcttgccagaggggattcccttccgaagccctacctggtttggaattccacgacttgaaaggatcgtccgcgggagtaataaaatcaagttcgttgttaaaaaacctgaactagttatttcctacttgcctcctgggatggctagtaaaataaacactaaagctttgcagtcccccaaaagaccacgaagtcctgggagtaattcaaaggttcctgaaattgaggtcaccgtggaaggccctaataacaacaatcctcaaacctcagctgttcgaaccccgacccagactaacggttctaacgttcccttcaagccacgagggagagagttttcctttgaggcctggaatgccaaaatcacggacctaaaacagaaagttgaaaatctcttcaatgagaaatgtggggaagctcttggccttaaacaagctgtgaaggtgccgttcgcgttatttgagtctttcccggaagacttttatgtggaaggcttacctgagggtgtgccattccgaagaccatcgacttttggcattccgaggctggagaagatactcagaaacaaagccaaaattaagttcatcattaaaaagcccgaaatgtttgagacggcgattaaggagagcacctcctctaagagccctcccagaaaaataaattcatcacccaatgttaatactactgcatcaggtgttgaagaccttaacatcattcaggtgacaattccagatgatgataatgaaagactctcgaaagttgaaaaagctagacagctaagagaacaagtgaatgacctctttagtcggaaatttggtgaagctattggtatgggttttcctgtgaaagttccctacaggaaaatcacaattaaccctggctgtgtggtggttgatggcatgcccccgggggtgtccttcaaagcccccagctacctggaaatcagctccatgagaaggatcttagactctgccgagtttatcaaattcacggtcattaggtaagtgagagtttcctgcttagtcacaggagcgaatctggagctcatgaggctgactcttctaaaatgcagccacaggtagtcatcgaatccggcttcctatgctgtgcaatcaacaaatcaaaataacttgtgtcatcattagaatgtcagatgtgcttctacgaactaagctgactcttttaattctttggcaaagggttggcaaactaggactgtttgccaaattcaggctgcctcctatttttagagtcttcctgaaacacagctacacccgtattatccatggctgctttcctgtcacagtgagtaagtagctgggactgagaaggcatggcctccaaagtctaaaatatttactctctagcactttgtagaaaaaccttagctaggcacagtggctaacgcctgtaatcccagcattttgggaggccaaggcaggcagatcacctgaggtcaggagttccagaccagcctggccaacatggtgaaatcccatctctacaaaaataaaacagttagctgggcatgatggcgggtgcctgtaatcccagctactcgggaggctgaggcaggatagtcgcttgaacccaggaggtggaggttgcaatgagccaagatcatgccactgcactccagcctggacgacagagtgagactccatcacaagaaaaaaagaactttgtcaacctctgtcttagggcgccttgtcacaggcttcgggtcagacggattcaaccttgcatcagccatttgttagccaggtcactctgttctttgtctgtaaatgagattgatcgttgttcccactgagagtgtcagctccttcccgtagagcaggcatgatgattgtactcacctctgacaccattgtgagtgccacattccttcccacgtccttgtcactgtaagagatgcccacctgagcaccaaccccaggttatcttcccctttgtcttccagccccccagaaacagctacgactcaacctacccaatcatttcatcatcagattgccactgtctctagttcaggtctcttgggactggcactcagaaatctcataataaatcctcttgaggcttctcatacactcgtcttcttccaatcttctttccctcaaaatctcatattttggttccacttcacccaccgtcattctccatatcactcccaggagttaggcaaaaagccccttccgttcttccgtatgttaaacttagaatcactctgttccctgctctgcgtttctattttttgtttttcctccatttactagtagcttaacactttctaacagtgttcttattattgatacgtatctatctcttccataagcttataaggtcacggataatacttctcattgtagtacgtaaatgacgtgggctagatatgagttgaataaacagttatacctgtaaattcttacagagtgaaaataaattgttatactttacaatttgtttctctctttagaccatttccaggacttgtgattaataaccgtgagtattttgtgaagtgttttgtttttgttttttcctggggtctgacgtgtgtgcgtgtgagtgtgtatacatgcttaacgtatatcacgttacttcacctatgtcagtaaccaggccaaatacttgttttagccctcagtaaaaacaccaggcacttcctagttgtaaaattattcaagcttcttaacttcctatcctcgatgcacttaatcataaaatggtaataatagcaccgattttgggggagtcgttccagtagatggaaagcatctggaacaggtgtcagcaagctcctgccgacgtgtatgcataaagttttattgaaaccaccatcgtgtccatttgtttatggcagaactgagagatggcagcagcaagtgtgtgcctgcaaaacctaaaatatttactaattggctctgcaagaaaagagtttgcatccccctaacctagaacagtgtctagcctctagtatgtgtttagcctacagtatgtgctcagcgaatacaatctatatttattactgcttttatgactgttataattactgtgcttggatttcgttacaaagtaagtcacaatgtgcctgcttctgttagtatttcagcacagtgcctggcacacatggggctctcaaatattgctgagcgagtgaacaaatgtcctttcaattccttaacgttgatgtcattttcaatagtattttgagccaaacttaattttgcgagtgtgttttgttttcttaactttattattaaaaatgtataaaagtgaggccaggcgtggtggctcacgcctgtaatcccagcagtttgggaggctgaggcaggcggatcagttgaggttgggagttggagaccagcccgtccaacatggtgaaagcctgtctctactaaaaatacaaaaatcagctgggtgtggtggcgcgtgcctgtaatcccagctactcaggaggctgaggcaggagagttgcttgaatcctagaggtggaggttgcagtgagctgagatcgtgccattgcactccagcctgggcaacaagagcaaaactctgtcccaataaataaataaataaaatgttctcttttgttcctgttcttgtgcggtagtgtggtatagagttttatggtaattactgtgaattagtgattctgagggacatatcagaactctgaggtttgtttccttctcatcttgagggaaacagcaaatgtatgttaaaatgcttttccaagggaacaacacatccttacattatttaaaccaatctgcttcattttcagagctggttgatcagagtgagtcagaaggccccgtgatacaagaatcagctgaaccaagccagttggaagttccagccacagaagaaataaaagagactgatggaagctctcagatcaagcaagaaccagaccccacgtggtagacctcttccctcctaggcttaaagtatcagtggttgagaagagcttttcggacctgttactaccccaagctgtgtaatatacttgtataacagaaataccttctatacaaacctttttttctacttttagatagaaatgtctactttttcagcagttctgtgaattaaagagcagagtgactgtgggtctggaatggctggtgtacttgggaatgtactatcaggattttacagcaatgctgggaaatgacagggaaaatgacaggaatgaatctcaccagattttttatgtactcagcagagccttgagttacggtgtttattttccaatcaagtgaagatatctcctacttctcctactggaacatctcagcttctgcagtgaagaaaaattcctgtgatagttcagttctttagtttttctatttgaaaaaaaaaaatcatttaaatgatcctttgttcacggctctccttaatgactgagtgaacagttcctatctgtatatttgactaaaccttttcctaagctatctctcatggttcctatgtttttttatcataattaaaagcaaaaccatctggatcacctaacagtcagaggtcagtatctcagcgtgtgaattatagaggaaatacagagagaacctcttccacttttacttttcgtccaaataaaatgcatggtgtaccagaagttgaagatcgggttgaggattggggctagctcgatgacactaaggccccaacatcgcgggacctgctgtggcgcggattcttaggaacgctgttctagccggccccctctccaggggtcgccgtggccggcattatttcctagttcttcttgtaaccctgaggtgccagcgcggggagtgaggaggggtcagggggctaaggatgcaacctctgacgttctgcgccttcctaggagagtcttacatgtgttgagatttcacaagcaatgcgagttgtaaaataccagctctacaagaagctaggctctgtgacggcatagttttcagtagctttatcacaatattcacaatggagaattatatgacatggtagcagaaataggcccttttatgtgttgcttctattttacctcaaattgtagatatagggtaatcaataaaatccatccatgcctttcacacactaagt

SEQ ID NO: 4831 - protein, 538 aa, Homo sapiens; identical to SEQ ID NO: 4183

SEQ ID NO: 4832 - DNA, 5243 bp, Homo sapiens
aaaaaaaaaaaaaaaaaaaaaaaaaaaagaaaaaagaaaaaaaaaaggaggaggaggaggagggtgagagagaagctgggagagcagagaaaaggggccaccggtcgcccccccgcttccccgcacgcgctctccagccgcggccgcccgcctgccgcggtcaccccggcctctgcctctgtcccccagtgatcggatcaaggcgctgagcgaggccctgcctgcggggcggccatgcggcggtgacaggagcgcgaccgacacgcacgggcccctcgccccctctcgcctcccgtccgctcgccagctcccctcagccgaggctgctccgcggcggccgcagcccgcgcgcggcccacactcgcctccccgttgaagatgaggagtcctcggagagcaggatggtggtgacattcctcatgtcagctctcgagtccatgtgtaaagaactggccaagtccaaagccgaagtggcctgcattgcagtgtatgaaacagacgtgtttgtcgtcggaactgaaagaggacgtgcttttgtcaataccagaaaggattttcaaaaagattttgtaaaatattgtgttgaagaagaagaaaaagctgcagagatgcataaaatgaaatctacaacccaggcaaatcggatgagtgtagatgctgtagaaattgaaacactcagaaaaacagttgaggactatttctgcttttgctatgggaaagctttaggcaaatccacagtggtacctgtaccatatgagaagatgctgcgagaccagtcggctgtggtagtgcaggggcttccggaaggtgttgcctttaaacaccccgagaactatgatcttgcaaccctgaaatggattttggagaacaaagcagggatttcattcatcattaagagaccttttttagagccaaagaagcatgtaggtggtcgtgtgatggtaacagatgctgacaggtcaatactatctccaggtggaagttgtggccccatcaaagtgaaaactgaacccacagaagattctggcatttccctggaaatggcagctgtgacagtaaaggaagaatcagaagatcctgattattatcaatataacattcaagcaggcccttctgaaactgatgatgttgatgaaaaacagcccctatcgaagcctttgcaaggaagccaccattcttcagagggcaatgaaggcacagaaatggaagtaccagcagaagatgatgattattctccaccgtctaagagaccaaaggccaatgagctaccgcagccaccagtcccggaacccgccaatgctgggaagcggaaagtgagggagttcaacttcgagaaatggaatgctcgcatcactgatctacgtaaacaagttgaagaattgtttgaaaggaaatatgctcaagccataaaagccaaaggtccggtgacgatcccgtaccctcttttccagtctcatgttgaagatctttatgtagaaggacttcctgaaggaattccttttagaaggccatctacttacggaattcctcgcctggagaggatattacttgcaaaggaaaggattcgttttgtgattaagaaacatgagcttctgaattcaacacgtgaagatttacagcttgataagccagcttcaggagtaaaggaagaatggtatgccagaatcactaaattaagaaagatggtggatcagcttttctgcaaaaaatttgcggaagccttggggagcactgaagccaaggctgtaccgtaccaaaaatttgaggcacacccgaatgatctgtacgtggaaggactgccagaaaacattcctttccgaagtccctcatggtatggaatcccaaggctggaaaaaatcattcaagtgggcaatcgaattaaatttgttattaaaagaccagaacttctgactcacagtaccactgaagttactcagccaagaacgaatacaccagtcaaagaagattggaatgtcagaattaccaagctacggaagcaagtggaagagatttttaatttgaaatttgcttagatttgttgacagcggtttcctggagtgctgtcttgagaacgattctgaggaggctcagcaagaaagagtgtttcagttgattgggtgtgtctgtcatggagaaggaactcaagctcttggactcaccgaggcagtaaaagtaccatatcctgtgtttgaatcaaacccggagttcttgtatgtggaaggcttgccagaggggattcccttccgaagccctacctggtttggaattccacgacttgaaaggatcgtccgcgggagtaataaaatcaagttcgttgttaaaaaacctgaactagttatttcctacttgcctcctgggatggctagtaaaataaacactaaagctttgcagtcccccaaaagaccacgaagtcctgggagtaattcaaaggttcctgaaattgaggtcaccgtggaaggccctaataacaacaatcctcaaacctcagctgttcgaaccccgacccagactaacggttctaacgttcccttcaagccacgagggagagagttttcctttgaggcctggaatgccaaaatcacggacctaaaacagaaagttgaaaatctcttcaatgagaaatgtggggaagctcttggccttaaacaagctgtgaaggtgccgttcgcgttatttgagtctttcccggaagacttttatgtggaaggcttacctgagggtgtgccattccgaagaccatcgacttttggcattccgaggctggagaagatactcagaaacaaagccaaaattaagttcatcattaaaaagcccgaaatgtttgagacggcgattaaggagagcacctcctctaagagccctcccagaaaaataaattcatcacccaatgttaatactactgcatcaggtgttgaagaccttaacatcattcaggtgacaattccagatgatgataatgaaagactctcgaaagttgaaaaagctagacagctaagagaacaagtgaatgacctctttagtcggaaatttggtgaagctattggtatgggttttcctgtgaaagttccctacaggaaaatcacaattaaccctggctgtgtggtggttgatggcatgcccccgggggtgtccttcaaagcccccagctacctggaaatcagctccatgagaaggatcttagactctgccgagtttatcaaattcacggtcattagaccatttccaggacttgtgattaataaccagctggttgatcagagtgagtcagaaggccccgtgatacaagaatcagctgaaccaagccagttggaagttccagccacagaagaaataaaagagactgatggaagctctcagatcaagcaagaaccagaccccacgtggtagacctcttccctcctagggtaaatcagcttctgtgtcagggatgctgtgtggtgtccatctgaaccccctgcatacgcgtagctaatgtgatctccccactttcacataagatggtggccctgccttcagggaatgtgggagccaggtgggagccttcccggatatttaagctagaagattctacagggagattctccttggatcaatatatgtctctcagtcaaagatgtaaaagcacttttgccttaaaaagaatgttctgtttctaaatagagtcaacgttgtcctcctcattggaattcactatgagtcagaatcattagactgacttttttttttccatagtaatagtattttgcagagtctcacagagctgcagatcttttgttcatcttgcagagttaacaagtctgatcctgttagtccagatttcttaaatttggccaagttataataggagcagtagcttgagacccgaagtcaggaaactttgacaatggatttttttttttaatccagagacttgtactggaatttgccttaccctgtcagctcatggacttaaggtttcatcccgctttatgagtgcttctgaatccaagtcattgttacctgaatttgcaaattaagttgtgatattcgtgactgttaaattcctgtaattagattaacctctttgcttgcttgtttgttttctctcctattttagcttaaagtatcagtggttgagaagagcttttcggacctgttactaccccaagctgtgtaatatacttgtataacagaaataccttctatacaaacctttttttctacttttagatagaaatgtctactttttcagcagttctgtgaattaaagagcagagtgactgtgggtctggaatggctggtgtacttgggaatgtactatcaggattttacagcaatgctgggaaatgacagggaaaatgacaggaatgaatctcaccagattttttatgtactcagcagagccttgagttacggtgtttattttccaatcaagtgaagatatctcctacttctcctactggaacatctcagcttctgcagtgaagaaaaattcctgtgatagttcagttctttagtttttctatttgaaaaaaaaaaatcatttaaatgatcctttgttcacggctctccttaatgactgagtgaacagttcctatctgtatatttgactaaaccttttcctaagctatctctcatggttcctatgtttttttatcataattaaaagcaaaaccatctggatcacctaacagtcagaggtcagtatctcagcgtgtgaattatagaggaaatacagagagaacctcttccacttttacttttcgtccaaataaaatgcatggtgtaccagaagttgaagatcgggttgaggattggggctagctcgatgacactaaggccccaacatcgcgggacctgctgtggcgcggattcttaggaacgctgttctagccggccccctctccaggggtcgccgtggccggcattatttcctagttcttcttgtaaccctgaggtgccagcgcggggagtgaggaggggtcagggggctaaggatgcaacctctgacgttctgcgccttcctaggagagtcttacatgtgttgagatttcacaagcaatgcgagttgtaaaataccagctctacaagaagctaggctctgtgacggcatagttttcagtagctttatcacaatattcacaatggagaattatatgacatggtagcagaaataggcccttttatgtgttgcttctattttacctcaaattgtagatatagggtaatcaataaaatccatccatgcctttcacacactaagt

SEQ ID NO: 4833 - protein, 543 aa, Homo sapiens; identical to SEQ ID NO: 4205

SEQ ID NO: 4834 - DNA, 7920 bp, Homo sapiens
aaaaaaaaaaaaaaaaaaaaaaaaaaaagaaaaaagaaaaaaaaaaggaggaggaggaggagggtgagagagaagctgggagagcagagaaaaggggccaccggtcgcccccccgcttccccgcacgcgctctccagccgcggccgcccgcctgccgcggtcaccccggcctctgcctctgtcccccagtgatcggatcaaggcgctgagcgaggccctgcctgcggggcggccatgcggcggtgacaggagcgcgaccgacacgcacgggcccctcgccccctctcgcctcccgtccgctcgccagctcccctcagccgaggctgctccgcggcggccgcagcccgcgcgcggcccacactcgcctcccctcggcacccccggccccggagctgcctggaggcggccgcactcggtgtaaagaactggccaagtccaaagccgaagtggcctgcattgcagtgtatgaaacagacgtgtttgtcgtcggaactgaaagaggacgtgcttttgtcaataccagaaaggattttcaaaaagattttgtaaaatattgtgttgaagaagaagaaaaagctgcagagatgcataaaatgaaatctacaacccaggcaaatcggatgagtgtagatgctgtagaaattgaaacactcagaaaaacagttgaggactatttctgcttttgctatgggaaagctttaggcaaatccacagtggtacctgtaccatatgagaagatgctgcgagaccagtcggctgtggtagtgcaggggcttccggaaggtgttgcctttaaacaccccgagaactatgatcttgcaaccctgaaatggattttggagaacaaagcagggatttcattcatcattaagagaccttttttagagccaaagaagcatgtaggtggtcgtgtgatggtaacagatgctgacaggtcaatactatctccaggtggaagttgtggccccatcaaagtgaaaactgaacccacagaagattctggcatttccctggaaatggcagctgtgacagtaaaggaagaatcagaagatcctgattattatcaatataacattcaaggaagccaccattcttcagagggcaatgaaggcacagaaatggaagtaccagcagaagatgatgattattctccaccgtctaagagaccaaaggccaatgagctaccgcagccaccagtcccggaacccgccaatgctgggaagcggaaagtgagggagttcaacttcgagaaatggaatgctcgcatcactgatctacgtaaacaagttgaagaattgtttgaaaggaaatatgctcaagccataaaagccaaaggtccggtgacgatcccgtaccctcttttccagtctcatgttgaagatctttatgtagaaggacttcctgaaggaattccttttagaaggccatctacttacggaattcctcgcctggagaggatattacttgcaaaggaaaggattcgttttgtgattaagaaacatgagcttctgaattcaacacgtgaagatttacagcttgataagccagcttcaggagtaaaggaagaatggtatgccagaatcactaaattaagaaagatggtggatcagcttttctgcaaaaaatttgcggaagccttggggagcactgaagccaaggctgtaccgtaccaaaaatttgaggcacacccgaatgatctgtacgtggaaggactgccagaaaacattcctttccgaagtccctcatggtatggaatcccaaggctggaaaaaatcattcaagtgggcaatcgaattaaatttgttattaaaagaccagaacttctgactcacagtaccactgaagttactcagccaagaacgaatacaccagtcaaagaagattggaatgtcagaattaccaagctacggaagcaagtggaagagatttttaatttgaaatttgcttagatttgttgacagcggtttcctggagtgctgtcttgagaacgattctgaggaggctcagcaagaaagagtgtttcagttgattgggtgtgtctgtcatggagaaggaactcaagctcttggactcaccgaggcagtaaaagtaccatatcctgtgtttgaatcaaacccggagttcttgtatgtggaaggcttgccagaggggattcccttccgaagccctacctggtttggaattccacgacttgaaaggatcgtccgcgggagtaataaaatcaagttcgttgttaaaaaacctgaactagttatttcctacttgcctcctgggatggctagtaaaataaacactaaagctttgcagtcccccaaaagaccacgaagtcctgggagtaattcaaaggttcctgaaattgaggtcaccgtggaaggccctaataacaacaatcctcaaacctcagctgttcgaaccccgacccagactaacggttctaacgttcccttcaagccacgagggagagagttttcctttgaggcctggaatgccaaaatcacggacctaaaacagaaagttgaaaatctcttcaatgagaaatgtggggaagctcttggccttaaacaagctgtgaaggtgccgttcgcgttatttgagtctttcccggaagacttttatgtggaaggcttacctgagggtgtgccattccgaagaccatcgacttttggcattccgaggctggagaagatactcagaaacaaagccaaaattaagttcatcattaaaaagcccgaaatgtttgagacggcgattaaggagagcacctcctctaagagccctcccagaaaaataaattcatcacccaatgttaatactactgcatcaggtgttgaagaccttaacatcattcaggtgacaattccagatgatgataatgaaagactctcgaaagttgaaaaagctagacagctaagagaacaagtgaatgacctctttagtcggaaatttggtgaagctattggtatgggttttcctgtgaaagttccctacaggaaaatcacaattaaccctggctgtgtggtggttgatggcatgcccccgggggtgtccttcaaagcccccagctacctggaaatcagctccatgagaaggatcttagactctgccgagtttatcaaattcacggtcattaggtaagtgagagtttcctgcttagtcacaggagcgaatctggagctcatgaggctgactcttctaaaatgcagccacaggtagtcatcgaatccggcttcctatgctgtgcaatcaacaaatcaaaataacttgtgtcatcattagaatgtcagatgtgcttctacgaactaagctgactcttttaattctttggcaaagggttggcaaactaggactgtttgccaaattcaggctgcctcctatttttagagtcttcctgaaacacagctacacccgtattatccatggctgctttcctgtcacagtgagtaagtagctgggactgagaaggcatggcctccaaagtctaaaatatttactctctagcactttgtagaaaaaccttagctaggcacagtggctaacgcctgtaatcccagcattttgggaggccaaggcaggcagatcacctgaggtcaggagttccagaccagcctggccaacatggtgaaatcccatctctacaaaaataaaacagttagctgggcatgatggcgggtgcctgtaatcccagctactcgggaggctgaggcaggatagtcgcttgaacccaggaggtggaggttgcaatgagccaagatcatgccactgcactccagcctggacgacagagtgagactccatcacaagaaaaaaagaactttgtcaacctctgtcttagggcgccttgtcacaggcttcgggtcagacggattcaaccttgcatcagccatttgttagccaggtcactctgttctttgtctgtaaatgagattgatcgttgttcccactgagagtgtcagctccttcccgtagagcaggcatgatgattgtactcacctctgacaccattgtgagtgccacattccttcccacgtccttgtcactgtaagagatgcccacctgagcaccaaccccaggttatcttcccctttgtcttccagccccccagaaacagctacgactcaacctacccaatcatttcatcatcagattgccactgtctctagttcaggtctcttgggactggcactcagaaatctcataataaatcctcttgaggcttctcatacactcgtcttcttccaatcttctttccctcaaaatctcatattttggttccacttcacccaccgtcattctccatatcactcccaggagttaggcaaaaagccccttccgttcttccgtatgttaaacttagaatcactctgttccctgctctgcgtttctattttttgtttttcctccatttactagtagcttaacactttctaacagtgttcttattattgatacgtatctatctcttccataagcttataaggtcacggataatacttctcattgtagtacgtaaatgacgtgggctagatatgagttgaataaacagttatacctgtaaattcttacagagtgaaaataaattgttatactttacaatttgtttctctctttagaccatttccaggacttgtgattaataaccgtgagtattttgtgaagtgttttgtttttgttttttcctggggtctgacgtgtgtgcgtgtgagtgtgtatacatgcttaacgtatatcacgttacttcacctatgtcagtaaccaggccaaatacttgttttagccctcagtaaaaacaccaggcacttcctagttgtaaaattattcaagcttcttaacttcctatcctcgatgcacttaatcataaaatggtaataatagcaccgattttgggggagtcgttccagtagatggaaagcatctggaacaggtgtcagcaagctcctgccgacgtgtatgcataaagttttattgaaaccaccatcgtgtccatttgtttatggcagaactgagagatggcagcagcaagtgtgtgcctgcaaaacctaaaatatttactaattggctctgcaagaaaagagtttgcatccccctaacctagaacagtgtctagcctctagtatgtgtttagcctacagtatgtgctcagcgaatacaatctatatttattactgcttttatgactgttataattactgtgcttggatttcgttacaaagtaagtcacaatgtgcctgcttctgttagtatttcagcacagtgcctggcacacatggggctctcaaatattgctgagcgagtgaacaaatgtcctttcaattccttaacgttgatgtcattttcaatagtattttgagccaaacttaattttgcgagtgtgttttgttttcttaactttattattaaaaatgtataaaagtgaggccaggcgtggtggctcacgcctgtaatcccagcagtttgggaggctgaggcaggcggatcagttgaggttgggagttggagaccagcccgtccaacatggtgaaagcctgtctctactaaaaatacaaaaatcagctgggtgtggtggcgcgtgcctgtaatcccagctactcaggaggctgaggcaggagagttgcttgaatcctagaggtggaggttgcagtgagctgagatcgtgccattgcactccagcctgggcaacaagagcaaaactctgtcccaataaataaataaataaaatgttctcttttgttcctgttcttgtgcggtagtgtggtatagagttttatggtaattactgtgaattagtgattctgagggacatatcagaactctgaggtttgtttccttctcatcttgagggaaacagcaaatgtatgttaaaatgcttttccaagggaacaacacatccttacattatttaaaccaatctgcttcattttcagagctggttgatcagagtgagtcagaaggccccgtgatacaagaatcagctgaaccaagccagttggaagttccagccacagaagaaataaaagagactgatggaagctctcagatcaagcaagaaccagaccccacgtggtagacctcttccctcctagggtaaatcagcttctgtgtcagggatgctgtgtggtgtccatctgaaccccctgcatacgcgtagctaatgtgatctccccactttcacataagatggtggccctgccttcagggaatgtgggagccaggtgggagccttcccggatatttaagctagaagattctacagggagattctccttggatcaatatatgtctctcagtcaaagatgtaaaagcacttttgccttaaaaagaatgttctgtttctaaatagagtcaacgttgtcctcctcattggaattcactatgagtcagaatcattagactgacttttttttttccatagtaatagtattttgcagagtctcacagagctgcagatcttttgttcatcttgcagagttaacaagtctgatcctgttagtccagatttcttaaatttggccaagttataataggagcagtagcttgagacccgaagtcaggaaactttgacaatggatttttttttttaatccagagacttgtactggaatttgccttaccctgtcagctcatggacttaaggtttcatcccgctttatgagtgcttctgaatccaagtcattgttacctgaatttgcaaattaagttgtgatattcgtgactgttaaattcctgtaattagattaacctctttgcttgcttgtttgttttctctcctattttagcttaaagtatcagtggttgagaagagcttttcggacctgttactaccccaagctgtgtaatatacttgtataacagaaataccttctatacaaacctttttttctacttttagatagaaatgtctactttttcagcagttctgtgaattaaagagcagagtgactgtgggtctggaatggctggtgtacttgggaatgtactatcaggattttacagcaatgctgggaaatgacagggaaaatgacaggaatgaatctcaccagattttttatgtactcagcagagccttgagttacggtgtttattttccaatcaagtgaagatatctcctacttctcctactggaacatctcagcttctgcagtgaagaaaaattcctgtgatagttcagttctttagtttttctatttgaaaaaaaaaaatcatttaaatgatcctttgttcacggctctccttaatgactgagtgaacagttcctatctgtatatttgactaaaccttttcctaagctatctctcatggttcctatgtttttttatcataattaaaagcaaaaccatctggatcacctaacagtcagaggtcagtatctcagcgtgtgaattatagaggaaatacagagagaacctcttccacttttacttttcgtccaaataaaatgcatggtgtaccagaagttgaagatcgggttgaggattggggctagctcgatgacactaaggccccaacatcgcgggacctgctgtggcgcggattcttaggaacgctgttctagccggccccctctccaggggtcgccgtggccggcattatttcctagttcttcttgtaaccctgaggtgccagcgcggggagtgaggaggggtcagggggctaaggatgcaacctctgacgttctgcgccttcctaggagagtcttacatgtgttgagatttcacaagcaatgcgagttgtaaaataccagctctacaagaagctaggctctgtgacggcatagttttcagtagctttatcacaatattcacaatggagaattatatgacatggtagcagaaataggcccttttatgtgttgcttctattttacctcaaattgtagatatagggtaatcaataaaatccatccatgcctttcacacactaagt

SEQ ID NO: 4835 - protein, 454 aa, Homo sapiens; identical to SEQ ID NO: 4239

SEQ ID NO: 4836 - DNA, 4004 bp, Homo sapiens
aaaaaaaaaaaaaaaaaaaaaaaaaaaagaaaaaagaaaaaaaaaaggaggaggaggaggagggtgagagagaagctgggagagcagagaaaaggggccaccggtcgcccccccgcttccccgcacgcgctctccagccgcggccgcccgcctgccgcggtcaccccggcctctgcctctgtcccccagtgatcggatcaaggcgctgagcgaggccctgcctgcggggcggccatgcggcggtgacaggagcgcgaccgacacgcacgggcccctcgccccctctcgcctcccgtccgctcgccagctcccctcagccgaggctgctccgcggcggccgcagcccgcgcgcggcccacactcgcctcccctcggcacccccggccccggagctgcctggaggcggccgcactcggggatcatggcccaagttgcaatgtccaccctccccgttgaagatgaggagtcctcggagagcaggatggtggtgacattcctcatgtcagctctcgagtccatgtgtaaagaactggccaagtccaaagccgaagtggcctgcattgcagtgtatgaaacagacgtgtttgtcgtcggaactgaaagaggacgtgcttttgtcaataccagaaaggattttcaaaaagattttgtaaaatattgtgttgaagaagaagaaaaagctgcagagatgcataaaatgaaatctacaacccaggcaaatcggatgagtgtagatgctgtagaaattgaaacactcagaaaaacagttgaggactatttctgcttttgctatgggaaagctttaggcaaatccacagtggtacctgtaccatatgagaagatgctgcgagaccagtcggctgtggtagtgcaggggcttccggaaggtgttgcctttaaacaccccgagaactatgatcttgcaaccctgaaatggattttggagaacaaagcagggatttcattcatcattaagagaccttttttagagccaaagaagcatgtaggtggtcgtgtgatggtaacagatgctgacaggtcaatactatctccaggtggaagttgtggccccatcaaagtgaaaactgaacccacagaagattctggaagccaccattcttcagagggcaatgaaggcacagaaatggaagtaccagcagaagattctactcaacatgtcccttcagaaacaagtgaggaccctgaagttgaggtgactattgaagatgatgattattctccaccgtctaagagaccaaaggccaatgagctaccgcagccaccagtcccggaacccgccaatgctgggaagcggaaagtgagggagttcaacttcgagaaatggaatgctcgcatcactgatctacgtaaacaagttgaagaattgtttgaaaggaaatatgctcaagccataaaagccaaaggtccggtgacgatcccgtaccctcttttccagtctcatgttgaagatctttatgtagaaggacttcctgaaggaattccttttagaaggccatctacttacggaattcctcgcctggagaggatattacttgcaaaggaaaggattcgttttgtgattaagaaacatgagcttctgaattcaacacgtgaagatttacagcttgataagccagcttcaggagtaaaggaagaatggtatgccagaatcactaaattaagaaagatggtggatcagcttttctgcaaaaaatttgcggaagccttggggagcactgaagccaaggctgtaccgtaccaaaaatttgaggcacacccgaatgatctgtacgtggaaggactgccagaaaacattcctttccgaagtccctcatggtatggaatcccaaggctggaaaaaatcattcaagtgggcaatcgaattaaatttgttattaaaagaccagaacttctgactcacagtaccactgaagttactcagccaagaacgaatacaccagtcaaagaagattggaatgtcagaattaccaagctacggaagcaagtggaagagatttttaatttgaaatttgcttagatttgttgacagcggtttcctggagtgctgtcttgagaacgattctgaggaggctcagcaagaaagagtgtttcagttgattgggtgtgtctgtcatggagaaggaactcaagctcttggactcaccgaggcagtaaaagtaccatatcctgtgtttgaatcaaacccggagttcttgtatgtggaaggcttgccagaggggattcccttccgaagccctacctggtttggaattccacgacttgaaaggatcgtccgcgggagtaataaaatcaagttcgttgttaaaaaacctgaactagttatttcctacttgcctcctgggatggctagtaaaataaacactaaagctttgcagtcccccaaaagaccacgaagtcctgggagtaattcaaaggttcctgaaattgaggtcaccgtggaaggccctaataacaacaatcctcaaacctcagctgttcgaaccccgacccagactaacggttctaacgttcccttcaagccacgagggagagagttttcctttgaggcctggaatgccaaaatcacggacctaaaacagaaagttgaaaatctcttcaatgagaaatgtggggaagctcttggccttaaacaagctgtgaaggtgccgttcgcgttatttgagtctttcccggaagacttttatgtggaaggcttacctgagggtgtgccattccgaagaccatcgacttttggcattccgaggctggagaagatactcagaaacaaagccaaaattaagttcatcattaaaaagcccgaaatgtttgagacggcgattaaggagagcacctcctctaagagccctcccagaaaaataaattcatcacccaatgttaatactactgcatcaggtgttgaagaccttaacatcattcaggtgacaattccagatgatgataatgaaagactctcgaaagttgaaaaagctagacagctaagagaacaagtgaatgacctctttagtcggaaatttggtgaagctattggtatgggttttcctgtgaaagttccctacaggaaaatcacaattaaccctggctgtgtggtggttgatggcatgcccccgggggtgtccttcaaagcccccagctacctggaaatcagctccatgagaaggatcttagactctgccgagtttatcaaattcacggtcattagaccatttccaggacttgtgattaataaccagctggttgatcagagtgagtcagaaggccccgtgatacaagaatcagctgaaccaagccagttggaagttccagccacagaagaaataaaagagactgatggaagctctcagatcaagcaagaaccagaccccacgtggtagacctcttccctcctaggcaaaaccatctggatcacctaacagtcagaggtcagtatctcagcgtgtgaattatagaggaaatacagagagaacctcttccacttttacttttcgtccaaataaaatgcatggtgtaccagaagttgaagatcgggttgaggattggggctagctcgatgacactaaggccccaacatcgcgggacctgctgtggcgcggattcttaggaacgctgttctagccggccccctctccaggggtcgccgtggccggcattatttcctagttcttcttgtaaccctgaggtgccagcgcggggagtgaggaggggtcagggggctaaggatgcaacctctgacgttctgcgccttcctaggagagtcttacatgtgttgagatttcacaagcaatgcgagttgtaaaataccagctctacaagaagctaggctctgtgacggcatagttttcagtagctttatcacaatattcacaatggagaattatatgacatggtagcagaaataggcccttttatgtgttgcttctattttacctcaaattgtagatatagggtaatcaataaaatccatccatgcctttcacacactaagt

SEQ ID NO: 4837 - protein, 538 aa, Homo sapiens; identical to SEQ ID NO: 4183

SEQ ID NO: 4838 - DNA, 5156 bp, Homo sapiens
aaaaaaaaaaaaaaaaaaaaaaaaaaaagaaaaaagaaaaaaaaaaggaggaggaggaggagggtgagagagaagctgggagagcagagaaaaggggccaccggtcgcccccccgcttccccgcacgcgctctccagccgcggccgcccgcctgccgcggtcaccccggcctctgcctctgtcccccagtgatcggatcaaggcgctgagcgaggccctgcctgcggggcggccatgcggcggtgacaggagcgcgaccgacacgcacgggcccctcgccccctctcgcctcccgtccgctcgccagctcccctcagccgaggctgctccgcggcggccgcagcccgcgcgcggcccacactcgcctcccctcggcacccccggccccggagctgcctggaggcggccgcactcggggatcatggcccaagttgcaatgtccaccctccccgttgaagatgaggagtcctcggagagcaggatggtggtgacattcctcatgtcagctctcgagtccatgtgtaaagaactggccaagtccaaagccgaagtggcctgcattgcagtgtatgaaacagacgtgtttgtcgtcggaactgaaagaggacgtgcttttgtcaataccagaaaggattttcaaaaagattttgtaaaatattgtgttgaagaagaagaaaaagctgcagagatgcataaaatgaaatctacaacccaggcaaatcggatgagtgtagatgctgtagaaattgaaacactcagaaaaacagttgaggactatttctgcttttgctatgggaaagctttaggcaaatccacagtggtacctgtaccatatgagaagatgctgcgagaccagtcggctgtggtagtgcaggggcttccggaaggtgttgcctttaaacaccccgagaactatgatcttgcaaccctgaaatggattttggagaacaaagcagggatttcattcatcattaagagaccttttttagagccaaagaagcatgtaggtggtcgtgtgatggtaacagatgctgacaggtcaatactatctccaggtggaagttgtggccccatcaaagtgaaaactgaacccacagaagattctggcatttccctggaaatggcagctgtgacagtaaaggaagaatcagaagatcctgattattatcaatataacattcaagcaggcccttctgaaactgatgatgttgatgaaaaacagcccctatcgaagcctttgcaaggaagccaccattcttcagagggcaatgaaggcacagaaatggaagtaccagcagaagattctactcaacatgtcccttcagaaacaagtgaggaccctgaagttgaggtgactattgaagatgatgattattctccaccgtctaagagaccaaaggccaatgagctaccgcagccaccagtcccggaacccgccaatgctgggaagcggaaagtgagggagttcaacttcgagaaatggaatgctcgcatcactgatctacgtaaacaagttgaagaattgtttgaaaggaaatatgctcaagccataaaagccaaaggtccggtgacgatcccgtaccctcttttccagtctcatgttgaagatctttatgtagaaggacttcctgaaggaattccttttagaaggccatctacttacggaattcctcgcctggagaggatattacttgcaaaggaaaggattcgttttgtgattaagaaacatgagcttctgaattcaacacgtgaagatttacagcttgataagccagcttcaggagtaaaggaagaatggtatgccagaatcactaaattaagaaagatggtggatcagcttttctgcaaaaaatttgcggaagccttggggagcactgaagccaaggctgtaccgtaccaaaaatttgaggcacacccgaatgatctgtacgtggaaggactgccagaaaacattcctttccgaagtccctcatggtatggaatcccaaggctggaaaaaatcattcaagtgggcaatcgaattaaatttgttattaaaagaccagaacttctgactcacagtaccactgaagttactcagccaagaacgaatacaccagtcaaagaagattggaatgtcagaattaccaagctacggaagcaagtggaagagatttttaatttgaaatttgctcaagctcttggactcaccgaggcagtaaaagtaccatatcctgtgtttgaatcaaacccggagttcttgaaaggatcgtccgcgggagtaataaaatcaagttcgttgttaaaaaacctgaactagttatttcctacttgcctcctgggatggctagtaaaataaacactaaagctttgcagtcccccaaaagaccacgaagtcctgggagtaattcaaaggttcctgaaattgaggtcaccgtggaaggccctaataacaacaatcctcaaacctcagctgttcgaaccccgacccagactaacggttctaacgttcccttcaagccacgagggagagagttttcctttgaggcctggaatgccaaaatcacggacctaaaacagaaagttgaaaatctcttcaatgagaaatgtggggaagctcttggccttaaacaagctgtgaaggtgccgttcgcgttatttgagtctttcccggaagacttttatgtggaaggcttacctgagggtgtgccattccgaagaccatcgacttttggcattccgaggctggagaagatactcagaaacaaagccaaaattaagttcatcattaaaaagcccgaaatgtttgagacggcgattaaggagagcacctcctctaagagccctcccagaaaaataaattcatcacccaatgttaatactactgcatcaggtgttgaagaccttaacatcattcaggtgacaattccagatgatgataatgaaagactctcgaaagttgaaaaagctagacagctaagagaacaagtgaatgacctctttagtcggaaatttggtgaagctattggtatgggttttcctgtgaaagttccctacaggaaaatcacaattaaccctggctgtgtggtggttgatggcatgcccccgggggtgtccttcaaagcccccagctacctggaaatcagctccatgagaaggatcttagactctgccgagtttatcaaattcacggtcattagaccatttccaggacttgtgattaataaccagctggttgatcagagtgagtcagaaggccccgtgatacaagaatcagctgaaccaagccagttggaagttccagccacagaaggtaaaaggacctcttccctcctagggtaaatcagcttctgtgtcagggatgctgtgtggtgtccatctgaaccccctgcatacgcgtagctaatgtgatctccccactttcacataagatggtggccctgccttcagggaatgtgggagccaggtgggagccttcccggatatttaagctagaagattctacagggagattctccttggatcaatatatgtctctcagtcaaagatgtaaaagcacttttgccttaaaaagaatgttctgtttctaaatagagtcaacgttgtcctcctcattggaattcactatgagtcagaatcattagactgacttttttttttccatagtaatagtattttgcagagtctcacagagctgcagatcttttgttcatcttgcagagttaacaagtctgatcctgttagtccagatttcttaaatttggccaagttataataggagcagtagcttgagacccgaagtcaggaaactttgacaatggatttttttttttaatccagagacttgtactggaatttgccttaccctgtcagctcatggacttaaggtttcatcccgctttatgagtgcttctgaatccaagtcattgttacctgaatttgcaaattaagttgtgatattcgtgactgttaaattcctgtaattagattaacctctttgcttgcttgtttgttttctctcctattttagcttaaagtatcagtggttgagaagagcttttcggacctgttactaccccaagctgtgtaatatacttgtataacagaaataccttctatacaaacctttttttctacttttagatagaaatgtctactttttcagcagttctgtgaattaaagagcagagtgactgtgggtctggaatggctggtgtacttgggaatgtactatcaggattttacagcaatgctgggaaatgacagggaaaatgacaggaatgaatctcaccagattttttatgtactcagcagagccttgagttacggtgtttattttccaatcaagtgaagatatctcctacttctcctactggaacatctcagcttctgcagtgaagaaaaattcctgtgatagttcagttctttagtttttctatttgaaaaaaaaaaatcatttaaatgatcctttgttcacggctctccttaatgactgagtgaacagttcctatctgtatatttgactaaaccttttcctaagctatctctcatggttcctatgtttttttatcataattaaaagcaaaaccatctggatcacctaacagtcagaggtcagtatctcagcgtgtgaattatagaggaaatacagagagaacctcttccacttttacttttcgtccaaataaaatgcatggtgtaccagaagttgaagatcgggttgaggattggggctagctcgatgacactaaggccccaacatcgcgggacctgctgtggcgcggattcttaggaacgctgttctagccggccccctctccaggggtcgccgtggccggcattatttcctagttcttcttgtaaccctgaggtgccagcgcggggagtgaggaggggtcagggggctaaggatgcaacctctgacgttctgcgccttcctaggagagtcttacatgtgttgagatttcacaagcaatgcgagttgtaaaataccagctctacaagaagctaggctctgtgacggcatagttttcagtagctttatcacaatattcacaatggagaattatatgacatggtagcagaaataggcccttttatgtgttgcttctattttacctcaaattgtagatatagggtaatcaataaaatccatccatgcctttcacacactaagt

SEQ ID NO: 4839 - protein, 625 aa, Homo sapiens; identical to SEQ ID NO: 4033

SEQ ID NO: 4840 - DNA, 5059 bp, Homo sapiens
aaaaaaaaaaaaaaaaaaaaaaaaaaaagaaaaaagaaaaaaaaaaggaggaggaggaggagggtgagagagaagctgggagagcagagaaaaggggccaccggtcgcccccccgcttccccgcacgcgctctccagccgcggccgcccgcctgccgcggtcaccccggcctctgcctctgtcccccagtgatcggatcaaggcgctgagcgaggccctgcctgcggggcggccatgcggcggtgacaggagcgcgaccgacacgcacgggcccctcgccccctctcgcctcccgtccgctcgccagctcccctcagccgaggctgctccgcggcggccgcagcccgcgcgcggcccacactcgcctcccctcggcacccccggccccggagctgcctggaggcggccgcactcggtgtaaagaactggccaagtccaaagccgaagtggcctgcattgcagtgtatgaaacagacgtgtttgtcgtcggaactgaaagaggacgtgcttttgtcaataccagaaaggattttcaaaaagattttgtaaaatattgtgttgaagaagaagaaaaagctgcagagatgcataaaatgaaatctacaacccaggcaaatcggatgagtgtagatgctgtagaaattgaaacactcagaaaaacagttgaggactatttctgcttttgctatgggaaagctttaggcaaatccacagtggtacctgtaccatatgagaagatgctgcgagaccagtcggctgtggtagtgcaggggcttccggaaggtgttgcctttaaacaccccgagaactatgatcttgcaaccctgaaatggattttggagaacaaagcagggatttcattcatcattaagagaccttttttagagccaaagaagcatgtaggtggtcgtgtgatggtaacagatgctgacaggtcaatactatctccaggtggaagttgtggccccatcaaagtgaaaactgaacccacagaagattctggcatttccctggaaatggcagctgtgacagtaaaggaagaatcagaagatcctgattattatcaatataacattcaaggaagccaccattcttcagagggcaatgaaggcacagaaatggaagtaccagcagaagattctactcaacatgtcccttcagaaacaagtgaggaccctgaagttgaggtgactattgaagatgatgattattctccaccgtctaagagaccaaaggccaatgagctaccgcagccaccagtcccggaacccgccaatgctgggaagcggaaagtgagggagttcaacttcgagaaatggaatgctcgcatcactgatctacgtaaacaagttgaagaattgtttgaaaggaaatatgctcaagccataaaagccaaaggtccggtgacgatcccgtaccctcttttccagtctcatgttgaagatctttatgtagaaggacttcctgaaggaattccttttagaaggccatctacttacggaattcctcgcctggagaggatattacttgcaaaggaaaggattcgttttgtgattaagaaacatgagcttctgaattcaacacgtgaagatttacagcttgataagccagcttcaggagtaaaggaagaatggtatgccagaatcactaaattaagaaagatggtggatcagcttttctgcaaaaaatttgcggaagccttggggagcactgaagccaaggctgtaccgtaccaaaaatttgaggcacacccgaatgatctgtacgtggaaggactgccagaaaacattcctttccgaagtccctcatggtatggaatcccaaggctggaaaaaatcattcaagtgggcaatcgaattaaatttgttattaaaagaccagaacttctgactcacagtaccactgaagttactcagccaagaacgaatacaccagtcaaagaagattggaatgtcagaattaccaagctacggaagcaagtggaagagatttttaatttgaaatttgctcaagctcttggactcaccgaggcagtaaaagtaccatatcctgtgtttgaatcaaacccggagttcttgtatgtggaaggcttgccagaggggattcccttccgaagccctacctggtttggaattccacgacttgaaaggatcgtccgcgggagtaataaaatcaagttcgttgttaaaaaacctgaactagttatttcctacttgcctcctgggatggctagtaaaataaacactaaagctttgcagtcccccaaaagaccacgaagtcctgggagtaattcaaaggttcctgaaattgaggtcaccgtggaaggccctaataacaacaatcctcaaacctcagctgttcgaaccccgacccagactaacggttctaacgttcccttcaagccacgagggagagagttttcctttgaggcctggaatgccaaaatcacggacctaaaacagaaagttgaaaatctcttcaatgagaaatgtggggaagctcttggccttaaacaagctgtgaaggtgccgttcgcgttatttgagtctttcccggaagacttttatgtggaaggcttacctgagggtgtgccattccgaagaccatcgacttttggcattccgaggctggagaagatactcagaaacaaagccaaaattaagttcatcattaaaaagcccgaaatgtttgagacggcgattaaggagagcacctcctctaagagccctcccagaaaaataaattcatcacccaatgttaatactactgcatcaggtgttgaagaccttaacatcattcaggtgacaattccagatgatgataatgaaagactctcgaaagttgaaaaagctagacagctaagagaacaagtgaatgacctctttagtcggaaatttggtgaagctattggtatgggttttcctgtgaaagttccctacaggaaaatcacaattaaccctggctgtgtggtggttgatggcatgcccccgggggtgtccttcaaagcccccagctacctggaaatcagctccatgagaaggatcttagactctgccgagtttatcaaattcacggtcattagaccatttccaggacttgtgattaataaccagctggttgatcagagtgagtcagaaggccccgtgatacaagaatcagctgaaccaagccagttggaagttccagccacagaaggtaaaaggacctcttccctcctagggtaaatcagcttctgtgtcagggatgctgtgtggtgtccatctgaaccccctgcatacgcgtagctaatgtgatctccccactttcacataagatggtggccctgccttcagggaatgtgggagccaggtgggagccttcccggatatttaagctagaagattctacagggagattctccttggatcaatatatgtctctcagtcaaagatgtaaaagcacttttgccttaaaaagaatgttctgtttctaaatagagtcaacgttgtcctcctcattggaattcactatgagtcagaatcattagactgacttttttttttccatagtaatagtattttgcagagtctcacagagctgcagatcttttgttcatcttgcagagttaacaagtctgatcctgttagtccagatttcttaaatttggccaagttataataggagcagtagcttgagacccgaagtcaggaaactttgacaatggatttttttttttaatccagagacttgtactggaatttgccttaccctgtcagctcatggacttaaggtttcatcccgctttatgagtgcttctgaatccaagtcattgttacctgaatttgcaaattaagttgtgatattcgtgactgttaaattcctgtaattagattaacctctttgcttgcttgtttgttttctctcctattttagcttaaagtatcagtggttgagaagagcttttcggacctgttactaccccaagctgtgtaatatacttgtataacagaaataccttctatacaaacctttttttctacttttagatagaaatgtctactttttcagcagttctgtgaattaaagagcagagtgactgtgggtctggaatggctggtgtacttgggaatgtactatcaggattttacagcaatgctgggaaatgacagggaaaatgacaggaatgaatctcaccagattttttatgtactcagcagagccttgagttacggtgtttattttccaatcaagtgaagatatctcctacttctcctactggaacatctcagcttctgcagtgaagaaaaattcctgtgatagttcagttctttagtttttctatttgaaaaaaaaaaatcatttaaatgatcctttgttcacggctctccttaatgactgagtgaacagttcctatctgtatatttgactaaaccttttcctaagctatctctcatggttcctatgtttttttatcataattaaaagcaaaaccatctggatcacctaacagtcagaggtcagtatctcagcgtgtgaattatagaggaaatacagagagaacctcttccacttttacttttcgtccaaataaaatgcatggtgtaccagaagttgaagatcgggttgaggattggggctagctcgatgacactaaggccccaacatcgcgggacctgctgtggcgcggattcttaggaacgctgttctagccggccccctctccaggggtcgccgtggccggcattatttcctagttcttcttgtaaccctgaggtgccagcgcggggagtgaggaggggtcagggggctaaggatgcaacctctgacgttctgcgccttcctaggagagtcttacatgtgttgagatttcacaagcaatgcgagttgtaaaataccagctctacaagaagctaggctctgtgacggcatagttttcagtagctttatcacaatattcacaatggagaattatatgacatggtagcagaaataggcccttttatgtgttgcttctattttacctcaaattgtagatatagggtaatcaataaaatccatccatgcctttcacacactaagt

SEQ ID NO: 4841 - protein, 879 aa, Homo sapiens
MHKMKSTTQANRMSVDAVEIETLRKTVEDYFCFCYGKALGKSTVVPVPYEKMLRDQSAVVVQGLPEGVAFKHPENYDLATLKWILENKAGISFIIKRPFLEPKKHVGGRVMVTDADRSILSPGGSCGPIKVKTEPTEDSGISLEMAAVTVKEESEDPDYYQYNIQGSHHSSEGNEGTEMEVPAEDSTQHVPSETSEDPEVEVTIEDDDYSPPSKRPKANELPQPPVPEPANAGKRKVREFNFEKWNARITDLRKQVEELFERKYAQAIKAKGPVTIPYPLFQSHVEDLYVEGLPEGIPFRRPSTYGIPRLERILLAKERIRFVIKKHELLNSTREDLQLDKPASGVKEEWYARITKLRKMVDQLFCKKFAEALGSTEAKAVPYQKFEAHPNDLYVEGLPENIPFRSPSWYGIPRLEKIIQVGNRIKFVIKRPELLTHSTTEVTQPRTNTPVKEDWNVRITKLRKQVEEIFNLKFAQALGLTEAVKVPYPVFESNPEFLYVEGLPEGIPFRSPTWFGIPRLERIVRGSNKIKFVVKKPELVISYLPPGMASKINTKALQSPKRPRSPGSNSKVPEIEVTVEGPNNNNPQTSAVRTPTQTNGSNVPFKPRGREFSFEAWNAKITDLKQKVENLFNEKCGEALGLKQAVKVPFALFESFPEDFYVEGLPEGVPFRRPSTFGIPRLEKILRNKAKIKFIIKKPEMFETAIKESTSSKSPPRKINSSPNVNTTASGVEDLNIIQVTIPDDDNERLSKVEKARQLREQVNDLFSRKFGEAIGMGFPVKVPYRKITINPGCVVVDGMPPGVSFKAPSYLEISSMRRILDSAEFIKFTVIRPFPGLVINNQLVDQSESEGPVIQESAEPSQLEVPATEGKRTSSLLG

SEQ ID NO: 4842 - DNA, 7109 bp, Homo sapiens
aaaaaaaaaaaaaaaaaaaaaaaaaaaagaaaaaagaaaaaaaaaaggaggaggaggaggagggtgagagagaagctgggagagcagagaaaaggggccaccggtcgcccccccgcttccccgcacgcgctctccagccgcggccgcccgcctgccgcggtcaccccggcctctgcctctgtcccccagtgatcggatcaaggcgctgagcgaggccctgcctgcggggcggccatgcggcggtgacaggagcgcgaccgacacgcacgggcccctcgccccctctcgcctcccgtccgctcgccagctcccctcagccgaggctgctccgcggcggccgcagcccgcgcgcggcccacactcgcctcccctcggcacccccggccccggagctgcctggaggcggccgcactcggtgtaaagaactggccaagtccaaagccgaagtggcctgcattgcagtgtatgaaacagacgtgtttgtcgtcggaactgaaagaggacgtgcttttgtcaataccagaaaggattttcaaaaagattttgtaaaatattgtgttgaagaagaagaaaaagctgcagagatgcataaaatgaaatctacaacccaggcaaatcggatgagtgtagatgctgtagaaattgaaacactcagaaaaacagttgaggactatttctgcttttgctatgggaaagctttaggcaaatccacagtggtacctgtaccatatgagaagatgctgcgagaccagtcggctgtggtagtgcaggggcttccggaaggtgttgcctttaaacaccccgagaactatgatcttgcaaccctgaaatggattttggagaacaaagcagggatttcattcatcattaagagaccttttttagagccaaagaagcatgtaggtggtcgtgtgatggtaacagatgctgacaggtcaatactatctccaggtggaagttgtggccccatcaaagtgaaaactgaacccacagaagattctggcatttccctggaaatggcagctgtgacagtaaaggaagaatcagaagatcctgattattatcaatataacattcaagcaggcccttctgaaactgatgatgttgatgaaaaacagcccctatcgaagcctttgcaaggaagccaccattcttcagagggcaatgaaggcacagaaatggaagtaccagcagaagatgatgattattctccaccgtctaagagaccaaaggccaatgagctaccgcagccaccagtcccggaacccgccaatgctgggaagcggaaagtgagggagttcaacttcgagaaatggaatgctcgcatcactgatctacgtaaacaagttgaagaattgtttgaaaggaaatatgctcaagccataaaagccaaaggtccggtgacgatcccgtaccctcttttccagtctcatgttgaagatctttatgtagaaggacttcctgaaggaattccttttagaaggccatctacttacggaattcctcgcctggagaggatattacttgcaaaggaaaggattcgttttgtgattaagaaacatgagcttctgaattcaacacgtgaagatttacagcttgataagccagcttcaggagtaaaggaagaatggtatgccagaatcactaaattaagaaagatggtggatcagcttttctgcaaaaaatttgcggaagccttggggagcactgaagccaaggctgtaccgtaccaaaaatttgaggcacacccgaatgatctgtacgtggaaggactgccagaaaacattcctttccgaagtccctcatggtatggaatcccaaggctggaaaaaatcattcaagtgggcaatcgaattaaatttgttattaaaagaccagaacttctgactcacagtaccactgaagttactcagccaagaacgaatacaccagtcaaagaagattggaatgtcagaattaccaagctacggaagcaagtggaagagatttttaatttgaaatttgctcaagctcttggactcaccgaggcagtaaaagtaccatatcctgtgtttgaatcaaacccggagttcttgaaaggatcgtccgcgggagtaataaaatcaagttcgttgttaaaaaacctgaactagttatttcctacttgcctcctgggatggctagtaaaataaacactaaagctttgcagtcccccaaaagaccacgaagtcctgggagtaattcaaaggttcctgaaattgaggtcaccgtggaaggccctaataacaacaatcctcaaacctcagctgttcgaaccccgacccagactaacggttctaacgttcccttcaagccacgagggagagagttttcctttgaggcctggaatgccaaaatcacggacctaaaacagaaagttgaaaatctcttcaatgagaaatgtggggaagctcttggccttaaacaagctgtgaaggtgccgttcgcgttatttgagtctttcccggaagacttttatgtggaaggcttacctgagggtgtgccattccgaagaccatcgacttttggcattccgaggctggagaagatactcagaaacaaagccaaaattaagttcatcattaaaaagcccgaaatgtttgagacggcgattaaggagagcacctcctctaagagccctcccagaaaaataaattcatcacccaatgttaatactactgcatcaggtgttgaagaccttaacatcattcaggtgacaattccagatgatgataatgaaagactctcgaaagttgaaaaagctagacagctaagagaacaagtgaatgacctctttagtcggaaatttggtgaagctattggtatgggttttcctgtgaaagttccctacaggaaaatcacaattaaccctggctgtgtggtggttgatggcatgcccccgggggtgtccttcaaagcccccagctacctggaaatcagctccatgagaaggatcttagactctgccgagtttatcaaattcacggtcattaggtaagtgagagtttcctgcttagtcacaggagcgaatctggagctcatgaggctgactcttctaaaatgcagccacaggtagtcatcgaatccggcttcctatgctgtgcaatcaacaaatcaaaataacttgtgtcatcattagaatgtcagatgtgcttctacgaactaagctgactcttttaattctttggcaaagggttggcaaactaggactgtttgccaaattcaggctgcctcctatttttagagtcttcctgaaacacagctacacccgtattatccatggctgctttcctgtcacagtgagtaagtagctgggactgagaaggcatggcctccaaagtctaaaatatttactctctagcactttgtagaaaaaccttagctaggcacagtggctaacgcctgtaatcccagcattttgggaggccaaggcaggcagatcacctgaggtcaggagttccagaccagcctggccaacatggtgaaatcccatctctacaaaaataaaacagttagctgggcatgatggcgggtgcctgtaatcccagctactcgggaggctgaggcaggatagtcgcttgaacccaggaggtggaggttgcaatgagccaagatcatgccactgcactccagcctggacgacagagtgagactccatcacaagaaaaaaagaactttgtcaacctctgtcttagggcgccttgtcacaggcttcgggtcagacggattcaaccttgcatcagccatttgttagccaggtcactctgttctttgtctgtaaatgagattgatcgttgttcccactgagagtgtcagctccttcccgtagagcaggcatgatgattgtactcacctctgacaccattgtgagtgccacattccttcccacgtccttgtcactgtaagagatgcccacctgagcaccaaccccaggttatcttcccctttgtcttccagccccccagaaacagctacgactcaacctacccaatcatttcatcatcagattgccactgtctctagttcaggtctcttgggactggcactcagaaatctcataataaatcctcttgaggcttctcatacactcgtcttcttccaatcttctttccctcaaaatctcatattttggttccacttcacccaccgtcattctccatatcactcccaggagttaggcaaaaagccccttccgttcttccgtatgttaaacttagaatcactctgttccctgctctgcgtttctattttttgtttttcctccatttactagtagcttaacactttctaacagtgttcttattattgatacgtatctatctcttccataagcttataaggtcacggataatacttctcattgtagtacgtaaatgacgtgggctagatatgagttgaataaacagttatacctgtaaattcttacagagtgaaaataaattgttatactttacaatttgtttctctctttagaccatttccaggacttgtgattaataaccgtgagtattttgtgaagtgttttgtttttgttttttcctggggtctgacgtgtgtgcgtgtgagtgtgtatacatgcttaacgtatatcacgttacttcacctatgtcagtaaccaggccaaatacttgttttagccctcagtaaaaacaccaggcacttcctagttgtaaaattattcaagcttcttaacttcctatcctcgatgcacttaatcataaaatggtaataatagcaccgattttgggggagtcgttccagtagatggaaagcatctggaacaggtgtcagcaagctcctgccgacgtgtatgcataaagttttattgaaaccaccatcgtgtccatttgtttatggcagaactgagagatggcagcagcaagtgtgtgcctgcaaaacctaaaatatttactaattggctctgcaagaaaagagtttgcatccccctaacctagaacagtgtctagcctctagtatgtgtttagcctacagtatgtgctcagcgaatacaatctatatttattactgcttttatgactgttataattactgtgcttggatttcgttacaaagtaagtcacaatgtgcctgcttctgttagtatttcagcacagtgcctggcacacatggggctctcaaatattgctgagcgagtgaacaaatgtcctttcaattccttaacgttgatgtcattttcaatagtattttgagccaaacttaattttgcgagtgtgttttgttttcttaactttattattaaaaatgtataaaagtgaggccaggcgtggtggctcacgcctgtaatcccagcagtttgggaggctgaggcaggcggatcagttgaggttgggagttggagaccagcccgtccaacatggtgaaagcctgtctctactaaaaatacaaaaatcagctgggtgtggtggcgcgtgcctgtaatcccagctactcaggaggctgaggcaggagagttgcttgaatcctagaggtggaggttgcagtgagctgagatcgtgccattgcactccagcctgggcaacaagagcaaaactctgtcccaataaataaataaataaaatgttctcttttgttcctgttcttgtgcggtagtgtggtatagagttttatggtaattactgtgaattagtgattctgagggacatatcagaactctgaggtttgtttccttctcatcttgagggaaacagcaaatgtatgttaaaatgcttttccaagggaacaacacatccttacattatttaaaccaatctgcttcattttcagagctggttgatcagagtgagtcagaaggccccgtgatacaagaatcagctgaaccaagccagttggaagttccagccacagaagaaataaaagagactgatggaagctctcagatcaagcaagaaccagaccccacgtggtagacctcttccctcctaggcttaaagtatcagtggttgagaagagcttttcggacctgttactaccccaagctgtgtaatatacttgtataacagaaataccttctatacaaacctttttttctacttttagatagaaatgtctactttttcagcagttctgtgaattaaagagcagagtgactgtgggtctggaatggctggtgtacttgggaatgtactatcaggattttacagcaatgctgggaaatgacagggaaaatgacaggaatgaatctcaccagattttttatgtactcagcagagccttgagttacggtgtttattttccaatcaagtgaagatatctcctacttctcctactggaacatctcagcttctgcagtgaagaaaaattcctgtgatagttcagttctttagtttttctatttgaaaaaaaaaaatcatttaaatgatcctttgttcacggctctccttaatgactgagtgaacagttcctatctgtatatttgactaaaccttttcctaagctatctctcatggttcctatgtttttttatcataattaaaagcaaaaccatctggatcacctaacagtcagaggtcagtatctcagcgtgtgaattatagaggaaatacagagagaacctcttccacttttacttttcgtccaaataaaatgcatggtgtaccagaagttgaagatcgggttgaggattggggctagctcgatgacactaaggccccaacatcgcgggacctgctgtggcgcggattcttaggaacgctgttctagccggccccctctccaggggtcgccgtggccggcattatttcctagttcttcttgtaaccctgaggtgccagcgcggggagtgaggaggggtcagggggctaaggatgcaacctctgacgttctgcgccttcctaggagagtcttacatgtgttgagatttcacaagcaatgcgagttgtaaaataccagctctacaagaagctaggctctgtgacggcatagttttcagtagctttatcacaatattcacaatggagaattatatgacatggtagcagaaataggcccttttatgtgttgcttctattttacctcaaattgtagatatagggtaatcaataaaatccatccatgcctttcacacactaagt

SEQ ID NO: 4843 - protein, 515 aa, Homo sapiens; identical to SEQ ID NO: 4501

SEQ ID NO: 4844 - DNA, 3731 bp, Homo sapiens
aaaaaaaaaaaaaaaaaaaaaaaaaaaagaaaaaagaaaaaaaaaaggaggaggaggaggagggtgagagagaagctgggagagcagagaaaaggggccaccggtcgcccccccgcttccccgcacgcgctctccagccgcggccgcccgcctgccgcggtcaccccggcctctgcctctgtcccccagtgatcggatcaaggcgctgagcgaggccctgcctgcggggcggccatgcggcggtgacaggagcgcgaccgacacgcacgggcccctcgccccctctcgcctcccgtccgctcgccagctcccctcagccgaggctgctccgcggcggccgcagcccgcgcgcggcccacactcgcctcccctcggcacccccggccccggagctgcctggaggcggccgcactcggtgtaaagaactggccaagtccaaagccgaagtggcctgcattgcagtgtatgaaacagacgtgtttgtcgtcggaactgaaagaggacgtgcttttgtcaataccagaaaggattttcaaaaagattttgtaaaatattgtgttgaagaagaagaaaaagctgcagagatgcataaaatgaaatctacaacccaggcaaatcggatgagtgtagatgctgtagaaattgaaacactcagaaaaacagttgaggactatttctgcttttgctatgggaaagctttaggcaaatccacagtggtacctgtaccatatgagaagatgctgcgagaccagtcggctgtggtagtgcaggggcttccggaaggtgttgcctttaaacaccccgagaactatgatcttgcaaccctgaaatggattttggagaacaaagcagggatttcattcatcattaagagaccttttttagagccaaagaagcatgtaggtggtcgtgtgatggtaacagatgctgacaggtcaatactatctccaggtggaagttgtggccccatcaaagtgaaaactgaacccacagaagattctggcatttccctggaaatggcagctgtgacagtaaaggaagaatcagaagatcctgattattatcaatataacattcaaggaagccaccattcttcagagggcaatgaaggcacagaaatggaagtaccagcagaagatgatgattattctccaccgtctaagagaccaaaggccaatgagctaccgcagccaccagtcccggaacccgccaatgctgggaagcggaaagtgagggagttcaacttcgagaaatggaatgctcgcatcactgatctacgtaaacaagttgaagaattgtttgaaaggaaatatgctcaagccataaaagccaaaggtccggtgacgatcccgtaccctcttttccagtctcatgttgaagatctttatgtagaaggacttcctgaaggaattccttttagaaggccatctacttacggaattcctcgcctggagaggatattacttgcaaaggaaaggattcgttttgtgattaagaaacatgagcttctgaattcaacacgtgaagatttacagcttgataagccagcttcaggagtaaaggaagaatggtatgccagaatcactaaattaagaaagatggtggatcagcttttctgcaaaaaatttgcggaagccttggggagcactgaagccaaggctgtaccgtaccaaaaatttgaggcacacccgaatgatctgtacgtggaaggactgccagaaaacattcctttccgaagtccctcatggtatggaatcccaaggctggaaaaaatcattcaagtgggcaatcgaattaaatttgttattaaaagaccagaacttctgactcacagtaccactgaagttactcagccaagaacgaatacaccagctcaagctcttggactcaccgaggcagtaaaagtaccatatcctgtgtttgaatcaaacccggagttcttgtatgtggaaggcttgccagaggggattcccttccgaagccctacctggtttggaattccacgacttgaaaggatcgtccgcgggagtaataaaatcaagttcgttgttaaaaaacctgaactagttatttcctacttgcctcctgggatggctagtaaaataaacactaaagctttgcagtcccccaaaagaccacgaagtcctgggagtaattcaaaggttcctgaaattgaggtcaccgtggaaggccctaataacaacaatcctcaaacctcagctgttcgaaccccgacccagactaacggttctaacgttcccttcaagccacgagggagagagttttcctttgaggcctggaatgccaaaatcacggacctaaaacagaaagttgaaaatctcttcaatgagaaatgtggggaagctcttggccttaaacaagctgtgaaggtgccgttcgcgttatttgagtctttcccggaagacttttatgtggaaggcttacctgagggtgtgccattccgaagaccatcgacttttggcattccgaggctggagaagatactcagaaacaaagccaaaattaagttcatcattaaaaagcccgaaatgtttgagacggcgattaaggagagcacctcctctaagagccctcccagaaaaataaattcatcacccaatgttaatactactgcatcaggtgttgaagaccttaacatcattcaggtgacaattccagatgatgataatgaaagactctcgaaagttgaaaaagctagacagctaagagaacaagtgaatgacctctttagtcggaaatttggtgaagctattggtatgggttttcctgtgaaagttccctacaggaaaatcacaattaaccctggctgtgtggtggttgatggcatgcccccgggggtgtccttcaaagcccccagctacctggaaatcagctccatgagaaggatcttagactctgccgagtttatcaaattcacggtcattagaccatttccaggacttgtgattaataaccagctggttgatcagagtgagtcagaaggccccgtgatacaagaatcagctgaaccaagccagttggaagttccagccacagaagaaataaaagagactgatggaagctctcagatcaagcaagaaccagaccccacgtggtagacctcttccctcctaggcaaaaccatctggatcacctaacagtcagaggtcagtatctcagcgtgtgaattatagaggaaatacagagagaacctcttccacttttacttttcgtccaaataaaatgcatggtgtaccagaagttgaagatcgggttgaggattggggctagctcgatgacactaaggccccaacatcgcgggacctgctgtggcgcggattcttaggaacgctgttctagccggccccctctccaggggtcgccgtggccggcattatttcctagttcttcttgtaaccctgaggtgccagcgcggggagtgaggaggggtcagggggctaaggatgcaacctctgacgttctgcgccttcctaggagagtcttacatgtgttgagatttcacaagcaatgcgagttgtaaaataccagctctacaagaagctaggctctgtgacggcatagttttcagtagctttatcacaatattcacaatggagaattatatgacatggtagcagaaataggcccttttatgtgttgcttctattttacctcaaattgtagatatagggtaatcaataaaatccatccatgcctttcacacactaagt

SEQ ID NO: 4845 - protein, 844 aa, Homo sapiens; identical to SEQ ID NO: 4247

SEQ ID NO: 4846 - DNA, 4112 bp, Homo sapiens
aaaaaaaaaaaaaaaaaaaaaaaaaaaagaaaaaagaaaaaaaaaaggaggaggaggaggagggtgagagagaagctgggagagcagagaaaaggggccaccggtcgcccccccgcttccccgcacgcgctctccagccgcggccgcccgcctgccgcggtcaccccggcctctgcctctgtcccccagtgatcggatcaaggcgctgagcgaggccctgcctgcggggcggccatgcggcggtgacaggagcgcgaccgacacgcacgggcccctcgccccctctcgcctcccgtccgctcgccagctcccctcagccgaggctgctccgcggcggccgcagcccgcgcgcggcccacactcgcctcccctcggcacccccggccccggagctgcctggaggcggccgcactcggtgtaaagaactggccaagtccaaagccgaagtggcctgcattgcagtgtatgaaacagacgtgtttgtcgtcggaactgaaagaggacgtgcttttgtcaataccagaaaggattttcaaaaagattttgtaaaatattgtgttgaagaagaagaaaaagctgcagagatgcataaaatgaaatctacaacccaggcaaatcggatgagtgtagatgctgtagaaattgaaacactcagaaaaacagttgaggactatttctgcttttgctatgggaaagctttaggcaaatccacagtggtacctgtaccatatgagaagatgctgcgagaccagtcggctgtggtagtgcaggggcttccggaaggtgttgcctttaaacaccccgagaactatgatcttgcaaccctgaaatggattttggagaacaaagcagggatttcattcatcattaagagaccttttttagagccaaagaagcatgtaggtggtcgtgtgatggtaacagatgctgacaggtcaatactatctccaggtggaagttgtggccccatcaaagtgaaaactgaacccacagaagattctggaagccaccattcttcagagggcaatgaaggcacagaaatggaagtaccagcagaagattctactcaacatgtcccttcagaaacaagtgaggaccctgaagttgaggtgactattgaagatgatgattattctccaccgtctaagagaccaaaggccaatgagctaccgcagccaccagtcccggaacccgccaatgctgggaagcggaaagtgagggagttcaacttcgagaaatggaatgctcgcatcactgatctacgtaaacaagttgaagaattgtttgaaaggaaatatgctcaagccataaaagccaaaggtccggtgacgatcccgtaccctcttttccagtctcatgttgaagatctttatgtagaaggacttcctgaaggaattccttttagaaggccatctacttacggaattcctcgcctggagaggatattacttgcaaaggaaaggattcgttttgtgattaagaaacatgagcttctgaattcaacacgtgaagatttacagcttgataagccagcttcaggagtaaaggaagaatggtatgccagaatcactaaattaagaaagatggtggatcagcttttctgcaaaaaatttgcggaagccttggggagcactgaagccaaggctgtaccgtaccaaaaatttgaggcacacccgaatgatctgtacgtggaaggactgccagaaaacattcctttccgaagtccctcatggtatggaatcccaaggctggaaaaaatcattcaagtgggcaatcgaattaaatttgttattaaaagaccagaacttctgactcacagtaccactgaagttactcagccaagaacgaatacaccagtcaaagaagattggaatgtcagaattaccaagctacggaagcaagtggaagagatttttaatttgaaatttgctcaagctcttggactcaccgaggcagtaaaagtaccatatcctgtgtttgaatcaaacccggagttcttgtatgtggaaggcttgccagaggggattcccttccgaagccctacctggtttggaattccacgacttgaaaggatcgtccgcgggagtaataaaatcaagttcgttgttaaaaaacctgaactagttatttcctacttgcctcctgggatggctagtaaaataaacactaaagctttgcagtcccccaaaagaccacgaagtcctgggagtaattcaaaggttcctgaaattgaggtcaccgtggaaggccctaataacaacaatcctcaaacctcagctgttcgaaccccgacccagactaacggttctaacgttcccttcaagccacgagggagagagttttcctttgaggcctggaatgccaaaatcacggacctaaaacagaaagttgaaaatctcttcaatgagaaatgtggggaagctcttggccttaaacaagctgtgaaggtgccgttcgcgttatttgagtctttcccggaagacttttatgtggaaggcttacctgagggtgtgccattccgaagaccatcgacttttggcattccgaggctggagaagatactcagaaacaaagccaaaattaagttcatcattaaaaagcccgaaatgtttgagacggcgattaaggagagcacctcctctaagagccctcccagaaaaataaattcatcacccaatgttaatactactgcatcaggtgttgaagaccttaacatcattcaggtgacaattccagatgatgataatgaaagactctcgaaagttgaaaaagctagacagctaagagaacaagtgaatgacctctttagtcggaaatttggtgaagctattggtatgggttttcctgtgaaagttccctacaggaaaatcacaattaaccctggctgtgtggtggttgatggcatgcccccgggggtgtccttcaaagcccccagctacctggaaatcagctccatgagaaggatcttagactctgccgagtttatcaaattcacggtcattagaccatttccaggacttgtgattaataaccagctggttgatcagagtgagtcagaaggccccgtgatacaagaatcagctgaaccaagccagttggaagttccagccacagaagaaataaaagagactgatggaagctctcagatcaagcaagaaccagaccccacgtggtagacctcttccctcctaggcttaaagtatcagtggttgagaagagcttttcggacctgttactaccccaagctgtagccttgagttacggtgtttattttccaatcaagtgaagatatctcctacttctcctactggaacatctcagcttctgcagtgaagaaaaattcctgtgatagttcagttctttagtttttctatttgaaaaaaaaaaatcatttaaatgatcctttgttcacggctctccttaatgactgagtgaacagttcctatctgtatatttgactaaaccttttcctaagctatctctcatggttcctatgtttttttatcataattaaaagcaaaaccatctggatcacctaacagtcagaggtcagtatctcagcgtgtgaattatagaggaaatacagagagaacctcttccacttttacttttcgtccaaataaaatgcatggtgtaccagaagttgaagatcgggttgaggattggggctagctcgatgacactaaggccccaacatcgcgggacctgctgtggcgcggattcttaggaacgctgttctagccggccccctctccaggggtcgccgtggccggcattatttcctagttcttcttgtaaccctgaggtgccagcgcggggagtgaggaggggtcagggggctaaggatgcaacctctgacgttctgcgccttcctaggagagtcttacatgtgttgagatttcacaagcaatgcgagttgtaaaataccagctctacaagaagctaggctctgtgacggcatagttttcagtagctttatcacaatattcacaatggagaattatatgacatggtagcagaaataggcccttttatgtgttgcttctattttacctcaaattgtagatatagggtaatcaataaaatccatccatgcctttcacacactaagt

SEQ ID NO: 4847 - protein, 863 aa, Homo sapiens; identical to SEQ ID NO: 4039

SEQ ID NO: 4848 - DNA, 4064 bp, Homo sapiens
aaaaaaaaaaaaaaaaaaaaaaaaaaaagaaaaaagaaaaaaaaaaggaggaggaggaggagggtgagagagaagctgggagagcagagaaaaggggccaccggtcgcccccccgcttccccgcacgcgctctccagccgcggccgcccgcctgccgcggtcaccccggcctctgcctctgtcccccagtgatcggatcaaggcgctgagcgaggccctgcctgcggggcggccatgcggcggtgacaggagcgcgaccgacacgcacgggcccctcgccccctctcgcctcccgtccgctcgccagctcccctcagccgaggctgctccgcggcggccgcagcccgcgcgcggcccacactcgcctcccctcggcacccccggccccggagctgcctggaggcggccgcactcggtgtaaagaactggccaagtccaaagccgaagtggcctgcattgcagtgtatgaaacagacgtgtttgtcgtcggaactgaaagaggacgtgcttttgtcaataccagaaaggattttcaaaaagattttgtaaaatattgtgttgaagaagaagaaaaagctgcagagatgcataaaatgaaatctacaacccaggcaaatcggatgagtgtagatgctgtagaaattgaaacactcagaaaaacagttgaggactatttctgcttttgctatgggaaagctttaggcaaatccacagtggtacctgtaccatatgagaagatgctgcgagaccagtcggctgtggtagtgcaggggcttccggaaggtgttgcctttaaacaccccgagaactatgatcttgcaaccctgaaatggattttggagaacaaagcagggatttcattcatcattaagagaccttttttagagccaaagaagcatgtaggtggtcgtgtgatggtaacagatgctgacaggtcaatactatctccaggtggaagttgtggccccatcaaagtgaaaactgaacccacagaagattctggcatttccctggaaatggcagctgtgacagtaaaggaagaatcagaagatcctgattattatcaatataacattcaagcaggcccttctgaaactgatgatgttgatgaaaaacagcccctatcgaagcctttgcaaggaagccaccattcttcagagggcaatgaaggcacagaaatggaagtaccagcagaagatgatgattattctccaccgtctaagagaccaaaggccaatgagctaccgcagccaccagtcccggaacccgccaatgctgggaagcggaaagtgagggagttcaacttcgagaaatggaatgctcgcatcactgatctacgtaaacaagttgaagaattgtttgaaaggaaatatgctcaagccataaaagccaaaggtccggtgacgatcccgtaccctcttttccagtctcatgttgaagatctttatgtagaaggacttcctgaaggaattccttttagaaggccatctacttacggaattcctcgcctggagaggatattacttgcaaaggaaaggattcgttttgtgattaagaaacatgagcttctgaattcaacacgtgaagatttacagcttgataagccagcttcaggagtaaaggaagaatggtatgccagaatcactaaattaagaaagatggtggatcagcttttctgcaaaaaatttgcggaagccttggggagcactgaagccaaggctgtaccgtaccaaaaatttgaggcacacccgaatgatctgtacgtggaaggactgccagaaaacattcctttccgaagtccctcatggtatggaatcccaaggctggaaaaaatcattcaagtgggcaatcgaattaaatttgttattaaaagaccagaacttctgactcacagtaccactgaagttactcagccaagaacgaatacaccagtcaaagaagattggaatgtcagaattaccaagctacggaagcaagtggaagagatttttaatttgaaatttgctcaagctcttggactcaccgaggcagtaaaagtaccatatcctgtgtttgaatcaaacccggagttcttgaaaggatcgtccgcgggagtaataaaatcaagttcgttgttaaaaaacctgaactagttatttcctacttgcctcctgggatggctagtaaaataaacactaaagctttgcagtcccccaaaagaccacgaagtcctgggagtaattcaaaggttcctgaaattgaggtcaccgtggaaggccctaataacaacaatcctcaaacctcagctgttcgaaccccgacccagactaacggttctaacgttcccttcaagccacgagggagagagttttcctttgaggcctggaatgccaaaatcacggacctaaaacagaaagttgaaaatctcttcaatgagaaatgtggggaagctcttggccttaaacaagctgtgaaggtgccgttcgcgttatttgagtctttcccggaagacttttatgtggaaggcttacctgagggtgtgccattccgaagaccatcgacttttggcattccgaggctggagaagatactcagaaacaaagccaaaattaagttcatcattaaaaagcccgaaatgtttgagacggcgattaaggagagcacctcctctaagagccctcccagaaaaataaattcatcacccaatgttaatactactgcatcaggtgttgaagaccttaacatcattcaggtgacaattccagatgatgataatgaaagactctcgaaagttgaaaaagctagacagctaagagaacaagtgaatgacctctttagtcggaaatttggtgaagctattggtatgggttttcctgtgaaagttccctacaggaaaatcacaattaaccctggctgtgtggtggttgatggcatgcccccgggggtgtccttcaaagcccccagctacctggaaatcagctccatgagaaggatcttagactctgccgagtttatcaaattcacggtcattagaccatttccaggacttgtgattaataaccagctggttgatcagagtgagtcagaaggccccgtgatacaagaatcagctgaaccaagccagttggaagttccagccacagaagaaataaaagagactgatggaagctctcagatcaagcaagaaccagaccccacgtggtagacctcttccctcctaggagccttgagttacggtgtttattttccaatcaagtgaagatatctcctacttctcctactggaacatctcagcttctgcagtgaagaaaaattcctgtgatagttcagttctttagtttttctatttgaaaaaaaaaaatcatttaaatgatcctttgttcacggctctccttaatgactgagtgaacagttcctatctgtatatttgactaaaccttttcctaagctatctctcatggttcctatgtttttttatcataattaaaagcaaaaccatctggatcacctaacagtcagaggtcagtatctcagcgtgtgaattatagaggaaatacagagagaacctcttccacttttacttttcgtccaaataaaatgcatggtgtaccagaagttgaagatcgggttgaggattggggctagctcgatgacactaaggccccaacatcgcgggacctgctgtggcgcggattcttaggaacgctgttctagccggccccctctccaggggtcgccgtggccggcattatttcctagttcttcttgtaaccctgaggtgccagcgcggggagtgaggaggggtcagggggctaaggatgcaacctctgacgttctgcgccttcctaggagagtcttacatgtgttgagatttcacaagcaatgcgagttgtaaaataccagctctacaagaagctaggctctgtgacggcatagttttcagtagctttatcacaatattcacaatggagaattatatgacatggtagcagaaataggcccttttatgtgttgcttctattttacctcaaattgtagatatagggtaatcaataaaatccatccatgcctttcacacactaagt

SEQ ID NO: 4849 - protein, 515 aa, Homo sapiens; identical to SEQ ID NO: 4501

SEQ ID NO: 4850 - DNA, 4171 bp, Homo sapiens
aaaaaaaaaaaaaaaaaaaaaaaaaaaagaaaaaagaaaaaaaaaaggaggaggaggaggagggtgagagagaagctgggagagcagagaaaaggggccaccggtcgcccccccgcttccccgcacgcgctctccagccgcggccgcccgcctgccgcggtcaccccggcctctgcctctgtcccccagtgatcggatcaaggcgctgagcgaggccctgcctgcggggcggccatgcggcggtgacaggagcgcgaccgacacgcacgggcccctcgccccctctcgcctcccgtccgctcgccagctcccctcagccgaggctgctccgcggcggccgcagcccgcgcgcggcccacactcgcctcccctcggcacccccggccccggagctgcctggaggcggccgcactcggggatcatggcccaagttgcaatgtccaccctccccgttgaagatgaggagtcctcggagagcaggatggtggtgacattcctcatgtcagctctcgagtccatgtgtaaagaactggccaagtccaaagccgaagtggcctgcattgcagtgtatgaaacagacgtgtttgtcgtcggaactgaaagaggacgtgcttttgtcaataccagaaaggattttcaaaaagattttgtaaaatattgtgttgaagaagaagaaaaagctgcagagatgcataaaatgaaatctacaacccaggcaaatcggatgagtgtagatgctgtagaaattgaaacactcagaaaaacagttgaggactatttctgcttttgctatgggaaagctttaggcaaatccacagtggtacctgtaccatatgagaagatgctgcgagaccagtcggctgtggtagtgcaggggcttccggaaggtgttgcctttaaacaccccgagaactatgatcttgcaaccctgaaatggattttggagaacaaagcagggatttcattcatcattaagagaccttttttagagccaaagaagcatgtaggtggtcgtgtgatggtaacagatgctgacaggtcaatactatctccaggtggaagttgtggccccatcaaagtgaaaactgaacccacagaagattctggcatttccctggaaatggcagctgtgacagtaaaggaagaatcagaagatcctgattattatcaatataacattcaaggaagccaccattcttcagagggcaatgaaggcacagaaatggaagtaccagcagaagattctactcaacatgtcccttcagaaacaagtgaggaccctgaagttgaggtgactattgaagatgatgattattctccaccgtctaagagaccaaaggccaatgagctaccgcagccaccagtcccggaacccgccaatgctgggaagcggaaagtgagggagttcaacttcgagaaatggaatgctcgcatcactgatctacgtaaacaagttgaagaattgtttgaaaggaaatatgctcaagccataaaagccaaaggtccggtgacgatcccgtaccctcttttccagtctcatgttgaagatctttatgtagaaggacttcctgaaggaattccttttagaaggccatctacttacggaattcctcgcctggagaggatattacttgcaaaggaaaggattcgttttgtgattaagaaacatgagcttctgaattcaacacgtgaagatttacagcttgataagccagcttcaggagtaaaggaagaatggtatgccagaatcactaaattaagaaagatggtggatcagcttttctgcaaaaaatttgcggaagccttggggagcactgaagccaaggctgtaccgtaccaaaaatttgaggcacacccgaatgatctgtacgtggaaggactgccagaaaacattcctttccgaagtccctcatggtatggaatcccaaggctggaaaaaatcattcaagtgggcaatcgaattaaatttgttattaaaagaccagaacttctgactcacagtaccactgaagttactcagccaagaacgaatacaccagtcaaagaagattggaatgtcagaattaccaagctacggaagcaagtggaagagatttttaatttgaaatttgctcaagctcttggactcaccgaggcagtaaaagtaccatatcctgtgtttgaatcaaacccggagttcttgaaaggatcgtccgcgggagtaataaaatcaagttcgttgttaaaaaacctgaactagttatttcctacttgcctcctgggatggctagtaaaataaacactaaagctttgcagtcccccaaaagaccacgaagtcctgggagtaattcaaaggttcctgaaattgaggtcaccgtggaaggccctaataacaacaatcctcaaacctcagctgttcgaaccccgacccagactaacggttctaacgttcccttcaagccacgagggagagagttttcctttgaggcctggaatgccaaaatcacggacctaaaacagaaagttgaaaatctcttcaatgagaaatgtggggaagctcttggccttaaacaagctgtgaaggtgccgttcgcgttatttgagtctttcccggaagacttttatgtggaaggcttacctgagggtgtgccattccgaagaccatcgacttttggcattccgaggctggagaagatactcagaaacaaagccaaaattaagttcatcattaaaaagcccgaaatgtttgagacggcgattaaggagagcacctcctctaagagccctcccagaaaaataaattcatcacccaatgttaatactactgcatcaggtgttgaagaccttaacatcattcaggtgacaattccagatgatgataatgaaagactctcgaaagttgaaaaagctagacagctaagagaacaagtgaatgacctctttagtcggaaatttggtgaagctattggtatgggttttcctgtgaaagttccctacaggaaaatcacaattaaccctggctgtgtggtggttgatggcatgcccccgggggtgtccttcaaagcccccagctacctggaaatcagctccatgagaaggatcttagactctgccgagtttatcaaattcacggtcattagaccatttccaggacttgtgattaataaccagctggttgatcagagtgagtcagaaggccccgtgatacaagaatcagctgaaccaagccagttggaagttccagccacagaagaaataaaagagactgatggaagctctcagatcaagcaagaaccagaccccacgtggtagacctcttccctcctaggagccttgagttacggtgtttattttccaatcaagtgaagatatctcctacttctcctactggaacatctcagcttctgcagtgaagaaaaattcctgtgatagttcagttctttagtttttctatttgaaaaaaaaaaatcatttaaatgatcctttgttcacggctctccttaatgactgagtgaacagttcctatctgtatatttgactaaaccttttcctaagctatctctcatggttcctatgtttttttatcataattaaaagcaaaaccatctggatcacctaacagtcagaggtcagtatctcagcgtgtgaattatagaggaaatacagagagaacctcttccacttttacttttcgtccaaataaaatgcatggtgtaccagaagttgaagatcgggttgaggattggggctagctcgatgacactaaggccccaacatcgcgggacctgctgtggcgcggattcttaggaacgctgttctagccggccccctctccaggggtcgccgtggccggcattatttcctagttcttcttgtaaccctgaggtgccagcgcggggagtgaggaggggtcagggggctaaggatgcaacctctgacgttctgcgccttcctaggagagtcttacatgtgttgagatttcacaagcaatgcgagttgtaaaataccagctctacaagaagctaggctctgtgacggcatagttttcagtagctttatcacaatattcacaatggagaattatatgacatggtagcagaaataggcccttttatgtgttgcttctattttacctcaaattgtagatatagggtaatcaataaaatccatccatgcctttcacacactaagt

SEQ ID NO: 4851 - protein, 605 aa, Homo sapiens; identical to SEQ ID NO: 4221

SEQ ID NO: 4852 - DNA, 4103 bp, Homo sapiens
aaaaaaaaaaaaaaaaaaaaaaaaaaaagaaaaaagaaaaaaaaaaggaggaggaggaggagggtgagagagaagctgggagagcagagaaaaggggccaccggtcgcccccccgcttccccgcacgcgctctccagccgcggccgcccgcctgccgcggtcaccccggcctctgcctctgtcccccagtgatcggatcaaggcgctgagcgaggccctgcctgcggggcggccatgcggcggtgacaggagcgcgaccgacacgcacgggcccctcgccccctctcgcctcccgtccgctcgccagctcccctcagccgaggctgctccgcggcggccgcagcccgcgcgcggcccacactcgcctcccctcggcacccccggccccggagctgcctggaggcggccgcactcggggatcatggcccaagttgcaatgtccaccctccccgttgaagatgaggagtcctcggagagcaggatggtggtgacattcctcatgtcagctctcgagtccatgtgtaaagaactggccaagtccaaagccgaagtggcctgcattgcagtgtatgaaacagacgtgtttgtcgtcggaactgaaagaggacgtgcttttgtcaataccagaaaggattttcaaaaagattttgtaaaatattgtgttgaagaagaagaaaaagctgcagagatgcataaaatgaaatctacaacccaggcaaatcggatgagtgtagatgctgtagaaattgaaacactcagaaaaacagttgaggactatttctgcttttgctatgggaaagctttaggcaaatccacagtggtacctgtaccatatgagaagatgctgcgagaccagtcggctgtggtagtgcaggggcttccggaaggtgttgcctttaaacaccccgagaactatgatcttgcaaccctgaaatggattttggagaacaaagcagggatttcattcatcattaagagaccttttttagagccaaagaagcatgtaggtggtcgtgtgatggtaacagatgctgacaggtcaatactatctccaggtggaagttgtggccccatcaaagtgaaaactgaacccacagaagattctggcatttccctggaaatggcagctgtgacagtaaaggaagaatcagaagatcctgattattatcaatataacattcaaggaagccaccattcttcagagggcaatgaaggcacagaaatggaagtaccagcagaagatgatgattattctccaccgtctaagagaccaaaggccaatgagctaccgcagccaccagtcccggaacccgccaatgctgggaagcggaaagtgagggagttcaacttcgagaaatggaatgctcgcatcactgatctacgtaaacaagttgaagaattgtttgaaaggaaatatgctcaagccataaaagccaaaggtccggtgacgatcccgtaccctcttttccagtctcatgttgaagatctttatgtagaaggacttcctgaaggaattccttttagaaggccatctacttacggaattcctcgcctggagaggatattacttgcaaaggaaaggattcgttttgtgattaagaaacatgagcttctgaattcaacacgtgaagatttacagcttgataagccagcttcaggagtaaaggaagaatggtatgccagaatcactaaattaagaaagatggtggatcagcttttctgcaaaaaatttgcggaagccttggggagcactgaagccaaggctgtaccgtaccaaaaatttgaggcacacccgaatgatctgtacgtggaaggactgccagaaaacattcctttccgaagtccctcatggtatggaatcccaaggctggaaaaaatcattcaagtgggcaatcgaattaaatttgttattaaaagaccagaacttctgactcacagtaccactgaagttactcagccaagaacgaatacaccagctcaagctcttggactcaccgaggcagtaaaagtaccatatcctgtgtttgaatcaaacccggagttcttgtatgtggaaggcttgccagaggggattcccttccgaagccctacctggtttggaattccacgacttgaaaggatcgtccgcgggagtaataaaatcaagttcgttgttaaaaaacctgaactagttatttcctacttgcctcctgggatggctagtaaaataaacactaaagctttgcagtcccccaaaagaccacgaagtcctgggagtaattcaaaggttcctgaaattgaggtcaccgtggaaggccctaataacaacaatcctcaaacctcagctgttcgaaccccgacccagactaacggttctaacgttcccttcaagccacgagggagagagttttcctttgaggcctggaatgccaaaatcacggacctaaaacagaaagttgaaaatctcttcaatgagaaatgtggggaagctcttggccttaaacaagctgtgaaggtgccgttcgcgttatttgagtctttcccggaagacttttatgtggaaggcttacctgagggtgtgccattccgaagaccatcgacttttggcattccgaggctggagaagatactcagaaacaaagccaaaattaagttcatcattaaaaagcccgaaatgtttgagacggcgattaaggagagcacctcctctaagagccctcccagaaaaataaattcatcacccaatgttaatactactgcatcaggtgttgaagaccttaacatcattcaggtgacaattccagatgatgataatgaaagactctcgaaagttgaaaaagctagacagctaagagaacaagtgaatgacctctttagtcggaaatttggtgaagctattggtatgggttttcctgtgaaagttccctacaggaaaatcacaattaaccctggctgtgtggtggttgatggcatgcccccgggggtgtccttcaaagcccccagctacctggaaatcagctccatgagaaggatcttagactctgccgagtttatcaaattcacggtcattagaccatttccaggacttgtgattaataaccagctggttgatcagagtgagtcagaaggccccgtgatacaagaatcagctgaaccaagccagttggaagttccagccacagaagaaataaaagagactgatggaagctctcagatcaagcaagaaccagaccccacgtggtagacctcttccctcctaggagccttgagttacggtgtttattttccaatcaagtgaagatatctcctacttctcctactggaacatctcagcttctgcagtgaagaaaaattcctgtgatagttcagttctttagtttttctatttgaaaaaaaaaaatcatttaaatgatcctttgttcacggctctccttaatgactgagtgaacagttcctatctgtatatttgactaaaccttttcctaagctatctctcatggttcctatgtttttttatcataattaaaagcaaaaccatctggatcacctaacagtcagaggtcagtatctcagcgtgtgaattatagaggaaatacagagagaacctcttccacttttacttttcgtccaaataaaatgcatggtgtaccagaagttgaagatcgggttgaggattggggctagctcgatgacactaaggccccaacatcgcgggacctgctgtggcgcggattcttaggaacgctgttctagccggccccctctccaggggtcgccgtggccggcattatttcctagttcttcttgtaaccctgaggtgccagcgcggggagtgaggaggggtcagggggctaaggatgcaacctctgacgttctgcgccttcctaggagagtcttacatgtgttgagatttcacaagcaatgcgagttgtaaaataccagctctacaagaagctaggctctgtgacggcatagttttcagtagctttatcacaatattcacaatggagaattatatgacatggtagcagaaataggcccttttatgtgttgcttctattttacctcaaattgtagatatagggtaatcaataaaatccatccatgcctttcacacactaagt

SEQ ID NO: 4853 - protein, 933 aa, Homo sapiens; identical to SEQ ID NO: 4067

SEQ ID NO: 4854 - DNA, 4235 bp, Homo sapiens
aaaaaaaaaaaaaaaaaaaaaaaaaaaagaaaaaagaaaaaaaaaaggaggaggaggaggagggtgagagagaagctgggagagcagagaaaaggggccaccggtcgcccccccgcttccccgcacgcgctctccagccgcggccgcccgcctgccgcggtcaccccggcctctgcctctgtcccccagtgatcggatcaaggcgctgagcgaggccctgcctgcggggcggccatgcggcggtgacaggagcgcgaccgacacgcacgggcccctcgccccctctcgcctcccgtccgctcgccagctcccctcagccgaggctgctccgcggcggccgcagcccgcgcgcggcccacactcgcctcccctcggcacccccggccccggagctgcctggaggcggccgcactcggggatcatggcccaagttgcaatgtccaccctccccgttgaagatgaggagtcctcggagagcaggatggtggtgacattcctcatgtcagctctcgagtccatgtgtaaagaactggccaagtccaaagccgaagtggcctgcattgcagtgtatgaaacagacgtgtttgtcgtcggaactgaaagaggacgtgcttttgtcaataccagaaaggattttcaaaaagattttgtaaaatattgtgttgaagaagaagaaaaagctgcagagatgcataaaatgaaatctacaacccaggcaaatcggatgagtgtagatgctgtagaaattgaaacactcagaaaaacagttgaggactatttctgcttttgctatgggaaagctttaggcaaatccacagtggtacctgtaccatatgagaagatgctgcgagaccagtcggctgtggtagtgcaggggcttccggaaggtgttgcctttaaacaccccgagaactatgatcttgcaaccctgaaatggattttggagaacaaagcagggatttcattcatcattaagagaccttttttagagccaaagaagcatgtaggtggtcgtgtgatggtaacagatgctgacaggtcaatactatctccaggtggaagttgtggccccatcaaagtgaaaactgaacccacagaagattctggcatttccctggaaatggcagctgtgacagtaaaggaagaatcagaagatcctgattattatcaatataacattcaagcaggcccttctgaaactgatgatgttgatgaaaaacagcccctatcgaagcctttgcaaggaagccaccattcttcagagggcaatgaaggcacagaaatggaagtaccagcagaagatgatgattattctccaccgtctaagagaccaaaggccaatgagctaccgcagccaccagtcccggaacccgccaatgctgggaagcggaaagtgagggagttcaacttcgagaaatggaatgctcgcatcactgatctacgtaaacaagttgaagaattgtttgaaaggaaatatgctcaagccataaaagccaaaggtccggtgacgatcccgtaccctcttttccagtctcatgttgaagatctttatgtagaaggacttcctgaaggaattccttttagaaggccatctacttacggaattcctcgcctggagaggatattacttgcaaaggaaaggattcgttttgtgattaagaaacatgagcttctgaattcaacacgtgaagatttacagcttgataagccagcttcaggagtaaaggaagaatggtatgccagaatcactaaattaagaaagatggtggatcagcttttctgcaaaaaatttgcggaagccttggggagcactgaagccaaggctgtaccgtaccaaaaatttgaggcacacccgaatgatctgtacgtggaaggactgccagaaaacattcctttccgaagtccctcatggtatggaatcccaaggctggaaaaaatcattcaagtgggcaatcgaattaaatttgttattaaaagaccagaacttctgactcacagtaccactgaagttactcagccaagaacgaatacaccagtcaaagaagattggaatgtcagaattaccaagctacggaagcaagtggaagagatttttaatttgaaatttgctcaagctcttggactcaccgaggcagtaaaagtaccatatcctgtgtttgaatcaaacccggagttcttgtatgtggaaggcttgccagaggggattcccttccgaagccctacctggtttggaattccacgacttgaaaggatcgtccgcgggagtaataaaatcaagttcgttgttaaaaaacctgaactagttatttcctacttgcctcctgggatggctagtaaaataaacactaaagctttgcagtcccccaaaagaccacgaagtcctgggagtaattcaaaggttcctgaaattgaggtcaccgtggaaggccctaataacaacaatcctcaaacctcagctgttcgaaccccgacccagactaacggttctaacgttcccttcaagccacgagggagagagttttcctttgaggcctggaatgccaaaatcacggacctaaaacagaaagttgaaaatctcttcaatgagaaatgtggggaagctcttggccttaaacaagctgtgaaggtgccgttcgcgttatttgagtctttcccggaagacttttatgtggaaggcttacctgagggtgtgccattccgaagaccatcgacttttggcattccgaggctggagaagatactcagaaacaaagccaaaattaagttcatcattaaaaagcccgaaatgtttgagacggcgattaaggagagcacctcctctaagagccctcccagaaaaataaattcatcacccaatgttaatactactgcatcaggtgttgaagaccttaacatcattcaggtgacaattccagatgatgataatgaaagactctcgaaagttgaaaaagctagacagctaagagaacaagtgaatgacctctttagtcggaaatttggtgaagctattggtatgggttttcctgtgaaagttccctacaggaaaatcacaattaaccctggctgtgtggtggttgatggcatgcccccgggggtgtccttcaaagcccccagctacctggaaatcagctccatgagaaggatcttagactctgccgagtttatcaaattcacggtcattagaccatttccaggacttgtgattaataaccagctggttgatcagagtgagtcagaaggccccgtgatacaagaatcagctgaaccaagccagttggaagttccagccacagaagaaataaaagagactgatggaagctctcagatcaagcaagaaccagaccccacgtggtagacctcttccctcctaggagccttgagttacggtgtttattttccaatcaagtgaagatatctcctacttctcctactggaacatctcagcttctgcagtgaagaaaaattcctgtgatagttcagttctttagtttttctatttgaaaaaaaaaaatcatttaaatgatcctttgttcacggctctccttaatgactgagtgaacagttcctatctgtatatttgactaaaccttttcctaagctatctctcatggttcctatgtttttttatcataattaaaagcaaaaccatctggatcacctaacagtcagaggtcagtatctcagcgtgtgaattatagaggaaatacagagagaacctcttccacttttacttttcgtccaaataaaatgcatggtgtaccagaagttgaagatcgggttgaggattggggctagctcgatgacactaaggccccaacatcgcgggacctgctgtggcgcggattcttaggaacgctgttctagccggccccctctccaggggtcgccgtggccggcattatttcctagttcttcttgtaaccctgaggtgccagcgcggggagtgaggaggggtcagggggctaaggatgcaacctctgacgttctgcgccttcctaggagagtcttacatgtgttgagatttcacaagcaatgcgagttgtaaaataccagctctacaagaagctaggctctgtgacggcatagttttcagtagctttatcacaatattcacaatggagaattatatgacatggtagcagaaataggcccttttatgtgttgcttctattttacctcaaattgtagatatagggtaatcaataaaatccatccatgcctttcacacactaagt

SEQ ID NO: 4855 - protein, 977 aa, Homo sapiens; identical to SEQ ID NO: 472

SEQ ID NO: 4856 - DNA, 4444 bp, Homo sapiens
aaaaaaaaaaaaaaaaaaaaaaaaaaaagaaaaaagaaaaaaaaaaggaggaggaggaggagggtgagagagaagctgggagagcagagaaaaggggccaccggtcgcccccccgcttccccgcacgcgctctccagccgcggccgcccgcctgccgcggtcaccccggcctctgcctctgtcccccagtgatcggatcaaggcgctgagcgaggccctgcctgcggggcggccatgcggcggtgacaggagcgcgaccgacacgcacgggcccctcgccccctctcgcctcccgtccgctcgccagctcccctcagccgaggctgctccgcggcggccgcagcccgcgcgcggcccacactcgcctcccctcggcacccccggccccggagctgcctggaggcggccgcactcggggatcatggcccaagttgcaatgtccaccctccccgttgaagatgaggagtcctcggagagcaggatggtggtgacattcctcatgtcagctctcgagtccatgtgtaaagaactggccaagtccaaagccgaagtggcctgcattgcagtgtatgaaacagacgtgtttgtcgtcggaactgaaagaggacgtgcttttgtcaataccagaaaggattttcaaaaagattttgtaaaatattgtgttgaagaagaagaaaaagctgcagagatgcataaaatgaaatctacaacccaggcaaatcggatgagtgtagatgctgtagaaattgaaacactcagaaaaacagttgaggactatttctgcttttgctatgggaaagctttaggcaaatccacagtggtacctgtaccatatgagaagatgctgcgagaccagtcggctgtggtagtgcaggggcttccggaaggtgttgcctttaaacaccccgagaactatgatcttgcaaccctgaaatggattttggagaacaaagcagggatttcattcatcattaagagaccttttttagagccaaagaagcatgtaggtggtcgtgtgatggtaacagatgctgacaggtcaatactatctccaggtggaagttgtggccccatcaaagtgaaaactgaacccacagaagattctggaagccaccattcttcagagggcaatgaaggcacagaaatggaagtaccagcagaagattctactcaacatgtcccttcagaaacaagtgaggaccctgaagttgaggtgactattgaagatgatgattattctccaccgtctaagagaccaaaggccaatgagctaccgcagccaccagtcccggaacccgccaatgctgggaagcggaaagtgagggagttcaacttcgagaaatggaatgctcgcatcactgatctacgtaaacaagttgaagaattgtttgaaaggaaatatgctcaagccataaaagccaaaggtccggtgacgatcccgtaccctcttttccagtctcatgttgaagatctttatgtagaaggacttcctgaaggaattccttttagaaggccatctacttacggaattcctcgcctggagaggatattacttgcaaaggaaaggattcgttttgtgattaagaaacatgagcttctgaattcaacacgtgaagatttacagcttgataagccagcttcaggagtaaaggaagaatggtatgccagaatcactaaattaagaaagatggtggatcagcttttctgcaaaaaatttgcggaagccttggggagcactgaagccaaggctgtaccgtaccaaaaatttgaggcacacccgaatgatctgtacgtggaaggactgccagaaaacattcctttccgaagtccctcatggtatggaatcccaaggctggaaaaaatcattcaagtgggcaatcgaattaaatttgttattaaaagaccagaacttctgactcacagtaccactgaagttactcagccaagaacgaatacaccagtcaaagaagattggaatgtcagaattaccaagctacggaagcaagtggaagagatttttaatttgaaatttgctcaagctcttggactcaccgaggcagtaaaagtaccatatcctgtgtttgaatcaaacccggagttcttgtatgtggaaggcttgccagaggggattcccttccgaagccctacctggtttggaattccacgacttgaaaggatcgtccgcgggagtaataaaatcaagttcgttgttaaaaaacctgaactagttatttcctacttgcctcctgggatggctagtaaaataaacactaaagctttgcagtcccccaaaagaccacgaagtcctgggagtaattcaaaggttcctgaaattgaggtcaccgtggaaggccctaataacaacaatcctcaaacctcagctgttcgaaccccgacccagactaacggttctaacgttcccttcaagccacgagggagagagttttcctttgaggcctggaatgccaaaatcacggacctaaaacagaaagttgaaaatctcttcaatgagaaatgtggggaagctcttggccttaaacaagctgtgaaggtgccgttcgcgttatttgagtctttcccggaagacttttatgtggaaggcttacctgagggtgtgccattccgaagaccatcgacttttggcattccgaggctggagaagatactcagaaacaaagccaaaattaagttcatcattaaaaagcccgaaatgtttgagacggcgattaaggagagcacctcctctaagagccctcccagaaaaataaattcatcacccaatgttaatactactgcatcaggtgttgaagaccttaacatcattcaggtgacaattccagatgatgataatgaaagactctcgaaagttgaaaaagctagacagctaagagaacaagtgaatgacctctttagtcggaaatttggtgaagctattggtatgggttttcctgtgaaagttccctacaggaaaatcacaattaaccctggctgtgtggtggttgatggcatgcccccgggggtgtccttcaaagcccccagctacctggaaatcagctccatgagaaggatcttagactctgccgagtttatcaaattcacggtcattagaccatttccaggacttgtgattaataaccagctggttgatcagagtgagtcagaaggccccgtgatacaagaatcagctgaaccaagccagttggaagttccagccacagaagaaataaaagagactgatggaagctctcagatcaagcaagaaccagaccccacgtggtagacctcttccctcctaggcttaaagtatcagtggttgagaagagcttttcggacctgttactaccccaagctgtgtaatatacttgtataacagaaataccttctatacaaacctttttttctacttttagatagaaatgtctactttttcagcagttctgtgaattaaagagcagagtgactgtgggtctggaatggctggtgtacttgggaatgtactatcaggattttacagcaatgctgggaaatgacagggaaaatgacaggaatgaatctcaccagattttttatgtactcagcagagccttgagttacggtgtttattttccaatcaagtgaagatatctcctacttctcctactggaacatctcagcttctgcagtgaagaaaaattcctgtgatagttcagttctttagtttttctatttgaaaaaaaaaaatcatttaaatgatcctttgttcacggctctccttaatgactgagtgaacagttcctatctgtatatttgactaaaccttttcctaagctatctctcatggttcctatgtttttttatcataattaaaagcaaaaccatctggatcacctaacagtcagaggtcagtatctcagcgtgtgaattatagaggaaatacagagagaacctcttccacttttacttttcgtccaaataaaatgcatggtgtaccagaagttgaagatcgggttgaggattggggctagctcgatgacactaaggccccaacatcgcgggacctgctgtggcgcggattcttaggaacgctgttctagccggccccctctccaggggtcgccgtggccggcattatttcctagttcttcttgtaaccctgaggtgccagcgcggggagtgaggaggggtcagggggctaaggatgcaacctctgacgttctgcgccttcctaggagagtcttacatgtgttgagatttcacaagcaatgcgagttgtaaaataccagctctacaagaagctaggctctgtgacggcatagttttcagtagctttatcacaatattcacaatggagaattatatgacatggtagcagaaataggcccttttatgtgttgcttctattttacctcaaattgtagatatagggtaatcaataaaatccatccatgcctttcacacactaagt

SEQ ID NO: 4857 - protein, 952 aa, Homo sapiens; identical to SEQ ID NO: 4069

SEQ ID NO: 4858 - DNA, 7801 bp, Homo sapiens
aaaaaaaaaaaaaaaaaaaaaaaaaaaagaaaaaagaaaaaaaaaaggaggaggaggaggagggtgagagagaagctgggagagcagagaaaaggggccaccggtcgcccccccgcttccccgcacgcgctctccagccgcggccgcccgcctgccgcggtcaccccggcctctgcctctgtcccccagtgatcggatcaaggcgctgagcgaggccctgcctgcggggcggccatgcggcggtgacaggagcgcgaccgacacgcacgggcccctcgccccctctcgcctcccgtccgctcgccagctcccctcagccgaggctgctccgcggcggccgcagcccgcgcgcggcccacactcgcctcccctcggcacccccggccccggagctgcctggaggcggccgcactcggtgtaaagaactggccaagtccaaagccgaagtggcctgcattgcagtgtatgaaacagacgtgtttgtcgtcggaactgaaagaggacgtgcttttgtcaataccagaaaggattttcaaaaagattttgtaaaatattgtgttgaagaagaagaaaaagctgcagagatgcataaaatgaaatctacaacccaggcaaatcggatgagtgtagatgctgtagaaattgaaacactcagaaaaacagttgaggactatttctgcttttgctatgggaaagctttaggcaaatccacagtggtacctgtaccatatgagaagatgctgcgagaccagtcggctgtggtagtgcaggggcttccggaaggtgttgcctttaaacaccccgagaactatgatcttgcaaccctgaaatggattttggagaacaaagcagggatttcattcatcattaagagaccttttttagagccaaagaagcatgtaggtggtcgtgtgatggtaacagatgctgacaggtcaatactatctccaggtggaagttgtggccccatcaaagtgaaaactgaacccacagaagattctggcatttccctggaaatggcagctgtgacagtaaaggaagaatcagaagatcctgattattatcaatataacattcaagcaggcccttctgaaactgatgatgttgatgaaaaacagcccctatcgaagcctttgcaaggaagccaccattcttcagagggcaatgaaggcacagaaatggaagtaccagcagaagatgatgattattctccaccgtctaagagaccaaaggccaatgagctaccgcagccaccagtcccggaacccgccaatgctgggaagcggaaagtgagggagttcaacttcgagaaatggaatgctcgcatcactgatctacgtaaacaagttgaagaattgtttgaaaggaaatatgctcaagccataaaagccaaaggtccggtgacgatcccgtaccctcttttccagtctcatgttgaagatctttatgtagaaggacttcctgaaggaattccttttagaaggccatctacttacggaattcctcgcctggagaggatattacttgcaaaggaaaggattcgttttgtgattaagaaacatgagcttctgaattcaacacgtgaagatttacagcttgataagccagcttcaggagtaaaggaagaatggtatgccagaatcactaaattaagaaagatggtggatcagcttttctgcaaaaaatttgcggaagccttggggagcactgaagccaaggctgtaccgtaccaaaaatttgaggcacacccgaatgatctgtacgtggaaggactgccagaaaacattcctttccgaagtccctcatggtatggaatcccaaggctggaaaaaatcattcaagtgggcaatcgaattaaatttgttattaaaagaccagaacttctgactcacagtaccactgaagttactcagccaagaacgaatacaccagtcaaagaagattggaatgtcagaattaccaagctacggaagcaagtggaagagatttttaatttgaaatttgctcaagctcttggactcaccgaggcagtaaaagtaccatatcctgtgtttgaatcaaacccggagttcttgaaaggatcgtccgcgggagtaataaaatcaagttcgttgttaaaaaacctgaactagttatttcctacttgcctcctgggatggctagtaaaataaacactaaagctttgcagtcccccaaaagaccacgaagtcctgggagtaattcaaaggttcctgaaattgaggtcaccgtggaaggccctaataacaacaatcctcaaacctcagctgttcgaaccccgacccagactaacggttctaacgttcccttcaagccacgagggagagagttttcctttgaggcctggaatgccaaaatcacggacctaaaacagaaagttgaaaatctcttcaatgagaaatgtggggaagctcttggccttaaacaagctgtgaaggtgccgttcgcgttatttgagtctttcccggaagacttttatgtggaaggcttacctgagggtgtgccattccgaagaccatcgacttttggcattccgaggctggagaagatactcagaaacaaagccaaaattaagttcatcattaaaaagcccgaaatgtttgagacggcgattaaggagagcacctcctctaagagccctcccagaaaaataaattcatcacccaatgttaatactactgcatcaggtgttgaagaccttaacatcattcaggtgacaattccagatgatgataatgaaagactctcgaaagttgaaaaagctagacagctaagagaacaagtgaatgacctctttagtcggaaatttggtgaagctattggtatgggttttcctgtgaaagttccctacaggaaaatcacaattaaccctggctgtgtggtggttgatggcatgcccccgggggtgtccttcaaagcccccagctacctggaaatcagctccatgagaaggatcttagactctgccgagtttatcaaattcacggtcattaggtaagtgagagtttcctgcttagtcacaggagcgaatctggagctcatgaggctgactcttctaaaatgcagccacaggtagtcatcgaatccggcttcctatgctgtgcaatcaacaaatcaaaataacttgtgtcatcattagaatgtcagatgtgcttctacgaactaagctgactcttttaattctttggcaaagggttggcaaactaggactgtttgccaaattcaggctgcctcctatttttagagtcttcctgaaacacagctacacccgtattatccatggctgctttcctgtcacagtgagtaagtagctgggactgagaaggcatggcctccaaagtctaaaatatttactctctagcactttgtagaaaaaccttagctaggcacagtggctaacgcctgtaatcccagcattttgggaggccaaggcaggcagatcacctgaggtcaggagttccagaccagcctggccaacatggtgaaatcccatctctacaaaaataaaacagttagctgggcatgatggcgggtgcctgtaatcccagctactcgggaggctgaggcaggatagtcgcttgaacccaggaggtggaggttgcaatgagccaagatcatgccactgcactccagcctggacgacagagtgagactccatcacaagaaaaaaagaactttgtcaacctctgtcttagggcgccttgtcacaggcttcgggtcagacggattcaaccttgcatcagccatttgttagccaggtcactctgttctttgtctgtaaatgagattgatcgttgttcccactgagagtgtcagctccttcccgtagagcaggcatgatgattgtactcacctctgacaccattgtgagtgccacattccttcccacgtccttgtcactgtaagagatgcccacctgagcaccaaccccaggttatcttcccctttgtcttccagccccccagaaacagctacgactcaacctacccaatcatttcatcatcagattgccactgtctctagttcaggtctcttgggactggcactcagaaatctcataataaatcctcttgaggcttctcatacactcgtcttcttccaatcttctttccctcaaaatctcatattttggttccacttcacccaccgtcattctccatatcactcccaggagttaggcaaaaagccccttccgttcttccgtatgttaaacttagaatcactctgttccctgctctgcgtttctattttttgtttttcctccatttactagtagcttaacactttctaacagtgttcttattattgatacgtatctatctcttccataagcttataaggtcacggataatacttctcattgtagtacgtaaatgacgtgggctagatatgagttgaataaacagttatacctgtaaattcttacagagtgaaaataaattgttatactttacaatttgtttctctctttagaccatttccaggacttgtgattaataaccgtgagtattttgtgaagtgttttgtttttgttttttcctggggtctgacgtgtgtgcgtgtgagtgtgtatacatgcttaacgtatatcacgttacttcacctatgtcagtaaccaggccaaatacttgttttagccctcagtaaaaacaccaggcacttcctagttgtaaaattattcaagcttcttaacttcctatcctcgatgcacttaatcataaaatggtaataatagcaccgattttgggggagtcgttccagtagatggaaagcatctggaacaggtgtcagcaagctcctgccgacgtgtatgcataaagttttattgaaaccaccatcgtgtccatttgtttatggcagaactgagagatggcagcagcaagtgtgtgcctgcaaaacctaaaatatttactaattggctctgcaagaaaagagtttgcatccccctaacctagaacagtgtctagcctctagtatgtgtttagcctacagtatgtgctcagcgaatacaatctatatttattactgcttttatgactgttataattactgtgcttggatttcgttacaaagtaagtcacaatgtgcctgcttctgttagtatttcagcacagtgcctggcacacatggggctctcaaatattgctgagcgagtgaacaaatgtcctttcaattccttaacgttgatgtcattttcaatagtattttgagccaaacttaattttgcgagtgtgttttgttttcttaactttattattaaaaatgtataaaagtgaggccaggcgtggtggctcacgcctgtaatcccagcagtttgggaggctgaggcaggcggatcagttgaggttgggagttggagaccagcccgtccaacatggtgaaagcctgtctctactaaaaatacaaaaatcagctgggtgtggtggcgcgtgcctgtaatcccagctactcaggaggctgaggcaggagagttgcttgaatcctagaggtggaggttgcagtgagctgagatcgtgccattgcactccagcctgggcaacaagagcaaaactctgtcccaataaataaataaataaaatgttctcttttgttcctgttcttgtgcggtagtgtggtatagagttttatggtaattactgtgaattagtgattctgagggacatatcagaactctgaggtttgtttccttctcatcttgagggaaacagcaaatgtatgttaaaatgcttttccaagggaacaacacatccttacattatttaaaccaatctgcttcattttcagagctggttgatcagagtgagtcagaaggccccgtgatacaagaatcagctgaaccaagccagttggaagttccagccacagaagaaataaaagagactgatggaagctctcagatcaagcaagaaccagaccccacgtggtagacctcttccctcctagggtaaatcagcttctgtgtcagggatgctgtgtggtgtccatctgaaccccctgcatacgcgtagctaatgtgatctccccactttcacataagatggtggccctgccttcagggaatgtgggagccaggtgggagccttcccggatatttaagctagaagattctacagggagattctccttggatcaatatatgtctctcagtcaaagatgtaaaagcacttttgccttaaaaagaatgttctgtttctaaatagagtcaacgttgtcctcctcattggaattcactatgagtcagaatcattagactgacttttttttttccatagtaatagtattttgcagagtctcacagagctgcagatcttttgttcatcttgcagagttaacaagtctgatcctgttagtccagatttcttaaatttggccaagttataataggagcagtagcttgagacccgaagtcaggaaactttgacaatggatttttttttttaatccagagacttgtactggaatttgccttaccctgtcagctcatggacttaaggtttcatcccgctttatgagtgcttctgaatccaagtcattgttacctgaatttgcaaattaagttgtgatattcgtgactgttaaattcctgtaattagattaacctctttgcttgcttgtttgttttctctcctattttagcttaaagtatcagtggttgagaagagcttttcggacctgttactaccccaagctgtgtaatatacttgtataacagaaataccttctatacaaacctttttttctacttttagatagaaatgtctactttttcagcagttctgtgaattaaagagcagagtgactgtgggtctggaatggctggtgtacttgggaatgtactatcaggattttacagcaatgctgggaaatgacagggaaaatgacaggaatgaatctcaccagattttttatgtactcagcagagccttgagttacggtgtttattttccaatcaagtgaagatatctcctacttctcctactggaacatctcagcttctgcagtgaagaaaaattcctgtgatagttcagttctttagtttttctatttgaaaaaaaaaaatcatttaaatgatcctttgttcacggctctccttaatgactgagtgaacagttcctatctgtatatttgactaaaccttttcctaagctatctctcatggttcctatgtttttttatcataattaaaagcaaaaccatctggatcacctaacagtcagaggtcagtatctcagcgtgtgaattatagaggaaatacagagagaacctcttccacttttacttttcgtccaaataaaatgcatggtgtaccagaagttgaagatcgggttgaggattggggctagctcgatgacactaaggccccaacatcgcgggacctgctgtggcgcggattcttaggaacgctgttctagccggccccctctccaggggtcgccgtggccggcattatttcctagttcttcttgtaaccctgaggtgccagcgcggggagtgaggaggggtcagggggctaaggatgcaacctctgacgttctgcgccttcctaggagagtcttacatgtgttgagatttcacaagcaatgcgagttgtaaaataccagctctacaagaagctaggctctgtgacggcatagttttcagtagctttatcacaatattcacaatggagaattatatgacatggtagcagaaataggcccttttatgtgttgcttctattttacctcaaattgtagatatagggtaatcaataaaatccatccatgcctttcacacactaagt

SEQ ID NO: 4859 - protein, 515 aa, Homo sapiens; identical to SEQ ID NO: 4501

SEQ ID NO: 4860 - DNA, 4083 bp, Homo sapiens
aaaaaaaaaaaaaaaaaaaaaaaaaaaagaaaaaagaaaaaaaaaaggaggaggaggaggagggtgagagagaagctgggagagcagagaaaaggggccaccggtcgcccccccgcttccccgcacgcgctctccagccgcggccgcccgcctgccgcggtcaccccggcctctgcctctgtcccccagtgatcggatcaaggcgctgagcgaggccctgcctgcggggcggccatgcggcggtgacaggagcgcgaccgacacgcacgggcccctcgccccctctcgcctcccgtccgctcgccagctcccctcagccgaggctgctccgcggcggccgcagcccgcgcgcggcccacactcgcctccccgttgaagatgaggagtcctcggagagcaggatggtggtgacattcctcatgtcagctctcgagtccatgtgtaaagaactggccaagtccaaagccgaagtggcctgcattgcagtgtatgaaacagacgtgtttgtcgtcggaactgaaagaggacgtgcttttgtcaataccagaaaggattttcaaaaagattttgtaaaatattgtgttgaagaagaagaaaaagctgcagagatgcataaaatgaaatctacaacccaggcaaatcggatgagtgtagatgctgtagaaattgaaacactcagaaaaacagttgaggactatttctgcttttgctatgggaaagctttaggcaaatccacagtggtacctgtaccatatgagaagatgctgcgagaccagtcggctgtggtagtgcaggggcttccggaaggtgttgcctttaaacaccccgagaactatgatcttgcaaccctgaaatggattttggagaacaaagcagggatttcattcatcattaagagaccttttttagagccaaagaagcatgtaggtggtcgtgtgatggtaacagatgctgacaggtcaatactatctccaggtggaagttgtggccccatcaaagtgaaaactgaacccacagaagattctggcatttccctggaaatggcagctgtgacagtaaaggaagaatcagaagatcctgattattatcaatataacattcaagcaggcccttctgaaactgatgatgttgatgaaaaacagcccctatcgaagcctttgcaaggaagccaccattcttcagagggcaatgaaggcacagaaatggaagtaccagcagaagatgatgattattctccaccgtctaagagaccaaaggccaatgagctaccgcagccaccagtcccggaacccgccaatgctgggaagcggaaagtgagggagttcaacttcgagaaatggaatgctcgcatcactgatctacgtaaacaagttgaagaattgtttgaaaggaaatatgctcaagccataaaagccaaaggtccggtgacgatcccgtaccctcttttccagtctcatgttgaagatctttatgtagaaggacttcctgaaggaattccttttagaaggccatctacttacggaattcctcgcctggagaggatattacttgcaaaggaaaggattcgttttgtgattaagaaacatgagcttctgaattcaacacgtgaagatttacagcttgataagccagcttcaggagtaaaggaagaatggtatgccagaatcactaaattaagaaagatggtggatcagcttttctgcaaaaaatttgcggaagccttggggagcactgaagccaaggctgtaccgtaccaaaaatttgaggcacacccgaatgatctgtacgtggaaggactgccagaaaacattcctttccgaagtccctcatggtatggaatcccaaggctggaaaaaatcattcaagtgggcaatcgaattaaatttgttattaaaagaccagaacttctgactcacagtaccactgaagttactcagccaagaacgaatacaccagctcaagctcttggactcaccgaggcagtaaaagtaccatatcctgtgtttgaatcaaacccggagttcttgtatgtggaaggcttgccagaggggattcccttccgaagccctacctggtttggaattccacgacttgaaaggatcgtccgcgggagtaataaaatcaagttcgttgttaaaaaacctgaactagttatttcctacttgcctcctgggatggctagtaaaataaacactaaagctttgcagtcccccaaaagaccacgaagtcctgggagtaattcaaaggttcctgaaattgaggtcaccgtggaaggccctaataacaacaatcctcaaacctcagctgttcgaaccccgacccagactaacggttctaacgttcccttcaagccacgagggagagagttttcctttgaggcctggaatgccaaaatcacggacctaaaacagaaagttgaaaatctcttcaatgagaaatgtggggaagctcttggccttaaacaagctgtgaaggtgccgttcgcgttatttgagtctttcccggaagacttttatgtggaaggcttacctgagggtgtgccattccgaagaccatcgacttttggcattccgaggctggagaagatactcagaaacaaagccaaaattaagttcatcattaaaaagcccgaaatgtttgagacggcgattaaggagagcacctcctctaagagccctcccagaaaaataaattcatcacccaatgttaatactactgcatcaggtgttgaagaccttaacatcattcaggtgacaattccagatgatgataatgaaagactctcgaaagttgaaaaagctagacagctaagagaacaagtgaatgacctctttagtcggaaatttggtgaagctattggtatgggttttcctgtgaaagttccctacaggaaaatcacaattaaccctggctgtgtggtggttgatggcatgcccccgggggtgtccttcaaagcccccagctacctggaaatcagctccatgagaaggatcttagactctgccgagtttatcaaattcacggtcattagaccatttccaggacttgtgattaataaccagctggttgatcagagtgagtcagaaggccccgtgatacaagaatcagctgaaccaagccagttggaagttccagccacagaagaaataaaagagactgatggaagctctcagatcaagcaagaaccagaccccacgtggtagacctcttccctcctaggagccttgagttacggtgtttattttccaatcaagtgaagatatctcctacttctcctactggaacatctcagcttctgcagtgaagaaaaattcctgtgatagttcagttctttagtttttctatttgaaaaaaaaaaatcatttaaatgatcctttgttcacggctctccttaatgactgagtgaacagttcctatctgtatatttgactaaaccttttcctaagctatctctcatggttcctatgtttttttatcataattaaaagcaaaaccatctggatcacctaacagtcagaggtcagtatctcagcgtgtgaattatagaggaaatacagagagaacctcttccacttttacttttcgtccaaataaaatgcatggtgtaccagaagttgaagatcgggttgaggattggggctagctcgatgacactaaggccccaacatcgcgggacctgctgtggcgcggattcttaggaacgctgttctagccggccccctctccaggggtcgccgtggccggcattatttcctagttcttcttgtaaccctgaggtgccagcgcggggagtgaggaggggtcagggggctaaggatgcaacctctgacgttctgcgccttcctaggagagtcttacatgtgttgagatttcacaagcaatgcgagttgtaaaataccagctctacaagaagctaggctctgtgacggcatagttttcagtagctttatcacaatattcacaatggagaattatatgacatggtagcagaaataggcccttttatgtgttgcttctattttacctcaaattgtagatatagggtaatcaataaaatccatccatgcctttcacacactaagt

SEQ ID NO: 4861 - protein, 933 aa, Homo sapiens; identical to SEQ ID NO: 4083

SEQ ID NO: 4862 - DNA, 7034 bp, Homo sapiens
aaaaaaaaaaaaaaaaaaaaaaaaaaaagaaaaaagaaaaaaaaaaggaggaggaggaggagggtgagagagaagctgggagagcagagaaaaggggccaccggtcgcccccccgcttccccgcacgcgctctccagccgcggccgcccgcctgccgcggtcaccccggcctctgcctctgtcccccagtgatcggatcaaggcgctgagcgaggccctgcctgcggggcggccatgcggcggtgacaggagcgcgaccgacacgcacgggcccctcgccccctctcgcctcccgtccgctcgccagctcccctcagccgaggctgctccgcggcggccgcagcccgcgcgcggcccacactcgcctcccctcggcacccccggccccggagctgcctggaggcggccgcactcggtgtaaagaactggccaagtccaaagccgaagtggcctgcattgcagtgtatgaaacagacgtgtttgtcgtcggaactgaaagaggacgtgcttttgtcaataccagaaaggattttcaaaaagattttgtaaaatattgtgttgaagaagaagaaaaagctgcagagatgcataaaatgaaatctacaacccaggcaaatcggatgagtgtagatgctgtagaaattgaaacactcagaaaaacagttgaggactatttctgcttttgctatgggaaagctttaggcaaatccacagtggtacctgtaccatatgagaagatgctgcgagaccagtcggctgtggtagtgcaggggcttccggaaggtgttgcctttaaacaccccgagaactatgatcttgcaaccctgaaatggattttggagaacaaagcagggatttcattcatcattaagagaccttttttagagccaaagaagcatgtaggtggtcgtgtgatggtaacagatgctgacaggtcaatactatctccaggtggaagttgtggccccatcaaagtgaaaactgaacccacagaagattctggaagccaccattcttcagagggcaatgaaggcacagaaatggaagtaccagcagaagattctactcaacatgtcccttcagaaacaagtgaggaccctgaagttgaggtgactattgaagatgatgattattctccaccgtctaagagaccaaaggccaatgagctaccgcagccaccagtcccggaacccgccaatgctgggaagcggaaagtgagggagttcaacttcgagaaatggaatgctcgcatcactgatctacgtaaacaagttgaagaattgtttgaaaggaaatatgctcaagccataaaagccaaaggtccggtgacgatcccgtaccctcttttccagtctcatgttgaagatctttatgtagaaggacttcctgaaggaattccttttagaaggccatctacttacggaattcctcgcctggagaggatattacttgcaaaggaaaggattcgttttgtgattaagaaacatgagcttctgaattcaacacgtgaagatttacagcttgataagccagcttcaggagtaaaggaagaatggtatgccagaatcactaaattaagaaagatggtggatcagcttttctgcaaaaaatttgcggaagccttggggagcactgaagccaaggctgtaccgtaccaaaaatttgaggcacacccgaatgatctgtacgtggaaggactgccagaaaacattcctttccgaagtccctcatggtatggaatcccaaggctggaaaaaatcattcaagtgggcaatcgaattaaatttgttattaaaagaccagaacttctgactcacagtaccactgaagttactcagccaagaacgaatacaccagtcaaagaagattggaatgtcagaattaccaagctacggaagcaagtggaagagatttttaatttgaaatttgctcaagctcttggactcaccgaggcagtaaaagtaccatatcctgtgtttgaatcaaacccggagttcttgaaaggatcgtccgcgggagtaataaaatcaagttcgttgttaaaaaacctgaactagttatttcctacttgcctcctgggatggctagtaaaataaacactaaagctttgcagtcccccaaaagaccacgaagtcctgggagtaattcaaaggttcctgaaattgaggtcaccgtggaaggccctaataacaacaatcctcaaacctcagctgttcgaaccccgacccagactaacggttctaacgttcccttcaagccacgagggagagagttttcctttgaggcctggaatgccaaaatcacggacctaaaacagaaagttgaaaatctcttcaatgagaaatgtggggaagctcttggccttaaacaagctgtgaaggtgccgttcgcgttatttgagtctttcccggaagacttttatgtggaaggcttacctgagggtgtgccattccgaagaccatcgacttttggcattccgaggctggagaagatactcagaaacaaagccaaaattaagttcatcattaaaaagcccgaaatgtttgagacggcgattaaggagagcacctcctctaagagccctcccagaaaaataaattcatcacccaatgttaatactactgcatcaggtgttgaagaccttaacatcattcaggtgacaattccagatgatgataatgaaagactctcgaaagttgaaaaagctagacagctaagagaacaagtgaatgacctctttagtcggaaatttggtgaagctattggtatgggttttcctgtgaaagttccctacaggaaaatcacaattaaccctggctgtgtggtggttgatggcatgcccccgggggtgtccttcaaagcccccagctacctggaaatcagctccatgagaaggatcttagactctgccgagtttatcaaattcacggtcattaggtaagtgagagtttcctgcttagtcacaggagcgaatctggagctcatgaggctgactcttctaaaatgcagccacaggtagtcatcgaatccggcttcctatgctgtgcaatcaacaaatcaaaataacttgtgtcatcattagaatgtcagatgtgcttctacgaactaagctgactcttttaattctttggcaaagggttggcaaactaggactgtttgccaaattcaggctgcctcctatttttagagtcttcctgaaacacagctacacccgtattatccatggctgctttcctgtcacagtgagtaagtagctgggactgagaaggcatggcctccaaagtctaaaatatttactctctagcactttgtagaaaaaccttagctaggcacagtggctaacgcctgtaatcccagcattttgggaggccaaggcaggcagatcacctgaggtcaggagttccagaccagcctggccaacatggtgaaatcccatctctacaaaaataaaacagttagctgggcatgatggcgggtgcctgtaatcccagctactcgggaggctgaggcaggatagtcgcttgaacccaggaggtggaggttgcaatgagccaagatcatgccactgcactccagcctggacgacagagtgagactccatcacaagaaaaaaagaactttgtcaacctctgtcttagggcgccttgtcacaggcttcgggtcagacggattcaaccttgcatcagccatttgttagccaggtcactctgttctttgtctgtaaatgagattgatcgttgttcccactgagagtgtcagctccttcccgtagagcaggcatgatgattgtactcacctctgacaccattgtgagtgccacattccttcccacgtccttgtcactgtaagagatgcccacctgagcaccaaccccaggttatcttcccctttgtcttccagccccccagaaacagctacgactcaacctacccaatcatttcatcatcagattgccactgtctctagttcaggtctcttgggactggcactcagaaatctcataataaatcctcttgaggcttctcatacactcgtcttcttccaatcttctttccctcaaaatctcatattttggttccacttcacccaccgtcattctccatatcactcccaggagttaggcaaaaagccccttccgttcttccgtatgttaaacttagaatcactctgttccctgctctgcgtttctattttttgtttttcctccatttactagtagcttaacactttctaacagtgttcttattattgatacgtatctatctcttccataagcttataaggtcacggataatacttctcattgtagtacgtaaatgacgtgggctagatatgagttgaataaacagttatacctgtaaattcttacagagtgaaaataaattgttatactttacaatttgtttctctctttagaccatttccaggacttgtgattaataaccgtgagtattttgtgaagtgttttgtttttgttttttcctggggtctgacgtgtgtgcgtgtgagtgtgtatacatgcttaacgtatatcacgttacttcacctatgtcagtaaccaggccaaatacttgttttagccctcagtaaaaacaccaggcacttcctagttgtaaaattattcaagcttcttaacttcctatcctcgatgcacttaatcataaaatggtaataatagcaccgattttgggggagtcgttccagtagatggaaagcatctggaacaggtgtcagcaagctcctgccgacgtgtatgcataaagttttattgaaaccaccatcgtgtccatttgtttatggcagaactgagagatggcagcagcaagtgtgtgcctgcaaaacctaaaatatttactaattggctctgcaagaaaagagtttgcatccccctaacctagaacagtgtctagcctctagtatgtgtttagcctacagtatgtgctcagcgaatacaatctatatttattactgcttttatgactgttataattactgtgcttggatttcgttacaaagtaagtcacaatgtgcctgcttctgttagtatttcagcacagtgcctggcacacatggggctctcaaatattgctgagcgagtgaacaaatgtcctttcaattccttaacgttgatgtcattttcaatagtattttgagccaaacttaattttgcgagtgtgttttgttttcttaactttattattaaaaatgtataaaagtgaggccaggcgtggtggctcacgcctgtaatcccagcagtttgggaggctgaggcaggcggatcagttgaggttgggagttggagaccagcccgtccaacatggtgaaagcctgtctctactaaaaatacaaaaatcagctgggtgtggtggcgcgtgcctgtaatcccagctactcaggaggctgaggcaggagagttgcttgaatcctagaggtggaggttgcagtgagctgagatcgtgccattgcactccagcctgggcaacaagagcaaaactctgtcccaataaataaataaataaaatgttctcttttgttcctgttcttgtgcggtagtgtggtatagagttttatggtaattactgtgaattagtgattctgagggacatatcagaactctgaggtttgtttccttctcatcttgagggaaacagcaaatgtatgttaaaatgcttttccaagggaacaacacatccttacattatttaaaccaatctgcttcattttcagagctggttgatcagagtgagtcagaaggccccgtgatacaagaatcagctgaaccaagccagttggaagttccagccacagaagaaataaaagagactgatggaagctctcagatcaagcaagaaccagaccccacgtggtagacctcttccctcctaggcttaaagtatcagtggttgagaagagcttttcggacctgttactaccccaagctgtgtaatatacttgtataacagaaataccttctatacaaacctttttttctacttttagatagaaatgtctactttttcagcagttctgtgaattaaagagcagagtgactgtgggtctggaatggctggtgtacttgggaatgtactatcaggattttacagcaatgctgggaaatgacagggaaaatgacaggaatgaatctcaccagattttttatgtactcagcagagccttgagttacggtgtttattttccaatcaagtgaagatatctcctacttctcctactggaacatctcagcttctgcagtgaagaaaaattcctgtgatagttcagttctttagtttttctatttgaaaaaaaaaaatcatttaaatgatcctttgttcacggctctccttaatgactgagtgaacagttcctatctgtatatttgactaaaccttttcctaagctatctctcatggttcctatgtttttttatcataattaaaagcaaaaccatctggatcacctaacagtcagaggtcagtatctcagcgtgtgaattatagaggaaatacagagagaacctcttccacttttacttttcgtccaaataaaatgcatggtgtaccagaagttgaagatcgggttgaggattggggctagctcgatgacactaaggccccaacatcgcgggacctgctgtggcgcggattcttaggaacgctgttctagccggccccctctccaggggtcgccgtggccggcattatttcctagttcttcttgtaaccctgaggtgccagcgcggggagtgaggaggggtcagggggctaaggatgcaacctctgacgttctgcgccttcctaggagagtcttacatgtgttgagatttcacaagcaatgcgagttgtaaaataccagctctacaagaagctaggctctgtgacggcatagttttcagtagctttatcacaatattcacaatggagaattatatgacatggtagcagaaataggcccttttatgtgttgcttctattttacctcaaattgtagatatagggtaatcaataaaatccatccatgcctttcacacactaagt

SEQ ID NO: 4863 - protein, 490 aa, Homo sapiens; identical to SEQ ID NO: 4105

SEQ ID NO: 4864 - DNA, 5147 bp, Homo sapiens
aaaaaaaaaaaaaaaaaaaaaaaaaaaagaaaaaagaaaaaaaaaaggaggaggaggaggagggtgagagagaagctgggagagcagagaaaaggggccaccggtcgcccccccgcttccccgcacgcgctctccagccgcggccgcccgcctgccgcggtcaccccggcctctgcctctgtcccccagtgatcggatcaaggcgctgagcgaggccctgcctgcggggcggccatgcggcggtgacaggagcgcgaccgacacgcacgggcccctcgccccctctcgcctcccgtccgctcgccagctcccctcagccgaggctgctccgcggcggccgcagcccgcgcgcggcccacactcgcctcccctcggcacccccggccccggagctgcctggaggcggccgcactcggggatcatggcccaagttgcaatgtccaccctccccgttgaagatgaggagtcctcggagagcaggatggtggtgacattcctcatgtcagctctcgagtccatgtgtaaagaactggccaagtccaaagccgaagtggcctgcattgcagtgtatgaaacagacgtgtttgtcgtcggaactgaaagaggacgtgcttttgtcaataccagaaaggattttcaaaaagattttgtaaaatattgtgttgaagaagaagaaaaagctgcagagatgcataaaatgaaatctacaacccaggcaaatcggatgagtgtagatgctgtagaaattgaaacactcagaaaaacagttgaggactatttctgcttttgctatgggaaagctttaggcaaatccacagtggtacctgtaccatatgagaagatgctgcgagaccagtcggctgtggtagtgcaggggcttccggaaggtgttgcctttaaacaccccgagaactatgatcttgcaaccctgaaatggattttggagaacaaagcagggatttcattcatcattaagagaccttttttagagccaaagaagcatgtaggtggtcgtgtgatggtaacagatgctgacaggtcaatactatctccaggtggaagttgtggccccatcaaagtgaaaactgaacccacagaagattctggcatttccctggaaatggcagctgtgacagtaaaggaagaatcagaagatcctgattattatcaatataacattcaaggaagccaccattcttcagagggcaatgaaggcacagaaatggaagtaccagcagaagattctactcaacatgtcccttcagaaacaagtgaggaccctgaagttgaggtgactattgaagatgatgattattctccaccgtctaagagaccaaaggccaatgagctaccgcagccaccagtcccggaacccgccaatgctgggaagcggaaagtgagggagttcaacttcgagaaatggaatgctcgcatcactgatctacgtaaacaagttgaagaattgtttgaaaggaaatatgctcaagccataaaagccaaaggtccggtgacgatcccgtaccctcttttccagtctcatgttgaagatctttatgtagaaggacttcctgaaggaattccttttagaaggccatctacttacggaattcctcgcctggagaggatattacttgcaaaggaaaggattcgttttgtgattaagaaacatgagcttctgaattcaacacgtgaagatttacagcttgataagccagcttcaggagtaaaggaagaatggtatgccagaatcactaaattaagaaagatggtggatcagcttttctgcaaaaaatttgcggaagccttggggagcactgaagccaaggctgtaccgtaccaaaaatttgaggcacacccgaatgatctgtacgtggaaggactgccagaaaacattcctttccgaagtccctcatggtatggaatcccaaggctggaaaaaatcattcaagtgggcaatcgaattaaatttgttattaaaagaccagaacttctgactcacagtaccactgaagttactcagccaagaacgaatacaccagtcaaagaagattggaatgtcagaattaccaagctacggaagcaagtggaagagatttttaatttgaaatttgctcaagctcttggactcaccgaggcagtaaaagtaccatatcctgtgtttgaatcaaacccggagttcttgaaaggatcgtccgcgggagtaataaaatcaagttcgttgttaaaaaacctgaactagttatttcctacttgcctcctgggatggctagtaaaataaacactaaagctttgcagtcccccaaaagaccacgaagtcctgggagtaattcaaaggttcctgaaattgaggtcaccgtggaaggccctaataacaacaatcctcaaacctcagctgttcgaaccccgacccagactaacggttctaacgttcccttcaagccacgagggagagagttttcctttgaggcctggaatgccaaaatcacggacctaaaacagaaagttgaaaatctcttcaatgagaaatgtggggaagctcttggccttaaacaagctgtgaaggtgccgttcgcgttatttgagtctttcccggaagacttttatgtggaaggcttacctgagggtgtgccattccgaagaccatcgacttttggcattccgaggctggagaagatactcagaaacaaagccaaaattaagttcatcattaaaaagcccgaaatgtttgagacggcgattaaggagagcacctcctctaagagccctcccagaaaaataaattcatcacccaatgttaatactactgcatcaggtgttgaagaccttaacatcattcaggtgacaattccagatgatgataatgaaagactctcgaaagttgaaaaagctagacagctaagagaacaagtgaatgacctctttagtcggaaatttggtgaagctattggtatgggttttcctgtgaaagttccctacaggaaaatcacaattaaccctggctgtgtggtggttgatggcatgcccccgggggtgtccttcaaagcccccagctacctggaaatcagctccatgagaaggatcttagactctgccgagtttatcaaattcacggtcattagaccatttccaggacttgtgattaataaccagctggttgatcagagtgagtcagaaggccccgtgatacaagaatcagctgaaccaagccagttggaagttccagccacagaagaaataaaagagactgatggaagctctcagatcaagcaagaaccagaccccacgtggtagacctcttccctcctagggtaaatcagcttctgtgtcagggatgctgtgtggtgtccatctgaaccccctgcatacgcgtagctaatgtgatctccccactttcacataagatggtggccctgccttcagggaatgtgggagccaggtgggagccttcccggatatttaagctagaagattctacagggagattctccttggatcaatatatgtctctcagtcaaagatgtaaaagcacttttgccttaaaaagaatgttctgtttctaaatagagtcaacgttgtcctcctcattggaattcactatgagtcagaatcattagactgacttttttttttccatagtaatagtattttgcagagtctcacagagctgcagatcttttgttcatcttgcagagttaacaagtctgatcctgttagtccagatttcttaaatttggccaagttataataggagcagtagcttgagacccgaagtcaggaaactttgacaatggatttttttttttaatccagagacttgtactggaatttgccttaccctgtcagctcatggacttaaggtttcatcccgctttatgagtgcttctgaatccaagtcattgttacctgaatttgcaaattaagttgtgatattcgtgactgttaaattcctgtaattagattaacctctttgcttgcttgtttgttttctctcctattttagcttaaagtatcagtggttgagaagagcttttcggacctgttactaccccaagctgtgtaatatacttgtataacagaaataccttctatacaaacctttttttctacttttagatagaaatgtctactttttcagcagttctgtgaattaaagagcagagtgactgtgggtctggaatggctggtgtacttgggaatgtactatcaggattttacagcaatgctgggaaatgacagggaaaatgacaggaatgaatctcaccagattttttatgtactcagcagagccttgagttacggtgtttattttccaatcaagtgaagatatctcctacttctcctactggaacatctcagcttctgcagtgaagaaaaattcctgtgatagttcagttctttagtttttctatttgaaaaaaaaaaatcatttaaatgatcctttgttcacggctctccttaatgactgagtgaacagttcctatctgtatatttgactaaaccttttcctaagctatctctcatggttcctatgtttttttatcataattaaaagcaaaaccatctggatcacctaacagtcagaggtcagtatctcagcgtgtgaattatagaggaaatacagagagaacctcttccacttttacttttcgtccaaataaaatgcatggtgtaccagaagttgaagatcgggttgaggattggggctagctcgatgacactaaggccccaacatcgcgggacctgctgtggcgcggattcttaggaacgctgttctagccggccccctctccaggggtcgccgtggccggcattatttcctagttcttcttgtaaccctgaggtgccagcgcggggagtgaggaggggtcagggggctaaggatgcaacctctgacgttctgcgccttcctaggagagtcttacatgtgttgagatttcacaagcaatgcgagttgtaaaataccagctctacaagaagctaggctctgtgacggcatagttttcagtagctttatcacaatattcacaatggagaattatatgacatggtagcagaaataggcccttttatgtgttgcttctattttacctcaaattgtagatatagggtaatcaataaaatccatccatgcctttcacacactaagt

SEQ ID NO: 4865 - protein, 605 aa, Homo sapiens; identical to SEQ ID NO: 4221

SEQ ID NO: 4866 - DNA, 7228 bp, Homo sapiens
aaaaaaaaaaaaaaaaaaaaaaaaaaaagaaaaaagaaaaaaaaaaggaggaggaggaggagggtgagagagaagctgggagagcagagaaaaggggccaccggtcgcccccccgcttccccgcacgcgctctccagccgcggccgcccgcctgccgcggtcaccccggcctctgcctctgtcccccagtgatcggatcaaggcgctgagcgaggccctgcctgcggggcggccatgcggcggtgacaggagcgcgaccgacacgcacgggcccctcgccccctctcgcctcccgtccgctcgccagctcccctcagccgaggctgctccgcggcggccgcagcccgcgcgcggcccacactcgcctcccctcggcacccccggccccggagctgcctggaggcggccgcactcggtgtaaagaactggccaagtccaaagccgaagtggcctgcattgcagtgtatgaaacagacgtgtttgtcgtcggaactgaaagaggacgtgcttttgtcaataccagaaaggattttcaaaaagattttgtaaaatattgtgttgaagaagaagaaaaagctgcagagatgcataaaatgaaatctacaacccaggcaaatcggatgagtgtagatgctgtagaaattgaaacactcagaaaaacagttgaggactatttctgcttttgctatgggaaagctttaggcaaatccacagtggtacctgtaccatatgagaagatgctgcgagaccagtcggctgtggtagtgcaggggcttccggaaggtgttgcctttaaacaccccgagaactatgatcttgcaaccctgaaatggattttggagaacaaagcagggatttcattcatcattaagagaccttttttagagccaaagaagcatgtaggtggtcgtgtgatggtaacagatgctgacaggtcaatactatctccaggtggaagttgtggccccatcaaagtgaaaactgaacccacagaagattctggcatttccctggaaatggcagctgtgacagtaaaggaagaatcagaagatcctgattattatcaatataacattcaaggaagccaccattcttcagagggcaatgaaggcacagaaatggaagtaccagcagaagatgatgattattctccaccgtctaagagaccaaaggccaatgagctaccgcagccaccagtcccggaacccgccaatgctgggaagcggaaagtgagggagttcaacttcgagaaatggaatgctcgcatcactgatctacgtaaacaagttgaagaattgtttgaaaggaaatatgctcaagccataaaagccaaaggtccggtgacgatcccgtaccctcttttccagtctcatgttgaagatctttatgtagaaggacttcctgaaggaattccttttagaaggccatctacttacggaattcctcgcctggagaggatattacttgcaaaggaaaggattcgttttgtgattaagaaacatgagcttctgaattcaacacgtgaagatttacagcttgataagccagcttcaggagtaaaggaagaatggtatgccagaatcactaaattaagaaagatggtggatcagcttttctgcaaaaaatttgcggaagccttggggagcactgaagccaaggctgtaccgtaccaaaaatttgaggcacacccgaatgatctgtacgtggaaggactgccagaaaacattcctttccgaagtccctcatggtatggaatcccaaggctggaaaaaatcattcaagtgggcaatcgaattaaatttgttattaaaagaccagaacttctgactcacagtaccactgaagttactcagccaagaacgaatacaccagtcaaagaagattggaatgtcagaattaccaagctacggaagcaagtggaagagatttttaatttgaaatttgcttagatttgttgacagcggtttcctggagtgctgtcttgagaacgattctgaggaggctcagcaagaaagagtgtttcagttgattgggtgtgtctgtcatggagaaggaactcaagctcttggactcaccgaggcagtaaaagtaccatatcctgtgtttgaatcaaacccggagttcttgtatgtggaaggcttgccagaggggattcccttccgaagccctacctggtttggaattccacgacttgaaaggatcgtccgcgggagtaataaaatcaagttcgttgttaaaaaacctgaactagttatttcctacttgcctcctgggatggctagtaaaataaacactaaagctttgcagtcccccaaaagaccacgaagtcctgggagtaattcaaaggttcctgaaattgaggtcaccgtggaaggccctaataacaacaatcctcaaacctcagctgttcgaaccccgacccagactaacggttctaacgttcccttcaagccacgagggagagagttttcctttgaggcctggaatgccaaaatcacggacctaaaacagaaagttgaaaatctcttcaatgagaaatgtggggaagctcttggccttaaacaagctgtgaaggtgccgttcgcgttatttgagtctttcccggaagacttttatgtggaaggcttacctgagggtgtgccattccgaagaccatcgacttttggcattccgaggctggagaagatactcagaaacaaagccaaaattaagttcatcattaaaaagcccgaaatgtttgagacggcgattaaggagagcacctcctctaagagccctcccagaaaaataaattcatcacccaatgttaatactactgcatcaggtgttgaagaccttaacatcattcaggtgacaattccagatgatgataatgaaagactctcgaaagttgaaaaagctagacagctaagagaacaagtgaatgacctctttagtcggaaatttggtgaagctattggtatgggttttcctgtgaaagttccctacaggaaaatcacaattaaccctggctgtgtggtggttgatggcatgcccccgggggtgtccttcaaagcccccagctacctggaaatcagctccatgagaaggatcttagactctgccgagtttatcaaattcacggtcattaggtaagtgagagtttcctgcttagtcacaggagcgaatctggagctcatgaggctgactcttctaaaatgcagccacaggtagtcatcgaatccggcttcctatgctgtgcaatcaacaaatcaaaataacttgtgtcatcattagaatgtcagatgtgcttctacgaactaagctgactcttttaattctttggcaaagggttggcaaactaggactgtttgccaaattcaggctgcctcctatttttagagtcttcctgaaacacagctacacccgtattatccatggctgctttcctgtcacagtgagtaagtagctgggactgagaaggcatggcctccaaagtctaaaatatttactctctagcactttgtagaaaaaccttagctaggcacagtggctaacgcctgtaatcccagcattttgggaggccaaggcaggcagatcacctgaggtcaggagttccagaccagcctggccaacatggtgaaatcccatctctacaaaaataaaacagttagctgggcatgatggcgggtgcctgtaatcccagctactcgggaggctgaggcaggatagtcgcttgaacccaggaggtggaggttgcaatgagccaagatcatgccactgcactccagcctggacgacagagtgagactccatcacaagaaaaaaagaactttgtcaacctctgtcttagggcgccttgtcacaggcttcgggtcagacggattcaaccttgcatcagccatttgttagccaggtcactctgttctttgtctgtaaatgagattgatcgttgttcccactgagagtgtcagctccttcccgtagagcaggcatgatgattgtactcacctctgacaccattgtgagtgccacattccttcccacgtccttgtcactgtaagagatgcccacctgagcaccaaccccaggttatcttcccctttgtcttccagccccccagaaacagctacgactcaacctacccaatcatttcatcatcagattgccactgtctctagttcaggtctcttgggactggcactcagaaatctcataataaatcctcttgaggcttctcatacactcgtcttcttccaatcttctttccctcaaaatctcatattttggttccacttcacccaccgtcattctccatatcactcccaggagttaggcaaaaagccccttccgttcttccgtatgttaaacttagaatcactctgttccctgctctgcgtttctattttttgtttttcctccatttactagtagcttaacactttctaacagtgttcttattattgatacgtatctatctcttccataagcttataaggtcacggataatacttctcattgtagtacgtaaatgacgtgggctagatatgagttgaataaacagttatacctgtaaattcttacagagtgaaaataaattgttatactttacaatttgtttctctctttagaccatttccaggacttgtgattaataaccgtgagtattttgtgaagtgttttgtttttgttttttcctggggtctgacgtgtgtgcgtgtgagtgtgtatacatgcttaacgtatatcacgttacttcacctatgtcagtaaccaggccaaatacttgttttagccctcagtaaaaacaccaggcacttcctagttgtaaaattattcaagcttcttaacttcctatcctcgatgcacttaatcataaaatggtaataatagcaccgattttgggggagtcgttccagtagatggaaagcatctggaacaggtgtcagcaagctcctgccgacgtgtatgcataaagttttattgaaaccaccatcgtgtccatttgtttatggcagaactgagagatggcagcagcaagtgtgtgcctgcaaaacctaaaatatttactaattggctctgcaagaaaagagtttgcatccccctaacctagaacagtgtctagcctctagtatgtgtttagcctacagtatgtgctcagcgaatacaatctatatttattactgcttttatgactgttataattactgtgcttggatttcgttacaaagtaagtcacaatgtgcctgcttctgttagtatttcagcacagtgcctggcacacatggggctctcaaatattgctgagcgagtgaacaaatgtcctttcaattccttaacgttgatgtcattttcaatagtattttgagccaaacttaattttgcgagtgtgttttgttttcttaactttattattaaaaatgtataaaagtgaggccaggcgtggtggctcacgcctgtaatcccagcagtttgggaggctgaggcaggcggatcagttgaggttgggagttggagaccagcccgtccaacatggtgaaagcctgtctctactaaaaatacaaaaatcagctgggtgtggtggcgcgtgcctgtaatcccagctactcaggaggctgaggcaggagagttgcttgaatcctagaggtggaggttgcagtgagctgagatcgtgccattgcactccagcctgggcaacaagagcaaaactctgtcccaataaataaataaataaaatgttctcttttgttcctgttcttgtgcggtagtgtggtatagagttttatggtaattactgtgaattagtgattctgagggacatatcagaactctgaggtttgtttccttctcatcttgagggaaacagcaaatgtatgttaaaatgcttttccaagggaacaacacatccttacattatttaaaccaatctgcttcattttcagagctggttgatcagagtgagtcagaaggccccgtgatacaagaatcagctgaaccaagccagttggaagttccagccacagaagaaataaaagagactgatggaagctctcagatcaagcaagaaccagaccccacgtggtagacctcttccctcctaggcttaaagtatcagtggttgagaagagcttttcggacctgttactaccccaagctgtgtaatatacttgtataacagaaataccttctatacaaacctttttttctacttttagatagaaatgtctactttttcagcagttctgtgaattaaagagcagagtgactgtgggtctggaatggctggtgtacttgggaatgtactatcaggattttacagcaatgctgggaaatgacagggaaaatgacaggaatgaatctcaccagattttttatgtactcagcagagccttgagttacggtgtttattttccaatcaagtgaagatatctcctacttctcctactggaacatctcagcttctgcagtgaagaaaaattcctgtgatagttcagttctttagtttttctatttgaaaaaaaaaaatcatttaaatgatcctttgttcacggctctccttaatgactgagtgaacagttcctatctgtatatttgactaaaccttttcctaagctatctctcatggttcctatgtttttttatcataattaaaagcaaaaccatctggatcacctaacagtcagaggtcagtatctcagcgtgtgaattatagaggaaatacagagagaacctcttccacttttacttttcgtccaaataaaatgcatggtgtaccagaagttgaagatcgggttgaggattggggctagctcgatgacactaaggccccaacatcgcgggacctgctgtggcgcggattcttaggaacgctgttctagccggccccctctccaggggtcgccgtggccggcattatttcctagttcttcttgtaaccctgaggtgccagcgcggggagtgaggaggggtcagggggctaaggatgcaacctctgacgttctgcgccttcctaggagagtcttacatgtgttgagatttcacaagcaatgcgagttgtaaaataccagctctacaagaagctaggctctgtgacggcatagttttcagtagctttatcacaatattcacaatggagaattatatgacatggtagcagaaataggcccttttatgtgttgcttctattttacctcaaattgtagatatagggtaatcaataaaatccatccatgcctttcacacactaagt

SEQ ID NO: 4867 - protein, 454 aa, Homo sapiens; identical to SEQ ID NO: 4239

SEQ ID NO: 4868 - DNA, 4149 bp, Homo sapiens
aaaaaaaaaaaaaaaaaaaaaaaaaaaagaaaaaagaaaaaaaaaaggaggaggaggaggagggtgagagagaagctgggagagcagagaaaaggggccaccggtcgcccccccgcttccccgcacgcgctctccagccgcggccgcccgcctgccgcggtcaccccggcctctgcctctgtcccccagtgatcggatcaaggcgctgagcgaggccctgcctgcggggcggccatgcggcggtgacaggagcgcgaccgacacgcacgggcccctcgccccctctcgcctcccgtccgctcgccagctcccctcagccgaggctgctccgcggcggccgcagcccgcgcgcggcccacactcgcctcccctcggcacccccggccccggagctgcctggaggcggccgcactcggggatcatggcccaagttgcaatgtccaccctccccgttgaagatgaggagtcctcggagagcaggatggtggtgacattcctcatgtcagctctcgagtccatgtgtaaagaactggccaagtccaaagccgaagtggcctgcattgcagtgtatgaaacagacgtgtttgtcgtcggaactgaaagaggacgtgcttttgtcaataccagaaaggattttcaaaaagattttgtaaaatattgtgttgaagaagaagaaaaagctgcagagatgcataaaatgaaatctacaacccaggcaaatcggatgagtgtagatgctgtagaaattgaaacactcagaaaaacagttgaggactatttctgcttttgctatgggaaagctttaggcaaatccacagtggtacctgtaccatatgagaagatgctgcgagaccagtcggctgtggtagtgcaggggcttccggaaggtgttgcctttaaacaccccgagaactatgatcttgcaaccctgaaatggattttggagaacaaagcagggatttcattcatcattaagagaccttttttagagccaaagaagcatgtaggtggtcgtgtgatggtaacagatgctgacaggtcaatactatctccaggtggaagttgtggccccatcaaagtgaaaactgaacccacagaagattctggaagccaccattcttcagagggcaatgaaggcacagaaatggaagtaccagcagaagattctactcaacatgtcccttcagaaacaagtgaggaccctgaagttgaggtgactattgaagatgatgattattctccaccgtctaagagaccaaaggccaatgagctaccgcagccaccagtcccggaacccgccaatgctgggaagcggaaagtgagggagttcaacttcgagaaatggaatgctcgcatcactgatctacgtaaacaagttgaagaattgtttgaaaggaaatatgctcaagccataaaagccaaaggtccggtgacgatcccgtaccctcttttccagtctcatgttgaagatctttatgtagaaggacttcctgaaggaattccttttagaaggccatctacttacggaattcctcgcctggagaggatattacttgcaaaggaaaggattcgttttgtgattaagaaacatgagcttctgaattcaacacgtgaagatttacagcttgataagccagcttcaggagtaaaggaagaatggtatgccagaatcactaaattaagaaagatggtggatcagcttttctgcaaaaaatttgcggaagccttggggagcactgaagccaaggctgtaccgtaccaaaaatttgaggcacacccgaatgatctgtacgtggaaggactgccagaaaacattcctttccgaagtccctcatggtatggaatcccaaggctggaaaaaatcattcaagtgggcaatcgaattaaatttgttattaaaagaccagaacttctgactcacagtaccactgaagttactcagccaagaacgaatacaccagtcaaagaagattggaatgtcagaattaccaagctacggaagcaagtggaagagatttttaatttgaaatttgctcaagctcttggactcaccgaggcagtaaaagtaccatatcctgtgtttgaatcaaacccggagttcttgaaaggatcgtccgcgggagtaataaaatcaagttcgttgttaaaaaacctgaactagttatttcctacttgcctcctgggatggctagtaaaataaacactaaagctttgcagtcccccaaaagaccacgaagtcctgggagtaattcaaaggttcctgaaattgaggtcaccgtggaaggccctaataacaacaatcctcaaacctcagctgttcgaaccccgacccagactaacggttctaacgttcccttcaagccacgagggagagagttttcctttgaggcctggaatgccaaaatcacggacctaaaacagaaagttgaaaatctcttcaatgagaaatgtggggaagctcttggccttaaacaagctgtgaaggtgccgttcgcgttatttgagtctttcccggaagacttttatgtggaaggcttacctgagggtgtgccattccgaagaccatcgacttttggcattccgaggctggagaagatactcagaaacaaagccaaaattaagttcatcattaaaaagcccgaaatgtttgagacggcgattaaggagagcacctcctctaagagccctcccagaaaaataaattcatcacccaatgttaatactactgcatcaggtgttgaagaccttaacatcattcaggtgacaattccagatgatgataatgaaagactctcgaaagttgaaaaagctagacagctaagagaacaagtgaatgacctctttagtcggaaatttggtgaagctattggtatgggttttcctgtgaaagttccctacaggaaaatcacaattaaccctggctgtgtggtggttgatggcatgcccccgggggtgtccttcaaagcccccagctacctggaaatcagctccatgagaaggatcttagactctgccgagtttatcaaattcacggtcattagaccatttccaggacttgtgattaataaccagctggttgatcagagtgagtcagaaggccccgtgatacaagaatcagctgaaccaagccagttggaagttccagccacagaagaaataaaagagactgatggaagctctcagatcaagcaagaaccagaccccacgtggtagacctcttccctcctaggcttaaagtatcagtggttgagaagagcttttcggacctgttactaccccaagctgtagccttgagttacggtgtttattttccaatcaagtgaagatatctcctacttctcctactggaacatctcagcttctgcagtgaagaaaaattcctgtgatagttcagttctttagtttttctatttgaaaaaaaaaaatcatttaaatgatcctttgttcacggctctccttaatgactgagtgaacagttcctatctgtatatttgactaaaccttttcctaagctatctctcatggttcctatgtttttttatcataattaaaagcaaaaccatctggatcacctaacagtcagaggtcagtatctcagcgtgtgaattatagaggaaatacagagagaacctcttccacttttacttttcgtccaaataaaatgcatggtgtaccagaagttgaagatcgggttgaggattggggctagctcgatgacactaaggccccaacatcgcgggacctgctgtggcgcggattcttaggaacgctgttctagccggccccctctccaggggtcgccgtggccggcattatttcctagttcttcttgtaaccctgaggtgccagcgcggggagtgaggaggggtcagggggctaaggatgcaacctctgacgttctgcgccttcctaggagagtcttacatgtgttgagatttcacaagcaatgcgagttgtaaaataccagctctacaagaagctaggctctgtgacggcatagttttcagtagctttatcacaatattcacaatggagaattatatgacatggtagcagaaataggcccttttatgtgttgcttctattttacctcaaattgtagatatagggtaatcaataaaatccatccatgcctttcacacactaagt

SEQ ID NO: 4869 - protein, 579 aa, Homo sapiens; identical to SEQ ID NO: 4111

SEQ ID NO: 4870 - DNA, 7823 bp, Homo sapiens
aaaaaaaaaaaaaaaaaaaaaaaaaaaagaaaaaagaaaaaaaaaaggaggaggaggaggagggtgagagagaagctgggagagcagagaaaaggggccaccggtcgcccccccgcttccccgcacgcgctctccagccgcggccgcccgcctgccgcggtcaccccggcctctgcctctgtcccccagtgatcggatcaaggcgctgagcgaggccctgcctgcggggcggccatgcggcggtgacaggagcgcgaccgacacgcacgggcccctcgccccctctcgcctcccgtccgctcgccagctcccctcagccgaggctgctccgcggcggccgcagcccgcgcgcggcccacactcgcctccccgttgaagatgaggagtcctcggagagcaggatggtggtgacattcctcatgtcagctctcgagtccatgtgtaaagaactggccaagtccaaagccgaagtggcctgcattgcagtgtatgaaacagacgtgtttgtcgtcggaactgaaagaggacgtgcttttgtcaataccagaaaggattttcaaaaagattttgtaaaatattgtgttgaagaagaagaaaaagctgcagagatgcataaaatgaaatctacaacccaggcaaatcggatgagtgtagatgctgtagaaattgaaacactcagaaaaacagttgaggactatttctgcttttgctatgggaaagctttaggcaaatccacagtggtacctgtaccatatgagaagatgctgcgagaccagtcggctgtggtagtgcaggggcttccggaaggtgttgcctttaaacaccccgagaactatgatcttgcaaccctgaaatggattttggagaacaaagcagggatttcattcatcattaagagaccttttttagagccaaagaagcatgtaggtggtcgtgtgatggtaacagatgctgacaggtcaatactatctccaggtggaagttgtggccccatcaaagtgaaaactgaacccacagaagattctggcatttccctggaaatggcagctgtgacagtaaaggaagaatcagaagatcctgattattatcaatataacattcaaggaagccaccattcttcagagggcaatgaaggcacagaaatggaagtaccagcagaagattctactcaacatgtcccttcagaaacaagtgaggaccctgaagttgaggtgactattgaagatgatgattattctccaccgtctaagagaccaaaggccaatgagctaccgcagccaccagtcccggaacccgccaatgctgggaagcggaaagtgagggagttcaacttcgagaaatggaatgctcgcatcactgatctacgtaaacaagttgaagaattgtttgaaaggaaatatgctcaagccataaaagccaaaggtccggtgacgatcccgtaccctcttttccagtctcatgttgaagatctttatgtagaaggacttcctgaaggaattccttttagaaggccatctacttacggaattcctcgcctggagaggatattacttgcaaaggaaaggattcgttttgtgattaagaaacatgagcttctgaattcaacacgtgaagatttacagcttgataagccagcttcaggagtaaaggaagaatggtatgccagaatcactaaattaagaaagatggtggatcagcttttctgcaaaaaatttgcggaagccttggggagcactgaagccaaggctgtaccgtaccaaaaatttgaggcacacccgaatgatctgtacgtggaaggactgccagaaaacattcctttccgaagtccctcatggtatggaatcccaaggctggaaaaaatcattcaagtgggcaatcgaattaaatttgttattaaaagaccagaacttctgactcacagtaccactgaagttactcagccaagaacgaatacaccagctcaagctcttggactcaccgaggcagtaaaagtaccatatcctgtgtttgaatcaaacccggagttcttgtatgtggaaggcttgccagaggggattcccttccgaagccctacctggtttggaattccacgacttgaaaggatcgtccgcgggagtaataaaatcaagttcgttgttaaaaaacctgaactagttatttcctacttgcctcctgggatggctagtaaaataaacactaaagctttgcagtcccccaaaagaccacgaagtcctgggagtaattcaaaggttcctgaaattgaggtcaccgtggaaggccctaataacaacaatcctcaaacctcagctgttcgaaccccgacccagactaacggttctaacgttcccttcaagccacgagggagagagttttcctttgaggcctggaatgccaaaatcacggacctaaaacagaaagttgaaaatctcttcaatgagaaatgtggggaagctcttggccttaaacaagctgtgaaggtgccgttcgcgttatttgagtctttcccggaagacttttatgtggaaggcttacctgagggtgtgccattccgaagaccatcgacttttggcattccgaggctggagaagatactcagaaacaaagccaaaattaagttcatcattaaaaagcccgaaatgtttgagacggcgattaaggagagcacctcctctaagagccctcccagaaaaataaattcatcacccaatgttaatactactgcatcaggtgttgaagaccttaacatcattcaggtgacaattccagatgatgataatgaaagactctcgaaagttgaaaaagctagacagctaagagaacaagtgaatgacctctttagtcggaaatttggtgaagctattggtatgggttttcctgtgaaagttccctacaggaaaatcacaattaaccctggctgtgtggtggttgatggcatgcccccgggggtgtccttcaaagcccccagctacctggaaatcagctccatgagaaggatcttagactctgccgagtttatcaaattcacggtcattaggtaagtgagagtttcctgcttagtcacaggagcgaatctggagctcatgaggctgactcttctaaaatgcagccacaggtagtcatcgaatccggcttcctatgctgtgcaatcaacaaatcaaaataacttgtgtcatcattagaatgtcagatgtgcttctacgaactaagctgactcttttaattctttggcaaagggttggcaaactaggactgtttgccaaattcaggctgcctcctatttttagagtcttcctgaaacacagctacacccgtattatccatggctgctttcctgtcacagtgagtaagtagctgggactgagaaggcatggcctccaaagtctaaaatatttactctctagcactttgtagaaaaaccttagctaggcacagtggctaacgcctgtaatcccagcattttgggaggccaaggcaggcagatcacctgaggtcaggagttccagaccagcctggccaacatggtgaaatcccatctctacaaaaataaaacagttagctgggcatgatggcgggtgcctgtaatcccagctactcgggaggctgaggcaggatagtcgcttgaacccaggaggtggaggttgcaatgagccaagatcatgccactgcactccagcctggacgacagagtgagactccatcacaagaaaaaaagaactttgtcaacctctgtcttagggcgccttgtcacaggcttcgggtcagacggattcaaccttgcatcagccatttgttagccaggtcactctgttctttgtctgtaaatgagattgatcgttgttcccactgagagtgtcagctccttcccgtagagcaggcatgatgattgtactcacctctgacaccattgtgagtgccacattccttcccacgtccttgtcactgtaagagatgcccacctgagcaccaaccccaggttatcttcccctttgtcttccagccccccagaaacagctacgactcaacctacccaatcatttcatcatcagattgccactgtctctagttcaggtctcttgggactggcactcagaaatctcataataaatcctcttgaggcttctcatacactcgtcttcttccaatcttctttccctcaaaatctcatattttggttccacttcacccaccgtcattctccatatcactcccaggagttaggcaaaaagccccttccgttcttccgtatgttaaacttagaatcactctgttccctgctctgcgtttctattttttgtttttcctccatttactagtagcttaacactttctaacagtgttcttattattgatacgtatctatctcttccataagcttataaggtcacggataatacttctcattgtagtacgtaaatgacgtgggctagatatgagttgaataaacagttatacctgtaaattcttacagagtgaaaataaattgttatactttacaatttgtttctctctttagaccatttccaggacttgtgattaataaccgtgagtattttgtgaagtgttttgtttttgttttttcctggggtctgacgtgtgtgcgtgtgagtgtgtatacatgcttaacgtatatcacgttacttcacctatgtcagtaaccaggccaaatacttgttttagccctcagtaaaaacaccaggcacttcctagttgtaaaattattcaagcttcttaacttcctatcctcgatgcacttaatcataaaatggtaataatagcaccgattttgggggagtcgttccagtagatggaaagcatctggaacaggtgtcagcaagctcctgccgacgtgtatgcataaagttttattgaaaccaccatcgtgtccatttgtttatggcagaactgagagatggcagcagcaagtgtgtgcctgcaaaacctaaaatatttactaattggctctgcaagaaaagagtttgcatccccctaacctagaacagtgtctagcctctagtatgtgtttagcctacagtatgtgctcagcgaatacaatctatatttattactgcttttatgactgttataattactgtgcttggatttcgttacaaagtaagtcacaatgtgcctgcttctgttagtatttcagcacagtgcctggcacacatggggctctcaaatattgctgagcgagtgaacaaatgtcctttcaattccttaacgttgatgtcattttcaatagtattttgagccaaacttaattttgcgagtgtgttttgttttcttaactttattattaaaaatgtataaaagtgaggccaggcgtggtggctcacgcctgtaatcccagcagtttgggaggctgaggcaggcggatcagttgaggttgggagttggagaccagcccgtccaacatggtgaaagcctgtctctactaaaaatacaaaaatcagctgggtgtggtggcgcgtgcctgtaatcccagctactcaggaggctgaggcaggagagttgcttgaatcctagaggtggaggttgcagtgagctgagatcgtgccattgcactccagcctgggcaacaagagcaaaactctgtcccaataaataaataaataaaatgttctcttttgttcctgttcttgtgcggtagtgtggtatagagttttatggtaattactgtgaattagtgattctgagggacatatcagaactctgaggtttgtttccttctcatcttgagggaaacagcaaatgtatgttaaaatgcttttccaagggaacaacacatccttacattatttaaaccaatctgcttcattttcagagctggttgatcagagtgagtcagaaggccccgtgatacaagaatcagctgaaccaagccagttggaagttccagccacagaagaaataaaagagactgatggaagctctcagatcaagcaagaaccagaccccacgtggtagacctcttccctcctagggtaaatcagcttctgtgtcagggatgctgtgtggtgtccatctgaaccccctgcatacgcgtagctaatgtgatctccccactttcacataagatggtggccctgccttcagggaatgtgggagccaggtgggagccttcccggatatttaagctagaagattctacagggagattctccttggatcaatatatgtctctcagtcaaagatgtaaaagcacttttgccttaaaaagaatgttctgtttctaaatagagtcaacgttgtcctcctcattggaattcactatgagtcagaatcattagactgacttttttttttccatagtaatagtattttgcagagtctcacagagctgcagatcttttgttcatcttgcagagttaacaagtctgatcctgttagtccagatttcttaaatttggccaagttataataggagcagtagcttgagacccgaagtcaggaaactttgacaatggatttttttttttaatccagagacttgtactggaatttgccttaccctgtcagctcatggacttaaggtttcatcccgctttatgagtgcttctgaatccaagtcattgttacctgaatttgcaaattaagttgtgatattcgtgactgttaaattcctgtaattagattaacctctttgcttgcttgtttgttttctctcctattttagcttaaagtatcagtggttgagaagagcttttcggacctgttactaccccaagctgtgtaatatacttgtataacagaaataccttctatacaaacctttttttctacttttagatagaaatgtctactttttcagcagttctgtgaattaaagagcagagtgactgtgggtctggaatggctggtgtacttgggaatgtactatcaggattttacagcaatgctgggaaatgacagggaaaatgacaggaatgaatctcaccagattttttatgtactcagcagagccttgagttacggtgtttattttccaatcaagtgaagatatctcctacttctcctactggaacatctcagcttctgcagtgaagaaaaattcctgtgatagttcagttctttagtttttctatttgaaaaaaaaaaatcatttaaatgatcctttgttcacggctctccttaatgactgagtgaacagttcctatctgtatatttgactaaaccttttcctaagctatctctcatggttcctatgtttttttatcataattaaaagcaaaaccatctggatcacctaacagtcagaggtcagtatctcagcgtgtgaattatagaggaaatacagagagaacctcttccacttttacttttcgtccaaataaaatgcatggtgtaccagaagttgaagatcgggttgaggattggggctagctcgatgacactaaggccccaacatcgcgggacctgctgtggcgcggattcttaggaacgctgttctagccggccccctctccaggggtcgccgtggccggcattatttcctagttcttcttgtaaccctgaggtgccagcgcggggagtgaggaggggtcagggggctaaggatgcaacctctgacgttctgcgccttcctaggagagtcttacatgtgttgagatttcacaagcaatgcgagttgtaaaataccagctctacaagaagctaggctctgtgacggcatagttttcagtagctttatcacaatattcacaatggagaattatatgacatggtagcagaaataggcccttttatgtgttgcttctattttacctcaaattgtagatatagggtaatcaataaaatccatccatgcctttcacacactaagt

SEQ ID NO: 4871 - protein, 878 aa, Homo sapiens
MVVTFLMSALESMCKELAKSKAEVACIAVYETDVFVVGTERGRAFVNTRKDFQKDFVKYCVEEEEKAAEMHKMKSTTQANRMSVDAVEIETLRKTVEDYFCFCYGKALGKSTVVPVPYEKMLRDQSAVVVQGLPEGVAFKHPENYDLATLKWILENKAGISFIIKRPFLEPKKHVGGRVMVTDADRSILSPGGSCGPIKVKTEPTEDSGISLEMAAVTVKEESEDPDYYQYNIQGSHHSSEGNEGTEMEVPAEDSTQHVPSETSEDPEVEVTIEDDDYSPPSKRPKANELPQPPVPEPANAGKRKVREFNFEKWNARITDLRKQVEELFERKYAQAIKAKGPVTIPYPLFQSHVEDLYVEGLPEGIPFRRPSTYGIPRLERILLAKERIRFVIKKHELLNSTREDLQLDKPASGVKEEWYARITKLRKMVDQLFCKKFAEALGSTEAKAVPYQKFEAHPNDLYVEGLPENIPFRSPSWYGIPRLEKIIQVGNRIKFVIKRPELLTHSTTEVTQPRTNTPAQALGLTEAVKVPYPVFESNPEFLYVEGLPEGIPFRSPTWFGIPRLERIVRGSNKIKFVVKKPELVISYLPPGMASKINTKALQSPKRPRSPGSNSKVPEIEVTVEGPNNNNPQTSAVRTPTQTNGSNVPFKPRGREFSFEAWNAKITDLKQKVENLFNEKCGEALGLKQAVKVPFALFESFPEDFYVEGLPEGVPFRRPSTFGIPRLEKILRNKAKIKFIIKKPEMFETAIKESTSSKSPPRKINSSPNVNTTASGVEDLNIIQVTIPDDDNERLSKVEKARQLREQVNDLFSRKFGEAIGMGFPVKVPYRKITINPGCVVVDGMPPGVSFKAPSYLEISSMRRILDSAEFIKFTVIR

SEQ ID NO: 4872 - DNA, 7332 bp, Homo sapiens
aaaaaaaaaaaaaaaaaaaaaaaaaaaagaaaaaagaaaaaaaaaaggaggaggaggaggagggtgagagagaagctgggagagcagagaaaaggggccaccggtcgcccccccgcttccccgcacgcgctctccagccgcggccgcccgcctgccgcggtcaccccggcctctgcctctgtcccccagtgatcggatcaaggcgctgagcgaggccctgcctgcggggcggccatgcggcggtgacaggagcgcgaccgacacgcacgggcccctcgccccctctcgcctcccgtccgctcgccagctcccctcagccgaggctgctccgcggcggccgcagcccgcgcgcggcccacactcgcctcccctcggcacccccggccccggagctgcctggaggcggccgcactcggggatcatggcccaagttgcaatgtccaccctccccgttgaagatgaggagtcctcggagagcaggatggtggtgacattcctcatgtcagctctcgagtccatgtgtaaagaactggccaagtccaaagccgaagtggcctgcattgcagtgtatgaaacagacgtgtttgtcgtcggaactgaaagaggacgtgcttttgtcaataccagaaaggattttcaaaaagattttgtaaaatattgtgttgaagaagaagaaaaagctgcagagatgcataaaatgaaatctacaacccaggcaaatcggatgagtgtagatgctgtagaaattgaaacactcagaaaaacagttgaggactatttctgcttttgctatgggaaagctttaggcaaatccacagtggtacctgtaccatatgagaagatgctgcgagaccagtcggctgtggtagtgcaggggcttccggaaggtgttgcctttaaacaccccgagaactatgatcttgcaaccctgaaatggattttggagaacaaagcagggatttcattcatcattaagagaccttttttagagccaaagaagcatgtaggtggtcgtgtgatggtaacagatgctgacaggtcaatactatctccaggtggaagttgtggccccatcaaagtgaaaactgaacccacagaagattctggcatttccctggaaatggcagctgtgacagtaaaggaagaatcagaagatcctgattattatcaatataacattcaaggaagccaccattcttcagagggcaatgaaggcacagaaatggaagtaccagcagaagatgatgattattctccaccgtctaagagaccaaaggccaatgagctaccgcagccaccagtcccggaacccgccaatgctgggaagcggaaagtgagggagttcaacttcgagaaatggaatgctcgcatcactgatctacgtaaacaagttgaagaattgtttgaaaggaaatatgctcaagccataaaagccaaaggtccggtgacgatcccgtaccctcttttccagtctcatgttgaagatctttatgtagaaggacttcctgaaggaattccttttagaaggccatctacttacggaattcctcgcctggagaggatattacttgcaaaggaaaggattcgttttgtgattaagaaacatgagcttctgaattcaacacgtgaagatttacagcttgataagccagcttcaggagtaaaggaagaatggtatgccagaatcactaaattaagaaagatggtggatcagcttttctgcaaaaaatttgcggaagccttggggagcactgaagccaaggctgtaccgtaccaaaaatttgaggcacacccgaatgatctgtacgtggaaggactgccagaaaacattcctttccgaagtccctcatggtatggaatcccaaggctggaaaaaatcattcaagtgggcaatcgaattaaatttgttattaaaagaccagaacttctgactcacagtaccactgaagttactcagccaagaacgaatacaccagtcaaagaagattggaatgtcagaattaccaagctacggaagcaagtggaagagatttttaatttgaaatttgcttagatttgttgacagcggtttcctggagtgctgtcttgagaacgattctgaggaggctcagcaagaaagagtgtttcagttgattgggtgtgtctgtcatggagaaggaactcaagctcttggactcaccgaggcagtaaaagtaccatatcctgtgtttgaatcaaacccggagttcttgtatgtggaaggcttgccagaggggattcccttccgaagccctacctggtttggaattccacgacttgaaaggatcgtccgcgggagtaataaaatcaagttcgttgttaaaaaacctgaactagttatttcctacttgcctcctgggatggctagtaaaataaacactaaagctttgcagtcccccaaaagaccacgaagtcctgggagtaattcaaaggttcctgaaattgaggtcaccgtggaaggccctaataacaacaatcctcaaacctcagctgttcgaaccccgacccagactaacggttctaacgttcccttcaagccacgagggagagagttttcctttgaggcctggaatgccaaaatcacggacctaaaacagaaagttgaaaatctcttcaatgagaaatgtggggaagctcttggccttaaacaagctgtgaaggtgccgttcgcgttatttgagtctttcccggaagacttttatgtggaaggcttacctgagggtgtgccattccgaagaccatcgacttttggcattccgaggctggagaagatactcagaaacaaagccaaaattaagttcatcattaaaaagcccgaaatgtttgagacggcgattaaggagagcacctcctctaagagccctcccagaaaaataaattcatcacccaatgttaatactactgcatcaggtgttgaagaccttaacatcattcaggtgacaattccagatgatgataatgaaagactctcgaaagttgaaaaagctagacagctaagagaacaagtgaatgacctctttagtcggaaatttggtgaagctattggtatgggttttcctgtgaaagttccctacaggaaaatcacaattaaccctggctgtgtggtggttgatggcatgcccccgggggtgtccttcaaagcccccagctacctggaaatcagctccatgagaaggatcttagactctgccgagtttatcaaattcacggtcattaggtaagtgagagtttcctgcttagtcacaggagcgaatctggagctcatgaggctgactcttctaaaatgcagccacaggtagtcatcgaatccggcttcctatgctgtgcaatcaacaaatcaaaataacttgtgtcatcattagaatgtcagatgtgcttctacgaactaagctgactcttttaattctttggcaaagggttggcaaactaggactgtttgccaaattcaggctgcctcctatttttagagtcttcctgaaacacagctacacccgtattatccatggctgctttcctgtcacagtgagtaagtagctgggactgagaaggcatggcctccaaagtctaaaatatttactctctagcactttgtagaaaaaccttagctaggcacagtggctaacgcctgtaatcccagcattttgggaggccaaggcaggcagatcacctgaggtcaggagttccagaccagcctggccaacatggtgaaatcccatctctacaaaaataaaacagttagctgggcatgatggcgggtgcctgtaatcccagctactcgggaggctgaggcaggatagtcgcttgaacccaggaggtggaggttgcaatgagccaagatcatgccactgcactccagcctggacgacagagtgagactccatcacaagaaaaaaagaactttgtcaacctctgtcttagggcgccttgtcacaggcttcgggtcagacggattcaaccttgcatcagccatttgttagccaggtcactctgttctttgtctgtaaatgagattgatcgttgttcccactgagagtgtcagctccttcccgtagagcaggcatgatgattgtactcacctctgacaccattgtgagtgccacattccttcccacgtccttgtcactgtaagagatgcccacctgagcaccaaccccaggttatcttcccctttgtcttccagccccccagaaacagctacgactcaacctacccaatcatttcatcatcagattgccactgtctctagttcaggtctcttgggactggcactcagaaatctcataataaatcctcttgaggcttctcatacactcgtcttcttccaatcttctttccctcaaaatctcatattttggttccacttcacccaccgtcattctccatatcactcccaggagttaggcaaaaagccccttccgttcttccgtatgttaaacttagaatcactctgttccctgctctgcgtttctattttttgtttttcctccatttactagtagcttaacactttctaacagtgttcttattattgatacgtatctatctcttccataagcttataaggtcacggataatacttctcattgtagtacgtaaatgacgtgggctagatatgagttgaataaacagttatacctgtaaattcttacagagtgaaaataaattgttatactttacaatttgtttctctctttagaccatttccaggacttgtgattaataaccgtgagtattttgtgaagtgttttgtttttgttttttcctggggtctgacgtgtgtgcgtgtgagtgtgtatacatgcttaacgtatatcacgttacttcacctatgtcagtaaccaggccaaatacttgttttagccctcagtaaaaacaccaggcacttcctagttgtaaaattattcaagcttcttaacttcctatcctcgatgcacttaatcataaaatggtaataatagcaccgattttgggggagtcgttccagtagatggaaagcatctggaacaggtgtcagcaagctcctgccgacgtgtatgcataaagttttattgaaaccaccatcgtgtccatttgtttatggcagaactgagagatggcagcagcaagtgtgtgcctgcaaaacctaaaatatttactaattggctctgcaagaaaagagtttgcatccccctaacctagaacagtgtctagcctctagtatgtgtttagcctacagtatgtgctcagcgaatacaatctatatttattactgcttttatgactgttataattactgtgcttggatttcgttacaaagtaagtcacaatgtgcctgcttctgttagtatttcagcacagtgcctggcacacatggggctctcaaatattgctgagcgagtgaacaaatgtcctttcaattccttaacgttgatgtcattttcaatagtattttgagccaaacttaattttgcgagtgtgttttgttttcttaactttattattaaaaatgtataaaagtgaggccaggcgtggtggctcacgcctgtaatcccagcagtttgggaggctgaggcaggcggatcagttgaggttgggagttggagaccagcccgtccaacatggtgaaagcctgtctctactaaaaatacaaaaatcagctgggtgtggtggcgcgtgcctgtaatcccagctactcaggaggctgaggcaggagagttgcttgaatcctagaggtggaggttgcagtgagctgagatcgtgccattgcactccagcctgggcaacaagagcaaaactctgtcccaataaataaataaataaaatgttctcttttgttcctgttcttgtgcggtagtgtggtatagagttttatggtaattactgtgaattagtgattctgagggacatatcagaactctgaggtttgtttccttctcatcttgagggaaacagcaaatgtatgttaaaatgcttttccaagggaacaacacatccttacattatttaaaccaatctgcttcattttcagagctggttgatcagagtgagtcagaaggccccgtgatacaagaatcagctgaaccaagccagttggaagttccagccacagaagaaataaaagagactgatggaagctctcagatcaagcaagaaccagaccccacgtggtagacctcttccctcctaggcttaaagtatcagtggttgagaagagcttttcggacctgttactaccccaagctgtgtaatatacttgtataacagaaataccttctatacaaacctttttttctacttttagatagaaatgtctactttttcagcagttctgtgaattaaagagcagagtgactgtgggtctggaatggctggtgtacttgggaatgtactatcaggattttacagcaatgctgggaaatgacagggaaaatgacaggaatgaatctcaccagattttttatgtactcagcagagccttgagttacggtgtttattttccaatcaagtgaagatatctcctacttctcctactggaacatctcagcttctgcagtgaagaaaaattcctgtgatagttcagttctttagtttttctatttgaaaaaaaaaaatcatttaaatgatcctttgttcacggctctccttaatgactgagtgaacagttcctatctgtatatttgactaaaccttttcctaagctatctctcatggttcctatgtttttttatcataattaaaagcaaaaccatctggatcacctaacagtcagaggtcagtatctcagcgtgtgaattatagaggaaatacagagagaacctcttccacttttacttttcgtccaaataaaatgcatggtgtaccagaagttgaagatcgggttgaggattggggctagctcgatgacactaaggccccaacatcgcgggacctgctgtggcgcggattcttaggaacgctgttctagccggccccctctccaggggtcgccgtggccggcattatttcctagttcttcttgtaaccctgaggtgccagcgcggggagtgaggaggggtcagggggctaaggatgcaacctctgacgttctgcgccttcctaggagagtcttacatgtgttgagatttcacaagcaatgcgagttgtaaaataccagctctacaagaagctaggctctgtgacggcatagttttcagtagctttatcacaatattcacaatggagaattatatgacatggtagcagaaataggcccttttatgtgttgcttctattttacctcaaattgtagatatagggtaatcaataaaatccatccatgcctttcacacactaagt

SEQ ID NO: 4873 - protein, 543 aa, Homo sapiens; identical to SEQ ID NO: 4195

SEQ ID NO: 4874 - DNA, 7283 bp, Homo sapiens
aaaaaaaaaaaaaaaaaaaaaaaaaaaagaaaaaagaaaaaaaaaaggaggaggaggaggagggtgagagagaagctgggagagcagagaaaaggggccaccggtcgcccccccgcttccccgcacgcgctctccagccgcggccgcccgcctgccgcggtcaccccggcctctgcctctgtcccccagtgatcggatcaaggcgctgagcgaggccctgcctgcggggcggccatgcggcggtgacaggagcgcgaccgacacgcacgggcccctcgccccctctcgcctcccgtccgctcgccagctcccctcagccgaggctgctccgcggcggccgcagcccgcgcgcggcccacactcgcctcccctcggcacccccggccccggagctgcctggaggcggccgcactcggggatcatggcccaagttgcaatgtccaccctccccgttgaagatgaggagtcctcggagagcaggatggtggtgacattcctcatgtcagctctcgagtccatgtgtaaagaactggccaagtccaaagccgaagtggcctgcattgcagtgtatgaaacagacgtgtttgtcgtcggaactgaaagaggacgtgcttttgtcaataccagaaaggattttcaaaaagattttgtaaaatattgtgttgaagaagaagaaaaagctgcagagatgcataaaatgaaatctacaacccaggcaaatcggatgagtgtagatgctgtagaaattgaaacactcagaaaaacagttgaggactatttctgcttttgctatgggaaagctttaggcaaatccacagtggtacctgtaccatatgagaagatgctgcgagaccagtcggctgtggtagtgcaggggcttccggaaggtgttgcctttaaacaccccgagaactatgatcttgcaaccctgaaatggattttggagaacaaagcagggatttcattcatcattaagagaccttttttagagccaaagaagcatgtaggtggtcgtgtgatggtaacagatgctgacaggtcaatactatctccaggtggaagttgtggccccatcaaagtgaaaactgaacccacagaagattctggcatttccctggaaatggcagctgtgacagtaaaggaagaatcagaagatcctgattattatcaatataacattcaaggaagccaccattcttcagagggcaatgaaggcacagaaatggaagtaccagcagaagattctactcaacatgtcccttcagaaacaagtgaggaccctgaagttgaggtgactattgaagatgatgattattctccaccgtctaagagaccaaaggccaatgagctaccgcagccaccagtcccggaacccgccaatgctgggaagcggaaagtgagggagttcaacttcgagaaatggaatgctcgcatcactgatctacgtaaacaagttgaagaattgtttgaaaggaaatatgctcaagccataaaagccaaaggtccggtgacgatcccgtaccctcttttccagtctcatgttgaagatctttatgtagaaggacttcctgaaggaattccttttagaaggccatctacttacggaattcctcgcctggagaggatattacttgcaaaggaaaggattcgttttgtgattaagaaacatgagcttctgaattcaacacgtgaagatttacagcttgataagccagcttcaggagtaaaggaagaatggtatgccagaatcactaaattaagaaagatggtggatcagcttttctgcaaaaaatttgcggaagccttggggagcactgaagccaaggctgtaccgtaccaaaaatttgaggcacacccgaatgatctgtacgtggaaggactgccagaaaacattcctttccgaagtccctcatggtatggaatcccaaggctggaaaaaatcattcaagtgggcaatcgaattaaatttgttattaaaagaccagaacttctgactcacagtaccactgaagttactcagccaagaacgaatacaccagtcaaagaagattggaatgtcagaattaccaagctacggaagcaagtggaagagatttttaatttgaaatttgctcaagctcttggactcaccgaggcagtaaaagtaccatatcctgtgtttgaatcaaacccggagttcttgtatgtggaaggcttgccagaggggattcccttccgaagccctacctggtttggaattccacgacttgaaaggatcgtccgcgggagtaataaaatcaagttcgttgttaaaaaacctgaactagttatttcctacttgcctcctgggatggctagtaaaataaacactaaagctttgcagtcccccaaaagaccacgaagtcctgggagtaattcaaaggttcctgaaattgaggtcaccgtggaaggccctaataacaacaatcctcaaacctcagctgttcgaaccccgacccagactaacggttctaacgttcccttcaagccacgagggagagagttttcctttgaggcctggaatgccaaaatcacggacctaaaacagaaagttgaaaatctcttcaatgagaaatgtggggaagctcttggccttaaacaagctgtgaaggtgccgttcgcgttatttgagtctttcccggaagacttttatgtggaaggcttacctgagggtgtgccattccgaagaccatcgacttttggcattccgaggctggagaagatactcagaaacaaagccaaaattaagttcatcattaaaaagcccgaaatgtttgagacggcgattaaggagagcacctcctctaagagccctcccagaaaaataaattcatcacccaatgttaatactactgcatcaggtgttgaagaccttaacatcattcaggtgacaattccagatgatgataatgaaagactctcgaaagttgaaaaagctagacagctaagagaacaagtgaatgacctctttagtcggaaatttggtgaagctattggtatgggttttcctgtgaaagttccctacaggaaaatcacaattaaccctggctgtgtggtggttgatggcatgcccccgggggtgtccttcaaagcccccagctacctggaaatcagctccatgagaaggatcttagactctgccgagtttatcaaattcacggtcattaggtaagtgagagtttcctgcttagtcacaggagcgaatctggagctcatgaggctgactcttctaaaatgcagccacaggtagtcatcgaatccggcttcctatgctgtgcaatcaacaaatcaaaataacttgtgtcatcattagaatgtcagatgtgcttctacgaactaagctgactcttttaattctttggcaaagggttggcaaactaggactgtttgccaaattcaggctgcctcctatttttagagtcttcctgaaacacagctacacccgtattatccatggctgctttcctgtcacagtgagtaagtagctgggactgagaaggcatggcctccaaagtctaaaatatttactctctagcactttgtagaaaaaccttagctaggcacagtggctaacgcctgtaatcccagcattttgggaggccaaggcaggcagatcacctgaggtcaggagttccagaccagcctggccaacatggtgaaatcccatctctacaaaaataaaacagttagctgggcatgatggcgggtgcctgtaatcccagctactcgggaggctgaggcaggatagtcgcttgaacccaggaggtggaggttgcaatgagccaagatcatgccactgcactccagcctggacgacagagtgagactccatcacaagaaaaaaagaactttgtcaacctctgtcttagggcgccttgtcacaggcttcgggtcagacggattcaaccttgcatcagccatttgttagccaggtcactctgttctttgtctgtaaatgagattgatcgttgttcccactgagagtgtcagctccttcccgtagagcaggcatgatgattgtactcacctctgacaccattgtgagtgccacattccttcccacgtccttgtcactgtaagagatgcccacctgagcaccaaccccaggttatcttcccctttgtcttccagccccccagaaacagctacgactcaacctacccaatcatttcatcatcagattgccactgtctctagttcaggtctcttgggactggcactcagaaatctcataataaatcctcttgaggcttctcatacactcgtcttcttccaatcttctttccctcaaaatctcatattttggttccacttcacccaccgtcattctccatatcactcccaggagttaggcaaaaagccccttccgttcttccgtatgttaaacttagaatcactctgttccctgctctgcgtttctattttttgtttttcctccatttactagtagcttaacactttctaacagtgttcttattattgatacgtatctatctcttccataagcttataaggtcacggataatacttctcattgtagtacgtaaatgacgtgggctagatatgagttgaataaacagttatacctgtaaattcttacagagtgaaaataaattgttatactttacaatttgtttctctctttagaccatttccaggacttgtgattaataaccgtgagtattttgtgaagtgttttgtttttgttttttcctggggtctgacgtgtgtgcgtgtgagtgtgtatacatgcttaacgtatatcacgttacttcacctatgtcagtaaccaggccaaatacttgttttagccctcagtaaaaacaccaggcacttcctagttgtaaaattattcaagcttcttaacttcctatcctcgatgcacttaatcataaaatggtaataatagcaccgattttgggggagtcgttccagtagatggaaagcatctggaacaggtgtcagcaagctcctgccgacgtgtatgcataaagttttattgaaaccaccatcgtgtccatttgtttatggcagaactgagagatggcagcagcaagtgtgtgcctgcaaaacctaaaatatttactaattggctctgcaagaaaagagtttgcatccccctaacctagaacagtgtctagcctctagtatgtgtttagcctacagtatgtgctcagcgaatacaatctatatttattactgcttttatgactgttataattactgtgcttggatttcgttacaaagtaagtcacaatgtgcctgcttctgttagtatttcagcacagtgcctggcacacatggggctctcaaatattgctgagcgagtgaacaaatgtcctttcaattccttaacgttgatgtcattttcaatagtattttgagccaaacttaattttgcgagtgtgttttgttttcttaactttattattaaaaatgtataaaagtgaggccaggcgtggtggctcacgcctgtaatcccagcagtttgggaggctgaggcaggcggatcagttgaggttgggagttggagaccagcccgtccaacatggtgaaagcctgtctctactaaaaatacaaaaatcagctgggtgtggtggcgcgtgcctgtaatcccagctactcaggaggctgaggcaggagagttgcttgaatcctagaggtggaggttgcagtgagctgagatcgtgccattgcactccagcctgggcaacaagagcaaaactctgtcccaataaataaataaataaaatgttctcttttgttcctgttcttgtgcggtagtgtggtatagagttttatggtaattactgtgaattagtgattctgagggacatatcagaactctgaggtttgtttccttctcatcttgagggaaacagcaaatgtatgttaaaatgcttttccaagggaacaacacatccttacattatttaaaccaatctgcttcattttcagagctggttgatcagagtgagtcagaaggccccgtgatacaagaatcagctgaaccaagccagttggaagttccagccacagaagaaataaaagagactgatggaagctctcagatcaagcaagaaccagaccccacgtggtagacctcttccctcctaggcttaaagtatcagtggttgagaagagcttttcggacctgttactaccccaagctgtgtaatatacttgtataacagaaataccttctatacaaacctttttttctacttttagatagaaatgtctactttttcagcagttctgtgaattaaagagcagagtgactgtgggtctggaatggctggtgtacttgggaatgtactatcaggattttacagcaatgctgggaaatgacagggaaaatgacaggaatgaatctcaccagattttttatgtactcagcagagccttgagttacggtgtttattttccaatcaagtgaagatatctcctacttctcctactggaacatctcagcttctgcagtgaagaaaaattcctgtgatagttcagttctttagtttttctatttgaaaaaaaaaaatcatttaaatgatcctttgttcacggctctccttaatgactgagtgaacagttcctatctgtatatttgactaaaccttttcctaagctatctctcatggttcctatgtttttttatcataattaaaagcaaaaccatctggatcacctaacagtcagaggtcagtatctcagcgtgtgaattatagaggaaatacagagagaacctcttccacttttacttttcgtccaaataaaatgcatggtgtaccagaagttgaagatcgggttgaggattggggctagctcgatgacactaaggccccaacatcgcgggacctgctgtggcgcggattcttaggaacgctgttctagccggccccctctccaggggtcgccgtggccggcattatttcctagttcttcttgtaaccctgaggtgccagcgcggggagtgaggaggggtcagggggctaaggatgcaacctctgacgttctgcgccttcctaggagagtcttacatgtgttgagatttcacaagcaatgcgagttgtaaaataccagctctacaagaagctaggctctgtgacggcatagttttcagtagctttatcacaatattcacaatggagaattatatgacatggtagcagaaataggcccttttatgtgttgcttctattttacctcaaattgtagatatagggtaatcaataaaatccatccatgcctttcacacactaagt

SEQ ID NO: 4875 - protein, 922 aa, Homo sapiens; identical to SEQ ID NO: 4059

SEQ ID NO: 4876 - DNA, 8087 bp, Homo sapiens
aaaaaaaaaaaaaaaaaaaaaaaaaaaagaaaaaagaaaaaaaaaaggaggaggaggaggagggtgagagagaagctgggagagcagagaaaaggggccaccggtcgcccccccgcttccccgcacgcgctctccagccgcggccgcccgcctgccgcggtcaccccggcctctgcctctgtcccccagtgatcggatcaaggcgctgagcgaggccctgcctgcggggcggccatgcggcggtgacaggagcgcgaccgacacgcacgggcccctcgccccctctcgcctcccgtccgctcgccagctcccctcagccgaggctgctccgcggcggccgcagcccgcgcgcggcccacactcgcctcccctcggcacccccggccccggagctgcctggaggcggccgcactcggggatcatggcccaagttgcaatgtccaccctccccgttgaagatgaggagtcctcggagagcaggatggtggtgacattcctcatgtcagctctcgagtccatgtgtaaagaactggccaagtccaaagccgaagtggcctgcattgcagtgtatgaaacagacgtgtttgtcgtcggaactgaaagaggacgtgcttttgtcaataccagaaaggattttcaaaaagattttgtaaaatattgtgttgaagaagaagaaaaagctgcagagatgcataaaatgaaatctacaacccaggcaaatcggatgagtgtagatgctgtagaaattgaaacactcagaaaaacagttgaggactatttctgcttttgctatgggaaagctttaggcaaatccacagtggtacctgtaccatatgagaagatgctgcgagaccagtcggctgtggtagtgcaggggcttccggaaggtgttgcctttaaacaccccgagaactatgatcttgcaaccctgaaatggattttggagaacaaagcagggatttcattcatcattaagagaccttttttagagccaaagaagcatgtaggtggtcgtgtgatggtaacagatgctgacaggtcaatactatctccaggtggaagttgtggccccatcaaagtgaaaactgaacccacagaagattctggcatttccctggaaatggcagctgtgacagtaaaggaagaatcagaagatcctgattattatcaatataacattcaaggaagccaccattcttcagagggcaatgaaggcacagaaatggaagtaccagcagaagattctactcaacatgtcccttcagaaacaagtgaggaccctgaagttgaggtgactattgaagatgatgattattctccaccgtctaagagaccaaaggccaatgagctaccgcagccaccagtcccggaacccgccaatgctgggaagcggaaagtgagggagttcaacttcgagaaatggaatgctcgcatcactgatctacgtaaacaagttgaagaattgtttgaaaggaaatatgctcaagccataaaagccaaaggtccggtgacgatcccgtaccctcttttccagtctcatgttgaagatctttatgtagaaggacttcctgaaggaattccttttagaaggccatctacttacggaattcctcgcctggagaggatattacttgcaaaggaaaggattcgttttgtgattaagaaacatgagcttctgaattcaacacgtgaagatttacagcttgataagccagcttcaggagtaaaggaagaatggtatgccagaatcactaaattaagaaagatggtggatcagcttttctgcaaaaaatttgcggaagccttggggagcactgaagccaaggctgtaccgtaccaaaaatttgaggcacacccgaatgatctgtacgtggaaggactgccagaaaacattcctttccgaagtccctcatggtatggaatcccaaggctggaaaaaatcattcaagtgggcaatcgaattaaatttgttattaaaagaccagaacttctgactcacagtaccactgaagttactcagccaagaacgaatacaccagtcaaagaagattggaatgtcagaattaccaagctacggaagcaagtggaagagatttttaatttgaaatttgcttagatttgttgacagcggtttcctggagtgctgtcttgagaacgattctgaggaggctcagcaagaaagagtgtttcagttgattgggtgtgtctgtcatggagaaggaactcaagctcttggactcaccgaggcagtaaaagtaccatatcctgtgtttgaatcaaacccggagttcttgtatgtggaaggcttgccagaggggattcccttccgaagccctacctggtttggaattccacgacttgaaaggatcgtccgcgggagtaataaaatcaagttcgttgttaaaaaacctgaactagttatttcctacttgcctcctgggatggctagtaaaataaacactaaagctttgcagtcccccaaaagaccacgaagtcctgggagtaattcaaaggttcctgaaattgaggtcaccgtggaaggccctaataacaacaatcctcaaacctcagctgttcgaaccccgacccagactaacggttctaacgttcccttcaagccacgagggagagagttttcctttgaggcctggaatgccaaaatcacggacctaaaacagaaagttgaaaatctcttcaatgagaaatgtggggaagctcttggccttaaacaagctgtgaaggtgccgttcgcgttatttgagtctttcccggaagacttttatgtggaaggcttacctgagggtgtgccattccgaagaccatcgacttttggcattccgaggctggagaagatactcagaaacaaagccaaaattaagttcatcattaaaaagcccgaaatgtttgagacggcgattaaggagagcacctcctctaagagccctcccagaaaaataaattcatcacccaatgttaatactactgcatcaggtgttgaagaccttaacatcattcaggtgacaattccagatgatgataatgaaagactctcgaaagttgaaaaagctagacagctaagagaacaagtgaatgacctctttagtcggaaatttggtgaagctattggtatgggttttcctgtgaaagttccctacaggaaaatcacaattaaccctggctgtgtggtggttgatggcatgcccccgggggtgtccttcaaagcccccagctacctggaaatcagctccatgagaaggatcttagactctgccgagtttatcaaattcacggtcattaggtaagtgagagtttcctgcttagtcacaggagcgaatctggagctcatgaggctgactcttctaaaatgcagccacaggtagtcatcgaatccggcttcctatgctgtgcaatcaacaaatcaaaataacttgtgtcatcattagaatgtcagatgtgcttctacgaactaagctgactcttttaattctttggcaaagggttggcaaactaggactgtttgccaaattcaggctgcctcctatttttagagtcttcctgaaacacagctacacccgtattatccatggctgctttcctgtcacagtgagtaagtagctgggactgagaaggcatggcctccaaagtctaaaatatttactctctagcactttgtagaaaaaccttagctaggcacagtggctaacgcctgtaatcccagcattttgggaggccaaggcaggcagatcacctgaggtcaggagttccagaccagcctggccaacatggtgaaatcccatctctacaaaaataaaacagttagctgggcatgatggcgggtgcctgtaatcccagctactcgggaggctgaggcaggatagtcgcttgaacccaggaggtggaggttgcaatgagccaagatcatgccactgcactccagcctggacgacagagtgagactccatcacaagaaaaaaagaactttgtcaacctctgtcttagggcgccttgtcacaggcttcgggtcagacggattcaaccttgcatcagccatttgttagccaggtcactctgttctttgtctgtaaatgagattgatcgttgttcccactgagagtgtcagctccttcccgtagagcaggcatgatgattgtactcacctctgacaccattgtgagtgccacattccttcccacgtccttgtcactgtaagagatgcccacctgagcaccaaccccaggttatcttcccctttgtcttccagccccccagaaacagctacgactcaacctacccaatcatttcatcatcagattgccactgtctctagttcaggtctcttgggactggcactcagaaatctcataataaatcctcttgaggcttctcatacactcgtcttcttccaatcttctttccctcaaaatctcatattttggttccacttcacccaccgtcattctccatatcactcccaggagttaggcaaaaagccccttccgttcttccgtatgttaaacttagaatcactctgttccctgctctgcgtttctattttttgtttttcctccatttactagtagcttaacactttctaacagtgttcttattattgatacgtatctatctcttccataagcttataaggtcacggataatacttctcattgtagtacgtaaatgacgtgggctagatatgagttgaataaacagttatacctgtaaattcttacagagtgaaaataaattgttatactttacaatttgtttctctctttagaccatttccaggacttgtgattaataaccgtgagtattttgtgaagtgttttgtttttgttttttcctggggtctgacgtgtgtgcgtgtgagtgtgtatacatgcttaacgtatatcacgttacttcacctatgtcagtaaccaggccaaatacttgttttagccctcagtaaaaacaccaggcacttcctagttgtaaaattattcaagcttcttaacttcctatcctcgatgcacttaatcataaaatggtaataatagcaccgattttgggggagtcgttccagtagatggaaagcatctggaacaggtgtcagcaagctcctgccgacgtgtatgcataaagttttattgaaaccaccatcgtgtccatttgtttatggcagaactgagagatggcagcagcaagtgtgtgcctgcaaaacctaaaatatttactaattggctctgcaagaaaagagtttgcatccccctaacctagaacagtgtctagcctctagtatgtgtttagcctacagtatgtgctcagcgaatacaatctatatttattactgcttttatgactgttataattactgtgcttggatttcgttacaaagtaagtcacaatgtgcctgcttctgttagtatttcagcacagtgcctggcacacatggggctctcaaatattgctgagcgagtgaacaaatgtcctttcaattccttaacgttgatgtcattttcaatagtattttgagccaaacttaattttgcgagtgtgttttgttttcttaactttattattaaaaatgtataaaagtgaggccaggcgtggtggctcacgcctgtaatcccagcagtttgggaggctgaggcaggcggatcagttgaggttgggagttggagaccagcccgtccaacatggtgaaagcctgtctctactaaaaatacaaaaatcagctgggtgtggtggcgcgtgcctgtaatcccagctactcaggaggctgaggcaggagagttgcttgaatcctagaggtggaggttgcagtgagctgagatcgtgccattgcactccagcctgggcaacaagagcaaaactctgtcccaataaataaataaataaaatgttctcttttgttcctgttcttgtgcggtagtgtggtatagagttttatggtaattactgtgaattagtgattctgagggacatatcagaactctgaggtttgtttccttctcatcttgagggaaacagcaaatgtatgttaaaatgcttttccaagggaacaacacatccttacattatttaaaccaatctgcttcattttcagagctggttgatcagagtgagtcagaaggccccgtgatacaagaatcagctgaaccaagccagttggaagttccagccacagaagaaataaaagagactgatggaagctctcagatcaagcaagaaccagaccccacgtggtagacctcttccctcctagggtaaatcagcttctgtgtcagggatgctgtgtggtgtccatctgaaccccctgcatacgcgtagctaatgtgatctccccactttcacataagatggtggccctgccttcagggaatgtgggagccaggtgggagccttcccggatatttaagctagaagattctacagggagattctccttggatcaatatatgtctctcagtcaaagatgtaaaagcacttttgccttaaaaagaatgttctgtttctaaatagagtcaacgttgtcctcctcattggaattcactatgagtcagaatcattagactgacttttttttttccatagtaatagtattttgcagagtctcacagagctgcagatcttttgttcatcttgcagagttaacaagtctgatcctgttagtccagatttcttaaatttggccaagttataataggagcagtagcttgagacccgaagtcaggaaactttgacaatggatttttttttttaatccagagacttgtactggaatttgccttaccctgtcagctcatggacttaaggtttcatcccgctttatgagtgcttctgaatccaagtcattgttacctgaatttgcaaattaagttgtgatattcgtgactgttaaattcctgtaattagattaacctctttgcttgcttgtttgttttctctcctattttagcttaaagtatcagtggttgagaagagcttttcggacctgttactaccccaagctgtgtaatatacttgtataacagaaataccttctatacaaacctttttttctacttttagatagaaatgtctactttttcagcagttctgtgaattaaagagcagagtgactgtgggtctggaatggctggtgtacttgggaatgtactatcaggattttacagcaatgctgggaaatgacagggaaaatgacaggaatgaatctcaccagattttttatgtactcagcagagccttgagttacggtgtttattttccaatcaagtgaagatatctcctacttctcctactggaacatctcagcttctgcagtgaagaaaaattcctgtgatagttcagttctttagtttttctatttgaaaaaaaaaaatcatttaaatgatcctttgttcacggctctccttaatgactgagtgaacagttcctatctgtatatttgactaaaccttttcctaagctatctctcatggttcctatgtttttttatcataattaaaagcaaaaccatctggatcacctaacagtcagaggtcagtatctcagcgtgtgaattatagaggaaatacagagagaacctcttccacttttacttttcgtccaaataaaatgcatggtgtaccagaagttgaagatcgggttgaggattggggctagctcgatgacactaaggccccaacatcgcgggacctgctgtggcgcggattcttaggaacgctgttctagccggccccctctccaggggtcgccgtggccggcattatttcctagttcttcttgtaaccctgaggtgccagcgcggggagtgaggaggggtcagggggctaaggatgcaacctctgacgttctgcgccttcctaggagagtcttacatgtgttgagatttcacaagcaatgcgagttgtaaaataccagctctacaagaagctaggctctgtgacggcatagttttcagtagctttatcacaatattcacaatggagaattatatgacatggtagcagaaataggcccttttatgtgttgcttctattttacctcaaattgtagatatagggtaatcaataaaatccatccatgcctttcacacactaagt

SEQ ID NO: 4877 - protein, 564 aa, Homo sapiens; identical to SEQ ID NO: 4061

SEQ ID NO: 4878 - DNA, 4442 bp, Homo sapiens
aaaaaaaaaaaaaaaaaaaaaaaaaaaagaaaaaagaaaaaaaaaaggaggaggaggaggagggtgagagagaagctgggagagcagagaaaaggggccaccggtcgcccccccgcttccccgcacgcgctctccagccgcggccgcccgcctgccgcggtcaccccggcctctgcctctgtcccccagtgatcggatcaaggcgctgagcgaggccctgcctgcggggcggccatgcggcggtgacaggagcgcgaccgacacgcacgggcccctcgccccctctcgcctcccgtccgctcgccagctcccctcagccgaggctgctccgcggcggccgcagcccgcgcgcggcccacactcgcctccccgttgaagatgaggagtcctcggagagcaggatggtggtgacattcctcatgtcagctctcgagtccatgtgtaaagaactggccaagtccaaagccgaagtggcctgcattgcagtgtatgaaacagacgtgtttgtcgtcggaactgaaagaggacgtgcttttgtcaataccagaaaggattttcaaaaagattttgtaaaatattgtgttgaagaagaagaaaaagctgcagagatgcataaaatgaaatctacaacccaggcaaatcggatgagtgtagatgctgtagaaattgaaacactcagaaaaacagttgaggactatttctgcttttgctatgggaaagctttaggcaaatccacagtggtacctgtaccatatgagaagatgctgcgagaccagtcggctgtggtagtgcaggggcttccggaaggtgttgcctttaaacaccccgagaactatgatcttgcaaccctgaaatggattttggagaacaaagcagggatttcattcatcattaagagaccttttttagagccaaagaagcatgtaggtggtcgtgtgatggtaacagatgctgacaggtcaatactatctccaggtggaagttgtggccccatcaaagtgaaaactgaacccacagaagattctggcatttccctggaaatggcagctgtgacagtaaaggaagaatcagaagatcctgattattatcaatataacattcaaggaagccaccattcttcagagggcaatgaaggcacagaaatggaagtaccagcagaagattctactcaacatgtcccttcagaaacaagtgaggaccctgaagttgaggtgactattgaagatgatgattattctccaccgtctaagagaccaaaggccaatgagctaccgcagccaccagtcccggaacccgccaatgctgggaagcggaaagtgagggagttcaacttcgagaaatggaatgctcgcatcactgatctacgtaaacaagttgaagaattgtttgaaaggaaatatgctcaagccataaaagccaaaggtccggtgacgatcccgtaccctcttttccagtctcatgttgaagatctttatgtagaaggacttcctgaaggaattccttttagaaggccatctacttacggaattcctcgcctggagaggatattacttgcaaaggaaaggattcgttttgtgattaagaaacatgagcttctgaattcaacacgtgaagatttacagcttgataagccagcttcaggagtaaaggaagaatggtatgccagaatcactaaattaagaaagatggtggatcagcttttctgcaaaaaatttgcggaagccttggggagcactgaagccaaggctgtaccgtaccaaaaatttgaggcacacccgaatgatctgtacgtggaaggactgccagaaaacattcctttccgaagtccctcatggtatggaatcccaaggctggaaaaaatcattcaagtgggcaatcgaattaaatttgttattaaaagaccagaacttctgactcacagtaccactgaagttactcagccaagaacgaatacaccagtcaaagaagattggaatgtcagaattaccaagctacggaagcaagtggaagagatttttaatttgaaatttgctcaagctcttggactcaccgaggcagtaaaagtaccatatcctgtgtttgaatcaaacccggagttcttgtatgtggaaggcttgccagaggggattcccttccgaagccctacctggtttggaattccacgacttgaaaggatcgtccgcgggagtaataaaatcaagttcgttgttaaaaaacctgaactagttatttcctacttgcctcctgggatggctagtaaaataaacactaaagctttgcagtcccccaaaagaccacgaagtcctgggagtaattcaaaggttcctgaaattgaggtcaccgtggaaggccctaataacaacaatcctcaaacctcagctgttcgaaccccgacccagactaacggttctaacgttcccttcaagccacgagggagagagttttcctttgaggcctggaatgccaaaatcacggacctaaaacagaaagttgaaaatctcttcaatgagaaatgtggggaagctcttggccttaaacaagctgtgaaggtgccgttcgcgttatttgagtctttcccggaagacttttatgtggaaggcttacctgagggtgtgccattccgaagaccatcgacttttggcattccgaggctggagaagatactcagaaacaaagccaaaattaagttcatcattaaaaagcccgaaatgtttgagacggcgattaaggagagcacctcctctaagagccctcccagaaaaataaattcatcacccaatgttaatactactgcatcaggtgttgaagaccttaacatcattcaggtgacaattccagatgatgataatgaaagactctcgaaagttgaaaaagctagacagctaagagaacaagtgaatgacctctttagtcggaaatttggtgaagctattggtatgggttttcctgtgaaagttccctacaggaaaatcacaattaaccctggctgtgtggtggttgatggcatgcccccgggggtgtccttcaaagcccccagctacctggaaatcagctccatgagaaggatcttagactctgccgagtttatcaaattcacggtcattagaccatttccaggacttgtgattaataaccagctggttgatcagagtgagtcagaaggccccgtgatacaagaatcagctgaaccaagccagttggaagttccagccacagaagaaataaaagagactgatggaagctctcagatcaagcaagaaccagaccccacgtggtagacctcttccctcctaggcttaaagtatcagtggttgagaagagcttttcggacctgttactaccccaagctgtgtaatatacttgtataacagaaataccttctatacaaacctttttttctacttttagatagaaatgtctactttttcagcagttctgtgaattaaagagcagagtgactgtgggtctggaatggctggtgtacttgggaatgtactatcaggattttacagcaatgctgggaaatgacagggaaaatgacaggaatgaatctcaccagattttttatgtactcagcagagccttgagttacggtgtttattttccaatcaagtgaagatatctcctacttctcctactggaacatctcagcttctgcagtgaagaaaaattcctgtgatagttcagttctttagtttttctatttgaaaaaaaaaaatcatttaaatgatcctttgttcacggctctccttaatgactgagtgaacagttcctatctgtatatttgactaaaccttttcctaagctatctctcatggttcctatgtttttttatcataattaaaagcaaaaccatctggatcacctaacagtcagaggtcagtatctcagcgtgtgaattatagaggaaatacagagagaacctcttccacttttacttttcgtccaaataaaatgcatggtgtaccagaagttgaagatcgggttgaggattggggctagctcgatgacactaaggccccaacatcgcgggacctgctgtggcgcggattcttaggaacgctgttctagccggccccctctccaggggtcgccgtggccggcattatttcctagttcttcttgtaaccctgaggtgccagcgcggggagtgaggaggggtcagggggctaaggatgcaacctctgacgttctgcgccttcctaggagagtcttacatgtgttgagatttcacaagcaatgcgagttgtaaaataccagctctacaagaagctaggctctgtgacggcatagttttcagtagctttatcacaatattcacaatggagaattatatgacatggtagcagaaataggcccttttatgtgttgcttctattttacctcaaattgtagatatagggtaatcaataaaatccatccatgcctttcacacactaagt

SEQ ID NO: 4879 - protein, 958 aa, Homo sapiens [sequence omitted]

SEQ ID NO: 4880 - DNA, 7196 bp, Homo sapiens
aaaaaaaaaaaaaaaaaaaaaaaaaaaagaaaaaagaaaaaaaaaaggaggaggaggaggagggtgagagagaagctgggagagcagagaaaaggggccaccggtcgcccccccgcttccccgcacgcgctctccagccgcggccgcccgcctgccgcggtcaccccggcctctgcctctgtcccccagtgatcggatcaaggcgctgagcgaggccctgcctgcggggcggccatgcggcggtgacaggagcgcgaccgacacgcacgggcccctcgccccctctcgcctcccgtccgctcgccagctcccctcagccgaggctgctccgcggcggccgcagcccgcgcgcggcccacactcgcctccccgttgaagatgaggagtcctcggagagcaggatggtggtgacattcctcatgtcagctctcgagtccatgtgtaaagaactggccaagtccaaagccgaagtggcctgcattgcagtgtatgaaacagacgtgtttgtcgtcggaactgaaagaggacgtgcttttgtcaataccagaaaggattttcaaaaagattttgtaaaatattgtgttgaagaagaagaaaaagctgcagagatgcataaaatgaaatctacaacccaggcaaatcggatgagtgtagatgctgtagaaattgaaacactcagaaaaacagttgaggactatttctgcttttgctatgggaaagctttaggcaaatccacagtggtacctgtaccatatgagaagatgctgcgagaccagtcggctgtggtagtgcaggggcttccggaaggtgttgcctttaaacaccccgagaactatgatcttgcaaccctgaaatggattttggagaacaaagcagggatttcattcatcattaagagaccttttttagagccaaagaagcatgtaggtggtcgtgtgatggtaacagatgctgacaggtcaatactatctccaggtggaagttgtggccccatcaaagtgaaaactgaacccacagaagattctggcatttccctggaaatggcagctgtgacagtaaaggaagaatcagaagatcctgattattatcaatataacattcaagcaggcccttctgaaactgatgatgttgatgaaaaacagcccctatcgaagcctttgcaaggaagccaccattcttcagagggcaatgaaggcacagaaatggaagtaccagcagaagattctactcaacatgtcccttcagaaacaagtgaggaccctgaagttgaggtgactattgaagatgatgattattctccaccgtctaagagaccaaaggccaatgagctaccgcagccaccagtcccggaacccgccaatgctgggaagcggaaagtgagggagttcaacttcgagaaatggaatgctcgcatcactgatctacgtaaacaagttgaagaattgtttgaaaggaaatatgctcaagccataaaagccaaaggtccggtgacgatcccgtaccctcttttccagtctcatgttgaagatctttatgtagaaggacttcctgaaggaattccttttagaaggccatctacttacggaattcctcgcctggagaggatattacttgcaaaggaaaggattcgttttgtgattaagaaacatgagcttctgaattcaacacgtgaagatttacagcttgataagccagcttcaggagtaaaggaagaatggtatgccagaatcactaaattaagaaagatggtggatcagcttttctgcaaaaaatttgcggaagccttggggagcactgaagccaaggctgtaccgtaccaaaaatttgaggcacacccgaatgatctgtacgtggaaggactgccagaaaacattcctttccgaagtccctcatggtatggaatcccaaggctggaaaaaatcattcaagtgggcaatcgaattaaatttgttattaaaagaccagaacttctgactcacagtaccactgaagttactcagccaagaacgaatacaccagtcaaagaagattggaatgtcagaattaccaagctacggaagcaagtggaagagatttttaatttgaaatttgctcaagctcttggactcaccgaggcagtaaaagtaccatatcctgtgtttgaatcaaacccggagttcttgaaaggatcgtccgcgggagtaataaaatcaagttcgttgttaaaaaacctgaactagttatttcctacttgcctcctgggatggctagtaaaataaacactaaagctttgcagtcccccaaaagaccacgaagtcctgggagtaattcaaaggttcctgaaattgaggtcaccgtggaaggccctaataacaacaatcctcaaacctcagctgttcgaaccccgacccagactaacggttctaacgttcccttcaagccacgagggagagagttttcctttgaggcctggaatgccaaaatcacggacctaaaacagaaagttgaaaatctcttcaatgagaaatgtggggaagctcttggccttaaacaagctgtgaaggtgccgttcgcgttatttgagtctttcccggaagacttttatgtggaaggcttacctgagggtgtgccattccgaagaccatcgacttttggcattccgaggctggagaagatactcagaaacaaagccaaaattaagttcatcattaaaaagcccgaaatgtttgagacggcgattaaggagagcacctcctctaagagccctcccagaaaaataaattcatcacccaatgttaatactactgcatcaggtgttgaagaccttaacatcattcaggtgacaattccagatgatgataatgaaagactctcgaaagttgaaaaagctagacagctaagagaacaagtgaatgacctctttagtcggaaatttggtgaagctattggtatgggttttcctgtgaaagttccctacaggaaaatcacaattaaccctggctgtgtggtggttgatggcatgcccccgggggtgtccttcaaagcccccagctacctggaaatcagctccatgagaaggatcttagactctgccgagtttatcaaattcacggtcattaggtaagtgagagtttcctgcttagtcacaggagcgaatctggagctcatgaggctgactcttctaaaatgcagccacaggtagtcatcgaatccggcttcctatgctgtgcaatcaacaaatcaaaataacttgtgtcatcattagaatgtcagatgtgcttctacgaactaagctgactcttttaattctttggcaaagggttggcaaactaggactgtttgccaaattcaggctgcctcctatttttagagtcttcctgaaacacagctacacccgtattatccatggctgctttcctgtcacagtgagtaagtagctgggactgagaaggcatggcctccaaagtctaaaatatttactctctagcactttgtagaaaaaccttagctaggcacagtggctaacgcctgtaatcccagcattttgggaggccaaggcaggcagatcacctgaggtcaggagttccagaccagcctggccaacatggtgaaatcccatctctacaaaaataaaacagttagctgggcatgatggcgggtgcctgtaatcccagctactcgggaggctgaggcaggatagtcgcttgaacccaggaggtggaggttgcaatgagccaagatcatgccactgcactccagcctggacgacagagtgagactccatcacaagaaaaaaagaactttgtcaacctctgtcttagggcgccttgtcacaggcttcgggtcagacggattcaaccttgcatcagccatttgttagccaggtcactctgttctttgtctgtaaatgagattgatcgttgttcccactgagagtgtcagctccttcccgtagagcaggcatgatgattgtactcacctctgacaccattgtgagtgccacattccttcccacgtccttgtcactgtaagagatgcccacctgagcaccaaccccaggttatcttcccctttgtcttccagccccccagaaacagctacgactcaacctacccaatcatttcatcatcagattgccactgtctctagttcaggtctcttgggactggcactcagaaatctcataataaatcctcttgaggcttctcatacactcgtcttcttccaatcttctttccctcaaaatctcatattttggttccacttcacccaccgtcattctccatatcactcccaggagttaggcaaaaagccccttccgttcttccgtatgttaaacttagaatcactctgttccctgctctgcgtttctattttttgtttttcctccatttactagtagcttaacactttctaacagtgttcttattattgatacgtatctatctcttccataagcttataaggtcacggataatacttctcattgtagtacgtaaatgacgtgggctagatatgagttgaataaacagttatacctgtaaattcttacagagtgaaaataaattgttatactttacaatttgtttctctctttagaccatttccaggacttgtgattaataaccgtgagtattttgtgaagtgttttgtttttgttttttcctggggtctgacgtgtgtgcgtgtgagtgtgtatacatgcttaacgtatatcacgttacttcacctatgtcagtaaccaggccaaatacttgttttagccctcagtaaaaacaccaggcacttcctagttgtaaaattattcaagcttcttaacttcctatcctcgatgcacttaatcataaaatggtaataatagcaccgattttgggggagtcgttccagtagatggaaagcatctggaacaggtgtcagcaagctcctgccgacgtgtatgcataaagttttattgaaaccaccatcgtgtccatttgtttatggcagaactgagagatggcagcagcaagtgtgtgcctgcaaaacctaaaatatttactaattggctctgcaagaaaagagtttgcatccccctaacctagaacagtgtctagcctctagtatgtgtttagcctacagtatgtgctcagcgaatacaatctatatttattactgcttttatgactgttataattactgtgcttggatttcgttacaaagtaagtcacaatgtgcctgcttctgttagtatttcagcacagtgcctggcacacatggggctctcaaatattgctgagcgagtgaacaaatgtcctttcaattccttaacgttgatgtcattttcaatagtattttgagccaaacttaattttgcgagtgtgttttgttttcttaactttattattaaaaatgtataaaagtgaggccaggcgtggtggctcacgcctgtaatcccagcagtttgggaggctgaggcaggcggatcagttgaggttgggagttggagaccagcccgtccaacatggtgaaagcctgtctctactaaaaatacaaaaatcagctgggtgtggtggcgcgtgcctgtaatcccagctactcaggaggctgaggcaggagagttgcttgaatcctagaggtggaggttgcagtgagctgagatcgtgccattgcactccagcctgggcaacaagagcaaaactctgtcccaataaataaataaataaaatgttctcttttgttcctgttcttgtgcggtagtgtggtatagagttttatggtaattactgtgaattagtgattctgagggacatatcagaactctgaggtttgtttccttctcatcttgagggaaacagcaaatgtatgttaaaatgcttttccaagggaacaacacatccttacattatttaaaccaatctgcttcattttcagagctggttgatcagagtgagtcagaaggccccgtgatacaagaatcagctgaaccaagccagttggaagttccagccacagaagaaataaaagagactgatggaagctctcagatcaagcaagaaccagaccccacgtggtagacctcttccctcctaggcttaaagtatcagtggttgagaagagcttttcggacctgttactaccccaagctgtgtaatatacttgtataacagaaataccttctatacaaacctttttttctacttttagatagaaatgtctactttttcagcagttctgtgaattaaagagcagagtgactgtgggtctggaatggctggtgtacttgggaatgtactatcaggattttacagcaatgctgggaaatgacagggaaaatgacaggaatgaatctcaccagattttttatgtactcagcagagccttgagttacggtgtttattttccaatcaagtgaagatatctcctacttctcctactggaacatctcagcttctgcagtgaagaaaaattcctgtgatagttcagttctttagtttttctatttgaaaaaaaaaaatcatttaaatgatcctttgttcacggctctccttaatgactgagtgaacagttcctatctgtatatttgactaaaccttttcctaagctatctctcatggttcctatgtttttttatcataattaaaagcaaaaccatctggatcacctaacagtcagaggtcagtatctcagcgtgtgaattatagaggaaatacagagagaacctcttccacttttacttttcgtccaaataaaatgcatggtgtaccagaagttgaagatcgggttgaggattggggctagctcgatgacactaaggccccaacatcgcgggacctgctgtggcgcggattcttaggaacgctgttctagccggccccctctccaggggtcgccgtggccggcattatttcctagttcttcttgtaaccctgaggtgccagcgcggggagtgaggaggggtcagggggctaaggatgcaacctctgacgttctgcgccttcctaggagagtcttacatgtgttgagatttcacaagcaatgcgagttgtaaaataccagctctacaagaagctaggctctgtgacggcatagttttcagtagctttatcacaatattcacaatggagaattatatgacatggtagcagaaataggcccttttatgtgttgcttctattttacctcaaattgtagatatagggtaatcaataaaatccatccatgcctttcacacactaagt

SEQ ID NO: 4881 - protein, 605 aa, Homo sapiens; identical to SEQ ID NO: 4017

SEQ ID NO: 4882 - DNA, 7131 bp, Homo sapiens
aaaaaaaaaaaaaaaaaaaaaaaaaaaagaaaaaagaaaaaaaaaaggaggaggaggaggagggtgagagagaagctgggagagcagagaaaaggggccaccggtcgcccccccgcttccccgcacgcgctctccagccgcggccgcccgcctgccgcggtcaccccggcctctgcctctgtcccccagtgatcggatcaaggcgctgagcgaggccctgcctgcggggcggccatgcggcggtgacaggagcgcgaccgacacgcacgggcccctcgccccctctcgcctcccgtccgctcgccagctcccctcagccgaggctgctccgcggcggccgcagcccgcgcgcggcccacactcgcctccccgttgaagatgaggagtcctcggagagcaggatggtggtgacattcctcatgtcagctctcgagtccatgtgtaaagaactggccaagtccaaagccgaagtggcctgcattgcagtgtatgaaacagacgtgtttgtcgtcggaactgaaagaggacgtgcttttgtcaataccagaaaggattttcaaaaagattttgtaaaatattgtgttgaagaagaagaaaaagctgcagagatgcataaaatgaaatctacaacccaggcaaatcggatgagtgtagatgctgtagaaattgaaacactcagaaaaacagttgaggactatttctgcttttgctatgggaaagctttaggcaaatccacagtggtacctgtaccatatgagaagatgctgcgagaccagtcggctgtggtagtgcaggggcttccggaaggtgttgcctttaaacaccccgagaactatgatcttgcaaccctgaaatggattttggagaacaaagcagggatttcattcatcattaagagaccttttttagagccaaagaagcatgtaggtggtcgtgtgatggtaacagatgctgacaggtcaatactatctccaggtggaagttgtggccccatcaaagtgaaaactgaacccacagaagattctggcatttccctggaaatggcagctgtgacagtaaaggaagaatcagaagatcctgattattatcaatataacattcaaggaagccaccattcttcagagggcaatgaaggcacagaaatggaagtaccagcagaagattctactcaacatgtcccttcagaaacaagtgaggaccctgaagttgaggtgactattgaagatgatgattattctccaccgtctaagagaccaaaggccaatgagctaccgcagccaccagtcccggaacccgccaatgctgggaagcggaaagtgagggagttcaacttcgagaaatggaatgctcgcatcactgatctacgtaaacaagttgaagaattgtttgaaaggaaatatgctcaagccataaaagccaaaggtccggtgacgatcccgtaccctcttttccagtctcatgttgaagatctttatgtagaaggacttcctgaaggaattccttttagaaggccatctacttacggaattcctcgcctggagaggatattacttgcaaaggaaaggattcgttttgtgattaagaaacatgagcttctgaattcaacacgtgaagatttacagcttgataagccagcttcaggagtaaaggaagaatggtatgccagaatcactaaattaagaaagatggtggatcagcttttctgcaaaaaatttgcggaagccttggggagcactgaagccaaggctgtaccgtaccaaaaatttgaggcacacccgaatgatctgtacgtggaaggactgccagaaaacattcctttccgaagtccctcatggtatggaatcccaaggctggaaaaaatcattcaagtgggcaatcgaattaaatttgttattaaaagaccagaacttctgactcacagtaccactgaagttactcagccaagaacgaatacaccagctcaagctcttggactcaccgaggcagtaaaagtaccatatcctgtgtttgaatcaaacccggagttcttgtatgtggaaggcttgccagaggggattcccttccgaagccctacctggtttggaattccacgacttgaaaggatcgtccgcgggagtaataaaatcaagttcgttgttaaaaaacctgaactagttatttcctacttgcctcctgggatggctagtaaaataaacactaaagctttgcagtcccccaaaagaccacgaagtcctgggagtaattcaaaggttcctgaaattgaggtcaccgtggaaggccctaataacaacaatcctcaaacctcagctgttcgaaccccgacccagactaacggttctaacgttcccttcaagccacgagggagagagttttcctttgaggcctggaatgccaaaatcacggacctaaaacagaaagttgaaaatctcttcaatgagaaatgtggggaagctcttggccttaaacaagctgtgaaggtgccgttcgcgttatttgagtctttcccggaagacttttatgtggaaggcttacctgagggtgtgccattccgaagaccatcgacttttggcattccgaggctggagaagatactcagaaacaaagccaaaattaagttcatcattaaaaagcccgaaatgtttgagacggcgattaaggagagcacctcctctaagagccctcccagaaaaataaattcatcacccaatgttaatactactgcatcaggtgttgaagaccttaacatcattcaggtgacaattccagatgatgataatgaaagactctcgaaagttgaaaaagctagacagctaagagaacaagtgaatgacctctttagtcggaaatttggtgaagctattggtatgggttttcctgtgaaagttccctacaggaaaatcacaattaaccctggctgtgtggtggttgatggcatgcccccgggggtgtccttcaaagcccccagctacctggaaatcagctccatgagaaggatcttagactctgccgagtttatcaaattcacggtcattaggtaagtgagagtttcctgcttagtcacaggagcgaatctggagctcatgaggctgactcttctaaaatgcagccacaggtagtcatcgaatccggcttcctatgctgtgcaatcaacaaatcaaaataacttgtgtcatcattagaatgtcagatgtgcttctacgaactaagctgactcttttaattctttggcaaagggttggcaaactaggactgtttgccaaattcaggctgcctcctatttttagagtcttcctgaaacacagctacacccgtattatccatggctgctttcctgtcacagtgagtaagtagctgggactgagaaggcatggcctccaaagtctaaaatatttactctctagcactttgtagaaaaaccttagctaggcacagtggctaacgcctgtaatcccagcattttgggaggccaaggcaggcagatcacctgaggtcaggagttccagaccagcctggccaacatggtgaaatcccatctctacaaaaataaaacagttagctgggcatgatggcgggtgcctgtaatcccagctactcgggaggctgaggcaggatagtcgcttgaacccaggaggtggaggttgcaatgagccaagatcatgccactgcactccagcctggacgacagagtgagactccatcacaagaaaaaaagaactttgtcaacctctgtcttagggcgccttgtcacaggcttcgggtcagacggattcaaccttgcatcagccatttgttagccaggtcactctgttctttgtctgtaaatgagattgatcgttgttcccactgagagtgtcagctccttcccgtagagcaggcatgatgattgtactcacctctgacaccattgtgagtgccacattccttcccacgtccttgtcactgtaagagatgcccacctgagcaccaaccccaggttatcttcccctttgtcttccagccccccagaaacagctacgactcaacctacccaatcatttcatcatcagattgccactgtctctagttcaggtctcttgggactggcactcagaaatctcataataaatcctcttgaggcttctcatacactcgtcttcttccaatcttctttccctcaaaatctcatattttggttccacttcacccaccgtcattctccatatcactcccaggagttaggcaaaaagccccttccgttcttccgtatgttaaacttagaatcactctgttccctgctctgcgtttctattttttgtttttcctccatttactagtagcttaacactttctaacagtgttcttattattgatacgtatctatctcttccataagcttataaggtcacggataatacttctcattgtagtacgtaaatgacgtgggctagatatgagttgaataaacagttatacctgtaaattcttacagagtgaaaataaattgttatactttacaatttgtttctctctttagaccatttccaggacttgtgattaataaccgtgagtattttgtgaagtgttttgtttttgttttttcctggggtctgacgtgtgtgcgtgtgagtgtgtatacatgcttaacgtatatcacgttacttcacctatgtcagtaaccaggccaaatacttgttttagccctcagtaaaaacaccaggcacttcctagttgtaaaattattcaagcttcttaacttcctatcctcgatgcacttaatcataaaatggtaataatagcaccgattttgggggagtcgttccagtagatggaaagcatctggaacaggtgtcagcaagctcctgccgacgtgtatgcataaagttttattgaaaccaccatcgtgtccatttgtttatggcagaactgagagatggcagcagcaagtgtgtgcctgcaaaacctaaaatatttactaattggctctgcaagaaaagagtttgcatccccctaacctagaacagtgtctagcctctagtatgtgtttagcctacagtatgtgctcagcgaatacaatctatatttattactgcttttatgactgttataattactgtgcttggatttcgttacaaagtaagtcacaatgtgcctgcttctgttagtatttcagcacagtgcctggcacacatggggctctcaaatattgctgagcgagtgaacaaatgtcctttcaattccttaacgttgatgtcattttcaatagtattttgagccaaacttaattttgcgagtgtgttttgttttcttaactttattattaaaaatgtataaaagtgaggccaggcgtggtggctcacgcctgtaatcccagcagtttgggaggctgaggcaggcggatcagttgaggttgggagttggagaccagcccgtccaacatggtgaaagcctgtctctactaaaaatacaaaaatcagctgggtgtggtggcgcgtgcctgtaatcccagctactcaggaggctgaggcaggagagttgcttgaatcctagaggtggaggttgcagtgagctgagatcgtgccattgcactccagcctgggcaacaagagcaaaactctgtcccaataaataaataaataaaatgttctcttttgttcctgttcttgtgcggtagtgtggtatagagttttatggtaattactgtgaattagtgattctgagggacatatcagaactctgaggtttgtttccttctcatcttgagggaaacagcaaatgtatgttaaaatgcttttccaagggaacaacacatccttacattatttaaaccaatctgcttcattttcagagctggttgatcagagtgagtcagaaggccccgtgatacaagaatcagctgaaccaagccagttggaagttccagccacagaagaaataaaagagactgatggaagctctcagatcaagcaagaaccagaccccacgtggtagacctcttccctcctaggcttaaagtatcagtggttgagaagagcttttcggacctgttactaccccaagctgtgtaatatacttgtataacagaaataccttctatacaaacctttttttctacttttagatagaaatgtctactttttcagcagttctgtgaattaaagagcagagtgactgtgggtctggaatggctggtgtacttgggaatgtactatcaggattttacagcaatgctgggaaatgacagggaaaatgacaggaatgaatctcaccagattttttatgtactcagcagagccttgagttacggtgtttattttccaatcaagtgaagatatctcctacttctcctactggaacatctcagcttctgcagtgaagaaaaattcctgtgatagttcagttctttagtttttctatttgaaaaaaaaaaatcatttaaatgatcctttgttcacggctctccttaatgactgagtgaacagttcctatctgtatatttgactaaaccttttcctaagctatctctcatggttcctatgtttttttatcataattaaaagcaaaaccatctggatcacctaacagtcagaggtcagtatctcagcgtgtgaattatagaggaaatacagagagaacctcttccacttttacttttcgtccaaataaaatgcatggtgtaccagaagttgaagatcgggttgaggattggggctagctcgatgacactaaggccccaacatcgcgggacctgctgtggcgcggattcttaggaacgctgttctagccggccccctctccaggggtcgccgtggccggcattatttcctagttcttcttgtaaccctgaggtgccagcgcggggagtgaggaggggtcagggggctaaggatgcaacctctgacgttctgcgccttcctaggagagtcttacatgtgttgagatttcacaagcaatgcgagttgtaaaataccagctctacaagaagctaggctctgtgacggcatagttttcagtagctttatcacaatattcacaatggagaattatatgacatggtagcagaaataggcccttttatgtgttgcttctattttacctcaaattgtagatatagggtaatcaataaaatccatccatgcctttcacacactaagt

SEQ ID NO: 4883 - protein, 878 aa, Homo sapiens; identical to SEQ ID NO: 4871

SEQ ID NO: 4884 - DNA, 5091 bp, Homo sapiens
aaaaaaaaaaaaaaaaaaaaaaaaaaaagaaaaaagaaaaaaaaaaggaggaggaggaggagggtgagagagaagctgggagagcagagaaaaggggccaccggtcgcccccccgcttccccgcacgcgctctccagccgcggccgcccgcctgccgcggtcaccccggcctctgcctctgtcccccagtgatcggatcaaggcgctgagcgaggccctgcctgcggggcggccatgcggcggtgacaggagcgcgaccgacacgcacgggcccctcgccccctctcgcctcccgtccgctcgccagctcccctcagccgaggctgctccgcggcggccgcagcccgcgcgcggcccacactcgcctcccctcggcacccccggccccggagctgcctggaggcggccgcactcggggatcatggcccaagttgcaatgtccaccctccccgttgaagatgaggagtcctcggagagcaggatggtggtgacattcctcatgtcagctctcgagtccatgtgtaaagaactggccaagtccaaagccgaagtggcctgcattgcagtgtatgaaacagacgtgtttgtcgtcggaactgaaagaggacgtgcttttgtcaataccagaaaggattttcaaaaagattttgtaaaatattgtgttgaagaagaagaaaaagctgcagagatgcataaaatgaaatctacaacccaggcaaatcggatgagtgtagatgctgtagaaattgaaacactcagaaaaacagttgaggactatttctgcttttgctatgggaaagctttaggcaaatccacagtggtacctgtaccatatgagaagatgctgcgagaccagtcggctgtggtagtgcaggggcttccggaaggtgttgcctttaaacaccccgagaactatgatcttgcaaccctgaaatggattttggagaacaaagcagggatttcattcatcattaagagaccttttttagagccaaagaagcatgtaggtggtcgtgtgatggtaacagatgctgacaggtcaatactatctccaggtggaagttgtggccccatcaaagtgaaaactgaacccacagaagattctggcatttccctggaaatggcagctgtgacagtaaaggaagaatcagaagatcctgattattatcaatataacattcaaggaagccaccattcttcagagggcaatgaaggcacagaaatggaagtaccagcagaagattctactcaacatgtcccttcagaaacaagtgaggaccctgaagttgaggtgactattgaagatgatgattattctccaccgtctaagagaccaaaggccaatgagctaccgcagccaccagtcccggaacccgccaatgctgggaagcggaaagtgagggagttcaacttcgagaaatggaatgctcgcatcactgatctacgtaaacaagttgaagaattgtttgaaaggaaatatgctcaagccataaaagccaaaggtccggtgacgatcccgtaccctcttttccagtctcatgttgaagatctttatgtagaaggacttcctgaaggaattccttttagaaggccatctacttacggaattcctcgcctggagaggatattacttgcaaaggaaaggattcgttttgtgattaagaaacatgagcttctgaattcaacacgtgaagatttacagcttgataagccagcttcaggagtaaaggaagaatggtatgccagaatcactaaattaagaaagatggtggatcagcttttctgcaaaaaatttgcggaagccttggggagcactgaagccaaggctgtaccgtaccaaaaatttgaggcacacccgaatgatctgtacgtggaaggactgccagaaaacattcctttccgaagtccctcatggtatggaatcccaaggctggaaaaaatcattcaagtgggcaatcgaattaaatttgttattaaaagaccagaacttctgactcacagtaccactgaagttactcagccaagaacgaatacaccagctcaagctcttggactcaccgaggcagtaaaagtaccatatcctgtgtttgaatcaaacccggagttcttgtatgtggaaggcttgccagaggggattcccttccgaagccctacctggtttggaattccacgacttgaaaggatcgtccgcgggagtaataaaatcaagttcgttgttaaaaaacctgaactagttatttcctacttgcctcctgggatggctagtaaaataaacactaaagctttgcagtcccccaaaagaccacgaagtcctgggagtaattcaaaggttcctgaaattgaggtcaccgtggaaggccctaataacaacaatcctcaaacctcagctgttcgaaccccgacccagactaacggttctaacgttcccttcaagccacgagggagagagttttcctttgaggcctggaatgccaaaatcacggacctaaaacagaaagttgaaaatctcttcaatgagaaatgtggggaagctcttggccttaaacaagctgtgaaggtgccgttcgcgttatttgagtctttcccggaagacttttatgtggaaggcttacctgagggtgtgccattccgaagaccatcgacttttggcattccgaggctggagaagatactcagaaacaaagccaaaattaagttcatcattaaaaagcccgaaatgtttgagacggcgattaaggagagcacctcctctaagagccctcccagaaaaataaattcatcacccaatgttaatactactgcatcaggtgttgaagaccttaacatcattcaggtgacaattccagatgatgataatgaaagactctcgaaagttgaaaaagctagacagctaagagaacaagtgaatgacctctttagtcggaaatttggtgaagctattggtatgggttttcctgtgaaagttccctacaggaaaatcacaattaaccctggctgtgtggtggttgatggcatgcccccgggggtgtccttcaaagcccccagctacctggaaatcagctccatgagaaggatcttagactctgccgagtttatcaaattcacggtcattagaccatttccaggacttgtgattaataaccagctggttgatcagagtgagtcagaaggccccgtgatacaagaatcagctgaaccaagccagttggaagttccagccacagaaggtaaaaggacctcttccctcctagggtaaatcagcttctgtgtcagggatgctgtgtggtgtccatctgaaccccctgcatacgcgtagctaatgtgatctccccactttcacataagatggtggccctgccttcagggaatgtgggagccaggtgggagccttcccggatatttaagctagaagattctacagggagattctccttggatcaatatatgtctctcagtcaaagatgtaaaagcacttttgccttaaaaagaatgttctgtttctaaatagagtcaacgttgtcctcctcattggaattcactatgagtcagaatcattagactgacttttttttttccatagtaatagtattttgcagagtctcacagagctgcagatcttttgttcatcttgcagagttaacaagtctgatcctgttagtccagatttcttaaatttggccaagttataataggagcagtagcttgagacccgaagtcaggaaactttgacaatggatttttttttttaatccagagacttgtactggaatttgccttaccctgtcagctcatggacttaaggtttcatcccgctttatgagtgcttctgaatccaagtcattgttacctgaatttgcaaattaagttgtgatattcgtgactgttaaattcctgtaattagattaacctctttgcttgcttgtttgttttctctcctattttagcttaaagtatcagtggttgagaagagcttttcggacctgttactaccccaagctgtgtaatatacttgtataacagaaataccttctatacaaacctttttttctacttttagatagaaatgtctactttttcagcagttctgtgaattaaagagcagagtgactgtgggtctggaatggctggtgtacttgggaatgtactatcaggattttacagcaatgctgggaaatgacagggaaaatgacaggaatgaatctcaccagattttttatgtactcagcagagccttgagttacggtgtttattttccaatcaagtgaagatatctcctacttctcctactggaacatctcagcttctgcagtgaagaaaaattcctgtgatagttcagttctttagtttttctatttgaaaaaaaaaaatcatttaaatgatcctttgttcacggctctccttaatgactgagtgaacagttcctatctgtatatttgactaaaccttttcctaagctatctctcatggttcctatgtttttttatcataattaaaagcaaaaccatctggatcacctaacagtcagaggtcagtatctcagcgtgtgaattatagaggaaatacagagagaacctcttccacttttacttttcgtccaaataaaatgcatggtgtaccagaagttgaagatcgggttgaggattggggctagctcgatgacactaaggccccaacatcgcgggacctgctgtggcgcggattcttaggaacgctgttctagccggccccctctccaggggtcgccgtggccggcattatttcctagttcttcttgtaaccctgaggtgccagcgcggggagtgaggaggggtcagggggctaaggatgcaacctctgacgttctgcgccttcctaggagagtcttacatgtgttgagatttcacaagcaatgcgagttgtaaaataccagctctacaagaagctaggctctgtgacggcatagttttcagtagctttatcacaatattcacaatggagaattatatgacatggtagcagaaataggcccttttatgtgttgcttctattttacctcaaattgtagatatagggtaatcaataaaatccatccatgcctttcacacactaagt

SEQ ID NO: 4885 - protein, 944 aa, Homo sapiens
MAQVAMSTLPVEDEESSESRMVVTFLMSALESMCKELAKSKAEVACIAVYETDVFVVGTERGRAFVNTRKDFQKDFVKYCVEEEEKAAEMHKMKSTTQANRMSVDAVEIETLRKTVEDYFCFCYGKALGKSTVVPVPYEKMLRDQSAVVVQGLPEGVAFKHPENYDLATLKWILENKAGISFIIKRPFLEPKKHVGGRVMVTDADRSILSPGGSCGPIKVKTEPTEDSGISLEMAAVTVKEESEDPDYYQYNIQGSHHSSEGNEGTEMEVPAEDSTQHVPSETSEDPEVEVTIEDDDYSPPSKRPKANELPQPPVPEPANAGKRKVREFNFEKWNARITDLRKQVEELFERKYAQAIKAKGPVTIPYPLFQSHVEDLYVEGLPEGIPFRRPSTYGIPRLERILLAKERIRFVIKKHELLNSTREDLQLDKPASGVKEEWYARITKLRKMVDQLFCKKFAEALGSTEAKAVPYQKFEAHPNDLYVEGLPENIPFRSPSWYGIPRLEKIIQVGNRIKFVIKRPELLTHSTTEVTQPRTNTPAQALGLTEAVKVPYPVFESNPEFLYVEGLPEGIPFRSPTWFGIPRLERIVRGSNKIKFVVKKPELVISYLPPGMASKINTKALQSPKRPRSPGSNSKVPEIEVTVEGPNNNNPQTSAVRTPTQTNGSNVPFKPRGREFSFEAWNAKITDLKQKVENLFNEKCGEALGLKQAVKVPFALFESFPEDFYVEGLPEGVPFRRPSTFGIPRLEKILRNKAKIKFIIKKPEMFETAIKESTSSKSPPRKINSSPNVNTTASGVEDLNIIQVTIPDDDNERLSKVEKARQLREQVNDLFSRKFGEAIGMGFPVKVPYRKITINPGCVVVDGMPPGVSFKAPSYLEISSMRRILDSAEFIKFTVIRPFPGLVINNQLVDQSESEGPVIQESAEPSQLEVPATEGKRTSSLLG

SEQ ID NO: 4886 - DNA, 8084 bp, Homo sapiens
aaaaaaaaaaaaaaaaaaaaaaaaaaaagaaaaaagaaaaaaaaaaggaggaggaggaggagggtgagagagaagctgggagagcagagaaaaggggccaccggtcgcccccccgcttccccgcacgcgctctccagccgcggccgcccgcctgccgcggtcaccccggcctctgcctctgtcccccagtgatcggatcaaggcgctgagcgaggccctgcctgcggggcggccatgcggcggtgacaggagcgcgaccgacacgcacgggcccctcgccccctctcgcctcccgtccgctcgccagctcccctcagccgaggctgctccgcggcggccgcagcccgcgcgcggcccacactcgcctcccctcggcacccccggccccggagctgcctggaggcggccgcactcggggatcatggcccaagttgcaatgtccaccctccccgttgaagatgaggagtcctcggagagcaggatggtggtgacattcctcatgtcagctctcgagtccatgtgtaaagaactggccaagtccaaagccgaagtggcctgcattgcagtgtatgaaacagacgtgtttgtcgtcggaactgaaagaggacgtgcttttgtcaataccagaaaggattttcaaaaagattttgtaaaatattgtgttgaagaagaagaaaaagctgcagagatgcataaaatgaaatctacaacccaggcaaatcggatgagtgtagatgctgtagaaattgaaacactcagaaaaacagttgaggactatttctgcttttgctatgggaaagctttaggcaaatccacagtggtacctgtaccatatgagaagatgctgcgagaccagtcggctgtggtagtgcaggggcttccggaaggtgttgcctttaaacaccccgagaactatgatcttgcaaccctgaaatggattttggagaacaaagcagggatttcattcatcattaagagaccttttttagagccaaagaagcatgtaggtggtcgtgtgatggtaacagatgctgacaggtcaatactatctccaggtggaagttgtggccccatcaaagtgaaaactgaacccacagaagattctggcatttccctggaaatggcagctgtgacagtaaaggaagaatcagaagatcctgattattatcaatataacattcaagcaggcccttctgaaactgatgatgttgatgaaaaacagcccctatcgaagcctttgcaaggaagccaccattcttcagagggcaatgaaggcacagaaatggaagtaccagcagaagatgatgattattctccaccgtctaagagaccaaaggccaatgagctaccgcagccaccagtcccggaacccgccaatgctgggaagcggaaagtgagggagttcaacttcgagaaatggaatgctcgcatcactgatctacgtaaacaagttgaagaattgtttgaaaggaaatatgctcaagccataaaagccaaaggtccggtgacgatcccgtaccctcttttccagtctcatgttgaagatctttatgtagaaggacttcctgaaggaattccttttagaaggccatctacttacggaattcctcgcctggagaggatattacttgcaaaggaaaggattcgttttgtgattaagaaacatgagcttctgaattcaacacgtgaagatttacagcttgataagccagcttcaggagtaaaggaagaatggtatgccagaatcactaaattaagaaagatggtggatcagcttttctgcaaaaaatttgcggaagccttggggagcactgaagccaaggctgtaccgtaccaaaaatttgaggcacacccgaatgatctgtacgtggaaggactgccagaaaacattcctttccgaagtccctcatggtatggaatcccaaggctggaaaaaatcattcaagtgggcaatcgaattaaatttgttattaaaagaccagaacttctgactcacagtaccactgaagttactcagccaagaacgaatacaccagtcaaagaagattggaatgtcagaattaccaagctacggaagcaagtggaagagatttttaatttgaaatttgcttagatttgttgacagcggtttcctggagtgctgtcttgagaacgattctgaggaggctcagcaagaaagagtgtttcagttgattgggtgtgtctgtcatggagaaggaactcaagctcttggactcaccgaggcagtaaaagtaccatatcctgtgtttgaatcaaacccggagttcttgtatgtggaaggcttgccagaggggattcccttccgaagccctacctggtttggaattccacgacttgaaaggatcgtccgcgggagtaataaaatcaagttcgttgttaaaaaacctgaactagttatttcctacttgcctcctgggatggctagtaaaataaacactaaagctttgcagtcccccaaaagaccacgaagtcctgggagtaattcaaaggttcctgaaattgaggtcaccgtggaaggccctaataacaacaatcctcaaacctcagctgttcgaaccccgacccagactaacggttctaacgttcccttcaagccacgagggagagagttttcctttgaggcctggaatgccaaaatcacggacctaaaacagaaagttgaaaatctcttcaatgagaaatgtggggaagctcttggccttaaacaagctgtgaaggtgccgttcgcgttatttgagtctttcccggaagacttttatgtggaaggcttacctgagggtgtgccattccgaagaccatcgacttttggcattccgaggctggagaagatactcagaaacaaagccaaaattaagttcatcattaaaaagcccgaaatgtttgagacggcgattaaggagagcacctcctctaagagccctcccagaaaaataaattcatcacccaatgttaatactactgcatcaggtgttgaagaccttaacatcattcaggtgacaattccagatgatgataatgaaagactctcgaaagttgaaaaagctagacagctaagagaacaagtgaatgacctctttagtcggaaatttggtgaagctattggtatgggttttcctgtgaaagttccctacaggaaaatcacaattaaccctggctgtgtggtggttgatggcatgcccccgggggtgtccttcaaagcccccagctacctggaaatcagctccatgagaaggatcttagactctgccgagtttatcaaattcacggtcattaggtaagtgagagtttcctgcttagtcacaggagcgaatctggagctcatgaggctgactcttctaaaatgcagccacaggtagtcatcgaatccggcttcctatgctgtgcaatcaacaaatcaaaataacttgtgtcatcattagaatgtcagatgtgcttctacgaactaagctgactcttttaattctttggcaaagggttggcaaactaggactgtttgccaaattcaggctgcctcctatttttagagtcttcctgaaacacagctacacccgtattatccatggctgctttcctgtcacagtgagtaagtagctgggactgagaaggcatggcctccaaagtctaaaatatttactctctagcactttgtagaaaaaccttagctaggcacagtggctaacgcctgtaatcccagcattttgggaggccaaggcaggcagatcacctgaggtcaggagttccagaccagcctggccaacatggtgaaatcccatctctacaaaaataaaacagttagctgggcatgatggcgggtgcctgtaatcccagctactcgggaggctgaggcaggatagtcgcttgaacccaggaggtggaggttgcaatgagccaagatcatgccactgcactccagcctggacgacagagtgagactccatcacaagaaaaaaagaactttgtcaacctctgtcttagggcgccttgtcacaggcttcgggtcagacggattcaaccttgcatcagccatttgttagccaggtcactctgttctttgtctgtaaatgagattgatcgttgttcccactgagagtgtcagctccttcccgtagagcaggcatgatgattgtactcacctctgacaccattgtgagtgccacattccttcccacgtccttgtcactgtaagagatgcccacctgagcaccaaccccaggttatcttcccctttgtcttccagccccccagaaacagctacgactcaacctacccaatcatttcatcatcagattgccactgtctctagttcaggtctcttgggactggcactcagaaatctcataataaatcctcttgaggcttctcatacactcgtcttcttccaatcttctttccctcaaaatctcatattttggttccacttcacccaccgtcattctccatatcactcccaggagttaggcaaaaagccccttccgttcttccgtatgttaaacttagaatcactctgttccctgctctgcgtttctattttttgtttttcctccatttactagtagcttaacactttctaacagtgttcttattattgatacgtatctatctcttccataagcttataaggtcacggataatacttctcattgtagtacgtaaatgacgtgggctagatatgagttgaataaacagttatacctgtaaattcttacagagtgaaaataaattgttatactttacaatttgtttctctctttagaccatttccaggacttgtgattaataaccgtgagtattttgtgaagtgttttgtttttgttttttcctggggtctgacgtgtgtgcgtgtgagtgtgtatacatgcttaacgtatatcacgttacttcacctatgtcagtaaccaggccaaatacttgttttagccctcagtaaaaacaccaggcacttcctagttgtaaaattattcaagcttcttaacttcctatcctcgatgcacttaatcataaaatggtaataatagcaccgattttgggggagtcgttccagtagatggaaagcatctggaacaggtgtcagcaagctcctgccgacgtgtatgcataaagttttattgaaaccaccatcgtgtccatttgtttatggcagaactgagagatggcagcagcaagtgtgtgcctgcaaaacctaaaatatttactaattggctctgcaagaaaagagtttgcatccccctaacctagaacagtgtctagcctctagtatgtgtttagcctacagtatgtgctcagcgaatacaatctatatttattactgcttttatgactgttataattactgtgcttggatttcgttacaaagtaagtcacaatgtgcctgcttctgttagtatttcagcacagtgcctggcacacatggggctctcaaatattgctgagcgagtgaacaaatgtcctttcaattccttaacgttgatgtcattttcaatagtattttgagccaaacttaattttgcgagtgtgttttgttttcttaactttattattaaaaatgtataaaagtgaggccaggcgtggtggctcacgcctgtaatcccagcagtttgggaggctgaggcaggcggatcagttgaggttgggagttggagaccagcccgtccaacatggtgaaagcctgtctctactaaaaatacaaaaatcagctgggtgtggtggcgcgtgcctgtaatcccagctactcaggaggctgaggcaggagagttgcttgaatcctagaggtggaggttgcagtgagctgagatcgtgccattgcactccagcctgggcaacaagagcaaaactctgtcccaataaataaataaataaaatgttctcttttgttcctgttcttgtgcggtagtgtggtatagagttttatggtaattactgtgaattagtgattctgagggacatatcagaactctgaggtttgtttccttctcatcttgagggaaacagcaaatgtatgttaaaatgcttttccaagggaacaacacatccttacattatttaaaccaatctgcttcattttcagagctggttgatcagagtgagtcagaaggccccgtgatacaagaatcagctgaaccaagccagttggaagttccagccacagaagaaataaaagagactgatggaagctctcagatcaagcaagaaccagaccccacgtggtagacctcttccctcctagggtaaatcagcttctgtgtcagggatgctgtgtggtgtccatctgaaccccctgcatacgcgtagctaatgtgatctccccactttcacataagatggtggccctgccttcagggaatgtgggagccaggtgggagccttcccggatatttaagctagaagattctacagggagattctccttggatcaatatatgtctctcagtcaaagatgtaaaagcacttttgccttaaaaagaatgttctgtttctaaatagagtcaacgttgtcctcctcattggaattcactatgagtcagaatcattagactgacttttttttttccatagtaatagtattttgcagagtctcacagagctgcagatcttttgttcatcttgcagagttaacaagtctgatcctgttagtccagatttcttaaatttggccaagttataataggagcagtagcttgagacccgaagtcaggaaactttgacaatggatttttttttttaatccagagacttgtactggaatttgccttaccctgtcagctcatggacttaaggtttcatcccgctttatgagtgcttctgaatccaagtcattgttacctgaatttgcaaattaagttgtgatattcgtgactgttaaattcctgtaattagattaacctctttgcttgcttgtttgttttctctcctattttagcttaaagtatcagtggttgagaagagcttttcggacctgttactaccccaagctgtgtaatatacttgtataacagaaataccttctatacaaacctttttttctacttttagatagaaatgtctactttttcagcagttctgtgaattaaagagcagagtgactgtgggtctggaatggctggtgtacttgggaatgtactatcaggattttacagcaatgctgggaaatgacagggaaaatgacaggaatgaatctcaccagattttttatgtactcagcagagccttgagttacggtgtttattttccaatcaagtgaagatatctcctacttctcctactggaacatctcagcttctgcagtgaagaaaaattcctgtgatagttcagttctttagtttttctatttgaaaaaaaaaaatcatttaaatgatcctttgttcacggctctccttaatgactgagtgaacagttcctatctgtatatttgactaaaccttttcctaagctatctctcatggttcctatgtttttttatcataattaaaagcaaaaccatctggatcacctaacagtcagaggtcagtatctcagcgtgtgaattatagaggaaatacagagagaacctcttccacttttacttttcgtccaaataaaatgcatggtgtaccagaagttgaagatcgggttgaggattggggctagctcgatgacactaaggccccaacatcgcgggacctgctgtggcgcggattcttaggaacgctgttctagccggccccctctccaggggtcgccgtggccggcattatttcctagttcttcttgtaaccctgaggtgccagcgcggggagtgaggaggggtcagggggctaaggatgcaacctctgacgttctgcgccttcctaggagagtcttacatgtgttgagatttcacaagcaatgcgagttgtaaaataccagctctacaagaagctaggctctgtgacggcatagttttcagtagctttatcacaatattcacaatggagaattatatgacatggtagcagaaataggcccttttatgtgttgcttctattttacctcaaattgtagatatagggtaatcaataaaatccatccatgcctttcacacactaagt

SEQ ID NO: 4887 - protein, 563 aa, Homo sapiens; identical to SEQ ID NO: 4097

SEQ ID NO: 4888 - DNA, 4387 bp, Homo sapiens
aaaaaaaaaaaaaaaaaaaaaaaaaaaagaaaaaagaaaaaaaaaaggaggaggaggaggagggtgagagagaagctgggagagcagagaaaaggggccaccggtcgcccccccgcttccccgcacgcgctctccagccgcggccgcccgcctgccgcggtcaccccggcctctgcctctgtcccccagtgatcggatcaaggcgctgagcgaggccctgcctgcggggcggccatgcggcggtgacaggagcgcgaccgacacgcacgggcccctcgccccctctcgcctcccgtccgctcgccagctcccctcagccgaggctgctccgcggcggccgcagcccgcgcgcggcccacactcgcctcccctcggcacccccggccccggagctgcctggaggcggccgcactcggggatcatggcccaagttgcaatgtccaccctccccgttgaagatgaggagtcctcggagagcaggatggtggtgacattcctcatgtcagctctcgagtccatgtgtaaagaactggccaagtccaaagccgaagtggcctgcattgcagtgtatgaaacagacgtgtttgtcgtcggaactgaaagaggacgtgcttttgtcaataccagaaaggattttcaaaaagattttgtaaaatattgtgttgaagaagaagaaaaagctgcagagatgcataaaatgaaatctacaacccaggcaaatcggatgagtgtagatgctgtagaaattgaaacactcagaaaaacagttgaggactatttctgcttttgctatgggaaagctttaggcaaatccacagtggtacctgtaccatatgagaagatgctgcgagaccagtcggctgtggtagtgcaggggcttccggaaggtgttgcctttaaacaccccgagaactatgatcttgcaaccctgaaatggattttggagaacaaagcagggatttcattcatcattaagagaccttttttagagccaaagaagcatgtaggtggtcgtgtgatggtaacagatgctgacaggtcaatactatctccaggtggaagttgtggccccatcaaagtgaaaactgaacccacagaagattctggcatttccctggaaatggcagctgtgacagtaaaggaagaatcagaagatcctgattattatcaatataacattcaaggaagccaccattcttcagagggcaatgaaggcacagaaatggaagtaccagcagaagatgatgattattctccaccgtctaagagaccaaaggccaatgagctaccgcagccaccagtcccggaacccgccaatgctgggaagcggaaagtgagggagttcaacttcgagaaatggaatgctcgcatcactgatctacgtaaacaagttgaagaattgtttgaaaggaaatatgctcaagccataaaagccaaaggtccggtgacgatcccgtaccctcttttccagtctcatgttgaagatctttatgtagaaggacttcctgaaggaattccttttagaaggccatctacttacggaattcctcgcctggagaggatattacttgcaaaggaaaggattcgttttgtgattaagaaacatgagcttctgaattcaacacgtgaagatttacagcttgataagccagcttcaggagtaaaggaagaatggtatgccagaatcactaaattaagaaagatggtggatcagcttttctgcaaaaaatttgcggaagccttggggagcactgaagccaaggctgtaccgtaccaaaaatttgaggcacacccgaatgatctgtacgtggaaggactgccagaaaacattcctttccgaagtccctcatggtatggaatcccaaggctggaaaaaatcattcaagtgggcaatcgaattaaatttgttattaaaagaccagaacttctgactcacagtaccactgaagttactcagccaagaacgaatacaccagctcaagctcttggactcaccgaggcagtaaaagtaccatatcctgtgtttgaatcaaacccggagttcttgtatgtggaaggcttgccagaggggattcccttccgaagccctacctggtttggaattccacgacttgaaaggatcgtccgcgggagtaataaaatcaagttcgttgttaaaaaacctgaactagttatttcctacttgcctcctgggatggctagtaaaataaacactaaagctttgcagtcccccaaaagaccacgaagtcctgggagtaattcaaaggttcctgaaattgaggtcaccgtggaaggccctaataacaacaatcctcaaacctcagctgttcgaaccccgacccagactaacggttctaacgttcccttcaagccacgagggagagagttttcctttgaggcctggaatgccaaaatcacggacctaaaacagaaagttgaaaatctcttcaatgagaaatgtggggaagctcttggccttaaacaagctgtgaaggtgccgttcgcgttatttgagtctttcccggaagacttttatgtggaaggcttacctgagggtgtgccattccgaagaccatcgacttttggcattccgaggctggagaagatactcagaaacaaagccaaaattaagttcatcattaaaaagcccgaaatgtttgagacggcgattaaggagagcacctcctctaagagccctcccagaaaaataaattcatcacccaatgttaatactactgcatcaggtgttgaagaccttaacatcattcaggtgacaattccagatgatgataatgaaagactctcgaaagttgaaaaagctagacagctaagagaacaagtgaatgacctctttagtcggaaatttggtgaagctattggtatgggttttcctgtgaaagttccctacaggaaaatcacaattaaccctggctgtgtggtggttgatggcatgcccccgggggtgtccttcaaagcccccagctacctggaaatcagctccatgagaaggatcttagactctgccgagtttatcaaattcacggtcattagaccatttccaggacttgtgattaataaccagctggttgatcagagtgagtcagaaggccccgtgatacaagaatcagctgaaccaagccagttggaagttccagccacagaagaaataaaagagactgatggaagctctcagatcaagcaagaaccagaccccacgtggtagacctcttccctcctaggcttaaagtatcagtggttgagaagagcttttcggacctgttactaccccaagctgtgtaatatacttgtataacagaaataccttctatacaaacctttttttctacttttagatagaaatgtctactttttcagcagttctgtgaattaaagagcagagtgactgtgggtctggaatggctggtgtacttgggaatgtactatcaggattttacagcaatgctgggaaatgacagggaaaatgacaggaatgaatctcaccagattttttatgtactcagcagagccttgagttacggtgtttattttccaatcaagtgaagatatctcctacttctcctactggaacatctcagcttctgcagtgaagaaaaattcctgtgatagttcagttctttagtttttctatttgaaaaaaaaaaatcatttaaatgatcctttgttcacggctctccttaatgactgagtgaacagttcctatctgtatatttgactaaaccttttcctaagctatctctcatggttcctatgtttttttatcataattaaaagcaaaaccatctggatcacctaacagtcagaggtcagtatctcagcgtgtgaattatagaggaaatacagagagaacctcttccacttttacttttcgtccaaataaaatgcatggtgtaccagaagttgaagatcgggttgaggattggggctagctcgatgacactaaggccccaacatcgcgggacctgctgtggcgcggattcttaggaacgctgttctagccggccccctctccaggggtcgccgtggccggcattatttcctagttcttcttgtaaccctgaggtgccagcgcggggagtgaggaggggtcagggggctaaggatgcaacctctgacgttctgcgccttcctaggagagtcttacatgtgttgagatttcacaagcaatgcgagttgtaaaataccagctctacaagaagctaggctctgtgacggcatagttttcagtagctttatcacaatattcacaatggagaattatatgacatggtagcagaaataggcccttttatgtgttgcttctattttacctcaaattgtagatatagggtaatcaataaaatccatccatgcctttcacacactaagt

SEQ ID NO: 4889 - protein, 933 aa, Homo sapiens; identical to SEQ ID NO: 4067

SEQ ID NO: 4890 - DNA, 4571 bp, Homo sapiens
aaaaaaaaaaaaaaaaaaaaaaaaaaaagaaaaaagaaaaaaaaaaggaggaggaggaggagggtgagagagaagctgggagagcagagaaaaggggccaccggtcgcccccccgcttccccgcacgcgctctccagccgcggccgcccgcctgccgcggtcaccccggcctctgcctctgtcccccagtgatcggatcaaggcgctgagcgaggccctgcctgcggggcggccatgcggcggtgacaggagcgcgaccgacacgcacgggcccctcgccccctctcgcctcccgtccgctcgccagctcccctcagccgaggctgctccgcggcggccgcagcccgcgcgcggcccacactcgcctcccctcggcacccccggccccggagctgcctggaggcggccgcactcggggatcatggcccaagttgcaatgtccaccctccccgttgaagatgaggagtcctcggagagcaggatggtggtgacattcctcatgtcagctctcgagtccatgtgtaaagaactggccaagtccaaagccgaagtggcctgcattgcagtgtatgaaacagacgtgtttgtcgtcggaactgaaagaggacgtgcttttgtcaataccagaaaggattttcaaaaagattttgtaaaatattgtgttgaagaagaagaaaaagctgcagagatgcataaaatgaaatctacaacccaggcaaatcggatgagtgtagatgctgtagaaattgaaacactcagaaaaacagttgaggactatttctgcttttgctatgggaaagctttaggcaaatccacagtggtacctgtaccatatgagaagatgctgcgagaccagtcggctgtggtagtgcaggggcttccggaaggtgttgcctttaaacaccccgagaactatgatcttgcaaccctgaaatggattttggagaacaaagcagggatttcattcatcattaagagaccttttttagagccaaagaagcatgtaggtggtcgtgtgatggtaacagatgctgacaggtcaatactatctccaggtggaagttgtggccccatcaaagtgaaaactgaacccacagaagattctggcatttccctggaaatggcagctgtgacagtaaaggaagaatcagaagatcctgattattatcaatataacattcaaggaagccaccattcttcagagggcaatgaaggcacagaaatggaagtaccagcagaagatgatgattattctccaccgtctaagagaccaaaggccaatgagctaccgcagccaccagtcccggaacccgccaatgctgggaagcggaaagtgagggagttcaacttcgagaaatggaatgctcgcatcactgatctacgtaaacaagttgaagaattgtttgaaaggaaatatgctcaagccataaaagccaaaggtccggtgacgatcccgtaccctcttttccagtctcatgttgaagatctttatgtagaaggacttcctgaaggaattccttttagaaggccatctacttacggaattcctcgcctggagaggatattacttgcaaaggaaaggattcgttttgtgattaagaaacatgagcttctgaattcaacacgtgaagatttacagcttgataagccagcttcaggagtaaaggaagaatggtatgccagaatcactaaattaagaaagatggtggatcagcttttctgcaaaaaatttgcggaagccttggggagcactgaagccaaggctgtaccgtaccaaaaatttgaggcacacccgaatgatctgtacgtggaaggactgccagaaaacattcctttccgaagtccctcatggtatggaatcccaaggctggaaaaaatcattcaagtgggcaatcgaattaaatttgttattaaaagaccagaacttctgactcacagtaccactgaagttactcagccaagaacgaatacaccagtcaaagaagattggaatgtcagaattaccaagctacggaagcaagtggaagagatttttaatttgaaatttgcttagatttgttgacagcggtttcctggagtgctgtcttgagaacgattctgaggaggctcagcaagaaagagtgtttcagttgattgggtgtgtctgtcatggagaaggaactcaagctcttggactcaccgaggcagtaaaagtaccatatcctgtgtttgaatcaaacccggagttcttgtatgtggaaggcttgccagaggggattcccttccgaagccctacctggtttggaattccacgacttgaaaggatcgtccgcgggagtaataaaatcaagttcgttgttaaaaaacctgaactagttatttcctacttgcctcctgggatggctagtaaaataaacactaaagctttgcagtcccccaaaagaccacgaagtcctgggagtaattcaaaggttcctgaaattgaggtcaccgtggaaggccctaataacaacaatcctcaaacctcagctgttcgaaccccgacccagactaacggttctaacgttcccttcaagccacgagggagagagttttcctttgaggcctggaatgccaaaatcacggacctaaaacagaaagttgaaaatctcttcaatgagaaatgtggggaagctcttggccttaaacaagctgtgaaggtgccgttcgcgttatttgagtctttcccggaagacttttatgtggaaggcttacctgagggtgtgccattccgaagaccatcgacttttggcattccgaggctggagaagatactcagaaacaaagccaaaattaagttcatcattaaaaagcccgaaatgtttgagacggcgattaaggagagcacctcctctaagagccctcccagaaaaataaattcatcacccaatgttaatactactgcatcaggtgttgaagaccttaacatcattcaggtgacaattccagatgatgataatgaaagactctcgaaagttgaaaaagctagacagctaagagaacaagtgaatgacctctttagtcggaaatttggtgaagctattggtatgggttttcctgtgaaagttccctacaggaaaatcacaattaaccctggctgtgtggtggttgatggcatgcccccgggggtgtccttcaaagcccccagctacctggaaatcagctccatgagaaggatcttagactctgccgagtttatcaaattcacggtcattagaccatttccaggacttgtgattaataaccagctggttgatcagagtgagtcagaaggccccgtgatacaagaatcagctgaaccaagccagttggaagttccagccacagaagaaataaaagagactgatggaagctctcagatcaagcaagaaccagaccccacgtggtagacctcttccctcctaggcttaaagtatcagtggttgagaagagcttttcggacctgttactaccccaagctgtgtaatatacttgtataacagaaataccttctatacaaacctttttttctacttttagatagaaatgtctactttttcagcagttctgtgaattaaagagcagagtgactgtgggtctggaatggctggtgtacttgggaatgtactatcaggattttacagcaatgctgggaaatgacagggaaaatgacaggaatgaatctcaccagattttttatgtactcagcagagccttgagttacggtgtttattttccaatcaagtgaagatatctcctacttctcctactggaacatctcagcttctgcagtgaagaaaaattcctgtgatagttcagttctttagtttttctatttgaaaaaaaaaaatcatttaaatgatcctttgttcacggctctccttaatgactgagtgaacagttcctatctgtatatttgactaaaccttttcctaagctatctctcatggttcctatgtttttttatcataattaaaagcaaaaccatctggatcacctaacagtcagaggtcagtatctcagcgtgtgaattatagaggaaatacagagagaacctcttccacttttacttttcgtccaaataaaatgcatggtgtaccagaagttgaagatcgggttgaggattggggctagctcgatgacactaaggccccaacatcgcgggacctgctgtggcgcggattcttaggaacgctgttctagccggccccctctccaggggtcgccgtggccggcattatttcctagttcttcttgtaaccctgaggtgccagcgcggggagtgaggaggggtcagggggctaaggatgcaacctctgacgttctgcgccttcctaggagagtcttacatgtgttgagatttcacaagcaatgcgagttgtaaaataccagctctacaagaagctaggctctgtgacggcatagttttcagtagctttatcacaatattcacaatggagaattatatgacatggtagcagaaataggcccttttatgtgttgcttctattttacctcaaattgtagatatagggtaatcaataaaatccatccatgcctttcacacactaagt

SEQ ID NO: 4891 - protein, 543 aa, Homo sapiens; identical to SEQ ID NO: 4195

SEQ ID NO: 4892 - DNA, 4040 bp, Homo sapiens
aaaaaaaaaaaaaaaaaaaaaaaaaaaagaaaaaagaaaaaaaaaaggaggaggaggaggagggtgagagagaagctgggagagcagagaaaaggggccaccggtcgcccccccgcttccccgcacgcgctctccagccgcggccgcccgcctgccgcggtcaccccggcctctgcctctgtcccccagtgatcggatcaaggcgctgagcgaggccctgcctgcggggcggccatgcggcggtgacaggagcgcgaccgacacgcacgggcccctcgccccctctcgcctcccgtccgctcgccagctcccctcagccgaggctgctccgcggcggccgcagcccgcgcgcggcccacactcgcctcccctcggcacccccggccccggagctgcctggaggcggccgcactcggtgtaaagaactggccaagtccaaagccgaagtggcctgcattgcagtgtatgaaacagacgtgtttgtcgtcggaactgaaagaggacgtgcttttgtcaataccagaaaggattttcaaaaagattttgtaaaatattgtgttgaagaagaagaaaaagctgcagagatgcataaaatgaaatctacaacccaggcaaatcggatgagtgtagatgctgtagaaattgaaacactcagaaaaacagttgaggactatttctgcttttgctatgggaaagctttaggcaaatccacagtggtacctgtaccatatgagaagatgctgcgagaccagtcggctgtggtagtgcaggggcttccggaaggtgttgcctttaaacaccccgagaactatgatcttgcaaccctgaaatggattttggagaacaaagcagggatttcattcatcattaagagaccttttttagagccaaagaagcatgtaggtggtcgtgtgatggtaacagatgctgacaggtcaatactatctccaggtggaagttgtggccccatcaaagtgaaaactgaacccacagaagattctggaagccaccattcttcagagggcaatgaaggcacagaaatggaagtaccagcagaagattctactcaacatgtcccttcagaaacaagtgaggaccctgaagttgaggtgactattgaagatgatgattattctccaccgtctaagagaccaaaggccaatgagctaccgcagccaccagtcccggaacccgccaatgctgggaagcggaaagtgagggagttcaacttcgagaaatggaatgctcgcatcactgatctacgtaaacaagttgaagaattgtttgaaaggaaatatgctcaagccataaaagccaaaggtccggtgacgatcccgtaccctcttttccagtctcatgttgaagatctttatgtagaaggacttcctgaaggaattccttttagaaggccatctacttacggaattcctcgcctggagaggatattacttgcaaaggaaaggattcgttttgtgattaagaaacatgagcttctgaattcaacacgtgaagatttacagcttgataagccagcttcaggagtaaaggaagaatggtatgccagaatcactaaattaagaaagatggtggatcagcttttctgcaaaaaatttgcggaagccttggggagcactgaagccaaggctgtaccgtaccaaaaatttgaggcacacccgaatgatctgtacgtggaaggactgccagaaaacattcctttccgaagtccctcatggtatggaatcccaaggctggaaaaaatcattcaagtgggcaatcgaattaaatttgttattaaaagaccagaacttctgactcacagtaccactgaagttactcagccaagaacgaatacaccagctcaagctcttggactcaccgaggcagtaaaagtaccatatcctgtgtttgaatcaaacccggagttcttgtatgtggaaggcttgccagaggggattcccttccgaagccctacctggtttggaattccacgacttgaaaggatcgtccgcgggagtaataaaatcaagttcgttgttaaaaaacctgaactagttatttcctacttgcctcctgggatggctagtaaaataaacactaaagctttgcagtcccccaaaagaccacgaagtcctgggagtaattcaaaggttcctgaaattgaggtcaccgtggaaggccctaataacaacaatcctcaaacctcagctgttcgaaccccgacccagactaacggttctaacgttcccttcaagccacgagggagagagttttcctttgaggcctggaatgccaaaatcacggacctaaaacagaaagttgaaaatctcttcaatgagaaatgtggggaagctcttggccttaaacaagctgtgaaggtgccgttcgcgttatttgagtctttcccggaagacttttatgtggaaggcttacctgagggtgtgccattccgaagaccatcgacttttggcattccgaggctggagaagatactcagaaacaaagccaaaattaagttcatcattaaaaagcccgaaatgtttgagacggcgattaaggagagcacctcctctaagagccctcccagaaaaataaattcatcacccaatgttaatactactgcatcaggtgttgaagaccttaacatcattcaggtgacaattccagatgatgataatgaaagactctcgaaagttgaaaaagctagacagctaagagaacaagtgaatgacctctttagtcggaaatttggtgaagctattggtatgggttttcctgtgaaagttccctacaggaaaatcacaattaaccctggctgtgtggtggttgatggcatgcccccgggggtgtccttcaaagcccccagctacctggaaatcagctccatgagaaggatcttagactctgccgagtttatcaaattcacggtcattagaccatttccaggacttgtgattaataaccagctggttgatcagagtgagtcagaaggccccgtgatacaagaatcagctgaaccaagccagttggaagttccagccacagaagaaataaaagagactgatggaagctctcagatcaagcaagaaccagaccccacgtggtagacctcttccctcctaggcttaaagtatcagtggttgagaagagcttttcggacctgttactaccccaagctgtagccttgagttacggtgtttattttccaatcaagtgaagatatctcctacttctcctactggaacatctcagcttctgcagtgaagaaaaattcctgtgatagttcagttctttagtttttctatttgaaaaaaaaaaatcatttaaatgatcctttgttcacggctctccttaatgactgagtgaacagttcctatctgtatatttgactaaaccttttcctaagctatctctcatggttcctatgtttttttatcataattaaaagcaaaaccatctggatcacctaacagtcagaggtcagtatctcagcgtgtgaattatagaggaaatacagagagaacctcttccacttttacttttcgtccaaataaaatgcatggtgtaccagaagttgaagatcgggttgaggattggggctagctcgatgacactaaggccccaacatcgcgggacctgctgtggcgcggattcttaggaacgctgttctagccggccccctctccaggggtcgccgtggccggcattatttcctagttcttcttgtaaccctgaggtgccagcgcggggagtgaggaggggtcagggggctaaggatgcaacctctgacgttctgcgccttcctaggagagtcttacatgtgttgagatttcacaagcaatgcgagttgtaaaataccagctctacaagaagctaggctctgtgacggcatagttttcagtagctttatcacaatattcacaatggagaattatatgacatggtagcagaaataggcccttttatgtgttgcttctattttacctcaaattgtagatatagggtaatcaataaaatccatccatgcctttcacacactaagt

SEQ ID NO: 4893 - protein, 839 aa, Homo sapiens; identical to SEQ ID NO: 4213

SEQ ID NO: 4894 - DNA, 3895 bp, Homo sapiens
aaaaaaaaaaaaaaaaaaaaaaaaaaaagaaaaaagaaaaaaaaaaggaggaggaggaggagggtgagagagaagctgggagagcagagaaaaggggccaccggtcgcccccccgcttccccgcacgcgctctccagccgcggccgcccgcctgccgcggtcaccccggcctctgcctctgtcccccagtgatcggatcaaggcgctgagcgaggccctgcctgcggggcggccatgcggcggtgacaggagcgcgaccgacacgcacgggcccctcgccccctctcgcctcccgtccgctcgccagctcccctcagccgaggctgctccgcggcggccgcagcccgcgcgcggcccacactcgcctcccctcggcacccccggccccggagctgcctggaggcggccgcactcggggatcatggcccaagttgcaatgtccaccctccccgttgaagatgaggagtcctcggagagcaggatggtggtgacattcctcatgtcagctctcgagtccatgtgtaaagaactggccaagtccaaagccgaagtggcctgcattgcagtgtatgaaacagacgtgtttgtcgtcggaactgaaagaggacgtgcttttgtcaataccagaaaggattttcaaaaagattttgtaaaatattgtgttgaagaagaagaaaaagctgcagagatgcataaaatgaaatctacaacccaggcaaatcggatgagtgtagatgctgtagaaattgaaacactcagaaaaacagttgaggactatttctgcttttgctatgggaaagctttaggcaaatccacagtggtacctgtaccatatgagaagatgctgcgagaccagtcggctgtggtagtgcaggggcttccggaaggtgttgcctttaaacaccccgagaactatgatcttgcaaccctgaaatggattttggagaacaaagcagggatttcattcatcattaagagaccttttttagagccaaagaagcatgtaggtggtcgtgtgatggtaacagatgctgacaggtcaatactatctccaggtggaagttgtggccccatcaaagtgaaaactgaacccacagaagattctggcatttccctggaaatggcagctgtgacagtaaaggaagaatcagaagatcctgattattatcaatataacattcaagcaggcccttctgaaactgatgatgttgatgaaaaacagcccctatcgaagcctttgcaaggaagccaccattcttcagagggcaatgaaggcacagaaatggaagtaccagcagaagatgatgattattctccaccgtctaagagaccaaaggccaatgagctaccgcagccaccagtcccggaacccgccaatgctgggaagcggaaagtgagggagttcaacttcgagaaatggaatgctcgcatcactgatctacgtaaacaagttgaagaattgtttgaaaggaaatatgctcaagccataaaagccaaaggtccggtgacgatcccgtaccctcttttccagtctcatgttgaagatctttatgtagaaggacttcctgaaggaattccttttagaaggccatctacttacggaattcctcgcctggagaggatattacttgcaaaggaaaggattcgttttgtgattaagaaacatgagcttctgaattcaacacgtgaagatttacagcttgataagccagcttcaggagtaaaggaagaatggtatgccagaatcactaaattaagaaagatggtggatcagcttttctgcaaaaaatttgcggaagccttggggagcactgaagccaaggctgtaccgtaccaaaaatttgaggcacacccgaatgatctgtacgtggaaggactgccagaaaacattcctttccgaagtccctcatggtatggaatcccaaggctggaaaaaatcattcaagtgggcaatcgaattaaatttgttattaaaagaccagaacttctgactcacagtaccactgaagttactcagccaagaacgaatacaccagctcaagctcttggactcaccgaggcagtaaaagtaccatatcctgtgtttgaatcaaacccggagttcttgtatgtggaaggcttgccagaggggattcccttccgaagccctacctggtttggaattccacgacttgaaaggatcgtccgcgggagtaataaaatcaagttcgttgttaaaaaacctgaactagttatttcctacttgcctcctgggatggctagtaaaataaacactaaagctttgcagtcccccaaaagaccacgaagtcctgggagtaattcaaaggttcctgaaattgaggtcaccgtggaaggccctaataacaacaatcctcaaacctcagctgttcgaaccccgacccagactaacggttctaacgttcccttcaagccacgagggagagagttttcctttgaggcctggaatgccaaaatcacggacctaaaacagaaagttgaaaatctcttcaatgagaaatgtggggaagctcttggccttaaacaagctgtgaaggtgccgttcgcgttatttgagtctttcccggaagacttttatgtggaaggcttacctgagggtgtgccattccgaagaccatcgacttttggcattccgaggctggagaagatactcagaaacaaagccaaaattaagttcatcattaaaaagcccgaaatgtttgagacggcgattaaggagagcacctcctctaagagccctcccagaaaaataaattcatcacccaatgttaatactactgcatcaggtgttgaagaccttaacatcattcaggtgacaattccagatgatgataatgaaagactctcgaaagttgaaaaagctagacagctaagagaacaagtgaatgacctctttagtcggaaatttggtgaagctattggtatgggttttcctgtgaaagttccctacaggaaaatcacaattaaccctggctgtgtggtggttgatggcatgcccccgggggtgtccttcaaagcccccagctacctggaaatcagctccatgagaaggatcttagactctgccgagtttatcaaattcacggtcattagaccatttccaggacttgtgattaataaccagctggttgatcagagtgagtcagaaggccccgtgatacaagaatcagctgaaccaagccagttggaagttccagccacagaagaaataaaagagactgatggaagctctcagatcaagcaagaaccagaccccacgtggtagacctcttccctcctaggcaaaaccatctggatcacctaacagtcagaggtcagtatctcagcgtgtgaattatagaggaaatacagagagaacctcttccacttttacttttcgtccaaataaaatgcatggtgtaccagaagttgaagatcgggttgaggattggggctagctcgatgacactaaggccccaacatcgcgggacctgctgtggcgcggattcttaggaacgctgttctagccggccccctctccaggggtcgccgtggccggcattatttcctagttcttcttgtaaccctgaggtgccagcgcggggagtgaggaggggtcagggggctaaggatgcaacctctgacgttctgcgccttcctaggagagtcttacatgtgttgagatttcacaagcaatgcgagttgtaaaataccagctctacaagaagctaggctctgtgacggcatagttttcagtagctttatcacaatattcacaatggagaattatatgacatggtagcagaaataggcccttttatgtgttgcttctattttacctcaaattgtagatatagggtaatcaataaaatccatccatgcctttcacacactaagt

SEQ ID NO: 4895 - protein, 953 aa, Homo sapiens; identical to SEQ ID NO: 4179

SEQ ID NO: 4896 - DNA, 7808 bp, Homo sapiens
aaaaaaaaaaaaaaaaaaaaaaaaaaaagaaaaaagaaaaaaaaaaggaggaggaggaggagggtgagagagaagctgggagagcagagaaaaggggccaccggtcgcccccccgcttccccgcacgcgctctccagccgcggccgcccgcctgccgcggtcaccccggcctctgcctctgtcccccagtgatcggatcaaggcgctgagcgaggccctgcctgcggggcggccatgcggcggtgacaggagcgcgaccgacacgcacgggcccctcgccccctctcgcctcccgtccgctcgccagctcccctcagccgaggctgctccgcggcggccgcagcccgcgcgcggcccacactcgcctcccctcggcacccccggccccggagctgcctggaggcggccgcactcggtgtaaagaactggccaagtccaaagccgaagtggcctgcattgcagtgtatgaaacagacgtgtttgtcgtcggaactgaaagaggacgtgcttttgtcaataccagaaaggattttcaaaaagattttgtaaaatattgtgttgaagaagaagaaaaagctgcagagatgcataaaatgaaatctacaacccaggcaaatcggatgagtgtagatgctgtagaaattgaaacactcagaaaaacagttgaggactatttctgcttttgctatgggaaagctttaggcaaatccacagtggtacctgtaccatatgagaagatgctgcgagaccagtcggctgtggtagtgcaggggcttccggaaggtgttgcctttaaacaccccgagaactatgatcttgcaaccctgaaatggattttggagaacaaagcagggatttcattcatcattaagagaccttttttagagccaaagaagcatgtaggtggtcgtgtgatggtaacagatgctgacaggtcaatactatctccaggtggaagttgtggccccatcaaagtgaaaactgaacccacagaagattctggcatttccctggaaatggcagctgtgacagtaaaggaagaatcagaagatcctgattattatcaatataacattcaaggaagccaccattcttcagagggcaatgaaggcacagaaatggaagtaccagcagaagatgatgattattctccaccgtctaagagaccaaaggccaatgagctaccgcagccaccagtcccggaacccgccaatgctgggaagcggaaagtgagggagttcaacttcgagaaatggaatgctcgcatcactgatctacgtaaacaagttgaagaattgtttgaaaggaaatatgctcaagccataaaagccaaaggtccggtgacgatcccgtaccctcttttccagtctcatgttgaagatctttatgtagaaggacttcctgaaggaattccttttagaaggccatctacttacggaattcctcgcctggagaggatattacttgcaaaggaaaggattcgttttgtgattaagaaacatgagcttctgaattcaacacgtgaagatttacagcttgataagccagcttcaggagtaaaggaagaatggtatgccagaatcactaaattaagaaagatggtggatcagcttttctgcaaaaaatttgcggaagccttggggagcactgaagccaaggctgtaccgtaccaaaaatttgaggcacacccgaatgatctgtacgtggaaggactgccagaaaacattcctttccgaagtccctcatggtatggaatcccaaggctggaaaaaatcattcaagtgggcaatcgaattaaatttgttattaaaagaccagaacttctgactcacagtaccactgaagttactcagccaagaacgaatacaccagtcaaagaagattggaatgtcagaattaccaagctacggaagcaagtggaagagatttttaatttgaaatttgctcaagctcttggactcaccgaggcagtaaaagtaccatatcctgtgtttgaatcaaacccggagttcttgtatgtggaaggcttgccagaggggattcccttccgaagccctacctggtttggaattccacgacttgaaaggatcgtccgcgggagtaataaaatcaagttcgttgttaaaaaacctgaactagttatttcctacttgcctcctgggatggctagtaaaataaacactaaagctttgcagtcccccaaaagaccacgaagtcctgggagtaattcaaaggttcctgaaattgaggtcaccgtggaaggccctaataacaacaatcctcaaacctcagctgttcgaaccccgacccagactaacggttctaacgttcccttcaagccacgagggagagagttttcctttgaggcctggaatgccaaaatcacggacctaaaacagaaagttgaaaatctcttcaatgagaaatgtggggaagctcttggccttaaacaagctgtgaaggtgccgttcgcgttatttgagtctttcccggaagacttttatgtggaaggcttacctgagggtgtgccattccgaagaccatcgacttttggcattccgaggctggagaagatactcagaaacaaagccaaaattaagttcatcattaaaaagcccgaaatgtttgagacggcgattaaggagagcacctcctctaagagccctcccagaaaaataaattcatcacccaatgttaatactactgcatcaggtgttgaagaccttaacatcattcaggtgacaattccagatgatgataatgaaagactctcgaaagttgaaaaagctagacagctaagagaacaagtgaatgacctctttagtcggaaatttggtgaagctattggtatgggttttcctgtgaaagttccctacaggaaaatcacaattaaccctggctgtgtggtggttgatggcatgcccccgggggtgtccttcaaagcccccagctacctggaaatcagctccatgagaaggatcttagactctgccgagtttatcaaattcacggtcattaggtaagtgagagtttcctgcttagtcacaggagcgaatctggagctcatgaggctgactcttctaaaatgcagccacaggtagtcatcgaatccggcttcctatgctgtgcaatcaacaaatcaaaataacttgtgtcatcattagaatgtcagatgtgcttctacgaactaagctgactcttttaattctttggcaaagggttggcaaactaggactgtttgccaaattcaggctgcctcctatttttagagtcttcctgaaacacagctacacccgtattatccatggctgctttcctgtcacagtgagtaagtagctgggactgagaaggcatggcctccaaagtctaaaatatttactctctagcactttgtagaaaaaccttagctaggcacagtggctaacgcctgtaatcccagcattttgggaggccaaggcaggcagatcacctgaggtcaggagttccagaccagcctggccaacatggtgaaatcccatctctacaaaaataaaacagttagctgggcatgatggcgggtgcctgtaatcccagctactcgggaggctgaggcaggatagtcgcttgaacccaggaggtggaggttgcaatgagccaagatcatgccactgcactccagcctggacgacagagtgagactccatcacaagaaaaaaagaactttgtcaacctctgtcttagggcgccttgtcacaggcttcgggtcagacggattcaaccttgcatcagccatttgttagccaggtcactctgttctttgtctgtaaatgagattgatcgttgttcccactgagagtgtcagctccttcccgtagagcaggcatgatgattgtactcacctctgacaccattgtgagtgccacattccttcccacgtccttgtcactgtaagagatgcccacctgagcaccaaccccaggttatcttcccctttgtcttccagccccccagaaacagctacgactcaacctacccaatcatttcatcatcagattgccactgtctctagttcaggtctcttgggactggcactcagaaatctcataataaatcctcttgaggcttctcatacactcgtcttcttccaatcttctttccctcaaaatctcatattttggttccacttcacccaccgtcattctccatatcactcccaggagttaggcaaaaagccccttccgttcttccgtatgttaaacttagaatcactctgttccctgctctgcgtttctattttttgtttttcctccatttactagtagcttaacactttctaacagtgttcttattattgatacgtatctatctcttccataagcttataaggtcacggataatacttctcattgtagtacgtaaatgacgtgggctagatatgagttgaataaacagttatacctgtaaattcttacagagtgaaaataaattgttatactttacaatttgtttctctctttagaccatttccaggacttgtgattaataaccgtgagtattttgtgaagtgttttgtttttgttttttcctggggtctgacgtgtgtgcgtgtgagtgtgtatacatgcttaacgtatatcacgttacttcacctatgtcagtaaccaggccaaatacttgttttagccctcagtaaaaacaccaggcacttcctagttgtaaaattattcaagcttcttaacttcctatcctcgatgcacttaatcataaaatggtaataatagcaccgattttgggggagtcgttccagtagatggaaagcatctggaacaggtgtcagcaagctcctgccgacgtgtatgcataaagttttattgaaaccaccatcgtgtccatttgtttatggcagaactgagagatggcagcagcaagtgtgtgcctgcaaaacctaaaatatttactaattggctctgcaagaaaagagtttgcatccccctaacctagaacagtgtctagcctctagtatgtgtttagcctacagtatgtgctcagcgaatacaatctatatttattactgcttttatgactgttataattactgtgcttggatttcgttacaaagtaagtcacaatgtgcctgcttctgttagtatttcagcacagtgcctggcacacatggggctctcaaatattgctgagcgagtgaacaaatgtcctttcaattccttaacgttgatgtcattttcaatagtattttgagccaaacttaattttgcgagtgtgttttgttttcttaactttattattaaaaatgtataaaagtgaggccaggcgtggtggctcacgcctgtaatcccagcagtttgggaggctgaggcaggcggatcagttgaggttgggagttggagaccagcccgtccaacatggtgaaagcctgtctctactaaaaatacaaaaatcagctgggtgtggtggcgcgtgcctgtaatcccagctactcaggaggctgaggcaggagagttgcttgaatcctagaggtggaggttgcagtgagctgagatcgtgccattgcactccagcctgggcaacaagagcaaaactctgtcccaataaataaataaataaaatgttctcttttgttcctgttcttgtgcggtagtgtggtatagagttttatggtaattactgtgaattagtgattctgagggacatatcagaactctgaggtttgtttccttctcatcttgagggaaacagcaaatgtatgttaaaatgcttttccaagggaacaacacatccttacattatttaaaccaatctgcttcattttcagagctggttgatcagagtgagtcagaaggccccgtgatacaagaatcagctgaaccaagccagttggaagttccagccacagaagaaataaaagagactgatggaagctctcagatcaagcaagaaccagaccccacgtggtagacctcttccctcctagggtaaatcagcttctgtgtcagggatgctgtgtggtgtccatctgaaccccctgcatacgcgtagctaatgtgatctccccactttcacataagatggtggccctgccttcagggaatgtgggagccaggtgggagccttcccggatatttaagctagaagattctacagggagattctccttggatcaatatatgtctctcagtcaaagatgtaaaagcacttttgccttaaaaagaatgttctgtttctaaatagagtcaacgttgtcctcctcattggaattcactatgagtcagaatcattagactgacttttttttttccatagtaatagtattttgcagagtctcacagagctgcagatcttttgttcatcttgcagagttaacaagtctgatcctgttagtccagatttcttaaatttggccaagttataataggagcagtagcttgagacccgaagtcaggaaactttgacaatggatttttttttttaatccagagacttgtactggaatttgccttaccctgtcagctcatggacttaaggtttcatcccgctttatgagtgcttctgaatccaagtcattgttacctgaatttgcaaattaagttgtgatattcgtgactgttaaattcctgtaattagattaacctctttgcttgcttgtttgttttctctcctattttagcttaaagtatcagtggttgagaagagcttttcggacctgttactaccccaagctgtgtaatatacttgtataacagaaataccttctatacaaacctttttttctacttttagatagaaatgtctactttttcagcagttctgtgaattaaagagcagagtgactgtgggtctggaatggctggtgtacttgggaatgtactatcaggattttacagcaatgctgggaaatgacagggaaaatgacaggaatgaatctcaccagattttttatgtactcagcagagccttgagttacggtgtttattttccaatcaagtgaagatatctcctacttctcctactggaacatctcagcttctgcagtgaagaaaaattcctgtgatagttcagttctttagtttttctatttgaaaaaaaaaaatcatttaaatgatcctttgttcacggctctccttaatgactgagtgaacagttcctatctgtatatttgactaaaccttttcctaagctatctctcatggttcctatgtttttttatcataattaaaagcaaaaccatctggatcacctaacagtcagaggtcagtatctcagcgtgtgaattatagaggaaatacagagagaacctcttccacttttacttttcgtccaaataaaatgcatggtgtaccagaagttgaagatcgggttgaggattggggctagctcgatgacactaaggccccaacatcgcgggacctgctgtggcgcggattcttaggaacgctgttctagccggccccctctccaggggtcgccgtggccggcattatttcctagttcttcttgtaaccctgaggtgccagcgcggggagtgaggaggggtcagggggctaaggatgcaacctctgacgttctgcgccttcctaggagagtcttacatgtgttgagatttcacaagcaatgcgagttgtaaaataccagctctacaagaagctaggctctgtgacggcatagttttcagtagctttatcacaatattcacaatggagaattatatgacatggtagcagaaataggcccttttatgtgttgcttctattttacctcaaattgtagatatagggtaatcaataaaatccatccatgcctttcacacactaagt

SEQ ID NO: 4897 - protein, 812 aa, Homo sapiens; identical to SEQ ID NO: 4635

SEQ ID NO: 4898 - DNA, 5098 bp, Homo sapiens
aaaaaaaaaaaaaaaaaaaaaaaaaaaagaaaaaagaaaaaaaaaaggaggaggaggaggagggtgagagagaagctgggagagcagagaaaaggggccaccggtcgcccccccgcttccccgcacgcgctctccagccgcggccgcccgcctgccgcggtcaccccggcctctgcctctgtcccccagtgatcggatcaaggcgctgagcgaggccctgcctgcggggcggccatgcggcggtgacaggagcgcgaccgacacgcacgggcccctcgccccctctcgcctcccgtccgctcgccagctcccctcagccgaggctgctccgcggcggccgcagcccgcgcgcggcccacactcgcctcccctcggcacccccggccccggagctgcctggaggcggccgcactcggtgtaaagaactggccaagtccaaagccgaagtggcctgcattgcagtgtatgaaacagacgtgtttgtcgtcggaactgaaagaggacgtgcttttgtcaataccagaaaggattttcaaaaagattttgtaaaatattgtgttgaagaagaagaaaaagctgcagagatgcataaaatgaaatctacaacccaggcaaatcggatgagtgtagatgctgtagaaattgaaacactcagaaaaacagttgaggactatttctgcttttgctatgggaaagctttaggcaaatccacagtggtacctgtaccatatgagaagatgctgcgagaccagtcggctgtggtagtgcaggggcttccggaaggtgttgcctttaaacaccccgagaactatgatcttgcaaccctgaaatggattttggagaacaaagcagggatttcattcatcattaagagaccttttttagagccaaagaagcatgtaggtggtcgtgtgatggtaacagatgctgacaggtcaatactatctccaggtggaagttgtggccccatcaaagtgaaaactgaacccacagaagattctggcatttccctggaaatggcagctgtgacagtaaaggaagaatcagaagatcctgattattatcaatataacattcaagcaggcccttctgaaactgatgatgttgatgaaaaacagcccctatcgaagcctttgcaaggaagccaccattcttcagagggcaatgaaggcacagaaatggaagtaccagcagaagattctactcaacatgtcccttcagaaacaagtgaggaccctgaagttgaggtgactattgaagatgatgattattctccaccgtctaagagaccaaaggccaatgagctaccgcagccaccagtcccggaacccgccaatgctgggaagcggaaagtgagggagttcaacttcgagaaatggaatgctcgcatcactgatctacgtaaacaagttgaagaattgtttgaaaggaaatatgctcaagccataaaagccaaaggtccggtgacgatcccgtaccctcttttccagtctcatgttgaagatctttatgtagaaggacttcctgaaggaattccttttagaaggccatctacttacggaattcctcgcctggagaggatattacttgcaaaggaaaggattcgttttgtgattaagaaacatgagcttctgaattcaacacgtgaagatttacagcttgataagccagcttcaggagtaaaggaagaatggtatgccagaatcactaaattaagaaagatggtggatcagcttttctgcaaaaaatttgcggaagccttggggagcactgaagccaaggctgtaccgtaccaaaaatttgaggcacacccgaatgatctgtacgtggaaggactgccagaaaacattcctttccgaagtccctcatggtatggaatcccaaggctggaaaaaatcattcaagtgggcaatcgaattaaatttgttattaaaagaccagaacttctgactcacagtaccactgaagttactcagccaagaacgaatacaccagctcaagctcttggactcaccgaggcagtaaaagtaccatatcctgtgtttgaatcaaacccggagttcttgtatgtggaaggcttgccagaggggattcccttccgaagccctacctggtttggaattccacgacttgaaaggatcgtccgcgggagtaataaaatcaagttcgttgttaaaaaacctgaactagttatttcctacttgcctcctgggatggctagtaaaataaacactaaagctttgcagtcccccaaaagaccacgaagtcctgggagtaattcaaaggttcctgaaattgaggtcaccgtggaaggccctaataacaacaatcctcaaacctcagctgttcgaaccccgacccagactaacggttctaacgttcccttcaagccacgagggagagagttttcctttgaggcctggaatgccaaaatcacggacctaaaacagaaagttgaaaatctcttcaatgagaaatgtggggaagctcttggccttaaacaagctgtgaaggtgccgttcgcgttatttgagtctttcccggaagacttttatgtggaaggcttacctgagggtgtgccattccgaagaccatcgacttttggcattccgaggctggagaagatactcagaaacaaagccaaaattaagttcatcattaaaaagcccgaaatgtttgagacggcgattaaggagagcacctcctctaagagccctcccagaaaaataaattcatcacccaatgttaatactactgcatcaggtgttgaagaccttaacatcattcaggtgacaattccagatgatgataatgaaagactctcgaaagttgaaaaagctagacagctaagagaacaagtgaatgacctctttagtcggaaatttggtgaagctattggtatgggttttcctgtgaaagttccctacaggaaaatcacaattaaccctggctgtgtggtggttgatggcatgcccccgggggtgtccttcaaagcccccagctacctggaaatcagctccatgagaaggatcttagactctgccgagtttatcaaattcacggtcattagaccatttccaggacttgtgattaataaccagctggttgatcagagtgagtcagaaggccccgtgatacaagaatcagctgaaccaagccagttggaagttccagccacagaagaaataaaagagactgatggaagctctcagatcaagcaagaaccagaccccacgtggtagacctcttccctcctagggtaaatcagcttctgtgtcagggatgctgtgtggtgtccatctgaaccccctgcatacgcgtagctaatgtgatctccccactttcacataagatggtggccctgccttcagggaatgtgggagccaggtgggagccttcccggatatttaagctagaagattctacagggagattctccttggatcaatatatgtctctcagtcaaagatgtaaaagcacttttgccttaaaaagaatgttctgtttctaaatagagtcaacgttgtcctcctcattggaattcactatgagtcagaatcattagactgacttttttttttccatagtaatagtattttgcagagtctcacagagctgcagatcttttgttcatcttgcagagttaacaagtctgatcctgttagtccagatttcttaaatttggccaagttataataggagcagtagcttgagacccgaagtcaggaaactttgacaatggatttttttttttaatccagagacttgtactggaatttgccttaccctgtcagctcatggacttaaggtttcatcccgctttatgagtgcttctgaatccaagtcattgttacctgaatttgcaaattaagttgtgatattcgtgactgttaaattcctgtaattagattaacctctttgcttgcttgtttgttttctctcctattttagcttaaagtatcagtggttgagaagagcttttcggacctgttactaccccaagctgtgtaatatacttgtataacagaaataccttctatacaaacctttttttctacttttagatagaaatgtctactttttcagcagttctgtgaattaaagagcagagtgactgtgggtctggaatggctggtgtacttgggaatgtactatcaggattttacagcaatgctgggaaatgacagggaaaatgacaggaatgaatctcaccagattttttatgtactcagcagagccttgagttacggtgtttattttccaatcaagtgaagatatctcctacttctcctactggaacatctcagcttctgcagtgaagaaaaattcctgtgatagttcagttctttagtttttctatttgaaaaaaaaaaatcatttaaatgatcctttgttcacggctctccttaatgactgagtgaacagttcctatctgtatatttgactaaaccttttcctaagctatctctcatggttcctatgtttttttatcataattaaaagcaaaaccatctggatcacctaacagtcagaggtcagtatctcagcgtgtgaattatagaggaaatacagagagaacctcttccacttttacttttcgtccaaataaaatgcatggtgtaccagaagttgaagatcgggttgaggattggggctagctcgatgacactaaggccccaacatcgcgggacctgctgtggcgcggattcttaggaacgctgttctagccggccccctctccaggggtcgccgtggccggcattatttcctagttcttcttgtaaccctgaggtgccagcgcggggagtgaggaggggtcagggggctaaggatgcaacctctgacgttctgcgccttcctaggagagtcttacatgtgttgagatttcacaagcaatgcgagttgtaaaataccagctctacaagaagctaggctctgtgacggcatagttttcagtagctttatcacaatattcacaatggagaattatatgacatggtagcagaaataggcccttttatgtgttgcttctattttacctcaaattgtagatatagggtaatcaataaaatccatccatgcctttcacacactaagt

SEQ ID NO: 4899 - protein, 885 aa, Homo sapiens; identical to SEQ ID NO: 4109

SEQ ID NO: 4900 - DNA, 7176 bp, Homo sapiens
aaaaaaaaaaaaaaaaaaaaaaaaaaaagaaaaaagaaaaaaaaaaggaggaggaggaggagggtgagagagaagctgggagagcagagaaaaggggccaccggtcgcccccccgcttccccgcacgcgctctccagccgcggccgcccgcctgccgcggtcaccccggcctctgcctctgtcccccagtgatcggatcaaggcgctgagcgaggccctgcctgcggggcggccatgcggcggtgacaggagcgcgaccgacacgcacgggcccctcgccccctctcgcctcccgtccgctcgccagctcccctcagccgaggctgctccgcggcggccgcagcccgcgcgcggcccacactcgcctcccctcggcacccccggccccggagctgcctggaggcggccgcactcggtgtaaagaactggccaagtccaaagccgaagtggcctgcattgcagtgtatgaaacagacgtgtttgtcgtcggaactgaaagaggacgtgcttttgtcaataccagaaaggattttcaaaaagattttgtaaaatattgtgttgaagaagaagaaaaagctgcagagatgcataaaatgaaatctacaacccaggcaaatcggatgagtgtagatgctgtagaaattgaaacactcagaaaaacagttgaggactatttctgcttttgctatgggaaagctttaggcaaatccacagtggtacctgtaccatatgagaagatgctgcgagaccagtcggctgtggtagtgcaggggcttccggaaggtgttgcctttaaacaccccgagaactatgatcttgcaaccctgaaatggattttggagaacaaagcagggatttcattcatcattaagagaccttttttagagccaaagaagcatgtaggtggtcgtgtgatggtaacagatgctgacaggtcaatactatctccaggtggaagttgtggccccatcaaagtgaaaactgaacccacagaagattctggcatttccctggaaatggcagctgtgacagtaaaggaagaatcagaagatcctgattattatcaatataacattcaagcaggcccttctgaaactgatgatgttgatgaaaaacagcccctatcgaagcctttgcaaggaagccaccattcttcagagggcaatgaaggcacagaaatggaagtaccagcagaagatgatgattattctccaccgtctaagagaccaaaggccaatgagctaccgcagccaccagtcccggaacccgccaatgctgggaagcggaaagtgagggagttcaacttcgagaaatggaatgctcgcatcactgatctacgtaaacaagttgaagaattgtttgaaaggaaatatgctcaagccataaaagccaaaggtccggtgacgatcccgtaccctcttttccagtctcatgttgaagatctttatgtagaaggacttcctgaaggaattccttttagaaggccatctacttacggaattcctcgcctggagaggatattacttgcaaaggaaaggattcgttttgtgattaagaaacatgagcttctgaattcaacacgtgaagatttacagcttgataagccagcttcaggagtaaaggaagaatggtatgccagaatcactaaattaagaaagatggtggatcagcttttctgcaaaaaatttgcggaagccttggggagcactgaagccaaggctgtaccgtaccaaaaatttgaggcacacccgaatgatctgtacgtggaaggactgccagaaaacattcctttccgaagtccctcatggtatggaatcccaaggctggaaaaaatcattcaagtgggcaatcgaattaaatttgttattaaaagaccagaacttctgactcacagtaccactgaagttactcagccaagaacgaatacaccagtcaaagaagattggaatgtcagaattaccaagctacggaagcaagtggaagagatttttaatttgaaatttgctcaagctcttggactcaccgaggcagtaaaagtaccatatcctgtgtttgaatcaaacccggagttcttgtatgtggaaggcttgccagaggggattcccttccgaagccctacctggtttggaattccacgacttgaaaggatcgtccgcgggagtaataaaatcaagttcgttgttaaaaaacctgaactagttatttcctacttgcctcctgggatggctagtaaaataaacactaaagctttgcagtcccccaaaagaccacgaagtcctgggagtaattcaaaggttcctgaaattgaggtcaccgtggaaggccctaataacaacaatcctcaaacctcagctgttcgaaccccgacccagactaacggttctaacgttcccttcaagccacgagggagagagttttcctttgaggcctggaatgccaaaatcacggacctaaaacagaaagttgaaaatctcttcaatgagaaatgtggggaagctcttggccttaaacaagctgtgaaggtgccgttcgcgttatttgagtctttcccggaagacttttatgtggaaggcttacctgagggtgtgccattccgaagaccatcgacttttggcattccgaggctggagaagatactcagaaacaaagccaaaattaagttcatcattaaaaagcccgaaatgtttgagacggcgattaaggagagcacctcctctaagagccctcccagaaaaataaattcatcacccaatgttaatactactgcatcaggtgttgaagaccttaacatcattcaggtgacaattccagatgatgataatgaaagactctcgaaagttgaaaaagctagacagctaagagaacaagtgaatgacctctttagtcggaaatttggtgaagctattggtatgggttttcctgtgaaagttccctacaggaaaatcacaattaaccctggctgtgtggtggttgatggcatgcccccgggggtgtccttcaaagcccccagctacctggaaatcagctccatgagaaggatcttagactctgccgagtttatcaaattcacggtcattaggtaagtgagagtttcctgcttagtcacaggagcgaatctggagctcatgaggctgactcttctaaaatgcagccacaggtagtcatcgaatccggcttcctatgctgtgcaatcaacaaatcaaaataacttgtgtcatcattagaatgtcagatgtgcttctacgaactaagctgactcttttaattctttggcaaagggttggcaaactaggactgtttgccaaattcaggctgcctcctatttttagagtcttcctgaaacacagctacacccgtattatccatggctgctttcctgtcacagtgagtaagtagctgggactgagaaggcatggcctccaaagtctaaaatatttactctctagcactttgtagaaaaaccttagctaggcacagtggctaacgcctgtaatcccagcattttgggaggccaaggcaggcagatcacctgaggtcaggagttccagaccagcctggccaacatggtgaaatcccatctctacaaaaataaaacagttagctgggcatgatggcgggtgcctgtaatcccagctactcgggaggctgaggcaggatagtcgcttgaacccaggaggtggaggttgcaatgagccaagatcatgccactgcactccagcctggacgacagagtgagactccatcacaagaaaaaaagaactttgtcaacctctgtcttagggcgccttgtcacaggcttcgggtcagacggattcaaccttgcatcagccatttgttagccaggtcactctgttctttgtctgtaaatgagattgatcgttgttcccactgagagtgtcagctccttcccgtagagcaggcatgatgattgtactcacctctgacaccattgtgagtgccacattccttcccacgtccttgtcactgtaagagatgcccacctgagcaccaaccccaggttatcttcccctttgtcttccagccccccagaaacagctacgactcaacctacccaatcatttcatcatcagattgccactgtctctagttcaggtctcttgggactggcactcagaaatctcataataaatcctcttgaggcttctcatacactcgtcttcttccaatcttctttccctcaaaatctcatattttggttccacttcacccaccgtcattctccatatcactcccaggagttaggcaaaaagccccttccgttcttccgtatgttaaacttagaatcactctgttccctgctctgcgtttctattttttgtttttcctccatttactagtagcttaacactttctaacagtgttcttattattgatacgtatctatctcttccataagcttataaggtcacggataatacttctcattgtagtacgtaaatgacgtgggctagatatgagttgaataaacagttatacctgtaaattcttacagagtgaaaataaattgttatactttacaatttgtttctctctttagaccatttccaggacttgtgattaataaccgtgagtattttgtgaagtgttttgtttttgttttttcctggggtctgacgtgtgtgcgtgtgagtgtgtatacatgcttaacgtatatcacgttacttcacctatgtcagtaaccaggccaaatacttgttttagccctcagtaaaaacaccaggcacttcctagttgtaaaattattcaagcttcttaacttcctatcctcgatgcacttaatcataaaatggtaataatagcaccgattttgggggagtcgttccagtagatggaaagcatctggaacaggtgtcagcaagctcctgccgacgtgtatgcataaagttttattgaaaccaccatcgtgtccatttgtttatggcagaactgagagatggcagcagcaagtgtgtgcctgcaaaacctaaaatatttactaattggctctgcaagaaaagagtttgcatccccctaacctagaacagtgtctagcctctagtatgtgtttagcctacagtatgtgctcagcgaatacaatctatatttattactgcttttatgactgttataattactgtgcttggatttcgttacaaagtaagtcacaatgtgcctgcttctgttagtatttcagcacagtgcctggcacacatggggctctcaaatattgctgagcgagtgaacaaatgtcctttcaattccttaacgttgatgtcattttcaatagtattttgagccaaacttaattttgcgagtgtgttttgttttcttaactttattattaaaaatgtataaaagtgaggccaggcgtggtggctcacgcctgtaatcccagcagtttgggaggctgaggcaggcggatcagttgaggttgggagttggagaccagcccgtccaacatggtgaaagcctgtctctactaaaaatacaaaaatcagctgggtgtggtggcgcgtgcctgtaatcccagctactcaggaggctgaggcaggagagttgcttgaatcctagaggtggaggttgcagtgagctgagatcgtgccattgcactccagcctgggcaacaagagcaaaactctgtcccaataaataaataaataaaatgttctcttttgttcctgttcttgtgcggtagtgtggtatagagttttatggtaattactgtgaattagtgattctgagggacatatcagaactctgaggtttgtttccttctcatcttgagggaaacagcaaatgtatgttaaaatgcttttccaagggaacaacacatccttacattatttaaaccaatctgcttcattttcagagctggttgatcagagtgagtcagaaggccccgtgatacaagaatcagctgaaccaagccagttggaagttccagccacagaagaaataaaagagactgatggaagctctcagatcaagcaagaaccagaccccacgtggtagacctcttccctcctaggcttaaagtatcagtggttgagaagagcttttcggacctgttactaccccaagctgtgtaatatacttgtataacagaaataccttctatacaaacctttttttctacttttagatagaaatgtctactttttcagcagttctgtgaattaaagagcagagtgactgtgggtctggaatggctggtgtacttgggaatgtactatcaggattttacagcaatgctgggaaatgacagggaaaatgacaggaatgaatctcaccagattttttatgtactcagcagagccttgagttacggtgtttattttccaatcaagtgaagatatctcctacttctcctactggaacatctcagcttctgcagtgaagaaaaattcctgtgatagttcagttctttagtttttctatttgaaaaaaaaaaatcatttaaatgatcctttgttcacggctctccttaatgactgagtgaacagttcctatctgtatatttgactaaaccttttcctaagctatctctcatggttcctatgtttttttatcataattaaaagcaaaaccatctggatcacctaacagtcagaggtcagtatctcagcgtgtgaattatagaggaaatacagagagaacctcttccacttttacttttcgtccaaataaaatgcatggtgtaccagaagttgaagatcgggttgaggattggggctagctcgatgacactaaggccccaacatcgcgggacctgctgtggcgcggattcttaggaacgctgttctagccggccccctctccaggggtcgccgtggccggcattatttcctagttcttcttgtaaccctgaggtgccagcgcggggagtgaggaggggtcagggggctaaggatgcaacctctgacgttctgcgccttcctaggagagtcttacatgtgttgagatttcacaagcaatgcgagttgtaaaataccagctctacaagaagctaggctctgtgacggcatagttttcagtagctttatcacaatattcacaatggagaattatatgacatggtagcagaaataggcccttttatgtgttgcttctattttacctcaaattgtagatatagggtaatcaataaaatccatccatgcctttcacacactaagt

SEQ ID NO: 4901 - protein, 832 aa, Homo sapiens; identical to SEQ ID NO: 4363

SEQ ID NO: 4902 - DNA, 4415 bp, Homo sapiens
aaaaaaaaaaaaaaaaaaaaaaaaaaaagaaaaaagaaaaaaaaaaggaggaggaggaggagggtgagagagaagctgggagagcagagaaaaggggccaccggtcgcccccccgcttccccgcacgcgctctccagccgcggccgcccgcctgccgcggtcaccccggcctctgcctctgtcccccagtgatcggatcaaggcgctgagcgaggccctgcctgcggggcggccatgcggcggtgacaggagcgcgaccgacacgcacgggcccctcgccccctctcgcctcccgtccgctcgccagctcccctcagccgaggctgctccgcggcggccgcagcccgcgcgcggcccacactcgcctcccctcggcacccccggccccggagctgcctggaggcggccgcactcggtgtaaagaactggccaagtccaaagccgaagtggcctgcattgcagtgtatgaaacagacgtgtttgtcgtcggaactgaaagaggacgtgcttttgtcaataccagaaaggattttcaaaaagattttgtaaaatattgtgttgaagaagaagaaaaagctgcagagatgcataaaatgaaatctacaacccaggcaaatcggatgagtgtagatgctgtagaaattgaaacactcagaaaaacagttgaggactatttctgcttttgctatgggaaagctttaggcaaatccacagtggtacctgtaccatatgagaagatgctgcgagaccagtcggctgtggtagtgcaggggcttccggaaggtgttgcctttaaacaccccgagaactatgatcttgcaaccctgaaatggattttggagaacaaagcagggatttcattcatcattaagagaccttttttagagccaaagaagcatgtaggtggtcgtgtgatggtaacagatgctgacaggtcaatactatctccaggtggaagttgtggccccatcaaagtgaaaactgaacccacagaagattctggcatttccctggaaatggcagctgtgacagtaaaggaagaatcagaagatcctgattattatcaatataacattcaagcaggcccttctgaaactgatgatgttgatgaaaaacagcccctatcgaagcctttgcaaggaagccaccattcttcagagggcaatgaaggcacagaaatggaagtaccagcagaagatgatgattattctccaccgtctaagagaccaaaggccaatgagctaccgcagccaccagtcccggaacccgccaatgctgggaagcggaaagtgagggagttcaacttcgagaaatggaatgctcgcatcactgatctacgtaaacaagttgaagaattgtttgaaaggaaatatgctcaagccataaaagccaaaggtccggtgacgatcccgtaccctcttttccagtctcatgttgaagatctttatgtagaaggacttcctgaaggaattccttttagaaggccatctacttacggaattcctcgcctggagaggatattacttgcaaaggaaaggattcgttttgtgattaagaaacatgagcttctgaattcaacacgtgaagatttacagcttgataagccagcttcaggagtaaaggaagaatggtatgccagaatcactaaattaagaaagatggtggatcagcttttctgcaaaaaatttgcggaagccttggggagcactgaagccaaggctgtaccgtaccaaaaatttgaggcacacccgaatgatctgtacgtggaaggactgccagaaaacattcctttccgaagtccctcatggtatggaatcccaaggctggaaaaaatcattcaagtgggcaatcgaattaaatttgttattaaaagaccagaacttctgactcacagtaccactgaagttactcagccaagaacgaatacaccagtcaaagaagattggaatgtcagaattaccaagctacggaagcaagtggaagagatttttaatttgaaatttgctcaagctcttggactcaccgaggcagtaaaagtaccatatcctgtgtttgaatcaaacccggagttcttgtatgtggaaggcttgccagaggggattcccttccgaagccctacctggtttggaattccacgacttgaaaggatcgtccgcgggagtaataaaatcaagttcgttgttaaaaaacctgaactagttatttcctacttgcctcctgggatggctagtaaaataaacactaaagctttgcagtcccccaaaagaccacgaagtcctgggagtaattcaaaggttcctgaaattgaggtcaccgtggaaggccctaataacaacaatcctcaaacctcagctgttcgaaccccgacccagactaacggttctaacgttcccttcaagccacgagggagagagttttcctttgaggcctggaatgccaaaatcacggacctaaaacagaaagttgaaaatctcttcaatgagaaatgtggggaagctcttggccttaaacaagctgtgaaggtgccgttcgcgttatttgagtctttcccggaagacttttatgtggaaggcttacctgagggtgtgccattccgaagaccatcgacttttggcattccgaggctggagaagatactcagaaacaaagccaaaattaagttcatcattaaaaagcccgaaatgtttgagacggcgattaaggagagcacctcctctaagagccctcccagaaaaataaattcatcacccaatgttaatactactgcatcaggtgttgaagaccttaacatcattcaggtgacaattccagatgatgataatgaaagactctcgaaagttgaaaaagctagacagctaagagaacaagtgaatgacctctttagtcggaaatttggtgaagctattggtatgggttttcctgtgaaagttccctacaggaaaatcacaattaaccctggctgtgtggtggttgatggcatgcccccgggggtgtccttcaaagcccccagctacctggaaatcagctccatgagaaggatcttagactctgccgagtttatcaaattcacggtcattagaccatttccaggacttgtgattaataaccagctggttgatcagagtgagtcagaaggccccgtgatacaagaatcagctgaaccaagccagttggaagttccagccacagaagaaataaaagagactgatggaagctctcagatcaagcaagaaccagaccccacgtggtagacctcttccctcctaggcttaaagtatcagtggttgagaagagcttttcggacctgttactaccccaagctgtgtaatatacttgtataacagaaataccttctatacaaacctttttttctacttttagatagaaatgtctactttttcagcagttctgtgaattaaagagcagagtgactgtgggtctggaatggctggtgtacttgggaatgtactatcaggattttacagcaatgctgggaaatgacagggaaaatgacaggaatgaatctcaccagattttttatgtactcagcagagccttgagttacggtgtttattttccaatcaagtgaagatatctcctacttctcctactggaacatctcagcttctgcagtgaagaaaaattcctgtgatagttcagttctttagtttttctatttgaaaaaaaaaaatcatttaaatgatcctttgttcacggctctccttaatgactgagtgaacagttcctatctgtatatttgactaaaccttttcctaagctatctctcatggttcctatgtttttttatcataattaaaagcaaaaccatctggatcacctaacagtcagaggtcagtatctcagcgtgtgaattatagaggaaatacagagagaacctcttccacttttacttttcgtccaaataaaatgcatggtgtaccagaagttgaagatcgggttgaggattggggctagctcgatgacactaaggccccaacatcgcgggacctgctgtggcgcggattcttaggaacgctgttctagccggccccctctccaggggtcgccgtggccggcattatttcctagttcttcttgtaaccctgaggtgccagcgcggggagtgaggaggggtcagggggctaaggatgcaacctctgacgttctgcgccttcctaggagagtcttacatgtgttgagatttcacaagcaatgcgagttgtaaaataccagctctacaagaagctaggctctgtgacggcatagttttcagtagctttatcacaatattcacaatggagaattatatgacatggtagcagaaataggcccttttatgtgttgcttctattttacctcaaattgtagatatagggtaatcaataaaatccatccatgcctttcacacactaagt

SEQ ID NO: 4903 - protein, 888 aa, Homo sapiens; identical to SEQ ID NO: 4027

SEQ ID NO: 4904 - DNA, 5171 bp, Homo sapiens
aaaaaaaaaaaaaaaaaaaaaaaaaaaagaaaaaagaaaaaaaaaaggaggaggaggaggagggtgagagagaagctgggagagcagagaaaaggggccaccggtcgcccccccgcttccccgcacgcgctctccagccgcggccgcccgcctgccgcggtcaccccggcctctgcctctgtcccccagtgatcggatcaaggcgctgagcgaggccctgcctgcggggcggccatgcggcggtgacaggagcgcgaccgacacgcacgggcccctcgccccctctcgcctcccgtccgctcgccagctcccctcagccgaggctgctccgcggcggccgcagcccgcgcgcggcccacactcgcctcccctcggcacccccggccccggagctgcctggaggcggccgcactcggtgtaaagaactggccaagtccaaagccgaagtggcctgcattgcagtgtatgaaacagacgtgtttgtcgtcggaactgaaagaggacgtgcttttgtcaataccagaaaggattttcaaaaagattttgtaaaatattgtgttgaagaagaagaaaaagctgcagagatgcataaaatgaaatctacaacccaggcaaatcggatgagtgtagatgctgtagaaattgaaacactcagaaaaacagttgaggactatttctgcttttgctatgggaaagctttaggcaaatccacagtggtacctgtaccatatgagaagatgctgcgagaccagtcggctgtggtagtgcaggggcttccggaaggtgttgcctttaaacaccccgagaactatgatcttgcaaccctgaaatggattttggagaacaaagcagggatttcattcatcattaagagaccttttttagagccaaagaagcatgtaggtggtcgtgtgatggtaacagatgctgacaggtcaatactatctccaggtggaagttgtggccccatcaaagtgaaaactgaacccacagaagattctggcatttccctggaaatggcagctgtgacagtaaaggaagaatcagaagatcctgattattatcaatataacattcaaggaagccaccattcttcagagggcaatgaaggcacagaaatggaagtaccagcagaagattctactcaacatgtcccttcagaaacaagtgaggaccctgaagttgaggtgactattgaagatgatgattattctccaccgtctaagagaccaaaggccaatgagctaccgcagccaccagtcccggaacccgccaatgctgggaagcggaaagtgagggagttcaacttcgagaaatggaatgctcgcatcactgatctacgtaaacaagttgaagaattgtttgaaaggaaatatgctcaagccataaaagccaaaggtccggtgacgatcccgtaccctcttttccagtctcatgttgaagatctttatgtagaaggacttcctgaaggaattccttttagaaggccatctacttacggaattcctcgcctggagaggatattacttgcaaaggaaaggattcgttttgtgattaagaaacatgagcttctgaattcaacacgtgaagatttacagcttgataagccagcttcaggagtaaaggaagaatggtatgccagaatcactaaattaagaaagatggtggatcagcttttctgcaaaaaatttgcggaagccttggggagcactgaagccaaggctgtaccgtaccaaaaatttgaggcacacccgaatgatctgtacgtggaaggactgccagaaaacattcctttccgaagtccctcatggtatggaatcccaaggctggaaaaaatcattcaagtgggcaatcgaattaaatttgttattaaaagaccagaacttctgactcacagtaccactgaagttactcagccaagaacgaatacaccagtcaaagaagattggaatgtcagaattaccaagctacggaagcaagtggaagagatttttaatttgaaatttgcttagatttgttgacagcggtttcctggagtgctgtcttgagaacgattctgaggaggctcagcaagaaagagtgtttcagttgattgggtgtgtctgtcatggagaaggaactcaagctcttggactcaccgaggcagtaaaagtaccatatcctgtgtttgaatcaaacccggagttcttgtatgtggaaggcttgccagaggggattcccttccgaagccctacctggtttggaattccacgacttgaaaggatcgtccgcgggagtaataaaatcaagttcgttgttaaaaaacctgaactagttatttcctacttgcctcctgggatggctagtaaaataaacactaaagctttgcagtcccccaaaagaccacgaagtcctgggagtaattcaaaggttcctgaaattgaggtcaccgtggaaggccctaataacaacaatcctcaaacctcagctgttcgaaccccgacccagactaacggttctaacgttcccttcaagccacgagggagagagttttcctttgaggcctggaatgccaaaatcacggacctaaaacagaaagttgaaaatctcttcaatgagaaatgtggggaagctcttggccttaaacaagctgtgaaggtgccgttcgcgttatttgagtctttcccggaagacttttatgtggaaggcttacctgagggtgtgccattccgaagaccatcgacttttggcattccgaggctggagaagatactcagaaacaaagccaaaattaagttcatcattaaaaagcccgaaatgtttgagacggcgattaaggagagcacctcctctaagagccctcccagaaaaataaattcatcacccaatgttaatactactgcatcaggtgttgaagaccttaacatcattcaggtgacaattccagatgatgataatgaaagactctcgaaagttgaaaaagctagacagctaagagaacaagtgaatgacctctttagtcggaaatttggtgaagctattggtatgggttttcctgtgaaagttccctacaggaaaatcacaattaaccctggctgtgtggtggttgatggcatgcccccgggggtgtccttcaaagcccccagctacctggaaatcagctccatgagaaggatcttagactctgccgagtttatcaaattcacggtcattagaccatttccaggacttgtgattaataaccagctggttgatcagagtgagtcagaaggccccgtgatacaagaatcagctgaaccaagccagttggaagttccagccacagaaggtaaaaggacctcttccctcctagggtaaatcagcttctgtgtcagggatgctgtgtggtgtccatctgaaccccctgcatacgcgtagctaatgtgatctccccactttcacataagatggtggccctgccttcagggaatgtgggagccaggtgggagccttcccggatatttaagctagaagattctacagggagattctccttggatcaatatatgtctctcagtcaaagatgtaaaagcacttttgccttaaaaagaatgttctgtttctaaatagagtcaacgttgtcctcctcattggaattcactatgagtcagaatcattagactgacttttttttttccatagtaatagtattttgcagagtctcacagagctgcagatcttttgttcatcttgcagagttaacaagtctgatcctgttagtccagatttcttaaatttggccaagttataataggagcagtagcttgagacccgaagtcaggaaactttgacaatggatttttttttttaatccagagacttgtactggaatttgccttaccctgtcagctcatggacttaaggtttcatcccgctttatgagtgcttctgaatccaagtcattgttacctgaatttgcaaattaagttgtgatattcgtgactgttaaattcctgtaattagattaacctctttgcttgcttgtttgttttctctcctattttagcttaaagtatcagtggttgagaagagcttttcggacctgttactaccccaagctgtgtaatatacttgtataacagaaataccttctatacaaacctttttttctacttttagatagaaatgtctactttttcagcagttctgtgaattaaagagcagagtgactgtgggtctggaatggctggtgtacttgggaatgtactatcaggattttacagcaatgctgggaaatgacagggaaaatgacaggaatgaatctcaccagattttttatgtactcagcagagccttgagttacggtgtttattttccaatcaagtgaagatatctcctacttctcctactggaacatctcagcttctgcagtgaagaaaaattcctgtgatagttcagttctttagtttttctatttgaaaaaaaaaaatcatttaaatgatcctttgttcacggctctccttaatgactgagtgaacagttcctatctgtatatttgactaaaccttttcctaagctatctctcatggttcctatgtttttttatcataattaaaagcaaaaccatctggatcacctaacagtcagaggtcagtatctcagcgtgtgaattatagaggaaatacagagagaacctcttccacttttacttttcgtccaaataaaatgcatggtgtaccagaagttgaagatcgggttgaggattggggctagctcgatgacactaaggccccaacatcgcgggacctgctgtggcgcggattcttaggaacgctgttctagccggccccctctccaggggtcgccgtggccggcattatttcctagttcttcttgtaaccctgaggtgccagcgcggggagtgaggaggggtcagggggctaaggatgcaacctctgacgttctgcgccttcctaggagagtcttacatgtgttgagatttcacaagcaatgcgagttgtaaaataccagctctacaagaagctaggctctgtgacggcatagttttcagtagctttatcacaatattcacaatggagaattatatgacatggtagcagaaataggcccttttatgtgttgcttctattttacctcaaattgtagatatagggtaatcaataaaatccatccatgcctttcacacactaagt

SEQ ID NO: 4905 - protein, 475 aa, Homo sapiens; identical to SEQ ID NO: 4139

SEQ ID NO: 4906 - DNA, 4522 bp, Homo sapiens
aaaaaaaaaaaaaaaaaaaaaaaaaaaagaaaaaagaaaaaaaaaaggaggaggaggaggagggtgagagagaagctgggagagcagagaaaaggggccaccggtcgcccccccgcttccccgcacgcgctctccagccgcggccgcccgcctgccgcggtcaccccggcctctgcctctgtcccccagtgatcggatcaaggcgctgagcgaggccctgcctgcggggcggccatgcggcggtgacaggagcgcgaccgacacgcacgggcccctcgccccctctcgcctcccgtccgctcgccagctcccctcagccgaggctgctccgcggcggccgcagcccgcgcgcggcccacactcgcctcccctcggcacccccggccccggagctgcctggaggcggccgcactcggggatcatggcccaagttgcaatgtccaccctccccgttgaagatgaggagtcctcggagagcaggatggtggtgacattcctcatgtcagctctcgagtccatgtgtaaagaactggccaagtccaaagccgaagtggcctgcattgcagtgtatgaaacagacgtgtttgtcgtcggaactgaaagaggacgtgcttttgtcaataccagaaaggattttcaaaaagattttgtaaaatattgtgttgaagaagaagaaaaagctgcagagatgcataaaatgaaatctacaacccaggcaaatcggatgagtgtagatgctgtagaaattgaaacactcagaaaaacagttgaggactatttctgcttttgctatgggaaagctttaggcaaatccacagtggtacctgtaccatatgagaagatgctgcgagaccagtcggctgtggtagtgcaggggcttccggaaggtgttgcctttaaacaccccgagaactatgatcttgcaaccctgaaatggattttggagaacaaagcagggatttcattcatcattaagagaccttttttagagccaaagaagcatgtaggtggtcgtgtgatggtaacagatgctgacaggtcaatactatctccaggtggaagttgtggccccatcaaagtgaaaactgaacccacagaagattctggcatttccctggaaatggcagctgtgacagtaaaggaagaatcagaagatcctgattattatcaatataacattcaaggaagccaccattcttcagagggcaatgaaggcacagaaatggaagtaccagcagaagattctactcaacatgtcccttcagaaacaagtgaggaccctgaagttgaggtgactattgaagatgatgattattctccaccgtctaagagaccaaaggccaatgagctaccgcagccaccagtcccggaacccgccaatgctgggaagcggaaagtgagggagttcaacttcgagaaatggaatgctcgcatcactgatctacgtaaacaagttgaagaattgtttgaaaggaaatatgctcaagccataaaagccaaaggtccggtgacgatcccgtaccctcttttccagtctcatgttgaagatctttatgtagaaggacttcctgaaggaattccttttagaaggccatctacttacggaattcctcgcctggagaggatattacttgcaaaggaaaggattcgttttgtgattaagaaacatgagcttctgaattcaacacgtgaagatttacagcttgataagccagcttcaggagtaaaggaagaatggtatgccagaatcactaaattaagaaagatggtggatcagcttttctgcaaaaaatttgcggaagccttggggagcactgaagccaaggctgtaccgtaccaaaaatttgaggcacacccgaatgatctgtacgtggaaggactgccagaaaacattcctttccgaagtccctcatggtatggaatcccaaggctggaaaaaatcattcaagtgggcaatcgaattaaatttgttattaaaagaccagaacttctgactcacagtaccactgaagttactcagccaagaacgaatacaccagtcaaagaagattggaatgtcagaattaccaagctacggaagcaagtggaagagatttttaatttgaaatttgctcaagctcttggactcaccgaggcagtaaaagtaccatatcctgtgtttgaatcaaacccggagttcttgtatgtggaaggcttgccagaggggattcccttccgaagccctacctggtttggaattccacgacttgaaaggatcgtccgcgggagtaataaaatcaagttcgttgttaaaaaacctgaactagttatttcctacttgcctcctgggatggctagtaaaataaacactaaagctttgcagtcccccaaaagaccacgaagtcctgggagtaattcaaaggttcctgaaattgaggtcaccgtggaaggccctaataacaacaatcctcaaacctcagctgttcgaaccccgacccagactaacggttctaacgttcccttcaagccacgagggagagagttttcctttgaggcctggaatgccaaaatcacggacctaaaacagaaagttgaaaatctcttcaatgagaaatgtggggaagctcttggccttaaacaagctgtgaaggtgccgttcgcgttatttgagtctttcccggaagacttttatgtggaaggcttacctgagggtgtgccattccgaagaccatcgacttttggcattccgaggctggagaagatactcagaaacaaagccaaaattaagttcatcattaaaaagcccgaaatgtttgagacggcgattaaggagagcacctcctctaagagccctcccagaaaaataaattcatcacccaatgttaatactactgcatcaggtgttgaagaccttaacatcattcaggtgacaattccagatgatgataatgaaagactctcgaaagttgaaaaagctagacagctaagagaacaagtgaatgacctctttagtcggaaatttggtgaagctattggtatgggttttcctgtgaaagttccctacaggaaaatcacaattaaccctggctgtgtggtggttgatggcatgcccccgggggtgtccttcaaagcccccagctacctggaaatcagctccatgagaaggatcttagactctgccgagtttatcaaattcacggtcattagaccatttccaggacttgtgattaataaccagctggttgatcagagtgagtcagaaggccccgtgatacaagaatcagctgaaccaagccagttggaagttccagccacagaagaaataaaagagactgatggaagctctcagatcaagcaagaaccagaccccacgtggtagacctcttccctcctaggcttaaagtatcagtggttgagaagagcttttcggacctgttactaccccaagctgtgtaatatacttgtataacagaaataccttctatacaaacctttttttctacttttagatagaaatgtctactttttcagcagttctgtgaattaaagagcagagtgactgtgggtctggaatggctggtgtacttgggaatgtactatcaggattttacagcaatgctgggaaatgacagggaaaatgacaggaatgaatctcaccagattttttatgtactcagcagagccttgagttacggtgtttattttccaatcaagtgaagatatctcctacttctcctactggaacatctcagcttctgcagtgaagaaaaattcctgtgatagttcagttctttagtttttctatttgaaaaaaaaaaatcatttaaatgatcctttgttcacggctctccttaatgactgagtgaacagttcctatctgtatatttgactaaaccttttcctaagctatctctcatggttcctatgtttttttatcataattaaaagcaaaaccatctggatcacctaacagtcagaggtcagtatctcagcgtgtgaattatagaggaaatacagagagaacctcttccacttttacttttcgtccaaataaaatgcatggtgtaccagaagttgaagatcgggttgaggattggggctagctcgatgacactaaggccccaacatcgcgggacctgctgtggcgcggattcttaggaacgctgttctagccggccccctctccaggggtcgccgtggccggcattatttcctagttcttcttgtaaccctgaggtgccagcgcggggagtgaggaggggtcagggggctaaggatgcaacctctgacgttctgcgccttcctaggagagtcttacatgtgttgagatttcacaagcaatgcgagttgtaaaataccagctctacaagaagctaggctctgtgacggcatagttttcagtagctttatcacaatattcacaatggagaattatatgacatggtagcagaaataggcccttttatgtgttgcttctattttacctcaaattgtagatatagggtaatcaataaaatccatccatgcctttcacacactaagt

SEQ ID NO: 4907 - protein, 978 aa, Homo sapiens; identical to SEQ ID NO: 470

SEQ ID NO: 4908 - DNA, 5159 bp, Homo sapiens
aaaaaaaaaaaaaaaaaaaaaaaaaaaagaaaaaagaaaaaaaaaaggaggaggaggaggagggtgagagagaagctgggagagcagagaaaaggggccaccggtcgcccccccgcttccccgcacgcgctctccagccgcggccgcccgcctgccgcggtcaccccggcctctgcctctgtcccccagtgatcggatcaaggcgctgagcgaggccctgcctgcggggcggccatgcggcggtgacaggagcgcgaccgacacgcacgggcccctcgccccctctcgcctcccgtccgctcgccagctcccctcagccgaggctgctccgcggcggccgcagcccgcgcgcggcccacactcgcctcccctcggcacccccggccccggagctgcctggaggcggccgcactcggtgtaaagaactggccaagtccaaagccgaagtggcctgcattgcagtgtatgaaacagacgtgtttgtcgtcggaactgaaagaggacgtgcttttgtcaataccagaaaggattttcaaaaagattttgtaaaatattgtgttgaagaagaagaaaaagctgcagagatgcataaaatgaaatctacaacccaggcaaatcggatgagtgtagatgctgtagaaattgaaacactcagaaaaacagttgaggactatttctgcttttgctatgggaaagctttaggcaaatccacagtggtacctgtaccatatgagaagatgctgcgagaccagtcggctgtggtagtgcaggggcttccggaaggtgttgcctttaaacaccccgagaactatgatcttgcaaccctgaaatggattttggagaacaaagcagggatttcattcatcattaagagaccttttttagagccaaagaagcatgtaggtggtcgtgtgatggtaacagatgctgacaggtcaatactatctccaggtggaagttgtggccccatcaaagtgaaaactgaacccacagaagattctggcatttccctggaaatggcagctgtgacagtaaaggaagaatcagaagatcctgattattatcaatataacattcaaggaagccaccattcttcagagggcaatgaaggcacagaaatggaagtaccagcagaagatgatgattattctccaccgtctaagagaccaaaggccaatgagctaccgcagccaccagtcccggaacccgccaatgctgggaagcggaaagtgagggagttcaacttcgagaaatggaatgctcgcatcactgatctacgtaaacaagttgaagaattgtttgaaaggaaatatgctcaagccataaaagccaaaggtccggtgacgatcccgtaccctcttttccagtctcatgttgaagatctttatgtagaaggacttcctgaaggaattccttttagaaggccatctacttacggaattcctcgcctggagaggatattacttgcaaaggaaaggattcgttttgtgattaagaaacatgagcttctgaattcaacacgtgaagatttacagcttgataagccagcttcaggagtaaaggaagaatggtatgccagaatcactaaattaagaaagatggtggatcagcttttctgcaaaaaatttgcggaagccttggggagcactgaagccaaggctgtaccgtaccaaaaatttgaggcacacccgaatgatctgtacgtggaaggactgccagaaaacattcctttccgaagtccctcatggtatggaatcccaaggctggaaaaaatcattcaagtgggcaatcgaattaaatttgttattaaaagaccagaacttctgactcacagtaccactgaagttactcagccaagaacgaatacaccagtcaaagaagattggaatgtcagaattaccaagctacggaagcaagtggaagagatttttaatttgaaatttgcttagatttgttgacagcggtttcctggagtgctgtcttgagaacgattctgaggaggctcagcaagaaagagtgtttcagttgattgggtgtgtctgtcatggagaaggaactcaagctcttggactcaccgaggcagtaaaagtaccatatcctgtgtttgaatcaaacccggagttcttgtatgtggaaggcttgccagaggggattcccttccgaagccctacctggtttggaattccacgacttgaaaggatcgtccgcgggagtaataaaatcaagttcgttgttaaaaaacctgaactagttatttcctacttgcctcctgggatggctagtaaaataaacactaaagctttgcagtcccccaaaagaccacgaagtcctgggagtaattcaaaggttcctgaaattgaggtcaccgtggaaggccctaataacaacaatcctcaaacctcagctgttcgaaccccgacccagactaacggttctaacgttcccttcaagccacgagggagagagttttcctttgaggcctggaatgccaaaatcacggacctaaaacagaaagttgaaaatctcttcaatgagaaatgtggggaagctcttggccttaaacaagctgtgaaggtgccgttcgcgttatttgagtctttcccggaagacttttatgtggaaggcttacctgagggtgtgccattccgaagaccatcgacttttggcattccgaggctggagaagatactcagaaacaaagccaaaattaagttcatcattaaaaagcccgaaatgtttgagacggcgattaaggagagcacctcctctaagagccctcccagaaaaataaattcatcacccaatgttaatactactgcatcaggtgttgaagaccttaacatcattcaggtgacaattccagatgatgataatgaaagactctcgaaagttgaaaaagctagacagctaagagaacaagtgaatgacctctttagtcggaaatttggtgaagctattggtatgggttttcctgtgaaagttccctacaggaaaatcacaattaaccctggctgtgtggtggttgatggcatgcccccgggggtgtccttcaaagcccccagctacctggaaatcagctccatgagaaggatcttagactctgccgagtttatcaaattcacggtcattagaccatttccaggacttgtgattaataaccagctggttgatcagagtgagtcagaaggccccgtgatacaagaatcagctgaaccaagccagttggaagttccagccacagaagaaataaaagagactgatggaagctctcagatcaagcaagaaccagaccccacgtggtagacctcttccctcctagggtaaatcagcttctgtgtcagggatgctgtgtggtgtccatctgaaccccctgcatacgcgtagctaatgtgatctccccactttcacataagatggtggccctgccttcagggaatgtgggagccaggtgggagccttcccggatatttaagctagaagattctacagggagattctccttggatcaatatatgtctctcagtcaaagatgtaaaagcacttttgccttaaaaagaatgttctgtttctaaatagagtcaacgttgtcctcctcattggaattcactatgagtcagaatcattagactgacttttttttttccatagtaatagtattttgcagagtctcacagagctgcagatcttttgttcatcttgcagagttaacaagtctgatcctgttagtccagatttcttaaatttggccaagttataataggagcagtagcttgagacccgaagtcaggaaactttgacaatggatttttttttttaatccagagacttgtactggaatttgccttaccctgtcagctcatggacttaaggtttcatcccgctttatgagtgcttctgaatccaagtcattgttacctgaatttgcaaattaagttgtgatattcgtgactgttaaattcctgtaattagattaacctctttgcttgcttgtttgttttctctcctattttagcttaaagtatcagtggttgagaagagcttttcggacctgttactaccccaagctgtgtaatatacttgtataacagaaataccttctatacaaacctttttttctacttttagatagaaatgtctactttttcagcagttctgtgaattaaagagcagagtgactgtgggtctggaatggctggtgtacttgggaatgtactatcaggattttacagcaatgctgggaaatgacagggaaaatgacaggaatgaatctcaccagattttttatgtactcagcagagccttgagttacggtgtttattttccaatcaagtgaagatatctcctacttctcctactggaacatctcagcttctgcagtgaagaaaaattcctgtgatagttcagttctttagtttttctatttgaaaaaaaaaaatcatttaaatgatcctttgttcacggctctccttaatgactgagtgaacagttcctatctgtatatttgactaaaccttttcctaagctatctctcatggttcctatgtttttttatcataattaaaagcaaaaccatctggatcacctaacagtcagaggtcagtatctcagcgtgtgaattatagaggaaatacagagagaacctcttccacttttacttttcgtccaaataaaatgcatggtgtaccagaagttgaagatcgggttgaggattggggctagctcgatgacactaaggccccaacatcgcgggacctgctgtggcgcggattcttaggaacgctgttctagccggccccctctccaggggtcgccgtggccggcattatttcctagttcttcttgtaaccctgaggtgccagcgcggggagtgaggaggggtcagggggctaaggatgcaacctctgacgttctgcgccttcctaggagagtcttacatgtgttgagatttcacaagcaatgcgagttgtaaaataccagctctacaagaagctaggctctgtgacggcatagttttcagtagctttatcacaatattcacaatggagaattatatgacatggtagcagaaataggcccttttatgtgttgcttctattttacctcaaattgtagatatagggtaatcaataaaatccatccatgcctttcacacactaagt

SEQ ID NO: 4909 - protein, 454 aa, Homo sapiens; identical to SEQ ID NO: 4239

SEQ ID NO: 4910 - DNA, 4987 bp, Homo sapiens
aaaaaaaaaaaaaaaaaaaaaaaaaaaagaaaaaagaaaaaaaaaaggaggaggaggaggagggtgagagagaagctgggagagcagagaaaaggggccaccggtcgcccccccgcttccccgcacgcgctctccagccgcggccgcccgcctgccgcggtcaccccggcctctgcctctgtcccccagtgatcggatcaaggcgctgagcgaggccctgcctgcggggcggccatgcggcggtgacaggagcgcgaccgacacgcacgggcccctcgccccctctcgcctcccgtccgctcgccagctcccctcagccgaggctgctccgcggcggccgcagcccgcgcgcggcccacactcgcctcccctcggcacccccggccccggagctgcctggaggcggccgcactcggtgtaaagaactggccaagtccaaagccgaagtggcctgcattgcagtgtatgaaacagacgtgtttgtcgtcggaactgaaagaggacgtgcttttgtcaataccagaaaggattttcaaaaagattttgtaaaatattgtgttgaagaagaagaaaaagctgcagagatgcataaaatgaaatctacaacccaggcaaatcggatgagtgtagatgctgtagaaattgaaacactcagaaaaacagttgaggactatttctgcttttgctatgggaaagctttaggcaaatccacagtggtacctgtaccatatgagaagatgctgcgagaccagtcggctgtggtagtgcaggggcttccggaaggtgttgcctttaaacaccccgagaactatgatcttgcaaccctgaaatggattttggagaacaaagcagggatttcattcatcattaagagaccttttttagagccaaagaagcatgtaggtggtcgtgtgatggtaacagatgctgacaggtcaatactatctccaggtggaagttgtggccccatcaaagtgaaaactgaacccacagaagattctggcatttccctggaaatggcagctgtgacagtaaaggaagaatcagaagatcctgattattatcaatataacattcaaggaagccaccattcttcagagggcaatgaaggcacagaaatggaagtaccagcagaagattctactcaacatgtcccttcagaaacaagtgaggaccctgaagttgaggtgactattgaagatgatgattattctccaccgtctaagagaccaaaggccaatgagctaccgcagccaccagtcccggaacccgccaatgctgggaagcggaaagtgagggagttcaacttcgagaaatggaatgctcgcatcactgatctacgtaaacaagttgaagaattgtttgaaaggaaatatgctcaagccataaaagccaaaggtccggtgacgatcccgtaccctcttttccagtctcatgttgaagatctttatgtagaaggacttcctgaaggaattccttttagaaggccatctacttacggaattcctcgcctggagaggatattacttgcaaaggaaaggattcgttttgtgattaagaaacatgagcttctgaattcaacacgtgaagatttacagcttgataagccagcttcaggagtaaaggaagaatggtatgccagaatcactaaattaagaaagatggtggatcagcttttctgcaaaaaatttgcggaagccttggggagcactgaagccaaggctgtaccgtaccaaaaatttgaggcacacccgaatgatctgtacgtggaaggactgccagaaaacattcctttccgaagtccctcatggtatggaatcccaaggctggaaaaaatcattcaagtgggcaatcgaattaaatttgttattaaaagaccagaacttctgactcacagtaccactgaagttactcagccaagaacgaatacaccagctcaagctcttggactcaccgaggcagtaaaagtaccatatcctgtgtttgaatcaaacccggagttcttgtatgtggaaggcttgccagaggggattcccttccgaagccctacctggtttggaattccacgacttgaaaggatcgtccgcgggagtaataaaatcaagttcgttgttaaaaaacctgaactagttatttcctacttgcctcctgggatggctagtaaaataaacactaaagctttgcagtcccccaaaagaccacgaagtcctgggagtaattcaaaggttcctgaaattgaggtcaccgtggaaggccctaataacaacaatcctcaaacctcagctgttcgaaccccgacccagactaacggttctaacgttcccttcaagccacgagggagagagttttcctttgaggcctggaatgccaaaatcacggacctaaaacagaaagttgaaaatctcttcaatgagaaatgtggggaagctcttggccttaaacaagctgtgaaggtgccgttcgcgttatttgagtctttcccggaagacttttatgtggaaggcttacctgagggtgtgccattccgaagaccatcgacttttggcattccgaggctggagaagatactcagaaacaaagccaaaattaagttcatcattaaaaagcccgaaatgtttgagacggcgattaaggagagcacctcctctaagagccctcccagaaaaataaattcatcacccaatgttaatactactgcatcaggtgttgaagaccttaacatcattcaggtgacaattccagatgatgataatgaaagactctcgaaagttgaaaaagctagacagctaagagaacaagtgaatgacctctttagtcggaaatttggtgaagctattggtatgggttttcctgtgaaagttccctacaggaaaatcacaattaaccctggctgtgtggtggttgatggcatgcccccgggggtgtccttcaaagcccccagctacctggaaatcagctccatgagaaggatcttagactctgccgagtttatcaaattcacggtcattagaccatttccaggacttgtgattaataaccagctggttgatcagagtgagtcagaaggccccgtgatacaagaatcagctgaaccaagccagttggaagttccagccacagaaggtaaaaggacctcttccctcctagggtaaatcagcttctgtgtcagggatgctgtgtggtgtccatctgaaccccctgcatacgcgtagctaatgtgatctccccactttcacataagatggtggccctgccttcagggaatgtgggagccaggtgggagccttcccggatatttaagctagaagattctacagggagattctccttggatcaatatatgtctctcagtcaaagatgtaaaagcacttttgccttaaaaagaatgttctgtttctaaatagagtcaacgttgtcctcctcattggaattcactatgagtcagaatcattagactgacttttttttttccatagtaatagtattttgcagagtctcacagagctgcagatcttttgttcatcttgcagagttaacaagtctgatcctgttagtccagatttcttaaatttggccaagttataataggagcagtagcttgagacccgaagtcaggaaactttgacaatggatttttttttttaatccagagacttgtactggaatttgccttaccctgtcagctcatggacttaaggtttcatcccgctttatgagtgcttctgaatccaagtcattgttacctgaatttgcaaattaagttgtgatattcgtgactgttaaattcctgtaattagattaacctctttgcttgcttgtttgttttctctcctattttagcttaaagtatcagtggttgagaagagcttttcggacctgttactaccccaagctgtgtaatatacttgtataacagaaataccttctatacaaacctttttttctacttttagatagaaatgtctactttttcagcagttctgtgaattaaagagcagagtgactgtgggtctggaatggctggtgtacttgggaatgtactatcaggattttacagcaatgctgggaaatgacagggaaaatgacaggaatgaatctcaccagattttttatgtactcagcagagccttgagttacggtgtttattttccaatcaagtgaagatatctcctacttctcctactggaacatctcagcttctgcagtgaagaaaaattcctgtgatagttcagttctttagtttttctatttgaaaaaaaaaaatcatttaaatgatcctttgttcacggctctccttaatgactgagtgaacagttcctatctgtatatttgactaaaccttttcctaagctatctctcatggttcctatgtttttttatcataattaaaagcaaaaccatctggatcacctaacagtcagaggtcagtatctcagcgtgtgaattatagaggaaatacagagagaacctcttccacttttacttttcgtccaaataaaatgcatggtgtaccagaagttgaagatcgggttgaggattggggctagctcgatgacactaaggccccaacatcgcgggacctgctgtggcgcggattcttaggaacgctgttctagccggccccctctccaggggtcgccgtggccggcattatttcctagttcttcttgtaaccctgaggtgccagcgcggggagtgaggaggggtcagggggctaaggatgcaacctctgacgttctgcgccttcctaggagagtcttacatgtgttgagatttcacaagcaatgcgagttgtaaaataccagctctacaagaagctaggctctgtgacggcatagttttcagtagctttatcacaatattcacaatggagaattatatgacatggtagcagaaataggcccttttatgtgttgcttctattttacctcaaattgtagatatagggtaatcaataaaatccatccatgcctttcacacactaagt

SEQ ID NO: 4911 - protein, 855 aa, Homo sapiens
MHKMKSTTQANRMSVDAVEIETLRKTVEDYFCFCYGKALGKSTVVPVPYEKMLRDQSAVVVQGLPEGVAFKHPENYDLATLKWILENKAGISFIIKRPFLEPKKHVGGRVMVTDADRSILSPGGSCGPIKVKTEPTEDSGISLEMAAVTVKEESEDPDYYQYNIQGSHHSSEGNEGTEMEVPAEDSTQHVPSETSEDPEVEVTIEDDDYSPPSKRPKANELPQPPVPEPANAGKRKVREFNFEKWNARITDLRKQVEELFERKYAQAIKAKGPVTIPYPLFQSHVEDLYVEGLPEGIPFRRPSTYGIPRLERILLAKERIRFVIKKHELLNSTREDLQLDKPASGVKEEWYARITKLRKMVDQLFCKKFAEALGSTEAKAVPYQKFEAHPNDLYVEGLPENIPFRSPSWYGIPRLEKIIQVGNRIKFVIKRPELLTHSTTEVTQPRTNTPAQALGLTEAVKVPYPVFESNPEFLYVEGLPEGIPFRSPTWFGIPRLERIVRGSNKIKFVVKKPELVISYLPPGMASKINTKALQSPKRPRSPGSNSKVPEIEVTVEGPNNNNPQTSAVRTPTQTNGSNVPFKPRGREFSFEAWNAKITDLKQKVENLFNEKCGEALGLKQAVKVPFALFESFPEDFYVEGLPEGVPFRRPSTFGIPRLEKILRNKAKIKFIIKKPEMFETAIKESTSSKSPPRKINSSPNVNTTASGVEDLNIIQVTIPDDDNERLSKVEKARQLREQVNDLFSRKFGEAIGMGFPVKVPYRKITINPGCVVVDGMPPGVSFKAPSYLEISSMRRILDSAEFIKFTVIRPFPGLVINNQLVDQSESEGPVIQESAEPSQLEVPATEGKRTSSLLG

SEQ ID NO: 4912 - DNA, 4139 bp, Homo sapiens
aaaaaaaaaaaaaaaaaaaaaaaaaaaagaaaaaagaaaaaaaaaaggaggaggaggaggagggtgagagagaagctgggagagcagagaaaaggggccaccggtcgcccccccgcttccccgcacgcgctctccagccgcggccgcccgcctgccgcggtcaccccggcctctgcctctgtcccccagtgatcggatcaaggcgctgagcgaggccctgcctgcggggcggccatgcggcggtgacaggagcgcgaccgacacgcacgggcccctcgccccctctcgcctcccgtccgctcgccagctcccctcagccgaggctgctccgcggcggccgcagcccgcgcgcggcccacactcgcctccccgttgaagatgaggagtcctcggagagcaggatggtggtgacattcctcatgtcagctctcgagtccatgtgtaaagaactggccaagtccaaagccgaagtggcctgcattgcagtgtatgaaacagacgtgtttgtcgtcggaactgaaagaggacgtgcttttgtcaataccagaaaggattttcaaaaagattttgtaaaatattgtgttgaagaagaagaaaaagctgcagagatgcataaaatgaaatctacaacccaggcaaatcggatgagtgtagatgctgtagaaattgaaacactcagaaaaacagttgaggactatttctgcttttgctatgggaaagctttaggcaaatccacagtggtacctgtaccatatgagaagatgctgcgagaccagtcggctgtggtagtgcaggggcttccggaaggtgttgcctttaaacaccccgagaactatgatcttgcaaccctgaaatggattttggagaacaaagcagggatttcattcatcattaagagaccttttttagagccaaagaagcatgtaggtggtcgtgtgatggtaacagatgctgacaggtcaatactatctccaggtggaagttgtggccccatcaaagtgaaaactgaacccacagaagattctggcatttccctggaaatggcagctgtgacagtaaaggaagaatcagaagatcctgattattatcaatataacattcaagcaggcccttctgaaactgatgatgttgatgaaaaacagcccctatcgaagcctttgcaaggaagccaccattcttcagagggcaatgaaggcacagaaatggaagtaccagcagaagatgatgattattctccaccgtctaagagaccaaaggccaatgagctaccgcagccaccagtcccggaacccgccaatgctgggaagcggaaagtgagggagttcaacttcgagaaatggaatgctcgcatcactgatctacgtaaacaagttgaagaattgtttgaaaggaaatatgctcaagccataaaagccaaaggtccggtgacgatcccgtaccctcttttccagtctcatgttgaagatctttatgtagaaggacttcctgaaggaattccttttagaaggccatctacttacggaattcctcgcctggagaggatattacttgcaaaggaaaggattcgttttgtgattaagaaacatgagcttctgaattcaacacgtgaagatttacagcttgataagccagcttcaggagtaaaggaagaatggtatgccagaatcactaaattaagaaagatggtggatcagcttttctgcaaaaaatttgcggaagccttggggagcactgaagccaaggctgtaccgtaccaaaaatttgaggcacacccgaatgatctgtacgtggaaggactgccagaaaacattcctttccgaagtccctcatggtatggaatcccaaggctggaaaaaatcattcaagtgggcaatcgaattaaatttgttattaaaagaccagaacttctgactcacagtaccactgaagttactcagccaagaacgaatacaccagctcaagctcttggactcaccgaggcagtaaaagtaccatatcctgtgtttgaatcaaacccggagttcttgtatgtggaaggcttgccagaggggattcccttccgaagccctacctggtttggaattccacgacttgaaaggatcgtccgcgggagtaataaaatcaagttcgttgttaaaaaacctgaactagttatttcctacttgcctcctgggatggctagtaaaataaacactaaagctttgcagtcccccaaaagaccacgaagtcctgggagtaattcaaaggttcctgaaattgaggtcaccgtggaaggccctaataacaacaatcctcaaacctcagctgttcgaaccccgacccagactaacggttctaacgttcccttcaagccacgagggagagagttttcctttgaggcctggaatgccaaaatcacggacctaaaacagaaagttgaaaatctcttcaatgagaaatgtggggaagctcttggccttaaacaagctgtgaaggtgccgttcgcgttatttgagtctttcccggaagacttttatgtggaaggcttacctgagggtgtgccattccgaagaccatcgacttttggcattccgaggctggagaagatactcagaaacaaagccaaaattaagttcatcattaaaaagcccgaaatgtttgagacggcgattaaggagagcacctcctctaagagccctcccagaaaaataaattcatcacccaatgttaatactactgcatcaggtgttgaagaccttaacatcattcaggtgacaattccagatgatgataatgaaagactctcgaaagttgaaaaagctagacagctaagagaacaagtgaatgacctctttagtcggaaatttggtgaagctattggtatgggttttcctgtgaaagttccctacaggaaaatcacaattaaccctggctgtgtggtggttgatggcatgcccccgggggtgtccttcaaagcccccagctacctggaaatcagctccatgagaaggatcttagactctgccgagtttatcaaattcacggtcattagaccatttccaggacttgtgattaataaccagctggttgatcagagtgagtcagaaggccccgtgatacaagaatcagctgaaccaagccagttggaagttccagccacagaagaaataaaagagactgatggaagctctcagatcaagcaagaaccagaccccacgtggtagacctcttccctcctaggcttaaagtatcagtggttgagaagagcttttcggacctgttactaccccaagctgtagccttgagttacggtgtttattttccaatcaagtgaagatatctcctacttctcctactggaacatctcagcttctgcagtgaagaaaaattcctgtgatagttcagttctttagtttttctatttgaaaaaaaaaaatcatttaaatgatcctttgttcacggctctccttaatgactgagtgaacagttcctatctgtatatttgactaaaccttttcctaagctatctctcatggttcctatgtttttttatcataattaaaagcaaaaccatctggatcacctaacagtcagaggtcagtatctcagcgtgtgaattatagaggaaatacagagagaacctcttccacttttacttttcgtccaaataaaatgcatggtgtaccagaagttgaagatcgggttgaggattggggctagctcgatgacactaaggccccaacatcgcgggacctgctgtggcgcggattcttaggaacgctgttctagccggccccctctccaggggtcgccgtggccggcattatttcctagttcttcttgtaaccctgaggtgccagcgcggggagtgaggaggggtcagggggctaaggatgcaacctctgacgttctgcgccttcctaggagagtcttacatgtgttgagatttcacaagcaatgcgagttgtaaaataccagctctacaagaagctaggctctgtgacggcatagttttcagtagctttatcacaatattcacaatggagaattatatgacatggtagcagaaataggcccttttatgtgttgcttctattttacctcaaattgtagatatagggtaatcaataaaatccatccatgcctttcacacactaagt

SEQ ID NO: 4913 - protein, 933 aa, Homo sapiens; identical to SEQ ID NO: 4083

SEQ ID NO: 4914 - DNA, 3958 bp, Homo sapiens
aaaaaaaaaaaaaaaaaaaaaaaaaaaagaaaaaagaaaaaaaaaaggaggaggaggaggagggtgagagagaagctgggagagcagagaaaaggggccaccggtcgcccccccgcttccccgcacgcgctctccagccgcggccgcccgcctgccgcggtcaccccggcctctgcctctgtcccccagtgatcggatcaaggcgctgagcgaggccctgcctgcggggcggccatgcggcggtgacaggagcgcgaccgacacgcacgggcccctcgccccctctcgcctcccgtccgctcgccagctcccctcagccgaggctgctccgcggcggccgcagcccgcgcgcggcccacactcgcctcccctcggcacccccggccccggagctgcctggaggcggccgcactcggggatcatggcccaagttgcaatgtccaccctccccgttgaagatgaggagtcctcggagagcaggatggtggtgacattcctcatgtcagctctcgagtccatgtgtaaagaactggccaagtccaaagccgaagtggcctgcattgcagtgtatgaaacagacgtgtttgtcgtcggaactgaaagaggacgtgcttttgtcaataccagaaaggattttcaaaaagattttgtaaaatattgtgttgaagaagaagaaaaagctgcagagatgcataaaatgaaatctacaacccaggcaaatcggatgagtgtagatgctgtagaaattgaaacactcagaaaaacagttgaggactatttctgcttttgctatgggaaagctttaggcaaatccacagtggtacctgtaccatatgagaagatgctgcgagaccagtcggctgtggtagtgcaggggcttccggaaggtgttgcctttaaacaccccgagaactatgatcttgcaaccctgaaatggattttggagaacaaagcagggatttcattcatcattaagagaccttttttagagccaaagaagcatgtaggtggtcgtgtgatggtaacagatgctgacaggtcaatactatctccaggtggaagttgtggccccatcaaagtgaaaactgaacccacagaagattctggcatttccctggaaatggcagctgtgacagtaaaggaagaatcagaagatcctgattattatcaatataacattcaagcaggcccttctgaaactgatgatgttgatgaaaaacagcccctatcgaagcctttgcaaggaagccaccattcttcagagggcaatgaaggcacagaaatggaagtaccagcagaagattctactcaacatgtcccttcagaaacaagtgaggaccctgaagttgaggtgactattgaagatgatgattattctccaccgtctaagagaccaaaggccaatgagctaccgcagccaccagtcccggaacccgccaatgctgggaagcggaaagtgagggagttcaacttcgagaaatggaatgctcgcatcactgatctacgtaaacaagttgaagaattgtttgaaaggaaatatgctcaagccataaaagccaaaggtccggtgacgatcccgtaccctcttttccagtctcatgttgaagatctttatgtagaaggacttcctgaaggaattccttttagaaggccatctacttacggaattcctcgcctggagaggatattacttgcaaaggaaaggattcgttttgtgattaagaaacatgagcttctgaattcaacacgtgaagatttacagcttgataagccagcttcaggagtaaaggaagaatggtatgccagaatcactaaattaagaaagatggtggatcagcttttctgcaaaaaatttgcggaagccttggggagcactgaagccaaggctgtaccgtaccaaaaatttgaggcacacccgaatgatctgtacgtggaaggactgccagaaaacattcctttccgaagtccctcatggtatggaatcccaaggctggaaaaaatcattcaagtgggcaatcgaattaaatttgttattaaaagaccagaacttctgactcacagtaccactgaagttactcagccaagaacgaatacaccagctcaagctcttggactcaccgaggcagtaaaagtaccatatcctgtgtttgaatcaaacccggagttcttgtatgtggaaggcttgccagaggggattcccttccgaagccctacctggtttggaattccacgacttgaaaggatcgtccgcgggagtaataaaatcaagttcgttgttaaaaaacctgaactagttatttcctacttgcctcctgggatggctagtaaaataaacactaaagctttgcagtcccccaaaagaccacgaagtcctgggagtaattcaaaggttcctgaaattgaggtcaccgtggaaggccctaataacaacaatcctcaaacctcagctgttcgaaccccgacccagactaacggttctaacgttcccttcaagccacgagggagagagttttcctttgaggcctggaatgccaaaatcacggacctaaaacagaaagttgaaaatctcttcaatgagaaatgtggggaagctcttggccttaaacaagctgtgaaggtgccgttcgcgttatttgagtctttcccggaagacttttatgtggaaggcttacctgagggtgtgccattccgaagaccatcgacttttggcattccgaggctggagaagatactcagaaacaaagccaaaattaagttcatcattaaaaagcccgaaatgtttgagacggcgattaaggagagcacctcctctaagagccctcccagaaaaataaattcatcacccaatgttaatactactgcatcaggtgttgaagaccttaacatcattcaggtgacaattccagatgatgataatgaaagactctcgaaagttgaaaaagctagacagctaagagaacaagtgaatgacctctttagtcggaaatttggtgaagctattggtatgggttttcctgtgaaagttccctacaggaaaatcacaattaaccctggctgtgtggtggttgatggcatgcccccgggggtgtccttcaaagcccccagctacctggaaatcagctccatgagaaggatcttagactctgccgagtttatcaaattcacggtcattagaccatttccaggacttgtgattaataaccagctggttgatcagagtgagtcagaaggccccgtgatacaagaatcagctgaaccaagccagttggaagttccagccacagaagaaataaaagagactgatggaagctctcagatcaagcaagaaccagaccccacgtggtagacctcttccctcctaggcaaaaccatctggatcacctaacagtcagaggtcagtatctcagcgtgtgaattatagaggaaatacagagagaacctcttccacttttacttttcgtccaaataaaatgcatggtgtaccagaagttgaagatcgggttgaggattggggctagctcgatgacactaaggccccaacatcgcgggacctgctgtggcgcggattcttaggaacgctgttctagccggccccctctccaggggtcgccgtggccggcattatttcctagttcttcttgtaaccctgaggtgccagcgcggggagtgaggaggggtcagggggctaaggatgcaacctctgacgttctgcgccttcctaggagagtcttacatgtgttgagatttcacaagcaatgcgagttgtaaaataccagctctacaagaagctaggctctgtgacggcatagttttcagtagctttatcacaatattcacaatggagaattatatgacatggtagcagaaataggcccttttatgtgttgcttctattttacctcaaattgtagatatagggtaatcaataaaatccatccatgcctttcacacactaagt

SEQ ID NO: 4915 - protein, 974 aa, Homo sapiens; identical to SEQ ID NO: 4101

SEQ ID NO: 4916 - DNA, 4527 bp, Homo sapiens
aaaaaaaaaaaaaaaaaaaaaaaaaaaagaaaaaagaaaaaaaaaaggaggaggaggaggagggtgagagagaagctgggagagcagagaaaaggggccaccggtcgcccccccgcttccccgcacgcgctctccagccgcggccgcccgcctgccgcggtcaccccggcctctgcctctgtcccccagtgatcggatcaaggcgctgagcgaggccctgcctgcggggcggccatgcggcggtgacaggagcgcgaccgacacgcacgggcccctcgccccctctcgcctcccgtccgctcgccagctcccctcagccgaggctgctccgcggcggccgcagcccgcgcgcggcccacactcgcctcccctcggcacccccggccccggagctgcctggaggcggccgcactcggtgtaaagaactggccaagtccaaagccgaagtggcctgcattgcagtgtatgaaacagacgtgtttgtcgtcggaactgaaagaggacgtgcttttgtcaataccagaaaggattttcaaaaagattttgtaaaatattgtgttgaagaagaagaaaaagctgcagagatgcataaaatgaaatctacaacccaggcaaatcggatgagtgtagatgctgtagaaattgaaacactcagaaaaacagttgaggactatttctgcttttgctatgggaaagctttaggcaaatccacagtggtacctgtaccatatgagaagatgctgcgagaccagtcggctgtggtagtgcaggggcttccggaaggtgttgcctttaaacaccccgagaactatgatcttgcaaccctgaaatggattttggagaacaaagcagggatttcattcatcattaagagaccttttttagagccaaagaagcatgtaggtggtcgtgtgatggtaacagatgctgacaggtcaatactatctccaggtggaagttgtggccccatcaaagtgaaaactgaacccacagaagattctggcatttccctggaaatggcagctgtgacagtaaaggaagaatcagaagatcctgattattatcaatataacattcaagcaggcccttctgaaactgatgatgttgatgaaaaacagcccctatcgaagcctttgcaaggaagccaccattcttcagagggcaatgaaggcacagaaatggaagtaccagcagaagatgatgattattctccaccgtctaagagaccaaaggccaatgagctaccgcagccaccagtcccggaacccgccaatgctgggaagcggaaagtgagggagttcaacttcgagaaatggaatgctcgcatcactgatctacgtaaacaagttgaagaattgtttgaaaggaaatatgctcaagccataaaagccaaaggtccggtgacgatcccgtaccctcttttccagtctcatgttgaagatctttatgtagaaggacttcctgaaggaattccttttagaaggccatctacttacggaattcctcgcctggagaggatattacttgcaaaggaaaggattcgttttgtgattaagaaacatgagcttctgaattcaacacgtgaagatttacagcttgataagccagcttcaggagtaaaggaagaatggtatgccagaatcactaaattaagaaagatggtggatcagcttttctgcaaaaaatttgcggaagccttggggagcactgaagccaaggctgtaccgtaccaaaaatttgaggcacacccgaatgatctgtacgtggaaggactgccagaaaacattcctttccgaagtccctcatggtatggaatcccaaggctggaaaaaatcattcaagtgggcaatcgaattaaatttgttattaaaagaccagaacttctgactcacagtaccactgaagttactcagccaagaacgaatacaccagtcaaagaagattggaatgtcagaattaccaagctacggaagcaagtggaagagatttttaatttgaaatttgcttagatttgttgacagcggtttcctggagtgctgtcttgagaacgattctgaggaggctcagcaagaaagagtgtttcagttgattgggtgtgtctgtcatggagaaggaactcaagctcttggactcaccgaggcagtaaaagtaccatatcctgtgtttgaatcaaacccggagttcttgtatgtggaaggcttgccagaggggattcccttccgaagccctacctggtttggaattccacgacttgaaaggatcgtccgcgggagtaataaaatcaagttcgttgttaaaaaacctgaactagttatttcctacttgcctcctgggatggctagtaaaataaacactaaagctttgcagtcccccaaaagaccacgaagtcctgggagtaattcaaaggttcctgaaattgaggtcaccgtggaaggccctaataacaacaatcctcaaacctcagctgttcgaaccccgacccagactaacggttctaacgttcccttcaagccacgagggagagagttttcctttgaggcctggaatgccaaaatcacggacctaaaacagaaagttgaaaatctcttcaatgagaaatgtggggaagctcttggccttaaacaagctgtgaaggtgccgttcgcgttatttgagtctttcccggaagacttttatgtggaaggcttacctgagggtgtgccattccgaagaccatcgacttttggcattccgaggctggagaagatactcagaaacaaagccaaaattaagttcatcattaaaaagcccgaaatgtttgagacggcgattaaggagagcacctcctctaagagccctcccagaaaaataaattcatcacccaatgttaatactactgcatcaggtgttgaagaccttaacatcattcaggtgacaattccagatgatgataatgaaagactctcgaaagttgaaaaagctagacagctaagagaacaagtgaatgacctctttagtcggaaatttggtgaagctattggtatgggttttcctgtgaaagttccctacaggaaaatcacaattaaccctggctgtgtggtggttgatggcatgcccccgggggtgtccttcaaagcccccagctacctggaaatcagctccatgagaaggatcttagactctgccgagtttatcaaattcacggtcattagaccatttccaggacttgtgattaataaccagctggttgatcagagtgagtcagaaggccccgtgatacaagaatcagctgaaccaagccagttggaagttccagccacagaagaaataaaagagactgatggaagctctcagatcaagcaagaaccagaccccacgtggtagacctcttccctcctaggcttaaagtatcagtggttgagaagagcttttcggacctgttactaccccaagctgtgtaatatacttgtataacagaaataccttctatacaaacctttttttctacttttagatagaaatgtctactttttcagcagttctgtgaattaaagagcagagtgactgtgggtctggaatggctggtgtacttgggaatgtactatcaggattttacagcaatgctgggaaatgacagggaaaatgacaggaatgaatctcaccagattttttatgtactcagcagagccttgagttacggtgtttattttccaatcaagtgaagatatctcctacttctcctactggaacatctcagcttctgcagtgaagaaaaattcctgtgatagttcagttctttagtttttctatttgaaaaaaaaaaatcatttaaatgatcctttgttcacggctctccttaatgactgagtgaacagttcctatctgtatatttgactaaaccttttcctaagctatctctcatggttcctatgtttttttatcataattaaaagcaaaaccatctggatcacctaacagtcagaggtcagtatctcagcgtgtgaattatagaggaaatacagagagaacctcttccacttttacttttcgtccaaataaaatgcatggtgtaccagaagttgaagatcgggttgaggattggggctagctcgatgacactaaggccccaacatcgcgggacctgctgtggcgcggattcttaggaacgctgttctagccggccccctctccaggggtcgccgtggccggcattatttcctagttcttcttgtaaccctgaggtgccagcgcggggagtgaggaggggtcagggggctaaggatgcaacctctgacgttctgcgccttcctaggagagtcttacatgtgttgagatttcacaagcaatgcgagttgtaaaataccagctctacaagaagctaggctctgtgacggcatagttttcagtagctttatcacaatattcacaatggagaattatatgacatggtagcagaaataggcccttttatgtgttgcttctattttacctcaaattgtagatatagggtaatcaataaaatccatccatgcctttcacacactaagt

SEQ ID NO: 4917 - protein, 474 aa, Homo sapiens; identical to SEQ ID NO: 4025

SEQ ID NO: 4918 - DNA, 4270 bp, Homo sapiens
aaaaaaaaaaaaaaaaaaaaaaaaaaaagaaaaaagaaaaaaaaaaggaggaggaggaggagggtgagagagaagctgggagagcagagaaaaggggccaccggtcgcccccccgcttccccgcacgcgctctccagccgcggccgcccgcctgccgcggtcaccccggcctctgcctctgtcccccagtgatcggatcaaggcgctgagcgaggccctgcctgcggggcggccatgcggcggtgacaggagcgcgaccgacacgcacgggcccctcgccccctctcgcctcccgtccgctcgccagctcccctcagccgaggctgctccgcggcggccgcagcccgcgcgcggcccacactcgcctccccgttgaagatgaggagtcctcggagagcaggatggtggtgacattcctcatgtcagctctcgagtccatgtgtaaagaactggccaagtccaaagccgaagtggcctgcattgcagtgtatgaaacagacgtgtttgtcgtcggaactgaaagaggacgtgcttttgtcaataccagaaaggattttcaaaaagattttgtaaaatattgtgttgaagaagaagaaaaagctgcagagatgcataaaatgaaatctacaacccaggcaaatcggatgagtgtagatgctgtagaaattgaaacactcagaaaaacagttgaggactatttctgcttttgctatgggaaagctttaggcaaatccacagtggtacctgtaccatatgagaagatgctgcgagaccagtcggctgtggtagtgcaggggcttccggaaggtgttgcctttaaacaccccgagaactatgatcttgcaaccctgaaatggattttggagaacaaagcagggatttcattcatcattaagagaccttttttagagccaaagaagcatgtaggtggtcgtgtgatggtaacagatgctgacaggtcaatactatctccaggtggaagttgtggccccatcaaagtgaaaactgaacccacagaagattctggcatttccctggaaatggcagctgtgacagtaaaggaagaatcagaagatcctgattattatcaatataacattcaaggaagccaccattcttcagagggcaatgaaggcacagaaatggaagtaccagcagaagattctactcaacatgtcccttcagaaacaagtgaggaccctgaagttgaggtgactattgaagatgatgattattctccaccgtctaagagaccaaaggccaatgagctaccgcagccaccagtcccggaacccgccaatgctgggaagcggaaagtgagggagttcaacttcgagaaatggaatgctcgcatcactgatctacgtaaacaagttgaagaattgtttgaaaggaaatatgctcaagccataaaagccaaaggtccggtgacgatcccgtaccctcttttccagtctcatgttgaagatctttatgtagaaggacttcctgaaggaattccttttagaaggccatctacttacggaattcctcgcctggagaggatattacttgcaaaggaaaggattcgttttgtgattaagaaacatgagcttctgaattcaacacgtgaagatttacagcttgataagccagcttcaggagtaaaggaagaatggtatgccagaatcactaaattaagaaagatggtggatcagcttttctgcaaaaaatttgcggaagccttggggagcactgaagccaaggctgtaccgtaccaaaaatttgaggcacacccgaatgatctgtacgtggaaggactgccagaaaacattcctttccgaagtccctcatggtatggaatcccaaggctggaaaaaatcattcaagtgggcaatcgaattaaatttgttattaaaagaccagaacttctgactcacagtaccactgaagttactcagccaagaacgaatacaccagtcaaagaagattggaatgtcagaattaccaagctacggaagcaagtggaagagatttttaatttgaaatttgcttagatttgttgacagcggtttcctggagtgctgtcttgagaacgattctgaggaggctcagcaagaaagagtgtttcagttgattgggtgtgtctgtcatggagaaggaactcaagctcttggactcaccgaggcagtaaaagtaccatatcctgtgtttgaatcaaacccggagttcttgtatgtggaaggcttgccagaggggattcccttccgaagccctacctggtttggaattccacgacttgaaaggatcgtccgcgggagtaataaaatcaagttcgttgttaaaaaacctgaactagttatttcctacttgcctcctgggatggctagtaaaataaacactaaagctttgcagtcccccaaaagaccacgaagtcctgggagtaattcaaaggttcctgaaattgaggtcaccgtggaaggccctaataacaacaatcctcaaacctcagctgttcgaaccccgacccagactaacggttctaacgttcccttcaagccacgagggagagagttttcctttgaggcctggaatgccaaaatcacggacctaaaacagaaagttgaaaatctcttcaatgagaaatgtggggaagctcttggccttaaacaagctgtgaaggtgccgttcgcgttatttgagtctttcccggaagacttttatgtggaaggcttacctgagggtgtgccattccgaagaccatcgacttttggcattccgaggctggagaagatactcagaaacaaagccaaaattaagttcatcattaaaaagcccgaaatgtttgagacggcgattaaggagagcacctcctctaagagccctcccagaaaaataaattcatcacccaatgttaatactactgcatcaggtgttgaagaccttaacatcattcaggtgacaattccagatgatgataatgaaagactctcgaaagttgaaaaagctagacagctaagagaacaagtgaatgacctctttagtcggaaatttggtgaagctattggtatgggttttcctgtgaaagttccctacaggaaaatcacaattaaccctggctgtgtggtggttgatggcatgcccccgggggtgtccttcaaagcccccagctacctggaaatcagctccatgagaaggatcttagactctgccgagtttatcaaattcacggtcattagaccatttccaggacttgtgattaataaccagctggttgatcagagtgagtcagaaggccccgtgatacaagaatcagctgaaccaagccagttggaagttccagccacagaagaaataaaagagactgatggaagctctcagatcaagcaagaaccagaccccacgtggtagacctcttccctcctaggagccttgagttacggtgtttattttccaatcaagtgaagatatctcctacttctcctactggaacatctcagcttctgcagtgaagaaaaattcctgtgatagttcagttctttagtttttctatttgaaaaaaaaaaatcatttaaatgatcctttgttcacggctctccttaatgactgagtgaacagttcctatctgtatatttgactaaaccttttcctaagctatctctcatggttcctatgtttttttatcataattaaaagcaaaaccatctggatcacctaacagtcagaggtcagtatctcagcgtgtgaattatagaggaaatacagagagaacctcttccacttttacttttcgtccaaataaaatgcatggtgtaccagaagttgaagatcgggttgaggattggggctagctcgatgacactaaggccccaacatcgcgggacctgctgtggcgcggattcttaggaacgctgttctagccggccccctctccaggggtcgccgtggccggcattatttcctagttcttcttgtaaccctgaggtgccagcgcggggagtgaggaggggtcagggggctaaggatgcaacctctgacgttctgcgccttcctaggagagtcttacatgtgttgagatttcacaagcaatgcgagttgtaaaataccagctctacaagaagctaggctctgtgacggcatagttttcagtagctttatcacaatattcacaatggagaattatatgacatggtagcagaaataggcccttttatgtgttgcttctattttacctcaaattgtagatatagggtaatcaataaaatccatccatgcctttcacacactaagt

SEQ ID NO: 4919 - protein, 544 aa, Homo sapiens; identical to SEQ ID NO: 4045

SEQ ID NO: 4920 - DNA, 4045 bp, Homo sapiens
aaaaaaaaaaaaaaaaaaaaaaaaaaaagaaaaaagaaaaaaaaaaggaggaggaggaggagggtgagagagaagctgggagagcagagaaaaggggccaccggtcgcccccccgcttccccgcacgcgctctccagccgcggccgcccgcctgccgcggtcaccccggcctctgcctctgtcccccagtgatcggatcaaggcgctgagcgaggccctgcctgcggggcggccatgcggcggtgacaggagcgcgaccgacacgcacgggcccctcgccccctctcgcctcccgtccgctcgccagctcccctcagccgaggctgctccgcggcggccgcagcccgcgcgcggcccacactcgcctcccctcggcacccccggccccggagctgcctggaggcggccgcactcggtgtaaagaactggccaagtccaaagccgaagtggcctgcattgcagtgtatgaaacagacgtgtttgtcgtcggaactgaaagaggacgtgcttttgtcaataccagaaaggattttcaaaaagattttgtaaaatattgtgttgaagaagaagaaaaagctgcagagatgcataaaatgaaatctacaacccaggcaaatcggatgagtgtagatgctgtagaaattgaaacactcagaaaaacagttgaggactatttctgcttttgctatgggaaagctttaggcaaatccacagtggtacctgtaccatatgagaagatgctgcgagaccagtcggctgtggtagtgcaggggcttccggaaggtgttgcctttaaacaccccgagaactatgatcttgcaaccctgaaatggattttggagaacaaagcagggatttcattcatcattaagagaccttttttagagccaaagaagcatgtaggtggtcgtgtgatggtaacagatgctgacaggtcaatactatctccaggtggaagttgtggccccatcaaagtgaaaactgaacccacagaagattctggaagccaccattcttcagagggcaatgaaggcacagaaatggaagtaccagcagaagattctactcaacatgtcccttcagaaacaagtgaggaccctgaagttgaggtgactattgaagatgatgattattctccaccgtctaagagaccaaaggccaatgagctaccgcagccaccagtcccggaacccgccaatgctgggaagcggaaagtgagggagttcaacttcgagaaatggaatgctcgcatcactgatctacgtaaacaagttgaagaattgtttgaaaggaaatatgctcaagccataaaagccaaaggtccggtgacgatcccgtaccctcttttccagtctcatgttgaagatctttatgtagaaggacttcctgaaggaattccttttagaaggccatctacttacggaattcctcgcctggagaggatattacttgcaaaggaaaggattcgttttgtgattaagaaacatgagcttctgaattcaacacgtgaagatttacagcttgataagccagcttcaggagtaaaggaagaatggtatgccagaatcactaaattaagaaagatggtggatcagcttttctgcaaaaaatttgcggaagccttggggagcactgaagccaaggctgtaccgtaccaaaaatttgaggcacacccgaatgatctgtacgtggaaggactgccagaaaacattcctttccgaagtccctcatggtatggaatcccaaggctggaaaaaatcattcaagtgggcaatcgaattaaatttgttattaaaagaccagaacttctgactcacagtaccactgaagttactcagccaagaacgaatacaccagtcaaagaagattggaatgtcagaattaccaagctacggaagcaagtggaagagatttttaatttgaaatttgctcaagctcttggactcaccgaggcagtaaaagtaccatatcctgtgtttgaatcaaacccggagttcttgaaaggatcgtccgcgggagtaataaaatcaagttcgttgttaaaaaacctgaactagttatttcctacttgcctcctgggatggctagtaaaataaacactaaagctttgcagtcccccaaaagaccacgaagtcctgggagtaattcaaaggttcctgaaattgaggtcaccgtggaaggccctaataacaacaatcctcaaacctcagctgttcgaaccccgacccagactaacggttctaacgttcccttcaagccacgagggagagagttttcctttgaggcctggaatgccaaaatcacggacctaaaacagaaagttgaaaatctcttcaatgagaaatgtggggaagctcttggccttaaacaagctgtgaaggtgccgttcgcgttatttgagtctttcccggaagacttttatgtggaaggcttacctgagggtgtgccattccgaagaccatcgacttttggcattccgaggctggagaagatactcagaaacaaagccaaaattaagttcatcattaaaaagcccgaaatgtttgagacggcgattaaggagagcacctcctctaagagccctcccagaaaaataaattcatcacccaatgttaatactactgcatcaggtgttgaagaccttaacatcattcaggtgacaattccagatgatgataatgaaagactctcgaaagttgaaaaagctagacagctaagagaacaagtgaatgacctctttagtcggaaatttggtgaagctattggtatgggttttcctgtgaaagttccctacaggaaaatcacaattaaccctggctgtgtggtggttgatggcatgcccccgggggtgtccttcaaagcccccagctacctggaaatcagctccatgagaaggatcttagactctgccgagtttatcaaattcacggtcattagaccatttccaggacttgtgattaataaccagctggttgatcagagtgagtcagaaggccccgtgatacaagaatcagctgaaccaagccagttggaagttccagccacagaagaaataaaagagactgatggaagctctcagatcaagcaagaaccagaccccacgtggtagacctcttccctcctaggcttaaagtatcagtggttgagaagagcttttcggacctgttactaccccaagctgtagccttgagttacggtgtttattttccaatcaagtgaagatatctcctacttctcctactggaacatctcagcttctgcagtgaagaaaaattcctgtgatagttcagttctttagtttttctatttgaaaaaaaaaaatcatttaaatgatcctttgttcacggctctccttaatgactgagtgaacagttcctatctgtatatttgactaaaccttttcctaagctatctctcatggttcctatgtttttttatcataattaaaagcaaaaccatctggatcacctaacagtcagaggtcagtatctcagcgtgtgaattatagaggaaatacagagagaacctcttccacttttacttttcgtccaaataaaatgcatggtgtaccagaagttgaagatcgggttgaggattggggctagctcgatgacactaaggccccaacatcgcgggacctgctgtggcgcggattcttaggaacgctgttctagccggccccctctccaggggtcgccgtggccggcattatttcctagttcttcttgtaaccctgaggtgccagcgcggggagtgaggaggggtcagggggctaaggatgcaacctctgacgttctgcgccttcctaggagagtcttacatgtgttgagatttcacaagcaatgcgagttgtaaaataccagctctacaagaagctaggctctgtgacggcatagttttcagtagctttatcacaatattcacaatggagaattatatgacatggtagcagaaataggcccttttatgtgttgcttctattttacctcaaattgtagatatagggtaatcaataaaatccatccatgcctttcacacactaagt

SEQ ID NO: 4921 - protein, 490 aa, Homo sapiens; identical to SEQ ID NO: 4105

SEQ ID NO: 4922 - DNA, 7395 bp, Homo sapiens
aaaaaaaaaaaaaaaaaaaaaaaaaaaagaaaaaagaaaaaaaaaaggaggaggaggaggagggtgagagagaagctgggagagcagagaaaaggggccaccggtcgcccccccgcttccccgcacgcgctctccagccgcggccgcccgcctgccgcggtcaccccggcctctgcctctgtcccccagtgatcggatcaaggcgctgagcgaggccctgcctgcggggcggccatgcggcggtgacaggagcgcgaccgacacgcacgggcccctcgccccctctcgcctcccgtccgctcgccagctcccctcagccgaggctgctccgcggcggccgcagcccgcgcgcggcccacactcgcctcccctcggcacccccggccccggagctgcctggaggcggccgcactcggggatcatggcccaagttgcaatgtccaccctccccgttgaagatgaggagtcctcggagagcaggatggtggtgacattcctcatgtcagctctcgagtccatgtgtaaagaactggccaagtccaaagccgaagtggcctgcattgcagtgtatgaaacagacgtgtttgtcgtcggaactgaaagaggacgtgcttttgtcaataccagaaaggattttcaaaaagattttgtaaaatattgtgttgaagaagaagaaaaagctgcagagatgcataaaatgaaatctacaacccaggcaaatcggatgagtgtagatgctgtagaaattgaaacactcagaaaaacagttgaggactatttctgcttttgctatgggaaagctttaggcaaatccacagtggtacctgtaccatatgagaagatgctgcgagaccagtcggctgtggtagtgcaggggcttccggaaggtgttgcctttaaacaccccgagaactatgatcttgcaaccctgaaatggattttggagaacaaagcagggatttcattcatcattaagagaccttttttagagccaaagaagcatgtaggtggtcgtgtgatggtaacagatgctgacaggtcaatactatctccaggtggaagttgtggccccatcaaagtgaaaactgaacccacagaagattctggcatttccctggaaatggcagctgtgacagtaaaggaagaatcagaagatcctgattattatcaatataacattcaaggaagccaccattcttcagagggcaatgaaggcacagaaatggaagtaccagcagaagattctactcaacatgtcccttcagaaacaagtgaggaccctgaagttgaggtgactattgaagatgatgattattctccaccgtctaagagaccaaaggccaatgagctaccgcagccaccagtcccggaacccgccaatgctgggaagcggaaagtgagggagttcaacttcgagaaatggaatgctcgcatcactgatctacgtaaacaagttgaagaattgtttgaaaggaaatatgctcaagccataaaagccaaaggtccggtgacgatcccgtaccctcttttccagtctcatgttgaagatctttatgtagaaggacttcctgaaggaattccttttagaaggccatctacttacggaattcctcgcctggagaggatattacttgcaaaggaaaggattcgttttgtgattaagaaacatgagcttctgaattcaacacgtgaagatttacagcttgataagccagcttcaggagtaaaggaagaatggtatgccagaatcactaaattaagaaagatggtggatcagcttttctgcaaaaaatttgcggaagccttggggagcactgaagccaaggctgtaccgtaccaaaaatttgaggcacacccgaatgatctgtacgtggaaggactgccagaaaacattcctttccgaagtccctcatggtatggaatcccaaggctggaaaaaatcattcaagtgggcaatcgaattaaatttgttattaaaagaccagaacttctgactcacagtaccactgaagttactcagccaagaacgaatacaccagtcaaagaagattggaatgtcagaattaccaagctacggaagcaagtggaagagatttttaatttgaaatttgcttagatttgttgacagcggtttcctggagtgctgtcttgagaacgattctgaggaggctcagcaagaaagagtgtttcagttgattgggtgtgtctgtcatggagaaggaactcaagctcttggactcaccgaggcagtaaaagtaccatatcctgtgtttgaatcaaacccggagttcttgtatgtggaaggcttgccagaggggattcccttccgaagccctacctggtttggaattccacgacttgaaaggatcgtccgcgggagtaataaaatcaagttcgttgttaaaaaacctgaactagttatttcctacttgcctcctgggatggctagtaaaataaacactaaagctttgcagtcccccaaaagaccacgaagtcctgggagtaattcaaaggttcctgaaattgaggtcaccgtggaaggccctaataacaacaatcctcaaacctcagctgttcgaaccccgacccagactaacggttctaacgttcccttcaagccacgagggagagagttttcctttgaggcctggaatgccaaaatcacggacctaaaacagaaagttgaaaatctcttcaatgagaaatgtggggaagctcttggccttaaacaagctgtgaaggtgccgttcgcgttatttgagtctttcccggaagacttttatgtggaaggcttacctgagggtgtgccattccgaagaccatcgacttttggcattccgaggctggagaagatactcagaaacaaagccaaaattaagttcatcattaaaaagcccgaaatgtttgagacggcgattaaggagagcacctcctctaagagccctcccagaaaaataaattcatcacccaatgttaatactactgcatcaggtgttgaagaccttaacatcattcaggtgacaattccagatgatgataatgaaagactctcgaaagttgaaaaagctagacagctaagagaacaagtgaatgacctctttagtcggaaatttggtgaagctattggtatgggttttcctgtgaaagttccctacaggaaaatcacaattaaccctggctgtgtggtggttgatggcatgcccccgggggtgtccttcaaagcccccagctacctggaaatcagctccatgagaaggatcttagactctgccgagtttatcaaattcacggtcattaggtaagtgagagtttcctgcttagtcacaggagcgaatctggagctcatgaggctgactcttctaaaatgcagccacaggtagtcatcgaatccggcttcctatgctgtgcaatcaacaaatcaaaataacttgtgtcatcattagaatgtcagatgtgcttctacgaactaagctgactcttttaattctttggcaaagggttggcaaactaggactgtttgccaaattcaggctgcctcctatttttagagtcttcctgaaacacagctacacccgtattatccatggctgctttcctgtcacagtgagtaagtagctgggactgagaaggcatggcctccaaagtctaaaatatttactctctagcactttgtagaaaaaccttagctaggcacagtggctaacgcctgtaatcccagcattttgggaggccaaggcaggcagatcacctgaggtcaggagttccagaccagcctggccaacatggtgaaatcccatctctacaaaaataaaacagttagctgggcatgatggcgggtgcctgtaatcccagctactcgggaggctgaggcaggatagtcgcttgaacccaggaggtggaggttgcaatgagccaagatcatgccactgcactccagcctggacgacagagtgagactccatcacaagaaaaaaagaactttgtcaacctctgtcttagggcgccttgtcacaggcttcgggtcagacggattcaaccttgcatcagccatttgttagccaggtcactctgttctttgtctgtaaatgagattgatcgttgttcccactgagagtgtcagctccttcccgtagagcaggcatgatgattgtactcacctctgacaccattgtgagtgccacattccttcccacgtccttgtcactgtaagagatgcccacctgagcaccaaccccaggttatcttcccctttgtcttccagccccccagaaacagctacgactcaacctacccaatcatttcatcatcagattgccactgtctctagttcaggtctcttgggactggcactcagaaatctcataataaatcctcttgaggcttctcatacactcgtcttcttccaatcttctttccctcaaaatctcatattttggttccacttcacccaccgtcattctccatatcactcccaggagttaggcaaaaagccccttccgttcttccgtatgttaaacttagaatcactctgttccctgctctgcgtttctattttttgtttttcctccatttactagtagcttaacactttctaacagtgttcttattattgatacgtatctatctcttccataagcttataaggtcacggataatacttctcattgtagtacgtaaatgacgtgggctagatatgagttgaataaacagttatacctgtaaattcttacagagtgaaaataaattgttatactttacaatttgtttctctctttagaccatttccaggacttgtgattaataaccgtgagtattttgtgaagtgttttgtttttgttttttcctggggtctgacgtgtgtgcgtgtgagtgtgtatacatgcttaacgtatatcacgttacttcacctatgtcagtaaccaggccaaatacttgttttagccctcagtaaaaacaccaggcacttcctagttgtaaaattattcaagcttcttaacttcctatcctcgatgcacttaatcataaaatggtaataatagcaccgattttgggggagtcgttccagtagatggaaagcatctggaacaggtgtcagcaagctcctgccgacgtgtatgcataaagttttattgaaaccaccatcgtgtccatttgtttatggcagaactgagagatggcagcagcaagtgtgtgcctgcaaaacctaaaatatttactaattggctctgcaagaaaagagtttgcatccccctaacctagaacagtgtctagcctctagtatgtgtttagcctacagtatgtgctcagcgaatacaatctatatttattactgcttttatgactgttataattactgtgcttggatttcgttacaaagtaagtcacaatgtgcctgcttctgttagtatttcagcacagtgcctggcacacatggggctctcaaatattgctgagcgagtgaacaaatgtcctttcaattccttaacgttgatgtcattttcaatagtattttgagccaaacttaattttgcgagtgtgttttgttttcttaactttattattaaaaatgtataaaagtgaggccaggcgtggtggctcacgcctgtaatcccagcagtttgggaggctgaggcaggcggatcagttgaggttgggagttggagaccagcccgtccaacatggtgaaagcctgtctctactaaaaatacaaaaatcagctgggtgtggtggcgcgtgcctgtaatcccagctactcaggaggctgaggcaggagagttgcttgaatcctagaggtggaggttgcagtgagctgagatcgtgccattgcactccagcctgggcaacaagagcaaaactctgtcccaataaataaataaataaaatgttctcttttgttcctgttcttgtgcggtagtgtggtatagagttttatggtaattactgtgaattagtgattctgagggacatatcagaactctgaggtttgtttccttctcatcttgagggaaacagcaaatgtatgttaaaatgcttttccaagggaacaacacatccttacattatttaaaccaatctgcttcattttcagagctggttgatcagagtgagtcagaaggccccgtgatacaagaatcagctgaaccaagccagttggaagttccagccacagaagaaataaaagagactgatggaagctctcagatcaagcaagaaccagaccccacgtggtagacctcttccctcctaggcttaaagtatcagtggttgagaagagcttttcggacctgttactaccccaagctgtgtaatatacttgtataacagaaataccttctatacaaacctttttttctacttttagatagaaatgtctactttttcagcagttctgtgaattaaagagcagagtgactgtgggtctggaatggctggtgtacttgggaatgtactatcaggattttacagcaatgctgggaaatgacagggaaaatgacaggaatgaatctcaccagattttttatgtactcagcagagccttgagttacggtgtttattttccaatcaagtgaagatatctcctacttctcctactggaacatctcagcttctgcagtgaagaaaaattcctgtgatagttcagttctttagtttttctatttgaaaaaaaaaaatcatttaaatgatcctttgttcacggctctccttaatgactgagtgaacagttcctatctgtatatttgactaaaccttttcctaagctatctctcatggttcctatgtttttttatcataattaaaagcaaaaccatctggatcacctaacagtcagaggtcagtatctcagcgtgtgaattatagaggaaatacagagagaacctcttccacttttacttttcgtccaaataaaatgcatggtgtaccagaagttgaagatcgggttgaggattggggctagctcgatgacactaaggccccaacatcgcgggacctgctgtggcgcggattcttaggaacgctgttctagccggccccctctccaggggtcgccgtggccggcattatttcctagttcttcttgtaaccctgaggtgccagcgcggggagtgaggaggggtcagggggctaaggatgcaacctctgacgttctgcgccttcctaggagagtcttacatgtgttgagatttcacaagcaatgcgagttgtaaaataccagctctacaagaagctaggctctgtgacggcatagttttcagtagctttatcacaatattcacaatggagaattatatgacatggtagcagaaataggcccttttatgtgttgcttctattttacctcaaattgtagatatagggtaatcaataaaatccatccatgcctttcacacactaagt

SEQ ID NO: 4923 - protein, 564 aa, Homo sapiens; identical to SEQ ID NO: 4061

SEQ ID NO: 4924 - DNA, 3963 bp, Homo sapiens
aaaaaaaaaaaaaaaaaaaaaaaaaaaagaaaaaagaaaaaaaaaaggaggaggaggaggagggtgagagagaagctgggagagcagagaaaaggggccaccggtcgcccccccgcttccccgcacgcgctctccagccgcggccgcccgcctgccgcggtcaccccggcctctgcctctgtcccccagtgatcggatcaaggcgctgagcgaggccctgcctgcggggcggccatgcggcggtgacaggagcgcgaccgacacgcacgggcccctcgccccctctcgcctcccgtccgctcgccagctcccctcagccgaggctgctccgcggcggccgcagcccgcgcgcggcccacactcgcctcccctcggcacccccggccccggagctgcctggaggcggccgcactcggggatcatggcccaagttgcaatgtccaccctccccgttgaagatgaggagtcctcggagagcaggatggtggtgacattcctcatgtcagctctcgagtccatgtgtaaagaactggccaagtccaaagccgaagtggcctgcattgcagtgtatgaaacagacgtgtttgtcgtcggaactgaaagaggacgtgcttttgtcaataccagaaaggattttcaaaaagattttgtaaaatattgtgttgaagaagaagaaaaagctgcagagatgcataaaatgaaatctacaacccaggcaaatcggatgagtgtagatgctgtagaaattgaaacactcagaaaaacagttgaggactatttctgcttttgctatgggaaagctttaggcaaatccacagtggtacctgtaccatatgagaagatgctgcgagaccagtcggctgtggtagtgcaggggcttccggaaggtgttgcctttaaacaccccgagaactatgatcttgcaaccctgaaatggattttggagaacaaagcagggatttcattcatcattaagagaccttttttagagccaaagaagcatgtaggtggtcgtgtgatggtaacagatgctgacaggtcaatactatctccaggtggaagttgtggccccatcaaagtgaaaactgaacccacagaagattctggcatttccctggaaatggcagctgtgacagtaaaggaagaatcagaagatcctgattattatcaatataacattcaagcaggcccttctgaaactgatgatgttgatgaaaaacagcccctatcgaagcctttgcaaggaagccaccattcttcagagggcaatgaaggcacagaaatggaagtaccagcagaagattctactcaacatgtcccttcagaaacaagtgaggaccctgaagttgaggtgactattgaagatgatgattattctccaccgtctaagagaccaaaggccaatgagctaccgcagccaccagtcccggaacccgccaatgctgggaagcggaaagtgagggagttcaacttcgagaaatggaatgctcgcatcactgatctacgtaaacaagttgaagaattgtttgaaaggaaatatgctcaagccataaaagccaaaggtccggtgacgatcccgtaccctcttttccagtctcatgttgaagatctttatgtagaaggacttcctgaaggaattccttttagaaggccatctacttacggaattcctcgcctggagaggatattacttgcaaaggaaaggattcgttttgtgattaagaaacatgagcttctgaattcaacacgtgaagatttacagcttgataagccagcttcaggagtaaaggaagaatggtatgccagaatcactaaattaagaaagatggtggatcagcttttctgcaaaaaatttgcggaagccttggggagcactgaagccaaggctgtaccgtaccaaaaatttgaggcacacccgaatgatctgtacgtggaaggactgccagaaaacattcctttccgaagtccctcatggtatggaatcccaaggctggaaaaaatcattcaagtgggcaatcgaattaaatttgttattaaaagaccagaacttctgactcacagtaccactgaagttactcagccaagaacgaatacaccagtcaaagaagattggaatgtcagaattaccaagctacggaagcaagtggaagagatttttaatttgaaatttgctcaagctcttggactcaccgaggcagtaaaagtaccatatcctgtgtttgaatcaaacccggagttcttgaaaggatcgtccgcgggagtaataaaatcaagttcgttgttaaaaaacctgaactagttatttcctacttgcctcctgggatggctagtaaaataaacactaaagctttgcagtcccccaaaagaccacgaagtcctgggagtaattcaaaggttcctgaaattgaggtcaccgtggaaggccctaataacaacaatcctcaaacctcagctgttcgaaccccgacccagactaacggttctaacgttcccttcaagccacgagggagagagttttcctttgaggcctggaatgccaaaatcacggacctaaaacagaaagttgaaaatctcttcaatgagaaatgtggggaagctcttggccttaaacaagctgtgaaggtgccgttcgcgttatttgagtctttcccggaagacttttatgtggaaggcttacctgagggtgtgccattccgaagaccatcgacttttggcattccgaggctggagaagatactcagaaacaaagccaaaattaagttcatcattaaaaagcccgaaatgtttgagacggcgattaaggagagcacctcctctaagagccctcccagaaaaataaattcatcacccaatgttaatactactgcatcaggtgttgaagaccttaacatcattcaggtgacaattccagatgatgataatgaaagactctcgaaagttgaaaaagctagacagctaagagaacaagtgaatgacctctttagtcggaaatttggtgaagctattggtatgggttttcctgtgaaagttccctacaggaaaatcacaattaaccctggctgtgtggtggttgatggcatgcccccgggggtgtccttcaaagcccccagctacctggaaatcagctccatgagaaggatcttagactctgccgagtttatcaaattcacggtcattagaccatttccaggacttgtgattaataaccagctggttgatcagagtgagtcagaaggccccgtgatacaagaatcagctgaaccaagccagttggaagttccagccacagaagaaataaaagagactgatggaagctctcagatcaagcaagaaccagaccccacgtggtagacctcttccctcctaggcaaaaccatctggatcacctaacagtcagaggtcagtatctcagcgtgtgaattatagaggaaatacagagagaacctcttccacttttacttttcgtccaaataaaatgcatggtgtaccagaagttgaagatcgggttgaggattggggctagctcgatgacactaaggccccaacatcgcgggacctgctgtggcgcggattcttaggaacgctgttctagccggccccctctccaggggtcgccgtggccggcattatttcctagttcttcttgtaaccctgaggtgccagcgcggggagtgaggaggggtcagggggctaaggatgcaacctctgacgttctgcgccttcctaggagagtcttacatgtgttgagatttcacaagcaatgcgagttgtaaaataccagctctacaagaagctaggctctgtgacggcatagttttcagtagctttatcacaatattcacaatggagaattatatgacatggtagcagaaataggcccttttatgtgttgcttctattttacctcaaattgtagatatagggtaatcaataaaatccatccatgcctttcacacactaagt

SEQ ID NO: 4925 - protein, 625 aa, Homo sapiens; identical to SEQ ID NO: 4033

SEQ ID NO: 4926 - DNA, 7312 bp, Homo sapiens
aaaaaaaaaaaaaaaaaaaaaaaaaaaagaaaaaagaaaaaaaaaaggaggaggaggaggagggtgagagagaagctgggagagcagagaaaaggggccaccggtcgcccccccgcttccccgcacgcgctctccagccgcggccgcccgcctgccgcggtcaccccggcctctgcctctgtcccccagtgatcggatcaaggcgctgagcgaggccctgcctgcggggcggccatgcggcggtgacaggagcgcgaccgacacgcacgggcccctcgccccctctcgcctcccgtccgctcgccagctcccctcagccgaggctgctccgcggcggccgcagcccgcgcgcggcccacactcgcctccccgttgaagatgaggagtcctcggagagcaggatggtggtgacattcctcatgtcagctctcgagtccatgtgtaaagaactggccaagtccaaagccgaagtggcctgcattgcagtgtatgaaacagacgtgtttgtcgtcggaactgaaagaggacgtgcttttgtcaataccagaaaggattttcaaaaagattttgtaaaatattgtgttgaagaagaagaaaaagctgcagagatgcataaaatgaaatctacaacccaggcaaatcggatgagtgtagatgctgtagaaattgaaacactcagaaaaacagttgaggactatttctgcttttgctatgggaaagctttaggcaaatccacagtggtacctgtaccatatgagaagatgctgcgagaccagtcggctgtggtagtgcaggggcttccggaaggtgttgcctttaaacaccccgagaactatgatcttgcaaccctgaaatggattttggagaacaaagcagggatttcattcatcattaagagaccttttttagagccaaagaagcatgtaggtggtcgtgtgatggtaacagatgctgacaggtcaatactatctccaggtggaagttgtggccccatcaaagtgaaaactgaacccacagaagattctggcatttccctggaaatggcagctgtgacagtaaaggaagaatcagaagatcctgattattatcaatataacattcaagcaggcccttctgaaactgatgatgttgatgaaaaacagcccctatcgaagcctttgcaaggaagccaccattcttcagagggcaatgaaggcacagaaatggaagtaccagcagaagatgatgattattctccaccgtctaagagaccaaaggccaatgagctaccgcagccaccagtcccggaacccgccaatgctgggaagcggaaagtgagggagttcaacttcgagaaatggaatgctcgcatcactgatctacgtaaacaagttgaagaattgtttgaaaggaaatatgctcaagccataaaagccaaaggtccggtgacgatcccgtaccctcttttccagtctcatgttgaagatctttatgtagaaggacttcctgaaggaattccttttagaaggccatctacttacggaattcctcgcctggagaggatattacttgcaaaggaaaggattcgttttgtgattaagaaacatgagcttctgaattcaacacgtgaagatttacagcttgataagccagcttcaggagtaaaggaagaatggtatgccagaatcactaaattaagaaagatggtggatcagcttttctgcaaaaaatttgcggaagccttggggagcactgaagccaaggctgtaccgtaccaaaaatttgaggcacacccgaatgatctgtacgtggaaggactgccagaaaacattcctttccgaagtccctcatggtatggaatcccaaggctggaaaaaatcattcaagtgggcaatcgaattaaatttgttattaaaagaccagaacttctgactcacagtaccactgaagttactcagccaagaacgaatacaccagtcaaagaagattggaatgtcagaattaccaagctacggaagcaagtggaagagatttttaatttgaaatttgcttagatttgttgacagcggtttcctggagtgctgtcttgagaacgattctgaggaggctcagcaagaaagagtgtttcagttgattgggtgtgtctgtcatggagaaggaactcaagctcttggactcaccgaggcagtaaaagtaccatatcctgtgtttgaatcaaacccggagttcttgtatgtggaaggcttgccagaggggattcccttccgaagccctacctggtttggaattccacgacttgaaaggatcgtccgcgggagtaataaaatcaagttcgttgttaaaaaacctgaactagttatttcctacttgcctcctgggatggctagtaaaataaacactaaagctttgcagtcccccaaaagaccacgaagtcctgggagtaattcaaaggttcctgaaattgaggtcaccgtggaaggccctaataacaacaatcctcaaacctcagctgttcgaaccccgacccagactaacggttctaacgttcccttcaagccacgagggagagagttttcctttgaggcctggaatgccaaaatcacggacctaaaacagaaagttgaaaatctcttcaatgagaaatgtggggaagctcttggccttaaacaagctgtgaaggtgccgttcgcgttatttgagtctttcccggaagacttttatgtggaaggcttacctgagggtgtgccattccgaagaccatcgacttttggcattccgaggctggagaagatactcagaaacaaagccaaaattaagttcatcattaaaaagcccgaaatgtttgagacggcgattaaggagagcacctcctctaagagccctcccagaaaaataaattcatcacccaatgttaatactactgcatcaggtgttgaagaccttaacatcattcaggtgacaattccagatgatgataatgaaagactctcgaaagttgaaaaagctagacagctaagagaacaagtgaatgacctctttagtcggaaatttggtgaagctattggtatgggttttcctgtgaaagttccctacaggaaaatcacaattaaccctggctgtgtggtggttgatggcatgcccccgggggtgtccttcaaagcccccagctacctggaaatcagctccatgagaaggatcttagactctgccgagtttatcaaattcacggtcattaggtaagtgagagtttcctgcttagtcacaggagcgaatctggagctcatgaggctgactcttctaaaatgcagccacaggtagtcatcgaatccggcttcctatgctgtgcaatcaacaaatcaaaataacttgtgtcatcattagaatgtcagatgtgcttctacgaactaagctgactcttttaattctttggcaaagggttggcaaactaggactgtttgccaaattcaggctgcctcctatttttagagtcttcctgaaacacagctacacccgtattatccatggctgctttcctgtcacagtgagtaagtagctgggactgagaaggcatggcctccaaagtctaaaatatttactctctagcactttgtagaaaaaccttagctaggcacagtggctaacgcctgtaatcccagcattttgggaggccaaggcaggcagatcacctgaggtcaggagttccagaccagcctggccaacatggtgaaatcccatctctacaaaaataaaacagttagctgggcatgatggcgggtgcctgtaatcccagctactcgggaggctgaggcaggatagtcgcttgaacccaggaggtggaggttgcaatgagccaagatcatgccactgcactccagcctggacgacagagtgagactccatcacaagaaaaaaagaactttgtcaacctctgtcttagggcgccttgtcacaggcttcgggtcagacggattcaaccttgcatcagccatttgttagccaggtcactctgttctttgtctgtaaatgagattgatcgttgttcccactgagagtgtcagctccttcccgtagagcaggcatgatgattgtactcacctctgacaccattgtgagtgccacattccttcccacgtccttgtcactgtaagagatgcccacctgagcaccaaccccaggttatcttcccctttgtcttccagccccccagaaacagctacgactcaacctacccaatcatttcatcatcagattgccactgtctctagttcaggtctcttgggactggcactcagaaatctcataataaatcctcttgaggcttctcatacactcgtcttcttccaatcttctttccctcaaaatctcatattttggttccacttcacccaccgtcattctccatatcactcccaggagttaggcaaaaagccccttccgttcttccgtatgttaaacttagaatcactctgttccctgctctgcgtttctattttttgtttttcctccatttactagtagcttaacactttctaacagtgttcttattattgatacgtatctatctcttccataagcttataaggtcacggataatacttctcattgtagtacgtaaatgacgtgggctagatatgagttgaataaacagttatacctgtaaattcttacagagtgaaaataaattgttatactttacaatttgtttctctctttagaccatttccaggacttgtgattaataaccgtgagtattttgtgaagtgttttgtttttgttttttcctggggtctgacgtgtgtgcgtgtgagtgtgtatacatgcttaacgtatatcacgttacttcacctatgtcagtaaccaggccaaatacttgttttagccctcagtaaaaacaccaggcacttcctagttgtaaaattattcaagcttcttaacttcctatcctcgatgcacttaatcataaaatggtaataatagcaccgattttgggggagtcgttccagtagatggaaagcatctggaacaggtgtcagcaagctcctgccgacgtgtatgcataaagttttattgaaaccaccatcgtgtccatttgtttatggcagaactgagagatggcagcagcaagtgtgtgcctgcaaaacctaaaatatttactaattggctctgcaagaaaagagtttgcatccccctaacctagaacagtgtctagcctctagtatgtgtttagcctacagtatgtgctcagcgaatacaatctatatttattactgcttttatgactgttataattactgtgcttggatttcgttacaaagtaagtcacaatgtgcctgcttctgttagtatttcagcacagtgcctggcacacatggggctctcaaatattgctgagcgagtgaacaaatgtcctttcaattccttaacgttgatgtcattttcaatagtattttgagccaaacttaattttgcgagtgtgttttgttttcttaactttattattaaaaatgtataaaagtgaggccaggcgtggtggctcacgcctgtaatcccagcagtttgggaggctgaggcaggcggatcagttgaggttgggagttggagaccagcccgtccaacatggtgaaagcctgtctctactaaaaatacaaaaatcagctgggtgtggtggcgcgtgcctgtaatcccagctactcaggaggctgaggcaggagagttgcttgaatcctagaggtggaggttgcagtgagctgagatcgtgccattgcactccagcctgggcaacaagagcaaaactctgtcccaataaataaataaataaaatgttctcttttgttcctgttcttgtgcggtagtgtggtatagagttttatggtaattactgtgaattagtgattctgagggacatatcagaactctgaggtttgtttccttctcatcttgagggaaacagcaaatgtatgttaaaatgcttttccaagggaacaacacatccttacattatttaaaccaatctgcttcattttcagagctggttgatcagagtgagtcagaaggccccgtgatacaagaatcagctgaaccaagccagttggaagttccagccacagaagaaataaaagagactgatggaagctctcagatcaagcaagaaccagaccccacgtggtagacctcttccctcctaggcttaaagtatcagtggttgagaagagcttttcggacctgttactaccccaagctgtgtaatatacttgtataacagaaataccttctatacaaacctttttttctacttttagatagaaatgtctactttttcagcagttctgtgaattaaagagcagagtgactgtgggtctggaatggctggtgtacttgggaatgtactatcaggattttacagcaatgctgggaaatgacagggaaaatgacaggaatgaatctcaccagattttttatgtactcagcagagccttgagttacggtgtttattttccaatcaagtgaagatatctcctacttctcctactggaacatctcagcttctgcagtgaagaaaaattcctgtgatagttcagttctttagtttttctatttgaaaaaaaaaaatcatttaaatgatcctttgttcacggctctccttaatgactgagtgaacagttcctatctgtatatttgactaaaccttttcctaagctatctctcatggttcctatgtttttttatcataattaaaagcaaaaccatctggatcacctaacagtcagaggtcagtatctcagcgtgtgaattatagaggaaatacagagagaacctcttccacttttacttttcgtccaaataaaatgcatggtgtaccagaagttgaagatcgggttgaggattggggctagctcgatgacactaaggccccaacatcgcgggacctgctgtggcgcggattcttaggaacgctgttctagccggccccctctccaggggtcgccgtggccggcattatttcctagttcttcttgtaaccctgaggtgccagcgcggggagtgaggaggggtcagggggctaaggatgcaacctctgacgttctgcgccttcctaggagagtcttacatgtgttgagatttcacaagcaatgcgagttgtaaaataccagctctacaagaagctaggctctgtgacggcatagttttcagtagctttatcacaatattcacaatggagaattatatgacatggtagcagaaataggcccttttatgtgttgcttctattttacctcaaattgtagatatagggtaatcaataaaatccatccatgcctttcacacactaagt

SEQ ID NO: 4927 - protein, 543 aa, Homo sapiens; identical to SEQ ID NO: 4205

SEQ ID NO: 4928 - DNA, 4095 bp, Homo sapiens
aaaaaaaaaaaaaaaaaaaaaaaaaaaagaaaaaagaaaaaaaaaaggaggaggaggaggagggtgagagagaagctgggagagcagagaaaaggggccaccggtcgcccccccgcttccccgcacgcgctctccagccgcggccgcccgcctgccgcggtcaccccggcctctgcctctgtcccccagtgatcggatcaaggcgctgagcgaggccctgcctgcggggcggccatgcggcggtgacaggagcgcgaccgacacgcacgggcccctcgccccctctcgcctcccgtccgctcgccagctcccctcagccgaggctgctccgcggcggccgcagcccgcgcgcggcccacactcgcctccccgttgaagatgaggagtcctcggagagcaggatggtggtgacattcctcatgtcagctctcgagtccatgtgtaaagaactggccaagtccaaagccgaagtggcctgcattgcagtgtatgaaacagacgtgtttgtcgtcggaactgaaagaggacgtgcttttgtcaataccagaaaggattttcaaaaagattttgtaaaatattgtgttgaagaagaagaaaaagctgcagagatgcataaaatgaaatctacaacccaggcaaatcggatgagtgtagatgctgtagaaattgaaacactcagaaaaacagttgaggactatttctgcttttgctatgggaaagctttaggcaaatccacagtggtacctgtaccatatgagaagatgctgcgagaccagtcggctgtggtagtgcaggggcttccggaaggtgttgcctttaaacaccccgagaactatgatcttgcaaccctgaaatggattttggagaacaaagcagggatttcattcatcattaagagaccttttttagagccaaagaagcatgtaggtggtcgtgtgatggtaacagatgctgacaggtcaatactatctccaggtggaagttgtggccccatcaaagtgaaaactgaacccacagaagattctggcatttccctggaaatggcagctgtgacagtaaaggaagaatcagaagatcctgattattatcaatataacattcaaggaagccaccattcttcagagggcaatgaaggcacagaaatggaagtaccagcagaagatgatgattattctccaccgtctaagagaccaaaggccaatgagctaccgcagccaccagtcccggaacccgccaatgctgggaagcggaaagtgagggagttcaacttcgagaaatggaatgctcgcatcactgatctacgtaaacaagttgaagaattgtttgaaaggaaatatgctcaagccataaaagccaaaggtccggtgacgatcccgtaccctcttttccagtctcatgttgaagatctttatgtagaaggacttcctgaaggaattccttttagaaggccatctacttacggaattcctcgcctggagaggatattacttgcaaaggaaaggattcgttttgtgattaagaaacatgagcttctgaattcaacacgtgaagatttacagcttgataagccagcttcaggagtaaaggaagaatggtatgccagaatcactaaattaagaaagatggtggatcagcttttctgcaaaaaatttgcggaagccttggggagcactgaagccaaggctgtaccgtaccaaaaatttgaggcacacccgaatgatctgtacgtggaaggactgccagaaaacattcctttccgaagtccctcatggtatggaatcccaaggctggaaaaaatcattcaagtgggcaatcgaattaaatttgttattaaaagaccagaacttctgactcacagtaccactgaagttactcagccaagaacgaatacaccagtcaaagaagattggaatgtcagaattaccaagctacggaagcaagtggaagagatttttaatttgaaatttgctcaagctcttggactcaccgaggcagtaaaagtaccatatcctgtgtttgaatcaaacccggagttcttgtatgtggaaggcttgccagaggggattcccttccgaagccctacctggtttggaattccacgacttgaaaggatcgtccgcgggagtaataaaatcaagttcgttgttaaaaaacctgaactagttatttcctacttgcctcctgggatggctagtaaaataaacactaaagctttgcagtcccccaaaagaccacgaagtcctgggagtaattcaaaggttcctgaaattgaggtcaccgtggaaggccctaataacaacaatcctcaaacctcagctgttcgaaccccgacccagactaacggttctaacgttcccttcaagccacgagggagagagttttcctttgaggcctggaatgccaaaatcacggacctaaaacagaaagttgaaaatctcttcaatgagaaatgtggggaagctcttggccttaaacaagctgtgaaggtgccgttcgcgttatttgagtctttcccggaagacttttatgtggaaggcttacctgagggtgtgccattccgaagaccatcgacttttggcattccgaggctggagaagatactcagaaacaaagccaaaattaagttcatcattaaaaagcccgaaatgtttgagacggcgattaaggagagcacctcctctaagagccctcccagaaaaataaattcatcacccaatgttaatactactgcatcaggtgttgaagaccttaacatcattcaggtgacaattccagatgatgataatgaaagactctcgaaagttgaaaaagctagacagctaagagaacaagtgaatgacctctttagtcggaaatttggtgaagctattggtatgggttttcctgtgaaagttccctacaggaaaatcacaattaaccctggctgtgtggtggttgatggcatgcccccgggggtgtccttcaaagcccccagctacctggaaatcagctccatgagaaggatcttagactctgccgagtttatcaaattcacggtcattagaccatttccaggacttgtgattaataaccagctggttgatcagagtgagtcagaaggccccgtgatacaagaatcagctgaaccaagccagttggaagttccagccacagaagaaataaaagagactgatggaagctctcagatcaagcaagaaccagaccccacgtggtagacctcttccctcctaggagccttgagttacggtgtttattttccaatcaagtgaagatatctcctacttctcctactggaacatctcagcttctgcagtgaagaaaaattcctgtgatagttcagttctttagtttttctatttgaaaaaaaaaaatcatttaaatgatcctttgttcacggctctccttaatgactgagtgaacagttcctatctgtatatttgactaaaccttttcctaagctatctctcatggttcctatgtttttttatcataattaaaagcaaaaccatctggatcacctaacagtcagaggtcagtatctcagcgtgtgaattatagaggaaatacagagagaacctcttccacttttacttttcgtccaaataaaatgcatggtgtaccagaagttgaagatcgggttgaggattggggctagctcgatgacactaaggccccaacatcgcgggacctgctgtggcgcggattcttaggaacgctgttctagccggccccctctccaggggtcgccgtggccggcattatttcctagttcttcttgtaaccctgaggtgccagcgcggggagtgaggaggggtcagggggctaaggatgcaacctctgacgttctgcgccttcctaggagagtcttacatgtgttgagatttcacaagcaatgcgagttgtaaaataccagctctacaagaagctaggctctgtgacggcatagttttcagtagctttatcacaatattcacaatggagaattatatgacatggtagcagaaataggcccttttatgtgttgcttctattttacctcaaattgtagatatagggtaatcaataaaatccatccatgcctttcacacactaagt

SEQ ID NO: 4929 - protein, 937 aa, Homo sapiens [sequence omitted]

SEQ ID NO: 4930 - DNA, 7263 bp, Homo sapiens
aaaaaaaaaaaaaaaaaaaaaaaaaaaagaaaaaagaaaaaaaaaaggaggaggaggaggagggtgagagagaagctgggagagcagagaaaaggggccaccggtcgcccccccgcttccccgcacgcgctctccagccgcggccgcccgcctgccgcggtcaccccggcctctgcctctgtcccccagtgatcggatcaaggcgctgagcgaggccctgcctgcggggcggccatgcggcggtgacaggagcgcgaccgacacgcacgggcccctcgccccctctcgcctcccgtccgctcgccagctcccctcagccgaggctgctccgcggcggccgcagcccgcgcgcggcccacactcgcctccccgttgaagatgaggagtcctcggagagcaggatggtggtgacattcctcatgtcagctctcgagtccatgtgtaaagaactggccaagtccaaagccgaagtggcctgcattgcagtgtatgaaacagacgtgtttgtcgtcggaactgaaagaggacgtgcttttgtcaataccagaaaggattttcaaaaagattttgtaaaatattgtgttgaagaagaagaaaaagctgcagagatgcataaaatgaaatctacaacccaggcaaatcggatgagtgtagatgctgtagaaattgaaacactcagaaaaacagttgaggactatttctgcttttgctatgggaaagctttaggcaaatccacagtggtacctgtaccatatgagaagatgctgcgagaccagtcggctgtggtagtgcaggggcttccggaaggtgttgcctttaaacaccccgagaactatgatcttgcaaccctgaaatggattttggagaacaaagcagggatttcattcatcattaagagaccttttttagagccaaagaagcatgtaggtggtcgtgtgatggtaacagatgctgacaggtcaatactatctccaggtggaagttgtggccccatcaaagtgaaaactgaacccacagaagattctggcatttccctggaaatggcagctgtgacagtaaaggaagaatcagaagatcctgattattatcaatataacattcaagcaggcccttctgaaactgatgatgttgatgaaaaacagcccctatcgaagcctttgcaaggaagccaccattcttcagagggcaatgaaggcacagaaatggaagtaccagcagaagattctactcaacatgtcccttcagaaacaagtgaggaccctgaagttgaggtgactattgaagatgatgattattctccaccgtctaagagaccaaaggccaatgagctaccgcagccaccagtcccggaacccgccaatgctgggaagcggaaagtgagggagttcaacttcgagaaatggaatgctcgcatcactgatctacgtaaacaagttgaagaattgtttgaaaggaaatatgctcaagccataaaagccaaaggtccggtgacgatcccgtaccctcttttccagtctcatgttgaagatctttatgtagaaggacttcctgaaggaattccttttagaaggccatctacttacggaattcctcgcctggagaggatattacttgcaaaggaaaggattcgttttgtgattaagaaacatgagcttctgaattcaacacgtgaagatttacagcttgataagccagcttcaggagtaaaggaagaatggtatgccagaatcactaaattaagaaagatggtggatcagcttttctgcaaaaaatttgcggaagccttggggagcactgaagccaaggctgtaccgtaccaaaaatttgaggcacacccgaatgatctgtacgtggaaggactgccagaaaacattcctttccgaagtccctcatggtatggaatcccaaggctggaaaaaatcattcaagtgggcaatcgaattaaatttgttattaaaagaccagaacttctgactcacagtaccactgaagttactcagccaagaacgaatacaccagtcaaagaagattggaatgtcagaattaccaagctacggaagcaagtggaagagatttttaatttgaaatttgctcaagctcttggactcaccgaggcagtaaaagtaccatatcctgtgtttgaatcaaacccggagttcttgtatgtggaaggcttgccagaggggattcccttccgaagccctacctggtttggaattccacgacttgaaaggatcgtccgcgggagtaataaaatcaagttcgttgttaaaaaacctgaactagttatttcctacttgcctcctgggatggctagtaaaataaacactaaagctttgcagtcccccaaaagaccacgaagtcctgggagtaattcaaaggttcctgaaattgaggtcaccgtggaaggccctaataacaacaatcctcaaacctcagctgttcgaaccccgacccagactaacggttctaacgttcccttcaagccacgagggagagagttttcctttgaggcctggaatgccaaaatcacggacctaaaacagaaagttgaaaatctcttcaatgagaaatgtggggaagctcttggccttaaacaagctgtgaaggtgccgttcgcgttatttgagtctttcccggaagacttttatgtggaaggcttacctgagggtgtgccattccgaagaccatcgacttttggcattccgaggctggagaagatactcagaaacaaagccaaaattaagttcatcattaaaaagcccgaaatgtttgagacggcgattaaggagagcacctcctctaagagccctcccagaaaaataaattcatcacccaatgttaatactactgcatcaggtgttgaagaccttaacatcattcaggtgacaattccagatgatgataatgaaagactctcgaaagttgaaaaagctagacagctaagagaacaagtgaatgacctctttagtcggaaatttggtgaagctattggtatgggttttcctgtgaaagttccctacaggaaaatcacaattaaccctggctgtgtggtggttgatggcatgcccccgggggtgtccttcaaagcccccagctacctggaaatcagctccatgagaaggatcttagactctgccgagtttatcaaattcacggtcattaggtaagtgagagtttcctgcttagtcacaggagcgaatctggagctcatgaggctgactcttctaaaatgcagccacaggtagtcatcgaatccggcttcctatgctgtgcaatcaacaaatcaaaataacttgtgtcatcattagaatgtcagatgtgcttctacgaactaagctgactcttttaattctttggcaaagggttggcaaactaggactgtttgccaaattcaggctgcctcctatttttagagtcttcctgaaacacagctacacccgtattatccatggctgctttcctgtcacagtgagtaagtagctgggactgagaaggcatggcctccaaagtctaaaatatttactctctagcactttgtagaaaaaccttagctaggcacagtggctaacgcctgtaatcccagcattttgggaggccaaggcaggcagatcacctgaggtcaggagttccagaccagcctggccaacatggtgaaatcccatctctacaaaaataaaacagttagctgggcatgatggcgggtgcctgtaatcccagctactcgggaggctgaggcaggatagtcgcttgaacccaggaggtggaggttgcaatgagccaagatcatgccactgcactccagcctggacgacagagtgagactccatcacaagaaaaaaagaactttgtcaacctctgtcttagggcgccttgtcacaggcttcgggtcagacggattcaaccttgcatcagccatttgttagccaggtcactctgttctttgtctgtaaatgagattgatcgttgttcccactgagagtgtcagctccttcccgtagagcaggcatgatgattgtactcacctctgacaccattgtgagtgccacattccttcccacgtccttgtcactgtaagagatgcccacctgagcaccaaccccaggttatcttcccctttgtcttccagccccccagaaacagctacgactcaacctacccaatcatttcatcatcagattgccactgtctctagttcaggtctcttgggactggcactcagaaatctcataataaatcctcttgaggcttctcatacactcgtcttcttccaatcttctttccctcaaaatctcatattttggttccacttcacccaccgtcattctccatatcactcccaggagttaggcaaaaagccccttccgttcttccgtatgttaaacttagaatcactctgttccctgctctgcgtttctattttttgtttttcctccatttactagtagcttaacactttctaacagtgttcttattattgatacgtatctatctcttccataagcttataaggtcacggataatacttctcattgtagtacgtaaatgacgtgggctagatatgagttgaataaacagttatacctgtaaattcttacagagtgaaaataaattgttatactttacaatttgtttctctctttagaccatttccaggacttgtgattaataaccgtgagtattttgtgaagtgttttgtttttgttttttcctggggtctgacgtgtgtgcgtgtgagtgtgtatacatgcttaacgtatatcacgttacttcacctatgtcagtaaccaggccaaatacttgttttagccctcagtaaaaacaccaggcacttcctagttgtaaaattattcaagcttcttaacttcctatcctcgatgcacttaatcataaaatggtaataatagcaccgattttgggggagtcgttccagtagatggaaagcatctggaacaggtgtcagcaagctcctgccgacgtgtatgcataaagttttattgaaaccaccatcgtgtccatttgtttatggcagaactgagagatggcagcagcaagtgtgtgcctgcaaaacctaaaatatttactaattggctctgcaagaaaagagtttgcatccccctaacctagaacagtgtctagcctctagtatgtgtttagcctacagtatgtgctcagcgaatacaatctatatttattactgcttttatgactgttataattactgtgcttggatttcgttacaaagtaagtcacaatgtgcctgcttctgttagtatttcagcacagtgcctggcacacatggggctctcaaatattgctgagcgagtgaacaaatgtcctttcaattccttaacgttgatgtcattttcaatagtattttgagccaaacttaattttgcgagtgtgttttgttttcttaactttattattaaaaatgtataaaagtgaggccaggcgtggtggctcacgcctgtaatcccagcagtttgggaggctgaggcaggcggatcagttgaggttgggagttggagaccagcccgtccaacatggtgaaagcctgtctctactaaaaatacaaaaatcagctgggtgtggtggcgcgtgcctgtaatcccagctactcaggaggctgaggcaggagagttgcttgaatcctagaggtggaggttgcagtgagctgagatcgtgccattgcactccagcctgggcaacaagagcaaaactctgtcccaataaataaataaataaaatgttctcttttgttcctgttcttgtgcggtagtgtggtatagagttttatggtaattactgtgaattagtgattctgagggacatatcagaactctgaggtttgtttccttctcatcttgagggaaacagcaaatgtatgttaaaatgcttttccaagggaacaacacatccttacattatttaaaccaatctgcttcattttcagagctggttgatcagagtgagtcagaaggccccgtgatacaagaatcagctgaaccaagccagttggaagttccagccacagaagaaataaaagagactgatggaagctctcagatcaagcaagaaccagaccccacgtggtagacctcttccctcctaggcttaaagtatcagtggttgagaagagcttttcggacctgttactaccccaagctgtgtaatatacttgtataacagaaataccttctatacaaacctttttttctacttttagatagaaatgtctactttttcagcagttctgtgaattaaagagcagagtgactgtgggtctggaatggctggtgtacttgggaatgtactatcaggattttacagcaatgctgggaaatgacagggaaaatgacaggaatgaatctcaccagattttttatgtactcagcagagccttgagttacggtgtttattttccaatcaagtgaagatatctcctacttctcctactggaacatctcagcttctgcagtgaagaaaaattcctgtgatagttcagttctttagtttttctatttgaaaaaaaaaaatcatttaaatgatcctttgttcacggctctccttaatgactgagtgaacagttcctatctgtatatttgactaaaccttttcctaagctatctctcatggttcctatgtttttttatcataattaaaagcaaaaccatctggatcacctaacagtcagaggtcagtatctcagcgtgtgaattatagaggaaatacagagagaacctcttccacttttacttttcgtccaaataaaatgcatggtgtaccagaagttgaagatcgggttgaggattggggctagctcgatgacactaaggccccaacatcgcgggacctgctgtggcgcggattcttaggaacgctgttctagccggccccctctccaggggtcgccgtggccggcattatttcctagttcttcttgtaaccctgaggtgccagcgcggggagtgaggaggggtcagggggctaaggatgcaacctctgacgttctgcgccttcctaggagagtcttacatgtgttgagatttcacaagcaatgcgagttgtaaaataccagctctacaagaagctaggctctgtgacggcatagttttcagtagctttatcacaatattcacaatggagaattatatgacatggtagcagaaataggcccttttatgtgttgcttctattttacctcaaattgtagatatagggtaatcaataaaatccatccatgcctttcacacactaagt

SEQ ID NO: 4931 - protein, 922 aa, Homo sapiens; identical to SEQ ID NO: 4361

SEQ ID NO: 4932 - DNA, 7252 bp, Homo sapiens
aaaaaaaaaaaaaaaaaaaaaaaaaaaagaaaaaagaaaaaaaaaaggaggaggaggaggagggtgagagagaagctgggagagcagagaaaaggggccaccggtcgcccccccgcttccccgcacgcgctctccagccgcggccgcccgcctgccgcggtcaccccggcctctgcctctgtcccccagtgatcggatcaaggcgctgagcgaggccctgcctgcggggcggccatgcggcggtgacaggagcgcgaccgacacgcacgggcccctcgccccctctcgcctcccgtccgctcgccagctcccctcagccgaggctgctccgcggcggccgcagcccgcgcgcggcccacactcgcctccccgttgaagatgaggagtcctcggagagcaggatggtggtgacattcctcatgtcagctctcgagtccatgtgtaaagaactggccaagtccaaagccgaagtggcctgcattgcagtgtatgaaacagacgtgtttgtcgtcggaactgaaagaggacgtgcttttgtcaataccagaaaggattttcaaaaagattttgtaaaatattgtgttgaagaagaagaaaaagctgcagagatgcataaaatgaaatctacaacccaggcaaatcggatgagtgtagatgctgtagaaattgaaacactcagaaaaacagttgaggactatttctgcttttgctatgggaaagctttaggcaaatccacagtggtacctgtaccatatgagaagatgctgcgagaccagtcggctgtggtagtgcaggggcttccggaaggtgttgcctttaaacaccccgagaactatgatcttgcaaccctgaaatggattttggagaacaaagcagggatttcattcatcattaagagaccttttttagagccaaagaagcatgtaggtggtcgtgtgatggtaacagatgctgacaggtcaatactatctccaggtggaagttgtggccccatcaaagtgaaaactgaacccacagaagattctggcatttccctggaaatggcagctgtgacagtaaaggaagaatcagaagatcctgattattatcaatataacattcaaggaagccaccattcttcagagggcaatgaaggcacagaaatggaagtaccagcagaagatgatgattattctccaccgtctaagagaccaaaggccaatgagctaccgcagccaccagtcccggaacccgccaatgctgggaagcggaaagtgagggagttcaacttcgagaaatggaatgctcgcatcactgatctacgtaaacaagttgaagaattgtttgaaaggaaatatgctcaagccataaaagccaaaggtccggtgacgatcccgtaccctcttttccagtctcatgttgaagatctttatgtagaaggacttcctgaaggaattccttttagaaggccatctacttacggaattcctcgcctggagaggatattacttgcaaaggaaaggattcgttttgtgattaagaaacatgagcttctgaattcaacacgtgaagatttacagcttgataagccagcttcaggagtaaaggaagaatggtatgccagaatcactaaattaagaaagatggtggatcagcttttctgcaaaaaatttgcggaagccttggggagcactgaagccaaggctgtaccgtaccaaaaatttgaggcacacccgaatgatctgtacgtggaaggactgccagaaaacattcctttccgaagtccctcatggtatggaatcccaaggctggaaaaaatcattcaagtgggcaatcgaattaaatttgttattaaaagaccagaacttctgactcacagtaccactgaagttactcagccaagaacgaatacaccagtcaaagaagattggaatgtcagaattaccaagctacggaagcaagtggaagagatttttaatttgaaatttgcttagatttgttgacagcggtttcctggagtgctgtcttgagaacgattctgaggaggctcagcaagaaagagtgtttcagttgattgggtgtgtctgtcatggagaaggaactcaagctcttggactcaccgaggcagtaaaagtaccatatcctgtgtttgaatcaaacccggagttcttgtatgtggaaggcttgccagaggggattcccttccgaagccctacctggtttggaattccacgacttgaaaggatcgtccgcgggagtaataaaatcaagttcgttgttaaaaaacctgaactagttatttcctacttgcctcctgggatggctagtaaaataaacactaaagctttgcagtcccccaaaagaccacgaagtcctgggagtaattcaaaggttcctgaaattgaggtcaccgtggaaggccctaataacaacaatcctcaaacctcagctgttcgaaccccgacccagactaacggttctaacgttcccttcaagccacgagggagagagttttcctttgaggcctggaatgccaaaatcacggacctaaaacagaaagttgaaaatctcttcaatgagaaatgtggggaagctcttggccttaaacaagctgtgaaggtgccgttcgcgttatttgagtctttcccggaagacttttatgtggaaggcttacctgagggtgtgccattccgaagaccatcgacttttggcattccgaggctggagaagatactcagaaacaaagccaaaattaagttcatcattaaaaagcccgaaatgtttgagacggcgattaaggagagcacctcctctaagagccctcccagaaaaataaattcatcacccaatgttaatactactgcatcaggtgttgaagaccttaacatcattcaggtgacaattccagatgatgataatgaaagactctcgaaagttgaaaaagctagacagctaagagaacaagtgaatgacctctttagtcggaaatttggtgaagctattggtatgggttttcctgtgaaagttccctacaggaaaatcacaattaaccctggctgtgtggtggttgatggcatgcccccgggggtgtccttcaaagcccccagctacctggaaatcagctccatgagaaggatcttagactctgccgagtttatcaaattcacggtcattaggtaagtgagagtttcctgcttagtcacaggagcgaatctggagctcatgaggctgactcttctaaaatgcagccacaggtagtcatcgaatccggcttcctatgctgtgcaatcaacaaatcaaaataacttgtgtcatcattagaatgtcagatgtgcttctacgaactaagctgactcttttaattctttggcaaagggttggcaaactaggactgtttgccaaattcaggctgcctcctatttttagagtcttcctgaaacacagctacacccgtattatccatggctgctttcctgtcacagtgagtaagtagctgggactgagaaggcatggcctccaaagtctaaaatatttactctctagcactttgtagaaaaaccttagctaggcacagtggctaacgcctgtaatcccagcattttgggaggccaaggcaggcagatcacctgaggtcaggagttccagaccagcctggccaacatggtgaaatcccatctctacaaaaataaaacagttagctgggcatgatggcgggtgcctgtaatcccagctactcgggaggctgaggcaggatagtcgcttgaacccaggaggtggaggttgcaatgagccaagatcatgccactgcactccagcctggacgacagagtgagactccatcacaagaaaaaaagaactttgtcaacctctgtcttagggcgccttgtcacaggcttcgggtcagacggattcaaccttgcatcagccatttgttagccaggtcactctgttctttgtctgtaaatgagattgatcgttgttcccactgagagtgtcagctccttcccgtagagcaggcatgatgattgtactcacctctgacaccattgtgagtgccacattccttcccacgtccttgtcactgtaagagatgcccacctgagcaccaaccccaggttatcttcccctttgtcttccagccccccagaaacagctacgactcaacctacccaatcatttcatcatcagattgccactgtctctagttcaggtctcttgggactggcactcagaaatctcataataaatcctcttgaggcttctcatacactcgtcttcttccaatcttctttccctcaaaatctcatattttggttccacttcacccaccgtcattctccatatcactcccaggagttaggcaaaaagccccttccgttcttccgtatgttaaacttagaatcactctgttccctgctctgcgtttctattttttgtttttcctccatttactagtagcttaacactttctaacagtgttcttattattgatacgtatctatctcttccataagcttataaggtcacggataatacttctcattgtagtacgtaaatgacgtgggctagatatgagttgaataaacagttatacctgtaaattcttacagagtgaaaataaattgttatactttacaatttgtttctctctttagaccatttccaggacttgtgattaataaccgtgagtattttgtgaagtgttttgtttttgttttttcctggggtctgacgtgtgtgcgtgtgagtgtgtatacatgcttaacgtatatcacgttacttcacctatgtcagtaaccaggccaaatacttgttttagccctcagtaaaaacaccaggcacttcctagttgtaaaattattcaagcttcttaacttcctatcctcgatgcacttaatcataaaatggtaataatagcaccgattttgggggagtcgttccagtagatggaaagcatctggaacaggtgtcagcaagctcctgccgacgtgtatgcataaagttttattgaaaccaccatcgtgtccatttgtttatggcagaactgagagatggcagcagcaagtgtgtgcctgcaaaacctaaaatatttactaattggctctgcaagaaaagagtttgcatccccctaacctagaacagtgtctagcctctagtatgtgtttagcctacagtatgtgctcagcgaatacaatctatatttattactgcttttatgactgttataattactgtgcttggatttcgttacaaagtaagtcacaatgtgcctgcttctgttagtatttcagcacagtgcctggcacacatggggctctcaaatattgctgagcgagtgaacaaatgtcctttcaattccttaacgttgatgtcattttcaatagtattttgagccaaacttaattttgcgagtgtgttttgttttcttaactttattattaaaaatgtataaaagtgaggccaggcgtggtggctcacgcctgtaatcccagcagtttgggaggctgaggcaggcggatcagttgaggttgggagttggagaccagcccgtccaacatggtgaaagcctgtctctactaaaaatacaaaaatcagctgggtgtggtggcgcgtgcctgtaatcccagctactcaggaggctgaggcaggagagttgcttgaatcctagaggtggaggttgcagtgagctgagatcgtgccattgcactccagcctgggcaacaagagcaaaactctgtcccaataaataaataaataaaatgttctcttttgttcctgttcttgtgcggtagtgtggtatagagttttatggtaattactgtgaattagtgattctgagggacatatcagaactctgaggtttgtttccttctcatcttgagggaaacagcaaatgtatgttaaaatgcttttccaagggaacaacacatccttacattatttaaaccaatctgcttcattttcagagctggttgatcagagtgagtcagaaggccccgtgatacaagaatcagctgaaccaagccagttggaagttccagccacagaagaaataaaagagactgatggaagctctcagatcaagcaagaaccagaccccacgtggtagacctcttccctcctaggcttaaagtatcagtggttgagaagagcttttcggacctgttactaccccaagctgtgtaatatacttgtataacagaaataccttctatacaaacctttttttctacttttagatagaaatgtctactttttcagcagttctgtgaattaaagagcagagtgactgtgggtctggaatggctggtgtacttgggaatgtactatcaggattttacagcaatgctgggaaatgacagggaaaatgacaggaatgaatctcaccagattttttatgtactcagcagagccttgagttacggtgtttattttccaatcaagtgaagatatctcctacttctcctactggaacatctcagcttctgcagtgaagaaaaattcctgtgatagttcagttctttagtttttctatttgaaaaaaaaaaatcatttaaatgatcctttgttcacggctctccttaatgactgagtgaacagttcctatctgtatatttgactaaaccttttcctaagctatctctcatggttcctatgtttttttatcataattaaaagcaaaaccatctggatcacctaacagtcagaggtcagtatctcagcgtgtgaattatagaggaaatacagagagaacctcttccacttttacttttcgtccaaataaaatgcatggtgtaccagaagttgaagatcgggttgaggattggggctagctcgatgacactaaggccccaacatcgcgggacctgctgtggcgcggattcttaggaacgctgttctagccggccccctctccaggggtcgccgtggccggcattatttcctagttcttcttgtaaccctgaggtgccagcgcggggagtgaggaggggtcagggggctaaggatgcaacctctgacgttctgcgccttcctaggagagtcttacatgtgttgagatttcacaagcaatgcgagttgtaaaataccagctctacaagaagctaggctctgtgacggcatagttttcagtagctttatcacaatattcacaatggagaattatatgacatggtagcagaaataggcccttttatgtgttgcttctattttacctcaaattgtagatatagggtaatcaataaaatccatccatgcctttcacacactaagt

SEQ ID NO: 4933 - protein, 523 aa, Homo sapiens; identical to SEQ ID NO: 4201

SEQ ID NO: 4934 - DNA, 3755 bp, Homo sapiens
aaaaaaaaaaaaaaaaaaaaaaaaaaaagaaaaaagaaaaaaaaaaggaggaggaggaggagggtgagagagaagctgggagagcagagaaaaggggccaccggtcgcccccccgcttccccgcacgcgctctccagccgcggccgcccgcctgccgcggtcaccccggcctctgcctctgtcccccagtgatcggatcaaggcgctgagcgaggccctgcctgcggggcggccatgcggcggtgacaggagcgcgaccgacacgcacgggcccctcgccccctctcgcctcccgtccgctcgccagctcccctcagccgaggctgctccgcggcggccgcagcccgcgcgcggcccacactcgcctccccgttgaagatgaggagtcctcggagagcaggatggtggtgacattcctcatgtcagctctcgagtccatgtgtaaagaactggccaagtccaaagccgaagtggcctgcattgcagtgtatgaaacagacgtgtttgtcgtcggaactgaaagaggacgtgcttttgtcaataccagaaaggattttcaaaaagattttgtaaaatattgtgttgaagaagaagaaaaagctgcagagatgcataaaatgaaatctacaacccaggcaaatcggatgagtgtagatgctgtagaaattgaaacactcagaaaaacagttgaggactatttctgcttttgctatgggaaagctttaggcaaatccacagtggtacctgtaccatatgagaagatgctgcgagaccagtcggctgtggtagtgcaggggcttccggaaggtgttgcctttaaacaccccgagaactatgatcttgcaaccctgaaatggattttggagaacaaagcagggatttcattcatcattaagagaccttttttagagccaaagaagcatgtaggtggtcgtgtgatggtaacagatgctgacaggtcaatactatctccaggtggaagttgtggccccatcaaagtgaaaactgaacccacagaagattctggcatttccctggaaatggcagctgtgacagtaaaggaagaatcagaagatcctgattattatcaatataacattcaaggaagccaccattcttcagagggcaatgaaggcacagaaatggaagtaccagcagaagatgatgattattctccaccgtctaagagaccaaaggccaatgagctaccgcagccaccagtcccggaacccgccaatgctgggaagcggaaagtgagggagttcaacttcgagaaatggaatgctcgcatcactgatctacgtaaacaagttgaagaattgtttgaaaggaaatatgctcaagccataaaagccaaaggtccggtgacgatcccgtaccctcttttccagtctcatgttgaagatctttatgtagaaggacttcctgaaggaattccttttagaaggccatctacttacggaattcctcgcctggagaggatattacttgcaaaggaaaggattcgttttgtgattaagaaacatgagcttctgaattcaacacgtgaagatttacagcttgataagccagcttcaggagtaaaggaagaatggtatgccagaatcactaaattaagaaagatggtggatcagcttttctgcaaaaaatttgcggaagccttggggagcactgaagccaaggctgtaccgtaccaaaaatttgaggcacacccgaatgatctgtacgtggaaggactgccagaaaacattcctttccgaagtccctcatggtatggaatcccaaggctggaaaaaatcattcaagtgggcaatcgaattaaatttgttattaaaagaccagaacttctgactcacagtaccactgaagttactcagccaagaacgaatacaccagctcaagctcttggactcaccgaggcagtaaaagtaccatatcctgtgtttgaatcaaacccggagttcttgtatgtggaaggcttgccagaggggattcccttccgaagccctacctggtttggaattccacgacttgaaaggatcgtccgcgggagtaataaaatcaagttcgttgttaaaaaacctgaactagttatttcctacttgcctcctgggatggctagtaaaataaacactaaagctttgcagtcccccaaaagaccacgaagtcctgggagtaattcaaaggttcctgaaattgaggtcaccgtggaaggccctaataacaacaatcctcaaacctcagctgttcgaaccccgacccagactaacggttctaacgttcccttcaagccacgagggagagagttttcctttgaggcctggaatgccaaaatcacggacctaaaacagaaagttgaaaatctcttcaatgagaaatgtggggaagctcttggccttaaacaagctgtgaaggtgccgttcgcgttatttgagtctttcccggaagacttttatgtggaaggcttacctgagggtgtgccattccgaagaccatcgacttttggcattccgaggctggagaagatactcagaaacaaagccaaaattaagttcatcattaaaaagcccgaaatgtttgagacggcgattaaggagagcacctcctctaagagccctcccagaaaaataaattcatcacccaatgttaatactactgcatcaggtgttgaagaccttaacatcattcaggtgacaattccagatgatgataatgaaagactctcgaaagttgaaaaagctagacagctaagagaacaagtgaatgacctctttagtcggaaatttggtgaagctattggtatgggttttcctgtgaaagttccctacaggaaaatcacaattaaccctggctgtgtggtggttgatggcatgcccccgggggtgtccttcaaagcccccagctacctggaaatcagctccatgagaaggatcttagactctgccgagtttatcaaattcacggtcattagaccatttccaggacttgtgattaataaccagctggttgatcagagtgagtcagaaggccccgtgatacaagaatcagctgaaccaagccagttggaagttccagccacagaagaaataaaagagactgatggaagctctcagatcaagcaagaaccagaccccacgtggtagacctcttccctcctaggcaaaaccatctggatcacctaacagtcagaggtcagtatctcagcgtgtgaattatagaggaaatacagagagaacctcttccacttttacttttcgtccaaataaaatgcatggtgtaccagaagttgaagatcgggttgaggattggggctagctcgatgacactaaggccccaacatcgcgggacctgctgtggcgcggattcttaggaacgctgttctagccggccccctctccaggggtcgccgtggccggcattatttcctagttcttcttgtaaccctgaggtgccagcgcggggagtgaggaggggtcagggggctaaggatgcaacctctgacgttctgcgccttcctaggagagtcttacatgtgttgagatttcacaagcaatgcgagttgtaaaataccagctctacaagaagctaggctctgtgacggcatagttttcagtagctttatcacaatattcacaatggagaattatatgacatggtagcagaaataggcccttttatgtgttgcttctattttacctcaaattgtagatatagggtaatcaataaaatccatccatgcctttcacacactaagt

SEQ ID NO: 4935 - protein, 913 aa, Homo sapiens; identical to SEQ ID NO: 4089

SEQ ID NO: 4936 - DNA, 4348 bp, Homo sapiens
aaaaaaaaaaaaaaaaaaaaaaaaaaaagaaaaaagaaaaaaaaaaggaggaggaggaggagggtgagagagaagctgggagagcagagaaaaggggccaccggtcgcccccccgcttccccgcacgcgctctccagccgcggccgcccgcctgccgcggtcaccccggcctctgcctctgtcccccagtgatcggatcaaggcgctgagcgaggccctgcctgcggggcggccatgcggcggtgacaggagcgcgaccgacacgcacgggcccctcgccccctctcgcctcccgtccgctcgccagctcccctcagccgaggctgctccgcggcggccgcagcccgcgcgcggcccacactcgcctcccctcggcacccccggccccggagctgcctggaggcggccgcactcggtgtaaagaactggccaagtccaaagccgaagtggcctgcattgcagtgtatgaaacagacgtgtttgtcgtcggaactgaaagaggacgtgcttttgtcaataccagaaaggattttcaaaaagattttgtaaaatattgtgttgaagaagaagaaaaagctgcagagatgcataaaatgaaatctacaacccaggcaaatcggatgagtgtagatgctgtagaaattgaaacactcagaaaaacagttgaggactatttctgcttttgctatgggaaagctttaggcaaatccacagtggtacctgtaccatatgagaagatgctgcgagaccagtcggctgtggtagtgcaggggcttccggaaggtgttgcctttaaacaccccgagaactatgatcttgcaaccctgaaatggattttggagaacaaagcagggatttcattcatcattaagagaccttttttagagccaaagaagcatgtaggtggtcgtgtgatggtaacagatgctgacaggtcaatactatctccaggtggaagttgtggccccatcaaagtgaaaactgaacccacagaagattctggcatttccctggaaatggcagctgtgacagtaaaggaagaatcagaagatcctgattattatcaatataacattcaagcaggcccttctgaaactgatgatgttgatgaaaaacagcccctatcgaagcctttgcaaggaagccaccattcttcagagggcaatgaaggcacagaaatggaagtaccagcagaagatgatgattattctccaccgtctaagagaccaaaggccaatgagctaccgcagccaccagtcccggaacccgccaatgctgggaagcggaaagtgagggagttcaacttcgagaaatggaatgctcgcatcactgatctacgtaaacaagttgaagaattgtttgaaaggaaatatgctcaagccataaaagccaaaggtccggtgacgatcccgtaccctcttttccagtctcatgttgaagatctttatgtagaaggacttcctgaaggaattccttttagaaggccatctacttacggaattcctcgcctggagaggatattacttgcaaaggaaaggattcgttttgtgattaagaaacatgagcttctgaattcaacacgtgaagatttacagcttgataagccagcttcaggagtaaaggaagaatggtatgccagaatcactaaattaagaaagatggtggatcagcttttctgcaaaaaatttgcggaagccttggggagcactgaagccaaggctgtaccgtaccaaaaatttgaggcacacccgaatgatctgtacgtggaaggactgccagaaaacattcctttccgaagtccctcatggtatggaatcccaaggctggaaaaaatcattcaagtgggcaatcgaattaaatttgttattaaaagaccagaacttctgactcacagtaccactgaagttactcagccaagaacgaatacaccagtcaaagaagattggaatgtcagaattaccaagctacggaagcaagtggaagagatttttaatttgaaatttgctcaagctcttggactcaccgaggcagtaaaagtaccatatcctgtgtttgaatcaaacccggagttcttgaaaggatcgtccgcgggagtaataaaatcaagttcgttgttaaaaaacctgaactagttatttcctacttgcctcctgggatggctagtaaaataaacactaaagctttgcagtcccccaaaagaccacgaagtcctgggagtaattcaaaggttcctgaaattgaggtcaccgtggaaggccctaataacaacaatcctcaaacctcagctgttcgaaccccgacccagactaacggttctaacgttcccttcaagccacgagggagagagttttcctttgaggcctggaatgccaaaatcacggacctaaaacagaaagttgaaaatctcttcaatgagaaatgtggggaagctcttggccttaaacaagctgtgaaggtgccgttcgcgttatttgagtctttcccggaagacttttatgtggaaggcttacctgagggtgtgccattccgaagaccatcgacttttggcattccgaggctggagaagatactcagaaacaaagccaaaattaagttcatcattaaaaagcccgaaatgtttgagacggcgattaaggagagcacctcctctaagagccctcccagaaaaataaattcatcacccaatgttaatactactgcatcaggtgttgaagaccttaacatcattcaggtgacaattccagatgatgataatgaaagactctcgaaagttgaaaaagctagacagctaagagaacaagtgaatgacctctttagtcggaaatttggtgaagctattggtatgggttttcctgtgaaagttccctacaggaaaatcacaattaaccctggctgtgtggtggttgatggcatgcccccgggggtgtccttcaaagcccccagctacctggaaatcagctccatgagaaggatcttagactctgccgagtttatcaaattcacggtcattagaccatttccaggacttgtgattaataaccagctggttgatcagagtgagtcagaaggccccgtgatacaagaatcagctgaaccaagccagttggaagttccagccacagaagaaataaaagagactgatggaagctctcagatcaagcaagaaccagaccccacgtggtagacctcttccctcctaggcttaaagtatcagtggttgagaagagcttttcggacctgttactaccccaagctgtgtaatatacttgtataacagaaataccttctatacaaacctttttttctacttttagatagaaatgtctactttttcagcagttctgtgaattaaagagcagagtgactgtgggtctggaatggctggtgtacttgggaatgtactatcaggattttacagcaatgctgggaaatgacagggaaaatgacaggaatgaatctcaccagattttttatgtactcagcagagccttgagttacggtgtttattttccaatcaagtgaagatatctcctacttctcctactggaacatctcagcttctgcagtgaagaaaaattcctgtgatagttcagttctttagtttttctatttgaaaaaaaaaaatcatttaaatgatcctttgttcacggctctccttaatgactgagtgaacagttcctatctgtatatttgactaaaccttttcctaagctatctctcatggttcctatgtttttttatcataattaaaagcaaaaccatctggatcacctaacagtcagaggtcagtatctcagcgtgtgaattatagaggaaatacagagagaacctcttccacttttacttttcgtccaaataaaatgcatggtgtaccagaagttgaagatcgggttgaggattggggctagctcgatgacactaaggccccaacatcgcgggacctgctgtggcgcggattcttaggaacgctgttctagccggccccctctccaggggtcgccgtggccggcattatttcctagttcttcttgtaaccctgaggtgccagcgcggggagtgaggaggggtcagggggctaaggatgcaacctctgacgttctgcgccttcctaggagagtcttacatgtgttgagatttcacaagcaatgcgagttgtaaaataccagctctacaagaagctaggctctgtgacggcatagttttcagtagctttatcacaatattcacaatggagaattatatgacatggtagcagaaataggcccttttatgtgttgcttctattttacctcaaattgtagatatagggtaatcaataaaatccatccatgcctttcacacactaagt

SEQ ID NO: 4937 - protein, 515 aa, Homo sapiens; identical to SEQ ID NO: 4501

SEQ ID NO: 4938 - DNA, 4406 bp, Homo sapiens
aaaaaaaaaaaaaaaaaaaaaaaaaaaagaaaaaagaaaaaaaaaaggaggaggaggaggagggtgagagagaagctgggagagcagagaaaaggggccaccggtcgcccccccgcttccccgcacgcgctctccagccgcggccgcccgcctgccgcggtcaccccggcctctgcctctgtcccccagtgatcggatcaaggcgctgagcgaggccctgcctgcggggcggccatgcggcggtgacaggagcgcgaccgacacgcacgggcccctcgccccctctcgcctcccgtccgctcgccagctcccctcagccgaggctgctccgcggcggccgcagcccgcgcgcggcccacactcgcctcccctcggcacccccggccccggagctgcctggaggcggccgcactcggggatcatggcccaagttgcaatgtccaccctccccgttgaagatgaggagtcctcggagagcaggatggtggtgacattcctcatgtcagctctcgagtccatgtgtaaagaactggccaagtccaaagccgaagtggcctgcattgcagtgtatgaaacagacgtgtttgtcgtcggaactgaaagaggacgtgcttttgtcaataccagaaaggattttcaaaaagattttgtaaaatattgtgttgaagaagaagaaaaagctgcagagatgcataaaatgaaatctacaacccaggcaaatcggatgagtgtagatgctgtagaaattgaaacactcagaaaaacagttgaggactatttctgcttttgctatgggaaagctttaggcaaatccacagtggtacctgtaccatatgagaagatgctgcgagaccagtcggctgtggtagtgcaggggcttccggaaggtgttgcctttaaacaccccgagaactatgatcttgcaaccctgaaatggattttggagaacaaagcagggatttcattcatcattaagagaccttttttagagccaaagaagcatgtaggtggtcgtgtgatggtaacagatgctgacaggtcaatactatctccaggtggaagttgtggccccatcaaagtgaaaactgaacccacagaagattctggcatttccctggaaatggcagctgtgacagtaaaggaagaatcagaagatcctgattattatcaatataacattcaaggaagccaccattcttcagagggcaatgaaggcacagaaatggaagtaccagcagaagattctactcaacatgtcccttcagaaacaagtgaggaccctgaagttgaggtgactattgaagatgatgattattctccaccgtctaagagaccaaaggccaatgagctaccgcagccaccagtcccggaacccgccaatgctgggaagcggaaagtgagggagttcaacttcgagaaatggaatgctcgcatcactgatctacgtaaacaagttgaagaattgtttgaaaggaaatatgctcaagccataaaagccaaaggtccggtgacgatcccgtaccctcttttccagtctcatgttgaagatctttatgtagaaggacttcctgaaggaattccttttagaaggccatctacttacggaattcctcgcctggagaggatattacttgcaaaggaaaggattcgttttgtgattaagaaacatgagcttctgaattcaacacgtgaagatttacagcttgataagccagcttcaggagtaaaggaagaatggtatgccagaatcactaaattaagaaagatggtggatcagcttttctgcaaaaaatttgcggaagccttggggagcactgaagccaaggctgtaccgtaccaaaaatttgaggcacacccgaatgatctgtacgtggaaggactgccagaaaacattcctttccgaagtccctcatggtatggaatcccaaggctggaaaaaatcattcaagtgggcaatcgaattaaatttgttattaaaagaccagaacttctgactcacagtaccactgaagttactcagccaagaacgaatacaccagtcaaagaagattggaatgtcagaattaccaagctacggaagcaagtggaagagatttttaatttgaaatttgcttagatttgttgacagcggtttcctggagtgctgtcttgagaacgattctgaggaggctcagcaagaaagagtgtttcagttgattgggtgtgtctgtcatggagaaggaactcaagctcttggactcaccgaggcagtaaaagtaccatatcctgtgtttgaatcaaacccggagttcttgtatgtggaaggcttgccagaggggattcccttccgaagccctacctggtttggaattccacgacttgaaaggatcgtccgcgggagtaataaaatcaagttcgttgttaaaaaacctgaactagttatttcctacttgcctcctgggatggctagtaaaataaacactaaagctttgcagtcccccaaaagaccacgaagtcctgggagtaattcaaaggttcctgaaattgaggtcaccgtggaaggccctaataacaacaatcctcaaacctcagctgttcgaaccccgacccagactaacggttctaacgttcccttcaagccacgagggagagagttttcctttgaggcctggaatgccaaaatcacggacctaaaacagaaagttgaaaatctcttcaatgagaaatgtggggaagctcttggccttaaacaagctgtgaaggtgccgttcgcgttatttgagtctttcccggaagacttttatgtggaaggcttacctgagggtgtgccattccgaagaccatcgacttttggcattccgaggctggagaagatactcagaaacaaagccaaaattaagttcatcattaaaaagcccgaaatgtttgagacggcgattaaggagagcacctcctctaagagccctcccagaaaaataaattcatcacccaatgttaatactactgcatcaggtgttgaagaccttaacatcattcaggtgacaattccagatgatgataatgaaagactctcgaaagttgaaaaagctagacagctaagagaacaagtgaatgacctctttagtcggaaatttggtgaagctattggtatgggttttcctgtgaaagttccctacaggaaaatcacaattaaccctggctgtgtggtggttgatggcatgcccccgggggtgtccttcaaagcccccagctacctggaaatcagctccatgagaaggatcttagactctgccgagtttatcaaattcacggtcattagaccatttccaggacttgtgattaataaccagctggttgatcagagtgagtcagaaggccccgtgatacaagaatcagctgaaccaagccagttggaagttccagccacagaagaaataaaagagactgatggaagctctcagatcaagcaagaaccagaccccacgtggtagacctcttccctcctaggcttaaagtatcagtggttgagaagagcttttcggacctgttactaccccaagctgtagccttgagttacggtgtttattttccaatcaagtgaagatatctcctacttctcctactggaacatctcagcttctgcagtgaagaaaaattcctgtgatagttcagttctttagtttttctatttgaaaaaaaaaaatcatttaaatgatcctttgttcacggctctccttaatgactgagtgaacagttcctatctgtatatttgactaaaccttttcctaagctatctctcatggttcctatgtttttttatcataattaaaagcaaaaccatctggatcacctaacagtcagaggtcagtatctcagcgtgtgaattatagaggaaatacagagagaacctcttccacttttacttttcgtccaaataaaatgcatggtgtaccagaagttgaagatcgggttgaggattggggctagctcgatgacactaaggccccaacatcgcgggacctgctgtggcgcggattcttaggaacgctgttctagccggccccctctccaggggtcgccgtggccggcattatttcctagttcttcttgtaaccctgaggtgccagcgcggggagtgaggaggggtcagggggctaaggatgcaacctctgacgttctgcgccttcctaggagagtcttacatgtgttgagatttcacaagcaatgcgagttgtaaaataccagctctacaagaagctaggctctgtgacggcatagttttcagtagctttatcacaatattcacaatggagaattatatgacatggtagcagaaataggcccttttatgtgttgcttctattttacctcaaattgtagatatagggtaatcaataaaatccatccatgcctttcacacactaagt

SEQ ID NO: 4939 - protein, 564 aa, Homo sapiens; identical to SEQ ID NO: 4061

SEQ ID NO: 4940 - DNA, 4981 bp, Homo sapiens
aaaaaaaaaaaaaaaaaaaaaaaaaaaagaaaaaagaaaaaaaaaaggaggaggaggaggagggtgagagagaagctgggagagcagagaaaaggggccaccggtcgcccccccgcttccccgcacgcgctctccagccgcggccgcccgcctgccgcggtcaccccggcctctgcctctgtcccccagtgatcggatcaaggcgctgagcgaggccctgcctgcggggcggccatgcggcggtgacaggagcgcgaccgacacgcacgggcccctcgccccctctcgcctcccgtccgctcgccagctcccctcagccgaggctgctccgcggcggccgcagcccgcgcgcggcccacactcgcctcccctcggcacccccggccccggagctgcctggaggcggccgcactcggtgtaaagaactggccaagtccaaagccgaagtggcctgcattgcagtgtatgaaacagacgtgtttgtcgtcggaactgaaagaggacgtgcttttgtcaataccagaaaggattttcaaaaagattttgtaaaatattgtgttgaagaagaagaaaaagctgcagagatgcataaaatgaaatctacaacccaggcaaatcggatgagtgtagatgctgtagaaattgaaacactcagaaaaacagttgaggactatttctgcttttgctatgggaaagctttaggcaaatccacagtggtacctgtaccatatgagaagatgctgcgagaccagtcggctgtggtagtgcaggggcttccggaaggtgttgcctttaaacaccccgagaactatgatcttgcaaccctgaaatggattttggagaacaaagcagggatttcattcatcattaagagaccttttttagagccaaagaagcatgtaggtggtcgtgtgatggtaacagatgctgacaggtcaatactatctccaggtggaagttgtggccccatcaaagtgaaaactgaacccacagaagattctggaagccaccattcttcagagggcaatgaaggcacagaaatggaagtaccagcagaagattctactcaacatgtcccttcagaaacaagtgaggaccctgaagttgaggtgactattgaagatgatgattattctccaccgtctaagagaccaaaggccaatgagctaccgcagccaccagtcccggaacccgccaatgctgggaagcggaaagtgagggagttcaacttcgagaaatggaatgctcgcatcactgatctacgtaaacaagttgaagaattgtttgaaaggaaatatgctcaagccataaaagccaaaggtccggtgacgatcccgtaccctcttttccagtctcatgttgaagatctttatgtagaaggacttcctgaaggaattccttttagaaggccatctacttacggaattcctcgcctggagaggatattacttgcaaaggaaaggattcgttttgtgattaagaaacatgagcttctgaattcaacacgtgaagatttacagcttgataagccagcttcaggagtaaaggaagaatggtatgccagaatcactaaattaagaaagatggtggatcagcttttctgcaaaaaatttgcggaagccttggggagcactgaagccaaggctgtaccgtaccaaaaatttgaggcacacccgaatgatctgtacgtggaaggactgccagaaaacattcctttccgaagtccctcatggtatggaatcccaaggctggaaaaaatcattcaagtgggcaatcgaattaaatttgttattaaaagaccagaacttctgactcacagtaccactgaagttactcagccaagaacgaatacaccagtcaaagaagattggaatgtcagaattaccaagctacggaagcaagtggaagagatttttaatttgaaatttgctcaagctcttggactcaccgaggcagtaaaagtaccatatcctgtgtttgaatcaaacccggagttcttgtatgtggaaggcttgccagaggggattcccttccgaagccctacctggtttggaattccacgacttgaaaggatcgtccgcgggagtaataaaatcaagttcgttgttaaaaaacctgaactagttatttcctacttgcctcctgggatggctagtaaaataaacactaaagctttgcagtcccccaaaagaccacgaagtcctgggagtaattcaaaggttcctgaaattgaggtcaccgtggaaggccctaataacaacaatcctcaaacctcagctgttcgaaccccgacccagactaacggttctaacgttcccttcaagccacgagggagagagttttcctttgaggcctggaatgccaaaatcacggacctaaaacagaaagttgaaaatctcttcaatgagaaatgtggggaagctcttggccttaaacaagctgtgaaggtgccgttcgcgttatttgagtctttcccggaagacttttatgtggaaggcttacctgagggtgtgccattccgaagaccatcgacttttggcattccgaggctggagaagatactcagaaacaaagccaaaattaagttcatcattaaaaagcccgaaatgtttgagacggcgattaaggagagcacctcctctaagagccctcccagaaaaataaattcatcacccaatgttaatactactgcatcaggtgttgaagaccttaacatcattcaggtgacaattccagatgatgataatgaaagactctcgaaagttgaaaaagctagacagctaagagaacaagtgaatgacctctttagtcggaaatttggtgaagctattggtatgggttttcctgtgaaagttccctacaggaaaatcacaattaaccctggctgtgtggtggttgatggcatgcccccgggggtgtccttcaaagcccccagctacctggaaatcagctccatgagaaggatcttagactctgccgagtttatcaaattcacggtcattagaccatttccaggacttgtgattaataaccagctggttgatcagagtgagtcagaaggccccgtgatacaagaatcagctgaaccaagccagttggaagttccagccacagaaggtaaaaggacctcttccctcctagggtaaatcagcttctgtgtcagggatgctgtgtggtgtccatctgaaccccctgcatacgcgtagctaatgtgatctccccactttcacataagatggtggccctgccttcagggaatgtgggagccaggtgggagccttcccggatatttaagctagaagattctacagggagattctccttggatcaatatatgtctctcagtcaaagatgtaaaagcacttttgccttaaaaagaatgttctgtttctaaatagagtcaacgttgtcctcctcattggaattcactatgagtcagaatcattagactgacttttttttttccatagtaatagtattttgcagagtctcacagagctgcagatcttttgttcatcttgcagagttaacaagtctgatcctgttagtccagatttcttaaatttggccaagttataataggagcagtagcttgagacccgaagtcaggaaactttgacaatggatttttttttttaatccagagacttgtactggaatttgccttaccctgtcagctcatggacttaaggtttcatcccgctttatgagtgcttctgaatccaagtcattgttacctgaatttgcaaattaagttgtgatattcgtgactgttaaattcctgtaattagattaacctctttgcttgcttgtttgttttctctcctattttagcttaaagtatcagtggttgagaagagcttttcggacctgttactaccccaagctgtgtaatatacttgtataacagaaataccttctatacaaacctttttttctacttttagatagaaatgtctactttttcagcagttctgtgaattaaagagcagagtgactgtgggtctggaatggctggtgtacttgggaatgtactatcaggattttacagcaatgctgggaaatgacagggaaaatgacaggaatgaatctcaccagattttttatgtactcagcagagccttgagttacggtgtttattttccaatcaagtgaagatatctcctacttctcctactggaacatctcagcttctgcagtgaagaaaaattcctgtgatagttcagttctttagtttttctatttgaaaaaaaaaaatcatttaaatgatcctttgttcacggctctccttaatgactgagtgaacagttcctatctgtatatttgactaaaccttttcctaagctatctctcatggttcctatgtttttttatcataattaaaagcaaaaccatctggatcacctaacagtcagaggtcagtatctcagcgtgtgaattatagaggaaatacagagagaacctcttccacttttacttttcgtccaaataaaatgcatggtgtaccagaagttgaagatcgggttgaggattggggctagctcgatgacactaaggccccaacatcgcgggacctgctgtggcgcggattcttaggaacgctgttctagccggccccctctccaggggtcgccgtggccggcattatttcctagttcttcttgtaaccctgaggtgccagcgcggggagtgaggaggggtcagggggctaaggatgcaacctctgacgttctgcgccttcctaggagagtcttacatgtgttgagatttcacaagcaatgcgagttgtaaaataccagctctacaagaagctaggctctgtgacggcatagttttcagtagctttatcacaatattcacaatggagaattatatgacatggtagcagaaataggcccttttatgtgttgcttctattttacctcaaattgtagatatagggtaatcaataaaatccatccatgcctttcacacactaagt

SEQ ID NO: 4941 - protein, 853 aa, Homo sapiens
MHKMKSTTQANRMSVDAVEIETLRKTVEDYFCFCYGKALGKSTVVPVPYEKMLRDQSAVVVQGLPEGVAFKHPENYDLATLKWILENKAGISFIIKRPFLEPKKHVGGRVMVTDADRSILSPGGSCGPIKVKTEPTEDSGSHHSSEGNEGTEMEVPAEDSTQHVPSETSEDPEVEVTIEDDDYSPPSKRPKANELPQPPVPEPANAGKRKVREFNFEKWNARITDLRKQVEELFERKYAQAIKAKGPVTIPYPLFQSHVEDLYVEGLPEGIPFRRPSTYGIPRLERILLAKERIRFVIKKHELLNSTREDLQLDKPASGVKEEWYARITKLRKMVDQLFCKKFAEALGSTEAKAVPYQKFEAHPNDLYVEGLPENIPFRSPSWYGIPRLEKIIQVGNRIKFVIKRPELLTHSTTEVTQPRTNTPVKEDWNVRITKLRKQVEEIFNLKFAQALGLTEAVKVPYPVFESNPEFLYVEGLPEGIPFRSPTWFGIPRLERIVRGSNKIKFVVKKPELVISYLPPGMASKINTKALQSPKRPRSPGSNSKVPEIEVTVEGPNNNNPQTSAVRTPTQTNGSNVPFKPRGREFSFEAWNAKITDLKQKVENLFNEKCGEALGLKQAVKVPFALFESFPEDFYVEGLPEGVPFRRPSTFGIPRLEKILRNKAKIKFIIKKPEMFETAIKESTSSKSPPRKINSSPNVNTTASGVEDLNIIQVTIPDDDNERLSKVEKARQLREQVNDLFSRKFGEAIGMGFPVKVPYRKITINPGCVVVDGMPPGVSFKAPSYLEISSMRRILDSAEFIKFTVIRPFPGLVINNQLVDQSESEGPVIQESAEPSQLEVPATEGKRTSSLLG

SEQ ID NO: 4942 - DNA, 7912 bp, Homo sapiens
aaaaaaaaaaaaaaaaaaaaaaaaaaaagaaaaaagaaaaaaaaaaggaggaggaggaggagggtgagagagaagctgggagagcagagaaaaggggccaccggtcgcccccccgcttccccgcacgcgctctccagccgcggccgcccgcctgccgcggtcaccccggcctctgcctctgtcccccagtgatcggatcaaggcgctgagcgaggccctgcctgcggggcggccatgcggcggtgacaggagcgcgaccgacacgcacgggcccctcgccccctctcgcctcccgtccgctcgccagctcccctcagccgaggctgctccgcggcggccgcagcccgcgcgcggcccacactcgcctcccctcggcacccccggccccggagctgcctggaggcggccgcactcggggatcatggcccaagttgcaatgtccaccctccccgttgaagatgaggagtcctcggagagcaggatggtggtgacattcctcatgtcagctctcgagtccatgtgtaaagaactggccaagtccaaagccgaagtggcctgcattgcagtgtatgaaacagacgtgtttgtcgtcggaactgaaagaggacgtgcttttgtcaataccagaaaggattttcaaaaagattttgtaaaatattgtgttgaagaagaagaaaaagctgcagagatgcataaaatgaaatctacaacccaggcaaatcggatgagtgtagatgctgtagaaattgaaacactcagaaaaacagttgaggactatttctgcttttgctatgggaaagctttaggcaaatccacagtggtacctgtaccatatgagaagatgctgcgagaccagtcggctgtggtagtgcaggggcttccggaaggtgttgcctttaaacaccccgagaactatgatcttgcaaccctgaaatggattttggagaacaaagcagggatttcattcatcattaagagaccttttttagagccaaagaagcatgtaggtggtcgtgtgatggtaacagatgctgacaggtcaatactatctccaggtggaagttgtggccccatcaaagtgaaaactgaacccacagaagattctggcatttccctggaaatggcagctgtgacagtaaaggaagaatcagaagatcctgattattatcaatataacattcaaggaagccaccattcttcagagggcaatgaaggcacagaaatggaagtaccagcagaagatgatgattattctccaccgtctaagagaccaaaggccaatgagctaccgcagccaccagtcccggaacccgccaatgctgggaagcggaaagtgagggagttcaacttcgagaaatggaatgctcgcatcactgatctacgtaaacaagttgaagaattgtttgaaaggaaatatgctcaagccataaaagccaaaggtccggtgacgatcccgtaccctcttttccagtctcatgttgaagatctttatgtagaaggacttcctgaaggaattccttttagaaggccatctacttacggaattcctcgcctggagaggatattacttgcaaaggaaaggattcgttttgtgattaagaaacatgagcttctgaattcaacacgtgaagatttacagcttgataagccagcttcaggagtaaaggaagaatggtatgccagaatcactaaattaagaaagatggtggatcagcttttctgcaaaaaatttgcggaagccttggggagcactgaagccaaggctgtaccgtaccaaaaatttgaggcacacccgaatgatctgtacgtggaaggactgccagaaaacattcctttccgaagtccctcatggtatggaatcccaaggctggaaaaaatcattcaagtgggcaatcgaattaaatttgttattaaaagaccagaacttctgactcacagtaccactgaagttactcagccaagaacgaatacaccagtcaaagaagattggaatgtcagaattaccaagctacggaagcaagtggaagagatttttaatttgaaatttgctcaagctcttggactcaccgaggcagtaaaagtaccatatcctgtgtttgaatcaaacccggagttcttgtatgtggaaggcttgccagaggggattcccttccgaagccctacctggtttggaattccacgacttgaaaggatcgtccgcgggagtaataaaatcaagttcgttgttaaaaaacctgaactagttatttcctacttgcctcctgggatggctagtaaaataaacactaaagctttgcagtcccccaaaagaccacgaagtcctgggagtaattcaaaggttcctgaaattgaggtcaccgtggaaggccctaataacaacaatcctcaaacctcagctgttcgaaccccgacccagactaacggttctaacgttcccttcaagccacgagggagagagttttcctttgaggcctggaatgccaaaatcacggacctaaaacagaaagttgaaaatctcttcaatgagaaatgtggggaagctcttggccttaaacaagctgtgaaggtgccgttcgcgttatttgagtctttcccggaagacttttatgtggaaggcttacctgagggtgtgccattccgaagaccatcgacttttggcattccgaggctggagaagatactcagaaacaaagccaaaattaagttcatcattaaaaagcccgaaatgtttgagacggcgattaaggagagcacctcctctaagagccctcccagaaaaataaattcatcacccaatgttaatactactgcatcaggtgttgaagaccttaacatcattcaggtgacaattccagatgatgataatgaaagactctcgaaagttgaaaaagctagacagctaagagaacaagtgaatgacctctttagtcggaaatttggtgaagctattggtatgggttttcctgtgaaagttccctacaggaaaatcacaattaaccctggctgtgtggtggttgatggcatgcccccgggggtgtccttcaaagcccccagctacctggaaatcagctccatgagaaggatcttagactctgccgagtttatcaaattcacggtcattaggtaagtgagagtttcctgcttagtcacaggagcgaatctggagctcatgaggctgactcttctaaaatgcagccacaggtagtcatcgaatccggcttcctatgctgtgcaatcaacaaatcaaaataacttgtgtcatcattagaatgtcagatgtgcttctacgaactaagctgactcttttaattctttggcaaagggttggcaaactaggactgtttgccaaattcaggctgcctcctatttttagagtcttcctgaaacacagctacacccgtattatccatggctgctttcctgtcacagtgagtaagtagctgggactgagaaggcatggcctccaaagtctaaaatatttactctctagcactttgtagaaaaaccttagctaggcacagtggctaacgcctgtaatcccagcattttgggaggccaaggcaggcagatcacctgaggtcaggagttccagaccagcctggccaacatggtgaaatcccatctctacaaaaataaaacagttagctgggcatgatggcgggtgcctgtaatcccagctactcgggaggctgaggcaggatagtcgcttgaacccaggaggtggaggttgcaatgagccaagatcatgccactgcactccagcctggacgacagagtgagactccatcacaagaaaaaaagaactttgtcaacctctgtcttagggcgccttgtcacaggcttcgggtcagacggattcaaccttgcatcagccatttgttagccaggtcactctgttctttgtctgtaaatgagattgatcgttgttcccactgagagtgtcagctccttcccgtagagcaggcatgatgattgtactcacctctgacaccattgtgagtgccacattccttcccacgtccttgtcactgtaagagatgcccacctgagcaccaaccccaggttatcttcccctttgtcttccagccccccagaaacagctacgactcaacctacccaatcatttcatcatcagattgccactgtctctagttcaggtctcttgggactggcactcagaaatctcataataaatcctcttgaggcttctcatacactcgtcttcttccaatcttctttccctcaaaatctcatattttggttccacttcacccaccgtcattctccatatcactcccaggagttaggcaaaaagccccttccgttcttccgtatgttaaacttagaatcactctgttccctgctctgcgtttctattttttgtttttcctccatttactagtagcttaacactttctaacagtgttcttattattgatacgtatctatctcttccataagcttataaggtcacggataatacttctcattgtagtacgtaaatgacgtgggctagatatgagttgaataaacagttatacctgtaaattcttacagagtgaaaataaattgttatactttacaatttgtttctctctttagaccatttccaggacttgtgattaataaccgtgagtattttgtgaagtgttttgtttttgttttttcctggggtctgacgtgtgtgcgtgtgagtgtgtatacatgcttaacgtatatcacgttacttcacctatgtcagtaaccaggccaaatacttgttttagccctcagtaaaaacaccaggcacttcctagttgtaaaattattcaagcttcttaacttcctatcctcgatgcacttaatcataaaatggtaataatagcaccgattttgggggagtcgttccagtagatggaaagcatctggaacaggtgtcagcaagctcctgccgacgtgtatgcataaagttttattgaaaccaccatcgtgtccatttgtttatggcagaactgagagatggcagcagcaagtgtgtgcctgcaaaacctaaaatatttactaattggctctgcaagaaaagagtttgcatccccctaacctagaacagtgtctagcctctagtatgtgtttagcctacagtatgtgctcagcgaatacaatctatatttattactgcttttatgactgttataattactgtgcttggatttcgttacaaagtaagtcacaatgtgcctgcttctgttagtatttcagcacagtgcctggcacacatggggctctcaaatattgctgagcgagtgaacaaatgtcctttcaattccttaacgttgatgtcattttcaatagtattttgagccaaacttaattttgcgagtgtgttttgttttcttaactttattattaaaaatgtataaaagtgaggccaggcgtggtggctcacgcctgtaatcccagcagtttgggaggctgaggcaggcggatcagttgaggttgggagttggagaccagcccgtccaacatggtgaaagcctgtctctactaaaaatacaaaaatcagctgggtgtggtggcgcgtgcctgtaatcccagctactcaggaggctgaggcaggagagttgcttgaatcctagaggtggaggttgcagtgagctgagatcgtgccattgcactccagcctgggcaacaagagcaaaactctgtcccaataaataaataaataaaatgttctcttttgttcctgttcttgtgcggtagtgtggtatagagttttatggtaattactgtgaattagtgattctgagggacatatcagaactctgaggtttgtttccttctcatcttgagggaaacagcaaatgtatgttaaaatgcttttccaagggaacaacacatccttacattatttaaaccaatctgcttcattttcagagctggttgatcagagtgagtcagaaggccccgtgatacaagaatcagctgaaccaagccagttggaagttccagccacagaagaaataaaagagactgatggaagctctcagatcaagcaagaaccagaccccacgtggtagacctcttccctcctagggtaaatcagcttctgtgtcagggatgctgtgtggtgtccatctgaaccccctgcatacgcgtagctaatgtgatctccccactttcacataagatggtggccctgccttcagggaatgtgggagccaggtgggagccttcccggatatttaagctagaagattctacagggagattctccttggatcaatatatgtctctcagtcaaagatgtaaaagcacttttgccttaaaaagaatgttctgtttctaaatagagtcaacgttgtcctcctcattggaattcactatgagtcagaatcattagactgacttttttttttccatagtaatagtattttgcagagtctcacagagctgcagatcttttgttcatcttgcagagttaacaagtctgatcctgttagtccagatttcttaaatttggccaagttataataggagcagtagcttgagacccgaagtcaggaaactttgacaatggatttttttttttaatccagagacttgtactggaatttgccttaccctgtcagctcatggacttaaggtttcatcccgctttatgagtgcttctgaatccaagtcattgttacctgaatttgcaaattaagttgtgatattcgtgactgttaaattcctgtaattagattaacctctttgcttgcttgtttgttttctctcctattttagcttaaagtatcagtggttgagaagagcttttcggacctgttactaccccaagctgtgtaatatacttgtataacagaaataccttctatacaaacctttttttctacttttagatagaaatgtctactttttcagcagttctgtgaattaaagagcagagtgactgtgggtctggaatggctggtgtacttgggaatgtactatcaggattttacagcaatgctgggaaatgacagggaaaatgacaggaatgaatctcaccagattttttatgtactcagcagagccttgagttacggtgtttattttccaatcaagtgaagatatctcctacttctcctactggaacatctcagcttctgcagtgaagaaaaattcctgtgatagttcagttctttagtttttctatttgaaaaaaaaaaatcatttaaatgatcctttgttcacggctctccttaatgactgagtgaacagttcctatctgtatatttgactaaaccttttcctaagctatctctcatggttcctatgtttttttatcataattaaaagcaaaaccatctggatcacctaacagtcagaggtcagtatctcagcgtgtgaattatagaggaaatacagagagaacctcttccacttttacttttcgtccaaataaaatgcatggtgtaccagaagttgaagatcgggttgaggattggggctagctcgatgacactaaggccccaacatcgcgggacctgctgtggcgcggattcttaggaacgctgttctagccggccccctctccaggggtcgccgtggccggcattatttcctagttcttcttgtaaccctgaggtgccagcgcggggagtgaggaggggtcagggggctaaggatgcaacctctgacgttctgcgccttcctaggagagtcttacatgtgttgagatttcacaagcaatgcgagttgtaaaataccagctctacaagaagctaggctctgtgacggcatagttttcagtagctttatcacaatattcacaatggagaattatatgacatggtagcagaaataggcccttttatgtgttgcttctattttacctcaaattgtagatatagggtaatcaataaaatccatccatgcctttcacacactaagt

SEQ ID NO: 4943 - protein, 901 aa, Homo sapiens [sequence omitted]

SEQ ID NO: 4944 - DNA, 5062 bp, Homo sapiens
aaaaaaaaaaaaaaaaaaaaaaaaaaaagaaaaaagaaaaaaaaaaggaggaggaggaggagggtgagagagaagctgggagagcagagaaaaggggccaccggtcgcccccccgcttccccgcacgcgctctccagccgcggccgcccgcctgccgcggtcaccccggcctctgcctctgtcccccagtgatcggatcaaggcgctgagcgaggccctgcctgcggggcggccatgcggcggtgacaggagcgcgaccgacacgcacgggcccctcgccccctctcgcctcccgtccgctcgccagctcccctcagccgaggctgctccgcggcggccgcagcccgcgcgcggcccacactcgcctccccgttgaagatgaggagtcctcggagagcaggatggtggtgacattcctcatgtcagctctcgagtccatgtgtaaagaactggccaagtccaaagccgaagtggcctgcattgcagtgtatgaaacagacgtgtttgtcgtcggaactgaaagaggacgtgcttttgtcaataccagaaaggattttcaaaaagattttgtaaaatattgtgttgaagaagaagaaaaagctgcagagatgcataaaatgaaatctacaacccaggcaaatcggatgagtgtagatgctgtagaaattgaaacactcagaaaaacagttgaggactatttctgcttttgctatgggaaagctttaggcaaatccacagtggtacctgtaccatatgagaagatgctgcgagaccagtcggctgtggtagtgcaggggcttccggaaggtgttgcctttaaacaccccgagaactatgatcttgcaaccctgaaatggattttggagaacaaagcagggatttcattcatcattaagagaccttttttagagccaaagaagcatgtaggtggtcgtgtgatggtaacagatgctgacaggtcaatactatctccaggtggaagttgtggccccatcaaagtgaaaactgaacccacagaagattctggcatttccctggaaatggcagctgtgacagtaaaggaagaatcagaagatcctgattattatcaatataacattcaaggaagccaccattcttcagagggcaatgaaggcacagaaatggaagtaccagcagaagattctactcaacatgtcccttcagaaacaagtgaggaccctgaagttgaggtgactattgaagatgatgattattctccaccgtctaagagaccaaaggccaatgagctaccgcagccaccagtcccggaacccgccaatgctgggaagcggaaagtgagggagttcaacttcgagaaatggaatgctcgcatcactgatctacgtaaacaagttgaagaattgtttgaaaggaaatatgctcaagccataaaagccaaaggtccggtgacgatcccgtaccctcttttccagtctcatgttgaagatctttatgtagaaggacttcctgaaggaattccttttagaaggccatctacttacggaattcctcgcctggagaggatattacttgcaaaggaaaggattcgttttgtgattaagaaacatgagcttctgaattcaacacgtgaagatttacagcttgataagccagcttcaggagtaaaggaagaatggtatgccagaatcactaaattaagaaagatggtggatcagcttttctgcaaaaaatttgcggaagccttggggagcactgaagccaaggctgtaccgtaccaaaaatttgaggcacacccgaatgatctgtacgtggaaggactgccagaaaacattcctttccgaagtccctcatggtatggaatcccaaggctggaaaaaatcattcaagtgggcaatcgaattaaatttgttattaaaagaccagaacttctgactcacagtaccactgaagttactcagccaagaacgaatacaccagctcaagctcttggactcaccgaggcagtaaaagtaccatatcctgtgtttgaatcaaacccggagttcttgtatgtggaaggcttgccagaggggattcccttccgaagccctacctggtttggaattccacgacttgaaaggatcgtccgcgggagtaataaaatcaagttcgttgttaaaaaacctgaactagttatttcctacttgcctcctgggatggctagtaaaataaacactaaagctttgcagtcccccaaaagaccacgaagtcctgggagtaattcaaaggttcctgaaattgaggtcaccgtggaaggccctaataacaacaatcctcaaacctcagctgttcgaaccccgacccagactaacggttctaacgttcccttcaagccacgagggagagagttttcctttgaggcctggaatgccaaaatcacggacctaaaacagaaagttgaaaatctcttcaatgagaaatgtggggaagctcttggccttaaacaagctgtgaaggtgccgttcgcgttatttgagtctttcccggaagacttttatgtggaaggcttacctgagggtgtgccattccgaagaccatcgacttttggcattccgaggctggagaagatactcagaaacaaagccaaaattaagttcatcattaaaaagcccgaaatgtttgagacggcgattaaggagagcacctcctctaagagccctcccagaaaaataaattcatcacccaatgttaatactactgcatcaggtgttgaagaccttaacatcattcaggtgacaattccagatgatgataatgaaagactctcgaaagttgaaaaagctagacagctaagagaacaagtgaatgacctctttagtcggaaatttggtgaagctattggtatgggttttcctgtgaaagttccctacaggaaaatcacaattaaccctggctgtgtggtggttgatggcatgcccccgggggtgtccttcaaagcccccagctacctggaaatcagctccatgagaaggatcttagactctgccgagtttatcaaattcacggtcattagaccatttccaggacttgtgattaataaccagctggttgatcagagtgagtcagaaggccccgtgatacaagaatcagctgaaccaagccagttggaagttccagccacagaagaaataaaagagactgatggaagctctcagatcaagcaagaaccagaccccacgtggtagacctcttccctcctagggtaaatcagcttctgtgtcagggatgctgtgtggtgtccatctgaaccccctgcatacgcgtagctaatgtgatctccccactttcacataagatggtggccctgccttcagggaatgtgggagccaggtgggagccttcccggatatttaagctagaagattctacagggagattctccttggatcaatatatgtctctcagtcaaagatgtaaaagcacttttgccttaaaaagaatgttctgtttctaaatagagtcaacgttgtcctcctcattggaattcactatgagtcagaatcattagactgacttttttttttccatagtaatagtattttgcagagtctcacagagctgcagatcttttgttcatcttgcagagttaacaagtctgatcctgttagtccagatttcttaaatttggccaagttataataggagcagtagcttgagacccgaagtcaggaaactttgacaatggatttttttttttaatccagagacttgtactggaatttgccttaccctgtcagctcatggacttaaggtttcatcccgctttatgagtgcttctgaatccaagtcattgttacctgaatttgcaaattaagttgtgatattcgtgactgttaaattcctgtaattagattaacctctttgcttgcttgtttgttttctctcctattttagcttaaagtatcagtggttgagaagagcttttcggacctgttactaccccaagctgtgtaatatacttgtataacagaaataccttctatacaaacctttttttctacttttagatagaaatgtctactttttcagcagttctgtgaattaaagagcagagtgactgtgggtctggaatggctggtgtacttgggaatgtactatcaggattttacagcaatgctgggaaatgacagggaaaatgacaggaatgaatctcaccagattttttatgtactcagcagagccttgagttacggtgtttattttccaatcaagtgaagatatctcctacttctcctactggaacatctcagcttctgcagtgaagaaaaattcctgtgatagttcagttctttagtttttctatttgaaaaaaaaaaatcatttaaatgatcctttgttcacggctctccttaatgactgagtgaacagttcctatctgtatatttgactaaaccttttcctaagctatctctcatggttcctatgtttttttatcataattaaaagcaaaaccatctggatcacctaacagtcagaggtcagtatctcagcgtgtgaattatagaggaaatacagagagaacctcttccacttttacttttcgtccaaataaaatgcatggtgtaccagaagttgaagatcgggttgaggattggggctagctcgatgacactaaggccccaacatcgcgggacctgctgtggcgcggattcttaggaacgctgttctagccggccccctctccaggggtcgccgtggccggcattatttcctagttcttcttgtaaccctgaggtgccagcgcggggagtgaggaggggtcagggggctaaggatgcaacctctgacgttctgcgccttcctaggagagtcttacatgtgttgagatttcacaagcaatgcgagttgtaaaataccagctctacaagaagctaggctctgtgacggcatagttttcagtagctttatcacaatattcacaatggagaattatatgacatggtagcagaaataggcccttttatgtgttgcttctattttacctcaaattgtagatatagggtaatcaataaaatccatccatgcctttcacacactaagt

SEQ ID NO: 4945 - protein, 934 aa, Homo sapiens; identical to SEQ ID NO: 4085

SEQ ID NO: 4946 - DNA, 4168 bp, Homo sapiens
aaaaaaaaaaaaaaaaaaaaaaaaaaaagaaaaaagaaaaaaaaaaggaggaggaggaggagggtgagagagaagctgggagagcagagaaaaggggccaccggtcgcccccccgcttccccgcacgcgctctccagccgcggccgcccgcctgccgcggtcaccccggcctctgcctctgtcccccagtgatcggatcaaggcgctgagcgaggccctgcctgcggggcggccatgcggcggtgacaggagcgcgaccgacacgcacgggcccctcgccccctctcgcctcccgtccgctcgccagctcccctcagccgaggctgctccgcggcggccgcagcccgcgcgcggcccacactcgcctcccctcggcacccccggccccggagctgcctggaggcggccgcactcggtgtaaagaactggccaagtccaaagccgaagtggcctgcattgcagtgtatgaaacagacgtgtttgtcgtcggaactgaaagaggacgtgcttttgtcaataccagaaaggattttcaaaaagattttgtaaaatattgtgttgaagaagaagaaaaagctgcagagatgcataaaatgaaatctacaacccaggcaaatcggatgagtgtagatgctgtagaaattgaaacactcagaaaaacagttgaggactatttctgcttttgctatgggaaagctttaggcaaatccacagtggtacctgtaccatatgagaagatgctgcgagaccagtcggctgtggtagtgcaggggcttccggaaggtgttgcctttaaacaccccgagaactatgatcttgcaaccctgaaatggattttggagaacaaagcagggatttcattcatcattaagagaccttttttagagccaaagaagcatgtaggtggtcgtgtgatggtaacagatgctgacaggtcaatactatctccaggtggaagttgtggccccatcaaagtgaaaactgaacccacagaagattctggaagccaccattcttcagagggcaatgaaggcacagaaatggaagtaccagcagaagattctactcaacatgtcccttcagaaacaagtgaggaccctgaagttgaggtgactattgaagatgatgattattctccaccgtctaagagaccaaaggccaatgagctaccgcagccaccagtcccggaacccgccaatgctgggaagcggaaagtgagggagttcaacttcgagaaatggaatgctcgcatcactgatctacgtaaacaagttgaagaattgtttgaaaggaaatatgctcaagccataaaagccaaaggtccggtgacgatcccgtaccctcttttccagtctcatgttgaagatctttatgtagaaggacttcctgaaggaattccttttagaaggccatctacttacggaattcctcgcctggagaggatattacttgcaaaggaaaggattcgttttgtgattaagaaacatgagcttctgaattcaacacgtgaagatttacagcttgataagccagcttcaggagtaaaggaagaatggtatgccagaatcactaaattaagaaagatggtggatcagcttttctgcaaaaaatttgcggaagccttggggagcactgaagccaaggctgtaccgtaccaaaaatttgaggcacacccgaatgatctgtacgtggaaggactgccagaaaacattcctttccgaagtccctcatggtatggaatcccaaggctggaaaaaatcattcaagtgggcaatcgaattaaatttgttattaaaagaccagaacttctgactcacagtaccactgaagttactcagccaagaacgaatacaccagtcaaagaagattggaatgtcagaattaccaagctacggaagcaagtggaagagatttttaatttgaaatttgcttagatttgttgacagcggtttcctggagtgctgtcttgagaacgattctgaggaggctcagcaagaaagagtgtttcagttgattgggtgtgtctgtcatggagaaggaactcaagctcttggactcaccgaggcagtaaaagtaccatatcctgtgtttgaatcaaacccggagttcttgtatgtggaaggcttgccagaggggattcccttccgaagccctacctggtttggaattccacgacttgaaaggatcgtccgcgggagtaataaaatcaagttcgttgttaaaaaacctgaactagttatttcctacttgcctcctgggatggctagtaaaataaacactaaagctttgcagtcccccaaaagaccacgaagtcctgggagtaattcaaaggttcctgaaattgaggtcaccgtggaaggccctaataacaacaatcctcaaacctcagctgttcgaaccccgacccagactaacggttctaacgttcccttcaagccacgagggagagagttttcctttgaggcctggaatgccaaaatcacggacctaaaacagaaagttgaaaatctcttcaatgagaaatgtggggaagctcttggccttaaacaagctgtgaaggtgccgttcgcgttatttgagtctttcccggaagacttttatgtggaaggcttacctgagggtgtgccattccgaagaccatcgacttttggcattccgaggctggagaagatactcagaaacaaagccaaaattaagttcatcattaaaaagcccgaaatgtttgagacggcgattaaggagagcacctcctctaagagccctcccagaaaaataaattcatcacccaatgttaatactactgcatcaggtgttgaagaccttaacatcattcaggtgacaattccagatgatgataatgaaagactctcgaaagttgaaaaagctagacagctaagagaacaagtgaatgacctctttagtcggaaatttggtgaagctattggtatgggttttcctgtgaaagttccctacaggaaaatcacaattaaccctggctgtgtggtggttgatggcatgcccccgggggtgtccttcaaagcccccagctacctggaaatcagctccatgagaaggatcttagactctgccgagtttatcaaattcacggtcattagaccatttccaggacttgtgattaataaccagctggttgatcagagtgagtcagaaggccccgtgatacaagaatcagctgaaccaagccagttggaagttccagccacagaagaaataaaagagactgatggaagctctcagatcaagcaagaaccagaccccacgtggtagacctcttccctcctaggagccttgagttacggtgtttattttccaatcaagtgaagatatctcctacttctcctactggaacatctcagcttctgcagtgaagaaaaattcctgtgatagttcagttctttagtttttctatttgaaaaaaaaaaatcatttaaatgatcctttgttcacggctctccttaatgactgagtgaacagttcctatctgtatatttgactaaaccttttcctaagctatctctcatggttcctatgtttttttatcataattaaaagcaaaaccatctggatcacctaacagtcagaggtcagtatctcagcgtgtgaattatagaggaaatacagagagaacctcttccacttttacttttcgtccaaataaaatgcatggtgtaccagaagttgaagatcgggttgaggattggggctagctcgatgacactaaggccccaacatcgcgggacctgctgtggcgcggattcttaggaacgctgttctagccggccccctctccaggggtcgccgtggccggcattatttcctagttcttcttgtaaccctgaggtgccagcgcggggagtgaggaggggtcagggggctaaggatgcaacctctgacgttctgcgccttcctaggagagtcttacatgtgttgagatttcacaagcaatgcgagttgtaaaataccagctctacaagaagctaggctctgtgacggcatagttttcagtagctttatcacaatattcacaatggagaattatatgacatggtagcagaaataggcccttttatgtgttgcttctattttacctcaaattgtagatatagggtaatcaataaaatccatccatgcctttcacacactaagt

SEQ ID NO: 4947 - protein, 449 aa, Homo sapiens; identical to SEQ ID NO: 4147

SEQ ID NO: 4948 - DNA, 7125 bp, Homo sapiens
aaaaaaaaaaaaaaaaaaaaaaaaaaaagaaaaaagaaaaaaaaaaggaggaggaggaggagggtgagagagaagctgggagagcagagaaaaggggccaccggtcgcccccccgcttccccgcacgcgctctccagccgcggccgcccgcctgccgcggtcaccccggcctctgcctctgtcccccagtgatcggatcaaggcgctgagcgaggccctgcctgcggggcggccatgcggcggtgacaggagcgcgaccgacacgcacgggcccctcgccccctctcgcctcccgtccgctcgccagctcccctcagccgaggctgctccgcggcggccgcagcccgcgcgcggcccacactcgcctccccgttgaagatgaggagtcctcggagagcaggatggtggtgacattcctcatgtcagctctcgagtccatgtgtaaagaactggccaagtccaaagccgaagtggcctgcattgcagtgtatgaaacagacgtgtttgtcgtcggaactgaaagaggacgtgcttttgtcaataccagaaaggattttcaaaaagattttgtaaaatattgtgttgaagaagaagaaaaagctgcagagatgcataaaatgaaatctacaacccaggcaaatcggatgagtgtagatgctgtagaaattgaaacactcagaaaaacagttgaggactatttctgcttttgctatgggaaagctttaggcaaatccacagtggtacctgtaccatatgagaagatgctgcgagaccagtcggctgtggtagtgcaggggcttccggaaggtgttgcctttaaacaccccgagaactatgatcttgcaaccctgaaatggattttggagaacaaagcagggatttcattcatcattaagagaccttttttagagccaaagaagcatgtaggtggtcgtgtgatggtaacagatgctgacaggtcaatactatctccaggtggaagttgtggccccatcaaagtgaaaactgaacccacagaagattctggaagccaccattcttcagagggcaatgaaggcacagaaatggaagtaccagcagaagattctactcaacatgtcccttcagaaacaagtgaggaccctgaagttgaggtgactattgaagatgatgattattctccaccgtctaagagaccaaaggccaatgagctaccgcagccaccagtcccggaacccgccaatgctgggaagcggaaagtgagggagttcaacttcgagaaatggaatgctcgcatcactgatctacgtaaacaagttgaagaattgtttgaaaggaaatatgctcaagccataaaagccaaaggtccggtgacgatcccgtaccctcttttccagtctcatgttgaagatctttatgtagaaggacttcctgaaggaattccttttagaaggccatctacttacggaattcctcgcctggagaggatattacttgcaaaggaaaggattcgttttgtgattaagaaacatgagcttctgaattcaacacgtgaagatttacagcttgataagccagcttcaggagtaaaggaagaatggtatgccagaatcactaaattaagaaagatggtggatcagcttttctgcaaaaaatttgcggaagccttggggagcactgaagccaaggctgtaccgtaccaaaaatttgaggcacacccgaatgatctgtacgtggaaggactgccagaaaacattcctttccgaagtccctcatggtatggaatcccaaggctggaaaaaatcattcaagtgggcaatcgaattaaatttgttattaaaagaccagaacttctgactcacagtaccactgaagttactcagccaagaacgaatacaccagtcaaagaagattggaatgtcagaattaccaagctacggaagcaagtggaagagatttttaatttgaaatttgctcaagctcttggactcaccgaggcagtaaaagtaccatatcctgtgtttgaatcaaacccggagttcttgtatgtggaaggcttgccagaggggattcccttccgaagccctacctggtttggaattccacgacttgaaaggatcgtccgcgggagtaataaaatcaagttcgttgttaaaaaacctgaactagttatttcctacttgcctcctgggatggctagtaaaataaacactaaagctttgcagtcccccaaaagaccacgaagtcctgggagtaattcaaaggttcctgaaattgaggtcaccgtggaaggccctaataacaacaatcctcaaacctcagctgttcgaaccccgacccagactaacggttctaacgttcccttcaagccacgagggagagagttttcctttgaggcctggaatgccaaaatcacggacctaaaacagaaagttgaaaatctcttcaatgagaaatgtggggaagctcttggccttaaacaagctgtgaaggtgccgttcgcgttatttgagtctttcccggaagacttttatgtggaaggcttacctgagggtgtgccattccgaagaccatcgacttttggcattccgaggctggagaagatactcagaaacaaagccaaaattaagttcatcattaaaaagcccgaaatgtttgagacggcgattaaggagagcacctcctctaagagccctcccagaaaaataaattcatcacccaatgttaatactactgcatcaggtgttgaagaccttaacatcattcaggtgacaattccagatgatgataatgaaagactctcgaaagttgaaaaagctagacagctaagagaacaagtgaatgacctctttagtcggaaatttggtgaagctattggtatgggttttcctgtgaaagttccctacaggaaaatcacaattaaccctggctgtgtggtggttgatggcatgcccccgggggtgtccttcaaagcccccagctacctggaaatcagctccatgagaaggatcttagactctgccgagtttatcaaattcacggtcattaggtaagtgagagtttcctgcttagtcacaggagcgaatctggagctcatgaggctgactcttctaaaatgcagccacaggtagtcatcgaatccggcttcctatgctgtgcaatcaacaaatcaaaataacttgtgtcatcattagaatgtcagatgtgcttctacgaactaagctgactcttttaattctttggcaaagggttggcaaactaggactgtttgccaaattcaggctgcctcctatttttagagtcttcctgaaacacagctacacccgtattatccatggctgctttcctgtcacagtgagtaagtagctgggactgagaaggcatggcctccaaagtctaaaatatttactctctagcactttgtagaaaaaccttagctaggcacagtggctaacgcctgtaatcccagcattttgggaggccaaggcaggcagatcacctgaggtcaggagttccagaccagcctggccaacatggtgaaatcccatctctacaaaaataaaacagttagctgggcatgatggcgggtgcctgtaatcccagctactcgggaggctgaggcaggatagtcgcttgaacccaggaggtggaggttgcaatgagccaagatcatgccactgcactccagcctggacgacagagtgagactccatcacaagaaaaaaagaactttgtcaacctctgtcttagggcgccttgtcacaggcttcgggtcagacggattcaaccttgcatcagccatttgttagccaggtcactctgttctttgtctgtaaatgagattgatcgttgttcccactgagagtgtcagctccttcccgtagagcaggcatgatgattgtactcacctctgacaccattgtgagtgccacattccttcccacgtccttgtcactgtaagagatgcccacctgagcaccaaccccaggttatcttcccctttgtcttccagccccccagaaacagctacgactcaacctacccaatcatttcatcatcagattgccactgtctctagttcaggtctcttgggactggcactcagaaatctcataataaatcctcttgaggcttctcatacactcgtcttcttccaatcttctttccctcaaaatctcatattttggttccacttcacccaccgtcattctccatatcactcccaggagttaggcaaaaagccccttccgttcttccgtatgttaaacttagaatcactctgttccctgctctgcgtttctattttttgtttttcctccatttactagtagcttaacactttctaacagtgttcttattattgatacgtatctatctcttccataagcttataaggtcacggataatacttctcattgtagtacgtaaatgacgtgggctagatatgagttgaataaacagttatacctgtaaattcttacagagtgaaaataaattgttatactttacaatttgtttctctctttagaccatttccaggacttgtgattaataaccgtgagtattttgtgaagtgttttgtttttgttttttcctggggtctgacgtgtgtgcgtgtgagtgtgtatacatgcttaacgtatatcacgttacttcacctatgtcagtaaccaggccaaatacttgttttagccctcagtaaaaacaccaggcacttcctagttgtaaaattattcaagcttcttaacttcctatcctcgatgcacttaatcataaaatggtaataatagcaccgattttgggggagtcgttccagtagatggaaagcatctggaacaggtgtcagcaagctcctgccgacgtgtatgcataaagttttattgaaaccaccatcgtgtccatttgtttatggcagaactgagagatggcagcagcaagtgtgtgcctgcaaaacctaaaatatttactaattggctctgcaagaaaagagtttgcatccccctaacctagaacagtgtctagcctctagtatgtgtttagcctacagtatgtgctcagcgaatacaatctatatttattactgcttttatgactgttataattactgtgcttggatttcgttacaaagtaagtcacaatgtgcctgcttctgttagtatttcagcacagtgcctggcacacatggggctctcaaatattgctgagcgagtgaacaaatgtcctttcaattccttaacgttgatgtcattttcaatagtattttgagccaaacttaattttgcgagtgtgttttgttttcttaactttattattaaaaatgtataaaagtgaggccaggcgtggtggctcacgcctgtaatcccagcagtttgggaggctgaggcaggcggatcagttgaggttgggagttggagaccagcccgtccaacatggtgaaagcctgtctctactaaaaatacaaaaatcagctgggtgtggtggcgcgtgcctgtaatcccagctactcaggaggctgaggcaggagagttgcttgaatcctagaggtggaggttgcagtgagctgagatcgtgccattgcactccagcctgggcaacaagagcaaaactctgtcccaataaataaataaataaaatgttctcttttgttcctgttcttgtgcggtagtgtggtatagagttttatggtaattactgtgaattagtgattctgagggacatatcagaactctgaggtttgtttccttctcatcttgagggaaacagcaaatgtatgttaaaatgcttttccaagggaacaacacatccttacattatttaaaccaatctgcttcattttcagagctggttgatcagagtgagtcagaaggccccgtgatacaagaatcagctgaaccaagccagttggaagttccagccacagaagaaataaaagagactgatggaagctctcagatcaagcaagaaccagaccccacgtggtagacctcttccctcctaggcttaaagtatcagtggttgagaagagcttttcggacctgttactaccccaagctgtgtaatatacttgtataacagaaataccttctatacaaacctttttttctacttttagatagaaatgtctactttttcagcagttctgtgaattaaagagcagagtgactgtgggtctggaatggctggtgtacttgggaatgtactatcaggattttacagcaatgctgggaaatgacagggaaaatgacaggaatgaatctcaccagattttttatgtactcagcagagccttgagttacggtgtttattttccaatcaagtgaagatatctcctacttctcctactggaacatctcagcttctgcagtgaagaaaaattcctgtgatagttcagttctttagtttttctatttgaaaaaaaaaaatcatttaaatgatcctttgttcacggctctccttaatgactgagtgaacagttcctatctgtatatttgactaaaccttttcctaagctatctctcatggttcctatgtttttttatcataattaaaagcaaaaccatctggatcacctaacagtcagaggtcagtatctcagcgtgtgaattatagaggaaatacagagagaacctcttccacttttacttttcgtccaaataaaatgcatggtgtaccagaagttgaagatcgggttgaggattggggctagctcgatgacactaaggccccaacatcgcgggacctgctgtggcgcggattcttaggaacgctgttctagccggccccctctccaggggtcgccgtggccggcattatttcctagttcttcttgtaaccctgaggtgccagcgcggggagtgaggaggggtcagggggctaaggatgcaacctctgacgttctgcgccttcctaggagagtcttacatgtgttgagatttcacaagcaatgcgagttgtaaaataccagctctacaagaagctaggctctgtgacggcatagttttcagtagctttatcacaatattcacaatggagaattatatgacatggtagcagaaataggcccttttatgtgttgcttctattttacctcaaattgtagatatagggtaatcaataaaatccatccatgcctttcacacactaagt

SEQ ID NO: 4949 - protein, 876 aa, Homo sapiens; identical to SEQ ID NO: 4475

SEQ ID NO: 4950 - DNA, 7840 bp, Homo sapiens
aaaaaaaaaaaaaaaaaaaaaaaaaaaagaaaaaagaaaaaaaaaaggaggaggaggaggagggtgagagagaagctgggagagcagagaaaaggggccaccggtcgcccccccgcttccccgcacgcgctctccagccgcggccgcccgcctgccgcggtcaccccggcctctgcctctgtcccccagtgatcggatcaaggcgctgagcgaggccctgcctgcggggcggccatgcggcggtgacaggagcgcgaccgacacgcacgggcccctcgccccctctcgcctcccgtccgctcgccagctcccctcagccgaggctgctccgcggcggccgcagcccgcgcgcggcccacactcgcctcccctcggcacccccggccccggagctgcctggaggcggccgcactcggggatcatggcccaagttgcaatgtccaccctccccgttgaagatgaggagtcctcggagagcaggatggtggtgacattcctcatgtcagctctcgagtccatgtgtaaagaactggccaagtccaaagccgaagtggcctgcattgcagtgtatgaaacagacgtgtttgtcgtcggaactgaaagaggacgtgcttttgtcaataccagaaaggattttcaaaaagattttgtaaaatattgtgttgaagaagaagaaaaagctgcagagatgcataaaatgaaatctacaacccaggcaaatcggatgagtgtagatgctgtagaaattgaaacactcagaaaaacagttgaggactatttctgcttttgctatgggaaagctttaggcaaatccacagtggtacctgtaccatatgagaagatgctgcgagaccagtcggctgtggtagtgcaggggcttccggaaggtgttgcctttaaacaccccgagaactatgatcttgcaaccctgaaatggattttggagaacaaagcagggatttcattcatcattaagagaccttttttagagccaaagaagcatgtaggtggtcgtgtgatggtaacagatgctgacaggtcaatactatctccaggtggaagttgtggccccatcaaagtgaaaactgaacccacagaagattctggcatttccctggaaatggcagctgtgacagtaaaggaagaatcagaagatcctgattattatcaatataacattcaaggaagccaccattcttcagagggcaatgaaggcacagaaatggaagtaccagcagaagatgatgattattctccaccgtctaagagaccaaaggccaatgagctaccgcagccaccagtcccggaacccgccaatgctgggaagcggaaagtgagggagttcaacttcgagaaatggaatgctcgcatcactgatctacgtaaacaagttgaagaattgtttgaaaggaaatatgctcaagccataaaagccaaaggtccggtgacgatcccgtaccctcttttccagtctcatgttgaagatctttatgtagaaggacttcctgaaggaattccttttagaaggccatctacttacggaattcctcgcctggagaggatattacttgcaaaggaaaggattcgttttgtgattaagaaacatgagcttctgaattcaacacgtgaagatttacagcttgataagccagcttcaggagtaaaggaagaatggtatgccagaatcactaaattaagaaagatggtggatcagcttttctgcaaaaaatttgcggaagccttggggagcactgaagccaaggctgtaccgtaccaaaaatttgaggcacacccgaatgatctgtacgtggaaggactgccagaaaacattcctttccgaagtccctcatggtatggaatcccaaggctggaaaaaatcattcaagtgggcaatcgaattaaatttgttattaaaagaccagaacttctgactcacagtaccactgaagttactcagccaagaacgaatacaccagctcaagctcttggactcaccgaggcagtaaaagtaccatatcctgtgtttgaatcaaacccggagttcttgtatgtggaaggcttgccagaggggattcccttccgaagccctacctggtttggaattccacgacttgaaaggatcgtccgcgggagtaataaaatcaagttcgttgttaaaaaacctgaactagttatttcctacttgcctcctgggatggctagtaaaataaacactaaagctttgcagtcccccaaaagaccacgaagtcctgggagtaattcaaaggttcctgaaattgaggtcaccgtggaaggccctaataacaacaatcctcaaacctcagctgttcgaaccccgacccagactaacggttctaacgttcccttcaagccacgagggagagagttttcctttgaggcctggaatgccaaaatcacggacctaaaacagaaagttgaaaatctcttcaatgagaaatgtggggaagctcttggccttaaacaagctgtgaaggtgccgttcgcgttatttgagtctttcccggaagacttttatgtggaaggcttacctgagggtgtgccattccgaagaccatcgacttttggcattccgaggctggagaagatactcagaaacaaagccaaaattaagttcatcattaaaaagcccgaaatgtttgagacggcgattaaggagagcacctcctctaagagccctcccagaaaaataaattcatcacccaatgttaatactactgcatcaggtgttgaagaccttaacatcattcaggtgacaattccagatgatgataatgaaagactctcgaaagttgaaaaagctagacagctaagagaacaagtgaatgacctctttagtcggaaatttggtgaagctattggtatgggttttcctgtgaaagttccctacaggaaaatcacaattaaccctggctgtgtggtggttgatggcatgcccccgggggtgtccttcaaagcccccagctacctggaaatcagctccatgagaaggatcttagactctgccgagtttatcaaattcacggtcattaggtaagtgagagtttcctgcttagtcacaggagcgaatctggagctcatgaggctgactcttctaaaatgcagccacaggtagtcatcgaatccggcttcctatgctgtgcaatcaacaaatcaaaataacttgtgtcatcattagaatgtcagatgtgcttctacgaactaagctgactcttttaattctttggcaaagggttggcaaactaggactgtttgccaaattcaggctgcctcctatttttagagtcttcctgaaacacagctacacccgtattatccatggctgctttcctgtcacagtgagtaagtagctgggactgagaaggcatggcctccaaagtctaaaatatttactctctagcactttgtagaaaaaccttagctaggcacagtggctaacgcctgtaatcccagcattttgggaggccaaggcaggcagatcacctgaggtcaggagttccagaccagcctggccaacatggtgaaatcccatctctacaaaaataaaacagttagctgggcatgatggcgggtgcctgtaatcccagctactcgggaggctgaggcaggatagtcgcttgaacccaggaggtggaggttgcaatgagccaagatcatgccactgcactccagcctggacgacagagtgagactccatcacaagaaaaaaagaactttgtcaacctctgtcttagggcgccttgtcacaggcttcgggtcagacggattcaaccttgcatcagccatttgttagccaggtcactctgttctttgtctgtaaatgagattgatcgttgttcccactgagagtgtcagctccttcccgtagagcaggcatgatgattgtactcacctctgacaccattgtgagtgccacattccttcccacgtccttgtcactgtaagagatgcccacctgagcaccaaccccaggttatcttcccctttgtcttccagccccccagaaacagctacgactcaacctacccaatcatttcatcatcagattgccactgtctctagttcaggtctcttgggactggcactcagaaatctcataataaatcctcttgaggcttctcatacactcgtcttcttccaatcttctttccctcaaaatctcatattttggttccacttcacccaccgtcattctccatatcactcccaggagttaggcaaaaagccccttccgttcttccgtatgttaaacttagaatcactctgttccctgctctgcgtttctattttttgtttttcctccatttactagtagcttaacactttctaacagtgttcttattattgatacgtatctatctcttccataagcttataaggtcacggataatacttctcattgtagtacgtaaatgacgtgggctagatatgagttgaataaacagttatacctgtaaattcttacagagtgaaaataaattgttatactttacaatttgtttctctctttagaccatttccaggacttgtgattaataaccgtgagtattttgtgaagtgttttgtttttgttttttcctggggtctgacgtgtgtgcgtgtgagtgtgtatacatgcttaacgtatatcacgttacttcacctatgtcagtaaccaggccaaatacttgttttagccctcagtaaaaacaccaggcacttcctagttgtaaaattattcaagcttcttaacttcctatcctcgatgcacttaatcataaaatggtaataatagcaccgattttgggggagtcgttccagtagatggaaagcatctggaacaggtgtcagcaagctcctgccgacgtgtatgcataaagttttattgaaaccaccatcgtgtccatttgtttatggcagaactgagagatggcagcagcaagtgtgtgcctgcaaaacctaaaatatttactaattggctctgcaagaaaagagtttgcatccccctaacctagaacagtgtctagcctctagtatgtgtttagcctacagtatgtgctcagcgaatacaatctatatttattactgcttttatgactgttataattactgtgcttggatttcgttacaaagtaagtcacaatgtgcctgcttctgttagtatttcagcacagtgcctggcacacatggggctctcaaatattgctgagcgagtgaacaaatgtcctttcaattccttaacgttgatgtcattttcaatagtattttgagccaaacttaattttgcgagtgtgttttgttttcttaactttattattaaaaatgtataaaagtgaggccaggcgtggtggctcacgcctgtaatcccagcagtttgggaggctgaggcaggcggatcagttgaggttgggagttggagaccagcccgtccaacatggtgaaagcctgtctctactaaaaatacaaaaatcagctgggtgtggtggcgcgtgcctgtaatcccagctactcaggaggctgaggcaggagagttgcttgaatcctagaggtggaggttgcagtgagctgagatcgtgccattgcactccagcctgggcaacaagagcaaaactctgtcccaataaataaataaataaaatgttctcttttgttcctgttcttgtgcggtagtgtggtatagagttttatggtaattactgtgaattagtgattctgagggacatatcagaactctgaggtttgtttccttctcatcttgagggaaacagcaaatgtatgttaaaatgcttttccaagggaacaacacatccttacattatttaaaccaatctgcttcattttcagagctggttgatcagagtgagtcagaaggccccgtgatacaagaatcagctgaaccaagccagttggaagttccagccacagaagaaataaaagagactgatggaagctctcagatcaagcaagaaccagaccccacgtggtagacctcttccctcctagggtaaatcagcttctgtgtcagggatgctgtgtggtgtccatctgaaccccctgcatacgcgtagctaatgtgatctccccactttcacataagatggtggccctgccttcagggaatgtgggagccaggtgggagccttcccggatatttaagctagaagattctacagggagattctccttggatcaatatatgtctctcagtcaaagatgtaaaagcacttttgccttaaaaagaatgttctgtttctaaatagagtcaacgttgtcctcctcattggaattcactatgagtcagaatcattagactgacttttttttttccatagtaatagtattttgcagagtctcacagagctgcagatcttttgttcatcttgcagagttaacaagtctgatcctgttagtccagatttcttaaatttggccaagttataataggagcagtagcttgagacccgaagtcaggaaactttgacaatggatttttttttttaatccagagacttgtactggaatttgccttaccctgtcagctcatggacttaaggtttcatcccgctttatgagtgcttctgaatccaagtcattgttacctgaatttgcaaattaagttgtgatattcgtgactgttaaattcctgtaattagattaacctctttgcttgcttgtttgttttctctcctattttagcttaaagtatcagtggttgagaagagcttttcggacctgttactaccccaagctgtgtaatatacttgtataacagaaataccttctatacaaacctttttttctacttttagatagaaatgtctactttttcagcagttctgtgaattaaagagcagagtgactgtgggtctggaatggctggtgtacttgggaatgtactatcaggattttacagcaatgctgggaaatgacagggaaaatgacaggaatgaatctcaccagattttttatgtactcagcagagccttgagttacggtgtttattttccaatcaagtgaagatatctcctacttctcctactggaacatctcagcttctgcagtgaagaaaaattcctgtgatagttcagttctttagtttttctatttgaaaaaaaaaaatcatttaaatgatcctttgttcacggctctccttaatgactgagtgaacagttcctatctgtatatttgactaaaccttttcctaagctatctctcatggttcctatgtttttttatcataattaaaagcaaaaccatctggatcacctaacagtcagaggtcagtatctcagcgtgtgaattatagaggaaatacagagagaacctcttccacttttacttttcgtccaaataaaatgcatggtgtaccagaagttgaagatcgggttgaggattggggctagctcgatgacactaaggccccaacatcgcgggacctgctgtggcgcggattcttaggaacgctgttctagccggccccctctccaggggtcgccgtggccggcattatttcctagttcttcttgtaaccctgaggtgccagcgcggggagtgaggaggggtcagggggctaaggatgcaacctctgacgttctgcgccttcctaggagagtcttacatgtgttgagatttcacaagcaatgcgagttgtaaaataccagctctacaagaagctaggctctgtgacggcatagttttcagtagctttatcacaatattcacaatggagaattatatgacatggtagcagaaataggcccttttatgtgttgcttctattttacctcaaattgtagatatagggtaatcaataaaatccatccatgcctttcacacactaagt

SEQ ID NO: 4951 - protein, 877 aa, Homo sapiens; identical to SEQ ID NO: 4525

SEQ ID NO: 4952 - DNA, 4028 bp, Homo sapiens
aaaaaaaaaaaaaaaaaaaaaaaaaaaagaaaaaagaaaaaaaaaaggaggaggaggaggagggtgagagagaagctgggagagcagagaaaaggggccaccggtcgcccccccgcttccccgcacgcgctctccagccgcggccgcccgcctgccgcggtcaccccggcctctgcctctgtcccccagtgatcggatcaaggcgctgagcgaggccctgcctgcggggcggccatgcggcggtgacaggagcgcgaccgacacgcacgggcccctcgccccctctcgcctcccgtccgctcgccagctcccctcagccgaggctgctccgcggcggccgcagcccgcgcgcggcccacactcgcctccccgttgaagatgaggagtcctcggagagcaggatggtggtgacattcctcatgtcagctctcgagtccatgtgtaaagaactggccaagtccaaagccgaagtggcctgcattgcagtgtatgaaacagacgtgtttgtcgtcggaactgaaagaggacgtgcttttgtcaataccagaaaggattttcaaaaagattttgtaaaatattgtgttgaagaagaagaaaaagctgcagagatgcataaaatgaaatctacaacccaggcaaatcggatgagtgtagatgctgtagaaattgaaacactcagaaaaacagttgaggactatttctgcttttgctatgggaaagctttaggcaaatccacagtggtacctgtaccatatgagaagatgctgcgagaccagtcggctgtggtagtgcaggggcttccggaaggtgttgcctttaaacaccccgagaactatgatcttgcaaccctgaaatggattttggagaacaaagcagggatttcattcatcattaagagaccttttttagagccaaagaagcatgtaggtggtcgtgtgatggtaacagatgctgacaggtcaatactatctccaggtggaagttgtggccccatcaaagtgaaaactgaacccacagaagattctggcatttccctggaaatggcagctgtgacagtaaaggaagaatcagaagatcctgattattatcaatataacattcaaggaagccaccattcttcagagggcaatgaaggcacagaaatggaagtaccagcagaagatgatgattattctccaccgtctaagagaccaaaggccaatgagctaccgcagccaccagtcccggaacccgccaatgctgggaagcggaaagtgagggagttcaacttcgagaaatggaatgctcgcatcactgatctacgtaaacaagttgaagaattgtttgaaaggaaatatgctcaagccataaaagccaaaggtccggtgacgatcccgtaccctcttttccagtctcatgttgaagatctttatgtagaaggacttcctgaaggaattccttttagaaggccatctacttacggaattcctcgcctggagaggatattacttgcaaaggaaaggattcgttttgtgattaagaaacatgagcttctgaattcaacacgtgaagatttacagcttgataagccagcttcaggagtaaaggaagaatggtatgccagaatcactaaattaagaaagatggtggatcagcttttctgcaaaaaatttgcggaagccttggggagcactgaagccaaggctgtaccgtaccaaaaatttgaggcacacccgaatgatctgtacgtggaaggactgccagaaaacattcctttccgaagtccctcatggtatggaatcccaaggctggaaaaaatcattcaagtgggcaatcgaattaaatttgttattaaaagaccagaacttctgactcacagtaccactgaagttactcagccaagaacgaatacaccagtcaaagaagattggaatgtcagaattaccaagctacggaagcaagtggaagagatttttaatttgaaatttgctcaagctcttggactcaccgaggcagtaaaagtaccatatcctgtgtttgaatcaaacccggagttcttgaaaggatcgtccgcgggagtaataaaatcaagttcgttgttaaaaaacctgaactagttatttcctacttgcctcctgggatggctagtaaaataaacactaaagctttgcagtcccccaaaagaccacgaagtcctgggagtaattcaaaggttcctgaaattgaggtcaccgtggaaggccctaataacaacaatcctcaaacctcagctgttcgaaccccgacccagactaacggttctaacgttcccttcaagccacgagggagagagttttcctttgaggcctggaatgccaaaatcacggacctaaaacagaaagttgaaaatctcttcaatgagaaatgtggggaagctcttggccttaaacaagctgtgaaggtgccgttcgcgttatttgagtctttcccggaagacttttatgtggaaggcttacctgagggtgtgccattccgaagaccatcgacttttggcattccgaggctggagaagatactcagaaacaaagccaaaattaagttcatcattaaaaagcccgaaatgtttgagacggcgattaaggagagcacctcctctaagagccctcccagaaaaataaattcatcacccaatgttaatactactgcatcaggtgttgaagaccttaacatcattcaggtgacaattccagatgatgataatgaaagactctcgaaagttgaaaaagctagacagctaagagaacaagtgaatgacctctttagtcggaaatttggtgaagctattggtatgggttttcctgtgaaagttccctacaggaaaatcacaattaaccctggctgtgtggtggttgatggcatgcccccgggggtgtccttcaaagcccccagctacctggaaatcagctccatgagaaggatcttagactctgccgagtttatcaaattcacggtcattagaccatttccaggacttgtgattaataaccagctggttgatcagagtgagtcagaaggccccgtgatacaagaatcagctgaaccaagccagttggaagttccagccacagaagaaataaaagagactgatggaagctctcagatcaagcaagaaccagaccccacgtggtagacctcttccctcctaggagccttgagttacggtgtttattttccaatcaagtgaagatatctcctacttctcctactggaacatctcagcttctgcagtgaagaaaaattcctgtgatagttcagttctttagtttttctatttgaaaaaaaaaaatcatttaaatgatcctttgttcacggctctccttaatgactgagtgaacagttcctatctgtatatttgactaaaccttttcctaagctatctctcatggttcctatgtttttttatcataattaaaagcaaaaccatctggatcacctaacagtcagaggtcagtatctcagcgtgtgaattatagaggaaatacagagagaacctcttccacttttacttttcgtccaaataaaatgcatggtgtaccagaagttgaagatcgggttgaggattggggctagctcgatgacactaaggccccaacatcgcgggacctgctgtggcgcggattcttaggaacgctgttctagccggccccctctccaggggtcgccgtggccggcattatttcctagttcttcttgtaaccctgaggtgccagcgcggggagtgaggaggggtcagggggctaaggatgcaacctctgacgttctgcgccttcctaggagagtcttacatgtgttgagatttcacaagcaatgcgagttgtaaaataccagctctacaagaagctaggctctgtgacggcatagttttcagtagctttatcacaatattcacaatggagaattatatgacatggtagcagaaataggcccttttatgtgttgcttctattttacctcaaattgtagatatagggtaatcaataaaatccatccatgcctttcacacactaagt

SEQ ID NO: 4953 - protein, 564 aa, Homo sapiens; identical to SEQ ID NO: 4023

SEQ ID NO: 4954 - DNA, 7133 bp, Homo sapiens
aaaaaaaaaaaaaaaaaaaaaaaaaaaagaaaaaagaaaaaaaaaaggaggaggaggaggagggtgagagagaagctgggagagcagagaaaaggggccaccggtcgcccccccgcttccccgcacgcgctctccagccgcggccgcccgcctgccgcggtcaccccggcctctgcctctgtcccccagtgatcggatcaaggcgctgagcgaggccctgcctgcggggcggccatgcggcggtgacaggagcgcgaccgacacgcacgggcccctcgccccctctcgcctcccgtccgctcgccagctcccctcagccgaggctgctccgcggcggccgcagcccgcgcgcggcccacactcgcctccccgttgaagatgaggagtcctcggagagcaggatggtggtgacattcctcatgtcagctctcgagtccatgtgtaaagaactggccaagtccaaagccgaagtggcctgcattgcagtgtatgaaacagacgtgtttgtcgtcggaactgaaagaggacgtgcttttgtcaataccagaaaggattttcaaaaagattttgtaaaatattgtgttgaagaagaagaaaaagctgcagagatgcataaaatgaaatctacaacccaggcaaatcggatgagtgtagatgctgtagaaattgaaacactcagaaaaacagttgaggactatttctgcttttgctatgggaaagctttaggcaaatccacagtggtacctgtaccatatgagaagatgctgcgagaccagtcggctgtggtagtgcaggggcttccggaaggtgttgcctttaaacaccccgagaactatgatcttgcaaccctgaaatggattttggagaacaaagcagggatttcattcatcattaagagaccttttttagagccaaagaagcatgtaggtggtcgtgtgatggtaacagatgctgacaggtcaatactatctccaggtggaagttgtggccccatcaaagtgaaaactgaacccacagaagattctggcatttccctggaaatggcagctgtgacagtaaaggaagaatcagaagatcctgattattatcaatataacattcaagcaggcccttctgaaactgatgatgttgatgaaaaacagcccctatcgaagcctttgcaaggaagccaccattcttcagagggcaatgaaggcacagaaatggaagtaccagcagaagatgatgattattctccaccgtctaagagaccaaaggccaatgagctaccgcagccaccagtcccggaacccgccaatgctgggaagcggaaagtgagggagttcaacttcgagaaatggaatgctcgcatcactgatctacgtaaacaagttgaagaattgtttgaaaggaaatatgctcaagccataaaagccaaaggtccggtgacgatcccgtaccctcttttccagtctcatgttgaagatctttatgtagaaggacttcctgaaggaattccttttagaaggccatctacttacggaattcctcgcctggagaggatattacttgcaaaggaaaggattcgttttgtgattaagaaacatgagcttctgaattcaacacgtgaagatttacagcttgataagccagcttcaggagtaaaggaagaatggtatgccagaatcactaaattaagaaagatggtggatcagcttttctgcaaaaaatttgcggaagccttggggagcactgaagccaaggctgtaccgtaccaaaaatttgaggcacacccgaatgatctgtacgtggaaggactgccagaaaacattcctttccgaagtccctcatggtatggaatcccaaggctggaaaaaatcattcaagtgggcaatcgaattaaatttgttattaaaagaccagaacttctgactcacagtaccactgaagttactcagccaagaacgaatacaccagtcaaagaagattggaatgtcagaattaccaagctacggaagcaagtggaagagatttttaatttgaaatttgctcaagctcttggactcaccgaggcagtaaaagtaccatatcctgtgtttgaatcaaacccggagttcttgaaaggatcgtccgcgggagtaataaaatcaagttcgttgttaaaaaacctgaactagttatttcctacttgcctcctgggatggctagtaaaataaacactaaagctttgcagtcccccaaaagaccacgaagtcctgggagtaattcaaaggttcctgaaattgaggtcaccgtggaaggccctaataacaacaatcctcaaacctcagctgttcgaaccccgacccagactaacggttctaacgttcccttcaagccacgagggagagagttttcctttgaggcctggaatgccaaaatcacggacctaaaacagaaagttgaaaatctcttcaatgagaaatgtggggaagctcttggccttaaacaagctgtgaaggtgccgttcgcgttatttgagtctttcccggaagacttttatgtggaaggcttacctgagggtgtgccattccgaagaccatcgacttttggcattccgaggctggagaagatactcagaaacaaagccaaaattaagttcatcattaaaaagcccgaaatgtttgagacggcgattaaggagagcacctcctctaagagccctcccagaaaaataaattcatcacccaatgttaatactactgcatcaggtgttgaagaccttaacatcattcaggtgacaattccagatgatgataatgaaagactctcgaaagttgaaaaagctagacagctaagagaacaagtgaatgacctctttagtcggaaatttggtgaagctattggtatgggttttcctgtgaaagttccctacaggaaaatcacaattaaccctggctgtgtggtggttgatggcatgcccccgggggtgtccttcaaagcccccagctacctggaaatcagctccatgagaaggatcttagactctgccgagtttatcaaattcacggtcattaggtaagtgagagtttcctgcttagtcacaggagcgaatctggagctcatgaggctgactcttctaaaatgcagccacaggtagtcatcgaatccggcttcctatgctgtgcaatcaacaaatcaaaataacttgtgtcatcattagaatgtcagatgtgcttctacgaactaagctgactcttttaattctttggcaaagggttggcaaactaggactgtttgccaaattcaggctgcctcctatttttagagtcttcctgaaacacagctacacccgtattatccatggctgctttcctgtcacagtgagtaagtagctgggactgagaaggcatggcctccaaagtctaaaatatttactctctagcactttgtagaaaaaccttagctaggcacagtggctaacgcctgtaatcccagcattttgggaggccaaggcaggcagatcacctgaggtcaggagttccagaccagcctggccaacatggtgaaatcccatctctacaaaaataaaacagttagctgggcatgatggcgggtgcctgtaatcccagctactcgggaggctgaggcaggatagtcgcttgaacccaggaggtggaggttgcaatgagccaagatcatgccactgcactccagcctggacgacagagtgagactccatcacaagaaaaaaagaactttgtcaacctctgtcttagggcgccttgtcacaggcttcgggtcagacggattcaaccttgcatcagccatttgttagccaggtcactctgttctttgtctgtaaatgagattgatcgttgttcccactgagagtgtcagctccttcccgtagagcaggcatgatgattgtactcacctctgacaccattgtgagtgccacattccttcccacgtccttgtcactgtaagagatgcccacctgagcaccaaccccaggttatcttcccctttgtcttccagccccccagaaacagctacgactcaacctacccaatcatttcatcatcagattgccactgtctctagttcaggtctcttgggactggcactcagaaatctcataataaatcctcttgaggcttctcatacactcgtcttcttccaatcttctttccctcaaaatctcatattttggttccacttcacccaccgtcattctccatatcactcccaggagttaggcaaaaagccccttccgttcttccgtatgttaaacttagaatcactctgttccctgctctgcgtttctattttttgtttttcctccatttactagtagcttaacactttctaacagtgttcttattattgatacgtatctatctcttccataagcttataaggtcacggataatacttctcattgtagtacgtaaatgacgtgggctagatatgagttgaataaacagttatacctgtaaattcttacagagtgaaaataaattgttatactttacaatttgtttctctctttagaccatttccaggacttgtgattaataaccgtgagtattttgtgaagtgttttgtttttgttttttcctggggtctgacgtgtgtgcgtgtgagtgtgtatacatgcttaacgtatatcacgttacttcacctatgtcagtaaccaggccaaatacttgttttagccctcagtaaaaacaccaggcacttcctagttgtaaaattattcaagcttcttaacttcctatcctcgatgcacttaatcataaaatggtaataatagcaccgattttgggggagtcgttccagtagatggaaagcatctggaacaggtgtcagcaagctcctgccgacgtgtatgcataaagttttattgaaaccaccatcgtgtccatttgtttatggcagaactgagagatggcagcagcaagtgtgtgcctgcaaaacctaaaatatttactaattggctctgcaagaaaagagtttgcatccccctaacctagaacagtgtctagcctctagtatgtgtttagcctacagtatgtgctcagcgaatacaatctatatttattactgcttttatgactgttataattactgtgcttggatttcgttacaaagtaagtcacaatgtgcctgcttctgttagtatttcagcacagtgcctggcacacatggggctctcaaatattgctgagcgagtgaacaaatgtcctttcaattccttaacgttgatgtcattttcaatagtattttgagccaaacttaattttgcgagtgtgttttgttttcttaactttattattaaaaatgtataaaagtgaggccaggcgtggtggctcacgcctgtaatcccagcagtttgggaggctgaggcaggcggatcagttgaggttgggagttggagaccagcccgtccaacatggtgaaagcctgtctctactaaaaatacaaaaatcagctgggtgtggtggcgcgtgcctgtaatcccagctactcaggaggctgaggcaggagagttgcttgaatcctagaggtggaggttgcagtgagctgagatcgtgccattgcactccagcctgggcaacaagagcaaaactctgtcccaataaataaataaataaaatgttctcttttgttcctgttcttgtgcggtagtgtggtatagagttttatggtaattactgtgaattagtgattctgagggacatatcagaactctgaggtttgtttccttctcatcttgagggaaacagcaaatgtatgttaaaatgcttttccaagggaacaacacatccttacattatttaaaccaatctgcttcattttcagagctggttgatcagagtgagtcagaaggccccgtgatacaagaatcagctgaaccaagccagttggaagttccagccacagaagaaataaaagagactgatggaagctctcagatcaagcaagaaccagaccccacgtggtagacctcttccctcctaggcttaaagtatcagtggttgagaagagcttttcggacctgttactaccccaagctgtgtaatatacttgtataacagaaataccttctatacaaacctttttttctacttttagatagaaatgtctactttttcagcagttctgtgaattaaagagcagagtgactgtgggtctggaatggctggtgtacttgggaatgtactatcaggattttacagcaatgctgggaaatgacagggaaaatgacaggaatgaatctcaccagattttttatgtactcagcagagccttgagttacggtgtttattttccaatcaagtgaagatatctcctacttctcctactggaacatctcagcttctgcagtgaagaaaaattcctgtgatagttcagttctttagtttttctatttgaaaaaaaaaaatcatttaaatgatcctttgttcacggctctccttaatgactgagtgaacagttcctatctgtatatttgactaaaccttttcctaagctatctctcatggttcctatgtttttttatcataattaaaagcaaaaccatctggatcacctaacagtcagaggtcagtatctcagcgtgtgaattatagaggaaatacagagagaacctcttccacttttacttttcgtccaaataaaatgcatggtgtaccagaagttgaagatcgggttgaggattggggctagctcgatgacactaaggccccaacatcgcgggacctgctgtggcgcggattcttaggaacgctgttctagccggccccctctccaggggtcgccgtggccggcattatttcctagttcttcttgtaaccctgaggtgccagcgcggggagtgaggaggggtcagggggctaaggatgcaacctctgacgttctgcgccttcctaggagagtcttacatgtgttgagatttcacaagcaatgcgagttgtaaaataccagctctacaagaagctaggctctgtgacggcatagttttcagtagctttatcacaatattcacaatggagaattatatgacatggtagcagaaataggcccttttatgtgttgcttctattttacctcaaattgtagatatagggtaatcaataaaatccatccatgcctttcacacactaagt

SEQ ID NO: 4955 - protein, 584 aa, Homo sapiens; identical to SEQ ID NO: 4077

SEQ ID NO: 4956 - DNA, 4071 bp, Homo sapiens
aaaaaaaaaaaaaaaaaaaaaaaaaaaagaaaaaagaaaaaaaaaaggaggaggaggaggagggtgagagagaagctgggagagcagagaaaaggggccaccggtcgcccccccgcttccccgcacgcgctctccagccgcggccgcccgcctgccgcggtcaccccggcctctgcctctgtcccccagtgatcggatcaaggcgctgagcgaggccctgcctgcggggcggccatgcggcggtgacaggagcgcgaccgacacgcacgggcccctcgccccctctcgcctcccgtccgctcgccagctcccctcagccgaggctgctccgcggcggccgcagcccgcgcgcggcccacactcgcctcccctcggcacccccggccccggagctgcctggaggcggccgcactcggtgtaaagaactggccaagtccaaagccgaagtggcctgcattgcagtgtatgaaacagacgtgtttgtcgtcggaactgaaagaggacgtgcttttgtcaataccagaaaggattttcaaaaagattttgtaaaatattgtgttgaagaagaagaaaaagctgcagagatgcataaaatgaaatctacaacccaggcaaatcggatgagtgtagatgctgtagaaattgaaacactcagaaaaacagttgaggactatttctgcttttgctatgggaaagctttaggcaaatccacagtggtacctgtaccatatgagaagatgctgcgagaccagtcggctgtggtagtgcaggggcttccggaaggtgttgcctttaaacaccccgagaactatgatcttgcaaccctgaaatggattttggagaacaaagcagggatttcattcatcattaagagaccttttttagagccaaagaagcatgtaggtggtcgtgtgatggtaacagatgctgacaggtcaatactatctccaggtggaagttgtggccccatcaaagtgaaaactgaacccacagaagattctggcatttccctggaaatggcagctgtgacagtaaaggaagaatcagaagatcctgattattatcaatataacattcaaggaagccaccattcttcagagggcaatgaaggcacagaaatggaagtaccagcagaagatgatgattattctccaccgtctaagagaccaaaggccaatgagctaccgcagccaccagtcccggaacccgccaatgctgggaagcggaaagtgagggagttcaacttcgagaaatggaatgctcgcatcactgatctacgtaaacaagttgaagaattgtttgaaaggaaatatgctcaagccataaaagccaaaggtccggtgacgatcccgtaccctcttttccagtctcatgttgaagatctttatgtagaaggacttcctgaaggaattccttttagaaggccatctacttacggaattcctcgcctggagaggatattacttgcaaaggaaaggattcgttttgtgattaagaaacatgagcttctgaattcaacacgtgaagatttacagcttgataagccagcttcaggagtaaaggaagaatggtatgccagaatcactaaattaagaaagatggtggatcagcttttctgcaaaaaatttgcggaagccttggggagcactgaagccaaggctgtaccgtaccaaaaatttgaggcacacccgaatgatctgtacgtggaaggactgccagaaaacattcctttccgaagtccctcatggtatggaatcccaaggctggaaaaaatcattcaagtgggcaatcgaattaaatttgttattaaaagaccagaacttctgactcacagtaccactgaagttactcagccaagaacgaatacaccagtcaaagaagattggaatgtcagaattaccaagctacggaagcaagtggaagagatttttaatttgaaatttgctcaagctcttggactcaccgaggcagtaaaagtaccatatcctgtgtttgaatcaaacccggagttcttgtatgtggaaggcttgccagaggggattcccttccgaagccctacctggtttggaattccacgacttgaaaggatcgtccgcgggagtaataaaatcaagttcgttgttaaaaaacctgaactagttatttcctacttgcctcctgggatggctagtaaaataaacactaaagctttgcagtcccccaaaagaccacgaagtcctgggagtaattcaaaggttcctgaaattgaggtcaccgtggaaggccctaataacaacaatcctcaaacctcagctgttcgaaccccgacccagactaacggttctaacgttcccttcaagccacgagggagagagttttcctttgaggcctggaatgccaaaatcacggacctaaaacagaaagttgaaaatctcttcaatgagaaatgtggggaagctcttggccttaaacaagctgtgaaggtgccgttcgcgttatttgagtctttcccggaagacttttatgtggaaggcttacctgagggtgtgccattccgaagaccatcgacttttggcattccgaggctggagaagatactcagaaacaaagccaaaattaagttcatcattaaaaagcccgaaatgtttgagacggcgattaaggagagcacctcctctaagagccctcccagaaaaataaattcatcacccaatgttaatactactgcatcaggtgttgaagaccttaacatcattcaggtgacaattccagatgatgataatgaaagactctcgaaagttgaaaaagctagacagctaagagaacaagtgaatgacctctttagtcggaaatttggtgaagctattggtatgggttttcctgtgaaagttccctacaggaaaatcacaattaaccctggctgtgtggtggttgatggcatgcccccgggggtgtccttcaaagcccccagctacctggaaatcagctccatgagaaggatcttagactctgccgagtttatcaaattcacggtcattagaccatttccaggacttgtgattaataaccagctggttgatcagagtgagtcagaaggccccgtgatacaagaatcagctgaaccaagccagttggaagttccagccacagaagaaataaaagagactgatggaagctctcagatcaagcaagaaccagaccccacgtggtagacctcttccctcctaggagccttgagttacggtgtttattttccaatcaagtgaagatatctcctacttctcctactggaacatctcagcttctgcagtgaagaaaaattcctgtgatagttcagttctttagtttttctatttgaaaaaaaaaaatcatttaaatgatcctttgttcacggctctccttaatgactgagtgaacagttcctatctgtatatttgactaaaccttttcctaagctatctctcatggttcctatgtttttttatcataattaaaagcaaaaccatctggatcacctaacagtcagaggtcagtatctcagcgtgtgaattatagaggaaatacagagagaacctcttccacttttacttttcgtccaaataaaatgcatggtgtaccagaagttgaagatcgggttgaggattggggctagctcgatgacactaaggccccaacatcgcgggacctgctgtggcgcggattcttaggaacgctgttctagccggccccctctccaggggtcgccgtggccggcattatttcctagttcttcttgtaaccctgaggtgccagcgcggggagtgaggaggggtcagggggctaaggatgcaacctctgacgttctgcgccttcctaggagagtcttacatgtgttgagatttcacaagcaatgcgagttgtaaaataccagctctacaagaagctaggctctgtgacggcatagttttcagtagctttatcacaatattcacaatggagaattatatgacatggtagcagaaataggcccttttatgtgttgcttctattttacctcaaattgtagatatagggtaatcaataaaatccatccatgcctttcacacactaagt

SEQ ID NO: 4957 - protein, 868 aa, Homo sapiens; identical to SEQ ID NO: 4729

SEQ ID NO: 4958 - DNA, 7455 bp, Homo sapiens
aaaaaaaaaaaaaaaaaaaaaaaaaaaagaaaaaagaaaaaaaaaaggaggaggaggaggagggtgagagagaagctgggagagcagagaaaaggggccaccggtcgcccccccgcttccccgcacgcgctctccagccgcggccgcccgcctgccgcggtcaccccggcctctgcctctgtcccccagtgatcggatcaaggcgctgagcgaggccctgcctgcggggcggccatgcggcggtgacaggagcgcgaccgacacgcacgggcccctcgccccctctcgcctcccgtccgctcgccagctcccctcagccgaggctgctccgcggcggccgcagcccgcgcgcggcccacactcgcctcccctcggcacccccggccccggagctgcctggaggcggccgcactcggggatcatggcccaagttgcaatgtccaccctccccgttgaagatgaggagtcctcggagagcaggatggtggtgacattcctcatgtcagctctcgagtccatgtgtaaagaactggccaagtccaaagccgaagtggcctgcattgcagtgtatgaaacagacgtgtttgtcgtcggaactgaaagaggacgtgcttttgtcaataccagaaaggattttcaaaaagattttgtaaaatattgtgttgaagaagaagaaaaagctgcagagatgcataaaatgaaatctacaacccaggcaaatcggatgagtgtagatgctgtagaaattgaaacactcagaaaaacagttgaggactatttctgcttttgctatgggaaagctttaggcaaatccacagtggtacctgtaccatatgagaagatgctgcgagaccagtcggctgtggtagtgcaggggcttccggaaggtgttgcctttaaacaccccgagaactatgatcttgcaaccctgaaatggattttggagaacaaagcagggatttcattcatcattaagagaccttttttagagccaaagaagcatgtaggtggtcgtgtgatggtaacagatgctgacaggtcaatactatctccaggtggaagttgtggccccatcaaagtgaaaactgaacccacagaagattctggcatttccctggaaatggcagctgtgacagtaaaggaagaatcagaagatcctgattattatcaatataacattcaagcaggcccttctgaaactgatgatgttgatgaaaaacagcccctatcgaagcctttgcaaggaagccaccattcttcagagggcaatgaaggcacagaaatggaagtaccagcagaagattctactcaacatgtcccttcagaaacaagtgaggaccctgaagttgaggtgactattgaagatgatgattattctccaccgtctaagagaccaaaggccaatgagctaccgcagccaccagtcccggaacccgccaatgctgggaagcggaaagtgagggagttcaacttcgagaaatggaatgctcgcatcactgatctacgtaaacaagttgaagaattgtttgaaaggaaatatgctcaagccataaaagccaaaggtccggtgacgatcccgtaccctcttttccagtctcatgttgaagatctttatgtagaaggacttcctgaaggaattccttttagaaggccatctacttacggaattcctcgcctggagaggatattacttgcaaaggaaaggattcgttttgtgattaagaaacatgagcttctgaattcaacacgtgaagatttacagcttgataagccagcttcaggagtaaaggaagaatggtatgccagaatcactaaattaagaaagatggtggatcagcttttctgcaaaaaatttgcggaagccttggggagcactgaagccaaggctgtaccgtaccaaaaatttgaggcacacccgaatgatctgtacgtggaaggactgccagaaaacattcctttccgaagtccctcatggtatggaatcccaaggctggaaaaaatcattcaagtgggcaatcgaattaaatttgttattaaaagaccagaacttctgactcacagtaccactgaagttactcagccaagaacgaatacaccagtcaaagaagattggaatgtcagaattaccaagctacggaagcaagtggaagagatttttaatttgaaatttgcttagatttgttgacagcggtttcctggagtgctgtcttgagaacgattctgaggaggctcagcaagaaagagtgtttcagttgattgggtgtgtctgtcatggagaaggaactcaagctcttggactcaccgaggcagtaaaagtaccatatcctgtgtttgaatcaaacccggagttcttgtatgtggaaggcttgccagaggggattcccttccgaagccctacctggtttggaattccacgacttgaaaggatcgtccgcgggagtaataaaatcaagttcgttgttaaaaaacctgaactagttatttcctacttgcctcctgggatggctagtaaaataaacactaaagctttgcagtcccccaaaagaccacgaagtcctgggagtaattcaaaggttcctgaaattgaggtcaccgtggaaggccctaataacaacaatcctcaaacctcagctgttcgaaccccgacccagactaacggttctaacgttcccttcaagccacgagggagagagttttcctttgaggcctggaatgccaaaatcacggacctaaaacagaaagttgaaaatctcttcaatgagaaatgtggggaagctcttggccttaaacaagctgtgaaggtgccgttcgcgttatttgagtctttcccggaagacttttatgtggaaggcttacctgagggtgtgccattccgaagaccatcgacttttggcattccgaggctggagaagatactcagaaacaaagccaaaattaagttcatcattaaaaagcccgaaatgtttgagacggcgattaaggagagcacctcctctaagagccctcccagaaaaataaattcatcacccaatgttaatactactgcatcaggtgttgaagaccttaacatcattcaggtgacaattccagatgatgataatgaaagactctcgaaagttgaaaaagctagacagctaagagaacaagtgaatgacctctttagtcggaaatttggtgaagctattggtatgggttttcctgtgaaagttccctacaggaaaatcacaattaaccctggctgtgtggtggttgatggcatgcccccgggggtgtccttcaaagcccccagctacctggaaatcagctccatgagaaggatcttagactctgccgagtttatcaaattcacggtcattaggtaagtgagagtttcctgcttagtcacaggagcgaatctggagctcatgaggctgactcttctaaaatgcagccacaggtagtcatcgaatccggcttcctatgctgtgcaatcaacaaatcaaaataacttgtgtcatcattagaatgtcagatgtgcttctacgaactaagctgactcttttaattctttggcaaagggttggcaaactaggactgtttgccaaattcaggctgcctcctatttttagagtcttcctgaaacacagctacacccgtattatccatggctgctttcctgtcacagtgagtaagtagctgggactgagaaggcatggcctccaaagtctaaaatatttactctctagcactttgtagaaaaaccttagctaggcacagtggctaacgcctgtaatcccagcattttgggaggccaaggcaggcagatcacctgaggtcaggagttccagaccagcctggccaacatggtgaaatcccatctctacaaaaataaaacagttagctgggcatgatggcgggtgcctgtaatcccagctactcgggaggctgaggcaggatagtcgcttgaacccaggaggtggaggttgcaatgagccaagatcatgccactgcactccagcctggacgacagagtgagactccatcacaagaaaaaaagaactttgtcaacctctgtcttagggcgccttgtcacaggcttcgggtcagacggattcaaccttgcatcagccatttgttagccaggtcactctgttctttgtctgtaaatgagattgatcgttgttcccactgagagtgtcagctccttcccgtagagcaggcatgatgattgtactcacctctgacaccattgtgagtgccacattccttcccacgtccttgtcactgtaagagatgcccacctgagcaccaaccccaggttatcttcccctttgtcttccagccccccagaaacagctacgactcaacctacccaatcatttcatcatcagattgccactgtctctagttcaggtctcttgggactggcactcagaaatctcataataaatcctcttgaggcttctcatacactcgtcttcttccaatcttctttccctcaaaatctcatattttggttccacttcacccaccgtcattctccatatcactcccaggagttaggcaaaaagccccttccgttcttccgtatgttaaacttagaatcactctgttccctgctctgcgtttctattttttgtttttcctccatttactagtagcttaacactttctaacagtgttcttattattgatacgtatctatctcttccataagcttataaggtcacggataatacttctcattgtagtacgtaaatgacgtgggctagatatgagttgaataaacagttatacctgtaaattcttacagagtgaaaataaattgttatactttacaatttgtttctctctttagaccatttccaggacttgtgattaataaccgtgagtattttgtgaagtgttttgtttttgttttttcctggggtctgacgtgtgtgcgtgtgagtgtgtatacatgcttaacgtatatcacgttacttcacctatgtcagtaaccaggccaaatacttgttttagccctcagtaaaaacaccaggcacttcctagttgtaaaattattcaagcttcttaacttcctatcctcgatgcacttaatcataaaatggtaataatagcaccgattttgggggagtcgttccagtagatggaaagcatctggaacaggtgtcagcaagctcctgccgacgtgtatgcataaagttttattgaaaccaccatcgtgtccatttgtttatggcagaactgagagatggcagcagcaagtgtgtgcctgcaaaacctaaaatatttactaattggctctgcaagaaaagagtttgcatccccctaacctagaacagtgtctagcctctagtatgtgtttagcctacagtatgtgctcagcgaatacaatctatatttattactgcttttatgactgttataattactgtgcttggatttcgttacaaagtaagtcacaatgtgcctgcttctgttagtatttcagcacagtgcctggcacacatggggctctcaaatattgctgagcgagtgaacaaatgtcctttcaattccttaacgttgatgtcattttcaatagtattttgagccaaacttaattttgcgagtgtgttttgttttcttaactttattattaaaaatgtataaaagtgaggccaggcgtggtggctcacgcctgtaatcccagcagtttgggaggctgaggcaggcggatcagttgaggttgggagttggagaccagcccgtccaacatggtgaaagcctgtctctactaaaaatacaaaaatcagctgggtgtggtggcgcgtgcctgtaatcccagctactcaggaggctgaggcaggagagttgcttgaatcctagaggtggaggttgcagtgagctgagatcgtgccattgcactccagcctgggcaacaagagcaaaactctgtcccaataaataaataaataaaatgttctcttttgttcctgttcttgtgcggtagtgtggtatagagttttatggtaattactgtgaattagtgattctgagggacatatcagaactctgaggtttgtttccttctcatcttgagggaaacagcaaatgtatgttaaaatgcttttccaagggaacaacacatccttacattatttaaaccaatctgcttcattttcagagctggttgatcagagtgagtcagaaggccccgtgatacaagaatcagctgaaccaagccagttggaagttccagccacagaagaaataaaagagactgatggaagctctcagatcaagcaagaaccagaccccacgtggtagacctcttccctcctaggcttaaagtatcagtggttgagaagagcttttcggacctgttactaccccaagctgtgtaatatacttgtataacagaaataccttctatacaaacctttttttctacttttagatagaaatgtctactttttcagcagttctgtgaattaaagagcagagtgactgtgggtctggaatggctggtgtacttgggaatgtactatcaggattttacagcaatgctgggaaatgacagggaaaatgacaggaatgaatctcaccagattttttatgtactcagcagagccttgagttacggtgtttattttccaatcaagtgaagatatctcctacttctcctactggaacatctcagcttctgcagtgaagaaaaattcctgtgatagttcagttctttagtttttctatttgaaaaaaaaaaatcatttaaatgatcctttgttcacggctctccttaatgactgagtgaacagttcctatctgtatatttgactaaaccttttcctaagctatctctcatggttcctatgtttttttatcataattaaaagcaaaaccatctggatcacctaacagtcagaggtcagtatctcagcgtgtgaattatagaggaaatacagagagaacctcttccacttttacttttcgtccaaataaaatgcatggtgtaccagaagttgaagatcgggttgaggattggggctagctcgatgacactaaggccccaacatcgcgggacctgctgtggcgcggattcttaggaacgctgttctagccggccccctctccaggggtcgccgtggccggcattatttcctagttcttcttgtaaccctgaggtgccagcgcggggagtgaggaggggtcagggggctaaggatgcaacctctgacgttctgcgccttcctaggagagtcttacatgtgttgagatttcacaagcaatgcgagttgtaaaataccagctctacaagaagctaggctctgtgacggcatagttttcagtagctttatcacaatattcacaatggagaattatatgacatggtagcagaaataggcccttttatgtgttgcttctattttacctcaaattgtagatatagggtaatcaataaaatccatccatgcctttcacacactaagt

SEQ ID NO: 4959 - protein, 584 aa, Homo sapiens; identical to SEQ ID NO: 4053

SEQ ID NO: 4960 - DNA, 5043 bp, Homo sapiens
aaaaaaaaaaaaaaaaaaaaaaaaaaaagaaaaaagaaaaaaaaaaggaggaggaggaggagggtgagagagaagctgggagagcagagaaaaggggccaccggtcgcccccccgcttccccgcacgcgctctccagccgcggccgcccgcctgccgcggtcaccccggcctctgcctctgtcccccagtgatcggatcaaggcgctgagcgaggccctgcctgcggggcggccatgcggcggtgacaggagcgcgaccgacacgcacgggcccctcgccccctctcgcctcccgtccgctcgccagctcccctcagccgaggctgctccgcggcggccgcagcccgcgcgcggcccacactcgcctcccctcggcacccccggccccggagctgcctggaggcggccgcactcggtgtaaagaactggccaagtccaaagccgaagtggcctgcattgcagtgtatgaaacagacgtgtttgtcgtcggaactgaaagaggacgtgcttttgtcaataccagaaaggattttcaaaaagattttgtaaaatattgtgttgaagaagaagaaaaagctgcagagatgcataaaatgaaatctacaacccaggcaaatcggatgagtgtagatgctgtagaaattgaaacactcagaaaaacagttgaggactatttctgcttttgctatgggaaagctttaggcaaatccacagtggtacctgtaccatatgagaagatgctgcgagaccagtcggctgtggtagtgcaggggcttccggaaggtgttgcctttaaacaccccgagaactatgatcttgcaaccctgaaatggattttggagaacaaagcagggatttcattcatcattaagagaccttttttagagccaaagaagcatgtaggtggtcgtgtgatggtaacagatgctgacaggtcaatactatctccaggtggaagttgtggccccatcaaagtgaaaactgaacccacagaagattctggcatttccctggaaatggcagctgtgacagtaaaggaagaatcagaagatcctgattattatcaatataacattcaaggaagccaccattcttcagagggcaatgaaggcacagaaatggaagtaccagcagaagattctactcaacatgtcccttcagaaacaagtgaggaccctgaagttgaggtgactattgaagatgatgattattctccaccgtctaagagaccaaaggccaatgagctaccgcagccaccagtcccggaacccgccaatgctgggaagcggaaagtgagggagttcaacttcgagaaatggaatgctcgcatcactgatctacgtaaacaagttgaagaattgtttgaaaggaaatatgctcaagccataaaagccaaaggtccggtgacgatcccgtaccctcttttccagtctcatgttgaagatctttatgtagaaggacttcctgaaggaattccttttagaaggccatctacttacggaattcctcgcctggagaggatattacttgcaaaggaaaggattcgttttgtgattaagaaacatgagcttctgaattcaacacgtgaagatttacagcttgataagccagcttcaggagtaaaggaagaatggtatgccagaatcactaaattaagaaagatggtggatcagcttttctgcaaaaaatttgcggaagccttggggagcactgaagccaaggctgtaccgtaccaaaaatttgaggcacacccgaatgatctgtacgtggaaggactgccagaaaacattcctttccgaagtccctcatggtatggaatcccaaggctggaaaaaatcattcaagtgggcaatcgaattaaatttgttattaaaagaccagaacttctgactcacagtaccactgaagttactcagccaagaacgaatacaccagtcaaagaagattggaatgtcagaattaccaagctacggaagcaagtggaagagatttttaatttgaaatttgctcaagctcttggactcaccgaggcagtaaaagtaccatatcctgtgtttgaatcaaacccggagttcttgaaaggatcgtccgcgggagtaataaaatcaagttcgttgttaaaaaacctgaactagttatttcctacttgcctcctgggatggctagtaaaataaacactaaagctttgcagtcccccaaaagaccacgaagtcctgggagtaattcaaaggttcctgaaattgaggtcaccgtggaaggccctaataacaacaatcctcaaacctcagctgttcgaaccccgacccagactaacggttctaacgttcccttcaagccacgagggagagagttttcctttgaggcctggaatgccaaaatcacggacctaaaacagaaagttgaaaatctcttcaatgagaaatgtggggaagctcttggccttaaacaagctgtgaaggtgccgttcgcgttatttgagtctttcccggaagacttttatgtggaaggcttacctgagggtgtgccattccgaagaccatcgacttttggcattccgaggctggagaagatactcagaaacaaagccaaaattaagttcatcattaaaaagcccgaaatgtttgagacggcgattaaggagagcacctcctctaagagccctcccagaaaaataaattcatcacccaatgttaatactactgcatcaggtgttgaagaccttaacatcattcaggtgacaattccagatgatgataatgaaagactctcgaaagttgaaaaagctagacagctaagagaacaagtgaatgacctctttagtcggaaatttggtgaagctattggtatgggttttcctgtgaaagttccctacaggaaaatcacaattaaccctggctgtgtggtggttgatggcatgcccccgggggtgtccttcaaagcccccagctacctggaaatcagctccatgagaaggatcttagactctgccgagtttatcaaattcacggtcattagaccatttccaggacttgtgattaataaccagctggttgatcagagtgagtcagaaggccccgtgatacaagaatcagctgaaccaagccagttggaagttccagccacagaagaaataaaagagactgatggaagctctcagatcaagcaagaaccagaccccacgtggtagacctcttccctcctagggtaaatcagcttctgtgtcagggatgctgtgtggtgtccatctgaaccccctgcatacgcgtagctaatgtgatctccccactttcacataagatggtggccctgccttcagggaatgtgggagccaggtgggagccttcccggatatttaagctagaagattctacagggagattctccttggatcaatatatgtctctcagtcaaagatgtaaaagcacttttgccttaaaaagaatgttctgtttctaaatagagtcaacgttgtcctcctcattggaattcactatgagtcagaatcattagactgacttttttttttccatagtaatagtattttgcagagtctcacagagctgcagatcttttgttcatcttgcagagttaacaagtctgatcctgttagtccagatttcttaaatttggccaagttataataggagcagtagcttgagacccgaagtcaggaaactttgacaatggatttttttttttaatccagagacttgtactggaatttgccttaccctgtcagctcatggacttaaggtttcatcccgctttatgagtgcttctgaatccaagtcattgttacctgaatttgcaaattaagttgtgatattcgtgactgttaaattcctgtaattagattaacctctttgcttgcttgtttgttttctctcctattttagcttaaagtatcagtggttgagaagagcttttcggacctgttactaccccaagctgtgtaatatacttgtataacagaaataccttctatacaaacctttttttctacttttagatagaaatgtctactttttcagcagttctgtgaattaaagagcagagtgactgtgggtctggaatggctggtgtacttgggaatgtactatcaggattttacagcaatgctgggaaatgacagggaaaatgacaggaatgaatctcaccagattttttatgtactcagcagagccttgagttacggtgtttattttccaatcaagtgaagatatctcctacttctcctactggaacatctcagcttctgcagtgaagaaaaattcctgtgatagttcagttctttagtttttctatttgaaaaaaaaaaatcatttaaatgatcctttgttcacggctctccttaatgactgagtgaacagttcctatctgtatatttgactaaaccttttcctaagctatctctcatggttcctatgtttttttatcataattaaaagcaaaaccatctggatcacctaacagtcagaggtcagtatctcagcgtgtgaattatagaggaaatacagagagaacctcttccacttttacttttcgtccaaataaaatgcatggtgtaccagaagttgaagatcgggttgaggattggggctagctcgatgacactaaggccccaacatcgcgggacctgctgtggcgcggattcttaggaacgctgttctagccggccccctctccaggggtcgccgtggccggcattatttcctagttcttcttgtaaccctgaggtgccagcgcggggagtgaggaggggtcagggggctaaggatgcaacctctgacgttctgcgccttcctaggagagtcttacatgtgttgagatttcacaagcaatgcgagttgtaaaataccagctctacaagaagctaggctctgtgacggcatagttttcagtagctttatcacaatattcacaatggagaattatatgacatggtagcagaaataggcccttttatgtgttgcttctattttacctcaaattgtagatatagggtaatcaataaaatccatccatgcctttcacacactaagt

SEQ ID NO: 4961 - protein, 516 aa, Homo sapiens; identical to SEQ ID NO: 4129

SEQ ID NO: 4962 - DNA, 5248 bp, Homo sapiens
aaaaaaaaaaaaaaaaaaaaaaaaaaaagaaaaaagaaaaaaaaaaggaggaggaggaggagggtgagagagaagctgggagagcagagaaaaggggccaccggtcgcccccccgcttccccgcacgcgctctccagccgcggccgcccgcctgccgcggtcaccccggcctctgcctctgtcccccagtgatcggatcaaggcgctgagcgaggccctgcctgcggggcggccatgcggcggtgacaggagcgcgaccgacacgcacgggcccctcgccccctctcgcctcccgtccgctcgccagctcccctcagccgaggctgctccgcggcggccgcagcccgcgcgcggcccacactcgcctcccctcggcacccccggccccggagctgcctggaggcggccgcactcggggatcatggcccaagttgcaatgtccaccctccccgttgaagatgaggagtcctcggagagcaggatggtggtgacattcctcatgtcagctctcgagtccatgtgtaaagaactggccaagtccaaagccgaagtggcctgcattgcagtgtatgaaacagacgtgtttgtcgtcggaactgaaagaggacgtgcttttgtcaataccagaaaggattttcaaaaagattttgtaaaatattgtgttgaagaagaagaaaaagctgcagagatgcataaaatgaaatctacaacccaggcaaatcggatgagtgtagatgctgtagaaattgaaacactcagaaaaacagttgaggactatttctgcttttgctatgggaaagctttaggcaaatccacagtggtacctgtaccatatgagaagatgctgcgagaccagtcggctgtggtagtgcaggggcttccggaaggtgttgcctttaaacaccccgagaactatgatcttgcaaccctgaaatggattttggagaacaaagcagggatttcattcatcattaagagaccttttttagagccaaagaagcatgtaggtggtcgtgtgatggtaacagatgctgacaggtcaatactatctccaggtggaagttgtggccccatcaaagtgaaaactgaacccacagaagattctggaagccaccattcttcagagggcaatgaaggcacagaaatggaagtaccagcagaagattctactcaacatgtcccttcagaaacaagtgaggaccctgaagttgaggtgactattgaagatgatgattattctccaccgtctaagagaccaaaggccaatgagctaccgcagccaccagtcccggaacccgccaatgctgggaagcggaaagtgagggagttcaacttcgagaaatggaatgctcgcatcactgatctacgtaaacaagttgaagaattgtttgaaaggaaatatgctcaagccataaaagccaaaggtccggtgacgatcccgtaccctcttttccagtctcatgttgaagatctttatgtagaaggacttcctgaaggaattccttttagaaggccatctacttacggaattcctcgcctggagaggatattacttgcaaaggaaaggattcgttttgtgattaagaaacatgagcttctgaattcaacacgtgaagatttacagcttgataagccagcttcaggagtaaaggaagaatggtatgccagaatcactaaattaagaaagatggtggatcagcttttctgcaaaaaatttgcggaagccttggggagcactgaagccaaggctgtaccgtaccaaaaatttgaggcacacccgaatgatctgtacgtggaaggactgccagaaaacattcctttccgaagtccctcatggtatggaatcccaaggctggaaaaaatcattcaagtgggcaatcgaattaaatttgttattaaaagaccagaacttctgactcacagtaccactgaagttactcagccaagaacgaatacaccagtcaaagaagattggaatgtcagaattaccaagctacggaagcaagtggaagagatttttaatttgaaatttgcttagatttgttgacagcggtttcctggagtgctgtcttgagaacgattctgaggaggctcagcaagaaagagtgtttcagttgattgggtgtgtctgtcatggagaaggaactcaagctcttggactcaccgaggcagtaaaagtaccatatcctgtgtttgaatcaaacccggagttcttgtatgtggaaggcttgccagaggggattcccttccgaagccctacctggtttggaattccacgacttgaaaggatcgtccgcgggagtaataaaatcaagttcgttgttaaaaaacctgaactagttatttcctacttgcctcctgggatggctagtaaaataaacactaaagctttgcagtcccccaaaagaccacgaagtcctgggagtaattcaaaggttcctgaaattgaggtcaccgtggaaggccctaataacaacaatcctcaaacctcagctgttcgaaccccgacccagactaacggttctaacgttcccttcaagccacgagggagagagttttcctttgaggcctggaatgccaaaatcacggacctaaaacagaaagttgaaaatctcttcaatgagaaatgtggggaagctcttggccttaaacaagctgtgaaggtgccgttcgcgttatttgagtctttcccggaagacttttatgtggaaggcttacctgagggtgtgccattccgaagaccatcgacttttggcattccgaggctggagaagatactcagaaacaaagccaaaattaagttcatcattaaaaagcccgaaatgtttgagacggcgattaaggagagcacctcctctaagagccctcccagaaaaataaattcatcacccaatgttaatactactgcatcaggtgttgaagaccttaacatcattcaggtgacaattccagatgatgataatgaaagactctcgaaagttgaaaaagctagacagctaagagaacaagtgaatgacctctttagtcggaaatttggtgaagctattggtatgggttttcctgtgaaagttccctacaggaaaatcacaattaaccctggctgtgtggtggttgatggcatgcccccgggggtgtccttcaaagcccccagctacctggaaatcagctccatgagaaggatcttagactctgccgagtttatcaaattcacggtcattagaccatttccaggacttgtgattaataaccagctggttgatcagagtgagtcagaaggccccgtgatacaagaatcagctgaaccaagccagttggaagttccagccacagaagaaataaaagagactgatggaagctctcagatcaagcaagaaccagaccccacgtggtagacctcttccctcctagggtaaatcagcttctgtgtcagggatgctgtgtggtgtccatctgaaccccctgcatacgcgtagctaatgtgatctccccactttcacataagatggtggccctgccttcagggaatgtgggagccaggtgggagccttcccggatatttaagctagaagattctacagggagattctccttggatcaatatatgtctctcagtcaaagatgtaaaagcacttttgccttaaaaagaatgttctgtttctaaatagagtcaacgttgtcctcctcattggaattcactatgagtcagaatcattagactgacttttttttttccatagtaatagtattttgcagagtctcacagagctgcagatcttttgttcatcttgcagagttaacaagtctgatcctgttagtccagatttcttaaatttggccaagttataataggagcagtagcttgagacccgaagtcaggaaactttgacaatggatttttttttttaatccagagacttgtactggaatttgccttaccctgtcagctcatggacttaaggtttcatcccgctttatgagtgcttctgaatccaagtcattgttacctgaatttgcaaattaagttgtgatattcgtgactgttaaattcctgtaattagattaacctctttgcttgcttgtttgttttctctcctattttagcttaaagtatcagtggttgagaagagcttttcggacctgttactaccccaagctgtgtaatatacttgtataacagaaataccttctatacaaacctttttttctacttttagatagaaatgtctactttttcagcagttctgtgaattaaagagcagagtgactgtgggtctggaatggctggtgtacttgggaatgtactatcaggattttacagcaatgctgggaaatgacagggaaaatgacaggaatgaatctcaccagattttttatgtactcagcagagccttgagttacggtgtttattttccaatcaagtgaagatatctcctacttctcctactggaacatctcagcttctgcagtgaagaaaaattcctgtgatagttcagttctttagtttttctatttgaaaaaaaaaaatcatttaaatgatcctttgttcacggctctccttaatgactgagtgaacagttcctatctgtatatttgactaaaccttttcctaagctatctctcatggttcctatgtttttttatcataattaaaagcaaaaccatctggatcacctaacagtcagaggtcagtatctcagcgtgtgaattatagaggaaatacagagagaacctcttccacttttacttttcgtccaaataaaatgcatggtgtaccagaagttgaagatcgggttgaggattggggctagctcgatgacactaaggccccaacatcgcgggacctgctgtggcgcggattcttaggaacgctgttctagccggccccctctccaggggtcgccgtggccggcattatttcctagttcttcttgtaaccctgaggtgccagcgcggggagtgaggaggggtcagggggctaaggatgcaacctctgacgttctgcgccttcctaggagagtcttacatgtgttgagatttcacaagcaatgcgagttgtaaaataccagctctacaagaagctaggctctgtgacggcatagttttcagtagctttatcacaatattcacaatggagaattatatgacatggtagcagaaataggcccttttatgtgttgcttctattttacctcaaattgtagatatagggtaatcaataaaatccatccatgcctttcacacactaagt

SEQ ID NO: 4963 - protein, 538 aa, Homo sapiens; identical to SEQ ID NO: 4183

SEQ ID NO: 4964 - DNA, 5033 bp, Homo sapiens
aaaaaaaaaaaaaaaaaaaaaaaaaaaagaaaaaagaaaaaaaaaaggaggaggaggaggagggtgagagagaagctgggagagcagagaaaaggggccaccggtcgcccccccgcttccccgcacgcgctctccagccgcggccgcccgcctgccgcggtcaccccggcctctgcctctgtcccccagtgatcggatcaaggcgctgagcgaggccctgcctgcggggcggccatgcggcggtgacaggagcgcgaccgacacgcacgggcccctcgccccctctcgcctcccgtccgctcgccagctcccctcagccgaggctgctccgcggcggccgcagcccgcgcgcggcccacactcgcctcccctcggcacccccggccccggagctgcctggaggcggccgcactcggggatcatggcccaagttgcaatgtccaccctccccgttgaagatgaggagtcctcggagagcaggatggtggtgacattcctcatgtcagctctcgagtccatgtgtaaagaactggccaagtccaaagccgaagtggcctgcattgcagtgtatgaaacagacgtgtttgtcgtcggaactgaaagaggacgtgcttttgtcaataccagaaaggattttcaaaaagattttgtaaaatattgtgttgaagaagaagaaaaagctgcagagatgcataaaatgaaatctacaacccaggcaaatcggatgagtgtagatgctgtagaaattgaaacactcagaaaaacagttgaggactatttctgcttttgctatgggaaagctttaggcaaatccacagtggtacctgtaccatatgagaagatgctgcgagaccagtcggctgtggtagtgcaggggcttccggaaggtgttgcctttaaacaccccgagaactatgatcttgcaaccctgaaatggattttggagaacaaagcagggatttcattcatcattaagagaccttttttagagccaaagaagcatgtaggtggtcgtgtgatggtaacagatgctgacaggtcaatactatctccaggtggaagttgtggccccatcaaagtgaaaactgaacccacagaagattctggcatttccctggaaatggcagctgtgacagtaaaggaagaatcagaagatcctgattattatcaatataacattcaaggaagccaccattcttcagagggcaatgaaggcacagaaatggaagtaccagcagaagatgatgattattctccaccgtctaagagaccaaaggccaatgagctaccgcagccaccagtcccggaacccgccaatgctgggaagcggaaagtgagggagttcaacttcgagaaatggaatgctcgcatcactgatctacgtaaacaagttgaagaattgtttgaaaggaaatatgctcaagccataaaagccaaaggtccggtgacgatcccgtaccctcttttccagtctcatgttgaagatctttatgtagaaggacttcctgaaggaattccttttagaaggccatctacttacggaattcctcgcctggagaggatattacttgcaaaggaaaggattcgttttgtgattaagaaacatgagcttctgaattcaacacgtgaagatttacagcttgataagccagcttcaggagtaaaggaagaatggtatgccagaatcactaaattaagaaagatggtggatcagcttttctgcaaaaaatttgcggaagccttggggagcactgaagccaaggctgtaccgtaccaaaaatttgaggcacacccgaatgatctgtacgtggaaggactgccagaaaacattcctttccgaagtccctcatggtatggaatcccaaggctggaaaaaatcattcaagtgggcaatcgaattaaatttgttattaaaagaccagaacttctgactcacagtaccactgaagttactcagccaagaacgaatacaccagtcaaagaagattggaatgtcagaattaccaagctacggaagcaagtggaagagatttttaatttgaaatttgctcaagctcttggactcaccgaggcagtaaaagtaccatatcctgtgtttgaatcaaacccggagttcttgaaaggatcgtccgcgggagtaataaaatcaagttcgttgttaaaaaacctgaactagttatttcctacttgcctcctgggatggctagtaaaataaacactaaagctttgcagtcccccaaaagaccacgaagtcctgggagtaattcaaaggttcctgaaattgaggtcaccgtggaaggccctaataacaacaatcctcaaacctcagctgttcgaaccccgacccagactaacggttctaacgttcccttcaagccacgagggagagagttttcctttgaggcctggaatgccaaaatcacggacctaaaacagaaagttgaaaatctcttcaatgagaaatgtggggaagctcttggccttaaacaagctgtgaaggtgccgttcgcgttatttgagtctttcccggaagacttttatgtggaaggcttacctgagggtgtgccattccgaagaccatcgacttttggcattccgaggctggagaagatactcagaaacaaagccaaaattaagttcatcattaaaaagcccgaaatgtttgagacggcgattaaggagagcacctcctctaagagccctcccagaaaaataaattcatcacccaatgttaatactactgcatcaggtgttgaagaccttaacatcattcaggtgacaattccagatgatgataatgaaagactctcgaaagttgaaaaagctagacagctaagagaacaagtgaatgacctctttagtcggaaatttggtgaagctattggtatgggttttcctgtgaaagttccctacaggaaaatcacaattaaccctggctgtgtggtggttgatggcatgcccccgggggtgtccttcaaagcccccagctacctggaaatcagctccatgagaaggatcttagactctgccgagtttatcaaattcacggtcattagaccatttccaggacttgtgattaataaccagctggttgatcagagtgagtcagaaggccccgtgatacaagaatcagctgaaccaagccagttggaagttccagccacagaaggtaaaaggacctcttccctcctagggtaaatcagcttctgtgtcagggatgctgtgtggtgtccatctgaaccccctgcatacgcgtagctaatgtgatctccccactttcacataagatggtggccctgccttcagggaatgtgggagccaggtgggagccttcccggatatttaagctagaagattctacagggagattctccttggatcaatatatgtctctcagtcaaagatgtaaaagcacttttgccttaaaaagaatgttctgtttctaaatagagtcaacgttgtcctcctcattggaattcactatgagtcagaatcattagactgacttttttttttccatagtaatagtattttgcagagtctcacagagctgcagatcttttgttcatcttgcagagttaacaagtctgatcctgttagtccagatttcttaaatttggccaagttataataggagcagtagcttgagacccgaagtcaggaaactttgacaatggatttttttttttaatccagagacttgtactggaatttgccttaccctgtcagctcatggacttaaggtttcatcccgctttatgagtgcttctgaatccaagtcattgttacctgaatttgcaaattaagttgtgatattcgtgactgttaaattcctgtaattagattaacctctttgcttgcttgtttgttttctctcctattttagcttaaagtatcagtggttgagaagagcttttcggacctgttactaccccaagctgtgtaatatacttgtataacagaaataccttctatacaaacctttttttctacttttagatagaaatgtctactttttcagcagttctgtgaattaaagagcagagtgactgtgggtctggaatggctggtgtacttgggaatgtactatcaggattttacagcaatgctgggaaatgacagggaaaatgacaggaatgaatctcaccagattttttatgtactcagcagagccttgagttacggtgtttattttccaatcaagtgaagatatctcctacttctcctactggaacatctcagcttctgcagtgaagaaaaattcctgtgatagttcagttctttagtttttctatttgaaaaaaaaaaatcatttaaatgatcctttgttcacggctctccttaatgactgagtgaacagttcctatctgtatatttgactaaaccttttcctaagctatctctcatggttcctatgtttttttatcataattaaaagcaaaaccatctggatcacctaacagtcagaggtcagtatctcagcgtgtgaattatagaggaaatacagagagaacctcttccacttttacttttcgtccaaataaaatgcatggtgtaccagaagttgaagatcgggttgaggattggggctagctcgatgacactaaggccccaacatcgcgggacctgctgtggcgcggattcttaggaacgctgttctagccggccccctctccaggggtcgccgtggccggcattatttcctagttcttcttgtaaccctgaggtgccagcgcggggagtgaggaggggtcagggggctaaggatgcaacctctgacgttctgcgccttcctaggagagtcttacatgtgttgagatttcacaagcaatgcgagttgtaaaataccagctctacaagaagctaggctctgtgacggcatagttttcagtagctttatcacaatattcacaatggagaattatatgacatggtagcagaaataggcccttttatgtgttgcttctattttacctcaaattgtagatatagggtaatcaataaaatccatccatgcctttcacacactaagt

SEQ ID NO: 4965 - protein, 584 aa, Homo sapiens; identical to SEQ ID NO: 4173

SEQ ID NO: 4966 - DNA, 4515 bp, Homo sapiens
aaaaaaaaaaaaaaaaaaaaaaaaaaaagaaaaaagaaaaaaaaaaggaggaggaggaggagggtgagagagaagctgggagagcagagaaaaggggccaccggtcgcccccccgcttccccgcacgcgctctccagccgcggccgcccgcctgccgcggtcaccccggcctctgcctctgtcccccagtgatcggatcaaggcgctgagcgaggccctgcctgcggggcggccatgcggcggtgacaggagcgcgaccgacacgcacgggcccctcgccccctctcgcctcccgtccgctcgccagctcccctcagccgaggctgctccgcggcggccgcagcccgcgcgcggcccacactcgcctcccctcggcacccccggccccggagctgcctggaggcggccgcactcggggatcatggcccaagttgcaatgtccaccctccccgttgaagatgaggagtcctcggagagcaggatggtggtgacattcctcatgtcagctctcgagtccatgtgtaaagaactggccaagtccaaagccgaagtggcctgcattgcagtgtatgaaacagacgtgtttgtcgtcggaactgaaagaggacgtgcttttgtcaataccagaaaggattttcaaaaagattttgtaaaatattgtgttgaagaagaagaaaaagctgcagagatgcataaaatgaaatctacaacccaggcaaatcggatgagtgtagatgctgtagaaattgaaacactcagaaaaacagttgaggactatttctgcttttgctatgggaaagctttaggcaaatccacagtggtacctgtaccatatgagaagatgctgcgagaccagtcggctgtggtagtgcaggggcttccggaaggtgttgcctttaaacaccccgagaactatgatcttgcaaccctgaaatggattttggagaacaaagcagggatttcattcatcattaagagaccttttttagagccaaagaagcatgtaggtggtcgtgtgatggtaacagatgctgacaggtcaatactatctccaggtggaagttgtggccccatcaaagtgaaaactgaacccacagaagattctggcatttccctggaaatggcagctgtgacagtaaaggaagaatcagaagatcctgattattatcaatataacattcaagcaggcccttctgaaactgatgatgttgatgaaaaacagcccctatcgaagcctttgcaaggaagccaccattcttcagagggcaatgaaggcacagaaatggaagtaccagcagaagattctactcaacatgtcccttcagaaacaagtgaggaccctgaagttgaggtgactattgaagatgatgattattctccaccgtctaagagaccaaaggccaatgagctaccgcagccaccagtcccggaacccgccaatgctgggaagcggaaagtgagggagttcaacttcgagaaatggaatgctcgcatcactgatctacgtaaacaagttgaagaattgtttgaaaggaaatatgctcaagccataaaagccaaaggtccggtgacgatcccgtaccctcttttccagtctcatgttgaagatctttatgtagaaggacttcctgaaggaattccttttagaaggccatctacttacggaattcctcgcctggagaggatattacttgcaaaggaaaggattcgttttgtgattaagaaacatgagcttctgaattcaacacgtgaagatttacagcttgataagccagcttcaggagtaaaggaagaatggtatgccagaatcactaaattaagaaagatggtggatcagcttttctgcaaaaaatttgcggaagccttggggagcactgaagccaaggctgtaccgtaccaaaaatttgaggcacacccgaatgatctgtacgtggaaggactgccagaaaacattcctttccgaagtccctcatggtatggaatcccaaggctggaaaaaatcattcaagtgggcaatcgaattaaatttgttattaaaagaccagaacttctgactcacagtaccactgaagttactcagccaagaacgaatacaccagtcaaagaagattggaatgtcagaattaccaagctacggaagcaagtggaagagatttttaatttgaaatttgctcaagctcttggactcaccgaggcagtaaaagtaccatatcctgtgtttgaatcaaacccggagttcttgaaaggatcgtccgcgggagtaataaaatcaagttcgttgttaaaaaacctgaactagttatttcctacttgcctcctgggatggctagtaaaataaacactaaagctttgcagtcccccaaaagaccacgaagtcctgggagtaattcaaaggttcctgaaattgaggtcaccgtggaaggccctaataacaacaatcctcaaacctcagctgttcgaaccccgacccagactaacggttctaacgttcccttcaagccacgagggagagagttttcctttgaggcctggaatgccaaaatcacggacctaaaacagaaagttgaaaatctcttcaatgagaaatgtggggaagctcttggccttaaacaagctgtgaaggtgccgttcgcgttatttgagtctttcccggaagacttttatgtggaaggcttacctgagggtgtgccattccgaagaccatcgacttttggcattccgaggctggagaagatactcagaaacaaagccaaaattaagttcatcattaaaaagcccgaaatgtttgagacggcgattaaggagagcacctcctctaagagccctcccagaaaaataaattcatcacccaatgttaatactactgcatcaggtgttgaagaccttaacatcattcaggtgacaattccagatgatgataatgaaagactctcgaaagttgaaaaagctagacagctaagagaacaagtgaatgacctctttagtcggaaatttggtgaagctattggtatgggttttcctgtgaaagttccctacaggaaaatcacaattaaccctggctgtgtggtggttgatggcatgcccccgggggtgtccttcaaagcccccagctacctggaaatcagctccatgagaaggatcttagactctgccgagtttatcaaattcacggtcattagaccatttccaggacttgtgattaataaccagctggttgatcagagtgagtcagaaggccccgtgatacaagaatcagctgaaccaagccagttggaagttccagccacagaagaaataaaagagactgatggaagctctcagatcaagcaagaaccagaccccacgtggtagacctcttccctcctaggcttaaagtatcagtggttgagaagagcttttcggacctgttactaccccaagctgtgtaatatacttgtataacagaaataccttctatacaaacctttttttctacttttagatagaaatgtctactttttcagcagttctgtgaattaaagagcagagtgactgtgggtctggaatggctggtgtacttgggaatgtactatcaggattttacagcaatgctgggaaatgacagggaaaatgacaggaatgaatctcaccagattttttatgtactcagcagagccttgagttacggtgtttattttccaatcaagtgaagatatctcctacttctcctactggaacatctcagcttctgcagtgaagaaaaattcctgtgatagttcagttctttagtttttctatttgaaaaaaaaaaatcatttaaatgatcctttgttcacggctctccttaatgactgagtgaacagttcctatctgtatatttgactaaaccttttcctaagctatctctcatggttcctatgtttttttatcataattaaaagcaaaaccatctggatcacctaacagtcagaggtcagtatctcagcgtgtgaattatagaggaaatacagagagaacctcttccacttttacttttcgtccaaataaaatgcatggtgtaccagaagttgaagatcgggttgaggattggggctagctcgatgacactaaggccccaacatcgcgggacctgctgtggcgcggattcttaggaacgctgttctagccggccccctctccaggggtcgccgtggccggcattatttcctagttcttcttgtaaccctgaggtgccagcgcggggagtgaggaggggtcagggggctaaggatgcaacctctgacgttctgcgccttcctaggagagtcttacatgtgttgagatttcacaagcaatgcgagttgtaaaataccagctctacaagaagctaggctctgtgacggcatagttttcagtagctttatcacaatattcacaatggagaattatatgacatggtagcagaaataggcccttttatgtgttgcttctattttacctcaaattgtagatatagggtaatcaataaaatccatccatgcctttcacacactaagt

SEQ ID NO: 4967 - protein, 625 aa, Homo sapiens; identical to SEQ ID NO: 4033

SEQ ID NO: 4968 - DNA, 4056 bp, Homo sapiens
aaaaaaaaaaaaaaaaaaaaaaaaaaaagaaaaaagaaaaaaaaaaggaggaggaggaggagggtgagagagaagctgggagagcagagaaaaggggccaccggtcgcccccccgcttccccgcacgcgctctccagccgcggccgcccgcctgccgcggtcaccccggcctctgcctctgtcccccagtgatcggatcaaggcgctgagcgaggccctgcctgcggggcggccatgcggcggtgacaggagcgcgaccgacacgcacgggcccctcgccccctctcgcctcccgtccgctcgccagctcccctcagccgaggctgctccgcggcggccgcagcccgcgcgcggcccacactcgcctcccctcggcacccccggccccggagctgcctggaggcggccgcactcggtgtaaagaactggccaagtccaaagccgaagtggcctgcattgcagtgtatgaaacagacgtgtttgtcgtcggaactgaaagaggacgtgcttttgtcaataccagaaaggattttcaaaaagattttgtaaaatattgtgttgaagaagaagaaaaagctgcagagatgcataaaatgaaatctacaacccaggcaaatcggatgagtgtagatgctgtagaaattgaaacactcagaaaaacagttgaggactatttctgcttttgctatgggaaagctttaggcaaatccacagtggtacctgtaccatatgagaagatgctgcgagaccagtcggctgtggtagtgcaggggcttccggaaggtgttgcctttaaacaccccgagaactatgatcttgcaaccctgaaatggattttggagaacaaagcagggatttcattcatcattaagagaccttttttagagccaaagaagcatgtaggtggtcgtgtgatggtaacagatgctgacaggtcaatactatctccaggtggaagttgtggccccatcaaagtgaaaactgaacccacagaagattctggaagccaccattcttcagagggcaatgaaggcacagaaatggaagtaccagcagaagattctactcaacatgtcccttcagaaacaagtgaggaccctgaagttgaggtgactattgaagatgatgattattctccaccgtctaagagaccaaaggccaatgagctaccgcagccaccagtcccggaacccgccaatgctgggaagcggaaagtgagggagttcaacttcgagaaatggaatgctcgcatcactgatctacgtaaacaagttgaagaattgtttgaaaggaaatatgctcaagccataaaagccaaaggtccggtgacgatcccgtaccctcttttccagtctcatgttgaagatctttatgtagaaggacttcctgaaggaattccttttagaaggccatctacttacggaattcctcgcctggagaggatattacttgcaaaggaaaggattcgttttgtgattaagaaacatgagcttctgaattcaacacgtgaagatttacagcttgataagccagcttcaggagtaaaggaagaatggtatgccagaatcactaaattaagaaagatggtggatcagcttttctgcaaaaaatttgcggaagccttggggagcactgaagccaaggctgtaccgtaccaaaaatttgaggcacacccgaatgatctgtacgtggaaggactgccagaaaacattcctttccgaagtccctcatggtatggaatcccaaggctggaaaaaatcattcaagtgggcaatcgaattaaatttgttattaaaagaccagaacttctgactcacagtaccactgaagttactcagccaagaacgaatacaccagtcaaagaagattggaatgtcagaattaccaagctacggaagcaagtggaagagatttttaatttgaaatttgctcaagctcttggactcaccgaggcagtaaaagtaccatatcctgtgtttgaatcaaacccggagttcttgtatgtggaaggcttgccagaggggattcccttccgaagccctacctggtttggaattccacgacttgaaaggatcgtccgcgggagtaataaaatcaagttcgttgttaaaaaacctgaactagttatttcctacttgcctcctgggatggctagtaaaataaacactaaagctttgcagtcccccaaaagaccacgaagtcctgggagtaattcaaaggttcctgaaattgaggtcaccgtggaaggccctaataacaacaatcctcaaacctcagctgttcgaaccccgacccagactaacggttctaacgttcccttcaagccacgagggagagagttttcctttgaggcctggaatgccaaaatcacggacctaaaacagaaagttgaaaatctcttcaatgagaaatgtggggaagctcttggccttaaacaagctgtgaaggtgccgttcgcgttatttgagtctttcccggaagacttttatgtggaaggcttacctgagggtgtgccattccgaagaccatcgacttttggcattccgaggctggagaagatactcagaaacaaagccaaaattaagttcatcattaaaaagcccgaaatgtttgagacggcgattaaggagagcacctcctctaagagccctcccagaaaaataaattcatcacccaatgttaatactactgcatcaggtgttgaagaccttaacatcattcaggtgacaattccagatgatgataatgaaagactctcgaaagttgaaaaagctagacagctaagagaacaagtgaatgacctctttagtcggaaatttggtgaagctattggtatgggttttcctgtgaaagttccctacaggaaaatcacaattaaccctggctgtgtggtggttgatggcatgcccccgggggtgtccttcaaagcccccagctacctggaaatcagctccatgagaaggatcttagactctgccgagtttatcaaattcacggtcattagaccatttccaggacttgtgattaataaccagctggttgatcagagtgagtcagaaggccccgtgatacaagaatcagctgaaccaagccagttggaagttccagccacagaagaaataaaagagactgatggaagctctcagatcaagcaagaaccagaccccacgtggtagacctcttccctcctaggagccttgagttacggtgtttattttccaatcaagtgaagatatctcctacttctcctactggaacatctcagcttctgcagtgaagaaaaattcctgtgatagttcagttctttagtttttctatttgaaaaaaaaaaatcatttaaatgatcctttgttcacggctctccttaatgactgagtgaacagttcctatctgtatatttgactaaaccttttcctaagctatctctcatggttcctatgtttttttatcataattaaaagcaaaaccatctggatcacctaacagtcagaggtcagtatctcagcgtgtgaattatagaggaaatacagagagaacctcttccacttttacttttcgtccaaataaaatgcatggtgtaccagaagttgaagatcgggttgaggattggggctagctcgatgacactaaggccccaacatcgcgggacctgctgtggcgcggattcttaggaacgctgttctagccggccccctctccaggggtcgccgtggccggcattatttcctagttcttcttgtaaccctgaggtgccagcgcggggagtgaggaggggtcagggggctaaggatgcaacctctgacgttctgcgccttcctaggagagtcttacatgtgttgagatttcacaagcaatgcgagttgtaaaataccagctctacaagaagctaggctctgtgacggcatagttttcagtagctttatcacaatattcacaatggagaattatatgacatggtagcagaaataggcccttttatgtgttgcttctattttacctcaaattgtagatatagggtaatcaataaaatccatccatgcctttcacacactaagt

SEQ ID NO: 4969 - protein, 863 aa, Homo sapiens; identical to SEQ ID NO: 4039

SEQ ID NO: 4970 - DNA, 7271 bp, Homo sapiens
aaaaaaaaaaaaaaaaaaaaaaaaaaaagaaaaaagaaaaaaaaaaggaggaggaggaggagggtgagagagaagctgggagagcagagaaaaggggccaccggtcgcccccccgcttccccgcacgcgctctccagccgcggccgcccgcctgccgcggtcaccccggcctctgcctctgtcccccagtgatcggatcaaggcgctgagcgaggccctgcctgcggggcggccatgcggcggtgacaggagcgcgaccgacacgcacgggcccctcgccccctctcgcctcccgtccgctcgccagctcccctcagccgaggctgctccgcggcggccgcagcccgcgcgcggcccacactcgcctcccctcggcacccccggccccggagctgcctggaggcggccgcactcggggatcatggcccaagttgcaatgtccaccctccccgttgaagatgaggagtcctcggagagcaggatggtggtgacattcctcatgtcagctctcgagtccatgtgtaaagaactggccaagtccaaagccgaagtggcctgcattgcagtgtatgaaacagacgtgtttgtcgtcggaactgaaagaggacgtgcttttgtcaataccagaaaggattttcaaaaagattttgtaaaatattgtgttgaagaagaagaaaaagctgcagagatgcataaaatgaaatctacaacccaggcaaatcggatgagtgtagatgctgtagaaattgaaacactcagaaaaacagttgaggactatttctgcttttgctatgggaaagctttaggcaaatccacagtggtacctgtaccatatgagaagatgctgcgagaccagtcggctgtggtagtgcaggggcttccggaaggtgttgcctttaaacaccccgagaactatgatcttgcaaccctgaaatggattttggagaacaaagcagggatttcattcatcattaagagaccttttttagagccaaagaagcatgtaggtggtcgtgtgatggtaacagatgctgacaggtcaatactatctccaggtggaagttgtggccccatcaaagtgaaaactgaacccacagaagattctggcatttccctggaaatggcagctgtgacagtaaaggaagaatcagaagatcctgattattatcaatataacattcaagcaggcccttctgaaactgatgatgttgatgaaaaacagcccctatcgaagcctttgcaaggaagccaccattcttcagagggcaatgaaggcacagaaatggaagtaccagcagaagattctactcaacatgtcccttcagaaacaagtgaggaccctgaagttgaggtgactattgaagatgatgattattctccaccgtctaagagaccaaaggccaatgagctaccgcagccaccagtcccggaacccgccaatgctgggaagcggaaagtgagggagttcaacttcgagaaatggaatgctcgcatcactgatctacgtaaacaagttgaagaattgtttgaaaggaaatatgctcaagccataaaagccaaaggtccggtgacgatcccgtaccctcttttccagtctcatgttgaagatctttatgtagaaggacttcctgaaggaattccttttagaaggccatctacttacggaattcctcgcctggagaggatattacttgcaaaggaaaggattcgttttgtgattaagaaacatgagcttctgaattcaacacgtgaagatttacagcttgataagccagcttcaggagtaaaggaagaatggtatgccagaatcactaaattaagaaagatggtggatcagcttttctgcaaaaaatttgcggaagccttggggagcactgaagccaaggctgtaccgtaccaaaaatttgaggcacacccgaatgatctgtacgtggaaggactgccagaaaacattcctttccgaagtccctcatggtatggaatcccaaggctggaaaaaatcattcaagtgggcaatcgaattaaatttgttattaaaagaccagaacttctgactcacagtaccactgaagttactcagccaagaacgaatacaccagctcaagctcttggactcaccgaggcagtaaaagtaccatatcctgtgtttgaatcaaacccggagttcttgtatgtggaaggcttgccagaggggattcccttccgaagccctacctggtttggaattccacgacttgaaaggatcgtccgcgggagtaataaaatcaagttcgttgttaaaaaacctgaactagttatttcctacttgcctcctgggatggctagtaaaataaacactaaagctttgcagtcccccaaaagaccacgaagtcctgggagtaattcaaaggttcctgaaattgaggtcaccgtggaaggccctaataacaacaatcctcaaacctcagctgttcgaaccccgacccagactaacggttctaacgttcccttcaagccacgagggagagagttttcctttgaggcctggaatgccaaaatcacggacctaaaacagaaagttgaaaatctcttcaatgagaaatgtggggaagctcttggccttaaacaagctgtgaaggtgccgttcgcgttatttgagtctttcccggaagacttttatgtggaaggcttacctgagggtgtgccattccgaagaccatcgacttttggcattccgaggctggagaagatactcagaaacaaagccaaaattaagttcatcattaaaaagcccgaaatgtttgagacggcgattaaggagagcacctcctctaagagccctcccagaaaaataaattcatcacccaatgttaatactactgcatcaggtgttgaagaccttaacatcattcaggtgacaattccagatgatgataatgaaagactctcgaaagttgaaaaagctagacagctaagagaacaagtgaatgacctctttagtcggaaatttggtgaagctattggtatgggttttcctgtgaaagttccctacaggaaaatcacaattaaccctggctgtgtggtggttgatggcatgcccccgggggtgtccttcaaagcccccagctacctggaaatcagctccatgagaaggatcttagactctgccgagtttatcaaattcacggtcattaggtaagtgagagtttcctgcttagtcacaggagcgaatctggagctcatgaggctgactcttctaaaatgcagccacaggtagtcatcgaatccggcttcctatgctgtgcaatcaacaaatcaaaataacttgtgtcatcattagaatgtcagatgtgcttctacgaactaagctgactcttttaattctttggcaaagggttggcaaactaggactgtttgccaaattcaggctgcctcctatttttagagtcttcctgaaacacagctacacccgtattatccatggctgctttcctgtcacagtgagtaagtagctgggactgagaaggcatggcctccaaagtctaaaatatttactctctagcactttgtagaaaaaccttagctaggcacagtggctaacgcctgtaatcccagcattttgggaggccaaggcaggcagatcacctgaggtcaggagttccagaccagcctggccaacatggtgaaatcccatctctacaaaaataaaacagttagctgggcatgatggcgggtgcctgtaatcccagctactcgggaggctgaggcaggatagtcgcttgaacccaggaggtggaggttgcaatgagccaagatcatgccactgcactccagcctggacgacagagtgagactccatcacaagaaaaaaagaactttgtcaacctctgtcttagggcgccttgtcacaggcttcgggtcagacggattcaaccttgcatcagccatttgttagccaggtcactctgttctttgtctgtaaatgagattgatcgttgttcccactgagagtgtcagctccttcccgtagagcaggcatgatgattgtactcacctctgacaccattgtgagtgccacattccttcccacgtccttgtcactgtaagagatgcccacctgagcaccaaccccaggttatcttcccctttgtcttccagccccccagaaacagctacgactcaacctacccaatcatttcatcatcagattgccactgtctctagttcaggtctcttgggactggcactcagaaatctcataataaatcctcttgaggcttctcatacactcgtcttcttccaatcttctttccctcaaaatctcatattttggttccacttcacccaccgtcattctccatatcactcccaggagttaggcaaaaagccccttccgttcttccgtatgttaaacttagaatcactctgttccctgctctgcgtttctattttttgtttttcctccatttactagtagcttaacactttctaacagtgttcttattattgatacgtatctatctcttccataagcttataaggtcacggataatacttctcattgtagtacgtaaatgacgtgggctagatatgagttgaataaacagttatacctgtaaattcttacagagtgaaaataaattgttatactttacaatttgtttctctctttagaccatttccaggacttgtgattaataaccgtgagtattttgtgaagtgttttgtttttgttttttcctggggtctgacgtgtgtgcgtgtgagtgtgtatacatgcttaacgtatatcacgttacttcacctatgtcagtaaccaggccaaatacttgttttagccctcagtaaaaacaccaggcacttcctagttgtaaaattattcaagcttcttaacttcctatcctcgatgcacttaatcataaaatggtaataatagcaccgattttgggggagtcgttccagtagatggaaagcatctggaacaggtgtcagcaagctcctgccgacgtgtatgcataaagttttattgaaaccaccatcgtgtccatttgtttatggcagaactgagagatggcagcagcaagtgtgtgcctgcaaaacctaaaatatttactaattggctctgcaagaaaagagtttgcatccccctaacctagaacagtgtctagcctctagtatgtgtttagcctacagtatgtgctcagcgaatacaatctatatttattactgcttttatgactgttataattactgtgcttggatttcgttacaaagtaagtcacaatgtgcctgcttctgttagtatttcagcacagtgcctggcacacatggggctctcaaatattgctgagcgagtgaacaaatgtcctttcaattccttaacgttgatgtcattttcaatagtattttgagccaaacttaattttgcgagtgtgttttgttttcttaactttattattaaaaatgtataaaagtgaggccaggcgtggtggctcacgcctgtaatcccagcagtttgggaggctgaggcaggcggatcagttgaggttgggagttggagaccagcccgtccaacatggtgaaagcctgtctctactaaaaatacaaaaatcagctgggtgtggtggcgcgtgcctgtaatcccagctactcaggaggctgaggcaggagagttgcttgaatcctagaggtggaggttgcagtgagctgagatcgtgccattgcactccagcctgggcaacaagagcaaaactctgtcccaataaataaataaataaaatgttctcttttgttcctgttcttgtgcggtagtgtggtatagagttttatggtaattactgtgaattagtgattctgagggacatatcagaactctgaggtttgtttccttctcatcttgagggaaacagcaaatgtatgttaaaatgcttttccaagggaacaacacatccttacattatttaaaccaatctgcttcattttcagagctggttgatcagagtgagtcagaaggccccgtgatacaagaatcagctgaaccaagccagttggaagttccagccacagaagaaataaaagagactgatggaagctctcagatcaagcaagaaccagaccccacgtggtagacctcttccctcctaggcttaaagtatcagtggttgagaagagcttttcggacctgttactaccccaagctgtgtaatatacttgtataacagaaataccttctatacaaacctttttttctacttttagatagaaatgtctactttttcagcagttctgtgaattaaagagcagagtgactgtgggtctggaatggctggtgtacttgggaatgtactatcaggattttacagcaatgctgggaaatgacagggaaaatgacaggaatgaatctcaccagattttttatgtactcagcagagccttgagttacggtgtttattttccaatcaagtgaagatatctcctacttctcctactggaacatctcagcttctgcagtgaagaaaaattcctgtgatagttcagttctttagtttttctatttgaaaaaaaaaaatcatttaaatgatcctttgttcacggctctccttaatgactgagtgaacagttcctatctgtatatttgactaaaccttttcctaagctatctctcatggttcctatgtttttttatcataattaaaagcaaaaccatctggatcacctaacagtcagaggtcagtatctcagcgtgtgaattatagaggaaatacagagagaacctcttccacttttacttttcgtccaaataaaatgcatggtgtaccagaagttgaagatcgggttgaggattggggctagctcgatgacactaaggccccaacatcgcgggacctgctgtggcgcggattcttaggaacgctgttctagccggccccctctccaggggtcgccgtggccggcattatttcctagttcttcttgtaaccctgaggtgccagcgcggggagtgaggaggggtcagggggctaaggatgcaacctctgacgttctgcgccttcctaggagagtcttacatgtgttgagatttcacaagcaatgcgagttgtaaaataccagctctacaagaagctaggctctgtgacggcatagttttcagtagctttatcacaatattcacaatggagaattatatgacatggtagcagaaataggcccttttatgtgttgcttctattttacctcaaattgtagatatagggtaatcaataaaatccatccatgcctttcacacactaagt

SEQ ID NO: 4971 - protein, 918 aa, Homo sapiens; identical to SEQ ID NO: 4169

SEQ ID NO: 4972 - DNA, 4582 bp, Homo sapiens
aaaaaaaaaaaaaaaaaaaaaaaaaaaagaaaaaagaaaaaaaaaaggaggaggaggaggagggtgagagagaagctgggagagcagagaaaaggggccaccggtcgcccccccgcttccccgcacgcgctctccagccgcggccgcccgcctgccgcggtcaccccggcctctgcctctgtcccccagtgatcggatcaaggcgctgagcgaggccctgcctgcggggcggccatgcggcggtgacaggagcgcgaccgacacgcacgggcccctcgccccctctcgcctcccgtccgctcgccagctcccctcagccgaggctgctccgcggcggccgcagcccgcgcgcggcccacactcgcctcccctcggcacccccggccccggagctgcctggaggcggccgcactcggggatcatggcccaagttgcaatgtccaccctccccgttgaagatgaggagtcctcggagagcaggatggtggtgacattcctcatgtcagctctcgagtccatgtgtaaagaactggccaagtccaaagccgaagtggcctgcattgcagtgtatgaaacagacgtgtttgtcgtcggaactgaaagaggacgtgcttttgtcaataccagaaaggattttcaaaaagattttgtaaaatattgtgttgaagaagaagaaaaagctgcagagatgcataaaatgaaatctacaacccaggcaaatcggatgagtgtagatgctgtagaaattgaaacactcagaaaaacagttgaggactatttctgcttttgctatgggaaagctttaggcaaatccacagtggtacctgtaccatatgagaagatgctgcgagaccagtcggctgtggtagtgcaggggcttccggaaggtgttgcctttaaacaccccgagaactatgatcttgcaaccctgaaatggattttggagaacaaagcagggatttcattcatcattaagagaccttttttagagccaaagaagcatgtaggtggtcgtgtgatggtaacagatgctgacaggtcaatactatctccaggtggaagttgtggccccatcaaagtgaaaactgaacccacagaagattctggcatttccctggaaatggcagctgtgacagtaaaggaagaatcagaagatcctgattattatcaatataacattcaagcaggcccttctgaaactgatgatgttgatgaaaaacagcccctatcgaagcctttgcaaggaagccaccattcttcagagggcaatgaaggcacagaaatggaagtaccagcagaagattctactcaacatgtcccttcagaaacaagtgaggaccctgaagttgaggtgactattgaagatgatgattattctccaccgtctaagagaccaaaggccaatgagctaccgcagccaccagtcccggaacccgccaatgctgggaagcggaaagtgagggagttcaacttcgagaaatggaatgctcgcatcactgatctacgtaaacaagttgaagaattgtttgaaaggaaatatgctcaagccataaaagccaaaggtccggtgacgatcccgtaccctcttttccagtctcatgttgaagatctttatgtagaaggacttcctgaaggaattccttttagaaggccatctacttacggaattcctcgcctggagaggatattacttgcaaaggaaaggattcgttttgtgattaagaaacatgagcttctgaattcaacacgtgaagatttacagcttgataagccagcttcaggagtaaaggaagaatggtatgccagaatcactaaattaagaaagatggtggatcagcttttctgcaaaaaatttgcggaagccttggggagcactgaagccaaggctgtaccgtaccaaaaatttgaggcacacccgaatgatctgtacgtggaaggactgccagaaaacattcctttccgaagtccctcatggtatggaatcccaaggctggaaaaaatcattcaagtgggcaatcgaattaaatttgttattaaaagaccagaacttctgactcacagtaccactgaagttactcagccaagaacgaatacaccagtcaaagaagattggaatgtcagaattaccaagctacggaagcaagtggaagagatttttaatttgaaatttgctcaagctcttggactcaccgaggcagtaaaagtaccatatcctgtgtttgaatcaaacccggagttcttgtatgtggaaggcttgccagaggggattcccttccgaagccctacctggtttggaattccacgacttgaaaggatcgtccgcgggagtaataaaatcaagttcgttgttaaaaaacctgaactagttatttcctacttgcctcctgggatggctagtaaaataaacactaaagctttgcagtcccccaaaagaccacgaagtcctgggagtaattcaaaggttcctgaaattgaggtcaccgtggaaggccctaataacaacaatcctcaaacctcagctgttcgaaccccgacccagactaacggttctaacgttcccttcaagccacgagggagagagttttcctttgaggcctggaatgccaaaatcacggacctaaaacagaaagttgaaaatctcttcaatgagaaatgtggggaagctcttggccttaaacaagctgtgaaggtgccgttcgcgttatttgagtctttcccggaagacttttatgtggaaggcttacctgagggtgtgccattccgaagaccatcgacttttggcattccgaggctggagaagatactcagaaacaaagccaaaattaagttcatcattaaaaagcccgaaatgtttgagacggcgattaaggagagcacctcctctaagagccctcccagaaaaataaattcatcacccaatgttaatactactgcatcaggtgttgaagaccttaacatcattcaggtgacaattccagatgatgataatgaaagactctcgaaagttgaaaaagctagacagctaagagaacaagtgaatgacctctttagtcggaaatttggtgaagctattggtatgggttttcctgtgaaagttccctacaggaaaatcacaattaaccctggctgtgtggtggttgatggcatgcccccgggggtgtccttcaaagcccccagctacctggaaatcagctccatgagaaggatcttagactctgccgagtttatcaaattcacggtcattagaccatttccaggacttgtgattaataaccagctggttgatcagagtgagtcagaaggccccgtgatacaagaatcagctgaaccaagccagttggaagttccagccacagaagaaataaaagagactgatggaagctctcagatcaagcaagaaccagaccccacgtggtagacctcttccctcctaggcttaaagtatcagtggttgagaagagcttttcggacctgttactaccccaagctgtgtaatatacttgtataacagaaataccttctatacaaacctttttttctacttttagatagaaatgtctactttttcagcagttctgtgaattaaagagcagagtgactgtgggtctggaatggctggtgtacttgggaatgtactatcaggattttacagcaatgctgggaaatgacagggaaaatgacaggaatgaatctcaccagattttttatgtactcagcagagccttgagttacggtgtttattttccaatcaagtgaagatatctcctacttctcctactggaacatctcagcttctgcagtgaagaaaaattcctgtgatagttcagttctttagtttttctatttgaaaaaaaaaaatcatttaaatgatcctttgttcacggctctccttaatgactgagtgaacagttcctatctgtatatttgactaaaccttttcctaagctatctctcatggttcctatgtttttttatcataattaaaagcaaaaccatctggatcacctaacagtcagaggtcagtatctcagcgtgtgaattatagaggaaatacagagagaacctcttccacttttacttttcgtccaaataaaatgcatggtgtaccagaagttgaagatcgggttgaggattggggctagctcgatgacactaaggccccaacatcgcgggacctgctgtggcgcggattcttaggaacgctgttctagccggccccctctccaggggtcgccgtggccggcattatttcctagttcttcttgtaaccctgaggtgccagcgcggggagtgaggaggggtcagggggctaaggatgcaacctctgacgttctgcgccttcctaggagagtcttacatgtgttgagatttcacaagcaatgcgagttgtaaaataccagctctacaagaagctaggctctgtgacggcatagttttcagtagctttatcacaatattcacaatggagaattatatgacatggtagcagaaataggcccttttatgtgttgcttctattttacctcaaattgtagatatagggtaatcaataaaatccatccatgcctttcacacactaagt

SEQ ID NO: 4973 - protein, 998 aa, Homo sapiens; identical to SEQ ID NO: 468

SEQ ID NO: 4974 - DNA, 4082 bp, Homo sapiens
aaaaaaaaaaaaaaaaaaaaaaaaaaaagaaaaaagaaaaaaaaaaggaggaggaggaggagggtgagagagaagctgggagagcagagaaaaggggccaccggtcgcccccccgcttccccgcacgcgctctccagccgcggccgcccgcctgccgcggtcaccccggcctctgcctctgtcccccagtgatcggatcaaggcgctgagcgaggccctgcctgcggggcggccatgcggcggtgacaggagcgcgaccgacacgcacgggcccctcgccccctctcgcctcccgtccgctcgccagctcccctcagccgaggctgctccgcggcggccgcagcccgcgcgcggcccacactcgcctcccctcggcacccccggccccggagctgcctggaggcggccgcactcggggatcatggcccaagttgcaatgtccaccctccccgttgaagatgaggagtcctcggagagcaggatggtggtgacattcctcatgtcagctctcgagtccatgtgtaaagaactggccaagtccaaagccgaagtggcctgcattgcagtgtatgaaacagacgtgtttgtcgtcggaactgaaagaggacgtgcttttgtcaataccagaaaggattttcaaaaagattttgtaaaatattgtgttgaagaagaagaaaaagctgcagagatgcataaaatgaaatctacaacccaggcaaatcggatgagtgtagatgctgtagaaattgaaacactcagaaaaacagttgaggactatttctgcttttgctatgggaaagctttaggcaaatccacagtggtacctgtaccatatgagaagatgctgcgagaccagtcggctgtggtagtgcaggggcttccggaaggtgttgcctttaaacaccccgagaactatgatcttgcaaccctgaaatggattttggagaacaaagcagggatttcattcatcattaagagaccttttttagagccaaagaagcatgtaggtggtcgtgtgatggtaacagatgctgacaggtcaatactatctccaggtggaagttgtggccccatcaaagtgaaaactgaacccacagaagattctggcatttccctggaaatggcagctgtgacagtaaaggaagaatcagaagatcctgattattatcaatataacattcaaggaagccaccattcttcagagggcaatgaaggcacagaaatggaagtaccagcagaagattctactcaacatgtcccttcagaaacaagtgaggaccctgaagttgaggtgactattgaagatgatgattattctccaccgtctaagagaccaaaggccaatgagctaccgcagccaccagtcccggaacccgccaatgctgggaagcggaaagtgagggagttcaacttcgagaaatggaatgctcgcatcactgatctacgtaaacaagttgaagaattgtttgaaaggaaatatgctcaagccataaaagccaaaggtccggtgacgatcccgtaccctcttttccagtctcatgttgaagatctttatgtagaaggacttcctgaaggaattccttttagaaggccatctacttacggaattcctcgcctggagaggatattacttgcaaaggaaaggattcgttttgtgattaagaaacatgagcttctgaattcaacacgtgaagatttacagcttgataagccagcttcaggagtaaaggaagaatggtatgccagaatcactaaattaagaaagatggtggatcagcttttctgcaaaaaatttgcggaagccttggggagcactgaagccaaggctgtaccgtaccaaaaatttgaggcacacccgaatgatctgtacgtggaaggactgccagaaaacattcctttccgaagtccctcatggtatggaatcccaaggctggaaaaaatcattcaagtgggcaatcgaattaaatttgttattaaaagaccagaacttctgactcacagtaccactgaagttactcagccaagaacgaatacaccagtcaaagaagattggaatgtcagaattaccaagctacggaagcaagtggaagagatttttaatttgaaatttgcttagatttgttgacagcggtttcctggagtgctgtcttgagaacgattctgaggaggctcagcaagaaagagtgtttcagttgattgggtgtgtctgtcatggagaaggaactcaagctcttggactcaccgaggcagtaaaagtaccatatcctgtgtttgaatcaaacccggagttcttgtatgtggaaggcttgccagaggggattcccttccgaagccctacctggtttggaattccacgacttgaaaggatcgtccgcgggagtaataaaatcaagttcgttgttaaaaaacctgaactagttatttcctacttgcctcctgggatggctagtaaaataaacactaaagctttgcagtcccccaaaagaccacgaagtcctgggagtaattcaaaggttcctgaaattgaggtcaccgtggaaggccctaataacaacaatcctcaaacctcagctgttcgaaccccgacccagactaacggttctaacgttcccttcaagccacgagggagagagttttcctttgaggcctggaatgccaaaatcacggacctaaaacagaaagttgaaaatctcttcaatgagaaatgtggggaagctcttggccttaaacaagctgtgaaggtgccgttcgcgttatttgagtctttcccggaagacttttatgtggaaggcttacctgagggtgtgccattccgaagaccatcgacttttggcattccgaggctggagaagatactcagaaacaaagccaaaattaagttcatcattaaaaagcccgaaatgtttgagacggcgattaaggagagcacctcctctaagagccctcccagaaaaataaattcatcacccaatgttaatactactgcatcaggtgttgaagaccttaacatcattcaggtgacaattccagatgatgataatgaaagactctcgaaagttgaaaaagctagacagctaagagaacaagtgaatgacctctttagtcggaaatttggtgaagctattggtatgggttttcctgtgaaagttccctacaggaaaatcacaattaaccctggctgtgtggtggttgatggcatgcccccgggggtgtccttcaaagcccccagctacctggaaatcagctccatgagaaggatcttagactctgccgagtttatcaaattcacggtcattagaccatttccaggacttgtgattaataaccagctggttgatcagagtgagtcagaaggccccgtgatacaagaatcagctgaaccaagccagttggaagttccagccacagaagaaataaaagagactgatggaagctctcagatcaagcaagaaccagaccccacgtggtagacctcttccctcctaggcaaaaccatctggatcacctaacagtcagaggtcagtatctcagcgtgtgaattatagaggaaatacagagagaacctcttccacttttacttttcgtccaaataaaatgcatggtgtaccagaagttgaagatcgggttgaggattggggctagctcgatgacactaaggccccaacatcgcgggacctgctgtggcgcggattcttaggaacgctgttctagccggccccctctccaggggtcgccgtggccggcattatttcctagttcttcttgtaaccctgaggtgccagcgcggggagtgaggaggggtcagggggctaaggatgcaacctctgacgttctgcgccttcctaggagagtcttacatgtgttgagatttcacaagcaatgcgagttgtaaaataccagctctacaagaagctaggctctgtgacggcatagttttcagtagctttatcacaatattcacaatggagaattatatgacatggtagcagaaataggcccttttatgtgttgcttctattttacctcaaattgtagatatagggtaatcaataaaatccatccatgcctttcacacactaagt

SEQ ID NO: 4975 - protein, 564 aa, Homo sapiens; identical to SEQ ID NO: 4061

SEQ ID NO: 4976 - DNA, 7291 bp, Homo sapiens
gggtcttgttctgtctcccaagctggagtgcagtggtgtggtcataggtcactgcagcgtcgaactcctaggctcaagtgatcctcttgcctcaggctcctgagtagctgggacaacaggcgtgtaccacacctggatactttttaaatttttggtagagaagggatctcactctattgccaagctggtgtcgaactcttggtcttaagcagccctcccacgtcagcatcccaaagtgttgggatttcagagggatcatggcccaagttgcaatgtccaccctccccgttgaagatgaggagtcctcggagagcaggatggtggtgacattcctcatgtcagctctcgagtccatgtgtaaagaactggccaagtccaaagccgaagtggcctgcattgcagtgtatgaaacagacgtgtttgtcgtcggaactgaaagaggacgtgcttttgtcaataccagaaaggattttcaaaaagattttgtaaaatattgtgttgaagaagaagaaaaagctgcagagatgcataaaatgaaatctacaacccaggcaaatcggatgagtgtagatgctgtagaaattgaaacactcagaaaaacagttgaggactatttctgcttttgctatgggaaagctttaggcaaatccacagtggtacctgtaccatatgagaagatgctgcgagaccagtcggctgtggtagtgcaggggcttccggaaggtgttgcctttaaacaccccgagaactatgatcttgcaaccctgaaatggattttggagaacaaagcagggatttcattcatcattaagagaccttttttagagccaaagaagcatgtaggtggtcgtgtgatggtaacagatgctgacaggtcaatactatctccaggtggaagttgtggccccatcaaagtgaaaactgaacccacagaagattctggcatttccctggaaatggcagctgtgacagtaaaggaagaatcagaagatcctgattattatcaatataacattcaagcaggcccttctgaaactgatgatgttgatgaaaaacagcccctatcgaagcctttgcaaggaagccaccattcttcagagggcaatgaaggcacagaaatggaagtaccagcagaagattctactcaacatgtcccttcagaaacaagtgaggaccctgaagttgaggtgactattgaagatgatgattattctccaccgtctaagagaccaaaggccaatgagctaccgcagccaccagtcccggaacccgccaatgctgggaagcggaaagtgagggagttcaacttcgagaaatggaatgctcgcatcactgatctacgtaaacaagttgaagaattgtttgaaaggaaatatgctcaagccataaaagccaaaggtccggtgacgatcccgtaccctcttttccagtctcatgttgaagatctttatgtagaaggacttcctgaaggaattccttttagaaggccatctacttacggaattcctcgcctggagaggatattacttgcaaaggaaaggattcgttttgtgattaagaaacatgagcttctgaattcaacacgtgaagatttacagcttgataagccagcttcaggagtaaaggaagaatggtatgccagaatcactaaattaagaaagatggtggatcagcttttctgcaaaaaatttgcggaagccttggggagcactgaagccaaggctgtaccgtaccaaaaatttgaggcacacccgaatgatctgtacgtggaaggactgccagaaaacattcctttccgaagtccctcatggtatggaatcccaaggctggaaaaaatcattcaagtgggcaatcgaattaaatttgttattaaaagaccagaacttctgactcacagtaccactgaagttactcagccaagaacgaatacaccagtcaaagaagattggaatgtcagaattaccaagctacggaagcaagtggaagagatttttaatttgaaatttgcttagatttgttgacagcggtttcctggagtgctgtcttgagaacgattctgaggaggctcagcaagaaagagtgtttcagttgattgggtgtgtctgtcatggagaaggaactcaagctcttggactcaccgaggcagtaaaagtaccatatcctgtgtttgaatcaaacccggagttcttgtatgtggaaggcttgccagaggggattcccttccgaagccctacctggtttggaattccacgacttgaaaggatcgtccgcgggagtaataaaatcaagttcgttgttaaaaaacctgaactagttatttcctacttgcctcctgggatggctagtaaaataaacactaaagctttgcagtcccccaaaagaccacgaagtcctgggagtaattcaaaggttcctgaaattgaggtcaccgtggaaggccctaataacaacaatcctcaaacctcagctgttcgaaccccgacccagactaacggttctaacgttcccttcaagccacgagggagagagttttcctttgaggcctggaatgccaaaatcacggacctaaaacagaaagttgaaaatctcttcaatgagaaatgtggggaagctcttggccttaaacaagctgtgaaggtgccgttcgcgttatttgagtctttcccggaagacttttatgtggaaggcttacctgagggtgtgccattccgaagaccatcgacttttggcattccgaggctggagaagatactcagaaacaaagccaaaattaagttcatcattaaaaagcccgaaatgtttgagacggcgattaaggagagcacctcctctaagagccctcccagaaaaataaattcatcacccaatgttaatactactgcatcaggtgttgaagaccttaacatcattcaggtgacaattccagatgatgataatgaaagactctcgaaagttgaaaaagctagacagctaagagaacaagtgaatgacctctttagtcggaaatttggtgaagctattggtatgggttttcctgtgaaagttccctacaggaaaatcacaattaaccctggctgtgtggtggttgatggcatgcccccgggggtgtccttcaaagcccccagctacctggaaatcagctccatgagaaggatcttagactctgccgagtttatcaaattcacggtcattaggtaagtgagagtttcctgcttagtcacaggagcgaatctggagctcatgaggctgactcttctaaaatgcagccacaggtagtcatcgaatccggcttcctatgctgtgcaatcaacaaatcaaaataacttgtgtcatcattagaatgtcagatgtgcttctacgaactaagctgactcttttaattctttggcaaagggttggcaaactaggactgtttgccaaattcaggctgcctcctatttttagagtcttcctgaaacacagctacacccgtattatccatggctgctttcctgtcacagtgagtaagtagctgggactgagaaggcatggcctccaaagtctaaaatatttactctctagcactttgtagaaaaaccttagctaggcacagtggctaacgcctgtaatcccagcattttgggaggccaaggcaggcagatcacctgaggtcaggagttccagaccagcctggccaacatggtgaaatcccatctctacaaaaataaaacagttagctgggcatgatggcgggtgcctgtaatcccagctactcgggaggctgaggcaggatagtcgcttgaacccaggaggtggaggttgcaatgagccaagatcatgccactgcactccagcctggacgacagagtgagactccatcacaagaaaaaaagaactttgtcaacctctgtcttagggcgccttgtcacaggcttcgggtcagacggattcaaccttgcatcagccatttgttagccaggtcactctgttctttgtctgtaaatgagattgatcgttgttcccactgagagtgtcagctccttcccgtagagcaggcatgatgattgtactcacctctgacaccattgtgagtgccacattccttcccacgtccttgtcactgtaagagatgcccacctgagcaccaaccccaggttatcttcccctttgtcttccagccccccagaaacagctacgactcaacctacccaatcatttcatcatcagattgccactgtctctagttcaggtctcttgggactggcactcagaaatctcataataaatcctcttgaggcttctcatacactcgtcttcttccaatcttctttccctcaaaatctcatattttggttccacttcacccaccgtcattctccatatcactcccaggagttaggcaaaaagccccttccgttcttccgtatgttaaacttagaatcactctgttccctgctctgcgtttctattttttgtttttcctccatttactagtagcttaacactttctaacagtgttcttattattgatacgtatctatctcttccataagcttataaggtcacggataatacttctcattgtagtacgtaaatgacgtgggctagatatgagttgaataaacagttatacctgtaaattcttacagagtgaaaataaattgttatactttacaatttgtttctctctttagaccatttccaggacttgtgattaataaccgtgagtattttgtgaagtgttttgtttttgttttttcctggggtctgacgtgtgtgcgtgtgagtgtgtatacatgcttaacgtatatcacgttacttcacctatgtcagtaaccaggccaaatacttgttttagccctcagtaaaaacaccaggcacttcctagttgtaaaattattcaagcttcttaacttcctatcctcgatgcacttaatcataaaatggtaataatagcaccgattttgggggagtcgttccagtagatggaaagcatctggaacaggtgtcagcaagctcctgccgacgtgtatgcataaagttttattgaaaccaccatcgtgtccatttgtttatggcagaactgagagatggcagcagcaagtgtgtgcctgcaaaacctaaaatatttactaattggctctgcaagaaaagagtttgcatccccctaacctagaacagtgtctagcctctagtatgtgtttagcctacagtatgtgctcagcgaatacaatctatatttattactgcttttatgactgttataattactgtgcttggatttcgttacaaagtaagtcacaatgtgcctgcttctgttagtatttcagcacagtgcctggcacacatggggctctcaaatattgctgagcgagtgaacaaatgtcctttcaattccttaacgttgatgtcattttcaatagtattttgagccaaacttaattttgcgagtgtgttttgttttcttaactttattattaaaaatgtataaaagtgaggccaggcgtggtggctcacgcctgtaatcccagcagtttgggaggctgaggcaggcggatcagttgaggttgggagttggagaccagcccgtccaacatggtgaaagcctgtctctactaaaaatacaaaaatcagctgggtgtggtggcgcgtgcctgtaatcccagctactcaggaggctgaggcaggagagttgcttgaatcctagaggtggaggttgcagtgagctgagatcgtgccattgcactccagcctgggcaacaagagcaaaactctgtcccaataaataaataaataaaatgttctcttttgttcctgttcttgtgcggtagtgtggtatagagttttatggtaattactgtgaattagtgattctgagggacatatcagaactctgaggtttgtttccttctcatcttgagggaaacagcaaatgtatgttaaaatgcttttccaagggaacaacacatccttacattatttaaaccaatctgcttcattttcagagctggttgatcagagtgagtcagaaggccccgtgatacaagaatcagctgaaccaagccagttggaagttccagccacagaagaaataaaagagactgatggaagctctcagatcaagcaagaaccagaccccacgtggtagacctcttccctcctaggcttaaagtatcagtggttgagaagagcttttcggacctgttactaccccaagctgtgtaatatacttgtataacagaaataccttctatacaaacctttttttctacttttagatagaaatgtctactttttcagcagttctgtgaattaaagagcagagtgactgtgggtctggaatggctggtgtacttgggaatgtactatcaggattttacagcaatgctgggaaatgacagggaaaatgacaggaatgaatctcaccagattttttatgtactcagcagagccttgagttacggtgtttattttccaatcaagtgaagatatctcctacttctcctactggaacatctcagcttctgcagtgaagaaaaattcctgtgatagttcagttctttagtttttctatttgaaaaaaaaaaatcatttaaatgatcctttgttcacggctctccttaatgactgagtgaacagttcctatctgtatatttgactaaaccttttcctaagctatctctcatggttcctatgtttttttatcataattaaaagcaaaaccatctggatcacctaacagtcagaggtcagtatctcagcgtgtgaattatagaggaaatacagagagaacctcttccacttttacttttcgtccaaataaaatgcatggtgtaccagaagttgaagatcgggttgaggattggggctagctcgatgacactaaggccccaacatcgcgggacctgctgtggcgcggattcttaggaacgctgttctagccggccccctctccaggggtcgccgtggccggcattatttcctagttcttcttgtaaccctgaggtgccagcgcggggagtgaggaggggtcagggggctaaggatgcaacctctgacgttctgcgccttcctaggagagtcttacatgtgttgagatttcacaagcaatgcgagttgtaaaataccagctctacaagaagctaggctctgtgacggcatagttttcagtagctttatcacaatattcacaatggagaattatatgacatggtagcagaaataggcccttttatgtgttgcttctattttacctcaaattgtagatatagggtaatcaataaaatccatccatgcctttcacacactaagt

SEQ ID NO: 4977 - protein, 584 aa, Homo sapiens; identical to SEQ ID NO: 4053

SEQ ID NO: 4978 - DNA, 4992 bp, Homo sapiens
gggtcttgttctgtctcccaagctggagtgcagtggtgtggtcataggtcactgcagcgtcgaactcctaggctcaagtgatcctcttgcctcaggctcctgagtagctgggacaacaggcgtgtaccacacctggatactttttaaatttttggtagagaagggatctcactctattgccaagctggtgtcgaactcttggtcttaagcagccctcccacgtcagcatcccaaagtgttgggatttcagagggatcatggcccaagttgcaatgtccaccctccccgttgaagatgaggagtcctcggagagcaggatggtggtgacattcctcatgtcagctctcgagtccatgtgtaaagaactggccaagtccaaagccgaagtggcctgcattgcagtgtatgaaacagacgtgtttgtcgtcggaactgaaagaggacgtgcttttgtcaataccagaaaggattttcaaaaagattttgtaaaatattgtgttgaagaagaagaaaaagctgcagagatgcataaaatgaaatctacaacccaggcaaatcggatgagtgtagatgctgtagaaattgaaacactcagaaaaacagttgaggactatttctgcttttgctatgggaaagctttaggcaaatccacagtggtacctgtaccatatgagaagatgctgcgagaccagtcggctgtggtagtgcaggggcttccggaaggtgttgcctttaaacaccccgagaactatgatcttgcaaccctgaaatggattttggagaacaaagcagggatttcattcatcattaagagaccttttttagagccaaagaagcatgtaggtggtcgtgtgatggtaacagatgctgacaggtcaatactatctccaggtggaagttgtggccccatcaaagtgaaaactgaacccacagaagattctggcatttccctggaaatggcagctgtgacagtaaaggaagaatcagaagatcctgattattatcaatataacattcaagcaggcccttctgaaactgatgatgttgatgaaaaacagcccctatcgaagcctttgcaaggaagccaccattcttcagagggcaatgaaggcacagaaatggaagtaccagcagaagattctactcaacatgtcccttcagaaacaagtgaggaccctgaagttgaggtgactattgaagatgatgattattctccaccgtctaagagaccaaaggccaatgagctaccgcagccaccagtcccggaacccgccaatgctgggaagcggaaagtgagggagttcaacttcgagaaatggaatgctcgcatcactgatctacgtaaacaagttgaagaattgtttgaaaggaaatatgctcaagccataaaagccaaaggtccggtgacgatcccgtaccctcttttccagtctcatgttgaagatctttatgtagaaggacttcctgaaggaattccttttagaaggccatctacttacggaattcctcgcctggagaggatattacttgcaaaggaaaggattcgttttgtgattaagaaacatgagcttctgaattcaacacgtgaagatttacagcttgataagccagcttcaggagtaaaggaagaatggtatgccagaatcactaaattaagaaagatggtggatcagcttttctgcaaaaaatttgcggaagccttggggagcactgaagccaaggctgtaccgtaccaaaaatttgaggcacacccgaatgatctgtacgtggaaggactgccagaaaacattcctttccgaagtccctcatggtatggaatcccaaggctggaaaaaatcattcaagtgggcaatcgaattaaatttgttattaaaagaccagaacttctgactcacagtaccactgaagttactcagccaagaacgaatacaccagtcaaagaagattggaatgtcagaattaccaagctacggaagcaagtggaagagatttttaatttgaaatttgctcaagctcttggactcaccgaggcagtaaaagtaccatatcctgtgtttgaatcaaacccggagttcttgaaaggatcgtccgcgggagtaataaaatcaagttcgttgttaaaaaacctgaactagttatttcctacttgcctcctgggatggctagtaaaataaacactaaagctttgcagtcccccaaaagaccacgaagtcctgggagtaattcaaaggttcctgaaattgaggtcaccgtggaaggccctaataacaacaatcctcaaacctcagctgttcgaaccccgacccagactaacggttctaacgttcccttcaagccacgagggagagagttttcctttgaggcctggaatgccaaaatcacggacctaaaacagaaagttgaaaatctcttcaatgagaaatgtggggaagctcttggccttaaacaagctgtgaaggtgccgttcgcgttatttgagtctttcccggaagacttttatgtggaaggcttacctgagggtgtgccattccgaagaccatcgacttttggcattccgaggctggagaagatactcagaaacaaagccaaaattaagttcatcattaaaaagcccgaaatgtttgagacggcgattaaggagagcacctcctctaagagccctcccagaaaaataaattcatcacccaatgttaatactactgcatcaggtgttgaagaccttaacatcattcaggtgacaattccagatgatgataatgaaagactctcgaaagttgaaaaagctagacagctaagagaacaagtgaatgacctctttagtcggaaatttggtgaagctattggtatgggttttcctgtgaaagttccctacaggaaaatcacaattaaccctggctgtgtggtggttgatggcatgcccccgggggtgtccttcaaagcccccagctacctggaaatcagctccatgagaaggatcttagactctgccgagtttatcaaattcacggtcattagaccatttccaggacttgtgattaataaccagctggttgatcagagtgagtcagaaggccccgtgatacaagaatcagctgaaccaagccagttggaagttccagccacagaaggtaaaaggacctcttccctcctagggtaaatcagcttctgtgtcagggatgctgtgtggtgtccatctgaaccccctgcatacgcgtagctaatgtgatctccccactttcacataagatggtggccctgccttcagggaatgtgggagccaggtgggagccttcccggatatttaagctagaagattctacagggagattctccttggatcaatatatgtctctcagtcaaagatgtaaaagcacttttgccttaaaaagaatgttctgtttctaaatagagtcaacgttgtcctcctcattggaattcactatgagtcagaatcattagactgacttttttttttccatagtaatagtattttgcagagtctcacagagctgcagatcttttgttcatcttgcagagttaacaagtctgatcctgttagtccagatttcttaaatttggccaagttataataggagcagtagcttgagacccgaagtcaggaaactttgacaatggatttttttttttaatccagagacttgtactggaatttgccttaccctgtcagctcatggacttaaggtttcatcccgctttatgagtgcttctgaatccaagtcattgttacctgaatttgcaaattaagttgtgatattcgtgactgttaaattcctgtaattagattaacctctttgcttgcttgtttgttttctctcctattttagcttaaagtatcagtggttgagaagagcttttcggacctgttactaccccaagctgtgtaatatacttgtataacagaaataccttctatacaaacctttttttctacttttagatagaaatgtctactttttcagcagttctgtgaattaaagagcagagtgactgtgggtctggaatggctggtgtacttgggaatgtactatcaggattttacagcaatgctgggaaatgacagggaaaatgacaggaatgaatctcaccagattttttatgtactcagcagagccttgagttacggtgtttattttccaatcaagtgaagatatctcctacttctcctactggaacatctcagcttctgcagtgaagaaaaattcctgtgatagttcagttctttagtttttctatttgaaaaaaaaaaatcatttaaatgatcctttgttcacggctctccttaatgactgagtgaacagttcctatctgtatatttgactaaaccttttcctaagctatctctcatggttcctatgtttttttatcataattaaaagcaaaaccatctggatcacctaacagtcagaggtcagtatctcagcgtgtgaattatagaggaaatacagagagaacctcttccacttttacttttcgtccaaataaaatgcatggtgtaccagaagttgaagatcgggttgaggattggggctagctcgatgacactaaggccccaacatcgcgggacctgctgtggcgcggattcttaggaacgctgttctagccggccccctctccaggggtcgccgtggccggcattatttcctagttcttcttgtaaccctgaggtgccagcgcggggagtgaggaggggtcagggggctaaggatgcaacctctgacgttctgcgccttcctaggagagtcttacatgtgttgagatttcacaagcaatgcgagttgtaaaataccagctctacaagaagctaggctctgtgacggcatagttttcagtagctttatcacaatattcacaatggagaattatatgacatggtagcagaaataggcccttttatgtgttgcttctattttacctcaaattgtagatatagggtaatcaataaaatccatccatgcctttcacacactaagt

SEQ ID NO: 4979 - protein, 625 aa, Homo sapiens; identical to SEQ ID NO: 4033

SEQ ID NO: 4980 - DNA, 4286 bp, Homo sapiens
gggtcttgttctgtctcccaagctggagtgcagtggtgtggtcataggtcactgcagcgtcgaactcctaggctcaagtgatcctcttgcctcaggctcctgagtagctgggacaacaggcgtgtaccacacctggatactttttaaatttttggtagagaagggatctcactctattgccaagctggtgtcgaactcttggtcttaagcagccctcccacgtcagcatcccaaagtgttgggatttcagagggatcatggcccaagttgcaatgtccaccctccccgttgaagatgaggagtcctcggagagcaggatggtggtgacattcctcatgtcagctctcgagtccatgtgtaaagaactggccaagtccaaagccgaagtggcctgcattgcagtgtatgaaacagacgtgtttgtcgtcggaactgaaagaggacgtgcttttgtcaataccagaaaggattttcaaaaagattttgtaaaatattgtgttgaagaagaagaaaaagctgcagagatgcataaaatgaaatctacaacccaggcaaatcggatgagtgtagatgctgtagaaattgaaacactcagaaaaacagttgaggactatttctgcttttgctatgggaaagctttaggcaaatccacagtggtacctgtaccatatgagaagatgctgcgagaccagtcggctgtggtagtgcaggggcttccggaaggtgttgcctttaaacaccccgagaactatgatcttgcaaccctgaaatggattttggagaacaaagcagggatttcattcatcattaagagaccttttttagagccaaagaagcatgtaggtggtcgtgtgatggtaacagatgctgacaggtcaatactatctccaggtggaagttgtggccccatcaaagtgaaaactgaacccacagaagattctggcatttccctggaaatggcagctgtgacagtaaaggaagaatcagaagatcctgattattatcaatataacattcaaggaagccaccattcttcagagggcaatgaaggcacagaaatggaagtaccagcagaagattctactcaacatgtcccttcagaaacaagtgaggaccctgaagttgaggtgactattgaagatgatgattattctccaccgtctaagagaccaaaggccaatgagctaccgcagccaccagtcccggaacccgccaatgctgggaagcggaaagtgagggagttcaacttcgagaaatggaatgctcgcatcactgatctacgtaaacaagttgaagaattgtttgaaaggaaatatgctcaagccataaaagccaaaggtccggtgacgatcccgtaccctcttttccagtctcatgttgaagatctttatgtagaaggacttcctgaaggaattccttttagaaggccatctacttacggaattcctcgcctggagaggatattacttgcaaaggaaaggattcgttttgtgattaagaaacatgagcttctgaattcaacacgtgaagatttacagcttgataagccagcttcaggagtaaaggaagaatggtatgccagaatcactaaattaagaaagatggtggatcagcttttctgcaaaaaatttgcggaagccttggggagcactgaagccaaggctgtaccgtaccaaaaatttgaggcacacccgaatgatctgtacgtggaaggactgccagaaaacattcctttccgaagtccctcatggtatggaatcccaaggctggaaaaaatcattcaagtgggcaatcgaattaaatttgttattaaaagaccagaacttctgactcacagtaccactgaagttactcagccaagaacgaatacaccagctcaagctcttggactcaccgaggcagtaaaagtaccatatcctgtgtttgaatcaaacccggagttcttgtatgtggaaggcttgccagaggggattcccttccgaagccctacctggtttggaattccacgacttgaaaggatcgtccgcgggagtaataaaatcaagttcgttgttaaaaaacctgaactagttatttcctacttgcctcctgggatggctagtaaaataaacactaaagctttgcagtcccccaaaagaccacgaagtcctgggagtaattcaaaggttcctgaaattgaggtcaccgtggaaggccctaataacaacaatcctcaaacctcagctgttcgaaccccgacccagactaacggttctaacgttcccttcaagccacgagggagagagttttcctttgaggcctggaatgccaaaatcacggacctaaaacagaaagttgaaaatctcttcaatgagaaatgtggggaagctcttggccttaaacaagctgtgaaggtgccgttcgcgttatttgagtctttcccggaagacttttatgtggaaggcttacctgagggtgtgccattccgaagaccatcgacttttggcattccgaggctggagaagatactcagaaacaaagccaaaattaagttcatcattaaaaagcccgaaatgtttgagacggcgattaaggagagcacctcctctaagagccctcccagaaaaataaattcatcacccaatgttaatactactgcatcaggtgttgaagaccttaacatcattcaggtgacaattccagatgatgataatgaaagactctcgaaagttgaaaaagctagacagctaagagaacaagtgaatgacctctttagtcggaaatttggtgaagctattggtatgggttttcctgtgaaagttccctacaggaaaatcacaattaaccctggctgtgtggtggttgatggcatgcccccgggggtgtccttcaaagcccccagctacctggaaatcagctccatgagaaggatcttagactctgccgagtttatcaaattcacggtcattagaccatttccaggacttgtgattaataaccagctggttgatcagagtgagtcagaaggccccgtgatacaagaatcagctgaaccaagccagttggaagttccagccacagaagaaataaaagagactgatggaagctctcagatcaagcaagaaccagaccccacgtggtagacctcttccctcctaggcttaaagtatcagtggttgagaagagcttttcggacctgttactaccccaagctgtgtaatatacttgtataacagaaataccttctatacaaacctttttttctacttttagatagaaatgtctactttttcagcagttctgtgaattaaagagcagagtgactgtgggtctggaatggctggtgtacttgggaatgtactatcaggattttacagcaatgctgggaaatgacagggaaaatgacaggaatgaatctcaccagattttttatgtactcagcagagccttgagttacggtgtttattttccaatcaagtgaagatatctcctacttctcctactggaacatctcagcttctgcagtgaagaaaaattcctgtgatagttcagttctttagtttttctatttgaaaaaaaaaaatcatttaaatgatcctttgttcacggctctccttaatgactgagtgaacagttcctatctgtatatttgactaaaccttttcctaagctatctctcatggttcctatgtttttttatcataattaaaagcaaaaccatctggatcacctaacagtcagaggtcagtatctcagcgtgtgaattatagaggaaatacagagagaacctcttccacttttacttttcgtccaaataaaatgcatggtgtaccagaagttgaagatcgggttgaggattggggctagctcgatgacactaaggccccaacatcgcgggacctgctgtggcgcggattcttaggaacgctgttctagccggccccctctccaggggtcgccgtggccggcattatttcctagttcttcttgtaaccctgaggtgccagcgcggggagtgaggaggggtcagggggctaaggatgcaacctctgacgttctgcgccttcctaggagagtcttacatgtgttgagatttcacaagcaatgcgagttgtaaaataccagctctacaagaagctaggctctgtgacggcatagttttcagtagctttatcacaatattcacaatggagaattatatgacatggtagcagaaataggcccttttatgtgttgcttctattttacctcaaattgtagatatagggtaatcaataaaatccatccatgcctttcacacactaagt

SEQ ID NO: 4981 - protein, 954 aa, Homo sapiens; identical to SEQ ID NO: 4155

SEQ ID NO: 4982 - DNA, 4004 bp, Homo sapiens
gggtcttgttctgtctcccaagctggagtgcagtggtgtggtcataggtcactgcagcgtcgaactcctaggctcaagtgatcctcttgcctcaggctcctgagtagctgggacaacaggcgtgtaccacacctggatactttttaaatttttggtagagaagggatctcactctattgccaagctggtgtcgaactcttggtcttaagcagccctcccacgtcagcatcccaaagtgttgggatttcagagggatcatggcccaagttgcaatgtccaccctccccgttgaagatgaggagtcctcggagagcaggatggtggtgacattcctcatgtcagctctcgagtccatgtgtaaagaactggccaagtccaaagccgaagtggcctgcattgcagtgtatgaaacagacgtgtttgtcgtcggaactgaaagaggacgtgcttttgtcaataccagaaaggattttcaaaaagattttgtaaaatattgtgttgaagaagaagaaaaagctgcagagatgcataaaatgaaatctacaacccaggcaaatcggatgagtgtagatgctgtagaaattgaaacactcagaaaaacagttgaggactatttctgcttttgctatgggaaagctttaggcaaatccacagtggtacctgtaccatatgagaagatgctgcgagaccagtcggctgtggtagtgcaggggcttccggaaggtgttgcctttaaacaccccgagaactatgatcttgcaaccctgaaatggattttggagaacaaagcagggatttcattcatcattaagagaccttttttagagccaaagaagcatgtaggtggtcgtgtgatggtaacagatgctgacaggtcaatactatctccaggtggaagttgtggccccatcaaagtgaaaactgaacccacagaagattctggcatttccctggaaatggcagctgtgacagtaaaggaagaatcagaagatcctgattattatcaatataacattcaagcaggcccttctgaaactgatgatgttgatgaaaaacagcccctatcgaagcctttgcaaggaagccaccattcttcagagggcaatgaaggcacagaaatggaagtaccagcagaagatgatgattattctccaccgtctaagagaccaaaggccaatgagctaccgcagccaccagtcccggaacccgccaatgctgggaagcggaaagtgagggagttcaacttcgagaaatggaatgctcgcatcactgatctacgtaaacaagttgaagaattgtttgaaaggaaatatgctcaagccataaaagccaaaggtccggtgacgatcccgtaccctcttttccagtctcatgttgaagatctttatgtagaaggacttcctgaaggaattccttttagaaggccatctacttacggaattcctcgcctggagaggatattacttgcaaaggaaaggattcgttttgtgattaagaaacatgagcttctgaattcaacacgtgaagatttacagcttgataagccagcttcaggagtaaaggaagaatggtatgccagaatcactaaattaagaaagatggtggatcagcttttctgcaaaaaatttgcggaagccttggggagcactgaagccaaggctgtaccgtaccaaaaatttgaggcacacccgaatgatctgtacgtggaaggactgccagaaaacattcctttccgaagtccctcatggtatggaatcccaaggctggaaaaaatcattcaagtgggcaatcgaattaaatttgttattaaaagaccagaacttctgactcacagtaccactgaagttactcagccaagaacgaatacaccagtcaaagaagattggaatgtcagaattaccaagctacggaagcaagtggaagagatttttaatttgaaatttgctcaagctcttggactcaccgaggcagtaaaagtaccatatcctgtgtttgaatcaaacccggagttcttgaaaggatcgtccgcgggagtaataaaatcaagttcgttgttaaaaaacctgaactagttatttcctacttgcctcctgggatggctagtaaaataaacactaaagctttgcagtcccccaaaagaccacgaagtcctgggagtaattcaaaggttcctgaaattgaggtcaccgtggaaggccctaataacaacaatcctcaaacctcagctgttcgaaccccgacccagactaacggttctaacgttcccttcaagccacgagggagagagttttcctttgaggcctggaatgccaaaatcacggacctaaaacagaaagttgaaaatctcttcaatgagaaatgtggggaagctcttggccttaaacaagctgtgaaggtgccgttcgcgttatttgagtctttcccggaagacttttatgtggaaggcttacctgagggtgtgccattccgaagaccatcgacttttggcattccgaggctggagaagatactcagaaacaaagccaaaattaagttcatcattaaaaagcccgaaatgtttgagacggcgattaaggagagcacctcctctaagagccctcccagaaaaataaattcatcacccaatgttaatactactgcatcaggtgttgaagaccttaacatcattcaggtgacaattccagatgatgataatgaaagactctcgaaagttgaaaaagctagacagctaagagaacaagtgaatgacctctttagtcggaaatttggtgaagctattggtatgggttttcctgtgaaagttccctacaggaaaatcacaattaaccctggctgtgtggtggttgatggcatgcccccgggggtgtccttcaaagcccccagctacctggaaatcagctccatgagaaggatcttagactctgccgagtttatcaaattcacggtcattagaccatttccaggacttgtgattaataaccagctggttgatcagagtgagtcagaaggccccgtgatacaagaatcagctgaaccaagccagttggaagttccagccacagaagaaataaaagagactgatggaagctctcagatcaagcaagaaccagaccccacgtggtagacctcttccctcctaggagccttgagttacggtgtttattttccaatcaagtgaagatatctcctacttctcctactggaacatctcagcttctgcagtgaagaaaaattcctgtgatagttcagttctttagtttttctatttgaaaaaaaaaaatcatttaaatgatcctttgttcacggctctccttaatgactgagtgaacagttcctatctgtatatttgactaaaccttttcctaagctatctctcatggttcctatgtttttttatcataattaaaagcaaaaccatctggatcacctaacagtcagaggtcagtatctcagcgtgtgaattatagaggaaatacagagagaacctcttccacttttacttttcgtccaaataaaatgcatggtgtaccagaagttgaagatcgggttgaggattggggctagctcgatgacactaaggccccaacatcgcgggacctgctgtggcgcggattcttaggaacgctgttctagccggccccctctccaggggtcgccgtggccggcattatttcctagttcttcttgtaaccctgaggtgccagcgcggggagtgaggaggggtcagggggctaaggatgcaacctctgacgttctgcgccttcctaggagagtcttacatgtgttgagatttcacaagcaatgcgagttgtaaaataccagctctacaagaagctaggctctgtgacggcatagttttcagtagctttatcacaatattcacaatggagaattatatgacatggtagcagaaataggcccttttatgtgttgcttctattttacctcaaattgtagatatagggtaatcaataaaatccatccatgcctttcacacactaagt

SEQ ID NO: 4983 - protein, 604 aa, Homo sapiens; identical to SEQ ID NO: 4117

SEQ ID NO: 4984 - DNA, 7661 bp, Homo sapiens
gggtcttgttctgtctcccaagctggagtgcagtggtgtggtcataggtcactgcagcgtcgaactcctaggctcaagtgatcctcttgcctcaggctcctgagtagctgggacaacaggcgtgtaccacacctggatactttttaaatttttggtagagaagggatctcactctattgccaagctggtgtcgaactcttggtcttaagcagccctcccacgtcagcatcccaaagtgttgggatttcagagggatcatggcccaagttgcaatgtccaccctccccgttgaagatgaggagtcctcggagagcaggatggtggtgacattcctcatgtcagctctcgagtccatgtgtaaagaactggccaagtccaaagccgaagtggcctgcattgcagtgtatgaaacagacgtgtttgtcgtcggaactgaaagaggacgtgcttttgtcaataccagaaaggattttcaaaaagattttgtaaaatattgtgttgaagaagaagaaaaagctgcagagatgcataaaatgaaatctacaacccaggcaaatcggatgagtgtagatgctgtagaaattgaaacactcagaaaaacagttgaggactatttctgcttttgctatgggaaagctttaggcaaatccacagtggtacctgtaccatatgagaagatgctgcgagaccagtcggctgtggtagtgcaggggcttccggaaggtgttgcctttaaacaccccgagaactatgatcttgcaaccctgaaatggattttggagaacaaagcagggatttcattcatcattaagagaccttttttagagccaaagaagcatgtaggtggtcgtgtgatggtaacagatgctgacaggtcaatactatctccaggtggaagttgtggccccatcaaagtgaaaactgaacccacagaagattctggaagccaccattcttcagagggcaatgaaggcacagaaatggaagtaccagcagaagattctactcaacatgtcccttcagaaacaagtgaggaccctgaagttgaggtgactattgaagatgatgattattctccaccgtctaagagaccaaaggccaatgagctaccgcagccaccagtcccggaacccgccaatgctgggaagcggaaagtgagggagttcaacttcgagaaatggaatgctcgcatcactgatctacgtaaacaagttgaagaattgtttgaaaggaaatatgctcaagccataaaagccaaaggtccggtgacgatcccgtaccctcttttccagtctcatgttgaagatctttatgtagaaggacttcctgaaggaattccttttagaaggccatctacttacggaattcctcgcctggagaggatattacttgcaaaggaaaggattcgttttgtgattaagaaacatgagcttctgaattcaacacgtgaagatttacagcttgataagccagcttcaggagtaaaggaagaatggtatgccagaatcactaaattaagaaagatggtggatcagcttttctgcaaaaaatttgcggaagccttggggagcactgaagccaaggctgtaccgtaccaaaaatttgaggcacacccgaatgatctgtacgtggaaggactgccagaaaacattcctttccgaagtccctcatggtatggaatcccaaggctggaaaaaatcattcaagtgggcaatcgaattaaatttgttattaaaagaccagaacttctgactcacagtaccactgaagttactcagccaagaacgaatacaccagctcaagctcttggactcaccgaggcagtaaaagtaccatatcctgtgtttgaatcaaacccggagttcttgtatgtggaaggcttgccagaggggattcccttccgaagccctacctggtttggaattccacgacttgaaaggatcgtccgcgggagtaataaaatcaagttcgttgttaaaaaacctgaactagttatttcctacttgcctcctgggatggctagtaaaataaacactaaagctttgcagtcccccaaaagaccacgaagtcctgggagtaattcaaaggttcctgaaattgaggtcaccgtggaaggccctaataacaacaatcctcaaacctcagctgttcgaaccccgacccagactaacggttctaacgttcccttcaagccacgagggagagagttttcctttgaggcctggaatgccaaaatcacggacctaaaacagaaagttgaaaatctcttcaatgagaaatgtggggaagctcttggccttaaacaagctgtgaaggtgccgttcgcgttatttgagtctttcccggaagacttttatgtggaaggcttacctgagggtgtgccattccgaagaccatcgacttttggcattccgaggctggagaagatactcagaaacaaagccaaaattaagttcatcattaaaaagcccgaaatgtttgagacggcgattaaggagagcacctcctctaagagccctcccagaaaaataaattcatcacccaatgttaatactactgcatcaggtgttgaagaccttaacatcattcaggtgacaattccagatgatgataatgaaagactctcgaaagttgaaaaagctagacagctaagagaacaagtgaatgacctctttagtcggaaatttggtgaagctattggtatgggttttcctgtgaaagttccctacaggaaaatcacaattaaccctggctgtgtggtggttgatggcatgcccccgggggtgtccttcaaagcccccagctacctggaaatcagctccatgagaaggatcttagactctgccgagtttatcaaattcacggtcattaggtaagtgagagtttcctgcttagtcacaggagcgaatctggagctcatgaggctgactcttctaaaatgcagccacaggtagtcatcgaatccggcttcctatgctgtgcaatcaacaaatcaaaataacttgtgtcatcattagaatgtcagatgtgcttctacgaactaagctgactcttttaattctttggcaaagggttggcaaactaggactgtttgccaaattcaggctgcctcctatttttagagtcttcctgaaacacagctacacccgtattatccatggctgctttcctgtcacagtgagtaagtagctgggactgagaaggcatggcctccaaagtctaaaatatttactctctagcactttgtagaaaaaccttagctaggcacagtggctaacgcctgtaatcccagcattttgggaggccaaggcaggcagatcacctgaggtcaggagttccagaccagcctggccaacatggtgaaatcccatctctacaaaaataaaacagttagctgggcatgatggcgggtgcctgtaatcccagctactcgggaggctgaggcaggatagtcgcttgaacccaggaggtggaggttgcaatgagccaagatcatgccactgcactccagcctggacgacagagtgagactccatcacaagaaaaaaagaactttgtcaacctctgtcttagggcgccttgtcacaggcttcgggtcagacggattcaaccttgcatcagccatttgttagccaggtcactctgttctttgtctgtaaatgagattgatcgttgttcccactgagagtgtcagctccttcccgtagagcaggcatgatgattgtactcacctctgacaccattgtgagtgccacattccttcccacgtccttgtcactgtaagagatgcccacctgagcaccaaccccaggttatcttcccctttgtcttccagccccccagaaacagctacgactcaacctacccaatcatttcatcatcagattgccactgtctctagttcaggtctcttgggactggcactcagaaatctcataataaatcctcttgaggcttctcatacactcgtcttcttccaatcttctttccctcaaaatctcatattttggttccacttcacccaccgtcattctccatatcactcccaggagttaggcaaaaagccccttccgttcttccgtatgttaaacttagaatcactctgttccctgctctgcgtttctattttttgtttttcctccatttactagtagcttaacactttctaacagtgttcttattattgatacgtatctatctcttccataagcttataaggtcacggataatacttctcattgtagtacgtaaatgacgtgggctagatatgagttgaataaacagttatacctgtaaattcttacagagtgaaaataaattgttatactttacaatttgtttctctctttagaccatttccaggacttgtgattaataaccgtgagtattttgtgaagtgttttgtttttgttttttcctggggtctgacgtgtgtgcgtgtgagtgtgtatacatgcttaacgtatatcacgttacttcacctatgtcagtaaccaggccaaatacttgttttagccctcagtaaaaacaccaggcacttcctagttgtaaaattattcaagcttcttaacttcctatcctcgatgcacttaatcataaaatggtaataatagcaccgattttgggggagtcgttccagtagatggaaagcatctggaacaggtgtcagcaagctcctgccgacgtgtatgcataaagttttattgaaaccaccatcgtgtccatttgtttatggcagaactgagagatggcagcagcaagtgtgtgcctgcaaaacctaaaatatttactaattggctctgcaagaaaagagtttgcatccccctaacctagaacagtgtctagcctctagtatgtgtttagcctacagtatgtgctcagcgaatacaatctatatttattactgcttttatgactgttataattactgtgcttggatttcgttacaaagtaagtcacaatgtgcctgcttctgttagtatttcagcacagtgcctggcacacatggggctctcaaatattgctgagcgagtgaacaaatgtcctttcaattccttaacgttgatgtcattttcaatagtattttgagccaaacttaattttgcgagtgtgttttgttttcttaactttattattaaaaatgtataaaagtgaggccaggcgtggtggctcacgcctgtaatcccagcagtttgggaggctgaggcaggcggatcagttgaggttgggagttggagaccagcccgtccaacatggtgaaagcctgtctctactaaaaatacaaaaatcagctgggtgtggtggcgcgtgcctgtaatcccagctactcaggaggctgaggcaggagagttgcttgaatcctagaggtggaggttgcagtgagctgagatcgtgccattgcactccagcctgggcaacaagagcaaaactctgtcccaataaataaataaataaaatgttctcttttgttcctgttcttgtgcggtagtgtggtatagagttttatggtaattactgtgaattagtgattctgagggacatatcagaactctgaggtttgtttccttctcatcttgagggaaacagcaaatgtatgttaaaatgcttttccaagggaacaacacatccttacattatttaaaccaatctgcttcattttcagagctggttgatcagagtgagtcagaaggccccgtgatacaagaatcagctgaaccaagccagttggaagttccagccacagaagaaataaaagagactgatggaagctctcagatcaagcaagaaccagaccccacgtggtagacctcttccctcctagggtaaatcagcttctgtgtcagggatgctgtgtggtgtccatctgaaccccctgcatacgcgtagctaatgtgatctccccactttcacataagatggtggccctgccttcagggaatgtgggagccaggtgggagccttcccggatatttaagctagaagattctacagggagattctccttggatcaatatatgtctctcagtcaaagatgtaaaagcacttttgccttaaaaagaatgttctgtttctaaatagagtcaacgttgtcctcctcattggaattcactatgagtcagaatcattagactgacttttttttttccatagtaatagtattttgcagagtctcacagagctgcagatcttttgttcatcttgcagagttaacaagtctgatcctgttagtccagatttcttaaatttggccaagttataataggagcagtagcttgagacccgaagtcaggaaactttgacaatggatttttttttttaatccagagacttgtactggaatttgccttaccctgtcagctcatggacttaaggtttcatcccgctttatgagtgcttctgaatccaagtcattgttacctgaatttgcaaattaagttgtgatattcgtgactgttaaattcctgtaattagattaacctctttgcttgcttgtttgttttctctcctattttagcttaaagtatcagtggttgagaagagcttttcggacctgttactaccccaagctgtgtaatatacttgtataacagaaataccttctatacaaacctttttttctacttttagatagaaatgtctactttttcagcagttctgtgaattaaagagcagagtgactgtgggtctggaatggctggtgtacttgggaatgtactatcaggattttacagcaatgctgggaaatgacagggaaaatgacaggaatgaatctcaccagattttttatgtactcagcagagccttgagttacggtgtttattttccaatcaagtgaagatatctcctacttctcctactggaacatctcagcttctgcagtgaagaaaaattcctgtgatagttcagttctttagtttttctatttgaaaaaaaaaaatcatttaaatgatcctttgttcacggctctccttaatgactgagtgaacagttcctatctgtatatttgactaaaccttttcctaagctatctctcatggttcctatgtttttttatcataattaaaagcaaaaccatctggatcacctaacagtcagaggtcagtatctcagcgtgtgaattatagaggaaatacagagagaacctcttccacttttacttttcgtccaaataaaatgcatggtgtaccagaagttgaagatcgggttgaggattggggctagctcgatgacactaaggccccaacatcgcgggacctgctgtggcgcggattcttaggaacgctgttctagccggccccctctccaggggtcgccgtggccggcattatttcctagttcttcttgtaaccctgaggtgccagcgcggggagtgaggaggggtcagggggctaaggatgcaacctctgacgttctgcgccttcctaggagagtcttacatgtgttgagatttcacaagcaatgcgagttgtaaaataccagctctacaagaagctaggctctgtgacggcatagttttcagtagctttatcacaatattcacaatggagaattatatgacatggtagcagaaataggcccttttatgtgttgcttctattttacctcaaattgtagatatagggtaatcaataaaatccatccatgcctttcacacactaagt

SEQ ID NO: 4985 - protein, 872 aa, Homo sapiens; identical to SEQ ID NO: 4541

SEQ ID NO: 4986 - DNA, 4055 bp, Homo sapiens
gggtcttgttctgtctcccaagctggagtgcagtggtgtggtcataggtcactgcagcgtcgaactcctaggctcaagtgatcctcttgcctcaggctcctgagtagctgggacaacaggcgtgtaccacacctggatactttttaaatttttggtagagaagggatctcactctattgccaagctggtgtcgaactcttggtcttaagcagccctcccacgtcagcatcccaaagtgttgggatttcagagggatcatggcccaagttgcaatgtccaccctccccgttgaagatgaggagtcctcggagagcaggatggtggtgacattcctcatgtcagctctcgagtccatgtgtaaagaactggccaagtccaaagccgaagtggcctgcattgcagtgtatgaaacagacgtgtttgtcgtcggaactgaaagaggacgtgcttttgtcaataccagaaaggattttcaaaaagattttgtaaaatattgtgttgaagaagaagaaaaagctgcagagatgcataaaatgaaatctacaacccaggcaaatcggatgagtgtagatgctgtagaaattgaaacactcagaaaaacagttgaggactatttctgcttttgctatgggaaagctttaggcaaatccacagtggtacctgtaccatatgagaagatgctgcgagaccagtcggctgtggtagtgcaggggcttccggaaggtgttgcctttaaacaccccgagaactatgatcttgcaaccctgaaatggattttggagaacaaagcagggatttcattcatcattaagagaccttttttagagccaaagaagcatgtaggtggtcgtgtgatggtaacagatgctgacaggtcaatactatctccaggtggaagttgtggccccatcaaagtgaaaactgaacccacagaagattctggcatttccctggaaatggcagctgtgacagtaaaggaagaatcagaagatcctgattattatcaatataacattcaagcaggcccttctgaaactgatgatgttgatgaaaaacagcccctatcgaagcctttgcaaggaagccaccattcttcagagggcaatgaaggcacagaaatggaagtaccagcagaagatgatgattattctccaccgtctaagagaccaaaggccaatgagctaccgcagccaccagtcccggaacccgccaatgctgggaagcggaaagtgagggagttcaacttcgagaaatggaatgctcgcatcactgatctacgtaaacaagttgaagaattgtttgaaaggaaatatgctcaagccataaaagccaaaggtccggtgacgatcccgtaccctcttttccagtctcatgttgaagatctttatgtagaaggacttcctgaaggaattccttttagaaggccatctacttacggaattcctcgcctggagaggatattacttgcaaaggaaaggattcgttttgtgattaagaaacatgagcttctgaattcaacacgtgaagatttacagcttgataagccagcttcaggagtaaaggaagaatggtatgccagaatcactaaattaagaaagatggtggatcagcttttctgcaaaaaatttgcggaagccttggggagcactgaagccaaggctgtaccgtaccaaaaatttgaggcacacccgaatgatctgtacgtggaaggactgccagaaaacattcctttccgaagtccctcatggtatggaatcccaaggctggaaaaaatcattcaagtgggcaatcgaattaaatttgttattaaaagaccagaacttctgactcacagtaccactgaagttactcagccaagaacgaatacaccagctcaagctcttggactcaccgaggcagtaaaagtaccatatcctgtgtttgaatcaaacccggagttcttgtatgtggaaggcttgccagaggggattcccttccgaagccctacctggtttggaattccacgacttgaaaggatcgtccgcgggagtaataaaatcaagttcgttgttaaaaaacctgaactagttatttcctacttgcctcctgggatggctagtaaaataaacactaaagctttgcagtcccccaaaagaccacgaagtcctgggagtaattcaaaggttcctgaaattgaggtcaccgtggaaggccctaataacaacaatcctcaaacctcagctgttcgaaccccgacccagactaacggttctaacgttcccttcaagccacgagggagagagttttcctttgaggcctggaatgccaaaatcacggacctaaaacagaaagttgaaaatctcttcaatgagaaatgtggggaagctcttggccttaaacaagctgtgaaggtgccgttcgcgttatttgagtctttcccggaagacttttatgtggaaggcttacctgagggtgtgccattccgaagaccatcgacttttggcattccgaggctggagaagatactcagaaacaaagccaaaattaagttcatcattaaaaagcccgaaatgtttgagacggcgattaaggagagcacctcctctaagagccctcccagaaaaataaattcatcacccaatgttaatactactgcatcaggtgttgaagaccttaacatcattcaggtgacaattccagatgatgataatgaaagactctcgaaagttgaaaaagctagacagctaagagaacaagtgaatgacctctttagtcggaaatttggtgaagctattggtatgggttttcctgtgaaagttccctacaggaaaatcacaattaaccctggctgtgtggtggttgatggcatgcccccgggggtgtccttcaaagcccccagctacctggaaatcagctccatgagaaggatcttagactctgccgagtttatcaaattcacggtcattagaccatttccaggacttgtgattaataaccagctggttgatcagagtgagtcagaaggccccgtgatacaagaatcagctgaaccaagccagttggaagttccagccacagaagaaataaaagagactgatggaagctctcagatcaagcaagaaccagaccccacgtggtagacctcttccctcctaggcttaaagtatcagtggttgagaagagcttttcggacctgttactaccccaagctgtagccttgagttacggtgtttattttccaatcaagtgaagatatctcctacttctcctactggaacatctcagcttctgcagtgaagaaaaattcctgtgatagttcagttctttagtttttctatttgaaaaaaaaaaatcatttaaatgatcctttgttcacggctctccttaatgactgagtgaacagttcctatctgtatatttgactaaaccttttcctaagctatctctcatggttcctatgtttttttatcataattaaaagcaaaaccatctggatcacctaacagtcagaggtcagtatctcagcgtgtgaattatagaggaaatacagagagaacctcttccacttttacttttcgtccaaataaaatgcatggtgtaccagaagttgaagatcgggttgaggattggggctagctcgatgacactaaggccccaacatcgcgggacctgctgtggcgcggattcttaggaacgctgttctagccggccccctctccaggggtcgccgtggccggcattatttcctagttcttcttgtaaccctgaggtgccagcgcggggagtgaggaggggtcagggggctaaggatgcaacctctgacgttctgcgccttcctaggagagtcttacatgtgttgagatttcacaagcaatgcgagttgtaaaataccagctctacaagaagctaggctctgtgacggcatagttttcagtagctttatcacaatattcacaatggagaattatatgacatggtagcagaaataggcccttttatgtgttgcttctattttacctcaaattgtagatatagggtaatcaataaaatccatccatgcctttcacacactaagt

SEQ ID NO: 4987 - protein, 953 aa, Homo sapiens; identical to SEQ ID NO: 4179

SEQ ID NO: 4988 - DNA, 4288 bp, Homo sapiens
gggtcttgttctgtctcccaagctggagtgcagtggtgtggtcataggtcactgcagcgtcgaactcctaggctcaagtgatcctcttgcctcaggctcctgagtagctgggacaacaggcgtgtaccacacctggatactttttaaatttttggtagagaagggatctcactctattgccaagctggtgtcgaactcttggtcttaagcagccctcccacgtcagcatcccaaagtgttgggatttcagagggatcatggcccaagttgcaatgtccaccctccccgttgaagatgaggagtcctcggagagcaggatggtggtgacattcctcatgtcagctctcgagtccatgtgtaaagaactggccaagtccaaagccgaagtggcctgcattgcagtgtatgaaacagacgtgtttgtcgtcggaactgaaagaggacgtgcttttgtcaataccagaaaggattttcaaaaagattttgtaaaatattgtgttgaagaagaagaaaaagctgcagagatgcataaaatgaaatctacaacccaggcaaatcggatgagtgtagatgctgtagaaattgaaacactcagaaaaacagttgaggactatttctgcttttgctatgggaaagctttaggcaaatccacagtggtacctgtaccatatgagaagatgctgcgagaccagtcggctgtggtagtgcaggggcttccggaaggtgttgcctttaaacaccccgagaactatgatcttgcaaccctgaaatggattttggagaacaaagcagggatttcattcatcattaagagaccttttttagagccaaagaagcatgtaggtggtcgtgtgatggtaacagatgctgacaggtcaatactatctccaggtggaagttgtggccccatcaaagtgaaaactgaacccacagaagattctggcatttccctggaaatggcagctgtgacagtaaaggaagaatcagaagatcctgattattatcaatataacattcaagcaggcccttctgaaactgatgatgttgatgaaaaacagcccctatcgaagcctttgcaaggaagccaccattcttcagagggcaatgaaggcacagaaatggaagtaccagcagaagatgatgattattctccaccgtctaagagaccaaaggccaatgagctaccgcagccaccagtcccggaacccgccaatgctgggaagcggaaagtgagggagttcaacttcgagaaatggaatgctcgcatcactgatctacgtaaacaagttgaagaattgtttgaaaggaaatatgctcaagccataaaagccaaaggtccggtgacgatcccgtaccctcttttccagtctcatgttgaagatctttatgtagaaggacttcctgaaggaattccttttagaaggccatctacttacggaattcctcgcctggagaggatattacttgcaaaggaaaggattcgttttgtgattaagaaacatgagcttctgaattcaacacgtgaagatttacagcttgataagccagcttcaggagtaaaggaagaatggtatgccagaatcactaaattaagaaagatggtggatcagcttttctgcaaaaaatttgcggaagccttggggagcactgaagccaaggctgtaccgtaccaaaaatttgaggcacacccgaatgatctgtacgtggaaggactgccagaaaacattcctttccgaagtccctcatggtatggaatcccaaggctggaaaaaatcattcaagtgggcaatcgaattaaatttgttattaaaagaccagaacttctgactcacagtaccactgaagttactcagccaagaacgaatacaccagtcaaagaagattggaatgtcagaattaccaagctacggaagcaagtggaagagatttttaatttgaaatttgctcaagctcttggactcaccgaggcagtaaaagtaccatatcctgtgtttgaatcaaacccggagttcttgaaaggatcgtccgcgggagtaataaaatcaagttcgttgttaaaaaacctgaactagttatttcctacttgcctcctgggatggctagtaaaataaacactaaagctttgcagtcccccaaaagaccacgaagtcctgggagtaattcaaaggttcctgaaattgaggtcaccgtggaaggccctaataacaacaatcctcaaacctcagctgttcgaaccccgacccagactaacggttctaacgttcccttcaagccacgagggagagagttttcctttgaggcctggaatgccaaaatcacggacctaaaacagaaagttgaaaatctcttcaatgagaaatgtggggaagctcttggccttaaacaagctgtgaaggtgccgttcgcgttatttgagtctttcccggaagacttttatgtggaaggcttacctgagggtgtgccattccgaagaccatcgacttttggcattccgaggctggagaagatactcagaaacaaagccaaaattaagttcatcattaaaaagcccgaaatgtttgagacggcgattaaggagagcacctcctctaagagccctcccagaaaaataaattcatcacccaatgttaatactactgcatcaggtgttgaagaccttaacatcattcaggtgacaattccagatgatgataatgaaagactctcgaaagttgaaaaagctagacagctaagagaacaagtgaatgacctctttagtcggaaatttggtgaagctattggtatgggttttcctgtgaaagttccctacaggaaaatcacaattaaccctggctgtgtggtggttgatggcatgcccccgggggtgtccttcaaagcccccagctacctggaaatcagctccatgagaaggatcttagactctgccgagtttatcaaattcacggtcattagaccatttccaggacttgtgattaataaccagctggttgatcagagtgagtcagaaggccccgtgatacaagaatcagctgaaccaagccagttggaagttccagccacagaagaaataaaagagactgatggaagctctcagatcaagcaagaaccagaccccacgtggtagacctcttccctcctaggcttaaagtatcagtggttgagaagagcttttcggacctgttactaccccaagctgtgtaatatacttgtataacagaaataccttctatacaaacctttttttctacttttagatagaaatgtctactttttcagcagttctgtgaattaaagagcagagtgactgtgggtctggaatggctggtgtacttgggaatgtactatcaggattttacagcaatgctgggaaatgacagggaaaatgacaggaatgaatctcaccagattttttatgtactcagcagagccttgagttacggtgtttattttccaatcaagtgaagatatctcctacttctcctactggaacatctcagcttctgcagtgaagaaaaattcctgtgatagttcagttctttagtttttctatttgaaaaaaaaaaatcatttaaatgatcctttgttcacggctctccttaatgactgagtgaacagttcctatctgtatatttgactaaaccttttcctaagctatctctcatggttcctatgtttttttatcataattaaaagcaaaaccatctggatcacctaacagtcagaggtcagtatctcagcgtgtgaattatagaggaaatacagagagaacctcttccacttttacttttcgtccaaataaaatgcatggtgtaccagaagttgaagatcgggttgaggattggggctagctcgatgacactaaggccccaacatcgcgggacctgctgtggcgcggattcttaggaacgctgttctagccggccccctctccaggggtcgccgtggccggcattatttcctagttcttcttgtaaccctgaggtgccagcgcggggagtgaggaggggtcagggggctaaggatgcaacctctgacgttctgcgccttcctaggagagtcttacatgtgttgagatttcacaagcaatgcgagttgtaaaataccagctctacaagaagctaggctctgtgacggcatagttttcagtagctttatcacaatattcacaatggagaattatatgacatggtagcagaaataggcccttttatgtgttgcttctattttacctcaaattgtagatatagggtaatcaataaaatccatccatgcctttcacacactaagt

SEQ ID NO: 4989 - protein, 604 aa, Homo sapiens; identical to SEQ ID NO: 4117

SEQ ID NO: 4990 - DNA, 7153 bp, Homo sapiens
gggtcttgttctgtctcccaagctggagtgcagtggtgtggtcataggtcactgcagcgtcgaactcctaggctcaagtgatcctcttgcctcaggctcctgagtagctgggacaacaggcgtgtaccacacctggatactttttaaatttttggtagagaagggatctcactctattgccaagctggtgtcgaactcttggtcttaagcagccctcccacgtcagcatcccaaagtgttgggatttcagagggatcatggcccaagttgcaatgtccaccctccccgttgaagatgaggagtcctcggagagcaggatggtggtgacattcctcatgtcagctctcgagtccatgtgtaaagaactggccaagtccaaagccgaagtggcctgcattgcagtgtatgaaacagacgtgtttgtcgtcggaactgaaagaggacgtgcttttgtcaataccagaaaggattttcaaaaagattttgtaaaatattgtgttgaagaagaagaaaaagctgcagagatgcataaaatgaaatctacaacccaggcaaatcggatgagtgtagatgctgtagaaattgaaacactcagaaaaacagttgaggactatttctgcttttgctatgggaaagctttaggcaaatccacagtggtacctgtaccatatgagaagatgctgcgagaccagtcggctgtggtagtgcaggggcttccggaaggtgttgcctttaaacaccccgagaactatgatcttgcaaccctgaaatggattttggagaacaaagcagggatttcattcatcattaagagaccttttttagagccaaagaagcatgtaggtggtcgtgtgatggtaacagatgctgacaggtcaatactatctccaggtggaagttgtggccccatcaaagtgaaaactgaacccacagaagattctggaagccaccattcttcagagggcaatgaaggcacagaaatggaagtaccagcagaagattctactcaacatgtcccttcagaaacaagtgaggaccctgaagttgaggtgactattgaagatgatgattattctccaccgtctaagagaccaaaggccaatgagctaccgcagccaccagtcccggaacccgccaatgctgggaagcggaaagtgagggagttcaacttcgagaaatggaatgctcgcatcactgatctacgtaaacaagttgaagaattgtttgaaaggaaatatgctcaagccataaaagccaaaggtccggtgacgatcccgtaccctcttttccagtctcatgttgaagatctttatgtagaaggacttcctgaaggaattccttttagaaggccatctacttacggaattcctcgcctggagaggatattacttgcaaaggaaaggattcgttttgtgattaagaaacatgagcttctgaattcaacacgtgaagatttacagcttgataagccagcttcaggagtaaaggaagaatggtatgccagaatcactaaattaagaaagatggtggatcagcttttctgcaaaaaatttgcggaagccttggggagcactgaagccaaggctgtaccgtaccaaaaatttgaggcacacccgaatgatctgtacgtggaaggactgccagaaaacattcctttccgaagtccctcatggtatggaatcccaaggctggaaaaaatcattcaagtgggcaatcgaattaaatttgttattaaaagaccagaacttctgactcacagtaccactgaagttactcagccaagaacgaatacaccagtcaaagaagattggaatgtcagaattaccaagctacggaagcaagtggaagagatttttaatttgaaatttgcttagatttgttgacagcggtttcctggagtgctgtcttgagaacgattctgaggaggctcagcaagaaagagtgtttcagttgattgggtgtgtctgtcatggagaaggaactcaagctcttggactcaccgaggcagtaaaagtaccatatcctgtgtttgaatcaaacccggagttcttgtatgtggaaggcttgccagaggggattcccttccgaagccctacctggtttggaattccacgacttgaaaggatcgtccgcgggagtaataaaatcaagttcgttgttaaaaaacctgaactagttatttcctacttgcctcctgggatggctagtaaaataaacactaaagctttgcagtcccccaaaagaccacgaagtcctgggagtaattcaaaggttcctgaaattgaggtcaccgtggaaggccctaataacaacaatcctcaaacctcagctgttcgaaccccgacccagactaacggttctaacgttcccttcaagccacgagggagagagttttcctttgaggcctggaatgccaaaatcacggacctaaaacagaaagttgaaaatctcttcaatgagaaatgtggggaagctcttggccttaaacaagctgtgaaggtgccgttcgcgttatttgagtctttcccggaagacttttatgtggaaggcttacctgagggtgtgccattccgaagaccatcgacttttggcattccgaggctggagaagatactcagaaacaaagccaaaattaagttcatcattaaaaagcccgaaatgtttgagacggcgattaaggagagcacctcctctaagagccctcccagaaaaataaattcatcacccaatgttaatactactgcatcaggtgttgaagaccttaacatcattcaggtgacaattccagatgatgataatgaaagactctcgaaagttgaaaaagctagacagctaagagaacaagtgaatgacctctttagtcggaaatttggtgaagctattggtatgggttttcctgtgaaagttccctacaggaaaatcacaattaaccctggctgtgtggtggttgatggcatgcccccgggggtgtccttcaaagcccccagctacctggaaatcagctccatgagaaggatcttagactctgccgagtttatcaaattcacggtcattaggtaagtgagagtttcctgcttagtcacaggagcgaatctggagctcatgaggctgactcttctaaaatgcagccacaggtagtcatcgaatccggcttcctatgctgtgcaatcaacaaatcaaaataacttgtgtcatcattagaatgtcagatgtgcttctacgaactaagctgactcttttaattctttggcaaagggttggcaaactaggactgtttgccaaattcaggctgcctcctatttttagagtcttcctgaaacacagctacacccgtattatccatggctgctttcctgtcacagtgagtaagtagctgggactgagaaggcatggcctccaaagtctaaaatatttactctctagcactttgtagaaaaaccttagctaggcacagtggctaacgcctgtaatcccagcattttgggaggccaaggcaggcagatcacctgaggtcaggagttccagaccagcctggccaacatggtgaaatcccatctctacaaaaataaaacagttagctgggcatgatggcgggtgcctgtaatcccagctactcgggaggctgaggcaggatagtcgcttgaacccaggaggtggaggttgcaatgagccaagatcatgccactgcactccagcctggacgacagagtgagactccatcacaagaaaaaaagaactttgtcaacctctgtcttagggcgccttgtcacaggcttcgggtcagacggattcaaccttgcatcagccatttgttagccaggtcactctgttctttgtctgtaaatgagattgatcgttgttcccactgagagtgtcagctccttcccgtagagcaggcatgatgattgtactcacctctgacaccattgtgagtgccacattccttcccacgtccttgtcactgtaagagatgcccacctgagcaccaaccccaggttatcttcccctttgtcttccagccccccagaaacagctacgactcaacctacccaatcatttcatcatcagattgccactgtctctagttcaggtctcttgggactggcactcagaaatctcataataaatcctcttgaggcttctcatacactcgtcttcttccaatcttctttccctcaaaatctcatattttggttccacttcacccaccgtcattctccatatcactcccaggagttaggcaaaaagccccttccgttcttccgtatgttaaacttagaatcactctgttccctgctctgcgtttctattttttgtttttcctccatttactagtagcttaacactttctaacagtgttcttattattgatacgtatctatctcttccataagcttataaggtcacggataatacttctcattgtagtacgtaaatgacgtgggctagatatgagttgaataaacagttatacctgtaaattcttacagagtgaaaataaattgttatactttacaatttgtttctctctttagaccatttccaggacttgtgattaataaccgtgagtattttgtgaagtgttttgtttttgttttttcctggggtctgacgtgtgtgcgtgtgagtgtgtatacatgcttaacgtatatcacgttacttcacctatgtcagtaaccaggccaaatacttgttttagccctcagtaaaaacaccaggcacttcctagttgtaaaattattcaagcttcttaacttcctatcctcgatgcacttaatcataaaatggtaataatagcaccgattttgggggagtcgttccagtagatggaaagcatctggaacaggtgtcagcaagctcctgccgacgtgtatgcataaagttttattgaaaccaccatcgtgtccatttgtttatggcagaactgagagatggcagcagcaagtgtgtgcctgcaaaacctaaaatatttactaattggctctgcaagaaaagagtttgcatccccctaacctagaacagtgtctagcctctagtatgtgtttagcctacagtatgtgctcagcgaatacaatctatatttattactgcttttatgactgttataattactgtgcttggatttcgttacaaagtaagtcacaatgtgcctgcttctgttagtatttcagcacagtgcctggcacacatggggctctcaaatattgctgagcgagtgaacaaatgtcctttcaattccttaacgttgatgtcattttcaatagtattttgagccaaacttaattttgcgagtgtgttttgttttcttaactttattattaaaaatgtataaaagtgaggccaggcgtggtggctcacgcctgtaatcccagcagtttgggaggctgaggcaggcggatcagttgaggttgggagttggagaccagcccgtccaacatggtgaaagcctgtctctactaaaaatacaaaaatcagctgggtgtggtggcgcgtgcctgtaatcccagctactcaggaggctgaggcaggagagttgcttgaatcctagaggtggaggttgcagtgagctgagatcgtgccattgcactccagcctgggcaacaagagcaaaactctgtcccaataaataaataaataaaatgttctcttttgttcctgttcttgtgcggtagtgtggtatagagttttatggtaattactgtgaattagtgattctgagggacatatcagaactctgaggtttgtttccttctcatcttgagggaaacagcaaatgtatgttaaaatgcttttccaagggaacaacacatccttacattatttaaaccaatctgcttcattttcagagctggttgatcagagtgagtcagaaggccccgtgatacaagaatcagctgaaccaagccagttggaagttccagccacagaagaaataaaagagactgatggaagctctcagatcaagcaagaaccagaccccacgtggtagacctcttccctcctaggcttaaagtatcagtggttgagaagagcttttcggacctgttactaccccaagctgtgtaatatacttgtataacagaaataccttctatacaaacctttttttctacttttagatagaaatgtctactttttcagcagttctgtgaattaaagagcagagtgactgtgggtctggaatggctggtgtacttgggaatgtactatcaggattttacagcaatgctgggaaatgacagggaaaatgacaggaatgaatctcaccagattttttatgtactcagcagagccttgagttacggtgtttattttccaatcaagtgaagatatctcctacttctcctactggaacatctcagcttctgcagtgaagaaaaattcctgtgatagttcagttctttagtttttctatttgaaaaaaaaaaatcatttaaatgatcctttgttcacggctctccttaatgactgagtgaacagttcctatctgtatatttgactaaaccttttcctaagctatctctcatggttcctatgtttttttatcataattaaaagcaaaaccatctggatcacctaacagtcagaggtcagtatctcagcgtgtgaattatagaggaaatacagagagaacctcttccacttttacttttcgtccaaataaaatgcatggtgtaccagaagttgaagatcgggttgaggattggggctagctcgatgacactaaggccccaacatcgcgggacctgctgtggcgcggattcttaggaacgctgttctagccggccccctctccaggggtcgccgtggccggcattatttcctagttcttcttgtaaccctgaggtgccagcgcggggagtgaggaggggtcagggggctaaggatgcaacctctgacgttctgcgccttcctaggagagtcttacatgtgttgagatttcacaagcaatgcgagttgtaaaataccagctctacaagaagctaggctctgtgacggcatagttttcagtagctttatcacaatattcacaatggagaattatatgacatggtagcagaaataggcccttttatgtgttgcttctattttacctcaaattgtagatatagggtaatcaataaaatccatccatgcctttcacacactaagt

SEQ ID NO: 4991 - protein, 538 aa, Homo sapiens; identical to SEQ ID NO: 4183

SEQ ID NO: 4992 - DNA, 4355 bp, Homo sapiens
gggtcttgttctgtctcccaagctggagtgcagtggtgtggtcataggtcactgcagcgtcgaactcctaggctcaagtgatcctcttgcctcaggctcctgagtagctgggacaacaggcgtgtaccacacctggatactttttaaatttttggtagagaagggatctcactctattgccaagctggtgtcgaactcttggtcttaagcagccctcccacgtcagcatcccaaagtgttgggatttcagagggatcatggcccaagttgcaatgtccaccctccccgttgaagatgaggagtcctcggagagcaggatggtggtgacattcctcatgtcagctctcgagtccatgtgtaaagaactggccaagtccaaagccgaagtggcctgcattgcagtgtatgaaacagacgtgtttgtcgtcggaactgaaagaggacgtgcttttgtcaataccagaaaggattttcaaaaagattttgtaaaatattgtgttgaagaagaagaaaaagctgcagagatgcataaaatgaaatctacaacccaggcaaatcggatgagtgtagatgctgtagaaattgaaacactcagaaaaacagttgaggactatttctgcttttgctatgggaaagctttaggcaaatccacagtggtacctgtaccatatgagaagatgctgcgagaccagtcggctgtggtagtgcaggggcttccggaaggtgttgcctttaaacaccccgagaactatgatcttgcaaccctgaaatggattttggagaacaaagcagggatttcattcatcattaagagaccttttttagagccaaagaagcatgtaggtggtcgtgtgatggtaacagatgctgacaggtcaatactatctccaggtggaagttgtggccccatcaaagtgaaaactgaacccacagaagattctggcatttccctggaaatggcagctgtgacagtaaaggaagaatcagaagatcctgattattatcaatataacattcaagcaggcccttctgaaactgatgatgttgatgaaaaacagcccctatcgaagcctttgcaaggaagccaccattcttcagagggcaatgaaggcacagaaatggaagtaccagcagaagatgatgattattctccaccgtctaagagaccaaaggccaatgagctaccgcagccaccagtcccggaacccgccaatgctgggaagcggaaagtgagggagttcaacttcgagaaatggaatgctcgcatcactgatctacgtaaacaagttgaagaattgtttgaaaggaaatatgctcaagccataaaagccaaaggtccggtgacgatcccgtaccctcttttccagtctcatgttgaagatctttatgtagaaggacttcctgaaggaattccttttagaaggccatctacttacggaattcctcgcctggagaggatattacttgcaaaggaaaggattcgttttgtgattaagaaacatgagcttctgaattcaacacgtgaagatttacagcttgataagccagcttcaggagtaaaggaagaatggtatgccagaatcactaaattaagaaagatggtggatcagcttttctgcaaaaaatttgcggaagccttggggagcactgaagccaaggctgtaccgtaccaaaaatttgaggcacacccgaatgatctgtacgtggaaggactgccagaaaacattcctttccgaagtccctcatggtatggaatcccaaggctggaaaaaatcattcaagtgggcaatcgaattaaatttgttattaaaagaccagaacttctgactcacagtaccactgaagttactcagccaagaacgaatacaccagtcaaagaagattggaatgtcagaattaccaagctacggaagcaagtggaagagatttttaatttgaaatttgctcaagctcttggactcaccgaggcagtaaaagtaccatatcctgtgtttgaatcaaacccggagttcttgtatgtggaaggcttgccagaggggattcccttccgaagccctacctggtttggaattccacgacttgaaaggatcgtccgcgggagtaataaaatcaagttcgttgttaaaaaacctgaactagttatttcctacttgcctcctgggatggctagtaaaataaacactaaagctttgcagtcccccaaaagaccacgaagtcctgggagtaattcaaaggttcctgaaattgaggtcaccgtggaaggccctaataacaacaatcctcaaacctcagctgttcgaaccccgacccagactaacggttctaacgttcccttcaagccacgagggagagagttttcctttgaggcctggaatgccaaaatcacggacctaaaacagaaagttgaaaatctcttcaatgagaaatgtggggaagctcttggccttaaacaagctgtgaaggtgccgttcgcgttatttgagtctttcccggaagacttttatgtggaaggcttacctgagggtgtgccattccgaagaccatcgacttttggcattccgaggctggagaagatactcagaaacaaagccaaaattaagttcatcattaaaaagcccgaaatgtttgagacggcgattaaggagagcacctcctctaagagccctcccagaaaaataaattcatcacccaatgttaatactactgcatcaggtgttgaagaccttaacatcattcaggtgacaattccagatgatgataatgaaagactctcgaaagttgaaaaagctagacagctaagagaacaagtgaatgacctctttagtcggaaatttggtgaagctattggtatgggttttcctgtgaaagttccctacaggaaaatcacaattaaccctggctgtgtggtggttgatggcatgcccccgggggtgtccttcaaagcccccagctacctggaaatcagctccatgagaaggatcttagactctgccgagtttatcaaattcacggtcattagaccatttccaggacttgtgattaataaccagctggttgatcagagtgagtcagaaggccccgtgatacaagaatcagctgaaccaagccagttggaagttccagccacagaagaaataaaagagactgatggaagctctcagatcaagcaagaaccagaccccacgtggtagacctcttccctcctaggcttaaagtatcagtggttgagaagagcttttcggacctgttactaccccaagctgtgtaatatacttgtataacagaaataccttctatacaaacctttttttctacttttagatagaaatgtctactttttcagcagttctgtgaattaaagagcagagtgactgtgggtctggaatggctggtgtacttgggaatgtactatcaggattttacagcaatgctgggaaatgacagggaaaatgacaggaatgaatctcaccagattttttatgtactcagcagagccttgagttacggtgtttattttccaatcaagtgaagatatctcctacttctcctactggaacatctcagcttctgcagtgaagaaaaattcctgtgatagttcagttctttagtttttctatttgaaaaaaaaaaatcatttaaatgatcctttgttcacggctctccttaatgactgagtgaacagttcctatctgtatatttgactaaaccttttcctaagctatctctcatggttcctatgtttttttatcataattaaaagcaaaaccatctggatcacctaacagtcagaggtcagtatctcagcgtgtgaattatagaggaaatacagagagaacctcttccacttttacttttcgtccaaataaaatgcatggtgtaccagaagttgaagatcgggttgaggattggggctagctcgatgacactaaggccccaacatcgcgggacctgctgtggcgcggattcttaggaacgctgttctagccggccccctctccaggggtcgccgtggccggcattatttcctagttcttcttgtaaccctgaggtgccagcgcggggagtgaggaggggtcagggggctaaggatgcaacctctgacgttctgcgccttcctaggagagtcttacatgtgttgagatttcacaagcaatgcgagttgtaaaataccagctctacaagaagctaggctctgtgacggcatagttttcagtagctttatcacaatattcacaatggagaattatatgacatggtagcagaaataggcccttttatgtgttgcttctattttacctcaaattgtagatatagggtaatcaataaaatccatccatgcctttcacacactaagt

SEQ ID NO: 4993 - protein, 977 aa, Homo sapiens; identical to SEQ ID NO: 472

SEQ ID NO: 4994 - DNA, 5059 bp, Homo sapiens
gggtcttgttctgtctcccaagctggagtgcagtggtgtggtcataggtcactgcagcgtcgaactcctaggctcaagtgatcctcttgcctcaggctcctgagtagctgggacaacaggcgtgtaccacacctggatactttttaaatttttggtagagaagggatctcactctattgccaagctggtgtcgaactcttggtcttaagcagccctcccacgtcagcatcccaaagtgttgggatttcagagggatcatggcccaagttgcaatgtccaccctccccgttgaagatgaggagtcctcggagagcaggatggtggtgacattcctcatgtcagctctcgagtccatgtgtaaagaactggccaagtccaaagccgaagtggcctgcattgcagtgtatgaaacagacgtgtttgtcgtcggaactgaaagaggacgtgcttttgtcaataccagaaaggattttcaaaaagattttgtaaaatattgtgttgaagaagaagaaaaagctgcagagatgcataaaatgaaatctacaacccaggcaaatcggatgagtgtagatgctgtagaaattgaaacactcagaaaaacagttgaggactatttctgcttttgctatgggaaagctttaggcaaatccacagtggtacctgtaccatatgagaagatgctgcgagaccagtcggctgtggtagtgcaggggcttccggaaggtgttgcctttaaacaccccgagaactatgatcttgcaaccctgaaatggattttggagaacaaagcagggatttcattcatcattaagagaccttttttagagccaaagaagcatgtaggtggtcgtgtgatggtaacagatgctgacaggtcaatactatctccaggtggaagttgtggccccatcaaagtgaaaactgaacccacagaagattctggcatttccctggaaatggcagctgtgacagtaaaggaagaatcagaagatcctgattattatcaatataacattcaagcaggcccttctgaaactgatgatgttgatgaaaaacagcccctatcgaagcctttgcaaggaagccaccattcttcagagggcaatgaaggcacagaaatggaagtaccagcagaagattctactcaacatgtcccttcagaaacaagtgaggaccctgaagttgaggtgactattgaagatgatgattattctccaccgtctaagagaccaaaggccaatgagctaccgcagccaccagtcccggaacccgccaatgctgggaagcggaaagtgagggagttcaacttcgagaaatggaatgctcgcatcactgatctacgtaaacaagttgaagaattgtttgaaaggaaatatgctcaagccataaaagccaaaggtccggtgacgatcccgtaccctcttttccagtctcatgttgaagatctttatgtagaaggacttcctgaaggaattccttttagaaggccatctacttacggaattcctcgcctggagaggatattacttgcaaaggaaaggattcgttttgtgattaagaaacatgagcttctgaattcaacacgtgaagatttacagcttgataagccagcttcaggagtaaaggaagaatggtatgccagaatcactaaattaagaaagatggtggatcagcttttctgcaaaaaatttgcggaagccttggggagcactgaagccaaggctgtaccgtaccaaaaatttgaggcacacccgaatgatctgtacgtggaaggactgccagaaaacattcctttccgaagtccctcatggtatggaatcccaaggctggaaaaaatcattcaagtgggcaatcgaattaaatttgttattaaaagaccagaacttctgactcacagtaccactgaagttactcagccaagaacgaatacaccagtcaaagaagattggaatgtcagaattaccaagctacggaagcaagtggaagagatttttaatttgaaatttgctcaagctcttggactcaccgaggcagtaaaagtaccatatcctgtgtttgaatcaaacccggagttcttgtatgtggaaggcttgccagaggggattcccttccgaagccctacctggtttggaattccacgacttgaaaggatcgtccgcgggagtaataaaatcaagttcgttgttaaaaaacctgaactagttatttcctacttgcctcctgggatggctagtaaaataaacactaaagctttgcagtcccccaaaagaccacgaagtcctgggagtaattcaaaggttcctgaaattgaggtcaccgtggaaggccctaataacaacaatcctcaaacctcagctgttcgaaccccgacccagactaacggttctaacgttcccttcaagccacgagggagagagttttcctttgaggcctggaatgccaaaatcacggacctaaaacagaaagttgaaaatctcttcaatgagaaatgtggggaagctcttggccttaaacaagctgtgaaggtgccgttcgcgttatttgagtctttcccggaagacttttatgtggaaggcttacctgagggtgtgccattccgaagaccatcgacttttggcattccgaggctggagaagatactcagaaacaaagccaaaattaagttcatcattaaaaagcccgaaatgtttgagacggcgattaaggagagcacctcctctaagagccctcccagaaaaataaattcatcacccaatgttaatactactgcatcaggtgttgaagaccttaacatcattcaggtgacaattccagatgatgataatgaaagactctcgaaagttgaaaaagctagacagctaagagaacaagtgaatgacctctttagtcggaaatttggtgaagctattggtatgggttttcctgtgaaagttccctacaggaaaatcacaattaaccctggctgtgtggtggttgatggcatgcccccgggggtgtccttcaaagcccccagctacctggaaatcagctccatgagaaggatcttagactctgccgagtttatcaaattcacggtcattagaccatttccaggacttgtgattaataaccagctggttgatcagagtgagtcagaaggccccgtgatacaagaatcagctgaaccaagccagttggaagttccagccacagaaggtaaaaggacctcttccctcctagggtaaatcagcttctgtgtcagggatgctgtgtggtgtccatctgaaccccctgcatacgcgtagctaatgtgatctccccactttcacataagatggtggccctgccttcagggaatgtgggagccaggtgggagccttcccggatatttaagctagaagattctacagggagattctccttggatcaatatatgtctctcagtcaaagatgtaaaagcacttttgccttaaaaagaatgttctgtttctaaatagagtcaacgttgtcctcctcattggaattcactatgagtcagaatcattagactgacttttttttttccatagtaatagtattttgcagagtctcacagagctgcagatcttttgttcatcttgcagagttaacaagtctgatcctgttagtccagatttcttaaatttggccaagttataataggagcagtagcttgagacccgaagtcaggaaactttgacaatggatttttttttttaatccagagacttgtactggaatttgccttaccctgtcagctcatggacttaaggtttcatcccgctttatgagtgcttctgaatccaagtcattgttacctgaatttgcaaattaagttgtgatattcgtgactgttaaattcctgtaattagattaacctctttgcttgcttgtttgttttctctcctattttagcttaaagtatcagtggttgagaagagcttttcggacctgttactaccccaagctgtgtaatatacttgtataacagaaataccttctatacaaacctttttttctacttttagatagaaatgtctactttttcagcagttctgtgaattaaagagcagagtgactgtgggtctggaatggctggtgtacttgggaatgtactatcaggattttacagcaatgctgggaaatgacagggaaaatgacaggaatgaatctcaccagattttttatgtactcagcagagccttgagttacggtgtttattttccaatcaagtgaagatatctcctacttctcctactggaacatctcagcttctgcagtgaagaaaaattcctgtgatagttcagttctttagtttttctatttgaaaaaaaaaaatcatttaaatgatcctttgttcacggctctccttaatgactgagtgaacagttcctatctgtatatttgactaaaccttttcctaagctatctctcatggttcctatgtttttttatcataattaaaagcaaaaccatctggatcacctaacagtcagaggtcagtatctcagcgtgtgaattatagaggaaatacagagagaacctcttccacttttacttttcgtccaaataaaatgcatggtgtaccagaagttgaagatcgggttgaggattggggctagctcgatgacactaaggccccaacatcgcgggacctgctgtggcgcggattcttaggaacgctgttctagccggccccctctccaggggtcgccgtggccggcattatttcctagttcttcttgtaaccctgaggtgccagcgcggggagtgaggaggggtcagggggctaaggatgcaacctctgacgttctgcgccttcctaggagagtcttacatgtgttgagatttcacaagcaatgcgagttgtaaaataccagctctacaagaagctaggctctgtgacggcatagttttcagtagctttatcacaatattcacaatggagaattatatgacatggtagcagaaataggcccttttatgtgttgcttctattttacctcaaattgtagatatagggtaatcaataaaatccatccatgcctttcacacactaagt

SEQ ID NO: 4995 - protein, 988 aa, Homo sapiens; identical to SEQ ID NO: 4765

SEQ ID NO: 4996 - DNA, 4932 bp, Homo sapiens
gggtcttgttctgtctcccaagctggagtgcagtggtgtggtcataggtcactgcagcgtcgaactcctaggctcaagtgatcctcttgcctcaggctcctgagtagctgggacaacaggcgtgtaccacacctggatactttttaaatttttggtagagaagggatctcactctattgccaagctggtgtcgaactcttggtcttaagcagccctcccacgtcagcatcccaaagtgttgggatttcagagggatcatggcccaagttgcaatgtccaccctccccgttgaagatgaggagtcctcggagagcaggatggtggtgacattcctcatgtcagctctcgagtccatgtgtaaagaactggccaagtccaaagccgaagtggcctgcattgcagtgtatgaaacagacgtgtttgtcgtcggaactgaaagaggacgtgcttttgtcaataccagaaaggattttcaaaaagattttgtaaaatattgtgttgaagaagaagaaaaagctgcagagatgcataaaatgaaatctacaacccaggcaaatcggatgagtgtagatgctgtagaaattgaaacactcagaaaaacagttgaggactatttctgcttttgctatgggaaagctttaggcaaatccacagtggtacctgtaccatatgagaagatgctgcgagaccagtcggctgtggtagtgcaggggcttccggaaggtgttgcctttaaacaccccgagaactatgatcttgcaaccctgaaatggattttggagaacaaagcagggatttcattcatcattaagagaccttttttagagccaaagaagcatgtaggtggtcgtgtgatggtaacagatgctgacaggtcaatactatctccaggtggaagttgtggccccatcaaagtgaaaactgaacccacagaagattctggcatttccctggaaatggcagctgtgacagtaaaggaagaatcagaagatcctgattattatcaatataacattcaaggaagccaccattcttcagagggcaatgaaggcacagaaatggaagtaccagcagaagattctactcaacatgtcccttcagaaacaagtgaggaccctgaagttgaggtgactattgaagatgatgattattctccaccgtctaagagaccaaaggccaatgagctaccgcagccaccagtcccggaacccgccaatgctgggaagcggaaagtgagggagttcaacttcgagaaatggaatgctcgcatcactgatctacgtaaacaagttgaagaattgtttgaaaggaaatatgctcaagccataaaagccaaaggtccggtgacgatcccgtaccctcttttccagtctcatgttgaagatctttatgtagaaggacttcctgaaggaattccttttagaaggccatctacttacggaattcctcgcctggagaggatattacttgcaaaggaaaggattcgttttgtgattaagaaacatgagcttctgaattcaacacgtgaagatttacagcttgataagccagcttcaggagtaaaggaagaatggtatgccagaatcactaaattaagaaagatggtggatcagcttttctgcaaaaaatttgcggaagccttggggagcactgaagccaaggctgtaccgtaccaaaaatttgaggcacacccgaatgatctgtacgtggaaggactgccagaaaacattcctttccgaagtccctcatggtatggaatcccaaggctggaaaaaatcattcaagtgggcaatcgaattaaatttgttattaaaagaccagaacttctgactcacagtaccactgaagttactcagccaagaacgaatacaccagtcaaagaagattggaatgtcagaattaccaagctacggaagcaagtggaagagatttttaatttgaaatttgctcaagctcttggactcaccgaggcagtaaaagtaccatatcctgtgtttgaatcaaacccggagttcttgaaaggatcgtccgcgggagtaataaaatcaagttcgttgttaaaaaacctgaactagttatttcctacttgcctcctgggatggctagtaaaataaacactaaagctttgcagtcccccaaaagaccacgaagtcctgggagtaattcaaaggttcctgaaattgaggtcaccgtggaaggccctaataacaacaatcctcaaacctcagctgttcgaaccccgacccagactaacggttctaacgttcccttcaagccacgagggagagagttttcctttgaggcctggaatgccaaaatcacggacctaaaacagaaagttgaaaatctcttcaatgagaaatgtggggaagctcttggccttaaacaagctgtgaaggtgccgttcgcgttatttgagtctttcccggaagacttttatgtggaaggcttacctgagggtgtgccattccgaagaccatcgacttttggcattccgaggctggagaagatactcagaaacaaagccaaaattaagttcatcattaaaaagcccgaaatgtttgagacggcgattaaggagagcacctcctctaagagccctcccagaaaaataaattcatcacccaatgttaatactactgcatcaggtgttgaagaccttaacatcattcaggtgacaattccagatgatgataatgaaagactctcgaaagttgaaaaagctagacagctaagagaacaagtgaatgacctctttagtcggaaatttggtgaagctattggtatgggttttcctgtgaaagttccctacaggaaaatcacaattaaccctggctgtgtggtggttgatggcatgcccccgggggtgtccttcaaagcccccagctacctggaaatcagctccatgagaaggatcttagactctgccgagtttatcaaattcacggtcattagaccatttccaggacttgtgattaataaccagctggttgatcagagtgagtcagaaggccccgtgatacaagaatcagctgaaccaagccagttggaagttccagccacagaaggtaaaaggacctcttccctcctagggtaaatcagcttctgtgtcagggatgctgtgtggtgtccatctgaaccccctgcatacgcgtagctaatgtgatctccccactttcacataagatggtggccctgccttcagggaatgtgggagccaggtgggagccttcccggatatttaagctagaagattctacagggagattctccttggatcaatatatgtctctcagtcaaagatgtaaaagcacttttgccttaaaaagaatgttctgtttctaaatagagtcaacgttgtcctcctcattggaattcactatgagtcagaatcattagactgacttttttttttccatagtaatagtattttgcagagtctcacagagctgcagatcttttgttcatcttgcagagttaacaagtctgatcctgttagtccagatttcttaaatttggccaagttataataggagcagtagcttgagacccgaagtcaggaaactttgacaatggatttttttttttaatccagagacttgtactggaatttgccttaccctgtcagctcatggacttaaggtttcatcccgctttatgagtgcttctgaatccaagtcattgttacctgaatttgcaaattaagttgtgatattcgtgactgttaaattcctgtaattagattaacctctttgcttgcttgtttgttttctctcctattttagcttaaagtatcagtggttgagaagagcttttcggacctgttactaccccaagctgtgtaatatacttgtataacagaaataccttctatacaaacctttttttctacttttagatagaaatgtctactttttcagcagttctgtgaattaaagagcagagtgactgtgggtctggaatggctggtgtacttgggaatgtactatcaggattttacagcaatgctgggaaatgacagggaaaatgacaggaatgaatctcaccagattttttatgtactcagcagagccttgagttacggtgtttattttccaatcaagtgaagatatctcctacttctcctactggaacatctcagcttctgcagtgaagaaaaattcctgtgatagttcagttctttagtttttctatttgaaaaaaaaaaatcatttaaatgatcctttgttcacggctctccttaatgactgagtgaacagttcctatctgtatatttgactaaaccttttcctaagctatctctcatggttcctatgtttttttatcataattaaaagcaaaaccatctggatcacctaacagtcagaggtcagtatctcagcgtgtgaattatagaggaaatacagagagaacctcttccacttttacttttcgtccaaataaaatgcatggtgtaccagaagttgaagatcgggttgaggattggggctagctcgatgacactaaggccccaacatcgcgggacctgctgtggcgcggattcttaggaacgctgttctagccggccccctctccaggggtcgccgtggccggcattatttcctagttcttcttgtaaccctgaggtgccagcgcggggagtgaggaggggtcagggggctaaggatgcaacctctgacgttctgcgccttcctaggagagtcttacatgtgttgagatttcacaagcaatgcgagttgtaaaataccagctctacaagaagctaggctctgtgacggcatagttttcagtagctttatcacaatattcacaatggagaattatatgacatggtagcagaaataggcccttttatgtgttgcttctattttacctcaaattgtagatatagggtaatcaataaaatccatccatgcctttcacacactaagt

SEQ ID NO: 4997 - protein, 605 aa, Homo sapiens; identical to SEQ ID NO: 4221

SEQ ID NO: 4998 - DNA, 4223 bp, Homo sapiens
gggtcttgttctgtctcccaagctggagtgcagtggtgtggtcataggtcactgcagcgtcgaactcctaggctcaagtgatcctcttgcctcaggctcctgagtagctgggacaacaggcgtgtaccacacctggatactttttaaatttttggtagagaagggatctcactctattgccaagctggtgtcgaactcttggtcttaagcagccctcccacgtcagcatcccaaagtgttgggatttcagagggatcatggcccaagttgcaatgtccaccctccccgttgaagatgaggagtcctcggagagcaggatggtggtgacattcctcatgtcagctctcgagtccatgtgtaaagaactggccaagtccaaagccgaagtggcctgcattgcagtgtatgaaacagacgtgtttgtcgtcggaactgaaagaggacgtgcttttgtcaataccagaaaggattttcaaaaagattttgtaaaatattgtgttgaagaagaagaaaaagctgcagagatgcataaaatgaaatctacaacccaggcaaatcggatgagtgtagatgctgtagaaattgaaacactcagaaaaacagttgaggactatttctgcttttgctatgggaaagctttaggcaaatccacagtggtacctgtaccatatgagaagatgctgcgagaccagtcggctgtggtagtgcaggggcttccggaaggtgttgcctttaaacaccccgagaactatgatcttgcaaccctgaaatggattttggagaacaaagcagggatttcattcatcattaagagaccttttttagagccaaagaagcatgtaggtggtcgtgtgatggtaacagatgctgacaggtcaatactatctccaggtggaagttgtggccccatcaaagtgaaaactgaacccacagaagattctggcatttccctggaaatggcagctgtgacagtaaaggaagaatcagaagatcctgattattatcaatataacattcaaggaagccaccattcttcagagggcaatgaaggcacagaaatggaagtaccagcagaagatgatgattattctccaccgtctaagagaccaaaggccaatgagctaccgcagccaccagtcccggaacccgccaatgctgggaagcggaaagtgagggagttcaacttcgagaaatggaatgctcgcatcactgatctacgtaaacaagttgaagaattgtttgaaaggaaatatgctcaagccataaaagccaaaggtccggtgacgatcccgtaccctcttttccagtctcatgttgaagatctttatgtagaaggacttcctgaaggaattccttttagaaggccatctacttacggaattcctcgcctggagaggatattacttgcaaaggaaaggattcgttttgtgattaagaaacatgagcttctgaattcaacacgtgaagatttacagcttgataagccagcttcaggagtaaaggaagaatggtatgccagaatcactaaattaagaaagatggtggatcagcttttctgcaaaaaatttgcggaagccttggggagcactgaagccaaggctgtaccgtaccaaaaatttgaggcacacccgaatgatctgtacgtggaaggactgccagaaaacattcctttccgaagtccctcatggtatggaatcccaaggctggaaaaaatcattcaagtgggcaatcgaattaaatttgttattaaaagaccagaacttctgactcacagtaccactgaagttactcagccaagaacgaatacaccagctcaagctcttggactcaccgaggcagtaaaagtaccatatcctgtgtttgaatcaaacccggagttcttgtatgtggaaggcttgccagaggggattcccttccgaagccctacctggtttggaattccacgacttgaaaggatcgtccgcgggagtaataaaatcaagttcgttgttaaaaaacctgaactagttatttcctacttgcctcctgggatggctagtaaaataaacactaaagctttgcagtcccccaaaagaccacgaagtcctgggagtaattcaaaggttcctgaaattgaggtcaccgtggaaggccctaataacaacaatcctcaaacctcagctgttcgaaccccgacccagactaacggttctaacgttcccttcaagccacgagggagagagttttcctttgaggcctggaatgccaaaatcacggacctaaaacagaaagttgaaaatctcttcaatgagaaatgtggggaagctcttggccttaaacaagctgtgaaggtgccgttcgcgttatttgagtctttcccggaagacttttatgtggaaggcttacctgagggtgtgccattccgaagaccatcgacttttggcattccgaggctggagaagatactcagaaacaaagccaaaattaagttcatcattaaaaagcccgaaatgtttgagacggcgattaaggagagcacctcctctaagagccctcccagaaaaataaattcatcacccaatgttaatactactgcatcaggtgttgaagaccttaacatcattcaggtgacaattccagatgatgataatgaaagactctcgaaagttgaaaaagctagacagctaagagaacaagtgaatgacctctttagtcggaaatttggtgaagctattggtatgggttttcctgtgaaagttccctacaggaaaatcacaattaaccctggctgtgtggtggttgatggcatgcccccgggggtgtccttcaaagcccccagctacctggaaatcagctccatgagaaggatcttagactctgccgagtttatcaaattcacggtcattagaccatttccaggacttgtgattaataaccagctggttgatcagagtgagtcagaaggccccgtgatacaagaatcagctgaaccaagccagttggaagttccagccacagaagaaataaaagagactgatggaagctctcagatcaagcaagaaccagaccccacgtggtagacctcttccctcctaggcttaaagtatcagtggttgagaagagcttttcggacctgttactaccccaagctgtgtaatatacttgtataacagaaataccttctatacaaacctttttttctacttttagatagaaatgtctactttttcagcagttctgtgaattaaagagcagagtgactgtgggtctggaatggctggtgtacttgggaatgtactatcaggattttacagcaatgctgggaaatgacagggaaaatgacaggaatgaatctcaccagattttttatgtactcagcagagccttgagttacggtgtttattttccaatcaagtgaagatatctcctacttctcctactggaacatctcagcttctgcagtgaagaaaaattcctgtgatagttcagttctttagtttttctatttgaaaaaaaaaaatcatttaaatgatcctttgttcacggctctccttaatgactgagtgaacagttcctatctgtatatttgactaaaccttttcctaagctatctctcatggttcctatgtttttttatcataattaaaagcaaaaccatctggatcacctaacagtcagaggtcagtatctcagcgtgtgaattatagaggaaatacagagagaacctcttccacttttacttttcgtccaaataaaatgcatggtgtaccagaagttgaagatcgggttgaggattggggctagctcgatgacactaaggccccaacatcgcgggacctgctgtggcgcggattcttaggaacgctgttctagccggccccctctccaggggtcgccgtggccggcattatttcctagttcttcttgtaaccctgaggtgccagcgcggggagtgaggaggggtcagggggctaaggatgcaacctctgacgttctgcgccttcctaggagagtcttacatgtgttgagatttcacaagcaatgcgagttgtaaaataccagctctacaagaagctaggctctgtgacggcatagttttcagtagctttatcacaatattcacaatggagaattatatgacatggtagcagaaataggcccttttatgtgttgcttctattttacctcaaattgtagatatagggtaatcaataaaatccatccatgcctttcacacactaagt

SEQ ID NO: 4999 - protein, 933 aa, Homo sapiens; identical to SEQ ID NO: 4067

SEQ ID NO: 5000 - DNA, 4927 bp, Homo sapiens
gggtcttgttctgtctcccaagctggagtgcagtggtgtggtcataggtcactgcagcgtcgaactcctaggctcaagtgatcctcttgcctcaggctcctgagtagctgggacaacaggcgtgtaccacacctggatactttttaaatttttggtagagaagggatctcactctattgccaagctggtgtcgaactcttggtcttaagcagccctcccacgtcagcatcccaaagtgttgggatttcagagggatcatggcccaagttgcaatgtccaccctccccgttgaagatgaggagtcctcggagagcaggatggtggtgacattcctcatgtcagctctcgagtccatgtgtaaagaactggccaagtccaaagccgaagtggcctgcattgcagtgtatgaaacagacgtgtttgtcgtcggaactgaaagaggacgtgcttttgtcaataccagaaaggattttcaaaaagattttgtaaaatattgtgttgaagaagaagaaaaagctgcagagatgcataaaatgaaatctacaacccaggcaaatcggatgagtgtagatgctgtagaaattgaaacactcagaaaaacagttgaggactatttctgcttttgctatgggaaagctttaggcaaatccacagtggtacctgtaccatatgagaagatgctgcgagaccagtcggctgtggtagtgcaggggcttccggaaggtgttgcctttaaacaccccgagaactatgatcttgcaaccctgaaatggattttggagaacaaagcagggatttcattcatcattaagagaccttttttagagccaaagaagcatgtaggtggtcgtgtgatggtaacagatgctgacaggtcaatactatctccaggtggaagttgtggccccatcaaagtgaaaactgaacccacagaagattctggcatttccctggaaatggcagctgtgacagtaaaggaagaatcagaagatcctgattattatcaatataacattcaaggaagccaccattcttcagagggcaatgaaggcacagaaatggaagtaccagcagaagattctactcaacatgtcccttcagaaacaagtgaggaccctgaagttgaggtgactattgaagatgatgattattctccaccgtctaagagaccaaaggccaatgagctaccgcagccaccagtcccggaacccgccaatgctgggaagcggaaagtgagggagttcaacttcgagaaatggaatgctcgcatcactgatctacgtaaacaagttgaagaattgtttgaaaggaaatatgctcaagccataaaagccaaaggtccggtgacgatcccgtaccctcttttccagtctcatgttgaagatctttatgtagaaggacttcctgaaggaattccttttagaaggccatctacttacggaattcctcgcctggagaggatattacttgcaaaggaaaggattcgttttgtgattaagaaacatgagcttctgaattcaacacgtgaagatttacagcttgataagccagcttcaggagtaaaggaagaatggtatgccagaatcactaaattaagaaagatggtggatcagcttttctgcaaaaaatttgcggaagccttggggagcactgaagccaaggctgtaccgtaccaaaaatttgaggcacacccgaatgatctgtacgtggaaggactgccagaaaacattcctttccgaagtccctcatggtatggaatcccaaggctggaaaaaatcattcaagtgggcaatcgaattaaatttgttattaaaagaccagaacttctgactcacagtaccactgaagttactcagccaagaacgaatacaccagctcaagctcttggactcaccgaggcagtaaaagtaccatatcctgtgtttgaatcaaacccggagttcttgtatgtggaaggcttgccagaggggattcccttccgaagccctacctggtttggaattccacgacttgaaaggatcgtccgcgggagtaataaaatcaagttcgttgttaaaaaacctgaactagttatttcctacttgcctcctgggatggctagtaaaataaacactaaagctttgcagtcccccaaaagaccacgaagtcctgggagtaattcaaaggttcctgaaattgaggtcaccgtggaaggccctaataacaacaatcctcaaacctcagctgttcgaaccccgacccagactaacggttctaacgttcccttcaagccacgagggagagagttttcctttgaggcctggaatgccaaaatcacggacctaaaacagaaagttgaaaatctcttcaatgagaaatgtggggaagctcttggccttaaacaagctgtgaaggtgccgttcgcgttatttgagtctttcccggaagacttttatgtggaaggcttacctgagggtgtgccattccgaagaccatcgacttttggcattccgaggctggagaagatactcagaaacaaagccaaaattaagttcatcattaaaaagcccgaaatgtttgagacggcgattaaggagagcacctcctctaagagccctcccagaaaaataaattcatcacccaatgttaatactactgcatcaggtgttgaagaccttaacatcattcaggtgacaattccagatgatgataatgaaagactctcgaaagttgaaaaagctagacagctaagagaacaagtgaatgacctctttagtcggaaatttggtgaagctattggtatgggttttcctgtgaaagttccctacaggaaaatcacaattaaccctggctgtgtggtggttgatggcatgcccccgggggtgtccttcaaagcccccagctacctggaaatcagctccatgagaaggatcttagactctgccgagtttatcaaattcacggtcattagaccatttccaggacttgtgattaataaccagctggttgatcagagtgagtcagaaggccccgtgatacaagaatcagctgaaccaagccagttggaagttccagccacagaaggtaaaaggacctcttccctcctagggtaaatcagcttctgtgtcagggatgctgtgtggtgtccatctgaaccccctgcatacgcgtagctaatgtgatctccccactttcacataagatggtggccctgccttcagggaatgtgggagccaggtgggagccttcccggatatttaagctagaagattctacagggagattctccttggatcaatatatgtctctcagtcaaagatgtaaaagcacttttgccttaaaaagaatgttctgtttctaaatagagtcaacgttgtcctcctcattggaattcactatgagtcagaatcattagactgacttttttttttccatagtaatagtattttgcagagtctcacagagctgcagatcttttgttcatcttgcagagttaacaagtctgatcctgttagtccagatttcttaaatttggccaagttataataggagcagtagcttgagacccgaagtcaggaaactttgacaatggatttttttttttaatccagagacttgtactggaatttgccttaccctgtcagctcatggacttaaggtttcatcccgctttatgagtgcttctgaatccaagtcattgttacctgaatttgcaaattaagttgtgatattcgtgactgttaaattcctgtaattagattaacctctttgcttgcttgtttgttttctctcctattttagcttaaagtatcagtggttgagaagagcttttcggacctgttactaccccaagctgtgtaatatacttgtataacagaaataccttctatacaaacctttttttctacttttagatagaaatgtctactttttcagcagttctgtgaattaaagagcagagtgactgtgggtctggaatggctggtgtacttgggaatgtactatcaggattttacagcaatgctgggaaatgacagggaaaatgacaggaatgaatctcaccagattttttatgtactcagcagagccttgagttacggtgtttattttccaatcaagtgaagatatctcctacttctcctactggaacatctcagcttctgcagtgaagaaaaattcctgtgatagttcagttctttagtttttctatttgaaaaaaaaaaatcatttaaatgatcctttgttcacggctctccttaatgactgagtgaacagttcctatctgtatatttgactaaaccttttcctaagctatctctcatggttcctatgtttttttatcataattaaaagcaaaaccatctggatcacctaacagtcagaggtcagtatctcagcgtgtgaattatagaggaaatacagagagaacctcttccacttttacttttcgtccaaataaaatgcatggtgtaccagaagttgaagatcgggttgaggattggggctagctcgatgacactaaggccccaacatcgcgggacctgctgtggcgcggattcttaggaacgctgttctagccggccccctctccaggggtcgccgtggccggcattatttcctagttcttcttgtaaccctgaggtgccagcgcggggagtgaggaggggtcagggggctaaggatgcaacctctgacgttctgcgccttcctaggagagtcttacatgtgttgagatttcacaagcaatgcgagttgtaaaataccagctctacaagaagctaggctctgtgacggcatagttttcagtagctttatcacaatattcacaatggagaattatatgacatggtagcagaaataggcccttttatgtgttgcttctattttacctcaaattgtagatatagggtaatcaataaaatccatccatgcctttcacacactaagt

SEQ ID NO: 5001 - protein, 944 aa, Homo sapiens; identical to SEQ ID NO: 4885

SEQ ID NO: 5002 - DNA, 4208 bp, Homo sapiens
gggtcttgttctgtctcccaagctggagtgcagtggtgtggtcataggtcactgcagcgtcgaactcctaggctcaagtgatcctcttgcctcaggctcctgagtagctgggacaacaggcgtgtaccacacctggatactttttaaatttttggtagagaagggatctcactctattgccaagctggtgtcgaactcttggtcttaagcagccctcccacgtcagcatcccaaagtgttgggatttcagagggatcatggcccaagttgcaatgtccaccctccccgttgaagatgaggagtcctcggagagcaggatggtggtgacattcctcatgtcagctctcgagtccatgtgtaaagaactggccaagtccaaagccgaagtggcctgcattgcagtgtatgaaacagacgtgtttgtcgtcggaactgaaagaggacgtgcttttgtcaataccagaaaggattttcaaaaagattttgtaaaatattgtgttgaagaagaagaaaaagctgcagagatgcataaaatgaaatctacaacccaggcaaatcggatgagtgtagatgctgtagaaattgaaacactcagaaaaacagttgaggactatttctgcttttgctatgggaaagctttaggcaaatccacagtggtacctgtaccatatgagaagatgctgcgagaccagtcggctgtggtagtgcaggggcttccggaaggtgttgcctttaaacaccccgagaactatgatcttgcaaccctgaaatggattttggagaacaaagcagggatttcattcatcattaagagaccttttttagagccaaagaagcatgtaggtggtcgtgtgatggtaacagatgctgacaggtcaatactatctccaggtggaagttgtggccccatcaaagtgaaaactgaacccacagaagattctggaagccaccattcttcagagggcaatgaaggcacagaaatggaagtaccagcagaagattctactcaacatgtcccttcagaaacaagtgaggaccctgaagttgaggtgactattgaagatgatgattattctccaccgtctaagagaccaaaggccaatgagctaccgcagccaccagtcccggaacccgccaatgctgggaagcggaaagtgagggagttcaacttcgagaaatggaatgctcgcatcactgatctacgtaaacaagttgaagaattgtttgaaaggaaatatgctcaagccataaaagccaaaggtccggtgacgatcccgtaccctcttttccagtctcatgttgaagatctttatgtagaaggacttcctgaaggaattccttttagaaggccatctacttacggaattcctcgcctggagaggatattacttgcaaaggaaaggattcgttttgtgattaagaaacatgagcttctgaattcaacacgtgaagatttacagcttgataagccagcttcaggagtaaaggaagaatggtatgccagaatcactaaattaagaaagatggtggatcagcttttctgcaaaaaatttgcggaagccttggggagcactgaagccaaggctgtaccgtaccaaaaatttgaggcacacccgaatgatctgtacgtggaaggactgccagaaaacattcctttccgaagtccctcatggtatggaatcccaaggctggaaaaaatcattcaagtgggcaatcgaattaaatttgttattaaaagaccagaacttctgactcacagtaccactgaagttactcagccaagaacgaatacaccagctcaagctcttggactcaccgaggcagtaaaagtaccatatcctgtgtttgaatcaaacccggagttcttgtatgtggaaggcttgccagaggggattcccttccgaagccctacctggtttggaattccacgacttgaaaggatcgtccgcgggagtaataaaatcaagttcgttgttaaaaaacctgaactagttatttcctacttgcctcctgggatggctagtaaaataaacactaaagctttgcagtcccccaaaagaccacgaagtcctgggagtaattcaaaggttcctgaaattgaggtcaccgtggaaggccctaataacaacaatcctcaaacctcagctgttcgaaccccgacccagactaacggttctaacgttcccttcaagccacgagggagagagttttcctttgaggcctggaatgccaaaatcacggacctaaaacagaaagttgaaaatctcttcaatgagaaatgtggggaagctcttggccttaaacaagctgtgaaggtgccgttcgcgttatttgagtctttcccggaagacttttatgtggaaggcttacctgagggtgtgccattccgaagaccatcgacttttggcattccgaggctggagaagatactcagaaacaaagccaaaattaagttcatcattaaaaagcccgaaatgtttgagacggcgattaaggagagcacctcctctaagagccctcccagaaaaataaattcatcacccaatgttaatactactgcatcaggtgttgaagaccttaacatcattcaggtgacaattccagatgatgataatgaaagactctcgaaagttgaaaaagctagacagctaagagaacaagtgaatgacctctttagtcggaaatttggtgaagctattggtatgggttttcctgtgaaagttccctacaggaaaatcacaattaaccctggctgtgtggtggttgatggcatgcccccgggggtgtccttcaaagcccccagctacctggaaatcagctccatgagaaggatcttagactctgccgagtttatcaaattcacggtcattagaccatttccaggacttgtgattaataaccagctggttgatcagagtgagtcagaaggccccgtgatacaagaatcagctgaaccaagccagttggaagttccagccacagaagaaataaaagagactgatggaagctctcagatcaagcaagaaccagaccccacgtggtagacctcttccctcctaggcttaaagtatcagtggttgagaagagcttttcggacctgttactaccccaagctgtgtaatatacttgtataacagaaataccttctatacaaacctttttttctacttttagatagaaatgtctactttttcagcagttctgtgaattaaagagcagagtgactgtgggtctggaatggctggtgtacttgggaatgtactatcaggattttacagcaatgctgggaaatgacagggaaaatgacaggaatgaatctcaccagattttttatgtactcagcagagccttgagttacggtgtttattttccaatcaagtgaagatatctcctacttctcctactggaacatctcagcttctgcagtgaagaaaaattcctgtgatagttcagttctttagtttttctatttgaaaaaaaaaaatcatttaaatgatcctttgttcacggctctccttaatgactgagtgaacagttcctatctgtatatttgactaaaccttttcctaagctatctctcatggttcctatgtttttttatcataattaaaagcaaaaccatctggatcacctaacagtcagaggtcagtatctcagcgtgtgaattatagaggaaatacagagagaacctcttccacttttacttttcgtccaaataaaatgcatggtgtaccagaagttgaagatcgggttgaggattggggctagctcgatgacactaaggccccaacatcgcgggacctgctgtggcgcggattcttaggaacgctgttctagccggccccctctccaggggtcgccgtggccggcattatttcctagttcttcttgtaaccctgaggtgccagcgcggggagtgaggaggggtcagggggctaaggatgcaacctctgacgttctgcgccttcctaggagagtcttacatgtgttgagatttcacaagcaatgcgagttgtaaaataccagctctacaagaagctaggctctgtgacggcatagttttcagtagctttatcacaatattcacaatggagaattatatgacatggtagcagaaataggcccttttatgtgttgcttctattttacctcaaattgtagatatagggtaatcaataaaatccatccatgcctttcacacactaagt

SEQ ID NO: 5003 - protein, 928 aa, Homo sapiens; identical to SEQ ID NO: 4237
